United States Patent Application Publication US 2005/0244851 A1 - sequence listing, part 99

SEQ ID NO: 3858957 - DNA, 25 bp, Homo sapien
tgggaaaacgcagcgaagcaaagaa

SEQ ID NO: 3858958 - DNA, 25 bp, Homo sapien
accatgggaaaacgcagcgaagcaa

SEQ ID NO: 3858959 - DNA, 25 bp, Homo sapien
gaaccatgggaaaacgcagcgaagc

SEQ ID NO: 3858960 - DNA, 25 bp, Homo sapien
gcagagacaagatggaacgtgggaa

SEQ ID NO: 3858961 - DNA, 25 bp, Homo sapien
agagacaagatggaacgtgggaagt

SEQ ID NO: 3858962 - DNA, 25 bp, Homo sapien
cagagacaagatggaacgtgggaag

SEQ ID NO: 3858963 - DNA, 25 bp, Homo sapien
aagtgggcagagacaagatggaacg

SEQ ID NO: 3858964 - DNA, 25 bp, Homo sapien
agccgcccgttctgttcctgcatgt

SEQ ID NO: 3858965 - DNA, 25 bp, Homo sapien
ggacttgaggccaaggacctgctcg

SEQ ID NO: 3858966 - DNA, 25 bp, Homo sapien
tctggttggccttgatccgctctga

SEQ ID NO: 3858967 - DNA, 25 bp, Homo sapien
tccttttcccgcaactgctgtagca

SEQ ID NO: 3858968 - DNA, 25 bp, Homo sapien
tctccagctccagtctgcaagctgg

SEQ ID NO: 3858969 - DNA, 25 bp, Homo sapien
gtctgcaagctggcggcggccatac

SEQ ID NO: 3858970 - DNA, 25 bp, Homo sapien
agctccagtctgcaagctggcggcg

SEQ ID NO: 3858971 - DNA, 25 bp, Homo sapien
tcagggccatgacccccacctctcc

SEQ ID NO: 3858972 - DNA, 25 bp, Homo sapien
ccagggcttggctgcgcagcgtcag

SEQ ID NO: 3858973 - DNA, 25 bp, Homo sapien
tcccgcagccgagtctgcacgtgct

SEQ ID NO: 3858974 - DNA, 25 bp, Homo sapien
gaagctctctttctcacgagcagcc

SEQ ID NO: 3858975 - DNA, 25 bp, Homo sapien
tggatctcccgcagccgagtctgca

SEQ ID NO: 3858976 - DNA, 25 bp, Homo sapien
ttctcacgagcagcccggctctctg

SEQ ID NO: 3858977 - DNA, 25 bp, Homo sapien
cctcctggaggatttcgtcggcatc

SEQ ID NO: 3858978 - DNA, 25 bp, Homo sapien
tgcttttccagcttgcgccgcagcc

SEQ ID NO: 3858979 - DNA, 25 bp, Homo sapien
tcgtcggcatctgcgtagacctcca

SEQ ID NO: 3858980 - DNA, 25 bp, Homo sapien
agcttgcgccgcagccgtgagatgt

SEQ ID NO: 3858981 - DNA, 25 bp, Homo sapien
tggccgcctctggtgaaatcccaat

SEQ ID NO: 3858982 - DNA, 25 bp, Homo sapien
caactgcttccaagggatgaccaag

SEQ ID NO: 3858983 - DNA, 25 bp, Homo sapien
cagcagagtccggattcatcactgg

SEQ ID NO: 3858984 - DNA, 25 bp, Homo sapien
ggacgagcactctatgaatgagcaa

SEQ ID NO: 3858985 - DNA, 25 bp, Homo sapien
aaggcatcagcttgggaacaactct

SEQ ID NO: 3858986 - DNA, 25 bp, Homo sapien
gcttgggaacaactctgacagtgcc

SEQ ID NO: 3858987 - DNA, 25 bp, Homo sapien
ggccaagcccaccacactggagact

SEQ ID NO: 3858988 - DNA, 25 bp, Homo sapien
ctgggccaggcaaaggcatcagctt

SEQ ID NO: 3858989 - DNA, 25 bp, Homo sapien
cgcacgcactcgaagcagaaaacgt

SEQ ID NO: 3858990 - DNA, 25 bp, Homo sapien
cagaaaacgtggaagcacttggtaa

SEQ ID NO: 3858991 - DNA, 25 bp, Homo sapien
tagatacgatggaagtcgtgggcac

SEQ ID NO: 3858992 - DNA, 25 bp, Homo sapien
tccttcttgcgggtgttacagcagg

SEQ ID NO: 3858993 - DNA, 25 bp, Homo sapien
cagggtccatggtgttccagagtcc

SEQ ID NO: 3858994 - DNA, 25 bp, Homo sapien
ccagggtccatggtgttccagagtc

SEQ ID NO: 3858995 - DNA, 25 bp, Homo sapien
agggtccatggtgttccagagtccc

SEQ ID NO: 3858996 - DNA, 25 bp, Homo sapien
gggtccatggtgttccagagtcccc

SEQ ID NO: 3858997 - DNA, 25 bp, Homo sapien
caaaccaactagatgggcaggggct

SEQ ID NO: 3858998 - DNA, 25 bp, Homo sapien
aacgaagcttggctgatcccatgcc

SEQ ID NO: 3858999 - DNA, 25 bp, Homo sapien
ccatgcccactagcatgcaccaggg

SEQ ID NO: 3859000 - DNA, 25 bp, Homo sapien
taggaaaagatggaacgaagcttgg

SEQ ID NO: 3859001 - DNA, 25 bp, Homo sapien
caagagccagaccaaggtgtccagg

SEQ ID NO: 3859002 - DNA, 25 bp, Homo sapien
cagtttccgggaagctcagtcaagt

SEQ ID NO: 3859003 - DNA, 25 bp, Homo sapien
tgcatccacggagacagacaggtta

SEQ ID NO: 3859004 - DNA, 25 bp, Homo sapien
tccttagggttaggatgcatccacg

SEQ ID NO: 3859005 - DNA, 25 bp, Homo sapien
tacaagcatctctagaacagaggct

SEQ ID NO: 3859006 - DNA, 25 bp, Homo sapien
tgtgggtccaaacgggtccctgcag

SEQ ID NO: 3859007 - DNA, 25 bp, Homo sapien
cagggggaagctcttctagctggaa

SEQ ID NO: 3859008 - DNA, 25 bp, Homo sapien
actgccctcacagccgatggagcat

SEQ ID NO: 3859009 - DNA, 25 bp, Homo sapien
agggttgaacgtttattcatcacaa

SEQ ID NO: 3859010 - DNA, 25 bp, Homo sapien
gagggttgaacgtttattcatcaca

SEQ ID NO: 3859011 - DNA, 25 bp, Homo sapien
acagccaaggacgtggtcagaccgg

SEQ ID NO: 3859012 - DNA, 25 bp, Homo sapien
tccctgccggccgttaagtctgagc

SEQ ID NO: 3859013 - DNA, 25 bp, Homo sapien
cacaccaagccagcaaagtgctgct

SEQ ID NO: 3859014 - DNA, 25 bp, Homo sapien
aggacaggcggctccgcgacgacca

SEQ ID NO: 3859015 - DNA, 25 bp, Homo sapien
catgtgcggaccaggaactacactt

SEQ ID NO: 3859016 - DNA, 25 bp, Homo sapien
cgagaacctcctaaccatgtgcgga

SEQ ID NO: 3859017 - DNA, 25 bp, Homo sapien
ccgattgcaacgagggaagtcaccc

SEQ ID NO: 3859018 - DNA, 25 bp, Homo sapien
gcgcaaccgggaaactagctctctc

SEQ ID NO: 3859019 - DNA, 25 bp, Homo sapien
catctactcaagagcccaggcgaag

SEQ ID NO: 3859020 - DNA, 25 bp, Homo sapien
gagacgatgcggaattacttggcat

SEQ ID NO: 3859021 - DNA, 25 bp, Homo sapien
tctctatgatgcaatatcctgcgtt

SEQ ID NO: 3859022 - DNA, 25 bp, Homo sapien
ccaggcgaaggctactcctggaagg

SEQ ID NO: 3859023 - DNA, 25 bp, Homo sapien
tttgatgccgacttttattaggtat

SEQ ID NO: 3859024 - DNA, 25 bp, Homo sapien
ggtatgaagacccacgaggagagtt

SEQ ID NO: 3859025 - DNA, 25 bp, Homo sapien
accgggtggcctttagcgcagatat

SEQ ID NO: 3859026 - DNA, 25 bp, Homo sapien
cctctgataaggagaccgggtggcc

SEQ ID NO: 3859027 - DNA, 25 bp, Homo sapien
actgacattgtgggatcttcacccc

SEQ ID NO: 3859028 - DNA, 25 bp, Homo sapien
ctgacattgtgggatcttcaccccg

SEQ ID NO: 3859029 - DNA, 25 bp, Homo sapien
caggacagcgacagcagctttctgg

SEQ ID NO: 3859030 - DNA, 25 bp, Homo sapien
gcttcctgaagatcctgcgcaggta

SEQ ID NO: 3859031 - DNA, 25 bp, Homo sapien
tgagaggcttcatgactcggtggtc

SEQ ID NO: 3859032 - DNA, 25 bp, Homo sapien
gcagatgcagccctcagttttccaa

SEQ ID NO: 3859033 - DNA, 25 bp, Homo sapien
cactggccatctctctatttaaggt

SEQ ID NO: 3859034 - DNA, 25 bp, Homo sapien
catgttcctctacccctaaatagtg

SEQ ID NO: 3859035 - DNA, 25 bp, Homo sapien
tccaatctagttgagaataagttgc

SEQ ID NO: 3859036 - DNA, 25 bp, Homo sapien
gaaaagtctcaagaatagtacaatg

SEQ ID NO: 3859037 - DNA, 25 bp, Homo sapien
tatgtccacagaaggtagctgtgtt

SEQ ID NO: 3859038 - DNA, 25 bp, Homo sapien
gctgtgttgaggcgagtgtcaccat

SEQ ID NO: 3859039 - DNA, 25 bp, Homo sapien
ctatgtccacagaaggtagctgtgt

SEQ ID NO: 3859040 - DNA, 25 bp, Homo sapien
ggtagctgtgttgaggcgagtgtca

SEQ ID NO: 3859041 - DNA, 25 bp, Homo sapien
gaagctgctattccaccaagcactg

SEQ ID NO: 3859042 - DNA, 25 bp, Homo sapien
gctttgccagtgcaaggatcaagca

SEQ ID NO: 3859043 - DNA, 25 bp, Homo sapien
gaactgtaggaaactcactctgcag

SEQ ID NO: 3859044 - DNA, 25 bp, Homo sapien
ggagcccattgctggaaagagcttt

SEQ ID NO: 3859045 - DNA, 25 bp, Homo sapien
cacacatcgcataaccagcgcttca

SEQ ID NO: 3859046 - DNA, 25 bp, Homo sapien
tgacaacaaccacacatcgcataac

SEQ ID NO: 3859047 - DNA, 25 bp, Homo sapien
taaccagcgcttcaaatattgaggc

SEQ ID NO: 3859048 - DNA, 25 bp, Homo sapien
gcttcaaatattgaggccgggtgcg

SEQ ID NO: 3859049 - DNA, 25 bp, Homo sapien
ttcctggagcacagccgcagggtat

SEQ ID NO: 3859050 - DNA, 25 bp, Homo sapien
cctggagcacagccgcagggtattc

SEQ ID NO: 3859051 - DNA, 25 bp, Homo sapien
tcctggagcacagccgcagggtatt

SEQ ID NO: 3859052 - DNA, 25 bp, Homo sapien
tcaggtctgtggctcagtcgggaag

SEQ ID NO: 3859053 - DNA, 25 bp, Homo sapien
gtgatttatccggagtcaagactca

SEQ ID NO: 3859054 - DNA, 25 bp, Homo sapien
gaaggatagaaacccaagcttcctc

SEQ ID NO: 3859055 - DNA, 25 bp, Homo sapien
cggagtcaagactcaggtctgtggc

SEQ ID NO: 3859056 - DNA, 25 bp, Homo sapien
ctgccgttcccgtgtcacagacaga

SEQ ID NO: 3859057 - DNA, 25 bp, Homo sapien
gctgccgttcccgtgtcacagacag

SEQ ID NO: 3859058 - DNA, 25 bp, Homo sapien
tgccgttcccgtgtcacagacagaa

SEQ ID NO: 3859059 - DNA, 25 bp, Homo sapien
aagctgccgttcccgtgtcacagac

SEQ ID NO: 3859060 - DNA, 25 bp, Homo sapien
acccgcgagctgaccgtgtcaggcg

SEQ ID NO: 3859061 - DNA, 25 bp, Homo sapien
tgccgcagtcggcagaggcgtggcc

SEQ ID NO: 3859062 - DNA, 25 bp, Homo sapien
ggagaccagctgtccctcgcgttgc

SEQ ID NO: 3859063 - DNA, 25 bp, Homo sapien
gagccattcccggtctccagtgcgg

SEQ ID NO: 3859064 - DNA, 25 bp, Homo sapien
acctttgtgacgctccgcggagaca

SEQ ID NO: 3859065 - DNA, 25 bp, Homo sapien
tgtatgcccgttatgcagtcaggaa

SEQ ID NO: 3859066 - DNA, 25 bp, Homo sapien
gcgggaaactcgcatctaggccaga

SEQ ID NO: 3859067 - DNA, 25 bp, Homo sapien
tatcttaagatctggtgagggcacg

SEQ ID NO: 3859068 - DNA, 25 bp, Homo sapien
gaatggagttattcctgattcagac

SEQ ID NO: 3859069 - DNA, 25 bp, Homo sapien
catttgcctgtggatttgcagttgg

SEQ ID NO: 3859070 - DNA, 25 bp, Homo sapien
gtaatggcgttcttgcccggccctc

SEQ ID NO: 3859071 - DNA, 25 bp, Homo sapien
tgtctagaccttagctggctgccgc

SEQ ID NO: 3859072 - DNA, 25 bp, Homo sapien
gctaatattcttgagggtcatccgg

SEQ ID NO: 3859073 - DNA, 25 bp, Homo sapien
tattccataggccaggatcactctg

SEQ ID NO: 3859074 - DNA, 25 bp, Homo sapien
gagcctggcaactgaaagcacgtag

SEQ ID NO: 3859075 - DNA, 25 bp, Homo sapien
tgagcaaactgggatggctgatcac

SEQ ID NO: 3859076 - DNA, 25 bp, Homo sapien
cagagctgaaggcttaggggctggg

SEQ ID NO: 3859077 - DNA, 25 bp, Homo sapien
cttggagcctgcgtcctgagggcct

SEQ ID NO: 3859078 - DNA, 25 bp, Homo sapien
cttgacgttccagatcccgggggca

SEQ ID NO: 3859079 - DNA, 25 bp, Homo sapien
cagcaccgacgaacccccaatgctg

SEQ ID NO: 3859080 - DNA, 25 bp, Homo sapien
cactcagttaacaagactgttgaat

SEQ ID NO: 3859081 - DNA, 25 bp, Homo sapien
agttgggcggtgtagaccaacagcc

SEQ ID NO: 3859082 - DNA, 25 bp, Homo sapien
ctggagcgtaattggcactcagtta

SEQ ID NO: 3859083 - DNA, 25 bp, Homo sapien
gcggctcacgcagcgcaggacacag

SEQ ID NO: 3859084 - DNA, 25 bp, Homo sapien
tatgaaagggctctgaacattccca

SEQ ID NO: 3859085 - DNA, 25 bp, Homo sapien
aaccctaagggcgatcactatcttg

SEQ ID NO: 3859086 - DNA, 25 bp, Homo sapien
gaaatacaagagaggtccagtcgct

SEQ ID NO: 3859087 - DNA, 25 bp, Homo sapien
tggagacccactcgtattcgcagcg

SEQ ID NO: 3859088 - DNA, 25 bp, Homo sapien
tggcccctggctgatcccggctccc

SEQ ID NO: 3859089 - DNA, 25 bp, Homo sapien
gcccctggctgatcccggctccctt

SEQ ID NO: 3859090 - DNA, 25 bp, Homo sapien
ctggctgatcccggctcccttcacg

SEQ ID NO: 3859091 - DNA, 25 bp, Homo sapien
ggctgatcccggctcccttcacgcc

SEQ ID NO: 3859092 - DNA, 25 bp, Homo sapien
ccagacttccctccctccggctcat

SEQ ID NO: 3859093 - DNA, 25 bp, Homo sapien
ccatccatgcaaggcgctggcctgg

SEQ ID NO: 3859094 - DNA, 25 bp, Homo sapien
aaggtccgcaagagccagtgtctgg

SEQ ID NO: 3859095 - DNA, 25 bp, Homo sapien
gcctggctagtcagcgaatcaaggt

SEQ ID NO: 3859096 - DNA, 25 bp, Homo sapien
aatcaaggtccgcaagagccagtgt

SEQ ID NO: 3859097 - DNA, 25 bp, Homo sapien
cagctgctcagcgtatttggtgagg

SEQ ID NO: 3859098 - DNA, 25 bp, Homo sapien
gtgtgtctgacggatcttggcctcc

SEQ ID NO: 3859099 - DNA, 25 bp, Homo sapien
aaggctgtgtgtctgacggatcttg

SEQ ID NO: 3859100 - DNA, 25 bp, Homo sapien
tttggtgaggaggtgcgcaaggctg

SEQ ID NO: 3859101 - DNA, 25 bp, Homo sapien
tgtcttctgtgaaagtgccctcttg

SEQ ID NO: 3859102 - DNA, 25 bp, Homo sapien
gggtcctctgcccaactaaagatgt

SEQ ID NO: 3859103 - DNA, 25 bp, Homo sapien
tcaaggtcacgcagagcctagaacc

SEQ ID NO: 3859104 - DNA, 25 bp, Homo sapien
gaacctcggtttcctgagatacaga

SEQ ID NO: 3859105 - DNA, 25 bp, Homo sapien
gcagccccgcgtggctcggagccgg

SEQ ID NO: 3859106 - DNA, 25 bp, Homo sapien
tggcagccccgcgtggctcggagcc

SEQ ID NO: 3859107 - DNA, 25 bp, Homo sapien
cactggcagccccgcgtggctcgga

SEQ ID NO: 3859108 - DNA, 25 bp, Homo sapien
cgcagccgctcgtgcactggcagcc

SEQ ID NO: 3859109 - DNA, 25 bp, Homo sapien
ggcgcgcgcgggttcagctcggcct

SEQ ID NO: 3859110 - DNA, 25 bp, Homo sapien
gcgcgcgcgggttcagctcggcctg

SEQ ID NO: 3859111 - DNA, 25 bp, Homo sapien
actcgcggtagaggccgcaaacgcg

SEQ ID NO: 3859112 - DNA, 25 bp, Homo sapien
cggctcagccactcgcggtagaggc

SEQ ID NO: 3859113 - DNA, 25 bp, Homo sapien
agccactcgcggtagaggccgcaaa

SEQ ID NO: 3859114 - DNA, 25 bp, Homo sapien
agaggccgcaaacgcggagccccag

SEQ ID NO: 3859115 - DNA, 25 bp, Homo sapien
gctgagatgcagagtagccttcccc

SEQ ID NO: 3859116 - DNA, 25 bp, Homo sapien
gacggagttaccatgcagacgagga

SEQ ID NO: 3859117 - DNA, 25 bp, Homo sapien
caatggagacagctaagagcagaca

SEQ ID NO: 3859118 - DNA, 25 bp, Homo sapien
caagaaaatggtagactcagacgga

SEQ ID NO: 3859119 - DNA, 25 bp, Homo sapien
cagaatggaatatactatacatgtt

SEQ ID NO: 3859120 - DNA, 25 bp, Homo sapien
aaataaatagcgactgggctgggca

SEQ ID NO: 3859121 - DNA, 25 bp, Homo sapien
aaaaagtctgaggtacagaatggaa

SEQ ID NO: 3859122 - DNA, 25 bp, Homo sapien
catgttatgaatactagtaaattga

SEQ ID NO: 3859123 - DNA, 25 bp, Homo sapien
agaggataacttgaaactaggagtt

SEQ ID NO: 3859124 - DNA, 25 bp, Homo sapien
tgccactcgctgcattcaagtctag

SEQ ID NO: 3859125 - DNA, 25 bp, Homo sapien
tcatgtggtcctcataaaaatcttg

SEQ ID NO: 3859126 - DNA, 25 bp, Homo sapien
gacatactactaagtgctttcagca

SEQ ID NO: 3859127 - DNA, 25 bp, Homo sapien
ttctactcgtcaggaacaatggaaa

SEQ ID NO: 3859128 - DNA, 25 bp, Homo sapien
acgggagtcgcagtccatctgctgc

SEQ ID NO: 3859129 - DNA, 25 bp, Homo sapien
ctgacgggagtcgcagtccatctgc

SEQ ID NO: 3859130 - DNA, 25 bp, Homo sapien
tgacgggagtcgcagtccatctgct

SEQ ID NO: 3859131 - DNA, 25 bp, Homo sapien
ctcacacgtgtcccgggagccatct

SEQ ID NO: 3859132 - DNA, 25 bp, Homo sapien
gcctgggagacccctgacaggtccc

SEQ ID NO: 3859133 - DNA, 25 bp, Homo sapien
ggcctgggagacccctgacaggtcc

SEQ ID NO: 3859134 - DNA, 25 bp, Homo sapien
acaggtccctccacctacaggcagc

SEQ ID NO: 3859135 - DNA, 25 bp, Homo sapien
ctgacaggtccctccacctacaggc

SEQ ID NO: 3859136 - DNA, 25 bp, Homo sapien
tgccggagcaggcacgactgcttca

SEQ ID NO: 3859137 - DNA, 25 bp, Homo sapien
agttcgcacacaggcccggcagcgg

SEQ ID NO: 3859138 - DNA, 25 bp, Homo sapien
agaagtggcaatccccgcactcagt

SEQ ID NO: 3859139 - DNA, 25 bp, Homo sapien
cggcggcagcgggttcggcgtcggc

SEQ ID NO: 3859140 - DNA, 25 bp, Homo sapien
tgtacactccatgaggctcaaacca

SEQ ID NO: 3859141 - DNA, 25 bp, Homo sapien
tgcagattgtacactccatgaggct

SEQ ID NO: 3859142 - DNA, 25 bp, Homo sapien
tctcgttgcagattgtacactccat

SEQ ID NO: 3859143 - DNA, 25 bp, Homo sapien
ggtggacgatctcgttgcagattgt

SEQ ID NO: 3859144 - DNA, 25 bp, Homo sapien
cggccttcctgggtgcagcgagggc

SEQ ID NO: 3859145 - DNA, 25 bp, Homo sapien
ctgcattgatgacaccctcagcctt

SEQ ID NO: 3859146 - DNA, 25 bp, Homo sapien
tctgcattgatgacaccctcagcct

SEQ ID NO: 3859147 - DNA, 25 bp, Homo sapien
ttcctgggtgcagcgagggcactcc

SEQ ID NO: 3859148 - DNA, 25 bp, Homo sapien
gttgtcggccctacggcggccaggc

SEQ ID NO: 3859149 - DNA, 25 bp, Homo sapien
gccctcctcgccgttgtcggcccta

SEQ ID NO: 3859150 - DNA, 25 bp, Homo sapien
tcctcgccgttgtcggccctacggc

SEQ ID NO: 3859151 - DNA, 25 bp, Homo sapien
ccgttgtcggccctacggcggccag

SEQ ID NO: 3859152 - DNA, 25 bp, Homo sapien
cctagtgagcgtgctccgtggctca

SEQ ID NO: 3859153 - DNA, 25 bp, Homo sapien
aagcctagtgagcgtgctccgtggc

SEQ ID NO: 3859154 - DNA, 25 bp, Homo sapien
gcctagtgagcgtgctccgtggctc

SEQ ID NO: 3859155 - DNA, 25 bp, Homo sapien
agcctagtgagcgtgctccgtggct

SEQ ID NO: 3859156 - DNA, 25 bp, Homo sapien
cttcttcaggtgcctctctcggcct

SEQ ID NO: 3859157 - DNA, 25 bp, Homo sapien
gatgagaaagcctggctcggattca

SEQ ID NO: 3859158 - DNA, 25 bp, Homo sapien
gggccgcctgggtccgatcctcgga

SEQ ID NO: 3859159 - DNA, 25 bp, Homo sapien
ccgcctgggtccgatcctcggagga

SEQ ID NO: 3859160 - DNA, 25 bp, Homo sapien
ggaggaggcaggcgtctccacccac

SEQ ID NO: 3859161 - DNA, 25 bp, Homo sapien
gcagaggccaaaggcggctttggtt

SEQ ID NO: 3859162 - DNA, 25 bp, Homo sapien
cagaggccaaaggcggctttggttt

SEQ ID NO: 3859163 - DNA, 25 bp, Homo sapien
cggggacggcaccgctgggccctct

SEQ ID NO: 3859164 - DNA, 25 bp, Homo sapien
gggacggcaccgctgggccctctgc

SEQ ID NO: 3859165 - DNA, 25 bp, Homo sapien
ttctcgccagagctgccccgggctg

SEQ ID NO: 3859166 - DNA, 25 bp, Homo sapien
catccgcttgaaacgctctagcttc

SEQ ID NO: 3859167 - DNA, 25 bp, Homo sapien
gcagctggcacatccgcttgaaacg

SEQ ID NO: 3859168 - DNA, 25 bp, Homo sapien
actcagcgatgtgcccgaagagtcg

SEQ ID NO: 3859169 - DNA, 25 bp, Homo sapien
gccagctgagtaggggccccccact

SEQ ID NO: 3859170 - DNA, 25 bp, Homo sapien
gggcccaggggccagctgagtaggg

SEQ ID NO: 3859171 - DNA, 25 bp, Homo sapien
ccaggggccagctgagtaggggccc

SEQ ID NO: 3859172 - DNA, 25 bp, Homo sapien
gggccagctgagtaggggcccccca

SEQ ID NO: 3859173 - DNA, 25 bp, Homo sapien
agcggctccaagttcggcagactcg

SEQ ID NO: 3859174 - DNA, 25 bp, Homo sapien
gaggtgctggaagacgcgaagccag

SEQ ID NO: 3859175 - DNA, 25 bp, Homo sapien
caagttcggcagactcgcatgcaga

SEQ ID NO: 3859176 - DNA, 25 bp, Homo sapien
gactcgcatgcagatacacagctcc

SEQ ID NO: 3859177 - DNA, 25 bp, Homo sapien
cccgtgctagggacgtgaagataaa

SEQ ID NO: 3859178 - DNA, 25 bp, Homo sapien
agcctgatagcctcgtttactgcaa

SEQ ID NO: 3859179 - DNA, 25 bp, Homo sapien
tcagctaaccttggtgcagtgccca

SEQ ID NO: 3859180 - DNA, 25 bp, Homo sapien
cacagggctgccattatgaaggtca

SEQ ID NO: 3859181 - DNA, 25 bp, Homo sapien
tcctggggggacaatgcctgacctg

SEQ ID NO: 3859182 - DNA, 25 bp, Homo sapien
gcagtagttatttcagcaaggggag

SEQ ID NO: 3859183 - DNA, 25 bp, Homo sapien
tgacctgagactccgaggaaagcag

SEQ ID NO: 3859184 - DNA, 25 bp, Homo sapien
taagagtcacctcaaggactgggtg

SEQ ID NO: 3859185 - DNA, 25 bp, Homo sapien
ggtcagtgacttccgccggctcagg

SEQ ID NO: 3859186 - DNA, 25 bp, Homo sapien
gtcggttcagaagccacatgagctg

SEQ ID NO: 3859187 - DNA, 25 bp, Homo sapien
gagacacctgtccagctgaggtcca

SEQ ID NO: 3859188 - DNA, 25 bp, Homo sapien
tcgaggccacagacgcttgtcatag

SEQ ID NO: 3859189 - DNA, 25 bp, Homo sapien
taacatcctcgatccagcggaggtc

SEQ ID NO: 3859190 - DNA, 25 bp, Homo sapien
atcctcgatccagcggaggtccagg

SEQ ID NO: 3859191 - DNA, 25 bp, Homo sapien
ccggagctgggagtctttaacatcc

SEQ ID NO: 3859192 - DNA, 25 bp, Homo sapien
tcccggagctgggagtctttaacat

SEQ ID NO: 3859193 - DNA, 25 bp, Homo sapien
cagccagatgagaggtcagcactcc

SEQ ID NO: 3859194 - DNA, 25 bp, Homo sapien
gcagccagatgagaggtcagcactc

SEQ ID NO: 3859195 - DNA, 25 bp, Homo sapien
tgcagccgaccacggctctctgttt

SEQ ID NO: 3859196 - DNA, 25 bp, Homo sapien
aaacctgccagacgcagttctgcca

SEQ ID NO: 3859197 - DNA, 25 bp, Homo sapien
gggtgcgtgacgcagcaggagacgc

SEQ ID NO: 3859198 - DNA, 25 bp, Homo sapien
agctccaaacctgccagacgcagtt

SEQ ID NO: 3859199 - DNA, 25 bp, Homo sapien
cagcaagattgaggtgcaccagggt

SEQ ID NO: 3859200 - DNA, 25 bp, Homo sapien
cagggtctcgcggagtggggacgtg

SEQ ID NO: 3859201 - DNA, 25 bp, Homo sapien
cactggggtccccgacgtgggcgca

SEQ ID NO: 3859202 - DNA, 25 bp, Homo sapien
tggggtccccgacgtgggcgcagtg

SEQ ID NO: 3859203 - DNA, 25 bp, Homo sapien
ggcggcgtagacgagggcagcggcg

SEQ ID NO: 3859204 - DNA, 25 bp, Homo sapien
ctaggcggcgtagacgagggcagcg

SEQ ID NO: 3859205 - DNA, 25 bp, Homo sapien
tagacgagggcagcggcggaacagc

SEQ ID NO: 3859206 - DNA, 25 bp, Homo sapien
cgtagacgagggcagcggcggaaca

SEQ ID NO: 3859207 - DNA, 25 bp, Homo sapien
ctgccagccgggcacaagcttcggg

SEQ ID NO: 3859208 - DNA, 25 bp, Homo sapien
ccagccgggcacaagcttcgggtga

SEQ ID NO: 3859209 - DNA, 25 bp, Homo sapien
aagcttcgggtgagagctggcggca

SEQ ID NO: 3859210 - DNA, 25 bp, Homo sapien
cacaagcttcgggtgagagctggcg

SEQ ID NO: 3859211 - DNA, 25 bp, Homo sapien
catggcaaccaggagtggcagttcc

SEQ ID NO: 3859212 - DNA, 25 bp, Homo sapien
gagtctgttactaggttcccatggc

SEQ ID NO: 3859213 - DNA, 25 bp, Homo sapien
gggtgccgccgctcaatacagtaaa

SEQ ID NO: 3859214 - DNA, 25 bp, Homo sapien
tcaggtctcagtccaagctggtcca

SEQ ID NO: 3859215 - DNA, 25 bp, Homo sapien
aggggcgggacctggcccggctcat

SEQ ID NO: 3859216 - DNA, 25 bp, Homo sapien
gtatgtggatagatctcccctcccc

SEQ ID NO: 3859217 - DNA, 25 bp, Homo sapien
aggtatgtggatagatctcccctcc

SEQ ID NO: 3859218 - DNA, 25 bp, Homo sapien
ggtatgtggatagatctcccctccc

SEQ ID NO: 3859219 - DNA, 25 bp, Homo sapien
ctccccccacccgcgcacctccctg

SEQ ID NO: 3859220 - DNA, 25 bp, Homo sapien
cccccaagcggccccattctcaagc

SEQ ID NO: 3859221 - DNA, 25 bp, Homo sapien
ctcaagcctctcgctatccccaggc

SEQ ID NO: 3859222 - DNA, 25 bp, Homo sapien
ccgcttgcccctcgccgggctgcct

SEQ ID NO: 3859223 - DNA, 25 bp, Homo sapien
ttgcccctcgccgggctgcctcttc

SEQ ID NO: 3859224 - DNA, 25 bp, Homo sapien
gcttgcccctcgccgggctgcctct

SEQ ID NO: 3859225 - DNA, 25 bp, Homo sapien
cccgcttgcccctcgccgggctgcc

SEQ ID NO: 3859226 - DNA, 25 bp, Homo sapien
ttttatagcaaaccgtattgtacag

SEQ ID NO: 3859227 - DNA, 25 bp, Homo sapien
ttgagttttatagcaaaccgtattg

SEQ ID NO: 3859228 - DNA, 25 bp, Homo sapien
tatagcaaaccgtattgtacagacc

SEQ ID NO: 3859229 - DNA, 25 bp, Homo sapien
agcaaaccgtattgtacagacccgg

SEQ ID NO: 3859230 - DNA, 25 bp, Homo sapien
gcaagaaaagcagcgtctgcgggga

SEQ ID NO: 3859231 - DNA, 25 bp, Homo sapien
agcaagaaaagcagcgtctgcgggg

SEQ ID NO: 3859232 - DNA, 25 bp, Homo sapien
ccggagcgggacagcggaggccaaa

SEQ ID NO: 3859233 - DNA, 25 bp, Homo sapien
gcgggacagcggaggccaaaacagg

SEQ ID NO: 3859234 - DNA, 25 bp, Homo sapien
cactacggggcggaagcgcctcggg

SEQ ID NO: 3859235 - DNA, 25 bp, Homo sapien
caccaggcggtcactacggggcgga

SEQ ID NO: 3859236 - DNA, 25 bp, Homo sapien
aggcggtcactacggggcggaagcg

SEQ ID NO: 3859237 - DNA, 25 bp, Homo sapien
cggcaccaggcggtcactacggggc

SEQ ID NO: 3859238 - DNA, 25 bp, Homo sapien
gaagctttgagcttggcccggctga

SEQ ID NO: 3859239 - DNA, 25 bp, Homo sapien
cacgaactcccggtacgtggccgag

SEQ ID NO: 3859240 - DNA, 25 bp, Homo sapien
caggtagccgcggtgcacgaactcc

SEQ ID NO: 3859241 - DNA, 25 bp, Homo sapien
aagcccgagagcaaggcagacgtgc

SEQ ID NO: 3859242 - DNA, 25 bp, Homo sapien
tcctgcagctcactttctccttttt

SEQ ID NO: 3859243 - DNA, 25 bp, Homo sapien
cctgcagctcactttctcctttttc

SEQ ID NO: 3859244 - DNA, 25 bp, Homo sapien
ctcctgcagctcactttctcctttt

SEQ ID NO: 3859245 - DNA, 25 bp, Homo sapien
cataggcttatgatgacccttaggg

SEQ ID NO: 3859246 - DNA, 25 bp, Homo sapien
aaggctcgggcccttaagctgtcac

SEQ ID NO: 3859247 - DNA, 25 bp, Homo sapien
ttctgggaccccacatagaagacca

SEQ ID NO: 3859248 - DNA, 25 bp, Homo sapien
cctgcatattctgccgtggagggat

SEQ ID NO: 3859249 - DNA, 25 bp, Homo sapien
tagtgaatgctaaagtctgaggaca

SEQ ID NO: 3859250 - DNA, 25 bp, Homo sapien
ttggaagaactagccacacttggcc

SEQ ID NO: 3859251 - DNA, 25 bp, Homo sapien
gagtttacaaatcggcacactgtgg

SEQ ID NO: 3859252 - DNA, 25 bp, Homo sapien
cacttggcctgcgttcctgcatggc

SEQ ID NO: 3859253 - DNA, 25 bp, Homo sapien
agacacgtggagaccatgagtgcaa

SEQ ID NO: 3859254 - DNA, 25 bp, Homo sapien
aggcctggtgggtactcgtggtcac

SEQ ID NO: 3859255 - DNA, 25 bp, Homo sapien
cagcttcaatgtggggcagcagaca

SEQ ID NO: 3859256 - DNA, 25 bp, Homo sapien
tgcagtctctggtgtggcgactggt

SEQ ID NO: 3859257 - DNA, 25 bp, Homo sapien
agccccaatgggcacaaacttgacc

SEQ ID NO: 3859258 - DNA, 25 bp, Homo sapien
ccaagggagccccaatgggcacaaa

SEQ ID NO: 3859259 - DNA, 25 bp, Homo sapien
catgggggtcggtgtgtccaaggga

SEQ ID NO: 3859260 - DNA, 25 bp, Homo sapien
tgggcacaaacttgacccaaccaac

SEQ ID NO: 3859261 - DNA, 25 bp, Homo sapien
ctggctcagcttgggacggtgctgc

SEQ ID NO: 3859262 - DNA, 25 bp, Homo sapien
gtgctgcagacgcagaggaccgtgg

SEQ ID NO: 3859263 - DNA, 25 bp, Homo sapien
aagctggactaagggaggtagccac

SEQ ID NO: 3859264 - DNA, 25 bp, Homo sapien
ccgtgggagattggaagctggacta

SEQ ID NO: 3859265 - DNA, 25 bp, Homo sapien
tgtagcggtctgtcttgtgtgccac

SEQ ID NO: 3859266 - DNA, 25 bp, Homo sapien
cctgcaggcgattcagttcctctag

SEQ ID NO: 3859267 - DNA, 25 bp, Homo sapien
caccaaggagcggtagaaatgcagg

SEQ ID NO: 3859268 - DNA, 25 bp, Homo sapien
aaacacgagccccacgggtaccatg

SEQ ID NO: 3859269 - DNA, 25 bp, Homo sapien
tatttcaagggctaaggactggacc

SEQ ID NO: 3859270 - DNA, 25 bp, Homo sapien
gagtagcttgcaaaacccaagggac

SEQ ID NO: 3859271 - DNA, 25 bp, Homo sapien
ggaaaagctagaccaatgccttggg

SEQ ID NO: 3859272 - DNA, 25 bp, Homo sapien
taaagcaagaatgtggaacccatcg

SEQ ID NO: 3859273 - DNA, 25 bp, Homo sapien
gaagggagacttatccaaggtctca

SEQ ID NO: 3859274 - DNA, 25 bp, Homo sapien
aaaataatttacgtggaggcatagg

SEQ ID NO: 3859275 - DNA, 25 bp, Homo sapien
caaggtctcacaccacaagatagaa

SEQ ID NO: 3859276 - DNA, 25 bp, Homo sapien
gagatcagattcctttctgttccag

SEQ ID NO: 3859277 - DNA, 25 bp, Homo sapien
gcccaagtgagagaatagcccgctt

SEQ ID NO: 3859278 - DNA, 25 bp, Homo sapien
tttcagccgagtatcgagggacccg

SEQ ID NO: 3859279 - DNA, 25 bp, Homo sapien
tggtggagtcaagaaaataacggcc

SEQ ID NO: 3859280 - DNA, 25 bp, Homo sapien
ccctgctggcagagtcgacaacttt

SEQ ID NO: 3859281 - DNA, 25 bp, Homo sapien
accttgacgaatcggcggcgacgaa

SEQ ID NO: 3859282 - DNA, 25 bp, Homo sapien
ggagagtcggcttcgccacgacgat

SEQ ID NO: 3859283 - DNA, 25 bp, Homo sapien
ggagcttggagattggccgcatccc

SEQ ID NO: 3859284 - DNA, 25 bp, Homo sapien
ccacgacgatctagatgctgcggcc

SEQ ID NO: 3859285 - DNA, 25 bp, Homo sapien
gccgagggtagcggcttcgcctcgg

SEQ ID NO: 3859286 - DNA, 25 bp, Homo sapien
tttcgccacaggcgctgccggggga

SEQ ID NO: 3859287 - DNA, 25 bp, Homo sapien
ccgagggtagcggcttcgcctcggc

SEQ ID NO: 3859288 - DNA, 25 bp, Homo sapien
cgagggtagcggcttcgcctcggcc

SEQ ID NO: 3859289 - DNA, 25 bp, Homo sapien
gcgggcacagggtctgcattcgcac

SEQ ID NO: 3859290 - DNA, 25 bp, Homo sapien
aggcccagcgggcacagggtctgca

SEQ ID NO: 3859291 - DNA, 25 bp, Homo sapien
ccagcgggcacagggtctgcattcg

SEQ ID NO: 3859292 - DNA, 25 bp, Homo sapien
gcccagcgggcacagggtctgcatt

SEQ ID NO: 3859293 - DNA, 25 bp, Homo sapien
ccccggcgcgcgcaccaaacaccac

SEQ ID NO: 3859294 - DNA, 25 bp, Homo sapien
ggcgcgcgcaccaaacaccactgcc

SEQ ID NO: 3859295 - DNA, 25 bp, Homo sapien
ccggcgcgcgcaccaaacaccactg

SEQ ID NO: 3859296 - DNA, 25 bp, Homo sapien
ctccccggcgcgcgcaccaaacacc

SEQ ID NO: 3859297 - DNA, 25 bp, Homo sapien
ccggccccgcagcggtggcggcggc

SEQ ID NO: 3859298 - DNA, 25 bp, Homo sapien
cagcggtggcggcggcggcgccccc

SEQ ID NO: 3859299 - DNA, 25 bp, Homo sapien
tgtagttccgccactggaagctcgg

SEQ ID NO: 3859300 - DNA, 25 bp, Homo sapien
gttgacactgaagtggactccatca

SEQ ID NO: 3859301 - DNA, 25 bp, Homo sapien
ggtccaaggcaggatccacgatgag

SEQ ID NO: 3859302 - DNA, 25 bp, Homo sapien
catagcggtacaccttctgagaagg

SEQ ID NO: 3859303 - DNA, 25 bp, Homo sapien
ggaggtcttcgactggtatatactt

SEQ ID NO: 3859304 - DNA, 25 bp, Homo sapien
cttcgactggtatatactttgagtc

SEQ ID NO: 3859305 - DNA, 25 bp, Homo sapien
acctgacatggcaacgggggtcttg

SEQ ID NO: 3859306 - DNA, 25 bp, Homo sapien
ggtcttggaggtcttcgactggtat

SEQ ID NO: 3859307 - DNA, 25 bp, Homo sapien
ttcaggaaggtctcccgcacgttgt

SEQ ID NO: 3859308 - DNA, 25 bp, Homo sapien
cgttgtcattcagccttgcaaaagt

SEQ ID NO: 3859309 - DNA, 25 bp, Homo sapien
tctgtccaatatagaactcgtccag

SEQ ID NO: 3859310 - DNA, 25 bp, Homo sapien
gtacttacggcacatatccttcagg

SEQ ID NO: 3859311 - DNA, 25 bp, Homo sapien
tattgcccgaccttgctggagacac

SEQ ID NO: 3859312 - DNA, 25 bp, Homo sapien
tttcagatcatgaccctgggcgcct

SEQ ID NO: 3859313 - DNA, 25 bp, Homo sapien
tgggcgcctgcctgaccctgacagg

SEQ ID NO: 3859314 - DNA, 25 bp, Homo sapien
gcatttgcatgtacaacctccgctg

SEQ ID NO: 3859315 - DNA, 25 bp, Homo sapien
gtctcagtggctgcacccgagcctt

SEQ ID NO: 3859316 - DNA, 25 bp, Homo sapien
gccattgacaattagttcatagtat

SEQ ID NO: 3859317 - DNA, 25 bp, Homo sapien
tcatagtatttcattcgttgttgtc

SEQ ID NO: 3859318 - DNA, 25 bp, Homo sapien
tgcacccgagccttggaacttctca

SEQ ID NO: 3859319 - DNA, 25 bp, Homo sapien
aggactgaggtgtgaactggccaaa

SEQ ID NO: 3859320 - DNA, 25 bp, Homo sapien
caggagtgcccaccgcagtggtgcc

SEQ ID NO: 3859321 - DNA, 25 bp, Homo sapien
ggctgctggagaagcttgtgtcctg

SEQ ID NO: 3859322 - DNA, 25 bp, Homo sapien
gggtgctgccccgagacgtgtaggg

SEQ ID NO: 3859323 - DNA, 25 bp, Homo sapien
ctacgaaactgagaggacgaggagg

SEQ ID NO: 3859324 - DNA, 25 bp, Homo sapien
ggcggcgggaaaaggcatcttggta

SEQ ID NO: 3859325 - DNA, 25 bp, Homo sapien
tagctgttctctgaccgccggggct

SEQ ID NO: 3859326 - DNA, 25 bp, Homo sapien
ccgtggaggcggttgtggaggctga

SEQ ID NO: 3859327 - DNA, 25 bp, Homo sapien
atacgctgggtagtttgcatcagaa

SEQ ID NO: 3859328 - DNA, 25 bp, Homo sapien
ataatacgctgggtagtttgcatca

SEQ ID NO: 3859329 - DNA, 25 bp, Homo sapien
tcataatacgctgggtagtttgcat

SEQ ID NO: 3859330 - DNA, 25 bp, Homo sapien
tttcataatacgctgggtagtttgc

SEQ ID NO: 3859331 - DNA, 25 bp, Homo sapien
ccggcgtggtgggtaggaagtatgg

SEQ ID NO: 3859332 - DNA, 25 bp, Homo sapien
ctcagctgtattttcagcaaaaggg

SEQ ID NO: 3859333 - DNA, 25 bp, Homo sapien
ggtgtaagaaggtgggaagcgctca

SEQ ID NO: 3859334 - DNA, 25 bp, Homo sapien
ggtaggaagtatggcgctggtagcg

SEQ ID NO: 3859335 - DNA, 25 bp, Homo sapien
tagtcctggtcggtgggccggctgg

SEQ ID NO: 3859336 - DNA, 25 bp, Homo sapien
aggcaggaggccggtagtcctggtc

SEQ ID NO: 3859337 - DNA, 25 bp, Homo sapien
gcaggaggccggtagtcctggtcgg

SEQ ID NO: 3859338 - DNA, 25 bp, Homo sapien
aggaggccggtagtcctggtcggtg

SEQ ID NO: 3859339 - DNA, 25 bp, Homo sapien
agagcgggcaggggaggctgggcgg

SEQ ID NO: 3859340 - DNA, 25 bp, Homo sapien
gggaagtccgaacttcttctctctc

SEQ ID NO: 3859341 - DNA, 25 bp, Homo sapien
agcgggcaggggaggctgggcgggg

SEQ ID NO: 3859342 - DNA, 25 bp, Homo sapien
ctggggagccagagcgggcagggga

SEQ ID NO: 3859343 - DNA, 25 bp, Homo sapien
aggaaaacttggagcgctgctcctt

SEQ ID NO: 3859344 - DNA, 25 bp, Homo sapien
ctgtgctgggcgaagggcacactct

SEQ ID NO: 3859345 - DNA, 25 bp, Homo sapien
ggaaaacttggagcgctgctccttc

SEQ ID NO: 3859346 - DNA, 25 bp, Homo sapien
ctgggcgaagggcacactctcattg

SEQ ID NO: 3859347 - DNA, 25 bp, Homo sapien
agggcccatgccctgacccagaagg

SEQ ID NO: 3859348 - DNA, 25 bp, Homo sapien
ggccggagggggtgtgcagggccca

SEQ ID NO: 3859349 - DNA, 25 bp, Homo sapien
ggcccatgccctgacccagaaggca

SEQ ID NO: 3859350 - DNA, 25 bp, Homo sapien
cccatgccctgacccagaaggcacc

SEQ ID NO: 3859351 - DNA, 25 bp, Homo sapien
gtccatttgccttgggagactcccg

SEQ ID NO: 3859352 - DNA, 25 bp, Homo sapien
ctggttctgtccatttgccttggga

SEQ ID NO: 3859353 - DNA, 25 bp, Homo sapien
ctgtccatttgccttgggagactcc

SEQ ID NO: 3859354 - DNA, 25 bp, Homo sapien
tgccttgggagactcccgggtagcc

SEQ ID NO: 3859355 - DNA, 25 bp, Homo sapien
tgagccaccccggtcgtcgtcggag

SEQ ID NO: 3859356 - DNA, 25 bp, Homo sapien
ccaagaggaagggacgccaggtagg

SEQ ID NO: 3859357 - DNA, 25 bp, Homo sapien
tcgtcggagatctccatgtcgtctc

SEQ ID NO: 3859358 - DNA, 25 bp, Homo sapien
ccatgtcgtctccagaagagcatgg

SEQ ID NO: 3859359 - DNA, 25 bp, Homo sapien
caaagtcatagatgtgcgggggtgg

SEQ ID NO: 3859360 - DNA, 25 bp, Homo sapien
agtcatagatgtgcgggggtggtgg

SEQ ID NO: 3859361 - DNA, 25 bp, Homo sapien
acaaagtcatagatgtgcgggggtg

SEQ ID NO: 3859362 - DNA, 25 bp, Homo sapien
aaagtcatagatgtgcgggggtggt

SEQ ID NO: 3859363 - DNA, 25 bp, Homo sapien
cagctgaggcggcaatcaatccctt

SEQ ID NO: 3859364 - DNA, 25 bp, Homo sapien
gaggcggcaatcaatcccttgccct

SEQ ID NO: 3859365 - DNA, 25 bp, Homo sapien
tggagccgagttaacatctgggtct

SEQ ID NO: 3859366 - DNA, 25 bp, Homo sapien
gccctgccgcagctgatggagccga

SEQ ID NO: 3859367 - DNA, 25 bp, Homo sapien
caggtggtaggcctcccgtgagtat

SEQ ID NO: 3859368 - DNA, 25 bp, Homo sapien
gcatatagagcatacggcaagccgt

SEQ ID NO: 3859369 - DNA, 25 bp, Homo sapien
accactggtcaaaggctccgaaggc

SEQ ID NO: 3859370 - DNA, 25 bp, Homo sapien
tcatctcctggaccagcatggcgag

SEQ ID NO: 3859371 - DNA, 25 bp, Homo sapien
gcccagtccacgagggacagcaggc

SEQ ID NO: 3859372 - DNA, 25 bp, Homo sapien
ggcgaaagcctcgatgcccgtagtg

SEQ ID NO: 3859373 - DNA, 25 bp, Homo sapien
ggctccttcagcttcgtcttctctt

SEQ ID NO: 3859374 - DNA, 25 bp, Homo sapien
tcagccctgacccaaaggcgaaagc

SEQ ID NO: 3859375 - DNA, 25 bp, Homo sapien
gagggacgaggcctcttttcctcac

SEQ ID NO: 3859376 - DNA, 25 bp, Homo sapien
ggacgaggcctcttttcctcactgg

SEQ ID NO: 3859377 - DNA, 25 bp, Homo sapien
tttccgatggctctttccgctttac

SEQ ID NO: 3859378 - DNA, 25 bp, Homo sapien
tcctcactggcctcggaaatttccg

SEQ ID NO: 3859379 - DNA, 25 bp, Homo sapien
gagcaaaggacttgcggtgcttgcc

SEQ ID NO: 3859380 - DNA, 25 bp, Homo sapien
cctgggtcttgcctcgctcttcgtc

SEQ ID NO: 3859381 - DNA, 25 bp, Homo sapien
gaggactcctgggatgcctcctccc

SEQ ID NO: 3859382 - DNA, 25 bp, Homo sapien
cttggtccccggacgtcctggctct

SEQ ID NO: 3859383 - DNA, 25 bp, Homo sapien
tccttctttgtggtatccacagctt

SEQ ID NO: 3859384 - DNA, 25 bp, Homo sapien
ctccttctttgtggtatccacagct

SEQ ID NO: 3859385 - DNA, 25 bp, Homo sapien
ccaaagtcgatttcactgtcttgtg

SEQ ID NO: 3859386 - DNA, 25 bp, Homo sapien
cgagcccaaagtcgatttcactgtc

SEQ ID NO: 3859387 - DNA, 25 bp, Homo sapien
caaagtcgatttcactgtcttgtgc

SEQ ID NO: 3859388 - DNA, 25 bp, Homo sapien
ctccgagcccaaagtcgatttcact

SEQ ID NO: 3859389 - DNA, 25 bp, Homo sapien
tttggaagacgaatcgctttcctcg

SEQ ID NO: 3859390 - DNA, 25 bp, Homo sapien
agacgaatcgctttcctcgtcctcg

SEQ ID NO: 3859391 - DNA, 25 bp, Homo sapien
gaacatttggaagacgaatcgcttt

SEQ ID NO: 3859392 - DNA, 25 bp, Homo sapien
gaagacgaatcgctttcctcgtcct

SEQ ID NO: 3859393 - DNA, 25 bp, Homo sapien
cattttcgccatctgagtcagcata

SEQ ID NO: 3859394 - DNA, 25 bp, Homo sapien
ctctcggagtctgatgtgctgtcat

SEQ ID NO: 3859395 - DNA, 25 bp, Homo sapien
tgtgctgtcattttcgccatctgag

SEQ ID NO: 3859396 - DNA, 25 bp, Homo sapien
gtctgatgtgctgtcattttcgcca

SEQ ID NO: 3859397 - DNA, 25 bp, Homo sapien
ctttccggcactggcacctccacag

SEQ ID NO: 3859398 - DNA, 25 bp, Homo sapien
gctggagacgcctcctgttcgggca

SEQ ID NO: 3859399 - DNA, 25 bp, Homo sapien
tgcaggccttgctggagacgcctcc

SEQ ID NO: 3859400 - DNA, 25 bp, Homo sapien
tgctggcgtgggcactgggacttct

SEQ ID NO: 3859401 - DNA, 25 bp, Homo sapien
ctgcccagtcaatatgactcccacc

SEQ ID NO: 3859402 - DNA, 25 bp, Homo sapien
tgcccagtcaatatgactcccacca

SEQ ID NO: 3859403 - DNA, 25 bp, Homo sapien
gcccagtcaatatgactcccaccac

SEQ ID NO: 3859404 - DNA, 25 bp, Homo sapien
cccgctcagcgccaacagggccgcc

SEQ ID NO: 3859405 - DNA, 25 bp, Homo sapien
cgctcagcgccaacagggccgccgg

SEQ ID NO: 3859406 - DNA, 25 bp, Homo sapien
ttccccgctcagcgccaacagggcc

SEQ ID NO: 3859407 - DNA, 25 bp, Homo sapien
gcgccaacagggccgccggcaccag

SEQ ID NO: 3859408 - DNA, 25 bp, Homo sapien
ctcttcctcggtgaggcggcctcgg

SEQ ID NO: 3859409 - DNA, 25 bp, Homo sapien
tggcaccacctcgatggcagagaag

SEQ ID NO: 3859410 - DNA, 25 bp, Homo sapien
tcgggccaactcttgaccagagatg

SEQ ID NO: 3859411 - DNA, 25 bp, Homo sapien
caggttgcggatggtccgctccacg

SEQ ID NO: 3859412 - DNA, 25 bp, Homo sapien
aggtcggccaggaccgccaggtcca

SEQ ID NO: 3859413 - DNA, 25 bp, Homo sapien
ggtcggccaggaccgccaggtccac

SEQ ID NO: 3859414 - DNA, 25 bp, Homo sapien
gctcggcctcgtccgatgtctctgt

SEQ ID NO: 3859415 - DNA, 25 bp, Homo sapien
gcgtgggcttgacggccagggcata

SEQ ID NO: 3859416 - DNA, 25 bp, Homo sapien
ctggggaactgaagagggcggcggg

SEQ ID NO: 3859417 - DNA, 25 bp, Homo sapien
gcctagggcgctcggcctcgtccga

SEQ ID NO: 3859418 - DNA, 25 bp, Homo sapien
cagttgctgcggcttgggctcctcc

SEQ ID NO: 3859419 - DNA, 25 bp, Homo sapien
tgctgcagttgctgcggcttgggct

SEQ ID NO: 3859420 - DNA, 25 bp, Homo sapien
ctgcagttgctgcggcttgggctcc

SEQ ID NO: 3859421 - DNA, 25 bp, Homo sapien
tgcagttgctgcggcttgggctcct

SEQ ID NO: 3859422 - DNA, 25 bp, Homo sapien
cggagggcgccctccccatcgctgc

SEQ ID NO: 3859423 - DNA, 25 bp, Homo sapien
ccggagggcgccctccccatcgctg

SEQ ID NO: 3859424 - DNA, 25 bp, Homo sapien
tgcgcctccggagggcgccctcccc

SEQ ID NO: 3859425 - DNA, 25 bp, Homo sapien
ctgcgcctccggagggcgccctccc

SEQ ID NO: 3859426 - DNA, 25 bp, Homo sapien
ctcgtaggcgcggggcggtggcggc

SEQ ID NO: 3859427 - DNA, 25 bp, Homo sapien
agggcggcggcgccgggcgtgggag

SEQ ID NO: 3859428 - DNA, 25 bp, Homo sapien
ggcggcggcgccgggcgtgggagcg

SEQ ID NO: 3859429 - DNA, 25 bp, Homo sapien
cggcggcgccgggcgtgggagcgga

SEQ ID NO: 3859430 - DNA, 25 bp, Homo sapien
ccagtgagtgtcgttgagccagtca

SEQ ID NO: 3859431 - DNA, 25 bp, Homo sapien
tgcagcagccgctcgtacgtaagcc

SEQ ID NO: 3859432 - DNA, 25 bp, Homo sapien
gccgcaggtaactcatgtcctctga

SEQ ID NO: 3859433 - DNA, 25 bp, Homo sapien
ggcccgagttccaaatgtcatacag

SEQ ID NO: 3859434 - DNA, 25 bp, Homo sapien
cttgcgttttggggtggtcaggttg

SEQ ID NO: 3859435 - DNA, 25 bp, Homo sapien
tagtagccttcgctgcgggctgagc

SEQ ID NO: 3859436 - DNA, 25 bp, Homo sapien
ctgatggggtagtagccttcgctgc

SEQ ID NO: 3859437 - DNA, 25 bp, Homo sapien
gggcacacgtccaggtacttgtcct

SEQ ID NO: 3859438 - DNA, 25 bp, Homo sapien
ccgagactgggcacacgtccaggta

SEQ ID NO: 3859439 - DNA, 25 bp, Homo sapien
accggcgctcggacagcacgcggtt

SEQ ID NO: 3859440 - DNA, 25 bp, Homo sapien
gcgctcggacagcacgcggttcgtc

SEQ ID NO: 3859441 - DNA, 25 bp, Homo sapien
gatggcggaggtaccgatggcgctc

SEQ ID NO: 3859442 - DNA, 25 bp, Homo sapien
tgtccatgatggcggaggtaccgat

SEQ ID NO: 3859443 - DNA, 25 bp, Homo sapien
agctggttgagtttcagcaggtcac

SEQ ID NO: 3859444 - DNA, 25 bp, Homo sapien
gagctggttgagtttcagcaggtca

SEQ ID NO: 3859445 - DNA, 25 bp, Homo sapien
tgagctggttgagtttcagcaggtc

SEQ ID NO: 3859446 - DNA, 25 bp, Homo sapien
cttgagctggttgagtttcagcagg

SEQ ID NO: 3859447 - DNA, 25 bp, Homo sapien
ccgagggaaccacaggagcctgctg

SEQ ID NO: 3859448 - DNA, 25 bp, Homo sapien
acccgagggaaccacaggagcctgc

SEQ ID NO: 3859449 - DNA, 25 bp, Homo sapien
ccaactccacccgagggaaccacag

SEQ ID NO: 3859450 - DNA, 25 bp, Homo sapien
actccacccgagggaaccacaggag

SEQ ID NO: 3859451 - DNA, 25 bp, Homo sapien
caaatcggagcttcttcttccggaa

SEQ ID NO: 3859452 - DNA, 25 bp, Homo sapien
atggcaaacagaccccactcgtgga

SEQ ID NO: 3859453 - DNA, 25 bp, Homo sapien
tgttctgacccacgtattcgatgac

SEQ ID NO: 3859454 - DNA, 25 bp, Homo sapien
catctcgtcagcagcaatgggttcc

SEQ ID NO: 3859455 - DNA, 25 bp, Homo sapien
tggccaggttgccacacttggtggc

SEQ ID NO: 3859456 - DNA, 25 bp, Homo sapien
tgaatctggccaggttgccacactt

SEQ ID NO: 3859457 - DNA, 25 bp, Homo sapien
aatctggccaggttgccacacttgg

SEQ ID NO: 3859458 - DNA, 25 bp, Homo sapien
gcagtggttgatgaatctggccagg

SEQ ID NO: 3859459 - DNA, 25 bp, Homo sapien
tcgtccacgccaatgggctgcttgg

SEQ ID NO: 3859460 - DNA, 25 bp, Homo sapien
cttctgggactcgatggtgatgacc

SEQ ID NO: 3859461 - DNA, 25 bp, Homo sapien
ggtgatgaccttggcgtagcagtta

SEQ ID NO: 3859462 - DNA, 25 bp, Homo sapien
tagtcgtaggtgatctcctcgtcca

SEQ ID NO: 3859463 - DNA, 25 bp, Homo sapien
gagccccggcagctctctgtgccac

SEQ ID NO: 3859464 - DNA, 25 bp, Homo sapien
ttagggagccccggcagctctctgt

SEQ ID NO: 3859465 - DNA, 25 bp, Homo sapien
tcagtttagggagccccggcagctc

SEQ ID NO: 3859466 - DNA, 25 bp, Homo sapien
agggagccccggcagctctctgtgc

SEQ ID NO: 3859467 - DNA, 25 bp, Homo sapien
taaaaatgtggcgtcgggtttgcgc

SEQ ID NO: 3859468 - DNA, 25 bp, Homo sapien
taacatatgtacagtccagcccagc

SEQ ID NO: 3859469 - DNA, 25 bp, Homo sapien
ggacagaatctgtacaggccggcac

SEQ ID NO: 3859470 - DNA, 25 bp, Homo sapien
caaagcaagaggactgtgtagcccc

SEQ ID NO: 3859471 - DNA, 25 bp, Homo sapien
gacagtctcggactgtctctgcagg

SEQ ID NO: 3859472 - DNA, 25 bp, Homo sapien
ctgcccaaatacaccgaccaaacac

SEQ ID NO: 3859473 - DNA, 25 bp, Homo sapien
tcttgcctgaaggcccctttacctg

SEQ ID NO: 3859474 - DNA, 25 bp, Homo sapien
ttcaacttgcacaaccctccgtgcc

SEQ ID NO: 3859475 - DNA, 25 bp, Homo sapien
ggtattcctggtgcgggtgcggctg

SEQ ID NO: 3859476 - DNA, 25 bp, Homo sapien
ggcactggtggggtattcctggtgc

SEQ ID NO: 3859477 - DNA, 25 bp, Homo sapien
actggtggggtattcctggtgcggg

SEQ ID NO: 3859478 - DNA, 25 bp, Homo sapien
cttggcaccaccctggcgggcactg

SEQ ID NO: 3859479 - DNA, 25 bp, Homo sapien
ggagccagcggtgacctcatcccac

SEQ ID NO: 3859480 - DNA, 25 bp, Homo sapien
catctgggtccagcggagaacttgg

SEQ ID NO: 3859481 - DNA, 25 bp, Homo sapien
gggatgaagctcgaacttgcagagt

SEQ ID NO: 3859482 - DNA, 25 bp, Homo sapien
gctcgaacttgcagagtgggctgaa

SEQ ID NO: 3859483 - DNA, 25 bp, Homo sapien
gccctcttctttcgtccagggctgg

SEQ ID NO: 3859484 - DNA, 25 bp, Homo sapien
tgcagccgctatcccagggtgccca

SEQ ID NO: 3859485 - DNA, 25 bp, Homo sapien
tcttctttcgtccagggctggccgg

SEQ ID NO: 3859486 - DNA, 25 bp, Homo sapien
gctatcccagggtgcccagactggc

SEQ ID NO: 3859487 - DNA, 25 bp, Homo sapien
cctgctgcaaccacctgttactgct

SEQ ID NO: 3859488 - DNA, 25 bp, Homo sapien
agcaaccaggccacctgccgtctgc

SEQ ID NO: 3859489 - DNA, 25 bp, Homo sapien
ctggggaagagaccttggctcatcc

SEQ ID NO: 3859490 - DNA, 25 bp, Homo sapien
ccctggagcggtgacgaggctggcg

SEQ ID NO: 3859491 - DNA, 25 bp, Homo sapien
attcgcaccacgtgctctcccagga

SEQ ID NO: 3859492 - DNA, 25 bp, Homo sapien
gcagcattcgcaccacgtgctctcc

SEQ ID NO: 3859493 - DNA, 25 bp, Homo sapien
agcattcgcaccacgtgctctccca

SEQ ID NO: 3859494 - DNA, 25 bp, Homo sapien
cagcagcattcgcaccacgtgctct

SEQ ID NO: 3859495 - DNA, 25 bp, Homo sapien
tccagccagggacccaggtgttggt

SEQ ID NO: 3859496 - DNA, 25 bp, Homo sapien
cagggacccaggtgttggtcaaaga

SEQ ID NO: 3859497 - DNA, 25 bp, Homo sapien
tcctccagccagggacccaggtgtt

SEQ ID NO: 3859498 - DNA, 25 bp, Homo sapien
cagccagggacccaggtgttggtca

SEQ ID NO: 3859499 - DNA, 25 bp, Homo sapien
tccaccacaagctcccccaacaaga

SEQ ID NO: 3859500 - DNA, 25 bp, Homo sapien
ccaccacaagctcccccaacaagaa

SEQ ID NO: 3859501 - DNA, 25 bp, Homo sapien
tctccaccacaagctcccccaacaa

SEQ ID NO: 3859502 - DNA, 25 bp, Homo sapien
cctctccaccacaagctcccccaac

SEQ ID NO: 3859503 - DNA, 25 bp, Homo sapien
tggccggggttggaggacacaggcc

SEQ ID NO: 3859504 - DNA, 25 bp, Homo sapien
gggttggaggacacaggccatgtca

SEQ ID NO: 3859505 - DNA, 25 bp, Homo sapien
cggggttggaggacacaggccatgt

SEQ ID NO: 3859506 - DNA, 25 bp, Homo sapien
ttggaggacacaggccatgtcagag

SEQ ID NO: 3859507 - DNA, 25 bp, Homo sapien
cgtctaccagcccagccgtgtggat

SEQ ID NO: 3859508 - DNA, 25 bp, Homo sapien
cctggatggcagtcaccctcacagg

SEQ ID NO: 3859509 - DNA, 25 bp, Homo sapien
tcatggatggtcttgggactggccc

SEQ ID NO: 3859510 - DNA, 25 bp, Homo sapien
acctcatgggcctgggtcacgtccc

SEQ ID NO: 3859511 - DNA, 25 bp, Homo sapien
acacaagcctcgatcacgttccggg

SEQ ID NO: 3859512 - DNA, 25 bp, Homo sapien
gcacacaagcctcgatcacgttccg

SEQ ID NO: 3859513 - DNA, 25 bp, Homo sapien
caagcctcgatcacgttccgggtac

SEQ ID NO: 3859514 - DNA, 25 bp, Homo sapien
ctgcacacaagcctcgatcacgttc

SEQ ID NO: 3859515 - DNA, 25 bp, Homo sapien
ctggtgtagaccaggaaccgtgttc

SEQ ID NO: 3859516 - DNA, 25 bp, Homo sapien
ctgtagaaggggtgacctttggtgt

SEQ ID NO: 3859517 - DNA, 25 bp, Homo sapien
tggtgtagaccaggaaccgtgttcc

SEQ ID NO: 3859518 - DNA, 25 bp, Homo sapien
gaaggaagactcaatgctgagggaa

SEQ ID NO: 3859519 - DNA, 25 bp, Homo sapien
ctgagggaaatgggctcttagagga

SEQ ID NO: 3859520 - DNA, 25 bp, Homo sapien
ggagaaggaagactcaatgctgagg

SEQ ID NO: 3859521 - DNA, 25 bp, Homo sapien
gagggaaatgggctcttagaggaca

SEQ ID NO: 3859522 - DNA, 25 bp, Homo sapien
gtgcctgtgcactgcttcgtatggg

SEQ ID NO: 3859523 - DNA, 25 bp, Homo sapien
ttgctgcaaggataggggtgcctgt

SEQ ID NO: 3859524 - DNA, 25 bp, Homo sapien
ttcgtatggggtgtcttcgttgccc

SEQ ID NO: 3859525 - DNA, 25 bp, Homo sapien
ttcctcccgttggcctccaggacca

SEQ ID NO: 3859526 - DNA, 25 bp, Homo sapien
ggaagagccaacctcccaggcgcag

SEQ ID NO: 3859527 - DNA, 25 bp, Homo sapien
cctggcggtagaagtccctcatgat

SEQ ID NO: 3859528 - DNA, 25 bp, Homo sapien
tgggacgaagggcacacgtcaccag

SEQ ID NO: 3859529 - DNA, 25 bp, Homo sapien
ttcaccgtagatgcccgtgggacga

SEQ ID NO: 3859530 - DNA, 25 bp, Homo sapien
catatttttctagccagagtccaca

SEQ ID NO: 3859531 - DNA, 25 bp, Homo sapien
ttaatgtcccaacttgcatggatcc

SEQ ID NO: 3859532 - DNA, 25 bp, Homo sapien
ggaatggctgctcccatagctgcaa

SEQ ID NO: 3859533 - DNA, 25 bp, Homo sapien
taatcacagtctaccttggcccatg

SEQ ID NO: 3859534 - DNA, 25 bp, Homo sapien
tttgggcccaggtagttgccgccca

SEQ ID NO: 3859535 - DNA, 25 bp, Homo sapien
gaaaccaggacctgcgtggtgggcc

SEQ ID NO: 3859536 - DNA, 25 bp, Homo sapien
ctgccttctccctcgccctggtagt

SEQ ID NO: 3859537 - DNA, 25 bp, Homo sapien
tcgccctggtagtcacttgctctcc

SEQ ID NO: 3859538 - DNA, 25 bp, Homo sapien
ctgccggtggcggaagagaggcgga

SEQ ID NO: 3859539 - DNA, 25 bp, Homo sapien
tgccggtggcggaagagaggcggac

SEQ ID NO: 3859540 - DNA, 25 bp, Homo sapien
gccggtggcggaagagaggcggaca

SEQ ID NO: 3859541 - DNA, 25 bp, Homo sapien
tcatagccgaaatggcgctgagcct

SEQ ID NO: 3859542 - DNA, 25 bp, Homo sapien
tagggtgatccatcgtagcagaagt

SEQ ID NO: 3859543 - DNA, 25 bp, Homo sapien
cgtagcggcctgtacccagagaatg

SEQ ID NO: 3859544 - DNA, 25 bp, Homo sapien
catgttgaaatcctcgtagctcctg

SEQ ID NO: 3859545 - DNA, 25 bp, Homo sapien
ctgggcctccaggccccagccccac

SEQ ID NO: 3859546 - DNA, 25 bp, Homo sapien
tctgggcctccaggccccagcccca

SEQ ID NO: 3859547 - DNA, 25 bp, Homo sapien
tgggcctccaggccccagccccacc

SEQ ID NO: 3859548 - DNA, 25 bp, Homo sapien
tctaagacagacagttgaaggtgag

SEQ ID NO: 3859549 - DNA, 25 bp, Homo sapien
caaggctcctggattgaaaatgtgg

SEQ ID NO: 3859550 - DNA, 25 bp, Homo sapien
tgaaagcatagggaggccatagccc

SEQ ID NO: 3859551 - DNA, 25 bp, Homo sapien
tggagggctctacgacaaggacagc

SEQ ID NO: 3859552 - DNA, 25 bp, Homo sapien
tacatattaactcactcagtcttca

SEQ ID NO: 3859553 - DNA, 25 bp, Homo sapien
gaggtgggcagtgttatgatccaca

SEQ ID NO: 3859554 - DNA, 25 bp, Homo sapien
catcgtgcctgaccaatgtgtacat

SEQ ID NO: 3859555 - DNA, 25 bp, Homo sapien
agccatcgtgcctgaccaatgtgta

SEQ ID NO: 3859556 - DNA, 25 bp, Homo sapien
cagtaaatctttattcaggccccac

SEQ ID NO: 3859557 - DNA, 25 bp, Homo sapien
taccaggacgatgctctgatgctac

SEQ ID NO: 3859558 - DNA, 25 bp, Homo sapien
tacacctgttgtgctcaggaacaaa

SEQ ID NO: 3859559 - DNA, 25 bp, Homo sapien
cagtggtgagcaaagcaagtgttca

SEQ ID NO: 3859560 - DNA, 25 bp, Homo sapien
ctcgcctttattgctttcgggtcca

SEQ ID NO: 3859561 - DNA, 25 bp, Homo sapien
agggcgtgggcggactgacgactta

SEQ ID NO: 3859562 - DNA, 25 bp, Homo sapien
gcggactgacgacttagcatttggg

SEQ ID NO: 3859563 - DNA, 25 bp, Homo sapien
tcgcctttattgctttcgggtccag

SEQ ID NO: 3859564 - DNA, 25 bp, Homo sapien
tgggacgccgttctcatcacgacgt

SEQ ID NO: 3859565 - DNA, 25 bp, Homo sapien
gaatgtgaccctgtgactgtcacgt

SEQ ID NO: 3859566 - DNA, 25 bp, Homo sapien
gtgactgtcacgtgtcccggctctg

SEQ ID NO: 3859567 - DNA, 25 bp, Homo sapien
tcccaaactcgtggaccgcagaatg

SEQ ID NO: 3859568 - DNA, 25 bp, Homo sapien
gcatctcacatcaccccatggtgcc

SEQ ID NO: 3859569 - DNA, 25 bp, Homo sapien
ggtaggaatacgtcatttgtacgta

SEQ ID NO: 3859570 - DNA, 25 bp, Homo sapien
tacgtaatccgagacacccgcatct

SEQ ID NO: 3859571 - DNA, 25 bp, Homo sapien
tacgtcatttgtacgtaatccgaga

SEQ ID NO: 3859572 - DNA, 25 bp, Homo sapien
gaaccgttgcatcttccaacggaaa

SEQ ID NO: 3859573 - DNA, 25 bp, Homo sapien
agtcggaagttgttgcgccccgagc

SEQ ID NO: 3859574 - DNA, 25 bp, Homo sapien
cggagatgcctggacgcgagaactt

SEQ ID NO: 3859575 - DNA, 25 bp, Homo sapien
gagaacttgctaccgtcaccggaac

SEQ ID NO: 3859576 - DNA, 25 bp, Homo sapien
ccagagccgggaggccctcaaattt

SEQ ID NO: 3859577 - DNA, 25 bp, Homo sapien
tccgtgataaattcggggcatgcgc

SEQ ID NO: 3859578 - DNA, 25 bp, Homo sapien
agtcaatgggaaggcgccgaccccg

SEQ ID NO: 3859579 - DNA, 25 bp, Homo sapien
ttggaattcccgtaccccgctcaca

SEQ ID NO: 3859580 - DNA, 25 bp, Homo sapien
tctcagctcgtgggtcctgtcccgc

SEQ ID NO: 3859581 - DNA, 25 bp, Homo sapien
gtctcagctcgtgggtcctgtcccg

SEQ ID NO: 3859582 - DNA, 25 bp, Homo sapien
tgtctcagctcgtgggtcctgtccc

SEQ ID NO: 3859583 - DNA, 25 bp, Homo sapien
ctgtctcagctcgtgggtcctgtcc

SEQ ID NO: 3859584 - DNA, 25 bp, Homo sapien
cttgtggaagaactcctcgtccggg

SEQ ID NO: 3859585 - DNA, 25 bp, Homo sapien
agcgcgacccgctccttgtcctctt

SEQ ID NO: 3859586 - DNA, 25 bp, Homo sapien
ccagccgtgccgtgcccgggtgcac

SEQ ID NO: 3859587 - DNA, 25 bp, Homo sapien
gtgcccgggtgcaccaccagcgcga

SEQ ID NO: 3859588 - DNA, 25 bp, Homo sapien
ccagtttgacaatagtctgccgaat

SEQ ID NO: 3859589 - DNA, 25 bp, Homo sapien
gactttattccccagtttgacaata

SEQ ID NO: 3859590 - DNA, 25 bp, Homo sapien
tattccccagtttgacaatagtctg

SEQ ID NO: 3859591 - DNA, 25 bp, Homo sapien
caatagtctgccgaattgtccggac

SEQ ID NO: 3859592 - DNA, 25 bp, Homo sapien
ggagcatgcgccctgcagccggggt

SEQ ID NO: 3859593 - DNA, 25 bp, Homo sapien
atccctggggcggagcatgcgccct

SEQ ID NO: 3859594 - DNA, 25 bp, Homo sapien
gcatgcgccctgcagccggggtttc

SEQ ID NO: 3859595 - DNA, 25 bp, Homo sapien
ccccacaatccctggggcggagcat

SEQ ID NO: 3859596 - DNA, 25 bp, Homo sapien
ttcagctgcaggcggatctccctcc

SEQ ID NO: 3859597 - DNA, 25 bp, Homo sapien
gtttgatctcatcgcgcaggttctg

SEQ ID NO: 3859598 - DNA, 25 bp, Homo sapien
gctgtttgatctcatcgcgcaggtt

SEQ ID NO: 3859599 - DNA, 25 bp, Homo sapien
ccagctgtttgatctcatcgcgcag

SEQ ID NO: 3859600 - DNA, 25 bp, Homo sapien
ggatatatcactggcttctctgggc

SEQ ID NO: 3859601 - DNA, 25 bp, Homo sapien
actgagttcccataggtatgcagag

SEQ ID NO: 3859602 - DNA, 25 bp, Homo sapien
ccagatataccaacaacagggcagg

SEQ ID NO: 3859603 - DNA, 25 bp, Homo sapien
tgcccagtgggcagcgataactgtg

SEQ ID NO: 3859604 - DNA, 25 bp, Homo sapien
ttctcattcttgtgttgacggagtt

SEQ ID NO: 3859605 - DNA, 25 bp, Homo sapien
gacggagttatagttctcatcagct

SEQ ID NO: 3859606 - DNA, 25 bp, Homo sapien
tctcattcttgtgttgacggagtta

SEQ ID NO: 3859607 - DNA, 25 bp, Homo sapien
agttatagttctcatcagcttcctc

SEQ ID NO: 3859608 - DNA, 25 bp, Homo sapien
cctcttcagtgttgccccaaggaag

SEQ ID NO: 3859609 - DNA, 25 bp, Homo sapien
ctcttcagtgttgccccaaggaagt

SEQ ID NO: 3859610 - DNA, 25 bp, Homo sapien
ttcctcttcagtgttgccccaagga

SEQ ID NO: 3859611 - DNA, 25 bp, Homo sapien
ttcagtgttgccccaaggaagttcc

SEQ ID NO: 3859612 - DNA, 25 bp, Homo sapien
ttgatgagctccacgaattgctggg

SEQ ID NO: 3859613 - DNA, 25 bp, Homo sapien
tattcggactgcattgaattgcact

SEQ ID NO: 3859614 - DNA, 25 bp, Homo sapien
tccgaatccgctccacgttcttctc

SEQ ID NO: 3859615 - DNA, 25 bp, Homo sapien
gttcttctcccggtattcggactgc

SEQ ID NO: 3859616 - DNA, 25 bp, Homo sapien
catctgctccaactcctcatcagac

SEQ ID NO: 3859617 - DNA, 25 bp, Homo sapien
atctgctccaactcctcatcagaca

SEQ ID NO: 3859618 - DNA, 25 bp, Homo sapien
tcatcagacaccatcccagcattgg

SEQ ID NO: 3859619 - DNA, 25 bp, Homo sapien
tgccgggccgagatctcatttaagg

SEQ ID NO: 3859620 - DNA, 25 bp, Homo sapien
acgaatactgcgttcaagctgctgg

SEQ ID NO: 3859621 - DNA, 25 bp, Homo sapien
gaaaagtgaatatgtcgtgcagctc

SEQ ID NO: 3859622 - DNA, 25 bp, Homo sapien
ttaaggcctgtcgagtcacctgcgt

SEQ ID NO: 3859623 - DNA, 25 bp, Homo sapien
gtcttgacgtgctcctgcccacgtt

SEQ ID NO: 3859624 - DNA, 25 bp, Homo sapien
tccgctgagctcaggatgttcttct

SEQ ID NO: 3859625 - DNA, 25 bp, Homo sapien
ttctccagggccgtcttgacgtgct

SEQ ID NO: 3859626 - DNA, 25 bp, Homo sapien
cacgttccacgtagtccgctgagct

SEQ ID NO: 3859627 - DNA, 25 bp, Homo sapien
ggcagtggccgggcctgggaggctc

SEQ ID NO: 3859628 - DNA, 25 bp, Homo sapien
agggaagtcacacagggtgcctggg

SEQ ID NO: 3859629 - DNA, 25 bp, Homo sapien
cagtggccgggcctgggaggctcac

SEQ ID NO: 3859630 - DNA, 25 bp, Homo sapien
aggagggggtcagggaagtcacaca

SEQ ID NO: 3859631 - DNA, 25 bp, Homo sapien
acacacagatggcaatcaagacttt

SEQ ID NO: 3859632 - DNA, 25 bp, Homo sapien
ctgtgacgccaatgatgactgctag

SEQ ID NO: 3859633 - DNA, 25 bp, Homo sapien
gacgacggtgatggacacacagatg

SEQ ID NO: 3859634 - DNA, 25 bp, Homo sapien
tgatgactgctaggaggacgacggt

SEQ ID NO: 3859635 - DNA, 25 bp, Homo sapien
aggagggagaacagggtctgaggga

SEQ ID NO: 3859636 - DNA, 25 bp, Homo sapien
cagggggcagcccacaacatctcac

SEQ ID NO: 3859637 - DNA, 25 bp, Homo sapien
ggccagggggcagcccacaacatct

SEQ ID NO: 3859638 - DNA, 25 bp, Homo sapien
gaaaggagggagaacagggtctgag

SEQ ID NO: 3859639 - DNA, 25 bp, Homo sapien
ggtccgactggaggctctgccctgc

SEQ ID NO: 3859640 - DNA, 25 bp, Homo sapien
gccctgggttcctggtgctcctagt

SEQ ID NO: 3859641 - DNA, 25 bp, Homo sapien
cccttctgcataggggccagtgtga

SEQ ID NO: 3859642 - DNA, 25 bp, Homo sapien
gaagaactgtctgcccttctgcata

SEQ ID NO: 3859643 - DNA, 25 bp, Homo sapien
gtgtgtcccggccaatcaggacagt

SEQ ID NO: 3859644 - DNA, 25 bp, Homo sapien
caaaaccgtgtgtcccggccaatca

SEQ ID NO: 3859645 - DNA, 25 bp, Homo sapien
cccggccaatcaggacagtgcaggc

SEQ ID NO: 3859646 - DNA, 25 bp, Homo sapien
aaaaccgtgtgtcccggccaatcag

SEQ ID NO: 3859647 - DNA, 25 bp, Homo sapien
ccaggtaaccctcagcaaccaggtg

SEQ ID NO: 3859648 - DNA, 25 bp, Homo sapien
tgcttcagccaggtaaccctcagca

SEQ ID NO: 3859649 - DNA, 25 bp, Homo sapien
ggatttcaggtaccttatggaagaa

SEQ ID NO: 3859650 - DNA, 25 bp, Homo sapien
aaagaaatttagtcagggcttggat

SEQ ID NO: 3859651 - DNA, 25 bp, Homo sapien
agatcgcaccactgcactccagtct

SEQ ID NO: 3859652 - DNA, 25 bp, Homo sapien
gggaggcgaagtttgcagtgagcgg

SEQ ID NO: 3859653 - DNA, 25 bp, Homo sapien
gagcaagactccgtctcaaaaaaaa

SEQ ID NO: 3859654 - DNA, 25 bp, Homo sapien
gggcgatagagcaagactccgtctc

SEQ ID NO: 3859655 - DNA, 25 bp, Homo sapien
tcccacacatggcaacgcgggactg

SEQ ID NO: 3859656 - DNA, 25 bp, Homo sapien
atggcaacgcgggactgagcccgcc

SEQ ID NO: 3859657 - DNA, 25 bp, Homo sapien
actgagcccgccagactgggcagct

SEQ ID NO: 3859658 - DNA, 25 bp, Homo sapien
gacgcggtctcccacacatggcaac

SEQ ID NO: 3859659 - DNA, 25 bp, Homo sapien
gatctcggacggtaagacctgcact

SEQ ID NO: 3859660 - DNA, 25 bp, Homo sapien
taaagcccacgacacactggatctg

SEQ ID NO: 3859661 - DNA, 25 bp, Homo sapien
gactaatgtccatgctcttcagaga

SEQ ID NO: 3859662 - DNA, 25 bp, Homo sapien
cttaagtcccgctggccaatcgtaa

SEQ ID NO: 3859663 - DNA, 25 bp, Homo sapien
tgtccagcatggctaagaagaggca

SEQ ID NO: 3859664 - DNA, 25 bp, Homo sapien
tggacacccgctgcatagacagtgg

SEQ ID NO: 3859665 - DNA, 25 bp, Homo sapien
tagacagtggatgccgagagactct

SEQ ID NO: 3859666 - DNA, 25 bp, Homo sapien
gagagactctatcagatcccagtaa

SEQ ID NO: 3859667 - DNA, 25 bp, Homo sapien
aaagaccttctatgggtcctgacag

SEQ ID NO: 3859668 - DNA, 25 bp, Homo sapien
aagaccttctatgggtcctgacagc

SEQ ID NO: 3859669 - DNA, 25 bp, Homo sapien
ggaaaagttcaaaggattgagcctg

SEQ ID NO: 3859670 - DNA, 25 bp, Homo sapien
caaagaccttctatgggtcctgaca

SEQ ID NO: 3859671 - DNA, 25 bp, Homo sapien
tgacagcatgctaccaatactccct

SEQ ID NO: 3859672 - DNA, 25 bp, Homo sapien
cactgtccagctcaacgtcaatgtc

SEQ ID NO: 3859673 - DNA, 25 bp, Homo sapien
aatgacagttcccttaccagccact

SEQ ID NO: 3859674 - DNA, 25 bp, Homo sapien
caaatgcatgcaatagtagtgacag

SEQ ID NO: 3859675 - DNA, 25 bp, Homo sapien
taaatgcatccccttcccaagggag

SEQ ID NO: 3859676 - DNA, 25 bp, Homo sapien
catggaatcagcctcaagcccagga

SEQ ID NO: 3859677 - DNA, 25 bp, Homo sapien
aagcccaggatctctaatagtctct

SEQ ID NO: 3859678 - DNA, 25 bp, Homo sapien
aaataaatgcatccccttcccaagg

SEQ ID NO: 3859679 - DNA, 25 bp, Homo sapien
tcaaatccaggaggcgaatgttgca

SEQ ID NO: 3859680 - DNA, 25 bp, Homo sapien
ttcaaatccaggaggcgaatgttgc

SEQ ID NO: 3859681 - DNA, 25 bp, Homo sapien
caaatccaggaggcgaatgttgcag

SEQ ID NO: 3859682 - DNA, 25 bp, Homo sapien
gggtgaagccataccactgcgagaa

SEQ ID NO: 3859683 - DNA, 25 bp, Homo sapien
ttattaaaagatgtccaccaggccc

SEQ ID NO: 3859684 - DNA, 25 bp, Homo sapien
tttggaatagagacacccagccagc

SEQ ID NO: 3859685 - DNA, 25 bp, Homo sapien
aaatcctttgtggtgtcgtcgagcc

SEQ ID NO: 3859686 - DNA, 25 bp, Homo sapien
ttctgggctgcggacacccaggctc

SEQ ID NO: 3859687 - DNA, 25 bp, Homo sapien
cgcggttctgggctgcggacaccca

SEQ ID NO: 3859688 - DNA, 25 bp, Homo sapien
tgtctccgcggttctgggctgcgga

SEQ ID NO: 3859689 - DNA, 25 bp, Homo sapien
ccgccggctgtctccgcggttctgg

SEQ ID NO: 3859690 - DNA, 25 bp, Homo sapien
acgcggccacgatccgagctggcct

SEQ ID NO: 3859691 - DNA, 25 bp, Homo sapien
cacgatccgagctggcctcagtttc

SEQ ID NO: 3859692 - DNA, 25 bp, Homo sapien
cgggttggcccagcgcgagcagcgc

SEQ ID NO: 3859693 - DNA, 25 bp, Homo sapien
gggcagctcccacgcggccacgatc

SEQ ID NO: 3859694 - DNA, 25 bp, Homo sapien
ctgtttggcagggtccgggctccgt

SEQ ID NO: 3859695 - DNA, 25 bp, Homo sapien
acgccacggagtcagcacaagtctc

SEQ ID NO: 3859696 - DNA, 25 bp, Homo sapien
gtcggtgcgaggagccgacgccgac

SEQ ID NO: 3859697 - DNA, 25 bp, Homo sapien
tagcgccggcccctgtttggcaggg

SEQ ID NO: 3859698 - DNA, 25 bp, Homo sapien
agggcgcagctggcatgagccagga

SEQ ID NO: 3859699 - DNA, 25 bp, Homo sapien
tgtcggggggctctcgcgctcccac

SEQ ID NO: 3859700 - DNA, 25 bp, Homo sapien
ggtagagaaaagagggcgcagctgg

SEQ ID NO: 3859701 - DNA, 25 bp, Homo sapien
gagccaggagtctactcccagctct

SEQ ID NO: 3859702 - DNA, 25 bp, Homo sapien
tcctcagaacacacggcaatgcctg

SEQ ID NO: 3859703 - DNA, 25 bp, Homo sapien
tgactgaggcggtcttcatcccaaa

SEQ ID NO: 3859704 - DNA, 25 bp, Homo sapien
tagtcaaccaccaatgaagtcctct

SEQ ID NO: 3859705 - DNA, 25 bp, Homo sapien
cagtacaactgtctccgaccgtaaa

SEQ ID NO: 3859706 - DNA, 25 bp, Homo sapien
tcaataagagaagtccaaatcttcc

SEQ ID NO: 3859707 - DNA, 25 bp, Homo sapien
ttcaataagagaagtccaaatcttc

SEQ ID NO: 3859708 - DNA, 25 bp, Homo sapien
tactagatccaatctgcaggcacca

SEQ ID NO: 3859709 - DNA, 25 bp, Homo sapien
taacttcgcctcttggctctacgag

SEQ ID NO: 3859710 - DNA, 25 bp, Homo sapien
tacgagcaacaagttcacctgaggt

SEQ ID NO: 3859711 - DNA, 25 bp, Homo sapien
ggcttaagtcatccctacaggtata

SEQ ID NO: 3859712 - DNA, 25 bp, Homo sapien
ctggaggttcagaaggagcagacac

SEQ ID NO: 3859713 - DNA, 25 bp, Homo sapien
gttcagaaggagcagacacgtggca

SEQ ID NO: 3859714 - DNA, 25 bp, Homo sapien
gagcagacacgtggcagcaccttcc

SEQ ID NO: 3859715 - DNA, 25 bp, Homo sapien
gaaggagcagacacgtggcagcacc

SEQ ID NO: 3859716 - DNA, 25 bp, Homo sapien
cgacgatggttaaccaggctcccgg

SEQ ID NO: 3859717 - DNA, 25 bp, Homo sapien
cactgctgacaacggtagggccgag

SEQ ID NO: 3859718 - DNA, 25 bp, Homo sapien
tcttgagagccatgggattggagaa

SEQ ID NO: 3859719 - DNA, 25 bp, Homo sapien
cctgcggcggccctcaggagcatgt

SEQ ID NO: 3859720 - DNA, 25 bp, Homo sapien
cacagtcaggtgtctcttctgtatg

SEQ ID NO: 3859721 - DNA, 25 bp, Homo sapien
agattcacagtcaggtgtctcttct

SEQ ID NO: 3859722 - DNA, 25 bp, Homo sapien
tgggtggcttgccaagccttctctt

SEQ ID NO: 3859723 - DNA, 25 bp, Homo sapien
cagccgtctgcaccatcctcaggac

SEQ ID NO: 3859724 - DNA, 25 bp, Homo sapien
ctggcagagttagtggagggtcccc

SEQ ID NO: 3859725 - DNA, 25 bp, Homo sapien
gccttctctttgtctggtgggcaga

SEQ ID NO: 3859726 - DNA, 25 bp, Homo sapien
tttccacagtctcggcaggcaaagg

SEQ ID NO: 3859727 - DNA, 25 bp, Homo sapien
gatgagcccgcacatggtttttgag

SEQ ID NO: 3859728 - DNA, 25 bp, Homo sapien
taaggccgatactgggcatgcagtc

SEQ ID NO: 3859729 - DNA, 25 bp, Homo sapien
tccactgggtcaggcgggagttcta

SEQ ID NO: 3859730 - DNA, 25 bp, Homo sapien
ccagtgaggctatcgcagaagtgag

SEQ ID NO: 3859731 - DNA, 25 bp, Homo sapien
tctccgctgccaggagtttggcttc

SEQ ID NO: 3859732 - DNA, 25 bp, Homo sapien
catgaggactttcccctgaagggtc

SEQ ID NO: 3859733 - DNA, 25 bp, Homo sapien
tggtcttcatccaccccagtgaggc

SEQ ID NO: 3859734 - DNA, 25 bp, Homo sapien
cgcagatgattacggtaggcagcca

SEQ ID NO: 3859735 - DNA, 25 bp, Homo sapien
gagagtcaaactccttcgggcagag

SEQ ID NO: 3859736 - DNA, 25 bp, Homo sapien
ccttcagggccatgcggttggagta

SEQ ID NO: 3859737 - DNA, 25 bp, Homo sapien
cctttgcagcgagggtggttccgca

SEQ ID NO: 3859738 - DNA, 25 bp, Homo sapien
cccaattgggtctctagtccctggc

SEQ ID NO: 3859739 - DNA, 25 bp, Homo sapien
cacccaattgggtctctagtccctg

SEQ ID NO: 3859740 - DNA, 25 bp, Homo sapien
gccctgatggggctctgactgcgct

SEQ ID NO: 3859741 - DNA, 25 bp, Homo sapien
ccctgatggggctctgactgcgctc

SEQ ID NO: 3859742 - DNA, 25 bp, Homo sapien
tccactatgattccccagtccccca

SEQ ID NO: 3859743 - DNA, 25 bp, Homo sapien
gcctccactatgattccccagtccc

SEQ ID NO: 3859744 - DNA, 25 bp, Homo sapien
ccagcctccactatgattccccagt

SEQ ID NO: 3859745 - DNA, 25 bp, Homo sapien
cagcctccactatgattccccagtc

SEQ ID NO: 3859746 - DNA, 25 bp, Homo sapien
agtcaccagcgtggcaaggactcct

SEQ ID NO: 3859747 - DNA, 25 bp, Homo sapien
cacagtcaggacaggcaaaggtctg

SEQ ID NO: 3859748 - DNA, 25 bp, Homo sapien
ctttgtggccacaggatttaagaac

SEQ ID NO: 3859749 - DNA, 25 bp, Homo sapien
tcagagtaggtccattgagctggca

SEQ ID NO: 3859750 - DNA, 25 bp, Homo sapien
gccagcatggcggtaggagcgcccg

SEQ ID NO: 3859751 - DNA, 25 bp, Homo sapien
ttctggtggttcagcaggctgccag

SEQ ID NO: 3859752 - DNA, 25 bp, Homo sapien
tgctgcacgaagctgattcggcggc

SEQ ID NO: 3859753 - DNA, 25 bp, Homo sapien
agcacgggtacaaccctgtggtgtg

SEQ ID NO: 3859754 - DNA, 25 bp, Homo sapien
tcctgggacccttcatgccccctac

SEQ ID NO: 3859755 - DNA, 25 bp, Homo sapien
ctcctgggacccttcatgcccccta

SEQ ID NO: 3859756 - DNA, 25 bp, Homo sapien
tgctcccccaccgactttggggctg

SEQ ID NO: 3859757 - DNA, 25 bp, Homo sapien
aatccccggggctctctcctctcac

SEQ ID NO: 3859758 - DNA, 25 bp, Homo sapien
ggctctctcctctcactccttgctc

SEQ ID NO: 3859759 - DNA, 25 bp, Homo sapien
actccttgctcccccaccgactttg

SEQ ID NO: 3859760 - DNA, 25 bp, Homo sapien
gaaccagtttccgtggccaagtcag

SEQ ID NO: 3859761 - DNA, 25 bp, Homo sapien
gctacagtgtaatggaggagcccag

SEQ ID NO: 3859762 - DNA, 25 bp, Homo sapien
tatacctgacttgcgggtgctcagc

SEQ ID NO: 3859763 - DNA, 25 bp, Homo sapien
tcattactttactggctgactcagg

SEQ ID NO: 3859764 - DNA, 25 bp, Homo sapien
tgagaacagggattctaggcctcct

SEQ ID NO: 3859765 - DNA, 25 bp, Homo sapien
tcagtcctccagttaaaggtgtgca

SEQ ID NO: 3859766 - DNA, 25 bp, Homo sapien
ccactagatggaatgggtccgcctc

SEQ ID NO: 3859767 - DNA, 25 bp, Homo sapien
tcccttgaggtcatgagaaatcttc

SEQ ID NO: 3859768 - DNA, 25 bp, Homo sapien
gagggggcaatggcaagtcccctct

SEQ ID NO: 3859769 - DNA, 25 bp, Homo sapien
aaggatccaggagtggggtcgtggg

SEQ ID NO: 3859770 - DNA, 25 bp, Homo sapien
gaaggatccaggagtggggtcgtgg

SEQ ID NO: 3859771 - DNA, 25 bp, Homo sapien
ttcaaggacagggacgcgaggaaca

SEQ ID NO: 3859772 - DNA, 25 bp, Homo sapien
cacaggcaactttcccaccggtggg

SEQ ID NO: 3859773 - DNA, 25 bp, Homo sapien
gggatgcccgaactactcctgagaa

SEQ ID NO: 3859774 - DNA, 25 bp, Homo sapien
gagaagagcacggtgatgaggctgg

SEQ ID NO: 3859775 - DNA, 25 bp, Homo sapien
tgctgagctccctggtgtctctcgc

SEQ ID NO: 3859776 - DNA, 25 bp, Homo sapien
ctgctgagctccctggtgtctctcg

SEQ ID NO: 3859777 - DNA, 25 bp, Homo sapien
gagctccctggtgtctctcgctggt

SEQ ID NO: 3859778 - DNA, 25 bp, Homo sapien
ctgagctccctggtgtctctcgctg

SEQ ID NO: 3859779 - DNA, 25 bp, Homo sapien
tctacacactacagctattgttagg

SEQ ID NO: 3859780 - DNA, 25 bp, Homo sapien
tccaacagcatattcggttgcatct

SEQ ID NO: 3859781 - DNA, 25 bp, Homo sapien
gttgcatcttctacacactacagct

SEQ ID NO: 3859782 - DNA, 25 bp, Homo sapien
tattcggttgcatcttctacacact

SEQ ID NO: 3859783 - DNA, 25 bp, Homo sapien
tgcctgacgggcttagtgctctcgc

SEQ ID NO: 3859784 - DNA, 25 bp, Homo sapien
tgcggctcgctctttgcctgacggg

SEQ ID NO: 3859785 - DNA, 25 bp, Homo sapien
ttagtgctctcgctctacgcgctgc

SEQ ID NO: 3859786 - DNA, 25 bp, Homo sapien
cctggagataatgggcagcacctgg

SEQ ID NO: 3859787 - DNA, 25 bp, Homo sapien
ccgccgtgacgtcgcgtgggcggca

SEQ ID NO: 3859788 - DNA, 25 bp, Homo sapien
gtcccagcggaagggctcgaacagt

SEQ ID NO: 3859789 - DNA, 25 bp, Homo sapien
ttgtagtttggtctgaggacgtgcc

SEQ ID NO: 3859790 - DNA, 25 bp, Homo sapien
agggctcgaacagtccactcgccag

SEQ ID NO: 3859791 - DNA, 25 bp, Homo sapien
gatgccccccatatggtagatgcca

SEQ ID NO: 3859792 - DNA, 25 bp, Homo sapien
ggtcacttggttcggcccggatgcc

SEQ ID NO: 3859793 - DNA, 25 bp, Homo sapien
ctgtgatggaggctgcggacgtgcg

SEQ ID NO: 3859794 - DNA, 25 bp, Homo sapien
agcgaacgtgcgacaccagccctgg

SEQ ID NO: 3859795 - DNA, 25 bp, Homo sapien
gaagaggaagttgtaaggatccgaa

SEQ ID NO: 3859796 - DNA, 25 bp, Homo sapien
taaggatccgaatccacagaacccg

SEQ ID NO: 3859797 - DNA, 25 bp, Homo sapien
agaacccgcaccatctctccacctg

SEQ ID NO: 3859798 - DNA, 25 bp, Homo sapien
ccacctgtgcatcggtctccccaga

SEQ ID NO: 3859799 - DNA, 25 bp, Homo sapien
ctttcagacccggtggccgctagga

SEQ ID NO: 3859800 - DNA, 25 bp, Homo sapien
gggctcttctccgacttcagggacc

SEQ ID NO: 3859801 - DNA, 25 bp, Homo sapien
tgcgtcgaggatgctgacaggctca

SEQ ID NO: 3859802 - DNA, 25 bp, Homo sapien
tgaggatccgctaggactgaggacc

SEQ ID NO: 3859803 - DNA, 25 bp, Homo sapien
tgacggtcttggagcgctcccgagc

SEQ ID NO: 3859804 - DNA, 25 bp, Homo sapien
cacgtggtgtgtgtcggtggccgac

SEQ ID NO: 3859805 - DNA, 25 bp, Homo sapien
tcccgagccatctccacgtggtgtg

SEQ ID NO: 3859806 - DNA, 25 bp, Homo sapien
cgatggccgactggttgtaaaagga

SEQ ID NO: 3859807 - DNA, 25 bp, Homo sapien
tcatggtgggcgttaggcggactga

SEQ ID NO: 3859808 - DNA, 25 bp, Homo sapien
gtggctgccgtcctgagagcggcca

SEQ ID NO: 3859809 - DNA, 25 bp, Homo sapien
cctgagagcggccagcgtagagcat

SEQ ID NO: 3859810 - DNA, 25 bp, Homo sapien
agcggccagcgtagagcatcatggt

SEQ ID NO: 3859811 - DNA, 25 bp, Homo sapien
aaaggaaggcagcggaagcccttga

SEQ ID NO: 3859812 - DNA, 25 bp, Homo sapien
tcttgctgcaggtaccgagcacttt

SEQ ID NO: 3859813 - DNA, 25 bp, Homo sapien
gcggtgagcaatcctcactggaagt

SEQ ID NO: 3859814 - DNA, 25 bp, Homo sapien
tggaagttcttgctgcaggtaccga

SEQ ID NO: 3859815 - DNA, 25 bp, Homo sapien
ctggaaggcacggatatatagctca

SEQ ID NO: 3859816 - DNA, 25 bp, Homo sapien
gcttctggaaggcacggatatatag

SEQ ID NO: 3859817 - DNA, 25 bp, Homo sapien
ggaaggcacggatatatagctcatg

SEQ ID NO: 3859818 - DNA, 25 bp, Homo sapien
ttctggaaggcacggatatatagct

SEQ ID NO: 3859819 - DNA, 25 bp, Homo sapien
caagagggtcaccacatccttgtgg

SEQ ID NO: 3859820 - DNA, 25 bp, Homo sapien
ctctatgtgcttccggctctcacgt

SEQ ID NO: 3859821 - DNA, 25 bp, Homo sapien
agctggcagtactgggcctcgtccg

SEQ ID NO: 3859822 - DNA, 25 bp, Homo sapien
gctgtcgcaccagctggcagtactg

SEQ ID NO: 3859823 - DNA, 25 bp, Homo sapien
agcaggcccggcctctcctttgctg

SEQ ID NO: 3859824 - DNA, 25 bp, Homo sapien
aggcccggcctctcctttgctgccc

SEQ ID NO: 3859825 - DNA, 25 bp, Homo sapien
ccagcaggcccggcctctcctttgc

SEQ ID NO: 3859826 - DNA, 25 bp, Homo sapien
ccccagcaggcccggcctctccttt

SEQ ID NO: 3859827 - DNA, 25 bp, Homo sapien
gatgcgtggccaacatgcggattcc

SEQ ID NO: 3859828 - DNA, 25 bp, Homo sapien
gcctcgaagtcagcgtcttgtccaa

SEQ ID NO: 3859829 - DNA, 25 bp, Homo sapien
tgcggattccaagcctcgaagtcag

SEQ ID NO: 3859830 - DNA, 25 bp, Homo sapien
caagaagtagcggacgagcttttca

SEQ ID NO: 3859831 - DNA, 25 bp, Homo sapien
ccaggcccttgacccggatccccag

SEQ ID NO: 3859832 - DNA, 25 bp, Homo sapien
ggcaacttcggaactgccccaaagc

SEQ ID NO: 3859833 - DNA, 25 bp, Homo sapien
tctcacttaatgttcccaggtgggt

SEQ ID NO: 3859834 - DNA, 25 bp, Homo sapien
tcctctgtctcacttaatgttccca

SEQ ID NO: 3859835 - DNA, 25 bp, Homo sapien
agtacagatgatgccgacaaagtca

SEQ ID NO: 3859836 - DNA, 25 bp, Homo sapien
gacgagtacagatgatgccgacaaa

SEQ ID NO: 3859837 - DNA, 25 bp, Homo sapien
tgagagacgagtacagatgatgccg

SEQ ID NO: 3859838 - DNA, 25 bp, Homo sapien
tctttggtgagagacgagtacagat

SEQ ID NO: 3859839 - DNA, 25 bp, Homo sapien
tcatgccccgggcaagggctcagac

SEQ ID NO: 3859840 - DNA, 25 bp, Homo sapien
gggcagcccctgtgacaaagaatta

SEQ ID NO: 3859841 - DNA, 25 bp, Homo sapien
atctggctggaaatgtcaatagtgc

SEQ ID NO: 3859842 - DNA, 25 bp, Homo sapien
ttcctaacgtgcacggggcagcccc

SEQ ID NO: 3859843 - DNA, 25 bp, Homo sapien
ggacacggggcgcattgccatactt

SEQ ID NO: 3859844 - DNA, 25 bp, Homo sapien
gggcgcattgccatacttgtgctca

SEQ ID NO: 3859845 - DNA, 25 bp, Homo sapien
gccatacttgtgctcacacaggcgt

SEQ ID NO: 3859846 - DNA, 25 bp, Homo sapien
cattgccatacttgtgctcacacag

SEQ ID NO: 3859847 - DNA, 25 bp, Homo sapien
agctccggcaggatgtagtccagtg

SEQ ID NO: 3859848 - DNA, 25 bp, Homo sapien
agtccagtggcatagggatgaaggg

SEQ ID NO: 3859849 - DNA, 25 bp, Homo sapien
ggatgaaggggaaccgggcagccac

SEQ ID NO: 3859850 - DNA, 25 bp, Homo sapien
ctccggcaggatgtagtccagtggc

SEQ ID NO: 3859851 - DNA, 25 bp, Homo sapien
tgatcagatcgacatcattgttggc

SEQ ID NO: 3859852 - DNA, 25 bp, Homo sapien
ctgatgatcagatcgacatcattgt

SEQ ID NO: 3859853 - DNA, 25 bp, Homo sapien
gatcagatcgacatcattgttggcg

SEQ ID NO: 3859854 - DNA, 25 bp, Homo sapien
gatgatcagatcgacatcattgttg

SEQ ID NO: 3859855 - DNA, 25 bp, Homo sapien
atgggtcctgactgggcgccactat

SEQ ID NO: 3859856 - DNA, 25 bp, Homo sapien
catgacccggtccagatctttgtga

SEQ ID NO: 3859857 - DNA, 25 bp, Homo sapien
cagtagtgaagtggtagtccatgac

SEQ ID NO: 3859858 - DNA, 25 bp, Homo sapien
cactatgcatgtccagatggccaaa

SEQ ID NO: 3859859 - DNA, 25 bp, Homo sapien
gaggcttgagtctcctggggtcccc

SEQ ID NO: 3859860 - DNA, 25 bp, Homo sapien
tcagaggcttgagtctcctggggtc

SEQ ID NO: 3859861 - DNA, 25 bp, Homo sapien
ggcttcagaggcttgagtctcctgg

SEQ ID NO: 3859862 - DNA, 25 bp, Homo sapien
ggaggcttcagaggcttgagtctcc

SEQ ID NO: 3859863 - DNA, 25 bp, Homo sapien
gtactccgcgtaggcccgtgacgtg

SEQ ID NO: 3859864 - DNA, 25 bp, Homo sapien
gaggtactccgcgtaggcccgtgac

SEQ ID NO: 3859865 - DNA, 25 bp, Homo sapien
tgacgtgggcaacccgaagccaaag

SEQ ID NO: 3859866 - DNA, 25 bp, Homo sapien
ccgtgacgtgggcaacccgaagcca

SEQ ID NO: 3859867 - DNA, 25 bp, Homo sapien
tcccggccatcgatgtggcggagcc

SEQ ID NO: 3859868 - DNA, 25 bp, Homo sapien
ggaagctttcctcccggccatcgat

SEQ ID NO: 3859869 - DNA, 25 bp, Homo sapien
cgcaggtagacgtccgtgccaatgc

SEQ ID NO: 3859870 - DNA, 25 bp, Homo sapien
gagccgcaggtagacgtccgtgcca

SEQ ID NO: 3859871 - DNA, 25 bp, Homo sapien
ccatgtaagtccatctgtctgggtc

SEQ ID NO: 3859872 - DNA, 25 bp, Homo sapien
tggaggcgaggaggcaatggaccct

SEQ ID NO: 3859873 - DNA, 25 bp, Homo sapien
caatggaccctgttgaggcagggca

SEQ ID NO: 3859874 - DNA, 25 bp, Homo sapien
gcccagctccatgtaagtccatctg

SEQ ID NO: 3859875 - DNA, 25 bp, Homo sapien
gaatgacggaactggtgctggaggc

SEQ ID NO: 3859876 - DNA, 25 bp, Homo sapien
aaatgtgaactttaataacaggtca

SEQ ID NO: 3859877 - DNA, 25 bp, Homo sapien
atgtgaactttaataacaggtcaga

SEQ ID NO: 3859878 - DNA, 25 bp, Homo sapien
aatgtgaactttaataacaggtcag

SEQ ID NO: 3859879 - DNA, 25 bp, Homo sapien
caaaatgtgaactttaataacaggt

SEQ ID NO: 3859880 - DNA, 25 bp, Homo sapien
tctgggacccggaaacatttgttca

SEQ ID NO: 3859881 - DNA, 25 bp, Homo sapien
gtcaaaactgatgcccgaagctggg

SEQ ID NO: 3859882 - DNA, 25 bp, Homo sapien
caggtaagagactgggacacgaacc

SEQ ID NO: 3859883 - DNA, 25 bp, Homo sapien
caaacatgcaacagacttgggaccc

SEQ ID NO: 3859884 - DNA, 25 bp, Homo sapien
cccgccgcaaccgccgcagcagctc

SEQ ID NO: 3859885 - DNA, 25 bp, Homo sapien
ccgcagcagctccctgtgccgccat

SEQ ID NO: 3859886 - DNA, 25 bp, Homo sapien
gcgacccctgaagtccccgccgcaa

SEQ ID NO: 3859887 - DNA, 25 bp, Homo sapien
gctcgccctcccccgcgacccctga

SEQ ID NO: 3859888 - DNA, 25 bp, Homo sapien
gatggggcggtcccctcagcggccg

SEQ ID NO: 3859889 - DNA, 25 bp, Homo sapien
cggggatggggcggtcccctcagcg

SEQ ID NO: 3859890 - DNA, 25 bp, Homo sapien
tggggcggtcccctcagcggccgca

SEQ ID NO: 3859891 - DNA, 25 bp, Homo sapien
gggatggggcggtcccctcagcggc

SEQ ID NO: 3859892 - DNA, 25 bp, Homo sapien
aggtgctatccggtcgccggcacag

SEQ ID NO: 3859893 - DNA, 25 bp, Homo sapien
gtgctatccggtcgccggcacaggt

SEQ ID NO: 3859894 - DNA, 25 bp, Homo sapien
gccaggtgctatccggtcgccggca

SEQ ID NO: 3859895 - DNA, 25 bp, Homo sapien
caggtgctatccggtcgccggcaca

SEQ ID NO: 3859896 - DNA, 25 bp, Homo sapien
cctatgctgtgttgttgccgggtac

SEQ ID NO: 3859897 - DNA, 25 bp, Homo sapien
tccaaaatttttagcagcgcacctg

SEQ ID NO: 3859898 - DNA, 25 bp, Homo sapien
tgagtaaggcaaccactacgtgtct

SEQ ID NO: 3859899 - DNA, 25 bp, Homo sapien
tgatgaatcacaagaagtgctgccc

SEQ ID NO: 3859900 - DNA, 25 bp, Homo sapien
ggccctcctggtcgttcactcgaga

SEQ ID NO: 3859901 - DNA, 25 bp, Homo sapien
tgtacatagaattcctctcggccct

SEQ ID NO: 3859902 - DNA, 25 bp, Homo sapien
tcgttcactcgagactggatcactt

SEQ ID NO: 3859903 - DNA, 25 bp, Homo sapien
gcccacgtagtgtacatagaattcc

SEQ ID NO: 3859904 - DNA, 25 bp, Homo sapien
agccaactccctgcacccacgccca

SEQ ID NO: 3859905 - DNA, 25 bp, Homo sapien
acgcccagatgtgccaagccactca

SEQ ID NO: 3859906 - DNA, 25 bp, Homo sapien
tgcacccacgcccagatgtgccaag

SEQ ID NO: 3859907 - DNA, 25 bp, Homo sapien
tatgggccataagagtgctgccagg

SEQ ID NO: 3859908 - DNA, 25 bp, Homo sapien
gcgagtgatcttgcgctcaggctgc

SEQ ID NO: 3859909 - DNA, 25 bp, Homo sapien
ggttcttgtctacccactcgtccag

SEQ ID NO: 3859910 - DNA, 25 bp, Homo sapien
gagctcgctcaggtacttctctgag

SEQ ID NO: 3859911 - DNA, 25 bp, Homo sapien
gatctcatcatgcttgcgcttttgg

SEQ ID NO: 3859912 - DNA, 25 bp, Homo sapien
tgctcaccggctaacaagtgtttgg

SEQ ID NO: 3859913 - DNA, 25 bp, Homo sapien
gaagtaggtaaagtccctgacacac

SEQ ID NO: 3859914 - DNA, 25 bp, Homo sapien
caaaagaggctaccagtgccggagg

SEQ ID NO: 3859915 - DNA, 25 bp, Homo sapien
tactaagacacagctactaggagac

SEQ ID NO: 3859916 - DNA, 25 bp, Homo sapien
gattcggcagtttagaccttgagga

SEQ ID NO: 3859917 - DNA, 25 bp, Homo sapien
tgggcttgcccactaactcatgtac

SEQ ID NO: 3859918 - DNA, 25 bp, Homo sapien
caccacagtaggaagtacacttggc

SEQ ID NO: 3859919 - DNA, 25 bp, Homo sapien
tacaataggaagttcgattcggcag

SEQ ID NO: 3859920 - DNA, 25 bp, Homo sapien
taacccaagagctcgccactgtact

SEQ ID NO: 3859921 - DNA, 25 bp, Homo sapien
gtaacccaagagctcgccactgtac

SEQ ID NO: 3859922 - DNA, 25 bp, Homo sapien
tgctggttgccaactcagaggtatg

SEQ ID NO: 3859923 - DNA, 25 bp, Homo sapien
tatactcagctaaacgtggtggctc

SEQ ID NO: 3859924 - DNA, 25 bp, Homo sapien
taattaggctctgaagaaccttgct

SEQ ID NO: 3859925 - DNA, 25 bp, Homo sapien
taaagtagccacttgtcacataggg

SEQ ID NO: 3859926 - DNA, 25 bp, Homo sapien
gaggcacaaagaggtgaggtcactt

SEQ ID NO: 3859927 - DNA, 25 bp, Homo sapien
gcctttgaaataagagtgctcattg

SEQ ID NO: 3859928 - DNA, 25 bp, Homo sapien
gcccctggtctgtccaattctgaac

SEQ ID NO: 3859929 - DNA, 25 bp, Homo sapien
tgtccctgttgtatgagagaaaact

SEQ ID NO: 3859930 - DNA, 25 bp, Homo sapien
caatggcaaaatctcacgtcactgc

SEQ ID NO: 3859931 - DNA, 25 bp, Homo sapien
caaatgatccaatcatctcagcttc

SEQ ID NO: 3859932 - DNA, 25 bp, Homo sapien
tgacctcgtggtctgcctgcgcctg

SEQ ID NO: 3859933 - DNA, 25 bp, Homo sapien
tcgtggtctgcctgcgcctggcctc

SEQ ID NO: 3859934 - DNA, 25 bp, Homo sapien
agacggtccatgacctacaccaggg

SEQ ID NO: 3859935 - DNA, 25 bp, Homo sapien
ggaggaacccagtacagcctgacaa

SEQ ID NO: 3859936 - DNA, 25 bp, Homo sapien
ttcccaagttcagcgagaagtggtc

SEQ ID NO: 3859937 - DNA, 25 bp, Homo sapien
gaaggagccagtgctttacccagaa

SEQ ID NO: 3859938 - DNA, 25 bp, Homo sapien
tgccagcagaaaacacttcctcagc

SEQ ID NO: 3859939 - DNA, 25 bp, Homo sapien
actgccagcagaaaacacttcctca

SEQ ID NO: 3859940 - DNA, 25 bp, Homo sapien
ctggagaatgcccttccttctctca

SEQ ID NO: 3859941 - DNA, 25 bp, Homo sapien
tctcactgccagcagaaaacacttc

SEQ ID NO: 3859942 - DNA, 25 bp, Homo sapien
tccaggcccagcgtaagaactgtta

SEQ ID NO: 3859943 - DNA, 25 bp, Homo sapien
cagggacagcggactcaagatgtgc

SEQ ID NO: 3859944 - DNA, 25 bp, Homo sapien
ctcggcctggccaagtcctaataca

SEQ ID NO: 3859945 - DNA, 25 bp, Homo sapien
aacagaagtggtgaccaggctgtcc

SEQ ID NO: 3859946 - DNA, 25 bp, Homo sapien
tggtggggtccatctctgcataagt

SEQ ID NO: 3859947 - DNA, 25 bp, Homo sapien
ctgtggtggggtccatctctgcata

SEQ ID NO: 3859948 - DNA, 25 bp, Homo sapien
cgcctcatgctccttctccaaggct

SEQ ID NO: 3859949 - DNA, 25 bp, Homo sapien
cctcatgctccttctccaaggctgc

SEQ ID NO: 3859950 - DNA, 25 bp, Homo sapien
tagttcccgatgtggatcttgtcca

SEQ ID NO: 3859951 - DNA, 25 bp, Homo sapien
caggcatcaatttcgtagttcccga

SEQ ID NO: 3859952 - DNA, 25 bp, Homo sapien
tacttgaggcagtactcgcagagcc

SEQ ID NO: 3859953 - DNA, 25 bp, Homo sapien
caagtggaagcggtagctcttctca

SEQ ID NO: 3859954 - DNA, 25 bp, Homo sapien
tcttgcggtagatctctttcccggg

SEQ ID NO: 3859955 - DNA, 25 bp, Homo sapien
acttcgtacacggagatgttgctct

SEQ ID NO: 3859956 - DNA, 25 bp, Homo sapien
gatgttgctcttgcggtagatctct

SEQ ID NO: 3859957 - DNA, 25 bp, Homo sapien
tttgccatcaacttcgtacacggag

SEQ ID NO: 3859958 - DNA, 25 bp, Homo sapien
gccagcagacacaggttctgacagt

SEQ ID NO: 3859959 - DNA, 25 bp, Homo sapien
tccacgtcaaagtacagtgtcttat

SEQ ID NO: 3859960 - DNA, 25 bp, Homo sapien
tcaggatgtaaaagacgaacggctc

SEQ ID NO: 3859961 - DNA, 25 bp, Homo sapien
agaagtagccaacaatgtgggcccc

SEQ ID NO: 3859962 - DNA, 25 bp, Homo sapien
agcgatgaggaacttcccgtagccg

SEQ ID NO: 3859963 - DNA, 25 bp, Homo sapien
ggtaggggggcaaggtcaggatgca

SEQ ID NO: 3859964 - DNA, 25 bp, Homo sapien
cttcccgtagccgcggcgttggtag

SEQ ID NO: 3859965 - DNA, 25 bp, Homo sapien
cacattgtttccatccggggactcc

SEQ ID NO: 3859966 - DNA, 25 bp, Homo sapien
gatggacagtgtgccccggaagtcc

SEQ ID NO: 3859967 - DNA, 25 bp, Homo sapien
tagctgcggtagctgagcttgccca

SEQ ID NO: 3859968 - DNA, 25 bp, Homo sapien
cggaagtcccgcaggatctctagca

SEQ ID NO: 3859969 - DNA, 25 bp, Homo sapien
atctctagcagcacccaggaccagt

SEQ ID NO: 3859970 - DNA, 25 bp, Homo sapien
aatgccagacctggtgcccttgtgg

SEQ ID NO: 3859971 - DNA, 25 bp, Homo sapien
tgaggaagcaggatcgtggcccatc

SEQ ID NO: 3859972 - DNA, 25 bp, Homo sapien
aggatcgtggcccatctcagggcaa

SEQ ID NO: 3859973 - DNA, 25 bp, Homo sapien
gatgagagcaaatgccagacctggt

SEQ ID NO: 3859974 - DNA, 25 bp, Homo sapien
tgacacagatcacgtgctggccctt

SEQ ID NO: 3859975 - DNA, 25 bp, Homo sapien
tacttgaccatattgagggattgca

SEQ ID NO: 3859976 - DNA, 25 bp, Homo sapien
ccaccagcttgggtgtgacacagat

SEQ ID NO: 3859977 - DNA, 25 bp, Homo sapien
cattttgggtgatactggtcatctg

SEQ ID NO: 3859978 - DNA, 25 bp, Homo sapien
gtgatgggtggtttcttatactggg

SEQ ID NO: 3859979 - DNA, 25 bp, Homo sapien
ctgtgatgggtggtttcttatactg

SEQ ID NO: 3859980 - DNA, 25 bp, Homo sapien
tgtgatgggtggtttcttatactgg

SEQ ID NO: 3859981 - DNA, 25 bp, Homo sapien
atgtgacagcaataaggaggccttg

SEQ ID NO: 3859982 - DNA, 25 bp, Homo sapien
ggaggccttgactcctaccagtcca

SEQ ID NO: 3859983 - DNA, 25 bp, Homo sapien
tcctaccagtccatatactgacact

SEQ ID NO: 3859984 - DNA, 25 bp, Homo sapien
tgtgacagcaataaggaggccttga

SEQ ID NO: 3859985 - DNA, 25 bp, Homo sapien
tcctctgggctcaggccagtttcac

SEQ ID NO: 3859986 - DNA, 25 bp, Homo sapien
cctccaggtgagaacaaaagggcag

SEQ ID NO: 3859987 - DNA, 25 bp, Homo sapien
gggagctggtctgactggtttggga

SEQ ID NO: 3859988 - DNA, 25 bp, Homo sapien
agcccaggaatgagaggcctgcccc

SEQ ID NO: 3859989 - DNA, 25 bp, Homo sapien
gagagcttgacttgcttgtgcttgg

SEQ ID NO: 3859990 - DNA, 25 bp, Homo sapien
tcacttcttggagagcttgacttgc

SEQ ID NO: 3859991 - DNA, 25 bp, Homo sapien
tggggggtgcccacttgaggcagac

SEQ ID NO: 3859992 - DNA, 25 bp, Homo sapien
cttggagagcttgacttgcttgtgc

SEQ ID NO: 3859993 - DNA, 25 bp, Homo sapien
ggaggctcaggtccgacagcagggg

SEQ ID NO: 3859994 - DNA, 25 bp, Homo sapien
tgacaaaacaggtctatacatattt

SEQ ID NO: 3859995 - DNA, 25 bp, Homo sapien
caaaacaggtctatacatatttaca

SEQ ID NO: 3859996 - DNA, 25 bp, Homo sapien
aaaacaggtctatacatatttacag

SEQ ID NO: 3859997 - DNA, 25 bp, Homo sapien
gaaatgaagaacatccgctcttggc

SEQ ID NO: 3859998 - DNA, 25 bp, Homo sapien
aagtgaaatgaagaacatccgctct

SEQ ID NO: 3859999 - DNA, 25 bp, Homo sapien
gtgaaatgaagaacatccgctcttg

SEQ ID NO: 3860000 - DNA, 25 bp, Homo sapien
aatgaagaacatccgctcttggcct

SEQ ID NO: 3860001 - DNA, 25 bp, Homo sapien
aatcttgcccactggccgctgagcg

SEQ ID NO: 3860002 - DNA, 25 bp, Homo sapien
tggactccggaggactgagccccca

SEQ ID NO: 3860003 - DNA, 25 bp, Homo sapien
aactgggctggcgcttggatctggg

SEQ ID NO: 3860004 - DNA, 25 bp, Homo sapien
tcgaggacaggaaaggccccaatct

SEQ ID NO: 3860005 - DNA, 25 bp, Homo sapien
ctcctgggacccttggctatgaaaa

SEQ ID NO: 3860006 - DNA, 25 bp, Homo sapien
catcacactcaaggacaggagcctg

SEQ ID NO: 3860007 - DNA, 25 bp, Homo sapien
ttactgcctgtagcaatggccagag

SEQ ID NO: 3860008 - DNA, 25 bp, Homo sapien
tacttccaggatggatgcatcacac

SEQ ID NO: 3860009 - DNA, 25 bp, Homo sapien
gtgcagtcgccggtcagtggccctg

SEQ ID NO: 3860010 - DNA, 25 bp, Homo sapien
caggtggcagcagtgcagtcgccgg

SEQ ID NO: 3860011 - DNA, 25 bp, Homo sapien
gcatcacctatgaaggcgtccatgt

SEQ ID NO: 3860012 - DNA, 25 bp, Homo sapien
tgtgtgtggtggctctctcgtgtct

SEQ ID NO: 3860013 - DNA, 25 bp, Homo sapien
accccaaggcttcctaccttgcgtg

SEQ ID NO: 3860014 - DNA, 25 bp, Homo sapien
tctatcttggattactccggtcggg

SEQ ID NO: 3860015 - DNA, 25 bp, Homo sapien
tgcgtgcctggagtctgccccaggg

SEQ ID NO: 3860016 - DNA, 25 bp, Homo sapien
tctgggtcctgccttcgacaccacc

SEQ ID NO: 3860017 - DNA, 25 bp, Homo sapien
ggctgctagttgcaatcaagggcat

SEQ ID NO: 3860018 - DNA, 25 bp, Homo sapien
tggctgctagttgcaatcaagggca

SEQ ID NO: 3860019 - DNA, 25 bp, Homo sapien
cttggctgctagttgcaatcaaggg

SEQ ID NO: 3860020 - DNA, 25 bp, Homo sapien
ttggctgctagttgcaatcaagggc

SEQ ID NO: 3860021 - DNA, 25 bp, Homo sapien
cgggctgtgagcagaaagaccttga

SEQ ID NO: 3860022 - DNA, 25 bp, Homo sapien
gcatccttttgtcgggctgtgagca

SEQ ID NO: 3860023 - DNA, 25 bp, Homo sapien
tgtgagcagaaagaccttgatttcc

SEQ ID NO: 3860024 - DNA, 25 bp, Homo sapien
agatttggcatccttttgtcgggct

SEQ ID NO: 3860025 - DNA, 25 bp, Homo sapien
ctgctgcatcgaactttaaacttca

SEQ ID NO: 3860026 - DNA, 25 bp, Homo sapien
tgctgcatcgaactttaaacttcac

SEQ ID NO: 3860027 - DNA, 25 bp, Homo sapien
tggcccacaaaggccttagagagcc

SEQ ID NO: 3860028 - DNA, 25 bp, Homo sapien
ctggcccacaaaggccttagagagc

SEQ ID NO: 3860029 - DNA, 25 bp, Homo sapien
tgcagtccaccaggaaggaactctt

SEQ ID NO: 3860030 - DNA, 25 bp, Homo sapien
gctgcagtccaccaggaaggaactc

SEQ ID NO: 3860031 - DNA, 25 bp, Homo sapien
gttggagctggctttgctgcagtcc

SEQ ID NO: 3860032 - DNA, 25 bp, Homo sapien
ttgctgcagtccaccaggaaggaac

SEQ ID NO: 3860033 - DNA, 25 bp, Homo sapien
tggagaccttctcgcaggcggtcgt

SEQ ID NO: 3860034 - DNA, 25 bp, Homo sapien
catggagaccttctcgcaggcggtc

SEQ ID NO: 3860035 - DNA, 25 bp, Homo sapien
aggcggtcgtgggcccatgtaccct

SEQ ID NO: 3860036 - DNA, 25 bp, Homo sapien
ggtcgtgggcccatgtaccctgatc

SEQ ID NO: 3860037 - DNA, 25 bp, Homo sapien
ggctgccagggatgtgttcctcccc

SEQ ID NO: 3860038 - DNA, 25 bp, Homo sapien
gggctgccagggatgtgttcctccc

SEQ ID NO: 3860039 - DNA, 25 bp, Homo sapien
taaggcactgtgacatgaaaagggc

SEQ ID NO: 3860040 - DNA, 25 bp, Homo sapien
gcactgtgacatgaaaagggctgcc

SEQ ID NO: 3860041 - DNA, 25 bp, Homo sapien
tcttgaggaaggtgctgagtctcgt

SEQ ID NO: 3860042 - DNA, 25 bp, Homo sapien
caggaaatcttgaggaaggtgctga

SEQ ID NO: 3860043 - DNA, 25 bp, Homo sapien
cccaggaaatcttgaggaaggtgct

SEQ ID NO: 3860044 - DNA, 25 bp, Homo sapien
gaaatcttgaggaaggtgctgagtc

SEQ ID NO: 3860045 - DNA, 25 bp, Homo sapien
aagtgggggtagaattacagtgagg

SEQ ID NO: 3860046 - DNA, 25 bp, Homo sapien
taagtgggggtagaattacagtgag

SEQ ID NO: 3860047 - DNA, 25 bp, Homo sapien
ctaagtgggggtagaattacagtga

SEQ ID NO: 3860048 - DNA, 25 bp, Homo sapien
tagttgtagggccttgcctcgttga

SEQ ID NO: 3860049 - DNA, 25 bp, Homo sapien
gtagttgtagggccttgcctcgttg

SEQ ID NO: 3860050 - DNA, 25 bp, Homo sapien
agttgtagggccttgcctcgttgat

SEQ ID NO: 3860051 - DNA, 25 bp, Homo sapien
tttcagcgggatttcagaaggtcct

SEQ ID NO: 3860052 - DNA, 25 bp, Homo sapien
tcagcgggatttcagaaggtccttt

SEQ ID NO: 3860053 - DNA, 25 bp, Homo sapien
ctttcagcgggatttcagaaggtcc

SEQ ID NO: 3860054 - DNA, 25 bp, Homo sapien
agcgggatttcagaaggtcctttga

SEQ ID NO: 3860055 - DNA, 25 bp, Homo sapien
cgtcgtctttcagggttgccttgcc

SEQ ID NO: 3860056 - DNA, 25 bp, Homo sapien
gaggttgacttcgtcgtctttcagg

SEQ ID NO: 3860057 - DNA, 25 bp, Homo sapien
tgccttgcctttcggcctttctggg

SEQ ID NO: 3860058 - DNA, 25 bp, Homo sapien
agcctccctcgtcggcagcacactg

SEQ ID NO: 3860059 - DNA, 25 bp, Homo sapien
acaggcaagcaagcaacgaagttcc

SEQ ID NO: 3860060 - DNA, 25 bp, Homo sapien
gaagttccaacaccgctgagtaccg

SEQ ID NO: 3860061 - DNA, 25 bp, Homo sapien
taccgacgcctggaggactgagcag

SEQ ID NO: 3860062 - DNA, 25 bp, Homo sapien
gctgagtaccgacgcctggaggact

SEQ ID NO: 3860063 - DNA, 25 bp, Homo sapien
aaattccttaactcaagcactgatg

SEQ ID NO: 3860064 - DNA, 25 bp, Homo sapien
gatgaataaaaaggaccacgtaggc

SEQ ID NO: 3860065 - DNA, 25 bp, Homo sapien
gctgccactctgaaagagttgaatt

SEQ ID NO: 3860066 - DNA, 25 bp, Homo sapien
tacaatcacattatcttcagctgcc

SEQ ID NO: 3860067 - DNA, 25 bp, Homo sapien
ctttgggttgcttgttgggtataat

SEQ ID NO: 3860068 - DNA, 25 bp, Homo sapien
tggctctggccataagaagaatagc

SEQ ID NO: 3860069 - DNA, 25 bp, Homo sapien
cactgtaactctgctgtccgtaggg

SEQ ID NO: 3860070 - DNA, 25 bp, Homo sapien
ggccatagcctgaagtgtccgtgga

SEQ ID NO: 3860071 - DNA, 25 bp, Homo sapien
gaagaatagctgctctggccatagc

SEQ ID NO: 3860072 - DNA, 25 bp, Homo sapien
tacactgtttcacggaaaagaaata

SEQ ID NO: 3860073 - DNA, 25 bp, Homo sapien
gccacaatgccctgtaaaggactca

SEQ ID NO: 3860074 - DNA, 25 bp, Homo sapien
gaggtgacccgctgagaaagactca

SEQ ID NO: 3860075 - DNA, 25 bp, Homo sapien
gctgctcaggtttaagaaaagcaac

SEQ ID NO: 3860076 - DNA, 25 bp, Homo sapien
tcataggcaaagatagttaccctcc

SEQ ID NO: 3860077 - DNA, 25 bp, Homo sapien
ccaggataagaaaaagggagtcaca

SEQ ID NO: 3860078 - DNA, 25 bp, Homo sapien
tatactcataaagccagcctctcag

SEQ ID NO: 3860079 - DNA, 25 bp, Homo sapien
aggcccaaggatccctgttaacagc

SEQ ID NO: 3860080 - DNA, 25 bp, Homo sapien
gtaggaggactgctgcccgtaagac

SEQ ID NO: 3860081 - DNA, 25 bp, Homo sapien
tctggctactgccatagccgccagt

SEQ ID NO: 3860082 - DNA, 25 bp, Homo sapien
tggggagttgactgagttccatagc

SEQ ID NO: 3860083 - DNA, 25 bp, Homo sapien
taagacgattgggagctctggctac

SEQ ID NO: 3860084 - DNA, 25 bp, Homo sapien
gctgctgtccaccatagctaggctg

SEQ ID NO: 3860085 - DNA, 25 bp, Homo sapien
gtccaccatagctaggctgctggct

SEQ ID NO: 3860086 - DNA, 25 bp, Homo sapien
cctgagggggattatagctttgctg

SEQ ID NO: 3860087 - DNA, 25 bp, Homo sapien
tccatagccctgagggggattatag

SEQ ID NO: 3860088 - DNA, 25 bp, Homo sapien
tccaccaccactgctgctgttgtac

SEQ ID NO: 3860089 - DNA, 25 bp, Homo sapien
cctccaccaccactgctgctgttgt

SEQ ID NO: 3860090 - DNA, 25 bp, Homo sapien
cacctccaccaccactgctgctgtt

SEQ ID NO: 3860091 - DNA, 25 bp, Homo sapien
ctccacctccaccaccactgctgct

SEQ ID NO: 3860092 - DNA, 25 bp, Homo sapien
tggaggattgatcttggccatagtt

SEQ ID NO: 3860093 - DNA, 25 bp, Homo sapien
ggaggattgatcttggccatagtta

SEQ ID NO: 3860094 - DNA, 25 bp, Homo sapien
gaggattgatcttggccatagttac

SEQ ID NO: 3860095 - DNA, 25 bp, Homo sapien
ggtcttgattgccataaccgccacc

SEQ ID NO: 3860096 - DNA, 25 bp, Homo sapien
tccacggtcctgctgtccatagcca

SEQ ID NO: 3860097 - DNA, 25 bp, Homo sapien
acgacctctgggttcatagccacca

SEQ ID NO: 3860098 - DNA, 25 bp, Homo sapien
ttgattgccataaccgccaccactg

SEQ ID NO: 3860099 - DNA, 25 bp, Homo sapien
tcaggctcccaagttctcacaaaaa

SEQ ID NO: 3860100 - DNA, 25 bp, Homo sapien
caaagatactccctggctcatgaga

SEQ ID NO: 3860101 - DNA, 25 bp, Homo sapien
ccaggagtgggatcatcggtttccc

SEQ ID NO: 3860102 - DNA, 25 bp, Homo sapien
tcacagatccctagacaacaagaat

SEQ ID NO: 3860103 - DNA, 25 bp, Homo sapien
aattagtgcaaatcaagctcgtgga

SEQ ID NO: 3860104 - DNA, 25 bp, Homo sapien
tatagaaaacgggaagagtagccaa

SEQ ID NO: 3860105 - DNA, 25 bp, Homo sapien
taccaactccctagaggacacatgg

SEQ ID NO: 3860106 - DNA, 25 bp, Homo sapien
cagtggaacaaataggtgggagacc

SEQ ID NO: 3860107 - DNA, 25 bp, Homo sapien
gacctttgagcatgtcacacacacg

SEQ ID NO: 3860108 - DNA, 25 bp, Homo sapien
ccttggtcgttcttccgatggagca

SEQ ID NO: 3860109 - DNA, 25 bp, Homo sapien
cacacacgtgtgcaatttctcagac

SEQ ID NO: 3860110 - DNA, 25 bp, Homo sapien
tctacactgcgagaagagcggagta

SEQ ID NO: 3860111 - DNA, 25 bp, Homo sapien
tattgaagccaccacggtcacttcc

SEQ ID NO: 3860112 - DNA, 25 bp, Homo sapien
aatttattgaagccaccacggtcac

SEQ ID NO: 3860113 - DNA, 25 bp, Homo sapien
tttattgaagccaccacggtcactt

SEQ ID NO: 3860114 - DNA, 25 bp, Homo sapien
attgaagccaccacggtcacttccg

SEQ ID NO: 3860115 - DNA, 25 bp, Homo sapien
gcaatgttacatccctcttccagaa

SEQ ID NO: 3860116 - DNA, 25 bp, Homo sapien
ggtcgcctgcccagaggagaaaatt

SEQ ID NO: 3860117 - DNA, 25 bp, Homo sapien
gactattgagtcttacccctacctg

SEQ ID NO: 3860118 - DNA, 25 bp, Homo sapien
tttttaagcatgtcccagggaacag

SEQ ID NO: 3860119 - DNA, 25 bp, Homo sapien
catgacgtgatccttggtcccgagg

SEQ ID NO: 3860120 - DNA, 25 bp, Homo sapien
tgacgtgatccttggtcccgagggc

SEQ ID NO: 3860121 - DNA, 25 bp, Homo sapien
cggagtcatgacgtgatccttggtc

SEQ ID NO: 3860122 - DNA, 25 bp, Homo sapien
agtcatgacgtgatccttggtcccg

SEQ ID NO: 3860123 - DNA, 25 bp, Homo sapien
cacccagtatacagtatggaaacca

SEQ ID NO: 3860124 - DNA, 25 bp, Homo sapien
gccagccatgctgataaatttcaga

SEQ ID NO: 3860125 - DNA, 25 bp, Homo sapien
tttgagtccctatatgccagccatg

SEQ ID NO: 3860126 - DNA, 25 bp, Homo sapien
taaagcacctagtatccatcaagca

SEQ ID NO: 3860127 - DNA, 25 bp, Homo sapien
gactcaattgtaacattctcaccca

SEQ ID NO: 3860128 - DNA, 25 bp, Homo sapien
cagccacagactcaattgtaacatt

SEQ ID NO: 3860129 - DNA, 25 bp, Homo sapien
aattgtaacattctcacccaggcct

SEQ ID NO: 3860130 - DNA, 25 bp, Homo sapien
taataataccaatctgcttgaagta

SEQ ID NO: 3860131 - DNA, 25 bp, Homo sapien
aacactgacagaaagctcccactcc

SEQ ID NO: 3860132 - DNA, 25 bp, Homo sapien
actgacagaaagctcccactcctct

SEQ ID NO: 3860133 - DNA, 25 bp, Homo sapien
tgacagaaagctcccactcctctcc

SEQ ID NO: 3860134 - DNA, 25 bp, Homo sapien
acactgacagaaagctcccactcct

SEQ ID NO: 3860135 - DNA, 25 bp, Homo sapien
tcaacaaattaagctggcaacaacc

SEQ ID NO: 3860136 - DNA, 25 bp, Homo sapien
tactatagagtacaaatctcaagag

SEQ ID NO: 3860137 - DNA, 25 bp, Homo sapien
tagggtactctgataagttatactt

SEQ ID NO: 3860138 - DNA, 25 bp, Homo sapien
gacttgtttttactgctggcaacca

SEQ ID NO: 3860139 - DNA, 25 bp, Homo sapien
catcaattttaaaggctacagtact

SEQ ID NO: 3860140 - DNA, 25 bp, Homo sapien
tcaattttaaaggctacagtactcc

SEQ ID NO: 3860141 - DNA, 25 bp, Homo sapien
acatcaattttaaaggctacagtac

SEQ ID NO: 3860142 - DNA, 25 bp, Homo sapien
atcaattttaaaggctacagtactc

SEQ ID NO: 3860143 - DNA, 25 bp, Homo sapien
tcaaaagagaccgttgcctctccct

SEQ ID NO: 3860144 - DNA, 25 bp, Homo sapien
caatagctgctttagctgaaggtgg

SEQ ID NO: 3860145 - DNA, 25 bp, Homo sapien
atgggctgtcccgttttcttgtttg

SEQ ID NO: 3860146 - DNA, 25 bp, Homo sapien
ctgtgtacaaattaatcatgggctg

SEQ ID NO: 3860147 - DNA, 25 bp, Homo sapien
aatgagaccttgataggatttccgg

SEQ ID NO: 3860148 - DNA, 25 bp, Homo sapien
cccggcgagtagcaaatgagacctt

SEQ ID NO: 3860149 - DNA, 25 bp, Homo sapien
ccccgattaaagtctgcccggcgag

SEQ ID NO: 3860150 - DNA, 25 bp, Homo sapien
ccttgataggatttccggagaattc

SEQ ID NO: 3860151 - DNA, 25 bp, Homo sapien
ccctctgcaccactagcaggtagct

SEQ ID NO: 3860152 - DNA, 25 bp, Homo sapien
tgcaccactagcaggtagctcctca

SEQ ID NO: 3860153 - DNA, 25 bp, Homo sapien
tctgcaccactagcaggtagctcct

SEQ ID NO: 3860154 - DNA, 25 bp, Homo sapien
cctctgcaccactagcaggtagctc

SEQ ID NO: 3860155 - DNA, 25 bp, Homo sapien
gatagaccaagtatgggtctgctcc

SEQ ID NO: 3860156 - DNA, 25 bp, Homo sapien
ctaatgcagatagaccaagtatggg

SEQ ID NO: 3860157 - DNA, 25 bp, Homo sapien
gaccaagtatgggtctgctccctct

SEQ ID NO: 3860158 - DNA, 25 bp, Homo sapien
gcagatagaccaagtatgggtctgc

SEQ ID NO: 3860159 - DNA, 25 bp, Homo sapien
tccatagcctccacggcccatgggt

SEQ ID NO: 3860160 - DNA, 25 bp, Homo sapien
ctccatagcctccacggcccatggg

SEQ ID NO: 3860161 - DNA, 25 bp, Homo sapien
gacacttccagtcaccagctcgctg

SEQ ID NO: 3860162 - DNA, 25 bp, Homo sapien
cacatacctcagtaccaatatatca

SEQ ID NO: 3860163 - DNA, 25 bp, Homo sapien
cacgcacatacctcagtaccaatat

SEQ ID NO: 3860164 - DNA, 25 bp, Homo sapien
aaaacacgcacatacctcagtacca

SEQ ID NO: 3860165 - DNA, 25 bp, Homo sapien
cgcacatacctcagtaccaatatat

SEQ ID NO: 3860166 - DNA, 25 bp, Homo sapien
tctgaccccaacagtgtggccttga

SEQ ID NO: 3860167 - DNA, 25 bp, Homo sapien
taagcttttggctaaatctgacccc

SEQ ID NO: 3860168 - DNA, 25 bp, Homo sapien
ctaggtaagcttttggctaaatctg

SEQ ID NO: 3860169 - DNA, 25 bp, Homo sapien
tggctaaatctgaccccaacagtgt

SEQ ID NO: 3860170 - DNA, 25 bp, Homo sapien
ggcaagacctagaactaggaagaaa

SEQ ID NO: 3860171 - DNA, 25 bp, Homo sapien
gacaaaacggcttgcttctcagagt

SEQ ID NO: 3860172 - DNA, 25 bp, Homo sapien
gaaactacggtgactttagagatac

SEQ ID NO: 3860173 - DNA, 25 bp, Homo sapien
cagtattactgaacccaatccatta

SEQ ID NO: 3860174 - DNA, 25 bp, Homo sapien
tggttgcattcattcctccaagaga

SEQ ID NO: 3860175 - DNA, 25 bp, Homo sapien
ctggttgcattcattcctccaagag

SEQ ID NO: 3860176 - DNA, 25 bp, Homo sapien
actggttgcattcattcctccaaga

SEQ ID NO: 3860177 - DNA, 25 bp, Homo sapien
cccctcctgggccatctggtttagg

SEQ ID NO: 3860178 - DNA, 25 bp, Homo sapien
tgggccatctggtttaggggcctta

SEQ ID NO: 3860179 - DNA, 25 bp, Homo sapien
ccatgtgagagccacctggtccccc

SEQ ID NO: 3860180 - DNA, 25 bp, Homo sapien
atgtgagagccacctggtccccctc

SEQ ID NO: 3860181 - DNA, 25 bp, Homo sapien
ccggtagccgcctcgatcatagcct

SEQ ID NO: 3860182 - DNA, 25 bp, Homo sapien
accacgacgatcatccccgtagtta

SEQ ID NO: 3860183 - DNA, 25 bp, Homo sapien
ctcctctgccaccacgacgatcatc

SEQ ID NO: 3860184 - DNA, 25 bp, Homo sapien
gcctcgatcatagcctcctctgcca

SEQ ID NO: 3860185 - DNA, 25 bp, Homo sapien
tcaagtgggtctacagattcactcc

SEQ ID NO: 3860186 - DNA, 25 bp, Homo sapien
taacccagcgagtatcttatctcaa

SEQ ID NO: 3860187 - DNA, 25 bp, Homo sapien
tccattatatttgagttaccagcct

SEQ ID NO: 3860188 - DNA, 25 bp, Homo sapien
caaaaccctgttatcctatggcctc

SEQ ID NO: 3860189 - DNA, 25 bp, Homo sapien
cctgcgatcctgtctgtgctcaccc

SEQ ID NO: 3860190 - DNA, 25 bp, Homo sapien
tccctgcgatcctgtctgtgctcac

SEQ ID NO: 3860191 - DNA, 25 bp, Homo sapien
tctccctgcgatcctgtctgtgctc

SEQ ID NO: 3860192 - DNA, 25 bp, Homo sapien
ctctccctgcgatcctgtctgtgct

SEQ ID NO: 3860193 - DNA, 25 bp, Homo sapien
atagttacaattacatagtccgaca

SEQ ID NO: 3860194 - DNA, 25 bp, Homo sapien
caattacatagtccgacacaaaaaa

SEQ ID NO: 3860195 - DNA, 25 bp, Homo sapien
ataacgagggtaacactgggtacag

SEQ ID NO: 3860196 - DNA, 25 bp, Homo sapien
gagggtaacactgggtacaggacaa

SEQ ID NO: 3860197 - DNA, 25 bp, Homo sapien
tgatcgggacatcgatcttccagga

SEQ ID NO: 3860198 - DNA, 25 bp, Homo sapien
ctgatcgggacatcgatcttccagg

SEQ ID NO: 3860199 - DNA, 25 bp, Homo sapien
tcgggacatcgatcttccaggaaag

SEQ ID NO: 3860200 - DNA, 25 bp, Homo sapien
gatcgggacatcgatcttccaggaa

SEQ ID NO: 3860201 - DNA, 25 bp, Homo sapien
cccgaacactgtattccagttcctg

SEQ ID NO: 3860202 - DNA, 25 bp, Homo sapien
atttggccttctccccgaacactgt

SEQ ID NO: 3860203 - DNA, 25 bp, Homo sapien
ggcagggtaatctgaacaggaaaac

SEQ ID NO: 3860204 - DNA, 25 bp, Homo sapien
ctgggcagggtaatctgaacaggaa

SEQ ID NO: 3860205 - DNA, 25 bp, Homo sapien
taagcgctctccaccatggtcaaat

SEQ ID NO: 3860206 - DNA, 25 bp, Homo sapien
tgaaagacccagagtggctaagcgc

SEQ ID NO: 3860207 - DNA, 25 bp, Homo sapien
tttgagcctcaccattaaaagggcc

SEQ ID NO: 3860208 - DNA, 25 bp, Homo sapien
tagctgggcaaatttaggccaacac

SEQ ID NO: 3860209 - DNA, 25 bp, Homo sapien
cgctgttcaccagggcagctaggaa

SEQ ID NO: 3860210 - DNA, 25 bp, Homo sapien
cagaccagtctccttatagcaggta

SEQ ID NO: 3860211 - DNA, 25 bp, Homo sapien
tagcaggtatctacccaagcgctgt

SEQ ID NO: 3860212 - DNA, 25 bp, Homo sapien
tctacccaagcgctgttcaccaggg

SEQ ID NO: 3860213 - DNA, 25 bp, Homo sapien
gctgtcttacaaaccaagttcgaaa

SEQ ID NO: 3860214 - DNA, 25 bp, Homo sapien
taagctatgcttgtgatggcagctg

SEQ ID NO: 3860215 - DNA, 25 bp, Homo sapien
cttgggttaatgttacgctctgtgt

SEQ ID NO: 3860216 - DNA, 25 bp, Homo sapien
agaggaaagcacttcccaattaggg

SEQ ID NO: 3860217 - DNA, 25 bp, Homo sapien
ccaagattcaaggatgcagcaactc

SEQ ID NO: 3860218 - DNA, 25 bp, Homo sapien
gagaacatacttgtggaacacttga

SEQ ID NO: 3860219 - DNA, 25 bp, Homo sapien
aggatggccagatgcagcggctcat

SEQ ID NO: 3860220 - DNA, 25 bp, Homo sapien
tgtgcctcaaatcacccaagattca

SEQ ID NO: 3860221 - DNA, 25 bp, Homo sapien
tgtactaagtcaaagcaatgcctgg

SEQ ID NO: 3860222 - DNA, 25 bp, Homo sapien
tgcttagagagcaccccaatgctgg

SEQ ID NO: 3860223 - DNA, 25 bp, Homo sapien
ggtaagccgaaaaacgtgccattgc

SEQ ID NO: 3860224 - DNA, 25 bp, Homo sapien
ttagaatcctgctaggcaaagcacc

SEQ ID NO: 3860225 - DNA, 25 bp, Homo sapien
ggacaaacagacctacagcacagct

SEQ ID NO: 3860226 - DNA, 25 bp, Homo sapien
taactgaaggctacatcaaggaagg

SEQ ID NO: 3860227 - DNA, 25 bp, Homo sapien
gaaaaaagctgaaagggctaactga

SEQ ID NO: 3860228 - DNA, 25 bp, Homo sapien
tgaaacccaggaaggcccggcacaa

SEQ ID NO: 3860229 - DNA, 25 bp, Homo sapien
taaaattttcatagccggacacagt

SEQ ID NO: 3860230 - DNA, 25 bp, Homo sapien
taattcctggtcaatctacccacca

SEQ ID NO: 3860231 - DNA, 25 bp, Homo sapien
taaaggtagatcagtgagtcaagtc

SEQ ID NO: 3860232 - DNA, 25 bp, Homo sapien
tctcacatgggctggaccctagacc

SEQ ID NO: 3860233 - DNA, 25 bp, Homo sapien
tcgataaatctagaagacattatgc

SEQ ID NO: 3860234 - DNA, 25 bp, Homo sapien
gactgcatgaacttatacacggaat

SEQ ID NO: 3860235 - DNA, 25 bp, Homo sapien
ccgttatttgtaacatgggtgaatc

SEQ ID NO: 3860236 - DNA, 25 bp, Homo sapien
tacacggaatctagaaagtcaaact

SEQ ID NO: 3860237 - DNA, 25 bp, Homo sapien
gcattaaccaccaacagaaagcagt

SEQ ID NO: 3860238 - DNA, 25 bp, Homo sapien
tgttcctgcctcaaagatactggga

SEQ ID NO: 3860239 - DNA, 25 bp, Homo sapien
aaacactttgtcgttggctccagag

SEQ ID NO: 3860240 - DNA, 25 bp, Homo sapien
tcttgccgctaacatgggtggccct

SEQ ID NO: 3860241 - DNA, 25 bp, Homo sapien
cctcatcccactgcatgtggggtcc

SEQ ID NO: 3860242 - DNA, 25 bp, Homo sapien
cctgcccctaggcttgcagaggaat

SEQ ID NO: 3860243 - DNA, 25 bp, Homo sapien
ctgcccctaggcttgcagaggaatt

SEQ ID NO: 3860244 - DNA, 25 bp, Homo sapien
tgcaggagatggccgggcagctgca

SEQ ID NO: 3860245 - DNA, 25 bp, Homo sapien
ctgcaggagatggccgggcagctgc

SEQ ID NO: 3860246 - DNA, 25 bp, Homo sapien
gcaggagatggccgggcagctgcag

SEQ ID NO: 3860247 - DNA, 25 bp, Homo sapien
aggagatggccgggcagctgcaggc

SEQ ID NO: 3860248 - DNA, 25 bp, Homo sapien
tctacgacatgtgggagaggatcct

SEQ ID NO: 3860249 - DNA, 25 bp, Homo sapien
aagcatctggcaaggtttcgggagc

SEQ ID NO: 3860250 - DNA, 25 bp, Homo sapien
tataagcaccggagggttatcccca

SEQ ID NO: 3860251 - DNA, 25 bp, Homo sapien
gaagcgccttttgctggagggcaac

SEQ ID NO: 3860252 - DNA, 25 bp, Homo sapien
tctggttggagatcttaggctgaaa

SEQ ID NO: 3860253 - DNA, 25 bp, Homo sapien
aagagtctcgaaggaggaccggtca

SEQ ID NO: 3860254 - DNA, 25 bp, Homo sapien
cagtggacaccacgcgtgatgggca

SEQ ID NO: 3860255 - DNA, 25 bp, Homo sapien
gggcacacagtgctcagcggaagac

SEQ ID NO: 3860256 - DNA, 25 bp, Homo sapien
aaactgtggccgcactcggctgtca

SEQ ID NO: 3860257 - DNA, 25 bp, Homo sapien
tgtcacgggcgcgtcgaacagctgc

SEQ ID NO: 3860258 - DNA, 25 bp, Homo sapien
tgctcgcagtagatgctcagcgggt

SEQ ID NO: 3860259 - DNA, 25 bp, Homo sapien
tgcgagccgagtgaggcgcacactc

SEQ ID NO: 3860260 - DNA, 25 bp, Homo sapien
accgaacagcccctccgaccacgat

SEQ ID NO: 3860261 - DNA, 25 bp, Homo sapien
agcgacctccccatcggccccgtgc

SEQ ID NO: 3860262 - DNA, 25 bp, Homo sapien
catcggccccgtgccaccgaacagc

SEQ ID NO: 3860263 - DNA, 25 bp, Homo sapien
tccgaccacgatgcgcgcggatccc

SEQ ID NO: 3860264 - DNA, 25 bp, Homo sapien
tgcttttgccacacggatgacacgc

SEQ ID NO: 3860265 - DNA, 25 bp, Homo sapien
tgcccgccggtagctatacgtgtgt

SEQ ID NO: 3860266 - DNA, 25 bp, Homo sapien
gatgacacgcaccagccagtgtgcg

SEQ ID NO: 3860267 - DNA, 25 bp, Homo sapien
cagtgtgcgttcgtctctatttgcc

SEQ ID NO: 3860268 - DNA, 25 bp, Homo sapien
ctcccatcctaaacctgccctctgt

SEQ ID NO: 3860269 - DNA, 25 bp, Homo sapien
tgtggctcaacctcaatgccagctc

SEQ ID NO: 3860270 - DNA, 25 bp, Homo sapien
tgccctctgtggctcaacctcaatg

SEQ ID NO: 3860271 - DNA, 25 bp, Homo sapien
cctaaacctgccctctgtggctcaa

SEQ ID NO: 3860272 - DNA, 25 bp, Homo sapien
accagctgatgctccagcacagcca

SEQ ID NO: 3860273 - DNA, 25 bp, Homo sapien
gccacactcttctccttgcgcatgc

SEQ ID NO: 3860274 - DNA, 25 bp, Homo sapien
cacctccaccagctgatgctccagc

SEQ ID NO: 3860275 - DNA, 25 bp, Homo sapien
ttgcgcatgcatgcctcctgcagct

SEQ ID NO: 3860276 - DNA, 25 bp, Homo sapien
acgctctgcctcgcggtccaaggag

SEQ ID NO: 3860277 - DNA, 25 bp, Homo sapien
caggaacacccgcatcttgcccagc

SEQ ID NO: 3860278 - DNA, 25 bp, Homo sapien
tcagtctgcggcttgtccgccacct

SEQ ID NO: 3860279 - DNA, 25 bp, Homo sapien
ctccaggtaagagttcaggctcccc

SEQ ID NO: 3860280 - DNA, 25 bp, Homo sapien
agtgtgcacacacctactaccgcag

SEQ ID NO: 3860281 - DNA, 25 bp, Homo sapien
ttcgccagtgtgcacacacctacta

SEQ ID NO: 3860282 - DNA, 25 bp, Homo sapien
gccagtgtgcacacacctactaccg

SEQ ID NO: 3860283 - DNA, 25 bp, Homo sapien
cagtgtgcacacacctactaccgca

SEQ ID NO: 3860284 - DNA, 25 bp, Homo sapien
cagctggatgtccagacgggcgggt

SEQ ID NO: 3860285 - DNA, 25 bp, Homo sapien
gcagctggatgtccagacgggcggg

SEQ ID NO: 3860286 - DNA, 25 bp, Homo sapien
gcatcagagcccggaacatcttcct

SEQ ID NO: 3860287 - DNA, 25 bp, Homo sapien
atcagagcccggaacatcttcctcc

SEQ ID NO: 3860288 - DNA, 25 bp, Homo sapien
catcagagcccggaacatcttcctc

SEQ ID NO: 3860289 - DNA, 25 bp, Homo sapien
aggactaaattgatacaaggcatgg

SEQ ID NO: 3860290 - DNA, 25 bp, Homo sapien
ctggagcgcaggtgcaacctaggct

SEQ ID NO: 3860291 - DNA, 25 bp, Homo sapien
ctggccaacaggactaaattgatac

SEQ ID NO: 3860292 - DNA, 25 bp, Homo sapien
caacaggactaaattgatacaaggc

SEQ ID NO: 3860293 - DNA, 25 bp, Homo sapien
gccttgtcgaactggcgcgggtcct

SEQ ID NO: 3860294 - DNA, 25 bp, Homo sapien
gtgcgcagagctcgggtcaaaggtc

SEQ ID NO: 3860295 - DNA, 25 bp, Homo sapien
cccagtagtgctcgccctcggagag

SEQ ID NO: 3860296 - DNA, 25 bp, Homo sapien
ccctcggagagctgctggtgcgcca

SEQ ID NO: 3860297 - DNA, 25 bp, Homo sapien
agcgcggcttgtcgccaacatccac

SEQ ID NO: 3860298 - DNA, 25 bp, Homo sapien
ccagcgcggcttgtcgccaacatcc

SEQ ID NO: 3860299 - DNA, 25 bp, Homo sapien
cgcccagcgcggcttgtcgccaaca

SEQ ID NO: 3860300 - DNA, 25 bp, Homo sapien
ccagcgcccagcgcggcttgtcgcc

SEQ ID NO: 3860301 - DNA, 25 bp, Homo sapien
gcaccgcgtgcaggcgcccgcggcg

SEQ ID NO: 3860302 - DNA, 25 bp, Homo sapien
ctgcgagggcaccgcgtgcaggcgc

SEQ ID NO: 3860303 - DNA, 25 bp, Homo sapien
ggcggggggcctcggccgcgatcac

SEQ ID NO: 3860304 - DNA, 25 bp, Homo sapien
cgagggcaccgcgtgcaggcgcccg

SEQ ID NO: 3860305 - DNA, 25 bp, Homo sapien
tcgccgaagctcaggtaaaggccaa

SEQ ID NO: 3860306 - DNA, 25 bp, Homo sapien
catcgtagaaggagaggacgccgtc

SEQ ID NO: 3860307 - DNA, 25 bp, Homo sapien
tcgtgccagcacacgtcgaagaagg

SEQ ID NO: 3860308 - DNA, 25 bp, Homo sapien
gctcgtggaaggcaaaaagcggcac

SEQ ID NO: 3860309 - DNA, 25 bp, Homo sapien
caggcctcggcgccttcgggaccca

SEQ ID NO: 3860310 - DNA, 25 bp, Homo sapien
tcaggcctcggcgccttcgggaccc

SEQ ID NO: 3860311 - DNA, 25 bp, Homo sapien
aggagacctaagcttcaacccaggc

SEQ ID NO: 3860312 - DNA, 25 bp, Homo sapien
cccacgcttgtcagtattctgggag

SEQ ID NO: 3860313 - DNA, 25 bp, Homo sapien
cgcttgtcagtattctgggagatcc

SEQ ID NO: 3860314 - DNA, 25 bp, Homo sapien
ttctcccgtcagacccgaccaagga

SEQ ID NO: 3860315 - DNA, 25 bp, Homo sapien
agaaaacctccgcaatgggctgccg

SEQ ID NO: 3860316 - DNA, 25 bp, Homo sapien
gaaatgccctgtgcgctaaaaccaa

SEQ ID NO: 3860317 - DNA, 25 bp, Homo sapien
cactgacagtgaagagcccaatggg

SEQ ID NO: 3860318 - DNA, 25 bp, Homo sapien
gcccaatgggttgtgcactaggtca

SEQ ID NO: 3860319 - DNA, 25 bp, Homo sapien
tgttgacccaaagaatccatgctca

SEQ ID NO: 3860320 - DNA, 25 bp, Homo sapien
agagtgtgttgccatcactcaggca

SEQ ID NO: 3860321 - DNA, 25 bp, Homo sapien
gacccaaagaatccatgctcaggac

SEQ ID NO: 3860322 - DNA, 25 bp, Homo sapien
agcttgcagtgccaagagagtgtgt

SEQ ID NO: 3860323 - DNA, 25 bp, Homo sapien
gaaagctgcctgtcgctcagtggga

SEQ ID NO: 3860324 - DNA, 25 bp, Homo sapien
tctggcaggccaaggaaattgttct

SEQ ID NO: 3860325 - DNA, 25 bp, Homo sapien
tgtccatgcagcaggccaaatgtct

SEQ ID NO: 3860326 - DNA, 25 bp, Homo sapien
cacaaagagcatggttggccacagg

SEQ ID NO: 3860327 - DNA, 25 bp, Homo sapien
ctgtatttgttagcaggtaaagaag

SEQ ID NO: 3860328 - DNA, 25 bp, Homo sapien
ggcaccactgaggaaccacaaggaa

SEQ ID NO: 3860329 - DNA, 25 bp, Homo sapien
tggaaggaggtgaaccaggggttgc

SEQ ID NO: 3860330 - DNA, 25 bp, Homo sapien
ggttgcaggcaccactgaggaacca

SEQ ID NO: 3860331 - DNA, 25 bp, Homo sapien
ggggttgcaggcaccactgaggaac

SEQ ID NO: 3860332 - DNA, 25 bp, Homo sapien
gttaacagaaggactctgagagcca

SEQ ID NO: 3860333 - DNA, 25 bp, Homo sapien
ttaacagaaggactctgagagccat

SEQ ID NO: 3860334 - DNA, 25 bp, Homo sapien
tgttaacagaaggactctgagagcc

SEQ ID NO: 3860335 - DNA, 25 bp, Homo sapien
gttgaacccatgacataaggtcaag

SEQ ID NO: 3860336 - DNA, 25 bp, Homo sapien
ccaagttgaacccatgacataaggt

SEQ ID NO: 3860337 - DNA, 25 bp, Homo sapien
gtgtccaagttgaacccatgacata

SEQ ID NO: 3860338 - DNA, 25 bp, Homo sapien
gtccaagttgaacccatgacataag

SEQ ID NO: 3860339 - DNA, 25 bp, Homo sapien
gcccgaagccccttgcgttctcttg

SEQ ID NO: 3860340 - DNA, 25 bp, Homo sapien
ccgaagccccttgcgttctcttgga

SEQ ID NO: 3860341 - DNA, 25 bp, Homo sapien
ctgcccgaagccccttgcgttctct

SEQ ID NO: 3860342 - DNA, 25 bp, Homo sapien
gaagccccttgcgttctcttggaag

SEQ ID NO: 3860343 - DNA, 25 bp, Homo sapien
caggcggatgggctcgcatgagcct

SEQ ID NO: 3860344 - DNA, 25 bp, Homo sapien
tagtcgcactggtagaggctgcccc

SEQ ID NO: 3860345 - DNA, 25 bp, Homo sapien
catgagcctgtgctgtagtcgcact

SEQ ID NO: 3860346 - DNA, 25 bp, Homo sapien
tggttggcagccactatctcctggg

SEQ ID NO: 3860347 - DNA, 25 bp, Homo sapien
ggtcacctccatgcgggagacaagg

SEQ ID NO: 3860348 - DNA, 25 bp, Homo sapien
caggggtcacctccatgcgggagac

SEQ ID NO: 3860349 - DNA, 25 bp, Homo sapien
tcacctccatgcgggagacaaggag

SEQ ID NO: 3860350 - DNA, 25 bp, Homo sapien
ggggtcacctccatgcgggagacaa

SEQ ID NO: 3860351 - DNA, 25 bp, Homo sapien
gacatgttcacggcctccacgggga

SEQ ID NO: 3860352 - DNA, 25 bp, Homo sapien
gggacatgttcacggcctccacggg

SEQ ID NO: 3860353 - DNA, 25 bp, Homo sapien
agggacatgttcacggcctccacgg

SEQ ID NO: 3860354 - DNA, 25 bp, Homo sapien
ggacatgttcacggcctccacgggg

SEQ ID NO: 3860355 - DNA, 25 bp, Homo sapien
cagcagctgaggggggctggtggtg

SEQ ID NO: 3860356 - DNA, 25 bp, Homo sapien
ctggtggtggctgccagggacaggc

SEQ ID NO: 3860357 - DNA, 25 bp, Homo sapien
ggtggtggctgccagggacaggccc

SEQ ID NO: 3860358 - DNA, 25 bp, Homo sapien
ctgaggggggctggtggtggctgcc

SEQ ID NO: 3860359 - DNA, 25 bp, Homo sapien
cgtaggttggatccaaacaggaagc

SEQ ID NO: 3860360 - DNA, 25 bp, Homo sapien
tttcacatacgtgttctcactgcaa

SEQ ID NO: 3860361 - DNA, 25 bp, Homo sapien
ggctgctgccgtaggttggatccaa

SEQ ID NO: 3860362 - DNA, 25 bp, Homo sapien
aagtctggtgcacggtgggaccaca

SEQ ID NO: 3860363 - DNA, 25 bp, Homo sapien
taccagagccatcaatcaagaaggc

SEQ ID NO: 3860364 - DNA, 25 bp, Homo sapien
cttcatccgccgaaagtcatgtggg

SEQ ID NO: 3860365 - DNA, 25 bp, Homo sapien
cacagttgagacaaactccttcatc

SEQ ID NO: 3860366 - DNA, 25 bp, Homo sapien
ggcaatgtcactatcctcttgagga

SEQ ID NO: 3860367 - DNA, 25 bp, Homo sapien
ttcaccagtgatcttgggttagggt

SEQ ID NO: 3860368 - DNA, 25 bp, Homo sapien
gcagctgcgttattggcttcaccag

SEQ ID NO: 3860369 - DNA, 25 bp, Homo sapien
atgcccgtggccgtgtgtgtccgcc

SEQ ID NO: 3860370 - DNA, 25 bp, Homo sapien
ggaattcttcagagtactgcatcaa

SEQ ID NO: 3860371 - DNA, 25 bp, Homo sapien
tccgttggtgatgttaaacagctct

SEQ ID NO: 3860372 - DNA, 25 bp, Homo sapien
caagggatcgccaaacttttctcca

SEQ ID NO: 3860373 - DNA, 25 bp, Homo sapien
gatgacatcctcatatcccaaggga

SEQ ID NO: 3860374 - DNA, 25 bp, Homo sapien
aaaggcattctttcgggctccgttg

SEQ ID NO: 3860375 - DNA, 25 bp, Homo sapien
cagaagcatcaacctgagagctgca

SEQ ID NO: 3860376 - DNA, 25 bp, Homo sapien
acggtgtatatgagctagcattagc

SEQ ID NO: 3860377 - DNA, 25 bp, Homo sapien
caacagatagctgatacggtgtata

SEQ ID NO: 3860378 - DNA, 25 bp, Homo sapien
ggaggatggatccacatagaaaccc

SEQ ID NO: 3860379 - DNA, 25 bp, Homo sapien
gcaaagatcttctcccgaagctggt

SEQ ID NO: 3860380 - DNA, 25 bp, Homo sapien
cacgtgatcacgaggcggcttggat

SEQ ID NO: 3860381 - DNA, 25 bp, Homo sapien
agctcttggcgggatttctcactgc

SEQ ID NO: 3860382 - DNA, 25 bp, Homo sapien
gatgcgatggtattaagctcttggc

SEQ ID NO: 3860383 - DNA, 25 bp, Homo sapien
atctcatgctcaaaggagctgctac

SEQ ID NO: 3860384 - DNA, 25 bp, Homo sapien
tctcatgctcaaaggagctgctact

SEQ ID NO: 3860385 - DNA, 25 bp, Homo sapien
ctcatgctcaaaggagctgctactt

SEQ ID NO: 3860386 - DNA, 25 bp, Homo sapien
gatggcagcgctgaagccttcctga

SEQ ID NO: 3860387 - DNA, 25 bp, Homo sapien
gtaagcatcattcatgtctgaatcc

SEQ ID NO: 3860388 - DNA, 25 bp, Homo sapien
gcatcattcatgtctgaatccactc

SEQ ID NO: 3860389 - DNA, 25 bp, Homo sapien
aagcatcattcatgtctgaatccac

SEQ ID NO: 3860390 - DNA, 25 bp, Homo sapien
taagcatcattcatgtctgaatcca

SEQ ID NO: 3860391 - DNA, 25 bp, Homo sapien
tgggtgcccttgacattagcgttgg

SEQ ID NO: 3860392 - DNA, 25 bp, Homo sapien
ttagcgttggactcccacatgccag

SEQ ID NO: 3860393 - DNA, 25 bp, Homo sapien
cacccggttccgtaagatgatggcg

SEQ ID NO: 3860394 - DNA, 25 bp, Homo sapien
taccaggccgatgtgctgatatcga

SEQ ID NO: 3860395 - DNA, 25 bp, Homo sapien
gctgcaccctgggtctggttaaaga

SEQ ID NO: 3860396 - DNA, 25 bp, Homo sapien
tccgttctgtttactggtgcatgca

SEQ ID NO: 3860397 - DNA, 25 bp, Homo sapien
gatcaactcatgacctaaccagtta

SEQ ID NO: 3860398 - DNA, 25 bp, Homo sapien
cccctcacgtggacctgtttagagt

SEQ ID NO: 3860399 - DNA, 25 bp, Homo sapien
aggaccaggtcggtgctgccgttgc

SEQ ID NO: 3860400 - DNA, 25 bp, Homo sapien
gaccaggtcggtgctgccgttgctg

SEQ ID NO: 3860401 - DNA, 25 bp, Homo sapien
accaggtcggtgctgccgttgctgt

SEQ ID NO: 3860402 - DNA, 25 bp, Homo sapien
tgaggaccaggtcggtgctgccgtt

SEQ ID NO: 3860403 - DNA, 25 bp, Homo sapien
ccctgctccccgtagagaacagcat

SEQ ID NO: 3860404 - DNA, 25 bp, Homo sapien
agggctgccccaaagcggccccagg

SEQ ID NO: 3860405 - DNA, 25 bp, Homo sapien
tggccctgctccccgtagagaacag

SEQ ID NO: 3860406 - DNA, 25 bp, Homo sapien
gctccccgtagagaacagcatcaca

SEQ ID NO: 3860407 - DNA, 25 bp, Homo sapien
taccagtccatccattgtgaggtcc

SEQ ID NO: 3860408 - DNA, 25 bp, Homo sapien
tgcccctgggctcctacagtcaggt

SEQ ID NO: 3860409 - DNA, 25 bp, Homo sapien
tacagtcaggtctaccagtccatcc

SEQ ID NO: 3860410 - DNA, 25 bp, Homo sapien
tccatccattgtgaggtcctggccc

SEQ ID NO: 3860411 - DNA, 25 bp, Homo sapien
tcaccacctgatcattacactcaaa

SEQ ID NO: 3860412 - DNA, 25 bp, Homo sapien
ttagccgatcccgtgtgctcttctg

SEQ ID NO: 3860413 - DNA, 25 bp, Homo sapien
gattgaactccatgattgccttgac

SEQ ID NO: 3860414 - DNA, 25 bp, Homo sapien
tgccttgactctcagtactggctgg

SEQ ID NO: 3860415 - DNA, 25 bp, Homo sapien
aagacggcgcgggaatgtgggcggc

SEQ ID NO: 3860416 - DNA, 25 bp, Homo sapien
ccagagccaggtcataagtcacaac

SEQ ID NO: 3860417 - DNA, 25 bp, Homo sapien
gcaactgtagtttcagggtctcaca

SEQ ID NO: 3860418 - DNA, 25 bp, Homo sapien
cagggtctcacaagtctgggtcagc

SEQ ID NO: 3860419 - DNA, 25 bp, Homo sapien
tgtgaagagtctctgagcatcctcc

SEQ ID NO: 3860420 - DNA, 25 bp, Homo sapien
ggctcactgggtcctcgatgcaatt

SEQ ID NO: 3860421 - DNA, 25 bp, Homo sapien
cagacaatggcgttcccaccagaga

SEQ ID NO: 3860422 - DNA, 25 bp, Homo sapien
ccagagagaagttcaggcgcagcac

SEQ ID NO: 3860423 - DNA, 25 bp, Homo sapien
gatgctgaggtcatcctggcagatg

SEQ ID NO: 3860424 - DNA, 25 bp, Homo sapien
atgctgaggtcatcctggcagatgt

SEQ ID NO: 3860425 - DNA, 25 bp, Homo sapien
agaaaagagcgggtcatggtacggg

SEQ ID NO: 3860426 - DNA, 25 bp, Homo sapien
aggagaaaagagcgggtcatggtac

SEQ ID NO: 3860427 - DNA, 25 bp, Homo sapien
aagagcgggtcatggtacgggtcct

SEQ ID NO: 3860428 - DNA, 25 bp, Homo sapien
agcgggtcatggtacgggtccttct

SEQ ID NO: 3860429 - DNA, 25 bp, Homo sapien
cagtcactgtcacgttgaactcccg

SEQ ID NO: 3860430 - DNA, 25 bp, Homo sapien
gaagaaggtgacctgtgtcctgtag

SEQ ID NO: 3860431 - DNA, 25 bp, Homo sapien
gagcgtggacaccttccggtaggac

SEQ ID NO: 3860432 - DNA, 25 bp, Homo sapien
gtcaagcgggaagaagaaggtgacc

SEQ ID NO: 3860433 - DNA, 25 bp, Homo sapien
acaggccaggcgccaggatcgctgt

SEQ ID NO: 3860434 - DNA, 25 bp, Homo sapien
gcgccaggatcgctgtgagcgctgg

SEQ ID NO: 3860435 - DNA, 25 bp, Homo sapien
gaagatggggtggtttatgctgcag

SEQ ID NO: 3860436 - DNA, 25 bp, Homo sapien
caaggccccagacacttcggtggag

SEQ ID NO: 3860437 - DNA, 25 bp, Homo sapien
tgtgccgggcttgaaatgtatgctt

SEQ ID NO: 3860438 - DNA, 25 bp, Homo sapien
gtgccgggcttgaaatgtatgcttt

SEQ ID NO: 3860439 - DNA, 25 bp, Homo sapien
ctgtgccgggcttgaaatgtatgct

SEQ ID NO: 3860440 - DNA, 25 bp, Homo sapien
gggaagccttagagtctacatcaaa

SEQ ID NO: 3860441 - DNA, 25 bp, Homo sapien
gccttgaggagcagtttgtttccaa

SEQ ID NO: 3860442 - DNA, 25 bp, Homo sapien
ggtcacattggccttgaggagcagt

SEQ ID NO: 3860443 - DNA, 25 bp, Homo sapien
ccttagagtctacatcaaacgtgat

SEQ ID NO: 3860444 - DNA, 25 bp, Homo sapien
gcagaagcctggtagcagagagcac

SEQ ID NO: 3860445 - DNA, 25 bp, Homo sapien
actaaattatcatctccgagagggc

SEQ ID NO: 3860446 - DNA, 25 bp, Homo sapien
ccgagagggcaggaaccactatcgt

SEQ ID NO: 3860447 - DNA, 25 bp, Homo sapien
tcagacgggcaactgcctgcagaag

SEQ ID NO: 3860448 - DNA, 25 bp, Homo sapien
agctccagccggctcttgagaactg

SEQ ID NO: 3860449 - DNA, 25 bp, Homo sapien
gccggctcttgagaactgacagtta

SEQ ID NO: 3860450 - DNA, 25 bp, Homo sapien
gaactgacagttagtctttgctcct

SEQ ID NO: 3860451 - DNA, 25 bp, Homo sapien
aagaaagagctccagccggctcttg

SEQ ID NO: 3860452 - DNA, 25 bp, Homo sapien
tgttggttctgggcatgttgttctc

SEQ ID NO: 3860453 - DNA, 25 bp, Homo sapien
ctccagttggaattcggttttgttg

SEQ ID NO: 3860454 - DNA, 25 bp, Homo sapien
tttgttggttctgggcatgttgttc

SEQ ID NO: 3860455 - DNA, 25 bp, Homo sapien
gttggttctgggcatgttgttctca

SEQ ID NO: 3860456 - DNA, 25 bp, Homo sapien
gtctcaggctaagtgtgtaaggagc

SEQ ID NO: 3860457 - DNA, 25 bp, Homo sapien
cacacagtgcgtgcccatttgggcc

SEQ ID NO: 3860458 - DNA, 25 bp, Homo sapien
tggacacacagtgcgtgcccatttg

SEQ ID NO: 3860459 - DNA, 25 bp, Homo sapien
tgtgtaaggagcgaacaggcacatg

SEQ ID NO: 3860460 - DNA, 25 bp, Homo sapien
gagatatttagtggagaccccatgg

SEQ ID NO: 3860461 - DNA, 25 bp, Homo sapien
gactggtattctctgaggccgtgaa

SEQ ID NO: 3860462 - DNA, 25 bp, Homo sapien
ctctgaggccgtgaagttgagatat

SEQ ID NO: 3860463 - DNA, 25 bp, Homo sapien
tgatgctgcatgacccgactggtat

SEQ ID NO: 3860464 - DNA, 25 bp, Homo sapien
tatgacagtctggttcagccggacg

SEQ ID NO: 3860465 - DNA, 25 bp, Homo sapien
cgggcaccaagaacaccaggctgat

SEQ ID NO: 3860466 - DNA, 25 bp, Homo sapien
atatgacagtctggttcagccggac

SEQ ID NO: 3860467 - DNA, 25 bp, Homo sapien
ggttcagccggacgggcaccaagaa

SEQ ID NO: 3860468 - DNA, 25 bp, Homo sapien
aggagtcaggccgagctccgctcac

SEQ ID NO: 3860469 - DNA, 25 bp, Homo sapien
ccgtgcaggagtcaggccgagctcc

SEQ ID NO: 3860470 - DNA, 25 bp, Homo sapien
ggcggagcggctctaaaacccaata

SEQ ID NO: 3860471 - DNA, 25 bp, Homo sapien
taaaacccaatagcattaacagagg

SEQ ID NO: 3860472 - DNA, 25 bp, Homo sapien
ccttggtgtggcacgtactcgagag

SEQ ID NO: 3860473 - DNA, 25 bp, Homo sapien
ccagaaagtcggagtgagagggcaa

SEQ ID NO: 3860474 - DNA, 25 bp, Homo sapien
ctcagccagaaagtcggagtgagag

SEQ ID NO: 3860475 - DNA, 25 bp, Homo sapien
ccgaagctcagccagaaagtcggag

SEQ ID NO: 3860476 - DNA, 25 bp, Homo sapien
ggattctctggcagacagcgatgga

SEQ ID NO: 3860477 - DNA, 25 bp, Homo sapien
tcaaacgagaggttgcctttgaggg

SEQ ID NO: 3860478 - DNA, 25 bp, Homo sapien
cttgatgtaccagtcaaacgagagg

SEQ ID NO: 3860479 - DNA, 25 bp, Homo sapien
ttctctggcagacagcgatggagca

SEQ ID NO: 3860480 - DNA, 25 bp, Homo sapien
ctgtgctcacgatcaggaggtggtt

SEQ ID NO: 3860481 - DNA, 25 bp, Homo sapien
ccggcagcagggtgaacacggaatc

SEQ ID NO: 3860482 - DNA, 25 bp, Homo sapien
tcacgatcaggaggtggttatgcga

SEQ ID NO: 3860483 - DNA, 25 bp, Homo sapien
gaatcgttaaacaagatctcagctg

SEQ ID NO: 3860484 - DNA, 25 bp, Homo sapien
cgaacggctccactttggtctccgt

SEQ ID NO: 3860485 - DNA, 25 bp, Homo sapien
gacctcgaacggctccactttggtc

SEQ ID NO: 3860486 - DNA, 25 bp, Homo sapien
gtacagcgcggcggtgatgagggcc

SEQ ID NO: 3860487 - DNA, 25 bp, Homo sapien
cttgtacagcgcggcggtgatgagg

SEQ ID NO: 3860488 - DNA, 25 bp, Homo sapien
gagggcgactcgttctcagcgcgcc

SEQ ID NO: 3860489 - DNA, 25 bp, Homo sapien
aacagaaactacaaggagggcgact

SEQ ID NO: 3860490 - DNA, 25 bp, Homo sapien
aaccgaggcacggagctgcagcgcg

SEQ ID NO: 3860491 - DNA, 25 bp, Homo sapien
tacaaggagggcgactcgttctcag

SEQ ID NO: 3860492 - DNA, 25 bp, Homo sapien
cccttcactcatcatgtccttgtat

SEQ ID NO: 3860493 - DNA, 25 bp, Homo sapien
atcatgtccttgtattgccgcttga

SEQ ID NO: 3860494 - DNA, 25 bp, Homo sapien
tgtccttgtattgccgcttgaagaa

SEQ ID NO: 3860495 - DNA, 25 bp, Homo sapien
cactcatcatgtccttgtattgccg

SEQ ID NO: 3860496 - DNA, 25 bp, Homo sapien
cacactcacacatgggcgtgcaagt

SEQ ID NO: 3860497 - DNA, 25 bp, Homo sapien
gagacatctgagtcacacacgtgag

SEQ ID NO: 3860498 - DNA, 25 bp, Homo sapien
gatacttcgctgtccgacgtgtcca

SEQ ID NO: 3860499 - DNA, 25 bp, Homo sapien
tgtcttcacccacaggattgaccgt

SEQ ID NO: 3860500 - DNA, 25 bp, Homo sapien
gtcttaatatgaaccgatgtctgag

SEQ ID NO: 3860501 - DNA, 25 bp, Homo sapien
cacaatcttgactacctttaaggag

SEQ ID NO: 3860502 - DNA, 25 bp, Homo sapien
tgcacatcgcctggaatctgtctga

SEQ ID NO: 3860503 - DNA, 25 bp, Homo sapien
cactgtacacttgaatgccttgtga

SEQ ID NO: 3860504 - DNA, 25 bp, Homo sapien
gacatatatttgatttattaactca

SEQ ID NO: 3860505 - DNA, 25 bp, Homo sapien
tatatttgatttattaactcagcat

SEQ ID NO: 3860506 - DNA, 25 bp, Homo sapien
catatatttgatttattaactcagc

SEQ ID NO: 3860507 - DNA, 25 bp, Homo sapien
atttgatttattaactcagcattga

SEQ ID NO: 3860508 - DNA, 25 bp, Homo sapien
ggtgaactcgaattggaagaaagcc

SEQ ID NO: 3860509 - DNA, 25 bp, Homo sapien
gacttccacggtgccccgggctcag

SEQ ID NO: 3860510 - DNA, 25 bp, Homo sapien
caaggtgaactcgaattggaagaaa

SEQ ID NO: 3860511 - DNA, 25 bp, Homo sapien
agccaaggtgaactcgaattggaag

SEQ ID NO: 3860512 - DNA, 25 bp, Homo sapien
acacacttccaagccgcgtgggtag

SEQ ID NO: 3860513 - DNA, 25 bp, Homo sapien
caagccgcgtgggtaggagagggcc

SEQ ID NO: 3860514 - DNA, 25 bp, Homo sapien
gacacacttccaagccgcgtgggta

SEQ ID NO: 3860515 - DNA, 25 bp, Homo sapien
acttccaagccgcgtgggtaggaga

SEQ ID NO: 3860516 - DNA, 25 bp, Homo sapien
ctcctgggccgttgcaggaagagct

SEQ ID NO: 3860517 - DNA, 25 bp, Homo sapien
gactagaaggtcagatgtggagctc

SEQ ID NO: 3860518 - DNA, 25 bp, Homo sapien
actagaaggtcagatgtggagctct

SEQ ID NO: 3860519 - DNA, 25 bp, Homo sapien
tgagctcctgggccgttgcaggaag

SEQ ID NO: 3860520 - DNA, 25 bp, Homo sapien
ctgtgaacaggaggagtgctgccct

SEQ ID NO: 3860521 - DNA, 25 bp, Homo sapien
aaatctcagaccctatgtgcctgcc

SEQ ID NO: 3860522 - DNA, 25 bp, Homo sapien
tgtccacagagcacaagttggcgca

SEQ ID NO: 3860523 - DNA, 25 bp, Homo sapien
gaaaacttgcggaccaaagcatcct

SEQ ID NO: 3860524 - DNA, 25 bp, Homo sapien
ctatgagagtgagtccaggaaaact

SEQ ID NO: 3860525 - DNA, 25 bp, Homo sapien
tctgcagagcagtacccaggctcta

SEQ ID NO: 3860526 - DNA, 25 bp, Homo sapien
cagagcagtacccaggctctaaaaa

SEQ ID NO: 3860527 - DNA, 25 bp, Homo sapien
aaggatctttccccaacgtgcacct

SEQ ID NO: 3860528 - DNA, 25 bp, Homo sapien
catccactatcgagttgcagttctc

SEQ ID NO: 3860529 - DNA, 25 bp, Homo sapien
tgggtcttctggacacccaactcat

SEQ ID NO: 3860530 - DNA, 25 bp, Homo sapien
gggtcttctggacacccaactcatc

SEQ ID NO: 3860531 - DNA, 25 bp, Homo sapien
cggccccagcgtcccaatctcccct

SEQ ID NO: 3860532 - DNA, 25 bp, Homo sapien
tccgagcctgatgcccggggtgcct

SEQ ID NO: 3860533 - DNA, 25 bp, Homo sapien
gctcctctgtgtccaagttgaaacc

SEQ ID NO: 3860534 - DNA, 25 bp, Homo sapien
aaacccagcgctgtccacacggaag

SEQ ID NO: 3860535 - DNA, 25 bp, Homo sapien
ctgtccacacggaaggctgtcagct

SEQ ID NO: 3860536 - DNA, 25 bp, Homo sapien
gagttggcatactggaccacgctgt

SEQ ID NO: 3860537 - DNA, 25 bp, Homo sapien
attagccagggcagtcgctacacca

SEQ ID NO: 3860538 - DNA, 25 bp, Homo sapien
cacaggctgtcgtgtggactaaatc

SEQ ID NO: 3860539 - DNA, 25 bp, Homo sapien
ggactaaatcagcatccacctgtga

SEQ ID NO: 3860540 - DNA, 25 bp, Homo sapien
atgttagctgtgagaccgtgcctgc

SEQ ID NO: 3860541 - DNA, 25 bp, Homo sapien
caggcaccagtgctgtagccacact

SEQ ID NO: 3860542 - DNA, 25 bp, Homo sapien
aggccacccgtttggttggcagctg

SEQ ID NO: 3860543 - DNA, 25 bp, Homo sapien
cctgcaggccgatgggctcacaggc

SEQ ID NO: 3860544 - DNA, 25 bp, Homo sapien
ctggtagaggccacccgtttggttg

SEQ ID NO: 3860545 - DNA, 25 bp, Homo sapien
aagcatatctgagggtgagggtctc

SEQ ID NO: 3860546 - DNA, 25 bp, Homo sapien
gaaagtgacactccggtgagtccac

SEQ ID NO: 3860547 - DNA, 25 bp, Homo sapien
tgaaggaagctgtcgggtcttgaca

SEQ ID NO: 3860548 - DNA, 25 bp, Homo sapien
acagagctgcgggagtgcgatgggc

SEQ ID NO: 3860549 - DNA, 25 bp, Homo sapien
catggtcactctcgggggtacagag

SEQ ID NO: 3860550 - DNA, 25 bp, Homo sapien
gacagatatgtgcatggtcactctc

SEQ ID NO: 3860551 - DNA, 25 bp, Homo sapien
agatatgtgcatggtcactctcggg

SEQ ID NO: 3860552 - DNA, 25 bp, Homo sapien
tgcatggtcactctcgggggtacag

SEQ ID NO: 3860553 - DNA, 25 bp, Homo sapien
tccgagacctcaaccagaacgtaag

SEQ ID NO: 3860554 - DNA, 25 bp, Homo sapien
gttctagaaatgcaggagcagttgc

SEQ ID NO: 3860555 - DNA, 25 bp, Homo sapien
aagagctagagcgaatattggtgta

SEQ ID NO: 3860556 - DNA, 25 bp, Homo sapien
tttggtacaggaaattaatagagct

SEQ ID NO: 3860557 - DNA, 25 bp, Homo sapien
ggcctggtccagttccgagacctca

SEQ ID NO: 3860558 - DNA, 25 bp, Homo sapien
gccctcctgcgccacccctgaaaca

SEQ ID NO: 3860559 - DNA, 25 bp, Homo sapien
tgctggaactgatagagtacactca

SEQ ID NO: 3860560 - DNA, 25 bp, Homo sapien
aggttgaactgagagaagtcactaa

SEQ ID NO: 3860561 - DNA, 25 bp, Homo sapien
tgtgcctggcgcagctcttcctgca

SEQ ID NO: 3860562 - DNA, 25 bp, Homo sapien
ctgaggaaaaacttgctggaactga

SEQ ID NO: 3860563 - DNA, 25 bp, Homo sapien
gaagtcactaagaacaaggagaaac

SEQ ID NO: 3860564 - DNA, 25 bp, Homo sapien
aagggctggtggtagacgccaggga

SEQ ID NO: 3860565 - DNA, 25 bp, Homo sapien
ggctggtggtagacgccagggacag

SEQ ID NO: 3860566 - DNA, 25 bp, Homo sapien
gggaagggctggtggtagacgccag

SEQ ID NO: 3860567 - DNA, 25 bp, Homo sapien
gaagggctggtggtagacgccaggg

SEQ ID NO: 3860568 - DNA, 25 bp, Homo sapien
gaggtacatgttcctcccgcactcg

SEQ ID NO: 3860569 - DNA, 25 bp, Homo sapien
gcagagtccggtgaggtacatgttc

SEQ ID NO: 3860570 - DNA, 25 bp, Homo sapien
gaggaagcagagtccggtgaggtac

SEQ ID NO: 3860571 - DNA, 25 bp, Homo sapien
ctcccgcactcgtggtgcacggtgg

SEQ ID NO: 3860572 - DNA, 25 bp, Homo sapien
gaaggcacaccctatttgcagccag

SEQ ID NO: 3860573 - DNA, 25 bp, Homo sapien
tgctagctgctgtgctaacccctgg

SEQ ID NO: 3860574 - DNA, 25 bp, Homo sapien
cagatgtcagtctcaccaaaggctt

SEQ ID NO: 3860575 - DNA, 25 bp, Homo sapien
catctgtcctgagaagagacgatct

SEQ ID NO: 3860576 - DNA, 25 bp, Homo sapien
cagcatagttagacctcacatctac

SEQ ID NO: 3860577 - DNA, 25 bp, Homo sapien
gcatagttagacctcacatctacta

SEQ ID NO: 3860578 - DNA, 25 bp, Homo sapien
agttagacctcacatctactaaaaa

SEQ ID NO: 3860579 - DNA, 25 bp, Homo sapien
catagttagacctcacatctactaa

SEQ ID NO: 3860580 - DNA, 25 bp, Homo sapien
gtggcaccggtcctccaagtgacac

SEQ ID NO: 3860581 - DNA, 25 bp, Homo sapien
agcccctagtctggcgatgggagtc

SEQ ID NO: 3860582 - DNA, 25 bp, Homo sapien
tggcctcctggccacaagagctcac

SEQ ID NO: 3860583 - DNA, 25 bp, Homo sapien
gaaggaggtggcaccggtcctccaa

SEQ ID NO: 3860584 - DNA, 25 bp, Homo sapien
tgagccatcgatcaggaacacaatg

SEQ ID NO: 3860585 - DNA, 25 bp, Homo sapien
caaagttgcgggaggagatgctgcc

SEQ ID NO: 3860586 - DNA, 25 bp, Homo sapien
cgaagttcatcatcgtggcaaagtt

SEQ ID NO: 3860587 - DNA, 25 bp, Homo sapien
gcttatcacagctctcacgaagttc

SEQ ID NO: 3860588 - DNA, 25 bp, Homo sapien
ctggtgaacagaagccaacaggctg

SEQ ID NO: 3860589 - DNA, 25 bp, Homo sapien
cctgaattcctcgaaagtgaagtgt

SEQ ID NO: 3860590 - DNA, 25 bp, Homo sapien
agtgaagtgtgtttggaatttgttg

SEQ ID NO: 3860591 - DNA, 25 bp, Homo sapien
tttgagctgcgcctgaattcctcga

SEQ ID NO: 3860592 - DNA, 25 bp, Homo sapien
acgacattttggatggcggtggccg

SEQ ID NO: 3860593 - DNA, 25 bp, Homo sapien
tggccgtgtatgtaaacccttgcag

SEQ ID NO: 3860594 - DNA, 25 bp, Homo sapien
cggtggccgtgtatgtaaacccttg

SEQ ID NO: 3860595 - DNA, 25 bp, Homo sapien
atggcggtggccgtgtatgtaaacc

SEQ ID NO: 3860596 - DNA, 25 bp, Homo sapien
catatgaggcatggaacaatcggtg

SEQ ID NO: 3860597 - DNA, 25 bp, Homo sapien
gggatgacatccttataatccaggc

SEQ ID NO: 3860598 - DNA, 25 bp, Homo sapien
cccaattgcatagcggatgatgcct

SEQ ID NO: 3860599 - DNA, 25 bp, Homo sapien
gacaatgagaattttggcggcatcc

SEQ ID NO: 3860600 - DNA, 25 bp, Homo sapien
acatacacagaaaggggagttgccc

SEQ ID NO: 3860601 - DNA, 25 bp, Homo sapien
gagaaacacgaagcccggacagcat

SEQ ID NO: 3860602 - DNA, 25 bp, Homo sapien
gatcaacatgatcacacccggtgga

SEQ ID NO: 3860603 - DNA, 25 bp, Homo sapien
ccccagaaaagatcaactcagtaaa

SEQ ID NO: 3860604 - DNA, 25 bp, Homo sapien
agaatttctgttttgaaaagctaat

SEQ ID NO: 3860605 - DNA, 25 bp, Homo sapien
atttctgttttgaaaagctaatcca

SEQ ID NO: 3860606 - DNA, 25 bp, Homo sapien
tccaagaatttctgttttgaaaagc

SEQ ID NO: 3860607 - DNA, 25 bp, Homo sapien
ttctgttttgaaaagctaatccaac

SEQ ID NO: 3860608 - DNA, 25 bp, Homo sapien
cctgggagggcttcgatgcaatgtc

SEQ ID NO: 3860609 - DNA, 25 bp, Homo sapien
gggcttcgatgcaatgtcatttaat

SEQ ID NO: 3860610 - DNA, 25 bp, Homo sapien
gggagggcttcgatgcaatgtcatt

SEQ ID NO: 3860611 - DNA, 25 bp, Homo sapien
taaatatgtgttcctgggagggctt

SEQ ID NO: 3860612 - DNA, 25 bp, Homo sapien
ggacagcgatggcagcaccgatctg

SEQ ID NO: 3860613 - DNA, 25 bp, Homo sapien
cagcaccgatctggtcctcatcagg

SEQ ID NO: 3860614 - DNA, 25 bp, Homo sapien
atgtggacagcgatggcagcaccga

SEQ ID NO: 3860615 - DNA, 25 bp, Homo sapien
gcgatggcagcaccgatctggtcct

SEQ ID NO: 3860616 - DNA, 25 bp, Homo sapien
tctccaattcgaaggagctactgct

SEQ ID NO: 3860617 - DNA, 25 bp, Homo sapien
aattcgaaggagctactgcttgtgg

SEQ ID NO: 3860618 - DNA, 25 bp, Homo sapien
gtgaacacagcgctgaagccctcct

SEQ ID NO: 3860619 - DNA, 25 bp, Homo sapien
tgtgccatctccaattcgaaggagc

SEQ ID NO: 3860620 - DNA, 25 bp, Homo sapien
gacatgttgatgaaggtagggctca

SEQ ID NO: 3860621 - DNA, 25 bp, Homo sapien
ggtaagagtccctcatgtccacatt

SEQ ID NO: 3860622 - DNA, 25 bp, Homo sapien
ctcctgagacatgttgatgaaggta

SEQ ID NO: 3860623 - DNA, 25 bp, Homo sapien
gtacaggaaggcacctccagaccag

SEQ ID NO: 3860624 - DNA, 25 bp, Homo sapien
ctttccagagggccagctcggtgga

SEQ ID NO: 3860625 - DNA, 25 bp, Homo sapien
aagatgacagccttcccggtgtgct

SEQ ID NO: 3860626 - DNA, 25 bp, Homo sapien
cagccttcccggtgtgctggtagcg

SEQ ID NO: 3860627 - DNA, 25 bp, Homo sapien
ggtgaagatgacagccttcccggtg

SEQ ID NO: 3860628 - DNA, 25 bp, Homo sapien
tgagtccccgtgacttcggccttca

SEQ ID NO: 3860629 - DNA, 25 bp, Homo sapien
agtccccgtgacttcggccttcatc

SEQ ID NO: 3860630 - DNA, 25 bp, Homo sapien
gagtccccgtgacttcggccttcat

SEQ ID NO: 3860631 - DNA, 25 bp, Homo sapien
ccccctcgggtctgctcgtagtaat

SEQ ID NO: 3860632 - DNA, 25 bp, Homo sapien
tgaggaccaggtcggtgctgccgtc

SEQ ID NO: 3860633 - DNA, 25 bp, Homo sapien
tgccgtcgctgtctacgtccacgga

SEQ ID NO: 3860634 - DNA, 25 bp, Homo sapien
tgtctacgtccacggagcagaggga

SEQ ID NO: 3860635 - DNA, 25 bp, Homo sapien
cccctgggcaagggacacacagaca

SEQ ID NO: 3860636 - DNA, 25 bp, Homo sapien
ccctgggcaagggacacacagacac

SEQ ID NO: 3860637 - DNA, 25 bp, Homo sapien
ccccctgggcaagggacacacagac

SEQ ID NO: 3860638 - DNA, 25 bp, Homo sapien
tgctccccgtagagaacagcatcac

SEQ ID NO: 3860639 - DNA, 25 bp, Homo sapien
ctgctccccgtagagaacagcatca

SEQ ID NO: 3860640 - DNA, 25 bp, Homo sapien
gctccccgtagagaacagcatcaca

SEQ ID NO: 3860641 - DNA, 25 bp, Homo sapien
gggccccgatgaccacgtctgtcag

SEQ ID NO: 3860642 - DNA, 25 bp, Homo sapien
gatgaccacgtctgtcagcttgtcc

SEQ ID NO: 3860643 - DNA, 25 bp, Homo sapien
agcactgtcagagccgccccaaagc

SEQ ID NO: 3860644 - DNA, 25 bp, Homo sapien
tgggtcccaagactccgtgaaacag

SEQ ID NO: 3860645 - DNA, 25 bp, Homo sapien
gggaataaaatcatgtagcatccag

SEQ ID NO: 3860646 - DNA, 25 bp, Homo sapien
cccttcgttctcagggaaccctgct

SEQ ID NO: 3860647 - DNA, 25 bp, Homo sapien
gaataaaatcatgtagcatccaggg

SEQ ID NO: 3860648 - DNA, 25 bp, Homo sapien
ataaaatcatgtagcatccagggag

SEQ ID NO: 3860649 - DNA, 25 bp, Homo sapien
tttttgacacgggattgtgctcttt

SEQ ID NO: 3860650 - DNA, 25 bp, Homo sapien
ttttgacacgggattgtgctctttc

SEQ ID NO: 3860651 - DNA, 25 bp, Homo sapien
actcagtcaagcatgctataaacag

SEQ ID NO: 3860652 - DNA, 25 bp, Homo sapien
ctcagtcaagcatgctataaacaga

SEQ ID NO: 3860653 - DNA, 25 bp, Homo sapien
tgagcggagattgcaccactgtgct

SEQ ID NO: 3860654 - DNA, 25 bp, Homo sapien
ctgcaatccaagctgctcaggaggc

SEQ ID NO: 3860655 - DNA, 25 bp, Homo sapien
tccagtctgggtgacagagcgagac

SEQ ID NO: 3860656 - DNA, 25 bp, Homo sapien
agtgagcggagattgcaccactgtg

SEQ ID NO: 3860657 - DNA, 25 bp, Homo sapien
ggccgtgggcaaggactcaatctgt

SEQ ID NO: 3860658 - DNA, 25 bp, Homo sapien
tgtcattcattcgatcagtctctag

SEQ ID NO: 3860659 - DNA, 25 bp, Homo sapien
ggtgtcctggtgacccgagtgtcat

SEQ ID NO: 3860660 - DNA, 25 bp, Homo sapien
gctcagagtttagccatgctcagga

SEQ ID NO: 3860661 - DNA, 25 bp, Homo sapien
gaggagagctgggagcccgcgatcc

SEQ ID NO: 3860662 - DNA, 25 bp, Homo sapien
tggaggagagctgggagcccgcgat

SEQ ID NO: 3860663 - DNA, 25 bp, Homo sapien
aggagagctgggagcccgcgatccg

SEQ ID NO: 3860664 - DNA, 25 bp, Homo sapien
ctggaggagagctgggagcccgcga

SEQ ID NO: 3860665 - DNA, 25 bp, Homo sapien
ccatcctgggtgaggtcttgacccc

SEQ ID NO: 3860666 - DNA, 25 bp, Homo sapien
cagtccatcctgggtgaggtcttga

SEQ ID NO: 3860667 - DNA, 25 bp, Homo sapien
tccatcctgggtgaggtcttgaccc

SEQ ID NO: 3860668 - DNA, 25 bp, Homo sapien
gtgaggtcttgacccccgctcagtg

SEQ ID NO: 3860669 - DNA, 25 bp, Homo sapien
ggctcctgggagcaccacgtggggt

SEQ ID NO: 3860670 - DNA, 25 bp, Homo sapien
agcaccgagctgaggacaggccgtc

SEQ ID NO: 3860671 - DNA, 25 bp, Homo sapien
gcaccacgtggggtgggcaccccca

SEQ ID NO: 3860672 - DNA, 25 bp, Homo sapien
gcacccccatctgaacctaggacca

SEQ ID NO: 3860673 - DNA, 25 bp, Homo sapien
ggctcccaagcaggttcttagaacg

SEQ ID NO: 3860674 - DNA, 25 bp, Homo sapien
caggtatgaactgcatgctcacccc

SEQ ID NO: 3860675 - DNA, 25 bp, Homo sapien
aaggcagatgttggactgtaccagg

SEQ ID NO: 3860676 - DNA, 25 bp, Homo sapien
agaacgtttgtcaatgtaaaggcag

SEQ ID NO: 3860677 - DNA, 25 bp, Homo sapien
atgggggactccagaggtcagggtg

SEQ ID NO: 3860678 - DNA, 25 bp, Homo sapien
tgggggactccagaggtcagggtgt

SEQ ID NO: 3860679 - DNA, 25 bp, Homo sapien
gcggtcgcagggacggcgttgagac

SEQ ID NO: 3860680 - DNA, 25 bp, Homo sapien
cggtcgcagggacggcgttgagaca

SEQ ID NO: 3860681 - DNA, 25 bp, Homo sapien
cagggacggcgttgagacaggaact

SEQ ID NO: 3860682 - DNA, 25 bp, Homo sapien
tcgcagggacggcgttgagacagga

SEQ ID NO: 3860683 - DNA, 25 bp, Homo sapien
ttcctggaaggtggcacggggactc

SEQ ID NO: 3860684 - DNA, 25 bp, Homo sapien
tcacagtgtgccttcagcccgagga

SEQ ID NO: 3860685 - DNA, 25 bp, Homo sapien
tcggctcagactccggttctttgtt

SEQ ID NO: 3860686 - DNA, 25 bp, Homo sapien
tcgagggccaggtccaaggtcacag

SEQ ID NO: 3860687 - DNA, 25 bp, Homo sapien
cagcataggccgcaggtttctgaag

SEQ ID NO: 3860688 - DNA, 25 bp, Homo sapien
gcatcggcggccagcataggccgca

SEQ ID NO: 3860689 - DNA, 25 bp, Homo sapien
gtgaagttcagacgcaaggtaatgg

SEQ ID NO: 3860690 - DNA, 25 bp, Homo sapien
ggaggccgtgaagtatctctgagca

SEQ ID NO: 3860691 - DNA, 25 bp, Homo sapien
gagatgccgagattgtcctggcaga

SEQ ID NO: 3860692 - DNA, 25 bp, Homo sapien
ttgtcctggcagatatggtcggctc

SEQ ID NO: 3860693 - DNA, 25 bp, Homo sapien
gctgaaggagatgccgagattgtcc

SEQ ID NO: 3860694 - DNA, 25 bp, Homo sapien
agatatggtcggctccacagttctt

SEQ ID NO: 3860695 - DNA, 25 bp, Homo sapien
tggccctctgccacgtagcggtagg

SEQ ID NO: 3860696 - DNA, 25 bp, Homo sapien
gatggtggttccgtaggagtcttcc

SEQ ID NO: 3860697 - DNA, 25 bp, Homo sapien
gttcagctccaggttactccccacc

SEQ ID NO: 3860698 - DNA, 25 bp, Homo sapien
cacgtagcggtaggacagtcctgcg

SEQ ID NO: 3860699 - DNA, 25 bp, Homo sapien
cacatgtcaggtgcagggaacgcag

SEQ ID NO: 3860700 - DNA, 25 bp, Homo sapien
tgggcgccgccacggaagatgaggt

SEQ ID NO: 3860701 - DNA, 25 bp, Homo sapien
caactggggcgctgtcacatgtcag

SEQ ID NO: 3860702 - DNA, 25 bp, Homo sapien
gatgaggtggttgattctgcagctg

SEQ ID NO: 3860703 - DNA, 25 bp, Homo sapien
gtcagaagcagccggtctcccagga

SEQ ID NO: 3860704 - DNA, 25 bp, Homo sapien
ctgctcacattggctgtcagaagca

SEQ ID NO: 3860705 - DNA, 25 bp, Homo sapien
ttgggggagacgtcaaaggtagcca

SEQ ID NO: 3860706 - DNA, 25 bp, Homo sapien
tgggggagacgtcaaaggtagccaa

SEQ ID NO: 3860707 - DNA, 25 bp, Homo sapien
tgctaaccacagtgtagacagcata

SEQ ID NO: 3860708 - DNA, 25 bp, Homo sapien
aaggtggtcttgctggtcctgggag

SEQ ID NO: 3860709 - DNA, 25 bp, Homo sapien
cttgctggtcctgggagtgttgttc

SEQ ID NO: 3860710 - DNA, 25 bp, Homo sapien
tagacagcatacttcaccgggagct

SEQ ID NO: 3860711 - DNA, 25 bp, Homo sapien
cccacaagggcgagggttcatgtct

SEQ ID NO: 3860712 - DNA, 25 bp, Homo sapien
gagagaagaaccctttttcctgcag

SEQ ID NO: 3860713 - DNA, 25 bp, Homo sapien
cacacagcaaattcgaggaaggcat

SEQ ID NO: 3860714 - DNA, 25 bp, Homo sapien
acaggagaacatccagcaaggcaca

SEQ ID NO: 3860715 - DNA, 25 bp, Homo sapien
agttgaggtatttggtgaattgttc

SEQ ID NO: 3860716 - DNA, 25 bp, Homo sapien
ggtatctgtgcatggccacatggct

SEQ ID NO: 3860717 - DNA, 25 bp, Homo sapien
gaggtatttggtgaattgttcgtgg

SEQ ID NO: 3860718 - DNA, 25 bp, Homo sapien
tgaggtatttggtgaattgttcgtg

SEQ ID NO: 3860719 - DNA, 25 bp, Homo sapien
cccagcccagtctcctgcgtctcca

SEQ ID NO: 3860720 - DNA, 25 bp, Homo sapien
agcccagtctcctgcgtctccacca

SEQ ID NO: 3860721 - DNA, 25 bp, Homo sapien
ccagcccagtctcctgcgtctccac

SEQ ID NO: 3860722 - DNA, 25 bp, Homo sapien
gcccagtctcctgcgtctccaccac

SEQ ID NO: 3860723 - DNA, 25 bp, Homo sapien
cagcctcctggttcagctccacagg

SEQ ID NO: 3860724 - DNA, 25 bp, Homo sapien
cagaagttgatgctgacaggcaggt

SEQ ID NO: 3860725 - DNA, 25 bp, Homo sapien
gggtgggagacctccacatccatcc

SEQ ID NO: 3860726 - DNA, 25 bp, Homo sapien
ggtccctctgtcccaggttattgac

SEQ ID NO: 3860727 - DNA, 25 bp, Homo sapien
aaagggcattcgtggaggagccaca

SEQ ID NO: 3860728 - DNA, 25 bp, Homo sapien
aggtagaaagggcattcgtggagga

SEQ ID NO: 3860729 - DNA, 25 bp, Homo sapien
aggagccacatgcagtccttgggta

SEQ ID NO: 3860730 - DNA, 25 bp, Homo sapien
ggagccacatgcagtccttgggtac

SEQ ID NO: 3860731 - DNA, 25 bp, Homo sapien
ctgaatgtgcgccaggaagtcagat

SEQ ID NO: 3860732 - DNA, 25 bp, Homo sapien
aatgtgcgccaggaagtcagatgct

SEQ ID NO: 3860733 - DNA, 25 bp, Homo sapien
ttcttctgaatgtgcgccaggaagt

SEQ ID NO: 3860734 - DNA, 25 bp, Homo sapien
cagatgctgggggtgcgattttctc

SEQ ID NO: 3860735 - DNA, 25 bp, Homo sapien
ggaggggacgtcacagcggaaccgc

SEQ ID NO: 3860736 - DNA, 25 bp, Homo sapien
gggacgtcacagcggaaccgcaggc

SEQ ID NO: 3860737 - DNA, 25 bp, Homo sapien
gccaaagctgaggttgcccttcagg

SEQ ID NO: 3860738 - DNA, 25 bp, Homo sapien
ggcggacccagccaaagctgaggtt

SEQ ID NO: 3860739 - DNA, 25 bp, Homo sapien
tctcataaatgcctcctgtcctgga

SEQ ID NO: 3860740 - DNA, 25 bp, Homo sapien
cctggaagctgggagtacacggatg

SEQ ID NO: 3860741 - DNA, 25 bp, Homo sapien
cataaatgcctcctgtcctggaagc

SEQ ID NO: 3860742 - DNA, 25 bp, Homo sapien
gatgtgtcgaacgtaatttcagcca

SEQ ID NO: 3860743 - DNA, 25 bp, Homo sapien
tgtacagtaccgctgtgatgagtgc

SEQ ID NO: 3860744 - DNA, 25 bp, Homo sapien
aacagacccccaatggagctgccta

SEQ ID NO: 3860745 - DNA, 25 bp, Homo sapien
tgtacttctccagcaccgttgtcgt

SEQ ID NO: 3860746 - DNA, 25 bp, Homo sapien
ccccaatggagctgcctacgatgag

SEQ ID NO: 3860747 - DNA, 25 bp, Homo sapien
tccatcatttccttgtactgacgct

SEQ ID NO: 3860748 - DNA, 25 bp, Homo sapien
catttccttgtactgacgcttgaag

SEQ ID NO: 3860749 - DNA, 25 bp, Homo sapien
tgtactgacgcttgaagaagccaac

SEQ ID NO: 3860750 - DNA, 25 bp, Homo sapien
ctgggggtctgtgtcccgttttctg

SEQ ID NO: 3860751 - DNA, 25 bp, Homo sapien
caagcaagacgttttctcccaaaga

SEQ ID NO: 3860752 - DNA, 25 bp, Homo sapien
tccagttggaaccttgacaagacaa

SEQ ID NO: 3860753 - DNA, 25 bp, Homo sapien
tctctcggtggtgcagtggttcctc

SEQ ID NO: 3860754 - DNA, 25 bp, Homo sapien
cattcgtgcctcatgggagaaggga

SEQ ID NO: 3860755 - DNA, 25 bp, Homo sapien
cagacattgtcctgagggtaatggg

SEQ ID NO: 3860756 - DNA, 25 bp, Homo sapien
gacattgtcctgagggtaatgggga

SEQ ID NO: 3860757 - DNA, 25 bp, Homo sapien
tcagacattgtcctgagggtaatgg

SEQ ID NO: 3860758 - DNA, 25 bp, Homo sapien
acattgtcctgagggtaatggggag

SEQ ID NO: 3860759 - DNA, 25 bp, Homo sapien
aatgttgcccaacgcgggaggccag

SEQ ID NO: 3860760 - DNA, 25 bp, Homo sapien
cactaattcactggaaacgagggtg

SEQ ID NO: 3860761 - DNA, 25 bp, Homo sapien
cctgggaaatcggaactgagagccc

SEQ ID NO: 3860762 - DNA, 25 bp, Homo sapien
gacttctcacgcgaagctggagagt

SEQ ID NO: 3860763 - DNA, 25 bp, Homo sapien
ttagacctttgacatatttcccaag

SEQ ID NO: 3860764 - DNA, 25 bp, Homo sapien
tatttttagacctttgacatatttc

SEQ ID NO: 3860765 - DNA, 25 bp, Homo sapien
gacctttgacatatttcccaagagc

SEQ ID NO: 3860766 - DNA, 25 bp, Homo sapien
tgacatatttcccaagagcggtaga

SEQ ID NO: 3860767 - DNA, 25 bp, Homo sapien
tacaaagccttatcttctgattccc

SEQ ID NO: 3860768 - DNA, 25 bp, Homo sapien
tgtgcccagccattagggctgaatt

SEQ ID NO: 3860769 - DNA, 25 bp, Homo sapien
aaatccacagggattttggagcctc

SEQ ID NO: 3860770 - DNA, 25 bp, Homo sapien
ctgcataataattagtcatcctggg

SEQ ID NO: 3860771 - DNA, 25 bp, Homo sapien
aggttggggacagagcacagaaggt

SEQ ID NO: 3860772 - DNA, 25 bp, Homo sapien
cctgagcagcgcgttgaggggaagt

SEQ ID NO: 3860773 - DNA, 25 bp, Homo sapien
agcagcgcgttgaggggaagtggaa

SEQ ID NO: 3860774 - DNA, 25 bp, Homo sapien
gaagtggaaggttggggacagagca

SEQ ID NO: 3860775 - DNA, 25 bp, Homo sapien
ctcagaagaagcacagtgccgaagg

SEQ ID NO: 3860776 - DNA, 25 bp, Homo sapien
gaagaagcacagtgccgaaggtcat

SEQ ID NO: 3860777 - DNA, 25 bp, Homo sapien
tcagaagaagcacagtgccgaaggt

SEQ ID NO: 3860778 - DNA, 25 bp, Homo sapien
cagaagaagcacagtgccgaaggtc

SEQ ID NO: 3860779 - DNA, 25 bp, Homo sapien
tgaggaatatttggtgggcggggag

SEQ ID NO: 3860780 - DNA, 25 bp, Homo sapien
gaagatcgtaggctcctccacatcc

SEQ ID NO: 3860781 - DNA, 25 bp, Homo sapien
ccacatccaggttgaatccatgata

SEQ ID NO: 3860782 - DNA, 25 bp, Homo sapien
gagatccaccgaactgcaccacgct

SEQ ID NO: 3860783 - DNA, 25 bp, Homo sapien
catcctcctggaagatcgtaggctc

SEQ ID NO: 3860784 - DNA, 25 bp, Homo sapien
agtcatacagccgtcccgtctggtt

SEQ ID NO: 3860785 - DNA, 25 bp, Homo sapien
tacagccgtcccgtctggttggccg

SEQ ID NO: 3860786 - DNA, 25 bp, Homo sapien
ccggtggcagctgcgcagtcataca

SEQ ID NO: 3860787 - DNA, 25 bp, Homo sapien
gcagctgcgcagtcatacagccgtc

SEQ ID NO: 3860788 - DNA, 25 bp, Homo sapien
aaggacatgttcacggcctcagggc

SEQ ID NO: 3860789 - DNA, 25 bp, Homo sapien
aggacatgttcacggcctcagggcg

SEQ ID NO: 3860790 - DNA, 25 bp, Homo sapien
aggagccgggagccgttggtggagg

SEQ ID NO: 3860791 - DNA, 25 bp, Homo sapien
caggagccgggagccgttggtggag

SEQ ID NO: 3860792 - DNA, 25 bp, Homo sapien
tgagtatgagttctccccacagact

SEQ ID NO: 3860793 - DNA, 25 bp, Homo sapien
gaggcaggaaccctttgagtatgag

SEQ ID NO: 3860794 - DNA, 25 bp, Homo sapien
ctttgagtatgagttctccccacag

SEQ ID NO: 3860795 - DNA, 25 bp, Homo sapien
agtatgagttctccccacagactct

SEQ ID NO: 3860796 - DNA, 25 bp, Homo sapien
aagcccttcatctggttaaagtcat

SEQ ID NO: 3860797 - DNA, 25 bp, Homo sapien
caaactggcccatgacagcttggac

SEQ ID NO: 3860798 - DNA, 25 bp, Homo sapien
gcccttcatctggttaaagtcattt

SEQ ID NO: 3860799 - DNA, 25 bp, Homo sapien
ctggcccatgacagcttggacaaag

SEQ ID NO: 3860800 - DNA, 25 bp, Homo sapien
gccgtgaacgtcaggcctttcagtt

SEQ ID NO: 3860801 - DNA, 25 bp, Homo sapien
tcaggatgcccgtggccgtgaacgt

SEQ ID NO: 3860802 - DNA, 25 bp, Homo sapien
gaggtttgagtactgcatcagtgca

SEQ ID NO: 3860803 - DNA, 25 bp, Homo sapien
tggacgatgggatccaccaggctct

SEQ ID NO: 3860804 - DNA, 25 bp, Homo sapien
attcttatgatgaaatagctgtgtc

SEQ ID NO: 3860805 - DNA, 25 bp, Homo sapien
ccattcttatgatgaaatagctgtg

SEQ ID NO: 3860806 - DNA, 25 bp, Homo sapien
ccccattcttatgatgaaatagctg

SEQ ID NO: 3860807 - DNA, 25 bp, Homo sapien
gatcttcttggcactttttcgggcc

SEQ ID NO: 3860808 - DNA, 25 bp, Homo sapien
tgacatcactgtattccagggggtc

SEQ ID NO: 3860809 - DNA, 25 bp, Homo sapien
cccgatagcgtagcggatgatgcca

SEQ ID NO: 3860810 - DNA, 25 bp, Homo sapien
atagcgtagcggatgatgccagcct

SEQ ID NO: 3860811 - DNA, 25 bp, Homo sapien
tccagggggtctttgtacttctgcc

SEQ ID NO: 3860812 - DNA, 25 bp, Homo sapien
cctggggcaggggtgaagaagaggc

SEQ ID NO: 3860813 - DNA, 25 bp, Homo sapien
tgagcctggggcaggggtgaagaag

SEQ ID NO: 3860814 - DNA, 25 bp, Homo sapien
ggggcaggggtgaagaagaggcgca

SEQ ID NO: 3860815 - DNA, 25 bp, Homo sapien
ctgaaggagatgcaggctgagcctg

SEQ ID NO: 3860816 - DNA, 25 bp, Homo sapien
agagacagccgaggaggatgagccc

SEQ ID NO: 3860817 - DNA, 25 bp, Homo sapien
gagagacagccgaggaggatgagcc

SEQ ID NO: 3860818 - DNA, 25 bp, Homo sapien
agagagacagccgaggaggatgagc

SEQ ID NO: 3860819 - DNA, 25 bp, Homo sapien
ctggcagtgggtccctggaaagcgt

SEQ ID NO: 3860820 - DNA, 25 bp, Homo sapien
cagtgggtccctggaaagcgtgtcc

SEQ ID NO: 3860821 - DNA, 25 bp, Homo sapien
tgggtccctggaaagcgtgtcccac

SEQ ID NO: 3860822 - DNA, 25 bp, Homo sapien
ggcagtgggtccctggaaagcgtgt

SEQ ID NO: 3860823 - DNA, 25 bp, Homo sapien
cttgaacacgtggtcctgcggaggc

SEQ ID NO: 3860824 - DNA, 25 bp, Homo sapien
gttgtccaccttgaacacgtggtcc

SEQ ID NO: 3860825 - DNA, 25 bp, Homo sapien
tgagctgatggtattcagctcctgc

SEQ ID NO: 3860826 - DNA, 25 bp, Homo sapien
ctgcggaggcgctgagctgatggta

SEQ ID NO: 3860827 - DNA, 25 bp, Homo sapien
gtggggaaacaggtcagtgaagttc

SEQ ID NO: 3860828 - DNA, 25 bp, Homo sapien
tgtggggaaacaggtcagtgaagtt

SEQ ID NO: 3860829 - DNA, 25 bp, Homo sapien
ctgtggggaaacaggtcagtgaagt

SEQ ID NO: 3860830 - DNA, 25 bp, Homo sapien
ttcttgggacatctcgtgctggaag

SEQ ID NO: 3860831 - DNA, 25 bp, Homo sapien
gacatctcgtgctggaaggagctgc

SEQ ID NO: 3860832 - DNA, 25 bp, Homo sapien
cttcttgggacatctcgtgctggaa

SEQ ID NO: 3860833 - DNA, 25 bp, Homo sapien
tgggacatctcgtgctggaaggagc

SEQ ID NO: 3860834 - DNA, 25 bp, Homo sapien
tgcagagttggtatccaagagctat

SEQ ID NO: 3860835 - DNA, 25 bp, Homo sapien
ctagaatacatgatccttgagagca

SEQ ID NO: 3860836 - DNA, 25 bp, Homo sapien
gctatggattgagggcaggctctac

SEQ ID NO: 3860837 - DNA, 25 bp, Homo sapien
tgcttagtgctatctgagaggctct

SEQ ID NO: 3860838 - DNA, 25 bp, Homo sapien
ctccagaccagctaaagctccccac

SEQ ID NO: 3860839 - DNA, 25 bp, Homo sapien
ccagaccagctaaagctccccacag

SEQ ID NO: 3860840 - DNA, 25 bp, Homo sapien
gaccagctaaagctccccacagccc

SEQ ID NO: 3860841 - DNA, 25 bp, Homo sapien
agaccagctaaagctccccacagcc

SEQ ID NO: 3860842 - DNA, 25 bp, Homo sapien
gggctcatatttgggggatacagga

SEQ ID NO: 3860843 - DNA, 25 bp, Homo sapien
ccaggttctgtacccccttccacag

SEQ ID NO: 3860844 - DNA, 25 bp, Homo sapien
agccttcccggtatgctggtagcgg

SEQ ID NO: 3860845 - DNA, 25 bp, Homo sapien
atgacagccttcccggtatgctggt

SEQ ID NO: 3860846 - DNA, 25 bp, Homo sapien
ggtgaagatgacagccttcccggta

SEQ ID NO: 3860847 - DNA, 25 bp, Homo sapien
gcgtccctgtgacttcggccttctt

SEQ ID NO: 3860848 - DNA, 25 bp, Homo sapien
cgtccctgtgacttcggccttcttc

SEQ ID NO: 3860849 - DNA, 25 bp, Homo sapien
tgcgtccctgtgacttcggccttct

SEQ ID NO: 3860850 - DNA, 25 bp, Homo sapien
ccccctcgggtctgctcatagtaat

SEQ ID NO: 3860851 - DNA, 25 bp, Homo sapien
acctggccccctcgggtctgctcat

SEQ ID NO: 3860852 - DNA, 25 bp, Homo sapien
cacctggccccctcgggtctgctca

SEQ ID NO: 3860853 - DNA, 25 bp, Homo sapien
tggccccctcgggtctgctcatagt

SEQ ID NO: 3860854 - DNA, 25 bp, Homo sapien
tgctcaccacggagaacagcgtcac

SEQ ID NO: 3860855 - DNA, 25 bp, Homo sapien
gctcaccacggagaacagcgtcaca

SEQ ID NO: 3860856 - DNA, 25 bp, Homo sapien
ctgctcaccacggagaacagcgtca

SEQ ID NO: 3860857 - DNA, 25 bp, Homo sapien
atggccacgtctatcagcttgtcct

SEQ ID NO: 3860858 - DNA, 25 bp, Homo sapien
ggctgatgccggattctgaggctcc

SEQ ID NO: 3860859 - DNA, 25 bp, Homo sapien
gccacgtctatcagcttgtcctcat

SEQ ID NO: 3860860 - DNA, 25 bp, Homo sapien
ggattctgaggctccgtgaaacagg

SEQ ID NO: 3860861 - DNA, 25 bp, Homo sapien
tgcagcctgggggagagctgggagc

SEQ ID NO: 3860862 - DNA, 25 bp, Homo sapien
tgggggagagctgggagctggcaat

SEQ ID NO: 3860863 - DNA, 25 bp, Homo sapien
ctgcagcctgggggagagctgggag

SEQ ID NO: 3860864 - DNA, 25 bp, Homo sapien
gggagagctgggagctggcaatccg

SEQ ID NO: 3860865 - DNA, 25 bp, Homo sapien
catcagtccatcctgggtgaggtcc

SEQ ID NO: 3860866 - DNA, 25 bp, Homo sapien
aggtccatcagtccatcctgggtga

SEQ ID NO: 3860867 - DNA, 25 bp, Homo sapien
ggtgaggtcctgacccccactcagc

SEQ ID NO: 3860868 - DNA, 25 bp, Homo sapien
cccacggccaggtccatcagtccat

SEQ ID NO: 3860869 - DNA, 25 bp, Homo sapien
ttctcttcccagcaccggtacacag

SEQ ID NO: 3860870 - DNA, 25 bp, Homo sapien
acctccacagggctgaatctcatgg

SEQ ID NO: 3860871 - DNA, 25 bp, Homo sapien
acagggctgaatctcatggccaccc

SEQ ID NO: 3860872 - DNA, 25 bp, Homo sapien
ccccactttcagcaccggcagactc

SEQ ID NO: 3860873 - DNA, 25 bp, Homo sapien
ctagctggtccagtgagcttttctg

SEQ ID NO: 3860874 - DNA, 25 bp, Homo sapien
tgagcttttctggatggtgagacag

SEQ ID NO: 3860875 - DNA, 25 bp, Homo sapien
cagtgagcttttctggatggtgaga

SEQ ID NO: 3860876 - DNA, 25 bp, Homo sapien
ccagtgagcttttctggatggtgag

SEQ ID NO: 3860877 - DNA, 25 bp, Homo sapien
ttcattgaaaatggcacgagaagtc

SEQ ID NO: 3860878 - DNA, 25 bp, Homo sapien
gaagtcagacgacctgggtccagtg

SEQ ID NO: 3860879 - DNA, 25 bp, Homo sapien
ggtccagtgccagatcaaacctgac

SEQ ID NO: 3860880 - DNA, 25 bp, Homo sapien
tcttcgagtcaaagtggggttcttg

SEQ ID NO: 3860881 - DNA, 25 bp, Homo sapien
gatgggctctctcaccagtgagaag

SEQ ID NO: 3860882 - DNA, 25 bp, Homo sapien
cagtgaagaggtcttgtgagcccac

SEQ ID NO: 3860883 - DNA, 25 bp, Homo sapien
gccagcacaggacgcaggttctggg

SEQ ID NO: 3860884 - DNA, 25 bp, Homo sapien
aagcagtgaagaggtcttgtgagcc

SEQ ID NO: 3860885 - DNA, 25 bp, Homo sapien
gatttgcattttaggaccagtcgac

SEQ ID NO: 3860886 - DNA, 25 bp, Homo sapien
cgaggctggcgcatttatgaaaagc

SEQ ID NO: 3860887 - DNA, 25 bp, Homo sapien
tatgaaaagcgtgcctagtaagggc

SEQ ID NO: 3860888 - DNA, 25 bp, Homo sapien
tagctcctctatggaaaatgggtgg

SEQ ID NO: 3860889 - DNA, 25 bp, Homo sapien
tcccatctgacatcttagtctttct

SEQ ID NO: 3860890 - DNA, 25 bp, Homo sapien
caaaatagtatattctgttcccatc

SEQ ID NO: 3860891 - DNA, 25 bp, Homo sapien
ctgcagcaaaatagtatattctgtt

SEQ ID NO: 3860892 - DNA, 25 bp, Homo sapien
tagtatattctgttcccatctgaca

SEQ ID NO: 3860893 - DNA, 25 bp, Homo sapien
ctgagggtgacacccaggtcccctt

SEQ ID NO: 3860894 - DNA, 25 bp, Homo sapien
agaagctgagggtgacacccaggtc

SEQ ID NO: 3860895 - DNA, 25 bp, Homo sapien
aagctgagggtgacacccaggtccc

SEQ ID NO: 3860896 - DNA, 25 bp, Homo sapien
ctgagaagctgagggtgacacccag

SEQ ID NO: 3860897 - DNA, 25 bp, Homo sapien
ccctgctggatagtagaggctgacc

SEQ ID NO: 3860898 - DNA, 25 bp, Homo sapien
gggctcctgacacccgtcggtgcga

SEQ ID NO: 3860899 - DNA, 25 bp, Homo sapien
ggttccgtaggaatcctcacctgcg

SEQ ID NO: 3860900 - DNA, 25 bp, Homo sapien
tcacaatcacgttgagctccaggga

SEQ ID NO: 3860901 - DNA, 25 bp, Homo sapien
gaagatggggtggttgacactgcag

SEQ ID NO: 3860902 - DNA, 25 bp, Homo sapien
cagcggctgcttcttaggccctcat

SEQ ID NO: 3860903 - DNA, 25 bp, Homo sapien
gtctcacatgccaggcgcagggcac

SEQ ID NO: 3860904 - DNA, 25 bp, Homo sapien
cctcagtgggcactgtctcacatgc

SEQ ID NO: 3860905 - DNA, 25 bp, Homo sapien
ttgcactggccctcataagcatcct

SEQ ID NO: 3860906 - DNA, 25 bp, Homo sapien
tcataagcatcctgtctcccagggt

SEQ ID NO: 3860907 - DNA, 25 bp, Homo sapien
ggtggccttgtaggagacatcgaat

SEQ ID NO: 3860908 - DNA, 25 bp, Homo sapien
taggagacatcgaatgtgactatga

SEQ ID NO: 3860909 - DNA, 25 bp, Homo sapien
ctgctgatcatggtgtagactgcat

SEQ ID NO: 3860910 - DNA, 25 bp, Homo sapien
tcatggtgtagactgcatacttcac

SEQ ID NO: 3860911 - DNA, 25 bp, Homo sapien
gctgcttgaagccttattgttctca

SEQ ID NO: 3860912 - DNA, 25 bp, Homo sapien
gctgatcatggtgtagactgcatac

SEQ ID NO: 3860913 - DNA, 25 bp, Homo sapien
cagaggtccaaggggaaggccaggg

SEQ ID NO: 3860914 - DNA, 25 bp, Homo sapien
ggccagaggtccaaggggaaggcca

SEQ ID NO: 3860915 - DNA, 25 bp, Homo sapien
atagaggaaggccagaggtccaagg

SEQ ID NO: 3860916 - DNA, 25 bp, Homo sapien
caaggggaaggccagggactgggca

SEQ ID NO: 3860917 - DNA, 25 bp, Homo sapien
ccatgtagcagctttgcttcagcac

SEQ ID NO: 3860918 - DNA, 25 bp, Homo sapien
ccttgatctccatgtagcagctttg

SEQ ID NO: 3860919 - DNA, 25 bp, Homo sapien
gacagaccatatcctgttgggcaca

SEQ ID NO: 3860920 - DNA, 25 bp, Homo sapien
tacaaaggacagaatttgtttcatg

SEQ ID NO: 3860921 - DNA, 25 bp, Homo sapien
cattttcttctcatcggaggttgca

SEQ ID NO: 3860922 - DNA, 25 bp, Homo sapien
catcggaggttgcaaagttgaagta

SEQ ID NO: 3860923 - DNA, 25 bp, Homo sapien
ggtatcgatgctcagcctctttcat

SEQ ID NO: 3860924 - DNA, 25 bp, Homo sapien
acggtatcgatgctcagcctctttc

SEQ ID NO: 3860925 - DNA, 25 bp, Homo sapien
gatctcgctggctgaggttattcac

SEQ ID NO: 3860926 - DNA, 25 bp, Homo sapien
ggccagatctcgctggctgaggtta

SEQ ID NO: 3860927 - DNA, 25 bp, Homo sapien
gaagttaatgctgatggccagatct

SEQ ID NO: 3860928 - DNA, 25 bp, Homo sapien
cccagaagttaatgctgatggccag

SEQ ID NO: 3860929 - DNA, 25 bp, Homo sapien
ttgaaatctgggtcaggaagtcaga

SEQ ID NO: 3860930 - DNA, 25 bp, Homo sapien
tctgggtcaggaagtcagaatgctg

SEQ ID NO: 3860931 - DNA, 25 bp, Homo sapien
aatctgggtcaggaagtcagaatgc

SEQ ID NO: 3860932 - DNA, 25 bp, Homo sapien
gaaatctgggtcaggaagtcagaat

SEQ ID NO: 3860933 - DNA, 25 bp, Homo sapien
aggggacgtcacagcggaactgcag

SEQ ID NO: 3860934 - DNA, 25 bp, Homo sapien
ctcgcggacccagccgaaactgaga

SEQ ID NO: 3860935 - DNA, 25 bp, Homo sapien
gacccagccgaaactgagattgccc

SEQ ID NO: 3860936 - DNA, 25 bp, Homo sapien
ccgaaactgagattgcccttcaggg

SEQ ID NO: 3860937 - DNA, 25 bp, Homo sapien
tctcataaatgcctcctgtcctgga

SEQ ID NO: 3860938 - DNA, 25 bp, Homo sapien
cctggaagctgggagtacacggatg

SEQ ID NO: 3860939 - DNA, 25 bp, Homo sapien
gatgtgtcgaacgtaatttcagcca

SEQ ID NO: 3860940 - DNA, 25 bp, Homo sapien
cataaatgcctcctgtcctggaagc

SEQ ID NO: 3860941 - DNA, 25 bp, Homo sapien
ctggtcgctgccctccacatggtct

SEQ ID NO: 3860942 - DNA, 25 bp, Homo sapien
agctggtcgctgccctccacatggt

SEQ ID NO: 3860943 - DNA, 25 bp, Homo sapien
gggtcctctttccagctggtcgctg

SEQ ID NO: 3860944 - DNA, 25 bp, Homo sapien
ctaggggtcctctttccagctggtc

SEQ ID NO: 3860945 - DNA, 25 bp, Homo sapien
atgggaatggcattgtagacctcgt

SEQ ID NO: 3860946 - DNA, 25 bp, Homo sapien
gaatggcattgtagacctcgtcttc

SEQ ID NO: 3860947 - DNA, 25 bp, Homo sapien
tgtagacctcgtcttcttctagcac

SEQ ID NO: 3860948 - DNA, 25 bp, Homo sapien
cattgtagacctcgtcttcttctag

SEQ ID NO: 3860949 - DNA, 25 bp, Homo sapien
tgagcgccagcagtagcagagcccc

SEQ ID NO: 3860950 - DNA, 25 bp, Homo sapien
tggctgtgatgagcgccagcagtag

SEQ ID NO: 3860951 - DNA, 25 bp, Homo sapien
tgtgatgagcgccagcagtagcaga

SEQ ID NO: 3860952 - DNA, 25 bp, Homo sapien
cttgtacagtgtggctgtgatgagc

SEQ ID NO: 3860953 - DNA, 25 bp, Homo sapien
tgatttatggttgcaagcaagtcca

SEQ ID NO: 3860954 - DNA, 25 bp, Homo sapien
cccacagtggtagagataaacagga

SEQ ID NO: 3860955 - DNA, 25 bp, Homo sapien
gaaagtggattattaggacaaaggc

SEQ ID NO: 3860956 - DNA, 25 bp, Homo sapien
agctgaaatcgtccccactgaatgt

SEQ ID NO: 3860957 - DNA, 25 bp, Homo sapien
tccttgccaaaataagaggcacagg

SEQ ID NO: 3860958 - DNA, 25 bp, Homo sapien
gaggcacaggacaacagctgtctgg

SEQ ID NO: 3860959 - DNA, 25 bp, Homo sapien
gcatagaatagggaacaaaatagtt

SEQ ID NO: 3860960 - DNA, 25 bp, Homo sapien
tattgtacttaaatgcctccttgcc

SEQ ID NO: 3860961 - DNA, 25 bp, Homo sapien
tgacctcagctacccatgaagggtg

SEQ ID NO: 3860962 - DNA, 25 bp, Homo sapien
gacctctgagataggccccaggagt

SEQ ID NO: 3860963 - DNA, 25 bp, Homo sapien
gaagttgacaacctcctcagacctg

SEQ ID NO: 3860964 - DNA, 25 bp, Homo sapien
gaggagtccttagcaagaagtccag

SEQ ID NO: 3860965 - DNA, 25 bp, Homo sapien
agcttgcagtgggcggagatcctgt

SEQ ID NO: 3860966 - DNA, 25 bp, Homo sapien
gtgggcggagatcctgtcactgcaa

SEQ ID NO: 3860967 - DNA, 25 bp, Homo sapien
gcttgcagtgggcggagatcctgtc

SEQ ID NO: 3860968 - DNA, 25 bp, Homo sapien
ggcggagatcctgtcactgcaatcc

SEQ ID NO: 3860969 - DNA, 25 bp, Homo sapien
cctgtgaggagttccatggcagcgc

SEQ ID NO: 3860970 - DNA, 25 bp, Homo sapien
cccctgtgaggagttccatggcagc

SEQ ID NO: 3860971 - DNA, 25 bp, Homo sapien
caagcccctgtgaggagttccatgg

SEQ ID NO: 3860972 - DNA, 25 bp, Homo sapien
tcaggcaagcccctgtgaggagttc

SEQ ID NO: 3860973 - DNA, 25 bp, Homo sapien
tacacaccggtgaaaagccgtactc

SEQ ID NO: 3860974 - DNA, 25 bp, Homo sapien
gaagcttccgatgtggctctgatct

SEQ ID NO: 3860975 - DNA, 25 bp, Homo sapien
tgtccgggttatggcagaagcttcc

SEQ ID NO: 3860976 - DNA, 25 bp, Homo sapien
tctgatctggttaagcaccactggg

SEQ ID NO: 3860977 - DNA, 25 bp, Homo sapien
agagtgacgggcttgtggaattttc

SEQ ID NO: 3860978 - DNA, 25 bp, Homo sapien
ttcgctgccgcttcctagagtgacg

SEQ ID NO: 3860979 - DNA, 25 bp, Homo sapien
agctggaccccggtgtcccgagtgt

SEQ ID NO: 3860980 - DNA, 25 bp, Homo sapien
tctggacgtgctcgtgagctcagga

SEQ ID NO: 3860981 - DNA, 25 bp, Homo sapien
ctcggtcagaggaagaagagggtta

SEQ ID NO: 3860982 - DNA, 25 bp, Homo sapien
tcggtcagaggaagaagagggttaa

SEQ ID NO: 3860983 - DNA, 25 bp, Homo sapien
ttctcctctaggctcgcttcgctgc

SEQ ID NO: 3860984 - DNA, 25 bp, Homo sapien
gaagtccgaccacggagccttcgtg

SEQ ID NO: 3860985 - DNA, 25 bp, Homo sapien
cctcgggaagcgctggaaactcttc

SEQ ID NO: 3860986 - DNA, 25 bp, Homo sapien
gatgtggtccgcgtcgagcttctca

SEQ ID NO: 3860987 - DNA, 25 bp, Homo sapien
ctgggacgtgcgggcggtgcatgag

SEQ ID NO: 3860988 - DNA, 25 bp, Homo sapien
gaggcgcggcagtaccttaatcgca

SEQ ID NO: 3860989 - DNA, 25 bp, Homo sapien
tgtttagcgccaccgcagtgatgca

SEQ ID NO: 3860990 - DNA, 25 bp, Homo sapien
tgtagttctcgaccccggaagtctg

SEQ ID NO: 3860991 - DNA, 25 bp, Homo sapien
gaagacagggaaatcgtcgggcacc

SEQ ID NO: 3860992 - DNA, 25 bp, Homo sapien
gagtccgtgagggttggcttcgcag

SEQ ID NO: 3860993 - DNA, 25 bp, Homo sapien
gctgccttgatgtggcgcgtgcgga

SEQ ID NO: 3860994 - DNA, 25 bp, Homo sapien
gccgcgtgcccggaagcgctcgatt

SEQ ID NO: 3860995 - DNA, 25 bp, Homo sapien
gccgctcgccgtagcagcgcgagta

SEQ ID NO: 3860996 - DNA, 25 bp, Homo sapien
ggcggagccggggcctgcctgggac

SEQ ID NO: 3860997 - DNA, 25 bp, Homo sapien
gggcggagccggggcctgcctggga

SEQ ID NO: 3860998 - DNA, 25 bp, Homo sapien
gggctagaagctcccgacgcggccg

SEQ ID NO: 3860999 - DNA, 25 bp, Homo sapien
ctagaagctcccgacgcggccgacg

SEQ ID NO: 3861000 - DNA, 25 bp, Homo sapien
gggcggggctagaagctcccgacgc

SEQ ID NO: 3861001 - DNA, 25 bp, Homo sapien
agaagctcccgacgcggccgacgag

SEQ ID NO: 3861002 - DNA, 25 bp, Homo sapien
aagtccagcgtcttgcgcaggcgca

SEQ ID NO: 3861003 - DNA, 25 bp, Homo sapien
gcaatcggctaggatgctgagcgcc

SEQ ID NO: 3861004 - DNA, 25 bp, Homo sapien
gagtctgcgcacttcggtccggcac

SEQ ID NO: 3861005 - DNA, 25 bp, Homo sapien
ccaaagggagtatgcctccgagtct

SEQ ID NO: 3861006 - DNA, 25 bp, Homo sapien
tctcaggttccatggctaagttccc

SEQ ID NO: 3861007 - DNA, 25 bp, Homo sapien
gttccatggctaagttccccagggc

SEQ ID NO: 3861008 - DNA, 25 bp, Homo sapien
ggccgttcggttctggatgctgtct

SEQ ID NO: 3861009 - DNA, 25 bp, Homo sapien
cagcacagtggatgtccccacagct

SEQ ID NO: 3861010 - DNA, 25 bp, Homo sapien
cacaatacgagggtgccatgcgctt

SEQ ID NO: 3861011 - DNA, 25 bp, Homo sapien
ggctagctccattaggatcccggcg

SEQ ID NO: 3861012 - DNA, 25 bp, Homo sapien
cggttgatggcctcacgacatagga

SEQ ID NO: 3861013 - DNA, 25 bp, Homo sapien
tgtcatacagaaaccccacaagggc

SEQ ID NO: 3861014 - DNA, 25 bp, Homo sapien
gtcacataggtcagcaggccgtaca

SEQ ID NO: 3861015 - DNA, 25 bp, Homo sapien
tgtggcatagccctcggagatcagc

SEQ ID NO: 3861016 - DNA, 25 bp, Homo sapien
gacactgctcaggagaccagtcggg

SEQ ID NO: 3861017 - DNA, 25 bp, Homo sapien
atagctgcgcacgaaggcctcgagg

SEQ ID NO: 3861018 - DNA, 25 bp, Homo sapien
ggagacgggtgggtatgggaactca

SEQ ID NO: 3861019 - DNA, 25 bp, Homo sapien
gcaaggagacgggtgggtatgggaa

SEQ ID NO: 3861020 - DNA, 25 bp, Homo sapien
gagacgggtgggtatgggaactcac

SEQ ID NO: 3861021 - DNA, 25 bp, Homo sapien
ggcaaggagacgggtgggtatggga

SEQ ID NO: 3861022 - DNA, 25 bp, Homo sapien
tagagttagggtatctgggtcccag

SEQ ID NO: 3861023 - DNA, 25 bp, Homo sapien
tgacaggttgtctggaggacgggct

SEQ ID NO: 3861024 - DNA, 25 bp, Homo sapien
ccccactctggtgacaggttgtctg

SEQ ID NO: 3861025 - DNA, 25 bp, Homo sapien
gggctgcatctagagttagggtatc

SEQ ID NO: 3861026 - DNA, 25 bp, Homo sapien
aagtctgggcccctgaagtgtgggc

SEQ ID NO: 3861027 - DNA, 25 bp, Homo sapien
ctgggtgagaaatcagggcactgaa

SEQ ID NO: 3861028 - DNA, 25 bp, Homo sapien
tctgggcccgtgagatgaaggaggg

SEQ ID NO: 3861029 - DNA, 25 bp, Homo sapien
ggacagtcagggtgtaagtctgggc

SEQ ID NO: 3861030 - DNA, 25 bp, Homo sapien
ctgtgagtggaaagcttgtcaggct

SEQ ID NO: 3861031 - DNA, 25 bp, Homo sapien
tgtgagtggaaagcttgtcaggctg

SEQ ID NO: 3861032 - DNA, 25 bp, Homo sapien
agtggaaagcttgtcaggctgggaa

SEQ ID NO: 3861033 - DNA, 25 bp, Homo sapien
agggtcagcgcgcaggccactcggt

SEQ ID NO: 3861034 - DNA, 25 bp, Homo sapien
tgaaccgtcaggttctgcagtagcc

SEQ ID NO: 3861035 - DNA, 25 bp, Homo sapien
accccaaagggcgactcagcctgaa

SEQ ID NO: 3861036 - DNA, 25 bp, Homo sapien
agcagcaggtgcgtcagggccccaa

SEQ ID NO: 3861037 - DNA, 25 bp, Homo sapien
ctgggaaacacagcactcctccccc

SEQ ID NO: 3861038 - DNA, 25 bp, Homo sapien
ccccgcaaggcacccacttcccact

SEQ ID NO: 3861039 - DNA, 25 bp, Homo sapien
tgggaaacacagcactcctccccca

SEQ ID NO: 3861040 - DNA, 25 bp, Homo sapien
ccgcaaggcacccacttcccactca

SEQ ID NO: 3861041 - DNA, 25 bp, Homo sapien
tgagtctaggtccatggggactgcc

SEQ ID NO: 3861042 - DNA, 25 bp, Homo sapien
ccggccgggtcagcgccgcaaggag

SEQ ID NO: 3861043 - DNA, 25 bp, Homo sapien
aggaggagccggagaccaccctgct

SEQ ID NO: 3861044 - DNA, 25 bp, Homo sapien
gagtccgcggcaaagaagaggaaga

SEQ ID NO: 3861045 - DNA, 25 bp, Homo sapien
ccgacaaccatgcaaatgatgcagg

SEQ ID NO: 3861046 - DNA, 25 bp, Homo sapien
catgcaaatgatgcaggacaggcca

SEQ ID NO: 3861047 - DNA, 25 bp, Homo sapien
acaaccatgcaaatgatgcaggaca

SEQ ID NO: 3861048 - DNA, 25 bp, Homo sapien
acacccccgacaaccatgcaaatga

SEQ ID NO: 3861049 - DNA, 25 bp, Homo sapien
gggtcccaggtggatgcggcccacg

SEQ ID NO: 3861050 - DNA, 25 bp, Homo sapien
gccagaccccgcttcctcgggcact

SEQ ID NO: 3861051 - DNA, 25 bp, Homo sapien
cacccactgactccgggccaccctg

SEQ ID NO: 3861052 - DNA, 25 bp, Homo sapien
agcccaggcagtaggaaacggccag

SEQ ID NO: 3861053 - DNA, 25 bp, Homo sapien
gccagcaaagcctccgtcaggggcc

SEQ ID NO: 3861054 - DNA, 25 bp, Homo sapien
agcaaagcctccgtcaggggccctg

SEQ ID NO: 3861055 - DNA, 25 bp, Homo sapien
ccagcaaagcctccgtcaggggccc

SEQ ID NO: 3861056 - DNA, 25 bp, Homo sapien
aagcctccgtcaggggccctgcctc

SEQ ID NO: 3861057 - DNA, 25 bp, Homo sapien
ttgcccccaactcaatccccatcac

SEQ ID NO: 3861058 - DNA, 25 bp, Homo sapien
gtctcagggaggatccttcacagcc

SEQ ID NO: 3861059 - DNA, 25 bp, Homo sapien
ggagtccggttccatgttctcaccg

SEQ ID NO: 3861060 - DNA, 25 bp, Homo sapien
agccaattcatccttgggtcccctt

SEQ ID NO: 3861061 - DNA, 25 bp, Homo sapien
tcgctcccgggtctttagatcgtca

SEQ ID NO: 3861062 - DNA, 25 bp, Homo sapien
cggtggcgcggggcgaacagggcgg

SEQ ID NO: 3861063 - DNA, 25 bp, Homo sapien
ccggtggcgcggggcgaacagggcg

SEQ ID NO: 3861064 - DNA, 25 bp, Homo sapien
gccggtggcgcggggcgaacagggc

SEQ ID NO: 3861065 - DNA, 25 bp, Homo sapien
ttcgtctctgagcacccgcgtgaaa

SEQ ID NO: 3861066 - DNA, 25 bp, Homo sapien
tctctgatgcagtcaaaatgggctc

SEQ ID NO: 3861067 - DNA, 25 bp, Homo sapien
gcttcgcagggaggacgagatacct

SEQ ID NO: 3861068 - DNA, 25 bp, Homo sapien
aaattgctccattggcccagtgcct

SEQ ID NO: 3861069 - DNA, 25 bp, Homo sapien
cagagcactgctcgaagggtagcaa

SEQ ID NO: 3861070 - DNA, 25 bp, Homo sapien
ttagatcagaagataaggttcccag

SEQ ID NO: 3861071 - DNA, 25 bp, Homo sapien
gagacaagggtcacggttagatcag

SEQ ID NO: 3861072 - DNA, 25 bp, Homo sapien
gtattaagagaagaggtcacagggc

SEQ ID NO: 3861073 - DNA, 25 bp, Homo sapien
gtctccaggtcagagagcagggcat

SEQ ID NO: 3861074 - DNA, 25 bp, Homo sapien
tagtctccaggtcagagagcagggc

SEQ ID NO: 3861075 - DNA, 25 bp, Homo sapien
ggtagtctccaggtcagagagcagg

SEQ ID NO: 3861076 - DNA, 25 bp, Homo sapien
gtgcgaggtggtagtctccaggtca

SEQ ID NO: 3861077 - DNA, 25 bp, Homo sapien
aggctccgcagggcgctctttggga

SEQ ID NO: 3861078 - DNA, 25 bp, Homo sapien
ccccgaggctcctgaagactcccca

SEQ ID NO: 3861079 - DNA, 25 bp, Homo sapien
ctgtacaggtggtccttgtcccccg

SEQ ID NO: 3861080 - DNA, 25 bp, Homo sapien
ctcctgaagactccccagaccctgt

SEQ ID NO: 3861081 - DNA, 25 bp, Homo sapien
ttgtcccccgaggctcctgaagact

SEQ ID NO: 3861082 - DNA, 25 bp, Homo sapien
tcctcacctgagactcagttggccc

SEQ ID NO: 3861083 - DNA, 25 bp, Homo sapien
cctgagactcagttggcccccatgc

SEQ ID NO: 3861084 - DNA, 25 bp, Homo sapien
ggtggggaatccaagcctcctcacc

SEQ ID NO: 3861085 - DNA, 25 bp, Homo sapien
gtggggaatccaagcctcctcacct

SEQ ID NO: 3861086 - DNA, 25 bp, Homo sapien
ttggggaccgaggcttgcataccgt

SEQ ID NO: 3861087 - DNA, 25 bp, Homo sapien
tggggaccgaggcttgcataccgtg

SEQ ID NO: 3861088 - DNA, 25 bp, Homo sapien
tttggggaccgaggcttgcataccg

SEQ ID NO: 3861089 - DNA, 25 bp, Homo sapien
ctgtgatgttgaactgagtggcatt

SEQ ID NO: 3861090 - DNA, 25 bp, Homo sapien
agctcacagagcccggtacccaaga

SEQ ID NO: 3861091 - DNA, 25 bp, Homo sapien
gaagcaaccgatctagctcacagag

SEQ ID NO: 3861092 - DNA, 25 bp, Homo sapien
tgagtggcattaagttcctgaagca

SEQ ID NO: 3861093 - DNA, 25 bp, Homo sapien
aggctgggtcttttcttatcttcag

SEQ ID NO: 3861094 - DNA, 25 bp, Homo sapien
gaggccaggagacgggctggaaggg

SEQ ID NO: 3861095 - DNA, 25 bp, Homo sapien
ttgggaggccaggagacgggctgga

SEQ ID NO: 3861096 - DNA, 25 bp, Homo sapien
ggaggccaggagacgggctggaagg

SEQ ID NO: 3861097 - DNA, 25 bp, Homo sapien
tgggaggccaggagacgggctggaa

SEQ ID NO: 3861098 - DNA, 25 bp, Homo sapien
atggttttgaacgcggaagtcagag

SEQ ID NO: 3861099 - DNA, 25 bp, Homo sapien
atccagctccagagtggctgaggtg

SEQ ID NO: 3861100 - DNA, 25 bp, Homo sapien
ttttgaacgcggaagtcagagagtg

SEQ ID NO: 3861101 - DNA, 25 bp, Homo sapien
agtgaggccatcagtctatccagct

SEQ ID NO: 3861102 - DNA, 25 bp, Homo sapien
agaattgagtcagcaaagcagcaga

SEQ ID NO: 3861103 - DNA, 25 bp, Homo sapien
ggaggacatgagaattgagtcagca

SEQ ID NO: 3861104 - DNA, 25 bp, Homo sapien
gcggggaggacatgagaattgagtc

SEQ ID NO: 3861105 - DNA, 25 bp, Homo sapien
gacatgagaattgagtcagcaaagc

SEQ ID NO: 3861106 - DNA, 25 bp, Homo sapien
tgcccttgccagtcggctctggtgg

SEQ ID NO: 3861107 - DNA, 25 bp, Homo sapien
tcatttgtggagctcaccaccggtg

SEQ ID NO: 3861108 - DNA, 25 bp, Homo sapien
ccagcatggtgtctaggctgccctt

SEQ ID NO: 3861109 - DNA, 25 bp, Homo sapien
accaccggtggctgagttggcccag

SEQ ID NO: 3861110 - DNA, 25 bp, Homo sapien
cagtgaggcaagatttacgcggcgt

SEQ ID NO: 3861111 - DNA, 25 bp, Homo sapien
tgttcgagatcacgcagcctgtaag

SEQ ID NO: 3861112 - DNA, 25 bp, Homo sapien
tgtaagcgatggagatctagctccc

SEQ ID NO: 3861113 - DNA, 25 bp, Homo sapien
aatcaaaatacgatcaggctgggtg

SEQ ID NO: 3861114 - DNA, 25 bp, Homo sapien
gggctccatccttctcgaagaagct

SEQ ID NO: 3861115 - DNA, 25 bp, Homo sapien
agcctccgcaaacgaagtgctcggg

SEQ ID NO: 3861116 - DNA, 25 bp, Homo sapien
tcccagggcggtggaacagcctccg

SEQ ID NO: 3861117 - DNA, 25 bp, Homo sapien
agaagcgctcaaagtagcactcggg

SEQ ID NO: 3861118 - DNA, 25 bp, Homo sapien
agagggcactcagcgcggcctccgt

SEQ ID NO: 3861119 - DNA, 25 bp, Homo sapien
gagaagatctaactaggaacgtggg

SEQ ID NO: 3861120 - DNA, 25 bp, Homo sapien
gtgactggactaaggcatgcgtggg

SEQ ID NO: 3861121 - DNA, 25 bp, Homo sapien
tctcctggtgagatagggcgggctc

SEQ ID NO: 3861122 - DNA, 25 bp, Homo sapien
gaagggctccccgcaactgacgcag

SEQ ID NO: 3861123 - DNA, 25 bp, Homo sapien
gctccccgcaactgacgcagcagaa

SEQ ID NO: 3861124 - DNA, 25 bp, Homo sapien
gtgagtgcccaaggcggtcaccatc

SEQ ID NO: 3861125 - DNA, 25 bp, Homo sapien
gggtgccagtgagtgcccaaggcgg

SEQ ID NO: 3861126 - DNA, 25 bp, Homo sapien
gggacccacaagacctgagatctgg

SEQ ID NO: 3861127 - DNA, 25 bp, Homo sapien
gggacccgcagcttttaagatggga

SEQ ID NO: 3861128 - DNA, 25 bp, Homo sapien
gaggagccgggtctatggcgggaca

SEQ ID NO: 3861129 - DNA, 25 bp, Homo sapien
agggaaccgagtgggctgaaagcaa

SEQ ID NO: 3861130 - DNA, 25 bp, Homo sapien
agacgaaacagtccgggtgccagag

SEQ ID NO: 3861131 - DNA, 25 bp, Homo sapien
agagcgcgctgagcgccgagatgta

SEQ ID NO: 3861132 - DNA, 25 bp, Homo sapien
aacagtccgggtgccagagcgcgct

SEQ ID NO: 3861133 - DNA, 25 bp, Homo sapien
ccgagatgtagttatccaggatggg

SEQ ID NO: 3861134 - DNA, 25 bp, Homo sapien
tggaagtggttctcgcacaacgggc

SEQ ID NO: 3861135 - DNA, 25 bp, Homo sapien
tcacagggaggccacacgtggcgca

SEQ ID NO: 3861136 - DNA, 25 bp, Homo sapien
gaaaaagctgcctcccgagaagggc

SEQ ID NO: 3861137 - DNA, 25 bp, Homo sapien
gcggccctcgtgctcgaaaaagctg

SEQ ID NO: 3861138 - DNA, 25 bp, Homo sapien
ggtggaagcggcgacccagggccga

SEQ ID NO: 3861139 - DNA, 25 bp, Homo sapien
tgagcgggcgcaggcagaaggtgca

SEQ ID NO: 3861140 - DNA, 25 bp, Homo sapien
gctcctggaaggaccccttggtgag

SEQ ID NO: 3861141 - DNA, 25 bp, Homo sapien
catgtgaagtggtccgggtggaagc

SEQ ID NO: 3861142 - DNA, 25 bp, Homo sapien
agggctggcagtagggcttgccggc

SEQ ID NO: 3861143 - DNA, 25 bp, Homo sapien
gggctggcagtagggcttgccggcg

SEQ ID NO: 3861144 - DNA, 25 bp, Homo sapien
cagggctggcagtagggcttgccgg

SEQ ID NO: 3861145 - DNA, 25 bp, Homo sapien
ggctggcagtagggcttgccggcgc

SEQ ID NO: 3861146 - DNA, 25 bp, Homo sapien
gggggagagggcgagccgagcgggc

SEQ ID NO: 3861147 - DNA, 25 bp, Homo sapien
ggggagagggcgagccgagcgggct

SEQ ID NO: 3861148 - DNA, 25 bp, Homo sapien
ggcccgcacgggagttcttgtctgt

SEQ ID NO: 3861149 - DNA, 25 bp, Homo sapien
ggcctggcctccgattcgctggaat

SEQ ID NO: 3861150 - DNA, 25 bp, Homo sapien
tgtgcaatccactttgtgggcgtgt

SEQ ID NO: 3861151 - DNA, 25 bp, Homo sapien
ctggctgggccgtttctgaacttga

SEQ ID NO: 3861152 - DNA, 25 bp, Homo sapien
gggcactgagccgacaagtccccca

SEQ ID NO: 3861153 - DNA, 25 bp, Homo sapien
actgagccgacaagtcccccaggtc

SEQ ID NO: 3861154 - DNA, 25 bp, Homo sapien
gcactgagccgacaagtcccccagg

SEQ ID NO: 3861155 - DNA, 25 bp, Homo sapien
tcaggggcactgagccgacaagtcc

SEQ ID NO: 3861156 - DNA, 25 bp, Homo sapien
gattgtcaatcagggccttctgggc

SEQ ID NO: 3861157 - DNA, 25 bp, Homo sapien
tatgcagcaatgactaggatgtcag

SEQ ID NO: 3861158 - DNA, 25 bp, Homo sapien
aagccaacgccaatgaccagcagga

SEQ ID NO: 3861159 - DNA, 25 bp, Homo sapien
atgaccagcaggaaatatgcagcaa

SEQ ID NO: 3861160 - DNA, 25 bp, Homo sapien
accacaccatgctgcgtcctgccag

SEQ ID NO: 3861161 - DNA, 25 bp, Homo sapien
tgccaggaagtagccgcccacagtg

SEQ ID NO: 3861162 - DNA, 25 bp, Homo sapien
ggaagtagccgcccacagtgcctct

SEQ ID NO: 3861163 - DNA, 25 bp, Homo sapien
caggaagtagccgcccacagtgcct

SEQ ID NO: 3861164 - DNA, 25 bp, Homo sapien
agggagtgagcagggctgcttctcc

SEQ ID NO: 3861165 - DNA, 25 bp, Homo sapien
ggtggccagaggagggagtgagcag

SEQ ID NO: 3861166 - DNA, 25 bp, Homo sapien
gccagaggagggagtgagcagggct

SEQ ID NO: 3861167 - DNA, 25 bp, Homo sapien
gagggagtgagcagggctgcttctc

SEQ ID NO: 3861168 - DNA, 25 bp, Homo sapien
attccactcgaatccagcaacagcc

SEQ ID NO: 3861169 - DNA, 25 bp, Homo sapien
aaagtggccactgccgatgttgctg

SEQ ID NO: 3861170 - DNA, 25 bp, Homo sapien
agccaagccacttgcagcgccagtc

SEQ ID NO: 3861171 - DNA, 25 bp, Homo sapien
tgttgctggcgaagagagaggcccc

SEQ ID NO: 3861172 - DNA, 25 bp, Homo sapien
gatcatctagatatgaaccccagca

SEQ ID NO: 3861173 - DNA, 25 bp, Homo sapien
gcttcctggctagatgtatgacctc

SEQ ID NO: 3861174 - DNA, 25 bp, Homo sapien
cttcggagcgcatctgagcaggtgc

SEQ ID NO: 3861175 - DNA, 25 bp, Homo sapien
gcaggctggctcacatggcaagtca

SEQ ID NO: 3861176 - DNA, 25 bp, Homo sapien
ccgccgaagcgcttgcgcaggtact

SEQ ID NO: 3861177 - DNA, 25 bp, Homo sapien
ggtactgtggcatcgtgatgacccc

SEQ ID NO: 3861178 - DNA, 25 bp, Homo sapien
aggtacacgggtgcaaacagccagc

SEQ ID NO: 3861179 - DNA, 25 bp, Homo sapien
tgatgacccccgctgtcaggtacac

SEQ ID NO: 3861180 - DNA, 25 bp, Homo sapien
ctggatgaatacagctccggagaac

SEQ ID NO: 3861181 - DNA, 25 bp, Homo sapien
gtgatgcccagaagcgcgatgacgg

SEQ ID NO: 3861182 - DNA, 25 bp, Homo sapien
ccagaagcgcgatgacggaggcata

SEQ ID NO: 3861183 - DNA, 25 bp, Homo sapien
gaagcgcgatgacggaggcatagat

SEQ ID NO: 3861184 - DNA, 25 bp, Homo sapien
gaatgacgaaggtctgtaccgtgtc

SEQ ID NO: 3861185 - DNA, 25 bp, Homo sapien
tctgtaccgtgtccgtgtacatcag

SEQ ID NO: 3861186 - DNA, 25 bp, Homo sapien
aggcgccccccagaatgacgaaggt

SEQ ID NO: 3861187 - DNA, 25 bp, Homo sapien
gtgtccgtgtacatcagcgcggcca

SEQ ID NO: 3861188 - DNA, 25 bp, Homo sapien
gcgcccctccctggtaggcgagccc

SEQ ID NO: 3861189 - DNA, 25 bp, Homo sapien
aggccgagagctccgcgaccatgcc

SEQ ID NO: 3861190 - DNA, 25 bp, Homo sapien
cttaggaccctcagaccggagacgc

SEQ ID NO: 3861191 - DNA, 25 bp, Homo sapien
gagctccgcgaccatgccctccgcg

SEQ ID NO: 3861192 - DNA, 25 bp, Homo sapien
cagtaccagcccgagacgattgtga

SEQ ID NO: 3861193 - DNA, 25 bp, Homo sapien
gctggagatgtttcccacggctgga

SEQ ID NO: 3861194 - DNA, 25 bp, Homo sapien
agcgaagtcgctgctcccaggtatt

SEQ ID NO: 3861195 - DNA, 25 bp, Homo sapien
ttgtcgaagagacccgaatacccgc

SEQ ID NO: 3861196 - DNA, 25 bp, Homo sapien
catgcctggcatgaccatgagaaac

SEQ ID NO: 3861197 - DNA, 25 bp, Homo sapien
catgggcgtcagcttcaggtaccca

SEQ ID NO: 3861198 - DNA, 25 bp, Homo sapien
gccttgatgtgggtcaggctcttcc

SEQ ID NO: 3861199 - DNA, 25 bp, Homo sapien
gatgcagcccgccttgatgtgggtc

SEQ ID NO: 3861200 - DNA, 25 bp, Homo sapien
acacctcaggcaccacgcacgccac

SEQ ID NO: 3861201 - DNA, 25 bp, Homo sapien
cgcacacgcgcctgcacacctcagg

SEQ ID NO: 3861202 - DNA, 25 bp, Homo sapien
tcaggcaccacgcacgccacctcgt

SEQ ID NO: 3861203 - DNA, 25 bp, Homo sapien
agcccacctccgtgccgcacacgcg

SEQ ID NO: 3861204 - DNA, 25 bp, Homo sapien
tccgcagcgagcttgcgcctgtggc

SEQ ID NO: 3861205 - DNA, 25 bp, Homo sapien
gcgggctccgcagcgagcttgcgcc

SEQ ID NO: 3861206 - DNA, 25 bp, Homo sapien
gggctccgcagcgagcttgcgcctg

SEQ ID NO: 3861207 - DNA, 25 bp, Homo sapien
gctccgcagcgagcttgcgcctgtg

SEQ ID NO: 3861208 - DNA, 25 bp, Homo sapien
gcgggccgacggcagccgtgaggct

SEQ ID NO: 3861209 - DNA, 25 bp, Homo sapien
ctgcgggccgacggcagccgtgagg

SEQ ID NO: 3861210 - DNA, 25 bp, Homo sapien
tgcgggccgacggcagccgtgaggc

SEQ ID NO: 3861211 - DNA, 25 bp, Homo sapien
cgggccgacggcagccgtgaggctg

SEQ ID NO: 3861212 - DNA, 25 bp, Homo sapien
gccgcaggcgcgtgtagatgtccat

SEQ ID NO: 3861213 - DNA, 25 bp, Homo sapien
gaccgccagcatgagtccgcgcaga

SEQ ID NO: 3861214 - DNA, 25 bp, Homo sapien
agcagctcgcggtcgccggcgcgtg

SEQ ID NO: 3861215 - DNA, 25 bp, Homo sapien
ggaggccagcgaggacatgagcgcg

SEQ ID NO: 3861216 - DNA, 25 bp, Homo sapien
cccgggctgatccgttggggaggag

SEQ ID NO: 3861217 - DNA, 25 bp, Homo sapien
tcccctgcaggtgcgcaagcccccg

SEQ ID NO: 3861218 - DNA, 25 bp, Homo sapien
ccctgcaggtgcgcaagcccccgcc

SEQ ID NO: 3861219 - DNA, 25 bp, Homo sapien
cgggctgatccgttggggaggaggg

SEQ ID NO: 3861220 - DNA, 25 bp, Homo sapien
cggtgccaggtagctagagactgcc

SEQ ID NO: 3861221 - DNA, 25 bp, Homo sapien
agcgccagcacgaagacggcggaca

SEQ ID NO: 3861222 - DNA, 25 bp, Homo sapien
attaacgcgcggcacgaagagcgcc

SEQ ID NO: 3861223 - DNA, 25 bp, Homo sapien
gatgtaatcgaagagctgcccgccc

SEQ ID NO: 3861224 - DNA, 25 bp, Homo sapien
caatggcgaagtagaggtagtgcac

SEQ ID NO: 3861225 - DNA, 25 bp, Homo sapien
gctgcccgagccgaaggagaactcg

SEQ ID NO: 3861226 - DNA, 25 bp, Homo sapien
tagtgcacgccgcagaggaaagctg

SEQ ID NO: 3861227 - DNA, 25 bp, Homo sapien
gagcagaagaacagcacaatggcga

SEQ ID NO: 3861228 - DNA, 25 bp, Homo sapien
taaagtctcttgcacaccagctcgt

SEQ ID NO: 3861229 - DNA, 25 bp, Homo sapien
gatggtagcgcttgtgacactggcc

SEQ ID NO: 3861230 - DNA, 25 bp, Homo sapien
tattgtgcccaccagtcagatcctg

SEQ ID NO: 3861231 - DNA, 25 bp, Homo sapien
tgttttgagtcccaaaggccatgcc

SEQ ID NO: 3861232 - DNA, 25 bp, Homo sapien
ggagactgaagaccaggcggtggag

SEQ ID NO: 3861233 - DNA, 25 bp, Homo sapien
ctctgggcacccattctgtacaggg

SEQ ID NO: 3861234 - DNA, 25 bp, Homo sapien
ggtcctcccgttcctccttgctatg

SEQ ID NO: 3861235 - DNA, 25 bp, Homo sapien
cttgctatgccggagactgaagacc

SEQ ID NO: 3861236 - DNA, 25 bp, Homo sapien
gttagtttgcgggaactcagctcct

SEQ ID NO: 3861237 - DNA, 25 bp, Homo sapien
ggccctgcagttagtttgcgggaac

SEQ ID NO: 3861238 - DNA, 25 bp, Homo sapien
tgcagttagtttgcgggaactcagc

SEQ ID NO: 3861239 - DNA, 25 bp, Homo sapien
gaaattgaggccctgcagttagttt

SEQ ID NO: 3861240 - DNA, 25 bp, Homo sapien
gcattgaggttgaccacacgggccc

SEQ ID NO: 3861241 - DNA, 25 bp, Homo sapien
ctgctcattccacaaaaccagagca

SEQ ID NO: 3861242 - DNA, 25 bp, Homo sapien
agggcattgaggttgaccacacggg

SEQ ID NO: 3861243 - DNA, 25 bp, Homo sapien
tcctgggtaaggggcggaggactgc

SEQ ID NO: 3861244 - DNA, 25 bp, Homo sapien
ttttccttagggcaactgcagcggg

SEQ ID NO: 3861245 - DNA, 25 bp, Homo sapien
ctgtggcttatggtgtccaacgcag

SEQ ID NO: 3861246 - DNA, 25 bp, Homo sapien
actgccaatcagatgcagtgggccc

SEQ ID NO: 3861247 - DNA, 25 bp, Homo sapien
ccaggccctcatgggaagtgactgc

SEQ ID NO: 3861248 - DNA, 25 bp, Homo sapien
gcaacaggagatgaattggaaagga

SEQ ID NO: 3861249 - DNA, 25 bp, Homo sapien
tgaggtgctagccttccgtgccagg

SEQ ID NO: 3861250 - DNA, 25 bp, Homo sapien
gaaaggaaagggtgaggtgctagcc

SEQ ID NO: 3861251 - DNA, 25 bp, Homo sapien
tggtcagtttggcccgaacattggg

SEQ ID NO: 3861252 - DNA, 25 bp, Homo sapien
gcagtctcgcagaaggccgaaggat

SEQ ID NO: 3861253 - DNA, 25 bp, Homo sapien
agctaaaacttctgtggccgaaccg

SEQ ID NO: 3861254 - DNA, 25 bp, Homo sapien
tggtctcacagcaaaaaaggcacct

SEQ ID NO: 3861255 - DNA, 25 bp, Homo sapien
taaaaatacagtcgctggtctcaca

SEQ ID NO: 3861256 - DNA, 25 bp, Homo sapien
ttctgataaaaagaggatgcttttt

SEQ ID NO: 3861257 - DNA, 25 bp, Homo sapien
aaaagaggatgcttttttggcaaat

SEQ ID NO: 3861258 - DNA, 25 bp, Homo sapien
ttctgcttcggagtgaagatgctgc

SEQ ID NO: 3861259 - DNA, 25 bp, Homo sapien
tttggcaaatttctgcttcggagtg

SEQ ID NO: 3861260 - DNA, 25 bp, Homo sapien
gaatgttgcaatctccttccataaa

SEQ ID NO: 3861261 - DNA, 25 bp, Homo sapien
caagagatcaggcagggccggatct

SEQ ID NO: 3861262 - DNA, 25 bp, Homo sapien
cagggccggatctgcagagttttgt

SEQ ID NO: 3861263 - DNA, 25 bp, Homo sapien
taatgataagccactgtgaggtgtt

SEQ ID NO: 3861264 - DNA, 25 bp, Homo sapien
tgctggccgtcctaacagtcactga

SEQ ID NO: 3861265 - DNA, 25 bp, Homo sapien
tacattttggtctatgagggatcgc

SEQ ID NO: 3861266 - DNA, 25 bp, Homo sapien
gctgccccaggtgaaagtataattg

SEQ ID NO: 3861267 - DNA, 25 bp, Homo sapien
tcctgagcccatatctctgacctgg

SEQ ID NO: 3861268 - DNA, 25 bp, Homo sapien
tcatccccttctggctcagactctg

SEQ ID NO: 3861269 - DNA, 25 bp, Homo sapien
cccttctggctcagactctgcattt

SEQ ID NO: 3861270 - DNA, 25 bp, Homo sapien
ccttctggctcagactctgcatttt

SEQ ID NO: 3861271 - DNA, 25 bp, Homo sapien
tctggctcagactctgcattttctg

SEQ ID NO: 3861272 - DNA, 25 bp, Homo sapien
tgtatatgtctcacccacactcttg

SEQ ID NO: 3861273 - DNA, 25 bp, Homo sapien
tctctgtgccaagctatagatgtag

SEQ ID NO: 3861274 - DNA, 25 bp, Homo sapien
cttcaggtctaacaggctgtatatg

SEQ ID NO: 3861275 - DNA, 25 bp, Homo sapien
cactcttgagggtgcgtgaatctct

SEQ ID NO: 3861276 - DNA, 25 bp, Homo sapien
caatcctgcggaaatgagatcctta

SEQ ID NO: 3861277 - DNA, 25 bp, Homo sapien
tccttcaatcctgcggaaatgagat

SEQ ID NO: 3861278 - DNA, 25 bp, Homo sapien
ctgaactccttcaatcctgcggaaa

SEQ ID NO: 3861279 - DNA, 25 bp, Homo sapien
cggaaatgagatccttattggcctt

SEQ ID NO: 3861280 - DNA, 25 bp, Homo sapien
tactagaatagtgccacagcaccaa

SEQ ID NO: 3861281 - DNA, 25 bp, Homo sapien
gtatcccgtgtctctcgttgtttcc

SEQ ID NO: 3861282 - DNA, 25 bp, Homo sapien
agaatgtggtcagcaatgggattcg

SEQ ID NO: 3861283 - DNA, 25 bp, Homo sapien
tctttcctctgcattgtatcccgtg

SEQ ID NO: 3861284 - DNA, 25 bp, Homo sapien
tgatgtagaagttcatccagtcctc

SEQ ID NO: 3861285 - DNA, 25 bp, Homo sapien
gttgatgtagaagttcatccagtcc

SEQ ID NO: 3861286 - DNA, 25 bp, Homo sapien
gatgtagaagttcatccagtcctcc

SEQ ID NO: 3861287 - DNA, 25 bp, Homo sapien
atgtagaagttcatccagtcctcca

SEQ ID NO: 3861288 - DNA, 25 bp, Homo sapien
tgggtgactcgggagctcatgagac

SEQ ID NO: 3861289 - DNA, 25 bp, Homo sapien
gagggcggtgggtgactcgggagct

SEQ ID NO: 3861290 - DNA, 25 bp, Homo sapien
ggcggtgggtgactcgggagctcat

SEQ ID NO: 3861291 - DNA, 25 bp, Homo sapien
cggtgggtgactcgggagctcatga

SEQ ID NO: 3861292 - DNA, 25 bp, Homo sapien
gcacagcctaaggacatgaaggtca

SEQ ID NO: 3861293 - DNA, 25 bp, Homo sapien
caggagcacagcctaaggacatgaa

SEQ ID NO: 3861294 - DNA, 25 bp, Homo sapien
cagcctaaggacatgaaggtcagag

SEQ ID NO: 3861295 - DNA, 25 bp, Homo sapien
aaggacatgaaggtcagagtttctc

SEQ ID NO: 3861296 - DNA, 25 bp, Homo sapien
ttagagtataacctaggagttggct

SEQ ID NO: 3861297 - DNA, 25 bp, Homo sapien
tttagagtataacctaggagttggc

SEQ ID NO: 3861298 - DNA, 25 bp, Homo sapien
tgcatccaatatcactgagggaatc

SEQ ID NO: 3861299 - DNA, 25 bp, Homo sapien
gcatccaatatcactgagggaatct

SEQ ID NO: 3861300 - DNA, 25 bp, Homo sapien
gaggcaggcattgccaacgcacaca

SEQ ID NO: 3861301 - DNA, 25 bp, Homo sapien
cactcaggaggcaggcattgccaac

SEQ ID NO: 3861302 - DNA, 25 bp, Homo sapien
aggaggcaggcattgccaacgcaca

SEQ ID NO: 3861303 - DNA, 25 bp, Homo sapien
ggcaggcattgccaacgcacacagc

SEQ ID NO: 3861304 - DNA, 25 bp, Homo sapien
gagcatgtagtttaagctgtgccca

SEQ ID NO: 3861305 - DNA, 25 bp, Homo sapien
gggagcatgtagtttaagctgtgcc

SEQ ID NO: 3861306 - DNA, 25 bp, Homo sapien
agcatgtagtttaagctgtgcccac

SEQ ID NO: 3861307 - DNA, 25 bp, Homo sapien
ctgggagcatgtagtttaagctgtg

SEQ ID NO: 3861308 - DNA, 25 bp, Homo sapien
ctcttccagaacaatacttataatc

SEQ ID NO: 3861309 - DNA, 25 bp, Homo sapien
ccaggatgttgaaggacctgatgta

SEQ ID NO: 3861310 - DNA, 25 bp, Homo sapien
caggatgttgaaggacctgatgtat

SEQ ID NO: 3861311 - DNA, 25 bp, Homo sapien
tcttccagaacaatacttataatca

SEQ ID NO: 3861312 - DNA, 25 bp, Homo sapien
gcctggctattctgggatggctgct

SEQ ID NO: 3861313 - DNA, 25 bp, Homo sapien
cctggctattctgggatggctgctc

SEQ ID NO: 3861314 - DNA, 25 bp, Homo sapien
tggctattctgggatggctgctcat

SEQ ID NO: 3861315 - DNA, 25 bp, Homo sapien
cagcctggctattctgggatggctg

SEQ ID NO: 3861316 - DNA, 25 bp, Homo sapien
gccgtggccgcccagatggcctatg

SEQ ID NO: 3861317 - DNA, 25 bp, Homo sapien
taggatccggccctgaatggagaag

SEQ ID NO: 3861318 - DNA, 25 bp, Homo sapien
gtccctaggatccggccctgaatgg

SEQ ID NO: 3861319 - DNA, 25 bp, Homo sapien
cagatggcctatgtctttcccactg

SEQ ID NO: 3861320 - DNA, 25 bp, Homo sapien
tggcatccaggttcttataattctt

SEQ ID NO: 3861321 - DNA, 25 bp, Homo sapien
gtggatgggtaaacacagtctcctc

SEQ ID NO: 3861322 - DNA, 25 bp, Homo sapien
tgtgattctttcaaggtgagaagag

SEQ ID NO: 3861323 - DNA, 25 bp, Homo sapien
gaagagatagtggatgggtaaacac

SEQ ID NO: 3861324 - DNA, 25 bp, Homo sapien
tgattggcgccgttacagacgtggc

SEQ ID NO: 3861325 - DNA, 25 bp, Homo sapien
ggcactgtcaaatggttcaacgtca

SEQ ID NO: 3861326 - DNA, 25 bp, Homo sapien
cagacgtggctactatggaaggcgc

SEQ ID NO: 3861327 - DNA, 25 bp, Homo sapien
cggcagcagtgaaggatttgacccc

SEQ ID NO: 3861328 - DNA, 25 bp, Homo sapien
ttgcactgttcacctagaaaaacca

SEQ ID NO: 3861329 - DNA, 25 bp, Homo sapien
ctgaaatgagttaagctgagaagga

SEQ ID NO: 3861330 - DNA, 25 bp, Homo sapien
taggaaggctgtaccctgaaaagcc

SEQ ID NO: 3861331 - DNA, 25 bp, Homo sapien
ttttacagtttcatgggcagaaggc

SEQ ID NO: 3861332 - DNA, 25 bp, Homo sapien
gattgacgtgattcaattctgtggt

SEQ ID NO: 3861333 - DNA, 25 bp, Homo sapien
tttcccacaatggtgcagcctttct

SEQ ID NO: 3861334 - DNA, 25 bp, Homo sapien
cccacaatggtgcagcctttctgtg

SEQ ID NO: 3861335 - DNA, 25 bp, Homo sapien
tctgtgctggtgaagattgacgtga

SEQ ID NO: 3861336 - DNA, 25 bp, Homo sapien
tctgtgaagttcttatactttcctt

SEQ ID NO: 3861337 - DNA, 25 bp, Homo sapien
ttctgtgaagttcttatactttcct

SEQ ID NO: 3861338 - DNA, 25 bp, Homo sapien
ctgtgaagttcttatactttccttt

SEQ ID NO: 3861339 - DNA, 25 bp, Homo sapien
tgtgaagttcttatactttccttta

SEQ ID NO: 3861340 - DNA, 25 bp, Homo sapien
cagcagactagcaatcttgatcaca

SEQ ID NO: 3861341 - DNA, 25 bp, Homo sapien
ttgtgattatactggacccatggtg

SEQ ID NO: 3861342 - DNA, 25 bp, Homo sapien
gaaaaaatattcagctgagtcactc

SEQ ID NO: 3861343 - DNA, 25 bp, Homo sapien
atctaatgtattcccagtatctggg

SEQ ID NO: 3861344 - DNA, 25 bp, Homo sapien
gtgaaaaacactcccctgattgtgg

SEQ ID NO: 3861345 - DNA, 25 bp, Homo sapien
tggcataggcattgagcacagctct

SEQ ID NO: 3861346 - DNA, 25 bp, Homo sapien
gacaacgtgtgggtcatacggccat

SEQ ID NO: 3861347 - DNA, 25 bp, Homo sapien
taggcctgcgattcagaagaagcgt

SEQ ID NO: 3861348 - DNA, 25 bp, Homo sapien
aactgatttgcaccaaaggactaac

SEQ ID NO: 3861349 - DNA, 25 bp, Homo sapien
gcataatactgattattgttttatc

SEQ ID NO: 3861350 - DNA, 25 bp, Homo sapien
agaactgatttgcaccaaaggacta

SEQ ID NO: 3861351 - DNA, 25 bp, Homo sapien
taatactgattattgttttatcaga

SEQ ID NO: 3861352 - DNA, 25 bp, Homo sapien
catgtggatcccagggtaccaacaa

SEQ ID NO: 3861353 - DNA, 25 bp, Homo sapien
ggcctggcagatgttcctcaatgtc

SEQ ID NO: 3861354 - DNA, 25 bp, Homo sapien
caggccatactcaaggactaagagg

SEQ ID NO: 3861355 - DNA, 25 bp, Homo sapien
ttcctcaatgtcctgcaggcttggc

SEQ ID NO: 3861356 - DNA, 25 bp, Homo sapien
tgcttattcctttggtagtagggtg

SEQ ID NO: 3861357 - DNA, 25 bp, Homo sapien
gatttctctgcagccacttctgtag

SEQ ID NO: 3861358 - DNA, 25 bp, Homo sapien
tgcagcccttgacaatcaacttatt

SEQ ID NO: 3861359 - DNA, 25 bp, Homo sapien
ccattttctacggagtctgcagccc

SEQ ID NO: 3861360 - DNA, 25 bp, Homo sapien
ctacggagtctgcagcccttgacaa

SEQ ID NO: 3861361 - DNA, 25 bp, Homo sapien
ggagcgtcccggtatcctctctagg

SEQ ID NO: 3861362 - DNA, 25 bp, Homo sapien
agatcaagcagggaagcgcacctgg

SEQ ID NO: 3861363 - DNA, 25 bp, Homo sapien
gaaagagcagggtacacagatcaag

SEQ ID NO: 3861364 - DNA, 25 bp, Homo sapien
tctctagggaccgtccagtacctgc

SEQ ID NO: 3861365 - DNA, 25 bp, Homo sapien
cagtgaatgaaggatgtggagcccc

SEQ ID NO: 3861366 - DNA, 25 bp, Homo sapien
atcagtgaatgaaggatgtggagcc

SEQ ID NO: 3861367 - DNA, 25 bp, Homo sapien
tggagtagaataaaggcaaacttct

SEQ ID NO: 3861368 - DNA, 25 bp, Homo sapien
tgacctccaaagtttagatgtggat

SEQ ID NO: 3861369 - DNA, 25 bp, Homo sapien
caatcctggcctcgatcaggccttt

SEQ ID NO: 3861370 - DNA, 25 bp, Homo sapien
aggcctttcagaccaaggaggcagc

SEQ ID NO: 3861371 - DNA, 25 bp, Homo sapien
tggcctcgatcaggcctttcagacc

SEQ ID NO: 3861372 - DNA, 25 bp, Homo sapien
catagccaatcctggcctcgatcag

SEQ ID NO: 3861373 - DNA, 25 bp, Homo sapien
ttccacctgagctcgctgtccaaac

SEQ ID NO: 3861374 - DNA, 25 bp, Homo sapien
tcggcacacctgcaagctgcacctt

SEQ ID NO: 3861375 - DNA, 25 bp, Homo sapien
cctcaactgctccttagcccaccac

SEQ ID NO: 3861376 - DNA, 25 bp, Homo sapien
aactgctccttagcccaccacagtc

SEQ ID NO: 3861377 - DNA, 25 bp, Homo sapien
cctgaatggtgacttctatctggtg

SEQ ID NO: 3861378 - DNA, 25 bp, Homo sapien
ggtctccaggcagttcccattcaag

SEQ ID NO: 3861379 - DNA, 25 bp, Homo sapien
tatctggtggtgtcgtctcctggct

SEQ ID NO: 3861380 - DNA, 25 bp, Homo sapien
cagaaaagtccaaatcctgaatggt

SEQ ID NO: 3861381 - DNA, 25 bp, Homo sapien
atgaacagctggtggatctccagca

SEQ ID NO: 3861382 - DNA, 25 bp, Homo sapien
tattcatggtccatgaacagctggt

SEQ ID NO: 3861383 - DNA, 25 bp, Homo sapien
tggtgacatgggtattcatggtcca

SEQ ID NO: 3861384 - DNA, 25 bp, Homo sapien
catgaacagctggtggatctccagc

SEQ ID NO: 3861385 - DNA, 25 bp, Homo sapien
cagctctgagacgtggtccagtgtg

SEQ ID NO: 3861386 - DNA, 25 bp, Homo sapien
tgcgcagctctgagacgtggtccag

SEQ ID NO: 3861387 - DNA, 25 bp, Homo sapien
gcgcagctctgagacgtggtccagt

SEQ ID NO: 3861388 - DNA, 25 bp, Homo sapien
gctgcgcagctctgagacgtggtcc

SEQ ID NO: 3861389 - DNA, 25 bp, Homo sapien
acgtggagcagcaagcccgcctgca

SEQ ID NO: 3861390 - DNA, 25 bp, Homo sapien
cacgtggagcagcaagcccgcctgc

SEQ ID NO: 3861391 - DNA, 25 bp, Homo sapien
cgtggagcagcaagcccgcctgcag

SEQ ID NO: 3861392 - DNA, 25 bp, Homo sapien
accacgtggagcagcaagcccgcct

SEQ ID NO: 3861393 - DNA, 25 bp, Homo sapien
gagagaggagggtgttaccagggcc

SEQ ID NO: 3861394 - DNA, 25 bp, Homo sapien
gagggtgttaccagggccctgcacc

SEQ ID NO: 3861395 - DNA, 25 bp, Homo sapien
gaggagggtgttaccagggccctgc

SEQ ID NO: 3861396 - DNA, 25 bp, Homo sapien
ggagagaggagggtgttaccagggc

SEQ ID NO: 3861397 - DNA, 25 bp, Homo sapien
agcagtctcaaatgtggcactcatc

SEQ ID NO: 3861398 - DNA, 25 bp, Homo sapien
cactcatcaccgtgggccttgtgca

SEQ ID NO: 3861399 - DNA, 25 bp, Homo sapien
caccgtgggccttgtgcattgtgca

SEQ ID NO: 3861400 - DNA, 25 bp, Homo sapien
tgtggcactcatcaccgtgggcctt

SEQ ID NO: 3861401 - DNA, 25 bp, Homo sapien
aggccactgtcagtgaagacgctca

SEQ ID NO: 3861402 - DNA, 25 bp, Homo sapien
cactgtcagtgaagacgctcaggaa

SEQ ID NO: 3861403 - DNA, 25 bp, Homo sapien
tgtcagtgaagacgctcaggaagga

SEQ ID NO: 3861404 - DNA, 25 bp, Homo sapien
agtgaagacgctcaggaaggacaag

SEQ ID NO: 3861405 - DNA, 25 bp, Homo sapien
caggcccctccaggtagaaaggcct

SEQ ID NO: 3861406 - DNA, 25 bp, Homo sapien
tgcctctaactgtggccctggtctg

SEQ ID NO: 3861407 - DNA, 25 bp, Homo sapien
agggccagctgcctctaactgtggc

SEQ ID NO: 3861408 - DNA, 25 bp, Homo sapien
ttaagcccccttcgtcagcctctgg

SEQ ID NO: 3861409 - DNA, 25 bp, Homo sapien
agggtccctagcaggatgtacttgg

SEQ ID NO: 3861410 - DNA, 25 bp, Homo sapien
gggtccatctccaagtctttctgct

SEQ ID NO: 3861411 - DNA, 25 bp, Homo sapien
agccgctcacggtgagcactttcag

SEQ ID NO: 3861412 - DNA, 25 bp, Homo sapien
cctgtgcatcttgcagttcccaggg

SEQ ID NO: 3861413 - DNA, 25 bp, Homo sapien
ggacaggtaccagccgctcacggtg

SEQ ID NO: 3861414 - DNA, 25 bp, Homo sapien
gtcctgtgcatcttgcagttcccag

SEQ ID NO: 3861415 - DNA, 25 bp, Homo sapien
gttatggtaaaagccctgtgtggat

SEQ ID NO: 3861416 - DNA, 25 bp, Homo sapien
ccctgtgtggatgtggtaatgctac

SEQ ID NO: 3861417 - DNA, 25 bp, Homo sapien
atggtaaaagccctgtgtggatgtg

SEQ ID NO: 3861418 - DNA, 25 bp, Homo sapien
taaaagccctgtgtggatgtggtaa

SEQ ID NO: 3861419 - DNA, 25 bp, Homo sapien
ctgctctgggttctcctggccctga

SEQ ID NO: 3861420 - DNA, 25 bp, Homo sapien
tctgggttctcctggccctgagatg

SEQ ID NO: 3861421 - DNA, 25 bp, Homo sapien
tgggttctcctggccctgagatgct

SEQ ID NO: 3861422 - DNA, 25 bp, Homo sapien
gctctgggttctcctggccctgaga

SEQ ID NO: 3861423 - DNA, 25 bp, Homo sapien
gagggaccagggagggagacatggg

SEQ ID NO: 3861424 - DNA, 25 bp, Homo sapien
gaccagggagggagacatgggctca

SEQ ID NO: 3861425 - DNA, 25 bp, Homo sapien
ggaccagggagggagacatgggctc

SEQ ID NO: 3861426 - DNA, 25 bp, Homo sapien
tgcagagggaccagggagggagaca

SEQ ID NO: 3861427 - DNA, 25 bp, Homo sapien
gttcttgttgggtaggtccctcatc

SEQ ID NO: 3861428 - DNA, 25 bp, Homo sapien
tctgcagctcctcgttccagtactg

SEQ ID NO: 3861429 - DNA, 25 bp, Homo sapien
tgttgggtaggtccctcatcatctg

SEQ ID NO: 3861430 - DNA, 25 bp, Homo sapien
tgcagctcctcgttccagtactggg

SEQ ID NO: 3861431 - DNA, 25 bp, Homo sapien
gcagggcaaacctgacgggccttca

SEQ ID NO: 3861432 - DNA, 25 bp, Homo sapien
gaagcagaatgctagaaggccttgc

SEQ ID NO: 3861433 - DNA, 25 bp, Homo sapien
cctagaagggctacagttgggcacc

SEQ ID NO: 3861434 - DNA, 25 bp, Homo sapien
taagtgccagcaagctgcaagtgct

SEQ ID NO: 3861435 - DNA, 25 bp, Homo sapien
cacttatgcttaaagaggcacagag

SEQ ID NO: 3861436 - DNA, 25 bp, Homo sapien
ttagtggctaccaaggagtatgagg

SEQ ID NO: 3861437 - DNA, 25 bp, Homo sapien
gcaggtttgggatccaccagctatg

SEQ ID NO: 3861438 - DNA, 25 bp, Homo sapien
gcacagagtttagtggctaccaagg

SEQ ID NO: 3861439 - DNA, 25 bp, Homo sapien
actaccatggcgccccatgtggctg

SEQ ID NO: 3861440 - DNA, 25 bp, Homo sapien
cctgactaccatggcgccccatgtg

SEQ ID NO: 3861441 - DNA, 25 bp, Homo sapien
gacgatgcctccctgactaccatgg

SEQ ID NO: 3861442 - DNA, 25 bp, Homo sapien
tgactaccatggcgccccatgtggc

SEQ ID NO: 3861443 - DNA, 25 bp, Homo sapien
gctgtgtccagcgtgtacagaccct

SEQ ID NO: 3861444 - DNA, 25 bp, Homo sapien
ggctgaagatgatgcggctccacat

SEQ ID NO: 3861445 - DNA, 25 bp, Homo sapien
cattggtgaatgctatggaggctgc

SEQ ID NO: 3861446 - DNA, 25 bp, Homo sapien
gcaaagtccttgtagtggccactaa

SEQ ID NO: 3861447 - DNA, 25 bp, Homo sapien
agatgacactctgctcctggtccca

SEQ ID NO: 3861448 - DNA, 25 bp, Homo sapien
ggatgccagggatgaggactggaac

SEQ ID NO: 3861449 - DNA, 25 bp, Homo sapien
agtggagccatagatgacactctgc

SEQ ID NO: 3861450 - DNA, 25 bp, Homo sapien
cccactccaggatgccagggatgag

SEQ ID NO: 3861451 - DNA, 25 bp, Homo sapien
tcaaccgagaagagctccgcctcat

SEQ ID NO: 3861452 - DNA, 25 bp, Homo sapien
gatccaggcaacacgatgggggcca

SEQ ID NO: 3861453 - DNA, 25 bp, Homo sapien
tcatcgttgcactggttgagcatgc

SEQ ID NO: 3861454 - DNA, 25 bp, Homo sapien
gggctcagcaggtagtatctgtcat

SEQ ID NO: 3861455 - DNA, 25 bp, Homo sapien
gagagggtccacattcagaccagga

SEQ ID NO: 3861456 - DNA, 25 bp, Homo sapien
caacactcagggactgtgaccttca

SEQ ID NO: 3861457 - DNA, 25 bp, Homo sapien
tgggaaatttaacatggccaactcc

SEQ ID NO: 3861458 - DNA, 25 bp, Homo sapien
tctagtgagtgtggccaaaacgagc

SEQ ID NO: 3861459 - DNA, 25 bp, Homo sapien
ctgggccttatagatgttgtcaaat

SEQ ID NO: 3861460 - DNA, 25 bp, Homo sapien
aggctcatcctacccaggccgggtg

SEQ ID NO: 3861461 - DNA, 25 bp, Homo sapien
ggattagctgcccacagcctacagg

SEQ ID NO: 3861462 - DNA, 25 bp, Homo sapien
tcggagctttccttctcgtggttct

SEQ ID NO: 3861463 - DNA, 25 bp, Homo sapien
tccacccagggatatagctggaggg

SEQ ID NO: 3861464 - DNA, 25 bp, Homo sapien
cgctggccatactgggggctgtgaa

SEQ ID NO: 3861465 - DNA, 25 bp, Homo sapien
ctggagctgctccaagacgctggcc

SEQ ID NO: 3861466 - DNA, 25 bp, Homo sapien
gagctgctccaagacgctggccata

SEQ ID NO: 3861467 - DNA, 25 bp, Homo sapien
gctccaagacgctggccatactggg

SEQ ID NO: 3861468 - DNA, 25 bp, Homo sapien
gaagaatgaagaggacatcaccgat

SEQ ID NO: 3861469 - DNA, 25 bp, Homo sapien
cagctgagaagaatgaagaggacat

SEQ ID NO: 3861470 - DNA, 25 bp, Homo sapien
gagaagaatgaagaggacatcaccg

SEQ ID NO: 3861471 - DNA, 25 bp, Homo sapien
gaatgaagaggacatcaccgatgac

SEQ ID NO: 3861472 - DNA, 25 bp, Homo sapien
gccaacttctaagtagggagccatg

SEQ ID NO: 3861473 - DNA, 25 bp, Homo sapien
tcaattttgagccatgtcagcctat

SEQ ID NO: 3861474 - DNA, 25 bp, Homo sapien
ggaagttctcatcactggctacact

SEQ ID NO: 3861475 - DNA, 25 bp, Homo sapien
taataaccttcatacgtggcatgcc

SEQ ID NO: 3861476 - DNA, 25 bp, Homo sapien
cacgcaaatgagctgaggaatccca

SEQ ID NO: 3861477 - DNA, 25 bp, Homo sapien
gattcctggagctagtgacgctgca

SEQ ID NO: 3861478 - DNA, 25 bp, Homo sapien
tcagtgagacgcgtggaacaagtac

SEQ ID NO: 3861479 - DNA, 25 bp, Homo sapien
tatattccgactgtagacccgaagg

SEQ ID NO: 3861480 - DNA, 25 bp, Homo sapien
ggccaggtaaatcccagctgagtgc

SEQ ID NO: 3861481 - DNA, 25 bp, Homo sapien
gtgacgaggccaggtaaatcccagc

SEQ ID NO: 3861482 - DNA, 25 bp, Homo sapien
ctagtgacgaggccaggtaaatccc

SEQ ID NO: 3861483 - DNA, 25 bp, Homo sapien
ccaggtaaatcccagctgagtgcct

SEQ ID NO: 3861484 - DNA, 25 bp, Homo sapien
cttctccaatgacgggatgttcacc

SEQ ID NO: 3861485 - DNA, 25 bp, Homo sapien
tcttctccaatgacgggatgttcac

SEQ ID NO: 3861486 - DNA, 25 bp, Homo sapien
cgggatgttcacctgtgccacaatc

SEQ ID NO: 3861487 - DNA, 25 bp, Homo sapien
tcacctgtgccacaatcccattagt

SEQ ID NO: 3861488 - DNA, 25 bp, Homo sapien
gatagtgccactgcaatgggcctta

SEQ ID NO: 3861489 - DNA, 25 bp, Homo sapien
gactatccaagcatcccaaaaggca

SEQ ID NO: 3861490 - DNA, 25 bp, Homo sapien
taaacttgccctcttgtagacaggc

SEQ ID NO: 3861491 - DNA, 25 bp, Homo sapien
caattatacataaggctgagggcct

SEQ ID NO: 3861492 - DNA, 25 bp, Homo sapien
ttactgcagccaacaaaggccaccg

SEQ ID NO: 3861493 - DNA, 25 bp, Homo sapien
gatgtcctggcgtctgagctacgga

SEQ ID NO: 3861494 - DNA, 25 bp, Homo sapien
tgcctgccggtcacagagtaacaga

SEQ ID NO: 3861495 - DNA, 25 bp, Homo sapien
gagcccctggtgaagagactgagct

SEQ ID NO: 3861496 - DNA, 25 bp, Homo sapien
tgctccagaggaccctaaaccacaa

SEQ ID NO: 3861497 - DNA, 25 bp, Homo sapien
tgactccccttaatttgtaagagga

SEQ ID NO: 3861498 - DNA, 25 bp, Homo sapien
caccaatcgctgtttacctaaatca

SEQ ID NO: 3861499 - DNA, 25 bp, Homo sapien
gggattttgaaatcgctgctccaga

SEQ ID NO: 3861500 - DNA, 25 bp, Homo sapien
cacagatatccactgtcacaaatcc

SEQ ID NO: 3861501 - DNA, 25 bp, Homo sapien
catttggcattaaagtcggacatcc

SEQ ID NO: 3861502 - DNA, 25 bp, Homo sapien
cattaaagtcggacatccagatagc

SEQ ID NO: 3861503 - DNA, 25 bp, Homo sapien
ggtgccaagtcctgtctcataacat

SEQ ID NO: 3861504 - DNA, 25 bp, Homo sapien
tctttcgagcaagaaacatgtcatt

SEQ ID NO: 3861505 - DNA, 25 bp, Homo sapien
aattatttccataatagcagatcat

SEQ ID NO: 3861506 - DNA, 25 bp, Homo sapien
tcgagcaagaaacatgtcatttaat

SEQ ID NO: 3861507 - DNA, 25 bp, Homo sapien
ccataatagcagatcatttagtata

SEQ ID NO: 3861508 - DNA, 25 bp, Homo sapien
tatacttcaacaggtaaggccaaaa

SEQ ID NO: 3861509 - DNA, 25 bp, Homo sapien
caggatagcaaacgtcagaccttcc

SEQ ID NO: 3861510 - DNA, 25 bp, Homo sapien
tacctcaactgaagggacaggagca

SEQ ID NO: 3861511 - DNA, 25 bp, Homo sapien
gggagtgctgccaatcctacctcaa

SEQ ID NO: 3861512 - DNA, 25 bp, Homo sapien
caccttgaatcatgtttgctcctcc

SEQ ID NO: 3861513 - DNA, 25 bp, Homo sapien
aagatggagtaggtagttaaccctg

SEQ ID NO: 3861514 - DNA, 25 bp, Homo sapien
tgatttagtccaggagtcgtgccct

SEQ ID NO: 3861515 - DNA, 25 bp, Homo sapien
ggtgcctgaggtttgtcccacccac

SEQ ID NO: 3861516 - DNA, 25 bp, Homo sapien
cacatccccatataaaagcttctga

SEQ ID NO: 3861517 - DNA, 25 bp, Homo sapien
gcttctgatctgagtccaggtgttc

SEQ ID NO: 3861518 - DNA, 25 bp, Homo sapien
ctaacatcacatccccatataaaag

SEQ ID NO: 3861519 - DNA, 25 bp, Homo sapien
tctgatctgagtccaggtgttccca

SEQ ID NO: 3861520 - DNA, 25 bp, Homo sapien
tccaaaaaggtgatcaggtccggct

SEQ ID NO: 3861521 - DNA, 25 bp, Homo sapien
ccaaaaaggtgatcaggtccggctt

SEQ ID NO: 3861522 - DNA, 25 bp, Homo sapien
caaaaaggtgatcaggtccggctta

SEQ ID NO: 3861523 - DNA, 25 bp, Homo sapien
aaaaaggtgatcaggtccggcttag

SEQ ID NO: 3861524 - DNA, 25 bp, Homo sapien
gggaagaggcaacatccagaatggg

SEQ ID NO: 3861525 - DNA, 25 bp, Homo sapien
agaagaaactaccatcggagggaag

SEQ ID NO: 3861526 - DNA, 25 bp, Homo sapien
gaagaaactaccatcggagggaaga

SEQ ID NO: 3861527 - DNA, 25 bp, Homo sapien
taagaggccttgagtatcatgagaa

SEQ ID NO: 3861528 - DNA, 25 bp, Homo sapien
tctttcttaagaggccttgagtatc

SEQ ID NO: 3861529 - DNA, 25 bp, Homo sapien
ttcttaagaggccttgagtatcatg

SEQ ID NO: 3861530 - DNA, 25 bp, Homo sapien
cttaagaggccttgagtatcatgag

SEQ ID NO: 3861531 - DNA, 25 bp, Homo sapien
tagttgtcttacattttgtatgtcc

SEQ ID NO: 3861532 - DNA, 25 bp, Homo sapien
ttttgtatgtccatcataatatcca

SEQ ID NO: 3861533 - DNA, 25 bp, Homo sapien
ccatcataatatccattgtgacctt

SEQ ID NO: 3861534 - DNA, 25 bp, Homo sapien
ttttgttataggtagttgtcttaca

SEQ ID NO: 3861535 - DNA, 25 bp, Homo sapien
tatattgatcacaggcagaacgagg

SEQ ID NO: 3861536 - DNA, 25 bp, Homo sapien
taagtcactattcggattatccaaa

SEQ ID NO: 3861537 - DNA, 25 bp, Homo sapien
ttatttgaaacatggactaagtcac

SEQ ID NO: 3861538 - DNA, 25 bp, Homo sapien
tatttgactgaacatttactccagt

SEQ ID NO: 3861539 - DNA, 25 bp, Homo sapien
tctattccttgacattgattaagca

SEQ ID NO: 3861540 - DNA, 25 bp, Homo sapien
ttccttgacattgattaagcaatga

SEQ ID NO: 3861541 - DNA, 25 bp, Homo sapien
ttttcccaaattatctattccttga

SEQ ID NO: 3861542 - DNA, 25 bp, Homo sapien
attttcccaaattatctattccttg

SEQ ID NO: 3861543 - DNA, 25 bp, Homo sapien
tatgccttggcttaatgttgtatca

SEQ ID NO: 3861544 - DNA, 25 bp, Homo sapien
tgtatcagatttattgtactgattt

SEQ ID NO: 3861545 - DNA, 25 bp, Homo sapien
gccttggcttaatgttgtatcagat

SEQ ID NO: 3861546 - DNA, 25 bp, Homo sapien
gggcttatgccttggcttaatgttg

SEQ ID NO: 3861547 - DNA, 25 bp, Homo sapien
ttttacgtttgcaatggttatgtag

SEQ ID NO: 3861548 - DNA, 25 bp, Homo sapien
cttgaataaagatactctgatggac

SEQ ID NO: 3861549 - DNA, 25 bp, Homo sapien
ggtgcattcatgaaaggctttctca

SEQ ID NO: 3861550 - DNA, 25 bp, Homo sapien
catggttggtgcattcatgaaaggc

SEQ ID NO: 3861551 - DNA, 25 bp, Homo sapien
agacttgacaatttactaaggattt

SEQ ID NO: 3861552 - DNA, 25 bp, Homo sapien
tatgttttcttagacttgacaattt

SEQ ID NO: 3861553 - DNA, 25 bp, Homo sapien
ttatgttttcttagacttgacaatt

SEQ ID NO: 3861554 - DNA, 25 bp, Homo sapien
ccacattctttacatttgtatggtt

SEQ ID NO: 3861555 - DNA, 25 bp, Homo sapien
atatgaactagaattgaaggctttg

SEQ ID NO: 3861556 - DNA, 25 bp, Homo sapien
cattctttacatttgtatggtttct

SEQ ID NO: 3861557 - DNA, 25 bp, Homo sapien
aatatgaactagaattgaaggcttt

SEQ ID NO: 3861558 - DNA, 25 bp, Homo sapien
atgagtaaaacatttgctacacgct

SEQ ID NO: 3861559 - DNA, 25 bp, Homo sapien
gaagatttgaagaatgagtaaaaca

SEQ ID NO: 3861560 - DNA, 25 bp, Homo sapien
gctacacgctttacatttgtaaagt

SEQ ID NO: 3861561 - DNA, 25 bp, Homo sapien
atgcacaagaagatttgaagaatga

SEQ ID NO: 3861562 - DNA, 25 bp, Homo sapien
ctctcatgctgagtaagggctgaag

SEQ ID NO: 3861563 - DNA, 25 bp, Homo sapien
ttctctcatgctgagtaagggctga

SEQ ID NO: 3861564 - DNA, 25 bp, Homo sapien
aagggctgaagacactttaaatgat

SEQ ID NO: 3861565 - DNA, 25 bp, Homo sapien
aagacactttaaatgatttaccaca

SEQ ID NO: 3861566 - DNA, 25 bp, Homo sapien
taaggcgtgaactacaattaaaggc

SEQ ID NO: 3861567 - DNA, 25 bp, Homo sapien
tgagtaaggcgtgaactacaattaa

SEQ ID NO: 3861568 - DNA, 25 bp, Homo sapien
aaggcgtgaactacaattaaaggct

SEQ ID NO: 3861569 - DNA, 25 bp, Homo sapien
gttgagtaaggcgtgaactacaatt

SEQ ID NO: 3861570 - DNA, 25 bp, Homo sapien
cagaaagacatgaggaatgagagaa

SEQ ID NO: 3861571 - DNA, 25 bp, Homo sapien
gaaagacatgaggaatgagagaaag

SEQ ID NO: 3861572 - DNA, 25 bp, Homo sapien
tgatgtcgtctaaggtttgaagacc

SEQ ID NO: 3861573 - DNA, 25 bp, Homo sapien
atgtcgtctaaggtttgaagaccgg

SEQ ID NO: 3861574 - DNA, 25 bp, Homo sapien
tatagaacgacctcttacagctctg

SEQ ID NO: 3861575 - DNA, 25 bp, Homo sapien
tccaactttgggctaggaccacaag

SEQ ID NO: 3861576 - DNA, 25 bp, Homo sapien
tgtgaactacactgagaaacagcct

SEQ ID NO: 3861577 - DNA, 25 bp, Homo sapien
tacaccagtagctacaaaaagcagg

SEQ ID NO: 3861578 - DNA, 25 bp, Homo sapien
gatcctgagctaacattgtaaacga

SEQ ID NO: 3861579 - DNA, 25 bp, Homo sapien
tccaaaggtaaacaagatcctgagc

SEQ ID NO: 3861580 - DNA, 25 bp, Homo sapien
gaaccagctttactcctacccagaa

SEQ ID NO: 3861581 - DNA, 25 bp, Homo sapien
tacatacattgcaaggcataaacct

SEQ ID NO: 3861582 - DNA, 25 bp, Homo sapien
ggtgcccatgagattaggacgttga

SEQ ID NO: 3861583 - DNA, 25 bp, Homo sapien
gctgctaacattctgagatagtgag

SEQ ID NO: 3861584 - DNA, 25 bp, Homo sapien
gagattaggacgttgatactttaga

SEQ ID NO: 3861585 - DNA, 25 bp, Homo sapien
gatactttagaatattcaaacccat

SEQ ID NO: 3861586 - DNA, 25 bp, Homo sapien
caaataaggccagtcagatccaagg

SEQ ID NO: 3861587 - DNA, 25 bp, Homo sapien
gagtagggcccagacgtcagtattg

SEQ ID NO: 3861588 - DNA, 25 bp, Homo sapien
cattacagtcacatgcggaggccct

SEQ ID NO: 3861589 - DNA, 25 bp, Homo sapien
ggagagtgccacttctgcgacagaa

SEQ ID NO: 3861590 - DNA, 25 bp, Homo sapien
ttaagttaccagacaatgtataggt

SEQ ID NO: 3861591 - DNA, 25 bp, Homo sapien
aaagccacatttgaacgacagccca

SEQ ID NO: 3861592 - DNA, 25 bp, Homo sapien
gacagcccaatagaatacgaaaata

SEQ ID NO: 3861593 - DNA, 25 bp, Homo sapien
taagaggaccggtgaactagaatac

SEQ ID NO: 3861594 - DNA, 25 bp, Homo sapien
tcctcccatggataaatttaacgaa

SEQ ID NO: 3861595 - DNA, 25 bp, Homo sapien
tagtcagctatcttggtcccttcct

SEQ ID NO: 3861596 - DNA, 25 bp, Homo sapien
ttcaactgcagctgtttctagtcag

SEQ ID NO: 3861597 - DNA, 25 bp, Homo sapien
aatgcaaggactttacactggaaga

SEQ ID NO: 3861598 - DNA, 25 bp, Homo sapien
atttcggattcttagctcttcttgc

SEQ ID NO: 3861599 - DNA, 25 bp, Homo sapien
caatttccatataggtgtgtgaggt

SEQ ID NO: 3861600 - DNA, 25 bp, Homo sapien
gtgtgaggttcctaatcttgagttc

SEQ ID NO: 3861601 - DNA, 25 bp, Homo sapien
ttttgttgtgatgttaagctgtcga

SEQ ID NO: 3861602 - DNA, 25 bp, Homo sapien
tgagtcctgctaaaagccatctata

SEQ ID NO: 3861603 - DNA, 25 bp, Homo sapien
tgggaacaggaccataatttccact

SEQ ID NO: 3861604 - DNA, 25 bp, Homo sapien
actccacctcgggaaattatactgg

SEQ ID NO: 3861605 - DNA, 25 bp, Homo sapien
tgagtacttgactgataactttggg

SEQ ID NO: 3861606 - DNA, 25 bp, Homo sapien
caactagacggcttcacagcagaat

SEQ ID NO: 3861607 - DNA, 25 bp, Homo sapien
tcctggaaatgctcaacctatcaag

SEQ ID NO: 3861608 - DNA, 25 bp, Homo sapien
tagaaagaagtacaacgcctgaaca

SEQ ID NO: 3861609 - DNA, 25 bp, Homo sapien
tgtacatgcacaaaccgagaggaaa

SEQ ID NO: 3861610 - DNA, 25 bp, Homo sapien
gctagcatgggcatttctatgcaca

SEQ ID NO: 3861611 - DNA, 25 bp, Homo sapien
tattttcctaactgatggtcacaca

SEQ ID NO: 3861612 - DNA, 25 bp, Homo sapien
tgaccaccactgaggttggatgcct

SEQ ID NO: 3861613 - DNA, 25 bp, Homo sapien
tctgttaaccatgctagagggcatg

SEQ ID NO: 3861614 - DNA, 25 bp, Homo sapien
tccttatccaagcccctttctgtaa

SEQ ID NO: 3861615 - DNA, 25 bp, Homo sapien
ttgcatgtggctcttactggaatga

SEQ ID NO: 3861616 - DNA, 25 bp, Homo sapien
gcatgtggctcttactggaatgaga

SEQ ID NO: 3861617 - DNA, 25 bp, Homo sapien
tgtggctcttactggaatgagaaga

SEQ ID NO: 3861618 - DNA, 25 bp, Homo sapien
ctgctctatcttggcagctgtccat

SEQ ID NO: 3861619 - DNA, 25 bp, Homo sapien
aagtcaagcagtccttttgcacttt

SEQ ID NO: 3861620 - DNA, 25 bp, Homo sapien
caaagtcaagcagtccttttgcact

SEQ ID NO: 3861621 - DNA, 25 bp, Homo sapien
ctgtgcccggtgtgggcctctgggg

SEQ ID NO: 3861622 - DNA, 25 bp, Homo sapien
ccaaagtcaagcagtccttttgcac

SEQ ID NO: 3861623 - DNA, 25 bp, Homo sapien
ggcgaccccagctaaagcctcattt

SEQ ID NO: 3861624 - DNA, 25 bp, Homo sapien
gcaggtctttgttctcactcacaca

SEQ ID NO: 3861625 - DNA, 25 bp, Homo sapien
tcagtgcgaaagacataggccacct

SEQ ID NO: 3861626 - DNA, 25 bp, Homo sapien
caggtttgtaccacagcacagaggc

SEQ ID NO: 3861627 - DNA, 25 bp, Homo sapien
tataatccaggttgaagaataaata

SEQ ID NO: 3861628 - DNA, 25 bp, Homo sapien
ataagctcaattgaaatctgtaaaa

SEQ ID NO: 3861629 - DNA, 25 bp, Homo sapien
agcatggtgattttatcatttcctc

SEQ ID NO: 3861630 - DNA, 25 bp, Homo sapien
atgaaacaatagcatggtgatttta

SEQ ID NO: 3861631 - DNA, 25 bp, Homo sapien
taatccactggaatcgctggaaccc

SEQ ID NO: 3861632 - DNA, 25 bp, Homo sapien
caattagagccatccatgaaaaacc

SEQ ID NO: 3861633 - DNA, 25 bp, Homo sapien
caacattatagctatgggcaaatgc

SEQ ID NO: 3861634 - DNA, 25 bp, Homo sapien
ggaggcggacgttggttcaacatac

SEQ ID NO: 3861635 - DNA, 25 bp, Homo sapien
ttattcctcttaggcggtggctggt

SEQ ID NO: 3861636 - DNA, 25 bp, Homo sapien
cacaatggtgtgtgttccccaactc

SEQ ID NO: 3861637 - DNA, 25 bp, Homo sapien
ggtggctggtgagcatttctgctca

SEQ ID NO: 3861638 - DNA, 25 bp, Homo sapien
gctcacaatggtgtgtgttccccaa

SEQ ID NO: 3861639 - DNA, 25 bp, Homo sapien
tcatcaacacctctttgtcaatctc

SEQ ID NO: 3861640 - DNA, 25 bp, Homo sapien
tctgctctgtagacttttgagccat

SEQ ID NO: 3861641 - DNA, 25 bp, Homo sapien
tcaacacctctttgtcaatctcttg

SEQ ID NO: 3861642 - DNA, 25 bp, Homo sapien
tgtctctgctctgtagacttttgag

SEQ ID NO: 3861643 - DNA, 25 bp, Homo sapien
cattaataagtagtttgtatctggt

SEQ ID NO: 3861644 - DNA, 25 bp, Homo sapien
gtctacatagtcacccattaataag

SEQ ID NO: 3861645 - DNA, 25 bp, Homo sapien
tctaaagagttccataagatcatgt

SEQ ID NO: 3861646 - DNA, 25 bp, Homo sapien
tccacagacagtatcagggcaacga

SEQ ID NO: 3861647 - DNA, 25 bp, Homo sapien
tgtaatgcattctggataatgaatg

SEQ ID NO: 3861648 - DNA, 25 bp, Homo sapien
attgtaatgcattctggataatgaa

SEQ ID NO: 3861649 - DNA, 25 bp, Homo sapien
tattgtaatgcattctggataatga

SEQ ID NO: 3861650 - DNA, 25 bp, Homo sapien
ttgtaatgcattctggataatgaat

SEQ ID NO: 3861651 - DNA, 25 bp, Homo sapien
gatcgcagcctggttaccacaacaa

SEQ ID NO: 3861652 - DNA, 25 bp, Homo sapien
gaggctcgccacaacaaagtgctgg

SEQ ID NO: 3861653 - DNA, 25 bp, Homo sapien
ttttctgcttgaacggtctggagga

SEQ ID NO: 3861654 - DNA, 25 bp, Homo sapien
ggcaaactgttagagtgacctatct

SEQ ID NO: 3861655 - DNA, 25 bp, Homo sapien
agatagttctccgatttatgtggat

SEQ ID NO: 3861656 - DNA, 25 bp, Homo sapien
tcagatagttctccgatttatgtgg

SEQ ID NO: 3861657 - DNA, 25 bp, Homo sapien
atcccagttggtggctgttgaacac

SEQ ID NO: 3861658 - DNA, 25 bp, Homo sapien
gttctccgatttatgtggattgtct

SEQ ID NO: 3861659 - DNA, 25 bp, Homo sapien
ggctcatgaccttggccagtggctc

SEQ ID NO: 3861660 - DNA, 25 bp, Homo sapien
tgtgtttggggctcatgaccttggc

SEQ ID NO: 3861661 - DNA, 25 bp, Homo sapien
ttggggctcatgaccttggccagtg

SEQ ID NO: 3861662 - DNA, 25 bp, Homo sapien
tgtcttgttatcatcccttgatgtt

SEQ ID NO: 3861663 - DNA, 25 bp, Homo sapien
gcccctgtctgcctcaaaggatcat

SEQ ID NO: 3861664 - DNA, 25 bp, Homo sapien
cctgtctgcctcaaaggatcatgga

SEQ ID NO: 3861665 - DNA, 25 bp, Homo sapien
ctgcctcaaaggatcatggaaaagc

SEQ ID NO: 3861666 - DNA, 25 bp, Homo sapien
cctcaaaggatcatggaaaagcaga

SEQ ID NO: 3861667 - DNA, 25 bp, Homo sapien
tatttcctggagatgtgacattttg

SEQ ID NO: 3861668 - DNA, 25 bp, Homo sapien
tggaaccttggtcttatttcctgga

SEQ ID NO: 3861669 - DNA, 25 bp, Homo sapien
gctgaactggttaggtggaaccttg

SEQ ID NO: 3861670 - DNA, 25 bp, Homo sapien
gctgcgactggcacagcaatcagga

SEQ ID NO: 3861671 - DNA, 25 bp, Homo sapien
ctctcgggagttcccgctccgcgac

SEQ ID NO: 3861672 - DNA, 25 bp, Homo sapien
ccagccaggacgctgtcaccagggc

SEQ ID NO: 3861673 - DNA, 25 bp, Homo sapien
ccctctcgggagttcccgctccgcg

SEQ ID NO: 3861674 - DNA, 25 bp, Homo sapien
ccccagccaggacgctgtcaccagg

SEQ ID NO: 3861675 - DNA, 25 bp, Homo sapien
agcatgtcccgggcggcacccaagg

SEQ ID NO: 3861676 - DNA, 25 bp, Homo sapien
gaactccagcatgtcccgggcggca

SEQ ID NO: 3861677 - DNA, 25 bp, Homo sapien
ggcggcacccaagggcgcccccata

SEQ ID NO: 3861678 - DNA, 25 bp, Homo sapien
tgggaactccagcatgtcccgggcg

SEQ ID NO: 3861679 - DNA, 25 bp, Homo sapien
ttagagatcatcgtccttgaattta

SEQ ID NO: 3861680 - DNA, 25 bp, Homo sapien
tagagatcatcgtccttgaatttac

SEQ ID NO: 3861681 - DNA, 25 bp, Homo sapien
cagtattccgggcacatccaactgt

SEQ ID NO: 3861682 - DNA, 25 bp, Homo sapien
tattccgggcacatccaactgtcca

SEQ ID NO: 3861683 - DNA, 25 bp, Homo sapien
agaatccactggaatccccgataca

SEQ ID NO: 3861684 - DNA, 25 bp, Homo sapien
gaatccactggaatccccgatacat

SEQ ID NO: 3861685 - DNA, 25 bp, Homo sapien
gactctgatcctgattgtcacttac

SEQ ID NO: 3861686 - DNA, 25 bp, Homo sapien
gattctgtacttgaccctgaccctc

SEQ ID NO: 3861687 - DNA, 25 bp, Homo sapien
tgaccctcactttggtcttcagttt

SEQ ID NO: 3861688 - DNA, 25 bp, Homo sapien
tatcttgttcttaccctgaccccga

SEQ ID NO: 3861689 - DNA, 25 bp, Homo sapien
agcaccaacgtcatagtgatggcag

SEQ ID NO: 3861690 - DNA, 25 bp, Homo sapien
tggattgagcaccaacgtcatagtg

SEQ ID NO: 3861691 - DNA, 25 bp, Homo sapien
ttgagcaccaacgtcatagtgatgg

SEQ ID NO: 3861692 - DNA, 25 bp, Homo sapien
atggcagctgggtttaagatgacag

SEQ ID NO: 3861693 - DNA, 25 bp, Homo sapien
ttgtggtcaccaggacttgcttgca

SEQ ID NO: 3861694 - DNA, 25 bp, Homo sapien
accaggacttgcttgcaagagctcc

SEQ ID NO: 3861695 - DNA, 25 bp, Homo sapien
ggtcaccaggacttgcttgcaagag

SEQ ID NO: 3861696 - DNA, 25 bp, Homo sapien
cttgtggtcaccaggacttgcttgc

SEQ ID NO: 3861697 - DNA, 25 bp, Homo sapien
aaactcatggacatatcaggaagca

SEQ ID NO: 3861698 - DNA, 25 bp, Homo sapien
ggatatttatgatgctcaataatgg

SEQ ID NO: 3861699 - DNA, 25 bp, Homo sapien
gattgctgggcgaagtaatgtccaa

SEQ ID NO: 3861700 - DNA, 25 bp, Homo sapien
taatgtccaatctttaaactcatgg

SEQ ID NO: 3861701 - DNA, 25 bp, Homo sapien
ctgttggtgggagatgataaaacct

SEQ ID NO: 3861702 - DNA, 25 bp, Homo sapien
ttctgttggtgggagatgataaaac

SEQ ID NO: 3861703 - DNA, 25 bp, Homo sapien
cttgtttctgttggtgggagatgat

SEQ ID NO: 3861704 - DNA, 25 bp, Homo sapien
ttggtgggagatgataaaaccttac

SEQ ID NO: 3861705 - DNA, 25 bp, Homo sapien
gtctatattctgcatgtagtactct

SEQ ID NO: 3861706 - DNA, 25 bp, Homo sapien
tatattctgcatgtagtactcttca

SEQ ID NO: 3861707 - DNA, 25 bp, Homo sapien
ttgtctatattctgcatgtagtact

SEQ ID NO: 3861708 - DNA, 25 bp, Homo sapien
ctatattctgcatgtagtactcttc

SEQ ID NO: 3861709 - DNA, 25 bp, Homo sapien
ggaggagcacgtgggggtatgttgc

SEQ ID NO: 3861710 - DNA, 25 bp, Homo sapien
gtatgttgctgtggttggcagatac

SEQ ID NO: 3861711 - DNA, 25 bp, Homo sapien
gctgtggttggcagatacatctgct

SEQ ID NO: 3861712 - DNA, 25 bp, Homo sapien
tgttgctgtggttggcagatacatc

SEQ ID NO: 3861713 - DNA, 25 bp, Homo sapien
tcatgactgccattgtcagggtaag

SEQ ID NO: 3861714 - DNA, 25 bp, Homo sapien
ccattgtcagggtaagctgagaagt

SEQ ID NO: 3861715 - DNA, 25 bp, Homo sapien
gtaagctgagaagtgcatgagctca

SEQ ID NO: 3861716 - DNA, 25 bp, Homo sapien
tcagggtaagctgagaagtgcatga

SEQ ID NO: 3861717 - DNA, 25 bp, Homo sapien
tgaaggtggcaggtaggatggtccc

SEQ ID NO: 3861718 - DNA, 25 bp, Homo sapien
tcaggctccgctatggcagaatttg

SEQ ID NO: 3861719 - DNA, 25 bp, Homo sapien
tgctggctcactagtttggtgcaca

SEQ ID NO: 3861720 - DNA, 25 bp, Homo sapien
ctctggacttctttggtgaagctgc

SEQ ID NO: 3861721 - DNA, 25 bp, Homo sapien
tgccaccagattaggtgtagacaac

SEQ ID NO: 3861722 - DNA, 25 bp, Homo sapien
gttctagtcgctgcactctgtggcc

SEQ ID NO: 3861723 - DNA, 25 bp, Homo sapien
agttctagtcgctgcactctgtggc

SEQ ID NO: 3861724 - DNA, 25 bp, Homo sapien
cagattaggtgtagacaacgggtgt

SEQ ID NO: 3861725 - DNA, 25 bp, Homo sapien
tcttagctacgaatctcccagtgcc

SEQ ID NO: 3861726 - DNA, 25 bp, Homo sapien
ggcctcccagaacgaaagactcgga

SEQ ID NO: 3861727 - DNA, 25 bp, Homo sapien
ttctcagaacgcgaagccgcctggg

SEQ ID NO: 3861728 - DNA, 25 bp, Homo sapien
gcaagtcgcagagcaacagaggttc

SEQ ID NO: 3861729 - DNA, 25 bp, Homo sapien
cactggacaaggtcttgaaaactct

SEQ ID NO: 3861730 - DNA, 25 bp, Homo sapien
tgaaaactctgagggcctcactcca

SEQ ID NO: 3861731 - DNA, 25 bp, Homo sapien
tcactccaaaagtagggctttacaa

SEQ ID NO: 3861732 - DNA, 25 bp, Homo sapien
gctcactggacaaggtcttgaaaac

SEQ ID NO: 3861733 - DNA, 25 bp, Homo sapien
gaaggagtcaagtttagttcacaag

SEQ ID NO: 3861734 - DNA, 25 bp, Homo sapien
tagataatggctcagcctttctatt

SEQ ID NO: 3861735 - DNA, 25 bp, Homo sapien
gtcaagtttagttcacaagaatttc

SEQ ID NO: 3861736 - DNA, 25 bp, Homo sapien
actataaaagctaactatagacaga

SEQ ID NO: 3861737 - DNA, 25 bp, Homo sapien
taaagaatacactgaccatgtggcc

SEQ ID NO: 3861738 - DNA, 25 bp, Homo sapien
aaagaatacactgaccatgtggcca

SEQ ID NO: 3861739 - DNA, 25 bp, Homo sapien
ataaagaatacactgaccatgtggc

SEQ ID NO: 3861740 - DNA, 25 bp, Homo sapien
aaataaagaatacactgaccatgtg

SEQ ID NO: 3861741 - DNA, 25 bp, Homo sapien
atcctgatacaaattcttctgagct

SEQ ID NO: 3861742 - DNA, 25 bp, Homo sapien
tccaaaaaggtgatcaggtccggct

SEQ ID NO: 3861743 - DNA, 25 bp, Homo sapien
caaaaaggtgatcaggtccggctta

SEQ ID NO: 3861744 - DNA, 25 bp, Homo sapien
ccaaaaaggtgatcaggtccggctt

SEQ ID NO: 3861745 - DNA, 25 bp, Homo sapien
aaaaaggtgatcaggtccggcttag

SEQ ID NO: 3861746 - DNA, 25 bp, Homo sapien
gaaagtttcctctagtatcagaaac

SEQ ID NO: 3861747 - DNA, 25 bp, Homo sapien
aataaaaactccaaacaacatacat

SEQ ID NO: 3861748 - DNA, 25 bp, Homo sapien
gacagaggtgcccaatctcaacact

SEQ ID NO: 3861749 - DNA, 25 bp, Homo sapien
catagtagtgagaaatcaagccaga

SEQ ID NO: 3861750 - DNA, 25 bp, Homo sapien
gccagacgcagtttcatattttgaa

SEQ ID NO: 3861751 - DNA, 25 bp, Homo sapien
ttcacagccagacgcagtttcatat

SEQ ID NO: 3861752 - DNA, 25 bp, Homo sapien
tattttgaacaattgatggtctgca

SEQ ID NO: 3861753 - DNA, 25 bp, Homo sapien
ccttcacagccagacgcagtttcat

SEQ ID NO: 3861754 - DNA, 25 bp, Homo sapien
agcaagatgatatgagaggtgatgt

SEQ ID NO: 3861755 - DNA, 25 bp, Homo sapien
agctcccatggcaagcaagatgata

SEQ ID NO: 3861756 - DNA, 25 bp, Homo sapien
caagatgatatgagaggtgatgtcg

SEQ ID NO: 3861757 - DNA, 25 bp, Homo sapien
atcagctcccatggcaagcaagatg

SEQ ID NO: 3861758 - DNA, 25 bp, Homo sapien
tgtctctaacaggaaccatttaact

SEQ ID NO: 3861759 - DNA, 25 bp, Homo sapien
atggccatactaccccaaatgatct

SEQ ID NO: 3861760 - DNA, 25 bp, Homo sapien
aaattaagatacctagcaatgaacg

SEQ ID NO: 3861761 - DNA, 25 bp, Homo sapien
gcaatgaacgtaactaagaagatga

SEQ ID NO: 3861762 - DNA, 25 bp, Homo sapien
tgtatgctactaaagttatcaggtt

SEQ ID NO: 3861763 - DNA, 25 bp, Homo sapien
taaaatacaataaggggacatagag

SEQ ID NO: 3861764 - DNA, 25 bp, Homo sapien
gtgtaatatctatggtaaccacaaa

SEQ ID NO: 3861765 - DNA, 25 bp, Homo sapien
gagaggcaggatttttgtatgctac

SEQ ID NO: 3861766 - DNA, 25 bp, Homo sapien
gattgaacccaaagacgactacctc

SEQ ID NO: 3861767 - DNA, 25 bp, Homo sapien
tcccaacaagggtggacacaaagcc

SEQ ID NO: 3861768 - DNA, 25 bp, Homo sapien
cattggactccgagatgtgctggct

SEQ ID NO: 3861769 - DNA, 25 bp, Homo sapien
tgcaccaaagagtaagtcccagttg

SEQ ID NO: 3861770 - DNA, 25 bp, Homo sapien
gctctgtcaacaggtccttgttata

SEQ ID NO: 3861771 - DNA, 25 bp, Homo sapien
gaatgaagcttctgtgcagtgctct

SEQ ID NO: 3861772 - DNA, 25 bp, Homo sapien
tccttgttataatgcgaaaacacat

SEQ ID NO: 3861773 - DNA, 25 bp, Homo sapien
tgtctcctcgatatcactttttgga

SEQ ID NO: 3861774 - DNA, 25 bp, Homo sapien
ttttcttaaatgtaaattctcaaga

SEQ ID NO: 3861775 - DNA, 25 bp, Homo sapien
tcttaaatgtaaattctcaagatca

SEQ ID NO: 3861776 - DNA, 25 bp, Homo sapien
cttaaatgtaaattctcaagatcac

SEQ ID NO: 3861777 - DNA, 25 bp, Homo sapien
ttcttaaatgtaaattctcaagatc

SEQ ID NO: 3861778 - DNA, 25 bp, Homo sapien
tcatcataacatccattgtgccctt

SEQ ID NO: 3861779 - DNA, 25 bp, Homo sapien
aactttcaacagaggattcatcaaa

SEQ ID NO: 3861780 - DNA, 25 bp, Homo sapien
ttcaacagaggattcatcaaattga

SEQ ID NO: 3861781 - DNA, 25 bp, Homo sapien
caaactttcaacagaggattcatca

SEQ ID NO: 3861782 - DNA, 25 bp, Homo sapien
taaagaccttcctatattgatcaaa

SEQ ID NO: 3861783 - DNA, 25 bp, Homo sapien
caaagttatagcttttggcacaaga

SEQ ID NO: 3861784 - DNA, 25 bp, Homo sapien
gagacctgcctaaataacactgaag

SEQ ID NO: 3861785 - DNA, 25 bp, Homo sapien
acatttcggtaactatttagagtag

SEQ ID NO: 3861786 - DNA, 25 bp, Homo sapien
actctgaagaaagacttcctcaaat

SEQ ID NO: 3861787 - DNA, 25 bp, Homo sapien
tcaaattctttacatttgtattgtt

SEQ ID NO: 3861788 - DNA, 25 bp, Homo sapien
tgaagaaagacttcctcaaattctt

SEQ ID NO: 3861789 - DNA, 25 bp, Homo sapien
tctgaagaaagacttcctcaaattc

SEQ ID NO: 3861790 - DNA, 25 bp, Homo sapien
tatggatggtctgatgttgaatatg

SEQ ID NO: 3861791 - DNA, 25 bp, Homo sapien
tgatatggatggtctgatgttgaat

SEQ ID NO: 3861792 - DNA, 25 bp, Homo sapien
gatggtctgatgttgaatatgtttt

SEQ ID NO: 3861793 - DNA, 25 bp, Homo sapien
ctgatgttgaatatgttttaatgac

SEQ ID NO: 3861794 - DNA, 25 bp, Homo sapien
tcattatggattatctgctttctaa

SEQ ID NO: 3861795 - DNA, 25 bp, Homo sapien
tctcttcggtaggaatgatctgatg

SEQ ID NO: 3861796 - DNA, 25 bp, Homo sapien
aactatggtttaagctatccccaca

SEQ ID NO: 3861797 - DNA, 25 bp, Homo sapien
gttgagtaaggtgcaaactatggtt

SEQ ID NO: 3861798 - DNA, 25 bp, Homo sapien
acaataagattggaggaacgagtaa

SEQ ID NO: 3861799 - DNA, 25 bp, Homo sapien
caataagattggaggaacgagtaaa

SEQ ID NO: 3861800 - DNA, 25 bp, Homo sapien
cacaataagattggaggaacgagta

SEQ ID NO: 3861801 - DNA, 25 bp, Homo sapien
cctgaggagtcactaaaagatttgc

SEQ ID NO: 3861802 - DNA, 25 bp, Homo sapien
taaggcaagaactacggctaaagac

SEQ ID NO: 3861803 - DNA, 25 bp, Homo sapien
taaggcatgaactacggttaaaagc

SEQ ID NO: 3861804 - DNA, 25 bp, Homo sapien
tgagttcgccgatgcacagtaagac

SEQ ID NO: 3861805 - DNA, 25 bp, Homo sapien
tatgaacccctaggtgactcataag

SEQ ID NO: 3861806 - DNA, 25 bp, Homo sapien
caccacggattaaggaaaagcagca

SEQ ID NO: 3861807 - DNA, 25 bp, Homo sapien
gacctcacattgttctgatgcagaa

SEQ ID NO: 3861808 - DNA, 25 bp, Homo sapien
gatattaacgtagaatgacctcaca

SEQ ID NO: 3861809 - DNA, 25 bp, Homo sapien
tatagaaaagagctctaaacacgta

SEQ ID NO: 3861810 - DNA, 25 bp, Homo sapien
atatagaaaagagctctaaacacgt

SEQ ID NO: 3861811 - DNA, 25 bp, Homo sapien
catatagggtgtgagctttaggctg

SEQ ID NO: 3861812 - DNA, 25 bp, Homo sapien
cacttacgaggtctatgagattcat

SEQ ID NO: 3861813 - DNA, 25 bp, Homo sapien
ttaagttcacccatagtctacagca

SEQ ID NO: 3861814 - DNA, 25 bp, Homo sapien
tgttagtacttcaactcagtggtcc

SEQ ID NO: 3861815 - DNA, 25 bp, Homo sapien
gaacggatgattgccactttatgag

SEQ ID NO: 3861816 - DNA, 25 bp, Homo sapien
tttgagggcaggcaagatcttcact

SEQ ID NO: 3861817 - DNA, 25 bp, Homo sapien
tctagtatgaaacctgatcggtacc

SEQ ID NO: 3861818 - DNA, 25 bp, Homo sapien
gaatgcctccccacaaaggtagaag

SEQ ID NO: 3861819 - DNA, 25 bp, Homo sapien
taaacagagtaagatgcatcgcaag

SEQ ID NO: 3861820 - DNA, 25 bp, Homo sapien
gatgccgtcaaaaaacagacatgca

SEQ ID NO: 3861821 - DNA, 25 bp, Homo sapien
gcatcgcaagtcatggacactccca

SEQ ID NO: 3861822 - DNA, 25 bp, Homo sapien
tagtggcaacccaagaaacacagct

SEQ ID NO: 3861823 - DNA, 25 bp, Homo sapien
gtgccgtgtttcttcactgggctct

SEQ ID NO: 3861824 - DNA, 25 bp, Homo sapien
agatttgggagtgccgtgtttcttc

SEQ ID NO: 3861825 - DNA, 25 bp, Homo sapien
tttgggagtgccgtgtttcttcact

SEQ ID NO: 3861826 - DNA, 25 bp, Homo sapien
ggagtgccgtgtttcttcactgggc

SEQ ID NO: 3861827 - DNA, 25 bp, Homo sapien
gaagcggatcccccaggtacagtcc

SEQ ID NO: 3861828 - DNA, 25 bp, Homo sapien
cggatcccccaggtacagtccatgg

SEQ ID NO: 3861829 - DNA, 25 bp, Homo sapien
caccaagaagcggatcccccaggta

SEQ ID NO: 3861830 - DNA, 25 bp, Homo sapien
cagctgccaccaagaagcggatccc

SEQ ID NO: 3861831 - DNA, 25 bp, Homo sapien
tcagccccaggctgcaacagctgaa

SEQ ID NO: 3861832 - DNA, 25 bp, Homo sapien
aacagctgaacctgggaatggacac

SEQ ID NO: 3861833 - DNA, 25 bp, Homo sapien
cgtgtaaagtatttggtgaaggtgt

SEQ ID NO: 3861834 - DNA, 25 bp, Homo sapien
gctgcaacagctgaacctgggaatg

SEQ ID NO: 3861835 - DNA, 25 bp, Homo sapien
gtttttgcactgtgtctctcacaca

SEQ ID NO: 3861836 - DNA, 25 bp, Homo sapien
cacacagtaatacacgaccatgtct

SEQ ID NO: 3861837 - DNA, 25 bp, Homo sapien
tgtgctcatggacctgtcactggta

SEQ ID NO: 3861838 - DNA, 25 bp, Homo sapien
tcatggacctgtcactggtaatggt

SEQ ID NO: 3861839 - DNA, 25 bp, Homo sapien
caagggacactaatattgagggtga

SEQ ID NO: 3861840 - DNA, 25 bp, Homo sapien
aagggaagcccaaatcagtgcagac

SEQ ID NO: 3861841 - DNA, 25 bp, Homo sapien
ctggacctgattcacaagggacact

SEQ ID NO: 3861842 - DNA, 25 bp, Homo sapien
cagtgcagaccccacggtgtggaca

SEQ ID NO: 3861843 - DNA, 25 bp, Homo sapien
caaggtcacctcgcacatcctccat

SEQ ID NO: 3861844 - DNA, 25 bp, Homo sapien
ccaaggtcacctcgcacatcctcca

SEQ ID NO: 3861845 - DNA, 25 bp, Homo sapien
agacccagctcagcccaaattccat

SEQ ID NO: 3861846 - DNA, 25 bp, Homo sapien
aaagacccagctcagcccaaattcc

SEQ ID NO: 3861847 - DNA, 25 bp, Homo sapien
ttaaaatagcagcaagaaagaccca

SEQ ID NO: 3861848 - DNA, 25 bp, Homo sapien
cttttaaaatagcagcaagaaagac

SEQ ID NO: 3861849 - DNA, 25 bp, Homo sapien
ctccaccagctgcacctcacactgc

SEQ ID NO: 3861850 - DNA, 25 bp, Homo sapien
accagctgcacctcacactgcacac

SEQ ID NO: 3861851 - DNA, 25 bp, Homo sapien
cccaggctggaccaagcctccccca

SEQ ID NO: 3861852 - DNA, 25 bp, Homo sapien
aagcctcccccagactccaccagct

SEQ ID NO: 3861853 - DNA, 25 bp, Homo sapien
ggagttctcattccggtaggtggca

SEQ ID NO: 3861854 - DNA, 25 bp, Homo sapien
catggttgaggagttctcattccgg

SEQ ID NO: 3861855 - DNA, 25 bp, Homo sapien
gagcttcctcacgactctgatgctg

SEQ ID NO: 3861856 - DNA, 25 bp, Homo sapien
gtgcccatggttgaggagttctcat

SEQ ID NO: 3861857 - DNA, 25 bp, Homo sapien
ggaggaagtactggttatgatcaga

SEQ ID NO: 3861858 - DNA, 25 bp, Homo sapien
tgatcagaaatccagaggcggcaca

SEQ ID NO: 3861859 - DNA, 25 bp, Homo sapien
cagaaatccagaggcggcacaggtg

SEQ ID NO: 3861860 - DNA, 25 bp, Homo sapien
ttatgatcagaaatccagaggcggc

SEQ ID NO: 3861861 - DNA, 25 bp, Homo sapien
ccatggtggtgtactcattgcacat

SEQ ID NO: 3861862 - DNA, 25 bp, Homo sapien
tccatggtggtgtactcattgcaca

SEQ ID NO: 3861863 - DNA, 25 bp, Homo sapien
atggtggtgtactcattgcacatgt

SEQ ID NO: 3861864 - DNA, 25 bp, Homo sapien
catggtggtgtactcattgcacatg

SEQ ID NO: 3861865 - DNA, 25 bp, Homo sapien
tgccacgaagttctgttgagacaca

SEQ ID NO: 3861866 - DNA, 25 bp, Homo sapien
ggaacagaggtcactgccacgaagt

SEQ ID NO: 3861867 - DNA, 25 bp, Homo sapien
cctcaggaattgagatgggaacaga

SEQ ID NO: 3861868 - DNA, 25 bp, Homo sapien
gggcactggtgcaactcctcaggaa

SEQ ID NO: 3861869 - DNA, 25 bp, Homo sapien
aggctgtaccaaggcctcccgcaga

SEQ ID NO: 3861870 - DNA, 25 bp, Homo sapien
caggcgttactgaaagtgaattcag

SEQ ID NO: 3861871 - DNA, 25 bp, Homo sapien
tcatccaggcgttactgaaagtgaa

SEQ ID NO: 3861872 - DNA, 25 bp, Homo sapien
atccaggcgttactgaaagtgaatt

SEQ ID NO: 3861873 - DNA, 25 bp, Homo sapien
tgcttttaatacggccaacccactc

SEQ ID NO: 3861874 - DNA, 25 bp, Homo sapien
tagctttgcttttaatacggccaac

SEQ ID NO: 3861875 - DNA, 25 bp, Homo sapien
cattagctttgcttttaatacggcc

SEQ ID NO: 3861876 - DNA, 25 bp, Homo sapien
tttaatacggccaacccactccagc

SEQ ID NO: 3861877 - DNA, 25 bp, Homo sapien
tgtctgtggtacagtaatacacggc

SEQ ID NO: 3861878 - DNA, 25 bp, Homo sapien
cacggccgtgtcctcggttttcagg

SEQ ID NO: 3861879 - DNA, 25 bp, Homo sapien
tgaatcatctcttgagatggtgaat

SEQ ID NO: 3861880 - DNA, 25 bp, Homo sapien
agatacagcgtgttttttgaatcat

SEQ ID NO: 3861881 - DNA, 25 bp, Homo sapien
gctggcaacatgcccactgtcaagt

SEQ ID NO: 3861882 - DNA, 25 bp, Homo sapien
tggcaacatgcccactgtcaagtgt

SEQ ID NO: 3861883 - DNA, 25 bp, Homo sapien
gcaacatgcccactgtcaagtgtga

SEQ ID NO: 3861884 - DNA, 25 bp, Homo sapien
catgcccactgtcaagtgtgactgg

SEQ ID NO: 3861885 - DNA, 25 bp, Homo sapien
cacagcaaaagcagggacatgcctg

SEQ ID NO: 3861886 - DNA, 25 bp, Homo sapien
acatgcctggcttggaggtcagtgc

SEQ ID NO: 3861887 - DNA, 25 bp, Homo sapien
gagaccacagcaaaagcagggacat

SEQ ID NO: 3861888 - DNA, 25 bp, Homo sapien
aaagcagggacatgcctggcttgga

SEQ ID NO: 3861889 - DNA, 25 bp, Homo sapien
aatgccgtccgagggtgaaggtgaa

SEQ ID NO: 3861890 - DNA, 25 bp, Homo sapien
tgcagtcccgcgagtaatgccgtcc

SEQ ID NO: 3861891 - DNA, 25 bp, Homo sapien
gtcccgcgagtaatgccgtccgagg

SEQ ID NO: 3861892 - DNA, 25 bp, Homo sapien
gtgcccaggacagcggctgagttca

SEQ ID NO: 3861893 - DNA, 25 bp, Homo sapien
ggtgttgagtccatcatcgcaggac

SEQ ID NO: 3861894 - DNA, 25 bp, Homo sapien
ttgagtccatcatcgcaggacttgg

SEQ ID NO: 3861895 - DNA, 25 bp, Homo sapien
gaaggtgttgagtccatcatcgcag

SEQ ID NO: 3861896 - DNA, 25 bp, Homo sapien
cggaaggtgttgagtccatcatcgc

SEQ ID NO: 3861897 - DNA, 25 bp, Homo sapien
caggctgggtatgcggtttggcagg

SEQ ID NO: 3861898 - DNA, 25 bp, Homo sapien
gcaggctgggtatgcggtttggcag

SEQ ID NO: 3861899 - DNA, 25 bp, Homo sapien
cctcactcctgcgcacacacacaga

SEQ ID NO: 3861900 - DNA, 25 bp, Homo sapien
ctgcgcacacacacagacctgcaac

SEQ ID NO: 3861901 - DNA, 25 bp, Homo sapien
tgcgcacacacacagacctgcaact

SEQ ID NO: 3861902 - DNA, 25 bp, Homo sapien
gcacacacacagacctgcaactcac

SEQ ID NO: 3861903 - DNA, 25 bp, Homo sapien
aaagagatcccgtggctggcagatg

SEQ ID NO: 3861904 - DNA, 25 bp, Homo sapien
ccatcatgtggatcctgagctgtga

SEQ ID NO: 3861905 - DNA, 25 bp, Homo sapien
accagacaaagagatcccgtggctg

SEQ ID NO: 3861906 - DNA, 25 bp, Homo sapien
tcagctctccgaacaaaccagacaa

SEQ ID NO: 3861907 - DNA, 25 bp, Homo sapien
agggcaggagctccatctcccatca

SEQ ID NO: 3861908 - DNA, 25 bp, Homo sapien
tgagggcaggagctccatctcccat

SEQ ID NO: 3861909 - DNA, 25 bp, Homo sapien
gcaggagctccatctcccatcagac

SEQ ID NO: 3861910 - DNA, 25 bp, Homo sapien
ggcaggagctccatctcccatcaga

SEQ ID NO: 3861911 - DNA, 25 bp, Homo sapien
gggggaacaggagtggtgagaggtc

SEQ ID NO: 3861912 - DNA, 25 bp, Homo sapien
ctgcagggagacacggggttggggg

SEQ ID NO: 3861913 - DNA, 25 bp, Homo sapien
ttggggggaacaggagtggtgagag

SEQ ID NO: 3861914 - DNA, 25 bp, Homo sapien
ggaacaggagtggtgagaggtcagt

SEQ ID NO: 3861915 - DNA, 25 bp, Homo sapien
acccgcttccactggcgcaggccgc

SEQ ID NO: 3861916 - DNA, 25 bp, Homo sapien
cttccactggcgcaggccgctgccc

SEQ ID NO: 3861917 - DNA, 25 bp, Homo sapien
cccgcttccactggcgcaggccgct

SEQ ID NO: 3861918 - DNA, 25 bp, Homo sapien
actggcgcaggccgctgcccacttt

SEQ ID NO: 3861919 - DNA, 25 bp, Homo sapien
cttgctcagcgagagcgagcgcgcc

SEQ ID NO: 3861920 - DNA, 25 bp, Homo sapien
ccttgctcagcgagagcgagcgcgc

SEQ ID NO: 3861921 - DNA, 25 bp, Homo sapien
cgccgccagcccgggctcccgccgc

SEQ ID NO: 3861922 - DNA, 25 bp, Homo sapien
gccgccgccagcccgggctcccgcc

SEQ ID NO: 3861923 - DNA, 25 bp, Homo sapien
ccgccgccgccagcccgggctcccg

SEQ ID NO: 3861924 - DNA, 25 bp, Homo sapien
gccgccagcccgggctcccgccgct

SEQ ID NO: 3861925 - DNA, 25 bp, Homo sapien
ccgatgcagacgggcgccgcctcgt

SEQ ID NO: 3861926 - DNA, 25 bp, Homo sapien
ctgtaggagatgtccacgaggcagg

SEQ ID NO: 3861927 - DNA, 25 bp, Homo sapien
aggagccgatgcagacgggcgccgc

SEQ ID NO: 3861928 - DNA, 25 bp, Homo sapien
agatgtccacgaggcaggagccgat

SEQ ID NO: 3861929 - DNA, 25 bp, Homo sapien
cggaacacgtgcctcctcttggtct

SEQ ID NO: 3861930 - DNA, 25 bp, Homo sapien
aagtcagcggtggtcagccggaaca

SEQ ID NO: 3861931 - DNA, 25 bp, Homo sapien
gatattcacagaagtcagcggtggt

SEQ ID NO: 3861932 - DNA, 25 bp, Homo sapien
ggtggtcagccggaacacgtgcctc

SEQ ID NO: 3861933 - DNA, 25 bp, Homo sapien
tcactttgcgataatcattaagctt

SEQ ID NO: 3861934 - DNA, 25 bp, Homo sapien
ctcactttgcgataatcattaagct

SEQ ID NO: 3861935 - DNA, 25 bp, Homo sapien
gatcagagcttggttggcacagccg

SEQ ID NO: 3861936 - DNA, 25 bp, Homo sapien
ttgctgatcagagcttggttggcac

SEQ ID NO: 3861937 - DNA, 25 bp, Homo sapien
ttgaggaactcagacttgaggcccc

SEQ ID NO: 3861938 - DNA, 25 bp, Homo sapien
gaggccacgtgccgcactctgcttg

SEQ ID NO: 3861939 - DNA, 25 bp, Homo sapien
cctgaggccacgtgccgcactctgc

SEQ ID NO: 3861940 - DNA, 25 bp, Homo sapien
ccccaggccgcgagagcctttgggg

SEQ ID NO: 3861941 - DNA, 25 bp, Homo sapien
ggttctccgtggctggctggcactc

SEQ ID NO: 3861942 - DNA, 25 bp, Homo sapien
tttttcttgatgatgttgatgcccc

SEQ ID NO: 3861943 - DNA, 25 bp, Homo sapien
tgcccttggggcagccttcttattt

SEQ ID NO: 3861944 - DNA, 25 bp, Homo sapien
ctgaccccaaatgcccttggggcag

SEQ ID NO: 3861945 - DNA, 25 bp, Homo sapien
ttgagctgctcctgtaggctggaca

SEQ ID NO: 3861946 - DNA, 25 bp, Homo sapien
gaggctcgggcagctttcggaagaa

SEQ ID NO: 3861947 - DNA, 25 bp, Homo sapien
aaggacttgagcaggctgttgatca

SEQ ID NO: 3861948 - DNA, 25 bp, Homo sapien
cagcagtgaaaagaggctcgggcag

SEQ ID NO: 3861949 - DNA, 25 bp, Homo sapien
ggcagctttcggaagaaggacttga

SEQ ID NO: 3861950 - DNA, 25 bp, Homo sapien
atgcagttggcctcgatgaagtcgt

SEQ ID NO: 3861951 - DNA, 25 bp, Homo sapien
tcccgcacgtcctcaatgcagttgg

SEQ ID NO: 3861952 - DNA, 25 bp, Homo sapien
agcttccgcagcgtcctcatccgct

SEQ ID NO: 3861953 - DNA, 25 bp, Homo sapien
catccgctcccgcacgtcctcaatg

SEQ ID NO: 3861954 - DNA, 25 bp, Homo sapien
cagtgatggtcttgagacggcccac

SEQ ID NO: 3861955 - DNA, 25 bp, Homo sapien
aagtagtgtcctgggagatcccgga

SEQ ID NO: 3861956 - DNA, 25 bp, Homo sapien
atggtcttgagacggcccacaagga

SEQ ID NO: 3861957 - DNA, 25 bp, Homo sapien
cccacaaggaatttgagcgtttcaa

SEQ ID NO: 3861958 - DNA, 25 bp, Homo sapien
cagtgtctccacgatcttgtagcgg

SEQ ID NO: 3861959 - DNA, 25 bp, Homo sapien
agtgtccgcccaaagaccagggcca

SEQ ID NO: 3861960 - DNA, 25 bp, Homo sapien
gtcatgttgtcctcagacgtcctca

SEQ ID NO: 3861961 - DNA, 25 bp, Homo sapien
tgggtcaccatgtctgtcatgttgt

SEQ ID NO: 3861962 - DNA, 25 bp, Homo sapien
tcttcatcactgaagaaccagtctg

SEQ ID NO: 3861963 - DNA, 25 bp, Homo sapien
cttgtcctcttcatcactgaagaac

SEQ ID NO: 3861964 - DNA, 25 bp, Homo sapien
tctctcccttgtcctcttcatcact

SEQ ID NO: 3861965 - DNA, 25 bp, Homo sapien
tgtcctcttcatcactgaagaacca

SEQ ID NO: 3861966 - DNA, 25 bp, Homo sapien
aggaggggtcagctggcatgccctc

SEQ ID NO: 3861967 - DNA, 25 bp, Homo sapien
ggtcagctggcatgccctcggatgc

SEQ ID NO: 3861968 - DNA, 25 bp, Homo sapien
ggggtcagctggcatgccctcggat

SEQ ID NO: 3861969 - DNA, 25 bp, Homo sapien
gaggggtcagctggcatgccctcgg

SEQ ID NO: 3861970 - DNA, 25 bp, Homo sapien
tgttgggcaggaggtactcaatgtt

SEQ ID NO: 3861971 - DNA, 25 bp, Homo sapien
ccaatgttgggcaggaggtactcaa

SEQ ID NO: 3861972 - DNA, 25 bp, Homo sapien
tgccaatgttgggcaggaggtactc

SEQ ID NO: 3861973 - DNA, 25 bp, Homo sapien
aatgttgggcaggaggtactcaatg

SEQ ID NO: 3861974 - DNA, 25 bp, Homo sapien
tggacttgactgaactacaggtggt

SEQ ID NO: 3861975 - DNA, 25 bp, Homo sapien
gacttgactgaactacaggtggtag

SEQ ID NO: 3861976 - DNA, 25 bp, Homo sapien
cttggacttgactgaactacaggtg

SEQ ID NO: 3861977 - DNA, 25 bp, Homo sapien
cttgactgaactacaggtggtagaa

SEQ ID NO: 3861978 - DNA, 25 bp, Homo sapien
aagccttcagaattgccttcatacg

SEQ ID NO: 3861979 - DNA, 25 bp, Homo sapien
gccttcagaattgccttcatacgta

SEQ ID NO: 3861980 - DNA, 25 bp, Homo sapien
ccttcagaattgccttcatacgtac

SEQ ID NO: 3861981 - DNA, 25 bp, Homo sapien
tcaagccttcagaattgccttcata

SEQ ID NO: 3861982 - DNA, 25 bp, Homo sapien
gaccatcaactttccccacggtcca

SEQ ID NO: 3861983 - DNA, 25 bp, Homo sapien
ttgggcactcggtacctcctgcctt

SEQ ID NO: 3861984 - DNA, 25 bp, Homo sapien
tttccccacggtccaattgccattc

SEQ ID NO: 3861985 - DNA, 25 bp, Homo sapien
ggtccaattgccattccctcaattc

SEQ ID NO: 3861986 - DNA, 25 bp, Homo sapien
agatgcctatccaggatgcactccc

SEQ ID NO: 3861987 - DNA, 25 bp, Homo sapien
tatccaggatgcactccctgtgagg

SEQ ID NO: 3861988 - DNA, 25 bp, Homo sapien
attcagccgccagatgcctatccag

SEQ ID NO: 3861989 - DNA, 25 bp, Homo sapien
actcattcagccgccagatgcctat

SEQ ID NO: 3861990 - DNA, 25 bp, Homo sapien
catgttaccgaatctcttctccccc

SEQ ID NO: 3861991 - DNA, 25 bp, Homo sapien
aaggtagtgaccgtgtcctggagcc

SEQ ID NO: 3861992 - DNA, 25 bp, Homo sapien
atccctgaaggtagtgaccgtgtcc

SEQ ID NO: 3861993 - DNA, 25 bp, Homo sapien
tcacttccatccctgaaggtagtga

SEQ ID NO: 3861994 - DNA, 25 bp, Homo sapien
tgctgccaccaaaaaaatgatcctt

SEQ ID NO: 3861995 - DNA, 25 bp, Homo sapien
aaaaaatgatccttcaggtccagtc

SEQ ID NO: 3861996 - DNA, 25 bp, Homo sapien
gccaccaaaaaaatgatccttcagg

SEQ ID NO: 3861997 - DNA, 25 bp, Homo sapien
gaggagctgtgttctcagcaacttc

SEQ ID NO: 3861998 - DNA, 25 bp, Homo sapien
taaggaagggcacagatgtggggtg

SEQ ID NO: 3861999 - DNA, 25 bp, Homo sapien
ggcacagatgtggggtggctcctca

SEQ ID NO: 3862000 - DNA, 25 bp, Homo sapien
acagatgtggggtggctcctcacca

SEQ ID NO: 3862001 - DNA, 25 bp, Homo sapien
ctaaggaagggcacagatgtggggt

SEQ ID NO: 3862002 - DNA, 25 bp, Homo sapien
cacggggaacctggatattgagagt

SEQ ID NO: 3862003 - DNA, 25 bp, Homo sapien
ccacggggaacctggatattgagag

SEQ ID NO: 3862004 - DNA, 25 bp, Homo sapien
tggttttgagtaacccatggtgtcc

SEQ ID NO: 3862005 - DNA, 25 bp, Homo sapien
tggttttgagtgcccccttgtgttc

SEQ ID NO: 3862006 - DNA, 25 bp, Homo sapien
ttttgagtaacccatggtgtcctga

SEQ ID NO: 3862007 - DNA, 25 bp, Homo sapien
ccctggtggttttgagtaacccatg

SEQ ID NO: 3862008 - DNA, 25 bp, Homo sapien
ccgctgttttcctgaggctccgcac

SEQ ID NO: 3862009 - DNA, 25 bp, Homo sapien
ccagtgtcctgagtgccccctggtg

SEQ ID NO: 3862010 - DNA, 25 bp, Homo sapien
cccagtgtcctgagtgccccctggt

SEQ ID NO: 3862011 - DNA, 25 bp, Homo sapien
agtgccccctggtggttctgagcac

SEQ ID NO: 3862012 - DNA, 25 bp, Homo sapien
ctgagtgccccctggtggttctgag

SEQ ID NO: 3862013 - DNA, 25 bp, Homo sapien
ccaatgttgctctcccagaatgaaa

SEQ ID NO: 3862014 - DNA, 25 bp, Homo sapien
agggctgacgtctgtgttgagtggg

SEQ ID NO: 3862015 - DNA, 25 bp, Homo sapien
cagggctgacgtctgtgttgagtgg

SEQ ID NO: 3862016 - DNA, 25 bp, Homo sapien
ttaatatagcaacaaggaaaaccca

SEQ ID NO: 3862017 - DNA, 25 bp, Homo sapien
aaacccagctcagcacaaactccat

SEQ ID NO: 3862018 - DNA, 25 bp, Homo sapien
atatagcaacaaggaaaacccagct

SEQ ID NO: 3862019 - DNA, 25 bp, Homo sapien
aaaacccagctcagcacaaactcca

SEQ ID NO: 3862020 - DNA, 25 bp, Homo sapien
cccagtgcatagcatagctactgaa

SEQ ID NO: 3862021 - DNA, 25 bp, Homo sapien
gaatcggcccttcacggagtctgca

SEQ ID NO: 3862022 - DNA, 25 bp, Homo sapien
gcccttcacggagtctgcatagtat

SEQ ID NO: 3862023 - DNA, 25 bp, Homo sapien
acccagtgcatagcatagctactga

SEQ ID NO: 3862024 - DNA, 25 bp, Homo sapien
agagaggaaagtcctatcagcctct

SEQ ID NO: 3862025 - DNA, 25 bp, Homo sapien
ggaatgggcttgagacctcgagctt

SEQ ID NO: 3862026 - DNA, 25 bp, Homo sapien
gagacctcgagctttggcagcaaga

SEQ ID NO: 3862027 - DNA, 25 bp, Homo sapien
aaagtcctatcagcctctcccacat

SEQ ID NO: 3862028 - DNA, 25 bp, Homo sapien
tcttcactactgttggccacttgca

SEQ ID NO: 3862029 - DNA, 25 bp, Homo sapien
tctccacatgacacactggagggtg

SEQ ID NO: 3862030 - DNA, 25 bp, Homo sapien
tctgtggtactttgcacagcacagg

SEQ ID NO: 3862031 - DNA, 25 bp, Homo sapien
gcattcccaggtgagtctccacatg

SEQ ID NO: 3862032 - DNA, 25 bp, Homo sapien
gctcttcaggtccagggctgactcc

SEQ ID NO: 3862033 - DNA, 25 bp, Homo sapien
gactggttgtgatggagtggccaga

SEQ ID NO: 3862034 - DNA, 25 bp, Homo sapien
ctcttcaggtccagggctgactcct

SEQ ID NO: 3862035 - DNA, 25 bp, Homo sapien
ccagtagtaaggactggttgtgatg

SEQ ID NO: 3862036 - DNA, 25 bp, Homo sapien
cagtattgttgaaatggctggccac

SEQ ID NO: 3862037 - DNA, 25 bp, Homo sapien
gtattgttgaaatggctggccaccc

SEQ ID NO: 3862038 - DNA, 25 bp, Homo sapien
tattgttgaaatggctggccacccc

SEQ ID NO: 3862039 - DNA, 25 bp, Homo sapien
ctaatcattcccagtattgttgaaa

SEQ ID NO: 3862040 - DNA, 25 bp, Homo sapien
agaagaggatcttgcaggtccagcc

SEQ ID NO: 3862041 - DNA, 25 bp, Homo sapien
caagaagaggatcttgcaggtccag

SEQ ID NO: 3862042 - DNA, 25 bp, Homo sapien
caccaagaagaggatcttgcaggtc

SEQ ID NO: 3862043 - DNA, 25 bp, Homo sapien
aagaggatcttgcaggtccagccca

SEQ ID NO: 3862044 - DNA, 25 bp, Homo sapien
actcaatcccctcctcattactggg

SEQ ID NO: 3862045 - DNA, 25 bp, Homo sapien
aaagcccccttgactggactcaatc

SEQ ID NO: 3862046 - DNA, 25 bp, Homo sapien
cctcctcattactgggacctgggaa

SEQ ID NO: 3862047 - DNA, 25 bp, Homo sapien
aggacacaggatggatgaaagcccc

SEQ ID NO: 3862048 - DNA, 25 bp, Homo sapien
tgcaagtagcagtaggtgaaggtgt

SEQ ID NO: 3862049 - DNA, 25 bp, Homo sapien
agtgcaagtagcagtaggtgaaggt

SEQ ID NO: 3862050 - DNA, 25 bp, Homo sapien
aagtagcagtaggtgaaggtgtatc

SEQ ID NO: 3862051 - DNA, 25 bp, Homo sapien
caagtagcagtaggtgaaggtgtat

SEQ ID NO: 3862052 - DNA, 25 bp, Homo sapien
taaaatcctgtccactcaagccctt

SEQ ID NO: 3862053 - DNA, 25 bp, Homo sapien
tcagactccaccagtgaacttcaca

SEQ ID NO: 3862054 - DNA, 25 bp, Homo sapien
actccaccagtgaacttcacatagg

SEQ ID NO: 3862055 - DNA, 25 bp, Homo sapien
caccagtgaacttcacataggactt

SEQ ID NO: 3862056 - DNA, 25 bp, Homo sapien
cagactccaccagtgaacttcacat

SEQ ID NO: 3862057 - DNA, 25 bp, Homo sapien
acgatatgtgggagacatttattaa

SEQ ID NO: 3862058 - DNA, 25 bp, Homo sapien
tagcagctgtgttcaatgctgaatc

SEQ ID NO: 3862059 - DNA, 25 bp, Homo sapien
gctgaatcccccttcacgatatgtg

SEQ ID NO: 3862060 - DNA, 25 bp, Homo sapien
tattaaatcttgtgtccttcaggca

SEQ ID NO: 3862061 - DNA, 25 bp, Homo sapien
ctggaggagactgctcccctgagac

SEQ ID NO: 3862062 - DNA, 25 bp, Homo sapien
acagctccagggcgatgtgggacat

SEQ ID NO: 3862063 - DNA, 25 bp, Homo sapien
ctgtgtctgtgcctctaaacactgg

SEQ ID NO: 3862064 - DNA, 25 bp, Homo sapien
tgtgcctctaaacactggaggagac

SEQ ID NO: 3862065 - DNA, 25 bp, Homo sapien
caatgtctctagttcgccataaatc

SEQ ID NO: 3862066 - DNA, 25 bp, Homo sapien
tctcaatgtctctagttcgccataa

SEQ ID NO: 3862067 - DNA, 25 bp, Homo sapien
gtcctctcaatgtctctagttcgcc

SEQ ID NO: 3862068 - DNA, 25 bp, Homo sapien
tcctctcaatgtctctagttcgcca

SEQ ID NO: 3862069 - DNA, 25 bp, Homo sapien
gacccagctcgtgtagtggttactg

SEQ ID NO: 3862070 - DNA, 25 bp, Homo sapien
gcggacccagctcgtgtagtggtta

SEQ ID NO: 3862071 - DNA, 25 bp, Homo sapien
ccagctcgtgtagtggttactgaag

SEQ ID NO: 3862072 - DNA, 25 bp, Homo sapien
ctcgtgtagtggttactgaaggtga

SEQ ID NO: 3862073 - DNA, 25 bp, Homo sapien
gcgtagtttgtgtaaccactattac

SEQ ID NO: 3862074 - DNA, 25 bp, Homo sapien
gtagtttgtgtaaccactattacca

SEQ ID NO: 3862075 - DNA, 25 bp, Homo sapien
gtttgtgtaaccactattaccacta

SEQ ID NO: 3862076 - DNA, 25 bp, Homo sapien
ctgcgtagtttgtgtaaccactatt

SEQ ID NO: 3862077 - DNA, 25 bp, Homo sapien
gtccctggagatggtgaatcggcct

SEQ ID NO: 3862078 - DNA, 25 bp, Homo sapien
cagtgagttcttggcgttgtccctg

SEQ ID NO: 3862079 - DNA, 25 bp, Homo sapien
cagatacagtgagttcttggcgttg

SEQ ID NO: 3862080 - DNA, 25 bp, Homo sapien
cctggagatggtgaatcggcctttc

SEQ ID NO: 3862081 - DNA, 25 bp, Homo sapien
actgacttcccctcactctgtgttt

SEQ ID NO: 3862082 - DNA, 25 bp, Homo sapien
gacttcccctcactctgtgtttcac

SEQ ID NO: 3862083 - DNA, 25 bp, Homo sapien
cttcccctcactctgtgtttcacac

SEQ ID NO: 3862084 - DNA, 25 bp, Homo sapien
tgacttcccctcactctgtgtttca

SEQ ID NO: 3862085 - DNA, 25 bp, Homo sapien
ctcctgccgcggagggtttttgcgc

SEQ ID NO: 3862086 - DNA, 25 bp, Homo sapien
gcgcctttttccaccgccgccgcat

SEQ ID NO: 3862087 - DNA, 25 bp, Homo sapien
gccgcggagggtttttgcgccttca

SEQ ID NO: 3862088 - DNA, 25 bp, Homo sapien
ggtttttgcgccttcatgtccccgc

SEQ ID NO: 3862089 - DNA, 25 bp, Homo sapien
cggctttttgccctagcctttgcgg

SEQ ID NO: 3862090 - DNA, 25 bp, Homo sapien
gctttttgccctagcctttgcggct

SEQ ID NO: 3862091 - DNA, 25 bp, Homo sapien
gccctagcctttgcggctttttgcg

SEQ ID NO: 3862092 - DNA, 25 bp, Homo sapien
ccggcgccggtgctttttactgctt

SEQ ID NO: 3862093 - DNA, 25 bp, Homo sapien
cgccgacgcggctttttgccatcgt

SEQ ID NO: 3862094 - DNA, 25 bp, Homo sapien
atcgtggatttttgaccccgccgct

SEQ ID NO: 3862095 - DNA, 25 bp, Homo sapien
ctgcgggtttttgcggctttctgcc

SEQ ID NO: 3862096 - DNA, 25 bp, Homo sapien
ttgccatcgtggatttttgaccccg

SEQ ID NO: 3862097 - DNA, 25 bp, Homo sapien
aaatagagatacttctcctgcccct

SEQ ID NO: 3862098 - DNA, 25 bp, Homo sapien
taaatcagagtatctactctaagtc

SEQ ID NO: 3862099 - DNA, 25 bp, Homo sapien
aaaaatagagatacttctcctgccc

SEQ ID NO: 3862100 - DNA, 25 bp, Homo sapien
tatctgctaatggacatggtagatt

SEQ ID NO: 3862101 - DNA, 25 bp, Homo sapien
gctatgctacttttctttactcctg

SEQ ID NO: 3862102 - DNA, 25 bp, Homo sapien
tagctatgctacttttctttactcc

SEQ ID NO: 3862103 - DNA, 25 bp, Homo sapien
ttagctatgctacttttctttactc

SEQ ID NO: 3862104 - DNA, 25 bp, Homo sapien
tatgctacttttctttactcctgga

SEQ ID NO: 3862105 - DNA, 25 bp, Homo sapien
tggactctttcaggaaaatgttcct

SEQ ID NO: 3862106 - DNA, 25 bp, Homo sapien
actctttcaggaaaatgttcctaag

SEQ ID NO: 3862107 - DNA, 25 bp, Homo sapien
gtggactctttcaggaaaatgttcc

SEQ ID NO: 3862108 - DNA, 25 bp, Homo sapien
gactctttcaggaaaatgttcctaa

SEQ ID NO: 3862109 - DNA, 25 bp, Homo sapien
actgcatcataaatgaaagggagga

SEQ ID NO: 3862110 - DNA, 25 bp, Homo sapien
gagtgtccaatatcatatttattgt

SEQ ID NO: 3862111 - DNA, 25 bp, Homo sapien
gaggaagagtgtccaatatcatatt

SEQ ID NO: 3862112 - DNA, 25 bp, Homo sapien
tgcatcataaatgaaagggaggaag

SEQ ID NO: 3862113 - DNA, 25 bp, Homo sapien
cagaaaccctgttaagcatggagct

SEQ ID NO: 3862114 - DNA, 25 bp, Homo sapien
ggaatgatcaaagcatgagaccaca

SEQ ID NO: 3862115 - DNA, 25 bp, Homo sapien
gagaaaatagaaatccggtggtgaa

SEQ ID NO: 3862116 - DNA, 25 bp, Homo sapien
gaattccatatgaaaaaggcctgtg

SEQ ID NO: 3862117 - DNA, 25 bp, Homo sapien
aaaaagctgtgtcggcggtggggca

SEQ ID NO: 3862118 - DNA, 25 bp, Homo sapien
gcaaaaagctgtgtcggcggtgggg

SEQ ID NO: 3862119 - DNA, 25 bp, Homo sapien
aagctgtgtcggcggtggggcaaaa

SEQ ID NO: 3862120 - DNA, 25 bp, Homo sapien
gctgtgtcggcggtggggcaaaaag

SEQ ID NO: 3862121 - DNA, 25 bp, Homo sapien
ggcagaaagccacggcgggcaaaaa

SEQ ID NO: 3862122 - DNA, 25 bp, Homo sapien
aaaagtcgcggcagcaaaaagccgc

SEQ ID NO: 3862123 - DNA, 25 bp, Homo sapien
gcaaaaagtcgcggtggcaaaaagc

SEQ ID NO: 3862124 - DNA, 25 bp, Homo sapien
gcgacgggggcaaaaagtcgcggca

SEQ ID NO: 3862125 - DNA, 25 bp, Homo sapien
gcacaggctgccaatgaagatgacg

SEQ ID NO: 3862126 - DNA, 25 bp, Homo sapien
ttattctctcccatcgcctccgcag

SEQ ID NO: 3862127 - DNA, 25 bp, Homo sapien
catcgcctccgcaggcagcgccact

SEQ ID NO: 3862128 - DNA, 25 bp, Homo sapien
gccaccctccgtggccgccgcatca

SEQ ID NO: 3862129 - DNA, 25 bp, Homo sapien
tgagatactgactcagtttataacc

SEQ ID NO: 3862130 - DNA, 25 bp, Homo sapien
tcttgagatactgactcagtttata

SEQ ID NO: 3862131 - DNA, 25 bp, Homo sapien
tcaaatcttgagatactgactcagt

SEQ ID NO: 3862132 - DNA, 25 bp, Homo sapien
gatactgactcagtttataaccgca

SEQ ID NO: 3862133 - DNA, 25 bp, Homo sapien
tgcttaatctagagataggcaatgc

SEQ ID NO: 3862134 - DNA, 25 bp, Homo sapien
ttaatctagagataggcaatgctcc

SEQ ID NO: 3862135 - DNA, 25 bp, Homo sapien
tttgcttaatctagagataggcaat

SEQ ID NO: 3862136 - DNA, 25 bp, Homo sapien
aagattgagcaggttattgtgcttt

SEQ ID NO: 3862137 - DNA, 25 bp, Homo sapien
gacggacaagacacgcatggaatga

SEQ ID NO: 3862138 - DNA, 25 bp, Homo sapien
cacgcttgtcgtgtccgggtgtgca

SEQ ID NO: 3862139 - DNA, 25 bp, Homo sapien
aatattagtggaaagcggaacgacg

SEQ ID NO: 3862140 - DNA, 25 bp, Homo sapien
caccaagactttatgcggactgctg

SEQ ID NO: 3862141 - DNA, 25 bp, Homo sapien
ctgattgctccacttttagtggtgc

SEQ ID NO: 3862142 - DNA, 25 bp, Homo sapien
tcagctggtgagaaactgactcccg

SEQ ID NO: 3862143 - DNA, 25 bp, Homo sapien
cacttttagtggtgctaaattcaaa

SEQ ID NO: 3862144 - DNA, 25 bp, Homo sapien
tgctccacttttagtggtgctaaat

SEQ ID NO: 3862145 - DNA, 25 bp, Homo sapien
gcctgttaaacctactcaacgtgtg

SEQ ID NO: 3862146 - DNA, 25 bp, Homo sapien
aaggattgttgcctccaatgcatgc

SEQ ID NO: 3862147 - DNA, 25 bp, Homo sapien
ctttggctctcgcaacaggcttaga

SEQ ID NO: 3862148 - DNA, 25 bp, Homo sapien
tatcacagccagaagtaatcactgc

SEQ ID NO: 3862149 - DNA, 25 bp, Homo sapien
tagccagagtagtggtaggagaaaa

SEQ ID NO: 3862150 - DNA, 25 bp, Homo sapien
gcgttgatgtcggcgtagaggttcg

SEQ ID NO: 3862151 - DNA, 25 bp, Homo sapien
tgatgtcggcgtagaggttcgtctc

SEQ ID NO: 3862152 - DNA, 25 bp, Homo sapien
gtagccagagtagtggtaggagaaa

SEQ ID NO: 3862153 - DNA, 25 bp, Homo sapien
gtcgatgccgagaccccagaactct

SEQ ID NO: 3862154 - DNA, 25 bp, Homo sapien
tccaggctctgatgccaggcagatg

SEQ ID NO: 3862155 - DNA, 25 bp, Homo sapien
caccctgtcgatgccgagaccccag

SEQ ID NO: 3862156 - DNA, 25 bp, Homo sapien
ctgccaccctgtcgatgccgagacc

SEQ ID NO: 3862157 - DNA, 25 bp, Homo sapien
acaggatgatgccgtccgggctgat

SEQ ID NO: 3862158 - DNA, 25 bp, Homo sapien
gtacaggatgatgccgtccgggctg

SEQ ID NO: 3862159 - DNA, 25 bp, Homo sapien
ctgccggtacaggatgatgccgtcc

SEQ ID NO: 3862160 - DNA, 25 bp, Homo sapien
gatgccgtccgggctgatgcggtac

SEQ ID NO: 3862161 - DNA, 25 bp, Homo sapien
caccgtggcggactcgtagcgcgag

SEQ ID NO: 3862162 - DNA, 25 bp, Homo sapien
tagcgcgaggccaggtccacggtgg

SEQ ID NO: 3862163 - DNA, 25 bp, Homo sapien
accgtggcggactcgtagcgcgagg

SEQ ID NO: 3862164 - DNA, 25 bp, Homo sapien
ccacggtgggcaccgtgccgatgct

SEQ ID NO: 3862165 - DNA, 25 bp, Homo sapien
ctcaggtccaaggtgagcggcgagt

SEQ ID NO: 3862166 - DNA, 25 bp, Homo sapien
tggggaaggcgtcgaagcagtaggt

SEQ ID NO: 3862167 - DNA, 25 bp, Homo sapien
ttggggaaggcgtcgaagcagtagg

SEQ ID NO: 3862168 - DNA, 25 bp, Homo sapien
ctggaagatgagcacgggcggcgtg

SEQ ID NO: 3862169 - DNA, 25 bp, Homo sapien
aagtccatcacctcgtatttcgtgt

SEQ ID NO: 3862170 - DNA, 25 bp, Homo sapien
tcacctcgtatttcgtgtcctggaa

SEQ ID NO: 3862171 - DNA, 25 bp, Homo sapien
tgcgagaagtccatcacctcgtatt

SEQ ID NO: 3862172 - DNA, 25 bp, Homo sapien
actgtaggcagagctagctgcgcgc

SEQ ID NO: 3862173 - DNA, 25 bp, Homo sapien
tctcctaagtagactaagaagtcat

SEQ ID NO: 3862174 - DNA, 25 bp, Homo sapien
tccagtaggctctggtaaagagttt

SEQ ID NO: 3862175 - DNA, 25 bp, Homo sapien
taaacatacatcatgttttgagaag

SEQ ID NO: 3862176 - DNA, 25 bp, Homo sapien
ggtgggatgaaagcagtctgagggc

SEQ ID NO: 3862177 - DNA, 25 bp, Homo sapien
aggtgggatgaaagcagtctgaggg

SEQ ID NO: 3862178 - DNA, 25 bp, Homo sapien
gaggtgggatgaaagcagtctgagg

SEQ ID NO: 3862179 - DNA, 25 bp, Homo sapien
ttactgcatctggttggtcagcagt

SEQ ID NO: 3862180 - DNA, 25 bp, Homo sapien
tactgcatctggttggtcagcagtc

SEQ ID NO: 3862181 - DNA, 25 bp, Homo sapien
cattgacacccaccttgctgttgtt

SEQ ID NO: 3862182 - DNA, 25 bp, Homo sapien
ggcatgccattgacacccaccttgc

SEQ ID NO: 3862183 - DNA, 25 bp, Homo sapien
tgacacccaccttgctgttgttcac

SEQ ID NO: 3862184 - DNA, 25 bp, Homo sapien
atgccattgacacccaccttgctgt

SEQ ID NO: 3862185 - DNA, 25 bp, Homo sapien
gcctgccacgcaacatgctcaggtg

SEQ ID NO: 3862186 - DNA, 25 bp, Homo sapien
gctcaggtgccagatctcgggcatt

SEQ ID NO: 3862187 - DNA, 25 bp, Homo sapien
ttgtgcaggacacatcgccgccctt

SEQ ID NO: 3862188 - DNA, 25 bp, Homo sapien
ctgctgcgaggcgagttggtctgca

SEQ ID NO: 3862189 - DNA, 25 bp, Homo sapien
gtctcctcgtttgctcagccggcag

SEQ ID NO: 3862190 - DNA, 25 bp, Homo sapien
cttcaggaacgacagacagcttttc

SEQ ID NO: 3862191 - DNA, 25 bp, Homo sapien
tccttcttggagtgcggaggtcctg

SEQ ID NO: 3862192 - DNA, 25 bp, Homo sapien
caagactgcgttaggaagaggctca

SEQ ID NO: 3862193 - DNA, 25 bp, Homo sapien
catttattaatagaagctatgtctc

SEQ ID NO: 3862194 - DNA, 25 bp, Homo sapien
cctaaacccagacacttatcacagg

SEQ ID NO: 3862195 - DNA, 25 bp, Homo sapien
taaacccagacacttatcacaggaa

SEQ ID NO: 3862196 - DNA, 25 bp, Homo sapien
tatgtctcagatagctgaagatggt

SEQ ID NO: 3862197 - DNA, 25 bp, Homo sapien
ggtgcatactgggagttgtagtctc

SEQ ID NO: 3862198 - DNA, 25 bp, Homo sapien
catactgggagttgtagtctctcca

SEQ ID NO: 3862199 - DNA, 25 bp, Homo sapien
cgcggtgcatactgggagttgtagt

SEQ ID NO: 3862200 - DNA, 25 bp, Homo sapien
tgcatactgggagttgtagtctctc

SEQ ID NO: 3862201 - DNA, 25 bp, Homo sapien
tctccgcagggcgaaactgctgggc

SEQ ID NO: 3862202 - DNA, 25 bp, Homo sapien
gacagggagcggaaccgtcttcaac

SEQ ID NO: 3862203 - DNA, 25 bp, Homo sapien
caattaccaggtgaaactagccgcc

SEQ ID NO: 3862204 - DNA, 25 bp, Homo sapien
taaaagcctgcagctcgaggagaca

SEQ ID NO: 3862205 - DNA, 25 bp, Homo sapien
cagccctagggacgggccgcactgc

SEQ ID NO: 3862206 - DNA, 25 bp, Homo sapien
cccagccctagggacgggccgcact

SEQ ID NO: 3862207 - DNA, 25 bp, Homo sapien
ccagccctagggacgggccgcactg

SEQ ID NO: 3862208 - DNA, 25 bp, Homo sapien
cacggcaacgctgctgtggaggcca

SEQ ID NO: 3862209 - DNA, 25 bp, Homo sapien
caggaaatcgagacactcgtgaggg

SEQ ID NO: 3862210 - DNA, 25 bp, Homo sapien
tgttggctgacaggaaatcgagaca

SEQ ID NO: 3862211 - DNA, 25 bp, Homo sapien
gaggccatgaaaggcgaacggccct

SEQ ID NO: 3862212 - DNA, 25 bp, Homo sapien
agcctgagacctgccaggtcggccg

SEQ ID NO: 3862213 - DNA, 25 bp, Homo sapien
tctggcagtcaagtgacagtttcag

SEQ ID NO: 3862214 - DNA, 25 bp, Homo sapien
ttcacttctggcagtcaagtgacag

SEQ ID NO: 3862215 - DNA, 25 bp, Homo sapien
cacttctggcagtcaagtgacagtt

SEQ ID NO: 3862216 - DNA, 25 bp, Homo sapien
ccgtagctgtttccttagtggatgc

SEQ ID NO: 3862217 - DNA, 25 bp, Homo sapien
tacactggtgggaaagtctccgtga

SEQ ID NO: 3862218 - DNA, 25 bp, Homo sapien
gacctagatatggaccacgcagcga

SEQ ID NO: 3862219 - DNA, 25 bp, Homo sapien
gtccacactaagaccctgaggcctg

SEQ ID NO: 3862220 - DNA, 25 bp, Homo sapien
tcactgtttagttctatcagaaaac

SEQ ID NO: 3862221 - DNA, 25 bp, Homo sapien
ttcagggtagaagcgcagacactat

SEQ ID NO: 3862222 - DNA, 25 bp, Homo sapien
gaagcgcagacactatccctgacct

SEQ ID NO: 3862223 - DNA, 25 bp, Homo sapien
gagccctattcagggtagaagcgca

SEQ ID NO: 3862224 - DNA, 25 bp, Homo sapien
gcagcaggcaggactttcaattgac

SEQ ID NO: 3862225 - DNA, 25 bp, Homo sapien
cagtcttgtatacagtctccagggc

SEQ ID NO: 3862226 - DNA, 25 bp, Homo sapien
gagacccatggaattattgagcctg

SEQ ID NO: 3862227 - DNA, 25 bp, Homo sapien
ctattataaacacgctcatgagggc

SEQ ID NO: 3862228 - DNA, 25 bp, Homo sapien
ccaccagagcagtgccacagagaat

SEQ ID NO: 3862229 - DNA, 25 bp, Homo sapien
cccaccagagcagtgccacagagaa

SEQ ID NO: 3862230 - DNA, 25 bp, Homo sapien
ccagagcagtgccacagagaatcat

SEQ ID NO: 3862231 - DNA, 25 bp, Homo sapien
caccagagcagtgccacagagaatc

SEQ ID NO: 3862232 - DNA, 25 bp, Homo sapien
aaggaggataatggcattgttcatc

SEQ ID NO: 3862233 - DNA, 25 bp, Homo sapien
ctgaaaaggaggataatggcattgt

SEQ ID NO: 3862234 - DNA, 25 bp, Homo sapien
ggaggataatggcattgttcatcat

SEQ ID NO: 3862235 - DNA, 25 bp, Homo sapien
gaaaaggaggataatggcattgttc

SEQ ID NO: 3862236 - DNA, 25 bp, Homo sapien
gttttcagatatgcccaggtacccc

SEQ ID NO: 3862237 - DNA, 25 bp, Homo sapien
aggttttcagatatgcccaggtacc

SEQ ID NO: 3862238 - DNA, 25 bp, Homo sapien
tcaaggttttcagatatgcccaggt

SEQ ID NO: 3862239 - DNA, 25 bp, Homo sapien
ctgaaaatgcaaacactttttcaag

SEQ ID NO: 3862240 - DNA, 25 bp, Homo sapien
tgctgcttcttccttttcttaagct

SEQ ID NO: 3862241 - DNA, 25 bp, Homo sapien
tagctgctgcttcttccttttctta

SEQ ID NO: 3862242 - DNA, 25 bp, Homo sapien
tgtagctgctgcttcttccttttct

SEQ ID NO: 3862243 - DNA, 25 bp, Homo sapien
gctgctgcttcttccttttcttaag

SEQ ID NO: 3862244 - DNA, 25 bp, Homo sapien
agacctgaactctgggacagtctgg

SEQ ID NO: 3862245 - DNA, 25 bp, Homo sapien
gtgccccggcccaaaggtgcaggtc

SEQ ID NO: 3862246 - DNA, 25 bp, Homo sapien
gacctgaactctgggacagtctggg

SEQ ID NO: 3862247 - DNA, 25 bp, Homo sapien
cacacgtagcaaaagagagtcacat

SEQ ID NO: 3862248 - DNA, 25 bp, Homo sapien
cctaggtactgtgctagagctatca

SEQ ID NO: 3862249 - DNA, 25 bp, Homo sapien
cagatgtaaaggctagtgaagacca

SEQ ID NO: 3862250 - DNA, 25 bp, Homo sapien
cattcaatgtgagagttatgatctc

SEQ ID NO: 3862251 - DNA, 25 bp, Homo sapien
tgagaatttattcccatggacaggg

SEQ ID NO: 3862252 - DNA, 25 bp, Homo sapien
ctttcaaggtgatctgacatggctt

SEQ ID NO: 3862253 - DNA, 25 bp, Homo sapien
tcatggcaccaattgttagtcactt

SEQ ID NO: 3862254 - DNA, 25 bp, Homo sapien
gacatggcttgaatgtgcaagaaaa

SEQ ID NO: 3862255 - DNA, 25 bp, Homo sapien
cctcagagccgcggcagcggtggca

SEQ ID NO: 3862256 - DNA, 25 bp, Homo sapien
ccggcgccgcctgaacaaggacgcc

SEQ ID NO: 3862257 - DNA, 25 bp, Homo sapien
ccccggcgccgcctgaacaaggacg

SEQ ID NO: 3862258 - DNA, 25 bp, Homo sapien
cagagccgcggcagcggtggcaaaa

SEQ ID NO: 3862259 - DNA, 25 bp, Homo sapien
tggccgctacgcgcagcgccgctct

SEQ ID NO: 3862260 - DNA, 25 bp, Homo sapien
ttctctcccctggccgctacgcgca

SEQ ID NO: 3862261 - DNA, 25 bp, Homo sapien
cccctggccgctacgcgcagcgccg

SEQ ID NO: 3862262 - DNA, 25 bp, Homo sapien
tctcccctggccgctacgcgcagcg

SEQ ID NO: 3862263 - DNA, 25 bp, Homo sapien
ctgctgcagcgtctggctggctgcg

SEQ ID NO: 3862264 - DNA, 25 bp, Homo sapien
tgcccacactgctgcagcgtctggc

SEQ ID NO: 3862265 - DNA, 25 bp, Homo sapien
cacactgctgcagcgtctggctggc

SEQ ID NO: 3862266 - DNA, 25 bp, Homo sapien
ccacactgctgcagcgtctggctgg

SEQ ID NO: 3862267 - DNA, 25 bp, Homo sapien
caatggagatgcggataagcttctg

SEQ ID NO: 3862268 - DNA, 25 bp, Homo sapien
ctgccaatggagatgcggataagct

SEQ ID NO: 3862269 - DNA, 25 bp, Homo sapien
atggagatgcggataagcttctgga

SEQ ID NO: 3862270 - DNA, 25 bp, Homo sapien
gccaatggagatgcggataagcttc

SEQ ID NO: 3862271 - DNA, 25 bp, Homo sapien
acagcgcacttgttgcgcaaccggc

SEQ ID NO: 3862272 - DNA, 25 bp, Homo sapien
acacagcgcacttgttgcgcaaccg

SEQ ID NO: 3862273 - DNA, 25 bp, Homo sapien
cacagcgcacttgttgcgcaaccgg

SEQ ID NO: 3862274 - DNA, 25 bp, Homo sapien
agcctccaacggggcgactggggct

SEQ ID NO: 3862275 - DNA, 25 bp, Homo sapien
tcatcttttcatttagtttcattat

SEQ ID NO: 3862276 - DNA, 25 bp, Homo sapien
atttcacttcatctcctcacttcat

SEQ ID NO: 3862277 - DNA, 25 bp, Homo sapien
catttcattttatcaattcatcaat

SEQ ID NO: 3862278 - DNA, 25 bp, Homo sapien
ctcatgatttcatctagtcatttca

SEQ ID NO: 3862279 - DNA, 25 bp, Homo sapien
catttcaccgtttcatcttttcatc

SEQ ID NO: 3862280 - DNA, 25 bp, Homo sapien
ctcttcatttcatttcaccgtttca

SEQ ID NO: 3862281 - DNA, 25 bp, Homo sapien
ctcatgatttcatctagtcatttca

SEQ ID NO: 3862282 - DNA, 25 bp, Homo sapien
atttcctcatttcaccattacattt

SEQ ID NO: 3862283 - DNA, 25 bp, Homo sapien
aagagtgttcacgggtcccttcatg

SEQ ID NO: 3862284 - DNA, 25 bp, Homo sapien
ccaagagtgttcacgggtcccttca

SEQ ID NO: 3862285 - DNA, 25 bp, Homo sapien
gagtgttcacgggtcccttcatgtc

SEQ ID NO: 3862286 - DNA, 25 bp, Homo sapien
agtgttcacgggtcccttcatgtca

SEQ ID NO: 3862287 - DNA, 25 bp, Homo sapien
ggtccccggcatttcgtggccatca

SEQ ID NO: 3862288 - DNA, 25 bp, Homo sapien
accccttggcgatccccatgcaggg

SEQ ID NO: 3862289 - DNA, 25 bp, Homo sapien
atttcgtggccatcaccccttggcg

SEQ ID NO: 3862290 - DNA, 25 bp, Homo sapien
tgtgaatgacaaccttgggtccccg

SEQ ID NO: 3862291 - DNA, 25 bp, Homo sapien
agggccggagagtctgactgtggct

SEQ ID NO: 3862292 - DNA, 25 bp, Homo sapien
gcagggccggagagtctgactgtgg

SEQ ID NO: 3862293 - DNA, 25 bp, Homo sapien
cagggccggagagtctgactgtggc

SEQ ID NO: 3862294 - DNA, 25 bp, Homo sapien
tgcagggccggagagtctgactgtg

SEQ ID NO: 3862295 - DNA, 25 bp, Homo sapien
gctgcccccaaggtgtcctctgtca

SEQ ID NO: 3862296 - DNA, 25 bp, Homo sapien
ctgcccccaaggtgtcctctgtcac

SEQ ID NO: 3862297 - DNA, 25 bp, Homo sapien
tgctgcccccaaggtgtcctctgtc

SEQ ID NO: 3862298 - DNA, 25 bp, Homo sapien
tgcccccaaggtgtcctctgtcacc

SEQ ID NO: 3862299 - DNA, 25 bp, Homo sapien
agggccgctcgtgaacaggacaggt

SEQ ID NO: 3862300 - DNA, 25 bp, Homo sapien
gggccgctcgtgaacaggacaggtt

SEQ ID NO: 3862301 - DNA, 25 bp, Homo sapien
gtagggccgctcgtgaacaggacag

SEQ ID NO: 3862302 - DNA, 25 bp, Homo sapien
ggccgctcgtgaacaggacaggttc

SEQ ID NO: 3862303 - DNA, 25 bp, Homo sapien
cacctaagcagggaagccgatttgg

SEQ ID NO: 3862304 - DNA, 25 bp, Homo sapien
cagtatgttctaggcaaaagcaggg

SEQ ID NO: 3862305 - DNA, 25 bp, Homo sapien
tacactatccactaggccgattgcg

SEQ ID NO: 3862306 - DNA, 25 bp, Homo sapien
tgtgatcagtcgagcttggcaagca

SEQ ID NO: 3862307 - DNA, 25 bp, Homo sapien
aaccaccacaaggagctgaaggcgg

SEQ ID NO: 3862308 - DNA, 25 bp, Homo sapien
ctagctggcgggaccgttagatcga

SEQ ID NO: 3862309 - DNA, 25 bp, Homo sapien
tctttgtgaaactccggcggtggga

SEQ ID NO: 3862310 - DNA, 25 bp, Homo sapien
ccggaccccgtggatatggagcaat

SEQ ID NO: 3862311 - DNA, 25 bp, Homo sapien
aaggcattgggaacagccgccagct

SEQ ID NO: 3862312 - DNA, 25 bp, Homo sapien
tgggcatccgtctcctctgcggcat

SEQ ID NO: 3862313 - DNA, 25 bp, Homo sapien
cacttagtgagcatggtatccgctc

SEQ ID NO: 3862314 - DNA, 25 bp, Homo sapien
gcatggtatccgctcaggggcctct

SEQ ID NO: 3862315 - DNA, 25 bp, Homo sapien
gtgggcatccgtctcctctgcggca

SEQ ID NO: 3862316 - DNA, 25 bp, Homo sapien
tcttgtgcggttgatctgtctccca

SEQ ID NO: 3862317 - DNA, 25 bp, Homo sapien
tctgtctcccatgcaaggccaacag

SEQ ID NO: 3862318 - DNA, 25 bp, Homo sapien
atctgtctcccatgcaaggccaaca

SEQ ID NO: 3862319 - DNA, 25 bp, Homo sapien
ttgtgcggttgatctgtctcccatg

SEQ ID NO: 3862320 - DNA, 25 bp, Homo sapien
tccagagggaaaaactgggtggtga

SEQ ID NO: 3862321 - DNA, 25 bp, Homo sapien
gactggacagggatgccacaggggc

SEQ ID NO: 3862322 - DNA, 25 bp, Homo sapien
gtgacagggactggacagggatgcc

SEQ ID NO: 3862323 - DNA, 25 bp, Homo sapien
ctgggtggtgacagggactggacag

SEQ ID NO: 3862324 - DNA, 25 bp, Homo sapien
ctggagcagcggacctccttgctta

SEQ ID NO: 3862325 - DNA, 25 bp, Homo sapien
gcggacctccttgcttactttgaat

SEQ ID NO: 3862326 - DNA, 25 bp, Homo sapien
gcagcggacctccttgcttactttg

SEQ ID NO: 3862327 - DNA, 25 bp, Homo sapien
gagcagcggacctccttgcttactt

SEQ ID NO: 3862328 - DNA, 25 bp, Homo sapien
ccaaagtgctgcttgggcttaaggt

SEQ ID NO: 3862329 - DNA, 25 bp, Homo sapien
cgagtcgcttcatggtcccaaacca

SEQ ID NO: 3862330 - DNA, 25 bp, Homo sapien
cttaaggttgtaattatttgcagcc

SEQ ID NO: 3862331 - DNA, 25 bp, Homo sapien
gagtcgcttcatggtcccaaaccag

SEQ ID NO: 3862332 - DNA, 25 bp, Homo sapien
gagccaccgtgtcccactgtgagtg

SEQ ID NO: 3862333 - DNA, 25 bp, Homo sapien
gagtgagtgagccacggcaaaagtc

SEQ ID NO: 3862334 - DNA, 25 bp, Homo sapien
tgtgaacacgccaaatctcgcagtc

SEQ ID NO: 3862335 - DNA, 25 bp, Homo sapien
tgtttcagaggctgtgacggtgccc

SEQ ID NO: 3862336 - DNA, 25 bp, Homo sapien
cctccacctggttgaggagcgctaa

SEQ ID NO: 3862337 - DNA, 25 bp, Homo sapien
ttcctccacctggttgaggagcgct

SEQ ID NO: 3862338 - DNA, 25 bp, Homo sapien
ccacctggttgaggagcgctaaagc

SEQ ID NO: 3862339 - DNA, 25 bp, Homo sapien
tccacctggttgaggagcgctaaag

SEQ ID NO: 3862340 - DNA, 25 bp, Homo sapien
ccagcgaagtatacattattagcct

SEQ ID NO: 3862341 - DNA, 25 bp, Homo sapien
tattgtcactaccaagtggtgatta

SEQ ID NO: 3862342 - DNA, 25 bp, Homo sapien
gattgttggcattcaaaagccagcg

SEQ ID NO: 3862343 - DNA, 25 bp, Homo sapien
gaattatcccctgttcattgggtaa

SEQ ID NO: 3862344 - DNA, 25 bp, Homo sapien
atcctttagcttgatgaatgaaaca

SEQ ID NO: 3862345 - DNA, 25 bp, Homo sapien
gctaatcctttagcttgatgaatga

SEQ ID NO: 3862346 - DNA, 25 bp, Homo sapien
taatcctttagcttgatgaatgaaa

SEQ ID NO: 3862347 - DNA, 25 bp, Homo sapien
ggagctaatcctttagcttgatgaa

SEQ ID NO: 3862348 - DNA, 25 bp, Homo sapien
atgcggcaggcacgcagcatttgcg

SEQ ID NO: 3862349 - DNA, 25 bp, Homo sapien
caggcacgcagcatttgcgtgggaa

SEQ ID NO: 3862350 - DNA, 25 bp, Homo sapien
aatgcggcaggcacgcagcatttgc

SEQ ID NO: 3862351 - DNA, 25 bp, Homo sapien
cggcaggcacgcagcatttgcgtgg

SEQ ID NO: 3862352 - DNA, 25 bp, Homo sapien
tgaataagaaaaatacgaaactaga

SEQ ID NO: 3862353 - DNA, 25 bp, Homo sapien
aaatacgaaactagaaggctgggtg

SEQ ID NO: 3862354 - DNA, 25 bp, Homo sapien
aaaaccagactagtaaatgcaacca

SEQ ID NO: 3862355 - DNA, 25 bp, Homo sapien
ctgttttcctcttggtggagttatt

SEQ ID NO: 3862356 - DNA, 25 bp, Homo sapien
agaccacctctcagggtttcctaat

SEQ ID NO: 3862357 - DNA, 25 bp, Homo sapien
cataggtgcggtgcattccaaccat

SEQ ID NO: 3862358 - DNA, 25 bp, Homo sapien
tcataggtgcggtgcattccaacca

SEQ ID NO: 3862359 - DNA, 25 bp, Homo sapien
ttcataggtgcggtgcattccaacc

SEQ ID NO: 3862360 - DNA, 25 bp, Homo sapien
cttcataggtgcggtgcattccaac

SEQ ID NO: 3862361 - DNA, 25 bp, Homo sapien
tatcttagaattgggtagaagttta

SEQ ID NO: 3862362 - DNA, 25 bp, Homo sapien
tcttagaattgggtagaagtttagc

SEQ ID NO: 3862363 - DNA, 25 bp, Homo sapien
cttagaattgggtagaagtttagct

SEQ ID NO: 3862364 - DNA, 25 bp, Homo sapien
atcttagaattgggtagaagtttag

SEQ ID NO: 3862365 - DNA, 25 bp, Homo sapien
gattgtaggtgatactgtgtatttc

SEQ ID NO: 3862366 - DNA, 25 bp, Homo sapien
ctcccagttgtagaaggttatgtaa

SEQ ID NO: 3862367 - DNA, 25 bp, Homo sapien
cccagttgtagaaggttatgtaatt

SEQ ID NO: 3862368 - DNA, 25 bp, Homo sapien
gttctcccagttgtagaaggttatg

SEQ ID NO: 3862369 - DNA, 25 bp, Homo sapien
taatgagtacagtcattgacaaagg

SEQ ID NO: 3862370 - DNA, 25 bp, Homo sapien
aatgagtacagtcattgacaaagga

SEQ ID NO: 3862371 - DNA, 25 bp, Homo sapien
ttaatgagtacagtcattgacaaag

SEQ ID NO: 3862372 - DNA, 25 bp, Homo sapien
tgttcactgatgaatggaacattcc

SEQ ID NO: 3862373 - DNA, 25 bp, Homo sapien
ggaacattcctaattgtaaatccag

SEQ ID NO: 3862374 - DNA, 25 bp, Homo sapien
gagtccaagcccagctcgtattaga

SEQ ID NO: 3862375 - DNA, 25 bp, Homo sapien
gaccatgcgttaggaacatggacgt

SEQ ID NO: 3862376 - DNA, 25 bp, Homo sapien
aatagaattgcccattgccagggaa

SEQ ID NO: 3862377 - DNA, 25 bp, Homo sapien
cataaggcatggacctacagccaat

SEQ ID NO: 3862378 - DNA, 25 bp, Homo sapien
tcataatgaagtgggaaaaaacagc

SEQ ID NO: 3862379 - DNA, 25 bp, Homo sapien
gcagctgcacttgcctccataaggc

SEQ ID NO: 3862380 - DNA, 25 bp, Homo sapien
cgtgtaaaggacaacaacagcaaga

SEQ ID NO: 3862381 - DNA, 25 bp, Homo sapien
acaacaacagcaagagagacagcac

SEQ ID NO: 3862382 - DNA, 25 bp, Homo sapien
gtgtaaaggacaacaacagcaagag

SEQ ID NO: 3862383 - DNA, 25 bp, Homo sapien
aggacaacaacagcaagagagacag

SEQ ID NO: 3862384 - DNA, 25 bp, Homo sapien
tgtcatccatactgctagcagccat

SEQ ID NO: 3862385 - DNA, 25 bp, Homo sapien
tcatccatactgctagcagccatta

SEQ ID NO: 3862386 - DNA, 25 bp, Homo sapien
gtcatccatactgctagcagccatt

SEQ ID NO: 3862387 - DNA, 25 bp, Homo sapien
tgaaatatcttccttggtctggaat

SEQ ID NO: 3862388 - DNA, 25 bp, Homo sapien
tcttccttggtctggaatgagcttt

SEQ ID NO: 3862389 - DNA, 25 bp, Homo sapien
tatcttccttggtctggaatgagct

SEQ ID NO: 3862390 - DNA, 25 bp, Homo sapien
taagccactgaaatatcttccttgg

SEQ ID NO: 3862391 - DNA, 25 bp, Homo sapien
tcctgccagcagactaatgcatacg

SEQ ID NO: 3862392 - DNA, 25 bp, Homo sapien
gagactatggcattattaagcatac

SEQ ID NO: 3862393 - DNA, 25 bp, Homo sapien
ctaatgcatacgttccttatagaga

SEQ ID NO: 3862394 - DNA, 25 bp, Homo sapien
tacgttccttatagagactatggca

SEQ ID NO: 3862395 - DNA, 25 bp, Homo sapien
agtcaaaacaaggaatcctctcttc

SEQ ID NO: 3862396 - DNA, 25 bp, Homo sapien
gcataatcctccagatccatgtaaa

SEQ ID NO: 3862397 - DNA, 25 bp, Homo sapien
tcctccagatccatgtaaaccaata

SEQ ID NO: 3862398 - DNA, 25 bp, Homo sapien
tgtgcataatcctccagatccatgt

SEQ ID NO: 3862399 - DNA, 25 bp, Homo sapien
taatcctccagatccatgtaaacca

SEQ ID NO: 3862400 - DNA, 25 bp, Homo sapien
tacttctgctccaactaaaccaaaa

SEQ ID NO: 3862401 - DNA, 25 bp, Homo sapien
atacttctgctccaactaaaccaaa

SEQ ID NO: 3862402 - DNA, 25 bp, Homo sapien
gctggcaattgcagtattattttgc

SEQ ID NO: 3862403 - DNA, 25 bp, Homo sapien
caagccatgccctagtcgtgctggt

SEQ ID NO: 3862404 - DNA, 25 bp, Homo sapien
aagcagcctgctgttcatgtagaag

SEQ ID NO: 3862405 - DNA, 25 bp, Homo sapien
caaaaggaaacgagtgaatggctgt

SEQ ID NO: 3862406 - DNA, 25 bp, Homo sapien
gagcctctctatactaaggttgaca

SEQ ID NO: 3862407 - DNA, 25 bp, Homo sapien
atatcgcacaaagtaggctccaggg

SEQ ID NO: 3862408 - DNA, 25 bp, Homo sapien
aaggaagctagtggagagaagctca

SEQ ID NO: 3862409 - DNA, 25 bp, Homo sapien
tattaggattaaaagtggttgcagc

SEQ ID NO: 3862410 - DNA, 25 bp, Homo sapien
acacatctggcaaagaccatccaaa

SEQ ID NO: 3862411 - DNA, 25 bp, Homo sapien
acacacacttgctacagttcgatgg

SEQ ID NO: 3862412 - DNA, 25 bp, Homo sapien
cacacacttgctacagttcgatggg

SEQ ID NO: 3862413 - DNA, 25 bp, Homo sapien
cacacacacttgctacagttcgatg

SEQ ID NO: 3862414 - DNA, 25 bp, Homo sapien
gaattaactggctggcctcgttgag

SEQ ID NO: 3862415 - DNA, 25 bp, Homo sapien
gatgaagacagctttgaagctctga

SEQ ID NO: 3862416 - DNA, 25 bp, Homo sapien
ctggctctcatgtggatgagaagag

SEQ ID NO: 3862417 - DNA, 25 bp, Homo sapien
taagcatgagtgtgaattaactggc

SEQ ID NO: 3862418 - DNA, 25 bp, Homo sapien
gggctcaggagaacagccttgttca

SEQ ID NO: 3862419 - DNA, 25 bp, Homo sapien
cgtgggctcaggagaacagccttgt

SEQ ID NO: 3862420 - DNA, 25 bp, Homo sapien
ggcgtgggctcaggagaacagcctt

SEQ ID NO: 3862421 - DNA, 25 bp, Homo sapien
ctggcgtgggctcaggagaacagcc

SEQ ID NO: 3862422 - DNA, 25 bp, Homo sapien
ctgggctgaccccaatgcagaaagc

SEQ ID NO: 3862423 - DNA, 25 bp, Homo sapien
ccccaatgcagaaagctgtaaatac

SEQ ID NO: 3862424 - DNA, 25 bp, Homo sapien
tgaccccaatgcagaaagctgtaaa

SEQ ID NO: 3862425 - DNA, 25 bp, Homo sapien
ggctgaccccaatgcagaaagctgt

SEQ ID NO: 3862426 - DNA, 25 bp, Homo sapien
tgctcccagttaagacagcttttgc

SEQ ID NO: 3862427 - DNA, 25 bp, Homo sapien
tgaggatggctagggacatagggct

SEQ ID NO: 3862428 - DNA, 25 bp, Homo sapien
atgaggatggctagggacatagggc

SEQ ID NO: 3862429 - DNA, 25 bp, Homo sapien
tgagggtggctggccccaattagca

SEQ ID NO: 3862430 - DNA, 25 bp, Homo sapien
ctatgagggtggctggccccaatta

SEQ ID NO: 3862431 - DNA, 25 bp, Homo sapien
gggtggctggccccaattagcacac

SEQ ID NO: 3862432 - DNA, 25 bp, Homo sapien
tatgagggtggctggccccaattag

SEQ ID NO: 3862433 - DNA, 25 bp, Homo sapien
gggatgggtcagtgcagccctggtg

SEQ ID NO: 3862434 - DNA, 25 bp, Homo sapien
gctggggatgggtcagtgcagccct

SEQ ID NO: 3862435 - DNA, 25 bp, Homo sapien
agctggggatgggtcagtgcagccc

SEQ ID NO: 3862436 - DNA, 25 bp, Homo sapien
tggggatgggtcagtgcagccctgg

SEQ ID NO: 3862437 - DNA, 25 bp, Homo sapien
cagggcagcatacaaatgcacagct

SEQ ID NO: 3862438 - DNA, 25 bp, Homo sapien
gggcagcatacaaatgcacagctga

SEQ ID NO: 3862439 - DNA, 25 bp, Homo sapien
cacagggcagcatacaaatgcacag

SEQ ID NO: 3862440 - DNA, 25 bp, Homo sapien
acacagggcagcatacaaatgcaca

SEQ ID NO: 3862441 - DNA, 25 bp, Homo sapien
tcccttaggcaaacttgggtgctgg

SEQ ID NO: 3862442 - DNA, 25 bp, Homo sapien
ccactgaaggaatcccttaggcaaa

SEQ ID NO: 3862443 - DNA, 25 bp, Homo sapien
tgaaggaatcccttaggcaaacttg

SEQ ID NO: 3862444 - DNA, 25 bp, Homo sapien
gaatcccttaggcaaacttgggtgc

SEQ ID NO: 3862445 - DNA, 25 bp, Homo sapien
aggaaacacagagtaactgtcagca

SEQ ID NO: 3862446 - DNA, 25 bp, Homo sapien
ctaggaaacacagagtaactgtcag

SEQ ID NO: 3862447 - DNA, 25 bp, Homo sapien
ggaaacacagagtaactgtcagcat

SEQ ID NO: 3862448 - DNA, 25 bp, Homo sapien
taggaaacacagagtaactgtcagc

SEQ ID NO: 3862449 - DNA, 25 bp, Homo sapien
tcctgtgccacgtgctcatcgtgat

SEQ ID NO: 3862450 - DNA, 25 bp, Homo sapien
gggtgatcccagaatatgtactgtt

SEQ ID NO: 3862451 - DNA, 25 bp, Homo sapien
ctcagcataggggtgatcccagaat

SEQ ID NO: 3862452 - DNA, 25 bp, Homo sapien
aatatgtactgtttgtctctgtggc

SEQ ID NO: 3862453 - DNA, 25 bp, Homo sapien
gtcaacactagaaattttcctcagc

SEQ ID NO: 3862454 - DNA, 25 bp, Homo sapien
ccagtgtggctgggtccccgctcat

SEQ ID NO: 3862455 - DNA, 25 bp, Homo sapien
gttgtgctttgaacatgggagtatg

SEQ ID NO: 3862456 - DNA, 25 bp, Homo sapien
ttttcttgcacattgatcctcgtgt

SEQ ID NO: 3862457 - DNA, 25 bp, Homo sapien
caaactgtgccgttgtgatgcaatt

SEQ ID NO: 3862458 - DNA, 25 bp, Homo sapien
gatgaatgggttgatccatgcaaac

SEQ ID NO: 3862459 - DNA, 25 bp, Homo sapien
ccaagagcttgggaaattcgactct

SEQ ID NO: 3862460 - DNA, 25 bp, Homo sapien
gaaattcgactctgcaccatgtcca

SEQ ID NO: 3862461 - DNA, 25 bp, Homo sapien
gggatattaaacttatcttcaggta

SEQ ID NO: 3862462 - DNA, 25 bp, Homo sapien
tccatttaaaggaccaagagcttgg

SEQ ID NO: 3862463 - DNA, 25 bp, Homo sapien
tggacagctcctgtagtagatcctt

SEQ ID NO: 3862464 - DNA, 25 bp, Homo sapien
ggacagctcctgtagtagatccttc

SEQ ID NO: 3862465 - DNA, 25 bp, Homo sapien
gacagctcctgtagtagatccttca

SEQ ID NO: 3862466 - DNA, 25 bp, Homo sapien
ctggacagctcctgtagtagatcct

SEQ ID NO: 3862467 - DNA, 25 bp, Homo sapien
ctatttcctcctggatggatccaga

SEQ ID NO: 3862468 - DNA, 25 bp, Homo sapien
cctgggtcggcagcacctcccacag

SEQ ID NO: 3862469 - DNA, 25 bp, Homo sapien
tccgcttccacttttgtcttttctg

SEQ ID NO: 3862470 - DNA, 25 bp, Homo sapien
tgcaggtgcagaggaaggacttgct

SEQ ID NO: 3862471 - DNA, 25 bp, Homo sapien
gtgcagaggaaggacttgctgacat

SEQ ID NO: 3862472 - DNA, 25 bp, Homo sapien
cttctgcaggtgcagaggaaggact

SEQ ID NO: 3862473 - DNA, 25 bp, Homo sapien
tgggcaccttcagggggctggttcc

SEQ ID NO: 3862474 - DNA, 25 bp, Homo sapien
atgggcaccttcagggggctggttc

SEQ ID NO: 3862475 - DNA, 25 bp, Homo sapien
cggcataggtcactgtttagagtct

SEQ ID NO: 3862476 - DNA, 25 bp, Homo sapien
cttccaagcttgtcagtaatgtaaa

SEQ ID NO: 3862477 - DNA, 25 bp, Homo sapien
tccaataaactagtgcggcataggt

SEQ ID NO: 3862478 - DNA, 25 bp, Homo sapien
tcactgcaggacagaagaatcttcc

SEQ ID NO: 3862479 - DNA, 25 bp, Homo sapien
agatgtagagacgtgctctcaggac

SEQ ID NO: 3862480 - DNA, 25 bp, Homo sapien
gatgtagagacgtgctctcaggaca

SEQ ID NO: 3862481 - DNA, 25 bp, Homo sapien
atgtagagacgtgctctcaggacag

SEQ ID NO: 3862482 - DNA, 25 bp, Homo sapien
gggaactggcagggaggcttgaggg

SEQ ID NO: 3862483 - DNA, 25 bp, Homo sapien
tggcagggaggcttgaggggcccat

SEQ ID NO: 3862484 - DNA, 25 bp, Homo sapien
cctcctgcactcgctgatgcggcag

SEQ ID NO: 3862485 - DNA, 25 bp, Homo sapien
tccctcctgcactcgctgatgcggc

SEQ ID NO: 3862486 - DNA, 25 bp, Homo sapien
ccctcctgcactcgctgatgcggca

SEQ ID NO: 3862487 - DNA, 25 bp, Homo sapien
ctcctgcactcgctgatgcggcagc

SEQ ID NO: 3862488 - DNA, 25 bp, Homo sapien
gccggttgcgcaacaagtgcgctgt

SEQ ID NO: 3862489 - DNA, 25 bp, Homo sapien
gcggcgctgcgcgtagcggccaggg

SEQ ID NO: 3862490 - DNA, 25 bp, Homo sapien
gagcggcgctgcgcgtagcggccag

SEQ ID NO: 3862491 - DNA, 25 bp, Homo sapien
cggttgcgcaacaagtgcgctgtgt

SEQ ID NO: 3862492 - DNA, 25 bp, Homo sapien
ccgctttttgccaccaccgacgcgg

SEQ ID NO: 3862493 - DNA, 25 bp, Homo sapien
cgctttttgccaccaccgacgcggc

SEQ ID NO: 3862494 - DNA, 25 bp, Homo sapien
ttttcgtggttatgcacagagtgct

SEQ ID NO: 3862495 - DNA, 25 bp, Homo sapien
taaaatactcccaagtaactcgtgc

SEQ ID NO: 3862496 - DNA, 25 bp, Homo sapien
ggcgttcctttaacacatgtgcaga

SEQ ID NO: 3862497 - DNA, 25 bp, Homo sapien
aatttgccagcatacctgggtgctt

SEQ ID NO: 3862498 - DNA, 25 bp, Homo sapien
gttgtgggctagacctgtggccttc

SEQ ID NO: 3862499 - DNA, 25 bp, Homo sapien
gtggttgtgggctagacctgtggcc

SEQ ID NO: 3862500 - DNA, 25 bp, Homo sapien
ctaggtggttgtgggctagacctgt

SEQ ID NO: 3862501 - DNA, 25 bp, Homo sapien
tggttgtgggctagacctgtggcct

SEQ ID NO: 3862502 - DNA, 25 bp, Homo sapien
cagtagttccccatccggaacaaag

SEQ ID NO: 3862503 - DNA, 25 bp, Homo sapien
agactgcagaccctcgcatgggctc

SEQ ID NO: 3862504 - DNA, 25 bp, Homo sapien
aaagactgcagaccctcgcatgggc

SEQ ID NO: 3862505 - DNA, 25 bp, Homo sapien
gcagtagttccccatccggaacaaa

SEQ ID NO: 3862506 - DNA, 25 bp, Homo sapien
tttactgctgcgatgtgtggggcct

SEQ ID NO: 3862507 - DNA, 25 bp, Homo sapien
tgtttactgctgcgatgtgtggggc

SEQ ID NO: 3862508 - DNA, 25 bp, Homo sapien
gtttactgctgcgatgtgtggggcc

SEQ ID NO: 3862509 - DNA, 25 bp, Homo sapien
ctgtttactgctgcgatgtgtgggg

SEQ ID NO: 3862510 - DNA, 25 bp, Homo sapien
agatccagcgcttttctctttgtgg

SEQ ID NO: 3862511 - DNA, 25 bp, Homo sapien
tacccatgggtaatcatgccttcct

SEQ ID NO: 3862512 - DNA, 25 bp, Homo sapien
ctttggctcagatgggttgcttcag

SEQ ID NO: 3862513 - DNA, 25 bp, Homo sapien
gatctctacccatctacccagaagg

SEQ ID NO: 3862514 - DNA, 25 bp, Homo sapien
ggatagatgttcacatcccaatcca

SEQ ID NO: 3862515 - DNA, 25 bp, Homo sapien
catcctctggactctgggatagatg

SEQ ID NO: 3862516 - DNA, 25 bp, Homo sapien
gggatagatgttcacatcccaatcc

SEQ ID NO: 3862517 - DNA, 25 bp, Homo sapien
tgaccagggtcccatcctctggact

SEQ ID NO: 3862518 - DNA, 25 bp, Homo sapien
ctgtgcagcttcatgcactggaacc

SEQ ID NO: 3862519 - DNA, 25 bp, Homo sapien
tgtgcagcttcatgcactggaacca

SEQ ID NO: 3862520 - DNA, 25 bp, Homo sapien
tgcagcttcatgcactggaaccaaa

SEQ ID NO: 3862521 - DNA, 25 bp, Homo sapien
gcagcttcatgcactggaaccaaac

SEQ ID NO: 3862522 - DNA, 25 bp, Homo sapien
taatcatactcacattgttctacaa

SEQ ID NO: 3862523 - DNA, 25 bp, Homo sapien
gcaggacagaggaattaatcatact

SEQ ID NO: 3862524 - DNA, 25 bp, Homo sapien
cattcatagggaaatttgttcattt

SEQ ID NO: 3862525 - DNA, 25 bp, Homo sapien
tacaaccatcatccacattcatagg

SEQ ID NO: 3862526 - DNA, 25 bp, Homo sapien
ttcctctgttctctaggctgtcaca

SEQ ID NO: 3862527 - DNA, 25 bp, Homo sapien
ctgccatttgccttttcaaaaccat

SEQ ID NO: 3862528 - DNA, 25 bp, Homo sapien
aaccatttcctctgttctctaggct

SEQ ID NO: 3862529 - DNA, 25 bp, Homo sapien
tgccatttgccttttcaaaaccatt

SEQ ID NO: 3862530 - DNA, 25 bp, Homo sapien
tccacagcagcgttgccgtggtaac

SEQ ID NO: 3862531 - DNA, 25 bp, Homo sapien
tcgatttcctgtcagccaacaaagg

SEQ ID NO: 3862532 - DNA, 25 bp, Homo sapien
caaagggccgttcgcctttcatggc

SEQ ID NO: 3862533 - DNA, 25 bp, Homo sapien
cgtggtaacgatcctccgccggacg

SEQ ID NO: 3862534 - DNA, 25 bp, Homo sapien
caggccaggccgtggttgtctttcc

SEQ ID NO: 3862535 - DNA, 25 bp, Homo sapien
cgcaaaaagggtactggtgaacgtg

SEQ ID NO: 3862536 - DNA, 25 bp, Homo sapien
tccaaggcggctcagcttgtgcttt

SEQ ID NO: 3862537 - DNA, 25 bp, Homo sapien
ccacggccacatccgcaaaaagggt

SEQ ID NO: 3862538 - DNA, 25 bp, Homo sapien
tgctaccgtcatgggagcaagaaca

SEQ ID NO: 3862539 - DNA, 25 bp, Homo sapien
cacgtcactcagttgctctaacaag

SEQ ID NO: 3862540 - DNA, 25 bp, Homo sapien
tgtcacatgcactctcacgatgagg

SEQ ID NO: 3862541 - DNA, 25 bp, Homo sapien
ctttggagagaattatgcacgtcac

SEQ ID NO: 3862542 - DNA, 25 bp, Homo sapien
gatagtcggataattatgtctctta

SEQ ID NO: 3862543 - DNA, 25 bp, Homo sapien
tgttcggtttacagagtttgctact

SEQ ID NO: 3862544 - DNA, 25 bp, Homo sapien
tctgggtcgatcttagctttataca

SEQ ID NO: 3862545 - DNA, 25 bp, Homo sapien
gaaaccccgatgtgaagtgtacata

SEQ ID NO: 3862546 - DNA, 25 bp, Homo sapien
tccaagaaggaatccggcgcccagt

SEQ ID NO: 3862547 - DNA, 25 bp, Homo sapien
gctgaagattgtagttatctaggag

SEQ ID NO: 3862548 - DNA, 25 bp, Homo sapien
aaagctgtctgtcgttcctgaagga

SEQ ID NO: 3862549 - DNA, 25 bp, Homo sapien
tgagcctcttcctaacgcagtcttg

SEQ ID NO: 3862550 - DNA, 25 bp, Homo sapien
agccagccctgcctgggccgcggcc

SEQ ID NO: 3862551 - DNA, 25 bp, Homo sapien
cctgggccgcggccgccggcctcat

SEQ ID NO: 3862552 - DNA, 25 bp, Homo sapien
atccggcccaggcagcagccagccc

SEQ ID NO: 3862553 - DNA, 25 bp, Homo sapien
catccggcccaggcagcagccagcc

SEQ ID NO: 3862554 - DNA, 25 bp, Homo sapien
caggcaggcatccttctcagcactg

SEQ ID NO: 3862555 - DNA, 25 bp, Homo sapien
ctttagcaggcaggcatccttctca

SEQ ID NO: 3862556 - DNA, 25 bp, Homo sapien
cagcactgccatccaggactctttc

SEQ ID NO: 3862557 - DNA, 25 bp, Homo sapien
gggatcagctttagcaggcaggcat

SEQ ID NO: 3862558 - DNA, 25 bp, Homo sapien
gaaaaacatgagactcggagtgggc

SEQ ID NO: 3862559 - DNA, 25 bp, Homo sapien
acattgtgttgaagctcctgggagc

SEQ ID NO: 3862560 - DNA, 25 bp, Homo sapien
ctggctgaagaaccacaagaggtct

SEQ ID NO: 3862561 - DNA, 25 bp, Homo sapien
tcattcagcccaagtagatgtcctt

SEQ ID NO: 3862562 - DNA, 25 bp, Homo sapien
ggatgcttttgaaagctgcccgcat

SEQ ID NO: 3862563 - DNA, 25 bp, Homo sapien
aggatgcttttgaaagctgcccgca

SEQ ID NO: 3862564 - DNA, 25 bp, Homo sapien
tatcaataatctgatttatcacagg

SEQ ID NO: 3862565 - DNA, 25 bp, Homo sapien
ttatcaataatctgatttatcacag

SEQ ID NO: 3862566 - DNA, 25 bp, Homo sapien
ctgaaagataactctggcatcttcc

SEQ ID NO: 3862567 - DNA, 25 bp, Homo sapien
tttcgtagctgacattgtggtgggt

SEQ ID NO: 3862568 - DNA, 25 bp, Homo sapien
gctgttacccattccttgatactga

SEQ ID NO: 3862569 - DNA, 25 bp, Homo sapien
tttctgaatcctttcgtagctgaca

SEQ ID NO: 3862570 - DNA, 25 bp, Homo sapien
gatactgacagtacaatggccatcc

SEQ ID NO: 3862571 - DNA, 25 bp, Homo sapien
tctttttctacttccttaatgactc

SEQ ID NO: 3862572 - DNA, 25 bp, Homo sapien
ttccttaatgactctaattgcagac

SEQ ID NO: 3862573 - DNA, 25 bp, Homo sapien
tctacttccttaatgactctaattg

SEQ ID NO: 3862574 - DNA, 25 bp, Homo sapien
tacttccttaatgactctaattgca

SEQ ID NO: 3862575 - DNA, 25 bp, Homo sapien
gctgtgagtggtatggcactgctgt

SEQ ID NO: 3862576 - DNA, 25 bp, Homo sapien
ctgtgagtggtatggcactgctgtg

SEQ ID NO: 3862577 - DNA, 25 bp, Homo sapien
tggctgtgagtggtatggcactgct

SEQ ID NO: 3862578 - DNA, 25 bp, Homo sapien
tgtgagtggtatggcactgctgtga

SEQ ID NO: 3862579 - DNA, 25 bp, Homo sapien
ccgcgatcccgacgcctctcgctac

SEQ ID NO: 3862580 - DNA, 25 bp, Homo sapien
tctcgctacccgaggggcgtgcccg

SEQ ID NO: 3862581 - DNA, 25 bp, Homo sapien
gacccgcgcttaccgccaatcgcaa

SEQ ID NO: 3862582 - DNA, 25 bp, Homo sapien
tgcccgcgcgggactgccgccccct

SEQ ID NO: 3862583 - DNA, 25 bp, Homo sapien
atctgttttcaaccatttggagtca

SEQ ID NO: 3862584 - DNA, 25 bp, Homo sapien
tcaaccatttggagtcaaggcgagc

SEQ ID NO: 3862585 - DNA, 25 bp, Homo sapien
agtcaaggcgagcctgggcagccaa

SEQ ID NO: 3862586 - DNA, 25 bp, Homo sapien
cgagcctgggcagccaaacacaaat

SEQ ID NO: 3862587 - DNA, 25 bp, Homo sapien
aggtgcaggagtttcatcttttttc

SEQ ID NO: 3862588 - DNA, 25 bp, Homo sapien
ttgtcatccagatcttctttctttg

SEQ ID NO: 3862589 - DNA, 25 bp, Homo sapien
ctatatacaggtgcaggagtttcat

SEQ ID NO: 3862590 - DNA, 25 bp, Homo sapien
ttgacttggccctatatacaggtgc

SEQ ID NO: 3862591 - DNA, 25 bp, Homo sapien
gccttttggtgcctggcgttctgtg

SEQ ID NO: 3862592 - DNA, 25 bp, Homo sapien
tggccttttggtgcctggcgttctg

SEQ ID NO: 3862593 - DNA, 25 bp, Homo sapien
gcttctggccttttggtgcctggcg

SEQ ID NO: 3862594 - DNA, 25 bp, Homo sapien
cttttggtgcctggcgttctgtgaa

SEQ ID NO: 3862595 - DNA, 25 bp, Homo sapien
ctcagcgtgcctctctgcacagcca

SEQ ID NO: 3862596 - DNA, 25 bp, Homo sapien
agcaggatggccagagccaagtgct

SEQ ID NO: 3862597 - DNA, 25 bp, Homo sapien
acagccagctccagcaggatggcca

SEQ ID NO: 3862598 - DNA, 25 bp, Homo sapien
gctccagcaggatggccagagccaa

SEQ ID NO: 3862599 - DNA, 25 bp, Homo sapien
caaaagcaaggtgctggtgccctgg

SEQ ID NO: 3862600 - DNA, 25 bp, Homo sapien
gcatgttgccctcggaggggggcgt

SEQ ID NO: 3862601 - DNA, 25 bp, Homo sapien
gtgcatgttgccctcggaggggggc

SEQ ID NO: 3862602 - DNA, 25 bp, Homo sapien
tgcatgttgccctcggaggggggcg

SEQ ID NO: 3862603 - DNA, 25 bp, Homo sapien
agagtgacagctcagatgacatgcc

SEQ ID NO: 3862604 - DNA, 25 bp, Homo sapien
gagctggtactaaacagagtgacag

SEQ ID NO: 3862605 - DNA, 25 bp, Homo sapien
aggggggagctggtactaaacagag

SEQ ID NO: 3862606 - DNA, 25 bp, Homo sapien
aacagagtgacagctcagatgacat

SEQ ID NO: 3862607 - DNA, 25 bp, Homo sapien
taaagaccagcactcctggaggttt

SEQ ID NO: 3862608 - DNA, 25 bp, Homo sapien
gaccagcactcctggaggtttacac

SEQ ID NO: 3862609 - DNA, 25 bp, Homo sapien
ctgtaaagaccagcactcctggagg

SEQ ID NO: 3862610 - DNA, 25 bp, Homo sapien
cactcctggaggtttacacccaggg

SEQ ID NO: 3862611 - DNA, 25 bp, Homo sapien
agccagatcttctaaatgggccatg

SEQ ID NO: 3862612 - DNA, 25 bp, Homo sapien
agacgtcggacagctacacggcaga

SEQ ID NO: 3862613 - DNA, 25 bp, Homo sapien
tcggacagctacacggcagaggcat

SEQ ID NO: 3862614 - DNA, 25 bp, Homo sapien
acgtcggacagctacacggcagagg

SEQ ID NO: 3862615 - DNA, 25 bp, Homo sapien
gagacgtcggacagctacacggcag

SEQ ID NO: 3862616 - DNA, 25 bp, Homo sapien
gacagcccacgttcagagtataaag

SEQ ID NO: 3862617 - DNA, 25 bp, Homo sapien
taagacagcccacgttcagagtata

SEQ ID NO: 3862618 - DNA, 25 bp, Homo sapien
cagcccacgttcagagtataaagaa

SEQ ID NO: 3862619 - DNA, 25 bp, Homo sapien
gcccacgttcagagtataaagaagg

SEQ ID NO: 3862620 - DNA, 25 bp, Homo sapien
ctttctcatcaatcacaatccagaa

SEQ ID NO: 3862621 - DNA, 25 bp, Homo sapien
atacactttctcatcaatcacaatc

SEQ ID NO: 3862622 - DNA, 25 bp, Homo sapien
cactttctcatcaatcacaatccag

SEQ ID NO: 3862623 - DNA, 25 bp, Homo sapien
tacactttctcatcaatcacaatcc

SEQ ID NO: 3862624 - DNA, 25 bp, Homo sapien
ggtgacttcaaactcgaaagcagct

SEQ ID NO: 3862625 - DNA, 25 bp, Homo sapien
gggtgacttcaaactcgaaagcagc

SEQ ID NO: 3862626 - DNA, 25 bp, Homo sapien
ccgggtgacttcaaactcgaaagca

SEQ ID NO: 3862627 - DNA, 25 bp, Homo sapien
tgacttcaaactcgaaagcagcttc

SEQ ID NO: 3862628 - DNA, 25 bp, Homo sapien
tgcatcactcaaggcatacagcctc

SEQ ID NO: 3862629 - DNA, 25 bp, Homo sapien
cctctgcatcactcaaggcatacag

SEQ ID NO: 3862630 - DNA, 25 bp, Homo sapien
tctgcatcactcaaggcatacagcc

SEQ ID NO: 3862631 - DNA, 25 bp, Homo sapien
ctgcatcactcaaggcatacagcct

SEQ ID NO: 3862632 - DNA, 25 bp, Homo sapien
tggcacattcaatctcgacaggaga

SEQ ID NO: 3862633 - DNA, 25 bp, Homo sapien
caggagacagcggtgtgctcattgc

SEQ ID NO: 3862634 - DNA, 25 bp, Homo sapien
tctcgacaggagacagcggtgtgct

SEQ ID NO: 3862635 - DNA, 25 bp, Homo sapien
tcctctctgtgtctatcagaggtga

SEQ ID NO: 3862636 - DNA, 25 bp, Homo sapien
gaactcaggattgtagttccagtcc

SEQ ID NO: 3862637 - DNA, 25 bp, Homo sapien
aactcaggattgtagttccagtcca

SEQ ID NO: 3862638 - DNA, 25 bp, Homo sapien
gcatcagaactcaggattgtagttc

SEQ ID NO: 3862639 - DNA, 25 bp, Homo sapien
tcagaactcaggattgtagttccag

SEQ ID NO: 3862640 - DNA, 25 bp, Homo sapien
cttcacgttgtgatcctgaatgtta

SEQ ID NO: 3862641 - DNA, 25 bp, Homo sapien
acgttgtgatcctgaatgttattgt

SEQ ID NO: 3862642 - DNA, 25 bp, Homo sapien
tcacgttgtgatcctgaatgttatt

SEQ ID NO: 3862643 - DNA, 25 bp, Homo sapien
cacgttgtgatcctgaatgttattg

SEQ ID NO: 3862644 - DNA, 25 bp, Homo sapien
tcaaatggcactgcctacagtacct

SEQ ID NO: 3862645 - DNA, 25 bp, Homo sapien
ggtgtggtcaaatggcactgcctac

SEQ ID NO: 3862646 - DNA, 25 bp, Homo sapien
gggaaacatgatcggtgtggtcaaa

SEQ ID NO: 3862647 - DNA, 25 bp, Homo sapien
gatcggtgtggtcaaatggcactgc

SEQ ID NO: 3862648 - DNA, 25 bp, Homo sapien
ttcatgttttaagaagcaacataac

SEQ ID NO: 3862649 - DNA, 25 bp, Homo sapien
tgttttaagaagcaacataacagca

SEQ ID NO: 3862650 - DNA, 25 bp, Homo sapien
agcaacataacagcaagcgaccgac

SEQ ID NO: 3862651 - DNA, 25 bp, Homo sapien
gaagcaacataacagcaagcgaccg

SEQ ID NO: 3862652 - DNA, 25 bp, Homo sapien
acattttgcttggtagacaactcta

SEQ ID NO: 3862653 - DNA, 25 bp, Homo sapien
tgcatgaactaaagataatgccaca

SEQ ID NO: 3862654 - DNA, 25 bp, Homo sapien
cactgacttaggcaacgttctgtgc

SEQ ID NO: 3862655 - DNA, 25 bp, Homo sapien
tgacttaggcaacgttctgtgcttt

SEQ ID NO: 3862656 - DNA, 25 bp, Homo sapien
acaactttaacaacaaatatttctg

SEQ ID NO: 3862657 - DNA, 25 bp, Homo sapien
tgcaaagttaaccaggaaaagacaa

SEQ ID NO: 3862658 - DNA, 25 bp, Homo sapien
taacaacaaatatttctgcaactgt

SEQ ID NO: 3862659 - DNA, 25 bp, Homo sapien
ctgcaaagttaaccaggaaaagaca

SEQ ID NO: 3862660 - DNA, 25 bp, Homo sapien
cctccgttcccgaattatcttctga

SEQ ID NO: 3862661 - DNA, 25 bp, Homo sapien
tcctccgttcccgaattatcttctg

SEQ ID NO: 3862662 - DNA, 25 bp, Homo sapien
taattgcaatgggtctcttgtccac

SEQ ID NO: 3862663 - DNA, 25 bp, Homo sapien
tgggtctcttgtccacatttattgg

SEQ ID NO: 3862664 - DNA, 25 bp, Homo sapien
cacatttattggactatgaggcaaa

SEQ ID NO: 3862665 - DNA, 25 bp, Homo sapien
tgtccacatttattggactatgagg

SEQ ID NO: 3862666 - DNA, 25 bp, Homo sapien
caaattcagcaattgtactgaggag

SEQ ID NO: 3862667 - DNA, 25 bp, Homo sapien
gaggagtggagactgcggataaaga

SEQ ID NO: 3862668 - DNA, 25 bp, Homo sapien
gggcaaattcagcaattgtactgag

SEQ ID NO: 3862669 - DNA, 25 bp, Homo sapien
ttaagggcaaattcagcaattgtac

SEQ ID NO: 3862670 - DNA, 25 bp, Homo sapien
taaagaatttgactcgggacactgc

SEQ ID NO: 3862671 - DNA, 25 bp, Homo sapien
gactcgggacactgccagacttcta

SEQ ID NO: 3862672 - DNA, 25 bp, Homo sapien
aagataaagaatttgactcgggaca

SEQ ID NO: 3862673 - DNA, 25 bp, Homo sapien
aatttgactcgggacactgccagac

SEQ ID NO: 3862674 - DNA, 25 bp, Homo sapien
agaatgttctgaacagtccaagcat

SEQ ID NO: 3862675 - DNA, 25 bp, Homo sapien
tagaatgttctgaacagtccaagca

SEQ ID NO: 3862676 - DNA, 25 bp, Homo sapien
ctaataagcattgacacccacttac

SEQ ID NO: 3862677 - DNA, 25 bp, Homo sapien
aacataacgcagaaagcacgggcta

SEQ ID NO: 3862678 - DNA, 25 bp, Homo sapien
cactgacatttcttgtgcgtggata

SEQ ID NO: 3862679 - DNA, 25 bp, Homo sapien
gactaataagcattgacacccactg

SEQ ID NO: 3862680 - DNA, 25 bp, Homo sapien
cccaggctcggtcccaatgggttct

SEQ ID NO: 3862681 - DNA, 25 bp, Homo sapien
catgctgagcatcatcaggaggaag

SEQ ID NO: 3862682 - DNA, 25 bp, Homo sapien
caatcaggcgcagtgccgtctgagt

SEQ ID NO: 3862683 - DNA, 25 bp, Homo sapien
caatgggttctcactggtgatggtc

SEQ ID NO: 3862684 - DNA, 25 bp, Homo sapien
ggctaagacgggcaattatactata

SEQ ID NO: 3862685 - DNA, 25 bp, Homo sapien
tctgtgctgcgccaaaagcagggct

SEQ ID NO: 3862686 - DNA, 25 bp, Homo sapien
ggcaattatactatagaagtctgca

SEQ ID NO: 3862687 - DNA, 25 bp, Homo sapien
aaagcagggctaagacgggcaatta

SEQ ID NO: 3862688 - DNA, 25 bp, Homo sapien
tatcttcctcaacattgtcacaact

SEQ ID NO: 3862689 - DNA, 25 bp, Homo sapien
ggcagaagcaccttgagcagaagca

SEQ ID NO: 3862690 - DNA, 25 bp, Homo sapien
tgttgcttccaaaactgtggcagaa

SEQ ID NO: 3862691 - DNA, 25 bp, Homo sapien
gagatgcacaggagccgtttccttc

SEQ ID NO: 3862692 - DNA, 25 bp, Homo sapien
tccaatcttcatcgtggcagccagt

SEQ ID NO: 3862693 - DNA, 25 bp, Homo sapien
tcatgaccctcgttccaatcttcat

SEQ ID NO: 3862694 - DNA, 25 bp, Homo sapien
acacctctcatgaccctcgttccaa

SEQ ID NO: 3862695 - DNA, 25 bp, Homo sapien
cctcgttccaatcttcatcgtggca

SEQ ID NO: 3862696 - DNA, 25 bp, Homo sapien
atcacttggcctaggcctggaggag

SEQ ID NO: 3862697 - DNA, 25 bp, Homo sapien
tcaccaatcacttggcctaggcctg

SEQ ID NO: 3862698 - DNA, 25 bp, Homo sapien
tctgctgagggctgtgcagcggccg

SEQ ID NO: 3862699 - DNA, 25 bp, Homo sapien
tgccagcttgaggtcgtattttcct

SEQ ID NO: 3862700 - DNA, 25 bp, Homo sapien
attccatgcgtgtcttgtccgtcgt

SEQ ID NO: 3862701 - DNA, 25 bp, Homo sapien
ggtgacccctctacaagccgaggaa

SEQ ID NO: 3862702 - DNA, 25 bp, Homo sapien
tgtttggaaatagggccgctgcaga

SEQ ID NO: 3862703 - DNA, 25 bp, Homo sapien
gaaggaaccacccttgatctcagtc

SEQ ID NO: 3862704 - DNA, 25 bp, Homo sapien
ggaacgctaaagaggccagcaaact

SEQ ID NO: 3862705 - DNA, 25 bp, Homo sapien
accagctccggtgttgctccctgta

SEQ ID NO: 3862706 - DNA, 25 bp, Homo sapien
accttcatgagcagcgtgatccact

SEQ ID NO: 3862707 - DNA, 25 bp, Homo sapien
agctccggtgttgctccctgtacac

SEQ ID NO: 3862708 - DNA, 25 bp, Homo sapien
ccttcatgagcagcgtgatccactg

SEQ ID NO: 3862709 - DNA, 25 bp, Homo sapien
gcttgcaacaaatgcacagctaaga

SEQ ID NO: 3862710 - DNA, 25 bp, Homo sapien
cttgcaacaaatgcacagctaagat

SEQ ID NO: 3862711 - DNA, 25 bp, Homo sapien
ttgatgtacttgttgatgagcccat

SEQ ID NO: 3862712 - DNA, 25 bp, Homo sapien
gatgtacttgttgatgagcccattc

SEQ ID NO: 3862713 - DNA, 25 bp, Homo sapien
agcggagctgggagttgatgtactt

SEQ ID NO: 3862714 - DNA, 25 bp, Homo sapien
gtacttgttgatgagcccattccac

SEQ ID NO: 3862715 - DNA, 25 bp, Homo sapien
ggtttcagctgattcaatgggcaaa

SEQ ID NO: 3862716 - DNA, 25 bp, Homo sapien
cgtccgcatgtcagagaactgcacg

SEQ ID NO: 3862717 - DNA, 25 bp, Homo sapien
gacacgtccgcatgtcagagaactg

SEQ ID NO: 3862718 - DNA, 25 bp, Homo sapien
tggtttcagctgattcaatgggcaa

SEQ ID NO: 3862719 - DNA, 25 bp, Homo sapien
tatcatacagtaactgagcacaagt

SEQ ID NO: 3862720 - DNA, 25 bp, Homo sapien
ttcccttatcatacagtaactgagc

SEQ ID NO: 3862721 - DNA, 25 bp, Homo sapien
tcaagtgctaatgttggtgctgggt

SEQ ID NO: 3862722 - DNA, 25 bp, Homo sapien
gtgctgggtcctagtgtaaagccaa

SEQ ID NO: 3862723 - DNA, 25 bp, Homo sapien
gcacggtaccttctaggttgctaaa

SEQ ID NO: 3862724 - DNA, 25 bp, Homo sapien
gttgctaaagccctcttcatgtctc

SEQ ID NO: 3862725 - DNA, 25 bp, Homo sapien
catagacgcacggtaccttctaggt

SEQ ID NO: 3862726 - DNA, 25 bp, Homo sapien
tctaggttgctaaagccctcttcat

SEQ ID NO: 3862727 - DNA, 25 bp, Homo sapien
cagcagtaaaatatgatccgttaac

SEQ ID NO: 3862728 - DNA, 25 bp, Homo sapien
aaagcatagcacaatgtgaagatgg

SEQ ID NO: 3862729 - DNA, 25 bp, Homo sapien
tcacacatgatggtttcagcagtaa

SEQ ID NO: 3862730 - DNA, 25 bp, Homo sapien
ttaacagctggaactcataaaagca

SEQ ID NO: 3862731 - DNA, 25 bp, Homo sapien
gcggctttctgctaccgctgctttt

SEQ ID NO: 3862732 - DNA, 25 bp, Homo sapien
ggctttctgctaccgctgctttttg

SEQ ID NO: 3862733 - DNA, 25 bp, Homo sapien
ccgcggctttctgctaccgctgctt

SEQ ID NO: 3862734 - DNA, 25 bp, Homo sapien
tgccgccgctttttgcgcccgcggc

SEQ ID NO: 3862735 - DNA, 25 bp, Homo sapien
taaaatctcaattgacaattccaat

SEQ ID NO: 3862736 - DNA, 25 bp, Homo sapien
gggatgtcaagactggtggaggtgt

SEQ ID NO: 3862737 - DNA, 25 bp, Homo sapien
ttattgtggggatgtcaagactggt

SEQ ID NO: 3862738 - DNA, 25 bp, Homo sapien
ggaggtgtgaaatttagaggtcaaa

SEQ ID NO: 3862739 - DNA, 25 bp, Homo sapien
gcttgccatgtttcttccccttcca

SEQ ID NO: 3862740 - DNA, 25 bp, Homo sapien
ctgcttgccatgtttcttccccttc

SEQ ID NO: 3862741 - DNA, 25 bp, Homo sapien
cttgccatgtttcttccccttccat

SEQ ID NO: 3862742 - DNA, 25 bp, Homo sapien
tgcttgccatgtttcttccccttcc

SEQ ID NO: 3862743 - DNA, 25 bp, Homo sapien
caggaaatacggacgatggaggtaa

SEQ ID NO: 3862744 - DNA, 25 bp, Homo sapien
ccagcaggaaatacggacgatggag

SEQ ID NO: 3862745 - DNA, 25 bp, Homo sapien
gcaggaaatacggacgatggaggta

SEQ ID NO: 3862746 - DNA, 25 bp, Homo sapien
agtgctctgtgtccaacgacctcac

SEQ ID NO: 3862747 - DNA, 25 bp, Homo sapien
ccagtgctctgtgtccaacgacctc

SEQ ID NO: 3862748 - DNA, 25 bp, Homo sapien
cagtgctctgtgtccaacgacctca

SEQ ID NO: 3862749 - DNA, 25 bp, Homo sapien
tgcctagacgcccgcacccctagct

SEQ ID NO: 3862750 - DNA, 25 bp, Homo sapien
cttgcctagacgcccgcacccctag

SEQ ID NO: 3862751 - DNA, 25 bp, Homo sapien
ttgcctagacgcccgcacccctagc

SEQ ID NO: 3862752 - DNA, 25 bp, Homo sapien
ccgcacccctagctccccgccttga

SEQ ID NO: 3862753 - DNA, 25 bp, Homo sapien
agcagctggctttttgatcccgccg

SEQ ID NO: 3862754 - DNA, 25 bp, Homo sapien
gcagctggctttttgatcccgccgc

SEQ ID NO: 3862755 - DNA, 25 bp, Homo sapien
agctggctttttgatcccgccgccg

SEQ ID NO: 3862756 - DNA, 25 bp, Homo sapien
gagcagctggctttttgatcccgcc

SEQ ID NO: 3862757 - DNA, 25 bp, Homo sapien
gcaaaacgtgtccatagtggggcac

SEQ ID NO: 3862758 - DNA, 25 bp, Homo sapien
aaaacgtgtccatagtggggcacag

SEQ ID NO: 3862759 - DNA, 25 bp, Homo sapien
caaaacgtgtccatagtggggcaca

SEQ ID NO: 3862760 - DNA, 25 bp, Homo sapien
aagatgaagcccacaaaggagagaa

SEQ ID NO: 3862761 - DNA, 25 bp, Homo sapien
atccagctcatacccattccagaag

SEQ ID NO: 3862762 - DNA, 25 bp, Homo sapien
gatccagctcatacccattccagaa

SEQ ID NO: 3862763 - DNA, 25 bp, Homo sapien
cactgagacgcagcctgggttcttg

SEQ ID NO: 3862764 - DNA, 25 bp, Homo sapien
actgagacgcagcctgggttcttgt

SEQ ID NO: 3862765 - DNA, 25 bp, Homo sapien
ctgagacgcagcctgggttcttgta

SEQ ID NO: 3862766 - DNA, 25 bp, Homo sapien
tgctgggccacacactgagaaatgg

SEQ ID NO: 3862767 - DNA, 25 bp, Homo sapien
gctgggccacacactgagaaatggc

SEQ ID NO: 3862768 - DNA, 25 bp, Homo sapien
gggccacacactgagaaatggccat

SEQ ID NO: 3862769 - DNA, 25 bp, Homo sapien
cctgctgggccacacactgagaaat

SEQ ID NO: 3862770 - DNA, 25 bp, Homo sapien
ccccagccagcagaaagctggtgtc

SEQ ID NO: 3862771 - DNA, 25 bp, Homo sapien
cagcagaaagctggtgtcccagcgc

SEQ ID NO: 3862772 - DNA, 25 bp, Homo sapien
tttccaggcctaccgcagggtggcc

SEQ ID NO: 3862773 - DNA, 25 bp, Homo sapien
tggactctgcgtgaacatgccccaa

SEQ ID NO: 3862774 - DNA, 25 bp, Homo sapien
ccaaggcagctgagcgagaagccgc

SEQ ID NO: 3862775 - DNA, 25 bp, Homo sapien
gccaaggcagctgagcgagaagccg

SEQ ID NO: 3862776 - DNA, 25 bp, Homo sapien
ctgcaagatgagagtcaccaggcat

SEQ ID NO: 3862777 - DNA, 25 bp, Homo sapien
tgtacttcttggccgcctcactagc

SEQ ID NO: 3862778 - DNA, 25 bp, Homo sapien
cttggccgcctcactagcactctcc

SEQ ID NO: 3862779 - DNA, 25 bp, Homo sapien
ccatttttctcagggaagggtctga

SEQ ID NO: 3862780 - DNA, 25 bp, Homo sapien
gccatttttctcagggaagggtctg

SEQ ID NO: 3862781 - DNA, 25 bp, Homo sapien
tgaggggccatttttctcagggaag

SEQ ID NO: 3862782 - DNA, 25 bp, Homo sapien
cttcctccaacttcacctcagcatt

SEQ ID NO: 3862783 - DNA, 25 bp, Homo sapien
gcgggcagaggacgctcctctggac

SEQ ID NO: 3862784 - DNA, 25 bp, Homo sapien
agcagcgggcagaggacgctcctct

SEQ ID NO: 3862785 - DNA, 25 bp, Homo sapien
tttggcacaaaatgggcagcagcgg

SEQ ID NO: 3862786 - DNA, 25 bp, Homo sapien
gcagaggacgctcctctggacttcc

SEQ ID NO: 3862787 - DNA, 25 bp, Homo sapien
cctgccggctaagcatggctgcatt

SEQ ID NO: 3862788 - DNA, 25 bp, Homo sapien
tgccggctaagcatggctgcattgg

SEQ ID NO: 3862789 - DNA, 25 bp, Homo sapien
ggcctgccggctaagcatggctgca

SEQ ID NO: 3862790 - DNA, 25 bp, Homo sapien
tggcctgccggctaagcatggctgc

SEQ ID NO: 3862791 - DNA, 25 bp, Homo sapien
ctgcatggccagaacctggttttca

SEQ ID NO: 3862792 - DNA, 25 bp, Homo sapien
catggccagaacctggttttcagct

SEQ ID NO: 3862793 - DNA, 25 bp, Homo sapien
cagaacctggttttcagctttctct

SEQ ID NO: 3862794 - DNA, 25 bp, Homo sapien
tggccagaacctggttttcagcttt

SEQ ID NO: 3862795 - DNA, 25 bp, Homo sapien
ccttggtgaggccctcagactgctt

SEQ ID NO: 3862796 - DNA, 25 bp, Homo sapien
actgcaagcggtcgtactccttggt

SEQ ID NO: 3862797 - DNA, 25 bp, Homo sapien
ctgcagctttgcgtgctcctactgc

SEQ ID NO: 3862798 - DNA, 25 bp, Homo sapien
gctcctactgcaagcggtcgtactc

SEQ ID NO: 3862799 - DNA, 25 bp, Homo sapien
tcttgtccatgggaccaactactgt

SEQ ID NO: 3862800 - DNA, 25 bp, Homo sapien
tcttcttgtccatgggaccaactac

SEQ ID NO: 3862801 - DNA, 25 bp, Homo sapien
tgtccatgggaccaactactgtagc

SEQ ID NO: 3862802 - DNA, 25 bp, Homo sapien
ttgtccatgggaccaactactgtag

SEQ ID NO: 3862803 - DNA, 25 bp, Homo sapien
taatgtgcttggagagtgtggacaa

SEQ ID NO: 3862804 - DNA, 25 bp, Homo sapien
aagagaaactccagtccacctgctc

SEQ ID NO: 3862805 - DNA, 25 bp, Homo sapien
cacccaccctcctgcgggaccaaag

SEQ ID NO: 3862806 - DNA, 25 bp, Homo sapien
gcattctgaacgtgtagcaatcagg

SEQ ID NO: 3862807 - DNA, 25 bp, Homo sapien
tgctacaagaatggcggaggtgagc

SEQ ID NO: 3862808 - DNA, 25 bp, Homo sapien
tacaagaatggcggaggtgagctcc

SEQ ID NO: 3862809 - DNA, 25 bp, Homo sapien
ctacaagaatggcggaggtgagctc

SEQ ID NO: 3862810 - DNA, 25 bp, Homo sapien
ctgtgctacaagaatggcggaggtg

SEQ ID NO: 3862811 - DNA, 25 bp, Homo sapien
gccacactaggagcgggcgaccctg

SEQ ID NO: 3862812 - DNA, 25 bp, Homo sapien
ctgggccacactaggagcgggcgac

SEQ ID NO: 3862813 - DNA, 25 bp, Homo sapien
ggccacactaggagcgggcgaccct

SEQ ID NO: 3862814 - DNA, 25 bp, Homo sapien
gcctgggccacactaggagcgggcg

SEQ ID NO: 3862815 - DNA, 25 bp, Homo sapien
gcttccagggtagccgggaagctct

SEQ ID NO: 3862816 - DNA, 25 bp, Homo sapien
ggagccttgctcatcagtcaggcag

SEQ ID NO: 3862817 - DNA, 25 bp, Homo sapien
agaggcctgtcacctgaagagctgg

SEQ ID NO: 3862818 - DNA, 25 bp, Homo sapien
agacacagaggcctgtcacctgaag

SEQ ID NO: 3862819 - DNA, 25 bp, Homo sapien
cttattcccgctccagtcccctcaa

SEQ ID NO: 3862820 - DNA, 25 bp, Homo sapien
cctacccactctcatgccaggcagg

SEQ ID NO: 3862821 - DNA, 25 bp, Homo sapien
cccctacccactctcatgccaggca

SEQ ID NO: 3862822 - DNA, 25 bp, Homo sapien
agcccctacccactctcatgccagg

SEQ ID NO: 3862823 - DNA, 25 bp, Homo sapien
aaagctggagggatggccgagggct

SEQ ID NO: 3862824 - DNA, 25 bp, Homo sapien
tgcagtgtccacgatcagatcaggg

SEQ ID NO: 3862825 - DNA, 25 bp, Homo sapien
gaagctcagtctggcttgggccaga

SEQ ID NO: 3862826 - DNA, 25 bp, Homo sapien
tagcttaacgggatgagccatctgg

SEQ ID NO: 3862827 - DNA, 25 bp, Homo sapien
gggctgaggccctcggagcctactt

SEQ ID NO: 3862828 - DNA, 25 bp, Homo sapien
ctgggtccttgagtggccccgctta

SEQ ID NO: 3862829 - DNA, 25 bp, Homo sapien
tgcggtccagatgggttggccctct

SEQ ID NO: 3862830 - DNA, 25 bp, Homo sapien
gcttatttaggccatctatgagtca

SEQ ID NO: 3862831 - DNA, 25 bp, Homo sapien
cctgaggctgtccccaaagtgccat

SEQ ID NO: 3862832 - DNA, 25 bp, Homo sapien
gctctctggcggtggcctgcactct

SEQ ID NO: 3862833 - DNA, 25 bp, Homo sapien
caccccttggacaagcaacatctga

SEQ ID NO: 3862834 - DNA, 25 bp, Homo sapien
tcagctctcctacatccctctcgag

SEQ ID NO: 3862835 - DNA, 25 bp, Homo sapien
tggtggtcgctgtcatcaacacggg

SEQ ID NO: 3862836 - DNA, 25 bp, Homo sapien
gtggtccacacagatcagaaattag

SEQ ID NO: 3862837 - DNA, 25 bp, Homo sapien
caagtggccatacgttactcagaga

SEQ ID NO: 3862838 - DNA, 25 bp, Homo sapien
tcaacacgggatgctcaacgctggt

SEQ ID NO: 3862839 - DNA, 25 bp, Homo sapien
actgtgatatcctgagcacccctga

SEQ ID NO: 3862840 - DNA, 25 bp, Homo sapien
gcgccccctcgtggtactgagggca

SEQ ID NO: 3862841 - DNA, 25 bp, Homo sapien
tgggcaaaccctcgtgtcctgagtg

SEQ ID NO: 3862842 - DNA, 25 bp, Homo sapien
tctgagtgcccctggtgtcatgagc

SEQ ID NO: 3862843 - DNA, 25 bp, Homo sapien
tgcttcctgagaacccccgtgtact

SEQ ID NO: 3862844 - DNA, 25 bp, Homo sapien
gctgcttcctgagaacccccgtgta

SEQ ID NO: 3862845 - DNA, 25 bp, Homo sapien
ctgagaacccccgtgtactgagcac

SEQ ID NO: 3862846 - DNA, 25 bp, Homo sapien
ttcctgagaacccccgtgtactgag

SEQ ID NO: 3862847 - DNA, 25 bp, Homo sapien
caccagctgcacttcacactgcaca

SEQ ID NO: 3862848 - DNA, 25 bp, Homo sapien
gactccaccagctgcacttcacact

SEQ ID NO: 3862849 - DNA, 25 bp, Homo sapien
accagctgcacttcacactgcacac

SEQ ID NO: 3862850 - DNA, 25 bp, Homo sapien
tccaccagctgcacttcacactgca

SEQ ID NO: 3862851 - DNA, 25 bp, Homo sapien
gaggagttctcattcctgtaggtgg

SEQ ID NO: 3862852 - DNA, 25 bp, Homo sapien
ttgaggagttctcattcctgtaggt

SEQ ID NO: 3862853 - DNA, 25 bp, Homo sapien
ggttgaggagttctcattcctgtag

SEQ ID NO: 3862854 - DNA, 25 bp, Homo sapien
ggagttctcattcctgtaggtggca

SEQ ID NO: 3862855 - DNA, 25 bp, Homo sapien
tcctcatgactctgatgctggtgcg

SEQ ID NO: 3862856 - DNA, 25 bp, Homo sapien
gcttcctcatgactctgatgctggt

SEQ ID NO: 3862857 - DNA, 25 bp, Homo sapien
tcatgactctgatgctggtgcgcat

SEQ ID NO: 3862858 - DNA, 25 bp, Homo sapien
ctcatgactctgatgctggtgcgca

SEQ ID NO: 3862859 - DNA, 25 bp, Homo sapien
ggaggaagtactggttatgatcaga

SEQ ID NO: 3862860 - DNA, 25 bp, Homo sapien
agtactggttatgatcagaaatcca

SEQ ID NO: 3862861 - DNA, 25 bp, Homo sapien
agctccttccctaggggctggcaga

SEQ ID NO: 3862862 - DNA, 25 bp, Homo sapien
tatgatcagaaatccagaggcagca

SEQ ID NO: 3862863 - DNA, 25 bp, Homo sapien
ccatggtggtgtactcattgcacat

SEQ ID NO: 3862864 - DNA, 25 bp, Homo sapien
tccatggtggtgtactcattgcaca

SEQ ID NO: 3862865 - DNA, 25 bp, Homo sapien
atggtggtgtactcattgcacatgt

SEQ ID NO: 3862866 - DNA, 25 bp, Homo sapien
catggtggtgtactcattgcacatg

SEQ ID NO: 3862867 - DNA, 25 bp, Homo sapien
cagggaggtttgtgtctggcctcac

SEQ ID NO: 3862868 - DNA, 25 bp, Homo sapien
cctgagcgccccttggtgacctgag

SEQ ID NO: 3862869 - DNA, 25 bp, Homo sapien
ttccctgcagggaggtttgtgtctg

SEQ ID NO: 3862870 - DNA, 25 bp, Homo sapien
ctgccttaatgtgtcctgagcgccc

SEQ ID NO: 3862871 - DNA, 25 bp, Homo sapien
ggaatcagagctttagtctgcaggg

SEQ ID NO: 3862872 - DNA, 25 bp, Homo sapien
tcagagctttagtctgcagggcagg

SEQ ID NO: 3862873 - DNA, 25 bp, Homo sapien
gcagcagatctgggaggtgatgaca

SEQ ID NO: 3862874 - DNA, 25 bp, Homo sapien
tgatgacactgacggggaacactgg

SEQ ID NO: 3862875 - DNA, 25 bp, Homo sapien
ctccaccagctgcacctcacactgg

SEQ ID NO: 3862876 - DNA, 25 bp, Homo sapien
accagctgcacctcacactggacac

SEQ ID NO: 3862877 - DNA, 25 bp, Homo sapien
aaggcctcccgcagactccaccagc

SEQ ID NO: 3862878 - DNA, 25 bp, Homo sapien
caaggcctcccgcagactccaccag

SEQ ID NO: 3862879 - DNA, 25 bp, Homo sapien
gcacaggagagtctaagggaccccc

SEQ ID NO: 3862880 - DNA, 25 bp, Homo sapien
caggagagtctaagggaccccccag

SEQ ID NO: 3862881 - DNA, 25 bp, Homo sapien
agagtctaagggaccccccaggctg

SEQ ID NO: 3862882 - DNA, 25 bp, Homo sapien
ctgcacaggagagtctaagggaccc

SEQ ID NO: 3862883 - DNA, 25 bp, Homo sapien
tgcagcgtagtctgttgtcccacca

SEQ ID NO: 3862884 - DNA, 25 bp, Homo sapien
ggtgcagcgtagtctgttgtcccac

SEQ ID NO: 3862885 - DNA, 25 bp, Homo sapien
gtgcagcgtagtctgttgtcccacc

SEQ ID NO: 3862886 - DNA, 25 bp, Homo sapien
gcagcgtagtctgttgtcccaccat

SEQ ID NO: 3862887 - DNA, 25 bp, Homo sapien
gagcgccccctggttgccccgcgcg

SEQ ID NO: 3862888 - DNA, 25 bp, Homo sapien
tgggtcccgagcgccccctggttgc

SEQ ID NO: 3862889 - DNA, 25 bp, Homo sapien
cgcgcgcccctgcagggaggtttgt

SEQ ID NO: 3862890 - DNA, 25 bp, Homo sapien
tcagtgggtcccgagcgccccctgg

SEQ ID NO: 3862891 - DNA, 25 bp, Homo sapien
tgcttgcctccaccctagccttgcc

SEQ ID NO: 3862892 - DNA, 25 bp, Homo sapien
acctgcttgcctccaccctagcctt

SEQ ID NO: 3862893 - DNA, 25 bp, Homo sapien
gaacctgcttgcctccaccctagcc

SEQ ID NO: 3862894 - DNA, 25 bp, Homo sapien
ttgcctccaccctagccttgccagc

SEQ ID NO: 3862895 - DNA, 25 bp, Homo sapien
aatgccgtccgagggtgaaggtgaa

SEQ ID NO: 3862896 - DNA, 25 bp, Homo sapien
tgcagtcccgcgagtaatgccgtcc

SEQ ID NO: 3862897 - DNA, 25 bp, Homo sapien
gagaccacagcaaaggcagggacat

SEQ ID NO: 3862898 - DNA, 25 bp, Homo sapien
ccaggacagcggctgagttcatggc

SEQ ID NO: 3862899 - DNA, 25 bp, Homo sapien
ttgagtccatcatcgcaggacttgg

SEQ ID NO: 3862900 - DNA, 25 bp, Homo sapien
ggtgttgagtccatcatcgcaggac

SEQ ID NO: 3862901 - DNA, 25 bp, Homo sapien
gaaggtgttgagtccatcatcgcag

SEQ ID NO: 3862902 - DNA, 25 bp, Homo sapien
cggaaggtgttgagtccatcatcgc

SEQ ID NO: 3862903 - DNA, 25 bp, Homo sapien
caggctgggtatgcggtttggcagg

SEQ ID NO: 3862904 - DNA, 25 bp, Homo sapien
gcaggctgggtatgcggtttggcag

SEQ ID NO: 3862905 - DNA, 25 bp, Homo sapien
gctgaaggtcgcatctgagaggtca

SEQ ID NO: 3862906 - DNA, 25 bp, Homo sapien
tcagaggttgagtgtcgcttagaag

SEQ ID NO: 3862907 - DNA, 25 bp, Homo sapien
tgaaggtcgcatctgagaggtcaga

SEQ ID NO: 3862908 - DNA, 25 bp, Homo sapien
agtgtcgcttagaaggagcgtcagc

SEQ ID NO: 3862909 - DNA, 25 bp, Homo sapien
tgcacttggaaccatgatgccacat

SEQ ID NO: 3862910 - DNA, 25 bp, Homo sapien
tctgtgcacttggaaccatgatgcc

SEQ ID NO: 3862911 - DNA, 25 bp, Homo sapien
gcagtctgtgcacttggaaccatga

SEQ ID NO: 3862912 - DNA, 25 bp, Homo sapien
gaaccatgatgccacatgcgttctc

SEQ ID NO: 3862913 - DNA, 25 bp, Homo sapien
caaagaggtcccgtggctggcagat

SEQ ID NO: 3862914 - DNA, 25 bp, Homo sapien
catcatgtggatcctgagctgtgag

SEQ ID NO: 3862915 - DNA, 25 bp, Homo sapien
gtgagccctgctcatcacagaactg

SEQ ID NO: 3862916 - DNA, 25 bp, Homo sapien
acaaaccagacaaagaggtcccgtg

SEQ ID NO: 3862917 - DNA, 25 bp, Homo sapien
agggcaggagctccatctcccatca

SEQ ID NO: 3862918 - DNA, 25 bp, Homo sapien
gcaggagctccatctcccatcagac

SEQ ID NO: 3862919 - DNA, 25 bp, Homo sapien
ggcaggagctccatctcccatcaga

SEQ ID NO: 3862920 - DNA, 25 bp, Homo sapien
tgagggcaggagctccatctcccat

SEQ ID NO: 3862921 - DNA, 25 bp, Homo sapien
gcttccactggcgcaggccgctgcc

SEQ ID NO: 3862922 - DNA, 25 bp, Homo sapien
actggcgcaggccgctgcccgcttt

SEQ ID NO: 3862923 - DNA, 25 bp, Homo sapien
tccactggcgcaggccgctgcccgc

SEQ ID NO: 3862924 - DNA, 25 bp, Homo sapien
ccgcttccactggcgcaggccgctg

SEQ ID NO: 3862925 - DNA, 25 bp, Homo sapien
cttgctcagcgagagcgagcgcgcc

SEQ ID NO: 3862926 - DNA, 25 bp, Homo sapien
ctccttgctcagcgagagcgagcgc

SEQ ID NO: 3862927 - DNA, 25 bp, Homo sapien
tccttgctcagcgagagcgagcgcg

SEQ ID NO: 3862928 - DNA, 25 bp, Homo sapien
ccttgctcagcgagagcgagcgcgc

SEQ ID NO: 3862929 - DNA, 25 bp, Homo sapien
tgcgccggcccccacagcccccgcc

SEQ ID NO: 3862930 - DNA, 25 bp, Homo sapien
cacagcccccgccgccgccggcccg

SEQ ID NO: 3862931 - DNA, 25 bp, Homo sapien
ctgcgccggcccccacagcccccgc

SEQ ID NO: 3862932 - DNA, 25 bp, Homo sapien
agccggaacacgtgcctcctcttgg

SEQ ID NO: 3862933 - DNA, 25 bp, Homo sapien
cggaacacgtgcctcctcttggtct

SEQ ID NO: 3862934 - DNA, 25 bp, Homo sapien
ggtggtcagccggaacacgtgcctc

SEQ ID NO: 3862935 - DNA, 25 bp, Homo sapien
aagtcagcggtggtcagccggaaca

SEQ ID NO: 3862936 - DNA, 25 bp, Homo sapien
gccctgctgttctcccggatcgctc

SEQ ID NO: 3862937 - DNA, 25 bp, Homo sapien
ccggtcctcagcctgaaagagatat

SEQ ID NO: 3862938 - DNA, 25 bp, Homo sapien
ccccagcatgtcatcccggtcctca

SEQ ID NO: 3862939 - DNA, 25 bp, Homo sapien
ggatcgctctgatccccccagcatg

SEQ ID NO: 3862940 - DNA, 25 bp, Homo sapien
gatcagagcttggttggcacagccg

SEQ ID NO: 3862941 - DNA, 25 bp, Homo sapien
tcactttgcgataatcattaagctt

SEQ ID NO: 3862942 - DNA, 25 bp, Homo sapien
ctcactttgcgataatcattaagct

SEQ ID NO: 3862943 - DNA, 25 bp, Homo sapien
ttgctgatcagagcttggttggcac

SEQ ID NO: 3862944 - DNA, 25 bp, Homo sapien
ttgaggaactcagacttgaggcccc

SEQ ID NO: 3862945 - DNA, 25 bp, Homo sapien
cctgaggccacgtgccgcactctgc

SEQ ID NO: 3862946 - DNA, 25 bp, Homo sapien
gaggccacgtgccgcactctgcttg

SEQ ID NO: 3862947 - DNA, 25 bp, Homo sapien
ccccaggccgcgagagcctttgggg

SEQ ID NO: 3862948 - DNA, 25 bp, Homo sapien
aaatgcccttgggacagccttctta

SEQ ID NO: 3862949 - DNA, 25 bp, Homo sapien
tgcccttgggacagccttcttattt

SEQ ID NO: 3862950 - DNA, 25 bp, Homo sapien
ctgaccccaaatgcccttgggacag

SEQ ID NO: 3862951 - DNA, 25 bp, Homo sapien
tgaccccaaatgcccttgggacagc

SEQ ID NO: 3862952 - DNA, 25 bp, Homo sapien
ttgagctgctcctgtaggctggaca

SEQ ID NO: 3862953 - DNA, 25 bp, Homo sapien
agcttttggaagaaggacttgagca

SEQ ID NO: 3862954 - DNA, 25 bp, Homo sapien
gctgttgatcacattgaggtcttgc

SEQ ID NO: 3862955 - DNA, 25 bp, Homo sapien
aggacttgagcaggctgttgatcac

SEQ ID NO: 3862956 - DNA, 25 bp, Homo sapien
tgaaaagaggctcgggcagcttttg

SEQ ID NO: 3862957 - DNA, 25 bp, Homo sapien
agttggcctcaatgaagtcgttgta

SEQ ID NO: 3862958 - DNA, 25 bp, Homo sapien
actcccgcgcgtcctcaatgcagtt

SEQ ID NO: 3862959 - DNA, 25 bp, Homo sapien
gcctcaatgaagtcgttgtatttgt

SEQ ID NO: 3862960 - DNA, 25 bp, Homo sapien
agcttccgcagcgtcctcatccact

SEQ ID NO: 3862961 - DNA, 25 bp, Homo sapien
tctcagagtggtcagcgatggtctt

SEQ ID NO: 3862962 - DNA, 25 bp, Homo sapien
tcatagtagtgtcctgggagatccc

SEQ ID NO: 3862963 - DNA, 25 bp, Homo sapien
gcccacaaggaatttgagtgtttca

SEQ ID NO: 3862964 - DNA, 25 bp, Homo sapien
gtcagcgatggtcttgagatggccc

SEQ ID NO: 3862965 - DNA, 25 bp, Homo sapien
tctccacgatcttgtagaggtcagg

SEQ ID NO: 3862966 - DNA, 25 bp, Homo sapien
agtgtccgcccaaagaccagggcca

SEQ ID NO: 3862967 - DNA, 25 bp, Homo sapien
gtcatgttgtcctcagacgtcctca

SEQ ID NO: 3862968 - DNA, 25 bp, Homo sapien
tcagtgtctccacgatcttgtagag

SEQ ID NO: 3862969 - DNA, 25 bp, Homo sapien
cctcttcgtcactgaagaaccagtc

SEQ ID NO: 3862970 - DNA, 25 bp, Homo sapien
cttgtcctcttcgtcactgaagaac

SEQ ID NO: 3862971 - DNA, 25 bp, Homo sapien
ctcccttgtcctcttcgtcactgaa

SEQ ID NO: 3862972 - DNA, 25 bp, Homo sapien
cttcgtcactgaagaaccagtctga

SEQ ID NO: 3862973 - DNA, 25 bp, Homo sapien
aggaggggtcagctggcatgccctc

SEQ ID NO: 3862974 - DNA, 25 bp, Homo sapien
gaggggtcagctggcatgccctcgg

SEQ ID NO: 3862975 - DNA, 25 bp, Homo sapien
ggggtcagctggcatgccctcggat

SEQ ID NO: 3862976 - DNA, 25 bp, Homo sapien
ggtcagctggcatgccctcggatgc

SEQ ID NO: 3862977 - DNA, 25 bp, Homo sapien
tgttgggcaggaggtactcaatgtt

SEQ ID NO: 3862978 - DNA, 25 bp, Homo sapien
tgccaatgttgggcaggaggtactc

SEQ ID NO: 3862979 - DNA, 25 bp, Homo sapien
ccaatgttgggcaggaggtactcaa

SEQ ID NO: 3862980 - DNA, 25 bp, Homo sapien
aatgttgggcaggaggtactcaatg

SEQ ID NO: 3862981 - DNA, 25 bp, Homo sapien
gacttgactgaactacaggtggtag

SEQ ID NO: 3862982 - DNA, 25 bp, Homo sapien
tggacttgactgaactacaggtggt

SEQ ID NO: 3862983 - DNA, 25 bp, Homo sapien
cttgactgaactacaggtggtagaa

SEQ ID NO: 3862984 - DNA, 25 bp, Homo sapien
cttggacttgactgaactacaggtg

SEQ ID NO: 3862985 - DNA, 25 bp, Homo sapien
aagccttcagaattgccttcatacg

SEQ ID NO: 3862986 - DNA, 25 bp, Homo sapien
gccttcagaattgccttcatacgta

SEQ ID NO: 3862987 - DNA, 25 bp, Homo sapien
ccttcagaattgccttcatacgtac

SEQ ID NO: 3862988 - DNA, 25 bp, Homo sapien
tcaagccttcagaattgccttcata

SEQ ID NO: 3862989 - DNA, 25 bp, Homo sapien
agggaccatcaactttccccacagt

SEQ ID NO: 3862990 - DNA, 25 bp, Homo sapien
ttgggcactcggtacctcctgactt

SEQ ID NO: 3862991 - DNA, 25 bp, Homo sapien
ccacagtccaattgccattccctca

SEQ ID NO: 3862992 - DNA, 25 bp, Homo sapien
cttgggcactcggtacctcctgact

SEQ ID NO: 3862993 - DNA, 25 bp, Homo sapien
ggagcttggatgcctgcacacttgg

SEQ ID NO: 3862994 - DNA, 25 bp, Homo sapien
gagcttggatgcctgcacacttggt

SEQ ID NO: 3862995 - DNA, 25 bp, Homo sapien
agcttggatgcctgcacacttggtc

SEQ ID NO: 3862996 - DNA, 25 bp, Homo sapien
catgttaccgaatctcttctccccc

SEQ ID NO: 3862997 - DNA, 25 bp, Homo sapien
aaggtagtgaccgtgtcctggagcc

SEQ ID NO: 3862998 - DNA, 25 bp, Homo sapien
atccctgaaggtagtgaccgtgtcc

SEQ ID NO: 3862999 - DNA, 25 bp, Homo sapien
tcacttccatccctgaaggtagtga

SEQ ID NO: 3863000 - DNA, 25 bp, Homo sapien
agccacccgcacagaccactggtga

SEQ ID NO: 3863001 - DNA, 25 bp, Homo sapien
accatcactacgacactgagcagat

SEQ ID NO: 3863002 - DNA, 25 bp, Homo sapien
tcatttcttggaccatcactacgac

SEQ ID NO: 3863003 - DNA, 25 bp, Homo sapien
ccatatttgattagcatggagacaa

SEQ ID NO: 3863004 - DNA, 25 bp, Homo sapien
gcatggagacaatctggatcatttc

SEQ ID NO: 3863005 - DNA, 25 bp, Homo sapien
gagctttgcgggacaccttcactga

SEQ ID NO: 3863006 - DNA, 25 bp, Homo sapien
tcactgaggccccaagcttcctcct

SEQ ID NO: 3863007 - DNA, 25 bp, Homo sapien
agtgaatatcgtagctggtgaaggt

SEQ ID NO: 3863008 - DNA, 25 bp, Homo sapien
aaggtgtatccagagctttgcggga

SEQ ID NO: 3863009 - DNA, 25 bp, Homo sapien
gtagtacacatctatgtcctcagat

SEQ ID NO: 3863010 - DNA, 25 bp, Homo sapien
agtacacatctatgtcctcagatct

SEQ ID NO: 3863011 - DNA, 25 bp, Homo sapien
tacacatctatgtcctcagatctct

SEQ ID NO: 3863012 - DNA, 25 bp, Homo sapien
agtagtacacatctatgtcctcaga

SEQ ID NO: 3863013 - DNA, 25 bp, Homo sapien
gggcacagatgtggggtggctcctc

SEQ ID NO: 3863014 - DNA, 25 bp, Homo sapien
ggtgtggacactaaggagggcacag

SEQ ID NO: 3863015 - DNA, 25 bp, Homo sapien
tgtggacactaaggagggcacagat

SEQ ID NO: 3863016 - DNA, 25 bp, Homo sapien
acagatgtggggtggctcctcacca

SEQ ID NO: 3863017 - DNA, 25 bp, Homo sapien
cacggggaacctggatattgagagt

SEQ ID NO: 3863018 - DNA, 25 bp, Homo sapien
ccacggggaacctggatattgagag

SEQ ID NO: 3863019 - DNA, 25 bp, Homo sapien
tggttttgagtaacccatggtgtcc

SEQ ID NO: 3863020 - DNA, 25 bp, Homo sapien
tggttttgagtgcccccttgtgttc

SEQ ID NO: 3863021 - DNA, 25 bp, Homo sapien
ttttgagtaacccatggtgtcctga

SEQ ID NO: 3863022 - DNA, 25 bp, Homo sapien
ccctggtggttttgagtaacccatg

SEQ ID NO: 3863023 - DNA, 25 bp, Homo sapien
ccgctgttttcctgaggctccgcac

SEQ ID NO: 3863024 - DNA, 25 bp, Homo sapien
cccagtgtcctgagtgccccctggt

SEQ ID NO: 3863025 - DNA, 25 bp, Homo sapien
agtgccccctggtggttctgagcac

SEQ ID NO: 3863026 - DNA, 25 bp, Homo sapien
ccagtgtcctgagtgccccctggtg

SEQ ID NO: 3863027 - DNA, 25 bp, Homo sapien
ctgagtgccccctggtggttctgag

SEQ ID NO: 3863028 - DNA, 25 bp, Homo sapien
ccaatgttgctctcccagaatgaaa

SEQ ID NO: 3863029 - DNA, 25 bp, Homo sapien
agggctgacgtctgtgttgagtggg

SEQ ID NO: 3863030 - DNA, 25 bp, Homo sapien
cagggctgacgtctgtgttgagtgg

SEQ ID NO: 3863031 - DNA, 25 bp, Homo sapien
ttaatatagcaacaaggaaaaccca

SEQ ID NO: 3863032 - DNA, 25 bp, Homo sapien
aaacccagctcagcacaaactccat

SEQ ID NO: 3863033 - DNA, 25 bp, Homo sapien
atatagcaacaaggaaaacccagct

SEQ ID NO: 3863034 - DNA, 25 bp, Homo sapien
aaaacccagctcagcacaaactcca

SEQ ID NO: 3863035 - DNA, 25 bp, Homo sapien
acccagtgcatagcatagctactga

SEQ ID NO: 3863036 - DNA, 25 bp, Homo sapien
cccagtgcatagcatagctactgaa

SEQ ID NO: 3863037 - DNA, 25 bp, Homo sapien
gcatagtatgtgccaccaccagtac

SEQ ID NO: 3863038 - DNA, 25 bp, Homo sapien
ctgcatagtatgtgccaccaccagt

SEQ ID NO: 3863039 - DNA, 25 bp, Homo sapien
tgcatagtatgtgccaccaccagta

SEQ ID NO: 3863040 - DNA, 25 bp, Homo sapien
gatacaaggagttcttggcattgtc

SEQ ID NO: 3863041 - DNA, 25 bp, Homo sapien
tgaagatacaaggagttcttggcat

SEQ ID NO: 3863042 - DNA, 25 bp, Homo sapien
acaaggagttcttggcattgtctct

SEQ ID NO: 3863043 - DNA, 25 bp, Homo sapien
gagatggtgaatcggcccttcacgg

SEQ ID NO: 3863044 - DNA, 25 bp, Homo sapien
atgactctgatcagtgggtcctgtg

SEQ ID NO: 3863045 - DNA, 25 bp, Homo sapien
ggggatgactctgatcagtgggtcc

SEQ ID NO: 3863046 - DNA, 25 bp, Homo sapien
ctctggggatgactctgatcagtgg

SEQ ID NO: 3863047 - DNA, 25 bp, Homo sapien
ggatgactctgatcagtgggtcctg

SEQ ID NO: 3863048 - DNA, 25 bp, Homo sapien
atcctggtgacaatggttgagggct

SEQ ID NO: 3863049 - DNA, 25 bp, Homo sapien
tggtgacaatggttgagggcttttc

SEQ ID NO: 3863050 - DNA, 25 bp, Homo sapien
ggtgacaatggttgagggcttttca

SEQ ID NO: 3863051 - DNA, 25 bp, Homo sapien
cctggtgacaatggttgagggcttt

SEQ ID NO: 3863052 - DNA, 25 bp, Homo sapien
gagacctcgagctttggcagcaaga

SEQ ID NO: 3863053 - DNA, 25 bp, Homo sapien
agagaggaaagtcctatcagcctct

SEQ ID NO: 3863054 - DNA, 25 bp, Homo sapien
ggaatgggcttgagacctcgagctt

SEQ ID NO: 3863055 - DNA, 25 bp, Homo sapien
aaagtcctatcagcctctcccacat

SEQ ID NO: 3863056 - DNA, 25 bp, Homo sapien
tcttcactactgttggccacttgca

SEQ ID NO: 3863057 - DNA, 25 bp, Homo sapien
tctccacatgacacactggagggtg

SEQ ID NO: 3863058 - DNA, 25 bp, Homo sapien
tctgtggtactttgcacagcacagg

SEQ ID NO: 3863059 - DNA, 25 bp, Homo sapien
gcattcccaggtgagtctccacatg

SEQ ID NO: 3863060 - DNA, 25 bp, Homo sapien
ggtcattcctagttccatttgtcag

SEQ ID NO: 3863061 - DNA, 25 bp, Homo sapien
caaaggttgtggttaagcagaatcc

SEQ ID NO: 3863062 - DNA, 25 bp, Homo sapien
ggtcatggtggcttctatcaaaggt

SEQ ID NO: 3863063 - DNA, 25 bp, Homo sapien
tatgtgcatgggaaacctccttcat

SEQ ID NO: 3863064 - DNA, 25 bp, Homo sapien
ccagtagtaaggactggttgtgatg

SEQ ID NO: 3863065 - DNA, 25 bp, Homo sapien
gctcttcaggtccagggctgactcc

SEQ ID NO: 3863066 - DNA, 25 bp, Homo sapien
gactggttgtgatggagtggccaga

SEQ ID NO: 3863067 - DNA, 25 bp, Homo sapien
ctcttcaggtccagggctgactcct

SEQ ID NO: 3863068 - DNA, 25 bp, Homo sapien
catgaacctaaggattctcttttcc

SEQ ID NO: 3863069 - DNA, 25 bp, Homo sapien
agaagaggatcttgcaggtccagcc

SEQ ID NO: 3863070 - DNA, 25 bp, Homo sapien
agaggatcttgcaggtccagccaat

SEQ ID NO: 3863071 - DNA, 25 bp, Homo sapien
ccaagaagaggatcttgcaggtcca

SEQ ID NO: 3863072 - DNA, 25 bp, Homo sapien
gaagaggatcttgcaggtccagcca

SEQ ID NO: 3863073 - DNA, 25 bp, Homo sapien
actcaatcccctcctcattactggg

SEQ ID NO: 3863074 - DNA, 25 bp, Homo sapien
aaagcccccttgactggactcaatc

SEQ ID NO: 3863075 - DNA, 25 bp, Homo sapien
cctcctcattactgggacctgggaa

SEQ ID NO: 3863076 - DNA, 25 bp, Homo sapien
aggacacaggatggatgaaagcccc

SEQ ID NO: 3863077 - DNA, 25 bp, Homo sapien
agtgcaagtagcagtaggtgaaggt

SEQ ID NO: 3863078 - DNA, 25 bp, Homo sapien
tgcaagtagcagtaggtgaaggtgt

SEQ ID NO: 3863079 - DNA, 25 bp, Homo sapien
caagtagcagtaggtgaaggtgtat

SEQ ID NO: 3863080 - DNA, 25 bp, Homo sapien
aagtagcagtaggtgaaggtgtatc

SEQ ID NO: 3863081 - DNA, 25 bp, Homo sapien
taaaatcctgtccactcaagccctt

SEQ ID NO: 3863082 - DNA, 25 bp, Homo sapien
ctaaaatcctgtccactcaagccct

SEQ ID NO: 3863083 - DNA, 25 bp, Homo sapien
ggaagggcacacacatgggatggct

SEQ ID NO: 3863084 - DNA, 25 bp, Homo sapien
actccaccagtgaacttcacatagg

SEQ ID NO: 3863085 - DNA, 25 bp, Homo sapien
cagactccaccagtgaacttcacat

SEQ ID NO: 3863086 - DNA, 25 bp, Homo sapien
ccaccagtgaacttcacataggact

SEQ ID NO: 3863087 - DNA, 25 bp, Homo sapien
caccagtgaacttcacataggactt

SEQ ID NO: 3863088 - DNA, 25 bp, Homo sapien
cacccatagctaagaaggaggctcg

SEQ ID NO: 3863089 - DNA, 25 bp, Homo sapien
ccatagctaagaaggaggctcggtc

SEQ ID NO: 3863090 - DNA, 25 bp, Homo sapien
gaaggttggagaacatccccctgtg

SEQ ID NO: 3863091 - DNA, 25 bp, Homo sapien
gcacctgccacagatgaaagagaca

SEQ ID NO: 3863092 - DNA, 25 bp, Homo sapien
acagctccagggcgatgtgggacat

SEQ ID NO: 3863093 - DNA, 25 bp, Homo sapien
ctgtgtctgtgcctctaaacactgg

SEQ ID NO: 3863094 - DNA, 25 bp, Homo sapien
ctggaggagactgctcccctgagac

SEQ ID NO: 3863095 - DNA, 25 bp, Homo sapien
tgtgcctctaaacactggaggagac

SEQ ID NO: 3863096 - DNA, 25 bp, Homo sapien
gcatgtctcctactatatagcaagc

SEQ ID NO: 3863097 - DNA, 25 bp, Homo sapien
ggccctatttgcatgtctcctacta

SEQ ID NO: 3863098 - DNA, 25 bp, Homo sapien
agacagagggccctatttgcatgtc

SEQ ID NO: 3863099 - DNA, 25 bp, Homo sapien
tttgcatgtctcctactatatagca

SEQ ID NO: 3863100 - DNA, 25 bp, Homo sapien
ttcatttgcagatacggtgagttat

SEQ ID NO: 3863101 - DNA, 25 bp, Homo sapien
tacggtgagttattggcgttgtccc

SEQ ID NO: 3863102 - DNA, 25 bp, Homo sapien
cgtagtttgtgtaaccactatcacc

SEQ ID NO: 3863103 - DNA, 25 bp, Homo sapien
cactatcaccactaatgtatgaaac

SEQ ID NO: 3863104 - DNA, 25 bp, Homo sapien
gacttcccctcgctgtgtgtttcac

SEQ ID NO: 3863105 - DNA, 25 bp, Homo sapien
cttcccctcgctgtgtgtttcacac

SEQ ID NO: 3863106 - DNA, 25 bp, Homo sapien
tgacttcccctcgctgtgtgtttca

SEQ ID NO: 3863107 - DNA, 25 bp, Homo sapien
acttcccctcgctgtgtgtttcaca

SEQ ID NO: 3863108 - DNA, 25 bp, Homo sapien
tttcccgccgtggcttcttgccctg

SEQ ID NO: 3863109 - DNA, 25 bp, Homo sapien
cttcttgccctgccgccccggcttt

SEQ ID NO: 3863110 - DNA, 25 bp, Homo sapien
caccgtgaatttttccgccgcggct

SEQ ID NO: 3863111 - DNA, 25 bp, Homo sapien
cgccaccgtgaatttttccgccgcg

SEQ ID NO: 3863112 - DNA, 25 bp, Homo sapien
aaatagagatacttctcctgcccct

SEQ ID NO: 3863113 - DNA, 25 bp, Homo sapien
tatctgctaatggacatggtagatt

SEQ ID NO: 3863114 - DNA, 25 bp, Homo sapien
aaaaatagagatacttctcctgccc

SEQ ID NO: 3863115 - DNA, 25 bp, Homo sapien
taaatcagagtatctactctaagtc

SEQ ID NO: 3863116 - DNA, 25 bp, Homo sapien
tatgctacttttctttactcctgga

SEQ ID NO: 3863117 - DNA, 25 bp, Homo sapien
tagctatgctacttttctttactcc

SEQ ID NO: 3863118 - DNA, 25 bp, Homo sapien
ttagctatgctacttttctttactc

SEQ ID NO: 3863119 - DNA, 25 bp, Homo sapien
gctatgctacttttctttactcctg

SEQ ID NO: 3863120 - DNA, 25 bp, Homo sapien
tcttagattgtctcacagcatcatt

SEQ ID NO: 3863121 - DNA, 25 bp, Homo sapien
gacagaaaatttataggtcagtatc

SEQ ID NO: 3863122 - DNA, 25 bp, Homo sapien
taattcttcttagattgtctcacag

SEQ ID NO: 3863123 - DNA, 25 bp, Homo sapien
aatatttccctcatgtttaaggctg

SEQ ID NO: 3863124 - DNA, 25 bp, Homo sapien
cagaaaccctgttaagcatggagct

SEQ ID NO: 3863125 - DNA, 25 bp, Homo sapien
ggaatgatcaaagcatgagaccaca

SEQ ID NO: 3863126 - DNA, 25 bp, Homo sapien
gaattccatatgaaaaaggcctgtg

SEQ ID NO: 3863127 - DNA, 25 bp, Homo sapien
gagaaaatagaaatccggtggtgaa

SEQ ID NO: 3863128 - DNA, 25 bp, Homo sapien
cactatgacaagtaaagctggaata

SEQ ID NO: 3863129 - DNA, 25 bp, Homo sapien
gatgcaaatagacaccactatgaca

SEQ ID NO: 3863130 - DNA, 25 bp, Homo sapien
ggagaaagaggacggatgcacttac

SEQ ID NO: 3863131 - DNA, 25 bp, Homo sapien
cacttacataggacagatgcaaata

SEQ ID NO: 3863132 - DNA, 25 bp, Homo sapien
aaacattccattggaaaaagctaca

SEQ ID NO: 3863133 - DNA, 25 bp, Homo sapien
aacattccattggaaaaagctacac

SEQ ID NO: 3863134 - DNA, 25 bp, Homo sapien
taaacattccattggaaaaagctac

SEQ ID NO: 3863135 - DNA, 25 bp, Homo sapien
catcgcctccgcaggcagcgccact

SEQ ID NO: 3863136 - DNA, 25 bp, Homo sapien
ttattctctcccatcgcctccgcag

SEQ ID NO: 3863137 - DNA, 25 bp, Homo sapien
ccctgtgccaccctccgtggccgcc

SEQ ID NO: 3863138 - DNA, 25 bp, Homo sapien
gtgccaccctccgtggccgccgcat

SEQ ID NO: 3863139 - DNA, 25 bp, Homo sapien
gcacaggctgccaatgaagatgacg

SEQ ID NO: 3863140 - DNA, 25 bp, Homo sapien
acagcccgcacaggctgccaatgaa

SEQ ID NO: 3863141 - DNA, 25 bp, Homo sapien
acaggctgccaatgaagatgacgat

SEQ ID NO: 3863142 - DNA, 25 bp, Homo sapien
ccgcacaggctgccaatgaagatga

SEQ ID NO: 3863143 - DNA, 25 bp, Homo sapien
agcaacaccggagctggtgcatgct

SEQ ID NO: 3863144 - DNA, 25 bp, Homo sapien
tgtctttagggacttgttaccaagc

SEQ ID NO: 3863145 - DNA, 25 bp, Homo sapien
tctattttcccttccgcagcttctc

SEQ ID NO: 3863146 - DNA, 25 bp, Homo sapien
tggtgtacagggagcaacaccggag

SEQ ID NO: 3863147 - DNA, 25 bp, Homo sapien
gacggacaagacacgcatggaatga

SEQ ID NO: 3863148 - DNA, 25 bp, Homo sapien
cacgcttgtcgtgtccgggtgtgca

SEQ ID NO: 3863149 - DNA, 25 bp, Homo sapien
caccaagactttatgcggactgctg

SEQ ID NO: 3863150 - DNA, 25 bp, Homo sapien
aatattagtggaaagcggaacgacg

SEQ ID NO: 3863151 - DNA, 25 bp, Homo sapien
gacagtgaagtccagaataggttgg

SEQ ID NO: 3863152 - DNA, 25 bp, Homo sapien
tcaatactccataatcaccttggct

SEQ ID NO: 3863153 - DNA, 25 bp, Homo sapien
tgattatgactggatggcatgtact

SEQ ID NO: 3863154 - DNA, 25 bp, Homo sapien
gaaaatgcactcacagattatgcgt

SEQ ID NO: 3863155 - DNA, 25 bp, Homo sapien
tagccagagtagtggtaggagaaaa

SEQ ID NO: 3863156 - DNA, 25 bp, Homo sapien
gcgttgatgtcggcgtagaggttcg

SEQ ID NO: 3863157 - DNA, 25 bp, Homo sapien
tgatgtcggcgtagaggttcgtctc

SEQ ID NO: 3863158 - DNA, 25 bp, Homo sapien
gtagccagagtagtggtaggagaaa

SEQ ID NO: 3863159 - DNA, 25 bp, Homo sapien
ctgccaccctgtcgatgccgagacc

SEQ ID NO: 3863160 - DNA, 25 bp, Homo sapien
gtcgatgccgagaccccagaactct

SEQ ID NO: 3863161 - DNA, 25 bp, Homo sapien
tccaggctctgatgccaggcagatg

SEQ ID NO: 3863162 - DNA, 25 bp, Homo sapien
caccctgtcgatgccgagaccccag

SEQ ID NO: 3863163 - DNA, 25 bp, Homo sapien
acaggatgatgccgtccgggctgat

SEQ ID NO: 3863164 - DNA, 25 bp, Homo sapien
gtacaggatgatgccgtccgggctg

SEQ ID NO: 3863165 - DNA, 25 bp, Homo sapien
ctgccggtacaggatgatgccgtcc

SEQ ID NO: 3863166 - DNA, 25 bp, Homo sapien
gatgccgtccgggctgatgcggtac

SEQ ID NO: 3863167 - DNA, 25 bp, Homo sapien
tccacggtgggcaccgtgccgatgc

SEQ ID NO: 3863168 - DNA, 25 bp, Homo sapien
cgtggcggactcgtagcgcgaggcc

SEQ ID NO: 3863169 - DNA, 25 bp, Homo sapien
gactcgtagcgcgaggccaggtcca

SEQ ID NO: 3863170 - DNA, 25 bp, Homo sapien
ccacggtgggcaccgtgccgatgct

SEQ ID NO: 3863171 - DNA, 25 bp, Homo sapien
ctcaggtccaaggtgagcggcgagt

SEQ ID NO: 3863172 - DNA, 25 bp, Homo sapien
tggggaaggcatcgaagcagtaggt

SEQ ID NO: 3863173 - DNA, 25 bp, Homo sapien
ttggggaaggcatcgaagcagtagg

SEQ ID NO: 3863174 - DNA, 25 bp, Homo sapien
gcgtgatcttggacaccttctggat

SEQ ID NO: 3863175 - DNA, 25 bp, Homo sapien
gggcggcgtgatcttggacaccttc

SEQ ID NO: 3863176 - DNA, 25 bp, Homo sapien
gcggcgtgatcttggacaccttctg

SEQ ID NO: 3863177 - DNA, 25 bp, Homo sapien
ctggatgatgagcacgggcggcgtg

SEQ ID NO: 3863178 - DNA, 25 bp, Homo sapien
gagaagtccatcacctcgtctttcg

SEQ ID NO: 3863179 - DNA, 25 bp, Homo sapien
gcgagaagtccatcacctcgtcttt

SEQ ID NO: 3863180 - DNA, 25 bp, Homo sapien
gaagtccatcacctcgtctttcgtg

SEQ ID NO: 3863181 - DNA, 25 bp, Homo sapien
agtccatcacctcgtctttcgtgtc

SEQ ID NO: 3863182 - DNA, 25 bp, Homo sapien
gcggctccacggcgttggggcagcg

SEQ ID NO: 3863183 - DNA, 25 bp, Homo sapien
agcggctccacggcgttggggcagc

SEQ ID NO: 3863184 - DNA, 25 bp, Homo sapien
gctggatgtctttgtgcccggcgcc

SEQ ID NO: 3863185 - DNA, 25 bp, Homo sapien
ggatgtctttgtgcccggcgccctc

SEQ ID NO: 3863186 - DNA, 25 bp, Homo sapien
tagagctggatgtctttgtgcccgg

SEQ ID NO: 3863187 - DNA, 25 bp, Homo sapien
tgtagagctggatgtctttgtgccc

SEQ ID NO: 3863188 - DNA, 25 bp, Homo sapien
taggcgctctggctgcgcagctcct

SEQ ID NO: 3863189 - DNA, 25 bp, Homo sapien
tgggagatgaagcgggcaggcgctc

SEQ ID NO: 3863190 - DNA, 25 bp, Homo sapien
gatgaagcgggcaggcgctccaggt

SEQ ID NO: 3863191 - DNA, 25 bp, Homo sapien
cagctcctgggagatgaagcgggca

SEQ ID NO: 3863192 - DNA, 25 bp, Homo sapien
gggctgccttattgctgaggtccgg

SEQ ID NO: 3863193 - DNA, 25 bp, Homo sapien
ctgccttattgctgaggtccggccg

SEQ ID NO: 3863194 - DNA, 25 bp, Homo sapien
gaggtccgggggctgccttattgct

SEQ ID NO: 3863195 - DNA, 25 bp, Homo sapien
atgcagtccctgggggggccggcgc

SEQ ID NO: 3863196 - DNA, 25 bp, Homo sapien
tgtgaaataggcaatatttgtccct

SEQ ID NO: 3863197 - DNA, 25 bp, Homo sapien
gccattgtgcaaactctcacttaat

SEQ ID NO: 3863198 - DNA, 25 bp, Homo sapien
tctcacttaatttctggcagtttcc

SEQ ID NO: 3863199 - DNA, 25 bp, Homo sapien
caaactctcacttaatttctggcag

SEQ ID NO: 3863200 - DNA, 25 bp, Homo sapien
tgctcctggaaccccaggaccctgt

SEQ ID NO: 3863201 - DNA, 25 bp, Homo sapien
gaccctgtgccccagtctccccatc

SEQ ID NO: 3863202 - DNA, 25 bp, Homo sapien
ctcctggaaccccaggaccctgtgc

SEQ ID NO: 3863203 - DNA, 25 bp, Homo sapien
gtgccccagtctccccatctgcagc

SEQ ID NO: 3863204 - DNA, 25 bp, Homo sapien
ttccccacagtgacctccttgccat

SEQ ID NO: 3863205 - DNA, 25 bp, Homo sapien
ttcacatgcagcgacaggcccacct

SEQ ID NO: 3863206 - DNA, 25 bp, Homo sapien
cacatgcagcgacaggcccaccttt

SEQ ID NO: 3863207 - DNA, 25 bp, Homo sapien
ttgccattcacatgcagcgacaggc

SEQ ID NO: 3863208 - DNA, 25 bp, Homo sapien
ggtgggatgaaagcagtctgagggc

SEQ ID NO: 3863209 - DNA, 25 bp, Homo sapien
aggtgggatgaaagcagtctgaggg

SEQ ID NO: 3863210 - DNA, 25 bp, Homo sapien
gaggtgggatgaaagcagtctgagg

SEQ ID NO: 3863211 - DNA, 25 bp, Homo sapien
ttactgcatctggttggtcagcagt

SEQ ID NO: 3863212 - DNA, 25 bp, Homo sapien
tactgcatctggttggtcagcagtc

SEQ ID NO: 3863213 - DNA, 25 bp, Homo sapien
atgccattgacacccaccttgctgt

SEQ ID NO: 3863214 - DNA, 25 bp, Homo sapien
cattgacacccaccttgctgttgtt

SEQ ID NO: 3863215 - DNA, 25 bp, Homo sapien
ggcatgccattgacacccaccttgc

SEQ ID NO: 3863216 - DNA, 25 bp, Homo sapien
tgacacccaccttgctgttgttcac

SEQ ID NO: 3863217 - DNA, 25 bp, Homo sapien
gcctgccacgcaacatgctcaggtg

SEQ ID NO: 3863218 - DNA, 25 bp, Homo sapien
ctgctgcgaggcgagttggtctgca

SEQ ID NO: 3863219 - DNA, 25 bp, Homo sapien
ttgtgcaggacacatcgccgccctt

SEQ ID NO: 3863220 - DNA, 25 bp, Homo sapien
tgctcaggtgccagatctcgggcat

SEQ ID NO: 3863221 - DNA, 25 bp, Homo sapien
ggagctgctgctccgcgagggggag

SEQ ID NO: 3863222 - DNA, 25 bp, Homo sapien
cgggagctgctgctccgcgaggggg

SEQ ID NO: 3863223 - DNA, 25 bp, Homo sapien
atcctgtgttcaacaaacagaagtg

SEQ ID NO: 3863224 - DNA, 25 bp, Homo sapien
acagaagtggcagcgggagctgctg

SEQ ID NO: 3863225 - DNA, 25 bp, Homo sapien
cttcaggaacgacagacagcttttc

SEQ ID NO: 3863226 - DNA, 25 bp, Homo sapien
tccttcttggagtgcggaggtcctg

SEQ ID NO: 3863227 - DNA, 25 bp, Homo sapien
gtctcctcgtttgctcagccggcag

SEQ ID NO: 3863228 - DNA, 25 bp, Homo sapien
tgaggtggtcctgcgtctcgaggag

SEQ ID NO: 3863229 - DNA, 25 bp, Homo sapien
gaggctcaagggggcagacagtgcc

SEQ ID NO: 3863230 - DNA, 25 bp, Homo sapien
ggctcaagggggcagacagtgccac

SEQ ID NO: 3863231 - DNA, 25 bp, Homo sapien
tcaagactgcgttaggaagaggctc

SEQ ID NO: 3863232 - DNA, 25 bp, Homo sapien
agactgcgttaggaagaggctcaag

SEQ ID NO: 3863233 - DNA, 25 bp, Homo sapien
tgattggataatacggccccaggcc

SEQ ID NO: 3863234 - DNA, 25 bp, Homo sapien
gaagcccggccttcactgtgggata

SEQ ID NO: 3863235 - DNA, 25 bp, Homo sapien
ggtaaaatgttccaagccgcagcct

SEQ ID NO: 3863236 - DNA, 25 bp, Homo sapien
gaagatgtgagccaactcgtagcca

SEQ ID NO: 3863237 - DNA, 25 bp, Homo sapien
cctaaacccagacacttatcacagg

SEQ ID NO: 3863238 - DNA, 25 bp, Homo sapien
taaacccagacacttatcacaggaa

SEQ ID NO: 3863239 - DNA, 25 bp, Homo sapien
catttattaatagaagctatgtctc

SEQ ID NO: 3863240 - DNA, 25 bp, Homo sapien
tatgtctcagatagctgaagatggt

SEQ ID NO: 3863241 - DNA, 25 bp, Homo sapien
gaaaatgtcacgttcaccagtaccc

SEQ ID NO: 3863242 - DNA, 25 bp, Homo sapien
atgtcacgttcaccagtaccctttt

SEQ ID NO: 3863243 - DNA, 25 bp, Homo sapien
aaatgtcacgttcaccagtaccctt

SEQ ID NO: 3863244 - DNA, 25 bp, Homo sapien
ctgggaatgcgcaagttcagagctt

SEQ ID NO: 3863245 - DNA, 25 bp, Homo sapien
aaagcacaagctgagccgccttgga

SEQ ID NO: 3863246 - DNA, 25 bp, Homo sapien
gctgctcagctcgattttctttccc

SEQ ID NO: 3863247 - DNA, 25 bp, Homo sapien
cttggaaagacaaccacggcctggc

SEQ ID NO: 3863248 - DNA, 25 bp, Homo sapien
gcgacttcgacttccagctgctcag

SEQ ID NO: 3863249 - DNA, 25 bp, Homo sapien
ggctacaggaggacaatcccagatt

SEQ ID NO: 3863250 - DNA, 25 bp, Homo sapien
tgtaggcggcttcgtttaccaagct

SEQ ID NO: 3863251 - DNA, 25 bp, Homo sapien
taaatcgagagtgtctggtcctcac

SEQ ID NO: 3863252 - DNA, 25 bp, Homo sapien
tttcatgccaaaccctcgccaaggg

SEQ ID NO: 3863253 - DNA, 25 bp, Homo sapien
tctccgcagggcgaaactgctgggc

SEQ ID NO: 3863254 - DNA, 25 bp, Homo sapien
gacagggagcggaaccgtcttcaac

SEQ ID NO: 3863255 - DNA, 25 bp, Homo sapien
caattaccaggtgaaactagccgcc

SEQ ID NO: 3863256 - DNA, 25 bp, Homo sapien
taaaagcctgcagctcgaggagaca

SEQ ID NO: 3863257 - DNA, 25 bp, Homo sapien
cagccctagggacgggccgcactgc

SEQ ID NO: 3863258 - DNA, 25 bp, Homo sapien
cccagccctagggacgggccgcact

SEQ ID NO: 3863259 - DNA, 25 bp, Homo sapien
ccagccctagggacgggccgcactg

SEQ ID NO: 3863260 - DNA, 25 bp, Homo sapien
gaggccatgaaaggcgaacggccct

SEQ ID NO: 3863261 - DNA, 25 bp, Homo sapien
cacggcaacgctgctgtggaggcca

SEQ ID NO: 3863262 - DNA, 25 bp, Homo sapien
caggaaatcgagacactcgtgaggg

SEQ ID NO: 3863263 - DNA, 25 bp, Homo sapien
tgttggctgacaggaaatcgagaca

SEQ ID NO: 3863264 - DNA, 25 bp, Homo sapien
ccgtagctgtttccttagtggatgc

SEQ ID NO: 3863265 - DNA, 25 bp, Homo sapien
gtccacactaagaccctgaggcctg

SEQ ID NO: 3863266 - DNA, 25 bp, Homo sapien
tacactggtgggaaagtctccgtga

SEQ ID NO: 3863267 - DNA, 25 bp, Homo sapien
gacctagatatggaccacgcagcga

SEQ ID NO: 3863268 - DNA, 25 bp, Homo sapien
cagtcttgtatacagtctccagggc

SEQ ID NO: 3863269 - DNA, 25 bp, Homo sapien
gagacccatggaattattgagcctg

SEQ ID NO: 3863270 - DNA, 25 bp, Homo sapien
gcagcaggcaggactttcaattgac

SEQ ID NO: 3863271 - DNA, 25 bp, Homo sapien
ctattataaacacgctcatgagggc

SEQ ID NO: 3863272 - DNA, 25 bp, Homo sapien
tccggcctgcgcatggcaccagcag

SEQ ID NO: 3863273 - DNA, 25 bp, Homo sapien
cagtccggcctgcgcatggcaccag

SEQ ID NO: 3863274 - DNA, 25 bp, Homo sapien
cctggcagagaccagtccggcctgc

SEQ ID NO: 3863275 - DNA, 25 bp, Homo sapien
ctggcagagaccagtccggcctgcg

SEQ ID NO: 3863276 - DNA, 25 bp, Homo sapien
aaaggaggataatggcattgttcat

SEQ ID NO: 3863277 - DNA, 25 bp, Homo sapien
ctgaaaaggaggataatggcattgt

SEQ ID NO: 3863278 - DNA, 25 bp, Homo sapien
gaaaaggaggataatggcattgttc

SEQ ID NO: 3863279 - DNA, 25 bp, Homo sapien
aaaaggaggataatggcattgttca

SEQ ID NO: 3863280 - DNA, 25 bp, Homo sapien
cttaagctgtgaaaatgcaaacact

SEQ ID NO: 3863281 - DNA, 25 bp, Homo sapien
gttttcagatatgcccaggtacccc

SEQ ID NO: 3863282 - DNA, 25 bp, Homo sapien
tcaaggttttcagatatgcccaggt

SEQ ID NO: 3863283 - DNA, 25 bp, Homo sapien
tccttttcttaagctgtgaaaatgc

SEQ ID NO: 3863284 - DNA, 25 bp, Homo sapien
gtgccccggcccaaaggtgcaggtc

SEQ ID NO: 3863285 - DNA, 25 bp, Homo sapien
agacctgaactctgggacagtctgg

SEQ ID NO: 3863286 - DNA, 25 bp, Homo sapien
gacctgaactctgggacagtctggg

SEQ ID NO: 3863287 - DNA, 25 bp, Homo sapien
ggtgattggccaaacatatgtcaca

SEQ ID NO: 3863288 - DNA, 25 bp, Homo sapien
cacaacattgcccaatacaggcagg

SEQ ID NO: 3863289 - DNA, 25 bp, Homo sapien
caatttgagttataggcaagagagt

SEQ ID NO: 3863290 - DNA, 25 bp, Homo sapien
ggtgcttggcccagtggtatgtcac

SEQ ID NO: 3863291 - DNA, 25 bp, Homo sapien
tcatggcaccaattgttagtcactt

SEQ ID NO: 3863292 - DNA, 25 bp, Homo sapien
tgagaatttattcccatggacaggg

SEQ ID NO: 3863293 - DNA, 25 bp, Homo sapien
ctttcaaggtgatctgacatggctt

SEQ ID NO: 3863294 - DNA, 25 bp, Homo sapien
gacatggcttgaatgtgcaagaaaa

SEQ ID NO: 3863295 - DNA, 25 bp, Homo sapien
cctcagagccgcggcagcggtggca

SEQ ID NO: 3863296 - DNA, 25 bp, Homo sapien
ccggcgccgcctgaacaaggacgcc

SEQ ID NO: 3863297 - DNA, 25 bp, Homo sapien
ccccggcgccgcctgaacaaggacg

SEQ ID NO: 3863298 - DNA, 25 bp, Homo sapien
cagagccgcggcagcggtggcaaaa

SEQ ID NO: 3863299 - DNA, 25 bp, Homo sapien
cccctggccgctacgcgcagcgccg

SEQ ID NO: 3863300 - DNA, 25 bp, Homo sapien
tggccgctacgcgcagcgccgctct

SEQ ID NO: 3863301 - DNA, 25 bp, Homo sapien
tctcccctggccgctacgcgcagcg

SEQ ID NO: 3863302 - DNA, 25 bp, Homo sapien
ttctctcccctggccgctacgcgca

SEQ ID NO: 3863303 - DNA, 25 bp, Homo sapien
ctgctgcagcgtctggctggctgcg

SEQ ID NO: 3863304 - DNA, 25 bp, Homo sapien
cacactgctgcagcgtctggctggc

SEQ ID NO: 3863305 - DNA, 25 bp, Homo sapien
ccacactgctgcagcgtctggctgg

SEQ ID NO: 3863306 - DNA, 25 bp, Homo sapien
tgcccacactgctgcagcgtctggc

SEQ ID NO: 3863307 - DNA, 25 bp, Homo sapien
ctgccaatggagatgcggataagct

SEQ ID NO: 3863308 - DNA, 25 bp, Homo sapien
caatggagatgcggataagcttctg

SEQ ID NO: 3863309 - DNA, 25 bp, Homo sapien
gccaatggagatgcggataagcttc

SEQ ID NO: 3863310 - DNA, 25 bp, Homo sapien
atggagatgcggataagcttctgga

SEQ ID NO: 3863311 - DNA, 25 bp, Homo sapien
acagcgcacttgttgcgcaaccggc

SEQ ID NO: 3863312 - DNA, 25 bp, Homo sapien
acacagcgcacttgttgcgcaaccg

SEQ ID NO: 3863313 - DNA, 25 bp, Homo sapien
cacagcgcacttgttgcgcaaccgg

SEQ ID NO: 3863314 - DNA, 25 bp, Homo sapien
tcctgagagcacgtctctacatcta

SEQ ID NO: 3863315 - DNA, 25 bp, Homo sapien
tgagagcacgtctctacatctatac

SEQ ID NO: 3863316 - DNA, 25 bp, Homo sapien
gagagcacgtctctacatctatacc

SEQ ID NO: 3863317 - DNA, 25 bp, Homo sapien
gagcacgtctctacatctatacctg

SEQ ID NO: 3863318 - DNA, 25 bp, Homo sapien
ttcacttcatctcatcattacacca

SEQ ID NO: 3863319 - DNA, 25 bp, Homo sapien
atttcacttcatctcctcacttcat

SEQ ID NO: 3863320 - DNA, 25 bp, Homo sapien
catttcattttatcaattcatcaat

SEQ ID NO: 3863321 - DNA, 25 bp, Homo sapien
ctcatgatttcatctagtcatttca

SEQ ID NO: 3863322 - DNA, 25 bp, Homo sapien
actgttccaggccagaatgacggaa

SEQ ID NO: 3863323 - DNA, 25 bp, Homo sapien
ttttacaaccctcatggccaccctg

SEQ ID NO: 3863324 - DNA, 25 bp, Homo sapien
gacggaattgttccgctgctgctgt

SEQ ID NO: 3863325 - DNA, 25 bp, Homo sapien
caaatgctgttggcatcacttttac

SEQ ID NO: 3863326 - DNA, 25 bp, Homo sapien
aggcccacctttcggtggaggatgc

SEQ ID NO: 3863327 - DNA, 25 bp, Homo sapien
gcccacctttcggtggaggatgctg

SEQ ID NO: 3863328 - DNA, 25 bp, Homo sapien
caggcccacctttcggtggaggatg

SEQ ID NO: 3863329 - DNA, 25 bp, Homo sapien
acaggcccacctttcggtggaggat

SEQ ID NO: 3863330 - DNA, 25 bp, Homo sapien
ttcctgtccatccactggggcaaag

SEQ ID NO: 3863331 - DNA, 25 bp, Homo sapien
tcctgtccatccactggggcaaagt

SEQ ID NO: 3863332 - DNA, 25 bp, Homo sapien
cctgtccatccactggggcaaagtc

SEQ ID NO: 3863333 - DNA, 25 bp, Homo sapien
tgtccatccactggggcaaagtcca

SEQ ID NO: 3863334 - DNA, 25 bp, Homo sapien
cattgacacccaccttgctgttgtt

SEQ ID NO: 3863335 - DNA, 25 bp, Homo sapien
atgccattgacacccaccttgctgt

SEQ ID NO: 3863336 - DNA, 25 bp, Homo sapien
ggcatgccattgacacccaccttgc

SEQ ID NO: 3863337 - DNA, 25 bp, Homo sapien
tgacacccaccttgctgttgttcac

SEQ ID NO: 3863338 - DNA, 25 bp, Homo sapien
gcctgccacgcaacatgctcaggtg

SEQ ID NO: 3863339 - DNA, 25 bp, Homo sapien
ctgctgcgaggcgagttggtctgca

SEQ ID NO: 3863340 - DNA, 25 bp, Homo sapien
ttgtgcaggacacatcgccgccctt

SEQ ID NO: 3863341 - DNA, 25 bp, Homo sapien
tgctcaggtgccagatctcgggcat

SEQ ID NO: 3863342 - DNA, 25 bp, Homo sapien
gtctcctcgtttgctcagccggcag

SEQ ID NO: 3863343 - DNA, 25 bp, Homo sapien
cttcaggaacgacagacagcttttc

SEQ ID NO: 3863344 - DNA, 25 bp, Homo sapien
tccttcttggagtgcggaggtcctg

SEQ ID NO: 3863345 - DNA, 25 bp, Homo sapien
tgaggtggtcctgcgtctcgaggag

SEQ ID NO: 3863346 - DNA, 25 bp, Homo sapien
gaggctcaagggggcagacagtgcc

SEQ ID NO: 3863347 - DNA, 25 bp, Homo sapien
ggctcaagggggcagacagtgccac

SEQ ID NO: 3863348 - DNA, 25 bp, Homo sapien
agactgcgttaggaagaggctcaag

SEQ ID NO: 3863349 - DNA, 25 bp, Homo sapien
tcaagactgcgttaggaagaggctc

SEQ ID NO: 3863350 - DNA, 25 bp, Homo sapien
tgattggataatacggccccaggcc

SEQ ID NO: 3863351 - DNA, 25 bp, Homo sapien
gaagatgtgagccaactcgtagcca

SEQ ID NO: 3863352 - DNA, 25 bp, Homo sapien
gaagcccggccttcactgtgggata

SEQ ID NO: 3863353 - DNA, 25 bp, Homo sapien
ggtaaaatgttccaagccgcagcct

SEQ ID NO: 3863354 - DNA, 25 bp, Homo sapien
catttattaatagaagctatgtctc

SEQ ID NO: 3863355 - DNA, 25 bp, Homo sapien
cctaaacccagacacttatcacagg

SEQ ID NO: 3863356 - DNA, 25 bp, Homo sapien
taaacccagacacttatcacaggaa

SEQ ID NO: 3863357 - DNA, 25 bp, Homo sapien
tatgtctcagatagctgaagatggt

SEQ ID NO: 3863358 - DNA, 25 bp, Homo sapien
gaaaatgtcacgttcaccagtaccc

SEQ ID NO: 3863359 - DNA, 25 bp, Homo sapien
atgtcacgttcaccagtaccctttt

SEQ ID NO: 3863360 - DNA, 25 bp, Homo sapien
aaatgtcacgttcaccagtaccctt

SEQ ID NO: 3863361 - DNA, 25 bp, Homo sapien
ctgggaatgcgcaagttcagagctt

SEQ ID NO: 3863362 - DNA, 25 bp, Homo sapien
gcgacttcgacttccagctgctcag

SEQ ID NO: 3863363 - DNA, 25 bp, Homo sapien
gctgctcagctcgattttctttccc

SEQ ID NO: 3863364 - DNA, 25 bp, Homo sapien
aaagcacaagctgagccgccttgga

SEQ ID NO: 3863365 - DNA, 25 bp, Homo sapien
cttggaaagacaaccacggcctggc

SEQ ID NO: 3863366 - DNA, 25 bp, Homo sapien
taaatcgagagtgtctggtcctcac

SEQ ID NO: 3863367 - DNA, 25 bp, Homo sapien
tgtaggcggcttcgtttaccaagct

SEQ ID NO: 3863368 - DNA, 25 bp, Homo sapien
ggctacaggaggacaatcccagatt

SEQ ID NO: 3863369 - DNA, 25 bp, Homo sapien
tttcatgccaaaccctcgccaaggg

SEQ ID NO: 3863370 - DNA, 25 bp, Homo sapien
tctccgcagggcgaaactgctgggc

SEQ ID NO: 3863371 - DNA, 25 bp, Homo sapien
caattaccaggtgaaactagccgcc

SEQ ID NO: 3863372 - DNA, 25 bp, Homo sapien
taaaagcctgcagctcgaggagaca

SEQ ID NO: 3863373 - DNA, 25 bp, Homo sapien
gacagggagcggaaccgtcttcaac

SEQ ID NO: 3863374 - DNA, 25 bp, Homo sapien
aagggagtgacaagaggaggagcga

SEQ ID NO: 3863375 - DNA, 25 bp, Homo sapien
agggagtgacaagaggaggagcgaa

SEQ ID NO: 3863376 - DNA, 25 bp, Homo sapien
aaagggagtgacaagaggaggagcg

SEQ ID NO: 3863377 - DNA, 25 bp, Homo sapien
cagccctagggacgggccgcactgc

SEQ ID NO: 3863378 - DNA, 25 bp, Homo sapien
cccagccctagggacgggccgcact

SEQ ID NO: 3863379 - DNA, 25 bp, Homo sapien
ccagccctagggacgggccgcactg

SEQ ID NO: 3863380 - DNA, 25 bp, Homo sapien
cacggcaacgctgctgtggaggcca

SEQ ID NO: 3863381 - DNA, 25 bp, Homo sapien
caggaaatcgagacactcgtgaggg

SEQ ID NO: 3863382 - DNA, 25 bp, Homo sapien
tgttggctgacaggaaatcgagaca

SEQ ID NO: 3863383 - DNA, 25 bp, Homo sapien
gaggccatgaaaggcgaacggccct

SEQ ID NO: 3863384 - DNA, 25 bp, Homo sapien
tacactggtgggaaagtctccgtga

SEQ ID NO: 3863385 - DNA, 25 bp, Homo sapien
ccgtagctgtttccttagtggatgc

SEQ ID NO: 3863386 - DNA, 25 bp, Homo sapien
gacctagatatggaccacgcagcga

SEQ ID NO: 3863387 - DNA, 25 bp, Homo sapien
gtccacactaagaccctgaggcctg

SEQ ID NO: 3863388 - DNA, 25 bp, Homo sapien
cagtcttgtatacagtctccagggc

SEQ ID NO: 3863389 - DNA, 25 bp, Homo sapien
gagacccatggaattattgagcctg

SEQ ID NO: 3863390 - DNA, 25 bp, Homo sapien
gcagcaggcaggactttcaattgac

SEQ ID NO: 3863391 - DNA, 25 bp, Homo sapien
ctattataaacacgctcatgagggc

SEQ ID NO: 3863392 - DNA, 25 bp, Homo sapien
actaagaagtgcttagcgtctttgg

SEQ ID NO: 3863393 - DNA, 25 bp, Homo sapien
gaagtgcttagcgtctttggaggtc

SEQ ID NO: 3863394 - DNA, 25 bp, Homo sapien
agtgcttagcgtctttggaggtcag

SEQ ID NO: 3863395 - DNA, 25 bp, Homo sapien
ggtaactaagaagtgcttagcgtct

SEQ ID NO: 3863396 - DNA, 25 bp, Homo sapien
aaaggaggataatggcattgttcat

SEQ ID NO: 3863397 - DNA, 25 bp, Homo sapien
ctgaaaaggaggataatggcattgt

SEQ ID NO: 3863398 - DNA, 25 bp, Homo sapien
gaaaaggaggataatggcattgttc

SEQ ID NO: 3863399 - DNA, 25 bp, Homo sapien
aaaaggaggataatggcattgttca

SEQ ID NO: 3863400 - DNA, 25 bp, Homo sapien
gttttcagatatgcccaggtacccc

SEQ ID NO: 3863401 - DNA, 25 bp, Homo sapien
tcaaggttttcagatatgcccaggt

SEQ ID NO: 3863402 - DNA, 25 bp, Homo sapien
cttaagctgtgaaaatgcaaacact

SEQ ID NO: 3863403 - DNA, 25 bp, Homo sapien
tccttttcttaagctgtgaaaatgc

SEQ ID NO: 3863404 - DNA, 25 bp, Homo sapien
gtgccccggcccaaaggtgcaggtc

SEQ ID NO: 3863405 - DNA, 25 bp, Homo sapien
tttccacccttgtgccttcactggg

SEQ ID NO: 3863406 - DNA, 25 bp, Homo sapien
cactgggcagacaagagatgagaag

SEQ ID NO: 3863407 - DNA, 25 bp, Homo sapien
ccttgtgccttcactgggcagacaa

SEQ ID NO: 3863408 - DNA, 25 bp, Homo sapien
gatgagaagacctgaactctgggac

SEQ ID NO: 3863409 - DNA, 25 bp, Homo sapien
ggtgattggccaaacatatgtcaca

SEQ ID NO: 3863410 - DNA, 25 bp, Homo sapien
cacaacattgcccaatacaggcagg

SEQ ID NO: 3863411 - DNA, 25 bp, Homo sapien
caatttgagttataggcaagagagt

SEQ ID NO: 3863412 - DNA, 25 bp, Homo sapien
ggtgcttggcccagtggtatgtcac

SEQ ID NO: 3863413 - DNA, 25 bp, Homo sapien
gacatggcttgaatgtgcaagaaaa

SEQ ID NO: 3863414 - DNA, 25 bp, Homo sapien
tgagaatttattcccatggacaggg

SEQ ID NO: 3863415 - DNA, 25 bp, Homo sapien
ctttcaaggtgatctgacatggctt

SEQ ID NO: 3863416 - DNA, 25 bp, Homo sapien
tcatggcaccaattgttagtcactt

SEQ ID NO: 3863417 - DNA, 25 bp, Homo sapien
agagccgcgtcggtggtggcaaaaa

SEQ ID NO: 3863418 - DNA, 25 bp, Homo sapien
gccgcgtcggtggtggcaaaaagcg

SEQ ID NO: 3863419 - DNA, 25 bp, Homo sapien
tcggctccgcccgaacaaggacgcc

SEQ ID NO: 3863420 - DNA, 25 bp, Homo sapien
cctcagagccgcgtcggtggtggca

SEQ ID NO: 3863421 - DNA, 25 bp, Homo sapien
ttctctcccctggccgctacgcgca

SEQ ID NO: 3863422 - DNA, 25 bp, Homo sapien
cccctggccgctacgcgcagcgccg

SEQ ID NO: 3863423 - DNA, 25 bp, Homo sapien
tctcccctggccgctacgcgcagcg

SEQ ID NO: 3863424 - DNA, 25 bp, Homo sapien
tggccgctacgcgcagcgccgctct

SEQ ID NO: 3863425 - DNA, 25 bp, Homo sapien
ctgctgcagcgtctggctggctgcg

SEQ ID NO: 3863426 - DNA, 25 bp, Homo sapien
cacactgctgcagcgtctggctggc

SEQ ID NO: 3863427 - DNA, 25 bp, Homo sapien
tgcccacactgctgcagcgtctggc

SEQ ID NO: 3863428 - DNA, 25 bp, Homo sapien
ccacactgctgcagcgtctggctgg

SEQ ID NO: 3863429 - DNA, 25 bp, Homo sapien
ctgccaatggagatgcggataagct

SEQ ID NO: 3863430 - DNA, 25 bp, Homo sapien
caatggagatgcggataagcttctg

SEQ ID NO: 3863431 - DNA, 25 bp, Homo sapien
atggagatgcggataagcttctgga

SEQ ID NO: 3863432 - DNA, 25 bp, Homo sapien
gccaatggagatgcggataagcttc

SEQ ID NO: 3863433 - DNA, 25 bp, Homo sapien
acagcgcacttgttgcgcaaccggc

SEQ ID NO: 3863434 - DNA, 25 bp, Homo sapien
acacagcgcacttgttgcgcaaccg

SEQ ID NO: 3863435 - DNA, 25 bp, Homo sapien
cacagcgcacttgttgcgcaaccgg

SEQ ID NO: 3863436 - DNA, 25 bp, Homo sapien
tctgttgcaggatgaccatgaaagg

SEQ ID NO: 3863437 - DNA, 25 bp, Homo sapien
tgttgcaggatgaccatgaaaggtg

SEQ ID NO: 3863438 - DNA, 25 bp, Homo sapien
cacagcaacgatgccagccatggcc

SEQ ID NO: 3863439 - DNA, 25 bp, Homo sapien
aaaggtgacagccactccacagcaa

SEQ ID NO: 3863440 - DNA, 25 bp, Homo sapien
tccctgagagctcacgtgtgaggtg

SEQ ID NO: 3863441 - DNA, 25 bp, Homo sapien
ctcgtggacggcagcactgcggtga

SEQ ID NO: 3863442 - DNA, 25 bp, Homo sapien
gcagcactgcggtgagacccagagc

SEQ ID NO: 3863443 - DNA, 25 bp, Homo sapien
aagaaaagcacctgcatcaccctca

SEQ ID NO: 3863444 - DNA, 25 bp, Homo sapien
gcagggccggagagtctgactgtgg

SEQ ID NO: 3863445 - DNA, 25 bp, Homo sapien
cagggccggagagtctgactgtggc

SEQ ID NO: 3863446 - DNA, 25 bp, Homo sapien
tgcagggccggagagtctgactgtg

SEQ ID NO: 3863447 - DNA, 25 bp, Homo sapien
agggccggagagtctgactgtggct

SEQ ID NO: 3863448 - DNA, 25 bp, Homo sapien
gctgcccccaaggtgtcctctgtca

SEQ ID NO: 3863449 - DNA, 25 bp, Homo sapien
ctgcccccaaggtgtcctctgtcac

SEQ ID NO: 3863450 - DNA, 25 bp, Homo sapien
tgctgcccccaaggtgtcctctgtc

SEQ ID NO: 3863451 - DNA, 25 bp, Homo sapien
tgcccccaaggtgtcctctgtcacc

SEQ ID NO: 3863452 - DNA, 25 bp, Homo sapien
agggccgctcgtgaacaggacaggt

SEQ ID NO: 3863453 - DNA, 25 bp, Homo sapien
gggccgctcgtgaacaggacaggtt

SEQ ID NO: 3863454 - DNA, 25 bp, Homo sapien
gtagggccgctcgtgaacaggacag

SEQ ID NO: 3863455 - DNA, 25 bp, Homo sapien
ggccgctcgtgaacaggacaggttc

SEQ ID NO: 3863456 - DNA, 25 bp, Homo sapien
cagtatgttctaggcaaaagcaggg

SEQ ID NO: 3863457 - DNA, 25 bp, Homo sapien
tacactatccactaggccgattgcg

SEQ ID NO: 3863458 - DNA, 25 bp, Homo sapien
tgtgatcagtcgagcttggcaagca

SEQ ID NO: 3863459 - DNA, 25 bp, Homo sapien
cacctaagcagggaagccgatttgg

SEQ ID NO: 3863460 - DNA, 25 bp, Homo sapien
ctagctggcgggaccgttagatcga

SEQ ID NO: 3863461 - DNA, 25 bp, Homo sapien
tctttgtgaaactccggcggtggga

SEQ ID NO: 3863462 - DNA, 25 bp, Homo sapien
aaccaccacaaggagctgaaggcgg

SEQ ID NO: 3863463 - DNA, 25 bp, Homo sapien
ccggaccccgtggatatggagcaat

SEQ ID NO: 3863464 - DNA, 25 bp, Homo sapien
aaggcattgggaacagccgccagct

SEQ ID NO: 3863465 - DNA, 25 bp, Homo sapien
tgggcatccgtctcctctgcggcat

SEQ ID NO: 3863466 - DNA, 25 bp, Homo sapien
cacttagtgagcatggtatccgctc

SEQ ID NO: 3863467 - DNA, 25 bp, Homo sapien
gcatggtatccgctcaggggcctct

SEQ ID NO: 3863468 - DNA, 25 bp, Homo sapien
gtgggcatccgtctcctctgcggca

SEQ ID NO: 3863469 - DNA, 25 bp, Homo sapien
tcttgtgcggttgatctgtctccca

SEQ ID NO: 3863470 - DNA, 25 bp, Homo sapien
atctgtctcccatgcaaggccaaca

SEQ ID NO: 3863471 - DNA, 25 bp, Homo sapien
ttgtgcggttgatctgtctcccatg

SEQ ID NO: 3863472 - DNA, 25 bp, Homo sapien
tctgtctcccatgcaaggccaacag

SEQ ID NO: 3863473 - DNA, 25 bp, Homo sapien
tccagagggaaaaactgggtggtga

SEQ ID NO: 3863474 - DNA, 25 bp, Homo sapien
gtgacagggactggacagggatgcc

SEQ ID NO: 3863475 - DNA, 25 bp, Homo sapien
ctgggtggtgacagggactggacag

SEQ ID NO: 3863476 - DNA, 25 bp, Homo sapien
gactggacagggatgccacaggggc

SEQ ID NO: 3863477 - DNA, 25 bp, Homo sapien
ctggagcagcggacctccttgctta

SEQ ID NO: 3863478 - DNA, 25 bp, Homo sapien
gcggacctccttgcttactttgaat

SEQ ID NO: 3863479 - DNA, 25 bp, Homo sapien
gcagcggacctccttgcttactttg

SEQ ID NO: 3863480 - DNA, 25 bp, Homo sapien
gagcagcggacctccttgcttactt

SEQ ID NO: 3863481 - DNA, 25 bp, Homo sapien
ccaaagtgctgcttgggcttaaggt

SEQ ID NO: 3863482 - DNA, 25 bp, Homo sapien
cttaaggttgtaattatttgcagcc

SEQ ID NO: 3863483 - DNA, 25 bp, Homo sapien
cgagtcgcttcatggtcccaaacca

SEQ ID NO: 3863484 - DNA, 25 bp, Homo sapien
gagtcgcttcatggtcccaaaccag

SEQ ID NO: 3863485 - DNA, 25 bp, Homo sapien
gagtgagtgagccacggcaaaagtc

SEQ ID NO: 3863486 - DNA, 25 bp, Homo sapien
gagccaccgtgtcccactgtgagtg

SEQ ID NO: 3863487 - DNA, 25 bp, Homo sapien
tgtgaacacgccaaatctcgcagtc

SEQ ID NO: 3863488 - DNA, 25 bp, Homo sapien
tgtttcagaggctgtgacggtgccc

SEQ ID NO: 3863489 - DNA, 25 bp, Homo sapien
tccacctggttgaggagcgctaaag

SEQ ID NO: 3863490 - DNA, 25 bp, Homo sapien
cctccacctggttgaggagcgctaa

SEQ ID NO: 3863491 - DNA, 25 bp, Homo sapien
ccacctggttgaggagcgctaaagc

SEQ ID NO: 3863492 - DNA, 25 bp, Homo sapien
ttcctccacctggttgaggagcgct

SEQ ID NO: 3863493 - DNA, 25 bp, Homo sapien
tattgtcactaccaagtggtgatta

SEQ ID NO: 3863494 - DNA, 25 bp, Homo sapien
ccagcgaagtatacattattagcct

SEQ ID NO: 3863495 - DNA, 25 bp, Homo sapien
gattgttggcattcaaaagccagcg

SEQ ID NO: 3863496 - DNA, 25 bp, Homo sapien
gaattatcccctgttcattgggtaa

SEQ ID NO: 3863497 - DNA, 25 bp, Homo sapien
atcctttagcttgatgaatgaaaca

SEQ ID NO: 3863498 - DNA, 25 bp, Homo sapien
gctaatcctttagcttgatgaatga

SEQ ID NO: 3863499 - DNA, 25 bp, Homo sapien
taatcctttagcttgatgaatgaaa

SEQ ID NO: 3863500 - DNA, 25 bp, Homo sapien
ggagctaatcctttagcttgatgaa

SEQ ID NO: 3863501 - DNA, 25 bp, Homo sapien
cggcaggcacgcagcatttgcgtgg

SEQ ID NO: 3863502 - DNA, 25 bp, Homo sapien
atgcggcaggcacgcagcatttgcg

SEQ ID NO: 3863503 - DNA, 25 bp, Homo sapien
caggcacgcagcatttgcgtgggaa

SEQ ID NO: 3863504 - DNA, 25 bp, Homo sapien
aatgcggcaggcacgcagcatttgc

SEQ ID NO: 3863505 - DNA, 25 bp, Homo sapien
tgaataagaaaaatacgaaactaga

SEQ ID NO: 3863506 - DNA, 25 bp, Homo sapien
aaatacgaaactagaaggctgggtg

SEQ ID NO: 3863507 - DNA, 25 bp, Homo sapien
aaaaccagactagtaaatgcaacca

SEQ ID NO: 3863508 - DNA, 25 bp, Homo sapien
ctgttttcctcttggtggagttatt

SEQ ID NO: 3863509 - DNA, 25 bp, Homo sapien
gaggtgggagctactcgtatacaca

SEQ ID NO: 3863510 - DNA, 25 bp, Homo sapien
ccagagaggtgggagctactcgtat

SEQ ID NO: 3863511 - DNA, 25 bp, Homo sapien
tgggagctactcgtatacacactgt

SEQ ID NO: 3863512 - DNA, 25 bp, Homo sapien
gagaggtgggagctactcgtataca

SEQ ID NO: 3863513 - DNA, 25 bp, Homo sapien
agaccacctctcagggtttcctaat

SEQ ID NO: 3863514 - DNA, 25 bp, Homo sapien
gtattccgcacatgccacctgtgag

SEQ ID NO: 3863515 - DNA, 25 bp, Homo sapien
tcaaattgccaaatggtggaggact

SEQ ID NO: 3863516 - DNA, 25 bp, Homo sapien
gataactctgggtctgtattccgca

SEQ ID NO: 3863517 - DNA, 25 bp, Homo sapien
catgaggcattggaatcagataact

SEQ ID NO: 3863518 - DNA, 25 bp, Homo sapien
cataggtgcggtgcattccaaccat

SEQ ID NO: 3863519 - DNA, 25 bp, Homo sapien
ttcataggtgcggtgcattccaacc

SEQ ID NO: 3863520 - DNA, 25 bp, Homo sapien
tcataggtgcggtgcattccaacca

SEQ ID NO: 3863521 - DNA, 25 bp, Homo sapien
cttcataggtgcggtgcattccaac

SEQ ID NO: 3863522 - DNA, 25 bp, Homo sapien
tatcttagaattgggtagaagttta

SEQ ID NO: 3863523 - DNA, 25 bp, Homo sapien
tcttagaattgggtagaagtttagc

SEQ ID NO: 3863524 - DNA, 25 bp, Homo sapien
cttagaattgggtagaagtttagct

SEQ ID NO: 3863525 - DNA, 25 bp, Homo sapien
atcttagaattgggtagaagtttag

SEQ ID NO: 3863526 - DNA, 25 bp, Homo sapien
gattgtaggtgatactgtgtatttc

SEQ ID NO: 3863527 - DNA, 25 bp, Homo sapien
ctcccagttgtagaaggttatgtaa

SEQ ID NO: 3863528 - DNA, 25 bp, Homo sapien
cccagttgtagaaggttatgtaatt

SEQ ID NO: 3863529 - DNA, 25 bp, Homo sapien
gttctcccagttgtagaaggttatg

SEQ ID NO: 3863530 - DNA, 25 bp, Homo sapien
taatgagtacagtcattgacaaagg

SEQ ID NO: 3863531 - DNA, 25 bp, Homo sapien
aatgagtacagtcattgacaaagga

SEQ ID NO: 3863532 - DNA, 25 bp, Homo sapien
ttaatgagtacagtcattgacaaag

SEQ ID NO: 3863533 - DNA, 25 bp, Homo sapien
cttcagagcctaagattgaccaggt

SEQ ID NO: 3863534 - DNA, 25 bp, Homo sapien
ctaaaggtattctaatgagttgtaa

SEQ ID NO: 3863535 - DNA, 25 bp, Homo sapien
ttttcccccaataatggcactataa

SEQ ID NO: 3863536 - DNA, 25 bp, Homo sapien
ggcactaaaggtattctaatgagtt

SEQ ID NO: 3863537 - DNA, 25 bp, Homo sapien
gagtccaagcccagctcgtattaga

SEQ ID NO: 3863538 - DNA, 25 bp, Homo sapien
ggaacattcctaattgtaaatccag

SEQ ID NO: 3863539 - DNA, 25 bp, Homo sapien
gaccatgcgttaggaacatggacgt

SEQ ID NO: 3863540 - DNA, 25 bp, Homo sapien
tgttcactgatgaatggaacattcc

SEQ ID NO: 3863541 - DNA, 25 bp, Homo sapien
aatagaattgcccattgccagggaa

SEQ ID NO: 3863542 - DNA, 25 bp, Homo sapien
cataaggcatggacctacagccaat

SEQ ID NO: 3863543 - DNA, 25 bp, Homo sapien
tcataatgaagtgggaaaaaacagc

SEQ ID NO: 3863544 - DNA, 25 bp, Homo sapien
gcagctgcacttgcctccataaggc

SEQ ID NO: 3863545 - DNA, 25 bp, Homo sapien
acaacaacagcaagagagacagcac

SEQ ID NO: 3863546 - DNA, 25 bp, Homo sapien
cgtgtaaaggacaacaacagcaaga

SEQ ID NO: 3863547 - DNA, 25 bp, Homo sapien
aggacaacaacagcaagagagacag

SEQ ID NO: 3863548 - DNA, 25 bp, Homo sapien
gtgtaaaggacaacaacagcaagag

SEQ ID NO: 3863549 - DNA, 25 bp, Homo sapien
tgtcatccatactgctagcagccat

SEQ ID NO: 3863550 - DNA, 25 bp, Homo sapien
tcatccatactgctagcagccatta

SEQ ID NO: 3863551 - DNA, 25 bp, Homo sapien
gtcatccatactgctagcagccatt

SEQ ID NO: 3863552 - DNA, 25 bp, Homo sapien
tgaaatatcttccttggtctggaat

SEQ ID NO: 3863553 - DNA, 25 bp, Homo sapien
tcttccttggtctggaatgagcttt

SEQ ID NO: 3863554 - DNA, 25 bp, Homo sapien
tatcttccttggtctggaatgagct

SEQ ID NO: 3863555 - DNA, 25 bp, Homo sapien
taagccactgaaatatcttccttgg

SEQ ID NO: 3863556 - DNA, 25 bp, Homo sapien
tcctgccagcagactaatgcatacg

SEQ ID NO: 3863557 - DNA, 25 bp, Homo sapien
gagactatggcattattaagcatac

SEQ ID NO: 3863558 - DNA, 25 bp, Homo sapien
ctaatgcatacgttccttatagaga

SEQ ID NO: 3863559 - DNA, 25 bp, Homo sapien
tacgttccttatagagactatggca

SEQ ID NO: 3863560 - DNA, 25 bp, Homo sapien
agtcaaaacaaggaatcctctcttc

SEQ ID NO: 3863561 - DNA, 25 bp, Homo sapien
gcataatcctccagatccatgtaaa

SEQ ID NO: 3863562 - DNA, 25 bp, Homo sapien
tgtgcataatcctccagatccatgt

SEQ ID NO: 3863563 - DNA, 25 bp, Homo sapien
tcctccagatccatgtaaaccaata

SEQ ID NO: 3863564 - DNA, 25 bp, Homo sapien
taatcctccagatccatgtaaacca

SEQ ID NO: 3863565 - DNA, 25 bp, Homo sapien
tacttctgctccaactaaaccaaaa

SEQ ID NO: 3863566 - DNA, 25 bp, Homo sapien
atacttctgctccaactaaaccaaa

SEQ ID NO: 3863567 - DNA, 25 bp, Homo sapien
gctggcaattgcagtattattttgc

SEQ ID NO: 3863568 - DNA, 25 bp, Homo sapien
caagccatgccctagtcgtgctggt

SEQ ID NO: 3863569 - DNA, 25 bp, Homo sapien
aagcagcctgctgttcatgtagaag

SEQ ID NO: 3863570 - DNA, 25 bp, Homo sapien
caaaaggaaacgagtgaatggctgt

SEQ ID NO: 3863571 - DNA, 25 bp, Homo sapien
gagcctctctatactaaggttgaca

SEQ ID NO: 3863572 - DNA, 25 bp, Homo sapien
atatcgcacaaagtaggctccaggg

SEQ ID NO: 3863573 - DNA, 25 bp, Homo sapien
aaggaagctagtggagagaagctca

SEQ ID NO: 3863574 - DNA, 25 bp, Homo sapien
tattaggattaaaagtggttgcagc

SEQ ID NO: 3863575 - DNA, 25 bp, Homo sapien
acacatctggcaaagaccatccaaa

SEQ ID NO: 3863576 - DNA, 25 bp, Homo sapien
acacacacttgctacagttcgatgg

SEQ ID NO: 3863577 - DNA, 25 bp, Homo sapien
cacacacacttgctacagttcgatg

SEQ ID NO: 3863578 - DNA, 25 bp, Homo sapien
cacacacttgctacagttcgatggg

SEQ ID NO: 3863579 - DNA, 25 bp, Homo sapien
gaattaactggctggcctcgttgag

SEQ ID NO: 3863580 - DNA, 25 bp, Homo sapien
ctggctctcatgtggatgagaagag

SEQ ID NO: 3863581 - DNA, 25 bp, Homo sapien
gatgaagacagctttgaagctctga

SEQ ID NO: 3863582 - DNA, 25 bp, Homo sapien
taagcatgagtgtgaattaactggc

SEQ ID NO: 3863583 - DNA, 25 bp, Homo sapien
ctggcgtgggctcaggagaacagcc

SEQ ID NO: 3863584 - DNA, 25 bp, Homo sapien
gggctcaggagaacagccttgttca

SEQ ID NO: 3863585 - DNA, 25 bp, Homo sapien
cgtgggctcaggagaacagccttgt

SEQ ID NO: 3863586 - DNA, 25 bp, Homo sapien
ggcgtgggctcaggagaacagcctt

SEQ ID NO: 3863587 - DNA, 25 bp, Homo sapien
ccccaatgcagaaagctgtaaatac

SEQ ID NO: 3863588 - DNA, 25 bp, Homo sapien
ggctgaccccaatgcagaaagctgt

SEQ ID NO: 3863589 - DNA, 25 bp, Homo sapien
tgaccccaatgcagaaagctgtaaa

SEQ ID NO: 3863590 - DNA, 25 bp, Homo sapien
ctgggctgaccccaatgcagaaagc

SEQ ID NO: 3863591 - DNA, 25 bp, Homo sapien
tgctcccagttaagacagcttttgc

SEQ ID NO: 3863592 - DNA, 25 bp, Homo sapien
tgaggatggctagggacatagggct

SEQ ID NO: 3863593 - DNA, 25 bp, Homo sapien
atgaggatggctagggacatagggc

SEQ ID NO: 3863594 - DNA, 25 bp, Homo sapien
tatgagggtggctggccccaattag

SEQ ID NO: 3863595 - DNA, 25 bp, Homo sapien
tgagggtggctggccccaattagca

SEQ ID NO: 3863596 - DNA, 25 bp, Homo sapien
ctatgagggtggctggccccaatta

SEQ ID NO: 3863597 - DNA, 25 bp, Homo sapien
gggtggctggccccaattagcacac

SEQ ID NO: 3863598 - DNA, 25 bp, Homo sapien
agctggggatgggtcagtgcagccc

SEQ ID NO: 3863599 - DNA, 25 bp, Homo sapien
gggatgggtcagtgcagccctggtg

SEQ ID NO: 3863600 - DNA, 25 bp, Homo sapien
gctggggatgggtcagtgcagccct

SEQ ID NO: 3863601 - DNA, 25 bp, Homo sapien
tggggatgggtcagtgcagccctgg

SEQ ID NO: 3863602 - DNA, 25 bp, Homo sapien
cagggcagcatacaaatgcacagct

SEQ ID NO: 3863603 - DNA, 25 bp, Homo sapien
gggcagcatacaaatgcacagctga

SEQ ID NO: 3863604 - DNA, 25 bp, Homo sapien
cacagggcagcatacaaatgcacag

SEQ ID NO: 3863605 - DNA, 25 bp, Homo sapien
acacagggcagcatacaaatgcaca

SEQ ID NO: 3863606 - DNA, 25 bp, Homo sapien
aacacagagtaactgtcagcatatt

SEQ ID NO: 3863607 - DNA, 25 bp, Homo sapien
tcccttaggcaaacttgggtgctgg

SEQ ID NO: 3863608 - DNA, 25 bp, Homo sapien
ccactgaaggaatcccttaggcaaa

SEQ ID NO: 3863609 - DNA, 25 bp, Homo sapien
gtcagcatattggttccactgaagg

SEQ ID NO: 3863610 - DNA, 25 bp, Homo sapien
tcctgtgccacgtgctcatcgtgat

SEQ ID NO: 3863611 - DNA, 25 bp, Homo sapien
acaaatggcacagttccttccaggc

SEQ ID NO: 3863612 - DNA, 25 bp, Homo sapien
tcctaatgcacagcaccttcttcta

SEQ ID NO: 3863613 - DNA, 25 bp, Homo sapien
cctaatgcacagcaccttcttctat

SEQ ID NO: 3863614 - DNA, 25 bp, Homo sapien
ccagtgtggctgggtccccgctcat

SEQ ID NO: 3863615 - DNA, 25 bp, Homo sapien
ggacagctcctgtagtagatccttc

SEQ ID NO: 3863616 - DNA, 25 bp, Homo sapien
tggacagctcctgtagtagatcctt

SEQ ID NO: 3863617 - DNA, 25 bp, Homo sapien
gacagctcctgtagtagatccttca

SEQ ID NO: 3863618 - DNA, 25 bp, Homo sapien
ctggacagctcctgtagtagatcct

SEQ ID NO: 3863619 - DNA, 25 bp, Homo sapien
ccttttgtataactcctgaggattt

SEQ ID NO: 3863620 - DNA, 25 bp, Homo sapien
ctatttcctcctggatggatccaga

SEQ ID NO: 3863621 - DNA, 25 bp, Homo sapien
cctgggtcggcagcacctcccacag

SEQ ID NO: 3863622 - DNA, 25 bp, Homo sapien
ccaagggagggtaagccgcatcatt

SEQ ID NO: 3863623 - DNA, 25 bp, Homo sapien
gggcctacaatcaaccgacggatct

SEQ ID NO: 3863624 - DNA, 25 bp, Homo sapien
cacaaccttgtgcatgacatggaat

SEQ ID NO: 3863625 - DNA, 25 bp, Homo sapien
tttctccatgtggacctccaccagt

SEQ ID NO: 3863626 - DNA, 25 bp, Homo sapien
gtggccacctgtaatggtggagtct

SEQ ID NO: 3863627 - DNA, 25 bp, Homo sapien
tccaattctgtgaagcaagcatcag

SEQ ID NO: 3863628 - DNA, 25 bp, Homo sapien
caattctgtgaagcaagcatcagag

SEQ ID NO: 3863629 - DNA, 25 bp, Homo sapien
ggccacctgtaatggtggagtcttc

SEQ ID NO: 3863630 - DNA, 25 bp, Homo sapien
tccgcttccacttttgtcttttctg

SEQ ID NO: 3863631 - DNA, 25 bp, Homo sapien
tgcaggtgcagaggaaggacttgct

SEQ ID NO: 3863632 - DNA, 25 bp, Homo sapien
gtgcagaggaaggacttgctgacat

SEQ ID NO: 3863633 - DNA, 25 bp, Homo sapien
cttctgcaggtgcagaggaaggact

SEQ ID NO: 3863634 - DNA, 25 bp, Homo sapien
gaagaacatgggcacgtctgtgctt

SEQ ID NO: 3863635 - DNA, 25 bp, Homo sapien
gcacgtctgtgcttccctcatcatt

SEQ ID NO: 3863636 - DNA, 25 bp, Homo sapien
gaacatgggcacgtctgtgcttccc

SEQ ID NO: 3863637 - DNA, 25 bp, Homo sapien
catgggcacgtctgtgcttccctca

SEQ ID NO: 3863638 - DNA, 25 bp, Homo sapien
tgggcaccttcagggggctggttcc

SEQ ID NO: 3863639 - DNA, 25 bp, Homo sapien
atgggcaccttcagggggctggttc

SEQ ID NO: 3863640 - DNA, 25 bp, Homo sapien
cggcataggtcactgtttagagtct

SEQ ID NO: 3863641 - DNA, 25 bp, Homo sapien
cttccaagcttgtcagtaatgtaaa

SEQ ID NO: 3863642 - DNA, 25 bp, Homo sapien
tccaataaactagtgcggcataggt

SEQ ID NO: 3863643 - DNA, 25 bp, Homo sapien
tactgcaggacagaagaatcttcca

SEQ ID NO: 3863644 - DNA, 25 bp, Homo sapien
tgcaagtgactaacaattggtgcca

SEQ ID NO: 3863645 - DNA, 25 bp, Homo sapien
ccaggctgaccaaaaggaactatct

SEQ ID NO: 3863646 - DNA, 25 bp, Homo sapien
tggtgccatgagcagactgttcaga

SEQ ID NO: 3863647 - DNA, 25 bp, Homo sapien
gctgatgcgaatgtcaccttctacg

SEQ ID NO: 3863648 - DNA, 25 bp, Homo sapien
ttgataggttctagtacacagaagt

SEQ ID NO: 3863649 - DNA, 25 bp, Homo sapien
tgacagccctttatggaatgttgct

SEQ ID NO: 3863650 - DNA, 25 bp, Homo sapien
ttactaattgtgcactttggccaac

SEQ ID NO: 3863651 - DNA, 25 bp, Homo sapien
tcctaacagccatgagtttacagct

SEQ ID NO: 3863652 - DNA, 25 bp, Homo sapien
tggcttcacaccacacaccagcacc

SEQ ID NO: 3863653 - DNA, 25 bp, Homo sapien
ctggcttcacaccacacaccagcac

SEQ ID NO: 3863654 - DNA, 25 bp, Homo sapien
gcttcacaccacacaccagcaccat

SEQ ID NO: 3863655 - DNA, 25 bp, Homo sapien
ggcttcacaccacacaccagcacca

SEQ ID NO: 3863656 - DNA, 25 bp, Homo sapien
ctgtgcagcttcatgcactggaacc

SEQ ID NO: 3863657 - DNA, 25 bp, Homo sapien
tgtgcagcttcatgcactggaacca

SEQ ID NO: 3863658 - DNA, 25 bp, Homo sapien
tgcagcttcatgcactggaaccaaa

SEQ ID NO: 3863659 - DNA, 25 bp, Homo sapien
gcagcttcatgcactggaaccaaac

SEQ ID NO: 3863660 - DNA, 25 bp, Homo sapien
ttcctctgttctctaggctgtcaca

SEQ ID NO: 3863661 - DNA, 25 bp, Homo sapien
ctgccatttgccttttcaaaaccat

SEQ ID NO: 3863662 - DNA, 25 bp, Homo sapien
aaccatttcctctgttctctaggct

SEQ ID NO: 3863663 - DNA, 25 bp, Homo sapien
tgccatttgccttttcaaaaccatt

SEQ ID NO: 3863664 - DNA, 25 bp, Homo sapien
gagaagcccgttcatgagtgtctga

SEQ ID NO: 3863665 - DNA, 25 bp, Homo sapien
tcgagaagcccgttcatgagtgtct

SEQ ID NO: 3863666 - DNA, 25 bp, Homo sapien
cccctcgagaagcccgttcatgagt

SEQ ID NO: 3863667 - DNA, 25 bp, Homo sapien
ctcgagaagcccgttcatgagtgtc

SEQ ID NO: 3863668 - DNA, 25 bp, Homo sapien
caaagggccgttcgcctttcatggc

SEQ ID NO: 3863669 - DNA, 25 bp, Homo sapien
tcgatttcctgtcagccaacaaagg

SEQ ID NO: 3863670 - DNA, 25 bp, Homo sapien
tccacagcagcgttgccgtggtaac

SEQ ID NO: 3863671 - DNA, 25 bp, Homo sapien
cgtggtaacgatcctccgccggacg

SEQ ID NO: 3863672 - DNA, 25 bp, Homo sapien
cctgctgaagagacattggagctag

SEQ ID NO: 3863673 - DNA, 25 bp, Homo sapien
gttgaagacggttccgctccctgtc

SEQ ID NO: 3863674 - DNA, 25 bp, Homo sapien
tagggcggctagtttcacctggtaa

SEQ ID NO: 3863675 - DNA, 25 bp, Homo sapien
gcttgtcatgttcgaagtttgatac

SEQ ID NO: 3863676 - DNA, 25 bp, Homo sapien
caggccaggccgtggttgtctttcc

SEQ ID NO: 3863677 - DNA, 25 bp, Homo sapien
cgcaaaaagggtactggtgaacgtg

SEQ ID NO: 3863678 - DNA, 25 bp, Homo sapien
gttgtctttccaaggcggctcagct

SEQ ID NO: 3863679 - DNA, 25 bp, Homo sapien
ccacggccacatccgcaaaaagggt

SEQ ID NO: 3863680 - DNA, 25 bp, Homo sapien
ctgagggatcaggttatcgtctgtt

SEQ ID NO: 3863681 - DNA, 25 bp, Homo sapien
gtaaaatgcctaatctatcataatc

SEQ ID NO: 3863682 - DNA, 25 bp, Homo sapien
gacacgaagccacagatttttagtg

SEQ ID NO: 3863683 - DNA, 25 bp, Homo sapien
tggccagtcaggctttagtggacac

SEQ ID NO: 3863684 - DNA, 25 bp, Homo sapien
gcatgaaatctggtaccatccagga

SEQ ID NO: 3863685 - DNA, 25 bp, Homo sapien
ctattcatggagattaacgctcagg

SEQ ID NO: 3863686 - DNA, 25 bp, Homo sapien
caggtttcaaagacccctcaagtgc

SEQ ID NO: 3863687 - DNA, 25 bp, Homo sapien
ttcaacaccgtattggaaatcctgc

SEQ ID NO: 3863688 - DNA, 25 bp, Homo sapien
ctttggagagaattatgcacgtcac

SEQ ID NO: 3863689 - DNA, 25 bp, Homo sapien
tgctaccgtcatgggagcaagaaca

SEQ ID NO: 3863690 - DNA, 25 bp, Homo sapien
cacgtcactcagttgctctaacaag

SEQ ID NO: 3863691 - DNA, 25 bp, Homo sapien
tgtcacatgcactctcacgatgagg

SEQ ID NO: 3863692 - DNA, 25 bp, Homo sapien
gatagtcggataattatgtctctta

SEQ ID NO: 3863693 - DNA, 25 bp, Homo sapien
tgttcggtttacagagtttgctact

SEQ ID NO: 3863694 - DNA, 25 bp, Homo sapien
gaaaccccgatgtgaagtgtacata

SEQ ID NO: 3863695 - DNA, 25 bp, Homo sapien
tctgggtcgatcttagctttataca

SEQ ID NO: 3863696 - DNA, 25 bp, Homo sapien
cctgggccgcggccgccggcctcat

SEQ ID NO: 3863697 - DNA, 25 bp, Homo sapien
agccagccctgcctgggccgcggcc

SEQ ID NO: 3863698 - DNA, 25 bp, Homo sapien
catccggcccaggcagcagccagcc

SEQ ID NO: 3863699 - DNA, 25 bp, Homo sapien
atccggcccaggcagcagccagccc

SEQ ID NO: 3863700 - DNA, 25 bp, Homo sapien
caggcaggcatccttctcagcactg

SEQ ID NO: 3863701 - DNA, 25 bp, Homo sapien
ttagcaggcaggcatccttctcagc

SEQ ID NO: 3863702 - DNA, 25 bp, Homo sapien
tcaccaggggatcagctttagcagg

SEQ ID NO: 3863703 - DNA, 25 bp, Homo sapien
cagcactgccatccaggactctttc

SEQ ID NO: 3863704 - DNA, 25 bp, Homo sapien
gcctagagacgtgatgccctgcatt

SEQ ID NO: 3863705 - DNA, 25 bp, Homo sapien
gaggttgcaagtcgcaagccttggc

SEQ ID NO: 3863706 - DNA, 25 bp, Homo sapien
cttgggtgggagacaccatggtaca

SEQ ID NO: 3863707 - DNA, 25 bp, Homo sapien
caggccatgtcttcggaggttgcaa

SEQ ID NO: 3863708 - DNA, 25 bp, Homo sapien
ggatgcttttgaaagctgcccgcat

SEQ ID NO: 3863709 - DNA, 25 bp, Homo sapien
aggatgcttttgaaagctgcccgca

SEQ ID NO: 3863710 - DNA, 25 bp, Homo sapien
ttatcaataatctgatttatcacag

SEQ ID NO: 3863711 - DNA, 25 bp, Homo sapien
tatcaataatctgatttatcacagg

SEQ ID NO: 3863712 - DNA, 25 bp, Homo sapien
ctgaaagataactctggcatcttcc

SEQ ID NO: 3863713 - DNA, 25 bp, Homo sapien
gctgttacccattccttgatactga

SEQ ID NO: 3863714 - DNA, 25 bp, Homo sapien
tgtggtgggtgctgttacccattcc

SEQ ID NO: 3863715 - DNA, 25 bp, Homo sapien
cctttcatagctgacattgtggtgg

SEQ ID NO: 3863716 - DNA, 25 bp, Homo sapien
gatactgacagtacaatggccatcc

SEQ ID NO: 3863717 - DNA, 25 bp, Homo sapien
aatgaggttcatattaatggcaggc

SEQ ID NO: 3863718 - DNA, 25 bp, Homo sapien
agtctatgcaggcaatttttgcttt

SEQ ID NO: 3863719 - DNA, 25 bp, Homo sapien
tagaaatgaggttcatattaatggc

SEQ ID NO: 3863720 - DNA, 25 bp, Homo sapien
ggttcatattaatggcaggccgaga

SEQ ID NO: 3863721 - DNA, 25 bp, Homo sapien
tctttttctacttccttaatgactc

SEQ ID NO: 3863722 - DNA, 25 bp, Homo sapien
ttccttaatgactctaattgcagac

SEQ ID NO: 3863723 - DNA, 25 bp, Homo sapien
tctacttccttaatgactctaattg

SEQ ID NO: 3863724 - DNA, 25 bp, Homo sapien
tacttccttaatgactctaattgca

SEQ ID NO: 3863725 - DNA, 25 bp, Homo sapien
agtacagaaccaggaccgtactaga

SEQ ID NO: 3863726 - DNA, 25 bp, Homo sapien
tacagaaccaggaccgtactagaaa

SEQ ID NO: 3863727 - DNA, 25 bp, Homo sapien
gaaccaggaccgtactagaaactca

SEQ ID NO: 3863728 - DNA, 25 bp, Homo sapien
cccatgagagcagggttgtgtctgc

SEQ ID NO: 3863729 - DNA, 25 bp, Homo sapien
ttcaaaatcaagaactgttcgtctc

SEQ ID NO: 3863730 - DNA, 25 bp, Homo sapien
tctctctggaatattagtatcataa

SEQ ID NO: 3863731 - DNA, 25 bp, Homo sapien
agaactgttcgtctctctggaatat

SEQ ID NO: 3863732 - DNA, 25 bp, Homo sapien
tctctggaatattagtatcataagc

SEQ ID NO: 3863733 - DNA, 25 bp, Homo sapien
ctgtgagtggtatggcactgctgtg

SEQ ID NO: 3863734 - DNA, 25 bp, Homo sapien
tggctgtgagtggtatggcactgct

SEQ ID NO: 3863735 - DNA, 25 bp, Homo sapien
tgtgagtggtatggcactgctgtga

SEQ ID NO: 3863736 - DNA, 25 bp, Homo sapien
gctgtgagtggtatggcactgctgt

SEQ ID NO: 3863737 - DNA, 25 bp, Homo sapien
atctgttttcaaccatttggagtca

SEQ ID NO: 3863738 - DNA, 25 bp, Homo sapien
tcaaccatttggagtcaaggcgagc

SEQ ID NO: 3863739 - DNA, 25 bp, Homo sapien
cgagcctgggcagccaaacacaaat

SEQ ID NO: 3863740 - DNA, 25 bp, Homo sapien
agtcaaggcgagcctgggcagccaa

SEQ ID NO: 3863741 - DNA, 25 bp, Homo sapien
aggtgcaggagtttcatcttttttc

SEQ ID NO: 3863742 - DNA, 25 bp, Homo sapien
ttgtcatccagatcttctttctttg

SEQ ID NO: 3863743 - DNA, 25 bp, Homo sapien
ctatatacaggtgcaggagtttcat

SEQ ID NO: 3863744 - DNA, 25 bp, Homo sapien
ttgacttggccctatatacaggtgc

SEQ ID NO: 3863745 - DNA, 25 bp, Homo sapien
cttttggtgtctggcgttccgtgaa

SEQ ID NO: 3863746 - DNA, 25 bp, Homo sapien
gccttttggtgtctggcgttccgtg

SEQ ID NO: 3863747 - DNA, 25 bp, Homo sapien
ggtgtctggcgttccgtgaacatcc

SEQ ID NO: 3863748 - DNA, 25 bp, Homo sapien
ttggtgtctggcgttccgtgaacat

SEQ ID NO: 3863749 - DNA, 25 bp, Homo sapien
gctccagcaggatggccagagccaa

SEQ ID NO: 3863750 - DNA, 25 bp, Homo sapien
ctcagcgtgcctctctgcacagcca

SEQ ID NO: 3863751 - DNA, 25 bp, Homo sapien
acagccagctccagcaggatggcca

SEQ ID NO: 3863752 - DNA, 25 bp, Homo sapien
agcaggatggccagagccaagtgct

SEQ ID NO: 3863753 - DNA, 25 bp, Homo sapien
caaaagcaaggtgctggtgccctgg

SEQ ID NO: 3863754 - DNA, 25 bp, Homo sapien
gtgcatgttgccctcggaggggggc

SEQ ID NO: 3863755 - DNA, 25 bp, Homo sapien
gcatgttgccctcggaggggggcgt

SEQ ID NO: 3863756 - DNA, 25 bp, Homo sapien
tgcatgttgccctcggaggggggcg

SEQ ID NO: 3863757 - DNA, 25 bp, Homo sapien
ctcaggaaactctcactggggctca

SEQ ID NO: 3863758 - DNA, 25 bp, Homo sapien
tcactggggctcagagggccagaca

SEQ ID NO: 3863759 - DNA, 25 bp, Homo sapien
actggggctcagagggccagacaaa

SEQ ID NO: 3863760 - DNA, 25 bp, Homo sapien
tggggctcagagggccagacaaaag

SEQ ID NO: 3863761 - DNA, 25 bp, Homo sapien
tcggacagctacacggcagaggcat

SEQ ID NO: 3863762 - DNA, 25 bp, Homo sapien
acgtcggacagctacacggcagagg

SEQ ID NO: 3863763 - DNA, 25 bp, Homo sapien
gagacgtcggacagctacacggcag

SEQ ID NO: 3863764 - DNA, 25 bp, Homo sapien
agccagatcttctaaatgggccatg

SEQ ID NO: 3863765 - DNA, 25 bp, Homo sapien
ctttctcatcaatcacaatccagaa

SEQ ID NO: 3863766 - DNA, 25 bp, Homo sapien
cactttctcatcaatcacaatccag

SEQ ID NO: 3863767 - DNA, 25 bp, Homo sapien
atacactttctcatcaatcacaatc

SEQ ID NO: 3863768 - DNA, 25 bp, Homo sapien
tacactttctcatcaatcacaatcc

SEQ ID NO: 3863769 - DNA, 25 bp, Homo sapien
ccgggtgacttcaaactcgaaagca

SEQ ID NO: 3863770 - DNA, 25 bp, Homo sapien
ggtgacttcaaactcgaaagcagct

SEQ ID NO: 3863771 - DNA, 25 bp, Homo sapien
gggtgacttcaaactcgaaagcagc

SEQ ID NO: 3863772 - DNA, 25 bp, Homo sapien
tgacttcaaactcgaaagcagcttc

SEQ ID NO: 3863773 - DNA, 25 bp, Homo sapien
tctgcatcactcaaggcatacagcc

SEQ ID NO: 3863774 - DNA, 25 bp, Homo sapien
cctctgcatcactcaaggcatacag

SEQ ID NO: 3863775 - DNA, 25 bp, Homo sapien
ctgcatcactcaaggcatacagcct

SEQ ID NO: 3863776 - DNA, 25 bp, Homo sapien
tgcatcactcaaggcatacagcctc

SEQ ID NO: 3863777 - DNA, 25 bp, Homo sapien
caggagacagcggtgtgctcattgc

SEQ ID NO: 3863778 - DNA, 25 bp, Homo sapien
tggcacattcaatctcgacaggaga

SEQ ID NO: 3863779 - DNA, 25 bp, Homo sapien
tctcgacaggagacagcggtgtgct

SEQ ID NO: 3863780 - DNA, 25 bp, Homo sapien
tcctctctgtgtctatcagaggtga

SEQ ID NO: 3863781 - DNA, 25 bp, Homo sapien
tcagcaaaaagcaaagattttctta

SEQ ID NO: 3863782 - DNA, 25 bp, Homo sapien
cagcaaaaagcaaagattttcttac

SEQ ID NO: 3863783 - DNA, 25 bp, Homo sapien
cagataccgtgtgaagactgagttg

SEQ ID NO: 3863784 - DNA, 25 bp, Homo sapien
gcctggttccacagataccgtgtga

SEQ ID NO: 3863785 - DNA, 25 bp, Homo sapien
taccgtgtgaagactgagttgcaca

SEQ ID NO: 3863786 - DNA, 25 bp, Homo sapien
tccacagataccgtgtgaagactga

SEQ ID NO: 3863787 - DNA, 25 bp, Homo sapien
gcagcctccagagaagatggatgac

SEQ ID NO: 3863788 - DNA, 25 bp, Homo sapien
cctccagagaagatggatgactgaa

SEQ ID NO: 3863789 - DNA, 25 bp, Homo sapien
cagagaagatggatgactgaagcca

SEQ ID NO: 3863790 - DNA, 25 bp, Homo sapien
gagaagatggatgactgaagccatt

SEQ ID NO: 3863791 - DNA, 25 bp, Homo sapien
gagcagtcgcgatttgctggcaggt

SEQ ID NO: 3863792 - DNA, 25 bp, Homo sapien
gtgggagcagtcgcgatttgctggc

SEQ ID NO: 3863793 - DNA, 25 bp, Homo sapien
ggagcagtcgcgatttgctggcagg

SEQ ID NO: 3863794 - DNA, 25 bp, Homo sapien
gcaatggcttgcagaaatgcctgag

SEQ ID NO: 3863795 - DNA, 25 bp, Homo sapien
tggcttgcagaaatgcctgagaatg

SEQ ID NO: 3863796 - DNA, 25 bp, Homo sapien
tgttattgtctgcaatggcttgcag

SEQ ID NO: 3863797 - DNA, 25 bp, Homo sapien
tgaatgttattgtctgcaatggctt

SEQ ID NO: 3863798 - DNA, 25 bp, Homo sapien
gggaaacatgatcggtgtggtcaaa

SEQ ID NO: 3863799 - DNA, 25 bp, Homo sapien
tgcctacagtacctttctatttgac

SEQ ID NO: 3863800 - DNA, 25 bp, Homo sapien
tcggtgtggtcaaatggcactgcct

SEQ ID NO: 3863801 - DNA, 25 bp, Homo sapien
aatggcactgcctacagtacctttc

SEQ ID NO: 3863802 - DNA, 25 bp, Homo sapien
gaagcaacataacagcaagcgaccg

SEQ ID NO: 3863803 - DNA, 25 bp, Homo sapien
agcaacataacagcaagcgaccgac

SEQ ID NO: 3863804 - DNA, 25 bp, Homo sapien
tgttttaagaagcaacataacagca

SEQ ID NO: 3863805 - DNA, 25 bp, Homo sapien
ttcatgttttaagaagcaacataac

SEQ ID NO: 3863806 - DNA, 25 bp, Homo sapien
acattttgcttggtagacaactcta

SEQ ID NO: 3863807 - DNA, 25 bp, Homo sapien
cactgacttaggcaacgttctgtgc

SEQ ID NO: 3863808 - DNA, 25 bp, Homo sapien
tgacttaggcaacgttctgtgcttt

SEQ ID NO: 3863809 - DNA, 25 bp, Homo sapien
tgcatgaactaaagataatgccaca

SEQ ID NO: 3863810 - DNA, 25 bp, Homo sapien
taacaacaaatatttctgcaactgt

SEQ ID NO: 3863811 - DNA, 25 bp, Homo sapien
ctgcaaagttaaccaggaaaagaca

SEQ ID NO: 3863812 - DNA, 25 bp, Homo sapien
tgcaaagttaaccaggaaaagacaa

SEQ ID NO: 3863813 - DNA, 25 bp, Homo sapien
acaactttaacaacaaatatttctg

SEQ ID NO: 3863814 - DNA, 25 bp, Homo sapien
cctccgttcccgaattatcttctga

SEQ ID NO: 3863815 - DNA, 25 bp, Homo sapien
tcctccgttcccgaattatcttctg

SEQ ID NO: 3863816 - DNA, 25 bp, Homo sapien
taaaaatacgtccttgttcccatca

SEQ ID NO: 3863817 - DNA, 25 bp, Homo sapien
tgtcagtaactctttcagcttccct

SEQ ID NO: 3863818 - DNA, 25 bp, Homo sapien
gcctcattgtctgatcggttgaaaa

SEQ ID NO: 3863819 - DNA, 25 bp, Homo sapien
ttacacagctacttccaggaaaatg

SEQ ID NO: 3863820 - DNA, 25 bp, Homo sapien
taattgcaatgggtctcttgtccac

SEQ ID NO: 3863821 - DNA, 25 bp, Homo sapien
tgggtctcttgtccacatttattgg

SEQ ID NO: 3863822 - DNA, 25 bp, Homo sapien
cacatttattggactatgaggcaaa

SEQ ID NO: 3863823 - DNA, 25 bp, Homo sapien
tgtccacatttattggactatgagg

SEQ ID NO: 3863824 - DNA, 25 bp, Homo sapien
caaattcagcaattgtactgaggag

SEQ ID NO: 3863825 - DNA, 25 bp, Homo sapien
gggcaaattcagcaattgtactgag

SEQ ID NO: 3863826 - DNA, 25 bp, Homo sapien
gaggagtggagactgcggataaaga

SEQ ID NO: 3863827 - DNA, 25 bp, Homo sapien
ttaagggcaaattcagcaattgtac

SEQ ID NO: 3863828 - DNA, 25 bp, Homo sapien
taaagaatttgactcgggacactgc

SEQ ID NO: 3863829 - DNA, 25 bp, Homo sapien
gactcgggacactgccagacttcta

SEQ ID NO: 3863830 - DNA, 25 bp, Homo sapien
aagataaagaatttgactcgggaca

SEQ ID NO: 3863831 - DNA, 25 bp, Homo sapien
aatttgactcgggacactgccagac

SEQ ID NO: 3863832 - DNA, 25 bp, Homo sapien
agaatgttctgaacagtccaagcat

SEQ ID NO: 3863833 - DNA, 25 bp, Homo sapien
tagaatgttctgaacagtccaagca

SEQ ID NO: 3863834 - DNA, 25 bp, Homo sapien
cactgacatttcttgtgcgtggata

SEQ ID NO: 3863835 - DNA, 25 bp, Homo sapien
ctaataagcattgacacccacttac

SEQ ID NO: 3863836 - DNA, 25 bp, Homo sapien
aacataacgcagaaagcacgggcta

SEQ ID NO: 3863837 - DNA, 25 bp, Homo sapien
gactaataagcattgacacccactg

SEQ ID NO: 3863838 - DNA, 25 bp, Homo sapien
tcgaggttgtttgcgctgtgctgca

SEQ ID NO: 3863839 - DNA, 25 bp, Homo sapien
catgctgagcatcatcaggaggaag

SEQ ID NO: 3863840 - DNA, 25 bp, Homo sapien
cccaggctcggtcccaatgggttct

SEQ ID NO: 3863841 - DNA, 25 bp, Homo sapien
caatcaggcgcagtgccgtctgagt

SEQ ID NO: 3863842 - DNA, 25 bp, Homo sapien
tatcttcctcaacattgtcacaact

SEQ ID NO: 3863843 - DNA, 25 bp, Homo sapien
cttgttgcttccaaaactgtggcag

SEQ ID NO: 3863844 - DNA, 25 bp, Homo sapien
gaaacaccttgagcagaagcattca

SEQ ID NO: 3863845 - DNA, 25 bp, Homo sapien
gagatgcacaggagccgtttccttc

SEQ ID NO: 3863846 - DNA, 25 bp, Homo sapien
tccaatcttcatcgtggcagccagt

SEQ ID NO: 3863847 - DNA, 25 bp, Homo sapien
tcatgaccctcgttccaatcttcat

SEQ ID NO: 3863848 - DNA, 25 bp, Homo sapien
acacctctcatgaccctcgttccaa

SEQ ID NO: 3863849 - DNA, 25 bp, Homo sapien
cctcgttccaatcttcatcgtggca

SEQ ID NO: 3863850 - DNA, 25 bp, Homo sapien
agagtcgtcctctgtgtccgaatcc

SEQ ID NO: 3863851 - DNA, 25 bp, Homo sapien
caatcactcggcctaggcctggagg

SEQ ID NO: 3863852 - DNA, 25 bp, Homo sapien
tctgctgagggctgtgcagcggccg

SEQ ID NO: 3863853 - DNA, 25 bp, Homo sapien
tgccagcttgaggtcgtattttcct

SEQ ID NO: 3863854 - DNA, 25 bp, Homo sapien
attccatgcgtgtcttgtccgtcgt

SEQ ID NO: 3863855 - DNA, 25 bp, Homo sapien
accagctccggtgttgctccctgta

SEQ ID NO: 3863856 - DNA, 25 bp, Homo sapien
accttcatgagcagcgtgatccact

SEQ ID NO: 3863857 - DNA, 25 bp, Homo sapien
agctccggtgttgctccctgtacac

SEQ ID NO: 3863858 - DNA, 25 bp, Homo sapien
ccttcatgagcagcgtgatccactg

SEQ ID NO: 3863859 - DNA, 25 bp, Homo sapien
gcttgcaacaaatgcacagctaaga

SEQ ID NO: 3863860 - DNA, 25 bp, Homo sapien
cttgcaacaaatgcacagctaagat

SEQ ID NO: 3863861 - DNA, 25 bp, Homo sapien
ttgatgtacttgttgatgagcccat

SEQ ID NO: 3863862 - DNA, 25 bp, Homo sapien
gatgtacttgttgatgagcccattc

SEQ ID NO: 3863863 - DNA, 25 bp, Homo sapien
agcggagctgggagttgatgtactt

SEQ ID NO: 3863864 - DNA, 25 bp, Homo sapien
gtacttgttgatgagcccattccac

SEQ ID NO: 3863865 - DNA, 25 bp, Homo sapien
cgtccgcatgtcagagaactgcacg

SEQ ID NO: 3863866 - DNA, 25 bp, Homo sapien
ggtttcagctgattcaatgggcaaa

SEQ ID NO: 3863867 - DNA, 25 bp, Homo sapien
tggtttcagctgattcaatgggcaa

SEQ ID NO: 3863868 - DNA, 25 bp, Homo sapien
gacacgtccgcatgtcagagaactg

SEQ ID NO: 3863869 - DNA, 25 bp, Homo sapien
tatcatacagtaactgagcacaagt

SEQ ID NO: 3863870 - DNA, 25 bp, Homo sapien
ttcccttatcatacagtaactgagc

SEQ ID NO: 3863871 - DNA, 25 bp, Homo sapien
tcaagtgctaatgttggtgctgggt

SEQ ID NO: 3863872 - DNA, 25 bp, Homo sapien
gtgctgggtcctagtgtaaagccaa

SEQ ID NO: 3863873 - DNA, 25 bp, Homo sapien
catagacgcacggtaccttctaggt

SEQ ID NO: 3863874 - DNA, 25 bp, Homo sapien
gttgctaaagccctcttcatgtctc

SEQ ID NO: 3863875 - DNA, 25 bp, Homo sapien
gcacggtaccttctaggttgctaaa

SEQ ID NO: 3863876 - DNA, 25 bp, Homo sapien
tctaggttgctaaagccctcttcat

SEQ ID NO: 3863877 - DNA, 25 bp, Homo sapien
cactgaaagaggttagacggataac

SEQ ID NO: 3863878 - DNA, 25 bp, Homo sapien
tgaggtacagacaacagccagactt

SEQ ID NO: 3863879 - DNA, 25 bp, Homo sapien
tgtatcaccatattcatgaagctgg

SEQ ID NO: 3863880 - DNA, 25 bp, Homo sapien
catagaaacaattgtctgcactggg

SEQ ID NO: 3863881 - DNA, 25 bp, Homo sapien
tgaaccttgatagcattatgccaac

SEQ ID NO: 3863882 - DNA, 25 bp, Homo sapien
cataggaggttaacagctagggaag

SEQ ID NO: 3863883 - DNA, 25 bp, Homo sapien
tagccgaaggctgaacacaactcaa

SEQ ID NO: 3863884 - DNA, 25 bp, Homo sapien
gaaatactgaataggcctcatcgag

SEQ ID NO: 3863885 - DNA, 25 bp, Homo sapien
tttaaggaatccaccgaacgataga

SEQ ID NO: 3863886 - DNA, 25 bp, Homo sapien
gaaatccctgcaagtatcccaacag

SEQ ID NO: 3863887 - DNA, 25 bp, Homo sapien
tttcagcaatattacagcaaacaag

SEQ ID NO: 3863888 - DNA, 25 bp, Homo sapien
aattagcaaacaccttacacccatg

SEQ ID NO: 3863889 - DNA, 25 bp, Homo sapien
tgcttgccatgtttcttccccttcc

SEQ ID NO: 3863890 - DNA, 25 bp, Homo sapien
gcttgccatgtttcttccccttcca

SEQ ID NO: 3863891 - DNA, 25 bp, Homo sapien
ctgcttgccatgtttcttccccttc

SEQ ID NO: 3863892 - DNA, 25 bp, Homo sapien
cttgccatgtttcttccccttccat

SEQ ID NO: 3863893 - DNA, 25 bp, Homo sapien
caggaaatacggacgatggaggtaa

SEQ ID NO: 3863894 - DNA, 25 bp, Homo sapien
ccagcaggaaatacggacgatggag

SEQ ID NO: 3863895 - DNA, 25 bp, Homo sapien
gcaggaaatacggacgatggaggta

SEQ ID NO: 3863896 - DNA, 25 bp, Homo sapien
ccagtgcgctgtgtccaacgacctc

SEQ ID NO: 3863897 - DNA, 25 bp, Homo sapien
cagtgcgctgtgtccaacgacctca

SEQ ID NO: 3863898 - DNA, 25 bp, Homo sapien
agtgcgctgtgtccaacgacctcac

SEQ ID NO: 3863899 - DNA, 25 bp, Homo sapien
ttgcctagacgcccgcacccctagc

SEQ ID NO: 3863900 - DNA, 25 bp, Homo sapien
tgcctagacgcccgcacccctagct

SEQ ID NO: 3863901 - DNA, 25 bp, Homo sapien
cttgcctagacgcccgcacccctag

SEQ ID NO: 3863902 - DNA, 25 bp, Homo sapien
ccgcacccctagctccccgccttga

SEQ ID NO: 3863903 - DNA, 25 bp, Homo sapien
gcagcaggagtgtggagcaaaacgt

SEQ ID NO: 3863904 - DNA, 25 bp, Homo sapien
ggagtgtggagcaaaacgtgtccat

SEQ ID NO: 3863905 - DNA, 25 bp, Homo sapien
caggagtgtggagcaaaacgtgtcc

SEQ ID NO: 3863906 - DNA, 25 bp, Homo sapien
agcaggagtgtggagcaaaacgtgt

SEQ ID NO: 3863907 - DNA, 25 bp, Homo sapien
aagatgaagcccacaaaggagagaa

SEQ ID NO: 3863908 - DNA, 25 bp, Homo sapien
atccagctcatacccattccagaag

SEQ ID NO: 3863909 - DNA, 25 bp, Homo sapien
gatccagctcatacccattccagaa

SEQ ID NO: 3863910 - DNA, 25 bp, Homo sapien
actgagacgcagcctgggttcttgt

SEQ ID NO: 3863911 - DNA, 25 bp, Homo sapien
ctgagacgcagcctgggttcttgta

SEQ ID NO: 3863912 - DNA, 25 bp, Homo sapien
cactgagacgcagcctgggttcttg

SEQ ID NO: 3863913 - DNA, 25 bp, Homo sapien
gctgggccacacactgagaaatggc

SEQ ID NO: 3863914 - DNA, 25 bp, Homo sapien
tgctgggccacacactgagaaatgg

SEQ ID NO: 3863915 - DNA, 25 bp, Homo sapien
gggccacacactgagaaatggccat

SEQ ID NO: 3863916 - DNA, 25 bp, Homo sapien
cctgctgggccacacactgagaaat

SEQ ID NO: 3863917 - DNA, 25 bp, Homo sapien
cagcagaaagctggtgtcccagcgc

SEQ ID NO: 3863918 - DNA, 25 bp, Homo sapien
tggactctgcgtgaacatgccccaa

SEQ ID NO: 3863919 - DNA, 25 bp, Homo sapien
ccccagccagcagaaagctggtgtc

SEQ ID NO: 3863920 - DNA, 25 bp, Homo sapien
tttccaggcctaccgcagggtggcc

SEQ ID NO: 3863921 - DNA, 25 bp, Homo sapien
aagagtcgaagtggcctcctgcccc

SEQ ID NO: 3863922 - DNA, 25 bp, Homo sapien
gccaggccttcacacttcgcagcct

SEQ ID NO: 3863923 - DNA, 25 bp, Homo sapien
ccaaggcagctgagcgagaagccgc

SEQ ID NO: 3863924 - DNA, 25 bp, Homo sapien
gccaaggcagctgagcgagaagccg

SEQ ID NO: 3863925 - DNA, 25 bp, Homo sapien
ctgcaagatgagagtcaccaggcat

SEQ ID NO: 3863926 - DNA, 25 bp, Homo sapien
cttggccgcctcactagcactctcc

SEQ ID NO: 3863927 - DNA, 25 bp, Homo sapien
tgtacttcttggccgcctcactagc

SEQ ID NO: 3863928 - DNA, 25 bp, Homo sapien
ccatttttctcagggaagggtctga

SEQ ID NO: 3863929 - DNA, 25 bp, Homo sapien
gccatttttctcagggaagggtctg

SEQ ID NO: 3863930 - DNA, 25 bp, Homo sapien
tgaggggccatttttctcagggaag

SEQ ID NO: 3863931 - DNA, 25 bp, Homo sapien
cttcctccaacttcacctcagcatt

SEQ ID NO: 3863932 - DNA, 25 bp, Homo sapien
cctgccggctaagcatggctgcatt

SEQ ID NO: 3863933 - DNA, 25 bp, Homo sapien
ggcctgccggctaagcatggctgca

SEQ ID NO: 3863934 - DNA, 25 bp, Homo sapien
tggcctgccggctaagcatggctgc

SEQ ID NO: 3863935 - DNA, 25 bp, Homo sapien
tgccggctaagcatggctgcattgg

SEQ ID NO: 3863936 - DNA, 25 bp, Homo sapien
ctgcatggccagaacctggttttca

SEQ ID NO: 3863937 - DNA, 25 bp, Homo sapien
catggccagaacctggttttcagct

SEQ ID NO: 3863938 - DNA, 25 bp, Homo sapien
cagaacctggttttcagctttctct

SEQ ID NO: 3863939 - DNA, 25 bp, Homo sapien
tggccagaacctggttttcagcttt

SEQ ID NO: 3863940 - DNA, 25 bp, Homo sapien
ccttggtgaggccctcagactgctt

SEQ ID NO: 3863941 - DNA, 25 bp, Homo sapien
actgcaagcggtcgtactccttggt

SEQ ID NO: 3863942 - DNA, 25 bp, Homo sapien
ctgcagctttgcgtgctcctactgc

SEQ ID NO: 3863943 - DNA, 25 bp, Homo sapien
gctcctactgcaagcggtcgtactc

SEQ ID NO: 3863944 - DNA, 25 bp, Homo sapien
tcttgtccatgggaccaactactgt

SEQ ID NO: 3863945 - DNA, 25 bp, Homo sapien
tcttcttgtccatgggaccaactac

SEQ ID NO: 3863946 - DNA, 25 bp, Homo sapien
tgtccatgggaccaactactgtagc

SEQ ID NO: 3863947 - DNA, 25 bp, Homo sapien
ttgtccatgggaccaactactgtag

SEQ ID NO: 3863948 - DNA, 25 bp, Homo sapien
taatgtgcttggagagtgtggacaa

SEQ ID NO: 3863949 - DNA, 25 bp, Homo sapien
cacccaccctcctgcgggaccaaag

SEQ ID NO: 3863950 - DNA, 25 bp, Homo sapien
aagagaaactccagtccacctgctc

SEQ ID NO: 3863951 - DNA, 25 bp, Homo sapien
gcattctgaacgtgtagcaatcagg

SEQ ID NO: 3863952 - DNA, 25 bp, Homo sapien
gaaacataaaatgggtgtggtgaag

SEQ ID NO: 3863953 - DNA, 25 bp, Homo sapien
aagatgccgagtagagataccagaa

SEQ ID NO: 3863954 - DNA, 25 bp, Homo sapien
cacattgtgtaagtttagagtcatc

SEQ ID NO: 3863955 - DNA, 25 bp, Homo sapien
gagtcatcactgagcactgaaacca

SEQ ID NO: 3863956 - DNA, 25 bp, Homo sapien
tttgggagtgccgtgtttcttcact

SEQ ID NO: 3863957 - DNA, 25 bp, Homo sapien
gtgccgtgtttcttcactgggctct

SEQ ID NO: 3863958 - DNA, 25 bp, Homo sapien
ggagtgccgtgtttcttcactgggc

SEQ ID NO: 3863959 - DNA, 25 bp, Homo sapien
agatttgggagtgccgtgtttcttc

SEQ ID NO: 3863960 - DNA, 25 bp, Homo sapien
cacagacatccaaatttacctcagt

SEQ ID NO: 3863961 - DNA, 25 bp, Homo sapien
aatttacctcagtggatctcaggtt

SEQ ID NO: 3863962 - DNA, 25 bp, Homo sapien
cagtggatctcaggttatttgcata

SEQ ID NO: 3863963 - DNA, 25 bp, Homo sapien
ttgcatattcatgacatagcatttc

SEQ ID NO: 3863964 - DNA, 25 bp, Homo sapien
caagaagtggatcccccaggtacag

SEQ ID NO: 3863965 - DNA, 25 bp, Homo sapien
cagctgccaccaagaagtggatccc

SEQ ID NO: 3863966 - DNA, 25 bp, Homo sapien
caccaagaagtggatcccccaggta

SEQ ID NO: 3863967 - DNA, 25 bp, Homo sapien
tggatcccccaggtacagtccatgg

SEQ ID NO: 3863968 - DNA, 25 bp, Homo sapien
tcagccccaggctgcaacagctgaa

SEQ ID NO: 3863969 - DNA, 25 bp, Homo sapien
gctgcaacagctgaacctgggaatg

SEQ ID NO: 3863970 - DNA, 25 bp, Homo sapien
cgtgtaaagtatttggtgaaggtgt

SEQ ID NO: 3863971 - DNA, 25 bp, Homo sapien
aacagctgaacctgggaatggacac

SEQ ID NO: 3863972 - DNA, 25 bp, Homo sapien
gtttttgcactgtgtctctcacaca

SEQ ID NO: 3863973 - DNA, 25 bp, Homo sapien
cagtaatacatgaccatgtcttcag

SEQ ID NO: 3863974 - DNA, 25 bp, Homo sapien
gtaggctgtgctcatggacctgtca

SEQ ID NO: 3863975 - DNA, 25 bp, Homo sapien
tcatggacctgtcactggtaatggt

SEQ ID NO: 3863976 - DNA, 25 bp, Homo sapien
aagggaagcccaaatcagtgcagat

SEQ ID NO: 3863977 - DNA, 25 bp, Homo sapien
gggacactaatattgagggtgatga

SEQ ID NO: 3863978 - DNA, 25 bp, Homo sapien
ctggacctgattcacaagggacact

SEQ ID NO: 3863979 - DNA, 25 bp, Homo sapien
aatcagtgcagatcccacggtgtgg

SEQ ID NO: 3863980 - DNA, 25 bp, Homo sapien
gcaccccctcatgatcctgagcacc

SEQ ID NO: 3863981 - DNA, 25 bp, Homo sapien
actgtgatatcctgagcacccctga

SEQ ID NO: 3863982 - DNA, 25 bp, Homo sapien
tgggcaaaccctcgtgtcctgagtg

SEQ ID NO: 3863983 - DNA, 25 bp, Homo sapien
gcgccccctcgtggtactgagggca

SEQ ID NO: 3863984 - DNA, 25 bp, Homo sapien
ctgagtgcccctggtgtcatgagcg

SEQ ID NO: 3863985 - DNA, 25 bp, Homo sapien
tgcttcctgagaacccccgtgtact

SEQ ID NO: 3863986 - DNA, 25 bp, Homo sapien
ctgagaacccccgtgtactgagcac

SEQ ID NO: 3863987 - DNA, 25 bp, Homo sapien
gctgcttcctgagaacccccgtgta

SEQ ID NO: 3863988 - DNA, 25 bp, Homo sapien
ttcctgagaacccccgtgtactgag

SEQ ID NO: 3863989 - DNA, 25 bp, Homo sapien
tgcctgttcaagagtctgccaaagt

SEQ ID NO: 3863990 - DNA, 25 bp, Homo sapien
tttcacatgtggtcctctagagtca

SEQ ID NO: 3863991 - DNA, 25 bp, Homo sapien
catgcctgttcaagagtctgccaaa

SEQ ID NO: 3863992 - DNA, 25 bp, Homo sapien
gtcatgattgctgtcgcatttcaaa

SEQ ID NO: 3863993 - DNA, 25 bp, Homo sapien
caaggtcacctcgcacatcctccat

SEQ ID NO: 3863994 - DNA, 25 bp, Homo sapien
ccaaggtcacctcgcacatcctcca

SEQ ID NO: 3863995 - DNA, 25 bp, Homo sapien
ggctggaccaagcctcccccagact

SEQ ID NO: 3863996 - DNA, 25 bp, Homo sapien
ggaccaagcctcccccagactccac

SEQ ID NO: 3863997 - DNA, 25 bp, Homo sapien
cccaggctggaccaagcctccccca

SEQ ID NO: 3863998 - DNA, 25 bp, Homo sapien
gctggaccaagcctcccccagactc

SEQ ID NO: 3863999 - DNA, 25 bp, Homo sapien
cgtcttaccgccattccaactaata

SEQ ID NO: 3864000 - DNA, 25 bp, Homo sapien
gcgtcttaccgccattccaactaat

SEQ ID NO: 3864001 - DNA, 25 bp, Homo sapien
gagcttcctcacgactctgatgctg

SEQ ID NO: 3864002 - DNA, 25 bp, Homo sapien
cgactctgatgctggtgcgcatggt

SEQ ID NO: 3864003 - DNA, 25 bp, Homo sapien
gtgcgcatggttgaggagttctcat

SEQ ID NO: 3864004 - DNA, 25 bp, Homo sapien
ggttgaggagttctcattcctgtag

SEQ ID NO: 3864005 - DNA, 25 bp, Homo sapien
gaggaagtactggttatgatcggaa

SEQ ID NO: 3864006 - DNA, 25 bp, Homo sapien
atcggaaatccagaggcggcacagg

SEQ ID NO: 3864007 - DNA, 25 bp, Homo sapien
ttatgatcggaaatccagaggcggc

SEQ ID NO: 3864008 - DNA, 25 bp, Homo sapien
tgatcggaaatccagaggcggcaca

SEQ ID NO: 3864009 - DNA, 25 bp, Homo sapien
ctgtaggaaaaactgctttctgaat

SEQ ID NO: 3864010 - DNA, 25 bp, Homo sapien
ggaaaaactgctttctgaatgtgta

SEQ ID NO: 3864011 - DNA, 25 bp, Homo sapien
taggaaaaactgctttctgaatgtg

SEQ ID NO: 3864012 - DNA, 25 bp, Homo sapien
gaaaaactgctttctgaatgtgtat

SEQ ID NO: 3864013 - DNA, 25 bp, Homo sapien
ccatggtggtgtactcattgcacat

SEQ ID NO: 3864014 - DNA, 25 bp, Homo sapien
tccatggtggtgtactcattgcaca

SEQ ID NO: 3864015 - DNA, 25 bp, Homo sapien
atggtggtgtactcattgcacatgt

SEQ ID NO: 3864016 - DNA, 25 bp, Homo sapien
catggtggtgtactcattgcacatg

SEQ ID NO: 3864017 - DNA, 25 bp, Homo sapien
gggcagggcagcagatctgggaggt

SEQ ID NO: 3864018 - DNA, 25 bp, Homo sapien
tcagagctttagtctgcagggcagg

SEQ ID NO: 3864019 - DNA, 25 bp, Homo sapien
gcagcagatctgggaggtgatgaca

SEQ ID NO: 3864020 - DNA, 25 bp, Homo sapien
tgatgacactgatggggaacactgg

SEQ ID NO: 3864021 - DNA, 25 bp, Homo sapien
accagctgcacctcacactggacac

SEQ ID NO: 3864022 - DNA, 25 bp, Homo sapien
ctccaccagctgcacctcacactgg

SEQ ID NO: 3864023 - DNA, 25 bp, Homo sapien
caaggcctcccgcagactccaccag

SEQ ID NO: 3864024 - DNA, 25 bp, Homo sapien
aaggcctcccgcagactccaccagc

SEQ ID NO: 3864025 - DNA, 25 bp, Homo sapien
gcacaggagagtctaagggaccccc

SEQ ID NO: 3864026 - DNA, 25 bp, Homo sapien
caggagagtctaagggaccccccag

SEQ ID NO: 3864027 - DNA, 25 bp, Homo sapien
agagtctaagggaccccccaggctg

SEQ ID NO: 3864028 - DNA, 25 bp, Homo sapien
ctgcacaggagagtctaagggaccc

SEQ ID NO: 3864029 - DNA, 25 bp, Homo sapien
ccaggcgttactgcaagtgaatcca

SEQ ID NO: 3864030 - DNA, 25 bp, Homo sapien
ggcgttactgcaagtgaatccagag

SEQ ID NO: 3864031 - DNA, 25 bp, Homo sapien
caggcgttactgcaagtgaatccag

SEQ ID NO: 3864032 - DNA, 25 bp, Homo sapien
gcgttactgcaagtgaatccagagg

SEQ ID NO: 3864033 - DNA, 25 bp, Homo sapien
ggtgcagcgtagtctgttgtcccac

SEQ ID NO: 3864034 - DNA, 25 bp, Homo sapien
tgcagcgtagtctgttgtcccacca

SEQ ID NO: 3864035 - DNA, 25 bp, Homo sapien
gcagcgtagtctgttgtcccaccat

SEQ ID NO: 3864036 - DNA, 25 bp, Homo sapien
gtgcagcgtagtctgttgtcccacc

SEQ ID NO: 3864037 - DNA, 25 bp, Homo sapien
gaggtttgtgtctgggctcacaccg

SEQ ID NO: 3864038 - DNA, 25 bp, Homo sapien
tgggtcccgagcgccccctggtagc

SEQ ID NO: 3864039 - DNA, 25 bp, Homo sapien
tgcgcgcccctgcagggaggtttgt

SEQ ID NO: 3864040 - DNA, 25 bp, Homo sapien
ggtttgtgtctgggctcacaccgac

SEQ ID NO: 3864041 - DNA, 25 bp, Homo sapien
ttgcctccaccctagccttgccagc

SEQ ID NO: 3864042 - DNA, 25 bp, Homo sapien
acctgcttgcctccaccctagcctt

SEQ ID NO: 3864043 - DNA, 25 bp, Homo sapien
tgcttgcctccaccctagccttgcc

SEQ ID NO: 3864044 - DNA, 25 bp, Homo sapien
gaacctgcttgcctccaccctagcc

SEQ ID NO: 3864045 - DNA, 25 bp, Homo sapien
aatgccgtccgagggtgaaggtgaa

SEQ ID NO: 3864046 - DNA, 25 bp, Homo sapien
tgcagtcccgcgagtaatgccgtcc

SEQ ID NO: 3864047 - DNA, 25 bp, Homo sapien
gagaccacagcaaaggcagggacat

SEQ ID NO: 3864048 - DNA, 25 bp, Homo sapien
ccaggacagcggctgagttcatggc

SEQ ID NO: 3864049 - DNA, 25 bp, Homo sapien
ttgagtccatcatcgcaggacttgg

SEQ ID NO: 3864050 - DNA, 25 bp, Homo sapien
ggtgttgagtccatcatcgcaggac

SEQ ID NO: 3864051 - DNA, 25 bp, Homo sapien
gaaggtgttgagtccatcatcgcag

SEQ ID NO: 3864052 - DNA, 25 bp, Homo sapien
cggaaggtgttgagtccatcatcgc

SEQ ID NO: 3864053 - DNA, 25 bp, Homo sapien
caggctgggtatgcggtttggcagg

SEQ ID NO: 3864054 - DNA, 25 bp, Homo sapien
gcaggctgggtatgcggtttggcag

SEQ ID NO: 3864055 - DNA, 25 bp, Homo sapien
gctgaaggtcgcatctgagaggtca

SEQ ID NO: 3864056 - DNA, 25 bp, Homo sapien
tcagaggttgagtgtcgcttagaag

SEQ ID NO: 3864057 - DNA, 25 bp, Homo sapien
agtgtcgcttagaaggagcgtcagc

SEQ ID NO: 3864058 - DNA, 25 bp, Homo sapien
tgaaggtcgcatctgagaggtcaga

SEQ ID NO: 3864059 - DNA, 25 bp, Homo sapien
gaaccatgatgccacatgcgttctc

SEQ ID NO: 3864060 - DNA, 25 bp, Homo sapien
tgcacttggaaccatgatgccacat

SEQ ID NO: 3864061 - DNA, 25 bp, Homo sapien
gcagtctgtgcacttggaaccatga

SEQ ID NO: 3864062 - DNA, 25 bp, Homo sapien
tctgtgcacttggaaccatgatgcc

SEQ ID NO: 3864063 - DNA, 25 bp, Homo sapien
catcatgtggatcctgagctgtgag

SEQ ID NO: 3864064 - DNA, 25 bp, Homo sapien
aaccagacaaagaggtcccgtggct

SEQ ID NO: 3864065 - DNA, 25 bp, Homo sapien
ggcaggagctccatctcccatcaga

SEQ ID NO: 3864066 - DNA, 25 bp, Homo sapien
tcccatcagaccaagagctcctctc

SEQ ID NO: 3864067 - DNA, 25 bp, Homo sapien
ctccttgctcagcgagagcgagcgc

SEQ ID NO: 3864068 - DNA, 25 bp, Homo sapien
cttgctcagcgagagcgagcgcgcc

SEQ ID NO: 3864069 - DNA, 25 bp, Homo sapien
tccttgctcagcgagagcgagcgcg

SEQ ID NO: 3864070 - DNA, 25 bp, Homo sapien
ccttgctcagcgagagcgagcgcgc

SEQ ID NO: 3864071 - DNA, 25 bp, Homo sapien
agatgtccacgaggcaggagccgac

SEQ ID NO: 3864072 - DNA, 25 bp, Homo sapien
tccacgaggcaggagccgacgcaga

SEQ ID NO: 3864073 - DNA, 25 bp, Homo sapien
agccgacgcagacgggcgccgcctt

SEQ ID NO: 3864074 - DNA, 25 bp, Homo sapien
ctgtagatgtccacgaggcaggagc

SEQ ID NO: 3864075 - DNA, 25 bp, Homo sapien
aagtcagcggtggtcagccggaaca

SEQ ID NO: 3864076 - DNA, 25 bp, Homo sapien
gatattcacagaagtcagcggtggt

SEQ ID NO: 3864077 - DNA, 25 bp, Homo sapien
cggaacacgtgcctcctcttggtct

SEQ ID NO: 3864078 - DNA, 25 bp, Homo sapien
ggtggtcagccggaacacgtgcctc

SEQ ID NO: 3864079 - DNA, 25 bp, Homo sapien
tcggccctgctgttctcccggatcg

SEQ ID NO: 3864080 - DNA, 25 bp, Homo sapien
ggccctgctgttctcccggatcgct

SEQ ID NO: 3864081 - DNA, 25 bp, Homo sapien
cctcggccctgctgttctcccggat

SEQ ID NO: 3864082 - DNA, 25 bp, Homo sapien
cgccctcggccctgctgttctcccg

SEQ ID NO: 3864083 - DNA, 25 bp, Homo sapien
acaataatccctgtcatcattaggg

SEQ ID NO: 3864084 - DNA, 25 bp, Homo sapien
cctgtcatcattagggtcaggatgg

SEQ ID NO: 3864085 - DNA, 25 bp, Homo sapien
aatccctgtcatcattagggtcagg

SEQ ID NO: 3864086 - DNA, 25 bp, Homo sapien
tcatcattagggtcaggatggtgac

SEQ ID NO: 3864087 - DNA, 25 bp, Homo sapien
gatcagagcttggttggcacagccg

SEQ ID NO: 3864088 - DNA, 25 bp, Homo sapien
ctcactttgcgataatcattaagct

SEQ ID NO: 3864089 - DNA, 25 bp, Homo sapien
ttgctgatcagagcttggttggcac

SEQ ID NO: 3864090 - DNA, 25 bp, Homo sapien
tcactttgcgataatcattaagctt

SEQ ID NO: 3864091 - DNA, 25 bp, Homo sapien
ttgaggaactcagacttgaggcccc

SEQ ID NO: 3864092 - DNA, 25 bp, Homo sapien
cctgaggccacgtgccgcactctgc

SEQ ID NO: 3864093 - DNA, 25 bp, Homo sapien
gaggccacgtgccgcactctgcttg

SEQ ID NO: 3864094 - DNA, 25 bp, Homo sapien
ccccaggccgcgagagcctttgggg

SEQ ID NO: 3864095 - DNA, 25 bp, Homo sapien
aaatgcccttgggacagccttctta

SEQ ID NO: 3864096 - DNA, 25 bp, Homo sapien
ctgaccccaaatgcccttgggacag

SEQ ID NO: 3864097 - DNA, 25 bp, Homo sapien
tgaccccaaatgcccttgggacagc

SEQ ID NO: 3864098 - DNA, 25 bp, Homo sapien
tgcccttgggacagccttcttattt

SEQ ID NO: 3864099 - DNA, 25 bp, Homo sapien
ttgagctgctcctgtaggctggaca

SEQ ID NO: 3864100 - DNA, 25 bp, Homo sapien
agcttttggaagaaggacttgagca

SEQ ID NO: 3864101 - DNA, 25 bp, Homo sapien
aggacttgagcaggctgttgatcac

SEQ ID NO: 3864102 - DNA, 25 bp, Homo sapien
tgaaaagaggctcgggcagcttttg

SEQ ID NO: 3864103 - DNA, 25 bp, Homo sapien
gctgttgatcacattgaggtcttgc

SEQ ID NO: 3864104 - DNA, 25 bp, Homo sapien
gttggcctcgatgaagtcattgtat

SEQ ID NO: 3864105 - DNA, 25 bp, Homo sapien
tcccgcgcgtcctcaatgcagttgg

SEQ ID NO: 3864106 - DNA, 25 bp, Homo sapien
aatgcagttggcctcgatgaagtca

SEQ ID NO: 3864107 - DNA, 25 bp, Homo sapien
agcttccgcagcgtcctcatccgct

SEQ ID NO: 3864108 - DNA, 25 bp, Homo sapien
cacaaggaatttgagcgtttcataa

SEQ ID NO: 3864109 - DNA, 25 bp, Homo sapien
tctcagagtggtcagcgatggtctt

SEQ ID NO: 3864110 - DNA, 25 bp, Homo sapien
gtcagcgatggtcttgagatggccc

SEQ ID NO: 3864111 - DNA, 25 bp, Homo sapien
taatagtgtcctgggagatcccgga

SEQ ID NO: 3864112 - DNA, 25 bp, Homo sapien
agtgtccgcccaaagaccagggcca

SEQ ID NO: 3864113 - DNA, 25 bp, Homo sapien
gtcatgttgtcctcagacgtcctca

SEQ ID NO: 3864114 - DNA, 25 bp, Homo sapien
tctccacgatcttgtagaggtcagg

SEQ ID NO: 3864115 - DNA, 25 bp, Homo sapien
tcagtgtctccacgatcttgtagag

SEQ ID NO: 3864116 - DNA, 25 bp, Homo sapien
cctcttcgtcactgaagaaccagtc

SEQ ID NO: 3864117 - DNA, 25 bp, Homo sapien
cttgtcctcttcgtcactgaagaac

SEQ ID NO: 3864118 - DNA, 25 bp, Homo sapien
ctcccttgtcctcttcgtcactgaa

SEQ ID NO: 3864119 - DNA, 25 bp, Homo sapien
cttcgtcactgaagaaccagtctga

SEQ ID NO: 3864120 - DNA, 25 bp, Homo sapien
aggggtcaactggcatgccctcgga

SEQ ID NO: 3864121 - DNA, 25 bp, Homo sapien
caggaggaggggtcaactggcatgc

SEQ ID NO: 3864122 - DNA, 25 bp, Homo sapien
aggaggggtcaactggcatgccctc

SEQ ID NO: 3864123 - DNA, 25 bp, Homo sapien
ggtcaactggcatgccctcggatgc

SEQ ID NO: 3864124 - DNA, 25 bp, Homo sapien
tgttgggcaggaggtactcaatgtt

SEQ ID NO: 3864125 - DNA, 25 bp, Homo sapien
ccaatgttgggcaggaggtactcaa

SEQ ID NO: 3864126 - DNA, 25 bp, Homo sapien
tgccaatgttgggcaggaggtactc

SEQ ID NO: 3864127 - DNA, 25 bp, Homo sapien
aatgttgggcaggaggtactcaatg

SEQ ID NO: 3864128 - DNA, 25 bp, Homo sapien
ggacttgactgaactataggtggta

SEQ ID NO: 3864129 - DNA, 25 bp, Homo sapien
acttgactgaactataggtggtaga

SEQ ID NO: 3864130 - DNA, 25 bp, Homo sapien
ttgactgaactataggtggtagaat

SEQ ID NO: 3864131 - DNA, 25 bp, Homo sapien
cttggacttgactgaactataggtg

SEQ ID NO: 3864132 - DNA, 25 bp, Homo sapien
ccttcagaattgcctttgtacgtac

SEQ ID NO: 3864133 - DNA, 25 bp, Homo sapien
tcaagccttcagaattgcctttgta

SEQ ID NO: 3864134 - DNA, 25 bp, Homo sapien
gccttcagaattgcctttgtacgta

SEQ ID NO: 3864135 - DNA, 25 bp, Homo sapien
aagccttcagaattgcctttgtacg

SEQ ID NO: 3864136 - DNA, 25 bp, Homo sapien
ggagcttggatgcctgcacacttgg

SEQ ID NO: 3864137 - DNA, 25 bp, Homo sapien
gagcttggatgcctgcacacttggt

SEQ ID NO: 3864138 - DNA, 25 bp, Homo sapien
agcttggatgcctgcacacttggtc

SEQ ID NO: 3864139 - DNA, 25 bp, Homo sapien
agatgcctatccaggatgcactccc

SEQ ID NO: 3864140 - DNA, 25 bp, Homo sapien
tatccaggatgcactccctgtgagg

SEQ ID NO: 3864141 - DNA, 25 bp, Homo sapien
attcagccgccagatgcctatccag

SEQ ID NO: 3864142 - DNA, 25 bp, Homo sapien
actcattcagccgccagatgcctat

SEQ ID NO: 3864143 - DNA, 25 bp, Homo sapien
gccagtccccagcttgcccgtagcc

SEQ ID NO: 3864144 - DNA, 25 bp, Homo sapien
agccagtccccagcttgcccgtagc

SEQ ID NO: 3864145 - DNA, 25 bp, Homo sapien
cagtccccagcttgcccgtagccca

SEQ ID NO: 3864146 - DNA, 25 bp, Homo sapien
agtccccagcttgcccgtagcccat

SEQ ID NO: 3864147 - DNA, 25 bp, Homo sapien
aaggtagtgaccgtgtcctggagcc

SEQ ID NO: 3864148 - DNA, 25 bp, Homo sapien
atccctgaaggtagtgaccgtgtcc

SEQ ID NO: 3864149 - DNA, 25 bp, Homo sapien
tcacttccatccctgaaggtagtga

SEQ ID NO: 3864150 - DNA, 25 bp, Homo sapien
catgttaccgaatctcttctccccc

SEQ ID NO: 3864151 - DNA, 25 bp, Homo sapien
tcccaggaaacgatgagacatagtt

SEQ ID NO: 3864152 - DNA, 25 bp, Homo sapien
ggtccccgaggcctgaccatccagc

SEQ ID NO: 3864153 - DNA, 25 bp, Homo sapien
gtgaccctggtgagatgtctgaagg

SEQ ID NO: 3864154 - DNA, 25 bp, Homo sapien
cttcagtcatcctcttggtgatttg

SEQ ID NO: 3864155 - DNA, 25 bp, Homo sapien
agccacccgcacagaccactggtga

SEQ ID NO: 3864156 - DNA, 25 bp, Homo sapien
gacactgagcagatgcctttgcctc

SEQ ID NO: 3864157 - DNA, 25 bp, Homo sapien
cactgagcagatgcctttgcctcat

SEQ ID NO: 3864158 - DNA, 25 bp, Homo sapien
acgacactgagcagatgcctttgcc

SEQ ID NO: 3864159 - DNA, 25 bp, Homo sapien
cactacgacactgagcagatgcctt

SEQ ID NO: 3864160 - DNA, 25 bp, Homo sapien
tttgattagcatggagacaatctgg

SEQ ID NO: 3864161 - DNA, 25 bp, Homo sapien
ttagcatggagacaatctggatcat

SEQ ID NO: 3864162 - DNA, 25 bp, Homo sapien
gcatggagacaatctggatcatttc

SEQ ID NO: 3864163 - DNA, 25 bp, Homo sapien
ccatatttgattagcatggagacaa

SEQ ID NO: 3864164 - DNA, 25 bp, Homo sapien
tgctgccaccaaaaaagtgatcctt

SEQ ID NO: 3864165 - DNA, 25 bp, Homo sapien
tgccaccaaaaaagtgatccttcag

SEQ ID NO: 3864166 - DNA, 25 bp, Homo sapien
gaggagctgtgttctcagcaacttc

SEQ ID NO: 3864167 - DNA, 25 bp, Homo sapien
tgaggagctgtgttctcagcaactt

SEQ ID NO: 3864168 - DNA, 25 bp, Homo sapien
gcctgtcgcacacagtgaatatcgt

SEQ ID NO: 3864169 - DNA, 25 bp, Homo sapien
gagctttgcgggacaccttcactga

SEQ ID NO: 3864170 - DNA, 25 bp, Homo sapien
cagtgaatatcgtagctggtgaagg

SEQ ID NO: 3864171 - DNA, 25 bp, Homo sapien
aaggtgtatccagagctttgcggga

SEQ ID NO: 3864172 - DNA, 25 bp, Homo sapien
gggcacagatgtggggtggctcctc

SEQ ID NO: 3864173 - DNA, 25 bp, Homo sapien
tgaggaagggcacagatgtggggtg

SEQ ID NO: 3864174 - DNA, 25 bp, Homo sapien
acagatgtggggtggctcctcacca

SEQ ID NO: 3864175 - DNA, 25 bp, Homo sapien
gaggaagggcacagatgtggggtgg

SEQ ID NO: 3864176 - DNA, 25 bp, Homo sapien
cacggggaacctggatattgagagt

SEQ ID NO: 3864177 - DNA, 25 bp, Homo sapien
ccacggggaacctggatattgagag

SEQ ID NO: 3864178 - DNA, 25 bp, Homo sapien
tggttttgagtaacccatggtgtcc

SEQ ID NO: 3864179 - DNA, 25 bp, Homo sapien
tggttttgagtgcccccttgtgttc

SEQ ID NO: 3864180 - DNA, 25 bp, Homo sapien
ttttgagtaacccatggtgtcctga

SEQ ID NO: 3864181 - DNA, 25 bp, Homo sapien
ccctggtggttttgagtaacccatg

SEQ ID NO: 3864182 - DNA, 25 bp, Homo sapien
ccgctgttttcctgaggctccgcac

SEQ ID NO: 3864183 - DNA, 25 bp, Homo sapien
ccagtgtcctgagtgccccctggtg

SEQ ID NO: 3864184 - DNA, 25 bp, Homo sapien
cccagtgtcctgagtgccccctggt

SEQ ID NO: 3864185 - DNA, 25 bp, Homo sapien
agtgccccctggtggttctgagcac

SEQ ID NO: 3864186 - DNA, 25 bp, Homo sapien
ctgagtgccccctggtggttctgag

SEQ ID NO: 3864187 - DNA, 25 bp, Homo sapien
ccaatgttgctctcccagaatgaaa

SEQ ID NO: 3864188 - DNA, 25 bp, Homo sapien
agggctgacgtctgtgttgagtggg

SEQ ID NO: 3864189 - DNA, 25 bp, Homo sapien
cagggctgacgtctgtgttgagtgg

SEQ ID NO: 3864190 - DNA, 25 bp, Homo sapien
taatatagcaacaaggaaaacccag

SEQ ID NO: 3864191 - DNA, 25 bp, Homo sapien
tagcaacaaggaaaacccagctcag

SEQ ID NO: 3864192 - DNA, 25 bp, Homo sapien
atatagcaacaaggaaaacccagct

SEQ ID NO: 3864193 - DNA, 25 bp, Homo sapien
ttaatatagcaacaaggaaaaccca

SEQ ID NO: 3864194 - DNA, 25 bp, Homo sapien
cccagtgcatagcatagctactgaa

SEQ ID NO: 3864195 - DNA, 25 bp, Homo sapien
gcccttcacggagtctgcatagtat

SEQ ID NO: 3864196 - DNA, 25 bp, Homo sapien
ggcccttcacggagtctgcatagta

SEQ ID NO: 3864197 - DNA, 25 bp, Homo sapien
acccagtgcatagcatagctactga

SEQ ID NO: 3864198 - DNA, 25 bp, Homo sapien
tctgtggtactttgcacagcacagg

SEQ ID NO: 3864199 - DNA, 25 bp, Homo sapien
tcttcactactgttggccacttgca

SEQ ID NO: 3864200 - DNA, 25 bp, Homo sapien
tctccacatgacacactggagggtg

SEQ ID NO: 3864201 - DNA, 25 bp, Homo sapien
gcattcccaggtgagtctccacatg

SEQ ID NO: 3864202 - DNA, 25 bp, Homo sapien
gctcttcaggtccagggctgactcc

SEQ ID NO: 3864203 - DNA, 25 bp, Homo sapien
ccagtagtaaggactggttgtgatg

SEQ ID NO: 3864204 - DNA, 25 bp, Homo sapien
gactggttgtgatggagtggccaga

SEQ ID NO: 3864205 - DNA, 25 bp, Homo sapien
ctcttcaggtccagggctgactcct

SEQ ID NO: 3864206 - DNA, 25 bp, Homo sapien
cagtattgttgaaatggctggccac

SEQ ID NO: 3864207 - DNA, 25 bp, Homo sapien
gtattgttgaaatggctggccaccc

SEQ ID NO: 3864208 - DNA, 25 bp, Homo sapien
tattgttgaaatggctggccacccc

SEQ ID NO: 3864209 - DNA, 25 bp, Homo sapien
ctaatcattcccagtattgttgaaa

SEQ ID NO: 3864210 - DNA, 25 bp, Homo sapien
agaagaggatcttgcaggtccagcc

SEQ ID NO: 3864211 - DNA, 25 bp, Homo sapien
caagaagaggatcttgcaggtccag

SEQ ID NO: 3864212 - DNA, 25 bp, Homo sapien
caccaagaagaggatcttgcaggtc

SEQ ID NO: 3864213 - DNA, 25 bp, Homo sapien
aagaggatcttgcaggtccagccca

SEQ ID NO: 3864214 - DNA, 25 bp, Homo sapien
actcaatcccctcctcattactggg

SEQ ID NO: 3864215 - DNA, 25 bp, Homo sapien
cctcctcattactgggacctgggaa

SEQ ID NO: 3864216 - DNA, 25 bp, Homo sapien
aaagcccccttgactggactcaatc

SEQ ID NO: 3864217 - DNA, 25 bp, Homo sapien
aggacacaggatggatgaaagcccc

SEQ ID NO: 3864218 - DNA, 25 bp, Homo sapien
tgcaagtagcagtaggtgaaggtgt

SEQ ID NO: 3864219 - DNA, 25 bp, Homo sapien
aagtagcagtaggtgaaggtgtatc

SEQ ID NO: 3864220 - DNA, 25 bp, Homo sapien
agtgcaagtagcagtaggtgaaggt

SEQ ID NO: 3864221 - DNA, 25 bp, Homo sapien
caagtagcagtaggtgaaggtgtat

SEQ ID NO: 3864222 - DNA, 25 bp, Homo sapien
taaaatcctgtccactcaagccctt

SEQ ID NO: 3864223 - DNA, 25 bp, Homo sapien
ctaaaatcctgtccactcaagccct

SEQ ID NO: 3864224 - DNA, 25 bp, Homo sapien
tcagactccaccagtgaacttcaca

SEQ ID NO: 3864225 - DNA, 25 bp, Homo sapien
actccaccagtgaacttcacatagg

SEQ ID NO: 3864226 - DNA, 25 bp, Homo sapien
cagactccaccagtgaacttcacat

SEQ ID NO: 3864227 - DNA, 25 bp, Homo sapien
caccagtgaacttcacataggactt

SEQ ID NO: 3864228 - DNA, 25 bp, Homo sapien
acgatatgtgggagacatttattaa

SEQ ID NO: 3864229 - DNA, 25 bp, Homo sapien
tagcagctgtgttcaatgctgaatc

SEQ ID NO: 3864230 - DNA, 25 bp, Homo sapien
gctgaatcccccttcacgatatgtg

SEQ ID NO: 3864231 - DNA, 25 bp, Homo sapien
tattaaatcttgtgtccttcaggca

SEQ ID NO: 3864232 - DNA, 25 bp, Homo sapien
ctggaggagactgctcccctgagac

SEQ ID NO: 3864233 - DNA, 25 bp, Homo sapien
acagctccagggcgatgtgggacat

SEQ ID NO: 3864234 - DNA, 25 bp, Homo sapien
ctgtgtctgtgcctctaaacactgg

SEQ ID NO: 3864235 - DNA, 25 bp, Homo sapien
tgtgcctctaaacactggaggagac

SEQ ID NO: 3864236 - DNA, 25 bp, Homo sapien
caatgtctctagttcgccataaatc

SEQ ID NO: 3864237 - DNA, 25 bp, Homo sapien
tctcaatgtctctagttcgccataa

SEQ ID NO: 3864238 - DNA, 25 bp, Homo sapien
tcctctcaatgtctctagttcgcca

SEQ ID NO: 3864239 - DNA, 25 bp, Homo sapien
gtcctctcaatgtctctagttcgcc

SEQ ID NO: 3864240 - DNA, 25 bp, Homo sapien
ggcgaacccagctcgtgtagtggtt

SEQ ID NO: 3864241 - DNA, 25 bp, Homo sapien
cctggcgaacccagctcgtgtagtg

SEQ ID NO: 3864242 - DNA, 25 bp, Homo sapien
aacccagctcgtgtagtggttactg

SEQ ID NO: 3864243 - DNA, 25 bp, Homo sapien
gcgaacccagctcgtgtagtggtta

SEQ ID NO: 3864244 - DNA, 25 bp, Homo sapien
gtgtaaccactattaccactaatgt

SEQ ID NO: 3864245 - DNA, 25 bp, Homo sapien
gtagtttgtgtaaccactattacca

SEQ ID NO: 3864246 - DNA, 25 bp, Homo sapien
cactattaccactaatgtatgaaac

SEQ ID NO: 3864247 - DNA, 25 bp, Homo sapien
ctgcgtagtttgtgtaaccactatt

SEQ ID NO: 3864248 - DNA, 25 bp, Homo sapien
ttgcagatacagtgagttcttggcg

SEQ ID NO: 3864249 - DNA, 25 bp, Homo sapien
atacagtgagttcttggcgttgtcc

SEQ ID NO: 3864250 - DNA, 25 bp, Homo sapien
cagtgagttcttggcgttgtccctg

SEQ ID NO: 3864251 - DNA, 25 bp, Homo sapien
cagatacagtgagttcttggcgttg

SEQ ID NO: 3864252 - DNA, 25 bp, Homo sapien
tccggacaccagggtccctcagaac

SEQ ID NO: 3864253 - DNA, 25 bp, Homo sapien
acaaggaggcgctccggacaccagg

SEQ ID NO: 3864254 - DNA, 25 bp, Homo sapien
aggaaacaaggaggcgctccggaca

SEQ ID NO: 3864255 - DNA, 25 bp, Homo sapien
tcaggaaacaaggaggcgctccgga

SEQ ID NO: 3864256 - DNA, 25 bp, Homo sapien
gaggccacccgagcaggtgtaaact

SEQ ID NO: 3864257 - DNA, 25 bp, Homo sapien
ggcctgcactgtgggagatccaagc

SEQ ID NO: 3864258 - DNA, 25 bp, Homo sapien
tgttaccaggttgtttgtgtggatg

SEQ ID NO: 3864259 - DNA, 25 bp, Homo sapien
caggacaactgttaccaggttgttt

SEQ ID NO: 3864260 - DNA, 25 bp, Homo sapien
cagctttgtcctggagttggtttag

SEQ ID NO: 3864261 - DNA, 25 bp, Homo sapien
tggtttagggagcaatcaggacctg

SEQ ID NO: 3864262 - DNA, 25 bp, Homo sapien
tattttcaggcgagtgctggagtgc

SEQ ID NO: 3864263 - DNA, 25 bp, Homo sapien
tgtgctccttattacggaaagcggg

SEQ ID NO: 3864264 - DNA, 25 bp, Homo sapien
tgccctggtgcctctatgatactgg

SEQ ID NO: 3864265 - DNA, 25 bp, Homo sapien
caatggaacttagaagaagacctct

SEQ ID NO: 3864266 - DNA, 25 bp, Homo sapien
cagatttgctgacttgaactgcaga

SEQ ID NO: 3864267 - DNA, 25 bp, Homo sapien
tactggttttagtggctttccctgc

SEQ ID NO: 3864268 - DNA, 25 bp, Homo sapien
gagacttcagatcctccagtgatac

SEQ ID NO: 3864269 - DNA, 25 bp, Homo sapien
tgtgtccaccagagacttcagatcc

SEQ ID NO: 3864270 - DNA, 25 bp, Homo sapien
catttacttttgcagtggacttcat

SEQ ID NO: 3864271 - DNA, 25 bp, Homo sapien
tctcaaagctacatttgacatttac

SEQ ID NO: 3864272 - DNA, 25 bp, Homo sapien
ggttgcaggcacccggcagtcgctc

SEQ ID NO: 3864273 - DNA, 25 bp, Homo sapien
gagccgcacctctgggcgccctgag

SEQ ID NO: 3864274 - DNA, 25 bp, Homo sapien
gaggagccgcacctctgggcgccct

SEQ ID NO: 3864275 - DNA, 25 bp, Homo sapien
gggaggagccgcacctctgggcgcc

SEQ ID NO: 3864276 - DNA, 25 bp, Homo sapien
ctagatgcgcagccagtaaaagtgg

SEQ ID NO: 3864277 - DNA, 25 bp, Homo sapien
gccagtaaaagtggttgacattcaa

SEQ ID NO: 3864278 - DNA, 25 bp, Homo sapien
gatgcgcagccagtaaaagtggttg

SEQ ID NO: 3864279 - DNA, 25 bp, Homo sapien
ccagtaaaagtggttgacattcaat

SEQ ID NO: 3864280 - DNA, 25 bp, Homo sapien
cttcaaggctggttgtttctgagaa

SEQ ID NO: 3864281 - DNA, 25 bp, Homo sapien
aaggctggttgtttctgagaacaca

SEQ ID NO: 3864282 - DNA, 25 bp, Homo sapien
caaggctggttgtttctgagaacac

SEQ ID NO: 3864283 - DNA, 25 bp, Homo sapien
tcaaggctggttgtttctgagaaca

SEQ ID NO: 3864284 - DNA, 25 bp, Homo sapien
tgtggctatattcgaaacagaatct

SEQ ID NO: 3864285 - DNA, 25 bp, Homo sapien
ttatttctgtggctatattcgaaac

SEQ ID NO: 3864286 - DNA, 25 bp, Homo sapien
ggctatattcgaaacagaatctttc

SEQ ID NO: 3864287 - DNA, 25 bp, Homo sapien
atttctgtggctatattcgaaacag

SEQ ID NO: 3864288 - DNA, 25 bp, Homo sapien
tgtgcaacattatccagtaggtagc

SEQ ID NO: 3864289 - DNA, 25 bp, Homo sapien
aacattatccagtaggtagcgacac

SEQ ID NO: 3864290 - DNA, 25 bp, Homo sapien
gcaacattatccagtaggtagcgac

SEQ ID NO: 3864291 - DNA, 25 bp, Homo sapien
ggctgtgcaacattatccagtaggt

SEQ ID NO: 3864292 - DNA, 25 bp, Homo sapien
cttatcaacattttggtcttcaaac

SEQ ID NO: 3864293 - DNA, 25 bp, Homo sapien
tgttttttcaatgccacatgcagca

SEQ ID NO: 3864294 - DNA, 25 bp, Homo sapien
caacattttggtcttcaaacaaggt

SEQ ID NO: 3864295 - DNA, 25 bp, Homo sapien
tctgttttttcaatgccacatgcag

SEQ ID NO: 3864296 - DNA, 25 bp, Homo sapien
tgagaatcaatgtcaaagcaggtgg

SEQ ID NO: 3864297 - DNA, 25 bp, Homo sapien
aagcaggtggtacatgatcccgcat

SEQ ID NO: 3864298 - DNA, 25 bp, Homo sapien
ctgagaatcaatgtcaaagcaggtg

SEQ ID NO: 3864299 - DNA, 25 bp, Homo sapien
tcaaagcaggtggtacatgatcccg

SEQ ID NO: 3864300 - DNA, 25 bp, Homo sapien
cttctcagctggttgtttctgagaa

SEQ ID NO: 3864301 - DNA, 25 bp, Homo sapien
tcagctggttgtttctgagaagaca

SEQ ID NO: 3864302 - DNA, 25 bp, Homo sapien
ctcagctggttgtttctgagaagac

SEQ ID NO: 3864303 - DNA, 25 bp, Homo sapien
tctcagctggttgtttctgagaaga

SEQ ID NO: 3864304 - DNA, 25 bp, Homo sapien
agtaatcgatacatgaagtaggttt

SEQ ID NO: 3864305 - DNA, 25 bp, Homo sapien
aaagtaatcgatacatgaagtaggt

SEQ ID NO: 3864306 - DNA, 25 bp, Homo sapien
caaagtaatcgatacatgaagtagg

SEQ ID NO: 3864307 - DNA, 25 bp, Homo sapien
aagtaatcgatacatgaagtaggtt

SEQ ID NO: 3864308 - DNA, 25 bp, Homo sapien
tgtggctatattcgaaacagaatct

SEQ ID NO: 3864309 - DNA, 25 bp, Homo sapien
ggctatattcgaaacagaatctttc

SEQ ID NO: 3864310 - DNA, 25 bp, Homo sapien
atttctgtggctatattcgaaacag

SEQ ID NO: 3864311 - DNA, 25 bp, Homo sapien
ttatttctgtggctatattcgaaac

SEQ ID NO: 3864312 - DNA, 25 bp, Homo sapien
cttcaaggctggtggtttctgagaa

SEQ ID NO: 3864313 - DNA, 25 bp, Homo sapien
tcaaggctggtggtttctgagaaga

SEQ ID NO: 3864314 - DNA, 25 bp, Homo sapien
aaggctggtggtttctgagaagaca

SEQ ID NO: 3864315 - DNA, 25 bp, Homo sapien
caaggctggtggtttctgagaagac

SEQ ID NO: 3864316 - DNA, 25 bp, Homo sapien
gtggctatattcgaaacagaatctt

SEQ ID NO: 3864317 - DNA, 25 bp, Homo sapien
gctatattcgaaacagaatctttct

SEQ ID NO: 3864318 - DNA, 25 bp, Homo sapien
tgtggctatattcgaaacagaatct

SEQ ID NO: 3864319 - DNA, 25 bp, Homo sapien
ggctatattcgaaacagaatctttc

SEQ ID NO: 3864320 - DNA, 25 bp, Homo sapien
ctccccgaggagtgcagccccggtg

SEQ ID NO: 3864321 - DNA, 25 bp, Homo sapien
ttctcctgctccccgaggagtgcag

SEQ ID NO: 3864322 - DNA, 25 bp, Homo sapien
tgcagccccggtgggcccaatggtt

SEQ ID NO: 3864323 - DNA, 25 bp, Homo sapien
gagtgcagccccggtgggcccaatg

SEQ ID NO: 3864324 - DNA, 25 bp, Homo sapien
ctgggaaaagaacacccaaaggctg

SEQ ID NO: 3864325 - DNA, 25 bp, Homo sapien
tgggaaaagaacacccaaaggctgc

SEQ ID NO: 3864326 - DNA, 25 bp, Homo sapien
ttttcccttgtgcacatcccctgtt

SEQ ID NO: 3864327 - DNA, 25 bp, Homo sapien
tgtgcacatcccctgtttccaagtc

SEQ ID NO: 3864328 - DNA, 25 bp, Homo sapien
ggggcccgattttcccttgtgcaca

SEQ ID NO: 3864329 - DNA, 25 bp, Homo sapien
tcttcaaagtcaccatagagctcct

SEQ ID NO: 3864330 - DNA, 25 bp, Homo sapien
tggcactttcttctttgtcggggtc

SEQ ID NO: 3864331 - DNA, 25 bp, Homo sapien
gcactttcttctttgtcggggtcaa

SEQ ID NO: 3864332 - DNA, 25 bp, Homo sapien
ttttctcttcttatccaaatgcttt

SEQ ID NO: 3864333 - DNA, 25 bp, Homo sapien
tctcttcttatccaaatgctttttc

SEQ ID NO: 3864334 - DNA, 25 bp, Homo sapien
tcatcaaaatatgtgctttctcctt

SEQ ID NO: 3864335 - DNA, 25 bp, Homo sapien
gcatttctcctttaagatcatcaaa

SEQ ID NO: 3864336 - DNA, 25 bp, Homo sapien
gcttgtttctgcatttctcctttaa

SEQ ID NO: 3864337 - DNA, 25 bp, Homo sapien
gtttctgcatttctcctttaagatc

SEQ ID NO: 3864338 - DNA, 25 bp, Homo sapien
tcccaggtcgaaaacactcataagg

SEQ ID NO: 3864339 - DNA, 25 bp, Homo sapien
tatgattggatctcgggacttgagg

SEQ ID NO: 3864340 - DNA, 25 bp, Homo sapien
aggattttcttataccagcgatgtt

SEQ ID NO: 3864341 - DNA, 25 bp, Homo sapien
taccagcgatgtttcttcagacgca

SEQ ID NO: 3864342 - DNA, 25 bp, Homo sapien
aaatatgattggatctcgggacttg

SEQ ID NO: 3864343 - DNA, 25 bp, Homo sapien
ggctgctccgcaatgcatgtgttgt

SEQ ID NO: 3864344 - DNA, 25 bp, Homo sapien
aaaggctgctccgcaatgcatgtgt

SEQ ID NO: 3864345 - DNA, 25 bp, Homo sapien
tgctccgcaatgcatgtgttgtggg

SEQ ID NO: 3864346 - DNA, 25 bp, Homo sapien
gctgctccgcaatgcatgtgttgtg

SEQ ID NO: 3864347 - DNA, 25 bp, Homo sapien
actgtattgccaagaaaccagttcc

SEQ ID NO: 3864348 - DNA, 25 bp, Homo sapien
gccactgacagactgtattgccaag

SEQ ID NO: 3864349 - DNA, 25 bp, Homo sapien
gacagactgtattgccaagaaacca

SEQ ID NO: 3864350 - DNA, 25 bp, Homo sapien
ttatgccactgacagactgtattgc

SEQ ID NO: 3864351 - DNA, 25 bp, Homo sapien
ttatggatttatccagatcaaggac

SEQ ID NO: 3864352 - DNA, 25 bp, Homo sapien
tttatggatttatccagatcaagga

SEQ ID NO: 3864353 - DNA, 25 bp, Homo sapien
tatggatttatccagatcaaggaca

SEQ ID NO: 3864354 - DNA, 25 bp, Homo sapien
ttttatggatttatccagatcaagg

SEQ ID NO: 3864355 - DNA, 25 bp, Homo sapien
caaatttggccacttccaaggcaga

SEQ ID NO: 3864356 - DNA, 25 bp, Homo sapien
tgaatcacagcaccttcaaatttgg

SEQ ID NO: 3864357 - DNA, 25 bp, Homo sapien
ttgaatcacagcaccttcaaatttg

SEQ ID NO: 3864358 - DNA, 25 bp, Homo sapien
agtttgaatcacagcaccttcaaat

SEQ ID NO: 3864359 - DNA, 25 bp, Homo sapien
cgctcatcagcagcttatcctcaaa

SEQ ID NO: 3864360 - DNA, 25 bp, Homo sapien
cttatcctcaaagctggcctggaaa

SEQ ID NO: 3864361 - DNA, 25 bp, Homo sapien
ctcatcagcagcttatcctcaaagc

SEQ ID NO: 3864362 - DNA, 25 bp, Homo sapien
agcagcttatcctcaaagctggcct

SEQ ID NO: 3864363 - DNA, 25 bp, Homo sapien
acgttcttgaccaggtgtccttctc

SEQ ID NO: 3864364 - DNA, 25 bp, Homo sapien
ggtccacgttcttgaccaggtgtcc

SEQ ID NO: 3864365 - DNA, 25 bp, Homo sapien
tccacgttcttgaccaggtgtcctt

SEQ ID NO: 3864366 - DNA, 25 bp, Homo sapien
cacgttcttgaccaggtgtccttct

SEQ ID NO: 3864367 - DNA, 25 bp, Homo sapien
tagccctggagaatctgagttgccc

SEQ ID NO: 3864368 - DNA, 25 bp, Homo sapien
ggagaatctgagttgcccaggcacc

SEQ ID NO: 3864369 - DNA, 25 bp, Homo sapien
gagaatctgagttgcccaggcacct

SEQ ID NO: 3864370 - DNA, 25 bp, Homo sapien
actggactagccctggagaatctga

SEQ ID NO: 3864371 - DNA, 25 bp, Homo sapien
aggctcacgcatgacggccagtctc

SEQ ID NO: 3864372 - DNA, 25 bp, Homo sapien
tcatgaggctcacgcatgacggcca

SEQ ID NO: 3864373 - DNA, 25 bp, Homo sapien
atgaggctcacgcatgacggccagt

SEQ ID NO: 3864374 - DNA, 25 bp, Homo sapien
gaggctcacgcatgacggccagtct

SEQ ID NO: 3864375 - DNA, 25 bp, Homo sapien
ggctctgaagtgctctttattgtgc

SEQ ID NO: 3864376 - DNA, 25 bp, Homo sapien
ctgaagtgctctttattgtgcaggt

SEQ ID NO: 3864377 - DNA, 25 bp, Homo sapien
gctctgaagtgctctttattgtgca

SEQ ID NO: 3864378 - DNA, 25 bp, Homo sapien
tctgaagtgctctttattgtgcagg

SEQ ID NO: 3864379 - DNA, 25 bp, Homo sapien
gaaactggccctcagcccccttcaa

SEQ ID NO: 3864380 - DNA, 25 bp, Homo sapien
tgaaactggccctcagcccccttca

SEQ ID NO: 3864381 - DNA, 25 bp, Homo sapien
tgcaagtgttgaggaccccaggcaa

SEQ ID NO: 3864382 - DNA, 25 bp, Homo sapien
ttgaggaccccaggcaagtgcactg

SEQ ID NO: 3864383 - DNA, 25 bp, Homo sapien
agggaactgcaagtgttgaggaccc

SEQ ID NO: 3864384 - DNA, 25 bp, Homo sapien
ccaggcaagtgcactgaggaatgaa

SEQ ID NO: 3864385 - DNA, 25 bp, Homo sapien
gccacgtccagtctgggacgctgca

SEQ ID NO: 3864386 - DNA, 25 bp, Homo sapien
ctgtgcatcccagggcgcagcgcga

SEQ ID NO: 3864387 - DNA, 25 bp, Homo sapien
gggcgcagcgcgacagtccgaggtc

SEQ ID NO: 3864388 - DNA, 25 bp, Homo sapien
cacgtccagtctgggacgctgcagg

SEQ ID NO: 3864389 - DNA, 25 bp, Homo sapien
ttaagagcccacgtgttccagtcca

SEQ ID NO: 3864390 - DNA, 25 bp, Homo sapien
ccggctgcgtcttctgcataactgc

SEQ ID NO: 3864391 - DNA, 25 bp, Homo sapien
tccagtccactatccccggctgcgt

SEQ ID NO: 3864392 - DNA, 25 bp, Homo sapien
gctgcgtcttctgcataactgccga

SEQ ID NO: 3864393 - DNA, 25 bp, Homo sapien
ggctgtgtccgggactgagtctccc

SEQ ID NO: 3864394 - DNA, 25 bp, Homo sapien
tgtctgttagaagaggcaacttggc

SEQ ID NO: 3864395 - DNA, 25 bp, Homo sapien
cattagaactggaatcagaggacag

SEQ ID NO: 3864396 - DNA, 25 bp, Homo sapien
tatggtaaccacacatggcaccacc

SEQ ID NO: 3864397 - DNA, 25 bp, Homo sapien
ggtgcctgccaacgcgcctggctaa

SEQ ID NO: 3864398 - DNA, 25 bp, Homo sapien
tacaggtgcctgccaacgcgcctgg

SEQ ID NO: 3864399 - DNA, 25 bp, Homo sapien
tgtgagccaccatgcccagcccatt

SEQ ID NO: 3864400 - DNA, 25 bp, Homo sapien
aggtgtgagccaccatgcccagccc

SEQ ID NO: 3864401 - DNA, 25 bp, Homo sapien
ttaaggattcaactgggtcatgttc

SEQ ID NO: 3864402 - DNA, 25 bp, Homo sapien
cgtccggccaagaatgcaagcattt

SEQ ID NO: 3864403 - DNA, 25 bp, Homo sapien
gaaacacaggtactgcagaagtggt

SEQ ID NO: 3864404 - DNA, 25 bp, Homo sapien
atgttgtggacatggccaactgcca

SEQ ID NO: 3864405 - DNA, 25 bp, Homo sapien
caaaatcttggagtgcccaaaatca

SEQ ID NO: 3864406 - DNA, 25 bp, Homo sapien
aaatcttggagtgcccaaaatcagt

SEQ ID NO: 3864407 - DNA, 25 bp, Homo sapien
aaaatcttggagtgcccaaaatcag

SEQ ID NO: 3864408 - DNA, 25 bp, Homo sapien
aagatccttgatttctacatgtgca

SEQ ID NO: 3864409 - DNA, 25 bp, Homo sapien
agagagaagacctcttaagtggttt

SEQ ID NO: 3864410 - DNA, 25 bp, Homo sapien
gaaagggaaatctcaattcaagtcc

SEQ ID NO: 3864411 - DNA, 25 bp, Homo sapien
tgtggcagtagcactgcacagggtt

SEQ ID NO: 3864412 - DNA, 25 bp, Homo sapien
gcccgcggcgactggggctcccacc

SEQ ID NO: 3864413 - DNA, 25 bp, Homo sapien
cccgcggcgactggggctcccacct

SEQ ID NO: 3864414 - DNA, 25 bp, Homo sapien
cgcccgcggcgactggggctcccac

SEQ ID NO: 3864415 - DNA, 25 bp, Homo sapien
cctggggtcggcttgggcgccggca

SEQ ID NO: 3864416 - DNA, 25 bp, Homo sapien
cagaaccagggtctgggtaggacca

SEQ ID NO: 3864417 - DNA, 25 bp, Homo sapien
gccaaggccctgtactaagatagca

SEQ ID NO: 3864418 - DNA, 25 bp, Homo sapien
cacggtcaggcctgcataagggcag

SEQ ID NO: 3864419 - DNA, 25 bp, Homo sapien
tcagaaatatggtagggcaagggct

SEQ ID NO: 3864420 - DNA, 25 bp, Homo sapien
tttcatctgatttcatgtcatcata

SEQ ID NO: 3864421 - DNA, 25 bp, Homo sapien
catctgatttcatgtcatcatatca

SEQ ID NO: 3864422 - DNA, 25 bp, Homo sapien
catcacatttcatctcacctcattt

SEQ ID NO: 3864423 - DNA, 25 bp, Homo sapien
gatttcatgtcatcatatcatgtca

SEQ ID NO: 3864424 - DNA, 25 bp, Homo sapien
gaggtatcttgatgaacaaggagtc

SEQ ID NO: 3864425 - DNA, 25 bp, Homo sapien
ggtatcttgatgaacaaggagtcat

SEQ ID NO: 3864426 - DNA, 25 bp, Homo sapien
aagaggtatcttgatgaacaaggag

SEQ ID NO: 3864427 - DNA, 25 bp, Homo sapien
atcttgatgaacaaggagtcattag

SEQ ID NO: 3864428 - DNA, 25 bp, Homo sapien
ggctcacagcaacctagcaaccttt

SEQ ID NO: 3864429 - DNA, 25 bp, Homo sapien
gctcacagcaacctagcaacctttg

SEQ ID NO: 3864430 - DNA, 25 bp, Homo sapien
tcacagcaacctagcaacctttgcc

SEQ ID NO: 3864431 - DNA, 25 bp, Homo sapien
cagcaacctagcaacctttgcctcc

SEQ ID NO: 3864432 - DNA, 25 bp, Homo sapien
taaaaatactaaactatacaagcaa

SEQ ID NO: 3864433 - DNA, 25 bp, Homo sapien
actatacaagcaatattaaatagta

SEQ ID NO: 3864434 - DNA, 25 bp, Homo sapien
aatgattaataacatgttgatcttt

SEQ ID NO: 3864435 - DNA, 25 bp, Homo sapien
ttaaatagtatataaacttggatta

SEQ ID NO: 3864436 - DNA, 25 bp, Homo sapien
agttgatactataagttagtactac

SEQ ID NO: 3864437 - DNA, 25 bp, Homo sapien
actataagttagtactacaatgaca

SEQ ID NO: 3864438 - DNA, 25 bp, Homo sapien
aagaaatgagttaggcaacaggcta

SEQ ID NO: 3864439 - DNA, 25 bp, Homo sapien
taaagaaatgagttaggcaacaggc

SEQ ID NO: 3864440 - DNA, 25 bp, Homo sapien
tctctccttcgctggccgaggtgag

SEQ ID NO: 3864441 - DNA, 25 bp, Homo sapien
ccttcgctggccgaggtgaggtcca

SEQ ID NO: 3864442 - DNA, 25 bp, Homo sapien
caggaccatgtagttctgacgtcca

SEQ ID NO: 3864443 - DNA, 25 bp, Homo sapien
gtgaggtccaggaccatgtagttct

SEQ ID NO: 3864444 - DNA, 25 bp, Homo sapien
gactgtgggactaacatggctatga

SEQ ID NO: 3864445 - DNA, 25 bp, Homo sapien
gactaacatggctatgatctgtcgg

SEQ ID NO: 3864446 - DNA, 25 bp, Homo sapien
catggctatgatctgtcggacagac

SEQ ID NO: 3864447 - DNA, 25 bp, Homo sapien
tatgatctgtcggacagacttcagg

SEQ ID NO: 3864448 - DNA, 25 bp, Homo sapien
tgctccatatccacggggtccgggc

SEQ ID NO: 3864449 - DNA, 25 bp, Homo sapien
catatccacggggtccgggccgcat

SEQ ID NO: 3864450 - DNA, 25 bp, Homo sapien
ctccatatccacggggtccgggccg

SEQ ID NO: 3864451 - DNA, 25 bp, Homo sapien
ctgctccatatccacggggtccggg

SEQ ID NO: 3864452 - DNA, 25 bp, Homo sapien
tgggtgggctccggcgccagcggcg

SEQ ID NO: 3864453 - DNA, 25 bp, Homo sapien
cactctggtcgtgctgcacactctg

SEQ ID NO: 3864454 - DNA, 25 bp, Homo sapien
ctctggtcgtgctgcacactctgtc

SEQ ID NO: 3864455 - DNA, 25 bp, Homo sapien
actctggtcgtgctgcacactctgt

SEQ ID NO: 3864456 - DNA, 25 bp, Homo sapien
gcagcgaggcgagccatggtgtcgc

SEQ ID NO: 3864457 - DNA, 25 bp, Homo sapien
aggcgagccatggtgtcgcaggctc

SEQ ID NO: 3864458 - DNA, 25 bp, Homo sapien
gcgaggcgagccatggtgtcgcagg

SEQ ID NO: 3864459 - DNA, 25 bp, Homo sapien
cgagccatggtgtcgcaggctctag

SEQ ID NO: 3864460 - DNA, 25 bp, Homo sapien
tgcgagttagtaaataactgtgctc

SEQ ID NO: 3864461 - DNA, 25 bp, Homo sapien
cgagttagtaaataactgtgctcct

SEQ ID NO: 3864462 - DNA, 25 bp, Homo sapien
tgtgcgagttagtaaataactgtgc

SEQ ID NO: 3864463 - DNA, 25 bp, Homo sapien
cttgtgcgagttagtaaataactgt

SEQ ID NO: 3864464 - DNA, 25 bp, Homo sapien
ggatggtgaagacgtggacagcggc

SEQ ID NO: 3864465 - DNA, 25 bp, Homo sapien
ctgttttccgagaaatgcaggctgc

SEQ ID NO: 3864466 - DNA, 25 bp, Homo sapien
tgagaaagccggctccaccaacgct

SEQ ID NO: 3864467 - DNA, 25 bp, Homo sapien
ccccaggcatgaggtgcacagagag

SEQ ID NO: 3864468 - DNA, 25 bp, Homo sapien
ttatcattccatgcaaacacactca

SEQ ID NO: 3864469 - DNA, 25 bp, Homo sapien
ccccgcagcggcgttctcatgggtg

SEQ ID NO: 3864470 - DNA, 25 bp, Homo sapien
tcatgggtggcgtcacagtggctcc

SEQ ID NO: 3864471 - DNA, 25 bp, Homo sapien
acacaagcggcggtgtcccagtggt

SEQ ID NO: 3864472 - DNA, 25 bp, Homo sapien
agatgtagagacgtgctctcaggac

SEQ ID NO: 3864473 - DNA, 25 bp, Homo sapien
gatgtagagacgtgctctcaggaca

SEQ ID NO: 3864474 - DNA, 25 bp, Homo sapien
atgtagagacgtgctctcaggacag

SEQ ID NO: 3864475 - DNA, 25 bp, Homo sapien
tggcagggaggcttgaggggcccat

SEQ ID NO: 3864476 - DNA, 25 bp, Homo sapien
gggaactggcagggaggcttgaggg

SEQ ID NO: 3864477 - DNA, 25 bp, Homo sapien
gagcggcgctgcgcgtagcggccag

SEQ ID NO: 3864478 - DNA, 25 bp, Homo sapien
gccggttgcgcaacaagtgcgctgt

SEQ ID NO: 3864479 - DNA, 25 bp, Homo sapien
gcggcgctgcgcgtagcggccaggg

SEQ ID NO: 3864480 - DNA, 25 bp, Homo sapien
cggttgcgcaacaagtgcgctgtgt

SEQ ID NO: 3864481 - DNA, 25 bp, Homo sapien
ttttcgtggttatgcacagagtgct

SEQ ID NO: 3864482 - DNA, 25 bp, Homo sapien
taaaatactcccaagtaactcgtgc

SEQ ID NO: 3864483 - DNA, 25 bp, Homo sapien
ggcgttcctttaacacatgtgcaga

SEQ ID NO: 3864484 - DNA, 25 bp, Homo sapien
aatttgccagcatacctgggtgctt

SEQ ID NO: 3864485 - DNA, 25 bp, Homo sapien
gttgtgggctagacctgtggccttc

SEQ ID NO: 3864486 - DNA, 25 bp, Homo sapien
gtggttgtgggctagacctgtggcc

SEQ ID NO: 3864487 - DNA, 25 bp, Homo sapien
ctaggtggttgtgggctagacctgt

SEQ ID NO: 3864488 - DNA, 25 bp, Homo sapien
tggttgtgggctagacctgtggcct

SEQ ID NO: 3864489 - DNA, 25 bp, Homo sapien
cagtagttccccatccggaacaaag

SEQ ID NO: 3864490 - DNA, 25 bp, Homo sapien
aaagactgcagaccctcgcatgggc

SEQ ID NO: 3864491 - DNA, 25 bp, Homo sapien
agactgcagaccctcgcatgggctc

SEQ ID NO: 3864492 - DNA, 25 bp, Homo sapien
gcagtagttccccatccggaacaaa

SEQ ID NO: 3864493 - DNA, 25 bp, Homo sapien
gtctatagcgccaggtgccccattg

SEQ ID NO: 3864494 - DNA, 25 bp, Homo sapien
tcccaagtgtctatagcgccaggtg

SEQ ID NO: 3864495 - DNA, 25 bp, Homo sapien
gtttcccaagtgtctatagcgccag

SEQ ID NO: 3864496 - DNA, 25 bp, Homo sapien
caagtgtctatagcgccaggtgccc

SEQ ID NO: 3864497 - DNA, 25 bp, Homo sapien
tttactgctgcgatgtgtggggcct

SEQ ID NO: 3864498 - DNA, 25 bp, Homo sapien
tgtttactgctgcgatgtgtggggc

SEQ ID NO: 3864499 - DNA, 25 bp, Homo sapien
gtttactgctgcgatgtgtggggcc

SEQ ID NO: 3864500 - DNA, 25 bp, Homo sapien
ctgtttactgctgcgatgtgtgggg

SEQ ID NO: 3864501 - DNA, 25 bp, Homo sapien
tttctggaacttagtcatgccattg

SEQ ID NO: 3864502 - DNA, 25 bp, Homo sapien
ctggaacttagtcatgccattgtag

SEQ ID NO: 3864503 - DNA, 25 bp, Homo sapien
ttctggaacttagtcatgccattgt

SEQ ID NO: 3864504 - DNA, 25 bp, Homo sapien
tctggaacttagtcatgccattgta

SEQ ID NO: 3864505 - DNA, 25 bp, Homo sapien
tacccatgggtaatcatgccttcct

SEQ ID NO: 3864506 - DNA, 25 bp, Homo sapien
agatccagcgcttttctctttgtgg

SEQ ID NO: 3864507 - DNA, 25 bp, Homo sapien
ctttggctcagatgggttgcttcag

SEQ ID NO: 3864508 - DNA, 25 bp, Homo sapien
gatctctacccatctacccagaagg

SEQ ID NO: 3864509 - DNA, 25 bp, Homo sapien
ggatagatgttcacatcccaatcca

SEQ ID NO: 3864510 - DNA, 25 bp, Homo sapien
cctctggactctgggatagatgttc

SEQ ID NO: 3864511 - DNA, 25 bp, Homo sapien
tgggatagatgttcacatcccaatc

SEQ ID NO: 3864512 - DNA, 25 bp, Homo sapien
tggactctgggatagatgttcacat

SEQ ID NO: 3864513 - DNA, 25 bp, Homo sapien
tggcttcacaccacacaccagcacc

SEQ ID NO: 3864514 - DNA, 25 bp, Homo sapien
ctggcttcacaccacacaccagcac

SEQ ID NO: 3864515 - DNA, 25 bp, Homo sapien
gcttcacaccacacaccagcaccat

SEQ ID NO: 3864516 - DNA, 25 bp, Homo sapien
ggcttcacaccacacaccagcacca

SEQ ID NO: 3864517 - DNA, 25 bp, Homo sapien
ctgtgcagcttcatgcactggaacc

SEQ ID NO: 3864518 - DNA, 25 bp, Homo sapien
tgtgcagcttcatgcactggaacca

SEQ ID NO: 3864519 - DNA, 25 bp, Homo sapien
tgcagcttcatgcactggaaccaaa

SEQ ID NO: 3864520 - DNA, 25 bp, Homo sapien
gcagcttcatgcactggaaccaaac

SEQ ID NO: 3864521 - DNA, 25 bp, Homo sapien
gcaggacagaggaattaatcatact

SEQ ID NO: 3864522 - DNA, 25 bp, Homo sapien
tacaaccatcatccacattcatagg

SEQ ID NO: 3864523 - DNA, 25 bp, Homo sapien
taatcatactcacattgttctacaa

SEQ ID NO: 3864524 - DNA, 25 bp, Homo sapien
cattcatagggaaatttgttcattt

SEQ ID NO: 3864525 - DNA, 25 bp, Homo sapien
tgccatttgccttttcaaaaccatt

SEQ ID NO: 3864526 - DNA, 25 bp, Homo sapien
ttcctctgttctctaggctgtcaca

SEQ ID NO: 3864527 - DNA, 25 bp, Homo sapien
ctgccatttgccttttcaaaaccat

SEQ ID NO: 3864528 - DNA, 25 bp, Homo sapien
aaccatttcctctgttctctaggct

SEQ ID NO: 3864529 - DNA, 25 bp, Homo sapien
tccacagcagcgttgccgtggtaac

SEQ ID NO: 3864530 - DNA, 25 bp, Homo sapien
tcgatttcctgtcagccaacaaagg

SEQ ID NO: 3864531 - DNA, 25 bp, Homo sapien
caaagggccgttcgcctttcatggc

SEQ ID NO: 3864532 - DNA, 25 bp, Homo sapien
cgtggtaacgatcctccgccggacg

SEQ ID NO: 3864533 - DNA, 25 bp, Homo sapien
tccaaggcggctcagcttgtgcttt

SEQ ID NO: 3864534 - DNA, 25 bp, Homo sapien
ccacggccacatccgcaaaaagggt

SEQ ID NO: 3864535 - DNA, 25 bp, Homo sapien
cgcaaaaagggtactggtgaacgtg

SEQ ID NO: 3864536 - DNA, 25 bp, Homo sapien
caggccaggccgtggttgtctttcc

SEQ ID NO: 3864537 - DNA, 25 bp, Homo sapien
gggtttttctcctccgctcttagca

SEQ ID NO: 3864538 - DNA, 25 bp, Homo sapien
cacatggctgggaattgggtttttc

SEQ ID NO: 3864539 - DNA, 25 bp, Homo sapien
cagacacatggctgggaattgggtt

SEQ ID NO: 3864540 - DNA, 25 bp, Homo sapien
tagcagcacctttgtaacccagtga

SEQ ID NO: 3864541 - DNA, 25 bp, Homo sapien
ctttggagagaattatgcacgtcac

SEQ ID NO: 3864542 - DNA, 25 bp, Homo sapien
tgctaccgtcatgggagcaagaaca

SEQ ID NO: 3864543 - DNA, 25 bp, Homo sapien
tgtcacatgcactctcacgatgagg

SEQ ID NO: 3864544 - DNA, 25 bp, Homo sapien
cacgtcactcagttgctctaacaag

SEQ ID NO: 3864545 - DNA, 25 bp, Homo sapien
gatagtcggataattatgtctctta

SEQ ID NO: 3864546 - DNA, 25 bp, Homo sapien
tgttcggtttacagagtttgctact

SEQ ID NO: 3864547 - DNA, 25 bp, Homo sapien
tctgggtcgatcttagctttataca

SEQ ID NO: 3864548 - DNA, 25 bp, Homo sapien
gaaaccccgatgtgaagtgtacata

SEQ ID NO: 3864549 - DNA, 25 bp, Homo sapien
tccaagaaggaatccggcgcccagt

SEQ ID NO: 3864550 - DNA, 25 bp, Homo sapien
gctgaagattgtagttatctaggag

SEQ ID NO: 3864551 - DNA, 25 bp, Homo sapien
aaagctgtctgtcgttcctgaagga

SEQ ID NO: 3864552 - DNA, 25 bp, Homo sapien
tgagcctcttcctaacgcagtcttg

SEQ ID NO: 3864553 - DNA, 25 bp, Homo sapien
tatcttcatcatgctgaggagtctt

SEQ ID NO: 3864554 - DNA, 25 bp, Homo sapien
tcttcatcatgctgaggagtcttca

SEQ ID NO: 3864555 - DNA, 25 bp, Homo sapien
cttcatcatgctgaggagtcttcac

SEQ ID NO: 3864556 - DNA, 25 bp, Homo sapien
ttatcttcatcatgctgaggagtct

SEQ ID NO: 3864557 - DNA, 25 bp, Homo sapien
ctttgcaaactcctcgttgcagctc

SEQ ID NO: 3864558 - DNA, 25 bp, Homo sapien
tgcaaactcctcgttgcagctcctt

SEQ ID NO: 3864559 - DNA, 25 bp, Homo sapien
tttgcaaactcctcgttgcagctcc

SEQ ID NO: 3864560 - DNA, 25 bp, Homo sapien
caaacccctctgtcttccttgcaaa

SEQ ID NO: 3864561 - DNA, 25 bp, Homo sapien
aatcggagcaccagaaccaactcat

SEQ ID NO: 3864562 - DNA, 25 bp, Homo sapien
gattaaatcggagcaccagaaccaa

SEQ ID NO: 3864563 - DNA, 25 bp, Homo sapien
atcatttgattaaatcggagcacca

SEQ ID NO: 3864564 - DNA, 25 bp, Homo sapien
ttgattaaatcggagcaccagaacc

SEQ ID NO: 3864565 - DNA, 25 bp, Homo sapien
ccttcagagaatgtgagtgatgttg

SEQ ID NO: 3864566 - DNA, 25 bp, Homo sapien
cataacaacccgctatatgttggtt

SEQ ID NO: 3864567 - DNA, 25 bp, Homo sapien
actctggtattccagttgccataac

SEQ ID NO: 3864568 - DNA, 25 bp, Homo sapien
tattccagttgccataacaacccgc

SEQ ID NO: 3864569 - DNA, 25 bp, Homo sapien
ggatactggactggaacacgcaggt

SEQ ID NO: 3864570 - DNA, 25 bp, Homo sapien
tggactggaacacgcaggtgcttaa

SEQ ID NO: 3864571 - DNA, 25 bp, Homo sapien
tactggactggaacacgcaggtgct

SEQ ID NO: 3864572 - DNA, 25 bp, Homo sapien
ggaacacgcaggtgcttaagtgatg

SEQ ID NO: 3864573 - DNA, 25 bp, Homo sapien
agggctggagaaccgcgtccttccg

SEQ ID NO: 3864574 - DNA, 25 bp, Homo sapien
tggagaaccgcgtccttccgaggcg

SEQ ID NO: 3864575 - DNA, 25 bp, Homo sapien
agcctcggtcctgtttaggcacgga

SEQ ID NO: 3864576 - DNA, 25 bp, Homo sapien
ctcggtcctgtttaggcacggaaag

SEQ ID NO: 3864577 - DNA, 25 bp, Homo sapien
ttaaacatgcaaacttgatgtcact

SEQ ID NO: 3864578 - DNA, 25 bp, Homo sapien
tgtctctaatgactgacggcacttc

SEQ ID NO: 3864579 - DNA, 25 bp, Homo sapien
tcttgagcgtggcttttaaacatgc

SEQ ID NO: 3864580 - DNA, 25 bp, Homo sapien
acatgcaaacttgatgtcactttcc

SEQ ID NO: 3864581 - DNA, 25 bp, Homo sapien
caagggtacagagaaacggatgtac

SEQ ID NO: 3864582 - DNA, 25 bp, Homo sapien
tggcaagggtacagagaaacggatg

SEQ ID NO: 3864583 - DNA, 25 bp, Homo sapien
gggtacagagaaacggatgtactgt

SEQ ID NO: 3864584 - DNA, 25 bp, Homo sapien
tacagagaaacggatgtactgtttt

SEQ ID NO: 3864585 - DNA, 25 bp, Homo sapien
gtacttaagaacatacatgtgatga

SEQ ID NO: 3864586 - DNA, 25 bp, Homo sapien
tgtgatgaatgcaatcaacactcat

SEQ ID NO: 3864587 - DNA, 25 bp, Homo sapien
cttgtgctgataacgtctgtactta

SEQ ID NO: 3864588 - DNA, 25 bp, Homo sapien
taacgtctgtacttaagaacataca

SEQ ID NO: 3864589 - DNA, 25 bp, Homo sapien
tatgttttctcgagatgtgtgtgga

SEQ ID NO: 3864590 - DNA, 25 bp, Homo sapien
cacacttgctgttattcgtgaacac

SEQ ID NO: 3864591 - DNA, 25 bp, Homo sapien
tctgttattttagatcggccctcac

SEQ ID NO: 3864592 - DNA, 25 bp, Homo sapien
tcgtgaacacaaagatatagtcatt

SEQ ID NO: 3864593 - DNA, 25 bp, Homo sapien
ctcgagagaggagatcgggctttgc

SEQ ID NO: 3864594 - DNA, 25 bp, Homo sapien
gagagaggagatcgggctttgctgg

SEQ ID NO: 3864595 - DNA, 25 bp, Homo sapien
agaggagatcgggctttgctggcac

SEQ ID NO: 3864596 - DNA, 25 bp, Homo sapien
tcgagagaggagatcgggctttgct

SEQ ID NO: 3864597 - DNA, 25 bp, Homo sapien
agtcagcctttcctaacccaggtgg

SEQ ID NO: 3864598 - DNA, 25 bp, Homo sapien
cagggaccactggtacggatccccg

SEQ ID NO: 3864599 - DNA, 25 bp, Homo sapien
tcaaggaggactccgtgccagtgac

SEQ ID NO: 3864600 - DNA, 25 bp, Homo sapien
atgacaccgcagacgtcgtccacag

SEQ ID NO: 3864601 - DNA, 25 bp, Homo sapien
tgaggaggacggtcgggcctctcat

SEQ ID NO: 3864602 - DNA, 25 bp, Homo sapien
cagtgaggaggacggtcgggcctct

SEQ ID NO: 3864603 - DNA, 25 bp, Homo sapien
gccacagtgaggaggacggtcgggc

SEQ ID NO: 3864604 - DNA, 25 bp, Homo sapien
cacagtgaggaggacggtcgggcct

SEQ ID NO: 3864605 - DNA, 25 bp, Homo sapien
gggagccctgactttgtaccggtgc

SEQ ID NO: 3864606 - DNA, 25 bp, Homo sapien
tctcgggccatggcgtccaggttgg

SEQ ID NO: 3864607 - DNA, 25 bp, Homo sapien
tcatggtgacaaaggcgggggtcat

SEQ ID NO: 3864608 - DNA, 25 bp, Homo sapien
gggtcatgtagcgtgccttcacccc

SEQ ID NO: 3864609 - DNA, 25 bp, Homo sapien
caaaggcgggggtcatgtagcgtgc

SEQ ID NO: 3864610 - DNA, 25 bp, Homo sapien
caccgcggccgccgcatcacccccg

SEQ ID NO: 3864611 - DNA, 25 bp, Homo sapien
cccaccgcggccgccgcatcacccc

SEQ ID NO: 3864612 - DNA, 25 bp, Homo sapien
cgcggccgccgcatcacccccgcca

SEQ ID NO: 3864613 - DNA, 25 bp, Homo sapien
tcccaccgcggccgccgcatcaccc

SEQ ID NO: 3864614 - DNA, 25 bp, Homo sapien
ggctgccgatgaggttctggagctg

SEQ ID NO: 3864615 - DNA, 25 bp, Homo sapien
ccgcgcaggctgccgatgaggttct

SEQ ID NO: 3864616 - DNA, 25 bp, Homo sapien
cgcaggctgccgatgaggttctgga

SEQ ID NO: 3864617 - DNA, 25 bp, Homo sapien
caggctgccgatgaggttctggagc

SEQ ID NO: 3864618 - DNA, 25 bp, Homo sapien
aagcctccaaccgggcgactcgagc

SEQ ID NO: 3864619 - DNA, 25 bp, Homo sapien
accgggcgactcgagctcaaggatg

SEQ ID NO: 3864620 - DNA, 25 bp, Homo sapien
tccaaccgggcgactcgagctcaag

SEQ ID NO: 3864621 - DNA, 25 bp, Homo sapien
caaccgggcgactcgagctcaagga

SEQ ID NO: 3864622 - DNA, 25 bp, Homo sapien
ccttctggaagcaattgtaaagaat

SEQ ID NO: 3864623 - DNA, 25 bp, Homo sapien
tccttctggaagcaattgtaaagaa

SEQ ID NO: 3864624 - DNA, 25 bp, Homo sapien
actcaatctctttagttctccatga

SEQ ID NO: 3864625 - DNA, 25 bp, Homo sapien
gaatcaccttgtaaaatagcaacaa

SEQ ID NO: 3864626 - DNA, 25 bp, Homo sapien
ccatgaatcaccttgtaaaatagca

SEQ ID NO: 3864627 - DNA, 25 bp, Homo sapien
gcaacaaggaaaacccagctgagct

SEQ ID NO: 3864628 - DNA, 25 bp, Homo sapien
tggtcagaaactcccacacatatcc

SEQ ID NO: 3864629 - DNA, 25 bp, Homo sapien
gaaactcccacacatatccagtgtt

SEQ ID NO: 3864630 - DNA, 25 bp, Homo sapien
cacacatatccagtgtttctctcac

SEQ ID NO: 3864631 - DNA, 25 bp, Homo sapien
agacactggtcagaaactcccacac

SEQ ID NO: 3864632 - DNA, 25 bp, Homo sapien
gctcatgtaccagctaccgacggtg

SEQ ID NO: 3864633 - DNA, 25 bp, Homo sapien
gctgcaccggagagttttaggtacc

SEQ ID NO: 3864634 - DNA, 25 bp, Homo sapien
tgcaggtagagcgtgttctttgagt

SEQ ID NO: 3864635 - DNA, 25 bp, Homo sapien
gagcgtgttctttgagttgtctgtg

SEQ ID NO: 3864636 - DNA, 25 bp, Homo sapien
ctgcagctgattccaccctgtgttc

SEQ ID NO: 3864637 - DNA, 25 bp, Homo sapien
attttgaccacagggaaacatcttc

SEQ ID NO: 3864638 - DNA, 25 bp, Homo sapien
agcgccaggaaagggcttgaggcct

SEQ ID NO: 3864639 - DNA, 25 bp, Homo sapien
cagaaagcaggaaaagcaaacggaa

SEQ ID NO: 3864640 - DNA, 25 bp, Homo sapien
cttgaggcctggaattttgaccaca

SEQ ID NO: 3864641 - DNA, 25 bp, Homo sapien
acttgcatttccagataagtctcca

SEQ ID NO: 3864642 - DNA, 25 bp, Homo sapien
catttccagataagtctccatgcaa

SEQ ID NO: 3864643 - DNA, 25 bp, Homo sapien
cagataagtctccatgcaacacagt

SEQ ID NO: 3864644 - DNA, 25 bp, Homo sapien
cggcaacttgcatttccagataagt

SEQ ID NO: 3864645 - DNA, 25 bp, Homo sapien
tgacccgcgcctctgcctgcctcat

SEQ ID NO: 3864646 - DNA, 25 bp, Homo sapien
gggtgacccgcgcctctgcctgcct

SEQ ID NO: 3864647 - DNA, 25 bp, Homo sapien
taagggtgacccgcgcctctgcctg

SEQ ID NO: 3864648 - DNA, 25 bp, Homo sapien
ctaagggtgacccgcgcctctgcct

SEQ ID NO: 3864649 - DNA, 25 bp, Homo sapien
ctggagtcaggagcacccagagccc

SEQ ID NO: 3864650 - DNA, 25 bp, Homo sapien
tggagtcaggagcacccagagcccc

SEQ ID NO: 3864651 - DNA, 25 bp, Homo sapien
ccagagccccagcagcaagaggggg

SEQ ID NO: 3864652 - DNA, 25 bp, Homo sapien
gagccccagcagcaagaggggggcc

SEQ ID NO: 3864653 - DNA, 25 bp, Homo sapien
gatgcgtagtgccacgagggatggc

SEQ ID NO: 3864654 - DNA, 25 bp, Homo sapien
tgcgtagtgccacgagggatggcct

SEQ ID NO: 3864655 - DNA, 25 bp, Homo sapien
cttggaggatgcgtagtgccacgag

SEQ ID NO: 3864656 - DNA, 25 bp, Homo sapien
gaggatgcgtagtgccacgagggat

SEQ ID NO: 3864657 - DNA, 25 bp, Homo sapien
cccacagcacatgtccacggtgacc

SEQ ID NO: 3864658 - DNA, 25 bp, Homo sapien
gtagctgagatagtagcagtctgga

SEQ ID NO: 3864659 - DNA, 25 bp, Homo sapien
cagaaactgaaggtctttgccgtgg

SEQ ID NO: 3864660 - DNA, 25 bp, Homo sapien
ccagcccagaaactgaaggtctttg

SEQ ID NO: 3864661 - DNA, 25 bp, Homo sapien
tagttacattcatgtggtgcctctt

SEQ ID NO: 3864662 - DNA, 25 bp, Homo sapien
taatattgtcatctacacgacaata

SEQ ID NO: 3864663 - DNA, 25 bp, Homo sapien
catagttacattcatgtggtgcctc

SEQ ID NO: 3864664 - DNA, 25 bp, Homo sapien
tctacacgacaatatgaattggaac

SEQ ID NO: 3864665 - DNA, 25 bp, Homo sapien
caatgtgtaataggcctaaatgtgt

SEQ ID NO: 3864666 - DNA, 25 bp, Homo sapien
taccaatgtgtaataggcctaaatg

SEQ ID NO: 3864667 - DNA, 25 bp, Homo sapien
agtaccaatgtgtaataggcctaaa

SEQ ID NO: 3864668 - DNA, 25 bp, Homo sapien
ccaatgtgtaataggcctaaatgtg

SEQ ID NO: 3864669 - DNA, 25 bp, Homo sapien
cagtagttatcatcaccagtacttc

SEQ ID NO: 3864670 - DNA, 25 bp, Homo sapien
gatattgctgcataatgcagaaggc

SEQ ID NO: 3864671 - DNA, 25 bp, Homo sapien
agttatcatcaccagtacttctcac

SEQ ID NO: 3864672 - DNA, 25 bp, Homo sapien
ggatattgctgcataatgcagaagg

SEQ ID NO: 3864673 - DNA, 25 bp, Homo sapien
agtttgtacagcactctcctatatg

SEQ ID NO: 3864674 - DNA, 25 bp, Homo sapien
ggaaggtcacatatattttggatag

SEQ ID NO: 3864675 - DNA, 25 bp, Homo sapien
ctggaaggtcacatatattttggat

SEQ ID NO: 3864676 - DNA, 25 bp, Homo sapien
aaggtcacatatattttggataggt

SEQ ID NO: 3864677 - DNA, 25 bp, Homo sapien
gaaggtcacatatattttggatagg

SEQ ID NO: 3864678 - DNA, 25 bp, Homo sapien
tcagtgcacggggttccatcttgca

SEQ ID NO: 3864679 - DNA, 25 bp, Homo sapien
cttcagtgcacggggttccatcttg

SEQ ID NO: 3864680 - DNA, 25 bp, Homo sapien
ttcagtgcacggggttccatcttgc

SEQ ID NO: 3864681 - DNA, 25 bp, Homo sapien
caagcctggttgttgagagctgttt

SEQ ID NO: 3864682 - DNA, 25 bp, Homo sapien
agcctggttgttgagagctgtttgt

SEQ ID NO: 3864683 - DNA, 25 bp, Homo sapien
aagcctggttgttgagagctgtttg

SEQ ID NO: 3864684 - DNA, 25 bp, Homo sapien
acaagcctggttgttgagagctgtt

SEQ ID NO: 3864685 - DNA, 25 bp, Homo sapien
cagttgtgtctgttgcacggtggtc

SEQ ID NO: 3864686 - DNA, 25 bp, Homo sapien
atcagttgtgtctgttgcacggtgg

SEQ ID NO: 3864687 - DNA, 25 bp, Homo sapien
agttgtgtctgttgcacggtggtca

SEQ ID NO: 3864688 - DNA, 25 bp, Homo sapien
tgtgtctgttgcacggtggtcatcc

SEQ ID NO: 3864689 - DNA, 25 bp, Homo sapien
gtaaatacgaccaaagaccactctc

SEQ ID NO: 3864690 - DNA, 25 bp, Homo sapien
tcttcttaggcacagtggaggatcc

SEQ ID NO: 3864691 - DNA, 25 bp, Homo sapien
gtttccatgaacacaaggagtgcca

SEQ ID NO: 3864692 - DNA, 25 bp, Homo sapien
gatcccagcctatatggcaatggca

SEQ ID NO: 3864693 - DNA, 25 bp, Homo sapien
tgcgctcccgagtttgcctttgttg

SEQ ID NO: 3864694 - DNA, 25 bp, Homo sapien
cttgtttcctgagcgcatcctggtg

SEQ ID NO: 3864695 - DNA, 25 bp, Homo sapien
cctaatggtcctgggcattccttgg

SEQ ID NO: 3864696 - DNA, 25 bp, Homo sapien
gttctcaatgctcccggctgttctg

SEQ ID NO: 3864697 - DNA, 25 bp, Homo sapien
tcatcatcaaagcactagtgagccc

SEQ ID NO: 3864698 - DNA, 25 bp, Homo sapien
ggcagcagtagctgtggagcccact

SEQ ID NO: 3864699 - DNA, 25 bp, Homo sapien
catcaaagcactagtgagccccagg

SEQ ID NO: 3864700 - DNA, 25 bp, Homo sapien
cactctgtggtacttagggaaagga

SEQ ID NO: 3864701 - DNA, 25 bp, Homo sapien
cccttagccaactccaggacagagc

SEQ ID NO: 3864702 - DNA, 25 bp, Homo sapien
ccttagccaactccaggacagagct

SEQ ID NO: 3864703 - DNA, 25 bp, Homo sapien
agaaactgccagagtgcttatctca

SEQ ID NO: 3864704 - DNA, 25 bp, Homo sapien
ctgccagagtgcttatctcactcat

SEQ ID NO: 3864705 - DNA, 25 bp, Homo sapien
aaactgccagagtgcttatctcact

SEQ ID NO: 3864706 - DNA, 25 bp, Homo sapien
actgccagagtgcttatctcactca

SEQ ID NO: 3864707 - DNA, 25 bp, Homo sapien
ccatcactattaatacgtgagaccc

SEQ ID NO: 3864708 - DNA, 25 bp, Homo sapien
gtgctactcccatcactattaatac

SEQ ID NO: 3864709 - DNA, 25 bp, Homo sapien
gctactcccatcactattaatacgt

SEQ ID NO: 3864710 - DNA, 25 bp, Homo sapien
tattaatacgtgagacccacaccag

SEQ ID NO: 3864711 - DNA, 25 bp, Homo sapien
tcagatgcccctgcagcgaggtttt

SEQ ID NO: 3864712 - DNA, 25 bp, Homo sapien
gcagcgaggtttttgtctgggctca

SEQ ID NO: 3864713 - DNA, 25 bp, Homo sapien
gatgcccctgcagcgaggtttttgt

SEQ ID NO: 3864714 - DNA, 25 bp, Homo sapien
cagcgaggtttttgtctgggctcac

SEQ ID NO: 3864715 - DNA, 25 bp, Homo sapien
acacctgagttccaggtaatgcatc

SEQ ID NO: 3864716 - DNA, 25 bp, Homo sapien
cacctgagttccaggtaatgcatct

SEQ ID NO: 3864717 - DNA, 25 bp, Homo sapien
gacagtaggaaaatctgaagcctct

SEQ ID NO: 3864718 - DNA, 25 bp, Homo sapien
aaagatgaaagtgtggcagtgcaca

SEQ ID NO: 3864719 - DNA, 25 bp, Homo sapien
ccagtataatctgggttaaagatga

SEQ ID NO: 3864720 - DNA, 25 bp, Homo sapien
ctgaggaggagaacatagggaaact

SEQ ID NO: 3864721 - DNA, 25 bp, Homo sapien
tccccacgtggacctttccctcaga

SEQ ID NO: 3864722 - DNA, 25 bp, Homo sapien
cccacgtggacctttccctcagaca

SEQ ID NO: 3864723 - DNA, 25 bp, Homo sapien
gaaggtgtcccgcaaagctctggat

SEQ ID NO: 3864724 - DNA, 25 bp, Homo sapien
tacgatattcactgtgtgcgacagg

SEQ ID NO: 3864725 - DNA, 25 bp, Homo sapien
catagatgtgtactactgtgcgaga

SEQ ID NO: 3864726 - DNA, 25 bp, Homo sapien
ctactctggcaatggtaagacaggc

SEQ ID NO: 3864727 - DNA, 25 bp, Homo sapien
attccatgggaaggacggccagggc

SEQ ID NO: 3864728 - DNA, 25 bp, Homo sapien
gccccgacccaaggcagtggtgtgg

SEQ ID NO: 3864729 - DNA, 25 bp, Homo sapien
gactggggttatgtctgtgacagga

SEQ ID NO: 3864730 - DNA, 25 bp, Homo sapien
ctgggtggagcggacactttagaga

SEQ ID NO: 3864731 - DNA, 25 bp, Homo sapien
atgagaagtcctcaaccatgcgcac

SEQ ID NO: 3864732 - DNA, 25 bp, Homo sapien
agaagtcctcaaccatgcgcaccag

SEQ ID NO: 3864733 - DNA, 25 bp, Homo sapien
cggaatgagaagtcctcaaccatgc

SEQ ID NO: 3864734 - DNA, 25 bp, Homo sapien
gaatgagaagtcctcaaccatgcgc

SEQ ID NO: 3864735 - DNA, 25 bp, Homo sapien
aactgggtcctctaggctccaggaa

SEQ ID NO: 3864736 - DNA, 25 bp, Homo sapien
gacaattccagcaagtccctgtatc

SEQ ID NO: 3864737 - DNA, 25 bp, Homo sapien
attagttggaatggcggtaagacgc

SEQ ID NO: 3864738 - DNA, 25 bp, Homo sapien
taagacgcactatgtggactccgtg

SEQ ID NO: 3864739 - DNA, 25 bp, Homo sapien
agtcctcagtgacctacaaagagac

SEQ ID NO: 3864740 - DNA, 25 bp, Homo sapien
aagtcctcagtgacctacaaagaga

SEQ ID NO: 3864741 - DNA, 25 bp, Homo sapien
cataaagcaagtcctcagtgaccta

SEQ ID NO: 3864742 - DNA, 25 bp, Homo sapien
aagcaagtcctcagtgacctacaaa

SEQ ID NO: 3864743 - DNA, 25 bp, Homo sapien
ctagaatatccaatacagagaagtg

SEQ ID NO: 3864744 - DNA, 25 bp, Homo sapien
tggagaatgattttgacgagctgag

SEQ ID NO: 3864745 - DNA, 25 bp, Homo sapien
aaccaaggctcgagaactacgtgaa

SEQ ID NO: 3864746 - DNA, 25 bp, Homo sapien
aacgcagttcctcaccagcaacaga

SEQ ID NO: 3864747 - DNA, 25 bp, Homo sapien
gggattgagttcagtcaagggggct

SEQ ID NO: 3864748 - DNA, 25 bp, Homo sapien
tggcagctgccacaggtaaggggct

SEQ ID NO: 3864749 - DNA, 25 bp, Homo sapien
gcagctgccacaggtaaggggctcc

SEQ ID NO: 3864750 - DNA, 25 bp, Homo sapien
agtaccagtgatgaggaggggattg

SEQ ID NO: 3864751 - DNA, 25 bp, Homo sapien
ccaagaaagtgttgtaacagctgca

SEQ ID NO: 3864752 - DNA, 25 bp, Homo sapien
taatcataggctgcgatggactgga

SEQ ID NO: 3864753 - DNA, 25 bp, Homo sapien
taaaataattgtgctgccgtggttc

SEQ ID NO: 3864754 - DNA, 25 bp, Homo sapien
gaataaatgtgtctccagtaggaac

SEQ ID NO: 3864755 - DNA, 25 bp, Homo sapien
gaattctgagaacatgctactgtgg

SEQ ID NO: 3864756 - DNA, 25 bp, Homo sapien
ttctgagaacatgctactgtggtgc

SEQ ID NO: 3864757 - DNA, 25 bp, Homo sapien
ggagaattctgagaacatgctactg

SEQ ID NO: 3864758 - DNA, 25 bp, Homo sapien
tgagaacatgctactgtggtgctgc

SEQ ID NO: 3864759 - DNA, 25 bp, Homo sapien
agatgccgttctcggcgctcttctt

SEQ ID NO: 3864760 - DNA, 25 bp, Homo sapien
tgccgttctcggcgctcttcttcgc

SEQ ID NO: 3864761 - DNA, 25 bp, Homo sapien
gatgccgttctcggcgctcttcttc

SEQ ID NO: 3864762 - DNA, 25 bp, Homo sapien
ccgttctcggcgctcttcttcgcca

SEQ ID NO: 3864763 - DNA, 25 bp, Homo sapien
cgggcgcgatgagggggcccttctt

SEQ ID NO: 3864764 - DNA, 25 bp, Homo sapien
ccgggcgcgatgagggggcccttct

SEQ ID NO: 3864765 - DNA, 25 bp, Homo sapien
atgaagtccatctggcgcgtccagg

SEQ ID NO: 3864766 - DNA, 25 bp, Homo sapien
tgaagtccatctggcgcgtccaggt

SEQ ID NO: 3864767 - DNA, 25 bp, Homo sapien
gatgaagtccatctggcgcgtccag

SEQ ID NO: 3864768 - DNA, 25 bp, Homo sapien
acacgttgcccaggcccacggtgaa

SEQ ID NO: 3864769 - DNA, 25 bp, Homo sapien
ggcccacggtgaagcccacacacga

SEQ ID NO: 3864770 - DNA, 25 bp, Homo sapien
gcccaggcccacggtgaagcccaca

SEQ ID NO: 3864771 - DNA, 25 bp, Homo sapien
ccaggcccacggtgaagcccacaca

SEQ ID NO: 3864772 - DNA, 25 bp, Homo sapien
tccgaccagggctatcaggatgcag

SEQ ID NO: 3864773 - DNA, 25 bp, Homo sapien
cagggctatcaggatgcagggaata

SEQ ID NO: 3864774 - DNA, 25 bp, Homo sapien
ttcctccgaccagggctatcaggat

SEQ ID NO: 3864775 - DNA, 25 bp, Homo sapien
gctatcaggatgcagggaataagga

SEQ ID NO: 3864776 - DNA, 25 bp, Homo sapien
taggtgttgcagtagaagacgatca

SEQ ID NO: 3864777 - DNA, 25 bp, Homo sapien
caggccagcaccatgatgtagtagg

SEQ ID NO: 3864778 - DNA, 25 bp, Homo sapien
taaaggacttgaccaggtaatagaa

SEQ ID NO: 3864779 - DNA, 25 bp, Homo sapien
aaggacttgaccaggtaatagaagc

SEQ ID NO: 3864780 - DNA, 25 bp, Homo sapien
gagggactgccaagaaacaccctgg

SEQ ID NO: 3864781 - DNA, 25 bp, Homo sapien
cccagacagcctcaagactttgttc

SEQ ID NO: 3864782 - DNA, 25 bp, Homo sapien
cccagttgagggcccctggcacctc

SEQ ID NO: 3864783 - DNA, 25 bp, Homo sapien
agcaggccagcagacaaagggtcac

SEQ ID NO: 3864784 - DNA, 25 bp, Homo sapien
ccagcaggccagcagacaaagggtc

SEQ ID NO: 3864785 - DNA, 25 bp, Homo sapien
gacacagaagtagaccagcacccag

SEQ ID NO: 3864786 - DNA, 25 bp, Homo sapien
cacccagcaggccagcagacaaagg

SEQ ID NO: 3864787 - DNA, 25 bp, Homo sapien
aagcccactccgagcacctccggtc

SEQ ID NO: 3864788 - DNA, 25 bp, Homo sapien
gctgctcagcggggactgcggcacc

SEQ ID NO: 3864789 - DNA, 25 bp, Homo sapien
agcccactccgagcacctccggtcc

SEQ ID NO: 3864790 - DNA, 25 bp, Homo sapien
ggctgctcagcggggactgcggcac

SEQ ID NO: 3864791 - DNA, 25 bp, Homo sapien
caggaccacgtaggggaatgtagca

SEQ ID NO: 3864792 - DNA, 25 bp, Homo sapien
gaccagtcaggcttgagatagtaaa

SEQ ID NO: 3864793 - DNA, 25 bp, Homo sapien
agctttgaccagtcaggcttgagat

SEQ ID NO: 3864794 - DNA, 25 bp, Homo sapien
gcacgaccaggaccacgtaggggaa

SEQ ID NO: 3864795 - DNA, 25 bp, Homo sapien
ccaggccaatggcataagaaaagaa

SEQ ID NO: 3864796 - DNA, 25 bp, Homo sapien
cccccaggccaatggcataagaaaa

SEQ ID NO: 3864797 - DNA, 25 bp, Homo sapien
aagaaaatctgggtccccacatcta

SEQ ID NO: 3864798 - DNA, 25 bp, Homo sapien
gggcccccaggccaatggcataaga

SEQ ID NO: 3864799 - DNA, 25 bp, Homo sapien
gcagttgttgttgaagcggttgtag

SEQ ID NO: 3864800 - DNA, 25 bp, Homo sapien
agttgttgttgaagcggttgtagct

SEQ ID NO: 3864801 - DNA, 25 bp, Homo sapien
ttgttgaagcggttgtagctgccca

SEQ ID NO: 3864802 - DNA, 25 bp, Homo sapien
ttgttgttgaagcggttgtagctgc

SEQ ID NO: 3864803 - DNA, 25 bp, Homo sapien
tgttgatgacagccaggatgatggc

SEQ ID NO: 3864804 - DNA, 25 bp, Homo sapien
gatgacagccaggatgatggcgtcc

SEQ ID NO: 3864805 - DNA, 25 bp, Homo sapien
ttgatgacagccaggatgatggcgt

SEQ ID NO: 3864806 - DNA, 25 bp, Homo sapien
ctgttgatgacagccaggatgatgg

SEQ ID NO: 3864807 - DNA, 25 bp, Homo sapien
gagaagaccacgaagccagcaaaga

SEQ ID NO: 3864808 - DNA, 25 bp, Homo sapien
tctgaggtgctgtcaaccctgggtc

SEQ ID NO: 3864809 - DNA, 25 bp, Homo sapien
gaccttgcagccgatgtcgtgccct

SEQ ID NO: 3864810 - DNA, 25 bp, Homo sapien
ggctgggaggtcctgtctctgtcaa

SEQ ID NO: 3864811 - DNA, 25 bp, Homo sapien
ctctgtcaacattgaaaaatcccag

SEQ ID NO: 3864812 - DNA, 25 bp, Homo sapien
gcatgaagaagaacagggcagccca

SEQ ID NO: 3864813 - DNA, 25 bp, Homo sapien
gagccccatgcaaatctggttgtcg

SEQ ID NO: 3864814 - DNA, 25 bp, Homo sapien
ccagagccccatgcaaatctggttg

SEQ ID NO: 3864815 - DNA, 25 bp, Homo sapien
cccatgcaaatctggttgtcgagac

SEQ ID NO: 3864816 - DNA, 25 bp, Homo sapien
gccccatgcaaatctggttgtcgag

SEQ ID NO: 3864817 - DNA, 25 bp, Homo sapien
gccgagccccgcaccaccctccacc

SEQ ID NO: 3864818 - DNA, 25 bp, Homo sapien
ctccacccctttccttgcccgcagc

SEQ ID NO: 3864819 - DNA, 25 bp, Homo sapien
ctagctcaggccgagccccgcacca

SEQ ID NO: 3864820 - DNA, 25 bp, Homo sapien
cacccctttccttgcccgcagccct

SEQ ID NO: 3864821 - DNA, 25 bp, Homo sapien
ggttgaggaggccggtgatgaagcc

SEQ ID NO: 3864822 - DNA, 25 bp, Homo sapien
tgaggaggccggtgatgaagccctc

SEQ ID NO: 3864823 - DNA, 25 bp, Homo sapien
gaggccggtgatgaagccctccaca

SEQ ID NO: 3864824 - DNA, 25 bp, Homo sapien
ggaggttgaggaggccggtgatgaa

SEQ ID NO: 3864825 - DNA, 25 bp, Homo sapien
ctttggaaacagaagtagtaggagg

SEQ ID NO: 3864826 - DNA, 25 bp, Homo sapien
gcacaacagagggccacagagatct

SEQ ID NO: 3864827 - DNA, 25 bp, Homo sapien
cacaacagagggccacagagatctc

SEQ ID NO: 3864828 - DNA, 25 bp, Homo sapien
cagagcccagtcagggaggatggca

SEQ ID NO: 3864829 - DNA, 25 bp, Homo sapien
agaagtcacaggcagaccccccacc

SEQ ID NO: 3864830 - DNA, 25 bp, Homo sapien
ggaggatggcagacggccaccagaa

SEQ ID NO: 3864831 - DNA, 25 bp, Homo sapien
gcagacggccaccagaagtcacagg

SEQ ID NO: 3864832 - DNA, 25 bp, Homo sapien
cgcactcccaaaaggcctgccagag

SEQ ID NO: 3864833 - DNA, 25 bp, Homo sapien
cacgcactcccaaaaggcctgccag

SEQ ID NO: 3864834 - DNA, 25 bp, Homo sapien
ccaccacgcactcccaaaaggcctg

SEQ ID NO: 3864835 - DNA, 25 bp, Homo sapien
ccaccaccacgcactcccaaaaggc

SEQ ID NO: 3864836 - DNA, 25 bp, Homo sapien
cccgatcatacaggcaatgtcgtcc

SEQ ID NO: 3864837 - DNA, 25 bp, Homo sapien
tcggtacccgatcatacaggcaatg

SEQ ID NO: 3864838 - DNA, 25 bp, Homo sapien
agcaccatttcatccaggggcaagg

SEQ ID NO: 3864839 - DNA, 25 bp, Homo sapien
gggcaaggtcggtacccgatcatac

SEQ ID NO: 3864840 - DNA, 25 bp, Homo sapien
gtagtacacaacgttgaagatgaag

SEQ ID NO: 3864841 - DNA, 25 bp, Homo sapien
agtacacaacgttgaagatgaagat

SEQ ID NO: 3864842 - DNA, 25 bp, Homo sapien
tagtacacaacgttgaagatgaaga

SEQ ID NO: 3864843 - DNA, 25 bp, Homo sapien
ctcagccatggtgcccttggccctg

SEQ ID NO: 3864844 - DNA, 25 bp, Homo sapien
acagcatggaggacagcacgaaggc

SEQ ID NO: 3864845 - DNA, 25 bp, Homo sapien
gcagtggcatgcacagcatggagga

SEQ ID NO: 3864846 - DNA, 25 bp, Homo sapien
gcacagcatggaggacagcacgaag

SEQ ID NO: 3864847 - DNA, 25 bp, Homo sapien
ccttgctgctctcggacactggggt

SEQ ID NO: 3864848 - DNA, 25 bp, Homo sapien
tgagctcggtactccaagtggtgga

SEQ ID NO: 3864849 - DNA, 25 bp, Homo sapien
actctccaccacgacgaccttgctg

SEQ ID NO: 3864850 - DNA, 25 bp, Homo sapien
tgctgctctcggacactggggtcag

SEQ ID NO: 3864851 - DNA, 25 bp, Homo sapien
gatgtgagctgagctgtcccatgac

SEQ ID NO: 3864852 - DNA, 25 bp, Homo sapien
ggtgagctggtgatgtgagctgagc

SEQ ID NO: 3864853 - DNA, 25 bp, Homo sapien
ctggtgatgtgagctgagctgtccc

SEQ ID NO: 3864854 - DNA, 25 bp, Homo sapien
gtgatgtgagctgagctgtcccatg

SEQ ID NO: 3864855 - DNA, 25 bp, Homo sapien
ggtggggatgaagcaggggctgcta

SEQ ID NO: 3864856 - DNA, 25 bp, Homo sapien
cccaaaagcgtcagggaaaggcagg

SEQ ID NO: 3864857 - DNA, 25 bp, Homo sapien
atgaagcaggggctgctatggctac

SEQ ID NO: 3864858 - DNA, 25 bp, Homo sapien
ccaaaagcgtcagggaaaggcaggc

SEQ ID NO: 3864859 - DNA, 25 bp, Homo sapien
tgagcactcatggtgctttctcccc

SEQ ID NO: 3864860 - DNA, 25 bp, Homo sapien
agtgagcactcatggtgctttctcc

SEQ ID NO: 3864861 - DNA, 25 bp, Homo sapien
gagcactcatggtgctttctcccct

SEQ ID NO: 3864862 - DNA, 25 bp, Homo sapien
ttagtgagcactcatggtgctttct

SEQ ID NO: 3864863 - DNA, 25 bp, Homo sapien
tattggtggtgattggcgcaggaat

SEQ ID NO: 3864864 - DNA, 25 bp, Homo sapien
aggaatcagaaggttccactgctgg

SEQ ID NO: 3864865 - DNA, 25 bp, Homo sapien
caagctcacacaattgatattggtg

SEQ ID NO: 3864866 - DNA, 25 bp, Homo sapien
aatcagaaggttccactgctggctg

SEQ ID NO: 3864867 - DNA, 25 bp, Homo sapien
caggaagtgcatccgccttgagcct

SEQ ID NO: 3864868 - DNA, 25 bp, Homo sapien
ggtgcaggaagtgcatccgccttga

SEQ ID NO: 3864869 - DNA, 25 bp, Homo sapien
tgcaggaagtgcatccgccttgagc

SEQ ID NO: 3864870 - DNA, 25 bp, Homo sapien
aggtgcaggaagtgcatccgccttg

SEQ ID NO: 3864871 - DNA, 25 bp, Homo sapien
agccgtctcgggactggacgtgaca

SEQ ID NO: 3864872 - DNA, 25 bp, Homo sapien
gtctcgggactggacgtgacagaca

SEQ ID NO: 3864873 - DNA, 25 bp, Homo sapien
ccgtctcgggactggacgtgacaga

SEQ ID NO: 3864874 - DNA, 25 bp, Homo sapien
cagccgtctcgggactggacgtgac

SEQ ID NO: 3864875 - DNA, 25 bp, Homo sapien
gccgtattctaagccaggtccctct

SEQ ID NO: 3864876 - DNA, 25 bp, Homo sapien
ccaggctcttggttggccgtattct

SEQ ID NO: 3864877 - DNA, 25 bp, Homo sapien
ggttggccgtattctaagccaggtc

SEQ ID NO: 3864878 - DNA, 25 bp, Homo sapien
tcttggttggccgtattctaagcca

SEQ ID NO: 3864879 - DNA, 25 bp, Homo sapien
tataaagcagttggcctgagctcag

SEQ ID NO: 3864880 - DNA, 25 bp, Homo sapien
gcagagacctggctgacagtgtata

SEQ ID NO: 3864881 - DNA, 25 bp, Homo sapien
ttagcagagggtgattgtcatccag

SEQ ID NO: 3864882 - DNA, 25 bp, Homo sapien
agagggtgattgtcatccaggcaga

SEQ ID NO: 3864883 - DNA, 25 bp, Homo sapien
tttggtgtcattgtggtgcatgagg

SEQ ID NO: 3864884 - DNA, 25 bp, Homo sapien
gtgtcattgtggtgcatgaggtggc

SEQ ID NO: 3864885 - DNA, 25 bp, Homo sapien
tggtgtcattgtggtgcatgaggtg

SEQ ID NO: 3864886 - DNA, 25 bp, Homo sapien
gtttggtgtcattgtggtgcatgag

SEQ ID NO: 3864887 - DNA, 25 bp, Homo sapien
gacctctgactaatgccagctggga

SEQ ID NO: 3864888 - DNA, 25 bp, Homo sapien
gcttctgggtagaggactcgcttgc

SEQ ID NO: 3864889 - DNA, 25 bp, Homo sapien
tgggacagacagaacgtggcagaat

SEQ ID NO: 3864890 - DNA, 25 bp, Homo sapien
tctgggttcctgttcgtcacatttg

SEQ ID NO: 3864891 - DNA, 25 bp, Homo sapien
tggttgggacttgcttcttccccat

SEQ ID NO: 3864892 - DNA, 25 bp, Homo sapien
aggtggccacagcacggaatctttt

SEQ ID NO: 3864893 - DNA, 25 bp, Homo sapien
tgaaacccgtcaggtcagcagcatg

SEQ ID NO: 3864894 - DNA, 25 bp, Homo sapien
cacggaatcttttggttgggacttg

SEQ ID NO: 3864895 - DNA, 25 bp, Homo sapien
tgggcactgtgttggacctggccat

SEQ ID NO: 3864896 - DNA, 25 bp, Homo sapien
ctgggcactgtgttggacctggcca

SEQ ID NO: 3864897 - DNA, 25 bp, Homo sapien
aagaaatcacgatttcaaaaagata

SEQ ID NO: 3864898 - DNA, 25 bp, Homo sapien
cacttctatgtttaccacaaatcta

SEQ ID NO: 3864899 - DNA, 25 bp, Homo sapien
gatacccacacttctatgtttacca

SEQ ID NO: 3864900 - DNA, 25 bp, Homo sapien
caaaaagatacccacacttctatgt

SEQ ID NO: 3864901 - DNA, 25 bp, Homo sapien
ctacagcacgtctctgaagaacagg

SEQ ID NO: 3864902 - DNA, 25 bp, Homo sapien
tccaaaagccaggtggtccttacca

SEQ ID NO: 3864903 - DNA, 25 bp, Homo sapien
aatgactaaaaatcctacagcacgt

SEQ ID NO: 3864904 - DNA, 25 bp, Homo sapien
gccaggtggtccttaccatgaccaa

SEQ ID NO: 3864905 - DNA, 25 bp, Homo sapien
tgcagcacccggctagcggcggccc

SEQ ID NO: 3864906 - DNA, 25 bp, Homo sapien
ctgcagcacccggctagcggcggcc

SEQ ID NO: 3864907 - DNA, 25 bp, Homo sapien
tccatcgtccgtatttcctgctggg

SEQ ID NO: 3864908 - DNA, 25 bp, Homo sapien
caagggaggtgtccgggccactcct

SEQ ID NO: 3864909 - DNA, 25 bp, Homo sapien
agggaggtgtccgggccactcctcg

SEQ ID NO: 3864910 - DNA, 25 bp, Homo sapien
gggaggtgtccgggccactcctcga

SEQ ID NO: 3864911 - DNA, 25 bp, Homo sapien
ccaggagtgaattggggccccaagg

SEQ ID NO: 3864912 - DNA, 25 bp, Homo sapien
ctccgaggccttcgtatcacccccg

SEQ ID NO: 3864913 - DNA, 25 bp, Homo sapien
cgaggccttcgtatcacccccgcca

SEQ ID NO: 3864914 - DNA, 25 bp, Homo sapien
ggccttcgtatcacccccgccactg

SEQ ID NO: 3864915 - DNA, 25 bp, Homo sapien
tccgaggccttcgtatcacccccgc

SEQ ID NO: 3864916 - DNA, 25 bp, Homo sapien
ccgatgagcttttggagctgccccc

SEQ ID NO: 3864917 - DNA, 25 bp, Homo sapien
ggtgcacagcctgtgcaggctgcca

SEQ ID NO: 3864918 - DNA, 25 bp, Homo sapien
ccaatggagatgccgatgagctttt

SEQ ID NO: 3864919 - DNA, 25 bp, Homo sapien
cacagcctgtgcaggctgccaatgg

SEQ ID NO: 3864920 - DNA, 25 bp, Homo sapien
ggtgaggtcgttggacacagtgcac

SEQ ID NO: 3864921 - DNA, 25 bp, Homo sapien
tagagcccagcccaggtccccaaac

SEQ ID NO: 3864922 - DNA, 25 bp, Homo sapien
caaaccccttatctccagggtctgt

SEQ ID NO: 3864923 - DNA, 25 bp, Homo sapien
tgggtgaggtcgttggacacagtgc

SEQ ID NO: 3864924 - DNA, 25 bp, Homo sapien
aaagagtctgtgtccttgtggccac

SEQ ID NO: 3864925 - DNA, 25 bp, Homo sapien
tcagtgcctggtggatgtaaaactg

SEQ ID NO: 3864926 - DNA, 25 bp, Homo sapien
gattgatgtaatctgctggcttctg

SEQ ID NO: 3864927 - DNA, 25 bp, Homo sapien
tggagtcttcacttgagagttcatc

SEQ ID NO: 3864928 - DNA, 25 bp, Homo sapien
cacaataaatctatgtcagaggcag

SEQ ID NO: 3864929 - DNA, 25 bp, Homo sapien
gacaggacagcctcatgatctaaat

SEQ ID NO: 3864930 - DNA, 25 bp, Homo sapien
atggtcctcaactgccggtgcttcc

SEQ ID NO: 3864931 - DNA, 25 bp, Homo sapien
agagatggtaactggccaccacctc

SEQ ID NO: 3864932 - DNA, 25 bp, Homo sapien
cagagcagaaaaactggaaactcta

SEQ ID NO: 3864933 - DNA, 25 bp, Homo sapien
agagcagaaaaactggaaactctaa

SEQ ID NO: 3864934 - DNA, 25 bp, Homo sapien
gagcagaaaaactggaaactctaaa

SEQ ID NO: 3864935 - DNA, 25 bp, Homo sapien
tgtggtccggggagtgggaagacac

SEQ ID NO: 3864936 - DNA, 25 bp, Homo sapien
ctgtggtccggggagtgggaagaca

SEQ ID NO: 3864937 - DNA, 25 bp, Homo sapien
tgcggcggcaattgatgaatgaatt

SEQ ID NO: 3864938 - DNA, 25 bp, Homo sapien
ccaacttggatggttgcggcggcaa

SEQ ID NO: 3864939 - DNA, 25 bp, Homo sapien
catcccatggtttctggagcggagg

SEQ ID NO: 3864940 - DNA, 25 bp, Homo sapien
gttgcggcggcaattgatgaatgaa

SEQ ID NO: 3864941 - DNA, 25 bp, Homo sapien
tacacacacatacgtaaatggtaat

SEQ ID NO: 3864942 - DNA, 25 bp, Homo sapien
cacacatacgtaaatggtaattctc

SEQ ID NO: 3864943 - DNA, 25 bp, Homo sapien
acacacatacgtaaatggtaattct

SEQ ID NO: 3864944 - DNA, 25 bp, Homo sapien
cacatacgtaaatggtaattctctg

SEQ ID NO: 3864945 - DNA, 25 bp, Homo sapien
tagtggagacttcccatgtcgcagg

SEQ ID NO: 3864946 - DNA, 25 bp, Homo sapien
gggcctgttgctcatgcgtctctgg

SEQ ID NO: 3864947 - DNA, 25 bp, Homo sapien
cattcaggccgactgaagcgtggtt

SEQ ID NO: 3864948 - DNA, 25 bp, Homo sapien
tccagagaagtgtggaaaagcagct

SEQ ID NO: 3864949 - DNA, 25 bp, Homo sapien
aggaagaggacccgcagcacggcgg

SEQ ID NO: 3864950 - DNA, 25 bp, Homo sapien
tgacgtctctctagcgatgaaaatt

SEQ ID NO: 3864951 - DNA, 25 bp, Homo sapien
gtaaaccgtgctcttaacaaatgtg

SEQ ID NO: 3864952 - DNA, 25 bp, Homo sapien
cctgcacgcagggattttgtgttcg

SEQ ID NO: 3864953 - DNA, 25 bp, Homo sapien
ttttgaagccaagtgttgacgtctc

SEQ ID NO: 3864954 - DNA, 25 bp, Homo sapien
ccagggttcaaaccattcttctgca

SEQ ID NO: 3864955 - DNA, 25 bp, Homo sapien
tacaggtaccaccaccctggccggc

SEQ ID NO: 3864956 - DNA, 25 bp, Homo sapien
ctgaaattacaggtaccaccaccct

SEQ ID NO: 3864957 - DNA, 25 bp, Homo sapien
caggtaccaccaccctggccggcta

SEQ ID NO: 3864958 - DNA, 25 bp, Homo sapien
cagcaatttaatctcgtcttaaggc

SEQ ID NO: 3864959 - DNA, 25 bp, Homo sapien
cttaaggccctaattctaattctgg

SEQ ID NO: 3864960 - DNA, 25 bp, Homo sapien
tctgtagggacttcctccactgaca

SEQ ID NO: 3864961 - DNA, 25 bp, Homo sapien
ggttgtcttgcgatttctaccacat

SEQ ID NO: 3864962 - DNA, 25 bp, Homo sapien
ctaatgaatatctgagcctcatcaa

SEQ ID NO: 3864963 - DNA, 25 bp, Homo sapien
tactaatgaatatctgagcctcatc

SEQ ID NO: 3864964 - DNA, 25 bp, Homo sapien
aattaattagtaatcgcattatgtc

SEQ ID NO: 3864965 - DNA, 25 bp, Homo sapien
attagtaatcgcattatgtctaaaa

SEQ ID NO: 3864966 - DNA, 25 bp, Homo sapien
tctcatgcgtctcatctgtgtggtg

SEQ ID NO: 3864967 - DNA, 25 bp, Homo sapien
gtctgtagatgactgaggattccac

SEQ ID NO: 3864968 - DNA, 25 bp, Homo sapien
aatcccaccatgaggacccggaaat

SEQ ID NO: 3864969 - DNA, 25 bp, Homo sapien
gatttgggtccctgtctagtcacct

SEQ ID NO: 3864970 - DNA, 25 bp, Homo sapien
cgctgtctgtgtcttactttcaaag

SEQ ID NO: 3864971 - DNA, 25 bp, Homo sapien
gggcgtccctttaggccaagcaggc

SEQ ID NO: 3864972 - DNA, 25 bp, Homo sapien
aagggcgtccctttaggccaagcag

SEQ ID NO: 3864973 - DNA, 25 bp, Homo sapien
acggggaggggcatatctccttgac

SEQ ID NO: 3864974 - DNA, 25 bp, Homo sapien
tccaagcatgaaggcggccccgcgg

SEQ ID NO: 3864975 - DNA, 25 bp, Homo sapien
ttcgcgcccacgtgcgaacaggcag

SEQ ID NO: 3864976 - DNA, 25 bp, Homo sapien
aggcggaccgcggtgcccgggatct

SEQ ID NO: 3864977 - DNA, 25 bp, Homo sapien
gtgcacggcagctgcgagggaccgg

SEQ ID NO: 3864978 - DNA, 25 bp, Homo sapien
aaagccggtggcactcgacccctag

SEQ ID NO: 3864979 - DNA, 25 bp, Homo sapien
cggcatgcattagctctagaattac

SEQ ID NO: 3864980 - DNA, 25 bp, Homo sapien
gggtcagcacccttcggcatgcatt

SEQ ID NO: 3864981 - DNA, 25 bp, Homo sapien
cggtggcactcgacccctaggcagg

SEQ ID NO: 3864982 - DNA, 25 bp, Homo sapien
acaggggggcatgcgattggcccga

SEQ ID NO: 3864983 - DNA, 25 bp, Homo sapien
cacaggggggcatgcgattggcccg

SEQ ID NO: 3864984 - DNA, 25 bp, Homo sapien
caggggggcatgcgattggcccgag

SEQ ID NO: 3864985 - DNA, 25 bp, Homo sapien
gggcagacgttcgaatgggtcgttg

SEQ ID NO: 3864986 - DNA, 25 bp, Homo sapien
agttgatagggcagacgttcgaatg

SEQ ID NO: 3864987 - DNA, 25 bp, Homo sapien
catcgaaagttgatagggcagacgt

SEQ ID NO: 3864988 - DNA, 25 bp, Homo sapien
taggcacagcgactaccatcgaaag

SEQ ID NO: 3864989 - DNA, 25 bp, Homo sapien
caaactgcgccggtccaagaatttc

SEQ ID NO: 3864990 - DNA, 25 bp, Homo sapien
aattaccgcggctgctggcactaaa

SEQ ID NO: 3864991 - DNA, 25 bp, Homo sapien
gccctccaatggatcttcgttaaag

SEQ ID NO: 3864992 - DNA, 25 bp, Homo sapien
gggccgcggaacactcagctaagag

SEQ ID NO: 3864993 - DNA, 25 bp, Homo sapien
gaataacaccgccacgttgccagtc

SEQ ID NO: 3864994 - DNA, 25 bp, Homo sapien
tggtcagaactaccacggtatctga

SEQ ID NO: 3864995 - DNA, 25 bp, Homo sapien
gttgccagtcggcatcgtttatggt

SEQ ID NO: 3864996 - DNA, 25 bp, Homo sapien
tcagaactaccacggtatctgatcg

SEQ ID NO: 3864997 - DNA, 25 bp, Homo sapien
caccaccacccatggaacagagaaa

SEQ ID NO: 3864998 - DNA, 25 bp, Homo sapien
acagagaaacagctatcaatctgtc

SEQ ID NO: 3864999 - DNA, 25 bp, Homo sapien
tgtcaatcctgtccctgtccggccc

SEQ ID NO: 3865000 - DNA, 25 bp, Homo sapien
gttgagtcaaattaagccgcaggct

SEQ ID NO: 3865001 - DNA, 25 bp, Homo sapien
ctcaatttcgggtggctgaaggcca

SEQ ID NO: 3865002 - DNA, 25 bp, Homo sapien
attgctcaatttcgggtggctgaag

SEQ ID NO: 3865003 - DNA, 25 bp, Homo sapien
gctcaatttcgggtggctgaaggcc

SEQ ID NO: 3865004 - DNA, 25 bp, Homo sapien
tgctcaatttcgggtggctgaaggc

SEQ ID NO: 3865005 - DNA, 25 bp, Homo sapien
agggtaggcacacgctgagccagtc

SEQ ID NO: 3865006 - DNA, 25 bp, Homo sapien
ccccatcacgaatgaggttcaacag

SEQ ID NO: 3865007 - DNA, 25 bp, Homo sapien
tcacgaatgaggttcaacaggttac

SEQ ID NO: 3865008 - DNA, 25 bp, Homo sapien
ccatccccatcacgaatgaggttca

SEQ ID NO: 3865009 - DNA, 25 bp, Homo sapien
catcacgaatgaggttcaacaggtt

SEQ ID NO: 3865010 - DNA, 25 bp, Homo sapien
tacttcctctagatagtcaagttcg

SEQ ID NO: 3865011 - DNA, 25 bp, Homo sapien
tagatagtcaagttcgactgtcttc

SEQ ID NO: 3865012 - DNA, 25 bp, Homo sapien
tcctctagatagtcaagttcgactg

SEQ ID NO: 3865013 - DNA, 25 bp, Homo sapien
tagtcaagttcgactgtcttctcag

SEQ ID NO: 3865014 - DNA, 25 bp, Homo sapien
gcggagggcgaacactgacagcacc

SEQ ID NO: 3865015 - DNA, 25 bp, Homo sapien
cacagcacggtgcacaggccatacg

SEQ ID NO: 3865016 - DNA, 25 bp, Homo sapien
ccaccagcgtcagcggcgacttgaa

SEQ ID NO: 3865017 - DNA, 25 bp, Homo sapien
gcgacttgaaagtgaggcgcggccc

SEQ ID NO: 3865018 - DNA, 25 bp, Homo sapien
gcgttcttcatcgacacagaagccc

SEQ ID NO: 3865019 - DNA, 25 bp, Homo sapien
ttcttcatcgacacagaagcccagt

SEQ ID NO: 3865020 - DNA, 25 bp, Homo sapien
cacagaagcccagtgatccaccgct

SEQ ID NO: 3865021 - DNA, 25 bp, Homo sapien
acagaagcccagtgatccaccgcta

SEQ ID NO: 3865022 - DNA, 25 bp, Homo sapien
cagaggagggcggacgtcgccggtc

SEQ ID NO: 3865023 - DNA, 25 bp, Homo sapien
cggacgtcgccggtctgcacttggg

SEQ ID NO: 3865024 - DNA, 25 bp, Homo sapien
gccccggcaggccacgtcagggaac

SEQ ID NO: 3865025 - DNA, 25 bp, Homo sapien
gccatgcaccccgaggagcccggag

SEQ ID NO: 3865026 - DNA, 25 bp, Homo sapien
cctcagaaacccaacatctctaaca

SEQ ID NO: 3865027 - DNA, 25 bp, Homo sapien
cagaaacccaacatctctaacaatc

SEQ ID NO: 3865028 - DNA, 25 bp, Homo sapien
tcagaaacccaacatctctaacaat

SEQ ID NO: 3865029 - DNA, 25 bp, Homo sapien
gaaacccaacatctctaacaatctt

SEQ ID NO: 3865030 - DNA, 25 bp, Homo sapien
ttggagacatagtggtccctgccgg

SEQ ID NO: 3865031 - DNA, 25 bp, Homo sapien
gtgtcagacacccgcagacgctcat

SEQ ID NO: 3865032 - DNA, 25 bp, Homo sapien
cctgccggctttgtgcatttgcaag

SEQ ID NO: 3865033 - DNA, 25 bp, Homo sapien
ctctgcacgccaggtcttggagaca

SEQ ID NO: 3865034 - DNA, 25 bp, Homo sapien
tttggcactccttcccggaagccca

SEQ ID NO: 3865035 - DNA, 25 bp, Homo sapien
aagaagtcgagaacgggatgtggca

SEQ ID NO: 3865036 - DNA, 25 bp, Homo sapien
ggatgtggcaaggatctctgtcact

SEQ ID NO: 3865037 - DNA, 25 bp, Homo sapien
cttggagaagaagtcgagaacggga

SEQ ID NO: 3865038 - DNA, 25 bp, Homo sapien
gcgggtagctgcgatggacccgcag

SEQ ID NO: 3865039 - DNA, 25 bp, Homo sapien
gggtagctgcgatggacccgcaggg

SEQ ID NO: 3865040 - DNA, 25 bp, Homo sapien
aatgcgggtagctgcgatggacccg

SEQ ID NO: 3865041 - DNA, 25 bp, Homo sapien
atgcgggtagctgcgatggacccgc

SEQ ID NO: 3865042 - DNA, 25 bp, Homo sapien
aaggacagtaggtccaattctgctt

SEQ ID NO: 3865043 - DNA, 25 bp, Homo sapien
aggacagtaggtccaattctgcttg

SEQ ID NO: 3865044 - DNA, 25 bp, Homo sapien
aggagtggggcttggcctgcttgca

SEQ ID NO: 3865045 - DNA, 25 bp, Homo sapien
cttgaggagtggggcttggcctgct

SEQ ID NO: 3865046 - DNA, 25 bp, Homo sapien
tggggcttggcctgcttgcacccag

SEQ ID NO: 3865047 - DNA, 25 bp, Homo sapien
agtggggcttggcctgcttgcaccc

SEQ ID NO: 3865048 - DNA, 25 bp, Homo sapien
tccgcacagtttctcgctgaagtcg

SEQ ID NO: 3865049 - DNA, 25 bp, Homo sapien
gctgaagtcgatctccggccagctg

SEQ ID NO: 3865050 - DNA, 25 bp, Homo sapien
ggctcctcagagaccactctcttgg

SEQ ID NO: 3865051 - DNA, 25 bp, Homo sapien
cttgcctttctagcgggctcctcag

SEQ ID NO: 3865052 - DNA, 25 bp, Homo sapien
tggcggcgcccagggcaggtccccc

SEQ ID NO: 3865053 - DNA, 25 bp, Homo sapien
ggcggcgcccagggcaggtccccca

SEQ ID NO: 3865054 - DNA, 25 bp, Homo sapien
gcggcgcccagggcaggtcccccat

SEQ ID NO: 3865055 - DNA, 25 bp, Homo sapien
ctggcggcgcccagggcaggtcccc

SEQ ID NO: 3865056 - DNA, 25 bp, Homo sapien
cacctggtgctcagcgacgtctcca

SEQ ID NO: 3865057 - DNA, 25 bp, Homo sapien
gagccgctccagtctcccggcacag

SEQ ID NO: 3865058 - DNA, 25 bp, Homo sapien
tcctgcggtgctgggcgcttgggcc

SEQ ID NO: 3865059 - DNA, 25 bp, Homo sapien
agccaggagccgctccagtctcccg

SEQ ID NO: 3865060 - DNA, 25 bp, Homo sapien
ggcgagacccgcgatgttggcggta

SEQ ID NO: 3865061 - DNA, 25 bp, Homo sapien
gctcgggactgagcgagggcggcag

SEQ ID NO: 3865062 - DNA, 25 bp, Homo sapien
caaaaaggctgcgagaggcgagacc

SEQ ID NO: 3865063 - DNA, 25 bp, Homo sapien
ctgaggcgcggacgccaaaaaggct

SEQ ID NO: 3865064 - DNA, 25 bp, Homo sapien
gacaggttctatgccccggtcttcc

SEQ ID NO: 3865065 - DNA, 25 bp, Homo sapien
tcttccgcagcgacaggttgggcgc

SEQ ID NO: 3865066 - DNA, 25 bp, Homo sapien
gacattggctgtggcgcgatgccga

SEQ ID NO: 3865067 - DNA, 25 bp, Homo sapien
ggtcctgagcgctattccctgggct

SEQ ID NO: 3865068 - DNA, 25 bp, Homo sapien
cctccttgcccaccggcggaggtgg

SEQ ID NO: 3865069 - DNA, 25 bp, Homo sapien
actgcaggctgaaaggggaccctcc

SEQ ID NO: 3865070 - DNA, 25 bp, Homo sapien
gaactgcaggctgaaaggggaccct

SEQ ID NO: 3865071 - DNA, 25 bp, Homo sapien
tgcaggctgaaaggggaccctcctt

SEQ ID NO: 3865072 - DNA, 25 bp, Homo sapien
taccgcagatggcgccgctgaacgg

SEQ ID NO: 3865073 - DNA, 25 bp, Homo sapien
agatggcgccgctgaacggcttctc

SEQ ID NO: 3865074 - DNA, 25 bp, Homo sapien
ggtgaaggccctaccgcagatggcg

SEQ ID NO: 3865075 - DNA, 25 bp, Homo sapien
gtgaaggccctaccgcagatggcgc

SEQ ID NO: 3865076 - DNA, 25 bp, Homo sapien
tgttccaccgcggcagctcgccttg

SEQ ID NO: 3865077 - DNA, 25 bp, Homo sapien
tgtgagggtggttattccacatgtg

SEQ ID NO: 3865078 - DNA, 25 bp, Homo sapien
tgagggtggttattccacatgtgag

SEQ ID NO: 3865079 - DNA, 25 bp, Homo sapien
aggttgtgagggtggttattccaca

SEQ ID NO: 3865080 - DNA, 25 bp, Homo sapien
ttcaggccatcatcccctagcagag

SEQ ID NO: 3865081 - DNA, 25 bp, Homo sapien
tttgggctgtcagatccttccggaa

SEQ ID NO: 3865082 - DNA, 25 bp, Homo sapien
gcctctgttctgaatgatggaaatc

SEQ ID NO: 3865083 - DNA, 25 bp, Homo sapien
cagccaaaacttcctgggatctggg

SEQ ID NO: 3865084 - DNA, 25 bp, Homo sapien
tctaattcgagcaaaaccagcgagt

SEQ ID NO: 3865085 - DNA, 25 bp, Homo sapien
tggaatactgcaggagacgcccttt

SEQ ID NO: 3865086 - DNA, 25 bp, Homo sapien
taacctggcgaatggacgctgcctg

SEQ ID NO: 3865087 - DNA, 25 bp, Homo sapien
tattttgcgctctttgcaccccagg

SEQ ID NO: 3865088 - DNA, 25 bp, Homo sapien
agactgtgttccgaataatcagagg

SEQ ID NO: 3865089 - DNA, 25 bp, Homo sapien
tccgaataatcagaggacattgtgt

SEQ ID NO: 3865090 - DNA, 25 bp, Homo sapien
tgttccgaataatcagaggacattg

SEQ ID NO: 3865091 - DNA, 25 bp, Homo sapien
actgtgttccgaataatcagaggac

SEQ ID NO: 3865092 - DNA, 25 bp, Homo sapien
tctgcctccgtgaggttatagctgc

SEQ ID NO: 3865093 - DNA, 25 bp, Homo sapien
ctgcagggcggttccgcccacagca

SEQ ID NO: 3865094 - DNA, 25 bp, Homo sapien
ctctgcctccgtgaggttatagctg

SEQ ID NO: 3865095 - DNA, 25 bp, Homo sapien
ccacagcaccctgcgctggctttgc

SEQ ID NO: 3865096 - DNA, 25 bp, Homo sapien
ctggtcactgatgtgttgcaggtca

SEQ ID NO: 3865097 - DNA, 25 bp, Homo sapien
tggtcactgatgtgttgcaggtcat

SEQ ID NO: 3865098 - DNA, 25 bp, Homo sapien
cctggtcactgatgtgttgcaggtc

SEQ ID NO: 3865099 - DNA, 25 bp, Homo sapien
ctcctggtcactgatgtgttgcagg

SEQ ID NO: 3865100 - DNA, 25 bp, Homo sapien
gggcaaacactatcagtcgcctcct

SEQ ID NO: 3865101 - DNA, 25 bp, Homo sapien
gcaaacactatcagtcgcctcctta

SEQ ID NO: 3865102 - DNA, 25 bp, Homo sapien
tgagggcaaacactatcagtcgcct

SEQ ID NO: 3865103 - DNA, 25 bp, Homo sapien
ctgagggcaaacactatcagtcgcc

SEQ ID NO: 3865104 - DNA, 25 bp, Homo sapien
tgagccgtattttctatcaagatgc

SEQ ID NO: 3865105 - DNA, 25 bp, Homo sapien
aatgtatgtctaaggtcaggctggc

SEQ ID NO: 3865106 - DNA, 25 bp, Homo sapien
tttctatcaagatgccatggaggta

SEQ ID NO: 3865107 - DNA, 25 bp, Homo sapien
tctagcaatatggtggaacatgagc

SEQ ID NO: 3865108 - DNA, 25 bp, Homo sapien
tatgttgtaatatattgccaaagcc

SEQ ID NO: 3865109 - DNA, 25 bp, Homo sapien
atgttgtaatatattgccaaagcca

SEQ ID NO: 3865110 - DNA, 25 bp, Homo sapien
tttatgttgtaatatattgccaaag

SEQ ID NO: 3865111 - DNA, 25 bp, Homo sapien
tgttgtaatatattgccaaagccac

SEQ ID NO: 3865112 - DNA, 25 bp, Homo sapien
aatagccagagatctatttgcatat

SEQ ID NO: 3865113 - DNA, 25 bp, Homo sapien
aaatagccagagatctatttgcata

SEQ ID NO: 3865114 - DNA, 25 bp, Homo sapien
aggcaatataaatatccactcaagg

SEQ ID NO: 3865115 - DNA, 25 bp, Homo sapien
ggcaatataaatatccactcaagga

SEQ ID NO: 3865116 - DNA, 25 bp, Homo sapien
caatataaatatccactcaaggaaa

SEQ ID NO: 3865117 - DNA, 25 bp, Homo sapien
aaaggcaatataaatatccactcaa

SEQ ID NO: 3865118 - DNA, 25 bp, Homo sapien
agttgcgtttgggatcatgcttgaa

SEQ ID NO: 3865119 - DNA, 25 bp, Homo sapien
aatacagttgcgtttgggatcatgc

SEQ ID NO: 3865120 - DNA, 25 bp, Homo sapien
tctgaaaatacagttgcgtttggga

SEQ ID NO: 3865121 - DNA, 25 bp, Homo sapien
tttatgacttgaaaaagagtacaga

SEQ ID NO: 3865122 - DNA, 25 bp, Homo sapien
taggacaaagatcgatgttagcact

SEQ ID NO: 3865123 - DNA, 25 bp, Homo sapien
tgttagcactagttagaagtcgttt

SEQ ID NO: 3865124 - DNA, 25 bp, Homo sapien
gatcgatgttagcactagttagaag

SEQ ID NO: 3865125 - DNA, 25 bp, Homo sapien
caattagtaggacaaagatcgatgt

SEQ ID NO: 3865126 - DNA, 25 bp, Homo sapien
gtcatccacactccacagaccatga

SEQ ID NO: 3865127 - DNA, 25 bp, Homo sapien
atccacactccacagaccatgattt

SEQ ID NO: 3865128 - DNA, 25 bp, Homo sapien
tgtcatccacactccacagaccatg

SEQ ID NO: 3865129 - DNA, 25 bp, Homo sapien
acactccacagaccatgatttctcc

SEQ ID NO: 3865130 - DNA, 25 bp, Homo sapien
taaactcaagtagctccaagaaaca

SEQ ID NO: 3865131 - DNA, 25 bp, Homo sapien
acactggcagacacatgaatattaa

SEQ ID NO: 3865132 - DNA, 25 bp, Homo sapien
aaaatacaggtcatggtcatttgcc

SEQ ID NO: 3865133 - DNA, 25 bp, Homo sapien
gccaaggcacacaggtcaaagtaat

SEQ ID NO: 3865134 - DNA, 25 bp, Homo sapien
tgtaataaacatgcacttgtgccaa

SEQ ID NO: 3865135 - DNA, 25 bp, Homo sapien
tatgaatagattgccagagccaaga

SEQ ID NO: 3865136 - DNA, 25 bp, Homo sapien
cactgccaggttctgaggatgctac

SEQ ID NO: 3865137 - DNA, 25 bp, Homo sapien
tatgaatagattgccagggctatga

SEQ ID NO: 3865138 - DNA, 25 bp, Homo sapien
ttcatgctgataacccttttcaaag

SEQ ID NO: 3865139 - DNA, 25 bp, Homo sapien
taagatggcattagagcacccaata

SEQ ID NO: 3865140 - DNA, 25 bp, Homo sapien
tgtattcacacagccgtgacatagc

SEQ ID NO: 3865141 - DNA, 25 bp, Homo sapien
tcaaagcagcggcatcttgatgcaa

SEQ ID NO: 3865142 - DNA, 25 bp, Homo sapien
ccgggcgcccgtgttggctggttca

SEQ ID NO: 3865143 - DNA, 25 bp, Homo sapien
ctgcgggtccgcgtactgcgccggg

SEQ ID NO: 3865144 - DNA, 25 bp, Homo sapien
aaaattgtccacctcgggagctggg

SEQ ID NO: 3865145 - DNA, 25 bp, Homo sapien
cgccgctcgctctggagcaaaattg

SEQ ID NO: 3865146 - DNA, 25 bp, Homo sapien
ccccttgccttgcatctggctgaag

SEQ ID NO: 3865147 - DNA, 25 bp, Homo sapien
ccagagaaaggctgtgttgactggt

SEQ ID NO: 3865148 - DNA, 25 bp, Homo sapien
gagagtggggagtaggtggcataat

SEQ ID NO: 3865149 - DNA, 25 bp, Homo sapien
tggggagtaggtggcataattttcc

SEQ ID NO: 3865150 - DNA, 25 bp, Homo sapien
gggagtaggtggcataattttccat

SEQ ID NO: 3865151 - DNA, 25 bp, Homo sapien
tgaggagagtggggagtaggtggca

SEQ ID NO: 3865152 - DNA, 25 bp, Homo sapien
gggtgacttggctgcaccaacatcc

SEQ ID NO: 3865153 - DNA, 25 bp, Homo sapien
ctgcaccaacatccttctttgagtt

SEQ ID NO: 3865154 - DNA, 25 bp, Homo sapien
tgcaccaacatccttctttgagttc

SEQ ID NO: 3865155 - DNA, 25 bp, Homo sapien
gcaggtgtaatgacatgggactcca

SEQ ID NO: 3865156 - DNA, 25 bp, Homo sapien
gctgtgcagaactaagaagcgctcc

SEQ ID NO: 3865157 - DNA, 25 bp, Homo sapien
taagacttctgccagtgataaggcc

SEQ ID NO: 3865158 - DNA, 25 bp, Homo sapien
gcacagcactgagtcctcttgcagc

SEQ ID NO: 3865159 - DNA, 25 bp, Homo sapien
ggaagaacaaaaagctaccctcagc

SEQ ID NO: 3865160 - DNA, 25 bp, Homo sapien
caccctggtccacttggatgtgggc

SEQ ID NO: 3865161 - DNA, 25 bp, Homo sapien
gggtccatgctcttgcataggtttc

SEQ ID NO: 3865162 - DNA, 25 bp, Homo sapien
gatgtgggcctcacacatggtatag

SEQ ID NO: 3865163 - DNA, 25 bp, Homo sapien
ccagaaggtgggttcaggctgcttt

SEQ ID NO: 3865164 - DNA, 25 bp, Homo sapien
tcagccatgatcaccaacaagcaca

SEQ ID NO: 3865165 - DNA, 25 bp, Homo sapien
gtccccagaaggtgggttcaggctg

SEQ ID NO: 3865166 - DNA, 25 bp, Homo sapien
tcctcagccatgatcaccaacaagc

SEQ ID NO: 3865167 - DNA, 25 bp, Homo sapien
cgctgatacggttaagcagctctgc

SEQ ID NO: 3865168 - DNA, 25 bp, Homo sapien
tagggaagggcttcggaagtggctc

SEQ ID NO: 3865169 - DNA, 25 bp, Homo sapien
ctgcaggtcccgctgatacggttaa

SEQ ID NO: 3865170 - DNA, 25 bp, Homo sapien
acggttaagcagctctgctagggaa

SEQ ID NO: 3865171 - DNA, 25 bp, Homo sapien
atgttttatttgctgattaatggac

SEQ ID NO: 3865172 - DNA, 25 bp, Homo sapien
catgttttatttgctgattaatgga

SEQ ID NO: 3865173 - DNA, 25 bp, Homo sapien
catgtaagtacactctctatccact

SEQ ID NO: 3865174 - DNA, 25 bp, Homo sapien
caaaacatgtaagtacactctctat

SEQ ID NO: 3865175 - DNA, 25 bp, Homo sapien
ctcagaagaatagatctgtatatgt

SEQ ID NO: 3865176 - DNA, 25 bp, Homo sapien
cagaagaatagatctgtatatgtaa

SEQ ID NO: 3865177 - DNA, 25 bp, Homo sapien
ggaatgactggaccttcacagcctg

SEQ ID NO: 3865178 - DNA, 25 bp, Homo sapien
gactggaccttcacagcctgtatgg

SEQ ID NO: 3865179 - DNA, 25 bp, Homo sapien
tatggcttcatccaagagcttttcc

SEQ ID NO: 3865180 - DNA, 25 bp, Homo sapien
gaccttcacagcctgtatggcttca

SEQ ID NO: 3865181 - DNA, 25 bp, Homo sapien
gaagtccggagttcaccaagcatat

SEQ ID NO: 3865182 - DNA, 25 bp, Homo sapien
gataacatagaagtccggagttcac

SEQ ID NO: 3865183 - DNA, 25 bp, Homo sapien
tggtgataacatagaagtccggagt

SEQ ID NO: 3865184 - DNA, 25 bp, Homo sapien
catagaagtccggagttcaccaagc

SEQ ID NO: 3865185 - DNA, 25 bp, Homo sapien
gtagtgcagttatcagaaatggaca

SEQ ID NO: 3865186 - DNA, 25 bp, Homo sapien
caagtagtgcagttatcagaaatgg

SEQ ID NO: 3865187 - DNA, 25 bp, Homo sapien
gtgcagttatcagaaatggacatat

SEQ ID NO: 3865188 - DNA, 25 bp, Homo sapien
ctccaagtagtgcagttatcagaaa

SEQ ID NO: 3865189 - DNA, 25 bp, Homo sapien
agccttgggataatgtttccagcat

SEQ ID NO: 3865190 - DNA, 25 bp, Homo sapien
gccttgggataatgtttccagcata

SEQ ID NO: 3865191 - DNA, 25 bp, Homo sapien
caaaatgtccttcctggattgagga

SEQ ID NO: 3865192 - DNA, 25 bp, Homo sapien
cttcctggattgaggaaatgacttg

SEQ ID NO: 3865193 - DNA, 25 bp, Homo sapien
aatgacttggcatatacaactccaa

SEQ ID NO: 3865194 - DNA, 25 bp, Homo sapien
gaaatgacttggcatatacaactcc

SEQ ID NO: 3865195 - DNA, 25 bp, Homo sapien
tgaagaaggtaatttcgaagaaaca

SEQ ID NO: 3865196 - DNA, 25 bp, Homo sapien
catcaagtaagatatttctggtaca

SEQ ID NO: 3865197 - DNA, 25 bp, Homo sapien
tgttggctctccttcatcaagtaag

SEQ ID NO: 3865198 - DNA, 25 bp, Homo sapien
tctgttggctctccttcatcaagta

SEQ ID NO: 3865199 - DNA, 25 bp, Homo sapien
ttggctctccttcatcaagtaagat

SEQ ID NO: 3865200 - DNA, 25 bp, Homo sapien
gtacatgtttccacactttcataca

SEQ ID NO: 3865201 - DNA, 25 bp, Homo sapien
tacatgtttccacactttcatacat

SEQ ID NO: 3865202 - DNA, 25 bp, Homo sapien
tgcccctgctgtgggataaaagtac

SEQ ID NO: 3865203 - DNA, 25 bp, Homo sapien
gggataaaagtacagtagacgttga

SEQ ID NO: 3865204 - DNA, 25 bp, Homo sapien
tacagtagacgttgatgctagaata

SEQ ID NO: 3865205 - DNA, 25 bp, Homo sapien
ctgcccctgctgtgggataaaagta

SEQ ID NO: 3865206 - DNA, 25 bp, Homo sapien
atggaatcactgatattgctagttg

SEQ ID NO: 3865207 - DNA, 25 bp, Homo sapien
ggaatcactgatattgctagttgtt

SEQ ID NO: 3865208 - DNA, 25 bp, Homo sapien
catggaatcactgatattgctagtt

SEQ ID NO: 3865209 - DNA, 25 bp, Homo sapien
tggaatcactgatattgctagttgt

SEQ ID NO: 3865210 - DNA, 25 bp, Homo sapien
tatgtccttgatgctgcattcgcac

SEQ ID NO: 3865211 - DNA, 25 bp, Homo sapien
agctatgtccttgatgctgcattcg

SEQ ID NO: 3865212 - DNA, 25 bp, Homo sapien
gctatgtccttgatgctgcattcgc

SEQ ID NO: 3865213 - DNA, 25 bp, Homo sapien
tcagctatgtccttgatgctgcatt

SEQ ID NO: 3865214 - DNA, 25 bp, Homo sapien
aataacacacctcatgagatattct

SEQ ID NO: 3865215 - DNA, 25 bp, Homo sapien
ataacacacctcatgagatattctt

SEQ ID NO: 3865216 - DNA, 25 bp, Homo sapien
taacacacctcatgagatattcttg

SEQ ID NO: 3865217 - DNA, 25 bp, Homo sapien
gaataacacacctcatgagatattc

SEQ ID NO: 3865218 - DNA, 25 bp, Homo sapien
gcacaggttcgaagaaagggattca

SEQ ID NO: 3865219 - DNA, 25 bp, Homo sapien
ctcagcacaggttcgaagaaaggga

SEQ ID NO: 3865220 - DNA, 25 bp, Homo sapien
cacaggttcgaagaaagggattcaa

SEQ ID NO: 3865221 - DNA, 25 bp, Homo sapien
cagcacaggttcgaagaaagggatt

SEQ ID NO: 3865222 - DNA, 25 bp, Homo sapien
tccatcttcacagtggcaaataaag

SEQ ID NO: 3865223 - DNA, 25 bp, Homo sapien
tgtatcactgtagccacctgctgtg

SEQ ID NO: 3865224 - DNA, 25 bp, Homo sapien
agtttaatatctgctgggattccag

SEQ ID NO: 3865225 - DNA, 25 bp, Homo sapien
gggattccaggtccatcttcacagt

SEQ ID NO: 3865226 - DNA, 25 bp, Homo sapien
tcatgtcaagattaacgagagagac

SEQ ID NO: 3865227 - DNA, 25 bp, Homo sapien
tgtcaagattaacgagagagacttg

SEQ ID NO: 3865228 - DNA, 25 bp, Homo sapien
catttcatgtcaagattaacgagag

SEQ ID NO: 3865229 - DNA, 25 bp, Homo sapien
aacatttcatgtcaagattaacgag

SEQ ID NO: 3865230 - DNA, 25 bp, Homo sapien
gtactcattcgtaggaaaacatctc

SEQ ID NO: 3865231 - DNA, 25 bp, Homo sapien
gggaaagtacaggatcagtgctgcc

SEQ ID NO: 3865232 - DNA, 25 bp, Homo sapien
tagaggacgccataggtctagaaca

SEQ ID NO: 3865233 - DNA, 25 bp, Homo sapien
tctagaacagaacagctcgggaggc

SEQ ID NO: 3865234 - DNA, 25 bp, Homo sapien
gagtgggtgaaatgttttaatttca

SEQ ID NO: 3865235 - DNA, 25 bp, Homo sapien
ctcaaagagtgggtgaaatgtttta

SEQ ID NO: 3865236 - DNA, 25 bp, Homo sapien
tcaaagagtgggtgaaatgttttaa

SEQ ID NO: 3865237 - DNA, 25 bp, Homo sapien
caaagagtgggtgaaatgttttaat

SEQ ID NO: 3865238 - DNA, 25 bp, Homo sapien
ataatccagaacactacttaacaca

SEQ ID NO: 3865239 - DNA, 25 bp, Homo sapien
taatccagaacactacttaacacat

SEQ ID NO: 3865240 - DNA, 25 bp, Homo sapien
tataatccagaacactacttaacac

SEQ ID NO: 3865241 - DNA, 25 bp, Homo sapien
gatcttgaatcaacgtggataccaa

SEQ ID NO: 3865242 - DNA, 25 bp, Homo sapien
gaatcaacgtggataccaaattcat

SEQ ID NO: 3865243 - DNA, 25 bp, Homo sapien
gctctgctcatcagcaaaatcttct

SEQ ID NO: 3865244 - DNA, 25 bp, Homo sapien
atctggctgatcttgaatcaacgtg

SEQ ID NO: 3865245 - DNA, 25 bp, Homo sapien
ctcagagcgcagcagatgaatgaag

SEQ ID NO: 3865246 - DNA, 25 bp, Homo sapien
gtcctcagagcgcagcagatgaatg

SEQ ID NO: 3865247 - DNA, 25 bp, Homo sapien
tcctcagagcgcagcagatgaatga

SEQ ID NO: 3865248 - DNA, 25 bp, Homo sapien
cctcagagcgcagcagatgaatgaa

SEQ ID NO: 3865249 - DNA, 25 bp, Homo sapien
cacagcgttatagtaagagtaaact

SEQ ID NO: 3865250 - DNA, 25 bp, Homo sapien
gcgttatagtaagagtaaactcata

SEQ ID NO: 3865251 - DNA, 25 bp, Homo sapien
aggagctgacacagcgttatagtaa

SEQ ID NO: 3865252 - DNA, 25 bp, Homo sapien
gctgacacagcgttatagtaagagt

SEQ ID NO: 3865253 - DNA, 25 bp, Homo sapien
taagcacttcaacatgtgatttcac

SEQ ID NO: 3865254 - DNA, 25 bp, Homo sapien
ttttaagcacttcaacatgtgattt

SEQ ID NO: 3865255 - DNA, 25 bp, Homo sapien
accattttaagcacttcaacatgtg

SEQ ID NO: 3865256 - DNA, 25 bp, Homo sapien
cattttaagcacttcaacatgtgat

SEQ ID NO: 3865257 - DNA, 25 bp, Homo sapien
agctcctcatggatcccctgcatgg

SEQ ID NO: 3865258 - DNA, 25 bp, Homo sapien
gctcctcatggatcccctgcatgga

SEQ ID NO: 3865259 - DNA, 25 bp, Homo sapien
gtgctctttgccaaatgagataaag

SEQ ID NO: 3865260 - DNA, 25 bp, Homo sapien
taaagtagcttaactcatcaaacag

SEQ ID NO: 3865261 - DNA, 25 bp, Homo sapien
cagaagctgaaacgtgcatccatac

SEQ ID NO: 3865262 - DNA, 25 bp, Homo sapien
tcagaagctgaaacgtgcatccata

SEQ ID NO: 3865263 - DNA, 25 bp, Homo sapien
gaaaacaatgacaccattgcatcac

SEQ ID NO: 3865264 - DNA, 25 bp, Homo sapien
gacaccattgcatcactatgtggat

SEQ ID NO: 3865265 - DNA, 25 bp, Homo sapien
caatgacaccattgcatcactatgt

SEQ ID NO: 3865266 - DNA, 25 bp, Homo sapien
agaaaacaatgacaccattgcatca

SEQ ID NO: 3865267 - DNA, 25 bp, Homo sapien
gatatgcagaagattgctcagggtc

SEQ ID NO: 3865268 - DNA, 25 bp, Homo sapien
ttatggcctgaagaacactcaggag

SEQ ID NO: 3865269 - DNA, 25 bp, Homo sapien
aaatggcaggtgaaaacggtggatt

SEQ ID NO: 3865270 - DNA, 25 bp, Homo sapien
tggaagaagctatagtgtacaagat

SEQ ID NO: 3865271 - DNA, 25 bp, Homo sapien
gatgatagaaaagcgaacagtattt

SEQ ID NO: 3865272 - DNA, 25 bp, Homo sapien
agtaagaaacagtcttctgatgata

SEQ ID NO: 3865273 - DNA, 25 bp, Homo sapien
tgatgatagaaaagcgaacagtatt

SEQ ID NO: 3865274 - DNA, 25 bp, Homo sapien
gaaacagtcttctgatgatagaaaa

SEQ ID NO: 3865275 - DNA, 25 bp, Homo sapien
gtgctgtgaaagtaccagaatttca

SEQ ID NO: 3865276 - DNA, 25 bp, Homo sapien
tgctgtgaaagtaccagaatttcat

SEQ ID NO: 3865277 - DNA, 25 bp, Homo sapien
tagcaaggttgaggtgaataagatg

SEQ ID NO: 3865278 - DNA, 25 bp, Homo sapien
caaggttgaggtgaataagatgatg

SEQ ID NO: 3865279 - DNA, 25 bp, Homo sapien
gcaaggttgaggtgaataagatgat

SEQ ID NO: 3865280 - DNA, 25 bp, Homo sapien
atagcaaggttgaggtgaataagat

SEQ ID NO: 3865281 - DNA, 25 bp, Homo sapien
tggcatacacattgcccacaagcct

SEQ ID NO: 3865282 - DNA, 25 bp, Homo sapien
actgacagtggcatacacattgccc

SEQ ID NO: 3865283 - DNA, 25 bp, Homo sapien
tctgagtagcacaaaaggactgaca

SEQ ID NO: 3865284 - DNA, 25 bp, Homo sapien
tatctttttatcagatctgagtagc

SEQ ID NO: 3865285 - DNA, 25 bp, Homo sapien
ttaagtggtgacagaataatctgtt

SEQ ID NO: 3865286 - DNA, 25 bp, Homo sapien
gtggtgacagaataatctgttttta

SEQ ID NO: 3865287 - DNA, 25 bp, Homo sapien
ggtgacagaataatctgtttttaat

SEQ ID NO: 3865288 - DNA, 25 bp, Homo sapien
aagtggtgacagaataatctgtttt

SEQ ID NO: 3865289 - DNA, 25 bp, Homo sapien
catgcgcattggctaggccgacttg

SEQ ID NO: 3865290 - DNA, 25 bp, Homo sapien
cactgtgccttgagaaatcagctcg

SEQ ID NO: 3865291 - DNA, 25 bp, Homo sapien
ttgagaaatcagctcgtgcaccgcg

SEQ ID NO: 3865292 - DNA, 25 bp, Homo sapien
atggacccatcactcgagcgacggt

SEQ ID NO: 3865293 - DNA, 25 bp, Homo sapien
caggacaataagctcctgggaggct

SEQ ID NO: 3865294 - DNA, 25 bp, Homo sapien
ttcaatccctgtgggaccaacgcag

SEQ ID NO: 3865295 - DNA, 25 bp, Homo sapien
tgtggtgtggttgtcttgatcctcg

SEQ ID NO: 3865296 - DNA, 25 bp, Homo sapien
cctcgaaagtaggacgctcaggatg

SEQ ID NO: 3865297 - DNA, 25 bp, Homo sapien
agtcacagagatccttgccgcgtcc

SEQ ID NO: 3865298 - DNA, 25 bp, Homo sapien
tctttgatgttggtctgcacgcact

SEQ ID NO: 3865299 - DNA, 25 bp, Homo sapien
catgcgcatccaggaagaagtgcca

SEQ ID NO: 3865300 - DNA, 25 bp, Homo sapien
gccagaaaggccagatttaagtcac

SEQ ID NO: 3865301 - DNA, 25 bp, Homo sapien
ctatggcagatagagcaagagggag

SEQ ID NO: 3865302 - DNA, 25 bp, Homo sapien
cagatagagcaagagggagtacaga

SEQ ID NO: 3865303 - DNA, 25 bp, Homo sapien
ggcaggatacagcacaatgccacta

SEQ ID NO: 3865304 - DNA, 25 bp, Homo sapien
ggcagatagagcaagagggagtaca

SEQ ID NO: 3865305 - DNA, 25 bp, Homo sapien
gcagcgtgccgagagccgagatggt

SEQ ID NO: 3865306 - DNA, 25 bp, Homo sapien
tgcagcgtgccgagagccgagatgg

SEQ ID NO: 3865307 - DNA, 25 bp, Homo sapien
gaggttgcgaaggttgcagcgtgcc

SEQ ID NO: 3865308 - DNA, 25 bp, Homo sapien
tctaacccagcctcatagaggaggg

SEQ ID NO: 3865309 - DNA, 25 bp, Homo sapien
ggccaggactccttttgggagagcc

SEQ ID NO: 3865310 - DNA, 25 bp, Homo sapien
ccccatgaggaactacaggaccttg

SEQ ID NO: 3865311 - DNA, 25 bp, Homo sapien
caggactccttttgggagagcccag

SEQ ID NO: 3865312 - DNA, 25 bp, Homo sapien
ggtgccctgcaaatccagtccaagg

SEQ ID NO: 3865313 - DNA, 25 bp, Homo sapien
tcaaggcccctaatgactgaccagg

SEQ ID NO: 3865314 - DNA, 25 bp, Homo sapien
tgtcaggagcccagttaaccagctg

SEQ ID NO: 3865315 - DNA, 25 bp, Homo sapien
tcagcaggtatacaagggaatcccc

SEQ ID NO: 3865316 - DNA, 25 bp, Homo sapien
gtgctcggtgggaaacggaatacag

SEQ ID NO: 3865317 - DNA, 25 bp, Homo sapien
tgggaaacggaatacaggtgtggat

SEQ ID NO: 3865318 - DNA, 25 bp, Homo sapien
cggtgggaaacggaatacaggtgtg

SEQ ID NO: 3865319 - DNA, 25 bp, Homo sapien
ctcggtgggaaacggaatacaggtg

SEQ ID NO: 3865320 - DNA, 25 bp, Homo sapien
ccacctcattgtagatgataaatgt

SEQ ID NO: 3865321 - DNA, 25 bp, Homo sapien
tcaccacctcattgtagatgataaa

SEQ ID NO: 3865322 - DNA, 25 bp, Homo sapien
cattgtagatgataaatgttatggc

SEQ ID NO: 3865323 - DNA, 25 bp, Homo sapien
cttcaccacctcattgtagatgata

SEQ ID NO: 3865324 - DNA, 25 bp, Homo sapien
tagacaggcggtgaaaatgaagagt

SEQ ID NO: 3865325 - DNA, 25 bp, Homo sapien
ccataaggtacatgaaggcaggaag

SEQ ID NO: 3865326 - DNA, 25 bp, Homo sapien
gatgctgtcaatggaactccttgcc

SEQ ID NO: 3865327 - DNA, 25 bp, Homo sapien
tgattccctgatgtgatgctgtcaa

SEQ ID NO: 3865328 - DNA, 25 bp, Homo sapien
ctctccacgctgtcacagtacaccc

SEQ ID NO: 3865329 - DNA, 25 bp, Homo sapien
ctccacgctgtcacagtacaccctg

SEQ ID NO: 3865330 - DNA, 25 bp, Homo sapien
tctccacgctgtcacagtacaccct

SEQ ID NO: 3865331 - DNA, 25 bp, Homo sapien
aagggctatgtcatcctcggtgggc

SEQ ID NO: 3865332 - DNA, 25 bp, Homo sapien
gcttgagtctttggcatcctgagcc

SEQ ID NO: 3865333 - DNA, 25 bp, Homo sapien
tccttgcaaatgacgctgagattca

SEQ ID NO: 3865334 - DNA, 25 bp, Homo sapien
tcctgtatccggagtagacagccct

SEQ ID NO: 3865335 - DNA, 25 bp, Homo sapien
tggattctcttctccccgagcttgg

SEQ ID NO: 3865336 - DNA, 25 bp, Homo sapien
gaacctgcaccgagtgccacttgga

SEQ ID NO: 3865337 - DNA, 25 bp, Homo sapien
agaaaaggaagaagcggcagctagc

SEQ ID NO: 3865338 - DNA, 25 bp, Homo sapien
gaagtgttcacgtttttggcgctta

SEQ ID NO: 3865339 - DNA, 25 bp, Homo sapien
catggagcaccccacatgtctaggt

SEQ ID NO: 3865340 - DNA, 25 bp, Homo sapien
gtgagccatggagcaccccacatgt

SEQ ID NO: 3865341 - DNA, 25 bp, Homo sapien
gatgcggcagattactttccttctg

SEQ ID NO: 3865342 - DNA, 25 bp, Homo sapien
tgttcattctggatgcggcagatta

SEQ ID NO: 3865343 - DNA, 25 bp, Homo sapien
ggaacaaagactgcggaccctggcg

SEQ ID NO: 3865344 - DNA, 25 bp, Homo sapien
acaaagactgcggaccctggcgcgg

SEQ ID NO: 3865345 - DNA, 25 bp, Homo sapien
ctggttctgcgtccggaacaaagac

SEQ ID NO: 3865346 - DNA, 25 bp, Homo sapien
gaagcactggttctgcgtccggaac

SEQ ID NO: 3865347 - DNA, 25 bp, Homo sapien
tgaacaaaagcaggagattagagcc

SEQ ID NO: 3865348 - DNA, 25 bp, Homo sapien
tactgcctctaacatggaggctgct

SEQ ID NO: 3865349 - DNA, 25 bp, Homo sapien
tcgctgccaggacgaagtgatctgc

SEQ ID NO: 3865350 - DNA, 25 bp, Homo sapien
ggaagtctgatggtactgcctctaa

SEQ ID NO: 3865351 - DNA, 25 bp, Homo sapien
cctgttccattccttctagaggctt

SEQ ID NO: 3865352 - DNA, 25 bp, Homo sapien
tgggtcctgttccattccttctaga

SEQ ID NO: 3865353 - DNA, 25 bp, Homo sapien
tgagtctctatagtgccaggtgccc

SEQ ID NO: 3865354 - DNA, 25 bp, Homo sapien
tctgactgccggcatgtctgcctgg

SEQ ID NO: 3865355 - DNA, 25 bp, Homo sapien
ttttctctggcgcaactcgggtcct

SEQ ID NO: 3865356 - DNA, 25 bp, Homo sapien
tattgcggtcgctaaagtgacagac

SEQ ID NO: 3865357 - DNA, 25 bp, Homo sapien
tcagcttctaggaaacaggcaaggg

SEQ ID NO: 3865358 - DNA, 25 bp, Homo sapien
tattccgtgtgtggaagggcgaacc

SEQ ID NO: 3865359 - DNA, 25 bp, Homo sapien
tttgtctgtttgtggcgcttggtca

SEQ ID NO: 3865360 - DNA, 25 bp, Homo sapien
gtttgtggcgcttggtcatgccatt

SEQ ID NO: 3865361 - DNA, 25 bp, Homo sapien
tctgtttgtggcgcttggtcatgcc

SEQ ID NO: 3865362 - DNA, 25 bp, Homo sapien
ttgtctgtttgtggcgcttggtcat

SEQ ID NO: 3865363 - DNA, 25 bp, Homo sapien
taaaaagtcttaggctgccggagcc

SEQ ID NO: 3865364 - DNA, 25 bp, Homo sapien
caacagccgtgagtttacagattcc

SEQ ID NO: 3865365 - DNA, 25 bp, Homo sapien
gataggttccggtacacagacatta

SEQ ID NO: 3865366 - DNA, 25 bp, Homo sapien
gggtccagaaggtcatgctcattag

SEQ ID NO: 3865367 - DNA, 25 bp, Homo sapien
ggttaggcatccacacaaagttctg

SEQ ID NO: 3865368 - DNA, 25 bp, Homo sapien
agtgattctctccagcgctgacccg

SEQ ID NO: 3865369 - DNA, 25 bp, Homo sapien
tctgattccctctcatgaagggcga

SEQ ID NO: 3865370 - DNA, 25 bp, Homo sapien
tctagacgacaaacggactttccac

SEQ ID NO: 3865371 - DNA, 25 bp, Homo sapien
gtcacacttcatgaactggaaccaa

SEQ ID NO: 3865372 - DNA, 25 bp, Homo sapien
cacacttcatgaactggaaccaaac

SEQ ID NO: 3865373 - DNA, 25 bp, Homo sapien
acacttcatgaactggaaccaaacc

SEQ ID NO: 3865374 - DNA, 25 bp, Homo sapien
tcacacttcatgaactggaaccaaa

SEQ ID NO: 3865375 - DNA, 25 bp, Homo sapien
gtcgggcctctcacggggacgcttc

SEQ ID NO: 3865376 - DNA, 25 bp, Homo sapien
cccttggacccctggccggtggcag

SEQ ID NO: 3865377 - DNA, 25 bp, Homo sapien
tgtgctctgggttgtcacaaatcct

SEQ ID NO: 3865378 - DNA, 25 bp, Homo sapien
aaaccaccatttccgctgtgctctg

SEQ ID NO: 3865379 - DNA, 25 bp, Homo sapien
ccgtctcccggagaagcgggcttcg

SEQ ID NO: 3865380 - DNA, 25 bp, Homo sapien
caacatagggcgtgtggcctctcaa

SEQ ID NO: 3865381 - DNA, 25 bp, Homo sapien
atggtaacgctcctcggccggattg

SEQ ID NO: 3865382 - DNA, 25 bp, Homo sapien
gcctccgcggcacggttgccatggt

SEQ ID NO: 3865383 - DNA, 25 bp, Homo sapien
tagccacttaagaaagctggcggct

SEQ ID NO: 3865384 - DNA, 25 bp, Homo sapien
cttaagaaagctggcggctccaggg

SEQ ID NO: 3865385 - DNA, 25 bp, Homo sapien
aagaccctgggtgccggtaggatag

SEQ ID NO: 3865386 - DNA, 25 bp, Homo sapien
ggtgccggtaggatagaaagtcgag

SEQ ID NO: 3865387 - DNA, 25 bp, Homo sapien
tttgtggctccatactaattttaca

SEQ ID NO: 3865388 - DNA, 25 bp, Homo sapien
cagttgattgtatacgcgtgcattt

SEQ ID NO: 3865389 - DNA, 25 bp, Homo sapien
tgtagatgactttgtgcactataga

SEQ ID NO: 3865390 - DNA, 25 bp, Homo sapien
tgtgtgcgcatatctagttttttct

SEQ ID NO: 3865391 - DNA, 25 bp, Homo sapien
ccctgtgcacagcagtgaaatccag

SEQ ID NO: 3865392 - DNA, 25 bp, Homo sapien
acctgtccaggagaggagcgcagct

SEQ ID NO: 3865393 - DNA, 25 bp, Homo sapien
cagcttgatgttgaaaaggaaacta

SEQ ID NO: 3865394 - DNA, 25 bp, Homo sapien
gagacctgtgaggcccaccacagaa

SEQ ID NO: 3865395 - DNA, 25 bp, Homo sapien
gaggccgagtagtctctgacataaa

SEQ ID NO: 3865396 - DNA, 25 bp, Homo sapien
ttttagagtggaggccgagtagtct

SEQ ID NO: 3865397 - DNA, 25 bp, Homo sapien
ccaagtcattttagagtggaggccg

SEQ ID NO: 3865398 - DNA, 25 bp, Homo sapien
ggaggccgagtagtctctgacataa

SEQ ID NO: 3865399 - DNA, 25 bp, Homo sapien
ccatcttctggctcccatttatctg

SEQ ID NO: 3865400 - DNA, 25 bp, Homo sapien
caggagccaccactcaaatttctgg

SEQ ID NO: 3865401 - DNA, 25 bp, Homo sapien
attttcaggaaattgtgggcaccag

SEQ ID NO: 3865402 - DNA, 25 bp, Homo sapien
ttattttcaggaaattgtgggcacc

SEQ ID NO: 3865403 - DNA, 25 bp, Homo sapien
aggcccacctcgatattctgatgtg

SEQ ID NO: 3865404 - DNA, 25 bp, Homo sapien
agccaaagacaggtcccgccttcca

SEQ ID NO: 3865405 - DNA, 25 bp, Homo sapien
cccacctcgatattctgatgtgatg

SEQ ID NO: 3865406 - DNA, 25 bp, Homo sapien
ttccaggcccacctcgatattctga

SEQ ID NO: 3865407 - DNA, 25 bp, Homo sapien
gaccgggctctaatgctggtgccac

SEQ ID NO: 3865408 - DNA, 25 bp, Homo sapien
aatgctggtgccacagctccaggtg

SEQ ID NO: 3865409 - DNA, 25 bp, Homo sapien
tgctggtgccacagctccaggtgag

SEQ ID NO: 3865410 - DNA, 25 bp, Homo sapien
ccgggctctaatgctggtgccacag

SEQ ID NO: 3865411 - DNA, 25 bp, Homo sapien
tactgaaggctgctgaacttgttct

SEQ ID NO: 3865412 - DNA, 25 bp, Homo sapien
tctccatcacagaggtggtgtgaca

SEQ ID NO: 3865413 - DNA, 25 bp, Homo sapien
gtggtgtgacagcagtctgagggca

SEQ ID NO: 3865414 - DNA, 25 bp, Homo sapien
ccatcacagaggtggtgtgacagca

SEQ ID NO: 3865415 - DNA, 25 bp, Homo sapien
aatgggatggtcaggagagcacatt

SEQ ID NO: 3865416 - DNA, 25 bp, Homo sapien
gggatggtcaggagagcacattgag

SEQ ID NO: 3865417 - DNA, 25 bp, Homo sapien
tgggatggtcaggagagcacattga

SEQ ID NO: 3865418 - DNA, 25 bp, Homo sapien
atgggatggtcaggagagcacattg

SEQ ID NO: 3865419 - DNA, 25 bp, Homo sapien
gctgtacactttgcagtggaattcc

SEQ ID NO: 3865420 - DNA, 25 bp, Homo sapien
acatactaagttgctgtacactttg

SEQ ID NO: 3865421 - DNA, 25 bp, Homo sapien
tactaagttgctgtacactttgcag

SEQ ID NO: 3865422 - DNA, 25 bp, Homo sapien
agttgctgtacactttgcagtggaa

SEQ ID NO: 3865423 - DNA, 25 bp, Homo sapien
tgagaactactcactgtacaggatt

SEQ ID NO: 3865424 - DNA, 25 bp, Homo sapien
gcaggtgctacatgaaccaatgcca

SEQ ID NO: 3865425 - DNA, 25 bp, Homo sapien
tttaggcatttgttcatagcaggtg

SEQ ID NO: 3865426 - DNA, 25 bp, Homo sapien
catgattctgtctttcgtaggctac

SEQ ID NO: 3865427 - DNA, 25 bp, Homo sapien
gcgatggctgcggatcccgctgacc

SEQ ID NO: 3865428 - DNA, 25 bp, Homo sapien
gggggcccagcgcaatggtctccaa

SEQ ID NO: 3865429 - DNA, 25 bp, Homo sapien
gcataagcaagcgatggctgcggat

SEQ ID NO: 3865430 - DNA, 25 bp, Homo sapien
ggtggcataagcaagcgatggctgc

SEQ ID NO: 3865431 - DNA, 25 bp, Homo sapien
gtatgctcaagtatgtaagggtcac

SEQ ID NO: 3865432 - DNA, 25 bp, Homo sapien
aagggtcacatttagctttcacttg

SEQ ID NO: 3865433 - DNA, 25 bp, Homo sapien
tgaacaatccgtttttcactaacaa

SEQ ID NO: 3865434 - DNA, 25 bp, Homo sapien
ctatgtatgctcaagtatgtaaggg

SEQ ID NO: 3865435 - DNA, 25 bp, Homo sapien
cagaagcatcatctttttggaaagt

SEQ ID NO: 3865436 - DNA, 25 bp, Homo sapien
cgtcttctgacctttgttgctgtca

SEQ ID NO: 3865437 - DNA, 25 bp, Homo sapien
atagatgcagaagcatcatcttttt

SEQ ID NO: 3865438 - DNA, 25 bp, Homo sapien
aacccatcttcttcaacgtcttctg

SEQ ID NO: 3865439 - DNA, 25 bp, Homo sapien
tcccccatcatcttcctcagtccat

SEQ ID NO: 3865440 - DNA, 25 bp, Homo sapien
ccccatcatcttcctcagtccatct

SEQ ID NO: 3865441 - DNA, 25 bp, Homo sapien
ccatcatcttcctcagtccatctcc

SEQ ID NO: 3865442 - DNA, 25 bp, Homo sapien
tcattcccccatcatcttcctcagt

SEQ ID NO: 3865443 - DNA, 25 bp, Homo sapien
taagctgctaggcacctgagtgggc

SEQ ID NO: 3865444 - DNA, 25 bp, Homo sapien
caagactcccttaagttagaggcaa

SEQ ID NO: 3865445 - DNA, 25 bp, Homo sapien
tttggcatctcgtcagccgacctgg

SEQ ID NO: 3865446 - DNA, 25 bp, Homo sapien
taaagcttctatgtgggctgagagc

SEQ ID NO: 3865447 - DNA, 25 bp, Homo sapien
tccaggccttccagcagcatcgtag

SEQ ID NO: 3865448 - DNA, 25 bp, Homo sapien
tatgtgacatgtgggctgaagcctg

SEQ ID NO: 3865449 - DNA, 25 bp, Homo sapien
gggacccgtgaacgcaatcgtctcc

SEQ ID NO: 3865450 - DNA, 25 bp, Homo sapien
gcagcatcgtagaacctgctctatg

SEQ ID NO: 3865451 - DNA, 25 bp, Homo sapien
tgaatttggccatattttctgatgt

SEQ ID NO: 3865452 - DNA, 25 bp, Homo sapien
cttgctgaatttggccatattttct

SEQ ID NO: 3865453 - DNA, 25 bp, Homo sapien
cctcttgctgaatttggccatattt

SEQ ID NO: 3865454 - DNA, 25 bp, Homo sapien
aggttcctcttgctgaatttggcca

SEQ ID NO: 3865455 - DNA, 25 bp, Homo sapien
tggctgtgccaagattctagaggct

SEQ ID NO: 3865456 - DNA, 25 bp, Homo sapien
cgagtaccccttgtacggcagcctg

SEQ ID NO: 3865457 - DNA, 25 bp, Homo sapien
tgggaacacagcctaggtctgtggc

SEQ ID NO: 3865458 - DNA, 25 bp, Homo sapien
ccccttgtacggcagcctgggaaca

SEQ ID NO: 3865459 - DNA, 25 bp, Homo sapien
tgcagccaatcactcaggccactga

SEQ ID NO: 3865460 - DNA, 25 bp, Homo sapien
tgatacaggcccctgttgctcagta

SEQ ID NO: 3865461 - DNA, 25 bp, Homo sapien
agccaatcactcaggccactgaggg

SEQ ID NO: 3865462 - DNA, 25 bp, Homo sapien
ccctgttgctcagtaactggaagaa

SEQ ID NO: 3865463 - DNA, 25 bp, Homo sapien
gttttcccaatgtgctgacaagcag

SEQ ID NO: 3865464 - DNA, 25 bp, Homo sapien
gtctgcacggtggtttccgagtctc

SEQ ID NO: 3865465 - DNA, 25 bp, Homo sapien
ggaaggactcgaggtctgcacggtg

SEQ ID NO: 3865466 - DNA, 25 bp, Homo sapien
acccagttttcccaatgtgctgaca

SEQ ID NO: 3865467 - DNA, 25 bp, Homo sapien
tacttgttgcggaggtgtttccgtg

SEQ ID NO: 3865468 - DNA, 25 bp, Homo sapien
ccagtgtagattgttctcttcggaa

SEQ ID NO: 3865469 - DNA, 25 bp, Homo sapien
ttctcttcggaaacagcaggtgatg

SEQ ID NO: 3865470 - DNA, 25 bp, Homo sapien
acactgtggattacttgttgcggag

SEQ ID NO: 3865471 - DNA, 25 bp, Homo sapien
ccaactgctggtaggcttttgcttt

SEQ ID NO: 3865472 - DNA, 25 bp, Homo sapien
caccaactgctggtaggcttttgct

SEQ ID NO: 3865473 - DNA, 25 bp, Homo sapien
tcagaagcaccaactgctggtaggc

SEQ ID NO: 3865474 - DNA, 25 bp, Homo sapien
gaagcaccaactgctggtaggcttt

SEQ ID NO: 3865475 - DNA, 25 bp, Homo sapien
catggggtggtaagtctccttgtcc

SEQ ID NO: 3865476 - DNA, 25 bp, Homo sapien
gagtgaccctgtatgcaacacaggt

SEQ ID NO: 3865477 - DNA, 25 bp, Homo sapien
taaagagtgaccctgtatgcaacac

SEQ ID NO: 3865478 - DNA, 25 bp, Homo sapien
aatgataaagagtgaccctgtatgc

SEQ ID NO: 3865479 - DNA, 25 bp, Homo sapien
tgaccctgtatgcaacacaggtgat

SEQ ID NO: 3865480 - DNA, 25 bp, Homo sapien
attcaaagagtatgctcaggatcat

SEQ ID NO: 3865481 - DNA, 25 bp, Homo sapien
gattcaaagagtatgctcaggatca

SEQ ID NO: 3865482 - DNA, 25 bp, Homo sapien
ggattcaaagagtatgctcaggatc

SEQ ID NO: 3865483 - DNA, 25 bp, Homo sapien
gggattcaaagagtatgctcaggat

SEQ ID NO: 3865484 - DNA, 25 bp, Homo sapien
aaataaatttctgcatgaaacttac

SEQ ID NO: 3865485 - DNA, 25 bp, Homo sapien
aaggacataactttgtaagtcatgg

SEQ ID NO: 3865486 - DNA, 25 bp, Homo sapien
catggtcaaaataaatttctgcatg

SEQ ID NO: 3865487 - DNA, 25 bp, Homo sapien
cataactttgtaagtcatggtcaaa

SEQ ID NO: 3865488 - DNA, 25 bp, Homo sapien
ttttcttctggtcctgagaagtttc

SEQ ID NO: 3865489 - DNA, 25 bp, Homo sapien
ctttattttcttctggtcctgagaa

SEQ ID NO: 3865490 - DNA, 25 bp, Homo sapien
tcttctggtcctgagaagtttccat

SEQ ID NO: 3865491 - DNA, 25 bp, Homo sapien
ttattttcttctggtcctgagaagt

SEQ ID NO: 3865492 - DNA, 25 bp, Homo sapien
ccacgaagcgttttggattccaagt

SEQ ID NO: 3865493 - DNA, 25 bp, Homo sapien
tggattccaagttgcggcagtagga

SEQ ID NO: 3865494 - DNA, 25 bp, Homo sapien
agcagccgccacgaccgcaaaaaaa

SEQ ID NO: 3865495 - DNA, 25 bp, Homo sapien
tgtcctgagagcaccacgaagcgtt

SEQ ID NO: 3865496 - DNA, 25 bp, Homo sapien
acctttgcacgctccccgaaggtgt

SEQ ID NO: 3865497 - DNA, 25 bp, Homo sapien
gcagccgctagcaggagcaactcgg

SEQ ID NO: 3865498 - DNA, 25 bp, Homo sapien
gctagcaggagcaactcggcgctgc

SEQ ID NO: 3865499 - DNA, 25 bp, Homo sapien
ggcggctgcggttccacctttgcac

SEQ ID NO: 3865500 - DNA, 25 bp, Homo sapien
cagaaaactatcacggcagctgaat

SEQ ID NO: 3865501 - DNA, 25 bp, Homo sapien
aaactatcacggcagctgaatttgt

SEQ ID NO: 3865502 - DNA, 25 bp, Homo sapien
caactggtaactcgcaggatgacaa

SEQ ID NO: 3865503 - DNA, 25 bp, Homo sapien
ttttccaactggtaactcgcaggat

SEQ ID NO: 3865504 - DNA, 25 bp, Homo sapien
tatttggtccaagagctcatcaagt

SEQ ID NO: 3865505 - DNA, 25 bp, Homo sapien
ttatttggtccaagagctcatcaag

SEQ ID NO: 3865506 - DNA, 25 bp, Homo sapien
acatcattaagtaccaggcttagtg

SEQ ID NO: 3865507 - DNA, 25 bp, Homo sapien
cattaagtaccaggcttagtgatat

SEQ ID NO: 3865508 - DNA, 25 bp, Homo sapien
taagtaccaggcttagtgatatgtt

SEQ ID NO: 3865509 - DNA, 25 bp, Homo sapien
taccaggcttagtgatatgttataa

SEQ ID NO: 3865510 - DNA, 25 bp, Homo sapien
cacctaggtgttgaacccactgatg

SEQ ID NO: 3865511 - DNA, 25 bp, Homo sapien
gaaaagaaggaagagccgcatcacc

SEQ ID NO: 3865512 - DNA, 25 bp, Homo sapien
aagtcacctcacttgagtgctgggc

SEQ ID NO: 3865513 - DNA, 25 bp, Homo sapien
tgtcgaaatctctattctgagcaga

SEQ ID NO: 3865514 - DNA, 25 bp, Homo sapien
catacgagagattgcaaattttatc

SEQ ID NO: 3865515 - DNA, 25 bp, Homo sapien
caactcacaggaactattgcctctg

SEQ ID NO: 3865516 - DNA, 25 bp, Homo sapien
gccttttgggtgcaactcacaggaa

SEQ ID NO: 3865517 - DNA, 25 bp, Homo sapien
tccaaagctggagcatacgagagat

SEQ ID NO: 3865518 - DNA, 25 bp, Homo sapien
acatctacattgagatcccagtaac

SEQ ID NO: 3865519 - DNA, 25 bp, Homo sapien
attttgggaagcagacgattcagct

SEQ ID NO: 3865520 - DNA, 25 bp, Homo sapien
cagcagcctctgtctggacataaca

SEQ ID NO: 3865521 - DNA, 25 bp, Homo sapien
tctgtctggacataacatctacatt

SEQ ID NO: 3865522 - DNA, 25 bp, Homo sapien
tagcactgaggttagacatccacaa

SEQ ID NO: 3865523 - DNA, 25 bp, Homo sapien
gcttcaggttctgtgtgactagcac

SEQ ID NO: 3865524 - DNA, 25 bp, Homo sapien
ctcttgagtgaattagggccaggca

SEQ ID NO: 3865525 - DNA, 25 bp, Homo sapien
aattgaagaccccatagagccagca

SEQ ID NO: 3865526 - DNA, 25 bp, Homo sapien
attaatgcctctctatttctgtagt

SEQ ID NO: 3865527 - DNA, 25 bp, Homo sapien
acaaaaagttattaatgcctctcta

SEQ ID NO: 3865528 - DNA, 25 bp, Homo sapien
ctagggatagttcagaaagacaaaa

SEQ ID NO: 3865529 - DNA, 25 bp, Homo sapien
tagtttctggggtataatttgttca

SEQ ID NO: 3865530 - DNA, 25 bp, Homo sapien
ccacaggtcctgttgtaccatttgg

SEQ ID NO: 3865531 - DNA, 25 bp, Homo sapien
cacagagagaagctaataccacagg

SEQ ID NO: 3865532 - DNA, 25 bp, Homo sapien
ggtctaactaatactactccactac

SEQ ID NO: 3865533 - DNA, 25 bp, Homo sapien
actccactacctggcccaacaggat

SEQ ID NO: 3865534 - DNA, 25 bp, Homo sapien
tggacactgagaatgcaggatattc

SEQ ID NO: 3865535 - DNA, 25 bp, Homo sapien
gctggacactgagaatgcaggatat

SEQ ID NO: 3865536 - DNA, 25 bp, Homo sapien
tggtaagtctcctcagaaaaacgta

SEQ ID NO: 3865537 - DNA, 25 bp, Homo sapien
aaaaacgtagttgtcctcgatcatc

SEQ ID NO: 3865538 - DNA, 25 bp, Homo sapien
gtccatgctggagtgtgtacacaga

SEQ ID NO: 3865539 - DNA, 25 bp, Homo sapien
tgccgttgaagtggaaagcctctct

SEQ ID NO: 3865540 - DNA, 25 bp, Homo sapien
taattttgtcccagtagagatacca

SEQ ID NO: 3865541 - DNA, 25 bp, Homo sapien
taccatctggtattggaagcagcca

SEQ ID NO: 3865542 - DNA, 25 bp, Homo sapien
gcaaaacataacgtgagctattttt

SEQ ID NO: 3865543 - DNA, 25 bp, Homo sapien
aacataacgtgagctattttttgtg

SEQ ID NO: 3865544 - DNA, 25 bp, Homo sapien
aaaacataacgtgagctattttttg

SEQ ID NO: 3865545 - DNA, 25 bp, Homo sapien
cataacgtgagctattttttgtgaa

SEQ ID NO: 3865546 - DNA, 25 bp, Homo sapien
aatcagttagacatcctcagggacc

SEQ ID NO: 3865547 - DNA, 25 bp, Homo sapien
aacattcccgagtggacagaatcag

SEQ ID NO: 3865548 - DNA, 25 bp, Homo sapien
agaccaagtccgaaacattcccgag

SEQ ID NO: 3865549 - DNA, 25 bp, Homo sapien
acagaatcagttagacatcctcagg

SEQ ID NO: 3865550 - DNA, 25 bp, Homo sapien
aaaatagtgttaacagagtcactca

SEQ ID NO: 3865551 - DNA, 25 bp, Homo sapien
gagtcactcaatatagggttgcaaa

SEQ ID NO: 3865552 - DNA, 25 bp, Homo sapien
taacagagtcactcaatatagggtt

SEQ ID NO: 3865553 - DNA, 25 bp, Homo sapien
caatatagggttgcaaaaagccttc

SEQ ID NO: 3865554 - DNA, 25 bp, Homo sapien
caacacaggctttgatgggactcag

SEQ ID NO: 3865555 - DNA, 25 bp, Homo sapien
tcaatggtggatgttgggaaacaac

SEQ ID NO: 3865556 - DNA, 25 bp, Homo sapien
tgtttaggtgattttgagaggctgc

SEQ ID NO: 3865557 - DNA, 25 bp, Homo sapien
caggctgaatgctcaggatctaggc

SEQ ID NO: 3865558 - DNA, 25 bp, Homo sapien
catctgagagcggaagagcaagtac

SEQ ID NO: 3865559 - DNA, 25 bp, Homo sapien
gagcaagtactctctaccatagaag

SEQ ID NO: 3865560 - DNA, 25 bp, Homo sapien
tacagtttgatagctctaaccagca

SEQ ID NO: 3865561 - DNA, 25 bp, Homo sapien
tcctcagggcatcagttcatcagtc

SEQ ID NO: 3865562 - DNA, 25 bp, Homo sapien
gaagttgggtactaaacattctgta

SEQ ID NO: 3865563 - DNA, 25 bp, Homo sapien
cacatggtgagttcatccttatagc

SEQ ID NO: 3865564 - DNA, 25 bp, Homo sapien
gattgaatggcccagcatttctatg

SEQ ID NO: 3865565 - DNA, 25 bp, Homo sapien
ttatagcttcctagaagttgggtac

SEQ ID NO: 3865566 - DNA, 25 bp, Homo sapien
gaaaacagatggttcagctgcaaac

SEQ ID NO: 3865567 - DNA, 25 bp, Homo sapien
gaaaattggagagactgtgttaccc

SEQ ID NO: 3865568 - DNA, 25 bp, Homo sapien
cgatacttgtgatggctgcgagcca

SEQ ID NO: 3865569 - DNA, 25 bp, Homo sapien
gagctcacctttgccttgataagaa

SEQ ID NO: 3865570 - DNA, 25 bp, Homo sapien
tgagccctcagttatgcccagacat

SEQ ID NO: 3865571 - DNA, 25 bp, Homo sapien
tcatgttccgccctgtacgtctggc

SEQ ID NO: 3865572 - DNA, 25 bp, Homo sapien
agctgaagggtgataagtgaccaga

SEQ ID NO: 3865573 - DNA, 25 bp, Homo sapien
ttataataatgtccgttctacaatt

SEQ ID NO: 3865574 - DNA, 25 bp, Homo sapien
aggagcgtagctcgatgttgaaaaa

SEQ ID NO: 3865575 - DNA, 25 bp, Homo sapien
tctgcaggggcatgtcgaggagagg

SEQ ID NO: 3865576 - DNA, 25 bp, Homo sapien
ggagcgtagctcgatgttgaaaaaa

SEQ ID NO: 3865577 - DNA, 25 bp, Homo sapien
catgtcgaggagaggagcgtagctc

SEQ ID NO: 3865578 - DNA, 25 bp, Homo sapien
ccaggagaccagtgtggatcgcgcc

SEQ ID NO: 3865579 - DNA, 25 bp, Homo sapien
tggatcgcgccttggagacgccctt

SEQ ID NO: 3865580 - DNA, 25 bp, Homo sapien
agaccagtgtggatcgcgccttgga

SEQ ID NO: 3865581 - DNA, 25 bp, Homo sapien
tgtggatcgcgccttggagacgccc

SEQ ID NO: 3865582 - DNA, 25 bp, Homo sapien
cacttcacgtctatgctcaggtaca

SEQ ID NO: 3865583 - DNA, 25 bp, Homo sapien
aatctccacttcacgtctatgctca

SEQ ID NO: 3865584 - DNA, 25 bp, Homo sapien
tccaatctccacttcacgtctatgc

SEQ ID NO: 3865585 - DNA, 25 bp, Homo sapien
tctccacttcacgtctatgctcagg

SEQ ID NO: 3865586 - DNA, 25 bp, Homo sapien
ctttcttatcaaggcaaaggtgagt

SEQ ID NO: 3865587 - DNA, 25 bp, Homo sapien
gtgttgaaccaataaataattcatc

SEQ ID NO: 3865588 - DNA, 25 bp, Homo sapien
tagtgttgaaccaataaataattca

SEQ ID NO: 3865589 - DNA, 25 bp, Homo sapien
cttatcaaggcaaaggtgagttcta

SEQ ID NO: 3865590 - DNA, 25 bp, Homo sapien
tcatccgaccttcgttgctgtcagt

SEQ ID NO: 3865591 - DNA, 25 bp, Homo sapien
caacatcatccgaccttcgttgctg

SEQ ID NO: 3865592 - DNA, 25 bp, Homo sapien
atccgaccttcgttgctgtcagtaa

SEQ ID NO: 3865593 - DNA, 25 bp, Homo sapien
catcatccgaccttcgttgctgtca

SEQ ID NO: 3865594 - DNA, 25 bp, Homo sapien
aatcctgcacattcccggagaaaga

SEQ ID NO: 3865595 - DNA, 25 bp, Homo sapien
gcaggagcaactccgtgctacgcgg

SEQ ID NO: 3865596 - DNA, 25 bp, Homo sapien
tacgcggcccatcggctccggggat

SEQ ID NO: 3865597 - DNA, 25 bp, Homo sapien
tccttcacccactccccggagatgt

SEQ ID NO: 3865598 - DNA, 25 bp, Homo sapien
ctccggaatgaccaccatttagcca

SEQ ID NO: 3865599 - DNA, 25 bp, Homo sapien
ccggaatgaccaccatttagccaat

SEQ ID NO: 3865600 - DNA, 25 bp, Homo sapien
tcctccggaatgaccaccatttagc

SEQ ID NO: 3865601 - DNA, 25 bp, Homo sapien
tccggaatgaccaccatttagccaa

SEQ ID NO: 3865602 - DNA, 25 bp, Homo sapien
cccagctgcttcatgccgcacacca

SEQ ID NO: 3865603 - DNA, 25 bp, Homo sapien
tgcttcatgccgcacaccagcacca

SEQ ID NO: 3865604 - DNA, 25 bp, Homo sapien
cagctgcttcatgccgcacaccagc

SEQ ID NO: 3865605 - DNA, 25 bp, Homo sapien
ctgccccagctgcttcatgccgcac

SEQ ID NO: 3865606 - DNA, 25 bp, Homo sapien
gagaagtgtgccgagagagggtaca

SEQ ID NO: 3865607 - DNA, 25 bp, Homo sapien
tccagcatcatcaggtcagtgagaa

SEQ ID NO: 3865608 - DNA, 25 bp, Homo sapien
gtccagcatcatcaggtcagtgaga

SEQ ID NO: 3865609 - DNA, 25 bp, Homo sapien
tcagtgagaagtgtgccgagagagg

SEQ ID NO: 3865610 - DNA, 25 bp, Homo sapien
cacagaagggacaccttttgccctg

SEQ ID NO: 3865611 - DNA, 25 bp, Homo sapien
tcaggttctgggctccacagaaggg

SEQ ID NO: 3865612 - DNA, 25 bp, Homo sapien
ctgtgatgatagacagggaaactga

SEQ ID NO: 3865613 - DNA, 25 bp, Homo sapien
cttttgccctgattctctgtgatga

SEQ ID NO: 3865614 - DNA, 25 bp, Homo sapien
aggaagggtgggattctgacaggtc

SEQ ID NO: 3865615 - DNA, 25 bp, Homo sapien
tggcaatcaccccctgtcactgaaa

SEQ ID NO: 3865616 - DNA, 25 bp, Homo sapien
tcctggaggacttcgatgggagaca

SEQ ID NO: 3865617 - DNA, 25 bp, Homo sapien
cacttcatggactggaccaaaaccc

SEQ ID NO: 3865618 - DNA, 25 bp, Homo sapien
attaccgtccttcgtgcctccaagt

SEQ ID NO: 3865619 - DNA, 25 bp, Homo sapien
ctagtaacaccttggtaacccaatg

SEQ ID NO: 3865620 - DNA, 25 bp, Homo sapien
aacccaatgattaccgtccttcgtg

SEQ ID NO: 3865621 - DNA, 25 bp, Homo sapien
tagtaacaccttggtaacccaatga

SEQ ID NO: 3865622 - DNA, 25 bp, Homo sapien
tctggcacttactgagcaggcaagg

SEQ ID NO: 3865623 - DNA, 25 bp, Homo sapien
taacctgacaattgccactatagag

SEQ ID NO: 3865624 - DNA, 25 bp, Homo sapien
gaattgagctatgtaaatctgccca

SEQ ID NO: 3865625 - DNA, 25 bp, Homo sapien
tgcccacatagttgcagtgaacctt

SEQ ID NO: 3865626 - DNA, 25 bp, Homo sapien
tgactcatatttgcctccttttaaa

SEQ ID NO: 3865627 - DNA, 25 bp, Homo sapien
ctcatatttgcctccttttaaattt

SEQ ID NO: 3865628 - DNA, 25 bp, Homo sapien
gactcatatttgcctccttttaaat

SEQ ID NO: 3865629 - DNA, 25 bp, Homo sapien
ctgactcatatttgcctccttttaa

SEQ ID NO: 3865630 - DNA, 25 bp, Homo sapien
gcaataaactcaaggagacctgtga

SEQ ID NO: 3865631 - DNA, 25 bp, Homo sapien
aactcaaggagacctgtgatgccca

SEQ ID NO: 3865632 - DNA, 25 bp, Homo sapien
ttcttttgcggggatctgtccagga

SEQ ID NO: 3865633 - DNA, 25 bp, Homo sapien
cactttgcacagcaataaactcaag

SEQ ID NO: 3865634 - DNA, 25 bp, Homo sapien
tgagaggagattctagggtgaagcc

SEQ ID NO: 3865635 - DNA, 25 bp, Homo sapien
ggagattctagggtgaagccagacc

SEQ ID NO: 3865636 - DNA, 25 bp, Homo sapien
gattctagggtgaagccagacctgg

SEQ ID NO: 3865637 - DNA, 25 bp, Homo sapien
attctagggtgaagccagacctgga

SEQ ID NO: 3865638 - DNA, 25 bp, Homo sapien
ttgtggcccacaaatagataactat

SEQ ID NO: 3865639 - DNA, 25 bp, Homo sapien
aaaaaacaggttgctagatgggatg

SEQ ID NO: 3865640 - DNA, 25 bp, Homo sapien
tgaactgttcagagggattttttgg

SEQ ID NO: 3865641 - DNA, 25 bp, Homo sapien
ctttcttgtgccttgtagagcaact

SEQ ID NO: 3865642 - DNA, 25 bp, Homo sapien
gatgcgatgccctgacatgggttgc

SEQ ID NO: 3865643 - DNA, 25 bp, Homo sapien
gcctggagctgtgcgcaatgagcaa

SEQ ID NO: 3865644 - DNA, 25 bp, Homo sapien
tgatggccctcccagatctgcatgg

SEQ ID NO: 3865645 - DNA, 25 bp, Homo sapien
cataaaactcttgggaactatcaca

SEQ ID NO: 3865646 - DNA, 25 bp, Homo sapien
ggaggggctgtggtagggccttgaa

SEQ ID NO: 3865647 - DNA, 25 bp, Homo sapien
agaggaggggctgtggtagggcctt

SEQ ID NO: 3865648 - DNA, 25 bp, Homo sapien
gggctgtggtagggccttgaaggac

SEQ ID NO: 3865649 - DNA, 25 bp, Homo sapien
gagaggaggggctgtggtagggcct

SEQ ID NO: 3865650 - DNA, 25 bp, Homo sapien
cagtgtcttctgcagttacattgcc

SEQ ID NO: 3865651 - DNA, 25 bp, Homo sapien
cctcagtgtcttctgcagttacatt

SEQ ID NO: 3865652 - DNA, 25 bp, Homo sapien
gtgtcttctgcagttacattgcctt

SEQ ID NO: 3865653 - DNA, 25 bp, Homo sapien
ctcctcagtgtcttctgcagttaca

SEQ ID NO: 3865654 - DNA, 25 bp, Homo sapien
cagccgaacaatccgttttccatta

SEQ ID NO: 3865655 - DNA, 25 bp, Homo sapien
atttagttgtcagccgaacaatccg

SEQ ID NO: 3865656 - DNA, 25 bp, Homo sapien
tagttgtcagccgaacaatccgttt

SEQ ID NO: 3865657 - DNA, 25 bp, Homo sapien
tgtcagccgaacaatccgttttcca

SEQ ID NO: 3865658 - DNA, 25 bp, Homo sapien
ctatgcttaggtacataaggctcac

SEQ ID NO: 3865659 - DNA, 25 bp, Homo sapien
atgtctatgcttaggtacataaggc

SEQ ID NO: 3865660 - DNA, 25 bp, Homo sapien
gtctatgcttaggtacataaggctc

SEQ ID NO: 3865661 - DNA, 25 bp, Homo sapien
tcatgtctatgcttaggtacataag

SEQ ID NO: 3865662 - DNA, 25 bp, Homo sapien
cgccgctgccgatgggttcatggat

SEQ ID NO: 3865663 - DNA, 25 bp, Homo sapien
aggaggacgaggtgtctccaatgcc

SEQ ID NO: 3865664 - DNA, 25 bp, Homo sapien
gccgatgggttcatggatctgtcct

SEQ ID NO: 3865665 - DNA, 25 bp, Homo sapien
caatgccaagcttcggcagcagaag

SEQ ID NO: 3865666 - DNA, 25 bp, Homo sapien
caggtattacttcctacggaatgac

SEQ ID NO: 3865667 - DNA, 25 bp, Homo sapien
tatcaggaaactggactgcaattac

SEQ ID NO: 3865668 - DNA, 25 bp, Homo sapien
aaaactcatagccaactcatcaggt

SEQ ID NO: 3865669 - DNA, 25 bp, Homo sapien
gcaattacatgcgtggagtccttat

SEQ ID NO: 3865670 - DNA, 25 bp, Homo sapien
tatgtttgcctgacccctgtaggac

SEQ ID NO: 3865671 - DNA, 25 bp, Homo sapien
tttgttcttctcatactggaggtgg

SEQ ID NO: 3865672 - DNA, 25 bp, Homo sapien
gctggacctgcagccttcactgggt

SEQ ID NO: 3865673 - DNA, 25 bp, Homo sapien
tcctgacttcttcatggagtgcggg

SEQ ID NO: 3865674 - DNA, 25 bp, Homo sapien
cctttattagtgttgattatattcc

SEQ ID NO: 3865675 - DNA, 25 bp, Homo sapien
ctcctttattagtgttgattatatt

SEQ ID NO: 3865676 - DNA, 25 bp, Homo sapien
tcctcctttattagtgttgattata

SEQ ID NO: 3865677 - DNA, 25 bp, Homo sapien
cttcctcctttattagtgttgatta

SEQ ID NO: 3865678 - DNA, 25 bp, Homo sapien
gacggaagggcaggattctgacagc

SEQ ID NO: 3865679 - DNA, 25 bp, Homo sapien
ctggagacggaagggcaggattctg

SEQ ID NO: 3865680 - DNA, 25 bp, Homo sapien
gagacggaagggcaggattctgaca

SEQ ID NO: 3865681 - DNA, 25 bp, Homo sapien
acggaagggcaggattctgacagct

SEQ ID NO: 3865682 - DNA, 25 bp, Homo sapien
gccacttcatggactgggaccaaac

SEQ ID NO: 3865683 - DNA, 25 bp, Homo sapien
ctgaagtagttgcatttcctgaagg

SEQ ID NO: 3865684 - DNA, 25 bp, Homo sapien
ccacttcatggactgggaccaaacc

SEQ ID NO: 3865685 - DNA, 25 bp, Homo sapien
gtgccacttcatggactgggaccaa

SEQ ID NO: 3865686 - DNA, 25 bp, Homo sapien
gcctctcacggggacgctcccgcca

SEQ ID NO: 3865687 - DNA, 25 bp, Homo sapien
ggtcgggcctctcacggggacgctc

SEQ ID NO: 3865688 - DNA, 25 bp, Homo sapien
ctgggtcgggcctctcacggggacg

SEQ ID NO: 3865689 - DNA, 25 bp, Homo sapien
tcgggcctctcacggggacgctccc

SEQ ID NO: 3865690 - DNA, 25 bp, Homo sapien
tgttccctaagctgtcacaaatcct

SEQ ID NO: 3865691 - DNA, 25 bp, Homo sapien
ttctgttccctaagctgtcacaaat

SEQ ID NO: 3865692 - DNA, 25 bp, Homo sapien
tgccgcttggtcctcgggctcgcag

SEQ ID NO: 3865693 - DNA, 25 bp, Homo sapien
cccaggagtgccgcttggtcctcgg

SEQ ID NO: 3865694 - DNA, 25 bp, Homo sapien
cgagaagcccccttgttagtgtatg

SEQ ID NO: 3865695 - DNA, 25 bp, Homo sapien
ggcgacctggcagttcttgggctcc

SEQ ID NO: 3865696 - DNA, 25 bp, Homo sapien
agtgcagcctgtccttaggcgtagg

SEQ ID NO: 3865697 - DNA, 25 bp, Homo sapien
taatggtgggcgacctggcagttct

SEQ ID NO: 3865698 - DNA, 25 bp, Homo sapien
cacgtccacgtccgcgaaaaaggca

SEQ ID NO: 3865699 - DNA, 25 bp, Homo sapien
gaaattcacctccacaaagctggag

SEQ ID NO: 3865700 - DNA, 25 bp, Homo sapien
tccacaaagctggagcaccagctgt

SEQ ID NO: 3865701 - DNA, 25 bp, Homo sapien
cacctccacaaagctggagcaccag

SEQ ID NO: 3865702 - DNA, 25 bp, Homo sapien
aaattcacctccacaaagctggagc

SEQ ID NO: 3865703 - DNA, 25 bp, Homo sapien
ctacgagtgccatgagtaagctgag

SEQ ID NO: 3865704 - DNA, 25 bp, Homo sapien
gaatcacaattcaattgggcattgt

SEQ ID NO: 3865705 - DNA, 25 bp, Homo sapien
gcctggtcagctgtatgcatccaat

SEQ ID NO: 3865706 - DNA, 25 bp, Homo sapien
tgatagagttgacaggaatcacaat

SEQ ID NO: 3865707 - DNA, 25 bp, Homo sapien
aacagaaacatagtaacattattcc

SEQ ID NO: 3865708 - DNA, 25 bp, Homo sapien
gtgcctgatgcatgactgtcctcag

SEQ ID NO: 3865709 - DNA, 25 bp, Homo sapien
gaaacatagtaacattattccaata

SEQ ID NO: 3865710 - DNA, 25 bp, Homo sapien
gaaaaagatattgaggtgctgttag

SEQ ID NO: 3865711 - DNA, 25 bp, Homo sapien
agtggccacctctcgtatctctgac

SEQ ID NO: 3865712 - DNA, 25 bp, Homo sapien
atacccaggccgctgccagcggtcc

SEQ ID NO: 3865713 - DNA, 25 bp, Homo sapien
attcagccgccagccatacccaggc

SEQ ID NO: 3865714 - DNA, 25 bp, Homo sapien
atctctgaccattcagccgccagcc

SEQ ID NO: 3865715 - DNA, 25 bp, Homo sapien
tccgtttgttgagcacagaatgtac

SEQ ID NO: 3865716 - DNA, 25 bp, Homo sapien
tgagcacagaatgtacgaatgccgg

SEQ ID NO: 3865717 - DNA, 25 bp, Homo sapien
gccgcttccgtttgttgagcacaga

SEQ ID NO: 3865718 - DNA, 25 bp, Homo sapien
cagctgccgcttccgtttgttgagc

SEQ ID NO: 3865719 - DNA, 25 bp, Homo sapien
aattggaagtttttccactaagcat

SEQ ID NO: 3865720 - DNA, 25 bp, Homo sapien
ggaagtttttccactaagcatctat

SEQ ID NO: 3865721 - DNA, 25 bp, Homo sapien
ttggaagtttttccactaagcatct

SEQ ID NO: 3865722 - DNA, 25 bp, Homo sapien
gaagtttttccactaagcatctatc

SEQ ID NO: 3865723 - DNA, 25 bp, Homo sapien
tccactttacagaactctaccatca

SEQ ID NO: 3865724 - DNA, 25 bp, Homo sapien
gagcatggggatagcaggcctgagg

SEQ ID NO: 3865725 - DNA, 25 bp, Homo sapien
cagaactctaccatcattataaaag

SEQ ID NO: 3865726 - DNA, 25 bp, Homo sapien
ctttacagaactctaccatcattat

SEQ ID NO: 3865727 - DNA, 25 bp, Homo sapien
tggaagaaacacgagtgcgaagtcc

SEQ ID NO: 3865728 - DNA, 25 bp, Homo sapien
gaagaaacacgagtgcgaagtccat

SEQ ID NO: 3865729 - DNA, 25 bp, Homo sapien
ggaagaaacacgagtgcgaagtcca

SEQ ID NO: 3865730 - DNA, 25 bp, Homo sapien
ctggaagaaacacgagtgcgaagtc

SEQ ID NO: 3865731 - DNA, 25 bp, Homo sapien
ctgagcggtgcacaggagcttcgca

SEQ ID NO: 3865732 - DNA, 25 bp, Homo sapien
tttaagctcaggcagacaagcggcc

SEQ ID NO: 3865733 - DNA, 25 bp, Homo sapien
aggtagccctggaggaatgcaccct

SEQ ID NO: 3865734 - DNA, 25 bp, Homo sapien
gacggcgcggtggatacgtccttcc

SEQ ID NO: 3865735 - DNA, 25 bp, Homo sapien
tacagacacctgcggagccagaggc

SEQ ID NO: 3865736 - DNA, 25 bp, Homo sapien
acctggatgccctgatatgcattgc

SEQ ID NO: 3865737 - DNA, 25 bp, Homo sapien
ttacagacacctgcggagccagagg

SEQ ID NO: 3865738 - DNA, 25 bp, Homo sapien
gcagtaatgataaacagtgaccctg

SEQ ID NO: 3865739 - DNA, 25 bp, Homo sapien
cagtaatgataaacagtgaccctgt

SEQ ID NO: 3865740 - DNA, 25 bp, Homo sapien
agcagtaatgataaacagtgaccct

SEQ ID NO: 3865741 - DNA, 25 bp, Homo sapien
tataggagacatcacactctggatg

SEQ ID NO: 3865742 - DNA, 25 bp, Homo sapien
aggagacatcacactctggatgcct

SEQ ID NO: 3865743 - DNA, 25 bp, Homo sapien
taggagacatcacactctggatgcc

SEQ ID NO: 3865744 - DNA, 25 bp, Homo sapien
atataggagacatcacactctggat

SEQ ID NO: 3865745 - DNA, 25 bp, Homo sapien
caggaacagcaaccacggcgaccgc

SEQ ID NO: 3865746 - DNA, 25 bp, Homo sapien
ccacggcgaccgcaaaacctgaact

SEQ ID NO: 3865747 - DNA, 25 bp, Homo sapien
cacggcgaccgcaaaacctgaactc

SEQ ID NO: 3865748 - DNA, 25 bp, Homo sapien
gaacagcaaccacggcgaccgcaaa

SEQ ID NO: 3865749 - DNA, 25 bp, Homo sapien
gagagaaggaagaggcatctccagt

SEQ ID NO: 3865750 - DNA, 25 bp, Homo sapien
agaaggaagaggcatctccagttcc

SEQ ID NO: 3865751 - DNA, 25 bp, Homo sapien
cctgagagaaggaagaggcatctcc

SEQ ID NO: 3865752 - DNA, 25 bp, Homo sapien
aggaagaggcatctccagttccaac

SEQ ID NO: 3865753 - DNA, 25 bp, Homo sapien
gagcttcgcgaaccggcgctgccgc

SEQ ID NO: 3865754 - DNA, 25 bp, Homo sapien
ctgcactgcgctgcgggtcagctcc

SEQ ID NO: 3865755 - DNA, 25 bp, Homo sapien
gcagggcgggcacggacggctctga

SEQ ID NO: 3865756 - DNA, 25 bp, Homo sapien
cgctgcgggtcagctcccggcaggg

SEQ ID NO: 3865757 - DNA, 25 bp, Homo sapien
ctggagatgatccgccgctccagtc

SEQ ID NO: 3865758 - DNA, 25 bp, Homo sapien
cctggagatgatccgccgctccagt

SEQ ID NO: 3865759 - DNA, 25 bp, Homo sapien
tcctggagatgatccgccgctccag

SEQ ID NO: 3865760 - DNA, 25 bp, Homo sapien
tcagaaaactatcatggcagcgcat

SEQ ID NO: 3865761 - DNA, 25 bp, Homo sapien
ttcagaaaactatcatggcagcgca

SEQ ID NO: 3865762 - DNA, 25 bp, Homo sapien
cacatttattgaatccagtcaaagg

SEQ ID NO: 3865763 - DNA, 25 bp, Homo sapien
catctacaattagatgctgtggagt

SEQ ID NO: 3865764 - DNA, 25 bp, Homo sapien
tggaaatgatttgtagtatgagaag

SEQ ID NO: 3865765 - DNA, 25 bp, Homo sapien
gataaaaacacatggccgatccatc

SEQ ID NO: 3865766 - DNA, 25 bp, Homo sapien
ggtaaagtgttccatgggtgtgaac

SEQ ID NO: 3865767 - DNA, 25 bp, Homo sapien
tcattagatcacatacttggtaaag

SEQ ID NO: 3865768 - DNA, 25 bp, Homo sapien
ttccatgggtgtgaacaataattct

SEQ ID NO: 3865769 - DNA, 25 bp, Homo sapien
agtaactccagtattccttcctccg

SEQ ID NO: 3865770 - DNA, 25 bp, Homo sapien
gcattctctgaacagtagtctccag

SEQ ID NO: 3865771 - DNA, 25 bp, Homo sapien
gctctagtaactaggcttagggcaa

SEQ ID NO: 3865772 - DNA, 25 bp, Homo sapien
gaacaagggccctgtacttctagct

SEQ ID NO: 3865773 - DNA, 25 bp, Homo sapien
ggtgcagtcgcaagtttgcccacat

SEQ ID NO: 3865774 - DNA, 25 bp, Homo sapien
acgaggatggcccacaggaatctct

SEQ ID NO: 3865775 - DNA, 25 bp, Homo sapien
cacgaggatggcccacaggaatctc

SEQ ID NO: 3865776 - DNA, 25 bp, Homo sapien
ccacgaggatggcccacaggaatct

SEQ ID NO: 3865777 - DNA, 25 bp, Homo sapien
aggcagctttctcctgggacccttt

SEQ ID NO: 3865778 - DNA, 25 bp, Homo sapien
gcagctttctcctgggacccttttc

SEQ ID NO: 3865779 - DNA, 25 bp, Homo sapien
cagccaggcagctttctcctgggac

SEQ ID NO: 3865780 - DNA, 25 bp, Homo sapien
ccaggcagctttctcctgggaccct

SEQ ID NO: 3865781 - DNA, 25 bp, Homo sapien
tcgggccccgcgctgagctgtctga

SEQ ID NO: 3865782 - DNA, 25 bp, Homo sapien
tgagctgtctgaagtgaggaacccc

SEQ ID NO: 3865783 - DNA, 25 bp, Homo sapien
gcagcactggctccgcgtggctcag

SEQ ID NO: 3865784 - DNA, 25 bp, Homo sapien
cgcgtggctcagagggcaccagggc

SEQ ID NO: 3865785 - DNA, 25 bp, Homo sapien
tgcgccagcagcacaatgttgccag

SEQ ID NO: 3865786 - DNA, 25 bp, Homo sapien
acagcaccgggatgggcactaccac

SEQ ID NO: 3865787 - DNA, 25 bp, Homo sapien
gcactaccactatcagcagcatcag

SEQ ID NO: 3865788 - DNA, 25 bp, Homo sapien
aggggtcgtacaccacgctgcaggt

SEQ ID NO: 3865789 - DNA, 25 bp, Homo sapien
cctacgggctaaagagattacaggc

SEQ ID NO: 3865790 - DNA, 25 bp, Homo sapien
tatatgtggtagtgcacctacgggc

SEQ ID NO: 3865791 - DNA, 25 bp, Homo sapien
gtcatatgcctactagagactcagg

SEQ ID NO: 3865792 - DNA, 25 bp, Homo sapien
tatcctgagctctacacctagtatg

SEQ ID NO: 3865793 - DNA, 25 bp, Homo sapien
gacaaagttccccaggagctgaaaa

SEQ ID NO: 3865794 - DNA, 25 bp, Homo sapien
ggagatcatgcctctttgagccagg

SEQ ID NO: 3865795 - DNA, 25 bp, Homo sapien
catgggtagctgatgggaccccaac

SEQ ID NO: 3865796 - DNA, 25 bp, Homo sapien
caatgtcccatgaagacgaagagga

SEQ ID NO: 3865797 - DNA, 25 bp, Homo sapien
tttaaatagcccctcctagtgtatg

SEQ ID NO: 3865798 - DNA, 25 bp, Homo sapien
gaagctggcagtctgacttgagctg

SEQ ID NO: 3865799 - DNA, 25 bp, Homo sapien
tgtgtccaagattacccagctggga

SEQ ID NO: 3865800 - DNA, 25 bp, Homo sapien
tcagaaccaggatgaacatagccta

SEQ ID NO: 3865801 - DNA, 25 bp, Homo sapien
tcttgctcctagtttccattgtggg

SEQ ID NO: 3865802 - DNA, 25 bp, Homo sapien
taactcggtgagatgaatccccaaa

SEQ ID NO: 3865803 - DNA, 25 bp, Homo sapien
tcagagtaggtctcaattggctaag

SEQ ID NO: 3865804 - DNA, 25 bp, Homo sapien
tttgcagatcctatgaaaagagcgt

SEQ ID NO: 3865805 - DNA, 25 bp, Homo sapien
agcccccagtctccccaggctgtcc

SEQ ID NO: 3865806 - DNA, 25 bp, Homo sapien
tctccccaggctgtcctccctccaa

SEQ ID NO: 3865807 - DNA, 25 bp, Homo sapien
cccaggctgtcctccctccaagccc

SEQ ID NO: 3865808 - DNA, 25 bp, Homo sapien
agccccagccagacccgaccctgct

SEQ ID NO: 3865809 - DNA, 25 bp, Homo sapien
gaagcccccagtctcaccaggtggt

SEQ ID NO: 3865810 - DNA, 25 bp, Homo sapien
tgaagcccccagtctcaccaggtgg

SEQ ID NO: 3865811 - DNA, 25 bp, Homo sapien
agcccccagtctcaccaggtggtct

SEQ ID NO: 3865812 - DNA, 25 bp, Homo sapien
ctgaagcccccagtctcaccaggtg

SEQ ID NO: 3865813 - DNA, 25 bp, Homo sapien
tacagacccgacccttttgagcttc

SEQ ID NO: 3865814 - DNA, 25 bp, Homo sapien
cgacccttttgagcttccgggctgg

SEQ ID NO: 3865815 - DNA, 25 bp, Homo sapien
ccgacccttttgagcttccgggctg

SEQ ID NO: 3865816 - DNA, 25 bp, Homo sapien
tcaatctcaggatcttgcttcaagt

SEQ ID NO: 3865817 - DNA, 25 bp, Homo sapien
tgggccaaggaatgcccacagcctg

SEQ ID NO: 3865818 - DNA, 25 bp, Homo sapien
catctgtgcagggacccactggaaa

SEQ ID NO: 3865819 - DNA, 25 bp, Homo sapien
gccagaaatctagccactgggccaa

SEQ ID NO: 3865820 - DNA, 25 bp, Homo sapien
cctgtttagcttctgggctttgtca

SEQ ID NO: 3865821 - DNA, 25 bp, Homo sapien
cggtgccccatccaagccccaggca

SEQ ID NO: 3865822 - DNA, 25 bp, Homo sapien
cagtatccccaggcggtgccccatc

SEQ ID NO: 3865823 - DNA, 25 bp, Homo sapien
tgtttagcttctgggctttgtcagg

SEQ ID NO: 3865824 - DNA, 25 bp, Homo sapien
ctccctaggcgttcccctatccaag

SEQ ID NO: 3865825 - DNA, 25 bp, Homo sapien
caggtctccctaggcgttcccctat

SEQ ID NO: 3865826 - DNA, 25 bp, Homo sapien
gtctccctaggcgttcccctatcca

SEQ ID NO: 3865827 - DNA, 25 bp, Homo sapien
ggtagcttctaggctggggcacctt

SEQ ID NO: 3865828 - DNA, 25 bp, Homo sapien
tgggctggagcaagaatgcagtcat

SEQ ID NO: 3865829 - DNA, 25 bp, Homo sapien
gaaatgttgtaacaagcagggaaaa

SEQ ID NO: 3865830 - DNA, 25 bp, Homo sapien
cagtcatgtgggaagcgggtggcgg

SEQ ID NO: 3865831 - DNA, 25 bp, Homo sapien
gggtcacagaatcgggaaatgttgt

SEQ ID NO: 3865832 - DNA, 25 bp, Homo sapien
caagtcccagccaagaccgaccctg

SEQ ID NO: 3865833 - DNA, 25 bp, Homo sapien
ccatccaagtcccagccaagaccga

SEQ ID NO: 3865834 - DNA, 25 bp, Homo sapien
atccaagtcccagccaagaccgacc

SEQ ID NO: 3865835 - DNA, 25 bp, Homo sapien
agtcccagccaagaccgaccctgct

SEQ ID NO: 3865836 - DNA, 25 bp, Homo sapien
gtgccctcaggttgctatggcagga

SEQ ID NO: 3865837 - DNA, 25 bp, Homo sapien
tgccctcaggttgctatggcaggag

SEQ ID NO: 3865838 - DNA, 25 bp, Homo sapien
aggtgccctcaggttgctatggcag

SEQ ID NO: 3865839 - DNA, 25 bp, Homo sapien
gccctcaggttgctatggcaggagc

SEQ ID NO: 3865840 - DNA, 25 bp, Homo sapien
tactagagagtcaagaggcagttgg

SEQ ID NO: 3865841 - DNA, 25 bp, Homo sapien
tatgatgcccgggaatgccgagact

SEQ ID NO: 3865842 - DNA, 25 bp, Homo sapien
cagttgggaagcattgtgactagta

SEQ ID NO: 3865843 - DNA, 25 bp, Homo sapien
tgggaaacagggtactagagagtca

SEQ ID NO: 3865844 - DNA, 25 bp, Homo sapien
cccatccaagcaccaccaaggtccg

SEQ ID NO: 3865845 - DNA, 25 bp, Homo sapien
agcaccaccaaggtccgatcctgct

SEQ ID NO: 3865846 - DNA, 25 bp, Homo sapien
caagcaccaccaaggtccgatcctg

SEQ ID NO: 3865847 - DNA, 25 bp, Homo sapien
atccaagcaccaccaaggtccgatc

SEQ ID NO: 3865848 - DNA, 25 bp, Homo sapien
ggctgctgggacggaaacccactgg

SEQ ID NO: 3865849 - DNA, 25 bp, Homo sapien
cgggctgctgggacggaaacccact

SEQ ID NO: 3865850 - DNA, 25 bp, Homo sapien
gggctgctgggacggaaacccactg

SEQ ID NO: 3865851 - DNA, 25 bp, Homo sapien
tggggcgctgtcagactgctgtggc

SEQ ID NO: 3865852 - DNA, 25 bp, Homo sapien
cttctgggatggggcgctgtcagac

SEQ ID NO: 3865853 - DNA, 25 bp, Homo sapien
gatggggcgctgtcagactgctgtg

SEQ ID NO: 3865854 - DNA, 25 bp, Homo sapien
tgggatggggcgctgtcagactgct

SEQ ID NO: 3865855 - DNA, 25 bp, Homo sapien
ctggtctcccaaggcaggctcccat

SEQ ID NO: 3865856 - DNA, 25 bp, Homo sapien
cccctggtctcccaaggcaggctcc

SEQ ID NO: 3865857 - DNA, 25 bp, Homo sapien
cagcccctggtctcccaaggcaggc

SEQ ID NO: 3865858 - DNA, 25 bp, Homo sapien
ctccagcccctggtctcccaaggca

SEQ ID NO: 3865859 - DNA, 25 bp, Homo sapien
cccagacaggccctaccctgcttag

SEQ ID NO: 3865860 - DNA, 25 bp, Homo sapien
tcacccccggcggtccccacatcca

SEQ ID NO: 3865861 - DNA, 25 bp, Homo sapien
cctggggcgccctcaggctgttatg

SEQ ID NO: 3865862 - DNA, 25 bp, Homo sapien
ggcggtccccacatccaagccccag

SEQ ID NO: 3865863 - DNA, 25 bp, Homo sapien
ccaagcttcagccaggcccctccct

SEQ ID NO: 3865864 - DNA, 25 bp, Homo sapien
cctgcttagcttccgggctcaggcg

SEQ ID NO: 3865865 - DNA, 25 bp, Homo sapien
cttccgggctcaggcgtgctcgggc

SEQ ID NO: 3865866 - DNA, 25 bp, Homo sapien
atgcgtccccccacccaagcttcag

SEQ ID NO: 3865867 - DNA, 25 bp, Homo sapien
ttccgggctgtggcgttctcaggct

SEQ ID NO: 3865868 - DNA, 25 bp, Homo sapien
cttccgggctgtggcgttctcaggc

SEQ ID NO: 3865869 - DNA, 25 bp, Homo sapien
tccccagacggaccccattcaagcc

SEQ ID NO: 3865870 - DNA, 25 bp, Homo sapien
ctccccagacggaccccattcaagc

SEQ ID NO: 3865871 - DNA, 25 bp, Homo sapien
gtctccccagacggaccccattcaa

SEQ ID NO: 3865872 - DNA, 25 bp, Homo sapien
tctccccagacggaccccattcaag

SEQ ID NO: 3865873 - DNA, 25 bp, Homo sapien
ctggtatccccaggcagtccctcat

SEQ ID NO: 3865874 - DNA, 25 bp, Homo sapien
acaggtgatcctccatccaagccta

SEQ ID NO: 3865875 - DNA, 25 bp, Homo sapien
cacaggtgatcctccatccaagcct

SEQ ID NO: 3865876 - DNA, 25 bp, Homo sapien
tccaagcctaagccagtcccgaccc

SEQ ID NO: 3865877 - DNA, 25 bp, Homo sapien
caggtgatcctccatccaagcctaa

SEQ ID NO: 3865878 - DNA, 25 bp, Homo sapien
ccggtctccccaggcggtcccacat

SEQ ID NO: 3865879 - DNA, 25 bp, Homo sapien
cagagcccggtctccccaggcggtc

SEQ ID NO: 3865880 - DNA, 25 bp, Homo sapien
tccagagcccggtctccccaggcgg

SEQ ID NO: 3865881 - DNA, 25 bp, Homo sapien
cctccagagcccggtctccccaggc

SEQ ID NO: 3865882 - DNA, 25 bp, Homo sapien
agccccttgtctctacaggcgctcc

SEQ ID NO: 3865883 - DNA, 25 bp, Homo sapien
cttgtctctacaggcgctcccccat

SEQ ID NO: 3865884 - DNA, 25 bp, Homo sapien
ccccttgtctctacaggcgctcccc

SEQ ID NO: 3865885 - DNA, 25 bp, Homo sapien
cagccccttgtctctacaggcgctc

SEQ ID NO: 3865886 - DNA, 25 bp, Homo sapien
aggtggtcccccatccaagccccag

SEQ ID NO: 3865887 - DNA, 25 bp, Homo sapien
cagacccaaccttgcttagctttca

SEQ ID NO: 3865888 - DNA, 25 bp, Homo sapien
gctcccagtcttcccaggtggtccc

SEQ ID NO: 3865889 - DNA, 25 bp, Homo sapien
caagccccagccagacccaaccttg

SEQ ID NO: 3865890 - DNA, 25 bp, Homo sapien
cattgaggcccatagtaagaaaacc

SEQ ID NO: 3865891 - DNA, 25 bp, Homo sapien
ggacattttggatcccattggaaca

SEQ ID NO: 3865892 - DNA, 25 bp, Homo sapien
gcactttcaggctactatggcttca

SEQ ID NO: 3865893 - DNA, 25 bp, Homo sapien
tctacgaagggcgatttttgagctc

SEQ ID NO: 3865894 - DNA, 25 bp, Homo sapien
acatctcctacatcatggaagatga

SEQ ID NO: 3865895 - DNA, 25 bp, Homo sapien
gctgcagggctgcgtgtccttttgt

SEQ ID NO: 3865896 - DNA, 25 bp, Homo sapien
ctgcagggctgcgtgtccttttgtt

SEQ ID NO: 3865897 - DNA, 25 bp, Homo sapien
tgcagggctgcgtgtccttttgttt

SEQ ID NO: 3865898 - DNA, 25 bp, Homo sapien
gcagggctgcgtgtccttttgtttt

SEQ ID NO: 3865899 - DNA, 25 bp, Homo sapien
ccgtcagcttgggatttcattccgg

SEQ ID NO: 3865900 - DNA, 25 bp, Homo sapien
aataagatcagagcgggtgaggata

SEQ ID NO: 3865901 - DNA, 25 bp, Homo sapien
tgagttgtggatggagtcccgcaac

SEQ ID NO: 3865902 - DNA, 25 bp, Homo sapien
tcgggaggcgggcacttctccgtca

SEQ ID NO: 3865903 - DNA, 25 bp, Homo sapien
gacatgcaggggtccaaatcgcctc

SEQ ID NO: 3865904 - DNA, 25 bp, Homo sapien
gaatcagacgaccttttgttgtgcc

SEQ ID NO: 3865905 - DNA, 25 bp, Homo sapien
catgtcctttaacttccctgtggtt

SEQ ID NO: 3865906 - DNA, 25 bp, Homo sapien
tggtttctggatttgcggtgaagtg

SEQ ID NO: 3865907 - DNA, 25 bp, Homo sapien
actctagcatcatagtgcactcgaa

SEQ ID NO: 3865908 - DNA, 25 bp, Homo sapien
tctcgaagcgacttttcctcaaggg

SEQ ID NO: 3865909 - DNA, 25 bp, Homo sapien
cgaccacggagttccactctagcat

SEQ ID NO: 3865910 - DNA, 25 bp, Homo sapien
agaagagagtttccaacgcccactt

SEQ ID NO: 3865911 - DNA, 25 bp, Homo sapien
cctgtggctcctgaatccatggtaa

SEQ ID NO: 3865912 - DNA, 25 bp, Homo sapien
agctggctgaaacgtgcacgggtcc

SEQ ID NO: 3865913 - DNA, 25 bp, Homo sapien
acgtgcacgggtccaaatcaccttc

SEQ ID NO: 3865914 - DNA, 25 bp, Homo sapien
gctcctgaatccatggtaaagttgg

SEQ ID NO: 3865915 - DNA, 25 bp, Homo sapien
gattcttgcctttcccacacagacg

SEQ ID NO: 3865916 - DNA, 25 bp, Homo sapien
ccacacagacgtgctgagaagcagg

SEQ ID NO: 3865917 - DNA, 25 bp, Homo sapien
catgattcttgcctttcccacacag

SEQ ID NO: 3865918 - DNA, 25 bp, Homo sapien
tcatgattcttgcctttcccacaca

SEQ ID NO: 3865919 - DNA, 25 bp, Homo sapien
atgttacacctgcacaccgtcacaa

SEQ ID NO: 3865920 - DNA, 25 bp, Homo sapien
acaccgtcacaacaatacagcccat

SEQ ID NO: 3865921 - DNA, 25 bp, Homo sapien
tccatgttacacctgcacaccgtca

SEQ ID NO: 3865922 - DNA, 25 bp, Homo sapien
tgctgactgctcaccatccacccac

SEQ ID NO: 3865923 - DNA, 25 bp, Homo sapien
ctgtggaagtacaatggttgtagga

SEQ ID NO: 3865924 - DNA, 25 bp, Homo sapien
tggaagtacaatggttgtaggatgg

SEQ ID NO: 3865925 - DNA, 25 bp, Homo sapien
tgtggaagtacaatggttgtaggat

SEQ ID NO: 3865926 - DNA, 25 bp, Homo sapien
aagtacaatggttgtaggatggagt

SEQ ID NO: 3865927 - DNA, 25 bp, Homo sapien
ttctgagggtgagcaaacttctcca

SEQ ID NO: 3865928 - DNA, 25 bp, Homo sapien
ctgagggtgagcaaacttctccagc

SEQ ID NO: 3865929 - DNA, 25 bp, Homo sapien
tttctgagggtgagcaaacttctcc

SEQ ID NO: 3865930 - DNA, 25 bp, Homo sapien
atttctgagggtgagcaaacttctc

SEQ ID NO: 3865931 - DNA, 25 bp, Homo sapien
actcttttagggagggtgatcaaga

SEQ ID NO: 3865932 - DNA, 25 bp, Homo sapien
ggtgatcaagaagttggctacagtt

SEQ ID NO: 3865933 - DNA, 25 bp, Homo sapien
ggctacagttaggtacttgagaata

SEQ ID NO: 3865934 - DNA, 25 bp, Homo sapien
cttgagaataaaatccgtggacctt

SEQ ID NO: 3865935 - DNA, 25 bp, Homo sapien
caatagaaaggtgctcactaggaca

SEQ ID NO: 3865936 - DNA, 25 bp, Homo sapien
cctataagtttgttcgacccgctgc

SEQ ID NO: 3865937 - DNA, 25 bp, Homo sapien
cagccaccaactggagttaggtaaa

SEQ ID NO: 3865938 - DNA, 25 bp, Homo sapien
gacatgctgcggtcatggctcatga

SEQ ID NO: 3865939 - DNA, 25 bp, Homo sapien
tttgcctagcttcccaaaggtcagc

SEQ ID NO: 3865940 - DNA, 25 bp, Homo sapien
ttgcctagcttcccaaaggtcagcc

SEQ ID NO: 3865941 - DNA, 25 bp, Homo sapien
taaagttgacttcccaagcactgac

SEQ ID NO: 3865942 - DNA, 25 bp, Homo sapien
taaagatggcttgacctctgcaaac

SEQ ID NO: 3865943 - DNA, 25 bp, Homo sapien
taagctaatgagagatggacacacc

SEQ ID NO: 3865944 - DNA, 25 bp, Homo sapien
taaggctgggcatatctaaaaagac

SEQ ID NO: 3865945 - DNA, 25 bp, Homo sapien
ttcccagtcttgggtgtgcgctgag

SEQ ID NO: 3865946 - DNA, 25 bp, Homo sapien
cttgggtgtgcgctgaggtggagga

SEQ ID NO: 3865947 - DNA, 25 bp, Homo sapien
tcagatgggatcccagtcattccca

SEQ ID NO: 3865948 - DNA, 25 bp, Homo sapien
agatgggatcccagtcattcccagt

SEQ ID NO: 3865949 - DNA, 25 bp, Homo sapien
cacttgtcttcggtctttcttatag

SEQ ID NO: 3865950 - DNA, 25 bp, Homo sapien
tcttcggtctttcttatagttttca

SEQ ID NO: 3865951 - DNA, 25 bp, Homo sapien
cttcggtctttcttatagttttcag

SEQ ID NO: 3865952 - DNA, 25 bp, Homo sapien
ttctcacttgtcttcggtctttctt

SEQ ID NO: 3865953 - DNA, 25 bp, Homo sapien
gcagctcctctgagttgccgtgagt

SEQ ID NO: 3865954 - DNA, 25 bp, Homo sapien
tcctctgagttgccgtgagtgttat

SEQ ID NO: 3865955 - DNA, 25 bp, Homo sapien
ctcctctgagttgccgtgagtgtta

SEQ ID NO: 3865956 - DNA, 25 bp, Homo sapien
cagctcctctgagttgccgtgagtg

SEQ ID NO: 3865957 - DNA, 25 bp, Homo sapien
tctttgaatggattcgattggaatc

SEQ ID NO: 3865958 - DNA, 25 bp, Homo sapien
ggaattgagtggaatctttgaatgg

SEQ ID NO: 3865959 - DNA, 25 bp, Homo sapien
aattgaattatcgaatggatttgaa

SEQ ID NO: 3865960 - DNA, 25 bp, Homo sapien
ggaatcatcgtaaatggaatcaagt

SEQ ID NO: 3865961 - DNA, 25 bp, Homo sapien
tgaatggaatcgttgagtttactct

SEQ ID NO: 3865962 - DNA, 25 bp, Homo sapien
gaatggaatcgttgagtttactcta

SEQ ID NO: 3865963 - DNA, 25 bp, Homo sapien
aatggaatcgttgagtttactctaa

SEQ ID NO: 3865964 - DNA, 25 bp, Homo sapien
ggaatcttcgtaaatgaaatcaagt

SEQ ID NO: 3865965 - DNA, 25 bp, Homo sapien
ggattcgattttaatcatcatcgaa

SEQ ID NO: 3865966 - DNA, 25 bp, Homo sapien
aattgaattatcgaatggatttgaa

SEQ ID NO: 3865967 - DNA, 25 bp, Homo sapien
aatggaatctttgaatggattcgat

SEQ ID NO: 3865968 - DNA, 25 bp, Homo sapien
tcaagtggattcatcgaatggaatc

SEQ ID NO: 3865969 - DNA, 25 bp, Homo sapien
tcatcgtaaatggaatcaagtggat

SEQ ID NO: 3865970 - DNA, 25 bp, Homo sapien
aatggaactgaatggaatatttgaa

SEQ ID NO: 3865971 - DNA, 25 bp, Homo sapien
tatcgtatggatttgaatggaatca

SEQ ID NO: 3865972 - DNA, 25 bp, Homo sapien
gatgattacattcgagtccgtacga

SEQ ID NO: 3865973 - DNA, 25 bp, Homo sapien
tccatttgattccagtctctgatga

SEQ ID NO: 3865974 - DNA, 25 bp, Homo sapien
acattcgagtccgtacgatgattcc

SEQ ID NO: 3865975 - DNA, 25 bp, Homo sapien
gagtccgtacgatgattccactcaa

SEQ ID NO: 3865976 - DNA, 25 bp, Homo sapien
tccatttgattccagtctctgatga

SEQ ID NO: 3865977 - DNA, 25 bp, Homo sapien
cactcaattccatatcatgatgatt

SEQ ID NO: 3865978 - DNA, 25 bp, Homo sapien
ccattagagtccatttaatgattcc

SEQ ID NO: 3865979 - DNA, 25 bp, Homo sapien
cgagtccatacgatgattccactca

SEQ ID NO: 3865980 - DNA, 25 bp, Homo sapien
gaaggcctggagagcttgctgtttc

SEQ ID NO: 3865981 - DNA, 25 bp, Homo sapien
ctcactgggaacatgaaggcctgga

SEQ ID NO: 3865982 - DNA, 25 bp, Homo sapien
gagagcttgctgtttcaatgagaga

SEQ ID NO: 3865983 - DNA, 25 bp, Homo sapien
ggcctggagagcttgctgtttcaat

SEQ ID NO: 3865984 - DNA, 25 bp, Homo sapien
ccccgtcgccgtgggattttgcagt

SEQ ID NO: 3865985 - DNA, 25 bp, Homo sapien
cggtggttgttaccgccgccgctgt

SEQ ID NO: 3865986 - DNA, 25 bp, Homo sapien
gcggctttttggacccaccactgtg

SEQ ID NO: 3865987 - DNA, 25 bp, Homo sapien
cgtggctttttgcagtcacagcttt

SEQ ID NO: 3865988 - DNA, 25 bp, Homo sapien
cgctgctttttgtcgccactgccga

SEQ ID NO: 3865989 - DNA, 25 bp, Homo sapien
cactgccgagtgttttttacctcca

SEQ ID NO: 3865990 - DNA, 25 bp, Homo sapien
ttttacctccactgctttttgccac

SEQ ID NO: 3865991 - DNA, 25 bp, Homo sapien
gctttttgtcgccactgccgagtgt

SEQ ID NO: 3865992 - DNA, 25 bp, Homo sapien
tcagtgtgctgcaagatgatttgat

SEQ ID NO: 3865993 - DNA, 25 bp, Homo sapien
ggttgctaggctctttgttgagcat

SEQ ID NO: 3865994 - DNA, 25 bp, Homo sapien
tgctaggctctttgttgagcatatt

SEQ ID NO: 3865995 - DNA, 25 bp, Homo sapien
aaatctaacctttttctcagtgtgc

SEQ ID NO: 3865996 - DNA, 25 bp, Homo sapien
ctggatttgcgtttcctccataaaa

SEQ ID NO: 3865997 - DNA, 25 bp, Homo sapien
ggaatggcgtcttcacacgtgactg

SEQ ID NO: 3865998 - DNA, 25 bp, Homo sapien
cagagtggcttggtcttactgggcc

SEQ ID NO: 3865999 - DNA, 25 bp, Homo sapien
acatgcgcgctgagaacggttggcc

SEQ ID NO: 3866000 - DNA, 25 bp, Homo sapien
cccagtgcgggtacaatatccaaga

SEQ ID NO: 3866001 - DNA, 25 bp, Homo sapien
cagttgctttttccaacagccgcgt

SEQ ID NO: 3866002 - DNA, 25 bp, Homo sapien
tccaacagccgcgtatttatccaag

SEQ ID NO: 3866003 - DNA, 25 bp, Homo sapien
caacagccgcgtatttatccaaggg

SEQ ID NO: 3866004 - DNA, 25 bp, Homo sapien
gctttttccaacagccgcgtattta

SEQ ID NO: 3866005 - DNA, 25 bp, Homo sapien
caatggtagggcttatgttgcggtc

SEQ ID NO: 3866006 - DNA, 25 bp, Homo sapien
aatgcttgatttccctacgccagtg

SEQ ID NO: 3866007 - DNA, 25 bp, Homo sapien
gatcctgggcaaatcgatacacaat

SEQ ID NO: 3866008 - DNA, 25 bp, Homo sapien
cagaaggcgcagttttggtcacaaa

SEQ ID NO: 3866009 - DNA, 25 bp, Homo sapien
agccgatcctccatagcacatgagc

SEQ ID NO: 3866010 - DNA, 25 bp, Homo sapien
cagctgcagccgatcctccatagca

SEQ ID NO: 3866011 - DNA, 25 bp, Homo sapien
agctgcagccgatcctccatagcac

SEQ ID NO: 3866012 - DNA, 25 bp, Homo sapien
tgcagccgatcctccatagcacatg

SEQ ID NO: 3866013 - DNA, 25 bp, Homo sapien
gagagatggcacttgtttcagtaat

SEQ ID NO: 3866014 - DNA, 25 bp, Homo sapien
tgccctcgtctcaaccatgatggca

SEQ ID NO: 3866015 - DNA, 25 bp, Homo sapien
aatgaatcctgtttgggtaacatct

SEQ ID NO: 3866016 - DNA, 25 bp, Homo sapien
catgatggcacccacggattcagca

SEQ ID NO: 3866017 - DNA, 25 bp, Homo sapien
aagtttcattgctccactgtttcca

SEQ ID NO: 3866018 - DNA, 25 bp, Homo sapien
tcccaagtttcattgctccactgtt

SEQ ID NO: 3866019 - DNA, 25 bp, Homo sapien
ttcccaagtttcattgctccactgt

SEQ ID NO: 3866020 - DNA, 25 bp, Homo sapien
ccaagtttcattgctccactgtttc

SEQ ID NO: 3866021 - DNA, 25 bp, Homo sapien
cctggccgtagcaatggactttctg

SEQ ID NO: 3866022 - DNA, 25 bp, Homo sapien
tggtcgtgggtgactcgccggcctc

SEQ ID NO: 3866023 - DNA, 25 bp, Homo sapien
gcactcatcccgtagtcacacgtga

SEQ ID NO: 3866024 - DNA, 25 bp, Homo sapien
cagaattgcgttttgaccctgagtg

SEQ ID NO: 3866025 - DNA, 25 bp, Homo sapien
ttcattataatccatgtcatctctg

SEQ ID NO: 3866026 - DNA, 25 bp, Homo sapien
cacttccacagaaatgggtaactgg

SEQ ID NO: 3866027 - DNA, 25 bp, Homo sapien
tcattataatccatgtcatctctgt

SEQ ID NO: 3866028 - DNA, 25 bp, Homo sapien
cttccacagaaatgggtaactggca

SEQ ID NO: 3866029 - DNA, 25 bp, Homo sapien
tagcattgcccccagtcataggaac

SEQ ID NO: 3866030 - DNA, 25 bp, Homo sapien
ccttcggtgcgtgtgacttcagctt

SEQ ID NO: 3866031 - DNA, 25 bp, Homo sapien
catgggtttgctcagccttcggtgc

SEQ ID NO: 3866032 - DNA, 25 bp, Homo sapien
tccacaaatcttagctggtatggca

SEQ ID NO: 3866033 - DNA, 25 bp, Homo sapien
catgctgccctaagaatcactgctg

SEQ ID NO: 3866034 - DNA, 25 bp, Homo sapien
aaatactggattttgcacatgctgc

SEQ ID NO: 3866035 - DNA, 25 bp, Homo sapien
tgaactaattgctgcctccacacag

SEQ ID NO: 3866036 - DNA, 25 bp, Homo sapien
gacccttctgagcaagtcgagggaa

SEQ ID NO: 3866037 - DNA, 25 bp, Homo sapien
cactccacctctggccagcagctgc

SEQ ID NO: 3866038 - DNA, 25 bp, Homo sapien
ttccagaatctgtcccactccacct

SEQ ID NO: 3866039 - DNA, 25 bp, Homo sapien
ctctgttcttccagaatctgtccca

SEQ ID NO: 3866040 - DNA, 25 bp, Homo sapien
ccactccacctctggccagcagctg

SEQ ID NO: 3866041 - DNA, 25 bp, Homo sapien
tcaaagaccaggatatgagcatcca

SEQ ID NO: 3866042 - DNA, 25 bp, Homo sapien
ttcaaagaccaggatatgagcatcc

SEQ ID NO: 3866043 - DNA, 25 bp, Homo sapien
caaagaccaggatatgagcatccat

SEQ ID NO: 3866044 - DNA, 25 bp, Homo sapien
ctttcagtaggtgtgatatacgcac

SEQ ID NO: 3866045 - DNA, 25 bp, Homo sapien
tgatatacgcacaaacactggcctg

SEQ ID NO: 3866046 - DNA, 25 bp, Homo sapien
agcaagcacatcgatctgttctttc

SEQ ID NO: 3866047 - DNA, 25 bp, Homo sapien
cagatcattggacactggctcccct

SEQ ID NO: 3866048 - DNA, 25 bp, Homo sapien
aggcaagggagtcctccggttcttg

SEQ ID NO: 3866049 - DNA, 25 bp, Homo sapien
agagaggcaagggagtcctccggtt

SEQ ID NO: 3866050 - DNA, 25 bp, Homo sapien
gagaggcaagggagtcctccggttc

SEQ ID NO: 3866051 - DNA, 25 bp, Homo sapien
agaggcaagggagtcctccggttct

SEQ ID NO: 3866052 - DNA, 25 bp, Homo sapien
gctgccattgcaggcgttctcgctg

SEQ ID NO: 3866053 - DNA, 25 bp, Homo sapien
gccctgtagcggttcttctgcgtag

SEQ ID NO: 3866054 - DNA, 25 bp, Homo sapien
atttgtcccgggagacgccgtgctg

SEQ ID NO: 3866055 - DNA, 25 bp, Homo sapien
caagcgacgtggacgctcatttgtc

SEQ ID NO: 3866056 - DNA, 25 bp, Homo sapien
gagtactaacccaaaagcgtctgtc

SEQ ID NO: 3866057 - DNA, 25 bp, Homo sapien
gggctttcccctaaattgcaagata

SEQ ID NO: 3866058 - DNA, 25 bp, Homo sapien
ttaagaacccatgttgtcctctgga

SEQ ID NO: 3866059 - DNA, 25 bp, Homo sapien
tattttgcatatttggactcagcca

SEQ ID NO: 3866060 - DNA, 25 bp, Homo sapien
gacctcccgaatcttgaatccagtg

SEQ ID NO: 3866061 - DNA, 25 bp, Homo sapien
tcataacacactggagcatttgcgc

SEQ ID NO: 3866062 - DNA, 25 bp, Homo sapien
tccatgtacatccagtgagggtttt

SEQ ID NO: 3866063 - DNA, 25 bp, Homo sapien
gcatttgcgcttgcggcgggaatca

SEQ ID NO: 3866064 - DNA, 25 bp, Homo sapien
caactagaggatggttggtccttga

SEQ ID NO: 3866065 - DNA, 25 bp, Homo sapien
gaatcacgaacctctgaggactcag

SEQ ID NO: 3866066 - DNA, 25 bp, Homo sapien
taaagaaacctgatcagggccgagc

SEQ ID NO: 3866067 - DNA, 25 bp, Homo sapien
tcagtgtgcccttgctgcatccaaa

SEQ ID NO: 3866068 - DNA, 25 bp, Homo sapien
catctagcgttaagtgacagggcca

SEQ ID NO: 3866069 - DNA, 25 bp, Homo sapien
agggtcttccttttgcgcatgcgca

SEQ ID NO: 3866070 - DNA, 25 bp, Homo sapien
gaagtaggccaatcaatgagccgcc

SEQ ID NO: 3866071 - DNA, 25 bp, Homo sapien
gagactcgggttcctagaagtaggc

SEQ ID NO: 3866072 - DNA, 25 bp, Homo sapien
ctcagcatgtcgggctcggcgaggc

SEQ ID NO: 3866073 - DNA, 25 bp, Homo sapien
gggctaggcgcccgatcagctccga

SEQ ID NO: 3866074 - DNA, 25 bp, Homo sapien
taggcgcccgatcagctccgacccc

SEQ ID NO: 3866075 - DNA, 25 bp, Homo sapien
gcgcggggctaggcgcccgatcagc

SEQ ID NO: 3866076 - DNA, 25 bp, Homo sapien
cctggtcttgcgcggccgaactcac

SEQ ID NO: 3866077 - DNA, 25 bp, Homo sapien
gcccagggccgcgaggcggaagccc

SEQ ID NO: 3866078 - DNA, 25 bp, Homo sapien
gccctggtcttgcgcggccgaactc

SEQ ID NO: 3866079 - DNA, 25 bp, Homo sapien
agccctggtcttgcgcggccgaact

SEQ ID NO: 3866080 - DNA, 25 bp, Homo sapien
tttctacccacggacagggctggct

SEQ ID NO: 3866081 - DNA, 25 bp, Homo sapien
tgtgccatcgccgtttgctatcgcc

SEQ ID NO: 3866082 - DNA, 25 bp, Homo sapien
gctataaacccgactgcagtaggcg

SEQ ID NO: 3866083 - DNA, 25 bp, Homo sapien
ctgttcccagggacgtgtgccatcg

SEQ ID NO: 3866084 - DNA, 25 bp, Homo sapien
taaatgactaccgagtcctgcaggt

SEQ ID NO: 3866085 - DNA, 25 bp, Homo sapien
tgttctaaatgactaccgagtcctg

SEQ ID NO: 3866086 - DNA, 25 bp, Homo sapien
ccacgttttagctacaatggcttta

SEQ ID NO: 3866087 - DNA, 25 bp, Homo sapien
ctcgcctgactgctccacgttttag

SEQ ID NO: 3866088 - DNA, 25 bp, Homo sapien
aatacagcctggttagcttcacact

SEQ ID NO: 3866089 - DNA, 25 bp, Homo sapien
tgaaggtcatatcctctggtgagag

SEQ ID NO: 3866090 - DNA, 25 bp, Homo sapien
ttcacactaagcctaactcctgtgg

SEQ ID NO: 3866091 - DNA, 25 bp, Homo sapien
aactcctgtggctcgtttatctggg

SEQ ID NO: 3866092 - DNA, 25 bp, Homo sapien
cactgctggtctccgtggtgcgtgc

SEQ ID NO: 3866093 - DNA, 25 bp, Homo sapien
gacaggcgcaagtactcctctgctt

SEQ ID NO: 3866094 - DNA, 25 bp, Homo sapien
tgcgtgcggagaggccgacacactt

SEQ ID NO: 3866095 - DNA, 25 bp, Homo sapien
agaggccgacacacttcacccggga

SEQ ID NO: 3866096 - DNA, 25 bp, Homo sapien
ctgatatgtctccttgttcaaacca

SEQ ID NO: 3866097 - DNA, 25 bp, Homo sapien
gctaaactgtacagctaggtctctt

SEQ ID NO: 3866098 - DNA, 25 bp, Homo sapien
gaattcaggcccagtaaacactcaa

SEQ ID NO: 3866099 - DNA, 25 bp, Homo sapien
ctttttagtatctttgaagccatgt

SEQ ID NO: 3866100 - DNA, 25 bp, Homo sapien
aaagtggcctggataagtcaagatc

SEQ ID NO: 3866101 - DNA, 25 bp, Homo sapien
tgaaaagtggcctggataagtcaag

SEQ ID NO: 3866102 - DNA, 25 bp, Homo sapien
gtgaaaagtggcctggataagtcaa

SEQ ID NO: 3866103 - DNA, 25 bp, Homo sapien
gaaaagtggcctggataagtcaaga

SEQ ID NO: 3866104 - DNA, 25 bp, Homo sapien
gatatcatctcttacaaaaggcaga

SEQ ID NO: 3866105 - DNA, 25 bp, Homo sapien
taaactgggaatatagtcacttggc

SEQ ID NO: 3866106 - DNA, 25 bp, Homo sapien
cactagttccaagttgttagctaca

SEQ ID NO: 3866107 - DNA, 25 bp, Homo sapien
ttgctagtggaattctggcaacact

SEQ ID NO: 3866108 - DNA, 25 bp, Homo sapien
aaagtagagttgactattctcactg

SEQ ID NO: 3866109 - DNA, 25 bp, Homo sapien
tcagcgtaatatggtttcaaaagta

SEQ ID NO: 3866110 - DNA, 25 bp, Homo sapien
tgcactccctccgtatatgcacata

SEQ ID NO: 3866111 - DNA, 25 bp, Homo sapien
gttttctacaatatcagctgcactc

SEQ ID NO: 3866112 - DNA, 25 bp, Homo sapien
tttttgaccatgcttccagagcctc

SEQ ID NO: 3866113 - DNA, 25 bp, Homo sapien
catttgctgtagtgcttcatgactt

SEQ ID NO: 3866114 - DNA, 25 bp, Homo sapien
gcttttctcaagacctgtacagttt

SEQ ID NO: 3866115 - DNA, 25 bp, Homo sapien
tctgggcaaccagataatcaactta

SEQ ID NO: 3866116 - DNA, 25 bp, Homo sapien
tgtttttatccactttcagctttag

SEQ ID NO: 3866117 - DNA, 25 bp, Homo sapien
tttttatccactttcagctttagaa

SEQ ID NO: 3866118 - DNA, 25 bp, Homo sapien
tttatccactttcagctttagaatc

SEQ ID NO: 3866119 - DNA, 25 bp, Homo sapien
ttgtttttatccactttcagcttta

SEQ ID NO: 3866120 - DNA, 25 bp, Homo sapien
cacagtcgatcaaatatagcttttt

SEQ ID NO: 3866121 - DNA, 25 bp, Homo sapien
ctagttgtttacacagtcgatcaaa

SEQ ID NO: 3866122 - DNA, 25 bp, Homo sapien
tgtcgacctgctgtccaatcttctc

SEQ ID NO: 3866123 - DNA, 25 bp, Homo sapien
tcttctctagttgtttacacagtcg

SEQ ID NO: 3866124 - DNA, 25 bp, Homo sapien
ctcaatttcagtatttgggcatgtt

SEQ ID NO: 3866125 - DNA, 25 bp, Homo sapien
caatttcagtatttgggcatgtttt

SEQ ID NO: 3866126 - DNA, 25 bp, Homo sapien
tgggcatgttttggatcacaaataa

SEQ ID NO: 3866127 - DNA, 25 bp, Homo sapien
cagtatttgggcatgttttggatca

SEQ ID NO: 3866128 - DNA, 25 bp, Homo sapien
tcttccgtggtggagtagctacatc

SEQ ID NO: 3866129 - DNA, 25 bp, Homo sapien
tggtggagtagctacatctccaggt

SEQ ID NO: 3866130 - DNA, 25 bp, Homo sapien
gggcttcaaccactatcttctttct

SEQ ID NO: 3866131 - DNA, 25 bp, Homo sapien
tttctcttccgtggtggagtagcta

SEQ ID NO: 3866132 - DNA, 25 bp, Homo sapien
tcaaaagcaatttcaaaattcttag

SEQ ID NO: 3866133 - DNA, 25 bp, Homo sapien
tatcaaaagcaatttcaaaattctt

SEQ ID NO: 3866134 - DNA, 25 bp, Homo sapien
ctgacagaaaattatcaaaagcaat

SEQ ID NO: 3866135 - DNA, 25 bp, Homo sapien
attatcaaaagcaatttcaaaattc

SEQ ID NO: 3866136 - DNA, 25 bp, Homo sapien
ctttctgtggtttatgtggcatctc

SEQ ID NO: 3866137 - DNA, 25 bp, Homo sapien
ttctgtggtttatgtggcatctcct

SEQ ID NO: 3866138 - DNA, 25 bp, Homo sapien
tgtgtcagatcttcatctttctgtg

SEQ ID NO: 3866139 - DNA, 25 bp, Homo sapien
gtttatgtggcatctcctctacctt

SEQ ID NO: 3866140 - DNA, 25 bp, Homo sapien
tgctgtagccttttgagcactggca

SEQ ID NO: 3866141 - DNA, 25 bp, Homo sapien
cactctgctgtagccttttgagcac

SEQ ID NO: 3866142 - DNA, 25 bp, Homo sapien
tctgctgtagccttttgagcactgg

SEQ ID NO: 3866143 - DNA, 25 bp, Homo sapien
tttgagcactggcagcattttccaa

SEQ ID NO: 3866144 - DNA, 25 bp, Homo sapien
ccaggctggagtatctatctattta

SEQ ID NO: 3866145 - DNA, 25 bp, Homo sapien
taaggctataccaatcaggcactgt

SEQ ID NO: 3866146 - DNA, 25 bp, Homo sapien
gcactgtggctggtctaatgctcac

SEQ ID NO: 3866147 - DNA, 25 bp, Homo sapien
caaagccgtcaagtcttcctggaga

SEQ ID NO: 3866148 - DNA, 25 bp, Homo sapien
aataagacaagggactgccattcac

SEQ ID NO: 3866149 - DNA, 25 bp, Homo sapien
ttattaacttaggctgtacaatata

SEQ ID NO: 3866150 - DNA, 25 bp, Homo sapien
ggctgtacaatatattgatttagtc

SEQ ID NO: 3866151 - DNA, 25 bp, Homo sapien
attcacttaaagcaaaatggctcca

SEQ ID NO: 3866152 - DNA, 25 bp, Homo sapien
caacatctaataacttgggtctagg

SEQ ID NO: 3866153 - DNA, 25 bp, Homo sapien
tgtgttgaccctgatttgagcaagc

SEQ ID NO: 3866154 - DNA, 25 bp, Homo sapien
gcctggcccgcatgtattacattta

SEQ ID NO: 3866155 - DNA, 25 bp, Homo sapien
ggtatagttaagcaagtatggcaac

SEQ ID NO: 3866156 - DNA, 25 bp, Homo sapien
ccttaaccaaccagtgatgctttgg

SEQ ID NO: 3866157 - DNA, 25 bp, Homo sapien
tacaagcagctcatgggccaattat

SEQ ID NO: 3866158 - DNA, 25 bp, Homo sapien
cttagcattccagtataacattggg

SEQ ID NO: 3866159 - DNA, 25 bp, Homo sapien
aattggtcaggattgaggcctcggc

SEQ ID NO: 3866160 - DNA, 25 bp, Homo sapien
tggtgacagttgttccccggtcctg

SEQ ID NO: 3866161 - DNA, 25 bp, Homo sapien
gaacaattggtagggcacgggacta

SEQ ID NO: 3866162 - DNA, 25 bp, Homo sapien
tcgggttacacccagatatttgcgg

SEQ ID NO: 3866163 - DNA, 25 bp, Homo sapien
gcttgggccttctgcaacaaatgca

SEQ ID NO: 3866164 - DNA, 25 bp, Homo sapien
agcttcgtgcggactctccctgtga

SEQ ID NO: 3866165 - DNA, 25 bp, Homo sapien
gagcagagatcacgagcactggtgc

SEQ ID NO: 3866166 - DNA, 25 bp, Homo sapien
tgtagcccctcatagaaaaagttgg

SEQ ID NO: 3866167 - DNA, 25 bp, Homo sapien
tgaggcgggttgtcctggttccaac

SEQ ID NO: 3866168 - DNA, 25 bp, Homo sapien
atgttttaggtttcatctctagaat

SEQ ID NO: 3866169 - DNA, 25 bp, Homo sapien
agaatttcaacttcggacttcaaca

SEQ ID NO: 3866170 - DNA, 25 bp, Homo sapien
tgtagtgtttaacctgcctttagtc

SEQ ID NO: 3866171 - DNA, 25 bp, Homo sapien
taatctttgtcctttgtagtgttta

SEQ ID NO: 3866172 - DNA, 25 bp, Homo sapien
ttggcagttttcttccttgagtact

SEQ ID NO: 3866173 - DNA, 25 bp, Homo sapien
ttttaaggatagttttgatgggcat

SEQ ID NO: 3866174 - DNA, 25 bp, Homo sapien
gatgggcataatatttttggttggc

SEQ ID NO: 3866175 - DNA, 25 bp, Homo sapien
cagttttcttccttgagtactttga

SEQ ID NO: 3866176 - DNA, 25 bp, Homo sapien
acctccacctcctacattcaagtga

SEQ ID NO: 3866177 - DNA, 25 bp, Homo sapien
tcacccaggctagtggcctgatctt

SEQ ID NO: 3866178 - DNA, 25 bp, Homo sapien
ctccacctcctacattcaagtgatt

SEQ ID NO: 3866179 - DNA, 25 bp, Homo sapien
tgtcacccaggctagtggcctgatc

SEQ ID NO: 3866180 - DNA, 25 bp, Homo sapien
gctggccgggcctttcgggagtagc

SEQ ID NO: 3866181 - DNA, 25 bp, Homo sapien
tggccgggcctttcgggagtagcag

SEQ ID NO: 3866182 - DNA, 25 bp, Homo sapien
ctggccgggcctttcgggagtagca

SEQ ID NO: 3866183 - DNA, 25 bp, Homo sapien
gagctggccgggcctttcgggagta

SEQ ID NO: 3866184 - DNA, 25 bp, Homo sapien
agcagcccgtgagccacgtctgcat

SEQ ID NO: 3866185 - DNA, 25 bp, Homo sapien
gcgccgactcctctggccaacgtgg

SEQ ID NO: 3866186 - DNA, 25 bp, Homo sapien
tactccgagctgcttggggatcccc

SEQ ID NO: 3866187 - DNA, 25 bp, Homo sapien
tgcagcctggctggcgccgactcct

SEQ ID NO: 3866188 - DNA, 25 bp, Homo sapien
tactatgatccatgtgataaaacat

SEQ ID NO: 3866189 - DNA, 25 bp, Homo sapien
catggaaaccataatcactactatg

SEQ ID NO: 3866190 - DNA, 25 bp, Homo sapien
aggcctgaaaaagattccgaagtag

SEQ ID NO: 3866191 - DNA, 25 bp, Homo sapien
cctgaaaaagattccgaagtagatt

SEQ ID NO: 3866192 - DNA, 25 bp, Homo sapien
gtgtaagtttatgcctttcatcaga

SEQ ID NO: 3866193 - DNA, 25 bp, Homo sapien
ggctccagtgatgcaagtgttagac

SEQ ID NO: 3866194 - DNA, 25 bp, Homo sapien
gatgtgcccgggtgtttgaatttat

SEQ ID NO: 3866195 - DNA, 25 bp, Homo sapien
catcagattatgtaaagttttaaac

SEQ ID NO: 3866196 - DNA, 25 bp, Homo sapien
gggctggagcttgccgtatagaaaa

SEQ ID NO: 3866197 - DNA, 25 bp, Homo sapien
tcagccttgtgtgcgttttagagtc

SEQ ID NO: 3866198 - DNA, 25 bp, Homo sapien
gaacagcttgtggaataagcacgtc

SEQ ID NO: 3866199 - DNA, 25 bp, Homo sapien
gctgaagaccattacaggaaagtca

SEQ ID NO: 3866200 - DNA, 25 bp, Homo sapien
cagaggcttgtttgaggcccgcggg

SEQ ID NO: 3866201 - DNA, 25 bp, Homo sapien
tgccgccgctaagggagaggagcat

SEQ ID NO: 3866202 - DNA, 25 bp, Homo sapien
gaggagcatgtctgcaactcgagcc

SEQ ID NO: 3866203 - DNA, 25 bp, Homo sapien
tctgcaactcgagccaagaaagtga

SEQ ID NO: 3866204 - DNA, 25 bp, Homo sapien
ttgccccctcgtagtcggccaggcc

SEQ ID NO: 3866205 - DNA, 25 bp, Homo sapien
ggccttgccccctcgtagtcggcca

SEQ ID NO: 3866206 - DNA, 25 bp, Homo sapien
cccctcgtagtcggccaggccgaga

SEQ ID NO: 3866207 - DNA, 25 bp, Homo sapien
ctcgtagtcggccaggccgagagga

SEQ ID NO: 3866208 - DNA, 25 bp, Homo sapien
taagtatcagtcacggacagattgg

SEQ ID NO: 3866209 - DNA, 25 bp, Homo sapien
agtgagtagcactggtttacacagc

SEQ ID NO: 3866210 - DNA, 25 bp, Homo sapien
tacacagctaggctgctccttgaag

SEQ ID NO: 3866211 - DNA, 25 bp, Homo sapien
tcctgacagtgggacttaggcaatt

SEQ ID NO: 3866212 - DNA, 25 bp, Homo sapien
gacaaggattggtcaatcagatgtg

SEQ ID NO: 3866213 - DNA, 25 bp, Homo sapien
ttaaagacaaggattggtcaatcag

SEQ ID NO: 3866214 - DNA, 25 bp, Homo sapien
gattggtcaatcagatgtgctaatt

SEQ ID NO: 3866215 - DNA, 25 bp, Homo sapien
ggtcaatcagatgtgctaatttttc

SEQ ID NO: 3866216 - DNA, 25 bp, Homo sapien
gtggtgctggtgcagatgcgggtgg

SEQ ID NO: 3866217 - DNA, 25 bp, Homo sapien
ggtgctggtgcagatgcgggtgggc

SEQ ID NO: 3866218 - DNA, 25 bp, Homo sapien
gtgcagatgcgggtgggcgtcataa

SEQ ID NO: 3866219 - DNA, 25 bp, Homo sapien
gcgggtgggcgtcataaagctgctc

SEQ ID NO: 3866220 - DNA, 25 bp, Homo sapien
ttcctcttccacgagcctgtaccgc

SEQ ID NO: 3866221 - DNA, 25 bp, Homo sapien
ctggcgggcctggacgacgcgcgca

SEQ ID NO: 3866222 - DNA, 25 bp, Homo sapien
gagcaggaccgacgcggaacagcaa

SEQ ID NO: 3866223 - DNA, 25 bp, Homo sapien
ggacgacgcgcgcaggagcaggacc

SEQ ID NO: 3866224 - DNA, 25 bp, Homo sapien
ctagcgccggatgccggcttttgca

SEQ ID NO: 3866225 - DNA, 25 bp, Homo sapien
ggatgccggcttttgcaaattgttt

SEQ ID NO: 3866226 - DNA, 25 bp, Homo sapien
gatgccggcttttgcaaattgttta

SEQ ID NO: 3866227 - DNA, 25 bp, Homo sapien
gcgccggatgccggcttttgcaaat

SEQ ID NO: 3866228 - DNA, 25 bp, Homo sapien
tcttgcaagagttgatccctaatac

SEQ ID NO: 3866229 - DNA, 25 bp, Homo sapien
gcaagagttgatccctaatacccat

SEQ ID NO: 3866230 - DNA, 25 bp, Homo sapien
gaggctttgtcaggcctatttttca

SEQ ID NO: 3866231 - DNA, 25 bp, Homo sapien
acttcctcttgcaagagttgatccc

SEQ ID NO: 3866232 - DNA, 25 bp, Homo sapien
tgctggatggtgcagtcatcgcccc

SEQ ID NO: 3866233 - DNA, 25 bp, Homo sapien
tggtgcagtcatcgccccgagtttc

SEQ ID NO: 3866234 - DNA, 25 bp, Homo sapien
tggatggtgcagtcatcgccccgag

SEQ ID NO: 3866235 - DNA, 25 bp, Homo sapien
agtcatcgccccgagtttcatcatc

SEQ ID NO: 3866236 - DNA, 25 bp, Homo sapien
tagagctgttggcagcctgtcccca

SEQ ID NO: 3866237 - DNA, 25 bp, Homo sapien
aggggccgtgctctctgtcgcgtct

SEQ ID NO: 3866238 - DNA, 25 bp, Homo sapien
tctgtcgcgtctgcgaagctagagc

SEQ ID NO: 3866239 - DNA, 25 bp, Homo sapien
tgcgaagctagagctgttggcagcc

SEQ ID NO: 3866240 - DNA, 25 bp, Homo sapien
cagtaggcgggagcgttcgtccgaa

SEQ ID NO: 3866241 - DNA, 25 bp, Homo sapien
gctctttgtcccagttgaggggctg

SEQ ID NO: 3866242 - DNA, 25 bp, Homo sapien
gcgggagcgttcgtccgaacgtggc

SEQ ID NO: 3866243 - DNA, 25 bp, Homo sapien
cgggaccggacagtaggcgggagcg

SEQ ID NO: 3866244 - DNA, 25 bp, Homo sapien
gagagtgacgcgaactacaagtccc

SEQ ID NO: 3866245 - DNA, 25 bp, Homo sapien
agagtgacgcgaactacaagtccca

SEQ ID NO: 3866246 - DNA, 25 bp, Homo sapien
ctgcggagagtgacgcgaactacaa

SEQ ID NO: 3866247 - DNA, 25 bp, Homo sapien
cggagagtgacgcgaactacaagtc

SEQ ID NO: 3866248 - DNA, 25 bp, Homo sapien
ggccctgtagttcccctggctgctc

SEQ ID NO: 3866249 - DNA, 25 bp, Homo sapien
tcctgggccctgtagttcccctggc

SEQ ID NO: 3866250 - DNA, 25 bp, Homo sapien
cctcctgggccctgtagttcccctg

SEQ ID NO: 3866251 - DNA, 25 bp, Homo sapien
ctgggccctgtagttcccctggctg

SEQ ID NO: 3866252 - DNA, 25 bp, Homo sapien
tcgccgcactcggttagctcgcgcg

SEQ ID NO: 3866253 - DNA, 25 bp, Homo sapien
tgtcgcccctggtaggccctcgccg

SEQ ID NO: 3866254 - DNA, 25 bp, Homo sapien
tagctcgcgcgcctggagcagctac

SEQ ID NO: 3866255 - DNA, 25 bp, Homo sapien
gtaggccctcgccgcactcggttag

SEQ ID NO: 3866256 - DNA, 25 bp, Homo sapien
ccaagggctctttcagcgagcggtg

SEQ ID NO: 3866257 - DNA, 25 bp, Homo sapien
gaaaaagaacaaacacgtcgcgcac

SEQ ID NO: 3866258 - DNA, 25 bp, Homo sapien
ggctttcgcaaaggctgcgcccaag

SEQ ID NO: 3866259 - DNA, 25 bp, Homo sapien
tgcgcccaaggcatgcatgcaacgt

SEQ ID NO: 3866260 - DNA, 25 bp, Homo sapien
tcacctgcgggttcatggactccag

SEQ ID NO: 3866261 - DNA, 25 bp, Homo sapien
tcgagctcgatctcgccggccttga

SEQ ID NO: 3866262 - DNA, 25 bp, Homo sapien
cttcacctgcgggttcatggactcc

SEQ ID NO: 3866263 - DNA, 25 bp, Homo sapien
agcacgatgggtccccgcacggcgt

SEQ ID NO: 3866264 - DNA, 25 bp, Homo sapien
agggggcattctctcgttttagcca

SEQ ID NO: 3866265 - DNA, 25 bp, Homo sapien
caccagtaagtgaacgggcgggagg

SEQ ID NO: 3866266 - DNA, 25 bp, Homo sapien
gccatgggggtggacgtcgtgggaa

SEQ ID NO: 3866267 - DNA, 25 bp, Homo sapien
gggctgctgcggtttttcccttgct

SEQ ID NO: 3866268 - DNA, 25 bp, Homo sapien
agcacggcccgctcaacaattgacg

SEQ ID NO: 3866269 - DNA, 25 bp, Homo sapien
ttgcaaggcctcactgagtgcccgg

SEQ ID NO: 3866270 - DNA, 25 bp, Homo sapien
aacgtgcggtgcctggcagcacggc

SEQ ID NO: 3866271 - DNA, 25 bp, Homo sapien
tcaacaagtgaaccgtattgcaagg

SEQ ID NO: 3866272 - DNA, 25 bp, Homo sapien
tccactggaccttggttccacgaga

SEQ ID NO: 3866273 - DNA, 25 bp, Homo sapien
ttcttcattcgcttatgttcctctc

SEQ ID NO: 3866274 - DNA, 25 bp, Homo sapien
ttccacgagagtagggcagacacac

SEQ ID NO: 3866275 - DNA, 25 bp, Homo sapien
tttttccaagaacttatcactgaga

SEQ ID NO: 3866276 - DNA, 25 bp, Homo sapien
ggctggtcggccaaggctccagagg

SEQ ID NO: 3866277 - DNA, 25 bp, Homo sapien
cagaccacagaagtggctggtcggc

SEQ ID NO: 3866278 - DNA, 25 bp, Homo sapien
ccccagaccacagaagtggctggtc

SEQ ID NO: 3866279 - DNA, 25 bp, Homo sapien
ccacagaagtggctggtcggccaag

SEQ ID NO: 3866280 - DNA, 25 bp, Homo sapien
caggcccaactctctggttccccac

SEQ ID NO: 3866281 - DNA, 25 bp, Homo sapien
ccgacaggcccaactctctggttcc

SEQ ID NO: 3866282 - DNA, 25 bp, Homo sapien
agcccgacaggcccaactctctggt

SEQ ID NO: 3866283 - DNA, 25 bp, Homo sapien
caaagcccgacaggcccaactctct

SEQ ID NO: 3866284 - DNA, 25 bp, Homo sapien
cctagcttctgaagaggctgaggca

SEQ ID NO: 3866285 - DNA, 25 bp, Homo sapien
tagtcctagcttctgaagaggctga

SEQ ID NO: 3866286 - DNA, 25 bp, Homo sapien
ttgaggccacagtgagctataactg

SEQ ID NO: 3866287 - DNA, 25 bp, Homo sapien
aggccacagtgagctataactgcac

SEQ ID NO: 3866288 - DNA, 25 bp, Homo sapien
ctgccggaggaaggtgattggctgc

SEQ ID NO: 3866289 - DNA, 25 bp, Homo sapien
ccggaggaaggtgattggctgctgc

SEQ ID NO: 3866290 - DNA, 25 bp, Homo sapien
tgccggaggaaggtgattggctgct

SEQ ID NO: 3866291 - DNA, 25 bp, Homo sapien
cggaggaaggtgattggctgctgcc

SEQ ID NO: 3866292 - DNA, 25 bp, Homo sapien
gggactctaacatccagggctgctg

SEQ ID NO: 3866293 - DNA, 25 bp, Homo sapien
actctgtgtggtctgattcatttcc

SEQ ID NO: 3866294 - DNA, 25 bp, Homo sapien
tgctggcctgctccaagggtcagca

SEQ ID NO: 3866295 - DNA, 25 bp, Homo sapien
ttcctgggcccagcatggggactct

SEQ ID NO: 3866296 - DNA, 25 bp, Homo sapien
aggggaagacgctgggctctctgca

SEQ ID NO: 3866297 - DNA, 25 bp, Homo sapien
agaagttgagagttgggatgcacta

SEQ ID NO: 3866298 - DNA, 25 bp, Homo sapien
agagttgggatgcactatgacctgg

SEQ ID NO: 3866299 - DNA, 25 bp, Homo sapien
tgacgcaagcctctctgcgaggact

SEQ ID NO: 3866300 - DNA, 25 bp, Homo sapien
ggatccgccgggcacgtttcttagc

SEQ ID NO: 3866301 - DNA, 25 bp, Homo sapien
tcttagcatcttctgggaagctggg

SEQ ID NO: 3866302 - DNA, 25 bp, Homo sapien
ggctgttcccgccacaagcctgcag

SEQ ID NO: 3866303 - DNA, 25 bp, Homo sapien
ttgggtaggtgcatagtgccatcac

SEQ ID NO: 3866304 - DNA, 25 bp, Homo sapien
catgcaggaccctccgcttgaggct

SEQ ID NO: 3866305 - DNA, 25 bp, Homo sapien
attcgcatgcaggaccctccgcttg

SEQ ID NO: 3866306 - DNA, 25 bp, Homo sapien
tcattcatttcacgcctaggggcct

SEQ ID NO: 3866307 - DNA, 25 bp, Homo sapien
gggccgcctgggaacactcattcat

SEQ ID NO: 3866308 - DNA, 25 bp, Homo sapien
tgtgacgaaggcaggctcagctgct

SEQ ID NO: 3866309 - DNA, 25 bp, Homo sapien
ctgtgacgaaggcaggctcagctgc

SEQ ID NO: 3866310 - DNA, 25 bp, Homo sapien
agcacccacacccggcatgatgcag

SEQ ID NO: 3866311 - DNA, 25 bp, Homo sapien
gcacccacacccggcatgatgcagg

SEQ ID NO: 3866312 - DNA, 25 bp, Homo sapien
ctctgtggagcctggtgccacgtca

SEQ ID NO: 3866313 - DNA, 25 bp, Homo sapien
ctggtgccacgtcaggatgcagaca

SEQ ID NO: 3866314 - DNA, 25 bp, Homo sapien
caggatgcagacattggggcatggg

SEQ ID NO: 3866315 - DNA, 25 bp, Homo sapien
tggtgccacgtcaggatgcagacat

SEQ ID NO: 3866316 - DNA, 25 bp, Homo sapien
aggcccatggccacggggtctttgg

SEQ ID NO: 3866317 - DNA, 25 bp, Homo sapien
taggcccatggccacggggtctttg

SEQ ID NO: 3866318 - DNA, 25 bp, Homo sapien
cttccaggagttttaggcccatggc

SEQ ID NO: 3866319 - DNA, 25 bp, Homo sapien
aggagttttaggcccatggccacgg

SEQ ID NO: 3866320 - DNA, 25 bp, Homo sapien
tgtaggcagccacatcttcacggat

SEQ ID NO: 3866321 - DNA, 25 bp, Homo sapien
catccctcctggtgatgtaggcagc

SEQ ID NO: 3866322 - DNA, 25 bp, Homo sapien
tgacaccctggctagcactgtagga

SEQ ID NO: 3866323 - DNA, 25 bp, Homo sapien
aaatgccgtcactagctcccgtggt

SEQ ID NO: 3866324 - DNA, 25 bp, Homo sapien
ttcacatctagaaagccagcactac

SEQ ID NO: 3866325 - DNA, 25 bp, Homo sapien
attcacatctagaaagccagcacta

SEQ ID NO: 3866326 - DNA, 25 bp, Homo sapien
tcacatctagaaagccagcactact

SEQ ID NO: 3866327 - DNA, 25 bp, Homo sapien
tgggatggggatcatcacacctgtc

SEQ ID NO: 3866328 - DNA, 25 bp, Homo sapien
ccccggagacgaggatcttcaggat

SEQ ID NO: 3866329 - DNA, 25 bp, Homo sapien
cctggatggcgtcgagctcagagat

SEQ ID NO: 3866330 - DNA, 25 bp, Homo sapien
cattcacattcagcgcccagcagtt

SEQ ID NO: 3866331 - DNA, 25 bp, Homo sapien
ggatcacagtggtctttggcctcct

SEQ ID NO: 3866332 - DNA, 25 bp, Homo sapien
taggatcacagtggtctttggcctc

SEQ ID NO: 3866333 - DNA, 25 bp, Homo sapien
gatcacagtggtctttggcctcctg

SEQ ID NO: 3866334 - DNA, 25 bp, Homo sapien
cttaggatcacagtggtctttggcc

SEQ ID NO: 3866335 - DNA, 25 bp, Homo sapien
ttcccagggttgattatgcagagca

SEQ ID NO: 3866336 - DNA, 25 bp, Homo sapien
ggttcccagggttgattatgcagag

SEQ ID NO: 3866337 - DNA, 25 bp, Homo sapien
gggttcccagggttgattatgcaga

SEQ ID NO: 3866338 - DNA, 25 bp, Homo sapien
gtggggttcccagggttgattatgc

SEQ ID NO: 3866339 - DNA, 25 bp, Homo sapien
tggaatgcaaaccaggatttgagca

SEQ ID NO: 3866340 - DNA, 25 bp, Homo sapien
ttatcctgttggaatgcaaaccagg

SEQ ID NO: 3866341 - DNA, 25 bp, Homo sapien
cctgttggaatgcaaaccaggattt

SEQ ID NO: 3866342 - DNA, 25 bp, Homo sapien
caaaccaggatttgagcaccagaaa

SEQ ID NO: 3866343 - DNA, 25 bp, Homo sapien
gacagagaagggctggtttctgagg

SEQ ID NO: 3866344 - DNA, 25 bp, Homo sapien
ggctggtttctgaggacagcagaac

SEQ ID NO: 3866345 - DNA, 25 bp, Homo sapien
gaagggctggtttctgaggacagca

SEQ ID NO: 3866346 - DNA, 25 bp, Homo sapien
agagaagggctggtttctgaggaca

SEQ ID NO: 3866347 - DNA, 25 bp, Homo sapien
tttgttaataatacctatattctgg

SEQ ID NO: 3866348 - DNA, 25 bp, Homo sapien
ttgttaataatacctatattctggt

SEQ ID NO: 3866349 - DNA, 25 bp, Homo sapien
ttttgttaataatacctatattctg

SEQ ID NO: 3866350 - DNA, 25 bp, Homo sapien
gtgaagagttagcttctttctcccc

SEQ ID NO: 3866351 - DNA, 25 bp, Homo sapien
cagcagatggtgaagagactcgcat

SEQ ID NO: 3866352 - DNA, 25 bp, Homo sapien
tccccagagaggcacccatgagctc

SEQ ID NO: 3866353 - DNA, 25 bp, Homo sapien
gccaccgggtgaagagttagcttct

SEQ ID NO: 3866354 - DNA, 25 bp, Homo sapien
tgtctgtatatgttgcgtgtgtagg

SEQ ID NO: 3866355 - DNA, 25 bp, Homo sapien
tgtataggtgtgttgaggtgtgtct

SEQ ID NO: 3866356 - DNA, 25 bp, Homo sapien
gtctatgtggtatttgtgtaggtgt

SEQ ID NO: 3866357 - DNA, 25 bp, Homo sapien
tgtgcagtgtttgtagtatgtgtct

SEQ ID NO: 3866358 - DNA, 25 bp, Homo sapien
ctcagccagttatgcgagggagaag

SEQ ID NO: 3866359 - DNA, 25 bp, Homo sapien
gcatgatggtgtagtcggcctccag

SEQ ID NO: 3866360 - DNA, 25 bp, Homo sapien
ctgtgttcccttgagacccatagaa

SEQ ID NO: 3866361 - DNA, 25 bp, Homo sapien
aagcccatccagaatcactcagtgc

SEQ ID NO: 3866362 - DNA, 25 bp, Homo sapien
aaagagcttctcttcccaggcaaag

SEQ ID NO: 3866363 - DNA, 25 bp, Homo sapien
aaagtggatcacatcttctatgcac

SEQ ID NO: 3866364 - DNA, 25 bp, Homo sapien
catcagccaggagaaagagcttctc

SEQ ID NO: 3866365 - DNA, 25 bp, Homo sapien
tctcttcccaggcaaagtggatcac

SEQ ID NO: 3866366 - DNA, 25 bp, Homo sapien
gtgaggaaacccatgggtctctctg

SEQ ID NO: 3866367 - DNA, 25 bp, Homo sapien
taccaggttgtgaggaaacccatgg

SEQ ID NO: 3866368 - DNA, 25 bp, Homo sapien
ggttgtgaggaaacccatgggtctc

SEQ ID NO: 3866369 - DNA, 25 bp, Homo sapien
ctgtataccaggttgtgaggaaacc

SEQ ID NO: 3866370 - DNA, 25 bp, Homo sapien
gagggtcaagctggctccattgcca

SEQ ID NO: 3866371 - DNA, 25 bp, Homo sapien
tcggagggtcaagctggctccattg

SEQ ID NO: 3866372 - DNA, 25 bp, Homo sapien
cagtcggagggtcaagctggctcca

SEQ ID NO: 3866373 - DNA, 25 bp, Homo sapien
gggatcagtcggagggtcaagctgg

SEQ ID NO: 3866374 - DNA, 25 bp, Homo sapien
cagagaaactgagcctttctggggc

SEQ ID NO: 3866375 - DNA, 25 bp, Homo sapien
ctattttggagatcagagaaactga

SEQ ID NO: 3866376 - DNA, 25 bp, Homo sapien
agagaaactgagcctttctggggcc

SEQ ID NO: 3866377 - DNA, 25 bp, Homo sapien
ttttggagatcagagaaactgagcc

SEQ ID NO: 3866378 - DNA, 25 bp, Homo sapien
ccagagcagcatttatacccgtttg

SEQ ID NO: 3866379 - DNA, 25 bp, Homo sapien
gagcagcatttatacccgtttggtt

SEQ ID NO: 3866380 - DNA, 25 bp, Homo sapien
ttggttctttccagtcccgagtcca

SEQ ID NO: 3866381 - DNA, 25 bp, Homo sapien
cactcgagtggaatcattgtgttct

SEQ ID NO: 3866382 - DNA, 25 bp, Homo sapien
gacgacggcattagtggccctttcc

SEQ ID NO: 3866383 - DNA, 25 bp, Homo sapien
caacactggtgacgacggcattagt

SEQ ID NO: 3866384 - DNA, 25 bp, Homo sapien
tggtgacgacggcattagtggccct

SEQ ID NO: 3866385 - DNA, 25 bp, Homo sapien
gacggcattagtggccctttcctct

SEQ ID NO: 3866386 - DNA, 25 bp, Homo sapien
tgtgccattccagggatgagccaag

SEQ ID NO: 3866387 - DNA, 25 bp, Homo sapien
attccagggatgagccaagtgtgcc

SEQ ID NO: 3866388 - DNA, 25 bp, Homo sapien
tcctgtgccattccagggatgagcc

SEQ ID NO: 3866389 - DNA, 25 bp, Homo sapien
gccattccagggatgagccaagtgt

SEQ ID NO: 3866390 - DNA, 25 bp, Homo sapien
gcacggcagggacggtcaccaaagg

SEQ ID NO: 3866391 - DNA, 25 bp, Homo sapien
caccaaagggtcctcaaagaggctg

SEQ ID NO: 3866392 - DNA, 25 bp, Homo sapien
tcaccaaagggtcctcaaagaggct

SEQ ID NO: 3866393 - DNA, 25 bp, Homo sapien
ggggcacggcagggacggtcaccaa

SEQ ID NO: 3866394 - DNA, 25 bp, Homo sapien
ccatctcgtacagcaccttcttgaa

SEQ ID NO: 3866395 - DNA, 25 bp, Homo sapien
tccacgttgctggagtactcgggcc

SEQ ID NO: 3866396 - DNA, 25 bp, Homo sapien
caatctggagagtacacgttgtcct

SEQ ID NO: 3866397 - DNA, 25 bp, Homo sapien
tgaaggagtggaatctgcaatctgg

SEQ ID NO: 3866398 - DNA, 25 bp, Homo sapien
agccggcagcgtgaggatctggcag

SEQ ID NO: 3866399 - DNA, 25 bp, Homo sapien
gaggagccggcagcgtgaggatctg

SEQ ID NO: 3866400 - DNA, 25 bp, Homo sapien
ggagccggcagcgtgaggatctggc

SEQ ID NO: 3866401 - DNA, 25 bp, Homo sapien
cagaggagccggcagcgtgaggatc

SEQ ID NO: 3866402 - DNA, 25 bp, Homo sapien
gaacacatgccctttgctgcaaacc

SEQ ID NO: 3866403 - DNA, 25 bp, Homo sapien
tccatgtacgtatgagatgtgtcca

SEQ ID NO: 3866404 - DNA, 25 bp, Homo sapien
tcagcctgcctggagacttacacat

SEQ ID NO: 3866405 - DNA, 25 bp, Homo sapien
gatgtgtccaggcttagagctccaa

SEQ ID NO: 3866406 - DNA, 25 bp, Homo sapien
ctccatgtagcctcctctgtaacca

SEQ ID NO: 3866407 - DNA, 25 bp, Homo sapien
ccatgtagcctcctctgtaaccaca

SEQ ID NO: 3866408 - DNA, 25 bp, Homo sapien
tccatgtagcctcctctgtaaccac

SEQ ID NO: 3866409 - DNA, 25 bp, Homo sapien
catgtagcctcctctgtaaccacac

SEQ ID NO: 3866410 - DNA, 25 bp, Homo sapien
tcggctgaattgctcaaaggactcc

SEQ ID NO: 3866411 - DNA, 25 bp, Homo sapien
tcacgacaatgtccatggcggcctg

SEQ ID NO: 3866412 - DNA, 25 bp, Homo sapien
gggcacaggcgcaccgacagcagct

SEQ ID NO: 3866413 - DNA, 25 bp, Homo sapien
tgccaccggggggttcacgacaatg

SEQ ID NO: 3866414 - DNA, 25 bp, Homo sapien
ggtggtctgttccttcgacactggg

SEQ ID NO: 3866415 - DNA, 25 bp, Homo sapien
acttggctctggacggaattcctca

SEQ ID NO: 3866416 - DNA, 25 bp, Homo sapien
catgggttctattctcgtaccagga

SEQ ID NO: 3866417 - DNA, 25 bp, Homo sapien
gcagcacttgcggaaatcccagatg

SEQ ID NO: 3866418 - DNA, 25 bp, Homo sapien
tgcaaggggttgcagtgaattcctg

SEQ ID NO: 3866419 - DNA, 25 bp, Homo sapien
taaacaggtcttccgtcagctttgc

SEQ ID NO: 3866420 - DNA, 25 bp, Homo sapien
agattacccaggaccgactccttct

SEQ ID NO: 3866421 - DNA, 25 bp, Homo sapien
atccgagggaaggcgtacatggccc

SEQ ID NO: 3866422 - DNA, 25 bp, Homo sapien
acactggtttgcatgaccacccggg

SEQ ID NO: 3866423 - DNA, 25 bp, Homo sapien
aaaaaggccctaggtgatcggtgca

SEQ ID NO: 3866424 - DNA, 25 bp, Homo sapien
gaagtttgggaagcgctgctccaga

SEQ ID NO: 3866425 - DNA, 25 bp, Homo sapien
tgtaatctaaatggcaggtctctct

SEQ ID NO: 3866426 - DNA, 25 bp, Homo sapien
tcatgcagtagaacatgtctggagc

SEQ ID NO: 3866427 - DNA, 25 bp, Homo sapien
tgaagtggtaagtgccttccctctg

SEQ ID NO: 3866428 - DNA, 25 bp, Homo sapien
gcttcatgcagtagaacatgtctgg

SEQ ID NO: 3866429 - DNA, 25 bp, Homo sapien
tctgcccaaagccactgccgggcac

SEQ ID NO: 3866430 - DNA, 25 bp, Homo sapien
ttccctggacaagacccggaccagc

SEQ ID NO: 3866431 - DNA, 25 bp, Homo sapien
tccctggacaagacccggaccagcc

SEQ ID NO: 3866432 - DNA, 25 bp, Homo sapien
gaagtagtcctctgctccatgtcaa

SEQ ID NO: 3866433 - DNA, 25 bp, Homo sapien
ctctctttgaagtagtcctctgctc

SEQ ID NO: 3866434 - DNA, 25 bp, Homo sapien
tgccatcgcagagttgaaaacggac

SEQ ID NO: 3866435 - DNA, 25 bp, Homo sapien
tggctccgggtgctaacagctcatg

SEQ ID NO: 3866436 - DNA, 25 bp, Homo sapien
tagtcagtctgacagtgagacaccc

SEQ ID NO: 3866437 - DNA, 25 bp, Homo sapien
tttcagacagcgatgggaccgatgg

SEQ ID NO: 3866438 - DNA, 25 bp, Homo sapien
aagttgatgtggaagtctttcacct

SEQ ID NO: 3866439 - DNA, 25 bp, Homo sapien
aggaagttgatgtggaagtctttca

SEQ ID NO: 3866440 - DNA, 25 bp, Homo sapien
gaagttgatgtggaagtctttcacc

SEQ ID NO: 3866441 - DNA, 25 bp, Homo sapien
agttgatgtggaagtctttcacctt

SEQ ID NO: 3866442 - DNA, 25 bp, Homo sapien
gagcaggtcccctctactctggttg

SEQ ID NO: 3866443 - DNA, 25 bp, Homo sapien
aaatgatgacgaagtgaccagcggc

SEQ ID NO: 3866444 - DNA, 25 bp, Homo sapien
gagaggcgctctcaacatcaaggca

SEQ ID NO: 3866445 - DNA, 25 bp, Homo sapien
ggcacaaagaaagacgtctccaggg

SEQ ID NO: 3866446 - DNA, 25 bp, Homo sapien
gcgcacagaattctcaggcctggct

SEQ ID NO: 3866447 - DNA, 25 bp, Homo sapien
gggttccagcctacgcatgttcaag

SEQ ID NO: 3866448 - DNA, 25 bp, Homo sapien
tgcccagtccacgtgctactgcgct

SEQ ID NO: 3866449 - DNA, 25 bp, Homo sapien
gcatctaccccaagctagtgcaaca

SEQ ID NO: 3866450 - DNA, 25 bp, Homo sapien
ggtcacccgcgggatgggtccacac

SEQ ID NO: 3866451 - DNA, 25 bp, Homo sapien
gggagaacaggcaccggtcacccgc

SEQ ID NO: 3866452 - DNA, 25 bp, Homo sapien
ttccagcggctctctccacggaagt

SEQ ID NO: 3866453 - DNA, 25 bp, Homo sapien
gattcagctcgccaccattcaagaa

SEQ ID NO: 3866454 - DNA, 25 bp, Homo sapien
taatggcagagaagccgcatgctgg

SEQ ID NO: 3866455 - DNA, 25 bp, Homo sapien
gaaggcaaaacactctgcatgaaag

SEQ ID NO: 3866456 - DNA, 25 bp, Homo sapien
tgggagaagcctgatgccacaggtc

SEQ ID NO: 3866457 - DNA, 25 bp, Homo sapien
tgcatgaaagcacggcaatgaacct

SEQ ID NO: 3866458 - DNA, 25 bp, Homo sapien
gagatacctgtgagaacctagacgg

SEQ ID NO: 3866459 - DNA, 25 bp, Homo sapien
gatcagcattcctacccgacgttaa

SEQ ID NO: 3866460 - DNA, 25 bp, Homo sapien
taacttccaagtgcgacctcaaatg

SEQ ID NO: 3866461 - DNA, 25 bp, Homo sapien
gaaaggcaccggaacagaatctgta

SEQ ID NO: 3866462 - DNA, 25 bp, Homo sapien
tgtgaacagggccacccaagctcct

SEQ ID NO: 3866463 - DNA, 25 bp, Homo sapien
agggccacccaagctccttattctc

SEQ ID NO: 3866464 - DNA, 25 bp, Homo sapien
ggccacccaagctccttattctcat

SEQ ID NO: 3866465 - DNA, 25 bp, Homo sapien
aacagggccacccaagctccttatt

SEQ ID NO: 3866466 - DNA, 25 bp, Homo sapien
gccctgtggtaaatgggttttgctg

SEQ ID NO: 3866467 - DNA, 25 bp, Homo sapien
tccctttcctatggggagcagcgtc

SEQ ID NO: 3866468 - DNA, 25 bp, Homo sapien
tcctcttcaatgttatggccccagt

SEQ ID NO: 3866469 - DNA, 25 bp, Homo sapien
ccaactccctttcctatggggagca

SEQ ID NO: 3866470 - DNA, 25 bp, Homo sapien
aagagagctgatggatggctggcag

SEQ ID NO: 3866471 - DNA, 25 bp, Homo sapien
ggctggcagtaaggttcatcttcct

SEQ ID NO: 3866472 - DNA, 25 bp, Homo sapien
gagtgacaggatatcagcagacagc

SEQ ID NO: 3866473 - DNA, 25 bp, Homo sapien
cttcttggagttctccccacttggg

SEQ ID NO: 3866474 - DNA, 25 bp, Homo sapien
caatatttgcattcagagcaaaggc

SEQ ID NO: 3866475 - DNA, 25 bp, Homo sapien
gagggatgcccccaatatttgcatt

SEQ ID NO: 3866476 - DNA, 25 bp, Homo sapien
cagagcaaaggcagatgaaattgga

SEQ ID NO: 3866477 - DNA, 25 bp, Homo sapien
gagcaaaggcagatgaaattggaga

SEQ ID NO: 3866478 - DNA, 25 bp, Homo sapien
gaagcttatatctcaggcctatgcc

SEQ ID NO: 3866479 - DNA, 25 bp, Homo sapien
ggtgtcttgagtgctgtaactccca

SEQ ID NO: 3866480 - DNA, 25 bp, Homo sapien
caagcactgggctagcctgacttct

SEQ ID NO: 3866481 - DNA, 25 bp, Homo sapien
cttcagtgatgctctgtagaggcca

SEQ ID NO: 3866482 - DNA, 25 bp, Homo sapien
cctgcataagctgctacaaatagaa

SEQ ID NO: 3866483 - DNA, 25 bp, Homo sapien
tgtaaagtttgtacaatttgtcctg

SEQ ID NO: 3866484 - DNA, 25 bp, Homo sapien
gagctgactgggaacaatggaaaaa

SEQ ID NO: 3866485 - DNA, 25 bp, Homo sapien
cacacaatgggtttggagctgactg

SEQ ID NO: 3866486 - DNA, 25 bp, Homo sapien
ggagtgcagtgtgcccatcagtaaa

SEQ ID NO: 3866487 - DNA, 25 bp, Homo sapien
tgatagcactcgaggctcaggaggt

SEQ ID NO: 3866488 - DNA, 25 bp, Homo sapien
cctataatgatagctctgatgaaga

SEQ ID NO: 3866489 - DNA, 25 bp, Homo sapien
gcagccatcatggacctggagtgca

SEQ ID NO: 3866490 - DNA, 25 bp, Homo sapien
gtgttagccaccactcttggcctgc

SEQ ID NO: 3866491 - DNA, 25 bp, Homo sapien
tgttagccaccactcttggcctgct

SEQ ID NO: 3866492 - DNA, 25 bp, Homo sapien
ccactcttggcctgcttttatttta

SEQ ID NO: 3866493 - DNA, 25 bp, Homo sapien
ccaccactcttggcctgcttttatt

SEQ ID NO: 3866494 - DNA, 25 bp, Homo sapien
tatgtgtgccagtacttctctgctt

SEQ ID NO: 3866495 - DNA, 25 bp, Homo sapien
ggccgggtgcgttagctcattccta

SEQ ID NO: 3866496 - DNA, 25 bp, Homo sapien
tgtgctctgattgtaatggagaagg

SEQ ID NO: 3866497 - DNA, 25 bp, Homo sapien
cagggatggtacaacagatgcagtc

SEQ ID NO: 3866498 - DNA, 25 bp, Homo sapien
gagctgtccaaaagtgtagtgcttg

SEQ ID NO: 3866499 - DNA, 25 bp, Homo sapien
tgtccaaaagtgtagtgcttgtcga

SEQ ID NO: 3866500 - DNA, 25 bp, Homo sapien
aaagtgtagtgcttgtcgaggtcga

SEQ ID NO: 3866501 - DNA, 25 bp, Homo sapien
gtcgaggtcgaggtgtgcgcatcat

SEQ ID NO: 3866502 - DNA, 25 bp, Homo sapien
tataatggcaagacaaccaaactac

SEQ ID NO: 3866503 - DNA, 25 bp, Homo sapien
ataatggcaagacaaccaaactaca

SEQ ID NO: 3866504 - DNA, 25 bp, Homo sapien
gtataatggcaagacaaccaaacta

SEQ ID NO: 3866505 - DNA, 25 bp, Homo sapien
tgtataatggcaagacaaccaaact

SEQ ID NO: 3866506 - DNA, 25 bp, Homo sapien
taataattgtacctcttctgaaggg

SEQ ID NO: 3866507 - DNA, 25 bp, Homo sapien
ctaagtgactcccttaagccgaaat

SEQ ID NO: 3866508 - DNA, 25 bp, Homo sapien
tatgcctcagaacagaaggttgtga

SEQ ID NO: 3866509 - DNA, 25 bp, Homo sapien
tttgagtttgcgaagtcatcagctt

SEQ ID NO: 3866510 - DNA, 25 bp, Homo sapien
taagagtactaccattctgaggagc

SEQ ID NO: 3866511 - DNA, 25 bp, Homo sapien
gagaaagtgccgaagaatccctacg

SEQ ID NO: 3866512 - DNA, 25 bp, Homo sapien
gagcatccagatttgtaagccgaga

SEQ ID NO: 3866513 - DNA, 25 bp, Homo sapien
tacagttagaaggaaggcgtgagcc

SEQ ID NO: 3866514 - DNA, 25 bp, Homo sapien
ttttcatcgtaagccccgagggagc

SEQ ID NO: 3866515 - DNA, 25 bp, Homo sapien
cagacccagagggtccaccgacgtc

SEQ ID NO: 3866516 - DNA, 25 bp, Homo sapien
gacgtcccggattctaataacgaca

SEQ ID NO: 3866517 - DNA, 25 bp, Homo sapien
ataacgacatctgcgcgccaggcgg

SEQ ID NO: 3866518 - DNA, 25 bp, Homo sapien
tgacacgactgggtttgaaaggcca

SEQ ID NO: 3866519 - DNA, 25 bp, Homo sapien
catcaaattatgtggtcctgacacc

SEQ ID NO: 3866520 - DNA, 25 bp, Homo sapien
cccacactaattgttagatggctaa

SEQ ID NO: 3866521 - DNA, 25 bp, Homo sapien
gcaaactgaacctttggaaaatgct

SEQ ID NO: 3866522 - DNA, 25 bp, Homo sapien
tacaatcagacaagataggtcagat

SEQ ID NO: 3866523 - DNA, 25 bp, Homo sapien
caagataggtcagataattccttct

SEQ ID NO: 3866524 - DNA, 25 bp, Homo sapien
tcagacaagataggtcagataattc

SEQ ID NO: 3866525 - DNA, 25 bp, Homo sapien
caatcagacaagataggtcagataa

SEQ ID NO: 3866526 - DNA, 25 bp, Homo sapien
ggatatggaacaggaccccttcaga

SEQ ID NO: 3866527 - DNA, 25 bp, Homo sapien
tctgtgcagcactcccttcttgagg

SEQ ID NO: 3866528 - DNA, 25 bp, Homo sapien
tactggacaggcataattgacaacc

SEQ ID NO: 3866529 - DNA, 25 bp, Homo sapien
tcagagcttttatgcccaggtgccc

SEQ ID NO: 3866530 - DNA, 25 bp, Homo sapien
taggagggtccacaacacatatttg

SEQ ID NO: 3866531 - DNA, 25 bp, Homo sapien
ttctgataccaatagcaagccccag

SEQ ID NO: 3866532 - DNA, 25 bp, Homo sapien
gattctcgcactcaattaacacaga

SEQ ID NO: 3866533 - DNA, 25 bp, Homo sapien
tatggctgtcccctatcctaccaaa

SEQ ID NO: 3866534 - DNA, 25 bp, Homo sapien
tgagtccccgacaacctctctgatg

SEQ ID NO: 3866535 - DNA, 25 bp, Homo sapien
tttctcacatatcctcaaggccctg

SEQ ID NO: 3866536 - DNA, 25 bp, Homo sapien
tatagtggacctgattgagtccccg

SEQ ID NO: 3866537 - DNA, 25 bp, Homo sapien
tctgatgtgagctctttccaagatc

SEQ ID NO: 3866538 - DNA, 25 bp, Homo sapien
tagtaggtggtatattctagtgacc

SEQ ID NO: 3866539 - DNA, 25 bp, Homo sapien
tccaggctttagtagacttccaaaa

SEQ ID NO: 3866540 - DNA, 25 bp, Homo sapien
agacaggaatggagttggacagaca

SEQ ID NO: 3866541 - DNA, 25 bp, Homo sapien
ggagtataggacacgatcactggat

SEQ ID NO: 3866542 - DNA, 25 bp, Homo sapien
tcctagatgtgatggcggccgggaa

SEQ ID NO: 3866543 - DNA, 25 bp, Homo sapien
cacttcctagatgtgatggcggccg

SEQ ID NO: 3866544 - DNA, 25 bp, Homo sapien
ggcggctgccgggcgagggtctcct

SEQ ID NO: 3866545 - DNA, 25 bp, Homo sapien
gatgtgatggcggccgggaagaggc

SEQ ID NO: 3866546 - DNA, 25 bp, Homo sapien
gtgtgagcaaaggttgtcagcacca

SEQ ID NO: 3866547 - DNA, 25 bp, Homo sapien
actatcaggccaaaagattccttga

SEQ ID NO: 3866548 - DNA, 25 bp, Homo sapien
tatagccgcccaaacagattcagac

SEQ ID NO: 3866549 - DNA, 25 bp, Homo sapien
gagggtgttggaggatgcagacggg

SEQ ID NO: 3866550 - DNA, 25 bp, Homo sapien
cccagcacacgtgacttgataggaa

SEQ ID NO: 3866551 - DNA, 25 bp, Homo sapien
ccagcacacgtgacttgataggaaa

SEQ ID NO: 3866552 - DNA, 25 bp, Homo sapien
cagcacacgtgacttgataggaaaa

SEQ ID NO: 3866553 - DNA, 25 bp, Homo sapien
cttgtccatggcattggcacacgcc

SEQ ID NO: 3866554 - DNA, 25 bp, Homo sapien
ttggcacacgcctaaccaccaggat

SEQ ID NO: 3866555 - DNA, 25 bp, Homo sapien
tgtccatggcattggcacacgccta

SEQ ID NO: 3866556 - DNA, 25 bp, Homo sapien
atggcattggcacacgcctaaccac

SEQ ID NO: 3866557 - DNA, 25 bp, Homo sapien
aacacgttcaaaccaaactcaggcg

SEQ ID NO: 3866558 - DNA, 25 bp, Homo sapien
ggatgagcccaactcaacacgttca

SEQ ID NO: 3866559 - DNA, 25 bp, Homo sapien
ctgagacccaaaactccatctgcca

SEQ ID NO: 3866560 - DNA, 25 bp, Homo sapien
catctgccatcttgacatctccatg

SEQ ID NO: 3866561 - DNA, 25 bp, Homo sapien
catcagcctcctaaagaacagggat

SEQ ID NO: 3866562 - DNA, 25 bp, Homo sapien
tgagcctataaaacaacctggccaa

SEQ ID NO: 3866563 - DNA, 25 bp, Homo sapien
ccatgccaaaagagctggatttgaa

SEQ ID NO: 3866564 - DNA, 25 bp, Homo sapien
ggctcaaaggatctacctgcatcag

SEQ ID NO: 3866565 - DNA, 25 bp, Homo sapien
gacagcaaggcattagcacaaaagg

SEQ ID NO: 3866566 - DNA, 25 bp, Homo sapien
aggaaattcccgctgaaagtcctgg

SEQ ID NO: 3866567 - DNA, 25 bp, Homo sapien
ctgcttttggttggtgttcatgcca

SEQ ID NO: 3866568 - DNA, 25 bp, Homo sapien
agcgcacccaaacaccatagatagt

SEQ ID NO: 3866569 - DNA, 25 bp, Homo sapien
tccaacttctcggcatctgcgttct

SEQ ID NO: 3866570 - DNA, 25 bp, Homo sapien
ccaacttctcggcatctgcgttctc

SEQ ID NO: 3866571 - DNA, 25 bp, Homo sapien
attccaacttctcggcatctgcgtt

SEQ ID NO: 3866572 - DNA, 25 bp, Homo sapien
agattccaacttctcggcatctgcg

SEQ ID NO: 3866573 - DNA, 25 bp, Homo sapien
tgaagaaggtgcaagtgaaccgcag

SEQ ID NO: 3866574 - DNA, 25 bp, Homo sapien
aagagtctggcacggggccgccttc

SEQ ID NO: 3866575 - DNA, 25 bp, Homo sapien
gcagctgcgggacgtgttcctctcc

SEQ ID NO: 3866576 - DNA, 25 bp, Homo sapien
gggagatcccgccagaggcgcatcc

SEQ ID NO: 3866577 - DNA, 25 bp, Homo sapien
cacagggtaggcctcatcacatctg

SEQ ID NO: 3866578 - DNA, 25 bp, Homo sapien
gatgggtgcttcaaggacaagctca

SEQ ID NO: 3866579 - DNA, 25 bp, Homo sapien
ggctgggtccgcatgtccaggacca

SEQ ID NO: 3866580 - DNA, 25 bp, Homo sapien
tgccctgacttatcaaggccagaga

SEQ ID NO: 3866581 - DNA, 25 bp, Homo sapien
caagagaggcaccaaatgagcctct

SEQ ID NO: 3866582 - DNA, 25 bp, Homo sapien
tggagagccaagctgttctttcggg

SEQ ID NO: 3866583 - DNA, 25 bp, Homo sapien
aatgcgttttgtcccaggttgcctg

SEQ ID NO: 3866584 - DNA, 25 bp, Homo sapien
tgcatccggtcactgaagaggcagt

SEQ ID NO: 3866585 - DNA, 25 bp, Homo sapien
aagaggcagtgaggactgtcacaga

SEQ ID NO: 3866586 - DNA, 25 bp, Homo sapien
gaacctcctgaaagtctgcctctga

SEQ ID NO: 3866587 - DNA, 25 bp, Homo sapien
gaaagacctatctagcccaagtgta

SEQ ID NO: 3866588 - DNA, 25 bp, Homo sapien
gaatcacactgattagacccagaag

SEQ ID NO: 3866589 - DNA, 25 bp, Homo sapien
agaagaatgcttccctgtttgagga

SEQ ID NO: 3866590 - DNA, 25 bp, Homo sapien
tcatacaatatttctcatacaataa

SEQ ID NO: 3866591 - DNA, 25 bp, Homo sapien
tctttttggaccctggtaatctcta

SEQ ID NO: 3866592 - DNA, 25 bp, Homo sapien
ttggaccctggtaatctctattcta

SEQ ID NO: 3866593 - DNA, 25 bp, Homo sapien
ttaatatgtaattatagggctgggc

SEQ ID NO: 3866594 - DNA, 25 bp, Homo sapien
tgtcacaccgctttacctgcagaac

SEQ ID NO: 3866595 - DNA, 25 bp, Homo sapien
gaaatcgcgtagatctgtcacaccg

SEQ ID NO: 3866596 - DNA, 25 bp, Homo sapien
tggtagcgcctcctccaatggtgaa

SEQ ID NO: 3866597 - DNA, 25 bp, Homo sapien
tgaagggatttgcagcgtttctgcc

SEQ ID NO: 3866598 - DNA, 25 bp, Homo sapien
gaattccgcgcatccctttgcaaag

SEQ ID NO: 3866599 - DNA, 25 bp, Homo sapien
cgagaacaataaaagccgcggccgt

SEQ ID NO: 3866600 - DNA, 25 bp, Homo sapien
cagtggttttcgaatagccccgcgg

SEQ ID NO: 3866601 - DNA, 25 bp, Homo sapien
caaagttgtgagattcctgtcgtgg

SEQ ID NO: 3866602 - DNA, 25 bp, Homo sapien
gcggctactcggagcggaccgcggg

SEQ ID NO: 3866603 - DNA, 25 bp, Homo sapien
ccgacgcgcctctttgtctggcggg

SEQ ID NO: 3866604 - DNA, 25 bp, Homo sapien
gggctcgcggctactcggagcggac

SEQ ID NO: 3866605 - DNA, 25 bp, Homo sapien
gggacccgacgcgcctctttgtctg

SEQ ID NO: 3866606 - DNA, 25 bp, Homo sapien
ctggagcggctctgctcggtcctca

SEQ ID NO: 3866607 - DNA, 25 bp, Homo sapien
tcagcccttcgcgaagcgccgggca

SEQ ID NO: 3866608 - DNA, 25 bp, Homo sapien
tgctcggtcctcaaaggtaaggacc

SEQ ID NO: 3866609 - DNA, 25 bp, Homo sapien
gggcagctcgggaacatggccctgg

SEQ ID NO: 3866610 - DNA, 25 bp, Homo sapien
ggctgagctgggcaaagttttgacc

SEQ ID NO: 3866611 - DNA, 25 bp, Homo sapien
gcctccgtcagacgggaggcatcga

SEQ ID NO: 3866612 - DNA, 25 bp, Homo sapien
agccacggcgagaggcaccctcact

SEQ ID NO: 3866613 - DNA, 25 bp, Homo sapien
ctgcccagggtcgagcaaggctgag

SEQ ID NO: 3866614 - DNA, 25 bp, Homo sapien
cggcgcgaagggcacggagagcctc

SEQ ID NO: 3866615 - DNA, 25 bp, Homo sapien
ctccctctgccgatgtccgcgcttc

SEQ ID NO: 3866616 - DNA, 25 bp, Homo sapien
gcgaagggcacggagagcctcgggc

SEQ ID NO: 3866617 - DNA, 25 bp, Homo sapien
agggcacggagagcctcgggctccc

SEQ ID NO: 3866618 - DNA, 25 bp, Homo sapien
tcagtgtgataaccgctgtggagaa

SEQ ID NO: 3866619 - DNA, 25 bp, Homo sapien
tggagactcccatcagctggcgaag

SEQ ID NO: 3866620 - DNA, 25 bp, Homo sapien
tctgaggagttggtactaaagtgcc

SEQ ID NO: 3866621 - DNA, 25 bp, Homo sapien
taaagtgcctgtcaacctggcgggc

SEQ ID NO: 3866622 - DNA, 25 bp, Homo sapien
tgatattttaatggtgtgagggtga

SEQ ID NO: 3866623 - DNA, 25 bp, Homo sapien
aaaatgaatgcagtcggcctgcctg

SEQ ID NO: 3866624 - DNA, 25 bp, Homo sapien
aagcagctgatattttaatggtgtg

SEQ ID NO: 3866625 - DNA, 25 bp, Homo sapien
cagtcggcctgcctgcaagcagctg

SEQ ID NO: 3866626 - DNA, 25 bp, Homo sapien
cacgcagagacaggcataaatattc

SEQ ID NO: 3866627 - DNA, 25 bp, Homo sapien
tggtaaggccttgatcacggttgtt

SEQ ID NO: 3866628 - DNA, 25 bp, Homo sapien
tacagagttcctactacacgcagag

SEQ ID NO: 3866629 - DNA, 25 bp, Homo sapien
caattggttagacaaacgtttacag

SEQ ID NO: 3866630 - DNA, 25 bp, Homo sapien
gacaaactaacagttattttctgag

SEQ ID NO: 3866631 - DNA, 25 bp, Homo sapien
tctgagatttctttcccactgacta

SEQ ID NO: 3866632 - DNA, 25 bp, Homo sapien
tgctctgagtctgaaatggcagttt

SEQ ID NO: 3866633 - DNA, 25 bp, Homo sapien
tttcccatgacagtgacaaactaac

SEQ ID NO: 3866634 - DNA, 25 bp, Homo sapien
attttgaatattgcagtggaaagag

SEQ ID NO: 3866635 - DNA, 25 bp, Homo sapien
agggcccagctccccgatttcatga

SEQ ID NO: 3866636 - DNA, 25 bp, Homo sapien
tttcatgactctgaatcagtcactt

SEQ ID NO: 3866637 - DNA, 25 bp, Homo sapien
catgactctgaatcagtcacttctt

SEQ ID NO: 3866638 - DNA, 25 bp, Homo sapien
tggagaacaagatacaaaacggagg

SEQ ID NO: 3866639 - DNA, 25 bp, Homo sapien
tcctcacccggatctagaagtagtc

SEQ ID NO: 3866640 - DNA, 25 bp, Homo sapien
tgttgtaaccccagcttggagtgaa

SEQ ID NO: 3866641 - DNA, 25 bp, Homo sapien
aaagggccaatgaatatctgctaaa

SEQ ID NO: 3866642 - DNA, 25 bp, Homo sapien
cagaatatcatctgaaagattccac

SEQ ID NO: 3866643 - DNA, 25 bp, Homo sapien
tcagaatatcatctgaaagattcca

SEQ ID NO: 3866644 - DNA, 25 bp, Homo sapien
agcttttttccgtaatctcaacatt

SEQ ID NO: 3866645 - DNA, 25 bp, Homo sapien
taaaaggtcccagacatttttcatg

SEQ ID NO: 3866646 - DNA, 25 bp, Homo sapien
aattttcttgaccatctctacgttg

SEQ ID NO: 3866647 - DNA, 25 bp, Homo sapien
tccaactaccatacaacgtgcttgg

SEQ ID NO: 3866648 - DNA, 25 bp, Homo sapien
taggtcggagcgcaaattttcttga

SEQ ID NO: 3866649 - DNA, 25 bp, Homo sapien
tctctacgttggtattccccgtcca

SEQ ID NO: 3866650 - DNA, 25 bp, Homo sapien
taattgaataactctagctggccaa

SEQ ID NO: 3866651 - DNA, 25 bp, Homo sapien
ttttttaattgaataactctagctg

SEQ ID NO: 3866652 - DNA, 25 bp, Homo sapien
tttaattgaataactctagctggcc

SEQ ID NO: 3866653 - DNA, 25 bp, Homo sapien
aattgaataactctagctggccaac

SEQ ID NO: 3866654 - DNA, 25 bp, Homo sapien
taatatttgatgggagcaatgtttc

SEQ ID NO: 3866655 - DNA, 25 bp, Homo sapien
ttgatgggagcaatgtttccagaga

SEQ ID NO: 3866656 - DNA, 25 bp, Homo sapien
tatttgatgggagcaatgtttccag

SEQ ID NO: 3866657 - DNA, 25 bp, Homo sapien
tttgatgggagcaatgtttccagag

SEQ ID NO: 3866658 - DNA, 25 bp, Homo sapien
cagacatggcttctcatgtgtatgg

SEQ ID NO: 3866659 - DNA, 25 bp, Homo sapien
gaagtgtgcaggttggaaacagaca

SEQ ID NO: 3866660 - DNA, 25 bp, Homo sapien
caaggctcagtgcagtgctactgca

SEQ ID NO: 3866661 - DNA, 25 bp, Homo sapien
ggaaacatgctaccatatagatgaa

SEQ ID NO: 3866662 - DNA, 25 bp, Homo sapien
cagattactgagtagaagccgcagc

SEQ ID NO: 3866663 - DNA, 25 bp, Homo sapien
gagatcttgtggtttcccatccaac

SEQ ID NO: 3866664 - DNA, 25 bp, Homo sapien
cctctgcaggcctagatctgaaaaa

SEQ ID NO: 3866665 - DNA, 25 bp, Homo sapien
caaagaatgaagacacgggacagac

SEQ ID NO: 3866666 - DNA, 25 bp, Homo sapien
cattgtaagcaaacaaactgcaaga

SEQ ID NO: 3866667 - DNA, 25 bp, Homo sapien
aagagcagacgataaggaaaattag

SEQ ID NO: 3866668 - DNA, 25 bp, Homo sapien
gagtacagcaaagcgtgggcaacct

SEQ ID NO: 3866669 - DNA, 25 bp, Homo sapien
gggctcaatataatagtggagcatt

SEQ ID NO: 3866670 - DNA, 25 bp, Homo sapien
atacctactgaacggcctacctgag

SEQ ID NO: 3866671 - DNA, 25 bp, Homo sapien
gatcaccaacatcagtgtcttccac

SEQ ID NO: 3866672 - DNA, 25 bp, Homo sapien
gggcaataaacacccttggagctgt

SEQ ID NO: 3866673 - DNA, 25 bp, Homo sapien
tctggaatacctactgaacggccta

SEQ ID NO: 3866674 - DNA, 25 bp, Homo sapien
taaatggtaccttgctaggtgaaag

SEQ ID NO: 3866675 - DNA, 25 bp, Homo sapien
tcctgagtttatcaaggttgtggca

SEQ ID NO: 3866676 - DNA, 25 bp, Homo sapien
taataagtagccatctcatctcaac

SEQ ID NO: 3866677 - DNA, 25 bp, Homo sapien
caatagcctcatataaacatgtgac

SEQ ID NO: 3866678 - DNA, 25 bp, Homo sapien
tcagagtcccctgtgaatatctcat

SEQ ID NO: 3866679 - DNA, 25 bp, Homo sapien
gggcacgaacatagtgctgcatatg

SEQ ID NO: 3866680 - DNA, 25 bp, Homo sapien
tgttgccactcagcttaatggccag

SEQ ID NO: 3866681 - DNA, 25 bp, Homo sapien
taactatacgtcaactccagaaatc

SEQ ID NO: 3866682 - DNA, 25 bp, Homo sapien
tgccttgaggtttacccttatcaac

SEQ ID NO: 3866683 - DNA, 25 bp, Homo sapien
cattggtgtcagatatttgccttga

SEQ ID NO: 3866684 - DNA, 25 bp, Homo sapien
cagcattggtgtcagatatttgcct

SEQ ID NO: 3866685 - DNA, 25 bp, Homo sapien
ggtgtcagatatttgccttgaggtt

SEQ ID NO: 3866686 - DNA, 25 bp, Homo sapien
agcctcgttcattcagacccagact

SEQ ID NO: 3866687 - DNA, 25 bp, Homo sapien
gatccagcctcgttcattcagaccc

SEQ ID NO: 3866688 - DNA, 25 bp, Homo sapien
tcgttcattcagacccagactattc

SEQ ID NO: 3866689 - DNA, 25 bp, Homo sapien
cctcgttcattcagacccagactat

SEQ ID NO: 3866690 - DNA, 25 bp, Homo sapien
atagtagcaagttccatttctggtt

SEQ ID NO: 3866691 - DNA, 25 bp, Homo sapien
ccatttctggttctgctctgcattt

SEQ ID NO: 3866692 - DNA, 25 bp, Homo sapien
tgcatttctgacattgagaggatgc

SEQ ID NO: 3866693 - DNA, 25 bp, Homo sapien
gacattgagaggatgcatcatccat

SEQ ID NO: 3866694 - DNA, 25 bp, Homo sapien
gcataaactgtgagtccagaaaacc

SEQ ID NO: 3866695 - DNA, 25 bp, Homo sapien
ctgcataaactgtgagtccagaaaa

SEQ ID NO: 3866696 - DNA, 25 bp, Homo sapien
taaactgtgagtccagaaaacctgc

SEQ ID NO: 3866697 - DNA, 25 bp, Homo sapien
aactgtgagtccagaaaacctgcac

SEQ ID NO: 3866698 - DNA, 25 bp, Homo sapien
ttgaagaccagggtggtgattccag

SEQ ID NO: 3866699 - DNA, 25 bp, Homo sapien
atcagtgggactccctggacccaga

SEQ ID NO: 3866700 - DNA, 25 bp, Homo sapien
ctatgactccatgccagaacttgaa

SEQ ID NO: 3866701 - DNA, 25 bp, Homo sapien
ctcagcccatcagtgggactccctg

SEQ ID NO: 3866702 - DNA, 25 bp, Homo sapien
aggcagctgttacagggatgcattc

SEQ ID NO: 3866703 - DNA, 25 bp, Homo sapien
tactgatacaatatgttgtcaggca

SEQ ID NO: 3866704 - DNA, 25 bp, Homo sapien
caatatgttgtcaggcagcttggag

SEQ ID NO: 3866705 - DNA, 25 bp, Homo sapien
tgatacaatatgttgtcaggcagct

SEQ ID NO: 3866706 - DNA, 25 bp, Homo sapien
gaaggtggcccctgagatctgattc

SEQ ID NO: 3866707 - DNA, 25 bp, Homo sapien
ggaatagccctgattcataacccca

SEQ ID NO: 3866708 - DNA, 25 bp, Homo sapien
ggtagcttacctcatgggccagatc

SEQ ID NO: 3866709 - DNA, 25 bp, Homo sapien
gcacatggtagaggttagcagcacc

SEQ ID NO: 3866710 - DNA, 25 bp, Homo sapien
ccctcctggggtagatccatcatac

SEQ ID NO: 3866711 - DNA, 25 bp, Homo sapien
cctccctcctggggtagatccatca

SEQ ID NO: 3866712 - DNA, 25 bp, Homo sapien
ctccctcctggggtagatccatcat

SEQ ID NO: 3866713 - DNA, 25 bp, Homo sapien
tccctcctggggtagatccatcata

SEQ ID NO: 3866714 - DNA, 25 bp, Homo sapien
acttgtactggccattaggaggacc

SEQ ID NO: 3866715 - DNA, 25 bp, Homo sapien
gataagcaagtgtggcattggctcc

SEQ ID NO: 3866716 - DNA, 25 bp, Homo sapien
gatggtatcccgctaggttgagagc

SEQ ID NO: 3866717 - DNA, 25 bp, Homo sapien
tgaactattgctccagtggcctgag

SEQ ID NO: 3866718 - DNA, 25 bp, Homo sapien
cagaaatttgtgataacgtggcatt

SEQ ID NO: 3866719 - DNA, 25 bp, Homo sapien
tatcctgattaataacctgtcagcc

SEQ ID NO: 3866720 - DNA, 25 bp, Homo sapien
actttattcaatgtggtttatcctg

SEQ ID NO: 3866721 - DNA, 25 bp, Homo sapien
tcttcagaaatttgtgataacgtgg

SEQ ID NO: 3866722 - DNA, 25 bp, Homo sapien
gtgtcagcatccagtcagccggaga

SEQ ID NO: 3866723 - DNA, 25 bp, Homo sapien
gaacttacgaacatacaaggtgctg

SEQ ID NO: 3866724 - DNA, 25 bp, Homo sapien
tcaagacattagaagtaggatgccc

SEQ ID NO: 3866725 - DNA, 25 bp, Homo sapien
gaccagtgtagattcctgagagcaa

SEQ ID NO: 3866726 - DNA, 25 bp, Homo sapien
ctgcttccagtgtagcacaaatcaa

SEQ ID NO: 3866727 - DNA, 25 bp, Homo sapien
gctgcttccagtgtagcacaaatca

SEQ ID NO: 3866728 - DNA, 25 bp, Homo sapien
tatggccggtgttctgtcttgctcc

SEQ ID NO: 3866729 - DNA, 25 bp, Homo sapien
gtatggccggtgttctgtcttgctc

SEQ ID NO: 3866730 - DNA, 25 bp, Homo sapien
atggccggtgttctgtcttgctcct

SEQ ID NO: 3866731 - DNA, 25 bp, Homo sapien
ttctcatagttcctgaactttttct

SEQ ID NO: 3866732 - DNA, 25 bp, Homo sapien
ctttctcatagttcctgaacttttt

SEQ ID NO: 3866733 - DNA, 25 bp, Homo sapien
tttctcatagttcctgaactttttc

SEQ ID NO: 3866734 - DNA, 25 bp, Homo sapien
gttaggagactgtccttgatctcag

SEQ ID NO: 3866735 - DNA, 25 bp, Homo sapien
ttaggttaggagactgtccttgatc

SEQ ID NO: 3866736 - DNA, 25 bp, Homo sapien
taggttaggagactgtccttgatct

SEQ ID NO: 3866737 - DNA, 25 bp, Homo sapien
ggttaggagactgtccttgatctca

SEQ ID NO: 3866738 - DNA, 25 bp, Homo sapien
taaaagccatgcagctttaagtctg

SEQ ID NO: 3866739 - DNA, 25 bp, Homo sapien
tttcaagctagcctactgtgtgtgt

SEQ ID NO: 3866740 - DNA, 25 bp, Homo sapien
gaaggaggtgtgtgacaggctgtta

SEQ ID NO: 3866741 - DNA, 25 bp, Homo sapien
tctctgttgttagtagttgaaggag

SEQ ID NO: 3866742 - DNA, 25 bp, Homo sapien
tcctgccacttcttttcttcatcag

SEQ ID NO: 3866743 - DNA, 25 bp, Homo sapien
catgcttcctgccacttcttttctt

SEQ ID NO: 3866744 - DNA, 25 bp, Homo sapien
tgccacttcttttcttcatcagcgc

SEQ ID NO: 3866745 - DNA, 25 bp, Homo sapien
tcatgcttcctgccacttcttttct

SEQ ID NO: 3866746 - DNA, 25 bp, Homo sapien
tattgtctggtgaataagccttccc

SEQ ID NO: 3866747 - DNA, 25 bp, Homo sapien
gctgactgaagtgatccaaacaaac

SEQ ID NO: 3866748 - DNA, 25 bp, Homo sapien
gctctttaacgtcactagggcttca

SEQ ID NO: 3866749 - DNA, 25 bp, Homo sapien
agggcttcatttggtacactagaga

SEQ ID NO: 3866750 - DNA, 25 bp, Homo sapien
tgtgaagggactgtctgtgttcttg

SEQ ID NO: 3866751 - DNA, 25 bp, Homo sapien
tctggtctgtgaagggactgtctgt

SEQ ID NO: 3866752 - DNA, 25 bp, Homo sapien
atctggtctgtgaagggactgtctg

SEQ ID NO: 3866753 - DNA, 25 bp, Homo sapien
gtctgtgaagggactgtctgtgttc

SEQ ID NO: 3866754 - DNA, 25 bp, Homo sapien
cggatggggtggcaaacaaacatac

SEQ ID NO: 3866755 - DNA, 25 bp, Homo sapien
gggtggcaaacaaacataccctgct

SEQ ID NO: 3866756 - DNA, 25 bp, Homo sapien
ggcaaacaaacataccctgctcttt

SEQ ID NO: 3866757 - DNA, 25 bp, Homo sapien
gtggcaaacaaacataccctgctct

SEQ ID NO: 3866758 - DNA, 25 bp, Homo sapien
gctctggtgggagctgccaggcagg

SEQ ID NO: 3866759 - DNA, 25 bp, Homo sapien
tgccaggcaggggccttgggagagg

SEQ ID NO: 3866760 - DNA, 25 bp, Homo sapien
gctgccaggcaggggccttgggaga

SEQ ID NO: 3866761 - DNA, 25 bp, Homo sapien
gtgggagctgccaggcaggggcctt

SEQ ID NO: 3866762 - DNA, 25 bp, Homo sapien
gcacttgaactgctcagcggaggtt

SEQ ID NO: 3866763 - DNA, 25 bp, Homo sapien
aactgctcagcggaggttgtgctgt

SEQ ID NO: 3866764 - DNA, 25 bp, Homo sapien
ttgaactgctcagcggaggttgtgc

SEQ ID NO: 3866765 - DNA, 25 bp, Homo sapien
caaagcacttgaactgctcagcgga

SEQ ID NO: 3866766 - DNA, 25 bp, Homo sapien
tagacaacagtgtatttgaggcaat

SEQ ID NO: 3866767 - DNA, 25 bp, Homo sapien
ttttagacaacagtgtatttgaggc

SEQ ID NO: 3866768 - DNA, 25 bp, Homo sapien
gacacatgggaacattaatatccct

SEQ ID NO: 3866769 - DNA, 25 bp, Homo sapien
ggatgggatattcatgcaggcaccc

SEQ ID NO: 3866770 - DNA, 25 bp, Homo sapien
cgatcaagtggaacaaagagtatca

SEQ ID NO: 3866771 - DNA, 25 bp, Homo sapien
gacttgatggagctgcaaaaccatg

SEQ ID NO: 3866772 - DNA, 25 bp, Homo sapien
cttgatggagctgcaaaaccatggc

SEQ ID NO: 3866773 - DNA, 25 bp, Homo sapien
tgagaactttgtgatgcatgcacaa

SEQ ID NO: 3866774 - DNA, 25 bp, Homo sapien
tccggtcgccgccttggccaccgcc

SEQ ID NO: 3866775 - DNA, 25 bp, Homo sapien
ctccggtcgccgccttggccaccgc

SEQ ID NO: 3866776 - DNA, 25 bp, Homo sapien
gctcttcgctccaagaccttccagc

SEQ ID NO: 3866777 - DNA, 25 bp, Homo sapien
tggtccgagctcttcgctccaagac

SEQ ID NO: 3866778 - DNA, 25 bp, Homo sapien
tgagcgcttggtccgagctcttcgc

SEQ ID NO: 3866779 - DNA, 25 bp, Homo sapien
cttccagctcacttctgccgtgagt

SEQ ID NO: 3866780 - DNA, 25 bp, Homo sapien
cgccaaggcgcttgaggcgaagcac

SEQ ID NO: 3866781 - DNA, 25 bp, Homo sapien
actctaagggaagtccggaccgctg

SEQ ID NO: 3866782 - DNA, 25 bp, Homo sapien
aatgtgccgccgcccgatttttaag

SEQ ID NO: 3866783 - DNA, 25 bp, Homo sapien
gaccgctgcctactttccgagtggg

SEQ ID NO: 3866784 - DNA, 25 bp, Homo sapien
tttaataacgccacaagtcatgacg

SEQ ID NO: 3866785 - DNA, 25 bp, Homo sapien
ccagccaaccaggaatacaggaagt

SEQ ID NO: 3866786 - DNA, 25 bp, Homo sapien
tctgcagccagatcgtagttacatc

SEQ ID NO: 3866787 - DNA, 25 bp, Homo sapien
tataagacataaagcaaggagccca

SEQ ID NO: 3866788 - DNA, 25 bp, Homo sapien
tcaggtccctgtaagaaaactccag

SEQ ID NO: 3866789 - DNA, 25 bp, Homo sapien
cagatagccacatcgttagtagcca

SEQ ID NO: 3866790 - DNA, 25 bp, Homo sapien
catgatgcagtatgcaacaaaggca

SEQ ID NO: 3866791 - DNA, 25 bp, Homo sapien
tatcctctgttgtgcagtgaagtaa

SEQ ID NO: 3866792 - DNA, 25 bp, Homo sapien
ctctaatcataagcgtcgcaggcta

SEQ ID NO: 3866793 - DNA, 25 bp, Homo sapien
ggctctaatcataagcgtcgcaggc

SEQ ID NO: 3866794 - DNA, 25 bp, Homo sapien
ttggctctaatcataagcgtcgcag

SEQ ID NO: 3866795 - DNA, 25 bp, Homo sapien
ctaatcataagcgtcgcaggctaag

SEQ ID NO: 3866796 - DNA, 25 bp, Homo sapien
agacgactgcatcaggtgagcaggc

SEQ ID NO: 3866797 - DNA, 25 bp, Homo sapien
cagaccttaagaaagcggaagacgg

SEQ ID NO: 3866798 - DNA, 25 bp, Homo sapien
ttaagaaagcggaagacggagagac

SEQ ID NO: 3866799 - DNA, 25 bp, Homo sapien
cggaagacggagagacgactgcatc

SEQ ID NO: 3866800 - DNA, 25 bp, Homo sapien
gtatgaagtcctgaccaagaagcag

SEQ ID NO: 3866801 - DNA, 25 bp, Homo sapien
tctgctatgtatgaagtcctgacca

SEQ ID NO: 3866802 - DNA, 25 bp, Homo sapien
gagcaaagatcacgcacctggactc

SEQ ID NO: 3866803 - DNA, 25 bp, Homo sapien
tacgaacgaaccaaagaaagcagtg

SEQ ID NO: 3866804 - DNA, 25 bp, Homo sapien
tgacgagggcacaaaggttgcagac

SEQ ID NO: 3866805 - DNA, 25 bp, Homo sapien
gaggtttgtatattccgggtactca

SEQ ID NO: 3866806 - DNA, 25 bp, Homo sapien
aatccctaggccaagatgttcccca

SEQ ID NO: 3866807 - DNA, 25 bp, Homo sapien
caaagagtcccatagttccatgagg

SEQ ID NO: 3866808 - DNA, 25 bp, Homo sapien
ataaaaacccatcaaattcagtcat

SEQ ID NO: 3866809 - DNA, 25 bp, Homo sapien
aataaaaacccatcaaattcagtca

SEQ ID NO: 3866810 - DNA, 25 bp, Homo sapien
agagtttcattatcaggtcttggaa

SEQ ID NO: 3866811 - DNA, 25 bp, Homo sapien
ggtccaacttatcccagagagtttc

SEQ ID NO: 3866812 - DNA, 25 bp, Homo sapien
tatcaggtcttggaagattaatgct

SEQ ID NO: 3866813 - DNA, 25 bp, Homo sapien
caattctgtaataatggtccaactt

SEQ ID NO: 3866814 - DNA, 25 bp, Homo sapien
ctgtatgcaagagccaaagcccagg

SEQ ID NO: 3866815 - DNA, 25 bp, Homo sapien
gccccagcagcgcagtataggctgt

SEQ ID NO: 3866816 - DNA, 25 bp, Homo sapien
ccggtagttggactttgatacagca

SEQ ID NO: 3866817 - DNA, 25 bp, Homo sapien
tgatacagcagcaatgttgacttga

SEQ ID NO: 3866818 - DNA, 25 bp, Homo sapien
ttatcggcctgacgcatatagcagt

SEQ ID NO: 3866819 - DNA, 25 bp, Homo sapien
cagtagagaattcctctcatgcatt

SEQ ID NO: 3866820 - DNA, 25 bp, Homo sapien
agctcatgggtccttcccttgtcat

SEQ ID NO: 3866821 - DNA, 25 bp, Homo sapien
tatagctgagtgctccagctcatgg

SEQ ID NO: 3866822 - DNA, 25 bp, Homo sapien
ggcggctttcttgcaaaacactgac

SEQ ID NO: 3866823 - DNA, 25 bp, Homo sapien
ccaggttggatgaccaatcgattta

SEQ ID NO: 3866824 - DNA, 25 bp, Homo sapien
gactggagaggcctcgggatcccac

SEQ ID NO: 3866825 - DNA, 25 bp, Homo sapien
tcaggactgctagggacttccacta

SEQ ID NO: 3866826 - DNA, 25 bp, Homo sapien
gagagtaggtggagatcctttgggt

SEQ ID NO: 3866827 - DNA, 25 bp, Homo sapien
ccaactaaagtgtgagagtaggtgg

SEQ ID NO: 3866828 - DNA, 25 bp, Homo sapien
tgggtcgtaaaacctccaatcattc

SEQ ID NO: 3866829 - DNA, 25 bp, Homo sapien
aacctccaatcattcactttacaga

SEQ ID NO: 3866830 - DNA, 25 bp, Homo sapien
caggtctgcttaccagaagcggccc

SEQ ID NO: 3866831 - DNA, 25 bp, Homo sapien
gcattcggttcatcccgcagagcca

SEQ ID NO: 3866832 - DNA, 25 bp, Homo sapien
acacgccagcaagccgggcttctta

SEQ ID NO: 3866833 - DNA, 25 bp, Homo sapien
ggcattgggcaccttaatccggcat

SEQ ID NO: 3866834 - DNA, 25 bp, Homo sapien
tcagacgagatagggcgttcagggt

SEQ ID NO: 3866835 - DNA, 25 bp, Homo sapien
cctacttagcttctgggatcagacg

SEQ ID NO: 3866836 - DNA, 25 bp, Homo sapien
gggatcagacgagatagggcgttca

SEQ ID NO: 3866837 - DNA, 25 bp, Homo sapien
cttctgggatcagacgagatagggc

SEQ ID NO: 3866838 - DNA, 25 bp, Homo sapien
tatttactgtatgttcacccggtac

SEQ ID NO: 3866839 - DNA, 25 bp, Homo sapien
gggaatactactaatgataacgaca

SEQ ID NO: 3866840 - DNA, 25 bp, Homo sapien
gctaaaatacagaagttggaaacgc

SEQ ID NO: 3866841 - DNA, 25 bp, Homo sapien
gcctgcaaagttacttgtgtgcatc

SEQ ID NO: 3866842 - DNA, 25 bp, Homo sapien
tctcctgtatgcacattgaaaacag

SEQ ID NO: 3866843 - DNA, 25 bp, Homo sapien
cataggaaagcaactcatctcctgt

SEQ ID NO: 3866844 - DNA, 25 bp, Homo sapien
cgtggatcctgcttaaactgctgga

SEQ ID NO: 3866845 - DNA, 25 bp, Homo sapien
aagacatgttgttgggcgtggatcc

SEQ ID NO: 3866846 - DNA, 25 bp, Homo sapien
cctttttgcttgaagaccaagaatt

SEQ ID NO: 3866847 - DNA, 25 bp, Homo sapien
gaccaagaattcactcggatttcat

SEQ ID NO: 3866848 - DNA, 25 bp, Homo sapien
tgttcaattgccacaactaactcag

SEQ ID NO: 3866849 - DNA, 25 bp, Homo sapien
acaactaactcagccctggtggctg

SEQ ID NO: 3866850 - DNA, 25 bp, Homo sapien
tgttgtagataatctggagtcctga

SEQ ID NO: 3866851 - DNA, 25 bp, Homo sapien
tcagtgttgtagataatctggagtc

SEQ ID NO: 3866852 - DNA, 25 bp, Homo sapien
ttgtagataatctggagtcctgagg

SEQ ID NO: 3866853 - DNA, 25 bp, Homo sapien
gataatctggagtcctgaggaaatc

SEQ ID NO: 3866854 - DNA, 25 bp, Homo sapien
caaaggctaggagactgattcgttc

SEQ ID NO: 3866855 - DNA, 25 bp, Homo sapien
caccaccacactttgaagtagggag

SEQ ID NO: 3866856 - DNA, 25 bp, Homo sapien
gatgctaaacaaacaggcaactcca

SEQ ID NO: 3866857 - DNA, 25 bp, Homo sapien
tgaccagtaagctaactcagcaaag

SEQ ID NO: 3866858 - DNA, 25 bp, Homo sapien
gatgctaactgaccaccaatatctg

SEQ ID NO: 3866859 - DNA, 25 bp, Homo sapien
tatacagatgtcatgggaccaagct

SEQ ID NO: 3866860 - DNA, 25 bp, Homo sapien
gagttacactaacggatgttcccat

SEQ ID NO: 3866861 - DNA, 25 bp, Homo sapien
tcctggcacatgatgctaactgacc

SEQ ID NO: 3866862 - DNA, 25 bp, Homo sapien
gtcaggcacacggtaaactctttcc

SEQ ID NO: 3866863 - DNA, 25 bp, Homo sapien
caaagtcaggcacacggtaaactct

SEQ ID NO: 3866864 - DNA, 25 bp, Homo sapien
ggcacacggtaaactctttccacac

SEQ ID NO: 3866865 - DNA, 25 bp, Homo sapien
aagtcaggcacacggtaaactcttt

SEQ ID NO: 3866866 - DNA, 25 bp, Homo sapien
tgatgagggctgacatgcatgtact

SEQ ID NO: 3866867 - DNA, 25 bp, Homo sapien
tattcaaacgcagtaaaccacagct

SEQ ID NO: 3866868 - DNA, 25 bp, Homo sapien
caagctgtggattaatgatgagggc

SEQ ID NO: 3866869 - DNA, 25 bp, Homo sapien
gatgttgatcacacaccttactggt

SEQ ID NO: 3866870 - DNA, 25 bp, Homo sapien
cagtgataacttttagcttaaattc

SEQ ID NO: 3866871 - DNA, 25 bp, Homo sapien
tgacagtgataacttttagcttaaa

SEQ ID NO: 3866872 - DNA, 25 bp, Homo sapien
tttaagtcccaataatccaaactga

SEQ ID NO: 3866873 - DNA, 25 bp, Homo sapien
cccaataatccaaactgacagtgat

SEQ ID NO: 3866874 - DNA, 25 bp, Homo sapien
aatttgttgcttttgtctaccaagt

SEQ ID NO: 3866875 - DNA, 25 bp, Homo sapien
cctgctgattctcaactcaacagag

SEQ ID NO: 3866876 - DNA, 25 bp, Homo sapien
ttttgtctaccaagtgcaggaaatc

SEQ ID NO: 3866877 - DNA, 25 bp, Homo sapien
gattctcaactcaacagaggctgga

SEQ ID NO: 3866878 - DNA, 25 bp, Homo sapien
tatttctaggttcaccttgatctaa

SEQ ID NO: 3866879 - DNA, 25 bp, Homo sapien
caccttgatctaaactaatggtcat

SEQ ID NO: 3866880 - DNA, 25 bp, Homo sapien
aaatatttctaggttcaccttgatc

SEQ ID NO: 3866881 - DNA, 25 bp, Homo sapien
taggttcaccttgatctaaactaat

SEQ ID NO: 3866882 - DNA, 25 bp, Homo sapien
tgaatccattaattgcttctagagc

SEQ ID NO: 3866883 - DNA, 25 bp, Homo sapien
gttgaatccattaattgcttctaga

SEQ ID NO: 3866884 - DNA, 25 bp, Homo sapien
ttgaatccattaattgcttctagag

SEQ ID NO: 3866885 - DNA, 25 bp, Homo sapien
ggttgaatccattaattgcttctag

SEQ ID NO: 3866886 - DNA, 25 bp, Homo sapien
aagtttgcctgttgcgattgtgagc

SEQ ID NO: 3866887 - DNA, 25 bp, Homo sapien
caaatataactgaccacgaacagcc

SEQ ID NO: 3866888 - DNA, 25 bp, Homo sapien
gagcatcgagatccacaaatataac

SEQ ID NO: 3866889 - DNA, 25 bp, Homo sapien
ggtaacagcgagcacaaagtttgcc

SEQ ID NO: 3866890 - DNA, 25 bp, Homo sapien
agtgtctggctaaaaagaacttcat

SEQ ID NO: 3866891 - DNA, 25 bp, Homo sapien
tgatgttctatacccatctctcaag

SEQ ID NO: 3866892 - DNA, 25 bp, Homo sapien
caaatgcaggataactgatgcaggg

SEQ ID NO: 3866893 - DNA, 25 bp, Homo sapien
tagtagcatctgttgggatcttcca

SEQ ID NO: 3866894 - DNA, 25 bp, Homo sapien
ggaaattcacattcaatgccatcaa

SEQ ID NO: 3866895 - DNA, 25 bp, Homo sapien
catcaatcatcatataaaggaaaaa

SEQ ID NO: 3866896 - DNA, 25 bp, Homo sapien
tatgggaaattcacattcaatgcca

SEQ ID NO: 3866897 - DNA, 25 bp, Homo sapien
aaatatgggaaattcacattcaatg

SEQ ID NO: 3866898 - DNA, 25 bp, Homo sapien
attcctgtacttgcttaggattgcc

SEQ ID NO: 3866899 - DNA, 25 bp, Homo sapien
tggagtcaaaagatcctgatattcc

SEQ ID NO: 3866900 - DNA, 25 bp, Homo sapien
gaagtactggagtcaaaagatcctg

SEQ ID NO: 3866901 - DNA, 25 bp, Homo sapien
cttctgtggtatgatgaagtactgg

SEQ ID NO: 3866902 - DNA, 25 bp, Homo sapien
ctggcacataatagtactttggtac

SEQ ID NO: 3866903 - DNA, 25 bp, Homo sapien
gccacagttgctaggaaatcgtttt

SEQ ID NO: 3866904 - DNA, 25 bp, Homo sapien
ctaggaaatcgtttttgactaccag

SEQ ID NO: 3866905 - DNA, 25 bp, Homo sapien
ttccatcacggccacagttgctagg

SEQ ID NO: 3866906 - DNA, 25 bp, Homo sapien
cctaattacatcaggatagaggtag

SEQ ID NO: 3866907 - DNA, 25 bp, Homo sapien
ttacatcaggatagaggtagagttt

SEQ ID NO: 3866908 - DNA, 25 bp, Homo sapien
aacctaattacatcaggatagaggt

SEQ ID NO: 3866909 - DNA, 25 bp, Homo sapien
taattacatcaggatagaggtagag

SEQ ID NO: 3866910 - DNA, 25 bp, Homo sapien
ggattggctgtgtgcaatactccac

SEQ ID NO: 3866911 - DNA, 25 bp, Homo sapien
ctgaagaagaccactggccttgtgg

SEQ ID NO: 3866912 - DNA, 25 bp, Homo sapien
gaggctaagaatattgtacacaaag

SEQ ID NO: 3866913 - DNA, 25 bp, Homo sapien
tgatcgaatcgttggcgctgtcagg

SEQ ID NO: 3866914 - DNA, 25 bp, Homo sapien
actacagcaggatttctccatgggc

SEQ ID NO: 3866915 - DNA, 25 bp, Homo sapien
cactacagcaggatttctccatggg

SEQ ID NO: 3866916 - DNA, 25 bp, Homo sapien
tcactacagcaggatttctccatgg

SEQ ID NO: 3866917 - DNA, 25 bp, Homo sapien
caccaggatataccacatactaggc

SEQ ID NO: 3866918 - DNA, 25 bp, Homo sapien
gacaaacaccaaaatcaatgggatg

SEQ ID NO: 3866919 - DNA, 25 bp, Homo sapien
tattgtctgaccacaagggaatgga

SEQ ID NO: 3866920 - DNA, 25 bp, Homo sapien
tgtacatgaaacatcctccaccagg

SEQ ID NO: 3866921 - DNA, 25 bp, Homo sapien
ggaaaacctcatgctcacgttacgt

SEQ ID NO: 3866922 - DNA, 25 bp, Homo sapien
tctttaggactaataagttcatcag

SEQ ID NO: 3866923 - DNA, 25 bp, Homo sapien
tagcgctggacaggatcaatgtctt

SEQ ID NO: 3866924 - DNA, 25 bp, Homo sapien
tttagtgggacatagcgctggacag

SEQ ID NO: 3866925 - DNA, 25 bp, Homo sapien
tgccacccagatgcactgcttcttc

SEQ ID NO: 3866926 - DNA, 25 bp, Homo sapien
tatgatgtgatattcagccaggctg

SEQ ID NO: 3866927 - DNA, 25 bp, Homo sapien
tctcagcatcctaaggcaccggtgc

SEQ ID NO: 3866928 - DNA, 25 bp, Homo sapien
caccggtgcaactgtgttcctatga

SEQ ID NO: 3866929 - DNA, 25 bp, Homo sapien
tcacttgacaactgtgggaccttgg

SEQ ID NO: 3866930 - DNA, 25 bp, Homo sapien
ctgtggcatattcaggctaggctct

SEQ ID NO: 3866931 - DNA, 25 bp, Homo sapien
gtggcatattcaggctaggctctct

SEQ ID NO: 3866932 - DNA, 25 bp, Homo sapien
actctgtgcggctgtggcatattca

SEQ ID NO: 3866933 - DNA, 25 bp, Homo sapien
aggagaaactctgtgcggctgtggc

SEQ ID NO: 3866934 - DNA, 25 bp, Homo sapien
caatactagatcataataatccttg

SEQ ID NO: 3866935 - DNA, 25 bp, Homo sapien
tccatcctgtagatgaaatatttca

SEQ ID NO: 3866936 - DNA, 25 bp, Homo sapien
tatacatcatgcctattattgaaac

SEQ ID NO: 3866937 - DNA, 25 bp, Homo sapien
ccttgtatatctttattctggacca

SEQ ID NO: 3866938 - DNA, 25 bp, Homo sapien
ctttacaagttagtggcagtcccag

SEQ ID NO: 3866939 - DNA, 25 bp, Homo sapien
taaatgacaaaaagactgggctgga

SEQ ID NO: 3866940 - DNA, 25 bp, Homo sapien
tattacagtgtgaaagccacctaag

SEQ ID NO: 3866941 - DNA, 25 bp, Homo sapien
tagagttctcttcgctaagtcagac

SEQ ID NO: 3866942 - DNA, 25 bp, Homo sapien
tgggaccttttgccccattcaccat

SEQ ID NO: 3866943 - DNA, 25 bp, Homo sapien
actccagcccaagtgggaccttttg

SEQ ID NO: 3866944 - DNA, 25 bp, Homo sapien
tccagcccaagtgggaccttttgcc

SEQ ID NO: 3866945 - DNA, 25 bp, Homo sapien
caagtgggaccttttgccccattca

SEQ ID NO: 3866946 - DNA, 25 bp, Homo sapien
taagtgccacatgaactaccaagtc

SEQ ID NO: 3866947 - DNA, 25 bp, Homo sapien
gctttctgctataagtgccacatga

SEQ ID NO: 3866948 - DNA, 25 bp, Homo sapien
ggctttctgctataagtgccacatg

SEQ ID NO: 3866949 - DNA, 25 bp, Homo sapien
cacatgaactaccaagtcattttcc

SEQ ID NO: 3866950 - DNA, 25 bp, Homo sapien
ctgaatgggttctacttgttgagga

SEQ ID NO: 3866951 - DNA, 25 bp, Homo sapien
tgagtttgaataccatatgtgttca

SEQ ID NO: 3866952 - DNA, 25 bp, Homo sapien
ttgttgaggagtttgagtttgaata

SEQ ID NO: 3866953 - DNA, 25 bp, Homo sapien
gtttgaataccatatgtgttcagaa

SEQ ID NO: 3866954 - DNA, 25 bp, Homo sapien
tcacaagctcctgctgaggccatat

SEQ ID NO: 3866955 - DNA, 25 bp, Homo sapien
tttcacaagctcctgctgaggccat

SEQ ID NO: 3866956 - DNA, 25 bp, Homo sapien
ttcacaagctcctgctgaggccata

SEQ ID NO: 3866957 - DNA, 25 bp, Homo sapien
aacttttcattgatacccagctgca

SEQ ID NO: 3866958 - DNA, 25 bp, Homo sapien
ttttcattgatacccagctgcaaat

SEQ ID NO: 3866959 - DNA, 25 bp, Homo sapien
cattgatacccagctgcaaataagc

SEQ ID NO: 3866960 - DNA, 25 bp, Homo sapien
tggccttccagagagtcctaacttt

SEQ ID NO: 3866961 - DNA, 25 bp, Homo sapien
ataatcgggtaacaaaccacagtct

SEQ ID NO: 3866962 - DNA, 25 bp, Homo sapien
tagaaatcacttaggtcgaaaataa

SEQ ID NO: 3866963 - DNA, 25 bp, Homo sapien
tatgtcatctatcagcaggaaaaca

SEQ ID NO: 3866964 - DNA, 25 bp, Homo sapien
gagacatgtagaaatcacttaggtc

SEQ ID NO: 3866965 - DNA, 25 bp, Homo sapien
tgagaacaaggaaaagtggacgtcc

SEQ ID NO: 3866966 - DNA, 25 bp, Homo sapien
aaagtggacgtccatgcattttcca

SEQ ID NO: 3866967 - DNA, 25 bp, Homo sapien
cttatattgtcttcccggatgagaa

SEQ ID NO: 3866968 - DNA, 25 bp, Homo sapien
tgtcttcccggatgagaacaaggaa

SEQ ID NO: 3866969 - DNA, 25 bp, Homo sapien
tctaatatggggttgaaccggctac

SEQ ID NO: 3866970 - DNA, 25 bp, Homo sapien
catatctaatatggggttgaaccgg

SEQ ID NO: 3866971 - DNA, 25 bp, Homo sapien
agcatatctaatatggggttgaacc

SEQ ID NO: 3866972 - DNA, 25 bp, Homo sapien
ctttgactcctccaattattccttt

SEQ ID NO: 3866973 - DNA, 25 bp, Homo sapien
tgtgtcactgattcgtaggaaatca

SEQ ID NO: 3866974 - DNA, 25 bp, Homo sapien
ggaaatcaagttgttctaccacagc

SEQ ID NO: 3866975 - DNA, 25 bp, Homo sapien
aagttgttctaccacagctccagat

SEQ ID NO: 3866976 - DNA, 25 bp, Homo sapien
cactgattcgtaggaaatcaagttg

SEQ ID NO: 3866977 - DNA, 25 bp, Homo sapien
taatgttgacatccggctgctgtcc

SEQ ID NO: 3866978 - DNA, 25 bp, Homo sapien
gctgctttgccgtttgacttttgaa

SEQ ID NO: 3866979 - DNA, 25 bp, Homo sapien
tgggtgggtttgtccttccattcac

SEQ ID NO: 3866980 - DNA, 25 bp, Homo sapien
tgaatgtttgggaggttctagttcc

SEQ ID NO: 3866981 - DNA, 25 bp, Homo sapien
ccatgtgggaagtgcatctgtctca

SEQ ID NO: 3866982 - DNA, 25 bp, Homo sapien
catgtgggaagtgcatctgtctcac

SEQ ID NO: 3866983 - DNA, 25 bp, Homo sapien
cttggctagccagacaactgcaatc

SEQ ID NO: 3866984 - DNA, 25 bp, Homo sapien
gccttctcttttgagcagtataccc

SEQ ID NO: 3866985 - DNA, 25 bp, Homo sapien
tgagcagtatacccagcaggatggc

SEQ ID NO: 3866986 - DNA, 25 bp, Homo sapien
gcaggatggcttggctagccagaca

SEQ ID NO: 3866987 - DNA, 25 bp, Homo sapien
ttttggctgccagctcttctataga

SEQ ID NO: 3866988 - DNA, 25 bp, Homo sapien
gtttttggctgccagctcttctata

SEQ ID NO: 3866989 - DNA, 25 bp, Homo sapien
ttggctgccagctcttctatagact

SEQ ID NO: 3866990 - DNA, 25 bp, Homo sapien
tggctgccagctcttctatagactc

SEQ ID NO: 3866991 - DNA, 25 bp, Homo sapien
gggacagacatgctacataggcaca

SEQ ID NO: 3866992 - DNA, 25 bp, Homo sapien
catcaaaatgcagagggccatgtga

SEQ ID NO: 3866993 - DNA, 25 bp, Homo sapien
tagaaagtgctgtaaccttggaggt

SEQ ID NO: 3866994 - DNA, 25 bp, Homo sapien
tttagggattagaaacctgaggctc

SEQ ID NO: 3866995 - DNA, 25 bp, Homo sapien
gtgtcagtggaaagccataaaaggg

SEQ ID NO: 3866996 - DNA, 25 bp, Homo sapien
ggtgtgtcagtggaaagccataaaa

SEQ ID NO: 3866997 - DNA, 25 bp, Homo sapien
gggtgtgtcagtggaaagccataaa

SEQ ID NO: 3866998 - DNA, 25 bp, Homo sapien
tgtgtcagtggaaagccataaaagg

SEQ ID NO: 3866999 - DNA, 25 bp, Homo sapien
aatttctgggtaaatgcagccccgt

SEQ ID NO: 3867000 - DNA, 25 bp, Homo sapien
tttctgggtaaatgcagccccgtag

SEQ ID NO: 3867001 - DNA, 25 bp, Homo sapien
tgggtaaatgcagccccgtagcgca

SEQ ID NO: 3867002 - DNA, 25 bp, Homo sapien
tctgggtaaatgcagccccgtagcg

SEQ ID NO: 3867003 - DNA, 25 bp, Homo sapien
tgtaccagaaaagtagtaatgtgtg

SEQ ID NO: 3867004 - DNA, 25 bp, Homo sapien
catgtaccagaaaagtagtaatgtg

SEQ ID NO: 3867005 - DNA, 25 bp, Homo sapien
atgtaccagaaaagtagtaatgtgt

SEQ ID NO: 3867006 - DNA, 25 bp, Homo sapien
tcagaattagggagggatccctcca

SEQ ID NO: 3867007 - DNA, 25 bp, Homo sapien
gctgaaatttcccagactgcaggac

SEQ ID NO: 3867008 - DNA, 25 bp, Homo sapien
ccaggacattgaacctaacagctga

SEQ ID NO: 3867009 - DNA, 25 bp, Homo sapien
ggtgcctagataaccaaatctctgg

SEQ ID NO: 3867010 - DNA, 25 bp, Homo sapien
gagcaggccagatgttcacaaatct

SEQ ID NO: 3867011 - DNA, 25 bp, Homo sapien
gagagcaggccagatgttcacaaat

SEQ ID NO: 3867012 - DNA, 25 bp, Homo sapien
caggccagatgttcacaaatctaaa

SEQ ID NO: 3867013 - DNA, 25 bp, Homo sapien
gccagatgttcacaaatctaaaaga

SEQ ID NO: 3867014 - DNA, 25 bp, Homo sapien
tactttacttaaaagacttgctgca

SEQ ID NO: 3867015 - DNA, 25 bp, Homo sapien
gggccaggctgtccactactttact

SEQ ID NO: 3867016 - DNA, 25 bp, Homo sapien
agacttgctgcacggcgtacaaccg

SEQ ID NO: 3867017 - DNA, 25 bp, Homo sapien
tgtttgccctgcactaaaacattag

SEQ ID NO: 3867018 - DNA, 25 bp, Homo sapien
accagaataggttgaagagtttcac

SEQ ID NO: 3867019 - DNA, 25 bp, Homo sapien
cagtctagtctaaaatataagggca

SEQ ID NO: 3867020 - DNA, 25 bp, Homo sapien
tttagtactagaaactccccagaga

SEQ ID NO: 3867021 - DNA, 25 bp, Homo sapien
ggctttcaaagcatgactcccactg

SEQ ID NO: 3867022 - DNA, 25 bp, Homo sapien
tcttcatgcccaaaggcacccagag

SEQ ID NO: 3867023 - DNA, 25 bp, Homo sapien
caatatggatgaccagttcttgctg

SEQ ID NO: 3867024 - DNA, 25 bp, Homo sapien
ttttgaatcactcttggagacaaag

SEQ ID NO: 3867025 - DNA, 25 bp, Homo sapien
tggagatgatccagccaatatggat

SEQ ID NO: 3867026 - DNA, 25 bp, Homo sapien
gatggcaagagatcatcccaatggg

SEQ ID NO: 3867027 - DNA, 25 bp, Homo sapien
gacggagaggtgacatcatgttaga

SEQ ID NO: 3867028 - DNA, 25 bp, Homo sapien
ccacaggtgtcgtgagtgtctacca

SEQ ID NO: 3867029 - DNA, 25 bp, Homo sapien
ccaagtaagaatgagtctgatgtgc

SEQ ID NO: 3867030 - DNA, 25 bp, Homo sapien
agcacaaatcaataatgagacagca

SEQ ID NO: 3867031 - DNA, 25 bp, Homo sapien
taaagttgaagaaattgcattggca

SEQ ID NO: 3867032 - DNA, 25 bp, Homo sapien
tcctgtgagcaggttaattttgttc

SEQ ID NO: 3867033 - DNA, 25 bp, Homo sapien
tgttcactggagtgcctgatagcag

SEQ ID NO: 3867034 - DNA, 25 bp, Homo sapien
taagcttcggatgtgtgatccacag

SEQ ID NO: 3867035 - DNA, 25 bp, Homo sapien
gatgccctggcagtatgaaaagcag

SEQ ID NO: 3867036 - DNA, 25 bp, Homo sapien
gtaagtaaagcttgactgacagacc

SEQ ID NO: 3867037 - DNA, 25 bp, Homo sapien
tgggcatcagaggacaaggtacgtc

SEQ ID NO: 3867038 - DNA, 25 bp, Homo sapien
taatgacggaaccaaatacacaaat

SEQ ID NO: 3867039 - DNA, 25 bp, Homo sapien
aaaacactctgagggatatgatcca

SEQ ID NO: 3867040 - DNA, 25 bp, Homo sapien
tcttggcagaatacaagccaaaaga

SEQ ID NO: 3867041 - DNA, 25 bp, Homo sapien
tggaaaacactctgagggatatgat

SEQ ID NO: 3867042 - DNA, 25 bp, Homo sapien
tgtcaaccaggcctgatgggccagg

SEQ ID NO: 3867043 - DNA, 25 bp, Homo sapien
gggtgtcaaccaggcctgatgggcc

SEQ ID NO: 3867044 - DNA, 25 bp, Homo sapien
ggtgtcaaccaggcctgatgggcca

SEQ ID NO: 3867045 - DNA, 25 bp, Homo sapien
cgggtgtcaaccaggcctgatgggc

SEQ ID NO: 3867046 - DNA, 25 bp, Homo sapien
ctcagcaatgcccttaatagcactg

SEQ ID NO: 3867047 - DNA, 25 bp, Homo sapien
gaagaggccgtttgagtttcctgaa

SEQ ID NO: 3867048 - DNA, 25 bp, Homo sapien
tgagtttcctgaaccgttgatacaa

SEQ ID NO: 3867049 - DNA, 25 bp, Homo sapien
cactgacccattcaaaggagaatga

SEQ ID NO: 3867050 - DNA, 25 bp, Homo sapien
gcttgtctccgccacggatctgaag

SEQ ID NO: 3867051 - DNA, 25 bp, Homo sapien
tgacagctgatacaagtccaaggct

SEQ ID NO: 3867052 - DNA, 25 bp, Homo sapien
tgttgaggctgcagaatatccagca

SEQ ID NO: 3867053 - DNA, 25 bp, Homo sapien
actaggtgacagctgatacaagtcc

SEQ ID NO: 3867054 - DNA, 25 bp, Homo sapien
gaatctgccacactcggtcatagaa

SEQ ID NO: 3867055 - DNA, 25 bp, Homo sapien
ggagttctattcaaagacccatcga

SEQ ID NO: 3867056 - DNA, 25 bp, Homo sapien
ttgggcgtgcgctccagaatctgcc

SEQ ID NO: 3867057 - DNA, 25 bp, Homo sapien
tcatagaacccggtgggagttctat

SEQ ID NO: 3867058 - DNA, 25 bp, Homo sapien
tgtactgtggctggtcaatatttcc

SEQ ID NO: 3867059 - DNA, 25 bp, Homo sapien
gagagaaattcatctcatacatggt

SEQ ID NO: 3867060 - DNA, 25 bp, Homo sapien
tttcccaacgtgtcttcaacaagga

SEQ ID NO: 3867061 - DNA, 25 bp, Homo sapien
tctacaacgatctgtctgtactgtg

SEQ ID NO: 3867062 - DNA, 25 bp, Homo sapien
ttgaccagtctgtctagatctactt

SEQ ID NO: 3867063 - DNA, 25 bp, Homo sapien
ttcaatttcctttagccgactctga

SEQ ID NO: 3867064 - DNA, 25 bp, Homo sapien
tagccgactctgatctttttgaaat

SEQ ID NO: 3867065 - DNA, 25 bp, Homo sapien
attaaatgcttctttgaccagtctg

SEQ ID NO: 3867066 - DNA, 25 bp, Homo sapien
gatcttctgtttgtaaagagttgac

SEQ ID NO: 3867067 - DNA, 25 bp, Homo sapien
aaaggaaaacagtaggcaaggcatt

SEQ ID NO: 3867068 - DNA, 25 bp, Homo sapien
gtaaagagttgacaggtaaaatctg

SEQ ID NO: 3867069 - DNA, 25 bp, Homo sapien
ggcaaggcattcgatcttctgtttg

SEQ ID NO: 3867070 - DNA, 25 bp, Homo sapien
agcagattcatcaccgcctttgtca

SEQ ID NO: 3867071 - DNA, 25 bp, Homo sapien
gcctttgtcaaatagctgcatgttc

SEQ ID NO: 3867072 - DNA, 25 bp, Homo sapien
tagctaatcagacacgggtcatcat

SEQ ID NO: 3867073 - DNA, 25 bp, Homo sapien
atcagacacgggtcatcattgtttg

SEQ ID NO: 3867074 - DNA, 25 bp, Homo sapien
gacatgcaagaggtccataaccccg

SEQ ID NO: 3867075 - DNA, 25 bp, Homo sapien
taccgttagattggctatgacatgc

SEQ ID NO: 3867076 - DNA, 25 bp, Homo sapien
ggtaagaattcagtccaaagagcaa

SEQ ID NO: 3867077 - DNA, 25 bp, Homo sapien
ttcagaacatgtgtctcaacagagc

SEQ ID NO: 3867078 - DNA, 25 bp, Homo sapien
tattaacatcttttagcatgacaat

SEQ ID NO: 3867079 - DNA, 25 bp, Homo sapien
taataatgcagtttttgagaaccaa

SEQ ID NO: 3867080 - DNA, 25 bp, Homo sapien
ttttagcatgacaataccactaaga

SEQ ID NO: 3867081 - DNA, 25 bp, Homo sapien
aaaactgtagaatagctctgtatac

SEQ ID NO: 3867082 - DNA, 25 bp, Homo sapien
tatgcaagatctcggcactgtacct

SEQ ID NO: 3867083 - DNA, 25 bp, Homo sapien
aatgctttcaggagtagcacaggaa

SEQ ID NO: 3867084 - DNA, 25 bp, Homo sapien
gaagctcaatcttgtgaacctagga

SEQ ID NO: 3867085 - DNA, 25 bp, Homo sapien
tctttagggcccaactgtgtctcat

SEQ ID NO: 3867086 - DNA, 25 bp, Homo sapien
tagactatagggcatttgatgtgga

SEQ ID NO: 3867087 - DNA, 25 bp, Homo sapien
tgaattatctcaagggttctgtgtg

SEQ ID NO: 3867088 - DNA, 25 bp, Homo sapien
tgaaactcatgtccttagctctaag

SEQ ID NO: 3867089 - DNA, 25 bp, Homo sapien
tagatgatgctcaataagcacttga

SEQ ID NO: 3867090 - DNA, 25 bp, Homo sapien
tagctcacttacactggccgctcag

SEQ ID NO: 3867091 - DNA, 25 bp, Homo sapien
cagcccctactgagttgtcaacaag

SEQ ID NO: 3867092 - DNA, 25 bp, Homo sapien
gatttttgtcccagcccattagtta

SEQ ID NO: 3867093 - DNA, 25 bp, Homo sapien
tgacttcttgctgtgaaagacaagg

SEQ ID NO: 3867094 - DNA, 25 bp, Homo sapien
taaatgatcccaacccttctgaacc

SEQ ID NO: 3867095 - DNA, 25 bp, Homo sapien
gaaaggttccagattacagctccca

SEQ ID NO: 3867096 - DNA, 25 bp, Homo sapien
tcaacccagagtcttgtaggaagtt

SEQ ID NO: 3867097 - DNA, 25 bp, Homo sapien
tccagaagggaaacgatcgtgctgc

SEQ ID NO: 3867098 - DNA, 25 bp, Homo sapien
ctggggtgggtgtcccgggcaatcg

SEQ ID NO: 3867099 - DNA, 25 bp, Homo sapien
gcagttggcggctgggctcagggca

SEQ ID NO: 3867100 - DNA, 25 bp, Homo sapien
cccgggcaatcggtggccgagctct

SEQ ID NO: 3867101 - DNA, 25 bp, Homo sapien
ctgaaagctgagtcctaaaccacat

SEQ ID NO: 3867102 - DNA, 25 bp, Homo sapien
tccgtaccccacttctggttcatgg

SEQ ID NO: 3867103 - DNA, 25 bp, Homo sapien
tggtgtgtcagaagtatcatatccc

SEQ ID NO: 3867104 - DNA, 25 bp, Homo sapien
ggtcaagtgcattggccttccatgc

SEQ ID NO: 3867105 - DNA, 25 bp, Homo sapien
cctcctcgggatagaaataaatggc

SEQ ID NO: 3867106 - DNA, 25 bp, Homo sapien
gcaagactcttctagagatgacggc

SEQ ID NO: 3867107 - DNA, 25 bp, Homo sapien
gatgacggcttcaatccaaagggct

SEQ ID NO: 3867108 - DNA, 25 bp, Homo sapien
tacggtaccattaggccaatgcatg

SEQ ID NO: 3867109 - DNA, 25 bp, Homo sapien
gatgtgatcatgtggtacggtacca

SEQ ID NO: 3867110 - DNA, 25 bp, Homo sapien
tggtgttttgacttcgtggttttgc

SEQ ID NO: 3867111 - DNA, 25 bp, Homo sapien
cacatgtacgcttgtgcgttctaag

SEQ ID NO: 3867112 - DNA, 25 bp, Homo sapien
tgctgtggacgcacatgtacgcttg

SEQ ID NO: 3867113 - DNA, 25 bp, Homo sapien
tgtgcgttctaagacgacttgccag

SEQ ID NO: 3867114 - DNA, 25 bp, Homo sapien
ctaccagaccggccttacaagaact

SEQ ID NO: 3867115 - DNA, 25 bp, Homo sapien
taccagaccggccttacaagaactc

SEQ ID NO: 3867116 - DNA, 25 bp, Homo sapien
cagccgtagggctgccctttgggga

SEQ ID NO: 3867117 - DNA, 25 bp, Homo sapien
cccagccgtagggctgccctttggg

SEQ ID NO: 3867118 - DNA, 25 bp, Homo sapien
ccagccgtagggctgccctttgggg

SEQ ID NO: 3867119 - DNA, 25 bp, Homo sapien
gaaaattggctttggtgagcgtcag

SEQ ID NO: 3867120 - DNA, 25 bp, Homo sapien
tggtgagcgtcagaaacaattgctg

SEQ ID NO: 3867121 - DNA, 25 bp, Homo sapien
gactgtcgcttcctaaatcacacct

SEQ ID NO: 3867122 - DNA, 25 bp, Homo sapien
caattgctgcccgaaagcaggactg

SEQ ID NO: 3867123 - DNA, 25 bp, Homo sapien
ctggggagcatgtaagttctttact

SEQ ID NO: 3867124 - DNA, 25 bp, Homo sapien
ggggagcatgtaagttctttactcc

SEQ ID NO: 3867125 - DNA, 25 bp, Homo sapien
acactggggagcatgtaagttcttt

SEQ ID NO: 3867126 - DNA, 25 bp, Homo sapien
cactggggagcatgtaagttcttta

SEQ ID NO: 3867127 - DNA, 25 bp, Homo sapien
tcctagtcctgtaacgataaccacc

SEQ ID NO: 3867128 - DNA, 25 bp, Homo sapien
ccttggcacataatactgtcaccaa

SEQ ID NO: 3867129 - DNA, 25 bp, Homo sapien
ttagagtcctcctagtcctgtaacg

SEQ ID NO: 3867130 - DNA, 25 bp, Homo sapien
cgataaccaccccttggcacataat

SEQ ID NO: 3867131 - DNA, 25 bp, Homo sapien
tcagtaggaaagtcgcttgacccag

SEQ ID NO: 3867132 - DNA, 25 bp, Homo sapien
caacaatgtagctccccgggaagat

SEQ ID NO: 3867133 - DNA, 25 bp, Homo sapien
aaacaagcttgaaacatgcatgggc

SEQ ID NO: 3867134 - DNA, 25 bp, Homo sapien
tagcacagcctgtatccaaggacag

SEQ ID NO: 3867135 - DNA, 25 bp, Homo sapien
actgggatgcccttgttgtgagtgc

SEQ ID NO: 3867136 - DNA, 25 bp, Homo sapien
gactgggatgcccttgttgtgagtg

SEQ ID NO: 3867137 - DNA, 25 bp, Homo sapien
ctgggatgcccttgttgtgagtgca

SEQ ID NO: 3867138 - DNA, 25 bp, Homo sapien
caaggtgaccaaggacaagggtggg

SEQ ID NO: 3867139 - DNA, 25 bp, Homo sapien
agaatagtttaagtttcctactgtg

SEQ ID NO: 3867140 - DNA, 25 bp, Homo sapien
cttctgttatcatgtcagtgctaaa

SEQ ID NO: 3867141 - DNA, 25 bp, Homo sapien
acttctgttatcatgtcagtgctaa

SEQ ID NO: 3867142 - DNA, 25 bp, Homo sapien
aacttctacaatagacagaatagtt

SEQ ID NO: 3867143 - DNA, 25 bp, Homo sapien
gtttgcaatggtctgatgctgctct

SEQ ID NO: 3867144 - DNA, 25 bp, Homo sapien
tcagccaatccagtaggtttgcaat

SEQ ID NO: 3867145 - DNA, 25 bp, Homo sapien
tccagtaggtttgcaatggtctgat

SEQ ID NO: 3867146 - DNA, 25 bp, Homo sapien
tgctgctcttactcccaagcacaga

SEQ ID NO: 3867147 - DNA, 25 bp, Homo sapien
cacaaaatcagttactggcatttgg

SEQ ID NO: 3867148 - DNA, 25 bp, Homo sapien
acaaaatcagttactggcatttgga

SEQ ID NO: 3867149 - DNA, 25 bp, Homo sapien
cacagccggcaatgacatgatggaa

SEQ ID NO: 3867150 - DNA, 25 bp, Homo sapien
gatgcgtagtcaaggaatgctgtcc

SEQ ID NO: 3867151 - DNA, 25 bp, Homo sapien
catgatggaatattgatgcgtagtc

SEQ ID NO: 3867152 - DNA, 25 bp, Homo sapien
cctcacagccggcaatgacatgatg

SEQ ID NO: 3867153 - DNA, 25 bp, Homo sapien
gaccagttgagaaatggttcctcca

SEQ ID NO: 3867154 - DNA, 25 bp, Homo sapien
ctcacagaatgagaccagttgagaa

SEQ ID NO: 3867155 - DNA, 25 bp, Homo sapien
aggtgggctctttgatcagaagagg

SEQ ID NO: 3867156 - DNA, 25 bp, Homo sapien
cagaatgagaccagttgagaaatgg

SEQ ID NO: 3867157 - DNA, 25 bp, Homo sapien
ctttttccacttgaactgcctcaaa

SEQ ID NO: 3867158 - DNA, 25 bp, Homo sapien
tctttttccacttgaactgcctcaa

SEQ ID NO: 3867159 - DNA, 25 bp, Homo sapien
ttctttttccacttgaactgcctca

SEQ ID NO: 3867160 - DNA, 25 bp, Homo sapien
tttttccacttgaactgcctcaaaa

SEQ ID NO: 3867161 - DNA, 25 bp, Homo sapien
tcaccggagacagcaaattacaagc

SEQ ID NO: 3867162 - DNA, 25 bp, Homo sapien
gcttcaaagagagcatcacgggtct

SEQ ID NO: 3867163 - DNA, 25 bp, Homo sapien
ggtgcttaatggaggtcccaggcct

SEQ ID NO: 3867164 - DNA, 25 bp, Homo sapien
ggcatgccgcaaatgggcttcaaag

SEQ ID NO: 3867165 - DNA, 25 bp, Homo sapien
taatcagaggtggtaagcagatagt

SEQ ID NO: 3867166 - DNA, 25 bp, Homo sapien
ggtcaaggaccatatctactttgct

SEQ ID NO: 3867167 - DNA, 25 bp, Homo sapien
tcagagacattaggctgagggaaag

SEQ ID NO: 3867168 - DNA, 25 bp, Homo sapien
taaaggaacaggtcatgctacacac

SEQ ID NO: 3867169 - DNA, 25 bp, Homo sapien
atcagaagtgacatctacacaatgg

SEQ ID NO: 3867170 - DNA, 25 bp, Homo sapien
ggggtgtcactcttagcagatccat

SEQ ID NO: 3867171 - DNA, 25 bp, Homo sapien
tcagaagtgacatctacacaatggg

SEQ ID NO: 3867172 - DNA, 25 bp, Homo sapien
aatggggtgtcactcttagcagatc

SEQ ID NO: 3867173 - DNA, 25 bp, Homo sapien
tcttcgacaccagcataatctgctg

SEQ ID NO: 3867174 - DNA, 25 bp, Homo sapien
ccagcataatctgctgtgacatagc

SEQ ID NO: 3867175 - DNA, 25 bp, Homo sapien
ccagaatgttctcttcgacaccagc

SEQ ID NO: 3867176 - DNA, 25 bp, Homo sapien
gaatgttctcttcgacaccagcata

SEQ ID NO: 3867177 - DNA, 25 bp, Homo sapien
ctggagagggactccatgggaaaat

SEQ ID NO: 3867178 - DNA, 25 bp, Homo sapien
agggatgtgatgagctgagccagct

SEQ ID NO: 3867179 - DNA, 25 bp, Homo sapien
ttcatgagctctgacagtaatgtgt

SEQ ID NO: 3867180 - DNA, 25 bp, Homo sapien
ggaaaatgggctcggccgtcagctt

SEQ ID NO: 3867181 - DNA, 25 bp, Homo sapien
gccttctcagagcccatgcagccat

SEQ ID NO: 3867182 - DNA, 25 bp, Homo sapien
ttctgccttctcagagcccatgcag

SEQ ID NO: 3867183 - DNA, 25 bp, Homo sapien
cctttctgccttctcagagcccatg

SEQ ID NO: 3867184 - DNA, 25 bp, Homo sapien
ctgccttctcagagcccatgcagcc

SEQ ID NO: 3867185 - DNA, 25 bp, Homo sapien
cccaacccaagctctcctgtggctc

SEQ ID NO: 3867186 - DNA, 25 bp, Homo sapien
gcccaacccaagctctcctgtggct

SEQ ID NO: 3867187 - DNA, 25 bp, Homo sapien
ggcccaacccaagctctcctgtggc

SEQ ID NO: 3867188 - DNA, 25 bp, Homo sapien
ccaacccaagctctcctgtggctcc

SEQ ID NO: 3867189 - DNA, 25 bp, Homo sapien
gtccaaaatggacttgtggttctgg

SEQ ID NO: 3867190 - DNA, 25 bp, Homo sapien
ctggttctcatgctcttgttgttgg

SEQ ID NO: 3867191 - DNA, 25 bp, Homo sapien
tggttctcatgctcttgttgttggg

SEQ ID NO: 3867192 - DNA, 25 bp, Homo sapien
aaaatggacttgtggttctggttct

SEQ ID NO: 3867193 - DNA, 25 bp, Homo sapien
taaaggactgcccattaacattcaa

SEQ ID NO: 3867194 - DNA, 25 bp, Homo sapien
cattcaatccataatagagaccatt

SEQ ID NO: 3867195 - DNA, 25 bp, Homo sapien
aataccccagcagtagtgatgtgag

SEQ ID NO: 3867196 - DNA, 25 bp, Homo sapien
cattatcttggcagcaaaatacccc

SEQ ID NO: 3867197 - DNA, 25 bp, Homo sapien
tttttctccaactatacgacattca

SEQ ID NO: 3867198 - DNA, 25 bp, Homo sapien
tgtttttctccaactatacgacatt

SEQ ID NO: 3867199 - DNA, 25 bp, Homo sapien
ttctccaactatacgacattcattc

SEQ ID NO: 3867200 - DNA, 25 bp, Homo sapien
tctccaactatacgacattcattca

SEQ ID NO: 3867201 - DNA, 25 bp, Homo sapien
atgcttcttgagagcccacgaatgc

SEQ ID NO: 3867202 - DNA, 25 bp, Homo sapien
gtttttcacgttcagcttccaggca

SEQ ID NO: 3867203 - DNA, 25 bp, Homo sapien
ttccaggcacttgattgagactcca

SEQ ID NO: 3867204 - DNA, 25 bp, Homo sapien
gaatgcatttatggccagtatctct

SEQ ID NO: 3867205 - DNA, 25 bp, Homo sapien
cagactccagaggcaggtcagaggt

SEQ ID NO: 3867206 - DNA, 25 bp, Homo sapien
gactccagaggcaggtcagaggtct

SEQ ID NO: 3867207 - DNA, 25 bp, Homo sapien
ccagaggcaggtcagaggtctccat

SEQ ID NO: 3867208 - DNA, 25 bp, Homo sapien
ctccagaggcaggtcagaggtctcc

SEQ ID NO: 3867209 - DNA, 25 bp, Homo sapien
accagctgtccctgtatttcaaagc

SEQ ID NO: 3867210 - DNA, 25 bp, Homo sapien
caaagccatttatgcactgattagc

SEQ ID NO: 3867211 - DNA, 25 bp, Homo sapien
catttatgcactgattagctcccac

SEQ ID NO: 3867212 - DNA, 25 bp, Homo sapien
gctcccactccttcatggtgacaag

SEQ ID NO: 3867213 - DNA, 25 bp, Homo sapien
caggtacataggagcccagtagctt

SEQ ID NO: 3867214 - DNA, 25 bp, Homo sapien
tttttgtggccccagtccaggtaca

SEQ ID NO: 3867215 - DNA, 25 bp, Homo sapien
tcaaagtcctgatttctcgattgcc

SEQ ID NO: 3867216 - DNA, 25 bp, Homo sapien
tttcttgatgggtctctgagcattt

SEQ ID NO: 3867217 - DNA, 25 bp, Homo sapien
cagtaattactccagtggcaaagct

SEQ ID NO: 3867218 - DNA, 25 bp, Homo sapien
ttcagggtggctgttcagcttgcag

SEQ ID NO: 3867219 - DNA, 25 bp, Homo sapien
cttcagggtggctgttcagcttgca

SEQ ID NO: 3867220 - DNA, 25 bp, Homo sapien
tcagcttgcagtaattactccagtg

SEQ ID NO: 3867221 - DNA, 25 bp, Homo sapien
tgggaaaagcttggagtttgtggag

SEQ ID NO: 3867222 - DNA, 25 bp, Homo sapien
agtttgtggagcctgaggctttcca

SEQ ID NO: 3867223 - DNA, 25 bp, Homo sapien
ctgggcactagcacaaagggaacgt

SEQ ID NO: 3867224 - DNA, 25 bp, Homo sapien
cctgaggctttccaggagccgctgg

SEQ ID NO: 3867225 - DNA, 25 bp, Homo sapien
ggattcaggctgaagttaacttcca

SEQ ID NO: 3867226 - DNA, 25 bp, Homo sapien
tggattcaggctgaagttaacttcc

SEQ ID NO: 3867227 - DNA, 25 bp, Homo sapien
gtggattcaggctgaagttaacttc

SEQ ID NO: 3867228 - DNA, 25 bp, Homo sapien
tgtggattcaggctgaagttaactt

SEQ ID NO: 3867229 - DNA, 25 bp, Homo sapien
gtgagctctgagctgataggcccag

SEQ ID NO: 3867230 - DNA, 25 bp, Homo sapien
tgggaagatcctaaagtggaactta

SEQ ID NO: 3867231 - DNA, 25 bp, Homo sapien
ctcgttttgggaagatcctaaagtg

SEQ ID NO: 3867232 - DNA, 25 bp, Homo sapien
ttggtgaacaccaaaggcttggata

SEQ ID NO: 3867233 - DNA, 25 bp, Homo sapien
tggtgaacaccaaaggcttggatac

SEQ ID NO: 3867234 - DNA, 25 bp, Homo sapien
ctaagtctggtgcatagagccccat

SEQ ID NO: 3867235 - DNA, 25 bp, Homo sapien
cacaaaagtgttgacccctggagtc

SEQ ID NO: 3867236 - DNA, 25 bp, Homo sapien
ggatccccggagataattcgccaca

SEQ ID NO: 3867237 - DNA, 25 bp, Homo sapien
tggcagcctcgtcccaaaaatgcgg

SEQ ID NO: 3867238 - DNA, 25 bp, Homo sapien
ttttccttgagcgaccagcagatgg

SEQ ID NO: 3867239 - DNA, 25 bp, Homo sapien
gctggcagcctttcgcactgggggc

SEQ ID NO: 3867240 - DNA, 25 bp, Homo sapien
cagacccgcctccacgcctccgctt

SEQ ID NO: 3867241 - DNA, 25 bp, Homo sapien
tcaccaaacctcagacccgcctcca

SEQ ID NO: 3867242 - DNA, 25 bp, Homo sapien
ctggcagcctttcgcactgggggct

SEQ ID NO: 3867243 - DNA, 25 bp, Homo sapien
agcaggacgccctcgtgggtgagca

SEQ ID NO: 3867244 - DNA, 25 bp, Homo sapien
aggacgccctcgtgggtgagcagca

SEQ ID NO: 3867245 - DNA, 25 bp, Homo sapien
cagcaggacgccctcgtgggtgagc

SEQ ID NO: 3867246 - DNA, 25 bp, Homo sapien
gcaggacgccctcgtgggtgagcag

SEQ ID NO: 3867247 - DNA, 25 bp, Homo sapien
gggccgagtccacgctggtgcgcat

SEQ ID NO: 3867248 - DNA, 25 bp, Homo sapien
gcgggccgagtccacgctggtgcgc

SEQ ID NO: 3867249 - DNA, 25 bp, Homo sapien
ttgcgggccgagtccacgctggtgc

SEQ ID NO: 3867250 - DNA, 25 bp, Homo sapien
gttgcgggccgagtccacgctggtg

SEQ ID NO: 3867251 - DNA, 25 bp, Homo sapien
ttgcagcgacgtgcccttcagaagg

SEQ ID NO: 3867252 - DNA, 25 bp, Homo sapien
gcgacgtgcccttcagaaggcggct

SEQ ID NO: 3867253 - DNA, 25 bp, Homo sapien
gatggtgctttgcagcgacgtgccc

SEQ ID NO: 3867254 - DNA, 25 bp, Homo sapien
cagaaggcggctccgcaccagctgc

SEQ ID NO: 3867255 - DNA, 25 bp, Homo sapien
gttgcggtgggctacgatcacgcca

SEQ ID NO: 3867256 - DNA, 25 bp, Homo sapien
gacttttcaagttcacaatgtgccc

SEQ ID NO: 3867257 - DNA, 25 bp, Homo sapien
tcgtatgttgggaaactagaatcca

SEQ ID NO: 3867258 - DNA, 25 bp, Homo sapien
cctagacagggaactaagtgtgcct

SEQ ID NO: 3867259 - DNA, 25 bp, Homo sapien
ggcctctgggctaccatacagaaaa

SEQ ID NO: 3867260 - DNA, 25 bp, Homo sapien
tctgatgagttcttataatgccgga

SEQ ID NO: 3867261 - DNA, 25 bp, Homo sapien
cgtcacctggatagcgcaaaggaaa

SEQ ID NO: 3867262 - DNA, 25 bp, Homo sapien
cagacttgtgcgtggaaacaggcta

SEQ ID NO: 3867263 - DNA, 25 bp, Homo sapien
tgcttgaaaggatattgtacaggta

SEQ ID NO: 3867264 - DNA, 25 bp, Homo sapien
aagccatgtaccctgaaaagtgtaa

SEQ ID NO: 3867265 - DNA, 25 bp, Homo sapien
gagaagtcggcactatgaggaaatg

SEQ ID NO: 3867266 - DNA, 25 bp, Homo sapien
agggagactgagaagtcggcactat

SEQ ID NO: 3867267 - DNA, 25 bp, Homo sapien
caactgcagtagtgggaaaatctaa

SEQ ID NO: 3867268 - DNA, 25 bp, Homo sapien
tatagatggctagaaacagagtacc

SEQ ID NO: 3867269 - DNA, 25 bp, Homo sapien
aatctattgtatattgggccccagg

SEQ ID NO: 3867270 - DNA, 25 bp, Homo sapien
caaaaggttgtatatcaagtcagtc

SEQ ID NO: 3867271 - DNA, 25 bp, Homo sapien
cataggcctgtaatcaacagagtgt

SEQ ID NO: 3867272 - DNA, 25 bp, Homo sapien
gaaactcctcaagtcggtccaactg

SEQ ID NO: 3867273 - DNA, 25 bp, Homo sapien
tttacaggtgttgggaaactcctca

SEQ ID NO: 3867274 - DNA, 25 bp, Homo sapien
agttactgcccacaacctgaacggc

SEQ ID NO: 3867275 - DNA, 25 bp, Homo sapien
cttccacctactaggttcaagtaat

SEQ ID NO: 3867276 - DNA, 25 bp, Homo sapien
tacagattcaaattttctatttttc

SEQ ID NO: 3867277 - DNA, 25 bp, Homo sapien
agcccatatagaaattacagattca

SEQ ID NO: 3867278 - DNA, 25 bp, Homo sapien
tccacctactaggttcaagtaatcc

SEQ ID NO: 3867279 - DNA, 25 bp, Homo sapien
ttctctttgttgcttgttcggataa

SEQ ID NO: 3867280 - DNA, 25 bp, Homo sapien
ggaagactatctaaaagacgtctca

SEQ ID NO: 3867281 - DNA, 25 bp, Homo sapien
tctcaatttagcaactgcagggaca

SEQ ID NO: 3867282 - DNA, 25 bp, Homo sapien
tgcagggacagacatatccaacatt

SEQ ID NO: 3867283 - DNA, 25 bp, Homo sapien
agtcatcttgaaccgctcctctagg

SEQ ID NO: 3867284 - DNA, 25 bp, Homo sapien
tttttgaagcaatttcaggccttca

SEQ ID NO: 3867285 - DNA, 25 bp, Homo sapien
catcatcttgcttgggttttctggt

SEQ ID NO: 3867286 - DNA, 25 bp, Homo sapien
aatttgtctgacaagcagtggtata

SEQ ID NO: 3867287 - DNA, 25 bp, Homo sapien
tggtgtcctggagtactaatcgcca

SEQ ID NO: 3867288 - DNA, 25 bp, Homo sapien
aatgagtaattgagtccctgacctg

SEQ ID NO: 3867289 - DNA, 25 bp, Homo sapien
tgcagttttctgcaactcccagtgg

SEQ ID NO: 3867290 - DNA, 25 bp, Homo sapien
gatctcaagccagaaataatccagc

SEQ ID NO: 3867291 - DNA, 25 bp, Homo sapien
ttttttctctagcatgacaatgtca

SEQ ID NO: 3867292 - DNA, 25 bp, Homo sapien
cacagactttatgggcctgctctgg

SEQ ID NO: 3867293 - DNA, 25 bp, Homo sapien
tgctctggcatactagatgttcgta

SEQ ID NO: 3867294 - DNA, 25 bp, Homo sapien
tatgtgtaattctcctaatagggcg

SEQ ID NO: 3867295 - DNA, 25 bp, Homo sapien
gaagttctaccataagttccaaata

SEQ ID NO: 3867296 - DNA, 25 bp, Homo sapien
aataatttctagtcagagcatattc

SEQ ID NO: 3867297 - DNA, 25 bp, Homo sapien
cagttgtacttttgttccaaggaag

SEQ ID NO: 3867298 - DNA, 25 bp, Homo sapien
agagcatattctggcattgactgag

SEQ ID NO: 3867299 - DNA, 25 bp, Homo sapien
tccaggagggccaacaaagcatagg

SEQ ID NO: 3867300 - DNA, 25 bp, Homo sapien
aaagcataggattgggcccttcagg

SEQ ID NO: 3867301 - DNA, 25 bp, Homo sapien
ggtcattatccagaagaatccgggc

SEQ ID NO: 3867302 - DNA, 25 bp, Homo sapien
caatcctgtggaactctcgacctag

SEQ ID NO: 3867303 - DNA, 25 bp, Homo sapien
tatttctaggagttaatatccacag

SEQ ID NO: 3867304 - DNA, 25 bp, Homo sapien
gattaaatattaaggcaagcctctc

SEQ ID NO: 3867305 - DNA, 25 bp, Homo sapien
gaaagttgagacaaggatttcttgc

SEQ ID NO: 3867306 - DNA, 25 bp, Homo sapien
ttttgtggcttacaaagtggacaga

SEQ ID NO: 3867307 - DNA, 25 bp, Homo sapien
tgccagaggcccgtattcgataaag

SEQ ID NO: 3867308 - DNA, 25 bp, Homo sapien
tactcgtctaaagggttgcataact

SEQ ID NO: 3867309 - DNA, 25 bp, Homo sapien
gatagacgataaatcccctgcctga

SEQ ID NO: 3867310 - DNA, 25 bp, Homo sapien
tccacagttgtatggtagaaatgcc

SEQ ID NO: 3867311 - DNA, 25 bp, Homo sapien
tcaacctggtgggttatattaatat

SEQ ID NO: 3867312 - DNA, 25 bp, Homo sapien
acagtgagctttccagtgatgctca

SEQ ID NO: 3867313 - DNA, 25 bp, Homo sapien
acacaggcaaagcacacagcacggt

SEQ ID NO: 3867314 - DNA, 25 bp, Homo sapien
taaggatcatgagagaacacaggca

SEQ ID NO: 3867315 - DNA, 25 bp, Homo sapien
acaaagccgattcacagagcaggcc

SEQ ID NO: 3867316 - DNA, 25 bp, Homo sapien
cacaaagccgattcacagagcaggc

SEQ ID NO: 3867317 - DNA, 25 bp, Homo sapien
tctgcacaaagccgattcacagagc

SEQ ID NO: 3867318 - DNA, 25 bp, Homo sapien
atgatctgcacaaagccgattcaca

SEQ ID NO: 3867319 - DNA, 25 bp, Homo sapien
aaatgctgtctctgaaaaggcataa

SEQ ID NO: 3867320 - DNA, 25 bp, Homo sapien
tgtctatgttgtgcaaagcaaatgc

SEQ ID NO: 3867321 - DNA, 25 bp, Homo sapien
taaaagcctgactgccgagaagaaa

SEQ ID NO: 3867322 - DNA, 25 bp, Homo sapien
aaaaggcataaaagcctgactgccg

SEQ ID NO: 3867323 - DNA, 25 bp, Homo sapien
caggagcgacgccattcagaaatca

SEQ ID NO: 3867324 - DNA, 25 bp, Homo sapien
tagctatcactataatatagcaaag

SEQ ID NO: 3867325 - DNA, 25 bp, Homo sapien
gcacattcacagtgtgagatgtcag

SEQ ID NO: 3867326 - DNA, 25 bp, Homo sapien
cttatcttctacttaattctggcta

SEQ ID NO: 3867327 - DNA, 25 bp, Homo sapien
cagtttgtcaacctcatctaatagg

SEQ ID NO: 3867328 - DNA, 25 bp, Homo sapien
aacactgggttgttcactcccacag

SEQ ID NO: 3867329 - DNA, 25 bp, Homo sapien
tcccacagtcttcaagccgttgatg

SEQ ID NO: 3867330 - DNA, 25 bp, Homo sapien
gatgatgcgaccaggcatgctgcca

SEQ ID NO: 3867331 - DNA, 25 bp, Homo sapien
cttgaatatgattatcaaccctcct

SEQ ID NO: 3867332 - DNA, 25 bp, Homo sapien
cactgtgtatatcacttgaatatga

SEQ ID NO: 3867333 - DNA, 25 bp, Homo sapien
aatatgattatcaaccctcctccat

SEQ ID NO: 3867334 - DNA, 25 bp, Homo sapien
tgaatatgattatcaaccctcctcc

SEQ ID NO: 3867335 - DNA, 25 bp, Homo sapien
cagaccggacgcttaagaagataaa

SEQ ID NO: 3867336 - DNA, 25 bp, Homo sapien
caggtctgcaaggataggaactgaa

SEQ ID NO: 3867337 - DNA, 25 bp, Homo sapien
caggaaatccaacatggtgagaggt

SEQ ID NO: 3867338 - DNA, 25 bp, Homo sapien
cggatgtcaaaaacaaccagttcag

SEQ ID NO: 3867339 - DNA, 25 bp, Homo sapien
aaaacaggaagcacgaggcagctca

SEQ ID NO: 3867340 - DNA, 25 bp, Homo sapien
taggaagcagtcagatcccagatcc

SEQ ID NO: 3867341 - DNA, 25 bp, Homo sapien
tgtgccaagcaaaccagaatgtatg

SEQ ID NO: 3867342 - DNA, 25 bp, Homo sapien
cctgcttaataagacacatgtccca

SEQ ID NO: 3867343 - DNA, 25 bp, Homo sapien
ttaaatttaagtgaacctactggca

SEQ ID NO: 3867344 - DNA, 25 bp, Homo sapien
cctactggcaatggaagcagcaagt

SEQ ID NO: 3867345 - DNA, 25 bp, Homo sapien
ccatttatagagtgctttaatatgt

SEQ ID NO: 3867346 - DNA, 25 bp, Homo sapien
caggacttgggcaagcagggaggaa

SEQ ID NO: 3867347 - DNA, 25 bp, Homo sapien
agtaagcactctagtgtatatttac

SEQ ID NO: 3867348 - DNA, 25 bp, Homo sapien
acatctgggctatattaccttaata

SEQ ID NO: 3867349 - DNA, 25 bp, Homo sapien
cactctagtgtatatttacatctac

SEQ ID NO: 3867350 - DNA, 25 bp, Homo sapien
catctgggctatattaccttaataa

SEQ ID NO: 3867351 - DNA, 25 bp, Homo sapien
gtatagctcaaatcaaaagatcatg

SEQ ID NO: 3867352 - DNA, 25 bp, Homo sapien
taaaggaagtttactatatctagac

SEQ ID NO: 3867353 - DNA, 25 bp, Homo sapien
gatgatgtctaagtccctctcttct

SEQ ID NO: 3867354 - DNA, 25 bp, Homo sapien
attttagtgctactcagttatagac

SEQ ID NO: 3867355 - DNA, 25 bp, Homo sapien
tatggttttgttcaggatccaacac

SEQ ID NO: 3867356 - DNA, 25 bp, Homo sapien
cagtggtgttggcagtagctataaa

SEQ ID NO: 3867357 - DNA, 25 bp, Homo sapien
ggccacatttagataatgatctgtg

SEQ ID NO: 3867358 - DNA, 25 bp, Homo sapien
gcagctggaatggtagcagtggtgt

SEQ ID NO: 3867359 - DNA, 25 bp, Homo sapien
tgatgatgtcaagagtggtgacctg

SEQ ID NO: 3867360 - DNA, 25 bp, Homo sapien
gatcaagtgcctatgggcaatctct

SEQ ID NO: 3867361 - DNA, 25 bp, Homo sapien
cagctgcttggggatcaagtgccta

SEQ ID NO: 3867362 - DNA, 25 bp, Homo sapien
acctggggtatctgaatctgctgtg

SEQ ID NO: 3867363 - DNA, 25 bp, Homo sapien
ggtccaacttggcttccttatgctg

SEQ ID NO: 3867364 - DNA, 25 bp, Homo sapien
tcagtcacatcagaacggtccaact

SEQ ID NO: 3867365 - DNA, 25 bp, Homo sapien
aaatggccccaagttttctatccag

SEQ ID NO: 3867366 - DNA, 25 bp, Homo sapien
ttctatccagagaacgaacccctgc

SEQ ID NO: 3867367 - DNA, 25 bp, Homo sapien
cctaggctcagttgcttgagatcac

SEQ ID NO: 3867368 - DNA, 25 bp, Homo sapien
gaacaattccttgagtatttgtggg

SEQ ID NO: 3867369 - DNA, 25 bp, Homo sapien
gacaagaataaaaagacctaggctc

SEQ ID NO: 3867370 - DNA, 25 bp, Homo sapien
ggagcatctagatctaggtcttaac

SEQ ID NO: 3867371 - DNA, 25 bp, Homo sapien
tattagagccaacttggagtccata

SEQ ID NO: 3867372 - DNA, 25 bp, Homo sapien
caaaatcgtctccaagagacaagta

SEQ ID NO: 3867373 - DNA, 25 bp, Homo sapien
tatgcctctagtaaagactacaccc

SEQ ID NO: 3867374 - DNA, 25 bp, Homo sapien
ggagtccatacctatgcctctagta

SEQ ID NO: 3867375 - DNA, 25 bp, Homo sapien
gccacctagcctaacctcgagttga

SEQ ID NO: 3867376 - DNA, 25 bp, Homo sapien
agccacctagcctaacctcgagttg

SEQ ID NO: 3867377 - DNA, 25 bp, Homo sapien
cacctagcctaacctcgagttgatt

SEQ ID NO: 3867378 - DNA, 25 bp, Homo sapien
ctagcctaacctcgagttgattttt

SEQ ID NO: 3867379 - DNA, 25 bp, Homo sapien
cagaccaaacgtcaggccacaaaac

SEQ ID NO: 3867380 - DNA, 25 bp, Homo sapien
tgtgggacttcaacactgagacaga

SEQ ID NO: 3867381 - DNA, 25 bp, Homo sapien
ttcaacactgagacagacaaagtca

SEQ ID NO: 3867382 - DNA, 25 bp, Homo sapien
ctccaagacagaccaaacgtcaggc

SEQ ID NO: 3867383 - DNA, 25 bp, Homo sapien
catcccgggagtaccacataataaa

SEQ ID NO: 3867384 - DNA, 25 bp, Homo sapien
aagaggacaggcctgtcatcactga

SEQ ID NO: 3867385 - DNA, 25 bp, Homo sapien
gacagacttgtggtctagccagcca

SEQ ID NO: 3867386 - DNA, 25 bp, Homo sapien
tcccacctaaggcaaatacagcaga

SEQ ID NO: 3867387 - DNA, 25 bp, Homo sapien
taaatgcactcatggccgtagacga

SEQ ID NO: 3867388 - DNA, 25 bp, Homo sapien
cttgcaaagtcaatggcaggaagcc

SEQ ID NO: 3867389 - DNA, 25 bp, Homo sapien
gaagaggcgcttgcatagtcagtga

SEQ ID NO: 3867390 - DNA, 25 bp, Homo sapien
taaagcatgcttagggcttgcaaag

SEQ ID NO: 3867391 - DNA, 25 bp, Homo sapien
tgcaacctgggtctttgataagaaa

SEQ ID NO: 3867392 - DNA, 25 bp, Homo sapien
cagtataaacttcaatgcgggctta

SEQ ID NO: 3867393 - DNA, 25 bp, Homo sapien
tctaacccctatctgtgcaacctgg

SEQ ID NO: 3867394 - DNA, 25 bp, Homo sapien
tagtaccaatgagccagtgcctaaa

SEQ ID NO: 3867395 - DNA, 25 bp, Homo sapien
tatagtgggtatagtcacgcactgc

SEQ ID NO: 3867396 - DNA, 25 bp, Homo sapien
caaacctattgtgctgccagctgta

SEQ ID NO: 3867397 - DNA, 25 bp, Homo sapien
gccccgttagggcaatggaatgcat

SEQ ID NO: 3867398 - DNA, 25 bp, Homo sapien
caacaacggacctgaaagattccta

SEQ ID NO: 3867399 - DNA, 25 bp, Homo sapien
aacggacctggccattcttcaattt

SEQ ID NO: 3867400 - DNA, 25 bp, Homo sapien
gaccttttcatgtccatttactata

SEQ ID NO: 3867401 - DNA, 25 bp, Homo sapien
gagatgtaagcaaatgaccttttca

SEQ ID NO: 3867402 - DNA, 25 bp, Homo sapien
caaacaaaagggtatctgcaaacat

SEQ ID NO: 3867403 - DNA, 25 bp, Homo sapien
aatctatgcagaggtatatcccagc

SEQ ID NO: 3867404 - DNA, 25 bp, Homo sapien
gagtttcccagcattaaagcagcag

SEQ ID NO: 3867405 - DNA, 25 bp, Homo sapien
cacagctattatggagggaagtcct

SEQ ID NO: 3867406 - DNA, 25 bp, Homo sapien
tcctctagagctgatggaagcacag

SEQ ID NO: 3867407 - DNA, 25 bp, Homo sapien
tgactcagattaccacctagtggcc

SEQ ID NO: 3867408 - DNA, 25 bp, Homo sapien
gaattacagtactctcagagagctg

SEQ ID NO: 3867409 - DNA, 25 bp, Homo sapien
tgaattatatactggctcccgctcc

SEQ ID NO: 3867410 - DNA, 25 bp, Homo sapien
cctagtggcctagaacaaggtgact

SEQ ID NO: 3867411 - DNA, 25 bp, Homo sapien
tcctgttgggctctagtgggctcct

SEQ ID NO: 3867412 - DNA, 25 bp, Homo sapien
ttctgggtgagggattctcccactc

SEQ ID NO: 3867413 - DNA, 25 bp, Homo sapien
tcttggacctcacagggatgaacct

SEQ ID NO: 3867414 - DNA, 25 bp, Homo sapien
gactgaaaccatgaatgacacagga

SEQ ID NO: 3867415 - DNA, 25 bp, Homo sapien
caaggatgtctttcagagcatggaa

SEQ ID NO: 3867416 - DNA, 25 bp, Homo sapien
catttcatacatcgggggcccaagg

SEQ ID NO: 3867417 - DNA, 25 bp, Homo sapien
aaatcggcatttcaggtggtagagc

SEQ ID NO: 3867418 - DNA, 25 bp, Homo sapien
cagtagtgtcactgatagattcagg

SEQ ID NO: 3867419 - DNA, 25 bp, Homo sapien
gctgcaagaagtgcggccacaccaa

SEQ ID NO: 3867420 - DNA, 25 bp, Homo sapien
agaagatgatgtgccacaagagctg

SEQ ID NO: 3867421 - DNA, 25 bp, Homo sapien
actgcaagaagatgatgtgccacaa

SEQ ID NO: 3867422 - DNA, 25 bp, Homo sapien
gcccccatgcagtcaactgctgcaa

SEQ ID NO: 3867423 - DNA, 25 bp, Homo sapien
tggctcctggcaagtcatattatca

SEQ ID NO: 3867424 - DNA, 25 bp, Homo sapien
gcttcaactcggtcttggcacccag

SEQ ID NO: 3867425 - DNA, 25 bp, Homo sapien
gggtctgcactagcacagtctgaag

SEQ ID NO: 3867426 - DNA, 25 bp, Homo sapien
taagcaaccacctgagtacaccagt

SEQ ID NO: 3867427 - DNA, 25 bp, Homo sapien
tctgcagactcatgttggtaaaagt

SEQ ID NO: 3867428 - DNA, 25 bp, Homo sapien
tcacatgctacaaggaaaataaggt

SEQ ID NO: 3867429 - DNA, 25 bp, Homo sapien
ggttctcccatgctaacaaggataa

SEQ ID NO: 3867430 - DNA, 25 bp, Homo sapien
cctgtacccaggtgaaataacagcc

SEQ ID NO: 3867431 - DNA, 25 bp, Homo sapien
caccctgggtgtcttcagtgaaggc

SEQ ID NO: 3867432 - DNA, 25 bp, Homo sapien
tagctcgcctgtactcaagccatga

SEQ ID NO: 3867433 - DNA, 25 bp, Homo sapien
tactgggcaatgcagtgggtacact

SEQ ID NO: 3867434 - DNA, 25 bp, Homo sapien
tgcttaccaccatttatcagaggaa

SEQ ID NO: 3867435 - DNA, 25 bp, Homo sapien
cccttggtactgtcgtcctcgcaat

SEQ ID NO: 3867436 - DNA, 25 bp, Homo sapien
tgttgaactataatcctcagtgctg

SEQ ID NO: 3867437 - DNA, 25 bp, Homo sapien
gactggatcacggagggaaatttct

SEQ ID NO: 3867438 - DNA, 25 bp, Homo sapien
aaaaggtgacctatgatactgttcc

SEQ ID NO: 3867439 - DNA, 25 bp, Homo sapien
caacacgtatagacccatcagaggg

SEQ ID NO: 3867440 - DNA, 25 bp, Homo sapien
taagcatgaatacctcctggcactg

SEQ ID NO: 3867441 - DNA, 25 bp, Homo sapien
tgagactaagggcatcagacacagg

SEQ ID NO: 3867442 - DNA, 25 bp, Homo sapien
ggctgtcaccacagaagcgatccat

SEQ ID NO: 3867443 - DNA, 25 bp, Homo sapien
ggagacagttttccagccatcttaa

SEQ ID NO: 3867444 - DNA, 25 bp, Homo sapien
gaagtcatcggttacattagccaag

SEQ ID NO: 3867445 - DNA, 25 bp, Homo sapien
ggtacagggtaagacacatgctgct

SEQ ID NO: 3867446 - DNA, 25 bp, Homo sapien
ggaatctctgtgatcaaggctaaca

SEQ ID NO: 3867447 - DNA, 25 bp, Homo sapien
ctgcgtctggccgagcacttatttt

SEQ ID NO: 3867448 - DNA, 25 bp, Homo sapien
tcatttaacaggttagagatttgag

SEQ ID NO: 3867449 - DNA, 25 bp, Homo sapien
ttaacaggttagagatttgagaggc

SEQ ID NO: 3867450 - DNA, 25 bp, Homo sapien
gttagagatttgagaggccaaactc

SEQ ID NO: 3867451 - DNA, 25 bp, Homo sapien
gcaagagtcggctgactccacagaa

SEQ ID NO: 3867452 - DNA, 25 bp, Homo sapien
ttggcaaatgctaaaggtgactgat

SEQ ID NO: 3867453 - DNA, 25 bp, Homo sapien
tgataccacacaatcctgcaagagt

SEQ ID NO: 3867454 - DNA, 25 bp, Homo sapien
ggtgactgataccacacaatcctgc

SEQ ID NO: 3867455 - DNA, 25 bp, Homo sapien
ctggctgactcaaacgctgagatac

SEQ ID NO: 3867456 - DNA, 25 bp, Homo sapien
gggagtccaagccaaacctattgct

SEQ ID NO: 3867457 - DNA, 25 bp, Homo sapien
gatttctccacctaagggagtccaa

SEQ ID NO: 3867458 - DNA, 25 bp, Homo sapien
aaacctattgctactcctggctgac

SEQ ID NO: 3867459 - DNA, 25 bp, Homo sapien
ccgagctggccggtcagagttaact

SEQ ID NO: 3867460 - DNA, 25 bp, Homo sapien
tagcgaggtgggcggactccttcat

SEQ ID NO: 3867461 - DNA, 25 bp, Homo sapien
tctttgcgttgctgcggagccagct

SEQ ID NO: 3867462 - DNA, 25 bp, Homo sapien
actccttcatcacgtccccgagctg

SEQ ID NO: 3867463 - DNA, 25 bp, Homo sapien
tcctgaaatgggaactaggatttcc

SEQ ID NO: 3867464 - DNA, 25 bp, Homo sapien
ccagtctccgccatggaaggtaccg

SEQ ID NO: 3867465 - DNA, 25 bp, Homo sapien
tagttcaggcactagtcaaatagtc

SEQ ID NO: 3867466 - DNA, 25 bp, Homo sapien
agtctcgagctcatgccagtctccg

SEQ ID NO: 3867467 - DNA, 25 bp, Homo sapien
tggctacatctgaacgtaccagccg

SEQ ID NO: 3867468 - DNA, 25 bp, Homo sapien
gttactatggtaactccagcagatg

SEQ ID NO: 3867469 - DNA, 25 bp, Homo sapien
cagatggtccatcttttgtgacagc

SEQ ID NO: 3867470 - DNA, 25 bp, Homo sapien
taccagccgcccactaaaaagtgag

SEQ ID NO: 3867471 - DNA, 25 bp, Homo sapien
aaatatgaattagttacaggcataa

SEQ ID NO: 3867472 - DNA, 25 bp, Homo sapien
aaaatatgaattagttacaggcata

SEQ ID NO: 3867473 - DNA, 25 bp, Homo sapien
aatatgaattagttacaggcataaa

SEQ ID NO: 3867474 - DNA, 25 bp, Homo sapien
ttctccgaggaataatgacttgctt

SEQ ID NO: 3867475 - DNA, 25 bp, Homo sapien
ccaggcagcttgctgtgacaaaact

SEQ ID NO: 3867476 - DNA, 25 bp, Homo sapien
taaatcctgtcgtacgttgcctggg

SEQ ID NO: 3867477 - DNA, 25 bp, Homo sapien
gacttgcttcagtcccgctctgtgt

SEQ ID NO: 3867478 - DNA, 25 bp, Homo sapien
ggtctggtcttgacagtaaagccac

SEQ ID NO: 3867479 - DNA, 25 bp, Homo sapien
aggtctggtcttgacagtaaagcca

SEQ ID NO: 3867480 - DNA, 25 bp, Homo sapien
caggtctggtcttgacagtaaagcc

SEQ ID NO: 3867481 - DNA, 25 bp, Homo sapien
gacatcttgcatacccctaatggtg

SEQ ID NO: 3867482 - DNA, 25 bp, Homo sapien
tctggagactgtgctgagaaccact

SEQ ID NO: 3867483 - DNA, 25 bp, Homo sapien
tcccaggatttgattcaggcggcct

SEQ ID NO: 3867484 - DNA, 25 bp, Homo sapien
tctttccagggacagtaaggatccc

SEQ ID NO: 3867485 - DNA, 25 bp, Homo sapien
gattagcgccctctggttgctgaaa

SEQ ID NO: 3867486 - DNA, 25 bp, Homo sapien
gattccatgcttaggaccatcccag

SEQ ID NO: 3867487 - DNA, 25 bp, Homo sapien
ttctgaggttgcaggcatccagggc

SEQ ID NO: 3867488 - DNA, 25 bp, Homo sapien
tagtccccagttagatgacgttgga

SEQ ID NO: 3867489 - DNA, 25 bp, Homo sapien
ggagtttgagaccagcctggccaac

SEQ ID NO: 3867490 - DNA, 25 bp, Homo sapien
gcagtgcagcctgggtgccagagca

SEQ ID NO: 3867491 - DNA, 25 bp, Homo sapien
actgcagtgcagcctgggtgccaga

SEQ ID NO: 3867492 - DNA, 25 bp, Homo sapien
aaggtggccggatcatttgaggttg

SEQ ID NO: 3867493 - DNA, 25 bp, Homo sapien
gataggtcatggttctgcaaggcag

SEQ ID NO: 3867494 - DNA, 25 bp, Homo sapien
gcattactcataatacccaagaggg

SEQ ID NO: 3867495 - DNA, 25 bp, Homo sapien
ggtatcatctattgagggcccagtc

SEQ ID NO: 3867496 - DNA, 25 bp, Homo sapien
tgagaagcccacgatcagcgtgctg

SEQ ID NO: 3867497 - DNA, 25 bp, Homo sapien
tcttgataagcaaagcacctaaagc

SEQ ID NO: 3867498 - DNA, 25 bp, Homo sapien
tagaatcaaaatacgtcacacccat

SEQ ID NO: 3867499 - DNA, 25 bp, Homo sapien
gatgtctccagtggacagtgtagga

SEQ ID NO: 3867500 - DNA, 25 bp, Homo sapien
taaaaacccatgcataaaacgtgga

SEQ ID NO: 3867501 - DNA, 25 bp, Homo sapien
caagtaaggatctctgccccagatg

SEQ ID NO: 3867502 - DNA, 25 bp, Homo sapien
gccccagatgcatggtttgaggtaa

SEQ ID NO: 3867503 - DNA, 25 bp, Homo sapien
tttgaggtaaggttcacagggacca

SEQ ID NO: 3867504 - DNA, 25 bp, Homo sapien
caatcacctagtactggaagctcac

SEQ ID NO: 3867505 - DNA, 25 bp, Homo sapien
caaaatgtcccttagtaatagtcaa

SEQ ID NO: 3867506 - DNA, 25 bp, Homo sapien
ccttagtaatagtcaagttgacctc

SEQ ID NO: 3867507 - DNA, 25 bp, Homo sapien
tttagatttggaaagggaattggca

SEQ ID NO: 3867508 - DNA, 25 bp, Homo sapien
tctttgtagcaaaatgtcccttagt

SEQ ID NO: 3867509 - DNA, 25 bp, Homo sapien
ctacttgatgtttacatctaaaatc

SEQ ID NO: 3867510 - DNA, 25 bp, Homo sapien
ttcatggcaataggaactgaagtac

SEQ ID NO: 3867511 - DNA, 25 bp, Homo sapien
tgagcattagtgttggaccataaat

SEQ ID NO: 3867512 - DNA, 25 bp, Homo sapien
tgcagttttcattgtggtatccacc

SEQ ID NO: 3867513 - DNA, 25 bp, Homo sapien
tagctgctggatacaattttcatgg

SEQ ID NO: 3867514 - DNA, 25 bp, Homo sapien
catatttgcctgttgtctattcaga

SEQ ID NO: 3867515 - DNA, 25 bp, Homo sapien
ttcagacctttttgatatttccttc

SEQ ID NO: 3867516 - DNA, 25 bp, Homo sapien
tatttgcctgttgtctattcagacc

SEQ ID NO: 3867517 - DNA, 25 bp, Homo sapien
ctattcagacctttttgatatttcc

SEQ ID NO: 3867518 - DNA, 25 bp, Homo sapien
caggatgaggatttagcctcaagag

SEQ ID NO: 3867519 - DNA, 25 bp, Homo sapien
cctcaagagtttgtattgcctagaa

SEQ ID NO: 3867520 - DNA, 25 bp, Homo sapien
caggcttgcactgtcatgtcaggat

SEQ ID NO: 3867521 - DNA, 25 bp, Homo sapien
taatggagcaaaaggacacctggtt

SEQ ID NO: 3867522 - DNA, 25 bp, Homo sapien
ctaatggtagaattctatttcattc

SEQ ID NO: 3867523 - DNA, 25 bp, Homo sapien
gtagaattctatttcattcacactc

SEQ ID NO: 3867524 - DNA, 25 bp, Homo sapien
ggtagaattctatttcattcacact

SEQ ID NO: 3867525 - DNA, 25 bp, Homo sapien
aatggtagaattctatttcattcac

SEQ ID NO: 3867526 - DNA, 25 bp, Homo sapien
gttccagaggacaccagtaactgtg

SEQ ID NO: 3867527 - DNA, 25 bp, Homo sapien
tatgaggcataactcttgtcctgaa

SEQ ID NO: 3867528 - DNA, 25 bp, Homo sapien
caacatggtcatctgagtgtttcac

SEQ ID NO: 3867529 - DNA, 25 bp, Homo sapien
tgcttgttataacgaagacttcctc

SEQ ID NO: 3867530 - DNA, 25 bp, Homo sapien
ttcaagtctgttcattagcatgtgt

SEQ ID NO: 3867531 - DNA, 25 bp, Homo sapien
ccggccttgcgtagccatttttatg

SEQ ID NO: 3867532 - DNA, 25 bp, Homo sapien
gcgcccggccttgcgtagccatttt

SEQ ID NO: 3867533 - DNA, 25 bp, Homo sapien
cagatttatattcaagtctgttcat

SEQ ID NO: 3867534 - DNA, 25 bp, Homo sapien
cattatgccttcagtaccatgtagt

SEQ ID NO: 3867535 - DNA, 25 bp, Homo sapien
tatcagcatccagcgaatgttagct

SEQ ID NO: 3867536 - DNA, 25 bp, Homo sapien
cacctaagtgccagtctcggctcta

SEQ ID NO: 3867537 - DNA, 25 bp, Homo sapien
taattactttgaggcacatggcaag

SEQ ID NO: 3867538 - DNA, 25 bp, Homo sapien
gggtatatggcctctggattagtct

SEQ ID NO: 3867539 - DNA, 25 bp, Homo sapien
agtgcggtagacttaactctaatca

SEQ ID NO: 3867540 - DNA, 25 bp, Homo sapien
ctctaatcacagcaaataactgggt

SEQ ID NO: 3867541 - DNA, 25 bp, Homo sapien
cagaagaaggcatcgtcatgcacag

SEQ ID NO: 3867542 - DNA, 25 bp, Homo sapien
ccagaaagtaaaggtgacatcggaa

SEQ ID NO: 3867543 - DNA, 25 bp, Homo sapien
tacagatgagtcacacctttgagct

SEQ ID NO: 3867544 - DNA, 25 bp, Homo sapien
tgacaagccatcttgagtggtcatg

SEQ ID NO: 3867545 - DNA, 25 bp, Homo sapien
tcaatacatagtgctgctgtgtgct

SEQ ID NO: 3867546 - DNA, 25 bp, Homo sapien
gcgactcctcgatctattcatgaag

SEQ ID NO: 3867547 - DNA, 25 bp, Homo sapien
gccattatgaatagcgactgtctag

SEQ ID NO: 3867548 - DNA, 25 bp, Homo sapien
cataggcgacgattgacttgggaag

SEQ ID NO: 3867549 - DNA, 25 bp, Homo sapien
cttgagctaaatggtcataggcgac

SEQ ID NO: 3867550 - DNA, 25 bp, Homo sapien
caccagcagttcttcgcaatcgtac

SEQ ID NO: 3867551 - DNA, 25 bp, Homo sapien
gaaacaggaaaaatacgatggtcac

SEQ ID NO: 3867552 - DNA, 25 bp, Homo sapien
ggaaaaatacgatggtcaccagcag

SEQ ID NO: 3867553 - DNA, 25 bp, Homo sapien
gataggaacacgcaagcaagctgaa

SEQ ID NO: 3867554 - DNA, 25 bp, Homo sapien
cccctgtaaatatgcgtcttctgga

SEQ ID NO: 3867555 - DNA, 25 bp, Homo sapien
cattcgcaacttggctatggagaaa

SEQ ID NO: 3867556 - DNA, 25 bp, Homo sapien
gctctctggatgctgtaatgcccca

SEQ ID NO: 3867557 - DNA, 25 bp, Homo sapien
tgctttgactatgtgttaccgccca

SEQ ID NO: 3867558 - DNA, 25 bp, Homo sapien
aaaggacttatggcatgtaaacatt

SEQ ID NO: 3867559 - DNA, 25 bp, Homo sapien
gaaatgagccgtcagactgctacag

SEQ ID NO: 3867560 - DNA, 25 bp, Homo sapien
aaatgagccgtcagactgctacagc

SEQ ID NO: 3867561 - DNA, 25 bp, Homo sapien
aaaaggacttatggcatgtaaacat

SEQ ID NO: 3867562 - DNA, 25 bp, Homo sapien
tgaagtcctcggatgcagaccgtgt

SEQ ID NO: 3867563 - DNA, 25 bp, Homo sapien
caaagacgattaagggagttccaca

SEQ ID NO: 3867564 - DNA, 25 bp, Homo sapien
cagggagagtcctagcaaaacggat

SEQ ID NO: 3867565 - DNA, 25 bp, Homo sapien
tacagagtgccgattttatacagga

SEQ ID NO: 3867566 - DNA, 25 bp, Homo sapien
gggagggcacaaggccgcggcggcg

SEQ ID NO: 3867567 - DNA, 25 bp, Homo sapien
ggagggcacaaggccgcggcggcgg

SEQ ID NO: 3867568 - DNA, 25 bp, Homo sapien
gactgagtggagttgggaaggatcc

SEQ ID NO: 3867569 - DNA, 25 bp, Homo sapien
agccgctttttctttgggactgagt

SEQ ID NO: 3867570 - DNA, 25 bp, Homo sapien
ggagttgggaaggatccgtggaggc

SEQ ID NO: 3867571 - DNA, 25 bp, Homo sapien
tgggaaggatccgtggaggcgctgg

SEQ ID NO: 3867572 - DNA, 25 bp, Homo sapien
gatattccaggtcgtcttgaagttc

SEQ ID NO: 3867573 - DNA, 25 bp, Homo sapien
gagctcagaagcgtgtctgtagtcc

SEQ ID NO: 3867574 - DNA, 25 bp, Homo sapien
ttccaggtcgtcttgaagttctctc

SEQ ID NO: 3867575 - DNA, 25 bp, Homo sapien
aaaaaagatattccaggtcgtcttg

SEQ ID NO: 3867576 - DNA, 25 bp, Homo sapien
aggatgatcttgaacatgtgacctc

SEQ ID NO: 3867577 - DNA, 25 bp, Homo sapien
ccaggatgatcttgaacatgtgacc

SEQ ID NO: 3867578 - DNA, 25 bp, Homo sapien
tgcccaggatgatcttgaacatgtg

SEQ ID NO: 3867579 - DNA, 25 bp, Homo sapien
ctggcatcagaggcatgcaccaccg

SEQ ID NO: 3867580 - DNA, 25 bp, Homo sapien
cacacagggaagtaacttgagagcc

SEQ ID NO: 3867581 - DNA, 25 bp, Homo sapien
aggcttctctgacaagggagaggca

SEQ ID NO: 3867582 - DNA, 25 bp, Homo sapien
ttgagagccgtgtccaacagcagag

SEQ ID NO: 3867583 - DNA, 25 bp, Homo sapien
cctgctgtgcctagcccagcgaagt

SEQ ID NO: 3867584 - DNA, 25 bp, Homo sapien
gatggcatgcagtgggatggtgaag

SEQ ID NO: 3867585 - DNA, 25 bp, Homo sapien
cgggcagtgtggatggcatgcagtg

SEQ ID NO: 3867586 - DNA, 25 bp, Homo sapien
gcttaaatcgacacacaaattggga

SEQ ID NO: 3867587 - DNA, 25 bp, Homo sapien
gagagttcctcctacacagaccttg

SEQ ID NO: 3867588 - DNA, 25 bp, Homo sapien
gaggcttctcaaccaaatgggattc

SEQ ID NO: 3867589 - DNA, 25 bp, Homo sapien
tcttgccccggcctagggagttgct

SEQ ID NO: 3867590 - DNA, 25 bp, Homo sapien
tcaagggtcatcacagcttccaaac

SEQ ID NO: 3867591 - DNA, 25 bp, Homo sapien
ggctcttggctgttgcgtccatcaa

SEQ ID NO: 3867592 - DNA, 25 bp, Homo sapien
gctgttgcgtccatcaagactctca

SEQ ID NO: 3867593 - DNA, 25 bp, Homo sapien
cccacagacagtgcccctgggatgt

SEQ ID NO: 3867594 - DNA, 25 bp, Homo sapien
ttttgggaaaagcacccacatgtgc

SEQ ID NO: 3867595 - DNA, 25 bp, Homo sapien
caaagagagaggtggttctaccccg

SEQ ID NO: 3867596 - DNA, 25 bp, Homo sapien
gctgtgttagcagttaccatggaag

SEQ ID NO: 3867597 - DNA, 25 bp, Homo sapien
ttcacttttgtcgagggtccgctga

SEQ ID NO: 3867598 - DNA, 25 bp, Homo sapien
tatccaggagagccgtaattattat

SEQ ID NO: 3867599 - DNA, 25 bp, Homo sapien
caggagagccgtaattattatttac

SEQ ID NO: 3867600 - DNA, 25 bp, Homo sapien
ttatccaggagagccgtaattatta

SEQ ID NO: 3867601 - DNA, 25 bp, Homo sapien
tccaggagagccgtaattattattt

SEQ ID NO: 3867602 - DNA, 25 bp, Homo sapien
tccgtggcgttggaccttaggagcc

SEQ ID NO: 3867603 - DNA, 25 bp, Homo sapien
cagctccgtggcgttggaccttagg

SEQ ID NO: 3867604 - DNA, 25 bp, Homo sapien
ctgcagctccgtggcgttggacctt

SEQ ID NO: 3867605 - DNA, 25 bp, Homo sapien
ttggaccttaggagccggcgcagca

SEQ ID NO: 3867606 - DNA, 25 bp, Homo sapien
agcttgcggggactcgcccgggcgg

SEQ ID NO: 3867607 - DNA, 25 bp, Homo sapien
ggcagcttgcggggactcgcccggg

SEQ ID NO: 3867608 - DNA, 25 bp, Homo sapien
tcgtgctcccgcgagaactgcctcc

SEQ ID NO: 3867609 - DNA, 25 bp, Homo sapien
cgtgctcccgcgagaactgcctcca

SEQ ID NO: 3867610 - DNA, 25 bp, Homo sapien
gagggagatccgcaggtagctgtgc

SEQ ID NO: 3867611 - DNA, 25 bp, Homo sapien
agggagatccgcaggtagctgtgct

SEQ ID NO: 3867612 - DNA, 25 bp, Homo sapien
gcagtactgacatctgaggttgcac

SEQ ID NO: 3867613 - DNA, 25 bp, Homo sapien
agggttgtagcctggctcattggcc

SEQ ID NO: 3867614 - DNA, 25 bp, Homo sapien
ggatgagcggctctccgcccatgag

SEQ ID NO: 3867615 - DNA, 25 bp, Homo sapien
gagccagatcttttcgacgccttcc

SEQ ID NO: 3867616 - DNA, 25 bp, Homo sapien
tgtccacctcgtccggctggatgag

SEQ ID NO: 3867617 - DNA, 25 bp, Homo sapien
ggagttcatcctcgttaaggcctcg

SEQ ID NO: 3867618 - DNA, 25 bp, Homo sapien
gagttcatcctcgttaaggcctcgc

SEQ ID NO: 3867619 - DNA, 25 bp, Homo sapien
tatgaaggccacgtccagggggagg

SEQ ID NO: 3867620 - DNA, 25 bp, Homo sapien
ctatgaaggccacgtccagggggag

SEQ ID NO: 3867621 - DNA, 25 bp, Homo sapien
tctatgaaggccacgtccaggggga

SEQ ID NO: 3867622 - DNA, 25 bp, Homo sapien
cttgttgccatcaaagggcatgtac

SEQ ID NO: 3867623 - DNA, 25 bp, Homo sapien
acttgttgccatcaaagggcatgta

SEQ ID NO: 3867624 - DNA, 25 bp, Homo sapien
aagttccacttgttgccatcaaagg

SEQ ID NO: 3867625 - DNA, 25 bp, Homo sapien
cttcttgaagttccacttgttgcca

SEQ ID NO: 3867626 - DNA, 25 bp, Homo sapien
tgaagctgatctggccttggaagcc

SEQ ID NO: 3867627 - DNA, 25 bp, Homo sapien
cagggattttaaaggccttggctgt

SEQ ID NO: 3867628 - DNA, 25 bp, Homo sapien
ggccttggctgtcctggattcctgc

SEQ ID NO: 3867629 - DNA, 25 bp, Homo sapien
tcctggattcctgctctgacagctt

SEQ ID NO: 3867630 - DNA, 25 bp, Homo sapien
tcccgtcagctgtgatttgcaggtg

SEQ ID NO: 3867631 - DNA, 25 bp, Homo sapien
cccgtcagctgtgatttgcaggtgg

SEQ ID NO: 3867632 - DNA, 25 bp, Homo sapien
ttcccgtcagctgtgatttgcaggt

SEQ ID NO: 3867633 - DNA, 25 bp, Homo sapien
gatcacagtgatcccgtagagatac

SEQ ID NO: 3867634 - DNA, 25 bp, Homo sapien
gaggccccagatcacagtgatcccg

SEQ ID NO: 3867635 - DNA, 25 bp, Homo sapien
cagatcacagtgatcccgtagagat

SEQ ID NO: 3867636 - DNA, 25 bp, Homo sapien
gccccagatcacagtgatcccgtag

SEQ ID NO: 3867637 - DNA, 25 bp, Homo sapien
aatactgaacatgcctgcatgctgc

SEQ ID NO: 3867638 - DNA, 25 bp, Homo sapien
aaatactgaacatgcctgcatgctg

SEQ ID NO: 3867639 - DNA, 25 bp, Homo sapien
aaaatgtcttgatgggggtcaccca

SEQ ID NO: 3867640 - DNA, 25 bp, Homo sapien
ctgaaaggagccagaacctagctgc

SEQ ID NO: 3867641 - DNA, 25 bp, Homo sapien
gaaaggagccagaacctagctgctg

SEQ ID NO: 3867642 - DNA, 25 bp, Homo sapien
ctggatctcagaccttgaacatgga

SEQ ID NO: 3867643 - DNA, 25 bp, Homo sapien
catctgactggagaaattcattctg

SEQ ID NO: 3867644 - DNA, 25 bp, Homo sapien
aatccacatgagttagttgttctga

SEQ ID NO: 3867645 - DNA, 25 bp, Homo sapien
tccaaatccacatgagttagttgtt

SEQ ID NO: 3867646 - DNA, 25 bp, Homo sapien
gagttagttgttctgagtttagctg

SEQ ID NO: 3867647 - DNA, 25 bp, Homo sapien
atgagttagttgttctgagtttagc

SEQ ID NO: 3867648 - DNA, 25 bp, Homo sapien
aggccacagccaaccactctgtgtc

SEQ ID NO: 3867649 - DNA, 25 bp, Homo sapien
ggccacagccaaccactctgtgtct

SEQ ID NO: 3867650 - DNA, 25 bp, Homo sapien
tgaggccacagccaaccactctgtg

SEQ ID NO: 3867651 - DNA, 25 bp, Homo sapien
gaggccacagccaaccactctgtgt

SEQ ID NO: 3867652 - DNA, 25 bp, Homo sapien
cctggcaagatgcccagatctccac

SEQ ID NO: 3867653 - DNA, 25 bp, Homo sapien
gcctggcaagatgcccagatctcca

SEQ ID NO: 3867654 - DNA, 25 bp, Homo sapien
agcctggcaagatgcccagatctcc

SEQ ID NO: 3867655 - DNA, 25 bp, Homo sapien
gcgatggagcatccatgctcagctc

SEQ ID NO: 3867656 - DNA, 25 bp, Homo sapien
ccagctccatgcagccggacccttc

SEQ ID NO: 3867657 - DNA, 25 bp, Homo sapien
agatttcaaaacataggagggcgat

SEQ ID NO: 3867658 - DNA, 25 bp, Homo sapien
acataggagggcgatggagcatcca

SEQ ID NO: 3867659 - DNA, 25 bp, Homo sapien
gtgaacaattgtaaatgtcatatgt

SEQ ID NO: 3867660 - DNA, 25 bp, Homo sapien
tcagaagagcacatgcagaagtgaa

SEQ ID NO: 3867661 - DNA, 25 bp, Homo sapien
catgcagaagtgaacaattgtaaat

SEQ ID NO: 3867662 - DNA, 25 bp, Homo sapien
cagaagtgaacaattgtaaatgtca

SEQ ID NO: 3867663 - DNA, 25 bp, Homo sapien
tgcattggctgggaggcgggaactg

SEQ ID NO: 3867664 - DNA, 25 bp, Homo sapien
caccagcagttgcagcctgagatgg

SEQ ID NO: 3867665 - DNA, 25 bp, Homo sapien
aaacaaagcaggatggtggaggcgc

SEQ ID NO: 3867666 - DNA, 25 bp, Homo sapien
gcgggaactgggttggtgggatgca

SEQ ID NO: 3867667 - DNA, 25 bp, Homo sapien
tctgcagctcccgtcaaaggcaggc

SEQ ID NO: 3867668 - DNA, 25 bp, Homo sapien
gcagctcccgtcaaaggcaggcagg

SEQ ID NO: 3867669 - DNA, 25 bp, Homo sapien
tagtctgcagctcccgtcaaaggca

SEQ ID NO: 3867670 - DNA, 25 bp, Homo sapien
cactgtagtctgcagctcccgtcaa

SEQ ID NO: 3867671 - DNA, 25 bp, Homo sapien
gggcaatgccaacaaactcagactc

SEQ ID NO: 3867672 - DNA, 25 bp, Homo sapien
ccagggcaatgccaacaaactcaga

SEQ ID NO: 3867673 - DNA, 25 bp, Homo sapien
ttccagggcaatgccaacaaactca

SEQ ID NO: 3867674 - DNA, 25 bp, Homo sapien
gtttccagggcaatgccaacaaact

SEQ ID NO: 3867675 - DNA, 25 bp, Homo sapien
gctgaaataccgagtgattggagtc

SEQ ID NO: 3867676 - DNA, 25 bp, Homo sapien
gtgaagagaaggactggcctaactg

SEQ ID NO: 3867677 - DNA, 25 bp, Homo sapien
aagagaaggactggcctaactgtgc

SEQ ID NO: 3867678 - DNA, 25 bp, Homo sapien
gcctaactgtgctgaaataccgagt

SEQ ID NO: 3867679 - DNA, 25 bp, Homo sapien
gcatttggacgcatggtccctgggt

SEQ ID NO: 3867680 - DNA, 25 bp, Homo sapien
accctggtgtaatccatttccatcc

SEQ ID NO: 3867681 - DNA, 25 bp, Homo sapien
tcagtgcacaccctggtgtaatcca

SEQ ID NO: 3867682 - DNA, 25 bp, Homo sapien
tttccatccttgtgcacagccagcc

SEQ ID NO: 3867683 - DNA, 25 bp, Homo sapien
ctcacttgggtatgggaaggtctcc

SEQ ID NO: 3867684 - DNA, 25 bp, Homo sapien
gatacagcagtgaccgaaagacatg

SEQ ID NO: 3867685 - DNA, 25 bp, Homo sapien
tgagccagacattatggtgggcact

SEQ ID NO: 3867686 - DNA, 25 bp, Homo sapien
cacagcctaggagaagggctcattt

SEQ ID NO: 3867687 - DNA, 25 bp, Homo sapien
aaatgattgcgaccagaaaagaagc

SEQ ID NO: 3867688 - DNA, 25 bp, Homo sapien
caaaacatcgaacaattagggtctg

SEQ ID NO: 3867689 - DNA, 25 bp, Homo sapien
tagagccctcagagcaacacatggg

SEQ ID NO: 3867690 - DNA, 25 bp, Homo sapien
aaactacatgggaacggcagccaga

SEQ ID NO: 3867691 - DNA, 25 bp, Homo sapien
cttgtactgtccctccgtgcagctg

SEQ ID NO: 3867692 - DNA, 25 bp, Homo sapien
cagcttgtactgtccctccgtgcag

SEQ ID NO: 3867693 - DNA, 25 bp, Homo sapien
tggcagcttgtactgtccctccgtg

SEQ ID NO: 3867694 - DNA, 25 bp, Homo sapien
cctctggcagcttgtactgtccctc

SEQ ID NO: 3867695 - DNA, 25 bp, Homo sapien
tccaggttctgaacgcactccttta

SEQ ID NO: 3867696 - DNA, 25 bp, Homo sapien
gtgctaagccgtcatcctccaggtt

SEQ ID NO: 3867697 - DNA, 25 bp, Homo sapien
tctccaagtgctaagccgtcatcct

SEQ ID NO: 3867698 - DNA, 25 bp, Homo sapien
ggtcttatctccaagtgctaagccg

SEQ ID NO: 3867699 - DNA, 25 bp, Homo sapien
tcagaagccattttccaccctgggg

SEQ ID NO: 3867700 - DNA, 25 bp, Homo sapien
cagaagccattttccaccctggggg

SEQ ID NO: 3867701 - DNA, 25 bp, Homo sapien
catctcctgagcttagtgtccgtgg

SEQ ID NO: 3867702 - DNA, 25 bp, Homo sapien
tgcagatggacctctctccgctaga

SEQ ID NO: 3867703 - DNA, 25 bp, Homo sapien
gctttgagcacttgccactctggct

SEQ ID NO: 3867704 - DNA, 25 bp, Homo sapien
tccccatgatgttgtgaccgcacag

SEQ ID NO: 3867705 - DNA, 25 bp, Homo sapien
ggcagggcagagatgtcactctcat

SEQ ID NO: 3867706 - DNA, 25 bp, Homo sapien
gctgggtgattcctgggcctacatt

SEQ ID NO: 3867707 - DNA, 25 bp, Homo sapien
tctcccacttcgtggcatccatgta

SEQ ID NO: 3867708 - DNA, 25 bp, Homo sapien
tccatgtaaagtaggtggcagggca

SEQ ID NO: 3867709 - DNA, 25 bp, Homo sapien
ctaatgtggaactggttgtccattg

SEQ ID NO: 3867710 - DNA, 25 bp, Homo sapien
ggttgtccattgtttgggcctatgg

SEQ ID NO: 3867711 - DNA, 25 bp, Homo sapien
taatgtggaactggttgtccattgt

SEQ ID NO: 3867712 - DNA, 25 bp, Homo sapien
cattgtttgggcctatggccaagtc

SEQ ID NO: 3867713 - DNA, 25 bp, Homo sapien
taccaaggattgtaaactatgggcc

SEQ ID NO: 3867714 - DNA, 25 bp, Homo sapien
tctcgtaagctgtaaactgggtaaa

SEQ ID NO: 3867715 - DNA, 25 bp, Homo sapien
taaatgtggaacatagccgcacaca

SEQ ID NO: 3867716 - DNA, 25 bp, Homo sapien
gtgggttccatcctaactttgtgca

SEQ ID NO: 3867717 - DNA, 25 bp, Homo sapien
tagttgatctgtagccttagggtcg

SEQ ID NO: 3867718 - DNA, 25 bp, Homo sapien
tctggattcatgaactttacttcac

SEQ ID NO: 3867719 - DNA, 25 bp, Homo sapien
ttttgtcagtccatcttctggattc

SEQ ID NO: 3867720 - DNA, 25 bp, Homo sapien
tacttcaccctgctgaacttaattt

SEQ ID NO: 3867721 - DNA, 25 bp, Homo sapien
aagggatgtcgcttatactccaaag

SEQ ID NO: 3867722 - DNA, 25 bp, Homo sapien
tctagcctgttgcttaagggatgtc

SEQ ID NO: 3867723 - DNA, 25 bp, Homo sapien
gaatcctttggtgtagtctagcctg

SEQ ID NO: 3867724 - DNA, 25 bp, Homo sapien
gtctgcttcacaaagggtcccagaa

SEQ ID NO: 3867725 - DNA, 25 bp, Homo sapien
ctcagagaactctgggcaagacact

SEQ ID NO: 3867726 - DNA, 25 bp, Homo sapien
gaacaacacccttcaggataggtat

SEQ ID NO: 3867727 - DNA, 25 bp, Homo sapien
cactccatgggttttgttaattagc

SEQ ID NO: 3867728 - DNA, 25 bp, Homo sapien
ggtattagctatcctgaaactctcc

SEQ ID NO: 3867729 - DNA, 25 bp, Homo sapien
ggtggtttcaccagtctacaaagtg

SEQ ID NO: 3867730 - DNA, 25 bp, Homo sapien
gacctacacccagcaatgaacaaga

SEQ ID NO: 3867731 - DNA, 25 bp, Homo sapien
gaattcctttggcaggttctatacc

SEQ ID NO: 3867732 - DNA, 25 bp, Homo sapien
cagcccaaaggttagatacaagatg

SEQ ID NO: 3867733 - DNA, 25 bp, Homo sapien
aacagttattggacatctgcccagg

SEQ ID NO: 3867734 - DNA, 25 bp, Homo sapien
acagacactcggtgatggagctgca

SEQ ID NO: 3867735 - DNA, 25 bp, Homo sapien
cagagatccccaccatatacagaaa

SEQ ID NO: 3867736 - DNA, 25 bp, Homo sapien
cctactaattaaggagagccaactg

SEQ ID NO: 3867737 - DNA, 25 bp, Homo sapien
gaactttgccacaggtaacttccca

SEQ ID NO: 3867738 - DNA, 25 bp, Homo sapien
gttacagcttaaccatggacccata

SEQ ID NO: 3867739 - DNA, 25 bp, Homo sapien
gacccataaggtgtttcaaagagat

SEQ ID NO: 3867740 - DNA, 25 bp, Homo sapien
caagacaggaaatcggaagctagcc

SEQ ID NO: 3867741 - DNA, 25 bp, Homo sapien
tgacaaaatatctgatttaagtgct

SEQ ID NO: 3867742 - DNA, 25 bp, Homo sapien
tagctcattagttttagtttttctg

SEQ ID NO: 3867743 - DNA, 25 bp, Homo sapien
caacacatacacagacagaatatcc

SEQ ID NO: 3867744 - DNA, 25 bp, Homo sapien
catacacagacagaatatccagtag

SEQ ID NO: 3867745 - DNA, 25 bp, Homo sapien
tcattcattggttagagtgcagggt

SEQ ID NO: 3867746 - DNA, 25 bp, Homo sapien
aacctcaaatctgactccctaaggg

SEQ ID NO: 3867747 - DNA, 25 bp, Homo sapien
ccactagatgacgagacatgaggaa

SEQ ID NO: 3867748 - DNA, 25 bp, Homo sapien
aagtgggccaaagtgtagatatcat

SEQ ID NO: 3867749 - DNA, 25 bp, Homo sapien
gaacgagtgtcccagtcattttaaa

SEQ ID NO: 3867750 - DNA, 25 bp, Homo sapien
cagtaaggttatgtgagggcttcca

SEQ ID NO: 3867751 - DNA, 25 bp, Homo sapien
caattcttaaaagacctgggaagca

SEQ ID NO: 3867752 - DNA, 25 bp, Homo sapien
gtctgtaagacctaatgaagctgag

SEQ ID NO: 3867753 - DNA, 25 bp, Homo sapien
ccagtgtaagctctttgccacctgc

SEQ ID NO: 3867754 - DNA, 25 bp, Homo sapien
ctttcagtcgttgcggatgaacatc

SEQ ID NO: 3867755 - DNA, 25 bp, Homo sapien
ttatccagtgtaagctctttgccac

SEQ ID NO: 3867756 - DNA, 25 bp, Homo sapien
acacctttcagtcgttgcggatgaa

SEQ ID NO: 3867757 - DNA, 25 bp, Homo sapien
tacagtgcacccatgaaactcaggc

SEQ ID NO: 3867758 - DNA, 25 bp, Homo sapien
aagtccatagcaagaaactgggtgc

SEQ ID NO: 3867759 - DNA, 25 bp, Homo sapien
taacagtcagtgaagcctggctggt

SEQ ID NO: 3867760 - DNA, 25 bp, Homo sapien
tagccagtgccctaaacagtaccag

SEQ ID NO: 3867761 - DNA, 25 bp, Homo sapien
tttttgacctgagctttggactgcc

SEQ ID NO: 3867762 - DNA, 25 bp, Homo sapien
cttgaagagggcatttgaaggcccc

SEQ ID NO: 3867763 - DNA, 25 bp, Homo sapien
tgaaggccccagtggcgtacagtac

SEQ ID NO: 3867764 - DNA, 25 bp, Homo sapien
agtctcagtgctagttcatccccag

SEQ ID NO: 3867765 - DNA, 25 bp, Homo sapien
agcatggtatgtgcttgacgagtgt

SEQ ID NO: 3867766 - DNA, 25 bp, Homo sapien
agcatatggcatgggagaatggaat

SEQ ID NO: 3867767 - DNA, 25 bp, Homo sapien
gcttgacgagtgtttgggtaaataa

SEQ ID NO: 3867768 - DNA, 25 bp, Homo sapien
taaatgagcatatggcatgggagaa

SEQ ID NO: 3867769 - DNA, 25 bp, Homo sapien
tgggcctgaccaggttacaaatgaa

SEQ ID NO: 3867770 - DNA, 25 bp, Homo sapien
gtccatgtcaagatccagcccctgg

SEQ ID NO: 3867771 - DNA, 25 bp, Homo sapien
cagttaatttctagtgcgtgagcat

SEQ ID NO: 3867772 - DNA, 25 bp, Homo sapien
gaattctggaggcatacggtccatg

SEQ ID NO: 3867773 - DNA, 25 bp, Homo sapien
tggctgcatatccaagcttgctgct

SEQ ID NO: 3867774 - DNA, 25 bp, Homo sapien
tttgcacaagggcagaagaaggggc

SEQ ID NO: 3867775 - DNA, 25 bp, Homo sapien
gaagaaggggctggctgcatatcca

SEQ ID NO: 3867776 - DNA, 25 bp, Homo sapien
gggctggctgcatatccaagcttgc

SEQ ID NO: 3867777 - DNA, 25 bp, Homo sapien
tgggtgtgccgagcaacattccacg

SEQ ID NO: 3867778 - DNA, 25 bp, Homo sapien
gagcaacattccacgtgcacatctg

SEQ ID NO: 3867779 - DNA, 25 bp, Homo sapien
attggttgggtgtgccgagcaacat

SEQ ID NO: 3867780 - DNA, 25 bp, Homo sapien
cattccacgtgcacatctgtctggt

SEQ ID NO: 3867781 - DNA, 25 bp, Homo sapien
gtgaccgatcacctgtcccgcttcc

SEQ ID NO: 3867782 - DNA, 25 bp, Homo sapien
ggtgaccgatcacctgtcccgcttc

SEQ ID NO: 3867783 - DNA, 25 bp, Homo sapien
tgacgtctgatgccaagctgatggc

SEQ ID NO: 3867784 - DNA, 25 bp, Homo sapien
gacgtctgatgccaagctgatggca

SEQ ID NO: 3867785 - DNA, 25 bp, Homo sapien
cgtctgatgccaagctgatggcatc

SEQ ID NO: 3867786 - DNA, 25 bp, Homo sapien
ctgatgccaagctgatggcatcaca

SEQ ID NO: 3867787 - DNA, 25 bp, Homo sapien
ggtgaccaatcacctgtcccacaac

SEQ ID NO: 3867788 - DNA, 25 bp, Homo sapien
aagatgcacgttcttccggaaactg

SEQ ID NO: 3867789 - DNA, 25 bp, Homo sapien
gggcttcttgcaagatgcacgttct

SEQ ID NO: 3867790 - DNA, 25 bp, Homo sapien
cacgttcttccggaaactgcaagtt

SEQ ID NO: 3867791 - DNA, 25 bp, Homo sapien
attctgtgccgggcagcagattcca

SEQ ID NO: 3867792 - DNA, 25 bp, Homo sapien
aaaagcaactggtatctcatcagtg

SEQ ID NO: 3867793 - DNA, 25 bp, Homo sapien
aaagccaagcaaagccggagagaga

SEQ ID NO: 3867794 - DNA, 25 bp, Homo sapien
aactggtatctcatcagtgctgtgt

SEQ ID NO: 3867795 - DNA, 25 bp, Homo sapien
tgaaatgaggtaacaggtggtgaaa

SEQ ID NO: 3867796 - DNA, 25 bp, Homo sapien
cgccacggacccaaggcgccctgag

SEQ ID NO: 3867797 - DNA, 25 bp, Homo sapien
ctggcgccgcgagaacagcaggtgg

SEQ ID NO: 3867798 - DNA, 25 bp, Homo sapien
agcaggtggcgccacggacccaagg

SEQ ID NO: 3867799 - DNA, 25 bp, Homo sapien
tggcgccacggacccaaggcgccct

SEQ ID NO: 3867800 - DNA, 25 bp, Homo sapien
tggtttgcatcccaattcggccttg

SEQ ID NO: 3867801 - DNA, 25 bp, Homo sapien
tgccagtcacccacgtccatttggt

SEQ ID NO: 3867802 - DNA, 25 bp, Homo sapien
ccatttgtgggaggcgttttctgcc

SEQ ID NO: 3867803 - DNA, 25 bp, Homo sapien
tctacctcgcgctcgggtggaaaga

SEQ ID NO: 3867804 - DNA, 25 bp, Homo sapien
tgccaccggccatgaggatggtcca

SEQ ID NO: 3867805 - DNA, 25 bp, Homo sapien
gatgccaccggccatgaggatggtc

SEQ ID NO: 3867806 - DNA, 25 bp, Homo sapien
caccggccatgaggatggtccacct

SEQ ID NO: 3867807 - DNA, 25 bp, Homo sapien
tcaggggatgccaccggccatgagg

SEQ ID NO: 3867808 - DNA, 25 bp, Homo sapien
gtcatatcgtattagggctcaccca

SEQ ID NO: 3867809 - DNA, 25 bp, Homo sapien
tcctctgtgcttgtcggcgtcctaa

SEQ ID NO: 3867810 - DNA, 25 bp, Homo sapien
caaacacagtcccattttgaggtac

SEQ ID NO: 3867811 - DNA, 25 bp, Homo sapien
tttgggaagacacaagctagcccgt

SEQ ID NO: 3867812 - DNA, 25 bp, Homo sapien
cttgagacaatcaccgagagccctg

SEQ ID NO: 3867813 - DNA, 25 bp, Homo sapien
tcaagaggacaagtatctaagccct

SEQ ID NO: 3867814 - DNA, 25 bp, Homo sapien
ctaaggaaacaagaggccctcagct

SEQ ID NO: 3867815 - DNA, 25 bp, Homo sapien
tcccagtgatcttaccaggacagtt

SEQ ID NO: 3867816 - DNA, 25 bp, Homo sapien
atgaaaacaaagacacaatgtacca

SEQ ID NO: 3867817 - DNA, 25 bp, Homo sapien
gacacaatgtaccagaatctgtggg

SEQ ID NO: 3867818 - DNA, 25 bp, Homo sapien
atgtaccagaatctgtgggacacat

SEQ ID NO: 3867819 - DNA, 25 bp, Homo sapien
gtgggacacatttaaagcagcgtgt

SEQ ID NO: 3867820 - DNA, 25 bp, Homo sapien
cacatgttcaaggaagtgcctctat

SEQ ID NO: 3867821 - DNA, 25 bp, Homo sapien
agagccccttgctcgcacaaattgc

SEQ ID NO: 3867822 - DNA, 25 bp, Homo sapien
ggagaagagccccttgctcgcacaa

SEQ ID NO: 3867823 - DNA, 25 bp, Homo sapien
caaggaagtgcctctataagatggt

SEQ ID NO: 3867824 - DNA, 25 bp, Homo sapien
caccgcacccggacaagtcataatc

SEQ ID NO: 3867825 - DNA, 25 bp, Homo sapien
cagcattgggagcagaaggaaggtg

SEQ ID NO: 3867826 - DNA, 25 bp, Homo sapien
cattgggagcagaaggaaggtggag

SEQ ID NO: 3867827 - DNA, 25 bp, Homo sapien
gcagaaggaaggtggagaaagccat

SEQ ID NO: 3867828 - DNA, 25 bp, Homo sapien
atggtctgcagagccagcattggga

SEQ ID NO: 3867829 - DNA, 25 bp, Homo sapien
aaagtaagccaaaccagtgctcttg

SEQ ID NO: 3867830 - DNA, 25 bp, Homo sapien
tctggtccatgctcaaagtaagcca

SEQ ID NO: 3867831 - DNA, 25 bp, Homo sapien
ttctccactccttgcatctggtcca

SEQ ID NO: 3867832 - DNA, 25 bp, Homo sapien
taagccaaaccagtgctcttgtgca

SEQ ID NO: 3867833 - DNA, 25 bp, Homo sapien
gtggaacccaaaccacagggaggca

SEQ ID NO: 3867834 - DNA, 25 bp, Homo sapien
tccaattgagtggaacccaaaccac

SEQ ID NO: 3867835 - DNA, 25 bp, Homo sapien
aatatttctccaattgagtggaacc

SEQ ID NO: 3867836 - DNA, 25 bp, Homo sapien
tggaacccaaaccacagggaggcag

SEQ ID NO: 3867837 - DNA, 25 bp, Homo sapien
gaactaagagtaagtgattcactga

SEQ ID NO: 3867838 - DNA, 25 bp, Homo sapien
ctgtgtgggacatattggttgaaga

SEQ ID NO: 3867839 - DNA, 25 bp, Homo sapien
tgctttctatgctatgaactaagag

SEQ ID NO: 3867840 - DNA, 25 bp, Homo sapien
acttcctactccttatctcttagag

SEQ ID NO: 3867841 - DNA, 25 bp, Homo sapien
tgtgttgagcacatcgtggccacat

SEQ ID NO: 3867842 - DNA, 25 bp, Homo sapien
tgttgagcacatcgtggccacattc

SEQ ID NO: 3867843 - DNA, 25 bp, Homo sapien
tgagcacatcgtggccacattccac

SEQ ID NO: 3867844 - DNA, 25 bp, Homo sapien
ctgtgttgagcacatcgtggccaca

SEQ ID NO: 3867845 - DNA, 25 bp, Homo sapien
agcatccaatctcccaagcccaagt

SEQ ID NO: 3867846 - DNA, 25 bp, Homo sapien
tgcccgaaattgtggctgacccctg

SEQ ID NO: 3867847 - DNA, 25 bp, Homo sapien
cattgttctcccatgatatgcccga

SEQ ID NO: 3867848 - DNA, 25 bp, Homo sapien
ggtaacgtccacaacttcataacag

SEQ ID NO: 3867849 - DNA, 25 bp, Homo sapien
ggtattggtggcaattactgtgtag

SEQ ID NO: 3867850 - DNA, 25 bp, Homo sapien
tttcccaaggttcctgaagtgtctg

SEQ ID NO: 3867851 - DNA, 25 bp, Homo sapien
ggaaggtcagcatggtattggtggc

SEQ ID NO: 3867852 - DNA, 25 bp, Homo sapien
tggcaattactgtgtagtcactgag

SEQ ID NO: 3867853 - DNA, 25 bp, Homo sapien
tctgtgctctgagtagggccagtga

SEQ ID NO: 3867854 - DNA, 25 bp, Homo sapien
tgatccatatcaaccatgtcactgg

SEQ ID NO: 3867855 - DNA, 25 bp, Homo sapien
tatgagttgatccatatcaaccatg

SEQ ID NO: 3867856 - DNA, 25 bp, Homo sapien
ccagtgatgggcttgaatatctgca

SEQ ID NO: 3867857 - DNA, 25 bp, Homo sapien
ggggacaggctgaaatcactcgcca

SEQ ID NO: 3867858 - DNA, 25 bp, Homo sapien
tggggacaggctgaaatcactcgcc

SEQ ID NO: 3867859 - DNA, 25 bp, Homo sapien
gagactgcaccacgactgggatggc

SEQ ID NO: 3867860 - DNA, 25 bp, Homo sapien
tctccagtagagacatgaaagcggg

SEQ ID NO: 3867861 - DNA, 25 bp, Homo sapien
tggaatctccagtagagacatgaaa

SEQ ID NO: 3867862 - DNA, 25 bp, Homo sapien
gcattcaggtaacccatcttacttg

SEQ ID NO: 3867863 - DNA, 25 bp, Homo sapien
ggaaagagctagtgagctcatctga

SEQ ID NO: 3867864 - DNA, 25 bp, Homo sapien
tttataagtcttctctcctatatga

SEQ ID NO: 3867865 - DNA, 25 bp, Homo sapien
tcacatagtatcatggcgacagtgg

SEQ ID NO: 3867866 - DNA, 25 bp, Homo sapien
tgatgcctgtgtgctcgaggaaaga

SEQ ID NO: 3867867 - DNA, 25 bp, Homo sapien
caagcccacctacattctgcagcat

SEQ ID NO: 3867868 - DNA, 25 bp, Homo sapien
ttggctaagtcctgctgccaagacc

SEQ ID NO: 3867869 - DNA, 25 bp, Homo sapien
ctgccaggtggtctccttggctaag

SEQ ID NO: 3867870 - DNA, 25 bp, Homo sapien
aagacccaagcccacctacattctg

SEQ ID NO: 3867871 - DNA, 25 bp, Homo sapien
ctcaatcctctccataggcatctga

SEQ ID NO: 3867872 - DNA, 25 bp, Homo sapien
cctctccataggcatctgaatattg

SEQ ID NO: 3867873 - DNA, 25 bp, Homo sapien
tgaagctgctgtaagtcttcttttc

SEQ ID NO: 3867874 - DNA, 25 bp, Homo sapien
ttccccctcaatcctctccataggc

SEQ ID NO: 3867875 - DNA, 25 bp, Homo sapien
taaggaggattcaccatgtcacatc

SEQ ID NO: 3867876 - DNA, 25 bp, Homo sapien
ggatatcaaccatcacctcatagag

SEQ ID NO: 3867877 - DNA, 25 bp, Homo sapien
gacaggtccatgttaacagggccag

SEQ ID NO: 3867878 - DNA, 25 bp, Homo sapien
aaaatgtctgcattcctgggccggc

SEQ ID NO: 3867879 - DNA, 25 bp, Homo sapien
tgcctattttgatacagtaccatgt

SEQ ID NO: 3867880 - DNA, 25 bp, Homo sapien
tattttgatacagtaccatgttgtt

SEQ ID NO: 3867881 - DNA, 25 bp, Homo sapien
agtctggtaatgtggtgcctccaga

SEQ ID NO: 3867882 - DNA, 25 bp, Homo sapien
ttgtttgggtaaccatagccttgta

SEQ ID NO: 3867883 - DNA, 25 bp, Homo sapien
catttaatggcaatgcttccaagaa

SEQ ID NO: 3867884 - DNA, 25 bp, Homo sapien
ctggtagcaaactcgcggcatccat

SEQ ID NO: 3867885 - DNA, 25 bp, Homo sapien
ccatctctggcatttaatggcaatg

SEQ ID NO: 3867886 - DNA, 25 bp, Homo sapien
agctggtagcaaactcgcggcatcc

SEQ ID NO: 3867887 - DNA, 25 bp, Homo sapien
catcacctcggcgtagagctgtcct

SEQ ID NO: 3867888 - DNA, 25 bp, Homo sapien
tcgagggcagttctccttgaggtcg

SEQ ID NO: 3867889 - DNA, 25 bp, Homo sapien
tagggctgagtgtctaaatctgcca

SEQ ID NO: 3867890 - DNA, 25 bp, Homo sapien
aaatctgccaagttcatccgagagc

SEQ ID NO: 3867891 - DNA, 25 bp, Homo sapien
tcagggcccgaagctgccttgttcc

SEQ ID NO: 3867892 - DNA, 25 bp, Homo sapien
caagcctctggtccctggtgagaga

SEQ ID NO: 3867893 - DNA, 25 bp, Homo sapien
aatttcaagcctctggtccctggtg

SEQ ID NO: 3867894 - DNA, 25 bp, Homo sapien
gcctcagggcccgaagctgccttgt

SEQ ID NO: 3867895 - DNA, 25 bp, Homo sapien
cagggcgagtttgtaacgaagccgc

SEQ ID NO: 3867896 - DNA, 25 bp, Homo sapien
aacgaagccgctccctctttgtctg

SEQ ID NO: 3867897 - DNA, 25 bp, Homo sapien
agcagaagggatactaattagaggg

SEQ ID NO: 3867898 - DNA, 25 bp, Homo sapien
ttagagggtgaattattagcttccc

SEQ ID NO: 3867899 - DNA, 25 bp, Homo sapien
gagccagccattgccgtcaacaact

SEQ ID NO: 3867900 - DNA, 25 bp, Homo sapien
cctcgcaggccacttgagccagcca

SEQ ID NO: 3867901 - DNA, 25 bp, Homo sapien
gcctccctcgcaggccacttgagcc

SEQ ID NO: 3867902 - DNA, 25 bp, Homo sapien
agccattgccgtcaacaactccaac

SEQ ID NO: 3867903 - DNA, 25 bp, Homo sapien
gtgaagtaaatcaccaggatgttca

SEQ ID NO: 3867904 - DNA, 25 bp, Homo sapien
ggtggtgaagtaaatcaccaggatg

SEQ ID NO: 3867905 - DNA, 25 bp, Homo sapien
gagggcagcatacaggaccctctgg

SEQ ID NO: 3867906 - DNA, 25 bp, Homo sapien
gggatggtaccagagaatgagtggt

SEQ ID NO: 3867907 - DNA, 25 bp, Homo sapien
gaatctgggttgtcagatttgcaaa

SEQ ID NO: 3867908 - DNA, 25 bp, Homo sapien
taatcatcaacaaacaactgtgcag

SEQ ID NO: 3867909 - DNA, 25 bp, Homo sapien
aagaatctgggttgtcagatttgca

SEQ ID NO: 3867910 - DNA, 25 bp, Homo sapien
catcaacaaacaactgtgcaggaag

SEQ ID NO: 3867911 - DNA, 25 bp, Homo sapien
tatttcattagctggtctcattccc

SEQ ID NO: 3867912 - DNA, 25 bp, Homo sapien
tcattccctcgatggcaactgggtt

SEQ ID NO: 3867913 - DNA, 25 bp, Homo sapien
ttaaagccccaatcatagaaataca

SEQ ID NO: 3867914 - DNA, 25 bp, Homo sapien
ctctgaattggagttaaagccctca

SEQ ID NO: 3867915 - DNA, 25 bp, Homo sapien
ccacgccagacccttcagaggctga

SEQ ID NO: 3867916 - DNA, 25 bp, Homo sapien
caccacccacgccagacccttcaga

SEQ ID NO: 3867917 - DNA, 25 bp, Homo sapien
ccacccacgccagacccttcagagg

SEQ ID NO: 3867918 - DNA, 25 bp, Homo sapien
acccacgccagacccttcagaggct

SEQ ID NO: 3867919 - DNA, 25 bp, Homo sapien
gaactttgaaagccacagcattctc

SEQ ID NO: 3867920 - DNA, 25 bp, Homo sapien
tgcagttccttgaactttgaaagcc

SEQ ID NO: 3867921 - DNA, 25 bp, Homo sapien
atgttgcagttccttgaactttgaa

SEQ ID NO: 3867922 - DNA, 25 bp, Homo sapien
ttttggatgttgcagttccttgaac

SEQ ID NO: 3867923 - DNA, 25 bp, Homo sapien
cagcattgactgaagcccgaggtgt

SEQ ID NO: 3867924 - DNA, 25 bp, Homo sapien
gggagatttatctgccaggatccgg

SEQ ID NO: 3867925 - DNA, 25 bp, Homo sapien
ctatgctgacagctccgggggagat

SEQ ID NO: 3867926 - DNA, 25 bp, Homo sapien
gaaccagcaaactcatgaatctgga

SEQ ID NO: 3867927 - DNA, 25 bp, Homo sapien
cattcagaagcatgcaaccctcatc

SEQ ID NO: 3867928 - DNA, 25 bp, Homo sapien
ttcagaagcatgcaaccctcatctg

SEQ ID NO: 3867929 - DNA, 25 bp, Homo sapien
cagaagcatgcaaccctcatctgcc

SEQ ID NO: 3867930 - DNA, 25 bp, Homo sapien
gcatgcaaccctcatctgcctgcat

SEQ ID NO: 3867931 - DNA, 25 bp, Homo sapien
ccttggccagggaattcataagtct

SEQ ID NO: 3867932 - DNA, 25 bp, Homo sapien
aacgagagagagatttctcttggac

SEQ ID NO: 3867933 - DNA, 25 bp, Homo sapien
agcacttattctgcctgtgcacagg

SEQ ID NO: 3867934 - DNA, 25 bp, Homo sapien
caaaaataaccagggttgcttgagc

SEQ ID NO: 3867935 - DNA, 25 bp, Homo sapien
ttgttctctccctcaaccatgctca

SEQ ID NO: 3867936 - DNA, 25 bp, Homo sapien
tcagttacgcaaataatagtgttcc

SEQ ID NO: 3867937 - DNA, 25 bp, Homo sapien
aacttgattcaaaactcctcttgtt

SEQ ID NO: 3867938 - DNA, 25 bp, Homo sapien
tccaacaatgtaggctcatgcctgt

SEQ ID NO: 3867939 - DNA, 25 bp, Homo sapien
ggacttcccattaatgactcttcct

SEQ ID NO: 3867940 - DNA, 25 bp, Homo sapien
aggacttcccattaatgactcttcc

SEQ ID NO: 3867941 - DNA, 25 bp, Homo sapien
aaggacttcccattaatgactcttc

SEQ ID NO: 3867942 - DNA, 25 bp, Homo sapien
aaaggacttcccattaatgactctt

SEQ ID NO: 3867943 - DNA, 25 bp, Homo sapien
ctctgagtcccttgcccagaatttg

SEQ ID NO: 3867944 - DNA, 25 bp, Homo sapien
ctgagtcccttgcccagaatttgct

SEQ ID NO: 3867945 - DNA, 25 bp, Homo sapien
tctgagtcccttgcccagaatttgc

SEQ ID NO: 3867946 - DNA, 25 bp, Homo sapien
taatctctgtcacctcgctgtcact

SEQ ID NO: 3867947 - DNA, 25 bp, Homo sapien
gtcactgccgctcaggaaaacaatg

SEQ ID NO: 3867948 - DNA, 25 bp, Homo sapien
gacacagccttgacttgacagagat

SEQ ID NO: 3867949 - DNA, 25 bp, Homo sapien
gaagttgctcagtcaataccaagct

SEQ ID NO: 3867950 - DNA, 25 bp, Homo sapien
acatgaaccagggcttgaatcagct

SEQ ID NO: 3867951 - DNA, 25 bp, Homo sapien
catgaaccagggcttgaatcagctg

SEQ ID NO: 3867952 - DNA, 25 bp, Homo sapien
agtttctcttgtaggtgtgccttca

SEQ ID NO: 3867953 - DNA, 25 bp, Homo sapien
ggttcattgctgtcctctgcacttc

SEQ ID NO: 3867954 - DNA, 25 bp, Homo sapien
gttgattgcattccgagctgccggt

SEQ ID NO: 3867955 - DNA, 25 bp, Homo sapien
ccggaccgtcgtcagcacatttgaa

SEQ ID NO: 3867956 - DNA, 25 bp, Homo sapien
ggatatttcaccacctggggactgc

SEQ ID NO: 3867957 - DNA, 25 bp, Homo sapien
aaccacagcaatcagttactgccca

SEQ ID NO: 3867958 - DNA, 25 bp, Homo sapien
ccttcgcaaccacagcaatcagtta

SEQ ID NO: 3867959 - DNA, 25 bp, Homo sapien
tggggactgcccttcgcaaccacag

SEQ ID NO: 3867960 - DNA, 25 bp, Homo sapien
cagtgtcctttccttggccaccggt

SEQ ID NO: 3867961 - DNA, 25 bp, Homo sapien
ccagtgtcctttccttggccaccgg

SEQ ID NO: 3867962 - DNA, 25 bp, Homo sapien
gaaagtggtttggcctcagaaccca

SEQ ID NO: 3867963 - DNA, 25 bp, Homo sapien
aagtggtttggcctcagaacccaca

SEQ ID NO: 3867964 - DNA, 25 bp, Homo sapien
tgttctggaatgcatccaggcacat

SEQ ID NO: 3867965 - DNA, 25 bp, Homo sapien
gcatccaggcacatccataaaagaa

SEQ ID NO: 3867966 - DNA, 25 bp, Homo sapien
ttttctaactggcaggagtcccagg

SEQ ID NO: 3867967 - DNA, 25 bp, Homo sapien
gtttttctaactggcaggagtccca

SEQ ID NO: 3867968 - DNA, 25 bp, Homo sapien
aaactgatccctgaattttcttagc

SEQ ID NO: 3867969 - DNA, 25 bp, Homo sapien
attcttcaccgaggatgcccagctt

SEQ ID NO: 3867970 - DNA, 25 bp, Homo sapien
tcccaaagacagagggatatagatg

SEQ ID NO: 3867971 - DNA, 25 bp, Homo sapien
tagcttgtgctttctagaaagaagg

SEQ ID NO: 3867972 - DNA, 25 bp, Homo sapien
ctgtggagggacaattccatccccc

SEQ ID NO: 3867973 - DNA, 25 bp, Homo sapien
tgtggagggacaattccatccccct

SEQ ID NO: 3867974 - DNA, 25 bp, Homo sapien
gtggagggacaattccatccccctc

SEQ ID NO: 3867975 - DNA, 25 bp, Homo sapien
tcagacgatgtgcatgtcatcccat

SEQ ID NO: 3867976 - DNA, 25 bp, Homo sapien
atcccatttggatttgtgggcaaac

SEQ ID NO: 3867977 - DNA, 25 bp, Homo sapien
gatttgtgggcaaaccaatgattcc

SEQ ID NO: 3867978 - DNA, 25 bp, Homo sapien
tgggcaaaccaatgattcctgggct

SEQ ID NO: 3867979 - DNA, 25 bp, Homo sapien
atgtcccatctgctaggaccaccag

SEQ ID NO: 3867980 - DNA, 25 bp, Homo sapien
gttctgatgtcccatctgctaggac

SEQ ID NO: 3867981 - DNA, 25 bp, Homo sapien
gaccccagttctgatgtcccatctg

SEQ ID NO: 3867982 - DNA, 25 bp, Homo sapien
agaccccagttctgatgtcccatct

SEQ ID NO: 3867983 - DNA, 25 bp, Homo sapien
atgctatctcctccgggcactgtga

SEQ ID NO: 3867984 - DNA, 25 bp, Homo sapien
gctatctcctccgggcactgtgact

SEQ ID NO: 3867985 - DNA, 25 bp, Homo sapien
tgctatctcctccgggcactgtgac

SEQ ID NO: 3867986 - DNA, 25 bp, Homo sapien
tcctcctcagggcatcgaaggtcca

SEQ ID NO: 3867987 - DNA, 25 bp, Homo sapien
ctttgagggattatttgcttcctcc

SEQ ID NO: 3867988 - DNA, 25 bp, Homo sapien
cctcctcagggcatcgaaggtccat

SEQ ID NO: 3867989 - DNA, 25 bp, Homo sapien
gagggattatttgcttcctcctcag

SEQ ID NO: 3867990 - DNA, 25 bp, Homo sapien
ctctgagaatccaagggcaaagagg

SEQ ID NO: 3867991 - DNA, 25 bp, Homo sapien
tcaggaacagagaatgcgcctctga

SEQ ID NO: 3867992 - DNA, 25 bp, Homo sapien
gaatgcgcctctgagaatccaaggg

SEQ ID NO: 3867993 - DNA, 25 bp, Homo sapien
cagagaatgcgcctctgagaatcca

SEQ ID NO: 3867994 - DNA, 25 bp, Homo sapien
atcagggactcttgttgagactgtg

SEQ ID NO: 3867995 - DNA, 25 bp, Homo sapien
gggactcttgttgagactgtgcaag

SEQ ID NO: 3867996 - DNA, 25 bp, Homo sapien
gactcttgttgagactgtgcaagat

SEQ ID NO: 3867997 - DNA, 25 bp, Homo sapien
cagggactcttgttgagactgtgca

SEQ ID NO: 3867998 - DNA, 25 bp, Homo sapien
gccaggacaacagagtcacactcat

SEQ ID NO: 3867999 - DNA, 25 bp, Homo sapien
cagagtcacactcattgaatatggt

SEQ ID NO: 3868000 - DNA, 25 bp, Homo sapien
aatatggttacagggcccacatctg

SEQ ID NO: 3868001 - DNA, 25 bp, Homo sapien
gctgggaacatccaaagaagcatca

SEQ ID NO: 3868002 - DNA, 25 bp, Homo sapien
acttgcccgactagctcatcagatg

SEQ ID NO: 3868003 - DNA, 25 bp, Homo sapien
tgtgtgcggatgacattgccagcct

SEQ ID NO: 3868004 - DNA, 25 bp, Homo sapien
tcagggaagattattaatggtggct

SEQ ID NO: 3868005 - DNA, 25 bp, Homo sapien
aactgaatggcataagggcctcagc

SEQ ID NO: 3868006 - DNA, 25 bp, Homo sapien
ttagaggtggtcttaatggcccatg

SEQ ID NO: 3868007 - DNA, 25 bp, Homo sapien
catgtagccatcattacaagcataa

SEQ ID NO: 3868008 - DNA, 25 bp, Homo sapien
taatttgcaaagctctaatagcctg

SEQ ID NO: 3868009 - DNA, 25 bp, Homo sapien
catccttagcagagcatagtaataa

SEQ ID NO: 3868010 - DNA, 25 bp, Homo sapien
aggttagaaaaatcttatagttcat

SEQ ID NO: 3868011 - DNA, 25 bp, Homo sapien
caggttagaaaaatcttatagttca

SEQ ID NO: 3868012 - DNA, 25 bp, Homo sapien
cacatgggtaggtgatgtaagcaca

SEQ ID NO: 3868013 - DNA, 25 bp, Homo sapien
atgggtagatgatgtaagcacacaa

SEQ ID NO: 3868014 - DNA, 25 bp, Homo sapien
cacttgggtagatgatgtaagcaca

SEQ ID NO: 3868015 - DNA, 25 bp, Homo sapien
cacatggatagatgatgcaagcaca

SEQ ID NO: 3868016 - DNA, 25 bp, Homo sapien
gccagagtggccaatatgccttccc

SEQ ID NO: 3868017 - DNA, 25 bp, Homo sapien
gtgcatggaaggattgaaagttctt

SEQ ID NO: 3868018 - DNA, 25 bp, Homo sapien
cctgtagatttattgacacgagcct

SEQ ID NO: 3868019 - DNA, 25 bp, Homo sapien
gacacgagcctgttttgtatcatat

SEQ ID NO: 3868020 - DNA, 25 bp, Homo sapien
agctgtcagcttaggcatcagctgt

SEQ ID NO: 3868021 - DNA, 25 bp, Homo sapien
agagctgtcagcttaggcatcagct

SEQ ID NO: 3868022 - DNA, 25 bp, Homo sapien
gagctgtcagcttaggcatcagctg

SEQ ID NO: 3868023 - DNA, 25 bp, Homo sapien
gctgtcagcttaggcatcagctgtg

SEQ ID NO: 3868024 - DNA, 25 bp, Homo sapien
tgggagatgctaatgaggtgcactg

SEQ ID NO: 3868025 - DNA, 25 bp, Homo sapien
tgcttgtgggagatgctaatgaggt

SEQ ID NO: 3868026 - DNA, 25 bp, Homo sapien
ggagatgctaatgaggtgcactggc

SEQ ID NO: 3868027 - DNA, 25 bp, Homo sapien
gatgctaatgaggtgcactggcccc

SEQ ID NO: 3868028 - DNA, 25 bp, Homo sapien
agggagagtcctcccatgtaagtct

SEQ ID NO: 3868029 - DNA, 25 bp, Homo sapien
gagtcctcccatgtaagtctagcac

SEQ ID NO: 3868030 - DNA, 25 bp, Homo sapien
ctagggagagtcctcccatgtaagt

SEQ ID NO: 3868031 - DNA, 25 bp, Homo sapien
ggagagtcctcccatgtaagtctag

SEQ ID NO: 3868032 - DNA, 25 bp, Homo sapien
tggatttggtgttctattcttctgt

SEQ ID NO: 3868033 - DNA, 25 bp, Homo sapien
atttggtgttctattcttctgtgcc

SEQ ID NO: 3868034 - DNA, 25 bp, Homo sapien
cagccttcagggatggatttggtgt

SEQ ID NO: 3868035 - DNA, 25 bp, Homo sapien
ttgtagaccttttcagccttcaggg

SEQ ID NO: 3868036 - DNA, 25 bp, Homo sapien
gctggtgtcagccaaggagaatgca

SEQ ID NO: 3868037 - DNA, 25 bp, Homo sapien
gaaaccttctcattactgccctgga

SEQ ID NO: 3868038 - DNA, 25 bp, Homo sapien
ggctttgtgaagcaccctggagaaa

SEQ ID NO: 3868039 - DNA, 25 bp, Homo sapien
aagtggggactggttctgctgcctc

SEQ ID NO: 3868040 - DNA, 25 bp, Homo sapien
tgcatctaagcacacaaccttggtt

SEQ ID NO: 3868041 - DNA, 25 bp, Homo sapien
cagctggtgccggagttttcaatac

SEQ ID NO: 3868042 - DNA, 25 bp, Homo sapien
ggagagtcctgtttggtcatgtgca

SEQ ID NO: 3868043 - DNA, 25 bp, Homo sapien
caatacccatgtcccctgggagagt

SEQ ID NO: 3868044 - DNA, 25 bp, Homo sapien
gatgtaaacatttggtattggggct

SEQ ID NO: 3868045 - DNA, 25 bp, Homo sapien
ttacgtcttcgacagcctggagccc

SEQ ID NO: 3868046 - DNA, 25 bp, Homo sapien
cattccctgggcttggatgtaaaca

SEQ ID NO: 3868047 - DNA, 25 bp, Homo sapien
gcatcttgtccactgatattttggg

SEQ ID NO: 3868048 - DNA, 25 bp, Homo sapien
accaaatgttttcaaagcaagcaaa

SEQ ID NO: 3868049 - DNA, 25 bp, Homo sapien
ttcatgtaggtgaacataaaaccaa

SEQ ID NO: 3868050 - DNA, 25 bp, Homo sapien
ccagagatttagtgcatttcatgta

SEQ ID NO: 3868051 - DNA, 25 bp, Homo sapien
aaaccaaatgttttcaaagcaagca

SEQ ID NO: 3868052 - DNA, 25 bp, Homo sapien
tcagctgcatctggttagaaatgta

SEQ ID NO: 3868053 - DNA, 25 bp, Homo sapien
aacaactaaaaaggctgaaactgag

SEQ ID NO: 3868054 - DNA, 25 bp, Homo sapien
catgactgttgccaattgcaggaga

SEQ ID NO: 3868055 - DNA, 25 bp, Homo sapien
aataccttgagattgtagattccag

SEQ ID NO: 3868056 - DNA, 25 bp, Homo sapien
ggatgccatctccatacacacatgc

SEQ ID NO: 3868057 - DNA, 25 bp, Homo sapien
gaaatgctgggcgtgttcatcaact

SEQ ID NO: 3868058 - DNA, 25 bp, Homo sapien
gcgaggcttacagagatgcatagga

SEQ ID NO: 3868059 - DNA, 25 bp, Homo sapien
gacgcactccctcagcttcaagaat

SEQ ID NO: 3868060 - DNA, 25 bp, Homo sapien
ccagctgacattgctttggacagac

SEQ ID NO: 3868061 - DNA, 25 bp, Homo sapien
tgagcaactgatcatgcaaccagac

SEQ ID NO: 3868062 - DNA, 25 bp, Homo sapien
aacaggtaatggctgctggatgctc

SEQ ID NO: 3868063 - DNA, 25 bp, Homo sapien
tcgggtactaagatttggcatgagc

SEQ ID NO: 3868064 - DNA, 25 bp, Homo sapien
gcaaccagactccacttatatcggg

SEQ ID NO: 3868065 - DNA, 25 bp, Homo sapien
tgaccaaggtatccctgggacttct

SEQ ID NO: 3868066 - DNA, 25 bp, Homo sapien
aaaaggtgtgctccataaagctgtc

SEQ ID NO: 3868067 - DNA, 25 bp, Homo sapien
ttgatagagcagaaacacattgagc

SEQ ID NO: 3868068 - DNA, 25 bp, Homo sapien
ttaaggctctttgcagtaagtggca

SEQ ID NO: 3868069 - DNA, 25 bp, Homo sapien
gaggaaatctctaatcgtattaagc

SEQ ID NO: 3868070 - DNA, 25 bp, Homo sapien
tgggcacacccaaggcctgggtaga

SEQ ID NO: 3868071 - DNA, 25 bp, Homo sapien
ctcagaatcaccaggtgtagtaaat

SEQ ID NO: 3868072 - DNA, 25 bp, Homo sapien
ggcctgggtagatactgtctgcttc

SEQ ID NO: 3868073 - DNA, 25 bp, Homo sapien
atcaccaggtgtagtaaatgtatac

SEQ ID NO: 3868074 - DNA, 25 bp, Homo sapien
ctttccatttgcagtccatttgcca

SEQ ID NO: 3868075 - DNA, 25 bp, Homo sapien
atttgcagtccatttgccatcctgt

SEQ ID NO: 3868076 - DNA, 25 bp, Homo sapien
cagtccatttgccatcctgtcacta

SEQ ID NO: 3868077 - DNA, 25 bp, Homo sapien
tgccatcctgtcactagacgatgct

SEQ ID NO: 3868078 - DNA, 25 bp, Homo sapien
tgtcatcggcgtgctgagccagctg

SEQ ID NO: 3868079 - DNA, 25 bp, Homo sapien
agagaggtgttgtcatcggcgtgct

SEQ ID NO: 3868080 - DNA, 25 bp, Homo sapien
ctgcaatagcttggtcatttcccag

SEQ ID NO: 3868081 - DNA, 25 bp, Homo sapien
actccctttagtctccctgcaatag

SEQ ID NO: 3868082 - DNA, 25 bp, Homo sapien
cgcccactctccacaccttcgtcgg

SEQ ID NO: 3868083 - DNA, 25 bp, Homo sapien
ccgacgaaggtgtggagagtgggcg

SEQ ID NO: 3868084 - DNA, 25 bp, Homo sapien
caggtggtcagtggcatggcagggg

SEQ ID NO: 3868085 - DNA, 25 bp, Homo sapien
gcaggtggtcagtggcatggcaggg

SEQ ID NO: 3868086 - DNA, 25 bp, Homo sapien
gcttccatttcgtagcaatcctttt

SEQ ID NO: 3868087 - DNA, 25 bp, Homo sapien
tccatttcgtagcaatccttttaaa

SEQ ID NO: 3868088 - DNA, 25 bp, Homo sapien
tttcgcttccatttcgtagcaatcc

SEQ ID NO: 3868089 - DNA, 25 bp, Homo sapien
attttctatcttacaccccctctgt

SEQ ID NO: 3868090 - DNA, 25 bp, Homo sapien
cttagcatgcaccttacccacctgg

SEQ ID NO: 3868091 - DNA, 25 bp, Homo sapien
cccagtggctttactctgtgcttgg

SEQ ID NO: 3868092 - DNA, 25 bp, Homo sapien
caatcccagtggctttactctgtgc

SEQ ID NO: 3868093 - DNA, 25 bp, Homo sapien
tttcccaatcccagtggctttactc

SEQ ID NO: 3868094 - DNA, 25 bp, Homo sapien
ttggagggcttctctactccccagt

SEQ ID NO: 3868095 - DNA, 25 bp, Homo sapien
tcccagtgtgttgggcttgatttga

SEQ ID NO: 3868096 - DNA, 25 bp, Homo sapien
cccagtgtgttgggcttgatttgaa

SEQ ID NO: 3868097 - DNA, 25 bp, Homo sapien
ttcccagtgtgttgggcttgatttg

SEQ ID NO: 3868098 - DNA, 25 bp, Homo sapien
caaaccgtgaagatggcttagatgc

SEQ ID NO: 3868099 - DNA, 25 bp, Homo sapien
tctccacagggcactagctggcttc

SEQ ID NO: 3868100 - DNA, 25 bp, Homo sapien
gcttagatgctgcacaacctgctgg

SEQ ID NO: 3868101 - DNA, 25 bp, Homo sapien
caacctgctggtctacctgaaaatt

SEQ ID NO: 3868102 - DNA, 25 bp, Homo sapien
ctccttttaaatggctctcttcctg

SEQ ID NO: 3868103 - DNA, 25 bp, Homo sapien
tcttcctggttctttgatctctgct

SEQ ID NO: 3868104 - DNA, 25 bp, Homo sapien
ttcctccttttaaatggctctcttc

SEQ ID NO: 3868105 - DNA, 25 bp, Homo sapien
tcagaactcatgctggctcttgcct

SEQ ID NO: 3868106 - DNA, 25 bp, Homo sapien
tttcaatgcaatggatggagtctct

SEQ ID NO: 3868107 - DNA, 25 bp, Homo sapien
ccgtttcaatgcaatggatggagtc

SEQ ID NO: 3868108 - DNA, 25 bp, Homo sapien
agtggaagttccgtttcaatgcaat

SEQ ID NO: 3868109 - DNA, 25 bp, Homo sapien
gaagttccgtttcaatgcaatggat

SEQ ID NO: 3868110 - DNA, 25 bp, Homo sapien
tggtaggcctgcaggagggttttac

SEQ ID NO: 3868111 - DNA, 25 bp, Homo sapien
tgcaggagggttttacgttccaagc

SEQ ID NO: 3868112 - DNA, 25 bp, Homo sapien
gcctgcaggagggttttacgttcca

SEQ ID NO: 3868113 - DNA, 25 bp, Homo sapien
ctggtaggcctgcaggagggtttta

SEQ ID NO: 3868114 - DNA, 25 bp, Homo sapien
caacacatctctgggcagggccagc

SEQ ID NO: 3868115 - DNA, 25 bp, Homo sapien
acacatctctgggcagggccagcac

SEQ ID NO: 3868116 - DNA, 25 bp, Homo sapien
ctcaacacatctctgggcagggcca

SEQ ID NO: 3868117 - DNA, 25 bp, Homo sapien
tcaacacatctctgggcagggccag

SEQ ID NO: 3868118 - DNA, 25 bp, Homo sapien
gtgaactctgtccagagtcctggtt

SEQ ID NO: 3868119 - DNA, 25 bp, Homo sapien
gaactctgtccagagtcctggtttt

SEQ ID NO: 3868120 - DNA, 25 bp, Homo sapien
ggtgaactctgtccagagtcctggt

SEQ ID NO: 3868121 - DNA, 25 bp, Homo sapien
tgaactctgtccagagtcctggttt

SEQ ID NO: 3868122 - DNA, 25 bp, Homo sapien
gggagccaactggaaccatttatgc

SEQ ID NO: 3868123 - DNA, 25 bp, Homo sapien
tgagggagccaactggaaccattta

SEQ ID NO: 3868124 - DNA, 25 bp, Homo sapien
ctctgagggagccaactggaaccat

SEQ ID NO: 3868125 - DNA, 25 bp, Homo sapien
ccaactggaaccatttatgctcaca

SEQ ID NO: 3868126 - DNA, 25 bp, Homo sapien
ttagtatctgattctaggtgggcca

SEQ ID NO: 3868127 - DNA, 25 bp, Homo sapien
ctgccgtttacccacagtttccctg

SEQ ID NO: 3868128 - DNA, 25 bp, Homo sapien
tagtatctgattctaggtgggccat

SEQ ID NO: 3868129 - DNA, 25 bp, Homo sapien
tgctcctttataggtagaggcaaag

SEQ ID NO: 3868130 - DNA, 25 bp, Homo sapien
tatcctgcgtgatgttactctgagc

SEQ ID NO: 3868131 - DNA, 25 bp, Homo sapien
tcctaggtgtagaatgtttggcatt

SEQ ID NO: 3868132 - DNA, 25 bp, Homo sapien
tagcatctcttatagggcatttctg

SEQ ID NO: 3868133 - DNA, 25 bp, Homo sapien
tgacagcccattgctgcacactgtg

SEQ ID NO: 3868134 - DNA, 25 bp, Homo sapien
gacagcccattgctgcacactgtgt

SEQ ID NO: 3868135 - DNA, 25 bp, Homo sapien
tccttgattgcctaaatatgtccct

SEQ ID NO: 3868136 - DNA, 25 bp, Homo sapien
tgattgcctaaatatgtccctgtct

SEQ ID NO: 3868137 - DNA, 25 bp, Homo sapien
ttgattgcctaaatatgtccctgtc

SEQ ID NO: 3868138 - DNA, 25 bp, Homo sapien
ccttgattgcctaaatatgtccctg

SEQ ID NO: 3868139 - DNA, 25 bp, Homo sapien
ggcacactggccagatgtaaaaagt

SEQ ID NO: 3868140 - DNA, 25 bp, Homo sapien
catacagggtcttggccaatgaggg

SEQ ID NO: 3868141 - DNA, 25 bp, Homo sapien
caggctttcccatggtactggcaca

SEQ ID NO: 3868142 - DNA, 25 bp, Homo sapien
taattccttgttcatggatggccat

SEQ ID NO: 3868143 - DNA, 25 bp, Homo sapien
ttctgagcattgggcttcagctggg

SEQ ID NO: 3868144 - DNA, 25 bp, Homo sapien
accttctgagcattgggcttcagct

SEQ ID NO: 3868145 - DNA, 25 bp, Homo sapien
cttctgagcattgggcttcagctgg

SEQ ID NO: 3868146 - DNA, 25 bp, Homo sapien
ccttctgagcattgggcttcagctg

SEQ ID NO: 3868147 - DNA, 25 bp, Homo sapien
tcctgagtgctaagcctcgggctag

SEQ ID NO: 3868148 - DNA, 25 bp, Homo sapien
ggaagcctgtgcatcctggaactgg

SEQ ID NO: 3868149 - DNA, 25 bp, Homo sapien
gactcattcctgagccctagctctg

SEQ ID NO: 3868150 - DNA, 25 bp, Homo sapien
tggaactgggactcattcctgagcc

SEQ ID NO: 3868151 - DNA, 25 bp, Homo sapien
gttcgtccaggagttttgattgtat

SEQ ID NO: 3868152 - DNA, 25 bp, Homo sapien
aagaggttcgtccaggagttttgat

SEQ ID NO: 3868153 - DNA, 25 bp, Homo sapien
gaggttcgtccaggagttttgattg

SEQ ID NO: 3868154 - DNA, 25 bp, Homo sapien
ctttattcaagaggttcgtccagga

SEQ ID NO: 3868155 - DNA, 25 bp, Homo sapien
tcgcagttcccgaagcagcgtatgt

SEQ ID NO: 3868156 - DNA, 25 bp, Homo sapien
tatacaccgcctctgaatccggagt

SEQ ID NO: 3868157 - DNA, 25 bp, Homo sapien
tactcgggcgcccaggacctatgat

SEQ ID NO: 3868158 - DNA, 25 bp, Homo sapien
gcccaggacctatgattccgctcat

SEQ ID NO: 3868159 - DNA, 25 bp, Homo sapien
aggacccaaacgaccctgcctggag

SEQ ID NO: 3868160 - DNA, 25 bp, Homo sapien
ctcaggccttctgtccccggatgtc

SEQ ID NO: 3868161 - DNA, 25 bp, Homo sapien
cagtttgaggacccaaacgaccctg

SEQ ID NO: 3868162 - DNA, 25 bp, Homo sapien
tcaggccttctgtccccggatgtct

SEQ ID NO: 3868163 - DNA, 25 bp, Homo sapien
tctgtgactccacgaaacgccaagg

SEQ ID NO: 3868164 - DNA, 25 bp, Homo sapien
ctaaggctgcttgatgttctgatgc

SEQ ID NO: 3868165 - DNA, 25 bp, Homo sapien
tcaatgccgtcgtgctctgtgactc

SEQ ID NO: 3868166 - DNA, 25 bp, Homo sapien
aacgccaaggagcttcttccggacg

SEQ ID NO: 3868167 - DNA, 25 bp, Homo sapien
gctccgcaccgagtccccgcggtga

SEQ ID NO: 3868168 - DNA, 25 bp, Homo sapien
cggctccgcaccgagtccccgcggt

SEQ ID NO: 3868169 - DNA, 25 bp, Homo sapien
ctccgcaccgagtccccgcggtgag

SEQ ID NO: 3868170 - DNA, 25 bp, Homo sapien
ggctccgcaccgagtccccgcggtg

SEQ ID NO: 3868171 - DNA, 25 bp, Homo sapien
aggccaagctccaccatcgcggccg

SEQ ID NO: 3868172 - DNA, 25 bp, Homo sapien
ggccaagctccaccatcgcggccgc

SEQ ID NO: 3868173 - DNA, 25 bp, Homo sapien
gccgtaagggtgcacagtaaataaa

SEQ ID NO: 3868174 - DNA, 25 bp, Homo sapien
taaaaagtacggatgcaaaatgtaa

SEQ ID NO: 3868175 - DNA, 25 bp, Homo sapien
tacgggtgcgtaaagcatgccgtaa

SEQ ID NO: 3868176 - DNA, 25 bp, Homo sapien
agaaaagcagtactcgttgccgccc

SEQ ID NO: 3868177 - DNA, 25 bp, Homo sapien
gcattttgactttcacgttttggac

SEQ ID NO: 3868178 - DNA, 25 bp, Homo sapien
tgactttcacgttttggactacgtg

SEQ ID NO: 3868179 - DNA, 25 bp, Homo sapien
cacgttttggactacgtgtgtgtag

SEQ ID NO: 3868180 - DNA, 25 bp, Homo sapien
tttcacgttttggactacgtgtgtg

SEQ ID NO: 3868181 - DNA, 25 bp, Homo sapien
taatgaactccgaacaggcagccta

SEQ ID NO: 3868182 - DNA, 25 bp, Homo sapien
ggtaaccactggcatacagatggca

SEQ ID NO: 3868183 - DNA, 25 bp, Homo sapien
gaatggctcaagcaacaggacatag

SEQ ID NO: 3868184 - DNA, 25 bp, Homo sapien
ggaggttacatatctcagggcactt

SEQ ID NO: 3868185 - DNA, 25 bp, Homo sapien
taacccggattgatggatccagccc

SEQ ID NO: 3868186 - DNA, 25 bp, Homo sapien
gaggctatcatatggaaacaacttg

SEQ ID NO: 3868187 - DNA, 25 bp, Homo sapien
taaatggcaagacctaacccgaggc

SEQ ID NO: 3868188 - DNA, 25 bp, Homo sapien
taagaacagacctgggacttctgct

SEQ ID NO: 3868189 - DNA, 25 bp, Homo sapien
gactaaatactagggaatggtactg

SEQ ID NO: 3868190 - DNA, 25 bp, Homo sapien
cactgtggtaggaaattcagaacgc

SEQ ID NO: 3868191 - DNA, 25 bp, Homo sapien
tctgggcctttgaaccaagattgaa

SEQ ID NO: 3868192 - DNA, 25 bp, Homo sapien
gcattttatagtctagttccaggca

SEQ ID NO: 3868193 - DNA, 25 bp, Homo sapien
tattatcgctgaactccaagtcctg

SEQ ID NO: 3868194 - DNA, 25 bp, Homo sapien
tatattgtctctcctgaacatgggc

SEQ ID NO: 3868195 - DNA, 25 bp, Homo sapien
taaaacagtgacatgcacattgcag

SEQ ID NO: 3868196 - DNA, 25 bp, Homo sapien
gggtcacctttacagtaggcacagg

SEQ ID NO: 3868197 - DNA, 25 bp, Homo sapien
tccaaagagtaatcaaagctaccac

SEQ ID NO: 3868198 - DNA, 25 bp, Homo sapien
caaatgcatttgaagtacctacctg

SEQ ID NO: 3868199 - DNA, 25 bp, Homo sapien
tgttaatccagccacccacggatga

SEQ ID NO: 3868200 - DNA, 25 bp, Homo sapien
taacaaaattggtgataagtagtcc

SEQ ID NO: 3868201 - DNA, 25 bp, Homo sapien
ctctcttcaagtggtatttaaattt

SEQ ID NO: 3868202 - DNA, 25 bp, Homo sapien
tctcttcaagtggtatttaaatttc

SEQ ID NO: 3868203 - DNA, 25 bp, Homo sapien
gatcacatggattctctcatcccag

SEQ ID NO: 3868204 - DNA, 25 bp, Homo sapien
ggctgatcacatggattctctcatc

SEQ ID NO: 3868205 - DNA, 25 bp, Homo sapien
acatggattctctcatcccagcctt

SEQ ID NO: 3868206 - DNA, 25 bp, Homo sapien
tggtgagggctgatcacatggattc

SEQ ID NO: 3868207 - DNA, 25 bp, Homo sapien
actctgcaagctgggtacttgggca

SEQ ID NO: 3868208 - DNA, 25 bp, Homo sapien
cctgggactctaactctggcactct

SEQ ID NO: 3868209 - DNA, 25 bp, Homo sapien
ctctggcactctgcaagctgggtac

SEQ ID NO: 3868210 - DNA, 25 bp, Homo sapien
tggagaacacccctgggactctaac

SEQ ID NO: 3868211 - DNA, 25 bp, Homo sapien
aaaccactagccaagagccaactca

SEQ ID NO: 3868212 - DNA, 25 bp, Homo sapien
aaccactagccaagagccaactcac

SEQ ID NO: 3868213 - DNA, 25 bp, Homo sapien
gctgcctagattaagtgggtatcct

SEQ ID NO: 3868214 - DNA, 25 bp, Homo sapien
gatgatgcctggttccgtcaacaaa

SEQ ID NO: 3868215 - DNA, 25 bp, Homo sapien
tacaggcagccagattcaaaatcct

SEQ ID NO: 3868216 - DNA, 25 bp, Homo sapien
tcacacggtgggtagtcaatataca

SEQ ID NO: 3868217 - DNA, 25 bp, Homo sapien
ctagtggtgacaagacaaatcatcc

SEQ ID NO: 3868218 - DNA, 25 bp, Homo sapien
taaagtgtaaatgacccacaactcc

SEQ ID NO: 3868219 - DNA, 25 bp, Homo sapien
cttatgccatccctactgtagtgag

SEQ ID NO: 3868220 - DNA, 25 bp, Homo sapien
gattgaaagggttaggcacaacagc

SEQ ID NO: 3868221 - DNA, 25 bp, Homo sapien
taagagtctttacttgtgttcagcc

SEQ ID NO: 3868222 - DNA, 25 bp, Homo sapien
gataataagcagttcacaccagtga

SEQ ID NO: 3868223 - DNA, 25 bp, Homo sapien
taatcattagtatgcagcactgtaa

SEQ ID NO: 3868224 - DNA, 25 bp, Homo sapien
acaataactatcagtggtgatgggc

SEQ ID NO: 3868225 - DNA, 25 bp, Homo sapien
cctgatcccggcatccagccagcca

SEQ ID NO: 3868226 - DNA, 25 bp, Homo sapien
atcccggcatccagccagccagggg

SEQ ID NO: 3868227 - DNA, 25 bp, Homo sapien
gatcccggcatccagccagccaggg

SEQ ID NO: 3868228 - DNA, 25 bp, Homo sapien
tgatcccggcatccagccagccagg

SEQ ID NO: 3868229 - DNA, 25 bp, Homo sapien
aatgtggctcatgttctgtcataag

SEQ ID NO: 3868230 - DNA, 25 bp, Homo sapien
tgatgaccacatgtcccctagactc

SEQ ID NO: 3868231 - DNA, 25 bp, Homo sapien
tgtcataagtatgcgtcagctttca

SEQ ID NO: 3868232 - DNA, 25 bp, Homo sapien
taacatctagttgtggccatcaaag

SEQ ID NO: 3868233 - DNA, 25 bp, Homo sapien
gtggggggtgcttgtttcaaaatga

SEQ ID NO: 3868234 - DNA, 25 bp, Homo sapien
ccaagagcaaaatagagaggatgct

SEQ ID NO: 3868235 - DNA, 25 bp, Homo sapien
ggttaacaggtgagagcagtgatcc

SEQ ID NO: 3868236 - DNA, 25 bp, Homo sapien
gatccaagagcaaaatagagaggat

SEQ ID NO: 3868237 - DNA, 25 bp, Homo sapien
taacaggtgagagcagtgatccaag

SEQ ID NO: 3868238 - DNA, 25 bp, Homo sapien
ggcaccgagtgccacgctgcgtttg

SEQ ID NO: 3868239 - DNA, 25 bp, Homo sapien
gcaagctattgttcagcaggcagat

SEQ ID NO: 3868240 - DNA, 25 bp, Homo sapien
tgctcgctgactcctttatgccggc

SEQ ID NO: 3868241 - DNA, 25 bp, Homo sapien
tgactcctttatgccggcaccggca

SEQ ID NO: 3868242 - DNA, 25 bp, Homo sapien
tgcagcctggtacagatggtagaac

SEQ ID NO: 3868243 - DNA, 25 bp, Homo sapien
tataggacaaagctgaaggtcactg

SEQ ID NO: 3868244 - DNA, 25 bp, Homo sapien
gatgcggtgcagaagtgagtccctc

SEQ ID NO: 3868245 - DNA, 25 bp, Homo sapien
ttccttcctaactgcggatgatggg

SEQ ID NO: 3868246 - DNA, 25 bp, Homo sapien
tgtaatatggaatctggttgttaaa

SEQ ID NO: 3868247 - DNA, 25 bp, Homo sapien
tttctgattgtaatatggaatctgg

SEQ ID NO: 3868248 - DNA, 25 bp, Homo sapien
ccagatgaagcctgaggtactctgc

SEQ ID NO: 3868249 - DNA, 25 bp, Homo sapien
ttgtactggaattcatcttttaaag

SEQ ID NO: 3868250 - DNA, 25 bp, Homo sapien
gggcacatgatgactggtttaccca

SEQ ID NO: 3868251 - DNA, 25 bp, Homo sapien
attttctttgacacactggggcaca

SEQ ID NO: 3868252 - DNA, 25 bp, Homo sapien
gatgactggtttacccaggttggca

SEQ ID NO: 3868253 - DNA, 25 bp, Homo sapien
cacatgatgactggtttacccaggt

SEQ ID NO: 3868254 - DNA, 25 bp, Homo sapien
cagaaggtgacaaagggcagtatct

SEQ ID NO: 3868255 - DNA, 25 bp, Homo sapien
cattcacatggttcggaataaaaca

SEQ ID NO: 3868256 - DNA, 25 bp, Homo sapien
gctcaatgtacgatctgtctaccta

SEQ ID NO: 3868257 - DNA, 25 bp, Homo sapien
tagggagggaaaacaatgcctcaga

SEQ ID NO: 3868258 - DNA, 25 bp, Homo sapien
tgtcaattggaggagatgctcagcc

SEQ ID NO: 3868259 - DNA, 25 bp, Homo sapien
gatgagattcagctgtcaattggag

SEQ ID NO: 3868260 - DNA, 25 bp, Homo sapien
ttactacatgtagtgggccccacag

SEQ ID NO: 3868261 - DNA, 25 bp, Homo sapien
acctggcactgtaatttactacatg

SEQ ID NO: 3868262 - DNA, 25 bp, Homo sapien
ttgccaaggcagctcaaggatagaa

SEQ ID NO: 3868263 - DNA, 25 bp, Homo sapien
gccaaggcagctcaaggatagaata

SEQ ID NO: 3868264 - DNA, 25 bp, Homo sapien
aaggcagctcaaggatagaatagga

SEQ ID NO: 3868265 - DNA, 25 bp, Homo sapien
caaggcagctcaaggatagaatagg

SEQ ID NO: 3868266 - DNA, 25 bp, Homo sapien
tcctgaggctcaagggaggttcgag

SEQ ID NO: 3868267 - DNA, 25 bp, Homo sapien
tctggacctctgaatcagggtggtt

SEQ ID NO: 3868268 - DNA, 25 bp, Homo sapien
gggcaacaactgagtgcaactgaga

SEQ ID NO: 3868269 - DNA, 25 bp, Homo sapien
aggggggcaacaactgagtgcaact

SEQ ID NO: 3868270 - DNA, 25 bp, Homo sapien
gggacagcgcttagccagagactga

SEQ ID NO: 3868271 - DNA, 25 bp, Homo sapien
tgtaggcggcaggaaaagacccgtc

SEQ ID NO: 3868272 - DNA, 25 bp, Homo sapien
gggcaatgctgagccgtcactgaca

SEQ ID NO: 3868273 - DNA, 25 bp, Homo sapien
ggtagaagctactcccaggtgaaac

SEQ ID NO: 3868274 - DNA, 25 bp, Homo sapien
agaaatatgcagattggctgggagc

SEQ ID NO: 3868275 - DNA, 25 bp, Homo sapien
taagcgggtattgattcacattggc

SEQ ID NO: 3868276 - DNA, 25 bp, Homo sapien
ctctttttgtattgacacaagtatc

SEQ ID NO: 3868277 - DNA, 25 bp, Homo sapien
ccttctcaatttgggagtgggcgtg

SEQ ID NO: 3868278 - DNA, 25 bp, Homo sapien
cactccctcatagcaattactggca

SEQ ID NO: 3868279 - DNA, 25 bp, Homo sapien
tctcagtgaggctgatcctgacccc

SEQ ID NO: 3868280 - DNA, 25 bp, Homo sapien
tgcaatggtgcgagtgattctcctg

SEQ ID NO: 3868281 - DNA, 25 bp, Homo sapien
tatgtgtctggaaattcctagcgcc

SEQ ID NO: 3868282 - DNA, 25 bp, Homo sapien
tatctggagaaactgtagaaccctc

SEQ ID NO: 3868283 - DNA, 25 bp, Homo sapien
tcaccccaagataaagatgccggca

SEQ ID NO: 3868284 - DNA, 25 bp, Homo sapien
gatgccggcactctgagatgcactt

SEQ ID NO: 3868285 - DNA, 25 bp, Homo sapien
tcctggtgggaatatgccaacatca

SEQ ID NO: 3868286 - DNA, 25 bp, Homo sapien
aatgactgacttttactgggctgga

SEQ ID NO: 3868287 - DNA, 25 bp, Homo sapien
tcaggaattcacgagcttagctagg

SEQ ID NO: 3868288 - DNA, 25 bp, Homo sapien
gaaaatttgggtctgagcctcctag

SEQ ID NO: 3868289 - DNA, 25 bp, Homo sapien
aattgagagtcttcgcagtggcctg

SEQ ID NO: 3868290 - DNA, 25 bp, Homo sapien
gagttagatccactcaggcccattg

SEQ ID NO: 3868291 - DNA, 25 bp, Homo sapien
gatgctggaagcaatcggctaacgc

SEQ ID NO: 3868292 - DNA, 25 bp, Homo sapien
ggctgttgggatctaacttcgcaga

SEQ ID NO: 3868293 - DNA, 25 bp, Homo sapien
catgcgaggccaatttgaaatcaga

SEQ ID NO: 3868294 - DNA, 25 bp, Homo sapien
aatccccatgattgccttcacagtg

SEQ ID NO: 3868295 - DNA, 25 bp, Homo sapien
gatggaattcataatccccatgatt

SEQ ID NO: 3868296 - DNA, 25 bp, Homo sapien
ggaattcataatccccatgattgcc

SEQ ID NO: 3868297 - DNA, 25 bp, Homo sapien
ttcataatccccatgattgccttca

SEQ ID NO: 3868298 - DNA, 25 bp, Homo sapien
tgccaagaattcacagaccccagtg

SEQ ID NO: 3868299 - DNA, 25 bp, Homo sapien
gaatgggccaggacttaaacactag

SEQ ID NO: 3868300 - DNA, 25 bp, Homo sapien
tcatatcagactcatgggtgggctc

SEQ ID NO: 3868301 - DNA, 25 bp, Homo sapien
cactttgacccatgaagggagccac

SEQ ID NO: 3868302 - DNA, 25 bp, Homo sapien
ttacagatgcccataggagtcaaaa

SEQ ID NO: 3868303 - DNA, 25 bp, Homo sapien
aaattgatgttggtcgttttcagtc

SEQ ID NO: 3868304 - DNA, 25 bp, Homo sapien
tgcccataggagtcaaaattgatgt

SEQ ID NO: 3868305 - DNA, 25 bp, Homo sapien
aataaagtctccctgagtaatttga

SEQ ID NO: 3868306 - DNA, 25 bp, Homo sapien
tatggtggacgcttccaagtgccag

SEQ ID NO: 3868307 - DNA, 25 bp, Homo sapien
gctcagaagggttaagtgccatgcc

SEQ ID NO: 3868308 - DNA, 25 bp, Homo sapien
catgaacatacatcccgtgaggacg

SEQ ID NO: 3868309 - DNA, 25 bp, Homo sapien
cagaggtgcatagccagttagcgac

SEQ ID NO: 3868310 - DNA, 25 bp, Homo sapien
caaggatgtcctgaggaaagtgccc

SEQ ID NO: 3868311 - DNA, 25 bp, Homo sapien
tggaaaggagctgccttggatgtct

SEQ ID NO: 3868312 - DNA, 25 bp, Homo sapien
ctcgccacgtttggaggtgcctgga

SEQ ID NO: 3868313 - DNA, 25 bp, Homo sapien
ttggatgtcttggtcccactcctgc

SEQ ID NO: 3868314 - DNA, 25 bp, Homo sapien
tgcgatcagcgatgacagatgcaga

SEQ ID NO: 3868315 - DNA, 25 bp, Homo sapien
tgctcctggtgacagatcgccaagg

SEQ ID NO: 3868316 - DNA, 25 bp, Homo sapien
cgagggacgcctaaatctaataagt

SEQ ID NO: 3868317 - DNA, 25 bp, Homo sapien
taaaggcaggctctgacagctaagg

SEQ ID NO: 3868318 - DNA, 25 bp, Homo sapien
acctctgagaaagggccggcttgat

SEQ ID NO: 3868319 - DNA, 25 bp, Homo sapien
tcagggaagtgaactggctgcccac

SEQ ID NO: 3868320 - DNA, 25 bp, Homo sapien
gagcgtgcaagaaagcactccctgg

SEQ ID NO: 3868321 - DNA, 25 bp, Homo sapien
cacggttacccgacaaagttgcctg

SEQ ID NO: 3868322 - DNA, 25 bp, Homo sapien
gtgcctccctgcttttacactgagt

SEQ ID NO: 3868323 - DNA, 25 bp, Homo sapien
tgcctccctgcttttacactgagtg

SEQ ID NO: 3868324 - DNA, 25 bp, Homo sapien
gcagcccgggaggggcactgccact

SEQ ID NO: 3868325 - DNA, 25 bp, Homo sapien
agcagcccgggaggggcactgccac

SEQ ID NO: 3868326 - DNA, 25 bp, Homo sapien
ctttgggtagctcatcctcacctct

SEQ ID NO: 3868327 - DNA, 25 bp, Homo sapien
ttgggtagctcatcctcacctctaa

SEQ ID NO: 3868328 - DNA, 25 bp, Homo sapien
ggtagctcatcctcacctctaaagg

SEQ ID NO: 3868329 - DNA, 25 bp, Homo sapien
gctcatcctcacctctaaaggaggt

SEQ ID NO: 3868330 - DNA, 25 bp, Homo sapien
gaatgcatttgcagggaattcaaac

SEQ ID NO: 3868331 - DNA, 25 bp, Homo sapien
ttcagtcaatagcatggagagagga

SEQ ID NO: 3868332 - DNA, 25 bp, Homo sapien
gaagcaaggcttccgtctgagtccc

SEQ ID NO: 3868333 - DNA, 25 bp, Homo sapien
ggccgtgactccattgcgacgctga

SEQ ID NO: 3868334 - DNA, 25 bp, Homo sapien
tgctatcttgagaccgaccagcaga

SEQ ID NO: 3868335 - DNA, 25 bp, Homo sapien
cgaccagcagatggcggaattgcaa

SEQ ID NO: 3868336 - DNA, 25 bp, Homo sapien
tgagaccgaccagcagatggcggaa

SEQ ID NO: 3868337 - DNA, 25 bp, Homo sapien
cttgcctgctatcttgagaccgacc

SEQ ID NO: 3868338 - DNA, 25 bp, Homo sapien
cctcgcccagcgaggagacctggct

SEQ ID NO: 3868339 - DNA, 25 bp, Homo sapien
acttcctcgcccagcgaggagacct

SEQ ID NO: 3868340 - DNA, 25 bp, Homo sapien
ggcagcagaactggcggcatgcagg

SEQ ID NO: 3868341 - DNA, 25 bp, Homo sapien
cagcagaactggcggcatgcagggt

SEQ ID NO: 3868342 - DNA, 25 bp, Homo sapien
gaatgttgaaggtgggcggacacag

SEQ ID NO: 3868343 - DNA, 25 bp, Homo sapien
caggtacgtgtcctttcttgtcctt

SEQ ID NO: 3868344 - DNA, 25 bp, Homo sapien
gcctgagtatctgggccattttcca

SEQ ID NO: 3868345 - DNA, 25 bp, Homo sapien
ttcctacatctaccaccaagggcct

SEQ ID NO: 3868346 - DNA, 25 bp, Homo sapien
gtttctcagtgacccagcacaagca

SEQ ID NO: 3868347 - DNA, 25 bp, Homo sapien
catgggacacatagcatcacacggg

SEQ ID NO: 3868348 - DNA, 25 bp, Homo sapien
tctccctctgtagcgtgtgagccca

SEQ ID NO: 3868349 - DNA, 25 bp, Homo sapien
gaatctgcgattttgctgtgccaga

SEQ ID NO: 3868350 - DNA, 25 bp, Homo sapien
gtcacatggtctgttcccatttagc

SEQ ID NO: 3868351 - DNA, 25 bp, Homo sapien
tcactctttcgatccctttgtctgg

SEQ ID NO: 3868352 - DNA, 25 bp, Homo sapien
gatccctttgtctggacttgatggc

SEQ ID NO: 3868353 - DNA, 25 bp, Homo sapien
tgatggcctggtgacttagaaggta

SEQ ID NO: 3868354 - DNA, 25 bp, Homo sapien
tctggacttgatggcctggtgactt

SEQ ID NO: 3868355 - DNA, 25 bp, Homo sapien
taaatccttcaggtccatttgttgc

SEQ ID NO: 3868356 - DNA, 25 bp, Homo sapien
aatccttcaggtccatttgttgctc

SEQ ID NO: 3868357 - DNA, 25 bp, Homo sapien
tccttcaggtccatttgttgctctg

SEQ ID NO: 3868358 - DNA, 25 bp, Homo sapien
ccttcaggtccatttgttgctctga

SEQ ID NO: 3868359 - DNA, 25 bp, Homo sapien
gaggtcagacatgcgcctatcttca

SEQ ID NO: 3868360 - DNA, 25 bp, Homo sapien
catgcgcctatcttcagcagtcttc

SEQ ID NO: 3868361 - DNA, 25 bp, Homo sapien
gacatgcgcctatcttcagcagtct

SEQ ID NO: 3868362 - DNA, 25 bp, Homo sapien
aggtgaggtcagacatgcgcctatc

SEQ ID NO: 3868363 - DNA, 25 bp, Homo sapien
ttatttcgtttaaggactgtcacca

SEQ ID NO: 3868364 - DNA, 25 bp, Homo sapien
tccccgtgctgtcatgaggcctttg

SEQ ID NO: 3868365 - DNA, 25 bp, Homo sapien
ttcttatttcgtttaaggactgtca

SEQ ID NO: 3868366 - DNA, 25 bp, Homo sapien
ccctgcggttccctccccgtgctgt

SEQ ID NO: 3868367 - DNA, 25 bp, Homo sapien
ctccatagaggcttcggtaggaggc

SEQ ID NO: 3868368 - DNA, 25 bp, Homo sapien
ggcggcgtccttcctgaatctcttt

SEQ ID NO: 3868369 - DNA, 25 bp, Homo sapien
gtaggaggcggcgtccttcctgaat

SEQ ID NO: 3868370 - DNA, 25 bp, Homo sapien
ttgctccactccatagaggcttcgg

SEQ ID NO: 3868371 - DNA, 25 bp, Homo sapien
tcaggcatcttgttggaccagtctc

SEQ ID NO: 3868372 - DNA, 25 bp, Homo sapien
tgccctctggctgttaaaggtaccc

SEQ ID NO: 3868373 - DNA, 25 bp, Homo sapien
cagtctcttatgaaggttgccctct

SEQ ID NO: 3868374 - DNA, 25 bp, Homo sapien
agtggactctgggtcgactgcatcc

SEQ ID NO: 3868375 - DNA, 25 bp, Homo sapien
attcattcctgcatccttgcacaac

SEQ ID NO: 3868376 - DNA, 25 bp, Homo sapien
catgtgggggtggatatccacattc

SEQ ID NO: 3868377 - DNA, 25 bp, Homo sapien
cttgagcaaggtccgaatgttctcc

SEQ ID NO: 3868378 - DNA, 25 bp, Homo sapien
gttctccttggataacctcaggtat

SEQ ID NO: 3868379 - DNA, 25 bp, Homo sapien
tttttagcatctatgtcctcttcga

SEQ ID NO: 3868380 - DNA, 25 bp, Homo sapien
ctttttagcatctatgtcctcttcg

SEQ ID NO: 3868381 - DNA, 25 bp, Homo sapien
ttttagcatctatgtcctcttcgac

SEQ ID NO: 3868382 - DNA, 25 bp, Homo sapien
gggccatgctgggtattccggtgaa

SEQ ID NO: 3868383 - DNA, 25 bp, Homo sapien
gagggccatgctgggtattccggtg

SEQ ID NO: 3868384 - DNA, 25 bp, Homo sapien
ccatgctgggtattccggtgaacac

SEQ ID NO: 3868385 - DNA, 25 bp, Homo sapien
ttagagggccatgctgggtattccg

SEQ ID NO: 3868386 - DNA, 25 bp, Homo sapien
tggaaggaccacttgtagtgtgcca

SEQ ID NO: 3868387 - DNA, 25 bp, Homo sapien
tctgattgcttactttctaaaggga

SEQ ID NO: 3868388 - DNA, 25 bp, Homo sapien
gggatgcactaagttggaaggacca

SEQ ID NO: 3868389 - DNA, 25 bp, Homo sapien
ttactttctaaagggatgcactaag

SEQ ID NO: 3868390 - DNA, 25 bp, Homo sapien
gatgaaagatttcgtggagacgcag

SEQ ID NO: 3868391 - DNA, 25 bp, Homo sapien
gaaaggacagatgttcgctacaacg

SEQ ID NO: 3868392 - DNA, 25 bp, Homo sapien
tttgaatccttacattgtcgatggg

SEQ ID NO: 3868393 - DNA, 25 bp, Homo sapien
gctacaacggagacgcagggatctt

SEQ ID NO: 3868394 - DNA, 25 bp, Homo sapien
tgtctgattggatgcctcccacagc

SEQ ID NO: 3868395 - DNA, 25 bp, Homo sapien
gaagccgccagggacacgctgagtc

SEQ ID NO: 3868396 - DNA, 25 bp, Homo sapien
tcagcggcggcctgtctgattggat

SEQ ID NO: 3868397 - DNA, 25 bp, Homo sapien
tgagtcctcgcttcttaaagtgcgc

SEQ ID NO: 3868398 - DNA, 25 bp, Homo sapien
tagcacaccactgtgggaacaccga

SEQ ID NO: 3868399 - DNA, 25 bp, Homo sapien
tcacggtgccgccatgggagggtgc

SEQ ID NO: 3868400 - DNA, 25 bp, Homo sapien
ttttgtttagagtggtgacatcagg

SEQ ID NO: 3868401 - DNA, 25 bp, Homo sapien
tgacatcaggattcgggatgtcgag

SEQ ID NO: 3868402 - DNA, 25 bp, Homo sapien
ttttgcagtagatttagcctgaggc

SEQ ID NO: 3868403 - DNA, 25 bp, Homo sapien
tctggcttctggaatttttgcagta

SEQ ID NO: 3868404 - DNA, 25 bp, Homo sapien
caccaacacttctctgtttctggct

SEQ ID NO: 3868405 - DNA, 25 bp, Homo sapien
tgaggctggttccatgggaagccca

SEQ ID NO: 3868406 - DNA, 25 bp, Homo sapien
tctgaaatcagctacatgtggcctc

SEQ ID NO: 3868407 - DNA, 25 bp, Homo sapien
tctttgttatgctgacgggtggtcc

SEQ ID NO: 3868408 - DNA, 25 bp, Homo sapien
gatgcatccagtagaagccccgtaa

SEQ ID NO: 3868409 - DNA, 25 bp, Homo sapien
cacttaacggcgatgggaccttgga

SEQ ID NO: 3868410 - DNA, 25 bp, Homo sapien
tatagggatttgaactgaggaagcc

SEQ ID NO: 3868411 - DNA, 25 bp, Homo sapien
tcactgtgaggtatgatgaaggcct

SEQ ID NO: 3868412 - DNA, 25 bp, Homo sapien
tctttaggtgcaaaaagccctctct

SEQ ID NO: 3868413 - DNA, 25 bp, Homo sapien
tcagatggacatggccctcagatgg

SEQ ID NO: 3868414 - DNA, 25 bp, Homo sapien
caagcatgccagtaaatgcatagcc

SEQ ID NO: 3868415 - DNA, 25 bp, Homo sapien
gggatggaacctgtacctataaata

SEQ ID NO: 3868416 - DNA, 25 bp, Homo sapien
tcatgagtgccgtgatggcaaagcc

SEQ ID NO: 3868417 - DNA, 25 bp, Homo sapien
ctgccagggattaatggagggaccc

SEQ ID NO: 3868418 - DNA, 25 bp, Homo sapien
tttgcagaaccacacgatgagccag

SEQ ID NO: 3868419 - DNA, 25 bp, Homo sapien
cacgcacagtgagggatcgctcaac

SEQ ID NO: 3868420 - DNA, 25 bp, Homo sapien
ggctcccggcgtaaatgcactgagt

SEQ ID NO: 3868421 - DNA, 25 bp, Homo sapien
taatcgagacgcttttctgcggctc

SEQ ID NO: 3868422 - DNA, 25 bp, Homo sapien
cataggcagcacacaggtttctgtg

SEQ ID NO: 3868423 - DNA, 25 bp, Homo sapien
acacaggtttctgtgcccgggccca

SEQ ID NO: 3868424 - DNA, 25 bp, Homo sapien
ccagcataggcagcacacaggtttc

SEQ ID NO: 3868425 - DNA, 25 bp, Homo sapien
cagcataggcagcacacaggtttct

SEQ ID NO: 3868426 - DNA, 25 bp, Homo sapien
ttggaccagcgccacgccctggaat

SEQ ID NO: 3868427 - DNA, 25 bp, Homo sapien
ctgcaggaagtgattccgtgagccg

SEQ ID NO: 3868428 - DNA, 25 bp, Homo sapien
tcagagttcacagcgcgtgtatgtg

SEQ ID NO: 3868429 - DNA, 25 bp, Homo sapien
cctggaatcttgactccctcattga

SEQ ID NO: 3868430 - DNA, 25 bp, Homo sapien
aaccctcggaggactacacccagct

SEQ ID NO: 3868431 - DNA, 25 bp, Homo sapien
ctcaggcaaccctcggaggactaca

SEQ ID NO: 3868432 - DNA, 25 bp, Homo sapien
gtgatgtttttactgtccacaccat

SEQ ID NO: 3868433 - DNA, 25 bp, Homo sapien
gctccccaggtgatgtttttactgt

SEQ ID NO: 3868434 - DNA, 25 bp, Homo sapien
gatgatgtttcagatgccaggcgtg

SEQ ID NO: 3868435 - DNA, 25 bp, Homo sapien
tggttgcatagcctcctaaagccat

SEQ ID NO: 3868436 - DNA, 25 bp, Homo sapien
ccaggcgtgtggttgcatagcctcc

SEQ ID NO: 3868437 - DNA, 25 bp, Homo sapien
cagatgccaggcgtgtggttgcata

SEQ ID NO: 3868438 - DNA, 25 bp, Homo sapien
aaacgcacaattggtggggatggtc

SEQ ID NO: 3868439 - DNA, 25 bp, Homo sapien
gatggtcctcgttgtaacctccttc

SEQ ID NO: 3868440 - DNA, 25 bp, Homo sapien
tcatttctgccttaaatttgaggtg

SEQ ID NO: 3868441 - DNA, 25 bp, Homo sapien
ggcaatgatgataattaatttcaaa

SEQ ID NO: 3868442 - DNA, 25 bp, Homo sapien
cgcctggtttgtcctttgcccccat

SEQ ID NO: 3868443 - DNA, 25 bp, Homo sapien
gtagtggcgtcagcacatccttggg

SEQ ID NO: 3868444 - DNA, 25 bp, Homo sapien
caatattcatatcaagctggagtag

SEQ ID NO: 3868445 - DNA, 25 bp, Homo sapien
taggactcccgagatttccctctgc

SEQ ID NO: 3868446 - DNA, 25 bp, Homo sapien
taaattcttgggcattactattgat

SEQ ID NO: 3868447 - DNA, 25 bp, Homo sapien
gatccccgtggtactgtttcaaaga

SEQ ID NO: 3868448 - DNA, 25 bp, Homo sapien
cagctgttgacatatattgagttac

SEQ ID NO: 3868449 - DNA, 25 bp, Homo sapien
ccgtaaagtgtgctgttctcaagta

SEQ ID NO: 3868450 - DNA, 25 bp, Homo sapien
ttcaaagatctgttcaccgtaaagt

SEQ ID NO: 3868451 - DNA, 25 bp, Homo sapien
caaaatggcccaattatttggaaga

SEQ ID NO: 3868452 - DNA, 25 bp, Homo sapien
acagggcacttgatctgggctcata

SEQ ID NO: 3868453 - DNA, 25 bp, Homo sapien
tgtgacagcgggcaccaaaatggcc

SEQ ID NO: 3868454 - DNA, 25 bp, Homo sapien
acagtcagatatgagagacagggca

SEQ ID NO: 3868455 - DNA, 25 bp, Homo sapien
gctgctcgcgccctaggaatactct

SEQ ID NO: 3868456 - DNA, 25 bp, Homo sapien
aatactctccgatggcggcgtgcag

SEQ ID NO: 3868457 - DNA, 25 bp, Homo sapien
tctaggccgccaacatcgaaatcat

SEQ ID NO: 3868458 - DNA, 25 bp, Homo sapien
gcagttggtaagattagaacagccc

SEQ ID NO: 3868459 - DNA, 25 bp, Homo sapien
aggaattcggctgcaagaacttggc

SEQ ID NO: 3868460 - DNA, 25 bp, Homo sapien
cagagctggctgattggaattgttg

SEQ ID NO: 3868461 - DNA, 25 bp, Homo sapien
tcacagcaacttcggcctttttgaa

SEQ ID NO: 3868462 - DNA, 25 bp, Homo sapien
aaaaattgtcaactgggagagccac

SEQ ID NO: 3868463 - DNA, 25 bp, Homo sapien
gaagggaatatagcccaaactggac

SEQ ID NO: 3868464 - DNA, 25 bp, Homo sapien
cgagagggaagggaatatagcccaa

SEQ ID NO: 3868465 - DNA, 25 bp, Homo sapien
ctgcgagagggaagggaatatagcc

SEQ ID NO: 3868466 - DNA, 25 bp, Homo sapien
ggaatatagcccaaactggacttca

SEQ ID NO: 3868467 - DNA, 25 bp, Homo sapien
tacatgaaaagagttccgttccact

SEQ ID NO: 3868468 - DNA, 25 bp, Homo sapien
gaagcccagaccaatcgaaaacttg

SEQ ID NO: 3868469 - DNA, 25 bp, Homo sapien
tccctggatggcttggacgaggcct

SEQ ID NO: 3868470 - DNA, 25 bp, Homo sapien
ggtagagccggcaccacattcatat

SEQ ID NO: 3868471 - DNA, 25 bp, Homo sapien
ggggcttctcggagatctaaggcca

SEQ ID NO: 3868472 - DNA, 25 bp, Homo sapien
cttgggggcttctcggagatctaag

SEQ ID NO: 3868473 - DNA, 25 bp, Homo sapien
gggcttctcggagatctaaggccat

SEQ ID NO: 3868474 - DNA, 25 bp, Homo sapien
tggtcttgggggcttctcggagatc

SEQ ID NO: 3868475 - DNA, 25 bp, Homo sapien
agcaacaaggaggaagatttagaac

SEQ ID NO: 3868476 - DNA, 25 bp, Homo sapien
ccaaagaaattcacgttgagcgcta

SEQ ID NO: 3868477 - DNA, 25 bp, Homo sapien
cgttgagcgctaatgtaaaatagca

SEQ ID NO: 3868478 - DNA, 25 bp, Homo sapien
agaataattacatggaaagcagttt

SEQ ID NO: 3868479 - DNA, 25 bp, Homo sapien
tgacacctgtttcccttcactgctt

SEQ ID NO: 3868480 - DNA, 25 bp, Homo sapien
caggaatgatgctccaagtgccagc

SEQ ID NO: 3868481 - DNA, 25 bp, Homo sapien
ttttgtccccagtgcgcgtgctcac

SEQ ID NO: 3868482 - DNA, 25 bp, Homo sapien
gcgagggcccacaaatctccaggca

SEQ ID NO: 3868483 - DNA, 25 bp, Homo sapien
tcagtggaaggtgtctactgccacc

SEQ ID NO: 3868484 - DNA, 25 bp, Homo sapien
tccaagcgggactttaacagcctgg

SEQ ID NO: 3868485 - DNA, 25 bp, Homo sapien
tagctgcccctattgttccaagcgg

SEQ ID NO: 3868486 - DNA, 25 bp, Homo sapien
gaccaaggtggtctatagctgcccc

SEQ ID NO: 3868487 - DNA, 25 bp, Homo sapien
accaggccctggcatggcgccggcc

SEQ ID NO: 3868488 - DNA, 25 bp, Homo sapien
cagacaggggcagtgtccgagagag

SEQ ID NO: 3868489 - DNA, 25 bp, Homo sapien
gggcagtgtccgagagagacccctt

SEQ ID NO: 3868490 - DNA, 25 bp, Homo sapien
cagtgtccgagagagaccccttgct

SEQ ID NO: 3868491 - DNA, 25 bp, Homo sapien
tgtaactcctaggtgagtgcctcct

SEQ ID NO: 3868492 - DNA, 25 bp, Homo sapien
tgctggtgggagaccgccttgggct

SEQ ID NO: 3868493 - DNA, 25 bp, Homo sapien
tctgtgcagactgtgtcaggtaggg

SEQ ID NO: 3868494 - DNA, 25 bp, Homo sapien
tgtgggaatgccactcagggtttgt

SEQ ID NO: 3868495 - DNA, 25 bp, Homo sapien
caagggcaagatggaggaagcaggg

SEQ ID NO: 3868496 - DNA, 25 bp, Homo sapien
ggcaagatggaggaagcaggggtgg

SEQ ID NO: 3868497 - DNA, 25 bp, Homo sapien
agatggaggaagcaggggtggtcat

SEQ ID NO: 3868498 - DNA, 25 bp, Homo sapien
caagatggaggaagcaggggtggtc

SEQ ID NO: 3868499 - DNA, 25 bp, Homo sapien
ggagtctgagttttaacgtgcccaa

SEQ ID NO: 3868500 - DNA, 25 bp, Homo sapien
taacgtgcccaattccagctgaggg

SEQ ID NO: 3868501 - DNA, 25 bp, Homo sapien
tgagttttaacgtgcccaattccag

SEQ ID NO: 3868502 - DNA, 25 bp, Homo sapien
gcagcccggagtctgagttttaacg

SEQ ID NO: 3868503 - DNA, 25 bp, Homo sapien
gaacatttgcctggaaatgagcagc

SEQ ID NO: 3868504 - DNA, 25 bp, Homo sapien
ctagaacatttgcctggaaatgagc

SEQ ID NO: 3868505 - DNA, 25 bp, Homo sapien
aacatttgcctggaaatgagcagca

SEQ ID NO: 3868506 - DNA, 25 bp, Homo sapien
gcagcagcagccggcgcacaggcag

SEQ ID NO: 3868507 - DNA, 25 bp, Homo sapien
atcctgaccagaaccttgaggggct

SEQ ID NO: 3868508 - DNA, 25 bp, Homo sapien
tcagcccaaagcagacttttaacag

SEQ ID NO: 3868509 - DNA, 25 bp, Homo sapien
cctgaccagaaccttgaggggctca

SEQ ID NO: 3868510 - DNA, 25 bp, Homo sapien
tcttcatcttcagcccaaagcagac

SEQ ID NO: 3868511 - DNA, 25 bp, Homo sapien
tccaccaactttggcagctccttct

SEQ ID NO: 3868512 - DNA, 25 bp, Homo sapien
ccagctggccgcgtgtcagggcccc

SEQ ID NO: 3868513 - DNA, 25 bp, Homo sapien
gtccaccaactttggcagctccttc

SEQ ID NO: 3868514 - DNA, 25 bp, Homo sapien
gtcagggccccctcatttatgtcca

SEQ ID NO: 3868515 - DNA, 25 bp, Homo sapien
ttgcgtggaaatctgctttgcctgg

SEQ ID NO: 3868516 - DNA, 25 bp, Homo sapien
tgggctgtagattccgcccgctgtc

SEQ ID NO: 3868517 - DNA, 25 bp, Homo sapien
tggtggttcgcgtgcccctgccttt

SEQ ID NO: 3868518 - DNA, 25 bp, Homo sapien
tcagccggtgttggtggttcgcgtg

SEQ ID NO: 3868519 - DNA, 25 bp, Homo sapien
ctcatccttggcagagttcctgcca

SEQ ID NO: 3868520 - DNA, 25 bp, Homo sapien
agactcatccttggcagagttcctg

SEQ ID NO: 3868521 - DNA, 25 bp, Homo sapien
tcagactcatccttggcagagttcc

SEQ ID NO: 3868522 - DNA, 25 bp, Homo sapien
ctcagactcatccttggcagagttc

SEQ ID NO: 3868523 - DNA, 25 bp, Homo sapien
tggcagacatggagggggtgtcgcc

SEQ ID NO: 3868524 - DNA, 25 bp, Homo sapien
gaaataggggtgctctgccagatgt

SEQ ID NO: 3868525 - DNA, 25 bp, Homo sapien
tggagggggtgtcgccatctggttc

SEQ ID NO: 3868526 - DNA, 25 bp, Homo sapien
aggtacccaagatgaaataggggtg

SEQ ID NO: 3868527 - DNA, 25 bp, Homo sapien
ccacatgactcggaggatgcaggca

SEQ ID NO: 3868528 - DNA, 25 bp, Homo sapien
catgactcggaggatgcaggcagta

SEQ ID NO: 3868529 - DNA, 25 bp, Homo sapien
tcggaggatgcaggcagtaattaaa

SEQ ID NO: 3868530 - DNA, 25 bp, Homo sapien
gactcggaggatgcaggcagtaatt

SEQ ID NO: 3868531 - DNA, 25 bp, Homo sapien
tgaaaggcacgagtttgtcgggaac

SEQ ID NO: 3868532 - DNA, 25 bp, Homo sapien
aaatgaaaggcacgagtttgtcggg

SEQ ID NO: 3868533 - DNA, 25 bp, Homo sapien
aaaggcacgagtttgtcgggaactg

SEQ ID NO: 3868534 - DNA, 25 bp, Homo sapien
ggaaatgaaaggcacgagtttgtcg

SEQ ID NO: 3868535 - DNA, 25 bp, Homo sapien
agtccctcgtcccacgtcagtttgg

SEQ ID NO: 3868536 - DNA, 25 bp, Homo sapien
tcttgggtccaacaccgatcggact

SEQ ID NO: 3868537 - DNA, 25 bp, Homo sapien
cctcttggctctgcatcgggctgtg

SEQ ID NO: 3868538 - DNA, 25 bp, Homo sapien
ggtccaacaccgatcggacttcagt

SEQ ID NO: 3868539 - DNA, 25 bp, Homo sapien
tggactgcattcctgcgtcaaccct

SEQ ID NO: 3868540 - DNA, 25 bp, Homo sapien
tccggcgattccctgtgagctttgt

SEQ ID NO: 3868541 - DNA, 25 bp, Homo sapien
ttgtcccttcgaggagcctcctgga

SEQ ID NO: 3868542 - DNA, 25 bp, Homo sapien
tgtctccttgacagggtgggaggaa

SEQ ID NO: 3868543 - DNA, 25 bp, Homo sapien
caggcgggcggcgtggcagcgccag

SEQ ID NO: 3868544 - DNA, 25 bp, Homo sapien
gggtatcacgactggcaaagaaagt

SEQ ID NO: 3868545 - DNA, 25 bp, Homo sapien
cgtggcagcgccagaaatctgacgg

SEQ ID NO: 3868546 - DNA, 25 bp, Homo sapien
ctgataagagcccagaaggagccca

SEQ ID NO: 3868547 - DNA, 25 bp, Homo sapien
cgagcagataaagtgaggggctgag

SEQ ID NO: 3868548 - DNA, 25 bp, Homo sapien
tgcgagcagataaagtgaggggctg

SEQ ID NO: 3868549 - DNA, 25 bp, Homo sapien
tgtgcgagcagataaagtgaggggc

SEQ ID NO: 3868550 - DNA, 25 bp, Homo sapien
ctgtgcgagcagataaagtgagggg

SEQ ID NO: 3868551 - DNA, 25 bp, Homo sapien
gcgccgggcccaccgcttgccaggc

SEQ ID NO: 3868552 - DNA, 25 bp, Homo sapien
tggtaatgaactctcagagggtccg

SEQ ID NO: 3868553 - DNA, 25 bp, Homo sapien
cctggggaatgtggagcaggcgccg

SEQ ID NO: 3868554 - DNA, 25 bp, Homo sapien
ggcccaccgcttgccaggccgaggt

SEQ ID NO: 3868555 - DNA, 25 bp, Homo sapien
gccgggctcggcagcgcggcccgca

SEQ ID NO: 3868556 - DNA, 25 bp, Homo sapien
tcagaaggttggagttttaatgatg

SEQ ID NO: 3868557 - DNA, 25 bp, Homo sapien
cagaaggttggagttttaatgatgc

SEQ ID NO: 3868558 - DNA, 25 bp, Homo sapien
aaggttggagttttaatgatgcagg

SEQ ID NO: 3868559 - DNA, 25 bp, Homo sapien
cagaaaattactggagctccgcggg

SEQ ID NO: 3868560 - DNA, 25 bp, Homo sapien
ttcttagaggcctgctaaattgctg

SEQ ID NO: 3868561 - DNA, 25 bp, Homo sapien
tagtcacagtgatatttgagcccct

SEQ ID NO: 3868562 - DNA, 25 bp, Homo sapien
ttgattttggttagtcacagtgata

SEQ ID NO: 3868563 - DNA, 25 bp, Homo sapien
cctttattagagttacagctcagct

SEQ ID NO: 3868564 - DNA, 25 bp, Homo sapien
agtgcctgtcggctccttggcagag

SEQ ID NO: 3868565 - DNA, 25 bp, Homo sapien
tccctttgtaacactaatagctgac

SEQ ID NO: 3868566 - DNA, 25 bp, Homo sapien
taatagctgactagctaagtgcctg

SEQ ID NO: 3868567 - DNA, 25 bp, Homo sapien
tcccgtgcgaactggtttcaaatcc

SEQ ID NO: 3868568 - DNA, 25 bp, Homo sapien
gatggtccaatctcccgtgcgaact

SEQ ID NO: 3868569 - DNA, 25 bp, Homo sapien
cttggagatggtccaatctcccgtg

SEQ ID NO: 3868570 - DNA, 25 bp, Homo sapien
tttcaaatcctcgtcgctggttggg

SEQ ID NO: 3868571 - DNA, 25 bp, Homo sapien
actcgaagtggctcctcggcagagg

SEQ ID NO: 3868572 - DNA, 25 bp, Homo sapien
accggttccagcgttcagagactcg

SEQ ID NO: 3868573 - DNA, 25 bp, Homo sapien
gattccttcagtaaagccctcggca

SEQ ID NO: 3868574 - DNA, 25 bp, Homo sapien
atacaagggccgtcacagctgtgct

SEQ ID NO: 3868575 - DNA, 25 bp, Homo sapien
gatctttggagccatctccatgctg

SEQ ID NO: 3868576 - DNA, 25 bp, Homo sapien
gctccgccgatccagccagttcttt

SEQ ID NO: 3868577 - DNA, 25 bp, Homo sapien
ccatgctgtagatctgccggcaggt

SEQ ID NO: 3868578 - DNA, 25 bp, Homo sapien
tcttttccaccaagaggttgatctt

SEQ ID NO: 3868579 - DNA, 25 bp, Homo sapien
ccattgcacccggcctcatcagttt

SEQ ID NO: 3868580 - DNA, 25 bp, Homo sapien
catatttcagaccacccatttttat

SEQ ID NO: 3868581 - DNA, 25 bp, Homo sapien
ttgcacccggcctcatcagtttttt

SEQ ID NO: 3868582 - DNA, 25 bp, Homo sapien
gctgatctggaactcaagcaatcca

SEQ ID NO: 3868583 - DNA, 25 bp, Homo sapien
ctcctgaactgaggggtaggcaaga

SEQ ID NO: 3868584 - DNA, 25 bp, Homo sapien
ctgaggggtaggcaagagcttggct

SEQ ID NO: 3868585 - DNA, 25 bp, Homo sapien
tgaactgaggggtaggcaagagctt

SEQ ID NO: 3868586 - DNA, 25 bp, Homo sapien
ggtaggcaagagcttggctggaagt

SEQ ID NO: 3868587 - DNA, 25 bp, Homo sapien
tcctgccctccttatcctctgtctc

SEQ ID NO: 3868588 - DNA, 25 bp, Homo sapien
agctcagggcccgtcacgtggagct

SEQ ID NO: 3868589 - DNA, 25 bp, Homo sapien
gctttttcattaggccggcacttcc

SEQ ID NO: 3868590 - DNA, 25 bp, Homo sapien
tcagggcccgtcacgtggagctgct

SEQ ID NO: 3868591 - DNA, 25 bp, Homo sapien
agacccacggacctcacactgtttg

SEQ ID NO: 3868592 - DNA, 25 bp, Homo sapien
tctttgtttgcatcttgtggaagag

SEQ ID NO: 3868593 - DNA, 25 bp, Homo sapien
cactgtttgcactggaccttttctt

SEQ ID NO: 3868594 - DNA, 25 bp, Homo sapien
gagtgactttgacccttgaattcta

SEQ ID NO: 3868595 - DNA, 25 bp, Homo sapien
catcttgggagtttccagagggcac

SEQ ID NO: 3868596 - DNA, 25 bp, Homo sapien
accaaactggcctttaggctggttg

SEQ ID NO: 3868597 - DNA, 25 bp, Homo sapien
ccaaagcttccggtgtcctcctggg

SEQ ID NO: 3868598 - DNA, 25 bp, Homo sapien
gatgtacaccaaactggcctttagg

SEQ ID NO: 3868599 - DNA, 25 bp, Homo sapien
tggttgtacatgtgttcccggtgtg

SEQ ID NO: 3868600 - DNA, 25 bp, Homo sapien
tggtttccaagggtgcgccagagtg

SEQ ID NO: 3868601 - DNA, 25 bp, Homo sapien
gaccaccttcatgattttctgaata

SEQ ID NO: 3868602 - DNA, 25 bp, Homo sapien
tggcgcctggcacgatgggtgttgc

SEQ ID NO: 3868603 - DNA, 25 bp, Homo sapien
gtgttgctgctgtacaaagcccctg

SEQ ID NO: 3868604 - DNA, 25 bp, Homo sapien
agatggggtgcgtgctgccctccag

SEQ ID NO: 3868605 - DNA, 25 bp, Homo sapien
cagatggggtgcgtgctgccctcca

SEQ ID NO: 3868606 - DNA, 25 bp, Homo sapien
gcagatggggtgcgtgctgccctcc

SEQ ID NO: 3868607 - DNA, 25 bp, Homo sapien
agcagatggggtgcgtgctgccctc

SEQ ID NO: 3868608 - DNA, 25 bp, Homo sapien
ttcagctccgttccctgatctctga

SEQ ID NO: 3868609 - DNA, 25 bp, Homo sapien
tggaatagaaatcgccttcaggacc

SEQ ID NO: 3868610 - DNA, 25 bp, Homo sapien
agtttggagctcagcattggtgtct

SEQ ID NO: 3868611 - DNA, 25 bp, Homo sapien
taggtagtaagactgcgggctccag

SEQ ID NO: 3868612 - DNA, 25 bp, Homo sapien
tccaggcggcgtgtcgtgcaacgtt

SEQ ID NO: 3868613 - DNA, 25 bp, Homo sapien
cattgatttttactgcctccgcgca

SEQ ID NO: 3868614 - DNA, 25 bp, Homo sapien
gagttggcgcgttctgataataaaa

SEQ ID NO: 3868615 - DNA, 25 bp, Homo sapien
ccgatgagccgatttgtgttcccag

SEQ ID NO: 3868616 - DNA, 25 bp, Homo sapien
ccaagatgtgttttgggtgccatga

SEQ ID NO: 3868617 - DNA, 25 bp, Homo sapien
ggctcaaaagttcggcttgtccatg

SEQ ID NO: 3868618 - DNA, 25 bp, Homo sapien
ttgaacgtgtgttctggcaatcggg

SEQ ID NO: 3868619 - DNA, 25 bp, Homo sapien
tgtccatgataagcttgagatgccc

SEQ ID NO: 3868620 - DNA, 25 bp, Homo sapien
ccccattgggctccactgtacttgg

SEQ ID NO: 3868621 - DNA, 25 bp, Homo sapien
cattgggctccactgtacttggctt

SEQ ID NO: 3868622 - DNA, 25 bp, Homo sapien
tggctctgcaccagccttggggccc

SEQ ID NO: 3868623 - DNA, 25 bp, Homo sapien
actgtacttggcttcctcgtcgaca

SEQ ID NO: 3868624 - DNA, 25 bp, Homo sapien
cagggagaggcagtaggagaagggt

SEQ ID NO: 3868625 - DNA, 25 bp, Homo sapien
aacagcagcagggagaggcagtagg

SEQ ID NO: 3868626 - DNA, 25 bp, Homo sapien
cagcagcagggagaggcagtaggag

SEQ ID NO: 3868627 - DNA, 25 bp, Homo sapien
cagcagggagaggcagtaggagaag

SEQ ID NO: 3868628 - DNA, 25 bp, Homo sapien
ctgggactggttgggcagagtctgc

SEQ ID NO: 3868629 - DNA, 25 bp, Homo sapien
tctccaggctgggttctgggactgg

SEQ ID NO: 3868630 - DNA, 25 bp, Homo sapien
gactggttgggcagagtctgctcca

SEQ ID NO: 3868631 - DNA, 25 bp, Homo sapien
atggcttccatccagcatagcagct

SEQ ID NO: 3868632 - DNA, 25 bp, Homo sapien
actgagtttgatctgggagctgaag

SEQ ID NO: 3868633 - DNA, 25 bp, Homo sapien
gagtttgatctgggagctgaagctg

SEQ ID NO: 3868634 - DNA, 25 bp, Homo sapien
ctgagtttgatctgggagctgaagc

SEQ ID NO: 3868635 - DNA, 25 bp, Homo sapien
gactgagtttgatctgggagctgaa

SEQ ID NO: 3868636 - DNA, 25 bp, Homo sapien
ttcccacaagccctttggaatgagg

SEQ ID NO: 3868637 - DNA, 25 bp, Homo sapien
cttcccacaagccctttggaatgag

SEQ ID NO: 3868638 - DNA, 25 bp, Homo sapien
ctcttcccacaagccctttggaatg

SEQ ID NO: 3868639 - DNA, 25 bp, Homo sapien
tcttcccacaagccctttggaatga

SEQ ID NO: 3868640 - DNA, 25 bp, Homo sapien
tggtggaagagttgcagggggtcct

SEQ ID NO: 3868641 - DNA, 25 bp, Homo sapien
cccaggaactcagaaagccacccag

SEQ ID NO: 3868642 - DNA, 25 bp, Homo sapien
ctggtggaagagttgcagggggtcc

SEQ ID NO: 3868643 - DNA, 25 bp, Homo sapien
tgacagcagcaggtaaatgcccggg

SEQ ID NO: 3868644 - DNA, 25 bp, Homo sapien
tgatctatttgtacagccttcaaac

SEQ ID NO: 3868645 - DNA, 25 bp, Homo sapien
gggaggcctcagacttctcgctggc

SEQ ID NO: 3868646 - DNA, 25 bp, Homo sapien
gcctgggattcctccgtgacagcag

SEQ ID NO: 3868647 - DNA, 25 bp, Homo sapien
taagtgtgcagactatttgtcctga

SEQ ID NO: 3868648 - DNA, 25 bp, Homo sapien
agtgtgcagactatttgtcctgata

SEQ ID NO: 3868649 - DNA, 25 bp, Homo sapien
ggtgtaagtgtgcagactatttgtc

SEQ ID NO: 3868650 - DNA, 25 bp, Homo sapien
tgtaagtgtgcagactatttgtcct

SEQ ID NO: 3868651 - DNA, 25 bp, Homo sapien
tcggcagcagaactccctcttaggg

SEQ ID NO: 3868652 - DNA, 25 bp, Homo sapien
caactagacatggagctagggacgt

SEQ ID NO: 3868653 - DNA, 25 bp, Homo sapien
ttggtgtgttgtccctatcggcccc

SEQ ID NO: 3868654 - DNA, 25 bp, Homo sapien
tgctgcccctgcttagtgatgccat

SEQ ID NO: 3868655 - DNA, 25 bp, Homo sapien
ctccagagcctttctgcatctcaca

SEQ ID NO: 3868656 - DNA, 25 bp, Homo sapien
ccactccagagcctttctgcatctc

SEQ ID NO: 3868657 - DNA, 25 bp, Homo sapien
agagcctttctgcatctcacacatg

SEQ ID NO: 3868658 - DNA, 25 bp, Homo sapien
gggccactccagagcctttctgcat

SEQ ID NO: 3868659 - DNA, 25 bp, Homo sapien
gagatggccgcaaacaccctttctc

SEQ ID NO: 3868660 - DNA, 25 bp, Homo sapien
aggacttcagagatggccgcaaaca

SEQ ID NO: 3868661 - DNA, 25 bp, Homo sapien
cgcaaacaccctttctcttaacagg

SEQ ID NO: 3868662 - DNA, 25 bp, Homo sapien
ctcttaacaggatgtgttcgggtgc

SEQ ID NO: 3868663 - DNA, 25 bp, Homo sapien
tcacagccatagctagatgagctct

SEQ ID NO: 3868664 - DNA, 25 bp, Homo sapien
cctgtaaggacagatgaatttactt

SEQ ID NO: 3868665 - DNA, 25 bp, Homo sapien
gcgtgacttctgcaagggtcacttt

SEQ ID NO: 3868666 - DNA, 25 bp, Homo sapien
agctagatgagctctgctgcgtgac

SEQ ID NO: 3868667 - DNA, 25 bp, Homo sapien
ctggcccctgtccaaagagcttttg

SEQ ID NO: 3868668 - DNA, 25 bp, Homo sapien
ggcggatgtggacccctggcccctg

SEQ ID NO: 3868669 - DNA, 25 bp, Homo sapien
tctgagtcagctgcaatggcaggac

SEQ ID NO: 3868670 - DNA, 25 bp, Homo sapien
tcccggttctccaaggcatttatag

SEQ ID NO: 3868671 - DNA, 25 bp, Homo sapien
tttttccagcttcttctgcaggagc

SEQ ID NO: 3868672 - DNA, 25 bp, Homo sapien
cttgaggaaggagctgcttgttttc

SEQ ID NO: 3868673 - DNA, 25 bp, Homo sapien
tccagcttcttctgcaggagcccac

SEQ ID NO: 3868674 - DNA, 25 bp, Homo sapien
tccttgaggaaggagctgcttgttt

SEQ ID NO: 3868675 - DNA, 25 bp, Homo sapien
ctaatgaaaatcctggagtaatgca

SEQ ID NO: 3868676 - DNA, 25 bp, Homo sapien
gcataagtggttctctgataataaa

SEQ ID NO: 3868677 - DNA, 25 bp, Homo sapien
cgagtcttaaaaaccagcccacgag

SEQ ID NO: 3868678 - DNA, 25 bp, Homo sapien
ctataaccaggaggacaataatctt

SEQ ID NO: 3868679 - DNA, 25 bp, Homo sapien
tgttgggattgctggcagggcttct

SEQ ID NO: 3868680 - DNA, 25 bp, Homo sapien
gtgttgggattgctggcagggcttc

SEQ ID NO: 3868681 - DNA, 25 bp, Homo sapien
cagtgttgggattgctggcagggct

SEQ ID NO: 3868682 - DNA, 25 bp, Homo sapien
gttgggattgctggcagggcttctc

SEQ ID NO: 3868683 - DNA, 25 bp, Homo sapien
ccactggagcccccacatttcttct

SEQ ID NO: 3868684 - DNA, 25 bp, Homo sapien
tccactggagcccccacatttcttc

SEQ ID NO: 3868685 - DNA, 25 bp, Homo sapien
ctccactggagcccccacatttctt

SEQ ID NO: 3868686 - DNA, 25 bp, Homo sapien
tgaggttgtgaaattcccctgggga

SEQ ID NO: 3868687 - DNA, 25 bp, Homo sapien
cctgaggttgtgaaattcccctggg

SEQ ID NO: 3868688 - DNA, 25 bp, Homo sapien
ggggagagggttgcatctctgatag

SEQ ID NO: 3868689 - DNA, 25 bp, Homo sapien
ctgaggttgtgaaattcccctgggg

SEQ ID NO: 3868690 - DNA, 25 bp, Homo sapien
tggaatctactggagttaagtgggc

SEQ ID NO: 3868691 - DNA, 25 bp, Homo sapien
aatctactggagttaagtgggccca

SEQ ID NO: 3868692 - DNA, 25 bp, Homo sapien
cagctggcttggcccgattttggaa

SEQ ID NO: 3868693 - DNA, 25 bp, Homo sapien
ccgattttggaatctactggagtta

SEQ ID NO: 3868694 - DNA, 25 bp, Homo sapien
gggaaggcgagtgacagccgcaggg

SEQ ID NO: 3868695 - DNA, 25 bp, Homo sapien
ggaaggcgagtgacagccgcagggc

SEQ ID NO: 3868696 - DNA, 25 bp, Homo sapien
ccacagctggtgccgcccttgggtg

SEQ ID NO: 3868697 - DNA, 25 bp, Homo sapien
gggacggcggcgtcgagcccacagc

SEQ ID NO: 3868698 - DNA, 25 bp, Homo sapien
ggctgcgggcccgccagccagatgt

SEQ ID NO: 3868699 - DNA, 25 bp, Homo sapien
ccgatcgggcctccgctttggggtg

SEQ ID NO: 3868700 - DNA, 25 bp, Homo sapien
cgctcacgcggcccgggtggggcct

SEQ ID NO: 3868701 - DNA, 25 bp, Homo sapien
agctcgctcacgcggcccgggtggg

SEQ ID NO: 3868702 - DNA, 25 bp, Homo sapien
gctcgctcacgcggcccgggtgggg

SEQ ID NO: 3868703 - DNA, 25 bp, Homo sapien
tcgctcacgcggcccgggtggggcc

SEQ ID NO: 3868704 - DNA, 25 bp, Homo sapien
aaattcccgtcagcttgcaagggca

SEQ ID NO: 3868705 - DNA, 25 bp, Homo sapien
tggagaatttgacaatttctgcaaa

SEQ ID NO: 3868706 - DNA, 25 bp, Homo sapien
caggaaaaccccgatacactgtggt

SEQ ID NO: 3868707 - DNA, 25 bp, Homo sapien
gtccccattatttgggtagccagga

SEQ ID NO: 3868708 - DNA, 25 bp, Homo sapien
caaggcagtgttaggaccagttccc

SEQ ID NO: 3868709 - DNA, 25 bp, Homo sapien
tgctccccggctctttgaaaaaggc

SEQ ID NO: 3868710 - DNA, 25 bp, Homo sapien
ggtgcagacatgctccccggctctt

SEQ ID NO: 3868711 - DNA, 25 bp, Homo sapien
gggagtatatgctttttcaaggcag

SEQ ID NO: 3868712 - DNA, 25 bp, Homo sapien
ctgctgctttgtcccgattctagcc

SEQ ID NO: 3868713 - DNA, 25 bp, Homo sapien
ttcgtctccacgctttgctttctat

SEQ ID NO: 3868714 - DNA, 25 bp, Homo sapien
ggaacgatgagagcggctaagtcta

SEQ ID NO: 3868715 - DNA, 25 bp, Homo sapien
gattctagcccctcggttgggtgcc

SEQ ID NO: 3868716 - DNA, 25 bp, Homo sapien
ggcaccggcaccctcgacacccagg

SEQ ID NO: 3868717 - DNA, 25 bp, Homo sapien
acacccaggccggctttctgtgctg

SEQ ID NO: 3868718 - DNA, 25 bp, Homo sapien
ccaggccggctttctgtgctggctc

SEQ ID NO: 3868719 - DNA, 25 bp, Homo sapien
acccaggccggctttctgtgctggc

SEQ ID NO: 3868720 - DNA, 25 bp, Homo sapien
tccgccaggagttcattgtctgcac

SEQ ID NO: 3868721 - DNA, 25 bp, Homo sapien
ggcagggagcctccgccaggagttc

SEQ ID NO: 3868722 - DNA, 25 bp, Homo sapien
gggagcctccgccaggagttcattg

SEQ ID NO: 3868723 - DNA, 25 bp, Homo sapien
ttcattgtctgcacggcgccggcgg

SEQ ID NO: 3868724 - DNA, 25 bp, Homo sapien
ggccggcgacttggcaccggcctgg

SEQ ID NO: 3868725 - DNA, 25 bp, Homo sapien
ccgggccgatccgagagccagagaa

SEQ ID NO: 3868726 - DNA, 25 bp, Homo sapien
ttccgagccactgcggccgtttcga

SEQ ID NO: 3868727 - DNA, 25 bp, Homo sapien
gcgcgcctcgcgctgagcaccgcag

SEQ ID NO: 3868728 - DNA, 25 bp, Homo sapien
cgtctgatccgagccggagcagtgc

SEQ ID NO: 3868729 - DNA, 25 bp, Homo sapien
gaccacaaagaagacaggagcgcga

SEQ ID NO: 3868730 - DNA, 25 bp, Homo sapien
atcgctcggtgctgttggccctctc

SEQ ID NO: 3868731 - DNA, 25 bp, Homo sapien
ctttattatgtgtctctgcagtgca

SEQ ID NO: 3868732 - DNA, 25 bp, Homo sapien
gagccgaggccaatcgtccccctcc

SEQ ID NO: 3868733 - DNA, 25 bp, Homo sapien
accccagagccgaggccaatcgtcc

SEQ ID NO: 3868734 - DNA, 25 bp, Homo sapien
cccagagccgaggccaatcgtcccc

SEQ ID NO: 3868735 - DNA, 25 bp, Homo sapien
cagagccgaggccaatcgtccccct

SEQ ID NO: 3868736 - DNA, 25 bp, Homo sapien
ggccctggcatgtcccaaagcgcat

SEQ ID NO: 3868737 - DNA, 25 bp, Homo sapien
aggccctggcatgtcccaaagcgca

SEQ ID NO: 3868738 - DNA, 25 bp, Homo sapien
ctgtggaggctttggttaagcagaa

SEQ ID NO: 3868739 - DNA, 25 bp, Homo sapien
tgggcttttgaagtcccctgcggga

SEQ ID NO: 3868740 - DNA, 25 bp, Homo sapien
caggctggggaggtcgcaaactgtg

SEQ ID NO: 3868741 - DNA, 25 bp, Homo sapien
gcctggggcttagtcccacttagaa

SEQ ID NO: 3868742 - DNA, 25 bp, Homo sapien
ggaggtcgcaaactgtgggcctggg

SEQ ID NO: 3868743 - DNA, 25 bp, Homo sapien
caaactgtgggcctggggcttagtc

SEQ ID NO: 3868744 - DNA, 25 bp, Homo sapien
tcccagggcagaagatcaggagagt

SEQ ID NO: 3868745 - DNA, 25 bp, Homo sapien
cttggcgagagtgcaagagccaaga

SEQ ID NO: 3868746 - DNA, 25 bp, Homo sapien
gttggcgccccacgggaggcagtgt

SEQ ID NO: 3868747 - DNA, 25 bp, Homo sapien
agagtttgttttcgggcttgctggc

SEQ ID NO: 3868748 - DNA, 25 bp, Homo sapien
ccatggccaaggggttgttggcttt

SEQ ID NO: 3868749 - DNA, 25 bp, Homo sapien
ctccatggccaaggggttgttggct

SEQ ID NO: 3868750 - DNA, 25 bp, Homo sapien
ggtgctccatggccaaggggttgtt

SEQ ID NO: 3868751 - DNA, 25 bp, Homo sapien
tgctccatggccaaggggttgttgg

SEQ ID NO: 3868752 - DNA, 25 bp, Homo sapien
ctgtggagcagggtgtttggagggc

SEQ ID NO: 3868753 - DNA, 25 bp, Homo sapien
tgtggagcagggtgtttggagggca

SEQ ID NO: 3868754 - DNA, 25 bp, Homo sapien
tgatgccgacatcattctggttttg

SEQ ID NO: 3868755 - DNA, 25 bp, Homo sapien
tttggaattcaagttgtagcttagc

SEQ ID NO: 3868756 - DNA, 25 bp, Homo sapien
ttcaagttgtagcttagccagcatg

SEQ ID NO: 3868757 - DNA, 25 bp, Homo sapien
tatctgggtgtgttacaatgatgcc

SEQ ID NO: 3868758 - DNA, 25 bp, Homo sapien
tgtacctggaatccgacctgggagt

SEQ ID NO: 3868759 - DNA, 25 bp, Homo sapien
tgagtgtccctgtctacacagcgaa

SEQ ID NO: 3868760 - DNA, 25 bp, Homo sapien
ctttcctaggtgacatacagaggca

SEQ ID NO: 3868761 - DNA, 25 bp, Homo sapien
tgggagtatctggacacaccttgcc

SEQ ID NO: 3868762 - DNA, 25 bp, Homo sapien
ccgagtcccagatgacaaggagggc

SEQ ID NO: 3868763 - DNA, 25 bp, Homo sapien
tcccagatgacaaggagggctgtga

SEQ ID NO: 3868764 - DNA, 25 bp, Homo sapien
gaaaaccgctccatgagccgagtcc

SEQ ID NO: 3868765 - DNA, 25 bp, Homo sapien
tgctgcagtaacagccacgtacatc

SEQ ID NO: 3868766 - DNA, 25 bp, Homo sapien
tttctgcctcgaatactccctgcag

SEQ ID NO: 3868767 - DNA, 25 bp, Homo sapien
caaggatacacagggcagaataggg

SEQ ID NO: 3868768 - DNA, 25 bp, Homo sapien
tgaggttatctccaggccttaccct

SEQ ID NO: 3868769 - DNA, 25 bp, Homo sapien
catgaccctgcgtggtgtgtctgcg

SEQ ID NO: 3868770 - DNA, 25 bp, Homo sapien
ggcagaagatacctggttgtgagtt

SEQ ID NO: 3868771 - DNA, 25 bp, Homo sapien
ccatctctgatcatcagtgggcaga

SEQ ID NO: 3868772 - DNA, 25 bp, Homo sapien
tctctgcaggattcacttggggacc

SEQ ID NO: 3868773 - DNA, 25 bp, Homo sapien
ctcatttcaggctctacaggcacca

SEQ ID NO: 3868774 - DNA, 25 bp, Homo sapien
ggagagcgctgcaaacttttcccag

SEQ ID NO: 3868775 - DNA, 25 bp, Homo sapien
tactgtcttgggagggttggataca

SEQ ID NO: 3868776 - DNA, 25 bp, Homo sapien
ctacatgaaagcaggaggcgtggca

SEQ ID NO: 3868777 - DNA, 25 bp, Homo sapien
tgaaaccctcctcggaaagagtgag

SEQ ID NO: 3868778 - DNA, 25 bp, Homo sapien
ccagagcccctgcaagccgtgggga

SEQ ID NO: 3868779 - DNA, 25 bp, Homo sapien
ctctgtctcgcttcagcgcgtccgc

SEQ ID NO: 3868780 - DNA, 25 bp, Homo sapien
cagggctggcggatcttgctggaac

SEQ ID NO: 3868781 - DNA, 25 bp, Homo sapien
ggagctcctccgaatccagcaggga

SEQ ID NO: 3868782 - DNA, 25 bp, Homo sapien
atggtggaaatggaactgagcagtc

SEQ ID NO: 3868783 - DNA, 25 bp, Homo sapien
ctgaatggtggaaatggaactgagc

SEQ ID NO: 3868784 - DNA, 25 bp, Homo sapien
gaatggtggaaatggaactgagcag

SEQ ID NO: 3868785 - DNA, 25 bp, Homo sapien
gtggaaatggaactgagcagtcgcc

SEQ ID NO: 3868786 - DNA, 25 bp, Homo sapien
gatcccagaaggtctgcaaaccgtc

SEQ ID NO: 3868787 - DNA, 25 bp, Homo sapien
cagctcattcatgggatttgcttgc

SEQ ID NO: 3868788 - DNA, 25 bp, Homo sapien
ggtctgcaaaccgtctttagtctcc

SEQ ID NO: 3868789 - DNA, 25 bp, Homo sapien
ctggattcccatcaaagacagaggc

SEQ ID NO: 3868790 - DNA, 25 bp, Homo sapien
cttctgcagatgattgacagtgagg

SEQ ID NO: 3868791 - DNA, 25 bp, Homo sapien
tcaaagtagacctgcttcactggtg

SEQ ID NO: 3868792 - DNA, 25 bp, Homo sapien
tcactggtgggagtgtggcctcacc

SEQ ID NO: 3868793 - DNA, 25 bp, Homo sapien
aagtagacctgcttcactggtggga

SEQ ID NO: 3868794 - DNA, 25 bp, Homo sapien
gagacttctgaatccaagggtctgc

SEQ ID NO: 3868795 - DNA, 25 bp, Homo sapien
gaagagacttctgaatccaagggtc

SEQ ID NO: 3868796 - DNA, 25 bp, Homo sapien
aagagacttctgaatccaagggtct

SEQ ID NO: 3868797 - DNA, 25 bp, Homo sapien
cctttctggaatcctgaatctgggt

SEQ ID NO: 3868798 - DNA, 25 bp, Homo sapien
cctcacactcagagcctttctggaa

SEQ ID NO: 3868799 - DNA, 25 bp, Homo sapien
tttctggaatcctgaatctgggtcc

SEQ ID NO: 3868800 - DNA, 25 bp, Homo sapien
tctggaatcctgaatctgggtccat

SEQ ID NO: 3868801 - DNA, 25 bp, Homo sapien
ttgacagggcagtctctcgattagg

SEQ ID NO: 3868802 - DNA, 25 bp, Homo sapien
gacagggcagtctctcgattaggct

SEQ ID NO: 3868803 - DNA, 25 bp, Homo sapien
gggcagtctctcgattaggctctca

SEQ ID NO: 3868804 - DNA, 25 bp, Homo sapien
gtctctcgattaggctctcagtggg

SEQ ID NO: 3868805 - DNA, 25 bp, Homo sapien
tgcaaccacaaggtgtctgcccaga

SEQ ID NO: 3868806 - DNA, 25 bp, Homo sapien
gtgaagatggatttccacaacagaa

SEQ ID NO: 3868807 - DNA, 25 bp, Homo sapien
aatgacatgagctggacatgcaacc

SEQ ID NO: 3868808 - DNA, 25 bp, Homo sapien
agattaaggcgaactccagcatggg

SEQ ID NO: 3868809 - DNA, 25 bp, Homo sapien
caccaccagtgttggctgtcgcagg

SEQ ID NO: 3868810 - DNA, 25 bp, Homo sapien
cctttcagcagtgtgccatgatggg

SEQ ID NO: 3868811 - DNA, 25 bp, Homo sapien
cccagtccctgttgaaattgagtcc

SEQ ID NO: 3868812 - DNA, 25 bp, Homo sapien
tctggagcttcctcgtggacaggcc

SEQ ID NO: 3868813 - DNA, 25 bp, Homo sapien
tggagttcctgccatcggaggcttc

SEQ ID NO: 3868814 - DNA, 25 bp, Homo sapien
tgccatcggaggcttcctgagaatt

SEQ ID NO: 3868815 - DNA, 25 bp, Homo sapien
gagttcctgccatcggaggcttcct

SEQ ID NO: 3868816 - DNA, 25 bp, Homo sapien
ttcctgccatcggaggcttcctgag

SEQ ID NO: 3868817 - DNA, 25 bp, Homo sapien
tcctgataaggtgggcaaccaattg

SEQ ID NO: 3868818 - DNA, 25 bp, Homo sapien
taaggtgggcaaccaattgccacag

SEQ ID NO: 3868819 - DNA, 25 bp, Homo sapien
aaccaattgccacagtcagggttgg

SEQ ID NO: 3868820 - DNA, 25 bp, Homo sapien
tcctgtcctgataaggtgggcaacc

SEQ ID NO: 3868821 - DNA, 25 bp, Homo sapien
ctggcacttgcccggtgctctgtga

SEQ ID NO: 3868822 - DNA, 25 bp, Homo sapien
tggcacttgcccggtgctctgtgaa

SEQ ID NO: 3868823 - DNA, 25 bp, Homo sapien
gctgcttgagcatccgtctgtcttt

SEQ ID NO: 3868824 - DNA, 25 bp, Homo sapien
ctgcttgagcatccgtctgtctttc

SEQ ID NO: 3868825 - DNA, 25 bp, Homo sapien
tgtggagggcccaagggaagaactg

SEQ ID NO: 3868826 - DNA, 25 bp, Homo sapien
gaaactgacatctggcggatggtca

SEQ ID NO: 3868827 - DNA, 25 bp, Homo sapien
catctggcggatggtcagatagtgt

SEQ ID NO: 3868828 - DNA, 25 bp, Homo sapien
ctggacagaaactgacatctggcgg

SEQ ID NO: 3868829 - DNA, 25 bp, Homo sapien
tgaggacacgcatgcacgtgatgct

SEQ ID NO: 3868830 - DNA, 25 bp, Homo sapien
catgcagtagatgagtgtccctgtg

SEQ ID NO: 3868831 - DNA, 25 bp, Homo sapien
tgatgctatcgttggctttccatgt

SEQ ID NO: 3868832 - DNA, 25 bp, Homo sapien
cctggttggtgtcagtcattggcag

SEQ ID NO: 3868833 - DNA, 25 bp, Homo sapien
gggcccatgtactgaggaggggctt

SEQ ID NO: 3868834 - DNA, 25 bp, Homo sapien
cggtcacggtcaccgacaggaccag

SEQ ID NO: 3868835 - DNA, 25 bp, Homo sapien
gcggtcacggtcaccgacaggacca

SEQ ID NO: 3868836 - DNA, 25 bp, Homo sapien
taacatccgtcagtggtgagtgagc

SEQ ID NO: 3868837 - DNA, 25 bp, Homo sapien
ctgtctgcagaatgtttggcgttaa

SEQ ID NO: 3868838 - DNA, 25 bp, Homo sapien
gaatgtttggcgttaacatccgtca

SEQ ID NO: 3868839 - DNA, 25 bp, Homo sapien
ctttcatataacagtgtaaaatggc

SEQ ID NO: 3868840 - DNA, 25 bp, Homo sapien
gcctgggcgcacaccatgtgtagat

SEQ ID NO: 3868841 - DNA, 25 bp, Homo sapien
tggcaggtttttgcttcggaggaac

SEQ ID NO: 3868842 - DNA, 25 bp, Homo sapien
tcgtaagaactttgggtctcccagc

SEQ ID NO: 3868843 - DNA, 25 bp, Homo sapien
tcccagcaggaatccgtcgatgtcc

SEQ ID NO: 3868844 - DNA, 25 bp, Homo sapien
tttctgctccccaatagggaaaaca

SEQ ID NO: 3868845 - DNA, 25 bp, Homo sapien
gctccccaatagggaaaacatgctg

SEQ ID NO: 3868846 - DNA, 25 bp, Homo sapien
tgctccccaatagggaaaacatgct

SEQ ID NO: 3868847 - DNA, 25 bp, Homo sapien
tctgctccccaatagggaaaacatg

SEQ ID NO: 3868848 - DNA, 25 bp, Homo sapien
tgatgcttttcaccctcccttgtgg

SEQ ID NO: 3868849 - DNA, 25 bp, Homo sapien
gaatgatgcttttcaccctcccttg

SEQ ID NO: 3868850 - DNA, 25 bp, Homo sapien
tttcaccctcccttgtggcttgtct

SEQ ID NO: 3868851 - DNA, 25 bp, Homo sapien
gcttttcaccctcccttgtggcttg

SEQ ID NO: 3868852 - DNA, 25 bp, Homo sapien
gaagtgggcacaggaacactctttg

SEQ ID NO: 3868853 - DNA, 25 bp, Homo sapien
aagaagtgggcacaggaacactctt

SEQ ID NO: 3868854 - DNA, 25 bp, Homo sapien
ctttggtggaagaagtgggcacagg

SEQ ID NO: 3868855 - DNA, 25 bp, Homo sapien
agtgggcacaggaacactctttgtc

SEQ ID NO: 3868856 - DNA, 25 bp, Homo sapien
cctttgccacactccgctttcttgt

SEQ ID NO: 3868857 - DNA, 25 bp, Homo sapien
ggagctcctggggtctgcttgtcct

SEQ ID NO: 3868858 - DNA, 25 bp, Homo sapien
tccttttccatacccctgctacgct

SEQ ID NO: 3868859 - DNA, 25 bp, Homo sapien
gagcttcacactatcttcagccact

SEQ ID NO: 3868860 - DNA, 25 bp, Homo sapien
cagccactaccttggattggaatgt

SEQ ID NO: 3868861 - DNA, 25 bp, Homo sapien
gagttgaacttgctgagcttcacac

SEQ ID NO: 3868862 - DNA, 25 bp, Homo sapien
gcctgcaggagaatcaaggcttttt

SEQ ID NO: 3868863 - DNA, 25 bp, Homo sapien
agcctgcaggagaatcaaggctttt

SEQ ID NO: 3868864 - DNA, 25 bp, Homo sapien
cctgcaggagaatcaaggctttttc

SEQ ID NO: 3868865 - DNA, 25 bp, Homo sapien
gagcctgcaggagaatcaaggcttt

SEQ ID NO: 3868866 - DNA, 25 bp, Homo sapien
ttcttggcatcatttggtttagttg

SEQ ID NO: 3868867 - DNA, 25 bp, Homo sapien
gagccggctggctttcttggcatca

SEQ ID NO: 3868868 - DNA, 25 bp, Homo sapien
tttcttggcatcatttggtttagtt

SEQ ID NO: 3868869 - DNA, 25 bp, Homo sapien
ttagagccggctggctttcttggca

SEQ ID NO: 3868870 - DNA, 25 bp, Homo sapien
cgtgctccccacgtgtaggctggtg

SEQ ID NO: 3868871 - DNA, 25 bp, Homo sapien
tgctccccacgtgtaggctggtgcc

SEQ ID NO: 3868872 - DNA, 25 bp, Homo sapien
cttggcacgtgctccccacgtgtag

SEQ ID NO: 3868873 - DNA, 25 bp, Homo sapien
gcacgtgctccccacgtgtaggctg

SEQ ID NO: 3868874 - DNA, 25 bp, Homo sapien
cggcctgcgggcttgtccgcttgat

SEQ ID NO: 3868875 - DNA, 25 bp, Homo sapien
aacgggcatgttgaccccagaactc

SEQ ID NO: 3868876 - DNA, 25 bp, Homo sapien
cctcagtttccctagatgagaaacg

SEQ ID NO: 3868877 - DNA, 25 bp, Homo sapien
cgggcttgtccgcttgatttcccat

SEQ ID NO: 3868878 - DNA, 25 bp, Homo sapien
tgtccgcatcgcagcttccgcggcc

SEQ ID NO: 3868879 - DNA, 25 bp, Homo sapien
ctgccctgtccgcatcgcagcttcc

SEQ ID NO: 3868880 - DNA, 25 bp, Homo sapien
cggcagctcgggtcaccgccgctgc

SEQ ID NO: 3868881 - DNA, 25 bp, Homo sapien
ggcagctcgggtcaccgccgctgcc

SEQ ID NO: 3868882 - DNA, 25 bp, Homo sapien
cttccgcctgctccagcgagttcat

SEQ ID NO: 3868883 - DNA, 25 bp, Homo sapien
aggaatcagggatacaactcgcggg

SEQ ID NO: 3868884 - DNA, 25 bp, Homo sapien
taccggaaaccaccgcaggaatcag

SEQ ID NO: 3868885 - DNA, 25 bp, Homo sapien
ccgcaggaatcagggatacaactcg

SEQ ID NO: 3868886 - DNA, 25 bp, Homo sapien
tggcagttaccggaaaccaccgcag

SEQ ID NO: 3868887 - DNA, 25 bp, Homo sapien
gcaggttgcaaacaatgaatatatt

SEQ ID NO: 3868888 - DNA, 25 bp, Homo sapien
attcagtaagtctcctctcaaaagc

SEQ ID NO: 3868889 - DNA, 25 bp, Homo sapien
tccagtagcaggttgcaaacaatga

SEQ ID NO: 3868890 - DNA, 25 bp, Homo sapien
gaatatattcagtaagtctcctctc

SEQ ID NO: 3868891 - DNA, 25 bp, Homo sapien
cgcctgcctgggcttcctaaagtgc

SEQ ID NO: 3868892 - DNA, 25 bp, Homo sapien
gatccgcctgcctgggcttcctaaa

SEQ ID NO: 3868893 - DNA, 25 bp, Homo sapien
tccgcctgcctgggcttcctaaagt

SEQ ID NO: 3868894 - DNA, 25 bp, Homo sapien
gtgatccgcctgcctgggcttccta

SEQ ID NO: 3868895 - DNA, 25 bp, Homo sapien
cttagatccttagcttcaatagtgc

SEQ ID NO: 3868896 - DNA, 25 bp, Homo sapien
taaatcctcaatgtgtgctactaca

SEQ ID NO: 3868897 - DNA, 25 bp, Homo sapien
tcattaaccaagtaagtgctaagac

SEQ ID NO: 3868898 - DNA, 25 bp, Homo sapien
gaccaaccagaattctcacagcata

SEQ ID NO: 3868899 - DNA, 25 bp, Homo sapien
cagacagataccactataagaagca

SEQ ID NO: 3868900 - DNA, 25 bp, Homo sapien
ctgtacagacagataccactataag

SEQ ID NO: 3868901 - DNA, 25 bp, Homo sapien
tgtacagacagataccactataaga

SEQ ID NO: 3868902 - DNA, 25 bp, Homo sapien
tacagacagataccactataagaag

SEQ ID NO: 3868903 - DNA, 25 bp, Homo sapien
ttgtgtctcagggtctattaaccag

SEQ ID NO: 3868904 - DNA, 25 bp, Homo sapien
tgtctcagggtctattaaccagttc

SEQ ID NO: 3868905 - DNA, 25 bp, Homo sapien
gtgtctcagggtctattaaccagtt

SEQ ID NO: 3868906 - DNA, 25 bp, Homo sapien
gtctcagggtctattaaccagttcc

SEQ ID NO: 3868907 - DNA, 25 bp, Homo sapien
ggctgtctgaattgccatggagact

SEQ ID NO: 3868908 - DNA, 25 bp, Homo sapien
tcagcagataaagttagggagacta

SEQ ID NO: 3868909 - DNA, 25 bp, Homo sapien
catggagactgatgacaaaagcctt

SEQ ID NO: 3868910 - DNA, 25 bp, Homo sapien
gactatatgcgaaataaacttctct

SEQ ID NO: 3868911 - DNA, 25 bp, Homo sapien
ataggcaccgaaatggaaacgttga

SEQ ID NO: 3868912 - DNA, 25 bp, Homo sapien
aacaggacaatccacaagtctaaga

SEQ ID NO: 3868913 - DNA, 25 bp, Homo sapien
ggtccaggatccatgactggaataa

SEQ ID NO: 3868914 - DNA, 25 bp, Homo sapien
ccacaagtctaagaatatgtagagg

SEQ ID NO: 3868915 - DNA, 25 bp, Homo sapien
agaaagaaagggctgatttcagatc

SEQ ID NO: 3868916 - DNA, 25 bp, Homo sapien
agggctgatttcagatctggacata

SEQ ID NO: 3868917 - DNA, 25 bp, Homo sapien
aagaaagggctgatttcagatctgg

SEQ ID NO: 3868918 - DNA, 25 bp, Homo sapien
aaagggctgatttcagatctggaca

SEQ ID NO: 3868919 - DNA, 25 bp, Homo sapien
gcaaactctgccattcataacctga

SEQ ID NO: 3868920 - DNA, 25 bp, Homo sapien
cacgctcagcctacctttactgtta

SEQ ID NO: 3868921 - DNA, 25 bp, Homo sapien
tccctgcagaggcaaaaaacaaatt

SEQ ID NO: 3868922 - DNA, 25 bp, Homo sapien
caggacattcaagtagggaaaaacg

SEQ ID NO: 3868923 - DNA, 25 bp, Homo sapien
gatggtgcaactactctcttgtgta

SEQ ID NO: 3868924 - DNA, 25 bp, Homo sapien
tgatggtgcaactactctcttgtgt

SEQ ID NO: 3868925 - DNA, 25 bp, Homo sapien
tgcaactactctcttgtgtattcca

SEQ ID NO: 3868926 - DNA, 25 bp, Homo sapien
ggtgcaactactctcttgtgtattc

SEQ ID NO: 3868927 - DNA, 25 bp, Homo sapien
taccgttcgacatcgagcagctata

SEQ ID NO: 3868928 - DNA, 25 bp, Homo sapien
gtattctgctaataccgttcgacat

SEQ ID NO: 3868929 - DNA, 25 bp, Homo sapien
taataccgttcgacatcgagcagct

SEQ ID NO: 3868930 - DNA, 25 bp, Homo sapien
tctgctaataccgttcgacatcgag

SEQ ID NO: 3868931 - DNA, 25 bp, Homo sapien
aacatgaggcctaggtttcaaaatt

SEQ ID NO: 3868932 - DNA, 25 bp, Homo sapien
catgaggcctaggtttcaaaattag

SEQ ID NO: 3868933 - DNA, 25 bp, Homo sapien
tcattgaacatgaggcctaggtttc

SEQ ID NO: 3868934 - DNA, 25 bp, Homo sapien
tgaacatgaggcctaggtttcaaaa

SEQ ID NO: 3868935 - DNA, 25 bp, Homo sapien
tactggtgcaagagaacaaagtcca

SEQ ID NO: 3868936 - DNA, 25 bp, Homo sapien
tattctggtgaaggcataggatgac

SEQ ID NO: 3868937 - DNA, 25 bp, Homo sapien
tagactctagtttctggcaccactc

SEQ ID NO: 3868938 - DNA, 25 bp, Homo sapien
caggatctgaagtactaaagtgaca

SEQ ID NO: 3868939 - DNA, 25 bp, Homo sapien
tgcgtgttaacatagataaaatctc

SEQ ID NO: 3868940 - DNA, 25 bp, Homo sapien
gccaacatgcgtgttaacatagata

SEQ ID NO: 3868941 - DNA, 25 bp, Homo sapien
caaattgccaacatgcgtgttaaca

SEQ ID NO: 3868942 - DNA, 25 bp, Homo sapien
aaatgcccatcaatccgtaaatgga

SEQ ID NO: 3868943 - DNA, 25 bp, Homo sapien
cttccaccccacattcacgccgtcc

SEQ ID NO: 3868944 - DNA, 25 bp, Homo sapien
cccttccaccccacattcacgccgt

SEQ ID NO: 3868945 - DNA, 25 bp, Homo sapien
tccaccccacattcacgccgtccca

SEQ ID NO: 3868946 - DNA, 25 bp, Homo sapien
caccccacattcacgccgtcccaca

SEQ ID NO: 3868947 - DNA, 25 bp, Homo sapien
tgcgcattgcttaaccccgacagct

SEQ ID NO: 3868948 - DNA, 25 bp, Homo sapien
tcttgctgtgatgaatgagccacag

SEQ ID NO: 3868949 - DNA, 25 bp, Homo sapien
cacgggcccgggtgcttcttgctgt

SEQ ID NO: 3868950 - DNA, 25 bp, Homo sapien
ggtctgcatgctctgctgcgcattg

SEQ ID NO: 3868951 - DNA, 25 bp, Homo sapien
cacagagcttaagttgctctaatac

SEQ ID NO: 3868952 - DNA, 25 bp, Homo sapien
caccacacagagcttaagttgctct

SEQ ID NO: 3868953 - DNA, 25 bp, Homo sapien
cactataaccagtgcaaatcttttg

SEQ ID NO: 3868954 - DNA, 25 bp, Homo sapien
ttaaaagcttccactataaccagtg

SEQ ID NO: 3868955 - DNA, 25 bp, Homo sapien
gtaatctgctggcaacatacatgca

SEQ ID NO: 3868956 - DNA, 25 bp, Homo sapien
gctttctctgcgagggcttccattg

SEQ ID NO: 3868957 - DNA, 25 bp, Homo sapien
tatctgctattttatctagtagaga

SEQ ID NO: 3868958 - DNA, 25 bp, Homo sapien
cgagtgagttgcttcccctcatcta

SEQ ID NO: 3868959 - DNA, 25 bp, Homo sapien
tcttgcagtcttgggaccgggaaag

SEQ ID NO: 3868960 - DNA, 25 bp, Homo sapien
tgtctccacctcttgcagtcttggg

SEQ ID NO: 3868961 - DNA, 25 bp, Homo sapien
cctcttgcagtcttgggaccgggaa

SEQ ID NO: 3868962 - DNA, 25 bp, Homo sapien
tccacctcttgcagtcttgggaccg

SEQ ID NO: 3868963 - DNA, 25 bp, Homo sapien
gcttgagccagatcaattttgtgtt

SEQ ID NO: 3868964 - DNA, 25 bp, Homo sapien
aatctattacctgctttgttggctg

SEQ ID NO: 3868965 - DNA, 25 bp, Homo sapien
caaagctgatagctttgcttgagcc

SEQ ID NO: 3868966 - DNA, 25 bp, Homo sapien
tacctgctttgttggctgtttagcc

SEQ ID NO: 3868967 - DNA, 25 bp, Homo sapien
catccacaaatacctgtaggccaag

SEQ ID NO: 3868968 - DNA, 25 bp, Homo sapien
atgatgctgtcctgcggcaccaccg

SEQ ID NO: 3868969 - DNA, 25 bp, Homo sapien
caccttcagttccatcgtaaagtgt

SEQ ID NO: 3868970 - DNA, 25 bp, Homo sapien
ttccatcgtaaagtgtgacgtggac

SEQ ID NO: 3868971 - DNA, 25 bp, Homo sapien
agactctggagatggggtcgcccac

SEQ ID NO: 3868972 - DNA, 25 bp, Homo sapien
agtggcattgtcacagactctggag

SEQ ID NO: 3868973 - DNA, 25 bp, Homo sapien
ctggagatggggtcgcccacacggt

SEQ ID NO: 3868974 - DNA, 25 bp, Homo sapien
ggcattgtcacagactctggagatg

SEQ ID NO: 3868975 - DNA, 25 bp, Homo sapien
tccacgatggcgatggaagaagaga

SEQ ID NO: 3868976 - DNA, 25 bp, Homo sapien
ctggctttgctagggacgatgcccc

SEQ ID NO: 3868977 - DNA, 25 bp, Homo sapien
gagatcatcgtgctcatcattgaca

SEQ ID NO: 3868978 - DNA, 25 bp, Homo sapien
gatggaagaagagatcatcgtgctc

SEQ ID NO: 3868979 - DNA, 25 bp, Homo sapien
tgacggctgcagcacacatgggcaa

SEQ ID NO: 3868980 - DNA, 25 bp, Homo sapien
acagaccaccgagagaggagggcaa

SEQ ID NO: 3868981 - DNA, 25 bp, Homo sapien
aacaaggtccgttgctgctgctcag

SEQ ID NO: 3868982 - DNA, 25 bp, Homo sapien
ggctgccgcgccgttaacaaggtcc

SEQ ID NO: 3868983 - DNA, 25 bp, Homo sapien
ctcggcctgacagtcgcccgtaggg

SEQ ID NO: 3868984 - DNA, 25 bp, Homo sapien
tgaggtcgcttgaagcgcttcgtcc

SEQ ID NO: 3868985 - DNA, 25 bp, Homo sapien
ttgaagcgcttcgtccggctcttgc

SEQ ID NO: 3868986 - DNA, 25 bp, Homo sapien
gagaactgaggtcgcttgaagcgct

SEQ ID NO: 3868987 - DNA, 25 bp, Homo sapien
tcgtcctcctcgcctccggtcccat

SEQ ID NO: 3868988 - DNA, 25 bp, Homo sapien
ggacctcggcgctcgggtgctggag

SEQ ID NO: 3868989 - DNA, 25 bp, Homo sapien
caggctggggtctagcagcagcggc

SEQ ID NO: 3868990 - DNA, 25 bp, Homo sapien
cgggccagccctgcgcaggcgcact

SEQ ID NO: 3868991 - DNA, 25 bp, Homo sapien
cgcacggcgtctcgtcgcgccaggc

SEQ ID NO: 3868992 - DNA, 25 bp, Homo sapien
catcatctcgttttcccacagcaat

SEQ ID NO: 3868993 - DNA, 25 bp, Homo sapien
ctccccatcaacatgacttgtgcca

SEQ ID NO: 3868994 - DNA, 25 bp, Homo sapien
tcatcatcatctcgttttcccacag

SEQ ID NO: 3868995 - DNA, 25 bp, Homo sapien
ccaagagcacccaattcaaacttcc

SEQ ID NO: 3868996 - DNA, 25 bp, Homo sapien
ctcttttagcagcgcaaccagaggg

SEQ ID NO: 3868997 - DNA, 25 bp, Homo sapien
tagcagcgcaaccagaggggtcatg

SEQ ID NO: 3868998 - DNA, 25 bp, Homo sapien
gatatccttagtcaccatgtcatca

SEQ ID NO: 3868999 - DNA, 25 bp, Homo sapien
gaggggtcatgatatccttagtcac

SEQ ID NO: 3869000 - DNA, 25 bp, Homo sapien
taaccaaatatcatgattagcaccc

SEQ ID NO: 3869001 - DNA, 25 bp, Homo sapien
accaaatatcatgattagcaccctg

SEQ ID NO: 3869002 - DNA, 25 bp, Homo sapien
aaccaaatatcatgattagcaccct

SEQ ID NO: 3869003 - DNA, 25 bp, Homo sapien
tgtaaccaaatatcatgattagcac

SEQ ID NO: 3869004 - DNA, 25 bp, Homo sapien
tattccacagcacgttcacagtctc

SEQ ID NO: 3869005 - DNA, 25 bp, Homo sapien
attccacagcacgttcacagtctca

SEQ ID NO: 3869006 - DNA, 25 bp, Homo sapien
tatattccacagcacgttcacagtc

SEQ ID NO: 3869007 - DNA, 25 bp, Homo sapien
tccacagcacgttcacagtctcatt

SEQ ID NO: 3869008 - DNA, 25 bp, Homo sapien
tctagttatggcagcatgaaggagc

SEQ ID NO: 3869009 - DNA, 25 bp, Homo sapien
tcatcaagcagaatttgcagtctac

SEQ ID NO: 3869010 - DNA, 25 bp, Homo sapien
tacacacatgacacgctaacagagc

SEQ ID NO: 3869011 - DNA, 25 bp, Homo sapien
gcccacagtctagtcaggaagacaa

SEQ ID NO: 3869012 - DNA, 25 bp, Homo sapien
aatagccaggtcaacattggtagga

SEQ ID NO: 3869013 - DNA, 25 bp, Homo sapien
atactttaacacaatctccaaacac

SEQ ID NO: 3869014 - DNA, 25 bp, Homo sapien
tagacactgctctactactgcattc

SEQ ID NO: 3869015 - DNA, 25 bp, Homo sapien
ctttgttgaatatagacactgctct

SEQ ID NO: 3869016 - DNA, 25 bp, Homo sapien
ctttctccctttcagagtcaaaagc

SEQ ID NO: 3869017 - DNA, 25 bp, Homo sapien
ttctccctttcagagtcaaaagcag

SEQ ID NO: 3869018 - DNA, 25 bp, Homo sapien
tctccctttcagagtcaaaagcaga

SEQ ID NO: 3869019 - DNA, 25 bp, Homo sapien
tccctttcagagtcaaaagcagaaa

SEQ ID NO: 3869020 - DNA, 25 bp, Homo sapien
agtggttccccagcccaataaagag

SEQ ID NO: 3869021 - DNA, 25 bp, Homo sapien
gctggatgcccgcagtaatgatcgg

SEQ ID NO: 3869022 - DNA, 25 bp, Homo sapien
gaaatgcagttccacaaagggacag

SEQ ID NO: 3869023 - DNA, 25 bp, Homo sapien
taaaggcctggtagttgtgcgttac

SEQ ID NO: 3869024 - DNA, 25 bp, Homo sapien
gattccagcatgttcaatgctgtag

SEQ ID NO: 3869025 - DNA, 25 bp, Homo sapien
caatagaagagattccatggaactg

SEQ ID NO: 3869026 - DNA, 25 bp, Homo sapien
gctgtagcactgaaagacttcagca

SEQ ID NO: 3869027 - DNA, 25 bp, Homo sapien
tgctaccaatgtcttcaatagaaga

SEQ ID NO: 3869028 - DNA, 25 bp, Homo sapien
cttcagataagatctttagtaaggc

SEQ ID NO: 3869029 - DNA, 25 bp, Homo sapien
aacctttgcgtttcagcctctttca

SEQ ID NO: 3869030 - DNA, 25 bp, Homo sapien
catttatgatttctgcttgactctt

SEQ ID NO: 3869031 - DNA, 25 bp, Homo sapien
catcatcttcaatcaaatcatcccc

SEQ ID NO: 3869032 - DNA, 25 bp, Homo sapien
gagacatcacgaacacaggtaagca

SEQ ID NO: 3869033 - DNA, 25 bp, Homo sapien
caatttacgcttcccgagacatcac

SEQ ID NO: 3869034 - DNA, 25 bp, Homo sapien
tcagccttcatcgtccttcggcagc

SEQ ID NO: 3869035 - DNA, 25 bp, Homo sapien
gaaaagtggttctatccacattttg

SEQ ID NO: 3869036 - DNA, 25 bp, Homo sapien
gcagtctgttgggctgtcagcaatg

SEQ ID NO: 3869037 - DNA, 25 bp, Homo sapien
cacatgttgacaataatttccagag

SEQ ID NO: 3869038 - DNA, 25 bp, Homo sapien
agcacatgttgacaataatttccag

SEQ ID NO: 3869039 - DNA, 25 bp, Homo sapien
gagcagtctgttgggctgtcagcaa

SEQ ID NO: 3869040 - DNA, 25 bp, Homo sapien
atctccacgggagtttccctcttgg

SEQ ID NO: 3869041 - DNA, 25 bp, Homo sapien
aatctccacgggagtttccctcttg

SEQ ID NO: 3869042 - DNA, 25 bp, Homo sapien
ctgggaagcgggcaaaccacgcaga

SEQ ID NO: 3869043 - DNA, 25 bp, Homo sapien
tgggaagcgggcaaaccacgcagaa

SEQ ID NO: 3869044 - DNA, 25 bp, Homo sapien
tgtcccccgcactcactgaaggaat

SEQ ID NO: 3869045 - DNA, 25 bp, Homo sapien
tcttcccattcgtcatcagagggat

SEQ ID NO: 3869046 - DNA, 25 bp, Homo sapien
aaggaattctccataaatgcgtcac

SEQ ID NO: 3869047 - DNA, 25 bp, Homo sapien
tgagagccgtgtgaacttcatggga

SEQ ID NO: 3869048 - DNA, 25 bp, Homo sapien
gaataccttgcttaagcctttccca

SEQ ID NO: 3869049 - DNA, 25 bp, Homo sapien
gtacacaaaatgaataccttgctta

SEQ ID NO: 3869050 - DNA, 25 bp, Homo sapien
taagcctttcccatgctccacggta

SEQ ID NO: 3869051 - DNA, 25 bp, Homo sapien
tccacggtaagcctagaatgaaaat

SEQ ID NO: 3869052 - DNA, 25 bp, Homo sapien
gaatgaccttttcgcctatttccag

SEQ ID NO: 3869053 - DNA, 25 bp, Homo sapien
tatttccagtactgttaggctcagc

SEQ ID NO: 3869054 - DNA, 25 bp, Homo sapien
gagtagtcatttaacacgattccct

SEQ ID NO: 3869055 - DNA, 25 bp, Homo sapien
tactcctaagtgaaatggttaggct

SEQ ID NO: 3869056 - DNA, 25 bp, Homo sapien
ctagaacataggtcaactgcaatgc

SEQ ID NO: 3869057 - DNA, 25 bp, Homo sapien
acataggtcaactgcaatgctgttt

SEQ ID NO: 3869058 - DNA, 25 bp, Homo sapien
tccaagtagggttcctagaacatag

SEQ ID NO: 3869059 - DNA, 25 bp, Homo sapien
tagggttcctagaacataggtcaac

SEQ ID NO: 3869060 - DNA, 25 bp, Homo sapien
gggcaactgtgacacacactgctat

SEQ ID NO: 3869061 - DNA, 25 bp, Homo sapien
caatgtaagttccatccgagttgtg

SEQ ID NO: 3869062 - DNA, 25 bp, Homo sapien
tgtattctagggcatgtgggcacat

SEQ ID NO: 3869063 - DNA, 25 bp, Homo sapien
cattctaactctgatggacaacacg

SEQ ID NO: 3869064 - DNA, 25 bp, Homo sapien
gaagagggctctgcactgaatagtg

SEQ ID NO: 3869065 - DNA, 25 bp, Homo sapien
aagagggctctgcactgaatagtgt

SEQ ID NO: 3869066 - DNA, 25 bp, Homo sapien
agatgctgtgcaagcgtctgaaggg

SEQ ID NO: 3869067 - DNA, 25 bp, Homo sapien
cagatgctgtgcaagcgtctgaagg

SEQ ID NO: 3869068 - DNA, 25 bp, Homo sapien
tcaaagcactacttatggcttctag

SEQ ID NO: 3869069 - DNA, 25 bp, Homo sapien
cactacttatggcttctagaaagtc

SEQ ID NO: 3869070 - DNA, 25 bp, Homo sapien
ctacttatggcttctagaaagtcaa

SEQ ID NO: 3869071 - DNA, 25 bp, Homo sapien
agcactacttatggcttctagaaag

SEQ ID NO: 3869072 - DNA, 25 bp, Homo sapien
agtcctgataacccactaccatcag

SEQ ID NO: 3869073 - DNA, 25 bp, Homo sapien
aagccagtcaaacttagcgtggggg

SEQ ID NO: 3869074 - DNA, 25 bp, Homo sapien
ataacccactaccatcagaccagct

SEQ ID NO: 3869075 - DNA, 25 bp, Homo sapien
tataccaacttcagtgacactaatg

SEQ ID NO: 3869076 - DNA, 25 bp, Homo sapien
tgtgaaaaccggactgacaggaatc

SEQ ID NO: 3869077 - DNA, 25 bp, Homo sapien
taagagtgacataaactcctggcag

SEQ ID NO: 3869078 - DNA, 25 bp, Homo sapien
aaggtgaaccctgctcatgtcggca

SEQ ID NO: 3869079 - DNA, 25 bp, Homo sapien
aggaatctcctctataggctacagg

SEQ ID NO: 3869080 - DNA, 25 bp, Homo sapien
tcctaaaatgctaacgacattcact

SEQ ID NO: 3869081 - DNA, 25 bp, Homo sapien
tgcataatgtcatcagctgatcagg

SEQ ID NO: 3869082 - DNA, 25 bp, Homo sapien
attactactatgaatgcctgctttg

SEQ ID NO: 3869083 - DNA, 25 bp, Homo sapien
gacattcactctaaccccgacatta

SEQ ID NO: 3869084 - DNA, 25 bp, Homo sapien
aagagggcatccaaagcttctcctg

SEQ ID NO: 3869085 - DNA, 25 bp, Homo sapien
tggtaacttcaagcagaaagcaccc

SEQ ID NO: 3869086 - DNA, 25 bp, Homo sapien
taatttgaatcgaggctctttcggc

SEQ ID NO: 3869087 - DNA, 25 bp, Homo sapien
tcattttaaagaccggctggaattc

SEQ ID NO: 3869088 - DNA, 25 bp, Homo sapien
gctgaagcagatagctgtaagaatt

SEQ ID NO: 3869089 - DNA, 25 bp, Homo sapien
gaagcagatagctgtaagaatttgg

SEQ ID NO: 3869090 - DNA, 25 bp, Homo sapien
agcagatagctgtaagaatttggaa

SEQ ID NO: 3869091 - DNA, 25 bp, Homo sapien
aaatgatagttacaaaggtgactga

SEQ ID NO: 3869092 - DNA, 25 bp, Homo sapien
tctcaacagtttcttgataagcaat

SEQ ID NO: 3869093 - DNA, 25 bp, Homo sapien
agaagtcagtcttttctcaacagtt

SEQ ID NO: 3869094 - DNA, 25 bp, Homo sapien
taagcaataaatcttcgcaaattca

SEQ ID NO: 3869095 - DNA, 25 bp, Homo sapien
tgtgctatagttacctctcccttct

SEQ ID NO: 3869096 - DNA, 25 bp, Homo sapien
ccttttagtattctaagcattgaat

SEQ ID NO: 3869097 - DNA, 25 bp, Homo sapien
tattctaagcattgaatactttggg

SEQ ID NO: 3869098 - DNA, 25 bp, Homo sapien
aaaccttttagtattctaagcattg

SEQ ID NO: 3869099 - DNA, 25 bp, Homo sapien
cattgaatactttgggggaagaact

SEQ ID NO: 3869100 - DNA, 25 bp, Homo sapien
caggttttgaagtttttacagaatg

SEQ ID NO: 3869101 - DNA, 25 bp, Homo sapien
ttttgaagtttttacagaatgtaca

SEQ ID NO: 3869102 - DNA, 25 bp, Homo sapien
tttacagaatgtacagaatgtaatc

SEQ ID NO: 3869103 - DNA, 25 bp, Homo sapien
gtttttacagaatgtacagaatgta

SEQ ID NO: 3869104 - DNA, 25 bp, Homo sapien
catgcttatgcatgcggtttcacca

SEQ ID NO: 3869105 - DNA, 25 bp, Homo sapien
gccaccatgcttatgcatgcggttt

SEQ ID NO: 3869106 - DNA, 25 bp, Homo sapien
gtgccaccatgcttatgcatgcggt

SEQ ID NO: 3869107 - DNA, 25 bp, Homo sapien
caccatgcttatgcatgcggtttca

SEQ ID NO: 3869108 - DNA, 25 bp, Homo sapien
tgaccccattagctcattagtataa

SEQ ID NO: 3869109 - DNA, 25 bp, Homo sapien
tcactgctggcgaattagttaagag

SEQ ID NO: 3869110 - DNA, 25 bp, Homo sapien
gagattccttcgcacttccactctt

SEQ ID NO: 3869111 - DNA, 25 bp, Homo sapien
ttagagagcgctagaaatgccacac

SEQ ID NO: 3869112 - DNA, 25 bp, Homo sapien
cctgtgctaaatatcctggatattg

SEQ ID NO: 3869113 - DNA, 25 bp, Homo sapien
gtcgactatatactaggtcctgtgc

SEQ ID NO: 3869114 - DNA, 25 bp, Homo sapien
tatttatgaagagtcgactatatac

SEQ ID NO: 3869115 - DNA, 25 bp, Homo sapien
ttgtttataggtcagaaactgtggg

SEQ ID NO: 3869116 - DNA, 25 bp, Homo sapien
tcttaattggttggagtgcgagctc

SEQ ID NO: 3869117 - DNA, 25 bp, Homo sapien
ggtgtgtcttccagccaatgtgtca

SEQ ID NO: 3869118 - DNA, 25 bp, Homo sapien
ccatgggtttgtgggtgtgtcttcc

SEQ ID NO: 3869119 - DNA, 25 bp, Homo sapien
aatgtgtcattgtagccaaatcttt

SEQ ID NO: 3869120 - DNA, 25 bp, Homo sapien
tgcaaggaggcataagtaaggactg

SEQ ID NO: 3869121 - DNA, 25 bp, Homo sapien
caaggaggcataagtaaggactgtt

SEQ ID NO: 3869122 - DNA, 25 bp, Homo sapien
gtgcaaggaggcataagtaaggact

SEQ ID NO: 3869123 - DNA, 25 bp, Homo sapien
ttaacactggggtgcaaggaggcat

SEQ ID NO: 3869124 - DNA, 25 bp, Homo sapien
ctgagcgtggacgaggccgcatgga

SEQ ID NO: 3869125 - DNA, 25 bp, Homo sapien
gcttccccggtgctgagcgtggacg

SEQ ID NO: 3869126 - DNA, 25 bp, Homo sapien
gggagcttctgaggcgcgcgcggct

SEQ ID NO: 3869127 - DNA, 25 bp, Homo sapien
gtccgggagcttctgaggcgcgcgc

SEQ ID NO: 3869128 - DNA, 25 bp, Homo sapien
ctgcatccacagactgttggacggt

SEQ ID NO: 3869129 - DNA, 25 bp, Homo sapien
cagtggtggttgaagtagaggttcc

SEQ ID NO: 3869130 - DNA, 25 bp, Homo sapien
tccacagactgttggacggtccgag

SEQ ID NO: 3869131 - DNA, 25 bp, Homo sapien
cagactgttggacggtccgagctgc

SEQ ID NO: 3869132 - DNA, 25 bp, Homo sapien
tgcccgaggccgaatcggctggatc

SEQ ID NO: 3869133 - DNA, 25 bp, Homo sapien
aggcgctccccggagcgatacatgc

SEQ ID NO: 3869134 - DNA, 25 bp, Homo sapien
ttgttgttgttggtcgtctctaggg

SEQ ID NO: 3869135 - DNA, 25 bp, Homo sapien
aggaagtcccgctgctccgcgggca

SEQ ID NO: 3869136 - DNA, 25 bp, Homo sapien
tgcagcaggctgtagttgagtccat

SEQ ID NO: 3869137 - DNA, 25 bp, Homo sapien
gctgcagcaggctgtagttgagtcc

SEQ ID NO: 3869138 - DNA, 25 bp, Homo sapien
ctgggctgcagcaggctgtagttga

SEQ ID NO: 3869139 - DNA, 25 bp, Homo sapien
gggctgcagcaggctgtagttgagt

SEQ ID NO: 3869140 - DNA, 25 bp, Homo sapien
ccacgactccctggttgtagttcct

SEQ ID NO: 3869141 - DNA, 25 bp, Homo sapien
gtcccgctgtacacgaccccgccgc

SEQ ID NO: 3869142 - DNA, 25 bp, Homo sapien
cgctgtacacgaccccgccgccgtc

SEQ ID NO: 3869143 - DNA, 25 bp, Homo sapien
cacgactccctggttgtagttcctc

SEQ ID NO: 3869144 - DNA, 25 bp, Homo sapien
ggtctcacgacattgctcaatgagg

SEQ ID NO: 3869145 - DNA, 25 bp, Homo sapien
tctcacgacattgctcaatgaggaa

SEQ ID NO: 3869146 - DNA, 25 bp, Homo sapien
tagggtctcacgacattgctcaatg

SEQ ID NO: 3869147 - DNA, 25 bp, Homo sapien
agggtctcacgacattgctcaatga

SEQ ID NO: 3869148 - DNA, 25 bp, Homo sapien
ccgtgccaggccttatgtgcattcc

SEQ ID NO: 3869149 - DNA, 25 bp, Homo sapien
cgtgccaggccttatgtgcattcct

SEQ ID NO: 3869150 - DNA, 25 bp, Homo sapien
aaactgggactgtacttaatgtcac

SEQ ID NO: 3869151 - DNA, 25 bp, Homo sapien
gcactaaactgggactgtacttaat

SEQ ID NO: 3869152 - DNA, 25 bp, Homo sapien
gtaacagtggttgcactaaactggg

SEQ ID NO: 3869153 - DNA, 25 bp, Homo sapien
ctgaaactagacagtaacagtggtt

SEQ ID NO: 3869154 - DNA, 25 bp, Homo sapien
tgttagctgctatgtgtttagttat

SEQ ID NO: 3869155 - DNA, 25 bp, Homo sapien
gtgttagctgctatgtgtttagtta

SEQ ID NO: 3869156 - DNA, 25 bp, Homo sapien
ttagctgctatgtgtttagttatat

SEQ ID NO: 3869157 - DNA, 25 bp, Homo sapien
gttagctgctatgtgtttagttata

SEQ ID NO: 3869158 - DNA, 25 bp, Homo sapien
tgtagtcccagctactcgggaggct

SEQ ID NO: 3869159 - DNA, 25 bp, Homo sapien
ttgcttgagcccaggaggcagaggt

SEQ ID NO: 3869160 - DNA, 25 bp, Homo sapien
aattggccgggcgtggcggtgggca

SEQ ID NO: 3869161 - DNA, 25 bp, Homo sapien
tactcgggaggctgaggcaggagaa

SEQ ID NO: 3869162 - DNA, 25 bp, Homo sapien
caaggcactcatactgtggtaacaa

SEQ ID NO: 3869163 - DNA, 25 bp, Homo sapien
aatacatctaatactgccattgggc

SEQ ID NO: 3869164 - DNA, 25 bp, Homo sapien
taagtatatggcttcccggtaaaca

SEQ ID NO: 3869165 - DNA, 25 bp, Homo sapien
tgccaaccagcagatcacaggatga

SEQ ID NO: 3869166 - DNA, 25 bp, Homo sapien
tggaagcaatcaaaatgaccttcag

SEQ ID NO: 3869167 - DNA, 25 bp, Homo sapien
gtgttcaggagaccagtatggaaaa

SEQ ID NO: 3869168 - DNA, 25 bp, Homo sapien
tgttcaggagaccagtatggaaaac

SEQ ID NO: 3869169 - DNA, 25 bp, Homo sapien
tttctagcctcactcccaagagctt

SEQ ID NO: 3869170 - DNA, 25 bp, Homo sapien
ccttctcactcagctcaaatattag

SEQ ID NO: 3869171 - DNA, 25 bp, Homo sapien
aagagcttccgagccctcttctacg

SEQ ID NO: 3869172 - DNA, 25 bp, Homo sapien
ttgctttttcaagaatcaccttctc

SEQ ID NO: 3869173 - DNA, 25 bp, Homo sapien
ccttacatgaaggaactgacaaagt

SEQ ID NO: 3869174 - DNA, 25 bp, Homo sapien
agacacagcatgtctgagcccacct

SEQ ID NO: 3869175 - DNA, 25 bp, Homo sapien
taactgtcaataacaggacatccct

SEQ ID NO: 3869176 - DNA, 25 bp, Homo sapien
gttccataactgaagtcagacctgt

SEQ ID NO: 3869177 - DNA, 25 bp, Homo sapien
gggccagagctccttaattacactc

SEQ ID NO: 3869178 - DNA, 25 bp, Homo sapien
aattacactctcgatcctgttcacc

SEQ ID NO: 3869179 - DNA, 25 bp, Homo sapien
gagctccttaattacactctcgatc

SEQ ID NO: 3869180 - DNA, 25 bp, Homo sapien
tccttaattacactctcgatcctgt

SEQ ID NO: 3869181 - DNA, 25 bp, Homo sapien
cagttttaaaacttccaaatatctg

SEQ ID NO: 3869182 - DNA, 25 bp, Homo sapien
tttcaccgaatcctcatctgcgact

SEQ ID NO: 3869183 - DNA, 25 bp, Homo sapien
tttgtgtttccgaagagcttcttcc

SEQ ID NO: 3869184 - DNA, 25 bp, Homo sapien
acttcccaaacaccactaggtcgat

SEQ ID NO: 3869185 - DNA, 25 bp, Homo sapien
cccaaacaccactaggtcgatgtca

SEQ ID NO: 3869186 - DNA, 25 bp, Homo sapien
tgtacattaaagctgatatcaactt

SEQ ID NO: 3869187 - DNA, 25 bp, Homo sapien
attctgtacattaaagctgatatca

SEQ ID NO: 3869188 - DNA, 25 bp, Homo sapien
cattaaagctgatatcaactttcac

SEQ ID NO: 3869189 - DNA, 25 bp, Homo sapien
tgctctcacgccattctgtacatta

SEQ ID NO: 3869190 - DNA, 25 bp, Homo sapien
cccgagagaacacctgagtgggcaa

SEQ ID NO: 3869191 - DNA, 25 bp, Homo sapien
tcctctgtaaaccatgccataggct

SEQ ID NO: 3869192 - DNA, 25 bp, Homo sapien
tgcacatgggctgatgactacacac

SEQ ID NO: 3869193 - DNA, 25 bp, Homo sapien
tgtacagaatgagtccaccttttgc

SEQ ID NO: 3869194 - DNA, 25 bp, Homo sapien
ccaagtatggcaatacaggatattt

SEQ ID NO: 3869195 - DNA, 25 bp, Homo sapien
atactaaaaccaagtatggcaatac

SEQ ID NO: 3869196 - DNA, 25 bp, Homo sapien
ctgcaataggaattgtttcaatact

SEQ ID NO: 3869197 - DNA, 25 bp, Homo sapien
tttcaatactaaaaccaagtatggc

SEQ ID NO: 3869198 - DNA, 25 bp, Homo sapien
ctataagaaccaattccacctgtaa

SEQ ID NO: 3869199 - DNA, 25 bp, Homo sapien
gaagtgtcgtccatataattcaaaa

SEQ ID NO: 3869200 - DNA, 25 bp, Homo sapien
tataaagcattgatggcctgtagcc

SEQ ID NO: 3869201 - DNA, 25 bp, Homo sapien
cctttatccggatgccagtctttaa

SEQ ID NO: 3869202 - DNA, 25 bp, Homo sapien
tctttggccacatatgaaccaccat

SEQ ID NO: 3869203 - DNA, 25 bp, Homo sapien
caacgtaggcataatcaaaggcctg

SEQ ID NO: 3869204 - DNA, 25 bp, Homo sapien
cagcatgactcaaaacaacgtaggc

SEQ ID NO: 3869205 - DNA, 25 bp, Homo sapien
tgcatggccccatatgaactccttc

SEQ ID NO: 3869206 - DNA, 25 bp, Homo sapien
caaaggcctgcttcacttgcatggc

SEQ ID NO: 3869207 - DNA, 25 bp, Homo sapien
catctgttactctaattattctacc

SEQ ID NO: 3869208 - DNA, 25 bp, Homo sapien
tactctaattattctacctagtatg

SEQ ID NO: 3869209 - DNA, 25 bp, Homo sapien
attgcatgaaggctcaggtctattc

SEQ ID NO: 3869210 - DNA, 25 bp, Homo sapien
tgatatccaatctctatatgtggca

SEQ ID NO: 3869211 - DNA, 25 bp, Homo sapien
aagagtgtttactaagagattccga

SEQ ID NO: 3869212 - DNA, 25 bp, Homo sapien
ttatctaactgctgagtatctacta

SEQ ID NO: 3869213 - DNA, 25 bp, Homo sapien
agattccgaggttttacttctacat

SEQ ID NO: 3869214 - DNA, 25 bp, Homo sapien
tgagtatctactatcaaggtaacac

SEQ ID NO: 3869215 - DNA, 25 bp, Homo sapien
tacatcactagagctggactgtgtg

SEQ ID NO: 3869216 - DNA, 25 bp, Homo sapien
acatcactagagctggactgtgtgg

SEQ ID NO: 3869217 - DNA, 25 bp, Homo sapien
ccagtggacggacggcaaagcagct

SEQ ID NO: 3869218 - DNA, 25 bp, Homo sapien
caaggatacatcttgcgaccctact

SEQ ID NO: 3869219 - DNA, 25 bp, Homo sapien
ggttttgcatggtgttgcatcggaa

SEQ ID NO: 3869220 - DNA, 25 bp, Homo sapien
ttgcgaccctactcggttcccagtg

SEQ ID NO: 3869221 - DNA, 25 bp, Homo sapien
ttttgtgataagtctgtgtctggca

SEQ ID NO: 3869222 - DNA, 25 bp, Homo sapien
cacactggtaggtttgggtcagcac

SEQ ID NO: 3869223 - DNA, 25 bp, Homo sapien
gcctgtggctttctcgtgacctcag

SEQ ID NO: 3869224 - DNA, 25 bp, Homo sapien
cttcctgctactcatggcctgtggc

SEQ ID NO: 3869225 - DNA, 25 bp, Homo sapien
caccacatcataagtgacagagcgg

SEQ ID NO: 3869226 - DNA, 25 bp, Homo sapien
ccaaacaccacatcataagtgacag

SEQ ID NO: 3869227 - DNA, 25 bp, Homo sapien
cacatcataagtgacagagcgggaa

SEQ ID NO: 3869228 - DNA, 25 bp, Homo sapien
catcataagtgacagagcgggaaga

SEQ ID NO: 3869229 - DNA, 25 bp, Homo sapien
tgctggaagaacgaaagagccttgc

SEQ ID NO: 3869230 - DNA, 25 bp, Homo sapien
ctggaagaacgaaagagccttgctg

SEQ ID NO: 3869231 - DNA, 25 bp, Homo sapien
ggaagcctttgctggaagaacgaaa

SEQ ID NO: 3869232 - DNA, 25 bp, Homo sapien
cctttgctggaagaacgaaagagcc

SEQ ID NO: 3869233 - DNA, 25 bp, Homo sapien
taatactgattattggatttgcctt

SEQ ID NO: 3869234 - DNA, 25 bp, Homo sapien
tgccatggtaatactgattattgga

SEQ ID NO: 3869235 - DNA, 25 bp, Homo sapien
gtcatcaaggaaccatggcttgttt

SEQ ID NO: 3869236 - DNA, 25 bp, Homo sapien
gaaccatggcttgtttgagttgtac

SEQ ID NO: 3869237 - DNA, 25 bp, Homo sapien
gactgtgaagcaaccaactgcctag

SEQ ID NO: 3869238 - DNA, 25 bp, Homo sapien
cactagtccacaggttcaggcaaac

SEQ ID NO: 3869239 - DNA, 25 bp, Homo sapien
gaatctcgtctcagaaatggctgca

SEQ ID NO: 3869240 - DNA, 25 bp, Homo sapien
tctgtggcgagctgggaaaaaacgc

SEQ ID NO: 3869241 - DNA, 25 bp, Homo sapien
taaaccgagtggtaagcactagagg

SEQ ID NO: 3869242 - DNA, 25 bp, Homo sapien
tagaggccgatgtgcatagaaatgc

SEQ ID NO: 3869243 - DNA, 25 bp, Homo sapien
gcagtggtaactagacaagattgga

SEQ ID NO: 3869244 - DNA, 25 bp, Homo sapien
gttgcccagtgatacggcctcagga

SEQ ID NO: 3869245 - DNA, 25 bp, Homo sapien
aatcccggcagcagtgaagaaaggt

SEQ ID NO: 3869246 - DNA, 25 bp, Homo sapien
acggtgacctctgccaaggtcagcc

SEQ ID NO: 3869247 - DNA, 25 bp, Homo sapien
ctggggcctccctgcgccggtaatg

SEQ ID NO: 3869248 - DNA, 25 bp, Homo sapien
cggtaatgggaatcccggcagcagt

SEQ ID NO: 3869249 - DNA, 25 bp, Homo sapien
gaaggaaaggcgtcccagcaggacc

SEQ ID NO: 3869250 - DNA, 25 bp, Homo sapien
tttctggaaggatccacagacggcg

SEQ ID NO: 3869251 - DNA, 25 bp, Homo sapien
cagagggaaacactttctagcaaac

SEQ ID NO: 3869252 - DNA, 25 bp, Homo sapien
ccctagaaccgtgggaaaggcgctg

SEQ ID NO: 3869253 - DNA, 25 bp, Homo sapien
tgtgcaaggcatctgggtttcccgg

SEQ ID NO: 3869254 - DNA, 25 bp, Homo sapien
gaggctgctaccctgtgcagtgttt

SEQ ID NO: 3869255 - DNA, 25 bp, Homo sapien
tcttgttatcggaaagcgggcgcca

SEQ ID NO: 3869256 - DNA, 25 bp, Homo sapien
cattgtcacttcctcatgtgcaagg

SEQ ID NO: 3869257 - DNA, 25 bp, Homo sapien
cggctccttgctaccagacctgtga

SEQ ID NO: 3869258 - DNA, 25 bp, Homo sapien
gctcaggctcgctgatgtggaccca

SEQ ID NO: 3869259 - DNA, 25 bp, Homo sapien
acctgtgaggacctccgctttctca

SEQ ID NO: 3869260 - DNA, 25 bp, Homo sapien
ggatggagctcaggctcgctgatgt

SEQ ID NO: 3869261 - DNA, 25 bp, Homo sapien
gctaccaaacattgagctgggactc

SEQ ID NO: 3869262 - DNA, 25 bp, Homo sapien
tccttggcctttgagataagcactc

SEQ ID NO: 3869263 - DNA, 25 bp, Homo sapien
taattgaaggagcaccctcctgtgc

SEQ ID NO: 3869264 - DNA, 25 bp, Homo sapien
taagcactcttactgtccgcattgt

SEQ ID NO: 3869265 - DNA, 25 bp, Homo sapien
tatatctatacatttaccctgtgcc

SEQ ID NO: 3869266 - DNA, 25 bp, Homo sapien
tatttgtacaattttgcctcattct

SEQ ID NO: 3869267 - DNA, 25 bp, Homo sapien
tttgcctcattctatatctatacat

SEQ ID NO: 3869268 - DNA, 25 bp, Homo sapien
ctgtgcctctttagccttgcaaatt

SEQ ID NO: 3869269 - DNA, 25 bp, Homo sapien
tccacgctacctaatgagagtgagt

SEQ ID NO: 3869270 - DNA, 25 bp, Homo sapien
tccttccacgctacctaatgagagt

SEQ ID NO: 3869271 - DNA, 25 bp, Homo sapien
gaaggctccttccacgctacctaat

SEQ ID NO: 3869272 - DNA, 25 bp, Homo sapien
cctaatgagagtgagtcacatctgg

SEQ ID NO: 3869273 - DNA, 25 bp, Homo sapien
cttcctcagacgcgcccaggctcac

SEQ ID NO: 3869274 - DNA, 25 bp, Homo sapien
cccttcctcagacgcgcccaggctc

SEQ ID NO: 3869275 - DNA, 25 bp, Homo sapien
tgcccttcctcagacgcgcccaggc

SEQ ID NO: 3869276 - DNA, 25 bp, Homo sapien
gcccttcctcagacgcgcccaggct

SEQ ID NO: 3869277 - DNA, 25 bp, Homo sapien
gaaagctccagaaagacccgctcca

SEQ ID NO: 3869278 - DNA, 25 bp, Homo sapien
ttagatgaatgcatagaaagctcca

SEQ ID NO: 3869279 - DNA, 25 bp, Homo sapien
gctccagaaagacccgctccagaaa

SEQ ID NO: 3869280 - DNA, 25 bp, Homo sapien
gatgaatgcatagaaagctccagaa

SEQ ID NO: 3869281 - DNA, 25 bp, Homo sapien
cccgcagtgggcccagcgaagtcca

SEQ ID NO: 3869282 - DNA, 25 bp, Homo sapien
ggtaggggaggccctcacaggagcc

SEQ ID NO: 3869283 - DNA, 25 bp, Homo sapien
ccgcagtgggcccagcgaagtccag

SEQ ID NO: 3869284 - DNA, 25 bp, Homo sapien
ggaggccctcacaggagcccaattc

SEQ ID NO: 3869285 - DNA, 25 bp, Homo sapien
ccatcctaacacagagtctgctcag

SEQ ID NO: 3869286 - DNA, 25 bp, Homo sapien
cccaccccatcctaacacagagtct

SEQ ID NO: 3869287 - DNA, 25 bp, Homo sapien
accccatcctaacacagagtctgct

SEQ ID NO: 3869288 - DNA, 25 bp, Homo sapien
tcctaacacagagtctgctcaggtt

SEQ ID NO: 3869289 - DNA, 25 bp, Homo sapien
caagcagcagttggggagaacaccc

SEQ ID NO: 3869290 - DNA, 25 bp, Homo sapien
acagccaagcagcagttggggagaa

SEQ ID NO: 3869291 - DNA, 25 bp, Homo sapien
gttggggagaacaccccaggcagtg

SEQ ID NO: 3869292 - DNA, 25 bp, Homo sapien
gcagttggggagaacaccccaggca

SEQ ID NO: 3869293 - DNA, 25 bp, Homo sapien
ctcctccccagggtacaggcctgtg

SEQ ID NO: 3869294 - DNA, 25 bp, Homo sapien
cctccccagggtacaggcctgtgtc

SEQ ID NO: 3869295 - DNA, 25 bp, Homo sapien
ccccagggtacaggcctgtgtctga

SEQ ID NO: 3869296 - DNA, 25 bp, Homo sapien
cttccagggacatgagctcctcccc

SEQ ID NO: 3869297 - DNA, 25 bp, Homo sapien
gcaccccgatcagggtgccctgggt

SEQ ID NO: 3869298 - DNA, 25 bp, Homo sapien
aaagcaccccgatcagggtgccctg

SEQ ID NO: 3869299 - DNA, 25 bp, Homo sapien
aagacaaagcaccccgatcagggtg

SEQ ID NO: 3869300 - DNA, 25 bp, Homo sapien
gacaaagcaccccgatcagggtgcc

SEQ ID NO: 3869301 - DNA, 25 bp, Homo sapien
aatcgtgacataaacaggcactggg

SEQ ID NO: 3869302 - DNA, 25 bp, Homo sapien
ggatacagaagtgctggtccctgcc

SEQ ID NO: 3869303 - DNA, 25 bp, Homo sapien
ctccttcagacagcttaaaagggct

SEQ ID NO: 3869304 - DNA, 25 bp, Homo sapien
caaaagaggccacttcccattagcc

SEQ ID NO: 3869305 - DNA, 25 bp, Homo sapien
ccttggccaaaaaacgcctctagag

SEQ ID NO: 3869306 - DNA, 25 bp, Homo sapien
cttggccaaaaaacgcctctagagc

SEQ ID NO: 3869307 - DNA, 25 bp, Homo sapien
cagttttcagctgggaagcaccttg

SEQ ID NO: 3869308 - DNA, 25 bp, Homo sapien
gaggcctgagtgaaagaccagggct

SEQ ID NO: 3869309 - DNA, 25 bp, Homo sapien
ttttcagctgggaagcaccttgccc

SEQ ID NO: 3869310 - DNA, 25 bp, Homo sapien
agaggcctgagtgaaagaccagggc

SEQ ID NO: 3869311 - DNA, 25 bp, Homo sapien
tggtgctgagctcaacattctcctc

SEQ ID NO: 3869312 - DNA, 25 bp, Homo sapien
cagccatttctggtcacaggtggtg

SEQ ID NO: 3869313 - DNA, 25 bp, Homo sapien
aggtggtgctgagctcaacattctc

SEQ ID NO: 3869314 - DNA, 25 bp, Homo sapien
catttctggtcacaggtggtgctga

SEQ ID NO: 3869315 - DNA, 25 bp, Homo sapien
agaaggcagaatccttagcactgcc

SEQ ID NO: 3869316 - DNA, 25 bp, Homo sapien
tagcactgccccaaccagggtatct

SEQ ID NO: 3869317 - DNA, 25 bp, Homo sapien
ccagggtatctgctaggtctctgca

SEQ ID NO: 3869318 - DNA, 25 bp, Homo sapien
tcagcagatgtgcactcatgccttc

SEQ ID NO: 3869319 - DNA, 25 bp, Homo sapien
taccagatatacgaagaagagctag

SEQ ID NO: 3869320 - DNA, 25 bp, Homo sapien
cctaccaataaaaggccaggacctg

SEQ ID NO: 3869321 - DNA, 25 bp, Homo sapien
aggaatgttactaatgaccccacag

SEQ ID NO: 3869322 - DNA, 25 bp, Homo sapien
tccagctgccaatgataatgaatcc

SEQ ID NO: 3869323 - DNA, 25 bp, Homo sapien
tcccaggcaaagcccccagaccaga

SEQ ID NO: 3869324 - DNA, 25 bp, Homo sapien
cccaggcaaagcccccagaccagag

SEQ ID NO: 3869325 - DNA, 25 bp, Homo sapien
ctcccaggcaaagcccccagaccag

SEQ ID NO: 3869326 - DNA, 25 bp, Homo sapien
agaagctccaaacaccagagggctg

SEQ ID NO: 3869327 - DNA, 25 bp, Homo sapien
ggacagccaggctgagaagctccaa

SEQ ID NO: 3869328 - DNA, 25 bp, Homo sapien
aagctccaaacaccagagggctgag

SEQ ID NO: 3869329 - DNA, 25 bp, Homo sapien
gctgccaaacaccagtgcaccagga

SEQ ID NO: 3869330 - DNA, 25 bp, Homo sapien
gctgactccacacgcagttcctcag

SEQ ID NO: 3869331 - DNA, 25 bp, Homo sapien
tgggctgactccacacgcagttcct

SEQ ID NO: 3869332 - DNA, 25 bp, Homo sapien
tgactccacacgcagttcctcagct

SEQ ID NO: 3869333 - DNA, 25 bp, Homo sapien
agactgggctgactccacacgcagt

SEQ ID NO: 3869334 - DNA, 25 bp, Homo sapien
tgctccatggccaacaaggggtccg

SEQ ID NO: 3869335 - DNA, 25 bp, Homo sapien
tccatggccaacaaggggtccgcac

SEQ ID NO: 3869336 - DNA, 25 bp, Homo sapien
taggcctctgtcctctccgaggcag

SEQ ID NO: 3869337 - DNA, 25 bp, Homo sapien
tgtcctctccgaggcaggcaagcag

SEQ ID NO: 3869338 - DNA, 25 bp, Homo sapien
ggagggcatctgtctgccaacaccc

SEQ ID NO: 3869339 - DNA, 25 bp, Homo sapien
gggcatctgtctgccaacaccctcc

SEQ ID NO: 3869340 - DNA, 25 bp, Homo sapien
gcatctgtctgccaacaccctcccc

SEQ ID NO: 3869341 - DNA, 25 bp, Homo sapien
gagggcatctgtctgccaacaccct

SEQ ID NO: 3869342 - DNA, 25 bp, Homo sapien
tggcacgcgtgtcgttaaggggccg

SEQ ID NO: 3869343 - DNA, 25 bp, Homo sapien
ttggcacgcgtgtcgttaaggggcc

SEQ ID NO: 3869344 - DNA, 25 bp, Homo sapien
cttggcacgcgtgtcgttaaggggc

SEQ ID NO: 3869345 - DNA, 25 bp, Homo sapien
tgctggctggtgagctggtacttct

SEQ ID NO: 3869346 - DNA, 25 bp, Homo sapien
tacttctcgtagagcgcatcttggt

SEQ ID NO: 3869347 - DNA, 25 bp, Homo sapien
tcgttgaggaagtagcgccccttgg

SEQ ID NO: 3869348 - DNA, 25 bp, Homo sapien
gccaccagcaggagcgtgagcagca

SEQ ID NO: 3869349 - DNA, 25 bp, Homo sapien
tttgtccatgcgtcgaacaccagca

SEQ ID NO: 3869350 - DNA, 25 bp, Homo sapien
caggagacactcgacgtacatcagc

SEQ ID NO: 3869351 - DNA, 25 bp, Homo sapien
tcagcacagagagggccgcaaacac

SEQ ID NO: 3869352 - DNA, 25 bp, Homo sapien
gaacgccatgcccagaatggcctgg

SEQ ID NO: 3869353 - DNA, 25 bp, Homo sapien
gacactgggtgtcgtgaagcctccc

SEQ ID NO: 3869354 - DNA, 25 bp, Homo sapien
tgaagggcagtagtgtgtacaccac

SEQ ID NO: 3869355 - DNA, 25 bp, Homo sapien
gtacaccacgaagacaatgaacagg

SEQ ID NO: 3869356 - DNA, 25 bp, Homo sapien
tcaaagaaccgagcaccaggaggtg

SEQ ID NO: 3869357 - DNA, 25 bp, Homo sapien
ggcccgaggggcatgcgtgctaagg

SEQ ID NO: 3869358 - DNA, 25 bp, Homo sapien
cagggcccgaggggcatgcgtgcta

SEQ ID NO: 3869359 - DNA, 25 bp, Homo sapien
cgaggggcatgcgtgctaagggcag

SEQ ID NO: 3869360 - DNA, 25 bp, Homo sapien
catgcgtgctaagggcagtcccaga

SEQ ID NO: 3869361 - DNA, 25 bp, Homo sapien
ccggcggatctggatgcacttcaca

SEQ ID NO: 3869362 - DNA, 25 bp, Homo sapien
gcgcctgtcaggttcccacacagga

SEQ ID NO: 3869363 - DNA, 25 bp, Homo sapien
aggaagatgactgcgttggccagca

SEQ ID NO: 3869364 - DNA, 25 bp, Homo sapien
tcacagtgtaggtgaagaggtcccg

SEQ ID NO: 3869365 - DNA, 25 bp, Homo sapien
catgctccttgagccgttcgatgat

SEQ ID NO: 3869366 - DNA, 25 bp, Homo sapien
tgcagcgacggtcaccatgctcctt

SEQ ID NO: 3869367 - DNA, 25 bp, Homo sapien
acattctggtgcctcttgacgtaga

SEQ ID NO: 3869368 - DNA, 25 bp, Homo sapien
tggaagttgttgtcaggcatgcagc

SEQ ID NO: 3869369 - DNA, 25 bp, Homo sapien
ggccagctgcgtgaagcccacgatg

SEQ ID NO: 3869370 - DNA, 25 bp, Homo sapien
ccagctgcgtgaagcccacgatgtc

SEQ ID NO: 3869371 - DNA, 25 bp, Homo sapien
gaagcccacgatgtccgcatagagg

SEQ ID NO: 3869372 - DNA, 25 bp, Homo sapien
agcccacgatgtccgcatagaggat

SEQ ID NO: 3869373 - DNA, 25 bp, Homo sapien
cttggcgatctggtcgaacttgcca

SEQ ID NO: 3869374 - DNA, 25 bp, Homo sapien
aacttgccaaagagctcattcagca

SEQ ID NO: 3869375 - DNA, 25 bp, Homo sapien
accaccagctccttgggagaacagt

SEQ ID NO: 3869376 - DNA, 25 bp, Homo sapien
caccagctccttgggagaacagtcg

SEQ ID NO: 3869377 - DNA, 25 bp, Homo sapien
tcttgattcgcatgcactcgttggc

SEQ ID NO: 3869378 - DNA, 25 bp, Homo sapien
tagcagtcgccgaggatcttgattc

SEQ ID NO: 3869379 - DNA, 25 bp, Homo sapien
gggcaggcccgatacacagtagtag

SEQ ID NO: 3869380 - DNA, 25 bp, Homo sapien
catcttcacgcagttccgggcgtgg

SEQ ID NO: 3869381 - DNA, 25 bp, Homo sapien
tcgtgggaccacacgtcatactgcc

SEQ ID NO: 3869382 - DNA, 25 bp, Homo sapien
agcacattccccgagtgtatgccca

SEQ ID NO: 3869383 - DNA, 25 bp, Homo sapien
atccggttggccagggacacgtcgt

SEQ ID NO: 3869384 - DNA, 25 bp, Homo sapien
ggctgcctccatccggttggccagg

SEQ ID NO: 3869385 - DNA, 25 bp, Homo sapien
ttagcgtggcctccgtgatgtgcac

SEQ ID NO: 3869386 - DNA, 25 bp, Homo sapien
cgtggcctccgtgatgtgcacccgg

SEQ ID NO: 3869387 - DNA, 25 bp, Homo sapien
ggtgctttagcgtggcctccgtgat

SEQ ID NO: 3869388 - DNA, 25 bp, Homo sapien
cttgtccaggtgctttagcgtggcc

SEQ ID NO: 3869389 - DNA, 25 bp, Homo sapien
gggtcgatgaccaggtaggtgcgga

SEQ ID NO: 3869390 - DNA, 25 bp, Homo sapien
tctccttgaggtaggggtcccgctg

SEQ ID NO: 3869391 - DNA, 25 bp, Homo sapien
tcatctccttgaggtaggggtcccg

SEQ ID NO: 3869392 - DNA, 25 bp, Homo sapien
ggtaggtgcggatgttcatctcctt

SEQ ID NO: 3869393 - DNA, 25 bp, Homo sapien
gccagggcagtggaactgcctcctc

SEQ ID NO: 3869394 - DNA, 25 bp, Homo sapien
agcagacaggccaaggcgggcccca

SEQ ID NO: 3869395 - DNA, 25 bp, Homo sapien
cctggccagggcagtggaactgcct

SEQ ID NO: 3869396 - DNA, 25 bp, Homo sapien
aagcaggccagggtcgggcagcaga

SEQ ID NO: 3869397 - DNA, 25 bp, Homo sapien
cgaggaccagagtgaaaggagccac

SEQ ID NO: 3869398 - DNA, 25 bp, Homo sapien
ccagggtctggcagtcgggccagcc

SEQ ID NO: 3869399 - DNA, 25 bp, Homo sapien
agccccaaggcatagcgaggaccag

SEQ ID NO: 3869400 - DNA, 25 bp, Homo sapien
ctggctgggccgacattcttgagca

SEQ ID NO: 3869401 - DNA, 25 bp, Homo sapien
gcgtaaggcagagcccatagaagcc

SEQ ID NO: 3869402 - DNA, 25 bp, Homo sapien
aagccagtgcagaaaatccacctcc

SEQ ID NO: 3869403 - DNA, 25 bp, Homo sapien
gcagagcccatagaagccagtgcag

SEQ ID NO: 3869404 - DNA, 25 bp, Homo sapien
cacagcaatggcgtaaggcagagcc

SEQ ID NO: 3869405 - DNA, 25 bp, Homo sapien
acgcattcgctccttcctgtgagaa

SEQ ID NO: 3869406 - DNA, 25 bp, Homo sapien
gggcagcgatccagggagttccact

SEQ ID NO: 3869407 - DNA, 25 bp, Homo sapien
atgacctgccacgtgcctgcgagac

SEQ ID NO: 3869408 - DNA, 25 bp, Homo sapien
tagccgccccgagaaatggccaagc

SEQ ID NO: 3869409 - DNA, 25 bp, Homo sapien
acgtgggtctcaccactgctcacgc

SEQ ID NO: 3869410 - DNA, 25 bp, Homo sapien
tcgaggtaccgggtcatgcgcactg

SEQ ID NO: 3869411 - DNA, 25 bp, Homo sapien
gctcacgctctcacggtggttgaga

SEQ ID NO: 3869412 - DNA, 25 bp, Homo sapien
tgagatgtgcaaagggccgtgccgc

SEQ ID NO: 3869413 - DNA, 25 bp, Homo sapien
ctgtctggggtccggcggtggcgct

SEQ ID NO: 3869414 - DNA, 25 bp, Homo sapien
cgtcatcgtacgagtcatcctccga

SEQ ID NO: 3869415 - DNA, 25 bp, Homo sapien
gctgagcccctcaatggctgacagc

SEQ ID NO: 3869416 - DNA, 25 bp, Homo sapien
ggagctgagcccctcaatggctgac

SEQ ID NO: 3869417 - DNA, 25 bp, Homo sapien
tggctgacagcatctcgtcatcgta

SEQ ID NO: 3869418 - DNA, 25 bp, Homo sapien
ctccaggaagatggacccaaaggtg

SEQ ID NO: 3869419 - DNA, 25 bp, Homo sapien
tccaggaagatggacccaaaggtgt

SEQ ID NO: 3869420 - DNA, 25 bp, Homo sapien
caggaagatggacccaaaggtgtag

SEQ ID NO: 3869421 - DNA, 25 bp, Homo sapien
gaagatggacccaaaggtgtagaag

SEQ ID NO: 3869422 - DNA, 25 bp, Homo sapien
caggcaaagtcgtggcgggcccggg

SEQ ID NO: 3869423 - DNA, 25 bp, Homo sapien
tggcgcaggcaaagtcgtggcgggc

SEQ ID NO: 3869424 - DNA, 25 bp, Homo sapien
acgaagatcaggctggcgcaggcaa

SEQ ID NO: 3869425 - DNA, 25 bp, Homo sapien
atgcagacgaagatcaggctggcgc

SEQ ID NO: 3869426 - DNA, 25 bp, Homo sapien
aggatggcgcctacagttttcagag

SEQ ID NO: 3869427 - DNA, 25 bp, Homo sapien
caagggctgtcaaccaaaatgcatg

SEQ ID NO: 3869428 - DNA, 25 bp, Homo sapien
caatcctggtcgatgcttcggccta

SEQ ID NO: 3869429 - DNA, 25 bp, Homo sapien
tcttctagaaagcaccaagtagctg

SEQ ID NO: 3869430 - DNA, 25 bp, Homo sapien
gaaggacacacccagtgccgccgtc

SEQ ID NO: 3869431 - DNA, 25 bp, Homo sapien
cgagaacttggtggcaaagcacagg

SEQ ID NO: 3869432 - DNA, 25 bp, Homo sapien
cagccccagtacacaggccaccagc

SEQ ID NO: 3869433 - DNA, 25 bp, Homo sapien
ggccaccagcccgaaggacacaccc

SEQ ID NO: 3869434 - DNA, 25 bp, Homo sapien
ccaccctctcagagatagtgcagag

SEQ ID NO: 3869435 - DNA, 25 bp, Homo sapien
tgccgatggtcaggacggccagggt

SEQ ID NO: 3869436 - DNA, 25 bp, Homo sapien
ctcagagatagtgcagagcgtcccc

SEQ ID NO: 3869437 - DNA, 25 bp, Homo sapien
ccctctcagagatagtgcagagcgt

SEQ ID NO: 3869438 - DNA, 25 bp, Homo sapien
taggcgtcccaaatctggaggtctc

SEQ ID NO: 3869439 - DNA, 25 bp, Homo sapien
tcccaaatctggaggtctccctcta

SEQ ID NO: 3869440 - DNA, 25 bp, Homo sapien
cacattgtaggcgtcccaaatctgg

SEQ ID NO: 3869441 - DNA, 25 bp, Homo sapien
taaggccacattgtaggcgtcccaa

SEQ ID NO: 3869442 - DNA, 25 bp, Homo sapien
tcgcggccagtaggcctgtctcatt

SEQ ID NO: 3869443 - DNA, 25 bp, Homo sapien
ttgtcttgctgctcgcggccagtag

SEQ ID NO: 3869444 - DNA, 25 bp, Homo sapien
gctgctcgcggccagtaggcctgtc

SEQ ID NO: 3869445 - DNA, 25 bp, Homo sapien
ggccagtaggcctgtctcattgcca

SEQ ID NO: 3869446 - DNA, 25 bp, Homo sapien
ggctttttcccatgctgtcccttgt

SEQ ID NO: 3869447 - DNA, 25 bp, Homo sapien
tgccctgctcaagattgtgctgtgg

SEQ ID NO: 3869448 - DNA, 25 bp, Homo sapien
gagcgtgcatgcatccaagctgcct

SEQ ID NO: 3869449 - DNA, 25 bp, Homo sapien
caggcctgtcagagaggaagtgccc

SEQ ID NO: 3869450 - DNA, 25 bp, Homo sapien
tgaagtgagctcatttaaacgggaa

SEQ ID NO: 3869451 - DNA, 25 bp, Homo sapien
cttatgaagtgagctcatttaaacg

SEQ ID NO: 3869452 - DNA, 25 bp, Homo sapien
tatgaagtgagctcatttaaacggg

SEQ ID NO: 3869453 - DNA, 25 bp, Homo sapien
gaagtgagctcatttaaacgggaaa

SEQ ID NO: 3869454 - DNA, 25 bp, Homo sapien
agcaccaggtaggccaccagggcca

SEQ ID NO: 3869455 - DNA, 25 bp, Homo sapien
aggaagaccgagcaggcgatgaagc

SEQ ID NO: 3869456 - DNA, 25 bp, Homo sapien
aagaccgagcaggcgatgaagccca

SEQ ID NO: 3869457 - DNA, 25 bp, Homo sapien
agagcaccaggtaggccaccagggc

SEQ ID NO: 3869458 - DNA, 25 bp, Homo sapien
ggtggtgccgttgggcttggtgagg

SEQ ID NO: 3869459 - DNA, 25 bp, Homo sapien
tggtgccgttgggcttggtgaggtt

SEQ ID NO: 3869460 - DNA, 25 bp, Homo sapien
ctggtggtgccgttgggcttggtga

SEQ ID NO: 3869461 - DNA, 25 bp, Homo sapien
ggtgccgttgggcttggtgaggttg

SEQ ID NO: 3869462 - DNA, 25 bp, Homo sapien
gagtcatgctctccaggtgccacgc

SEQ ID NO: 3869463 - DNA, 25 bp, Homo sapien
gtgccacgcacacccaggggaaagg

SEQ ID NO: 3869464 - DNA, 25 bp, Homo sapien
agggaggcccaagtcactcccagca

SEQ ID NO: 3869465 - DNA, 25 bp, Homo sapien
tgaatgcgaagggaggcccaagtca

SEQ ID NO: 3869466 - DNA, 25 bp, Homo sapien
ggtcttcaggtccttccaggaacag

SEQ ID NO: 3869467 - DNA, 25 bp, Homo sapien
agtgtaagcagggtgatgtagaaca

SEQ ID NO: 3869468 - DNA, 25 bp, Homo sapien
tctggagagtgtaagcagggtgatg

SEQ ID NO: 3869469 - DNA, 25 bp, Homo sapien
ctgtctggagagtgtaagcagggtg

SEQ ID NO: 3869470 - DNA, 25 bp, Homo sapien
acaggaccaggtagaaattggtcat

SEQ ID NO: 3869471 - DNA, 25 bp, Homo sapien
acgtgggctggcaggacgttctcca

SEQ ID NO: 3869472 - DNA, 25 bp, Homo sapien
tcttccataggcagtccaagcggca

SEQ ID NO: 3869473 - DNA, 25 bp, Homo sapien
taacttgtcaccgataaagtgggca

SEQ ID NO: 3869474 - DNA, 25 bp, Homo sapien
tctccagaagaaggcggttcacgtt

SEQ ID NO: 3869475 - DNA, 25 bp, Homo sapien
ggaagagtggcaaggcctcaggagc

SEQ ID NO: 3869476 - DNA, 25 bp, Homo sapien
gaagagtggcaaggcctcaggagca

SEQ ID NO: 3869477 - DNA, 25 bp, Homo sapien
aagagtggcaaggcctcaggagcag

SEQ ID NO: 3869478 - DNA, 25 bp, Homo sapien
gagtggcaaggcctcaggagcagat

SEQ ID NO: 3869479 - DNA, 25 bp, Homo sapien
cagtcataggactgatggtaccagt

SEQ ID NO: 3869480 - DNA, 25 bp, Homo sapien
gcacggaggcaaacatgacacagac

SEQ ID NO: 3869481 - DNA, 25 bp, Homo sapien
gaacactttgaagtccggcacggag

SEQ ID NO: 3869482 - DNA, 25 bp, Homo sapien
gatctcattgagcaggcgtaggcac

SEQ ID NO: 3869483 - DNA, 25 bp, Homo sapien
gcaaacacagcattatctacacagg

SEQ ID NO: 3869484 - DNA, 25 bp, Homo sapien
cacagagaagatgccaacgaattat

SEQ ID NO: 3869485 - DNA, 25 bp, Homo sapien
tgggattatagaccaccttgcccag

SEQ ID NO: 3869486 - DNA, 25 bp, Homo sapien
gagtctaatcttagcaagctgccca

SEQ ID NO: 3869487 - DNA, 25 bp, Homo sapien
tccacgccgctgaacttgggcttca

SEQ ID NO: 3869488 - DNA, 25 bp, Homo sapien
ggttctcgtgccctgaggcgacgct

SEQ ID NO: 3869489 - DNA, 25 bp, Homo sapien
cagctgccatgtacgtgctgccgat

SEQ ID NO: 3869490 - DNA, 25 bp, Homo sapien
tgccctgaggcgacgctgagccctg

SEQ ID NO: 3869491 - DNA, 25 bp, Homo sapien
ggagtgcctgttgatgccgtccagc

SEQ ID NO: 3869492 - DNA, 25 bp, Homo sapien
caccatgacaccaatgtgggcatgc

SEQ ID NO: 3869493 - DNA, 25 bp, Homo sapien
tcagggcgatgctgaactccaccat

SEQ ID NO: 3869494 - DNA, 25 bp, Homo sapien
acgcggaggcggaaggagttgaagg

SEQ ID NO: 3869495 - DNA, 25 bp, Homo sapien
ccagatgtcatactgaggttttcgg

SEQ ID NO: 3869496 - DNA, 25 bp, Homo sapien
agtgctttccattcggctggccaca

SEQ ID NO: 3869497 - DNA, 25 bp, Homo sapien
tcatactgaggttttcgggccccaa

SEQ ID NO: 3869498 - DNA, 25 bp, Homo sapien
actccagcaatcacaggcccatggt

SEQ ID NO: 3869499 - DNA, 25 bp, Homo sapien
tgacgttgatcaggccacggcattc

SEQ ID NO: 3869500 - DNA, 25 bp, Homo sapien
tgaaacttggcagtgtccgtacaga

SEQ ID NO: 3869501 - DNA, 25 bp, Homo sapien
aagtaagtcctcagctcgcctttgc

SEQ ID NO: 3869502 - DNA, 25 bp, Homo sapien
cggcattcacaagagtacccgaggc

SEQ ID NO: 3869503 - DNA, 25 bp, Homo sapien
gagggagtctccaatccgtgctaga

SEQ ID NO: 3869504 - DNA, 25 bp, Homo sapien
gccttttcggaatccagcaggagcc

SEQ ID NO: 3869505 - DNA, 25 bp, Homo sapien
tcatcatgtgctaaagttgcctgcc

SEQ ID NO: 3869506 - DNA, 25 bp, Homo sapien
tccagtgcaggtccaaagaagccaa

SEQ ID NO: 3869507 - DNA, 25 bp, Homo sapien
aagagatttatgtctagtgtctgaa

SEQ ID NO: 3869508 - DNA, 25 bp, Homo sapien
cagatgtaaaacacccctttcagct

SEQ ID NO: 3869509 - DNA, 25 bp, Homo sapien
aggcaaaaagtaacagtgttaattg

SEQ ID NO: 3869510 - DNA, 25 bp, Homo sapien
agtgttaattgtggtgtttttctct

SEQ ID NO: 3869511 - DNA, 25 bp, Homo sapien
gctgaccccataagctgatgctaga

SEQ ID NO: 3869512 - DNA, 25 bp, Homo sapien
agtggttaaaaaggcagagcataca

SEQ ID NO: 3869513 - DNA, 25 bp, Homo sapien
tgcctcattcaaaggcaaggctctg

SEQ ID NO: 3869514 - DNA, 25 bp, Homo sapien
tttcaaagcacctctctccagaatg

SEQ ID NO: 3869515 - DNA, 25 bp, Homo sapien
aagtaagatacagttgaaggacggc

SEQ ID NO: 3869516 - DNA, 25 bp, Homo sapien
taagatacagttgaaggacggcagg

SEQ ID NO: 3869517 - DNA, 25 bp, Homo sapien
ggagaacgcaaagatgtgtgagtaa

SEQ ID NO: 3869518 - DNA, 25 bp, Homo sapien
gaacgcaaagatgtgtgagtaatca

SEQ ID NO: 3869519 - DNA, 25 bp, Homo sapien
gaagagatgcactcacaggttgtcc

SEQ ID NO: 3869520 - DNA, 25 bp, Homo sapien
tcagagaggcccagtgcactaatgt

SEQ ID NO: 3869521 - DNA, 25 bp, Homo sapien
tgcacccatgcggagtagatccttc

SEQ ID NO: 3869522 - DNA, 25 bp, Homo sapien
gaaatcctggcgatgctctggtgat

SEQ ID NO: 3869523 - DNA, 25 bp, Homo sapien
ctagtgagttcatgaggaccacgaa

SEQ ID NO: 3869524 - DNA, 25 bp, Homo sapien
catgaggaccacgaaaataaaatac

SEQ ID NO: 3869525 - DNA, 25 bp, Homo sapien
gtgagttcatgaggaccacgaaaat

SEQ ID NO: 3869526 - DNA, 25 bp, Homo sapien
gagttcatgaggaccacgaaaataa

SEQ ID NO: 3869527 - DNA, 25 bp, Homo sapien
tatgggtaattaggcacctcccacc

SEQ ID NO: 3869528 - DNA, 25 bp, Homo sapien
tgcccctgcatacccagtgggaatg

SEQ ID NO: 3869529 - DNA, 25 bp, Homo sapien
cctgacaaaagcacactgggagttt

SEQ ID NO: 3869530 - DNA, 25 bp, Homo sapien
gacaggatcatcactaagaagcgtt

SEQ ID NO: 3869531 - DNA, 25 bp, Homo sapien
tgattgcttaatatctgggttgatc

SEQ ID NO: 3869532 - DNA, 25 bp, Homo sapien
ccatatgtaggtagagaaatcaggt

SEQ ID NO: 3869533 - DNA, 25 bp, Homo sapien
gaaatcaggtggatcaatggagtta

SEQ ID NO: 3869534 - DNA, 25 bp, Homo sapien
gagttagagttggagagccatacca

SEQ ID NO: 3869535 - DNA, 25 bp, Homo sapien
gattgggaagctttcacattctctg

SEQ ID NO: 3869536 - DNA, 25 bp, Homo sapien
ctctgaagagcaagattgggaagct

SEQ ID NO: 3869537 - DNA, 25 bp, Homo sapien
tcatgcacagtaatccctagaactc

SEQ ID NO: 3869538 - DNA, 25 bp, Homo sapien
gagaatattgctgtgttcatgcaca

SEQ ID NO: 3869539 - DNA, 25 bp, Homo sapien
ggtcaggcccaacgatgactgctgt

SEQ ID NO: 3869540 - DNA, 25 bp, Homo sapien
cagtaatagcacatcgggaggaacc

SEQ ID NO: 3869541 - DNA, 25 bp, Homo sapien
ggaaagttttgctcactggcctgaa

SEQ ID NO: 3869542 - DNA, 25 bp, Homo sapien
tgtcacaatagttagaggaaccctg

SEQ ID NO: 3869543 - DNA, 25 bp, Homo sapien
acatcgtatctttcactatagtcag

SEQ ID NO: 3869544 - DNA, 25 bp, Homo sapien
tgacatcgtatctttcactatagtc

SEQ ID NO: 3869545 - DNA, 25 bp, Homo sapien
gacatcgtatctttcactatagtca

SEQ ID NO: 3869546 - DNA, 25 bp, Homo sapien
gtgacatcgtatctttcactatagt

SEQ ID NO: 3869547 - DNA, 25 bp, Homo sapien
tatgcacaaaggatctagctagaca

SEQ ID NO: 3869548 - DNA, 25 bp, Homo sapien
tttagatagtaattcctagccctgg

SEQ ID NO: 3869549 - DNA, 25 bp, Homo sapien
gatcagtctgtgtcattatgcacaa

SEQ ID NO: 3869550 - DNA, 25 bp, Homo sapien
taaacccgccattaacaaagccata

SEQ ID NO: 3869551 - DNA, 25 bp, Homo sapien
aaaaaatctgtagctcgttgtgatc

SEQ ID NO: 3869552 - DNA, 25 bp, Homo sapien
gaacaaaaaaatctgtagctcgttg

SEQ ID NO: 3869553 - DNA, 25 bp, Homo sapien
aaaaatctgtagctcgttgtgatca

SEQ ID NO: 3869554 - DNA, 25 bp, Homo sapien
caaaaaaatctgtagctcgttgtga

SEQ ID NO: 3869555 - DNA, 25 bp, Homo sapien
gcggcgggccctcggcggctctgcc

SEQ ID NO: 3869556 - DNA, 25 bp, Homo sapien
ctctgccgggcttccgctctttccc

SEQ ID NO: 3869557 - DNA, 25 bp, Homo sapien
tctgccgggcttccgctctttccca

SEQ ID NO: 3869558 - DNA, 25 bp, Homo sapien
gccgggcttccgctctttcccagtg

SEQ ID NO: 3869559 - DNA, 25 bp, Homo sapien
cactcaagagctgttgggctgttgg

SEQ ID NO: 3869560 - DNA, 25 bp, Homo sapien
tagcctcagttgtagccggatgtca

SEQ ID NO: 3869561 - DNA, 25 bp, Homo sapien
tcaatccttcaaggctgttggactg

SEQ ID NO: 3869562 - DNA, 25 bp, Homo sapien
tttgaagctcacacagttgctggca

SEQ ID NO: 3869563 - DNA, 25 bp, Homo sapien
cagaggccaccgacatgaaaagcga

SEQ ID NO: 3869564 - DNA, 25 bp, Homo sapien
gcgaggggctccgcggaaacaccat

SEQ ID NO: 3869565 - DNA, 25 bp, Homo sapien
aggccaccgacatgaaaagcgaggg

SEQ ID NO: 3869566 - DNA, 25 bp, Homo sapien
ctcccagaggccaccgacatgaaaa

SEQ ID NO: 3869567 - DNA, 25 bp, Homo sapien
agccttgccaggggaggctttctca

SEQ ID NO: 3869568 - DNA, 25 bp, Homo sapien
cagccttgccaggggaggctttctc

SEQ ID NO: 3869569 - DNA, 25 bp, Homo sapien
gccttgccaggggaggctttctcac

SEQ ID NO: 3869570 - DNA, 25 bp, Homo sapien
atttgcccgcccctaggatggtcag

SEQ ID NO: 3869571 - DNA, 25 bp, Homo sapien
tttcagctctcgacatcctctgagc

SEQ ID NO: 3869572 - DNA, 25 bp, Homo sapien
tctcctcaggtgctttgggcaaggg

SEQ ID NO: 3869573 - DNA, 25 bp, Homo sapien
gatggtcagcaggactcttttcagc

SEQ ID NO: 3869574 - DNA, 25 bp, Homo sapien
caaatgatggtcctgatgctcagaa

SEQ ID NO: 3869575 - DNA, 25 bp, Homo sapien
gaatccccctgatctcttggccaaa

SEQ ID NO: 3869576 - DNA, 25 bp, Homo sapien
cccaaatgatggtcctgatgctcag

SEQ ID NO: 3869577 - DNA, 25 bp, Homo sapien
tctcttggccaaagctccaaaggcc

SEQ ID NO: 3869578 - DNA, 25 bp, Homo sapien
cagtggcatagagcgtcagagcatg

SEQ ID NO: 3869579 - DNA, 25 bp, Homo sapien
cagcagtggcatagagcgtcagagc

SEQ ID NO: 3869580 - DNA, 25 bp, Homo sapien
tgcagcagtggcatagagcgtcaga

SEQ ID NO: 3869581 - DNA, 25 bp, Homo sapien
aggtgcagcagtggcatagagcgtc

SEQ ID NO: 3869582 - DNA, 25 bp, Homo sapien
ttgagaatgacctcaggtagctgca

SEQ ID NO: 3869583 - DNA, 25 bp, Homo sapien
gtgaggctggtcaccctcctgatcc

SEQ ID NO: 3869584 - DNA, 25 bp, Homo sapien
ctttgcagtaagaagccagaggtgg

SEQ ID NO: 3869585 - DNA, 25 bp, Homo sapien
tctttgcagtaagaagccagaggtg

SEQ ID NO: 3869586 - DNA, 25 bp, Homo sapien
gatgttggaaccctgatgtgtccct

SEQ ID NO: 3869587 - DNA, 25 bp, Homo sapien
ttaaatgttcacgttctttgattca

SEQ ID NO: 3869588 - DNA, 25 bp, Homo sapien
tgttcacgttctttgattcatcaac

SEQ ID NO: 3869589 - DNA, 25 bp, Homo sapien
ctttgattcatcaaccagatgttgg

SEQ ID NO: 3869590 - DNA, 25 bp, Homo sapien
agacggctgccacatcgctgggcct

SEQ ID NO: 3869591 - DNA, 25 bp, Homo sapien
ctatggccagcgcagacggctgcca

SEQ ID NO: 3869592 - DNA, 25 bp, Homo sapien
acatcgctgggcctcctcgtgttct

SEQ ID NO: 3869593 - DNA, 25 bp, Homo sapien
ctggcagccgctggtggtgtgagga

SEQ ID NO: 3869594 - DNA, 25 bp, Homo sapien
gaacaagttacttctatcctctgtg

SEQ ID NO: 3869595 - DNA, 25 bp, Homo sapien
gaactacaagacagtgtgccatcag

SEQ ID NO: 3869596 - DNA, 25 bp, Homo sapien
gttggcacggccacctacggttatg

SEQ ID NO: 3869597 - DNA, 25 bp, Homo sapien
tggcataagaataagtgcacctacc

SEQ ID NO: 3869598 - DNA, 25 bp, Homo sapien
gctgggttacttcatactcttctga

SEQ ID NO: 3869599 - DNA, 25 bp, Homo sapien
ggttaagtttaccactgccagattc

SEQ ID NO: 3869600 - DNA, 25 bp, Homo sapien
tccacctttgcaagatgccagcctt

SEQ ID NO: 3869601 - DNA, 25 bp, Homo sapien
tattgtatgaaaccagagtccagac

SEQ ID NO: 3869602 - DNA, 25 bp, Homo sapien
cagaggcgttgctgtagctctcacc

SEQ ID NO: 3869603 - DNA, 25 bp, Homo sapien
tacttggacaaatcattgctggaaa

SEQ ID NO: 3869604 - DNA, 25 bp, Homo sapien
tcaccctgcagatgtctcgcaatgt

SEQ ID NO: 3869605 - DNA, 25 bp, Homo sapien
ctcgcaatgttggatggtaccatga

SEQ ID NO: 3869606 - DNA, 25 bp, Homo sapien
tcaagtcgtcctccggcctcacatc

SEQ ID NO: 3869607 - DNA, 25 bp, Homo sapien
gtcgtcctccggcctcacatctggc

SEQ ID NO: 3869608 - DNA, 25 bp, Homo sapien
aagtcgtcctccggcctcacatctg

SEQ ID NO: 3869609 - DNA, 25 bp, Homo sapien
agtcgtcctccggcctcacatctgg

SEQ ID NO: 3869610 - DNA, 25 bp, Homo sapien
gcattacatgactgtatctccagat

SEQ ID NO: 3869611 - DNA, 25 bp, Homo sapien
gatgccagcattacatgactgtatc

SEQ ID NO: 3869612 - DNA, 25 bp, Homo sapien
tggtgatgccagcattacatgactg

SEQ ID NO: 3869613 - DNA, 25 bp, Homo sapien
ggttggtgatgccagcattacatga

SEQ ID NO: 3869614 - DNA, 25 bp, Homo sapien
taccagagaagagggagtagggctg

SEQ ID NO: 3869615 - DNA, 25 bp, Homo sapien
tgtaccagagaagagggagtagggc

SEQ ID NO: 3869616 - DNA, 25 bp, Homo sapien
ctgtgtaccagagaagagggagtag

SEQ ID NO: 3869617 - DNA, 25 bp, Homo sapien
tgtgtaccagagaagagggagtagg

SEQ ID NO: 3869618 - DNA, 25 bp, Homo sapien
ggtgtcactcgggaacagtgccagt

SEQ ID NO: 3869619 - DNA, 25 bp, Homo sapien
cgggaacagtgccagtctcattagg

SEQ ID NO: 3869620 - DNA, 25 bp, Homo sapien
cactcgggggtgtcactcgggaaca

SEQ ID NO: 3869621 - DNA, 25 bp, Homo sapien
acaaaaacacattacggcactcggg

SEQ ID NO: 3869622 - DNA, 25 bp, Homo sapien
atgcgtcaggtaactggatagggtc

SEQ ID NO: 3869623 - DNA, 25 bp, Homo sapien
cgtcaggtaactggatagggtcttg

SEQ ID NO: 3869624 - DNA, 25 bp, Homo sapien
ctctgatgcgtcaggtaactggata

SEQ ID NO: 3869625 - DNA, 25 bp, Homo sapien
gatagggtcttggtcacagcaattt

SEQ ID NO: 3869626 - DNA, 25 bp, Homo sapien
atgtatggaaaacccagggccacgg

SEQ ID NO: 3869627 - DNA, 25 bp, Homo sapien
tcagagttccaagctgatgtatgga

SEQ ID NO: 3869628 - DNA, 25 bp, Homo sapien
gccagccagcaacaaaagtcaggtg

SEQ ID NO: 3869629 - DNA, 25 bp, Homo sapien
caaaagtcaggtgactggtggcttt

SEQ ID NO: 3869630 - DNA, 25 bp, Homo sapien
catccagcccgagttatggacaaag

SEQ ID NO: 3869631 - DNA, 25 bp, Homo sapien
cagcccgagttatggacaaagttga

SEQ ID NO: 3869632 - DNA, 25 bp, Homo sapien
cccgagttatggacaaagttgatgt

SEQ ID NO: 3869633 - DNA, 25 bp, Homo sapien
ggcatccagcccgagttatggacaa

SEQ ID NO: 3869634 - DNA, 25 bp, Homo sapien
tgccccccattgtcctgaggccgcc

SEQ ID NO: 3869635 - DNA, 25 bp, Homo sapien
ctgccccccattgtcctgaggccgc

SEQ ID NO: 3869636 - DNA, 25 bp, Homo sapien
ccctgtatgcctgccccccattgtc

SEQ ID NO: 3869637 - DNA, 25 bp, Homo sapien
cccctgtatgcctgccccccattgt

SEQ ID NO: 3869638 - DNA, 25 bp, Homo sapien
tggagcgggcaacaaaagcattctt

SEQ ID NO: 3869639 - DNA, 25 bp, Homo sapien
aatgcaaagcggcagcgatgtccct

SEQ ID NO: 3869640 - DNA, 25 bp, Homo sapien
agcatctttggagcgggcaacaaaa

SEQ ID NO: 3869641 - DNA, 25 bp, Homo sapien
aagggaatgcaaagcggcagcgatg

SEQ ID NO: 3869642 - DNA, 25 bp, Homo sapien
cagacgctccggataggtccaaaat

SEQ ID NO: 3869643 - DNA, 25 bp, Homo sapien
gtcagggtactggtgcctccaccag

SEQ ID NO: 3869644 - DNA, 25 bp, Homo sapien
caaaatgtcctgctaggtatacaga

SEQ ID NO: 3869645 - DNA, 25 bp, Homo sapien
gcggccaccaacaggttcacagacg

SEQ ID NO: 3869646 - DNA, 25 bp, Homo sapien
ctctgtccttcttgcgggttccatg

SEQ ID NO: 3869647 - DNA, 25 bp, Homo sapien
gtccttcttgcgggttccatgtctc

SEQ ID NO: 3869648 - DNA, 25 bp, Homo sapien
tccttcttgcgggttccatgtctct

SEQ ID NO: 3869649 - DNA, 25 bp, Homo sapien
ggtaacctcggggaatgaagctaga

SEQ ID NO: 3869650 - DNA, 25 bp, Homo sapien
caggagctctaaagagggtaacctc

SEQ ID NO: 3869651 - DNA, 25 bp, Homo sapien
gggaatgaagctagagcatctgtcc

SEQ ID NO: 3869652 - DNA, 25 bp, Homo sapien
gagcatctgtccaggagaccatcag

SEQ ID NO: 3869653 - DNA, 25 bp, Homo sapien
gctgagtgaatcaacaccactgcag

SEQ ID NO: 3869654 - DNA, 25 bp, Homo sapien
gagtcatgacaaagtgcagctgctg

SEQ ID NO: 3869655 - DNA, 25 bp, Homo sapien
tccaatggcctacatctgaaacttc

SEQ ID NO: 3869656 - DNA, 25 bp, Homo sapien
gacaatccccttgatgctttgcacc

SEQ ID NO: 3869657 - DNA, 25 bp, Homo sapien
agccttgaagtccgaatacactgaa

SEQ ID NO: 3869658 - DNA, 25 bp, Homo sapien
cttgaagtccgaatacactgaaatg

SEQ ID NO: 3869659 - DNA, 25 bp, Homo sapien
gccttgaagtccgaatacactgaaa

SEQ ID NO: 3869660 - DNA, 25 bp, Homo sapien
ccttgaagtccgaatacactgaaat

SEQ ID NO: 3869661 - DNA, 25 bp, Homo sapien
tttgcaaggagggtatctccagctc

SEQ ID NO: 3869662 - DNA, 25 bp, Homo sapien
ccatgccttggccatcaaagagaaa

SEQ ID NO: 3869663 - DNA, 25 bp, Homo sapien
catcccattggccagccatgccttg

SEQ ID NO: 3869664 - DNA, 25 bp, Homo sapien
ttgcaaggagggtatctccagctct

SEQ ID NO: 3869665 - DNA, 25 bp, Homo sapien
cagggtaatcagaggccagtctctg

SEQ ID NO: 3869666 - DNA, 25 bp, Homo sapien
gtaatcagaggccagtctctgtcca

SEQ ID NO: 3869667 - DNA, 25 bp, Homo sapien
agggtaatcagaggccagtctctgt

SEQ ID NO: 3869668 - DNA, 25 bp, Homo sapien
gggtaatcagaggccagtctctgtc

SEQ ID NO: 3869669 - DNA, 25 bp, Homo sapien
gagcagcaagttccttattccccat

SEQ ID NO: 3869670 - DNA, 25 bp, Homo sapien
caccccgggtggcttagcaggagca

SEQ ID NO: 3869671 - DNA, 25 bp, Homo sapien
ccccgggtggcttagcaggagcagc

SEQ ID NO: 3869672 - DNA, 25 bp, Homo sapien
cttcaccccgggtggcttagcagga

SEQ ID NO: 3869673 - DNA, 25 bp, Homo sapien
gagctgactggatgcctgacccatt

SEQ ID NO: 3869674 - DNA, 25 bp, Homo sapien
gctgtagagctccatagtcccaggg

SEQ ID NO: 3869675 - DNA, 25 bp, Homo sapien
ggtggtctctacagctgtagagctc

SEQ ID NO: 3869676 - DNA, 25 bp, Homo sapien
ccaacccatcaggatctctttgcag

SEQ ID NO: 3869677 - DNA, 25 bp, Homo sapien
ccggatctggggtgagaacccaaga

SEQ ID NO: 3869678 - DNA, 25 bp, Homo sapien
aaaatgttagtctgtccaggtctct

SEQ ID NO: 3869679 - DNA, 25 bp, Homo sapien
ccaggtctctgagaagggggtctcc

SEQ ID NO: 3869680 - DNA, 25 bp, Homo sapien
gaacccaagagatgggccttgtggc

SEQ ID NO: 3869681 - DNA, 25 bp, Homo sapien
tatcctctaggatcctggaaccagt

SEQ ID NO: 3869682 - DNA, 25 bp, Homo sapien
gactagccatattgcaagtgaccat

SEQ ID NO: 3869683 - DNA, 25 bp, Homo sapien
ttatatagcggacttgacatctggg

SEQ ID NO: 3869684 - DNA, 25 bp, Homo sapien
aaggacattaggaattcacagcccc

SEQ ID NO: 3869685 - DNA, 25 bp, Homo sapien
gtgttacgctcgtcctggcaccagg

SEQ ID NO: 3869686 - DNA, 25 bp, Homo sapien
ggacactgtgggtccgtgttacgct

SEQ ID NO: 3869687 - DNA, 25 bp, Homo sapien
cactgtgggtccgtgttacgctcgt

SEQ ID NO: 3869688 - DNA, 25 bp, Homo sapien
tgggtccgtgttacgctcgtcctgg

SEQ ID NO: 3869689 - DNA, 25 bp, Homo sapien
gcggccgggagcgtccctaagccat

SEQ ID NO: 3869690 - DNA, 25 bp, Homo sapien
gagcgtccctaagccatgcgcccgg

SEQ ID NO: 3869691 - DNA, 25 bp, Homo sapien
gcggcccgactgacgcccgggagcg

SEQ ID NO: 3869692 - DNA, 25 bp, Homo sapien
gccgagcggagcccgaggcggcgcc

SEQ ID NO: 3869693 - DNA, 25 bp, Homo sapien
ccggcttggagtgaagtttccccat

SEQ ID NO: 3869694 - DNA, 25 bp, Homo sapien
gggctctccctgcgcttgcacacgg

SEQ ID NO: 3869695 - DNA, 25 bp, Homo sapien
cgggctctccctgcgcttgcacacg

SEQ ID NO: 3869696 - DNA, 25 bp, Homo sapien
gctctccctgcgcttgcacacggcg

SEQ ID NO: 3869697 - DNA, 25 bp, Homo sapien
ctctccctgcgcttgcacacggcgg

SEQ ID NO: 3869698 - DNA, 25 bp, Homo sapien
ggccgttctgccgcggccgcggtgt

SEQ ID NO: 3869699 - DNA, 25 bp, Homo sapien
ctgggccgttctgccgcggccgcgg

SEQ ID NO: 3869700 - DNA, 25 bp, Homo sapien
cggccgcggtgtcccccgcgtccat

SEQ ID NO: 3869701 - DNA, 25 bp, Homo sapien
gttctgccgcggccgcggtgtcccc

SEQ ID NO: 3869702 - DNA, 25 bp, Homo sapien
gacgggtttaggatcagaccaggga

SEQ ID NO: 3869703 - DNA, 25 bp, Homo sapien
gtttaggatcagaccagggagcact

SEQ ID NO: 3869704 - DNA, 25 bp, Homo sapien
ggtttaggatcagaccagggagcac

SEQ ID NO: 3869705 - DNA, 25 bp, Homo sapien
cgggtttaggatcagaccagggagc

SEQ ID NO: 3869706 - DNA, 25 bp, Homo sapien
ggtgcttcggcctatggtgcccgcc

SEQ ID NO: 3869707 - DNA, 25 bp, Homo sapien
aggcagcgctcacggcgaagctgtc

SEQ ID NO: 3869708 - DNA, 25 bp, Homo sapien
cagctgtcggggtcccgagacaccg

SEQ ID NO: 3869709 - DNA, 25 bp, Homo sapien
ctgtctcccgatccactcctcgatg

SEQ ID NO: 3869710 - DNA, 25 bp, Homo sapien
cagactgcctgaaagccccgtgcag

SEQ ID NO: 3869711 - DNA, 25 bp, Homo sapien
cagagttccggagctcacaggacat

SEQ ID NO: 3869712 - DNA, 25 bp, Homo sapien
taggcttgcgcgagttccacgcaga

SEQ ID NO: 3869713 - DNA, 25 bp, Homo sapien
tgcgcgagttccacgcagactgcct

SEQ ID NO: 3869714 - DNA, 25 bp, Homo sapien
tgttatggctttgaagataaaagtc

SEQ ID NO: 3869715 - DNA, 25 bp, Homo sapien
gataaaagtcaattgaagtaagccc

SEQ ID NO: 3869716 - DNA, 25 bp, Homo sapien
aaaacatgcgggtaacatttgttat

SEQ ID NO: 3869717 - DNA, 25 bp, Homo sapien
gtcaattgaagtaagccctcgctgt

SEQ ID NO: 3869718 - DNA, 25 bp, Homo sapien
tcagcctatttcttcaggcagctct

SEQ ID NO: 3869719 - DNA, 25 bp, Homo sapien
agttctggggcatgattagctctct

SEQ ID NO: 3869720 - DNA, 25 bp, Homo sapien
ggctgcacatcctgtctcggacagc

SEQ ID NO: 3869721 - DNA, 25 bp, Homo sapien
cccaaggacctgtccatgacacagg

SEQ ID NO: 3869722 - DNA, 25 bp, Homo sapien
aacaggccaggttgagcccccaagg

SEQ ID NO: 3869723 - DNA, 25 bp, Homo sapien
cgaagccatgaagcagcgggaagct

SEQ ID NO: 3869724 - DNA, 25 bp, Homo sapien
ggaagcttcccaggataaacggagc

SEQ ID NO: 3869725 - DNA, 25 bp, Homo sapien
tttcacacagagagtcgaagccatg

SEQ ID NO: 3869726 - DNA, 25 bp, Homo sapien
tctgtgagagacaagagcggcaaaa

SEQ ID NO: 3869727 - DNA, 25 bp, Homo sapien
ggcttggcaggagcgcagcatcacc

SEQ ID NO: 3869728 - DNA, 25 bp, Homo sapien
agcatcaccaggctgcccttcggag

SEQ ID NO: 3869729 - DNA, 25 bp, Homo sapien
cggagctgctcaggcttgcctccag

SEQ ID NO: 3869730 - DNA, 25 bp, Homo sapien
gggcttggcaggagcgcagcatcac

SEQ ID NO: 3869731 - DNA, 25 bp, Homo sapien
cactccaagagacatgagggcctac

SEQ ID NO: 3869732 - DNA, 25 bp, Homo sapien
tttcggagggccaagaaggttgcac

SEQ ID NO: 3869733 - DNA, 25 bp, Homo sapien
ttcttaatgatcagcccgtgtggca

SEQ ID NO: 3869734 - DNA, 25 bp, Homo sapien
gagcttagttccactctcacagagg

SEQ ID NO: 3869735 - DNA, 25 bp, Homo sapien
ggcagtgggtgcctttggactttcc

SEQ ID NO: 3869736 - DNA, 25 bp, Homo sapien
gcagctcgcgggcacactgagcctg

SEQ ID NO: 3869737 - DNA, 25 bp, Homo sapien
gtgcctttggactttccagggcagg

SEQ ID NO: 3869738 - DNA, 25 bp, Homo sapien
agcagagaaagtccccagtgcccgc

SEQ ID NO: 3869739 - DNA, 25 bp, Homo sapien
tgcagagagctcaatgagaagtcca

SEQ ID NO: 3869740 - DNA, 25 bp, Homo sapien
aatgcagccatgaatgttcttgtaa

SEQ ID NO: 3869741 - DNA, 25 bp, Homo sapien
tgttaccttgtaccctagtgatgga

SEQ ID NO: 3869742 - DNA, 25 bp, Homo sapien
cgctgggctttgaccagttgcagag

SEQ ID NO: 3869743 - DNA, 25 bp, Homo sapien
cctatgaatgttttgcagttgcttt

SEQ ID NO: 3869744 - DNA, 25 bp, Homo sapien
aggcctgaatagactttttcacact

SEQ ID NO: 3869745 - DNA, 25 bp, Homo sapien
tgcagatacacagtgacacaggcct

SEQ ID NO: 3869746 - DNA, 25 bp, Homo sapien
cacactgtaagaaacaggaccatgg

SEQ ID NO: 3869747 - DNA, 25 bp, Homo sapien
gacgagacgccagtagcagctgctg

SEQ ID NO: 3869748 - DNA, 25 bp, Homo sapien
gagccaagaggacgagacgccagta

SEQ ID NO: 3869749 - DNA, 25 bp, Homo sapien
gaaaggccccgatttgtgacatcac

SEQ ID NO: 3869750 - DNA, 25 bp, Homo sapien
cacaagaaggtgctctgatccaacc

SEQ ID NO: 3869751 - DNA, 25 bp, Homo sapien
gaatgacggatgtaagagcatttat

SEQ ID NO: 3869752 - DNA, 25 bp, Homo sapien
gccataggtgccctgaaattggaat

SEQ ID NO: 3869753 - DNA, 25 bp, Homo sapien
taggtgccctgaaattggaatgacg

SEQ ID NO: 3869754 - DNA, 25 bp, Homo sapien
tgccctgaaattggaatgacggatg

SEQ ID NO: 3869755 - DNA, 25 bp, Homo sapien
gctgagatgatagatctcccagaga

SEQ ID NO: 3869756 - DNA, 25 bp, Homo sapien
gagaatgcatgtgtagcaggttaga

SEQ ID NO: 3869757 - DNA, 25 bp, Homo sapien
atgcatgtgtagcaggttagagtgc

SEQ ID NO: 3869758 - DNA, 25 bp, Homo sapien
ttagagtgcgtgtatagtgggcagc

SEQ ID NO: 3869759 - DNA, 25 bp, Homo sapien
tgtagcaggttagagtgcgtgtata

SEQ ID NO: 3869760 - DNA, 25 bp, Homo sapien
ttagagtggtagcgggtagcccgtg

SEQ ID NO: 3869761 - DNA, 25 bp, Homo sapien
tagagtggtagcgggtagcccgtgg

SEQ ID NO: 3869762 - DNA, 25 bp, Homo sapien
gtgtggcgggttagagtggtagcgg

SEQ ID NO: 3869763 - DNA, 25 bp, Homo sapien
gagtggtagcgggtagcccgtggga

SEQ ID NO: 3869764 - DNA, 25 bp, Homo sapien
gcgggtagcccgcaggagtaagaca

SEQ ID NO: 3869765 - DNA, 25 bp, Homo sapien
tgcatgtgtggctggttagagtgcg

SEQ ID NO: 3869766 - DNA, 25 bp, Homo sapien
tagcccgcaggagtaagacagtgca

SEQ ID NO: 3869767 - DNA, 25 bp, Homo sapien
catgtgtggctggttagagtgcgtg

SEQ ID NO: 3869768 - DNA, 25 bp, Homo sapien
tgcatgcatggcaggttagagtgca

SEQ ID NO: 3869769 - DNA, 25 bp, Homo sapien
agtgcgtgtgtagcaggtagcccag

SEQ ID NO: 3869770 - DNA, 25 bp, Homo sapien
tagtccgtgggaccaaaacagtgca

SEQ ID NO: 3869771 - DNA, 25 bp, Homo sapien
caagagagtgcatgtgtagcaggta

SEQ ID NO: 3869772 - DNA, 25 bp, Homo sapien
ctggtagcctgtgggactgagagag

SEQ ID NO: 3869773 - DNA, 25 bp, Homo sapien
tagcaggttagggtgcgtgtgcagc

SEQ ID NO: 3869774 - DNA, 25 bp, Homo sapien
caagacagtgcgtgtgtagctggta

SEQ ID NO: 3869775 - DNA, 25 bp, Homo sapien
agagtgcatgtgtagcgactagccg

SEQ ID NO: 3869776 - DNA, 25 bp, Homo sapien
accttgactaaccagatcccacgtg

SEQ ID NO: 3869777 - DNA, 25 bp, Homo sapien
tgactaaccagatcccacgtgctgg

SEQ ID NO: 3869778 - DNA, 25 bp, Homo sapien
cagatcccacgtgctggtatctaca

SEQ ID NO: 3869779 - DNA, 25 bp, Homo sapien
gtgctggtatctacaagtgactgca

SEQ ID NO: 3869780 - DNA, 25 bp, Homo sapien
gaggacataatcaagagggtcacac

SEQ ID NO: 3869781 - DNA, 25 bp, Homo sapien
caccagatgaggacataatcaagag

SEQ ID NO: 3869782 - DNA, 25 bp, Homo sapien
cagaggactcggttcattctgaaac

SEQ ID NO: 3869783 - DNA, 25 bp, Homo sapien
caaccaccagatgaggacataatca

SEQ ID NO: 3869784 - DNA, 25 bp, Homo sapien
ctcaggcgaccccacttctggccgg

SEQ ID NO: 3869785 - DNA, 25 bp, Homo sapien
tcagggatgccacagcggatcaaag

SEQ ID NO: 3869786 - DNA, 25 bp, Homo sapien
ggatgccacagcggatcaaagccca

SEQ ID NO: 3869787 - DNA, 25 bp, Homo sapien
cagaaggcctcaggcgaccccactt

SEQ ID NO: 3869788 - DNA, 25 bp, Homo sapien
ggctgtcacaccagcaagtcgcagg

SEQ ID NO: 3869789 - DNA, 25 bp, Homo sapien
cagcaagtcgcaggcatccacatgc

SEQ ID NO: 3869790 - DNA, 25 bp, Homo sapien
atggtcgcgccttcctccagagcca

SEQ ID NO: 3869791 - DNA, 25 bp, Homo sapien
aggcatccacatgccatggtcgcgc

SEQ ID NO: 3869792 - DNA, 25 bp, Homo sapien
tcctcttcctcgctgagcgtgtctc

SEQ ID NO: 3869793 - DNA, 25 bp, Homo sapien
tgagcgtgtctctcaacacgtcgcc

SEQ ID NO: 3869794 - DNA, 25 bp, Homo sapien
cttccagccgaaagtcgtcctcctc

SEQ ID NO: 3869795 - DNA, 25 bp, Homo sapien
tccagccgaaagtcgtcctcctctt

SEQ ID NO: 3869796 - DNA, 25 bp, Homo sapien
gggaagagagcaatggactccgaat

SEQ ID NO: 3869797 - DNA, 25 bp, Homo sapien
gggcacacggccagctgaacacccg

SEQ ID NO: 3869798 - DNA, 25 bp, Homo sapien
gaagagagcaatggactccgaatac

SEQ ID NO: 3869799 - DNA, 25 bp, Homo sapien
acacggccagctgaacacccgcttc

SEQ ID NO: 3869800 - DNA, 25 bp, Homo sapien
catcccaccctctagtccaccccca

SEQ ID NO: 3869801 - DNA, 25 bp, Homo sapien
cttcctaaagatgccggagagtgga

SEQ ID NO: 3869802 - DNA, 25 bp, Homo sapien
gagagacaacgagcaaaggcccaga

SEQ ID NO: 3869803 - DNA, 25 bp, Homo sapien
aggatgcggagagacaacgagcaaa

SEQ ID NO: 3869804 - DNA, 25 bp, Homo sapien
gcacttgaggatgcggagagacaac

SEQ ID NO: 3869805 - DNA, 25 bp, Homo sapien
gctgtgctcataggatgggagtgcc

SEQ ID NO: 3869806 - DNA, 25 bp, Homo sapien
tgtgctcataggatgggagtgccca

SEQ ID NO: 3869807 - DNA, 25 bp, Homo sapien
ctgacagggctgtgctcataggatg

SEQ ID NO: 3869808 - DNA, 25 bp, Homo sapien
gacagggctgtgctcataggatggg

SEQ ID NO: 3869809 - DNA, 25 bp, Homo sapien
caatcgtccacgtacagattatctg

SEQ ID NO: 3869810 - DNA, 25 bp, Homo sapien
cgtacagattatctgctgcaaatat

SEQ ID NO: 3869811 - DNA, 25 bp, Homo sapien
tgtttgagtccacaaccttctgaca

SEQ ID NO: 3869812 - DNA, 25 bp, Homo sapien
tcagggttgcttgccaagatgtttg

SEQ ID NO: 3869813 - DNA, 25 bp, Homo sapien
ggatgctcgccctgacatatccaca

SEQ ID NO: 3869814 - DNA, 25 bp, Homo sapien
ctcagtgaatacaatgtaagattta

SEQ ID NO: 3869815 - DNA, 25 bp, Homo sapien
gtaagatttaacacaagccagaact

SEQ ID NO: 3869816 - DNA, 25 bp, Homo sapien
cagaacttccttgctagagtctgga

SEQ ID NO: 3869817 - DNA, 25 bp, Homo sapien
agggagcattaggagcagggtccag

SEQ ID NO: 3869818 - DNA, 25 bp, Homo sapien
cagggtccagacgccgggcagccat

SEQ ID NO: 3869819 - DNA, 25 bp, Homo sapien
gcattaggagcagggtccagacgcc

SEQ ID NO: 3869820 - DNA, 25 bp, Homo sapien
ggagcattaggagcagggtccagac

SEQ ID NO: 3869821 - DNA, 25 bp, Homo sapien
cccagcccgtcagtcttctcaggag

SEQ ID NO: 3869822 - DNA, 25 bp, Homo sapien
tgcccagcccgtcagtcttctcagg

SEQ ID NO: 3869823 - DNA, 25 bp, Homo sapien
gcccagcccgtcagtcttctcagga

SEQ ID NO: 3869824 - DNA, 25 bp, Homo sapien
agtggacagggagcactttggccaa

SEQ ID NO: 3869825 - DNA, 25 bp, Homo sapien
ccttgagtggacagggagcactttg

SEQ ID NO: 3869826 - DNA, 25 bp, Homo sapien
ggacagggagcactttggccaagac

SEQ ID NO: 3869827 - DNA, 25 bp, Homo sapien
gaccttgagtggacagggagcactt

SEQ ID NO: 3869828 - DNA, 25 bp, Homo sapien
caacactgactgggtagtggaagcc

SEQ ID NO: 3869829 - DNA, 25 bp, Homo sapien
gcaacactgactgggtagtggaagc

SEQ ID NO: 3869830 - DNA, 25 bp, Homo sapien
ggcaacactgactgggtagtggaag

SEQ ID NO: 3869831 - DNA, 25 bp, Homo sapien
tgttgtcaaagtcatacagggtgaa

SEQ ID NO: 3869832 - DNA, 25 bp, Homo sapien
gtgaaggtccactcctgccggctgt

SEQ ID NO: 3869833 - DNA, 25 bp, Homo sapien
tccatggacacgtcgcactggagct

SEQ ID NO: 3869834 - DNA, 25 bp, Homo sapien
tctcgggtgaccttgccgttgttgt

SEQ ID NO: 3869835 - DNA, 25 bp, Homo sapien
gagtggttgacagaggagtccacca

SEQ ID NO: 3869836 - DNA, 25 bp, Homo sapien
gagctttacccgcagcatcttgctg

SEQ ID NO: 3869837 - DNA, 25 bp, Homo sapien
gacaaggacgctcctcttgctctgg

SEQ ID NO: 3869838 - DNA, 25 bp, Homo sapien
cagcctgattgacaaggacgctcct

SEQ ID NO: 3869839 - DNA, 25 bp, Homo sapien
cagaaagcccacaggttcccttccg

SEQ ID NO: 3869840 - DNA, 25 bp, Homo sapien
cttccggccctcccaggaaggctct

SEQ ID NO: 3869841 - DNA, 25 bp, Homo sapien
ccggccctcccaggaaggctctgtt

SEQ ID NO: 3869842 - DNA, 25 bp, Homo sapien
tgtccacaaagcagctgccccagaa

SEQ ID NO: 3869843 - DNA, 25 bp, Homo sapien
ctgagtccggcccgagaagcacagg

SEQ ID NO: 3869844 - DNA, 25 bp, Homo sapien
gctgcctggcgtgcagctgctttgc

SEQ ID NO: 3869845 - DNA, 25 bp, Homo sapien
gcctggcgtgcagctgctttgcaag

SEQ ID NO: 3869846 - DNA, 25 bp, Homo sapien
tccggcccgagaagcacaggagaca

SEQ ID NO: 3869847 - DNA, 25 bp, Homo sapien
agcggggctcgctgcttcttctccc

SEQ ID NO: 3869848 - DNA, 25 bp, Homo sapien
tctgctcggggccttgcgctctgca

SEQ ID NO: 3869849 - DNA, 25 bp, Homo sapien
gtctctgctcggggccttgcgctct

SEQ ID NO: 3869850 - DNA, 25 bp, Homo sapien
tggtctctgctcggggccttgcgct

SEQ ID NO: 3869851 - DNA, 25 bp, Homo sapien
tatcccggcgagatctaagtagtgg

SEQ ID NO: 3869852 - DNA, 25 bp, Homo sapien
taagtagtggtttctcctctcgatg

SEQ ID NO: 3869853 - DNA, 25 bp, Homo sapien
catctacgcaatggtggtagcagcc

SEQ ID NO: 3869854 - DNA, 25 bp, Homo sapien
caggcccaaattgggacgtgtagtt

SEQ ID NO: 3869855 - DNA, 25 bp, Homo sapien
agcgagatcgagtgggattggaggt

SEQ ID NO: 3869856 - DNA, 25 bp, Homo sapien
acctcacaaagtgcttgctcccgtc

SEQ ID NO: 3869857 - DNA, 25 bp, Homo sapien
cccggagccgttgctggagctctga

SEQ ID NO: 3869858 - DNA, 25 bp, Homo sapien
gcttccggctcatgggagcgagatc

SEQ ID NO: 3869859 - DNA, 25 bp, Homo sapien
ggggacaccgcagggatggcgggtc

SEQ ID NO: 3869860 - DNA, 25 bp, Homo sapien
gtcccagagggggcttgtttcttgc

SEQ ID NO: 3869861 - DNA, 25 bp, Homo sapien
ggacaccgcagggatggcgggtccc

SEQ ID NO: 3869862 - DNA, 25 bp, Homo sapien
gcggagggggacaccgcagggatgg

SEQ ID NO: 3869863 - DNA, 25 bp, Homo sapien
ccttggctcggtgcttgtgcttctt

SEQ ID NO: 3869864 - DNA, 25 bp, Homo sapien
tggctctccttggctcggtgcttgt

SEQ ID NO: 3869865 - DNA, 25 bp, Homo sapien
gctctccttggctcggtgcttgtgc

SEQ ID NO: 3869866 - DNA, 25 bp, Homo sapien
ttgtgcttcttgtgcccgagggggg

SEQ ID NO: 3869867 - DNA, 25 bp, Homo sapien
accaccaaggcgggcagctcccgca

SEQ ID NO: 3869868 - DNA, 25 bp, Homo sapien
gcaggtgctcccgccccaggacagg

SEQ ID NO: 3869869 - DNA, 25 bp, Homo sapien
gctcccgcaggtgctcccgccccag

SEQ ID NO: 3869870 - DNA, 25 bp, Homo sapien
cccgcaggtgctcccgccccaggac

SEQ ID NO: 3869871 - DNA, 25 bp, Homo sapien
cggctgcccggcctggctctcatac

SEQ ID NO: 3869872 - DNA, 25 bp, Homo sapien
gtaatggtggtgatgttcatggtgg

SEQ ID NO: 3869873 - DNA, 25 bp, Homo sapien
tggtggtggtgctcatgtctctgga

SEQ ID NO: 3869874 - DNA, 25 bp, Homo sapien
tatgtctggtagaagtggtggtaat

SEQ ID NO: 3869875 - DNA, 25 bp, Homo sapien
ctatgtctggtagaagtggtggtaa

SEQ ID NO: 3869876 - DNA, 25 bp, Homo sapien
catgtaggctagctaaatattagtg

SEQ ID NO: 3869877 - DNA, 25 bp, Homo sapien
tgtgggctgatccacatagatgctg

SEQ ID NO: 3869878 - DNA, 25 bp, Homo sapien
tccatagatcttctacatgtaggct

SEQ ID NO: 3869879 - DNA, 25 bp, Homo sapien
gcagagttgaggctaagggctccct

SEQ ID NO: 3869880 - DNA, 25 bp, Homo sapien
aggtagcagctgtttatcttctcgg

SEQ ID NO: 3869881 - DNA, 25 bp, Homo sapien
ttctcggagatttcgagggtctctg

SEQ ID NO: 3869882 - DNA, 25 bp, Homo sapien
tctctggaagccgggccaagtaagg

SEQ ID NO: 3869883 - DNA, 25 bp, Homo sapien
cagaataatactaagaggtagcagc

SEQ ID NO: 3869884 - DNA, 25 bp, Homo sapien
tataacaatcagttaagggcaaaat

SEQ ID NO: 3869885 - DNA, 25 bp, Homo sapien
gttcgcactctgcagtccactgaaa

SEQ ID NO: 3869886 - DNA, 25 bp, Homo sapien
aaaacacaacagcaagacgttcgca

SEQ ID NO: 3869887 - DNA, 25 bp, Homo sapien
tgtagcatataacaatcagttaagg

SEQ ID NO: 3869888 - DNA, 25 bp, Homo sapien
gtggattttcatgtcgtgcatggca

SEQ ID NO: 3869889 - DNA, 25 bp, Homo sapien
catgtcgtgcatggcagaagagatg

SEQ ID NO: 3869890 - DNA, 25 bp, Homo sapien
ggcttgatcccactggaaaagcatg

SEQ ID NO: 3869891 - DNA, 25 bp, Homo sapien
gactcttggggaaaagggcttgatc

SEQ ID NO: 3869892 - DNA, 25 bp, Homo sapien
gagtacaagttatcaatccgaggga

SEQ ID NO: 3869893 - DNA, 25 bp, Homo sapien
taagaatacggtgacaactaagccc

SEQ ID NO: 3869894 - DNA, 25 bp, Homo sapien
ggattcgaacctagcaaactggcac

SEQ ID NO: 3869895 - DNA, 25 bp, Homo sapien
ttcatagtgctcacaagggacaggc

SEQ ID NO: 3869896 - DNA, 25 bp, Homo sapien
tcctcggtacccagtgacagatcag

SEQ ID NO: 3869897 - DNA, 25 bp, Homo sapien
gtgaagtgcaagagtcccctaggct

SEQ ID NO: 3869898 - DNA, 25 bp, Homo sapien
tctgacagacacaccaagatgcagg

SEQ ID NO: 3869899 - DNA, 25 bp, Homo sapien
tgctactggcaaatgggtctcacct

SEQ ID NO: 3869900 - DNA, 25 bp, Homo sapien
gcacaggcaacaggactctcagaat

SEQ ID NO: 3869901 - DNA, 25 bp, Homo sapien
ggtgggcctggtatctgcatttcac

SEQ ID NO: 3869902 - DNA, 25 bp, Homo sapien
tcagaatgttttctacgggcccaac

SEQ ID NO: 3869903 - DNA, 25 bp, Homo sapien
gaggtatggagcttgtgaaaaacac

SEQ ID NO: 3869904 - DNA, 25 bp, Homo sapien
agctatctaagaagtccctgcctgc

SEQ ID NO: 3869905 - DNA, 25 bp, Homo sapien
tctgcctaggcaccagctaaggtgg

SEQ ID NO: 3869906 - DNA, 25 bp, Homo sapien
gcaacccatagagccaggatcctga

SEQ ID NO: 3869907 - DNA, 25 bp, Homo sapien
ggatcctgataaccactgctgactg

SEQ ID NO: 3869908 - DNA, 25 bp, Homo sapien
ccagagaatttggggccacatcttc

SEQ ID NO: 3869909 - DNA, 25 bp, Homo sapien
ctaggacatcaggtccagagaattt

SEQ ID NO: 3869910 - DNA, 25 bp, Homo sapien
gtggtcacaccacagagactggcct

SEQ ID NO: 3869911 - DNA, 25 bp, Homo sapien
tcaacagcaggccatgtgctaggtc

SEQ ID NO: 3869912 - DNA, 25 bp, Homo sapien
tgaaagtacggatgaacagaaagcc

SEQ ID NO: 3869913 - DNA, 25 bp, Homo sapien
agatgacggtggtaaaggccagcca

SEQ ID NO: 3869914 - DNA, 25 bp, Homo sapien
gatcccacatgtaagcaagcaagcg

SEQ ID NO: 3869915 - DNA, 25 bp, Homo sapien
ccgtgggatcctaccaagagagcct

SEQ ID NO: 3869916 - DNA, 25 bp, Homo sapien
taagaagatgttcggcagcacggaa

SEQ ID NO: 3869917 - DNA, 25 bp, Homo sapien
cacggaaggtagtgctgatcccaca

SEQ ID NO: 3869918 - DNA, 25 bp, Homo sapien
ccacagcctgggtggacccgcccgg

SEQ ID NO: 3869919 - DNA, 25 bp, Homo sapien
cacagcctgggtggacccgcccggc

SEQ ID NO: 3869920 - DNA, 25 bp, Homo sapien
gaaatagcccttgaccaatgactga

SEQ ID NO: 3869921 - DNA, 25 bp, Homo sapien
gcctggcttgtatcccctgtaggaa

SEQ ID NO: 3869922 - DNA, 25 bp, Homo sapien
aatgttcttgtggttgacacctgcc

SEQ ID NO: 3869923 - DNA, 25 bp, Homo sapien
tctggcttagacgaatcacctatgg

SEQ ID NO: 3869924 - DNA, 25 bp, Homo sapien
gaatctgactgctaaaagtggccca

SEQ ID NO: 3869925 - DNA, 25 bp, Homo sapien
tctagggtgttgtcctcatggtcca

SEQ ID NO: 3869926 - DNA, 25 bp, Homo sapien
aacaaagcccagtcaggtcccatgt

SEQ ID NO: 3869927 - DNA, 25 bp, Homo sapien
tgtccaagcctggaatagaggtcct

SEQ ID NO: 3869928 - DNA, 25 bp, Homo sapien
tcccagcagaactgtacctggcctt

SEQ ID NO: 3869929 - DNA, 25 bp, Homo sapien
ctcatcccagcagaactgtacctgg

SEQ ID NO: 3869930 - DNA, 25 bp, Homo sapien
ctggccttcctgcccattccctggg

SEQ ID NO: 3869931 - DNA, 25 bp, Homo sapien
tcatcccagcagaactgtacctggc

SEQ ID NO: 3869932 - DNA, 25 bp, Homo sapien
gagccttcattaacttaatcgcctc

SEQ ID NO: 3869933 - DNA, 25 bp, Homo sapien
gccttcattaacttaatcgcctctt

SEQ ID NO: 3869934 - DNA, 25 bp, Homo sapien
tagttttcaaatcagcaaaatgagc

SEQ ID NO: 3869935 - DNA, 25 bp, Homo sapien
ttcaaatcagcaaaatgagccttca

SEQ ID NO: 3869936 - DNA, 25 bp, Homo sapien
gcaaatcttcacaggccgtgtttta

SEQ ID NO: 3869937 - DNA, 25 bp, Homo sapien
caaaagatgtcagagaaacgaatga

SEQ ID NO: 3869938 - DNA, 25 bp, Homo sapien
gaattacttgttcccctgataggtg

SEQ ID NO: 3869939 - DNA, 25 bp, Homo sapien
ctgataggtgacaaaagatgtcaga

SEQ ID NO: 3869940 - DNA, 25 bp, Homo sapien
ttggttagctcacccatcagggcag

SEQ ID NO: 3869941 - DNA, 25 bp, Homo sapien
tcttatggcaacttctaacggtggc

SEQ ID NO: 3869942 - DNA, 25 bp, Homo sapien
ttacaccaagcaggatccaaggacc

SEQ ID NO: 3869943 - DNA, 25 bp, Homo sapien
tcagggcagacttgggcagaaatca

SEQ ID NO: 3869944 - DNA, 25 bp, Homo sapien
caggatggagccttgttaggaacac

SEQ ID NO: 3869945 - DNA, 25 bp, Homo sapien
gcaagcagctccctgtgcggtaaaa

SEQ ID NO: 3869946 - DNA, 25 bp, Homo sapien
tgttgaactgacttgaaggcacctc

SEQ ID NO: 3869947 - DNA, 25 bp, Homo sapien
aatgcaaaatggactgacacgcctt

SEQ ID NO: 3869948 - DNA, 25 bp, Homo sapien
tggcctgagcatccacgggagtttc

SEQ ID NO: 3869949 - DNA, 25 bp, Homo sapien
tctggccatggacactgcatcttca

SEQ ID NO: 3869950 - DNA, 25 bp, Homo sapien
tgcagcagttagagcccactcgttc

SEQ ID NO: 3869951 - DNA, 25 bp, Homo sapien
ctgatggactgggatggcctgccac

SEQ ID NO: 3869952 - DNA, 25 bp, Homo sapien
aatttgaactgcaagcgggcactcg

SEQ ID NO: 3869953 - DNA, 25 bp, Homo sapien
cagtttaatgggatattccagcaca

SEQ ID NO: 3869954 - DNA, 25 bp, Homo sapien
gctggaaaagcaaagagttagaccc

SEQ ID NO: 3869955 - DNA, 25 bp, Homo sapien
tcaagccaggcctataagaagtgta

SEQ ID NO: 3869956 - DNA, 25 bp, Homo sapien
gcaacaaatgtttactaacaaagaa

SEQ ID NO: 3869957 - DNA, 25 bp, Homo sapien
tgctatcaacaatatgcaacaaatg

SEQ ID NO: 3869958 - DNA, 25 bp, Homo sapien
acagatgatattgattttgtcagtt

SEQ ID NO: 3869959 - DNA, 25 bp, Homo sapien
tcaaatctaaaatgctatcaacaat

SEQ ID NO: 3869960 - DNA, 25 bp, Homo sapien
taaaaactgtagacgccccatcagg

SEQ ID NO: 3869961 - DNA, 25 bp, Homo sapien
tcatctttggacagatatccctcaa

SEQ ID NO: 3869962 - DNA, 25 bp, Homo sapien
acttcttgaaaatctaggcctatgg

SEQ ID NO: 3869963 - DNA, 25 bp, Homo sapien
cacttcaagtgagagatattggact

SEQ ID NO: 3869964 - DNA, 25 bp, Homo sapien
gcaaggacttcgtgactctgcagga

SEQ ID NO: 3869965 - DNA, 25 bp, Homo sapien
ggagggccatcgctactatgcgcct

SEQ ID NO: 3869966 - DNA, 25 bp, Homo sapien
tgcgagaatacctgcactgagccgg

SEQ ID NO: 3869967 - DNA, 25 bp, Homo sapien
tggcctacgcgctgggcaaggactt

SEQ ID NO: 3869968 - DNA, 25 bp, Homo sapien
ccctcagaaagatagtgtggcctct

SEQ ID NO: 3869969 - DNA, 25 bp, Homo sapien
gcgtccagttgttggagggtaccca

SEQ ID NO: 3869970 - DNA, 25 bp, Homo sapien
ggatctctgtctcccagcgtgggcc

SEQ ID NO: 3869971 - DNA, 25 bp, Homo sapien
caaggcttctcaggtgagcgtccag

SEQ ID NO: 3869972 - DNA, 25 bp, Homo sapien
tctatgtcagtcactggctctgtgt

SEQ ID NO: 3869973 - DNA, 25 bp, Homo sapien
cagagaaaaggcaccagatggaact

SEQ ID NO: 3869974 - DNA, 25 bp, Homo sapien
gctctgggagctaatgcctgaattc

SEQ ID NO: 3869975 - DNA, 25 bp, Homo sapien
tgtgatccaagcctcggttttccca

SEQ ID NO: 3869976 - DNA, 25 bp, Homo sapien
tgtgtcacctgcgaaaaacacctgg

SEQ ID NO: 3869977 - DNA, 25 bp, Homo sapien
gtaatggtgactgaagctcccgcgg

SEQ ID NO: 3869978 - DNA, 25 bp, Homo sapien
tgtctcaatataaccacagcggtgc

SEQ ID NO: 3869979 - DNA, 25 bp, Homo sapien
catgtcaggcatccagagcggtagt

SEQ ID NO: 3869980 - DNA, 25 bp, Homo sapien
cgcgagccgcctgcgcgccgactcc

SEQ ID NO: 3869981 - DNA, 25 bp, Homo sapien
gcgagccgcctgcgcgccgactcca

SEQ ID NO: 3869982 - DNA, 25 bp, Homo sapien
cgagccgcctgcgcgccgactccaa

SEQ ID NO: 3869983 - DNA, 25 bp, Homo sapien
tgatctctacttcagttactacaac

SEQ ID NO: 3869984 - DNA, 25 bp, Homo sapien
ctccccaaggtgaggcccatgtaga

SEQ ID NO: 3869985 - DNA, 25 bp, Homo sapien
tcaggcgaaatctgtcagtctatct

SEQ ID NO: 3869986 - DNA, 25 bp, Homo sapien
aaagacaccattgtcctccccaagg

SEQ ID NO: 3869987 - DNA, 25 bp, Homo sapien
caggcatggcatctgcgggtaggcc

SEQ ID NO: 3869988 - DNA, 25 bp, Homo sapien
ggccttgtgcagaacgccaaaagcc

SEQ ID NO: 3869989 - DNA, 25 bp, Homo sapien
caaagcccattaggctgggggagca

SEQ ID NO: 3869990 - DNA, 25 bp, Homo sapien
agaacgccaaaagcccagtggcaca

SEQ ID NO: 3869991 - DNA, 25 bp, Homo sapien
gtgagaggctgaaccaccctcttcc

SEQ ID NO: 3869992 - DNA, 25 bp, Homo sapien
aggctgaaccaccctcttcccccat

SEQ ID NO: 3869993 - DNA, 25 bp, Homo sapien
gagaggctgaaccaccctcttcccc

SEQ ID NO: 3869994 - DNA, 25 bp, Homo sapien
cgtgagaggctgaaccaccctcttc

SEQ ID NO: 3869995 - DNA, 25 bp, Homo sapien
gaatgtccgaggaggacacttgctc

SEQ ID NO: 3869996 - DNA, 25 bp, Homo sapien
gagaatgtccgaggaggacacttgc

SEQ ID NO: 3869997 - DNA, 25 bp, Homo sapien
cggagaatgtccgaggaggacactt

SEQ ID NO: 3869998 - DNA, 25 bp, Homo sapien
aatgtccgaggaggacacttgctct

SEQ ID NO: 3869999 - DNA, 25 bp, Homo sapien
ctgaggatcaagctgggacgggaca

SEQ ID NO: 3870000 - DNA, 25 bp, Homo sapien
ctgggacgggacaatgcctgctcct

SEQ ID NO: 3870001 - DNA, 25 bp, Homo sapien
aaggatgaaagaaggctgaggatca

SEQ ID NO: 3870002 - DNA, 25 bp, Homo sapien
ggcctgggagcatgtcgcggccaag

SEQ ID NO: 3870003 - DNA, 25 bp, Homo sapien
taaggtagttctctcaggccaagga

SEQ ID NO: 3870004 - DNA, 25 bp, Homo sapien
tcagctgtggaaacaccagccaagg

SEQ ID NO: 3870005 - DNA, 25 bp, Homo sapien
ttgtgcccacatctaagcagaggag

SEQ ID NO: 3870006 - DNA, 25 bp, Homo sapien
cctcatacggtagccaaggtaagca

SEQ ID NO: 3870007 - DNA, 25 bp, Homo sapien
aacgaaagtgaaagggtgtaggcat

SEQ ID NO: 3870008 - DNA, 25 bp, Homo sapien
tcagttctgcgattgtcatggggtc

SEQ ID NO: 3870009 - DNA, 25 bp, Homo sapien
gctgctgcagtgccccgaagaaacg

SEQ ID NO: 3870010 - DNA, 25 bp, Homo sapien
cagtgccccgaagaaacgaaagtga

SEQ ID NO: 3870011 - DNA, 25 bp, Homo sapien
atttgagggcaagtgaccctccagg

SEQ ID NO: 3870012 - DNA, 25 bp, Homo sapien
gaatttgagggcaagtgaccctcca

SEQ ID NO: 3870013 - DNA, 25 bp, Homo sapien
gggaatttgagggcaagtgaccctc

SEQ ID NO: 3870014 - DNA, 25 bp, Homo sapien
ctgctgtgcgttctgggaatttgag

SEQ ID NO: 3870015 - DNA, 25 bp, Homo sapien
tcgaaaccaccgtgcacagactgct

SEQ ID NO: 3870016 - DNA, 25 bp, Homo sapien
gaaaccaccgtgcacagactgctgc

SEQ ID NO: 3870017 - DNA, 25 bp, Homo sapien
acgccctcgaaaccaccgtgcacag

SEQ ID NO: 3870018 - DNA, 25 bp, Homo sapien
ccctcgaaaccaccgtgcacagact

SEQ ID NO: 3870019 - DNA, 25 bp, Homo sapien
ccttattccagacggtgtccagaag

SEQ ID NO: 3870020 - DNA, 25 bp, Homo sapien
gacggtgtgaagatcggcaacctga

SEQ ID NO: 3870021 - DNA, 25 bp, Homo sapien
tcgaagccttccagggaccctgaga

SEQ ID NO: 3870022 - DNA, 25 bp, Homo sapien
tgggcagccgcgatgagcttctgac

SEQ ID NO: 3870023 - DNA, 25 bp, Homo sapien
tcaatctcaatctagggttatccag

SEQ ID NO: 3870024 - DNA, 25 bp, Homo sapien
gaagcacctaatagattctggctga

SEQ ID NO: 3870025 - DNA, 25 bp, Homo sapien
taagtcaatgaccagtgctggccaa

SEQ ID NO: 3870026 - DNA, 25 bp, Homo sapien
gctggccaattggtccagcactggc

SEQ ID NO: 3870027 - DNA, 25 bp, Homo sapien
gttgtagaaggaaggcagccaatcc

SEQ ID NO: 3870028 - DNA, 25 bp, Homo sapien
agccaatccattcgctttcaccgtg

SEQ ID NO: 3870029 - DNA, 25 bp, Homo sapien
cgtggcaagatcaagcagccttctt

SEQ ID NO: 3870030 - DNA, 25 bp, Homo sapien
catgttgtagaaggaaggcagccaa

SEQ ID NO: 3870031 - DNA, 25 bp, Homo sapien
caccatggtgaagacgggacctaac

SEQ ID NO: 3870032 - DNA, 25 bp, Homo sapien
gacgggacctaaccagacaatgggc

SEQ ID NO: 3870033 - DNA, 25 bp, Homo sapien
tggcaccatggtgaagacgggacct

SEQ ID NO: 3870034 - DNA, 25 bp, Homo sapien
tggtgaagacgggacctaaccagac

SEQ ID NO: 3870035 - DNA, 25 bp, Homo sapien
tgaggaagcgagactgagcagacac

SEQ ID NO: 3870036 - DNA, 25 bp, Homo sapien
aactcggtgcggatgtacttcctga

SEQ ID NO: 3870037 - DNA, 25 bp, Homo sapien
gagcagtggcgttcacgatccgtga

SEQ ID NO: 3870038 - DNA, 25 bp, Homo sapien
tcaaagagtagagtccgcacagaga

SEQ ID NO: 3870039 - DNA, 25 bp, Homo sapien
tgaaggaattccaggggcgccgtac

SEQ ID NO: 3870040 - DNA, 25 bp, Homo sapien
ctggcacgacacctttggcacgcac

SEQ ID NO: 3870041 - DNA, 25 bp, Homo sapien
gtactccctggcacgacacctttgg

SEQ ID NO: 3870042 - DNA, 25 bp, Homo sapien
aggggcgccgtactccctggcacga

SEQ ID NO: 3870043 - DNA, 25 bp, Homo sapien
ccattggtgagttgcctggcctgcc

SEQ ID NO: 3870044 - DNA, 25 bp, Homo sapien
atctgaaggttgtgcggctcggcct

SEQ ID NO: 3870045 - DNA, 25 bp, Homo sapien
tccggatgagccagatgaacccggg

SEQ ID NO: 3870046 - DNA, 25 bp, Homo sapien
cactgagtgccaggtagaacgcggc

SEQ ID NO: 3870047 - DNA, 25 bp, Homo sapien
tgaacagcaatgcccagtaacactc

SEQ ID NO: 3870048 - DNA, 25 bp, Homo sapien
ctgaacagcaatgcccagtaacact

SEQ ID NO: 3870049 - DNA, 25 bp, Homo sapien
aacagcaatgcccagtaacactcac

SEQ ID NO: 3870050 - DNA, 25 bp, Homo sapien
gaacagcaatgcccagtaacactca

SEQ ID NO: 3870051 - DNA, 25 bp, Homo sapien
acttctagagcccagctcggtgctc

SEQ ID NO: 3870052 - DNA, 25 bp, Homo sapien
aagcatagcaccagacccagcacat

SEQ ID NO: 3870053 - DNA, 25 bp, Homo sapien
gaggtcattccggaaagcatagcac

SEQ ID NO: 3870054 - DNA, 25 bp, Homo sapien
cataggccagtcaataaagtgtggc

SEQ ID NO: 3870055 - DNA, 25 bp, Homo sapien
tttcttgggtcctgaaattcccatc

SEQ ID NO: 3870056 - DNA, 25 bp, Homo sapien
tctgatggggcacaagtcacctctg

SEQ ID NO: 3870057 - DNA, 25 bp, Homo sapien
aacagtagttgtaaccctgcagcca

SEQ ID NO: 3870058 - DNA, 25 bp, Homo sapien
caagtcacctctgatttggtgttgt

SEQ ID NO: 3870059 - DNA, 25 bp, Homo sapien
ggaatctgtcgcatgctgatccgca

SEQ ID NO: 3870060 - DNA, 25 bp, Homo sapien
tactctcaggaagtggtttgtccca

SEQ ID NO: 3870061 - DNA, 25 bp, Homo sapien
tctaaatagaagcagggcaatcccc

SEQ ID NO: 3870062 - DNA, 25 bp, Homo sapien
tgaaatcctgtttggacactgtgct

SEQ ID NO: 3870063 - DNA, 25 bp, Homo sapien
cagggcgagaccacttgtatcagaa

SEQ ID NO: 3870064 - DNA, 25 bp, Homo sapien
gaccagtagttctcccagggcgaga

SEQ ID NO: 3870065 - DNA, 25 bp, Homo sapien
aaaaccaagctggttgctgcagacc

SEQ ID NO: 3870066 - DNA, 25 bp, Homo sapien
tgaaaaatatagatttcctgggccc

SEQ ID NO: 3870067 - DNA, 25 bp, Homo sapien
gcttgcagatgcctcggtctgagat

SEQ ID NO: 3870068 - DNA, 25 bp, Homo sapien
acttctgcaattgctcgcagtgaag

SEQ ID NO: 3870069 - DNA, 25 bp, Homo sapien
ggtctgagatattgttatcgcgcaa

SEQ ID NO: 3870070 - DNA, 25 bp, Homo sapien
cagtgaagagcacattcaatgagct

SEQ ID NO: 3870071 - DNA, 25 bp, Homo sapien
tggagtgtgcacagccgtcagtcaa

SEQ ID NO: 3870072 - DNA, 25 bp, Homo sapien
gcatgcaaggagcttagccatggag

SEQ ID NO: 3870073 - DNA, 25 bp, Homo sapien
tgcacagccgtcagtcaatttgttg

SEQ ID NO: 3870074 - DNA, 25 bp, Homo sapien
ggagcttagccatggagtgtgcaca

SEQ ID NO: 3870075 - DNA, 25 bp, Homo sapien
ggcagtgatgtagttattccccagc

SEQ ID NO: 3870076 - DNA, 25 bp, Homo sapien
aggaggtgttgcctcggagcccctc

SEQ ID NO: 3870077 - DNA, 25 bp, Homo sapien
ggctcccgcggcagtgatgtagtta

SEQ ID NO: 3870078 - DNA, 25 bp, Homo sapien
cccgcggcagtgatgtagttattcc

SEQ ID NO: 3870079 - DNA, 25 bp, Homo sapien
ggtgatcacccaaggcttcagccag

SEQ ID NO: 3870080 - DNA, 25 bp, Homo sapien
acctcaagctctggtgatcacccaa

SEQ ID NO: 3870081 - DNA, 25 bp, Homo sapien
gctctggtgatcacccaaggcttca

SEQ ID NO: 3870082 - DNA, 25 bp, Homo sapien
ctgagccacctcaagctctggtgat

SEQ ID NO: 3870083 - DNA, 25 bp, Homo sapien
cagagttcttctagcatgacgttct

SEQ ID NO: 3870084 - DNA, 25 bp, Homo sapien
tcttctagcatgacgttctttgcca

SEQ ID NO: 3870085 - DNA, 25 bp, Homo sapien
gcttgggcacccacactgccaatgt

SEQ ID NO: 3870086 - DNA, 25 bp, Homo sapien
gacgttctttgccagcatcagtgcc

SEQ ID NO: 3870087 - DNA, 25 bp, Homo sapien
cttctgcgagagaacatacaccttc

SEQ ID NO: 3870088 - DNA, 25 bp, Homo sapien
cagtccttctgcgagagaacataca

SEQ ID NO: 3870089 - DNA, 25 bp, Homo sapien
tccttctgcgagagaacatacacct

SEQ ID NO: 3870090 - DNA, 25 bp, Homo sapien
cttcagtccttctgcgagagaacat

SEQ ID NO: 3870091 - DNA, 25 bp, Homo sapien
gtaggtgatgcagttattggacaac

SEQ ID NO: 3870092 - DNA, 25 bp, Homo sapien
ggcttctgcccctaggtaggtgatg

SEQ ID NO: 3870093 - DNA, 25 bp, Homo sapien
ttctgcccctaggtaggtgatgcag

SEQ ID NO: 3870094 - DNA, 25 bp, Homo sapien
ggtaggtgatgcagttattggacaa

SEQ ID NO: 3870095 - DNA, 25 bp, Homo sapien
cttatgggaatgagttgccaaaggg

SEQ ID NO: 3870096 - DNA, 25 bp, Homo sapien
catttgatatctgcattcgctgcag

SEQ ID NO: 3870097 - DNA, 25 bp, Homo sapien
tttaaagcaagggtcacaggcttat

SEQ ID NO: 3870098 - DNA, 25 bp, Homo sapien
tgccaaagggtcctggtctaagaca

SEQ ID NO: 3870099 - DNA, 25 bp, Homo sapien
tcaacctcctctagagagaaagtgt

SEQ ID NO: 3870100 - DNA, 25 bp, Homo sapien
gcttgtcaacctcctctagagagaa

SEQ ID NO: 3870101 - DNA, 25 bp, Homo sapien
gccgagcttgtcaacctcctctaga

SEQ ID NO: 3870102 - DNA, 25 bp, Homo sapien
tccctgcagccgagcttgtcaacct

SEQ ID NO: 3870103 - DNA, 25 bp, Homo sapien
tatttacagcataaagttcacggcc

SEQ ID NO: 3870104 - DNA, 25 bp, Homo sapien
cagttaacaagcacatccatgggcc

SEQ ID NO: 3870105 - DNA, 25 bp, Homo sapien
catcaaccagaagcctagtgaggcc

SEQ ID NO: 3870106 - DNA, 25 bp, Homo sapien
catttgctttgaaggaacggcctaa

SEQ ID NO: 3870107 - DNA, 25 bp, Homo sapien
gctcagccacttggaatatgactcc

SEQ ID NO: 3870108 - DNA, 25 bp, Homo sapien
caccggagtgaataaggaggcttga

SEQ ID NO: 3870109 - DNA, 25 bp, Homo sapien
tggaatgaagcgctagtctcagctc

SEQ ID NO: 3870110 - DNA, 25 bp, Homo sapien
gagtactgggcacttcacacactgg

SEQ ID NO: 3870111 - DNA, 25 bp, Homo sapien
gcgcagccaaacctgctacctgggc

SEQ ID NO: 3870112 - DNA, 25 bp, Homo sapien
ccgcgcagccaaacctgctacctgg

SEQ ID NO: 3870113 - DNA, 25 bp, Homo sapien
ccccgcgcagccaaacctgctacct

SEQ ID NO: 3870114 - DNA, 25 bp, Homo sapien
ggcccccgcgcagccaaacctgcta

SEQ ID NO: 3870115 - DNA, 25 bp, Homo sapien
tcgcccctcgccccggctccccagc

SEQ ID NO: 3870116 - DNA, 25 bp, Homo sapien
tcgccccggctccccagcccgcgtc

SEQ ID NO: 3870117 - DNA, 25 bp, Homo sapien
ctcgccccggctccccagcccgcgt

SEQ ID NO: 3870118 - DNA, 25 bp, Homo sapien
cctcgccccggctccccagcccgcg

SEQ ID NO: 3870119 - DNA, 25 bp, Homo sapien
cgggtggctgtgtagaaccatcctc

SEQ ID NO: 3870120 - DNA, 25 bp, Homo sapien
cagggcgcacctttcaactaaggaa

SEQ ID NO: 3870121 - DNA, 25 bp, Homo sapien
tcaactaaggaactccgggtggctg

SEQ ID NO: 3870122 - DNA, 25 bp, Homo sapien
acagcagggcgcacctttcaactaa

SEQ ID NO: 3870123 - DNA, 25 bp, Homo sapien
taagatgaagtcattcaaccaagac

SEQ ID NO: 3870124 - DNA, 25 bp, Homo sapien
caaccaagacgagagttggaaggca

SEQ ID NO: 3870125 - DNA, 25 bp, Homo sapien
caagacgagagttggaaggcacaaa

SEQ ID NO: 3870126 - DNA, 25 bp, Homo sapien
gaagtcattcaaccaagacgagagt

SEQ ID NO: 3870127 - DNA, 25 bp, Homo sapien
gagttatttatcatcaagaaggttg

SEQ ID NO: 3870128 - DNA, 25 bp, Homo sapien
tatgctaacatacatttctccccac

SEQ ID NO: 3870129 - DNA, 25 bp, Homo sapien
aactgactcaacacaatatgaaggg

SEQ ID NO: 3870130 - DNA, 25 bp, Homo sapien
cagtctactttcactgggatgtgca

SEQ ID NO: 3870131 - DNA, 25 bp, Homo sapien
gacacctgtggaaacctctatcttg

SEQ ID NO: 3870132 - DNA, 25 bp, Homo sapien
taagggctgcccaaacagctatcca

SEQ ID NO: 3870133 - DNA, 25 bp, Homo sapien
tgaggtcgcgaatgctttctacaga

SEQ ID NO: 3870134 - DNA, 25 bp, Homo sapien
gtatcttatgcttcctgaggtcgcg

SEQ ID NO: 3870135 - DNA, 25 bp, Homo sapien
actgtggccaagaccttccaggctc

SEQ ID NO: 3870136 - DNA, 25 bp, Homo sapien
cagttcactgtggccaagaccttcc

SEQ ID NO: 3870137 - DNA, 25 bp, Homo sapien
ctgtggccaagaccttccaggctca

SEQ ID NO: 3870138 - DNA, 25 bp, Homo sapien
atcacagttcactgtggccaagacc

SEQ ID NO: 3870139 - DNA, 25 bp, Homo sapien
ggaaactactaataactttgtcata

SEQ ID NO: 3870140 - DNA, 25 bp, Homo sapien
gaaactactaataactttgtcataa

SEQ ID NO: 3870141 - DNA, 25 bp, Homo sapien
caggacagcccacgtctatttggag

SEQ ID NO: 3870142 - DNA, 25 bp, Homo sapien
gaaggaatccttgaatgccccacag

SEQ ID NO: 3870143 - DNA, 25 bp, Homo sapien
aaatccgctcttcccagtagggtga

SEQ ID NO: 3870144 - DNA, 25 bp, Homo sapien
ccaaagaatattccggagactgtcc

SEQ ID NO: 3870145 - DNA, 25 bp, Homo sapien
tatgagttctagcttgtccaatgca

SEQ ID NO: 3870146 - DNA, 25 bp, Homo sapien
caggacctgcgtaatcactttccaa

SEQ ID NO: 3870147 - DNA, 25 bp, Homo sapien
gaggaagttcgacctgcattgtgtc

SEQ ID NO: 3870148 - DNA, 25 bp, Homo sapien
tcccttggtacaccccgtcagtgaa

SEQ ID NO: 3870149 - DNA, 25 bp, Homo sapien
catcccagttgccaatagggttatc

SEQ ID NO: 3870150 - DNA, 25 bp, Homo sapien
tactttcaacacacgcaaaactaca

SEQ ID NO: 3870151 - DNA, 25 bp, Homo sapien
ctgggatgatatcattgatgtgcaa

SEQ ID NO: 3870152 - DNA, 25 bp, Homo sapien
gcaatagaattgtactttcaacaca

SEQ ID NO: 3870153 - DNA, 25 bp, Homo sapien
ctcttgacataaaggcaagtttggg

SEQ ID NO: 3870154 - DNA, 25 bp, Homo sapien
tattatgactggatgaacctttgtc

SEQ ID NO: 3870155 - DNA, 25 bp, Homo sapien
gggaggcctcctttcctgcgtcaca

SEQ ID NO: 3870156 - DNA, 25 bp, Homo sapien
ctgtagcctttggtttattatgact

SEQ ID NO: 3870157 - DNA, 25 bp, Homo sapien
ttgtgagtcaacagaagacccattt

SEQ ID NO: 3870158 - DNA, 25 bp, Homo sapien
tggttgtgagtcaacagaagaccca

SEQ ID NO: 3870159 - DNA, 25 bp, Homo sapien
gatttggattgtggttgtgagtcaa

SEQ ID NO: 3870160 - DNA, 25 bp, Homo sapien
tattttttgatttggattgtggttg

SEQ ID NO: 3870161 - DNA, 25 bp, Homo sapien
tgtattcaaggatattgactctgtc

SEQ ID NO: 3870162 - DNA, 25 bp, Homo sapien
tatatacagatctagtccaactgcc

SEQ ID NO: 3870163 - DNA, 25 bp, Homo sapien
taatagtactctcataggcatcaca

SEQ ID NO: 3870164 - DNA, 25 bp, Homo sapien
tatctccaacagtgttctcgctcct

SEQ ID NO: 3870165 - DNA, 25 bp, Homo sapien
ggtggtgaagaacggtcaaagtctg

SEQ ID NO: 3870166 - DNA, 25 bp, Homo sapien
gtggtggtgaagaacggtcaaagtc

SEQ ID NO: 3870167 - DNA, 25 bp, Homo sapien
tggtgaagaacggtcaaagtctgta

SEQ ID NO: 3870168 - DNA, 25 bp, Homo sapien
ggtgaagaacggtcaaagtctgtag

SEQ ID NO: 3870169 - DNA, 25 bp, Homo sapien
taaagagtggaatctgttctcggtg

SEQ ID NO: 3870170 - DNA, 25 bp, Homo sapien
tctcggtggtcagtgagttcacagg

SEQ ID NO: 3870171 - DNA, 25 bp, Homo sapien
ggaatctgttctcggtggtcagtga

SEQ ID NO: 3870172 - DNA, 25 bp, Homo sapien
ttggtgagactgaatggtaaagagt

SEQ ID NO: 3870173 - DNA, 25 bp, Homo sapien
tgagcccacttctagaccatgtgag

SEQ ID NO: 3870174 - DNA, 25 bp, Homo sapien
ggtggctgaccgatccaacggatta

SEQ ID NO: 3870175 - DNA, 25 bp, Homo sapien
gagggttctccttaacttcagccaa

SEQ ID NO: 3870176 - DNA, 25 bp, Homo sapien
tcttccattacagactgggctgaca

SEQ ID NO: 3870177 - DNA, 25 bp, Homo sapien
taatagggcgaaatctgcacaaaac

SEQ ID NO: 3870178 - DNA, 25 bp, Homo sapien
tataaggagcctaaatcgattggcc

SEQ ID NO: 3870179 - DNA, 25 bp, Homo sapien
gatatgttctcctgatctctaaagg

SEQ ID NO: 3870180 - DNA, 25 bp, Homo sapien
taggacaagtgggtcgcaagcttca

SEQ ID NO: 3870181 - DNA, 25 bp, Homo sapien
agtattcactagcatggaaacaaac

SEQ ID NO: 3870182 - DNA, 25 bp, Homo sapien
tttcccgcaccatttctacaagcat

SEQ ID NO: 3870183 - DNA, 25 bp, Homo sapien
cccaccatgccccataagatagtat

SEQ ID NO: 3870184 - DNA, 25 bp, Homo sapien
gggctttcccgcaccatttctacaa

SEQ ID NO: 3870185 - DNA, 25 bp, Homo sapien
gttgagtaatcagtgcttcagccca

SEQ ID NO: 3870186 - DNA, 25 bp, Homo sapien
tccctcttcgcacctgtactgagaa

SEQ ID NO: 3870187 - DNA, 25 bp, Homo sapien
gaagtgacttccttaatccagcatg

SEQ ID NO: 3870188 - DNA, 25 bp, Homo sapien
gaacctcatcaagaaaaaggagttg

SEQ ID NO: 3870189 - DNA, 25 bp, Homo sapien
tgcattataccgtgccttacagaga

SEQ ID NO: 3870190 - DNA, 25 bp, Homo sapien
ttcaatatgcattataccgtgcctt

SEQ ID NO: 3870191 - DNA, 25 bp, Homo sapien
cttacagagatagtatacaaagaac

SEQ ID NO: 3870192 - DNA, 25 bp, Homo sapien
ccgtgccttacagagatagtataca

SEQ ID NO: 3870193 - DNA, 25 bp, Homo sapien
tgaaggttccatccgtacagcctgc

SEQ ID NO: 3870194 - DNA, 25 bp, Homo sapien
tcttcagggcacaggtgaaataccg

SEQ ID NO: 3870195 - DNA, 25 bp, Homo sapien
tgaaataccgagtgcctctgaaggt

SEQ ID NO: 3870196 - DNA, 25 bp, Homo sapien
caatctgattggaaaccggctgcaa

SEQ ID NO: 3870197 - DNA, 25 bp, Homo sapien
acttcacttaagtagcctccaaatg

SEQ ID NO: 3870198 - DNA, 25 bp, Homo sapien
gaataaggttgagtctaagtaacaa

SEQ ID NO: 3870199 - DNA, 25 bp, Homo sapien
ttcccaatcattatctccaagcctt

SEQ ID NO: 3870200 - DNA, 25 bp, Homo sapien
taacaagaattgtaatgaccctgga

SEQ ID NO: 3870201 - DNA, 25 bp, Homo sapien
gtctaagtaacacagtgtccagaac

SEQ ID NO: 3870202 - DNA, 25 bp, Homo sapien
attctacatcgttcttttctttggg

SEQ ID NO: 3870203 - DNA, 25 bp, Homo sapien
tataatattctacatcgttcttttc

SEQ ID NO: 3870204 - DNA, 25 bp, Homo sapien
tgtcctcagtagctcttgggtttca

SEQ ID NO: 3870205 - DNA, 25 bp, Homo sapien
taagcatgattacttgtagcagaag

SEQ ID NO: 3870206 - DNA, 25 bp, Homo sapien
catggaatatgctatgttctacacc

SEQ ID NO: 3870207 - DNA, 25 bp, Homo sapien
gaagctagactacaccaatttaact

SEQ ID NO: 3870208 - DNA, 25 bp, Homo sapien
gttctacaccttggccacatttaag

SEQ ID NO: 3870209 - DNA, 25 bp, Homo sapien
tctaggaaggaggtgttaacatgcc

SEQ ID NO: 3870210 - DNA, 25 bp, Homo sapien
gatatgaatgctacagacacaggga

SEQ ID NO: 3870211 - DNA, 25 bp, Homo sapien
tagtaacgtaacctgtcagccactg

SEQ ID NO: 3870212 - DNA, 25 bp, Homo sapien
tgaccagtttcttaccgtggacagg

SEQ ID NO: 3870213 - DNA, 25 bp, Homo sapien
ttatcctagacactattatatgctc

SEQ ID NO: 3870214 - DNA, 25 bp, Homo sapien
cataaatcaataggttagacaatta

SEQ ID NO: 3870215 - DNA, 25 bp, Homo sapien
ctacaagtaactgtcatacactaag

SEQ ID NO: 3870216 - DNA, 25 bp, Homo sapien
tagaaccagaattatcctagacact

SEQ ID NO: 3870217 - DNA, 25 bp, Homo sapien
aatttttgtggcacacacatatcca

SEQ ID NO: 3870218 - DNA, 25 bp, Homo sapien
agtttcataatttttgtggcacaca

SEQ ID NO: 3870219 - DNA, 25 bp, Homo sapien
ctttttcttcagaggtaaatcctga

SEQ ID NO: 3870220 - DNA, 25 bp, Homo sapien
taaatcctgatgcagcctccacctt

SEQ ID NO: 3870221 - DNA, 25 bp, Homo sapien
gaaaatgtagaaaacccaatgcaac

SEQ ID NO: 3870222 - DNA, 25 bp, Homo sapien
gagtaagcccattagctaggaagag

SEQ ID NO: 3870223 - DNA, 25 bp, Homo sapien
tttaatatactagaaccagccagct

SEQ ID NO: 3870224 - DNA, 25 bp, Homo sapien
gaagagattataacactgttccctg

SEQ ID NO: 3870225 - DNA, 25 bp, Homo sapien
aaggttctacccttaaaatatgatg

SEQ ID NO: 3870226 - DNA, 25 bp, Homo sapien
aatatgatgaaacagaatattcaag

SEQ ID NO: 3870227 - DNA, 25 bp, Homo sapien
aggttctacccttaaaatatgatga

SEQ ID NO: 3870228 - DNA, 25 bp, Homo sapien
agaatattcaagaattcctcaggat

SEQ ID NO: 3870229 - DNA, 25 bp, Homo sapien
caataatacttatcgctagggttaa

SEQ ID NO: 3870230 - DNA, 25 bp, Homo sapien
caaggctttcattcaacatggtggg

SEQ ID NO: 3870231 - DNA, 25 bp, Homo sapien
taaactatggtactgtggcaaggac

SEQ ID NO: 3870232 - DNA, 25 bp, Homo sapien
taacttgcatgatattcccctagcc

SEQ ID NO: 3870233 - DNA, 25 bp, Homo sapien
accataaaattgatggtgtagcttt

SEQ ID NO: 3870234 - DNA, 25 bp, Homo sapien
gctttggatagtcagaacaacagag

SEQ ID NO: 3870235 - DNA, 25 bp, Homo sapien
gtcccagcagtatttgagaacagaa

SEQ ID NO: 3870236 - DNA, 25 bp, Homo sapien
aatcaaaatgttaagttgtcccagc

SEQ ID NO: 3870237 - DNA, 25 bp, Homo sapien
gaagtaacaatcttgtaccttttga

SEQ ID NO: 3870238 - DNA, 25 bp, Homo sapien
aaagaccattctaacaactgctgaa

SEQ ID NO: 3870239 - DNA, 25 bp, Homo sapien
ttgatagaagtaacaatcttgtacc

SEQ ID NO: 3870240 - DNA, 25 bp, Homo sapien
gaattgtgggaacgccaactttctc

SEQ ID NO: 3870241 - DNA, 25 bp, Homo sapien
gaggacaccaataagccacaagtct

SEQ ID NO: 3870242 - DNA, 25 bp, Homo sapien
caaaatagtcatggctgtcaaacaa

SEQ ID NO: 3870243 - DNA, 25 bp, Homo sapien
ggatccacacgtgaccatgggctgt

SEQ ID NO: 3870244 - DNA, 25 bp, Homo sapien
taatattggtgtcctatgaaacagg

SEQ ID NO: 3870245 - DNA, 25 bp, Homo sapien
tgtcttcaagtaaatctgttatatt

SEQ ID NO: 3870246 - DNA, 25 bp, Homo sapien
ccaaatcgaggcatctgaataatca

SEQ ID NO: 3870247 - DNA, 25 bp, Homo sapien
gagtgttgcaggttttacaaaactg

SEQ ID NO: 3870248 - DNA, 25 bp, Homo sapien
tttccagctgagatgtccggatcgt

SEQ ID NO: 3870249 - DNA, 25 bp, Homo sapien
ccggatcgtcgtagcattctctaca

SEQ ID NO: 3870250 - DNA, 25 bp, Homo sapien
tcatacattgcaagccctccacata

SEQ ID NO: 3870251 - DNA, 25 bp, Homo sapien
tatgattcagcctcttcggatgaag

SEQ ID NO: 3870252 - DNA, 25 bp, Homo sapien
gatcggccatgctgtcaaagaagag

SEQ ID NO: 3870253 - DNA, 25 bp, Homo sapien
tgtctccagtcccagtcgggtaagt

SEQ ID NO: 3870254 - DNA, 25 bp, Homo sapien
ggcaagggatgcagccgtgtctcca

SEQ ID NO: 3870255 - DNA, 25 bp, Homo sapien
cacatgcagaagaaaggcgttttca

SEQ ID NO: 3870256 - DNA, 25 bp, Homo sapien
ccacatgcagaagaaaggcgttttc

SEQ ID NO: 3870257 - DNA, 25 bp, Homo sapien
tgcagaagaaaggcgttttcagtac

SEQ ID NO: 3870258 - DNA, 25 bp, Homo sapien
catgcagaagaaaggcgttttcagt

SEQ ID NO: 3870259 - DNA, 25 bp, Homo sapien
taggctactggagggccacaccaga

SEQ ID NO: 3870260 - DNA, 25 bp, Homo sapien
tggagggccacaccagaaggccgtg

SEQ ID NO: 3870261 - DNA, 25 bp, Homo sapien
ccagaaggccgtgggggctggatct

SEQ ID NO: 3870262 - DNA, 25 bp, Homo sapien
ctactggagggccacaccagaaggc

SEQ ID NO: 3870263 - DNA, 25 bp, Homo sapien
tgatttctggaagtgaaagcctcct

SEQ ID NO: 3870264 - DNA, 25 bp, Homo sapien
agttctaaacccttttgccagtgat

SEQ ID NO: 3870265 - DNA, 25 bp, Homo sapien
gaagaactctttatagggcagtcaa

SEQ ID NO: 3870266 - DNA, 25 bp, Homo sapien
gctaatttcaggctctaaaagcctt

SEQ ID NO: 3870267 - DNA, 25 bp, Homo sapien
gagtccaaggaatgcaggtcttcca

SEQ ID NO: 3870268 - DNA, 25 bp, Homo sapien
agtactctcctacttctgggcatgg

SEQ ID NO: 3870269 - DNA, 25 bp, Homo sapien
gacttgaggaatgttgaagccattc

SEQ ID NO: 3870270 - DNA, 25 bp, Homo sapien
cagtcttcgtgcacagccttggatt

SEQ ID NO: 3870271 - DNA, 25 bp, Homo sapien
atttgtacaaactcattgttggact

SEQ ID NO: 3870272 - DNA, 25 bp, Homo sapien
tatttgtacaaactcattgttggac

SEQ ID NO: 3870273 - DNA, 25 bp, Homo sapien
ttatttgtacaaactcattgttgga

SEQ ID NO: 3870274 - DNA, 25 bp, Homo sapien
cacaaagacatccattgccggcaat

SEQ ID NO: 3870275 - DNA, 25 bp, Homo sapien
cagaactgccagctcgaataagatg

SEQ ID NO: 3870276 - DNA, 25 bp, Homo sapien
gccggcaatggacgtgaacagaact

SEQ ID NO: 3870277 - DNA, 25 bp, Homo sapien
taagatgcaacgttaggactctgcc

SEQ ID NO: 3870278 - DNA, 25 bp, Homo sapien
caaaaatatcatatgatcaatgcac

SEQ ID NO: 3870279 - DNA, 25 bp, Homo sapien
caattaaaattgtatgcttccaaaa

SEQ ID NO: 3870280 - DNA, 25 bp, Homo sapien
aaagcttcaggtattaataacttca

SEQ ID NO: 3870281 - DNA, 25 bp, Homo sapien
tactttctagagtgcaaaatgcttc

SEQ ID NO: 3870282 - DNA, 25 bp, Homo sapien
caggtgtccatccaaacaggtcttc

SEQ ID NO: 3870283 - DNA, 25 bp, Homo sapien
tatggtcctggtctacaacatccgc

SEQ ID NO: 3870284 - DNA, 25 bp, Homo sapien
aagttctctaccatgacagcctggg

SEQ ID NO: 3870285 - DNA, 25 bp, Homo sapien
gatgagaaacctgcagataccgagg

SEQ ID NO: 3870286 - DNA, 25 bp, Homo sapien
caagcaggaatttgggtgacaacac

SEQ ID NO: 3870287 - DNA, 25 bp, Homo sapien
gaacagtcggattcagcaggcatgg

SEQ ID NO: 3870288 - DNA, 25 bp, Homo sapien
tcaagatccagctatagagggtagt

SEQ ID NO: 3870289 - DNA, 25 bp, Homo sapien
cctagggataggaagaatctggcca

SEQ ID NO: 3870290 - DNA, 25 bp, Homo sapien
cattaatggagaattgcaccaaacc

SEQ ID NO: 3870291 - DNA, 25 bp, Homo sapien
tcttcattaatggagaattgcacca

SEQ ID NO: 3870292 - DNA, 25 bp, Homo sapien
gttatcttcattaatggagaattgc

SEQ ID NO: 3870293 - DNA, 25 bp, Homo sapien
aatgttatcttcattaatggagaat

SEQ ID NO: 3870294 - DNA, 25 bp, Homo sapien
tggtgcttgaaaggacaatccctcc

SEQ ID NO: 3870295 - DNA, 25 bp, Homo sapien
gaagggcaatgcgaacaccctgcag

SEQ ID NO: 3870296 - DNA, 25 bp, Homo sapien
tgcaggaagcctcagtctaaaaccc

SEQ ID NO: 3870297 - DNA, 25 bp, Homo sapien
gactgctggatgctacaatcaggga

SEQ ID NO: 3870298 - DNA, 25 bp, Homo sapien
gtattctatgtggtggtcttcttaa

SEQ ID NO: 3870299 - DNA, 25 bp, Homo sapien
taacaaaattaaggctaaatcagag

SEQ ID NO: 3870300 - DNA, 25 bp, Homo sapien
gaatgttctcataaatataggatgt

SEQ ID NO: 3870301 - DNA, 25 bp, Homo sapien
taaggctaaatcagagcgagctgat

SEQ ID NO: 3870302 - DNA, 25 bp, Homo sapien
tctgcagggcagaatgttccaccag

SEQ ID NO: 3870303 - DNA, 25 bp, Homo sapien
tgacaactggttcccaatcctggtt

SEQ ID NO: 3870304 - DNA, 25 bp, Homo sapien
tttcccttaggagctcgttcatgtc

SEQ ID NO: 3870305 - DNA, 25 bp, Homo sapien
tatcagcatgcatatccacccatgg

SEQ ID NO: 3870306 - DNA, 25 bp, Homo sapien
tgcagattccgggacctcacaaccg

SEQ ID NO: 3870307 - DNA, 25 bp, Homo sapien
ccataaagccacagatttgtaattc

SEQ ID NO: 3870308 - DNA, 25 bp, Homo sapien
gaccttacggcattcgcccagtaga

SEQ ID NO: 3870309 - DNA, 25 bp, Homo sapien
cagtagatggcgctagctcatttta

SEQ ID NO: 3870310 - DNA, 25 bp, Homo sapien
caagtcttaatccaagtggaatctc

SEQ ID NO: 3870311 - DNA, 25 bp, Homo sapien
tctggatttctagagtggcaggtga

SEQ ID NO: 3870312 - DNA, 25 bp, Homo sapien
gactggactcaactccccacttatg

SEQ ID NO: 3870313 - DNA, 25 bp, Homo sapien
tattacatgtcaccgcaacagggta

SEQ ID NO: 3870314 - DNA, 25 bp, Homo sapien
gggccactggaatgaaccagctctt

SEQ ID NO: 3870315 - DNA, 25 bp, Homo sapien
cacccctctgggctagggaagaagc

SEQ ID NO: 3870316 - DNA, 25 bp, Homo sapien
caggtccggatgtctggcaggaatt

SEQ ID NO: 3870317 - DNA, 25 bp, Homo sapien
tggaatgaaccagctctttcctctc

SEQ ID NO: 3870318 - DNA, 25 bp, Homo sapien
tcctctcgaatcagggcttgcaggg

SEQ ID NO: 3870319 - DNA, 25 bp, Homo sapien
ctccatcctcagccggagacagcac

SEQ ID NO: 3870320 - DNA, 25 bp, Homo sapien
gccggagacagcacgcctccagcct

SEQ ID NO: 3870321 - DNA, 25 bp, Homo sapien
atcctcagccggagacagcacgcct

SEQ ID NO: 3870322 - DNA, 25 bp, Homo sapien
ggcccccacggctgcgactgcggca

SEQ ID NO: 3870323 - DNA, 25 bp, Homo sapien
cctcggaattgctacagcggaggcg

SEQ ID NO: 3870324 - DNA, 25 bp, Homo sapien
cacggctgcgactgcggcaccggaa

SEQ ID NO: 3870325 - DNA, 25 bp, Homo sapien
ccccacggctgcgactgcggcaccg

SEQ ID NO: 3870326 - DNA, 25 bp, Homo sapien
caaagttcacaaaggagagagctgg

SEQ ID NO: 3870327 - DNA, 25 bp, Homo sapien
caagactacaggtcaaacgggcagt

SEQ ID NO: 3870328 - DNA, 25 bp, Homo sapien
gcagttctttaatctaagccaggca

SEQ ID NO: 3870329 - DNA, 25 bp, Homo sapien
tcactctggctaggacgcctttgct

SEQ ID NO: 3870330 - DNA, 25 bp, Homo sapien
agcccgcgggcagtcctgggcctgt

SEQ ID NO: 3870331 - DNA, 25 bp, Homo sapien
gaagcagcatgggttcttgcacaca

SEQ ID NO: 3870332 - DNA, 25 bp, Homo sapien
acgtgcacacatgccccacgcctgc

SEQ ID NO: 3870333 - DNA, 25 bp, Homo sapien
ctgcacacgggctgagaagcagcat

SEQ ID NO: 3870334 - DNA, 25 bp, Homo sapien
agcctcctacataatctctatatcc

SEQ ID NO: 3870335 - DNA, 25 bp, Homo sapien
taatctctatatccaaaatgcccca

SEQ ID NO: 3870336 - DNA, 25 bp, Homo sapien
cataatctctatatccaaaatgccc

SEQ ID NO: 3870337 - DNA, 25 bp, Homo sapien
cctacataatctctatatccaaaat

SEQ ID NO: 3870338 - DNA, 25 bp, Homo sapien
gaatgttcatagtgccccaaggtag

SEQ ID NO: 3870339 - DNA, 25 bp, Homo sapien
cacttagcactacttggggtcctca

SEQ ID NO: 3870340 - DNA, 25 bp, Homo sapien
acttagcactacttggggtcctcat

SEQ ID NO: 3870341 - DNA, 25 bp, Homo sapien
catgaagccatgctccaaccctctg

SEQ ID NO: 3870342 - DNA, 25 bp, Homo sapien
tctgggcctcacaagcatctgggca

SEQ ID NO: 3870343 - DNA, 25 bp, Homo sapien
ctggctgcacaccccaagatctggg

SEQ ID NO: 3870344 - DNA, 25 bp, Homo sapien
caagatctgggcctcacaagcatct

SEQ ID NO: 3870345 - DNA, 25 bp, Homo sapien
tgggcctcacaagcatctgggcact

SEQ ID NO: 3870346 - DNA, 25 bp, Homo sapien
aaattagagaaaatagacgtgcttc

SEQ ID NO: 3870347 - DNA, 25 bp, Homo sapien
aaatagacgtgcttctcggaaaggg

SEQ ID NO: 3870348 - DNA, 25 bp, Homo sapien
tgctcccggcgctgttgtaagtgca

SEQ ID NO: 3870349 - DNA, 25 bp, Homo sapien
gcacagcggcactgaataaattaga

SEQ ID NO: 3870350 - DNA, 25 bp, Homo sapien
gcaggcatggtgcatgttagctgaa

SEQ ID NO: 3870351 - DNA, 25 bp, Homo sapien
ccagtacaggtaggtggcaggcatg

SEQ ID NO: 3870352 - DNA, 25 bp, Homo sapien
gcatggtgcatgttagctgaaatca

SEQ ID NO: 3870353 - DNA, 25 bp, Homo sapien
tggtgcatgttagctgaaatcactc

SEQ ID NO: 3870354 - DNA, 25 bp, Homo sapien
gggccctcgcaaggcacactttcag

SEQ ID NO: 3870355 - DNA, 25 bp, Homo sapien
ggccctcgcaaggcacactttcaga

SEQ ID NO: 3870356 - DNA, 25 bp, Homo sapien
caaatggagctgctatgactgggca

SEQ ID NO: 3870357 - DNA, 25 bp, Homo sapien
catctggagaccaatggcaggctgc

SEQ ID NO: 3870358 - DNA, 25 bp, Homo sapien
tgggcaccatcgcaacaaacaagac

SEQ ID NO: 3870359 - DNA, 25 bp, Homo sapien
tcttggttgggctcatgcgtgcatc

SEQ ID NO: 3870360 - DNA, 25 bp, Homo sapien
cgctatggagcaagcctgagacctg

SEQ ID NO: 3870361 - DNA, 25 bp, Homo sapien
tggcgctatggagcaagcctgagac

SEQ ID NO: 3870362 - DNA, 25 bp, Homo sapien
agtcagaaaacctggatccgtgtcc

SEQ ID NO: 3870363 - DNA, 25 bp, Homo sapien
cagcaggtggcgctatggagcaagc

SEQ ID NO: 3870364 - DNA, 25 bp, Homo sapien
taggaaacattcgaccatccaagag

SEQ ID NO: 3870365 - DNA, 25 bp, Homo sapien
tctgagtcttgatttgggtgcctac

SEQ ID NO: 3870366 - DNA, 25 bp, Homo sapien
tgtggaacttccgagaaagaggaca

SEQ ID NO: 3870367 - DNA, 25 bp, Homo sapien
ggcaagcgtgaagcagcagacactc

SEQ ID NO: 3870368 - DNA, 25 bp, Homo sapien
gtccatccagttggcccgaaatgaa

SEQ ID NO: 3870369 - DNA, 25 bp, Homo sapien
cactaatttgccaacaagctcagtc

SEQ ID NO: 3870370 - DNA, 25 bp, Homo sapien
actggagtggcaactctttcaagga

SEQ ID NO: 3870371 - DNA, 25 bp, Homo sapien
ctttcaaggacgctaaaaattgctt

SEQ ID NO: 3870372 - DNA, 25 bp, Homo sapien
tcaatttgctgtagtgagactgcgc

SEQ ID NO: 3870373 - DNA, 25 bp, Homo sapien
gagactgcgcgagtttcctgtggac

SEQ ID NO: 3870374 - DNA, 25 bp, Homo sapien
caaaatacaggccacgggaggtagc

SEQ ID NO: 3870375 - DNA, 25 bp, Homo sapien
catcatgcctgttagttgtagggta

SEQ ID NO: 3870376 - DNA, 25 bp, Homo sapien
gagaaactctggaagtgggagtcag

SEQ ID NO: 3870377 - DNA, 25 bp, Homo sapien
ctggagaaactctggaagtgggagt

SEQ ID NO: 3870378 - DNA, 25 bp, Homo sapien
gaagtgggagtcaggctggggcagc

SEQ ID NO: 3870379 - DNA, 25 bp, Homo sapien
aaactctggaagtgggagtcaggct

SEQ ID NO: 3870380 - DNA, 25 bp, Homo sapien
ctgtctctcctatcagcagccttaa

SEQ ID NO: 3870381 - DNA, 25 bp, Homo sapien
tgcatctgtctctcctatcagcagc

SEQ ID NO: 3870382 - DNA, 25 bp, Homo sapien
tgtctctcctatcagcagccttaat

SEQ ID NO: 3870383 - DNA, 25 bp, Homo sapien
caatactgctttctgggtggccggg

SEQ ID NO: 3870384 - DNA, 25 bp, Homo sapien
gatccccagtcacggaggtttacca

SEQ ID NO: 3870385 - DNA, 25 bp, Homo sapien
tgtttatatgagatcccatgattct

SEQ ID NO: 3870386 - DNA, 25 bp, Homo sapien
ggctcctggattgcttatttacaga

SEQ ID NO: 3870387 - DNA, 25 bp, Homo sapien
gtggtgtgcactgaacaattcgctg

SEQ ID NO: 3870388 - DNA, 25 bp, Homo sapien
gcagcaggcaggtctgacggagtct

SEQ ID NO: 3870389 - DNA, 25 bp, Homo sapien
cactgaacaattcgctgaagcagca

SEQ ID NO: 3870390 - DNA, 25 bp, Homo sapien
tctgacggagtctgctgcagcagta

SEQ ID NO: 3870391 - DNA, 25 bp, Homo sapien
tggacaatgggagcttgagcctgct

SEQ ID NO: 3870392 - DNA, 25 bp, Homo sapien
gagagctacttctaagggcattaaa

SEQ ID NO: 3870393 - DNA, 25 bp, Homo sapien
ccatttgtcattggtagagagctac

SEQ ID NO: 3870394 - DNA, 25 bp, Homo sapien
acttgtgggagattgcatagagcac

SEQ ID NO: 3870395 - DNA, 25 bp, Homo sapien
ccttgacataactctctccatgtgc

SEQ ID NO: 3870396 - DNA, 25 bp, Homo sapien
tccttgacataactctctccatgtg

SEQ ID NO: 3870397 - DNA, 25 bp, Homo sapien
cttgacataactctctccatgtgca

SEQ ID NO: 3870398 - DNA, 25 bp, Homo sapien
gagttgtccccattgtctgcagcca

SEQ ID NO: 3870399 - DNA, 25 bp, Homo sapien
gaatgagatagcatcatgcagttgt

SEQ ID NO: 3870400 - DNA, 25 bp, Homo sapien
gcagttgtgagttgtccccattgtc

SEQ ID NO: 3870401 - DNA, 25 bp, Homo sapien
catcatgcagttgtgagttgtcccc

SEQ ID NO: 3870402 - DNA, 25 bp, Homo sapien
tggtcaggaccaggttatatgcctc

SEQ ID NO: 3870403 - DNA, 25 bp, Homo sapien
taaatttgtggcagatgcaggtcat

SEQ ID NO: 3870404 - DNA, 25 bp, Homo sapien
ttcttggcatgggtcctggtaaatt

SEQ ID NO: 3870405 - DNA, 25 bp, Homo sapien
caggaccaggttatatgcctctgcc

SEQ ID NO: 3870406 - DNA, 25 bp, Homo sapien
cccacagctggaaccaggctctggc

SEQ ID NO: 3870407 - DNA, 25 bp, Homo sapien
acagctggaaccaggctctggccac

SEQ ID NO: 3870408 - DNA, 25 bp, Homo sapien
catatcccacagctggaaccaggct

SEQ ID NO: 3870409 - DNA, 25 bp, Homo sapien
tatcccacagctggaaccaggctct

SEQ ID NO: 3870410 - DNA, 25 bp, Homo sapien
attgctgttcccgacaatggttttc

SEQ ID NO: 3870411 - DNA, 25 bp, Homo sapien
gctgttcccgacaatggttttcttc

SEQ ID NO: 3870412 - DNA, 25 bp, Homo sapien
tggcttggtgtcagagcccaggatt

SEQ ID NO: 3870413 - DNA, 25 bp, Homo sapien
ccatcattggccagtggcttggtgt

SEQ ID NO: 3870414 - DNA, 25 bp, Homo sapien
ctccattgagttgtaggcagaggcc

SEQ ID NO: 3870415 - DNA, 25 bp, Homo sapien
catgtgctccattgagttgtaggca

SEQ ID NO: 3870416 - DNA, 25 bp, Homo sapien
cttcatgtgctccattgagttgtag

SEQ ID NO: 3870417 - DNA, 25 bp, Homo sapien
tgctccattgagttgtaggcagagg

SEQ ID NO: 3870418 - DNA, 25 bp, Homo sapien
aacagatacgtttagcagcagggct

SEQ ID NO: 3870419 - DNA, 25 bp, Homo sapien
ggtgctctgtggaggtgaccccaat

SEQ ID NO: 3870420 - DNA, 25 bp, Homo sapien
gaaactaatgctagggacccagtgg

SEQ ID NO: 3870421 - DNA, 25 bp, Homo sapien
gacccagtggccgataataggcgca

SEQ ID NO: 3870422 - DNA, 25 bp, Homo sapien
gattgagctgtgattaggtatctgg

SEQ ID NO: 3870423 - DNA, 25 bp, Homo sapien
gacaccagcatcgattgagctgtga

SEQ ID NO: 3870424 - DNA, 25 bp, Homo sapien
ggaaaaagacaccagcatcgattga

SEQ ID NO: 3870425 - DNA, 25 bp, Homo sapien
gcatcgattgagctgtgattaggta

SEQ ID NO: 3870426 - DNA, 25 bp, Homo sapien
cagagatcctatgtaaagcatgttt

SEQ ID NO: 3870427 - DNA, 25 bp, Homo sapien
gttcagagatcctatgtaaagcatg

SEQ ID NO: 3870428 - DNA, 25 bp, Homo sapien
aagttcagagatcctatgtaaagca

SEQ ID NO: 3870429 - DNA, 25 bp, Homo sapien
ttcagagatcctatgtaaagcatgt

SEQ ID NO: 3870430 - DNA, 25 bp, Homo sapien
gcagcccaagctggaaacatgattt

SEQ ID NO: 3870431 - DNA, 25 bp, Homo sapien
agatgaaacagcagcccaagctgga

SEQ ID NO: 3870432 - DNA, 25 bp, Homo sapien
ccattattcatgagtcccagggccg

SEQ ID NO: 3870433 - DNA, 25 bp, Homo sapien
ttccattattcatgagtcccagggc

SEQ ID NO: 3870434 - DNA, 25 bp, Homo sapien
tgctcctggaaagtcgtctgggctg

SEQ ID NO: 3870435 - DNA, 25 bp, Homo sapien
tctgggctgtaaggagtggttactg

SEQ ID NO: 3870436 - DNA, 25 bp, Homo sapien
aagtctatgtagcagcccgtagaag

SEQ ID NO: 3870437 - DNA, 25 bp, Homo sapien
tagcagcccgtagaagaatacactt

SEQ ID NO: 3870438 - DNA, 25 bp, Homo sapien
ccttcaaggccaagtctatgtagca

SEQ ID NO: 3870439 - DNA, 25 bp, Homo sapien
atgtagcagcccgtagaagaataca

SEQ ID NO: 3870440 - DNA, 25 bp, Homo sapien
ctccagttttcactgcagcagggct

SEQ ID NO: 3870441 - DNA, 25 bp, Homo sapien
ctgcagcagggctgttggtgaggat

SEQ ID NO: 3870442 - DNA, 25 bp, Homo sapien
agttttcactgcagcagggctgttg

SEQ ID NO: 3870443 - DNA, 25 bp, Homo sapien
ttcactgcagcagggctgttggtga

SEQ ID NO: 3870444 - DNA, 25 bp, Homo sapien
ctagatgctgaaggaagaagaggaa

SEQ ID NO: 3870445 - DNA, 25 bp, Homo sapien
tagatgctgaaggaagaagaggaag

SEQ ID NO: 3870446 - DNA, 25 bp, Homo sapien
tcagatcgactctctcgctgtgtgg

SEQ ID NO: 3870447 - DNA, 25 bp, Homo sapien
caatcttcagttcagatcgactctc

SEQ ID NO: 3870448 - DNA, 25 bp, Homo sapien
cgactctctcgctgtgtggctttag

SEQ ID NO: 3870449 - DNA, 25 bp, Homo sapien
tgatgtcaaacaatcttcagttcag

SEQ ID NO: 3870450 - DNA, 25 bp, Homo sapien
ctcccagtggtcagcatcatccaca

SEQ ID NO: 3870451 - DNA, 25 bp, Homo sapien
tcccagtggtcagcatcatccacat

SEQ ID NO: 3870452 - DNA, 25 bp, Homo sapien
tgagaatctgattattgtctgtaag

SEQ ID NO: 3870453 - DNA, 25 bp, Homo sapien
tgtctatgagaatctgattattgtc

SEQ ID NO: 3870454 - DNA, 25 bp, Homo sapien
ggttgagtttgtctatgagaatctg

SEQ ID NO: 3870455 - DNA, 25 bp, Homo sapien
tctgattattgtctgtaaggttttc

SEQ ID NO: 3870456 - DNA, 25 bp, Homo sapien
tggacactgcgtgccgatgagacat

SEQ ID NO: 3870457 - DNA, 25 bp, Homo sapien
gatgagacatccttcgagggcagcc

SEQ ID NO: 3870458 - DNA, 25 bp, Homo sapien
ggacagggtgagataactgagcctt

SEQ ID NO: 3870459 - DNA, 25 bp, Homo sapien
gcatgctagccagagggcaagccat

SEQ ID NO: 3870460 - DNA, 25 bp, Homo sapien
caatcctgtaatgcattctgacacc

SEQ ID NO: 3870461 - DNA, 25 bp, Homo sapien
tggatggtgccctgcaccgggctct

SEQ ID NO: 3870462 - DNA, 25 bp, Homo sapien
aagtaaggaactgccctggtacagc

SEQ ID NO: 3870463 - DNA, 25 bp, Homo sapien
tgtgctggcgttcagtcaatcctgt

SEQ ID NO: 3870464 - DNA, 25 bp, Homo sapien
ctgcctctcttgatccttggcccac

SEQ ID NO: 3870465 - DNA, 25 bp, Homo sapien
catgttggcgacacatctttgccag

SEQ ID NO: 3870466 - DNA, 25 bp, Homo sapien
gtttgtcatggacaccattgtgtgg

SEQ ID NO: 3870467 - DNA, 25 bp, Homo sapien
ttgccagcggccacattacccaggt

SEQ ID NO: 3870468 - DNA, 25 bp, Homo sapien
gcagtgatggaatagtgtcctgaga

SEQ ID NO: 3870469 - DNA, 25 bp, Homo sapien
tctggaattcatcctcgattgggtc

SEQ ID NO: 3870470 - DNA, 25 bp, Homo sapien
ttctggaattcatcctcgattgggt

SEQ ID NO: 3870471 - DNA, 25 bp, Homo sapien
ggaattcatcctcgattgggtccat

SEQ ID NO: 3870472 - DNA, 25 bp, Homo sapien
tggaattcatcctcgattgggtcca

SEQ ID NO: 3870473 - DNA, 25 bp, Homo sapien
cagccaatgcggtgagacatagacc

SEQ ID NO: 3870474 - DNA, 25 bp, Homo sapien
tggaggaccagaaagccctactgct

SEQ ID NO: 3870475 - DNA, 25 bp, Homo sapien
cacagggcttggataaacgtggtct

SEQ ID NO: 3870476 - DNA, 25 bp, Homo sapien
tcacaagagcgtaaccaagacagtc

SEQ ID NO: 3870477 - DNA, 25 bp, Homo sapien
tctctggccacaaggctgtacttca

SEQ ID NO: 3870478 - DNA, 25 bp, Homo sapien
gaaagttgtatttgctctctggcca

SEQ ID NO: 3870479 - DNA, 25 bp, Homo sapien
cacaaggctgtacttcatttgtgtc

SEQ ID NO: 3870480 - DNA, 25 bp, Homo sapien
tttgaaagttgtatttgctctctgg

SEQ ID NO: 3870481 - DNA, 25 bp, Homo sapien
ctttgggttcagacaggaccctgga

SEQ ID NO: 3870482 - DNA, 25 bp, Homo sapien
accctggatttcctgcagaatttct

SEQ ID NO: 3870483 - DNA, 25 bp, Homo sapien
ttgggttcagacaggaccctggatt

SEQ ID NO: 3870484 - DNA, 25 bp, Homo sapien
cctggatttcctgcagaatttcttg

SEQ ID NO: 3870485 - DNA, 25 bp, Homo sapien
gaccagggaacattcgatagataga

SEQ ID NO: 3870486 - DNA, 25 bp, Homo sapien
ggtaagactttcaccgccgacttga

SEQ ID NO: 3870487 - DNA, 25 bp, Homo sapien
gggtccacacagttcggcagctcat

SEQ ID NO: 3870488 - DNA, 25 bp, Homo sapien
gatggccttcaaccaatgaccaggg

SEQ ID NO: 3870489 - DNA, 25 bp, Homo sapien
cattgggccctaccaatattttcat

SEQ ID NO: 3870490 - DNA, 25 bp, Homo sapien
gctaagagctgctaatctaaccagc

SEQ ID NO: 3870491 - DNA, 25 bp, Homo sapien
catctcgtccagaccccaggaaata

SEQ ID NO: 3870492 - DNA, 25 bp, Homo sapien
gaaatatgtctagatcaaagcctgc

SEQ ID NO: 3870493 - DNA, 25 bp, Homo sapien
gacatttctaggaggcaatcccgtc

SEQ ID NO: 3870494 - DNA, 25 bp, Homo sapien
ttcacccgcttcgtggaggacagca

SEQ ID NO: 3870495 - DNA, 25 bp, Homo sapien
tctccaacgggctggcgatgaaggc

SEQ ID NO: 3870496 - DNA, 25 bp, Homo sapien
tggaatcagtatgcagcagcgctct

SEQ ID NO: 3870497 - DNA, 25 bp, Homo sapien
ggtgattcccgccaactcgttgtca

SEQ ID NO: 3870498 - DNA, 25 bp, Homo sapien
gccctgcagattcacgagagaactc

SEQ ID NO: 3870499 - DNA, 25 bp, Homo sapien
tggaagagctttcacgactaaaggc

SEQ ID NO: 3870500 - DNA, 25 bp, Homo sapien
caagacagaggtcaacggcttcgtg

SEQ ID NO: 3870501 - DNA, 25 bp, Homo sapien
tatttagttctgaatctgtcattat

SEQ ID NO: 3870502 - DNA, 25 bp, Homo sapien
tgtgtgaacaaacagaatagctttt

SEQ ID NO: 3870503 - DNA, 25 bp, Homo sapien
cattatttgtctaagcccagctgac

SEQ ID NO: 3870504 - DNA, 25 bp, Homo sapien
gcttaatagaacatgctgacataat

SEQ ID NO: 3870505 - DNA, 25 bp, Homo sapien
tgagaccttttgcaccggaaaactg

SEQ ID NO: 3870506 - DNA, 25 bp, Homo sapien
tttccaccccaagcgaaagcgagca

SEQ ID NO: 3870507 - DNA, 25 bp, Homo sapien
agcagctgcgccgagtatttttccg

SEQ ID NO: 3870508 - DNA, 25 bp, Homo sapien
agtccgctgaaaagagcccctgaac

SEQ ID NO: 3870509 - DNA, 25 bp, Homo sapien
cctgatgtcgggaaaggggaatcct

SEQ ID NO: 3870510 - DNA, 25 bp, Homo sapien
ccgctccctttacccctgatgtcgg

SEQ ID NO: 3870511 - DNA, 25 bp, Homo sapien
cccgctccctttacccctgatgtcg

SEQ ID NO: 3870512 - DNA, 25 bp, Homo sapien
gctccctttacccctgatgtcggga

SEQ ID NO: 3870513 - DNA, 25 bp, Homo sapien
caagacccgggagccccatgaggcg

SEQ ID NO: 3870514 - DNA, 25 bp, Homo sapien
gctgccagcggtaaggaagtttact

SEQ ID NO: 3870515 - DNA, 25 bp, Homo sapien
ccggcaggatctttccggagttgtt

SEQ ID NO: 3870516 - DNA, 25 bp, Homo sapien
gggaaagcgagcacatctcccggca

SEQ ID NO: 3870517 - DNA, 25 bp, Homo sapien
tcggagcccaggccggtccccgctc

SEQ ID NO: 3870518 - DNA, 25 bp, Homo sapien
ccctgcagccaaccggggcagccgg

SEQ ID NO: 3870519 - DNA, 25 bp, Homo sapien
tccccgcggagtgacgcgccctgca

SEQ ID NO: 3870520 - DNA, 25 bp, Homo sapien
ggctctgcggcgccaccgctgccgc

SEQ ID NO: 3870521 - DNA, 25 bp, Homo sapien
tatttctttgcatcgcggcacgcgg

SEQ ID NO: 3870522 - DNA, 25 bp, Homo sapien
caaacgcgttcgtgtacctgggaca

SEQ ID NO: 3870523 - DNA, 25 bp, Homo sapien
tcgagaaccttggagcgaggagacc

SEQ ID NO: 3870524 - DNA, 25 bp, Homo sapien
tacaggtccggagtacacgaagtcg

SEQ ID NO: 3870525 - DNA, 25 bp, Homo sapien
ttcgggttcgaagccgctccagtgt

SEQ ID NO: 3870526 - DNA, 25 bp, Homo sapien
acttcgggttcgaagccgctccagt

SEQ ID NO: 3870527 - DNA, 25 bp, Homo sapien
tcgggttcgaagccgctccagtgtt

SEQ ID NO: 3870528 - DNA, 25 bp, Homo sapien
cttcgggttcgaagccgctccagtg

SEQ ID NO: 3870529 - DNA, 25 bp, Homo sapien
gagaaagacgaactttgccgcgggc

SEQ ID NO: 3870530 - DNA, 25 bp, Homo sapien
taataccggtgtaggaacagccctc

SEQ ID NO: 3870531 - DNA, 25 bp, Homo sapien
caagacgctcaactgtggacggaaa

SEQ ID NO: 3870532 - DNA, 25 bp, Homo sapien
gacagtacgcgactcttggctcggg

SEQ ID NO: 3870533 - DNA, 25 bp, Homo sapien
ttccactttctctacgtcgggacat

SEQ ID NO: 3870534 - DNA, 25 bp, Homo sapien
tctctacgtcgggacatttcctctg

SEQ ID NO: 3870535 - DNA, 25 bp, Homo sapien
cactttctctacgtcgggacatttc

SEQ ID NO: 3870536 - DNA, 25 bp, Homo sapien
cgtcgggacatttcctctgggagga

SEQ ID NO: 3870537 - DNA, 25 bp, Homo sapien
gcctctgcaggcctctagtttaaac

SEQ ID NO: 3870538 - DNA, 25 bp, Homo sapien
aactattgtggatgttacagccaag

SEQ ID NO: 3870539 - DNA, 25 bp, Homo sapien
gatagcgaacaaagaactgtggtct

SEQ ID NO: 3870540 - DNA, 25 bp, Homo sapien
ccaaggtgggcctaagagttctgcc

SEQ ID NO: 3870541 - DNA, 25 bp, Homo sapien
cgcccatgacctcagttcgctgcaa

SEQ ID NO: 3870542 - DNA, 25 bp, Homo sapien
tatcgcccatgacctcagttcgctg

SEQ ID NO: 3870543 - DNA, 25 bp, Homo sapien
atcgcccatgacctcagttcgctgc

SEQ ID NO: 3870544 - DNA, 25 bp, Homo sapien
tcgcccatgacctcagttcgctgca

SEQ ID NO: 3870545 - DNA, 25 bp, Homo sapien
gaagatgtgaaggtaaaggggccaa

SEQ ID NO: 3870546 - DNA, 25 bp, Homo sapien
catttttccaggctgggttccagca

SEQ ID NO: 3870547 - DNA, 25 bp, Homo sapien
tgccgatagaaagttccaacacagg

SEQ ID NO: 3870548 - DNA, 25 bp, Homo sapien
gggcccatgcctatcttgttcacag

SEQ ID NO: 3870549 - DNA, 25 bp, Homo sapien
tctcagaatcgttgggaaacaaaca

SEQ ID NO: 3870550 - DNA, 25 bp, Homo sapien
caaagtctagaacagtagggctcca

SEQ ID NO: 3870551 - DNA, 25 bp, Homo sapien
taatgggactcagcattacccagcc

SEQ ID NO: 3870552 - DNA, 25 bp, Homo sapien
ccaacctggaaagatgaaggatgac

SEQ ID NO: 3870553 - DNA, 25 bp, Homo sapien
gggaccctctgtatgcaaaggacat

SEQ ID NO: 3870554 - DNA, 25 bp, Homo sapien
gcacctggcaacacctaaagagagt

SEQ ID NO: 3870555 - DNA, 25 bp, Homo sapien
cattttaatgacttcgctggcttgg

SEQ ID NO: 3870556 - DNA, 25 bp, Homo sapien
tgaggttcgtgtctattcccttaac

SEQ ID NO: 3870557 - DNA, 25 bp, Homo sapien
tcccttaacgttaatgccatagcaa

SEQ ID NO: 3870558 - DNA, 25 bp, Homo sapien
ttttcatggagagggcatacggaga

SEQ ID NO: 3870559 - DNA, 25 bp, Homo sapien
tggctgagcaaggtgccagctcttg

SEQ ID NO: 3870560 - DNA, 25 bp, Homo sapien
tgttctcagtccaaccgtgtacctg

SEQ ID NO: 3870561 - DNA, 25 bp, Homo sapien
gcacagtcacctgcacgcatctgtt

SEQ ID NO: 3870562 - DNA, 25 bp, Homo sapien
tcttggctctagagttcaattcttc

SEQ ID NO: 3870563 - DNA, 25 bp, Homo sapien
cttacatgggattgtgcactgtaac

SEQ ID NO: 3870564 - DNA, 25 bp, Homo sapien
caagttcttacatgggattgtgcac

SEQ ID NO: 3870565 - DNA, 25 bp, Homo sapien
gttcttacatgggattgtgcactgt

SEQ ID NO: 3870566 - DNA, 25 bp, Homo sapien
aacaagttcttacatgggattgtgc

SEQ ID NO: 3870567 - DNA, 25 bp, Homo sapien
cagtacattgaaccaagttaaacct

SEQ ID NO: 3870568 - DNA, 25 bp, Homo sapien
acatgcaaattgctaggttgttgta

SEQ ID NO: 3870569 - DNA, 25 bp, Homo sapien
aaattgctaggttgttgtaacacag

SEQ ID NO: 3870570 - DNA, 25 bp, Homo sapien
tacattgaaccaagttaaacctgtg

SEQ ID NO: 3870571 - DNA, 25 bp, Homo sapien
atgataattacagtatgtttgtact

SEQ ID NO: 3870572 - DNA, 25 bp, Homo sapien
aattacagtatgtttgtacttactg

SEQ ID NO: 3870573 - DNA, 25 bp, Homo sapien
tgataattacagtatgtttgtactt

SEQ ID NO: 3870574 - DNA, 25 bp, Homo sapien
cagcactcaccactctagggtgcca

SEQ ID NO: 3870575 - DNA, 25 bp, Homo sapien
ccactctagggtgccacctgaactc

SEQ ID NO: 3870576 - DNA, 25 bp, Homo sapien
caccactctagggtgccacctgaac

SEQ ID NO: 3870577 - DNA, 25 bp, Homo sapien
cactcaccactctagggtgccacct

SEQ ID NO: 3870578 - DNA, 25 bp, Homo sapien
gcagatgggtgaaggctcgtcaaat

SEQ ID NO: 3870579 - DNA, 25 bp, Homo sapien
ggtgaaggctcgtcaaattcaaaac

SEQ ID NO: 3870580 - DNA, 25 bp, Homo sapien
gaaggctcgtcaaattcaaaacaga

SEQ ID NO: 3870581 - DNA, 25 bp, Homo sapien
gtaggcagatgggtgaaggctcgtc

SEQ ID NO: 3870582 - DNA, 25 bp, Homo sapien
cctcctaacggcacctctgggcatg

SEQ ID NO: 3870583 - DNA, 25 bp, Homo sapien
tcataattccaacctcctaacggca

SEQ ID NO: 3870584 - DNA, 25 bp, Homo sapien
ctcggatgctctgtggtgcctgttg

SEQ ID NO: 3870585 - DNA, 25 bp, Homo sapien
tctgggcatgtttctcggatgctct

SEQ ID NO: 3870586 - DNA, 25 bp, Homo sapien
cagggtacatgaaagccaggggccg

SEQ ID NO: 3870587 - DNA, 25 bp, Homo sapien
ctgcagggtacatgaaagccagggg

SEQ ID NO: 3870588 - DNA, 25 bp, Homo sapien
agggtacatgaaagccaggggccgg

SEQ ID NO: 3870589 - DNA, 25 bp, Homo sapien
agagaaagatagcaaggttcttcta

SEQ ID NO: 3870590 - DNA, 25 bp, Homo sapien
tcttctaaagttacaacaccatcgt

SEQ ID NO: 3870591 - DNA, 25 bp, Homo sapien
tctaaagttacaacaccatcgttag

SEQ ID NO: 3870592 - DNA, 25 bp, Homo sapien
aaagttacaacaccatcgttagcag

SEQ ID NO: 3870593 - DNA, 25 bp, Homo sapien
tctcagcaaaatccccagttgaacc

SEQ ID NO: 3870594 - DNA, 25 bp, Homo sapien
ctcagcaaaatccccagttgaaccc

SEQ ID NO: 3870595 - DNA, 25 bp, Homo sapien
ctctcagcaaaatccccagttgaac

SEQ ID NO: 3870596 - DNA, 25 bp, Homo sapien
tcgtggggagggtggaccttgattc

SEQ ID NO: 3870597 - DNA, 25 bp, Homo sapien
cattatcagagtcgtggggagggtg

SEQ ID NO: 3870598 - DNA, 25 bp, Homo sapien
ggagggtggaccttgattcttcctc

SEQ ID NO: 3870599 - DNA, 25 bp, Homo sapien
ttcattatcagagtcgtggggaggg

SEQ ID NO: 3870600 - DNA, 25 bp, Homo sapien
cttgcttattacaaattggctctga

SEQ ID NO: 3870601 - DNA, 25 bp, Homo sapien
gctcttgcttattacaaattggctc

SEQ ID NO: 3870602 - DNA, 25 bp, Homo sapien
ctgggtcaaactgctcttgcttatt

SEQ ID NO: 3870603 - DNA, 25 bp, Homo sapien
ttaatctgggtcaaactgctcttgc

SEQ ID NO: 3870604 - DNA, 25 bp, Homo sapien
acagcaagcaagatgcagaggagat

SEQ ID NO: 3870605 - DNA, 25 bp, Homo sapien
ggaatcaggatgtaaagggagccca

SEQ ID NO: 3870606 - DNA, 25 bp, Homo sapien
tgcaacaaatcaggccagagagggc

SEQ ID NO: 3870607 - DNA, 25 bp, Homo sapien
cagtggagcagaccctgagtgacac

SEQ ID NO: 3870608 - DNA, 25 bp, Homo sapien
gatagttgtggactatgagtctgtg

SEQ ID NO: 3870609 - DNA, 25 bp, Homo sapien
gttggcccatgagtctgggaagtgc

SEQ ID NO: 3870610 - DNA, 25 bp, Homo sapien
actaaaacccatggatagttgtgga

SEQ ID NO: 3870611 - DNA, 25 bp, Homo sapien
tgaacttcactgaggtacttcttcc

SEQ ID NO: 3870612 - DNA, 25 bp, Homo sapien
tccttccagtcgatggacttcttgt

SEQ ID NO: 3870613 - DNA, 25 bp, Homo sapien
tccagtcgatggacttcttgtcgga

SEQ ID NO: 3870614 - DNA, 25 bp, Homo sapien
cagtcgatggacttcttgtcggact

SEQ ID NO: 3870615 - DNA, 25 bp, Homo sapien
cttccagtcgatggacttcttgtcg

SEQ ID NO: 3870616 - DNA, 25 bp, Homo sapien
cagtttccacacttaacgtcagctc

SEQ ID NO: 3870617 - DNA, 25 bp, Homo sapien
agaacaacatccctcttgccaagat

SEQ ID NO: 3870618 - DNA, 25 bp, Homo sapien
gctacatcaataaggtccgctgttt

SEQ ID NO: 3870619 - DNA, 25 bp, Homo sapien
tatgcagagaacaacatccctcttg

SEQ ID NO: 3870620 - DNA, 25 bp, Homo sapien
atgactgccaggtgccgtccctgtg

SEQ ID NO: 3870621 - DNA, 25 bp, Homo sapien
tggatgactgccaggtgccgtccct

SEQ ID NO: 3870622 - DNA, 25 bp, Homo sapien
gccaggtgccgtccctgtgacagca

SEQ ID NO: 3870623 - DNA, 25 bp, Homo sapien
ctgccaggtgccgtccctgtgacag

SEQ ID NO: 3870624 - DNA, 25 bp, Homo sapien
gaaagcgtatgtgactcaataagcg

SEQ ID NO: 3870625 - DNA, 25 bp, Homo sapien
cctagaaagcgtatgtgactcaata

SEQ ID NO: 3870626 - DNA, 25 bp, Homo sapien
tgtgactcaataagcgacttacagt

SEQ ID NO: 3870627 - DNA, 25 bp, Homo sapien
cgtatgtgactcaataagcgactta

SEQ ID NO: 3870628 - DNA, 25 bp, Homo sapien
tgctccttcaatcattcccaaaaca

SEQ ID NO: 3870629 - DNA, 25 bp, Homo sapien
tccccagggcaattggatagatcca

SEQ ID NO: 3870630 - DNA, 25 bp, Homo sapien
ggcttgccagtgctttttgctctca

SEQ ID NO: 3870631 - DNA, 25 bp, Homo sapien
gatagatccagctccaagagtttcc

SEQ ID NO: 3870632 - DNA, 25 bp, Homo sapien
tacaggatgactgaaaggcggctgc

SEQ ID NO: 3870633 - DNA, 25 bp, Homo sapien
gagagggagatatagcttggaactt

SEQ ID NO: 3870634 - DNA, 25 bp, Homo sapien
tcccatatttagttggccacagctc

SEQ ID NO: 3870635 - DNA, 25 bp, Homo sapien
caaaggatacatcctggagagggct

SEQ ID NO: 3870636 - DNA, 25 bp, Homo sapien
ggctggtgtaagcagtgctgatcca

SEQ ID NO: 3870637 - DNA, 25 bp, Homo sapien
tctgaagtgtcttgattgacacctt

SEQ ID NO: 3870638 - DNA, 25 bp, Homo sapien
aagtgtcttgattgacaccttcagc

SEQ ID NO: 3870639 - DNA, 25 bp, Homo sapien
tgtcttgattgacaccttcagccat

SEQ ID NO: 3870640 - DNA, 25 bp, Homo sapien
tgaagtgtcttgattgacaccttca

SEQ ID NO: 3870641 - DNA, 25 bp, Homo sapien
cctctgaatgttccgagagtctctg

SEQ ID NO: 3870642 - DNA, 25 bp, Homo sapien
gcagagcagcgtgggcctcctgaac

SEQ ID NO: 3870643 - DNA, 25 bp, Homo sapien
gtgggcctcctgaacagcaacagtt

SEQ ID NO: 3870644 - DNA, 25 bp, Homo sapien
tgatgaggggaacctctgaatgttc

SEQ ID NO: 3870645 - DNA, 25 bp, Homo sapien
aacagtgacctgctgggagaccaga

SEQ ID NO: 3870646 - DNA, 25 bp, Homo sapien
gactccaccctatttctagaaagag

SEQ ID NO: 3870647 - DNA, 25 bp, Homo sapien
ttttgctcttccaaacagtgacctg

SEQ ID NO: 3870648 - DNA, 25 bp, Homo sapien
tccttcacggccagtgttgactcca

SEQ ID NO: 3870649 - DNA, 25 bp, Homo sapien
ttcccaaaaaaaggctcataatgac

SEQ ID NO: 3870650 - DNA, 25 bp, Homo sapien
ccaaaaaaaggctcataatgaccac

SEQ ID NO: 3870651 - DNA, 25 bp, Homo sapien
tttcccaaaaaaaggctcataatga

SEQ ID NO: 3870652 - DNA, 25 bp, Homo sapien
cccaaaaaaaggctcataatgacca

SEQ ID NO: 3870653 - DNA, 25 bp, Homo sapien
tgctgccgggggcaaaaattcctgt

SEQ ID NO: 3870654 - DNA, 25 bp, Homo sapien
gcttttcctatgatgtgccaataga

SEQ ID NO: 3870655 - DNA, 25 bp, Homo sapien
cacaccagggtcagcttttcctatg

SEQ ID NO: 3870656 - DNA, 25 bp, Homo sapien
gtcagcttttcctatgatgtgccaa

SEQ ID NO: 3870657 - DNA, 25 bp, Homo sapien
taacaagtcccgttgcacagtgcta

SEQ ID NO: 3870658 - DNA, 25 bp, Homo sapien
tcaagccttgaacaccaataagagg

SEQ ID NO: 3870659 - DNA, 25 bp, Homo sapien
gaataaagacacaggcaataggcca

SEQ ID NO: 3870660 - DNA, 25 bp, Homo sapien
gcctgggcatgttcatgtagcaaca

SEQ ID NO: 3870661 - DNA, 25 bp, Homo sapien
ctcctttgtcccgtcttgcttaaca

SEQ ID NO: 3870662 - DNA, 25 bp, Homo sapien
tgtcccgtcttgcttaacactagca

SEQ ID NO: 3870663 - DNA, 25 bp, Homo sapien
tccactcctttgtcccgtcttgctt

SEQ ID NO: 3870664 - DNA, 25 bp, Homo sapien
cgtcttgcttaacactagcaaccat

SEQ ID NO: 3870665 - DNA, 25 bp, Homo sapien
tcatatgtctaaattcaccttgtaa

SEQ ID NO: 3870666 - DNA, 25 bp, Homo sapien
tatgtctaaattcaccttgtaaaga

SEQ ID NO: 3870667 - DNA, 25 bp, Homo sapien
tgtctaaattcaccttgtaaagaga

SEQ ID NO: 3870668 - DNA, 25 bp, Homo sapien
gtctaaattcaccttgtaaagagag

SEQ ID NO: 3870669 - DNA, 25 bp, Homo sapien
ctcagtttttctctgtgctttctgt

SEQ ID NO: 3870670 - DNA, 25 bp, Homo sapien
tcagtttttctctgtgctttctgtt

SEQ ID NO: 3870671 - DNA, 25 bp, Homo sapien
cagtttttctctgtgctttctgttc

SEQ ID NO: 3870672 - DNA, 25 bp, Homo sapien
caccagcgtggcttgtgacttggaa

SEQ ID NO: 3870673 - DNA, 25 bp, Homo sapien
aattccatcactggtgcctagagac

SEQ ID NO: 3870674 - DNA, 25 bp, Homo sapien
tcagtatagtatcatgaggacctca

SEQ ID NO: 3870675 - DNA, 25 bp, Homo sapien
gcaatttaatcagtgcagcttccag

SEQ ID NO: 3870676 - DNA, 25 bp, Homo sapien
ctaacggaatgaatgtagatggaca

SEQ ID NO: 3870677 - DNA, 25 bp, Homo sapien
aggttagatgattgcacaatgttcc

SEQ ID NO: 3870678 - DNA, 25 bp, Homo sapien
cagagcagtgagtagcatcactaac

SEQ ID NO: 3870679 - DNA, 25 bp, Homo sapien
tggacaagaagacctcataggttag

SEQ ID NO: 3870680 - DNA, 25 bp, Homo sapien
taagatgataataaccatcagacat

SEQ ID NO: 3870681 - DNA, 25 bp, Homo sapien
ttaagatgataataaccatcagaca

SEQ ID NO: 3870682 - DNA, 25 bp, Homo sapien
cttaaaatgacgacttcctttgcca

SEQ ID NO: 3870683 - DNA, 25 bp, Homo sapien
gccacagcctggcttgggcacttag

SEQ ID NO: 3870684 - DNA, 25 bp, Homo sapien
aatgacgacttcctttgccacagcc

SEQ ID NO: 3870685 - DNA, 25 bp, Homo sapien
caccttaaaatgacgacttcctttg

SEQ ID NO: 3870686 - DNA, 25 bp, Homo sapien
ctggcctctttttacagtgtgtgct

SEQ ID NO: 3870687 - DNA, 25 bp, Homo sapien
gggctgtgttccgttcaatgcatac

SEQ ID NO: 3870688 - DNA, 25 bp, Homo sapien
gtttatgattaatgaatgactcacc

SEQ ID NO: 3870689 - DNA, 25 bp, Homo sapien
cagtgtgtgcttatgtgtccttgat

SEQ ID NO: 3870690 - DNA, 25 bp, Homo sapien
ggttcatgacggaaacccaggaatc

SEQ ID NO: 3870691 - DNA, 25 bp, Homo sapien
tcaccactacttggataagagtcat

SEQ ID NO: 3870692 - DNA, 25 bp, Homo sapien
gcagcttttcaccactacttggata

SEQ ID NO: 3870693 - DNA, 25 bp, Homo sapien
caggcaagctgggttcatgacggaa

SEQ ID NO: 3870694 - DNA, 25 bp, Homo sapien
atgctcagtaattattgtgaactca

SEQ ID NO: 3870695 - DNA, 25 bp, Homo sapien
ttgggcgaacccctcatgctcagta

SEQ ID NO: 3870696 - DNA, 25 bp, Homo sapien
gttctgctctgccttaataggagat

SEQ ID NO: 3870697 - DNA, 25 bp, Homo sapien
taatgggaggtttctcacgtgcacg

SEQ ID NO: 3870698 - DNA, 25 bp, Homo sapien
gctgcatctgtaacccagaaaggct

SEQ ID NO: 3870699 - DNA, 25 bp, Homo sapien
acacccgttgggctgattctgactt

SEQ ID NO: 3870700 - DNA, 25 bp, Homo sapien
tctgctgtcaaaggcgagtttcgca

SEQ ID NO: 3870701 - DNA, 25 bp, Homo sapien
taagcatcccgtatgcaaggtgatg

SEQ ID NO: 3870702 - DNA, 25 bp, Homo sapien
gattccaaatgagttacacccgttg

SEQ ID NO: 3870703 - DNA, 25 bp, Homo sapien
ggagtcactgcaaccccagacatgt

SEQ ID NO: 3870704 - DNA, 25 bp, Homo sapien
tatttttaggttctgtcttgaagac

SEQ ID NO: 3870705 - DNA, 25 bp, Homo sapien
gacacggaaactttcatacatttca

SEQ ID NO: 3870706 - DNA, 25 bp, Homo sapien
tcagcttctttgtctggagtcactg

SEQ ID NO: 3870707 - DNA, 25 bp, Homo sapien
cacacaggctggtaactggcttcag

SEQ ID NO: 3870708 - DNA, 25 bp, Homo sapien
tgtagtcacacatcacgtgatcaca

SEQ ID NO: 3870709 - DNA, 25 bp, Homo sapien
gagacacgatcgtttatcacaggcc

SEQ ID NO: 3870710 - DNA, 25 bp, Homo sapien
aaactcctgtgggtcaagagacacg

SEQ ID NO: 3870711 - DNA, 25 bp, Homo sapien
actgagacactccacaagcaaagag

SEQ ID NO: 3870712 - DNA, 25 bp, Homo sapien
gaaatgaactcatccgggagagaac

SEQ ID NO: 3870713 - DNA, 25 bp, Homo sapien
ggagagaactcgagtcccctgcttg

SEQ ID NO: 3870714 - DNA, 25 bp, Homo sapien
gcatccgatgaaacacagtgactat

SEQ ID NO: 3870715 - DNA, 25 bp, Homo sapien
acaatctgctcgataaaacaaaatg

SEQ ID NO: 3870716 - DNA, 25 bp, Homo sapien
aactcttttcacaatctgctcgata

SEQ ID NO: 3870717 - DNA, 25 bp, Homo sapien
tctgctcgataaaacaaaatgaacc

SEQ ID NO: 3870718 - DNA, 25 bp, Homo sapien
aaaactcttttcacaatctgctcga

SEQ ID NO: 3870719 - DNA, 25 bp, Homo sapien
tacaattatgcagacccggctcctt

SEQ ID NO: 3870720 - DNA, 25 bp, Homo sapien
tgatacaattatgcagacccggctc

SEQ ID NO: 3870721 - DNA, 25 bp, Homo sapien
cccggctccttgtgtgaacaaccat

SEQ ID NO: 3870722 - DNA, 25 bp, Homo sapien
acccggctccttgtgtgaacaacca

SEQ ID NO: 3870723 - DNA, 25 bp, Homo sapien
ctgtctgtccaagattccacaatgc

SEQ ID NO: 3870724 - DNA, 25 bp, Homo sapien
cagtttgactgtctgtccaagattc

SEQ ID NO: 3870725 - DNA, 25 bp, Homo sapien
gaattctcccagagattattcctgt

SEQ ID NO: 3870726 - DNA, 25 bp, Homo sapien
ttagacaccacttaatggcacctcc

SEQ ID NO: 3870727 - DNA, 25 bp, Homo sapien
gacactggaagcaccttgggtgtcc

SEQ ID NO: 3870728 - DNA, 25 bp, Homo sapien
taaagacaaggaacatgggctacat

SEQ ID NO: 3870729 - DNA, 25 bp, Homo sapien
tgtagcagcgaagaggtagcatcat

SEQ ID NO: 3870730 - DNA, 25 bp, Homo sapien
gataactgcaaattcacgtctccgt

SEQ ID NO: 3870731 - DNA, 25 bp, Homo sapien
gctcgcaagaggatgccagaagagt

SEQ ID NO: 3870732 - DNA, 25 bp, Homo sapien
gaaaaaggctggctcgcaagaggat

SEQ ID NO: 3870733 - DNA, 25 bp, Homo sapien
aaggctggctcgcaagaggatgcca

SEQ ID NO: 3870734 - DNA, 25 bp, Homo sapien
tcagattctccggagaaaaaggctg

SEQ ID NO: 3870735 - DNA, 25 bp, Homo sapien
gggtaagcattgcactttgggccca

SEQ ID NO: 3870736 - DNA, 25 bp, Homo sapien
catggaaggtatttggcagctaaag

SEQ ID NO: 3870737 - DNA, 25 bp, Homo sapien
acagtttctataattgggtaagcat

SEQ ID NO: 3870738 - DNA, 25 bp, Homo sapien
ggcagctgagctaacattgcacctg

SEQ ID NO: 3870739 - DNA, 25 bp, Homo sapien
ttgaggcagaaagaatcgccttttg

SEQ ID NO: 3870740 - DNA, 25 bp, Homo sapien
gatacgttccacaattggaatgcaa

SEQ ID NO: 3870741 - DNA, 25 bp, Homo sapien
gtttagcttgtgcataaaatggcaa

SEQ ID NO: 3870742 - DNA, 25 bp, Homo sapien
tcttgactgtaatctgtttagcttg

SEQ ID NO: 3870743 - DNA, 25 bp, Homo sapien
tgaattggagataaaaggtatggtc

SEQ ID NO: 3870744 - DNA, 25 bp, Homo sapien
ccgaaactccaggtggcagaatcac

SEQ ID NO: 3870745 - DNA, 25 bp, Homo sapien
cacagtttcatataaattaggcggg

SEQ ID NO: 3870746 - DNA, 25 bp, Homo sapien
agacacgtctcacagagcagacccg

SEQ ID NO: 3870747 - DNA, 25 bp, Homo sapien
agacccgaaactccaggtggcagaa

SEQ ID NO: 3870748 - DNA, 25 bp, Homo sapien
gcatcttttgacaattccgcaaagg

SEQ ID NO: 3870749 - DNA, 25 bp, Homo sapien
gctttttccaactctccacaagcat

SEQ ID NO: 3870750 - DNA, 25 bp, Homo sapien
agttcttcagtgaggggcataaagc

SEQ ID NO: 3870751 - DNA, 25 bp, Homo sapien
caattccgcaaaggcagttcttcag

SEQ ID NO: 3870752 - DNA, 25 bp, Homo sapien
tgccggttctcttacatcctgaatg

SEQ ID NO: 3870753 - DNA, 25 bp, Homo sapien
ttgatgccggttctcttacatcctg

SEQ ID NO: 3870754 - DNA, 25 bp, Homo sapien
tgggctttgatgccggttctcttac

SEQ ID NO: 3870755 - DNA, 25 bp, Homo sapien
tcttacatcctgaatgcatgaaagg

SEQ ID NO: 3870756 - DNA, 25 bp, Homo sapien
ttatgagtcaatgatcagacaggaa

SEQ ID NO: 3870757 - DNA, 25 bp, Homo sapien
tcagacaggaaaagggcacgcttac

SEQ ID NO: 3870758 - DNA, 25 bp, Homo sapien
atgagtcaatgatcagacaggaaaa

SEQ ID NO: 3870759 - DNA, 25 bp, Homo sapien
tgatcagacaggaaaagggcacgct

SEQ ID NO: 3870760 - DNA, 25 bp, Homo sapien
ggacaaaaatggaggtgtccactaa

SEQ ID NO: 3870761 - DNA, 25 bp, Homo sapien
tggaggtgtccactaaacgtgatgg

SEQ ID NO: 3870762 - DNA, 25 bp, Homo sapien
tccactaaacgtgatggattaggct

SEQ ID NO: 3870763 - DNA, 25 bp, Homo sapien
cgtgatggattaggcttataaacag

SEQ ID NO: 3870764 - DNA, 25 bp, Homo sapien
gcttgagctgttctgagcagatttc

SEQ ID NO: 3870765 - DNA, 25 bp, Homo sapien
tctgttccttgtaagcaaagagcct

SEQ ID NO: 3870766 - DNA, 25 bp, Homo sapien
tgggagatatccttgcatcctttca

SEQ ID NO: 3870767 - DNA, 25 bp, Homo sapien
gacttgcccagtcctgattcccatt

SEQ ID NO: 3870768 - DNA, 25 bp, Homo sapien
ccagttttctctcctatggcaaggg

SEQ ID NO: 3870769 - DNA, 25 bp, Homo sapien
tcaacccgttattctaatctctcca

SEQ ID NO: 3870770 - DNA, 25 bp, Homo sapien
ctatggcaagggcagcttgcctgag

SEQ ID NO: 3870771 - DNA, 25 bp, Homo sapien
tctggcatgcatccgagaagaatag

SEQ ID NO: 3870772 - DNA, 25 bp, Homo sapien
agttctactgcataaaaatgtgtcc

SEQ ID NO: 3870773 - DNA, 25 bp, Homo sapien
ggaattcccaagtgccttgagttct

SEQ ID NO: 3870774 - DNA, 25 bp, Homo sapien
gcttggacccattgctttaattgct

SEQ ID NO: 3870775 - DNA, 25 bp, Homo sapien
gaggtgccatattgcaccacacagc

SEQ ID NO: 3870776 - DNA, 25 bp, Homo sapien
ctgacagcctcggtcagtaatttct

SEQ ID NO: 3870777 - DNA, 25 bp, Homo sapien
gcctcggtcagtaatttctctgaag

SEQ ID NO: 3870778 - DNA, 25 bp, Homo sapien
gtgtggagaggtgccatattgcacc

SEQ ID NO: 3870779 - DNA, 25 bp, Homo sapien
tttggattcttgatctatgggcaaa

SEQ ID NO: 3870780 - DNA, 25 bp, Homo sapien
gggcaaaatcaaggaatgatattcc

SEQ ID NO: 3870781 - DNA, 25 bp, Homo sapien
tgggcaaaatcaaggaatgatattc

SEQ ID NO: 3870782 - DNA, 25 bp, Homo sapien
gattcttgatctatgggcaaaatca

SEQ ID NO: 3870783 - DNA, 25 bp, Homo sapien
ctgctggttctgagcagcacacagt

SEQ ID NO: 3870784 - DNA, 25 bp, Homo sapien
gctctgctggttctgagcagcacac

SEQ ID NO: 3870785 - DNA, 25 bp, Homo sapien
tggttctgagcagcacacagtgcat

SEQ ID NO: 3870786 - DNA, 25 bp, Homo sapien
ctggttctgagcagcacacagtgca

SEQ ID NO: 3870787 - DNA, 25 bp, Homo sapien
ctctcagccaggaaatatctgcggc

SEQ ID NO: 3870788 - DNA, 25 bp, Homo sapien
caggaaatatctgcggccaccatta

SEQ ID NO: 3870789 - DNA, 25 bp, Homo sapien
tatctgcggccaccattaaacagga

SEQ ID NO: 3870790 - DNA, 25 bp, Homo sapien
caccattaaacaggatatggcccat

SEQ ID NO: 3870791 - DNA, 25 bp, Homo sapien
ccctacaccagtggttccacttaag

SEQ ID NO: 3870792 - DNA, 25 bp, Homo sapien
actacctgatgcatagttatctttc

SEQ ID NO: 3870793 - DNA, 25 bp, Homo sapien
ctacctgatgcatagttatctttcc

SEQ ID NO: 3870794 - DNA, 25 bp, Homo sapien
tggtaaccctacaccagtggttcca

SEQ ID NO: 3870795 - DNA, 25 bp, Homo sapien
ccggtgtaggcgtcattaacaatgc

SEQ ID NO: 3870796 - DNA, 25 bp, Homo sapien
tttccggtgtaggcgtcattaacaa

SEQ ID NO: 3870797 - DNA, 25 bp, Homo sapien
ggtgtaggcgtcattaacaatgctc

SEQ ID NO: 3870798 - DNA, 25 bp, Homo sapien
tccggtgtaggcgtcattaacaatg

SEQ ID NO: 3870799 - DNA, 25 bp, Homo sapien
tgttaaactgtaataccgccaacag

SEQ ID NO: 3870800 - DNA, 25 bp, Homo sapien
ctgtaataccgccaacagttcggtg

SEQ ID NO: 3870801 - DNA, 25 bp, Homo sapien
ccgccaacagttcggtgtcaagcct

SEQ ID NO: 3870802 - DNA, 25 bp, Homo sapien
caagtgttaaactgtaataccgcca

SEQ ID NO: 3870803 - DNA, 25 bp, Homo sapien
gcgcagtgacaagatggtccagatg

SEQ ID NO: 3870804 - DNA, 25 bp, Homo sapien
cagtgacaagatggtccagatgcaa

SEQ ID NO: 3870805 - DNA, 25 bp, Homo sapien
gcttggcgcagtgacaagatggtcc

SEQ ID NO: 3870806 - DNA, 25 bp, Homo sapien
cttggcgcagtgacaagatggtcca

SEQ ID NO: 3870807 - DNA, 25 bp, Homo sapien
gaagaacagggccatagaacaggcc

SEQ ID NO: 3870808 - DNA, 25 bp, Homo sapien
gaggaagaacagggccatagaacag

SEQ ID NO: 3870809 - DNA, 25 bp, Homo sapien
ctgcagggaacaggaggaagaacag

SEQ ID NO: 3870810 - DNA, 25 bp, Homo sapien
agaacagggccatagaacaggccat

SEQ ID NO: 3870811 - DNA, 25 bp, Homo sapien
cactgtgagattagatccaacttcg

SEQ ID NO: 3870812 - DNA, 25 bp, Homo sapien
tgagacagggcacttgctgagtctg

SEQ ID NO: 3870813 - DNA, 25 bp, Homo sapien
ttagatccaacttcgctgagaagct

SEQ ID NO: 3870814 - DNA, 25 bp, Homo sapien
cacttgctgagtctggcagaggtga

SEQ ID NO: 3870815 - DNA, 25 bp, Homo sapien
tatttgttgaaagggattgggtgaa

SEQ ID NO: 3870816 - DNA, 25 bp, Homo sapien
aatgtcattcctatggcaacagaca

SEQ ID NO: 3870817 - DNA, 25 bp, Homo sapien
cagacatcgccctggaaatcatttt

SEQ ID NO: 3870818 - DNA, 25 bp, Homo sapien
cagagtgtgaatatggcttagttac

SEQ ID NO: 3870819 - DNA, 25 bp, Homo sapien
gtctgtctcacttgaagactttgtg

SEQ ID NO: 3870820 - DNA, 25 bp, Homo sapien
tcagtctgtctcacttgaagacttt

SEQ ID NO: 3870821 - DNA, 25 bp, Homo sapien
cagtctgtctcacttgaagactttg

SEQ ID NO: 3870822 - DNA, 25 bp, Homo sapien
ctgtctcacttgaagactttgtggt

SEQ ID NO: 3870823 - DNA, 25 bp, Homo sapien
cttgtcccagtcaaaaggatgacaa

SEQ ID NO: 3870824 - DNA, 25 bp, Homo sapien
tctgccctttacttgtcccagtcaa

SEQ ID NO: 3870825 - DNA, 25 bp, Homo sapien
actttaacgatgcttcttcggcggc

SEQ ID NO: 3870826 - DNA, 25 bp, Homo sapien
gggtgaagagagactttaacgatgc

SEQ ID NO: 3870827 - DNA, 25 bp, Homo sapien
cggcagggtgaagagagactttaac

SEQ ID NO: 3870828 - DNA, 25 bp, Homo sapien
gagactttaacgatgcttcttcggc

SEQ ID NO: 3870829 - DNA, 25 bp, Homo sapien
ctggagcgcttcgtgtttggatctc

SEQ ID NO: 3870830 - DNA, 25 bp, Homo sapien
gcccctggagcgcttcgtgtttgga

SEQ ID NO: 3870831 - DNA, 25 bp, Homo sapien
caaagcccctggagcgcttcgtgtt

SEQ ID NO: 3870832 - DNA, 25 bp, Homo sapien
cctggagcgcttcgtgtttggatct

SEQ ID NO: 3870833 - DNA, 25 bp, Homo sapien
tgttcaaaataatctcttaggtgat

SEQ ID NO: 3870834 - DNA, 25 bp, Homo sapien
gttcaaaataatctcttaggtgatg

SEQ ID NO: 3870835 - DNA, 25 bp, Homo sapien
tctcttaggtgatgttcttcagtgt

SEQ ID NO: 3870836 - DNA, 25 bp, Homo sapien
cttaggtgatgttcttcagtgtctt

SEQ ID NO: 3870837 - DNA, 25 bp, Homo sapien
ttcaatcacttcaatttttccatac

SEQ ID NO: 3870838 - DNA, 25 bp, Homo sapien
ctgtcagtcatgatttcaatcactt

SEQ ID NO: 3870839 - DNA, 25 bp, Homo sapien
gatttcaatcacttcaatttttcca

SEQ ID NO: 3870840 - DNA, 25 bp, Homo sapien
tgatttcaatcacttcaatttttcc

SEQ ID NO: 3870841 - DNA, 25 bp, Homo sapien
atcttatccacggagtcatggtcgt

SEQ ID NO: 3870842 - DNA, 25 bp, Homo sapien
tgacaatcttatccacggagtcatg

SEQ ID NO: 3870843 - DNA, 25 bp, Homo sapien
gacaatcttatccacggagtcatgg

SEQ ID NO: 3870844 - DNA, 25 bp, Homo sapien
caatcttatccacggagtcatggtc

SEQ ID NO: 3870845 - DNA, 25 bp, Homo sapien
tggatgaagcactagccatctcttg

SEQ ID NO: 3870846 - DNA, 25 bp, Homo sapien
atctcttgctttgacagggcttttc

SEQ ID NO: 3870847 - DNA, 25 bp, Homo sapien
cttgctttgacagggcttttctaac

SEQ ID NO: 3870848 - DNA, 25 bp, Homo sapien
ctcttgctttgacagggcttttcta

SEQ ID NO: 3870849 - DNA, 25 bp, Homo sapien
gaagttgtcattcccaccgaaacca

SEQ ID NO: 3870850 - DNA, 25 bp, Homo sapien
acgaccgaagttgtcattcccaccg

SEQ ID NO: 3870851 - DNA, 25 bp, Homo sapien
ccacgaccgaagttgtcattcccac

SEQ ID NO: 3870852 - DNA, 25 bp, Homo sapien
cgaccgaagttgtcattcccaccga

SEQ ID NO: 3870853 - DNA, 25 bp, Homo sapien
ccaccaccacggctgccaccaaagc

SEQ ID NO: 3870854 - DNA, 25 bp, Homo sapien
aaagccaccacgaccactgaagttt

SEQ ID NO: 3870855 - DNA, 25 bp, Homo sapien
aagccaccacgaccactgaagtttc

SEQ ID NO: 3870856 - DNA, 25 bp, Homo sapien
catatccaccaccaccacggctgcc

SEQ ID NO: 3870857 - DNA, 25 bp, Homo sapien
ctgattgttgtaattgccaaaatca

SEQ ID NO: 3870858 - DNA, 25 bp, Homo sapien
gttgtaattgccaaaatcattgtag

SEQ ID NO: 3870859 - DNA, 25 bp, Homo sapien
ttgttgtaattgccaaaatcattgt

SEQ ID NO: 3870860 - DNA, 25 bp, Homo sapien
gattgttgtaattgccaaaatcatt

SEQ ID NO: 3870861 - DNA, 25 bp, Homo sapien
gccttcaaaatttcctcccttcatg

SEQ ID NO: 3870862 - DNA, 25 bp, Homo sapien
agcttctgccttcaaaatttcctcc

SEQ ID NO: 3870863 - DNA, 25 bp, Homo sapien
cgccatgggggccagagcttctgcc

SEQ ID NO: 3870864 - DNA, 25 bp, Homo sapien
tctgccttcaaaatttcctcccttc

SEQ ID NO: 3870865 - DNA, 25 bp, Homo sapien
tgctggaaccgccatagccaccttg

SEQ ID NO: 3870866 - DNA, 25 bp, Homo sapien
gccaccttggtttcgtggttttgca

SEQ ID NO: 3870867 - DNA, 25 bp, Homo sapien
tgctgctgctggaaccgccatagcc

SEQ ID NO: 3870868 - DNA, 25 bp, Homo sapien
gctgctggaaccgccatagccacct

SEQ ID NO: 3870869 - DNA, 25 bp, Homo sapien
ttagcaatcaacagcatggggtgca

SEQ ID NO: 3870870 - DNA, 25 bp, Homo sapien
gtcctcgagttttttgcctatacac

SEQ ID NO: 3870871 - DNA, 25 bp, Homo sapien
cattaaaaccctttgttggaatgct

SEQ ID NO: 3870872 - DNA, 25 bp, Homo sapien
ttggaatgctttacactttccacag

SEQ ID NO: 3870873 - DNA, 25 bp, Homo sapien
aaaaaaagacatttatccagcgtca

SEQ ID NO: 3870874 - DNA, 25 bp, Homo sapien
aaaaaagacatttatccagcgtcac

SEQ ID NO: 3870875 - DNA, 25 bp, Homo sapien
agtaagagcttttatggttgtatat

SEQ ID NO: 3870876 - DNA, 25 bp, Homo sapien
tgtatattctgttgggtgtttttcc

SEQ ID NO: 3870877 - DNA, 25 bp, Homo sapien
gagcttttatggttgtatattctgt

SEQ ID NO: 3870878 - DNA, 25 bp, Homo sapien
aacagcccctcctgacaacacctgg

SEQ ID NO: 3870879 - DNA, 25 bp, Homo sapien
cagagcttcgaacattgagttgtaa

SEQ ID NO: 3870880 - DNA, 25 bp, Homo sapien
cattgagttgtaaaggcccagtcgc

SEQ ID NO: 3870881 - DNA, 25 bp, Homo sapien
ttgtaaaggcccagtcgctgtgagg

SEQ ID NO: 3870882 - DNA, 25 bp, Homo sapien
ttcgaacattgagttgtaaaggccc

SEQ ID NO: 3870883 - DNA, 25 bp, Homo sapien
agttgggctgccgtctcttgccaga

SEQ ID NO: 3870884 - DNA, 25 bp, Homo sapien
gcatcctgatccacgcagcgaagga

SEQ ID NO: 3870885 - DNA, 25 bp, Homo sapien
tgccagagggaaattatggaccctt

SEQ ID NO: 3870886 - DNA, 25 bp, Homo sapien
cattgttccagctgagagcacgcta

SEQ ID NO: 3870887 - DNA, 25 bp, Homo sapien
tctggtttgcgctgataatgctgct

SEQ ID NO: 3870888 - DNA, 25 bp, Homo sapien
gcgctgataatgctgctctccttcc

SEQ ID NO: 3870889 - DNA, 25 bp, Homo sapien
cccgctcctctggtttgcgctgata

SEQ ID NO: 3870890 - DNA, 25 bp, Homo sapien
ttccagctcagcagccaaacccacc

SEQ ID NO: 3870891 - DNA, 25 bp, Homo sapien
cagagtagaaatggctctggcccct

SEQ ID NO: 3870892 - DNA, 25 bp, Homo sapien
gaggaaggtggaggggcgcaccagc

SEQ ID NO: 3870893 - DNA, 25 bp, Homo sapien
gtggaggggcgcaccagccccagga

SEQ ID NO: 3870894 - DNA, 25 bp, Homo sapien
tcagagtagaaatggctctggcccc

SEQ ID NO: 3870895 - DNA, 25 bp, Homo sapien
cagagataaattggtgacactgatt

SEQ ID NO: 3870896 - DNA, 25 bp, Homo sapien
gatttcacagtgcattgtggatgtt

SEQ ID NO: 3870897 - DNA, 25 bp, Homo sapien
tcaatggatttcacagtgcattgtg

SEQ ID NO: 3870898 - DNA, 25 bp, Homo sapien
cctggaggtcagagataaattggtg

SEQ ID NO: 3870899 - DNA, 25 bp, Homo sapien
tggtgccagaggtctccaagcagtg

SEQ ID NO: 3870900 - DNA, 25 bp, Homo sapien
taccttcagtgagagtgagtaacca

SEQ ID NO: 3870901 - DNA, 25 bp, Homo sapien
gtatccctgatcattgccatgtggg

SEQ ID NO: 3870902 - DNA, 25 bp, Homo sapien
gaagtaatccaagacaaagtcagtg

SEQ ID NO: 3870903 - DNA, 25 bp, Homo sapien
ccaacgtgtactttcggctctgtca

SEQ ID NO: 3870904 - DNA, 25 bp, Homo sapien
tgtactttcggctctgtcaacaggg

SEQ ID NO: 3870905 - DNA, 25 bp, Homo sapien
gctcagcaaagccaacgtgtacttt

SEQ ID NO: 3870906 - DNA, 25 bp, Homo sapien
gcaaagccaacgtgtactttcggct

SEQ ID NO: 3870907 - DNA, 25 bp, Homo sapien
ctggtctggccagtaaaaacctccg

SEQ ID NO: 3870908 - DNA, 25 bp, Homo sapien
tcttcctgtgttttgccgatgcaca

SEQ ID NO: 3870909 - DNA, 25 bp, Homo sapien
cctccgatcaggctacacgaaaaaa

SEQ ID NO: 3870910 - DNA, 25 bp, Homo sapien
gatgcacagtatgttgtgtgggtaa

SEQ ID NO: 3870911 - DNA, 25 bp, Homo sapien
ctacgctcaagcagccctgtcatca

SEQ ID NO: 3870912 - DNA, 25 bp, Homo sapien
tcattatccgcacacaccttttctt

SEQ ID NO: 3870913 - DNA, 25 bp, Homo sapien
cctacgctcaagcagccctgtcatc

SEQ ID NO: 3870914 - DNA, 25 bp, Homo sapien
gccctgtcatcattatccgcacaca

SEQ ID NO: 3870915 - DNA, 25 bp, Homo sapien
cagagtggaccaggtagagtgttcc

SEQ ID NO: 3870916 - DNA, 25 bp, Homo sapien
caggagacagcgtaaatggtggcac

SEQ ID NO: 3870917 - DNA, 25 bp, Homo sapien
cagagaagtgggactagatctgagt

SEQ ID NO: 3870918 - DNA, 25 bp, Homo sapien
cgaggtctagaattgtcagggaaca

SEQ ID NO: 3870919 - DNA, 25 bp, Homo sapien
cacagaacaggcagagtccattttc

SEQ ID NO: 3870920 - DNA, 25 bp, Homo sapien
aacaggcagagtccattttccagct

SEQ ID NO: 3870921 - DNA, 25 bp, Homo sapien
cagaacaggcagagtccattttcca

SEQ ID NO: 3870922 - DNA, 25 bp, Homo sapien
ctggcacagaacaggcagagtccat

SEQ ID NO: 3870923 - DNA, 25 bp, Homo sapien
agggcagcaaccacagtggttccag

SEQ ID NO: 3870924 - DNA, 25 bp, Homo sapien
tggttccagaccataggcgggtaga

SEQ ID NO: 3870925 - DNA, 25 bp, Homo sapien
ggtgcggtacagcatagaccgaagc

SEQ ID NO: 3870926 - DNA, 25 bp, Homo sapien
cctttgtcaaagcccggctcttctg

SEQ ID NO: 3870927 - DNA, 25 bp, Homo sapien
cctggaactttcacagagagcctgt

SEQ ID NO: 3870928 - DNA, 25 bp, Homo sapien
taacatggcaaatggttaggcagat

SEQ ID NO: 3870929 - DNA, 25 bp, Homo sapien
cagcactgttgatgtcgccttaatt

SEQ ID NO: 3870930 - DNA, 25 bp, Homo sapien
taaactctgtaggaggtaaacctgc

SEQ ID NO: 3870931 - DNA, 25 bp, Homo sapien
tcttgcagtcaaatgtactttgctg

SEQ ID NO: 3870932 - DNA, 25 bp, Homo sapien
gtccagggtcttgcagtcaaatgta

SEQ ID NO: 3870933 - DNA, 25 bp, Homo sapien
ggagcccttgtaaaggtgttgacaa

SEQ ID NO: 3870934 - DNA, 25 bp, Homo sapien
tgtgacattgattgaggagcccttg

SEQ ID NO: 3870935 - DNA, 25 bp, Homo sapien
gagaccaagccatcaaaatgtgcca

SEQ ID NO: 3870936 - DNA, 25 bp, Homo sapien
cacattcttgacacgagctggtaat

SEQ ID NO: 3870937 - DNA, 25 bp, Homo sapien
ggtaatgtacacaccgagaccaagc

SEQ ID NO: 3870938 - DNA, 25 bp, Homo sapien
cttgacacgagctggtaatgtacac

SEQ ID NO: 3870939 - DNA, 25 bp, Homo sapien
tccagccctcgtcttttgggcgagc

SEQ ID NO: 3870940 - DNA, 25 bp, Homo sapien
gagtcaggacagaaagaaccacaat

SEQ ID NO: 3870941 - DNA, 25 bp, Homo sapien
gaaaatccactgtgcgtctcctgag

SEQ ID NO: 3870942 - DNA, 25 bp, Homo sapien
ttttcgatataaagcacaagtggtc

SEQ ID NO: 3870943 - DNA, 25 bp, Homo sapien
ggtcctgccaatgcgtgctggaatt

SEQ ID NO: 3870944 - DNA, 25 bp, Homo sapien
aggtcctgccaatgcgtgctggaat

SEQ ID NO: 3870945 - DNA, 25 bp, Homo sapien
ctgccaatgcgtgctggaattgcgg

SEQ ID NO: 3870946 - DNA, 25 bp, Homo sapien
aatgcgtgctggaattgcggtctca

SEQ ID NO: 3870947 - DNA, 25 bp, Homo sapien
tccttaacattctctccggagagtt

SEQ ID NO: 3870948 - DNA, 25 bp, Homo sapien
ttctctccggagagttgggcaggtc

SEQ ID NO: 3870949 - DNA, 25 bp, Homo sapien
aaggcactttctgatggatgcatct

SEQ ID NO: 3870950 - DNA, 25 bp, Homo sapien
tccttccttaacattctctccggag

SEQ ID NO: 3870951 - DNA, 25 bp, Homo sapien
tgccaatgctccctggtgccaatgc

SEQ ID NO: 3870952 - DNA, 25 bp, Homo sapien
tcctacttcatgtgcctgagcttta

SEQ ID NO: 3870953 - DNA, 25 bp, Homo sapien
catgtgcctgagctttagaaagagc

SEQ ID NO: 3870954 - DNA, 25 bp, Homo sapien
gggaacagtgcctgatgccaatgct

SEQ ID NO: 3870955 - DNA, 25 bp, Homo sapien
tcctgtgttcctgccaacaagcctg

SEQ ID NO: 3870956 - DNA, 25 bp, Homo sapien
cctgtgttcctgccaacaagcctga

SEQ ID NO: 3870957 - DNA, 25 bp, Homo sapien
ttcctgtgttcctgccaacaagcct

SEQ ID NO: 3870958 - DNA, 25 bp, Homo sapien
aaggctgttaatgcccctgtcctca

SEQ ID NO: 3870959 - DNA, 25 bp, Homo sapien
caccctggtggtgaacaccctcaaa

SEQ ID NO: 3870960 - DNA, 25 bp, Homo sapien
aattggtgattgaagaccttgaagg

SEQ ID NO: 3870961 - DNA, 25 bp, Homo sapien
tttacaaaggctgttaatgcccctg

SEQ ID NO: 3870962 - DNA, 25 bp, Homo sapien
aatttctaaagtaccccatagtgct

SEQ ID NO: 3870963 - DNA, 25 bp, Homo sapien
cccatagtgcttggtttttcaagag

SEQ ID NO: 3870964 - DNA, 25 bp, Homo sapien
caagagtcctagcatctctagggat

SEQ ID NO: 3870965 - DNA, 25 bp, Homo sapien
tctagggatgatgctacatatttcc

SEQ ID NO: 3870966 - DNA, 25 bp, Homo sapien
tggttctacggacacagttgcaatt

SEQ ID NO: 3870967 - DNA, 25 bp, Homo sapien
tttgcatctcggcatggactccact

SEQ ID NO: 3870968 - DNA, 25 bp, Homo sapien
taaaagagctgatttggttctacgg

SEQ ID NO: 3870969 - DNA, 25 bp, Homo sapien
tcataaataaccctatgggcagctt

SEQ ID NO: 3870970 - DNA, 25 bp, Homo sapien
tgcttttggtcaaatttacggagaa

SEQ ID NO: 3870971 - DNA, 25 bp, Homo sapien
tgtaaaattgtcagtaggtatctga

SEQ ID NO: 3870972 - DNA, 25 bp, Homo sapien
aatgaatataatgcaaaaagattgt

SEQ ID NO: 3870973 - DNA, 25 bp, Homo sapien
ccacttccaagtgaactaggttcat

SEQ ID NO: 3870974 - DNA, 25 bp, Homo sapien
ggtctccttgaaaatacccatacag

SEQ ID NO: 3870975 - DNA, 25 bp, Homo sapien
cttaagtaatcagcagtgacactgt

SEQ ID NO: 3870976 - DNA, 25 bp, Homo sapien
gaccacttgtaagagatgattccaa

SEQ ID NO: 3870977 - DNA, 25 bp, Homo sapien
ccagtagtaaccatgtcatcatcca

SEQ ID NO: 3870978 - DNA, 25 bp, Homo sapien
gttggtcttaaagacgaatgttcga

SEQ ID NO: 3870979 - DNA, 25 bp, Homo sapien
tggtcttaaagacgaatgttcgata

SEQ ID NO: 3870980 - DNA, 25 bp, Homo sapien
tcagttggtcttaaagacgaatgtt

SEQ ID NO: 3870981 - DNA, 25 bp, Homo sapien
ggtcttaaagacgaatgttcgatac

SEQ ID NO: 3870982 - DNA, 25 bp, Homo sapien
ctgtctccttagtgactgcgacacc

SEQ ID NO: 3870983 - DNA, 25 bp, Homo sapien
gtgactgcgacacccacatcaaaca

SEQ ID NO: 3870984 - DNA, 25 bp, Homo sapien
tccttagtgactgcgacacccacat

SEQ ID NO: 3870985 - DNA, 25 bp, Homo sapien
tagtgactgcgacacccacatcaaa

SEQ ID NO: 3870986 - DNA, 25 bp, Homo sapien
ctggcttggctgtctcatactatta

SEQ ID NO: 3870987 - DNA, 25 bp, Homo sapien
tgaggtttatgatcctatctgtgtc

SEQ ID NO: 3870988 - DNA, 25 bp, Homo sapien
tggttggaatgataggaaaagtctc

SEQ ID NO: 3870989 - DNA, 25 bp, Homo sapien
gatccttttactatcctggcttggc

SEQ ID NO: 3870990 - DNA, 25 bp, Homo sapien
catgctggcagggattctgtcctcc

SEQ ID NO: 3870991 - DNA, 25 bp, Homo sapien
aggtctggacctatctgcacccaga

SEQ ID NO: 3870992 - DNA, 25 bp, Homo sapien
tgcacccagacattttggagtgggt

SEQ ID NO: 3870993 - DNA, 25 bp, Homo sapien
taattactggggagataagccatgc

SEQ ID NO: 3870994 - DNA, 25 bp, Homo sapien
ctttaaagctgaaaacctgtgccct

SEQ ID NO: 3870995 - DNA, 25 bp, Homo sapien
ttaaagctgaaaacctgtgcccttg

SEQ ID NO: 3870996 - DNA, 25 bp, Homo sapien
aaacctgtgcccttggcaagacgtt

SEQ ID NO: 3870997 - DNA, 25 bp, Homo sapien
tgaaaacctgtgcccttggcaagac

SEQ ID NO: 3870998 - DNA, 25 bp, Homo sapien
aacaaaacgccaggcatgtccatca

SEQ ID NO: 3870999 - DNA, 25 bp, Homo sapien
tcagtccagtaatgatgcctgatac

SEQ ID NO: 3871000 - DNA, 25 bp, Homo sapien
cctgatacagtgttcacaggatcat

SEQ ID NO: 3871001 - DNA, 25 bp, Homo sapien
aaaacgccaggcatgtccatcaagt

SEQ ID NO: 3871002 - DNA, 25 bp, Homo sapien
tacatcaatgattttaccatcgctt

SEQ ID NO: 3871003 - DNA, 25 bp, Homo sapien
aaactaatcttctaaggccagagaa

SEQ ID NO: 3871004 - DNA, 25 bp, Homo sapien
aatactctgttcttaggatgtggcc

SEQ ID NO: 3871005 - DNA, 25 bp, Homo sapien
tccaaagagcaaatgtttggcattt

SEQ ID NO: 3871006 - DNA, 25 bp, Homo sapien
aagacctggaaagagatcccatttg

SEQ ID NO: 3871007 - DNA, 25 bp, Homo sapien
agccctagacagagacctcgccttt

SEQ ID NO: 3871008 - DNA, 25 bp, Homo sapien
aggcatgaggaagcggcagacaccc

SEQ ID NO: 3871009 - DNA, 25 bp, Homo sapien
caaaatcatccatgttggacagatg

SEQ ID NO: 3871010 - DNA, 25 bp, Homo sapien
ttcccagcactaccggttcagtagg

SEQ ID NO: 3871011 - DNA, 25 bp, Homo sapien
agtgaaatagtgcagttcatactca

SEQ ID NO: 3871012 - DNA, 25 bp, Homo sapien
cgcataactgccagaaaggaaatta

SEQ ID NO: 3871013 - DNA, 25 bp, Homo sapien
tactcagccgcataactgccagaaa

SEQ ID NO: 3871014 - DNA, 25 bp, Homo sapien
tatggattcaaatggtcctcggaga

SEQ ID NO: 3871015 - DNA, 25 bp, Homo sapien
gacccattcgtatacagtcaagaaa

SEQ ID NO: 3871016 - DNA, 25 bp, Homo sapien
caatatcaatgaaaggtttgatggc

SEQ ID NO: 3871017 - DNA, 25 bp, Homo sapien
caatgaaaggtttgatggcgatgat

SEQ ID NO: 3871018 - DNA, 25 bp, Homo sapien
tgaaggtgatgaagacccattcgta

SEQ ID NO: 3871019 - DNA, 25 bp, Homo sapien
ccgtgtgggttatcacagtgatcaa

SEQ ID NO: 3871020 - DNA, 25 bp, Homo sapien
gaaagtggatgtcatagcagtccac

SEQ ID NO: 3871021 - DNA, 25 bp, Homo sapien
tgtcatagcagtccactgtgccttc

SEQ ID NO: 3871022 - DNA, 25 bp, Homo sapien
ctgtgccttccgtgtgggttatcac

SEQ ID NO: 3871023 - DNA, 25 bp, Homo sapien
tgctctcccaaaggtcccgtaatgc

SEQ ID NO: 3871024 - DNA, 25 bp, Homo sapien
caaaggtcccgtaatgccataagca

SEQ ID NO: 3871025 - DNA, 25 bp, Homo sapien
tctcccaaaggtcccgtaatgccat

SEQ ID NO: 3871026 - DNA, 25 bp, Homo sapien
ttctgctctcccaaaggtcccgtaa

SEQ ID NO: 3871027 - DNA, 25 bp, Homo sapien
taagtaggtctcctcggttggaaga

SEQ ID NO: 3871028 - DNA, 25 bp, Homo sapien
gaagaattccataaagagcttcctg

SEQ ID NO: 3871029 - DNA, 25 bp, Homo sapien
cttgcaagtgctcgaaatttaatgg

SEQ ID NO: 3871030 - DNA, 25 bp, Homo sapien
ctcagctgggccatcaatgggctgt

SEQ ID NO: 3871031 - DNA, 25 bp, Homo sapien
ggacgatattcttccccagtgctca

SEQ ID NO: 3871032 - DNA, 25 bp, Homo sapien
taaatctccattttgctagggaggg

SEQ ID NO: 3871033 - DNA, 25 bp, Homo sapien
tctctggacgatattcttccccagt

SEQ ID NO: 3871034 - DNA, 25 bp, Homo sapien
tccattttgctagggagggcttttc

SEQ ID NO: 3871035 - DNA, 25 bp, Homo sapien
ggtctgccaggacactaaccaactg

SEQ ID NO: 3871036 - DNA, 25 bp, Homo sapien
caactgaccagtactgacaagggta

SEQ ID NO: 3871037 - DNA, 25 bp, Homo sapien
tattgagcaaccactaggtcctaag

SEQ ID NO: 3871038 - DNA, 25 bp, Homo sapien
agctttaaatatccctggcctggct

SEQ ID NO: 3871039 - DNA, 25 bp, Homo sapien
gactttgcggtgtagtgcacttgca

SEQ ID NO: 3871040 - DNA, 25 bp, Homo sapien
cctataaaacatcggctttgctgcc

SEQ ID NO: 3871041 - DNA, 25 bp, Homo sapien
ggtgaagtgcacaggtccctataaa

SEQ ID NO: 3871042 - DNA, 25 bp, Homo sapien
cttgcaccggagcttggaagagatc

SEQ ID NO: 3871043 - DNA, 25 bp, Homo sapien
gatccttggggtccttccatatccc

SEQ ID NO: 3871044 - DNA, 25 bp, Homo sapien
ccattgaccactggtgggaggcagc

SEQ ID NO: 3871045 - DNA, 25 bp, Homo sapien
ggcagccagtacaggccttgttgta

SEQ ID NO: 3871046 - DNA, 25 bp, Homo sapien
gccttgttgtaagcagatccttggg

SEQ ID NO: 3871047 - DNA, 25 bp, Homo sapien
caagtcctggttgattcccgtggca

SEQ ID NO: 3871048 - DNA, 25 bp, Homo sapien
tgtttgtgttcagactggccagccc

SEQ ID NO: 3871049 - DNA, 25 bp, Homo sapien
tgctcctcccgacgaatgggatggg

SEQ ID NO: 3871050 - DNA, 25 bp, Homo sapien
tctgctcagcagactggtactctgc

SEQ ID NO: 3871051 - DNA, 25 bp, Homo sapien
cagcagttcactgtgaacatcttca

SEQ ID NO: 3871052 - DNA, 25 bp, Homo sapien
ctattctgaataactgatcctatcc

SEQ ID NO: 3871053 - DNA, 25 bp, Homo sapien
tcagtccgccatgaaatccctgtgt

SEQ ID NO: 3871054 - DNA, 25 bp, Homo sapien
tatccttcctaaatgcttcccactt

SEQ ID NO: 3871055 - DNA, 25 bp, Homo sapien
taatccaatttgagtgtggactgag

SEQ ID NO: 3871056 - DNA, 25 bp, Homo sapien
ggtagaaccgggcagctccacatgg

SEQ ID NO: 3871057 - DNA, 25 bp, Homo sapien
ccgaatggcctggtagaaccgggca

SEQ ID NO: 3871058 - DNA, 25 bp, Homo sapien
cagaacttcccgaatggcctggtag

SEQ ID NO: 3871059 - DNA, 25 bp, Homo sapien
aaatgtgcttcagtgcctcgggctg

SEQ ID NO: 3871060 - DNA, 25 bp, Homo sapien
ggctgaagttattaatgtgttgatt

SEQ ID NO: 3871061 - DNA, 25 bp, Homo sapien
ttctttggctgaagttattaatgtg

SEQ ID NO: 3871062 - DNA, 25 bp, Homo sapien
gaagttattaatgtgttgattgatg

SEQ ID NO: 3871063 - DNA, 25 bp, Homo sapien
cttcaggcatgtgttgcctttctca

SEQ ID NO: 3871064 - DNA, 25 bp, Homo sapien
ttcaggcatgtgttgcctttctcaa

SEQ ID NO: 3871065 - DNA, 25 bp, Homo sapien
aaagcattccccgaagtgatgtgtt

SEQ ID NO: 3871066 - DNA, 25 bp, Homo sapien
ggctatcatgtaaagtctcaaaagc

SEQ ID NO: 3871067 - DNA, 25 bp, Homo sapien
agtgatggggctatcatgtaaagtc

SEQ ID NO: 3871068 - DNA, 25 bp, Homo sapien
agcattccccgaagtgatgtgttct

SEQ ID NO: 3871069 - DNA, 25 bp, Homo sapien
agctgtctcatacccacaaatgtgg

SEQ ID NO: 3871070 - DNA, 25 bp, Homo sapien
tttggcttcaacatcacccgatagg

SEQ ID NO: 3871071 - DNA, 25 bp, Homo sapien
aaatgtggtccccagacactggaat

SEQ ID NO: 3871072 - DNA, 25 bp, Homo sapien
taggagactgcgtctaccgccagtt

SEQ ID NO: 3871073 - DNA, 25 bp, Homo sapien
tataatgtgcatacagcaaatgcca

SEQ ID NO: 3871074 - DNA, 25 bp, Homo sapien
ctataatgtgcatacagcaaatgcc

SEQ ID NO: 3871075 - DNA, 25 bp, Homo sapien
gggctctcgtgaccgaatcgtctcc

SEQ ID NO: 3871076 - DNA, 25 bp, Homo sapien
taaaaattgaatttcgtctgcctgt

SEQ ID NO: 3871077 - DNA, 25 bp, Homo sapien
gtgaccgaatcgtctcctaagcaca

SEQ ID NO: 3871078 - DNA, 25 bp, Homo sapien
ctgttgacaagctgattgatctggg

SEQ ID NO: 3871079 - DNA, 25 bp, Homo sapien
tcatttagactacccactggataac

SEQ ID NO: 3871080 - DNA, 25 bp, Homo sapien
cttttgaggttcatgatgtatcagc

SEQ ID NO: 3871081 - DNA, 25 bp, Homo sapien
cagcaggttccacaatgagaggaca

SEQ ID NO: 3871082 - DNA, 25 bp, Homo sapien
gaggacatgtgtaggtcttgagtaa

SEQ ID NO: 3871083 - DNA, 25 bp, Homo sapien
tattgacactgataagaggaccaac

SEQ ID NO: 3871084 - DNA, 25 bp, Homo sapien
gctggctgccaaatggaattattga

SEQ ID NO: 3871085 - DNA, 25 bp, Homo sapien
gtaaataggcttgtctgattaatca

SEQ ID NO: 3871086 - DNA, 25 bp, Homo sapien
tgaaaagaattagctgctggctgcc

SEQ ID NO: 3871087 - DNA, 25 bp, Homo sapien
actttcagaatgccagggtgtccac

SEQ ID NO: 3871088 - DNA, 25 bp, Homo sapien
ctttcagaatgccagggtgtccacg

SEQ ID NO: 3871089 - DNA, 25 bp, Homo sapien
tgtggttacgccagttatattccat

SEQ ID NO: 3871090 - DNA, 25 bp, Homo sapien
ctgtggttacgccagttatattcca

SEQ ID NO: 3871091 - DNA, 25 bp, Homo sapien
catatgttgggagccagctgtttat

SEQ ID NO: 3871092 - DNA, 25 bp, Homo sapien
ttatttacaagtgcttgacatattt

SEQ ID NO: 3871093 - DNA, 25 bp, Homo sapien
cactttctcggctgttgcctttttt

SEQ ID NO: 3871094 - DNA, 25 bp, Homo sapien
tgggagccagctgtttatttacaag

SEQ ID NO: 3871095 - DNA, 25 bp, Homo sapien
cagttgaattatgccgcatgctgca

SEQ ID NO: 3871096 - DNA, 25 bp, Homo sapien
caattacagttgaattatgccgcat

SEQ ID NO: 3871097 - DNA, 25 bp, Homo sapien
agatacggatgggagattgtggcac

SEQ ID NO: 3871098 - DNA, 25 bp, Homo sapien
agggctggcagatacggatgggaga

SEQ ID NO: 3871099 - DNA, 25 bp, Homo sapien
gaagatgcaattgggccatctgctt

SEQ ID NO: 3871100 - DNA, 25 bp, Homo sapien
aagaagatgcaattgggccatctgc

SEQ ID NO: 3871101 - DNA, 25 bp, Homo sapien
aaagaagatgcaattgggccatctg

SEQ ID NO: 3871102 - DNA, 25 bp, Homo sapien
agaagatgcaattgggccatctgct

SEQ ID NO: 3871103 - DNA, 25 bp, Homo sapien
cacagcaggccgtaatgatccatta

SEQ ID NO: 3871104 - DNA, 25 bp, Homo sapien
attggtgtttgtacacagcaggccg

SEQ ID NO: 3871105 - DNA, 25 bp, Homo sapien
ttgagaaccagatttaaaagcatat

SEQ ID NO: 3871106 - DNA, 25 bp, Homo sapien
atgatccattatcttgcagacagag

SEQ ID NO: 3871107 - DNA, 25 bp, Homo sapien
cagtggaccttgttaagtgcagctt

SEQ ID NO: 3871108 - DNA, 25 bp, Homo sapien
acagtggaccttgttaagtgcagct

SEQ ID NO: 3871109 - DNA, 25 bp, Homo sapien
caacagtggaccttgttaagtgcag

SEQ ID NO: 3871110 - DNA, 25 bp, Homo sapien
aacagtggaccttgttaagtgcagc

SEQ ID NO: 3871111 - DNA, 25 bp, Homo sapien
aggtaggacactgagtttcctactt

SEQ ID NO: 3871112 - DNA, 25 bp, Homo sapien
cttccccgtaaacgttgtgatagag

SEQ ID NO: 3871113 - DNA, 25 bp, Homo sapien
tgtgatagagcaggtaggacactga

SEQ ID NO: 3871114 - DNA, 25 bp, Homo sapien
tgcaattttgccatgaacccttccc

SEQ ID NO: 3871115 - DNA, 25 bp, Homo sapien
gagaaaggagaaggtctcttgaatg

SEQ ID NO: 3871116 - DNA, 25 bp, Homo sapien
gaaaggagaaggtctcttgaatgtg

SEQ ID NO: 3871117 - DNA, 25 bp, Homo sapien
aggagaaggtctcttgaatgtggat

SEQ ID NO: 3871118 - DNA, 25 bp, Homo sapien
aaggagaaggtctcttgaatgtgga

SEQ ID NO: 3871119 - DNA, 25 bp, Homo sapien
ggagtcagggagcatccacttgctc

SEQ ID NO: 3871120 - DNA, 25 bp, Homo sapien
cccctagctcatagttgcctgaagg

SEQ ID NO: 3871121 - DNA, 25 bp, Homo sapien
gatctatagggagctgtgcaagcca

SEQ ID NO: 3871122 - DNA, 25 bp, Homo sapien
tctggattctggttaaagggaggca

SEQ ID NO: 3871123 - DNA, 25 bp, Homo sapien
gattcaagcaaaacatgacagcaca

SEQ ID NO: 3871124 - DNA, 25 bp, Homo sapien
aaattgtgagattcaagcaaaacat

SEQ ID NO: 3871125 - DNA, 25 bp, Homo sapien
ttaaattgtgagattcaagcaaaac

SEQ ID NO: 3871126 - DNA, 25 bp, Homo sapien
tcaagcaaaacatgacagcacacac

SEQ ID NO: 3871127 - DNA, 25 bp, Homo sapien
gctctgaacagggcaagggtagaca

SEQ ID NO: 3871128 - DNA, 25 bp, Homo sapien
ctgaacagggcaagggtagacacag

SEQ ID NO: 3871129 - DNA, 25 bp, Homo sapien
cacagggatggcatggttgaggcag

SEQ ID NO: 3871130 - DNA, 25 bp, Homo sapien
tagacacagggatggcatggttgag

SEQ ID NO: 3871131 - DNA, 25 bp, Homo sapien
gggcgctcaattcattatcagccat

SEQ ID NO: 3871132 - DNA, 25 bp, Homo sapien
cgcagagggcgctcaattcattatc

SEQ ID NO: 3871133 - DNA, 25 bp, Homo sapien
ttctgatctctccaacgcagagggc

SEQ ID NO: 3871134 - DNA, 25 bp, Homo sapien
tctccaacgcagagggcgctcaatt

SEQ ID NO: 3871135 - DNA, 25 bp, Homo sapien
tttcgatcgatgacgaggtgagtgt

SEQ ID NO: 3871136 - DNA, 25 bp, Homo sapien
ggtgagtgtaataggcagatcgcca

SEQ ID NO: 3871137 - DNA, 25 bp, Homo sapien
ctgatgtctgtatggtttcgatcga

SEQ ID NO: 3871138 - DNA, 25 bp, Homo sapien
ggacctccactgattcatggcacca

SEQ ID NO: 3871139 - DNA, 25 bp, Homo sapien
gctctggagatcatataagcgtcca

SEQ ID NO: 3871140 - DNA, 25 bp, Homo sapien
ctgctgtgctctggagatcatataa

SEQ ID NO: 3871141 - DNA, 25 bp, Homo sapien
gctgtgctctggagatcatataagc

SEQ ID NO: 3871142 - DNA, 25 bp, Homo sapien
tgtgctctggagatcatataagcgt

SEQ ID NO: 3871143 - DNA, 25 bp, Homo sapien
aaacaggcaggtgagtttctatagc

SEQ ID NO: 3871144 - DNA, 25 bp, Homo sapien
agaccggaggtgcaaacaggcaggt

SEQ ID NO: 3871145 - DNA, 25 bp, Homo sapien
cagagaccggaggtgcaaacaggca

SEQ ID NO: 3871146 - DNA, 25 bp, Homo sapien
ctgcagagaccggaggtgcaaacag

SEQ ID NO: 3871147 - DNA, 25 bp, Homo sapien
gtaaagggcgtgcaagtggggattg

SEQ ID NO: 3871148 - DNA, 25 bp, Homo sapien
agtaaagggcgtgcaagtggggatt

SEQ ID NO: 3871149 - DNA, 25 bp, Homo sapien
attacctgcagtaaagggcgtgcaa

SEQ ID NO: 3871150 - DNA, 25 bp, Homo sapien
acctgcagtaaagggcgtgcaagtg

SEQ ID NO: 3871151 - DNA, 25 bp, Homo sapien
tctatgataaccctgaaaggtatcc

SEQ ID NO: 3871152 - DNA, 25 bp, Homo sapien
ggcctttgggccttctctatgataa

SEQ ID NO: 3871153 - DNA, 25 bp, Homo sapien
ccagtcaggactacaaggtgataat

SEQ ID NO: 3871154 - DNA, 25 bp, Homo sapien
ggactgcatcaagatcatctccaat

SEQ ID NO: 3871155 - DNA, 25 bp, Homo sapien
tgtgcttttcagcatgtccatttcc

SEQ ID NO: 3871156 - DNA, 25 bp, Homo sapien
tgcttttcagcatgtccatttccca

SEQ ID NO: 3871157 - DNA, 25 bp, Homo sapien
ccctgtgcttttcagcatgtccatt

SEQ ID NO: 3871158 - DNA, 25 bp, Homo sapien
cctgtgcttttcagcatgtccattt

SEQ ID NO: 3871159 - DNA, 25 bp, Homo sapien
ccagactcttttgctgtgggagaaa

SEQ ID NO: 3871160 - DNA, 25 bp, Homo sapien
aattattgtcccttctactggccca

SEQ ID NO: 3871161 - DNA, 25 bp, Homo sapien
cccatagagggaggtccaagcagcc

SEQ ID NO: 3871162 - DNA, 25 bp, Homo sapien
tctgcaattgtgatgcgtgagcacc

SEQ ID NO: 3871163 - DNA, 25 bp, Homo sapien
ctcagaggctttgtagtagaagtgt

SEQ ID NO: 3871164 - DNA, 25 bp, Homo sapien
tactgtcctgacacataaacaccta

SEQ ID NO: 3871165 - DNA, 25 bp, Homo sapien
gacatgtgacttggcaattgaataa

SEQ ID NO: 3871166 - DNA, 25 bp, Homo sapien
cataaacacctagaagcaggttttc

SEQ ID NO: 3871167 - DNA, 25 bp, Homo sapien
catcaaggtgtgatgcaaagagttt

SEQ ID NO: 3871168 - DNA, 25 bp, Homo sapien
taaattgaaatgaaggcgaggattt

SEQ ID NO: 3871169 - DNA, 25 bp, Homo sapien
aaatgaaggcgaggatttgtcaggt

SEQ ID NO: 3871170 - DNA, 25 bp, Homo sapien
gttttccattcgatgcttccattga

SEQ ID NO: 3871171 - DNA, 25 bp, Homo sapien
gccatctggtcataaattgcaacat

SEQ ID NO: 3871172 - DNA, 25 bp, Homo sapien
tcagggataatgagcttggagtgtc

SEQ ID NO: 3871173 - DNA, 25 bp, Homo sapien
cacgaaaatcgctcactcagggata

SEQ ID NO: 3871174 - DNA, 25 bp, Homo sapien
gcttagctaaatggcactcaaaaca

SEQ ID NO: 3871175 - DNA, 25 bp, Homo sapien
gaactgttgaagcttattgccccta

SEQ ID NO: 3871176 - DNA, 25 bp, Homo sapien
ctggagaggagtgcattttctgtgc

SEQ ID NO: 3871177 - DNA, 25 bp, Homo sapien
ttgtgccagagtgccatgttccatc

SEQ ID NO: 3871178 - DNA, 25 bp, Homo sapien
tgtgtggttcttgtgccagagtgcc

SEQ ID NO: 3871179 - DNA, 25 bp, Homo sapien
tcttcctggagcagtgttatggccc

SEQ ID NO: 3871180 - DNA, 25 bp, Homo sapien
cctggagcagtgttatggccctaaa

SEQ ID NO: 3871181 - DNA, 25 bp, Homo sapien
gatagaaagaccaatggtatctgca

SEQ ID NO: 3871182 - DNA, 25 bp, Homo sapien
ttatggccctaaagtggatagaaag

SEQ ID NO: 3871183 - DNA, 25 bp, Homo sapien
gatagcatcgccttgttgcacctgt

SEQ ID NO: 3871184 - DNA, 25 bp, Homo sapien
tatgtcttaactcttggcttgtctg

SEQ ID NO: 3871185 - DNA, 25 bp, Homo sapien
tacattctatagtccaaatcactcg

SEQ ID NO: 3871186 - DNA, 25 bp, Homo sapien
cactcgccttcttgacacttttctg

SEQ ID NO: 3871187 - DNA, 25 bp, Homo sapien
atttctcaaattcctgtttactggc

SEQ ID NO: 3871188 - DNA, 25 bp, Homo sapien
tctcaaattcctgtttactggccat

SEQ ID NO: 3871189 - DNA, 25 bp, Homo sapien
tttctcaaattcctgtttactggcc

SEQ ID NO: 3871190 - DNA, 25 bp, Homo sapien
ttctcaaattcctgtttactggcca

SEQ ID NO: 3871191 - DNA, 25 bp, Homo sapien
cactatttatgctgtgcccatccat

SEQ ID NO: 3871192 - DNA, 25 bp, Homo sapien
ccagtgctttctgggtgtccctatc

SEQ ID NO: 3871193 - DNA, 25 bp, Homo sapien
ctcggccagcaaaacacgataggtt

SEQ ID NO: 3871194 - DNA, 25 bp, Homo sapien
cacgataggttccactatttatgct

SEQ ID NO: 3871195 - DNA, 25 bp, Homo sapien
ctacacagttgcataaacaagttca

SEQ ID NO: 3871196 - DNA, 25 bp, Homo sapien
ttcaaaaccagctgcatttttctgg

SEQ ID NO: 3871197 - DNA, 25 bp, Homo sapien
catttttctggtctgaccgaatagg

SEQ ID NO: 3871198 - DNA, 25 bp, Homo sapien
agttgcataaacaagttcaaaacca

SEQ ID NO: 3871199 - DNA, 25 bp, Homo sapien
gaggacactgtagtcaccaagtaac

SEQ ID NO: 3871200 - DNA, 25 bp, Homo sapien
ggacactttttgcagttgaggacac

SEQ ID NO: 3871201 - DNA, 25 bp, Homo sapien
tgaaattaaacagtatgacgaaccc

SEQ ID NO: 3871202 - DNA, 25 bp, Homo sapien
tcttgagggcaatcaaaatagcagg

SEQ ID NO: 3871203 - DNA, 25 bp, Homo sapien
gttcttagcaccataaagcacatag

SEQ ID NO: 3871204 - DNA, 25 bp, Homo sapien
tcttagcaccataaagcacatagca

SEQ ID NO: 3871205 - DNA, 25 bp, Homo sapien
tagcaccataaagcacatagcagat

SEQ ID NO: 3871206 - DNA, 25 bp, Homo sapien
agaagttcttagcaccataaagcac

SEQ ID NO: 3871207 - DNA, 25 bp, Homo sapien
gcatttcttctgactgagtattcat

SEQ ID NO: 3871208 - DNA, 25 bp, Homo sapien
actttgtggacaaacctgcaggcct

SEQ ID NO: 3871209 - DNA, 25 bp, Homo sapien
tgcatttcttctgactgagtattca

SEQ ID NO: 3871210 - DNA, 25 bp, Homo sapien
ctgcatttcttctgactgagtattc

SEQ ID NO: 3871211 - DNA, 25 bp, Homo sapien
tcctttgcaaaagagtgtgtttccc

SEQ ID NO: 3871212 - DNA, 25 bp, Homo sapien
gctccagggagctatgcttcgccga

SEQ ID NO: 3871213 - DNA, 25 bp, Homo sapien
ttcgccgagcgcattttcacctgaa

SEQ ID NO: 3871214 - DNA, 25 bp, Homo sapien
tgattatgcgccaagaaccagtcct

SEQ ID NO: 3871215 - DNA, 25 bp, Homo sapien
ttactaatatcccaaggtggattca

SEQ ID NO: 3871216 - DNA, 25 bp, Homo sapien
tcatatagacagtaacatttgagag

SEQ ID NO: 3871217 - DNA, 25 bp, Homo sapien
gcatttcaggcgctttctagatctt

SEQ ID NO: 3871218 - DNA, 25 bp, Homo sapien
tatcagcatttcaggcgctttctag

SEQ ID NO: 3871219 - DNA, 25 bp, Homo sapien
caacaaagaaaggaatttgtttctg

SEQ ID NO: 3871220 - DNA, 25 bp, Homo sapien
tgcaacaaagaaaggaatttgtttc

SEQ ID NO: 3871221 - DNA, 25 bp, Homo sapien
ctgcaacaaagaaaggaatttgttt

SEQ ID NO: 3871222 - DNA, 25 bp, Homo sapien
ggattcaaaatgagactctgagggc

SEQ ID NO: 3871223 - DNA, 25 bp, Homo sapien
catgggagtgcctaggacttcggca

SEQ ID NO: 3871224 - DNA, 25 bp, Homo sapien
caaggtaatagctgaactcctccac

SEQ ID NO: 3871225 - DNA, 25 bp, Homo sapien
aaaatagcatccctaagtgcctgga

SEQ ID NO: 3871226 - DNA, 25 bp, Homo sapien
tactctcaagacctcgaaggctgtc

SEQ ID NO: 3871227 - DNA, 25 bp, Homo sapien
tcttcaataaaagtggacgcttcca

SEQ ID NO: 3871228 - DNA, 25 bp, Homo sapien
gacgcttccacaaggatggttacac

SEQ ID NO: 3871229 - DNA, 25 bp, Homo sapien
gtttaggagatggacccctcagcca

SEQ ID NO: 3871230 - DNA, 25 bp, Homo sapien
aattcggtgcccaaatagtcttcct

SEQ ID NO: 3871231 - DNA, 25 bp, Homo sapien
ctttatcttcaattcggtgcccaaa

SEQ ID NO: 3871232 - DNA, 25 bp, Homo sapien
agtcttcctattagagggacactgc

SEQ ID NO: 3871233 - DNA, 25 bp, Homo sapien
caatgggtgagatacagttttgctt

SEQ ID NO: 3871234 - DNA, 25 bp, Homo sapien
catttgttatattgcttctgcttga

SEQ ID NO: 3871235 - DNA, 25 bp, Homo sapien
tatgcaagatttgcagccaaacact

SEQ ID NO: 3871236 - DNA, 25 bp, Homo sapien
ctgttccttcagagcggtatttgtt

SEQ ID NO: 3871237 - DNA, 25 bp, Homo sapien
ttttccttgtgacacattttgaagt

SEQ ID NO: 3871238 - DNA, 25 bp, Homo sapien
taaaagcccatatcaaatctcttga

SEQ ID NO: 3871239 - DNA, 25 bp, Homo sapien
tccaggaatcttggtttagtagaaa

SEQ ID NO: 3871240 - DNA, 25 bp, Homo sapien
gataaagggctcagtgtgactcgaa

SEQ ID NO: 3871241 - DNA, 25 bp, Homo sapien
gtttagtagaaatatatcctctgag

SEQ ID NO: 3871242 - DNA, 25 bp, Homo sapien
tttctgggtgccttctctgaaaact

SEQ ID NO: 3871243 - DNA, 25 bp, Homo sapien
gaaaactgcccagattttggacttg

SEQ ID NO: 3871244 - DNA, 25 bp, Homo sapien
tttgggttccgcaaaggaacacatc

SEQ ID NO: 3871245 - DNA, 25 bp, Homo sapien
taatgcagacaatacggtttctggg

SEQ ID NO: 3871246 - DNA, 25 bp, Homo sapien
tccacgcagctccttcccaagaaga

SEQ ID NO: 3871247 - DNA, 25 bp, Homo sapien
gaagaatggttcccaggtggtattc

SEQ ID NO: 3871248 - DNA, 25 bp, Homo sapien
tttccacgcagctccttcccaagaa

SEQ ID NO: 3871249 - DNA, 25 bp, Homo sapien
agaatggttcccaggtggtattctc

SEQ ID NO: 3871250 - DNA, 25 bp, Homo sapien
aaagaaaagacggctgccagcaact

SEQ ID NO: 3871251 - DNA, 25 bp, Homo sapien
acaaagaaaagacggctgccagcaa

SEQ ID NO: 3871252 - DNA, 25 bp, Homo sapien
caaagaaaagacggctgccagcaac

SEQ ID NO: 3871253 - DNA, 25 bp, Homo sapien
catactctcttcgtgtgatccagga

SEQ ID NO: 3871254 - DNA, 25 bp, Homo sapien
tccaggaatcaagaagccaccatca

SEQ ID NO: 3871255 - DNA, 25 bp, Homo sapien
gaatccataccagcaaaatggcacc

SEQ ID NO: 3871256 - DNA, 25 bp, Homo sapien
aactggagaattgacacactgtcct

SEQ ID NO: 3871257 - DNA, 25 bp, Homo sapien
ctggagaatcggcttcaggatggat

SEQ ID NO: 3871258 - DNA, 25 bp, Homo sapien
gtggtttctggagaatcggcttcag

SEQ ID NO: 3871259 - DNA, 25 bp, Homo sapien
gagccttctgggctagtggtttctg

SEQ ID NO: 3871260 - DNA, 25 bp, Homo sapien
agccttctgggctagtggtttctgg

SEQ ID NO: 3871261 - DNA, 25 bp, Homo sapien
gcaggtggaaccgattgcctgtatg

SEQ ID NO: 3871262 - DNA, 25 bp, Homo sapien
acctgacacttagaatcctgccctt

SEQ ID NO: 3871263 - DNA, 25 bp, Homo sapien
taggtctgatgcaggaatagttaag

SEQ ID NO: 3871264 - DNA, 25 bp, Homo sapien
cagagatagataggtctgatgcagg

SEQ ID NO: 3871265 - DNA, 25 bp, Homo sapien
tagaaccacaaatggtaataatttc

SEQ ID NO: 3871266 - DNA, 25 bp, Homo sapien
ggatgtttctgtgatgggtgaccca

SEQ ID NO: 3871267 - DNA, 25 bp, Homo sapien
aagattatggtgtggtggatgtttc

SEQ ID NO: 3871268 - DNA, 25 bp, Homo sapien
tgaaggacacggcactggtaatgaa

SEQ ID NO: 3871269 - DNA, 25 bp, Homo sapien
tgtccactcttgctaccactaccat

SEQ ID NO: 3871270 - DNA, 25 bp, Homo sapien
gacctccacataagtgtttctcaga

SEQ ID NO: 3871271 - DNA, 25 bp, Homo sapien
tcatgtccactcttgctaccactac

SEQ ID NO: 3871272 - DNA, 25 bp, Homo sapien
atcttgacctccacataagtgtttc

SEQ ID NO: 3871273 - DNA, 25 bp, Homo sapien
catcatatcctatatgtctgatgtg

SEQ ID NO: 3871274 - DNA, 25 bp, Homo sapien
atcctatatgtctgatgtggctaac

SEQ ID NO: 3871275 - DNA, 25 bp, Homo sapien
ggctaactcttctgtatgcatggtt

SEQ ID NO: 3871276 - DNA, 25 bp, Homo sapien
ctgatgtggctaactcttctgtatg

SEQ ID NO: 3871277 - DNA, 25 bp, Homo sapien
ctttgataaatgtactgttacacaa

SEQ ID NO: 3871278 - DNA, 25 bp, Homo sapien
ggagtctttgataaatgtactgtta

SEQ ID NO: 3871279 - DNA, 25 bp, Homo sapien
aagggagtctttgataaatgtactg

SEQ ID NO: 3871280 - DNA, 25 bp, Homo sapien
tttgataaatgtactgttacacaat

SEQ ID NO: 3871281 - DNA, 25 bp, Homo sapien
gaagtcttaccttgcagaagttcac

SEQ ID NO: 3871282 - DNA, 25 bp, Homo sapien
atagctcgtcactggccccattgtc

SEQ ID NO: 3871283 - DNA, 25 bp, Homo sapien
gagaagtcttaccttgcagaagttc

SEQ ID NO: 3871284 - DNA, 25 bp, Homo sapien
tttctttattttccatagctcgtca

SEQ ID NO: 3871285 - DNA, 25 bp, Homo sapien
tgcaaatgggtaatgtaatccagcc

SEQ ID NO: 3871286 - DNA, 25 bp, Homo sapien
tcctgtttgattcaaagtagttagg

SEQ ID NO: 3871287 - DNA, 25 bp, Homo sapien
tgctgtatatttcagcaacttgtga

SEQ ID NO: 3871288 - DNA, 25 bp, Homo sapien
tcagcaacttgtgatatgtgatcat

SEQ ID NO: 3871289 - DNA, 25 bp, Homo sapien
cctgcagggcttttgagagatgtaa

SEQ ID NO: 3871290 - DNA, 25 bp, Homo sapien
aaacacgtgtgcattcttcctgcag

SEQ ID NO: 3871291 - DNA, 25 bp, Homo sapien
tgagagatgtaatcaaaccaagttt

SEQ ID NO: 3871292 - DNA, 25 bp, Homo sapien
ccaagaaacacgtgtgcattcttcc

SEQ ID NO: 3871293 - DNA, 25 bp, Homo sapien
gaaggcccctgtgcaggcaactgag

SEQ ID NO: 3871294 - DNA, 25 bp, Homo sapien
ttgggaagtgtcaggaaggcccctg

SEQ ID NO: 3871295 - DNA, 25 bp, Homo sapien
tcaggaaggcccctgtgcaggcaac

SEQ ID NO: 3871296 - DNA, 25 bp, Homo sapien
aggaaggcccctgtgcaggcaactg

SEQ ID NO: 3871297 - DNA, 25 bp, Homo sapien
gtgactggatcccaaccaatgaggg

SEQ ID NO: 3871298 - DNA, 25 bp, Homo sapien
cttgtgcaacgaggatctgctggga

SEQ ID NO: 3871299 - DNA, 25 bp, Homo sapien
tcaccatggagcactagacagcctt

SEQ ID NO: 3871300 - DNA, 25 bp, Homo sapien
ttgtgttcagagttggagccacccc

SEQ ID NO: 3871301 - DNA, 25 bp, Homo sapien
acatgcttgtggcaccacccatggg

SEQ ID NO: 3871302 - DNA, 25 bp, Homo sapien
cctgcataaccagctcgcctgctgt

SEQ ID NO: 3871303 - DNA, 25 bp, Homo sapien
tccgctttcccctgcataaccagct

SEQ ID NO: 3871304 - DNA, 25 bp, Homo sapien
ctgaaggtcacatgcttgtggcacc

SEQ ID NO: 3871305 - DNA, 25 bp, Homo sapien
ccaaaagcatggcactgtcatctgg

SEQ ID NO: 3871306 - DNA, 25 bp, Homo sapien
gggaagtccaaaagcatggcactgt

SEQ ID NO: 3871307 - DNA, 25 bp, Homo sapien
aaaagcatggcactgtcatctggtg

SEQ ID NO: 3871308 - DNA, 25 bp, Homo sapien
aagcatggcactgtcatctggtgag

SEQ ID NO: 3871309 - DNA, 25 bp, Homo sapien
tgtacttgtgtatttacagatatca

SEQ ID NO: 3871310 - DNA, 25 bp, Homo sapien
gtacttgtgtatttacagatatcat

SEQ ID NO: 3871311 - DNA, 25 bp, Homo sapien
gagcagtacgagctcctgttcacta

SEQ ID NO: 3871312 - DNA, 25 bp, Homo sapien
tctgagcagtacgagctcctgttca

SEQ ID NO: 3871313 - DNA, 25 bp, Homo sapien
tatttctgagcagtacgagctcctg

SEQ ID NO: 3871314 - DNA, 25 bp, Homo sapien
agtacgagctcctgttcactatgcc

SEQ ID NO: 3871315 - DNA, 25 bp, Homo sapien
ccctccaatcactggcaccacaccc

SEQ ID NO: 3871316 - DNA, 25 bp, Homo sapien
cccctccaatcactggcaccacacc

SEQ ID NO: 3871317 - DNA, 25 bp, Homo sapien
cctccaatcactggcaccacaccca

SEQ ID NO: 3871318 - DNA, 25 bp, Homo sapien
ctccaatcactggcaccacacccat

SEQ ID NO: 3871319 - DNA, 25 bp, Homo sapien
ccttaggggtgtctcttagtccttg

SEQ ID NO: 3871320 - DNA, 25 bp, Homo sapien
tcttccttaggggtgtctcttagtc

SEQ ID NO: 3871321 - DNA, 25 bp, Homo sapien
gatgccttctgaactgacgtgcctg

SEQ ID NO: 3871322 - DNA, 25 bp, Homo sapien
gaactgacgtgcctgggaatcaatc

SEQ ID NO: 3871323 - DNA, 25 bp, Homo sapien
ggcagatgccttctgaactgacgtg

SEQ ID NO: 3871324 - DNA, 25 bp, Homo sapien
ccttctgaactgacgtgcctgggaa

SEQ ID NO: 3871325 - DNA, 25 bp, Homo sapien
aacaagaagttctcactgtgctgat

SEQ ID NO: 3871326 - DNA, 25 bp, Homo sapien
gacaatggcattttatccagccctt

SEQ ID NO: 3871327 - DNA, 25 bp, Homo sapien
gaggacatttatatactgcttagga

SEQ ID NO: 3871328 - DNA, 25 bp, Homo sapien
gctgaagattttgcatattacccta

SEQ ID NO: 3871329 - DNA, 25 bp, Homo sapien
ttttcttcagtacatctgcaaaaca

SEQ ID NO: 3871330 - DNA, 25 bp, Homo sapien
tcaagccggcagtgaacttggcagg

SEQ ID NO: 3871331 - DNA, 25 bp, Homo sapien
tggtccaccaaagtattttgagtgg

SEQ ID NO: 3871332 - DNA, 25 bp, Homo sapien
ggttcttagtgatacagttttcttc

SEQ ID NO: 3871333 - DNA, 25 bp, Homo sapien
tataccggcatccttggagatattg

SEQ ID NO: 3871334 - DNA, 25 bp, Homo sapien
ttgaaatgaagtgggatataccggc

SEQ ID NO: 3871335 - DNA, 25 bp, Homo sapien
tattgtgggtcctggttccaagcca

SEQ ID NO: 3871336 - DNA, 25 bp, Homo sapien
ggagggccaactgattgtatgcaca

SEQ ID NO: 3871337 - DNA, 25 bp, Homo sapien
atgaggcatataaggctttgtgagg

SEQ ID NO: 3871338 - DNA, 25 bp, Homo sapien
catataaggctttgtgaggggcagc

SEQ ID NO: 3871339 - DNA, 25 bp, Homo sapien
ggggcagcgcttcccctctcatggc

SEQ ID NO: 3871340 - DNA, 25 bp, Homo sapien
agcgcttcccctctcatggccagga

SEQ ID NO: 3871341 - DNA, 25 bp, Homo sapien
tcaattgctcactggttaccatgga

SEQ ID NO: 3871342 - DNA, 25 bp, Homo sapien
aattgctcactggttaccatggaaa

SEQ ID NO: 3871343 - DNA, 25 bp, Homo sapien
tcaagagggactgcttttctccctc

SEQ ID NO: 3871344 - DNA, 25 bp, Homo sapien
tgtcaattgctcactggttaccatg

SEQ ID NO: 3871345 - DNA, 25 bp, Homo sapien
ggtttgggtatgagctgtcctttct

SEQ ID NO: 3871346 - DNA, 25 bp, Homo sapien
tgtagcctcctcgtgaggtttgggt

SEQ ID NO: 3871347 - DNA, 25 bp, Homo sapien
gaggtttgggtatgagctgtccttt

SEQ ID NO: 3871348 - DNA, 25 bp, Homo sapien
agcctcctcgtgaggtttgggtatg

SEQ ID NO: 3871349 - DNA, 25 bp, Homo sapien
tgtagaaagcatgcacctgcccact

SEQ ID NO: 3871350 - DNA, 25 bp, Homo sapien
ccatcttgggagtcacggtgtgcaa

SEQ ID NO: 3871351 - DNA, 25 bp, Homo sapien
ccatttagtggagtgtcgggtctac

SEQ ID NO: 3871352 - DNA, 25 bp, Homo sapien
tcattacggacctctgcactgtgcc

SEQ ID NO: 3871353 - DNA, 25 bp, Homo sapien
agtgcatatccatgcttgagcccag

SEQ ID NO: 3871354 - DNA, 25 bp, Homo sapien
gaagggtactcgataaatgcttgca

SEQ ID NO: 3871355 - DNA, 25 bp, Homo sapien
tgactcgtgctctcccagtggaaac

SEQ ID NO: 3871356 - DNA, 25 bp, Homo sapien
tagtgtcccagtttagaaggctaac

SEQ ID NO: 3871357 - DNA, 25 bp, Homo sapien
ctcattggtcctgaattccgctagc

SEQ ID NO: 3871358 - DNA, 25 bp, Homo sapien
tggtcctgaattccgctagcctgct

SEQ ID NO: 3871359 - DNA, 25 bp, Homo sapien
tcctgaattccgctagcctgctgct

SEQ ID NO: 3871360 - DNA, 25 bp, Homo sapien
tgaattccgctagcctgctgcttcc

SEQ ID NO: 3871361 - DNA, 25 bp, Homo sapien
aaagtgcagcattccctgtggtggt

SEQ ID NO: 3871362 - DNA, 25 bp, Homo sapien
gggtccagttccagactgctttgca

SEQ ID NO: 3871363 - DNA, 25 bp, Homo sapien
agggtttgccagtgctttgtcatgg

SEQ ID NO: 3871364 - DNA, 25 bp, Homo sapien
tgagctcctggtgaatctatcccgg

SEQ ID NO: 3871365 - DNA, 25 bp, Homo sapien
ctgccaggtgagtcaagtgttcagt

SEQ ID NO: 3871366 - DNA, 25 bp, Homo sapien
gccaggtgagtcaagtgttcagtca

SEQ ID NO: 3871367 - DNA, 25 bp, Homo sapien
ccaggtgagtcaagtgttcagtcat

SEQ ID NO: 3871368 - DNA, 25 bp, Homo sapien
tgccaggtgagtcaagtgttcagtc

SEQ ID NO: 3871369 - DNA, 25 bp, Homo sapien
agatgatctgttgacctgccaccac

SEQ ID NO: 3871370 - DNA, 25 bp, Homo sapien
tgcatcagaaaaacgctctgctttg

SEQ ID NO: 3871371 - DNA, 25 bp, Homo sapien
aaaacgctctgctttgtgtacaaag

SEQ ID NO: 3871372 - DNA, 25 bp, Homo sapien
ggcctgatgtttagcctcttctggg

SEQ ID NO: 3871373 - DNA, 25 bp, Homo sapien
ggttcagccatgcatcgcctctctg

SEQ ID NO: 3871374 - DNA, 25 bp, Homo sapien
tgctcctggttcagccatgcatcgc

SEQ ID NO: 3871375 - DNA, 25 bp, Homo sapien
tactaccacaccttgtgtgctccag

SEQ ID NO: 3871376 - DNA, 25 bp, Homo sapien
ctctgggcagttactaccacacctt

SEQ ID NO: 3871377 - DNA, 25 bp, Homo sapien
caagtctacaaagttctcagggagg

SEQ ID NO: 3871378 - DNA, 25 bp, Homo sapien
tcctgagagcttgtgtcatgagaca

SEQ ID NO: 3871379 - DNA, 25 bp, Homo sapien
ggaggagactcagccacttgttctt

SEQ ID NO: 3871380 - DNA, 25 bp, Homo sapien
caggtgcctcctattgagtggatca

SEQ ID NO: 3871381 - DNA, 25 bp, Homo sapien
caaagtagcaaacatgaccacccat

SEQ ID NO: 3871382 - DNA, 25 bp, Homo sapien
tcatttccacaaagtagcaaacatg

SEQ ID NO: 3871383 - DNA, 25 bp, Homo sapien
tccacaaagtagcaaacatgaccac

SEQ ID NO: 3871384 - DNA, 25 bp, Homo sapien
tttccacaaagtagcaaacatgacc

SEQ ID NO: 3871385 - DNA, 25 bp, Homo sapien
gaaagcatgtgctgggtaccatgta

SEQ ID NO: 3871386 - DNA, 25 bp, Homo sapien
aaagcatgtgctgggtaccatgtaa

SEQ ID NO: 3871387 - DNA, 25 bp, Homo sapien
ggtctggttcccgagccagagctcg

SEQ ID NO: 3871388 - DNA, 25 bp, Homo sapien
gtgggtctggttcccgagccagagc

SEQ ID NO: 3871389 - DNA, 25 bp, Homo sapien
gttcccgagccagagctcgctgaca

SEQ ID NO: 3871390 - DNA, 25 bp, Homo sapien
tctggttcccgagccagagctcgct

SEQ ID NO: 3871391 - DNA, 25 bp, Homo sapien
ctttggtgggttgagcagattttgc

SEQ ID NO: 3871392 - DNA, 25 bp, Homo sapien
ccaagctgttcccaccaggctttgg

SEQ ID NO: 3871393 - DNA, 25 bp, Homo sapien
gcctgagtggcagagatgctgacat

SEQ ID NO: 3871394 - DNA, 25 bp, Homo sapien
gattttgctctaagcctgagtggca

SEQ ID NO: 3871395 - DNA, 25 bp, Homo sapien
aaggctcagtggagagctgaatccc

SEQ ID NO: 3871396 - DNA, 25 bp, Homo sapien
cagtggagagctgaatccccacacc

SEQ ID NO: 3871397 - DNA, 25 bp, Homo sapien
actcccaatgtccacaaggctcagt

SEQ ID NO: 3871398 - DNA, 25 bp, Homo sapien
tctcccaactcccaatgtccacaag

SEQ ID NO: 3871399 - DNA, 25 bp, Homo sapien
gacatgggcctgctattaacaacat

SEQ ID NO: 3871400 - DNA, 25 bp, Homo sapien
gaagacatgggcctgctattaacaa

SEQ ID NO: 3871401 - DNA, 25 bp, Homo sapien
ctcagtcctacgagagacaaaagaa

SEQ ID NO: 3871402 - DNA, 25 bp, Homo sapien
catgaactcagtcctacgagagaca

SEQ ID NO: 3871403 - DNA, 25 bp, Homo sapien
taatgctaactggatttgtattggc

SEQ ID NO: 3871404 - DNA, 25 bp, Homo sapien
gatttgtattggcttcaaactcaac

SEQ ID NO: 3871405 - DNA, 25 bp, Homo sapien
aactggatttgtattggcttcaaac

SEQ ID NO: 3871406 - DNA, 25 bp, Homo sapien
ttcatcttctaatgctaactggatt

SEQ ID NO: 3871407 - DNA, 25 bp, Homo sapien
gagcaaatcgaccagcttttttatt

SEQ ID NO: 3871408 - DNA, 25 bp, Homo sapien
tagatttctgagcaaatcgaccagc

SEQ ID NO: 3871409 - DNA, 25 bp, Homo sapien
attctcaaatatgctgttgcgacag

SEQ ID NO: 3871410 - DNA, 25 bp, Homo sapien
gctgttgcgacagttatagatttct

SEQ ID NO: 3871411 - DNA, 25 bp, Homo sapien
tggaataacaagcaagtgaagacct

SEQ ID NO: 3871412 - DNA, 25 bp, Homo sapien
gtggaataacaagcaagtgaagacc

SEQ ID NO: 3871413 - DNA, 25 bp, Homo sapien
ggaataacaagcaagtgaagacctg

SEQ ID NO: 3871414 - DNA, 25 bp, Homo sapien
tggcttgtggcggaattctggtcct

SEQ ID NO: 3871415 - DNA, 25 bp, Homo sapien
ggcggaattctggtcctagcagcat

SEQ ID NO: 3871416 - DNA, 25 bp, Homo sapien
tgtggcggaattctggtcctagcag

SEQ ID NO: 3871417 - DNA, 25 bp, Homo sapien
cttgtggcggaattctggtcctagc

SEQ ID NO: 3871418 - DNA, 25 bp, Homo sapien
aaaaggaagtttcgtggatgcttca

SEQ ID NO: 3871419 - DNA, 25 bp, Homo sapien
tgccagttactgagtaatgacgcat

SEQ ID NO: 3871420 - DNA, 25 bp, Homo sapien
cctcagtttcccggtgccagttact

SEQ ID NO: 3871421 - DNA, 25 bp, Homo sapien
cagacagcaggggtactgcttggag

SEQ ID NO: 3871422 - DNA, 25 bp, Homo sapien
tctcagagtgcaggatccatattta

SEQ ID NO: 3871423 - DNA, 25 bp, Homo sapien
tgactggcatagtttgccttcacta

SEQ ID NO: 3871424 - DNA, 25 bp, Homo sapien
tgaatgagtatcttttggaaaacag

SEQ ID NO: 3871425 - DNA, 25 bp, Homo sapien
cacaataggtaactgagactctgcc

SEQ ID NO: 3871426 - DNA, 25 bp, Homo sapien
gatggatcataatagtagatcatga

SEQ ID NO: 3871427 - DNA, 25 bp, Homo sapien
attcaattgtaacacggccgccgag

SEQ ID NO: 3871428 - DNA, 25 bp, Homo sapien
ccccttgtaattcaattgtaacacg

SEQ ID NO: 3871429 - DNA, 25 bp, Homo sapien
tgctccgttggtgatggatcataat

SEQ ID NO: 3871430 - DNA, 25 bp, Homo sapien
ggtttagtgcagatggtcttcacaa

SEQ ID NO: 3871431 - DNA, 25 bp, Homo sapien
tctgagagggcggtcataagattct

SEQ ID NO: 3871432 - DNA, 25 bp, Homo sapien
aattctttagaaattgggccctctg

SEQ ID NO: 3871433 - DNA, 25 bp, Homo sapien
gagtagtgccaattacagggtagtt

SEQ ID NO: 3871434 - DNA, 25 bp, Homo sapien
gtagccttataacacatttgtccct

SEQ ID NO: 3871435 - DNA, 25 bp, Homo sapien
ctgtagccttataacacatttgtcc

SEQ ID NO: 3871436 - DNA, 25 bp, Homo sapien
tgaattaacctgacactggaagaca

SEQ ID NO: 3871437 - DNA, 25 bp, Homo sapien
aagttcatcttgaattaacctgaca

SEQ ID NO: 3871438 - DNA, 25 bp, Homo sapien
tgaggcaaaacaactgagacgtccg

SEQ ID NO: 3871439 - DNA, 25 bp, Homo sapien
acgtccggataagcactgtggtggt

SEQ ID NO: 3871440 - DNA, 25 bp, Homo sapien
catgttgattgcaataacagcatca

SEQ ID NO: 3871441 - DNA, 25 bp, Homo sapien
gcatcaaagccatgcacattctgtg

SEQ ID NO: 3871442 - DNA, 25 bp, Homo sapien
caaaagactccaacagtgtcaagcc

SEQ ID NO: 3871443 - DNA, 25 bp, Homo sapien
ttgccttgaaaaaagagctctctct

SEQ ID NO: 3871444 - DNA, 25 bp, Homo sapien
tctgctagcccaaaagacaaagagc

SEQ ID NO: 3871445 - DNA, 25 bp, Homo sapien
tctaaaagcactgcccattgccttg

SEQ ID NO: 3871446 - DNA, 25 bp, Homo sapien
atctcctaatgtggctcctgagata

SEQ ID NO: 3871447 - DNA, 25 bp, Homo sapien
tcctaatgtggctcctgagataacc

SEQ ID NO: 3871448 - DNA, 25 bp, Homo sapien
ggctcctgagataacctttagcaaa

SEQ ID NO: 3871449 - DNA, 25 bp, Homo sapien
caaactcttggtctgatgcattctc

SEQ ID NO: 3871450 - DNA, 25 bp, Homo sapien
cagatctattaaagttttcgcagcc

SEQ ID NO: 3871451 - DNA, 25 bp, Homo sapien
gatctattaaagttttcgcagccca

SEQ ID NO: 3871452 - DNA, 25 bp, Homo sapien
tctattaaagttttcgcagcccagg

SEQ ID NO: 3871453 - DNA, 25 bp, Homo sapien
ctattaaagttttcgcagcccaggg

SEQ ID NO: 3871454 - DNA, 25 bp, Homo sapien
aatgtttctctctgtaccatactga

SEQ ID NO: 3871455 - DNA, 25 bp, Homo sapien
gtttctctctgtaccatactgatca

SEQ ID NO: 3871456 - DNA, 25 bp, Homo sapien
aaattttgaagcaaatgtttctctc

SEQ ID NO: 3871457 - DNA, 25 bp, Homo sapien
aaaattttgaagcaaatgtttctct

SEQ ID NO: 3871458 - DNA, 25 bp, Homo sapien
ggagatccaggatctgccctgagac

SEQ ID NO: 3871459 - DNA, 25 bp, Homo sapien
gatccaggatctgccctgagacctc

SEQ ID NO: 3871460 - DNA, 25 bp, Homo sapien
gaggagatccaggatctgccctgag

SEQ ID NO: 3871461 - DNA, 25 bp, Homo sapien
gagatccaggatctgccctgagacc

SEQ ID NO: 3871462 - DNA, 25 bp, Homo sapien
ctgcctgtgcctgtcaaatgccaca

SEQ ID NO: 3871463 - DNA, 25 bp, Homo sapien
cattaccaagaacctgataccagga

SEQ ID NO: 3871464 - DNA, 25 bp, Homo sapien
gtcattaccaagaacctgataccag

SEQ ID NO: 3871465 - DNA, 25 bp, Homo sapien
tctgtgtcattaccaagaacctgat

SEQ ID NO: 3871466 - DNA, 25 bp, Homo sapien
tgtgtcattaccaagaacctgatac

SEQ ID NO: 3871467 - DNA, 25 bp, Homo sapien
tagtaaattgtgtagtaaccataat

SEQ ID NO: 3871468 - DNA, 25 bp, Homo sapien
actgatggcaaatatctcaggcttc

SEQ ID NO: 3871469 - DNA, 25 bp, Homo sapien
gatggcaaatatctcaggcttcagg

SEQ ID NO: 3871470 - DNA, 25 bp, Homo sapien
ttagtaaattgtgtagtaaccataa

SEQ ID NO: 3871471 - DNA, 25 bp, Homo sapien
ttcagggtcccttttcagcattcgt

SEQ ID NO: 3871472 - DNA, 25 bp, Homo sapien
cagggtcccttttcagcattcgttt

SEQ ID NO: 3871473 - DNA, 25 bp, Homo sapien
gtttttttcctctatcatcaatcat

SEQ ID NO: 3871474 - DNA, 25 bp, Homo sapien
tcgtttttttcctctatcatcaatc

SEQ ID NO: 3871475 - DNA, 25 bp, Homo sapien
aagactgtctgttaagctgccatca

SEQ ID NO: 3871476 - DNA, 25 bp, Homo sapien
ctattgaactttcacagtgactaag

SEQ ID NO: 3871477 - DNA, 25 bp, Homo sapien
aacacccaacactgtcagatgcttt

SEQ ID NO: 3871478 - DNA, 25 bp, Homo sapien
gtgactaagaccttgcggacaaaga

SEQ ID NO: 3871479 - DNA, 25 bp, Homo sapien
tcaactccatgagaagtacgtgggt

SEQ ID NO: 3871480 - DNA, 25 bp, Homo sapien
cctgtgaaaaacgagacccctgttg

SEQ ID NO: 3871481 - DNA, 25 bp, Homo sapien
ccagggacataagtagcttcagaca

SEQ ID NO: 3871482 - DNA, 25 bp, Homo sapien
ggtgccaagagtgcaaacatgtcat

SEQ ID NO: 3871483 - DNA, 25 bp, Homo sapien
gttatttcatgggtcattaatgtgt

SEQ ID NO: 3871484 - DNA, 25 bp, Homo sapien
ttgttatgaacgcattcattgccat

SEQ ID NO: 3871485 - DNA, 25 bp, Homo sapien
ttattattgttatgaacgcattcat

SEQ ID NO: 3871486 - DNA, 25 bp, Homo sapien
tgtgtttaatgcatggaacattcta

SEQ ID NO: 3871487 - DNA, 25 bp, Homo sapien
tatgctattatagcctttgccagca

SEQ ID NO: 3871488 - DNA, 25 bp, Homo sapien
tttaaaatgacaggacaggagtatg

SEQ ID NO: 3871489 - DNA, 25 bp, Homo sapien
tagaactgacctttcatgtagctga

SEQ ID NO: 3871490 - DNA, 25 bp, Homo sapien
aagtacttaattctgcaggtagctg

SEQ ID NO: 3871491 - DNA, 25 bp, Homo sapien
gtaatttagttttctcaggcagtgc

SEQ ID NO: 3871492 - DNA, 25 bp, Homo sapien
cttctgtatgattgattctgtaatt

SEQ ID NO: 3871493 - DNA, 25 bp, Homo sapien
ctgtatgattgattctgtaatttag

SEQ ID NO: 3871494 - DNA, 25 bp, Homo sapien
ctgtaatttagttttctcaggcagt

SEQ ID NO: 3871495 - DNA, 25 bp, Homo sapien
atttcatggtcaattgaatttacta

SEQ ID NO: 3871496 - DNA, 25 bp, Homo sapien
ttcatggtcaattgaatttactata

SEQ ID NO: 3871497 - DNA, 25 bp, Homo sapien
tcatggtcaattgaatttactatat

SEQ ID NO: 3871498 - DNA, 25 bp, Homo sapien
tttcatggtcaattgaatttactat

SEQ ID NO: 3871499 - DNA, 25 bp, Homo sapien
tctgcacattaggaccatgccagtg

SEQ ID NO: 3871500 - DNA, 25 bp, Homo sapien
ggattagtggtgcaaagattcaaag

SEQ ID NO: 3871501 - DNA, 25 bp, Homo sapien
ggcttcattgttaattccccagata

SEQ ID NO: 3871502 - DNA, 25 bp, Homo sapien
tccccagataacaacatatgattgc

SEQ ID NO: 3871503 - DNA, 25 bp, Homo sapien
cctgcttgactaaacgctgcgtggc

SEQ ID NO: 3871504 - DNA, 25 bp, Homo sapien
gagccacctgcttgactaaacgctg

SEQ ID NO: 3871505 - DNA, 25 bp, Homo sapien
tgcttgactaaacgctgcgtggcct

SEQ ID NO: 3871506 - DNA, 25 bp, Homo sapien
gccacctgcttgactaaacgctgcg

SEQ ID NO: 3871507 - DNA, 25 bp, Homo sapien
taagtgacttgacagatgtccatag

SEQ ID NO: 3871508 - DNA, 25 bp, Homo sapien
cagcatgtgaccgtgcgtggcacac

SEQ ID NO: 3871509 - DNA, 25 bp, Homo sapien
catcaagttggatggtgtctgctaa

SEQ ID NO: 3871510 - DNA, 25 bp, Homo sapien
gtggactttgcagtccggcctctgc

SEQ ID NO: 3871511 - DNA, 25 bp, Homo sapien
cagattggagtcctgcaaaagctca

SEQ ID NO: 3871512 - DNA, 25 bp, Homo sapien
ctcctggcaatgtggtgtgtagccc

SEQ ID NO: 3871513 - DNA, 25 bp, Homo sapien
tgtgtagccccgagcgcagcttcat

SEQ ID NO: 3871514 - DNA, 25 bp, Homo sapien
aaagctcaatgcttcctactgctcc

SEQ ID NO: 3871515 - DNA, 25 bp, Homo sapien
tacgtaattgtctttcgatggcgca

SEQ ID NO: 3871516 - DNA, 25 bp, Homo sapien
ttgttcgcacactcggaggccttcc

SEQ ID NO: 3871517 - DNA, 25 bp, Homo sapien
gccccgcgtacatccttcatttgaa

SEQ ID NO: 3871518 - DNA, 25 bp, Homo sapien
gaaactgtgattgaggaaggaaatg

SEQ ID NO: 3871519 - DNA, 25 bp, Homo sapien
atgtcgtttcgaagtaaatgctgcc

SEQ ID NO: 3871520 - DNA, 25 bp, Homo sapien
tgagtatctggaacacttgccacga

SEQ ID NO: 3871521 - DNA, 25 bp, Homo sapien
gctgtctgcattgctaaggctctgg

SEQ ID NO: 3871522 - DNA, 25 bp, Homo sapien
caaggactgggttttgcatgtcgtt

SEQ ID NO: 3871523 - DNA, 25 bp, Homo sapien
gcttaaaagcttgactatctggtac

SEQ ID NO: 3871524 - DNA, 25 bp, Homo sapien
tggatgacccatagagcttaaaagc

SEQ ID NO: 3871525 - DNA, 25 bp, Homo sapien
tttctagaaactgcattacctgggt

SEQ ID NO: 3871526 - DNA, 25 bp, Homo sapien
gtttcagcaaattaccacccatggg

SEQ ID NO: 3871527 - DNA, 25 bp, Homo sapien
caccttggacttgcttccatcagtt

SEQ ID NO: 3871528 - DNA, 25 bp, Homo sapien
cttggacttgcttccatcagttggg

SEQ ID NO: 3871529 - DNA, 25 bp, Homo sapien
catgtgtataaagagtatgagcatt

SEQ ID NO: 3871530 - DNA, 25 bp, Homo sapien
tgtcttttgatagctagacctttgg

SEQ ID NO: 3871531 - DNA, 25 bp, Homo sapien
tgaacgtggaatttctgattccaag

SEQ ID NO: 3871532 - DNA, 25 bp, Homo sapien
tgtgtccatttaggcatttcccata

SEQ ID NO: 3871533 - DNA, 25 bp, Homo sapien
ttgaggaataggcaacgtggtgctt

SEQ ID NO: 3871534 - DNA, 25 bp, Homo sapien
tctgctcgttccctcaggagttctg

SEQ ID NO: 3871535 - DNA, 25 bp, Homo sapien
gctcagctaggatgcatttctctca

SEQ ID NO: 3871536 - DNA, 25 bp, Homo sapien
ccaggcgcattgaggagagacttca

SEQ ID NO: 3871537 - DNA, 25 bp, Homo sapien
tctaatggatctggacaggctaacc

SEQ ID NO: 3871538 - DNA, 25 bp, Homo sapien
tagtggaggatgaagtgccaacctc

SEQ ID NO: 3871539 - DNA, 25 bp, Homo sapien
gagagggcagcttctactctgggat

SEQ ID NO: 3871540 - DNA, 25 bp, Homo sapien
taaatccttccaacagtccttcctg

SEQ ID NO: 3871541 - DNA, 25 bp, Homo sapien
cattcagggaccagatctttctttc

SEQ ID NO: 3871542 - DNA, 25 bp, Homo sapien
cctgcctgttgaatattctttgttc

SEQ ID NO: 3871543 - DNA, 25 bp, Homo sapien
gacctccaatcttttacttatgaag

SEQ ID NO: 3871544 - DNA, 25 bp, Homo sapien
ttgatattatctgccttagatctct

SEQ ID NO: 3871545 - DNA, 25 bp, Homo sapien
gggacctccaatcttttacttatga

SEQ ID NO: 3871546 - DNA, 25 bp, Homo sapien
tattatctgccttagatctctgatt

SEQ ID NO: 3871547 - DNA, 25 bp, Homo sapien
ttatgaagctgacttggtggtggat

SEQ ID NO: 3871548 - DNA, 25 bp, Homo sapien
aagctgacttggtggtggattttgc

SEQ ID NO: 3871549 - DNA, 25 bp, Homo sapien
tgaagctgacttggtggtggatttt

SEQ ID NO: 3871550 - DNA, 25 bp, Homo sapien
tatgaagctgacttggtggtggatt

SEQ ID NO: 3871551 - DNA, 25 bp, Homo sapien
tggtcagttgctgttggaacgaaca

SEQ ID NO: 3871552 - DNA, 25 bp, Homo sapien
atggattgggtggtcagttgctgtt

SEQ ID NO: 3871553 - DNA, 25 bp, Homo sapien
ctattgaatgatggattgggtggtc

SEQ ID NO: 3871554 - DNA, 25 bp, Homo sapien
tattgaatgatggattgggtggtca

SEQ ID NO: 3871555 - DNA, 25 bp, Homo sapien
tgtcacaagcccgatctactctgga

SEQ ID NO: 3871556 - DNA, 25 bp, Homo sapien
gaatgtcgccactctggttaaagta

SEQ ID NO: 3871557 - DNA, 25 bp, Homo sapien
tattgagtgaaggtacacacacagg

SEQ ID NO: 3871558 - DNA, 25 bp, Homo sapien
gtagctggcagataactaaactggg

SEQ ID NO: 3871559 - DNA, 25 bp, Homo sapien
tgtcaatttgtgcaacctgctgggc

SEQ ID NO: 3871560 - DNA, 25 bp, Homo sapien
tcaatttgtgcaacctgctgggcca

SEQ ID NO: 3871561 - DNA, 25 bp, Homo sapien
gtcaatttgtgcaacctgctgggcc

SEQ ID NO: 3871562 - DNA, 25 bp, Homo sapien
caatttgtgcaacctgctgggccat

SEQ ID NO: 3871563 - DNA, 25 bp, Homo sapien
tcatgtcgcttctctcaacagcagc

SEQ ID NO: 3871564 - DNA, 25 bp, Homo sapien
caacagcagctagtggctgtgccat

SEQ ID NO: 3871565 - DNA, 25 bp, Homo sapien
catgggggtgtagaagctggcatcc

SEQ ID NO: 3871566 - DNA, 25 bp, Homo sapien
agtttgtttttcatgtcgcttctct

SEQ ID NO: 3871567 - DNA, 25 bp, Homo sapien
taatgtgtcatcaggtctcccaggt

SEQ ID NO: 3871568 - DNA, 25 bp, Homo sapien
tccagtctggataggaatgctacgc

SEQ ID NO: 3871569 - DNA, 25 bp, Homo sapien
gaggaaacgtgagtagccctggcct

SEQ ID NO: 3871570 - DNA, 25 bp, Homo sapien
tatggtgattcgctttaggtcctgc

SEQ ID NO: 3871571 - DNA, 25 bp, Homo sapien
tgtgtaaacagccatttacccaggt

SEQ ID NO: 3871572 - DNA, 25 bp, Homo sapien
tttacccaggtgtcaagaggagcaa

SEQ ID NO: 3871573 - DNA, 25 bp, Homo sapien
cggctgggtgatctgcctgtgtaaa

SEQ ID NO: 3871574 - DNA, 25 bp, Homo sapien
gctgggtgatctgcctgtgtaaaca

SEQ ID NO: 3871575 - DNA, 25 bp, Homo sapien
tcctgcattatgtaccactcacttc

SEQ ID NO: 3871576 - DNA, 25 bp, Homo sapien
gactctcagggttatcaggcacctc

SEQ ID NO: 3871577 - DNA, 25 bp, Homo sapien
accaaggtgcaagacaccacaatcc

SEQ ID NO: 3871578 - DNA, 25 bp, Homo sapien
gacaccacaatccatactcaataag

SEQ ID NO: 3871579 - DNA, 25 bp, Homo sapien
ggaggccctgacatcggcatgcatg

SEQ ID NO: 3871580 - DNA, 25 bp, Homo sapien
tcggcatgcatgtttcccactgttg

SEQ ID NO: 3871581 - DNA, 25 bp, Homo sapien
tgttgtaaagcctgcttactacagt

SEQ ID NO: 3871582 - DNA, 25 bp, Homo sapien
gtttccgccagtgttacagatggag

SEQ ID NO: 3871583 - DNA, 25 bp, Homo sapien
ggtgaggaaatttgtgcccctgtga

SEQ ID NO: 3871584 - DNA, 25 bp, Homo sapien
caaagatttcctgtcccgtaatgga

SEQ ID NO: 3871585 - DNA, 25 bp, Homo sapien
tcccgtaatggaaagtaggtgtgac

SEQ ID NO: 3871586 - DNA, 25 bp, Homo sapien
gacgttctgtttgataatcccaggc

SEQ ID NO: 3871587 - DNA, 25 bp, Homo sapien
caatgtcgtcatctgctggcaactg

SEQ ID NO: 3871588 - DNA, 25 bp, Homo sapien
tcattgagggttatcactgtgaact

SEQ ID NO: 3871589 - DNA, 25 bp, Homo sapien
tctctagcaaagacccaatgtcgtc

SEQ ID NO: 3871590 - DNA, 25 bp, Homo sapien
actttctctggtggtttctctagca

SEQ ID NO: 3871591 - DNA, 25 bp, Homo sapien
tacagtgagcataaacaagcctggg

SEQ ID NO: 3871592 - DNA, 25 bp, Homo sapien
cctgggaatgaacctaatagactct

SEQ ID NO: 3871593 - DNA, 25 bp, Homo sapien
cattctgagggcaggttccacatag

SEQ ID NO: 3871594 - DNA, 25 bp, Homo sapien
cattgctaagacgtctagattgcct

SEQ ID NO: 3871595 - DNA, 25 bp, Homo sapien
ttaccattcagaagtaggaaatcca

SEQ ID NO: 3871596 - DNA, 25 bp, Homo sapien
taccattcagaagtaggaaatccat

SEQ ID NO: 3871597 - DNA, 25 bp, Homo sapien
tttaccattcagaagtaggaaatcc

SEQ ID NO: 3871598 - DNA, 25 bp, Homo sapien
actttcaaatactagcccattcact

SEQ ID NO: 3871599 - DNA, 25 bp, Homo sapien
gcagcattggctcttcgtgatcatc

SEQ ID NO: 3871600 - DNA, 25 bp, Homo sapien
ttgtccctgcttatatttgtcaact

SEQ ID NO: 3871601 - DNA, 25 bp, Homo sapien
cattcactagagcattatctcccca

SEQ ID NO: 3871602 - DNA, 25 bp, Homo sapien
tctgttcatgcaccttcgaatgtct

SEQ ID NO: 3871603 - DNA, 25 bp, Homo sapien
gcaccttcgaatgtcttctccttga

SEQ ID NO: 3871604 - DNA, 25 bp, Homo sapien
cttctccttgacacccaattccaca

SEQ ID NO: 3871605 - DNA, 25 bp, Homo sapien
cttcactctgttcatgcaccttcga

SEQ ID NO: 3871606 - DNA, 25 bp, Homo sapien
cagctggaattcacattctgaggcc

SEQ ID NO: 3871607 - DNA, 25 bp, Homo sapien
tgtttctagacattggttgacagag

SEQ ID NO: 3871608 - DNA, 25 bp, Homo sapien
cattggttgacagagcagctggaat

SEQ ID NO: 3871609 - DNA, 25 bp, Homo sapien
catgaatgaagactttgcactcaac

SEQ ID NO: 3871610 - DNA, 25 bp, Homo sapien
tccagttactaagctctcccttggg

SEQ ID NO: 3871611 - DNA, 25 bp, Homo sapien
ccagatttatcggagatggagacca

SEQ ID NO: 3871612 - DNA, 25 bp, Homo sapien
caagtgttagcacatgcccctgact

SEQ ID NO: 3871613 - DNA, 25 bp, Homo sapien
tgttcgacttttcctggccagagag

SEQ ID NO: 3871614 - DNA, 25 bp, Homo sapien
ttttgttcccaatgtatgagccctt

SEQ ID NO: 3871615 - DNA, 25 bp, Homo sapien
tattccaatgtaaactcccagagcc

SEQ ID NO: 3871616 - DNA, 25 bp, Homo sapien
tagtaacccgatacatattctttcc

SEQ ID NO: 3871617 - DNA, 25 bp, Homo sapien
gcagacctgggtagcttagtaaccc

SEQ ID NO: 3871618 - DNA, 25 bp, Homo sapien
ctctacttcttctaagattccatct

SEQ ID NO: 3871619 - DNA, 25 bp, Homo sapien
cctctacttcttctaagattccatc

SEQ ID NO: 3871620 - DNA, 25 bp, Homo sapien
tctacttcttctaagattccatctg

SEQ ID NO: 3871621 - DNA, 25 bp, Homo sapien
ctacttcttctaagattccatctgc

SEQ ID NO: 3871622 - DNA, 25 bp, Homo sapien
ccgatccctaagagcaagcctaaga

SEQ ID NO: 3871623 - DNA, 25 bp, Homo sapien
ttcccagtgtggtatctgaccccga

SEQ ID NO: 3871624 - DNA, 25 bp, Homo sapien
gatagtccatgaaaaggtcctgctg

SEQ ID NO: 3871625 - DNA, 25 bp, Homo sapien
ggagtgcccctcgatgtaaagtgtt

SEQ ID NO: 3871626 - DNA, 25 bp, Homo sapien
ccccttaagagcactcaaacacttg

SEQ ID NO: 3871627 - DNA, 25 bp, Homo sapien
ttagacaatccccttaagagcactc

SEQ ID NO: 3871628 - DNA, 25 bp, Homo sapien
gagcactcaaacacttgttcatgtt

SEQ ID NO: 3871629 - DNA, 25 bp, Homo sapien
tcaggagccaagatattagacaatc

SEQ ID NO: 3871630 - DNA, 25 bp, Homo sapien
aaatgggtacaaggtggctggaaga

SEQ ID NO: 3871631 - DNA, 25 bp, Homo sapien
ctcatttacgttaaagagcccttgg

SEQ ID NO: 3871632 - DNA, 25 bp, Homo sapien
cttgggcttgaaatgggtacaaggt

SEQ ID NO: 3871633 - DNA, 25 bp, Homo sapien
tcagtaactcatttacgttaaagag

SEQ ID NO: 3871634 - DNA, 25 bp, Homo sapien
ctgaattgtgaggacgctccctatc

SEQ ID NO: 3871635 - DNA, 25 bp, Homo sapien
atcagctgaaagctccagcccattg

SEQ ID NO: 3871636 - DNA, 25 bp, Homo sapien
ttctgaattgtgaggacgctcccta

SEQ ID NO: 3871637 - DNA, 25 bp, Homo sapien
tatcagctgaaagctccagcccatt

SEQ ID NO: 3871638 - DNA, 25 bp, Homo sapien
aatactcaaactgtcatgaaaagcc

SEQ ID NO: 3871639 - DNA, 25 bp, Homo sapien
tcatgtgcaatactcaaactgtcat

SEQ ID NO: 3871640 - DNA, 25 bp, Homo sapien
atgtgcttgaggctttgctagatgc

SEQ ID NO: 3871641 - DNA, 25 bp, Homo sapien
tgctagatgcttcatgtgcaatact

SEQ ID NO: 3871642 - DNA, 25 bp, Homo sapien
gatgaatcatgttgtctggctgaaa

SEQ ID NO: 3871643 - DNA, 25 bp, Homo sapien
ccatcgtgtatgaacaatgctctca

SEQ ID NO: 3871644 - DNA, 25 bp, Homo sapien
ggtaggagacctagaccatcgtgta

SEQ ID NO: 3871645 - DNA, 25 bp, Homo sapien
ggaatcttctctttaaacgtggctg

SEQ ID NO: 3871646 - DNA, 25 bp, Homo sapien
ttgaatactttgagtgccacataga

SEQ ID NO: 3871647 - DNA, 25 bp, Homo sapien
gtcaacattaccctgtacaatagct

SEQ ID NO: 3871648 - DNA, 25 bp, Homo sapien
gccacatagaaaataacacccactg

SEQ ID NO: 3871649 - DNA, 25 bp, Homo sapien
tctccttcacgaaaagtcaacatta

SEQ ID NO: 3871650 - DNA, 25 bp, Homo sapien
ttttggatggaccattccatcctgg

SEQ ID NO: 3871651 - DNA, 25 bp, Homo sapien
ttggatggaccattccatcctggag

SEQ ID NO: 3871652 - DNA, 25 bp, Homo sapien
tctctgggctatcacaactggcttt

SEQ ID NO: 3871653 - DNA, 25 bp, Homo sapien
accttctctgggctatcacaactgg

SEQ ID NO: 3871654 - DNA, 25 bp, Homo sapien
ctgctgctgatgaattatcaaacac

SEQ ID NO: 3871655 - DNA, 25 bp, Homo sapien
ttgaagcgacaggagctgtgtggaa

SEQ ID NO: 3871656 - DNA, 25 bp, Homo sapien
gaagcgacaggagctgtgtggaagc

SEQ ID NO: 3871657 - DNA, 25 bp, Homo sapien
tgctgctgctgatgaattatcaaac

SEQ ID NO: 3871658 - DNA, 25 bp, Homo sapien
gctctgtgaataagtcatgtagcac

SEQ ID NO: 3871659 - DNA, 25 bp, Homo sapien
catgtagcacaatgtaaagtgggat

SEQ ID NO: 3871660 - DNA, 25 bp, Homo sapien
caggcaagtgcggtgattagaatga

SEQ ID NO: 3871661 - DNA, 25 bp, Homo sapien
tagaatgaatcaacatcaggcgccg

SEQ ID NO: 3871662 - DNA, 25 bp, Homo sapien
gctggtcttaggaagtcctcaggtg

SEQ ID NO: 3871663 - DNA, 25 bp, Homo sapien
gctggtccttcagtgcgctggtctt

SEQ ID NO: 3871664 - DNA, 25 bp, Homo sapien
gagattgatttgactcagcctctcc

SEQ ID NO: 3871665 - DNA, 25 bp, Homo sapien
cctcaggtgaggagattgatttgac

SEQ ID NO: 3871666 - DNA, 25 bp, Homo sapien
cttccattcagcagtgttacatact

SEQ ID NO: 3871667 - DNA, 25 bp, Homo sapien
ggcaggggccacttgcttccattca

SEQ ID NO: 3871668 - DNA, 25 bp, Homo sapien
tcactcatgttacatattgactggg

SEQ ID NO: 3871669 - DNA, 25 bp, Homo sapien
cattcagcagtgttacatactcttc

SEQ ID NO: 3871670 - DNA, 25 bp, Homo sapien
cagatcttattgagggctgttctct

SEQ ID NO: 3871671 - DNA, 25 bp, Homo sapien
ttccagatcttattgagggctgttc

SEQ ID NO: 3871672 - DNA, 25 bp, Homo sapien
tctttccagatcttattgagggctg

SEQ ID NO: 3871673 - DNA, 25 bp, Homo sapien
ccagatcttattgagggctgttctc

SEQ ID NO: 3871674 - DNA, 25 bp, Homo sapien
gcatgtaatatagtaagcctcacca

SEQ ID NO: 3871675 - DNA, 25 bp, Homo sapien
ttttcagtagatgggccaaagtgct

SEQ ID NO: 3871676 - DNA, 25 bp, Homo sapien
tcaccaaatgttgggtactatccaa

SEQ ID NO: 3871677 - DNA, 25 bp, Homo sapien
tccttcgaccaccatgagactcttg

SEQ ID NO: 3871678 - DNA, 25 bp, Homo sapien
caatggatttcactgtggacaaccc

SEQ ID NO: 3871679 - DNA, 25 bp, Homo sapien
gtattctgaagagagcaatggattt

SEQ ID NO: 3871680 - DNA, 25 bp, Homo sapien
ttcactgtggacaaccctattttcc

SEQ ID NO: 3871681 - DNA, 25 bp, Homo sapien
gaagagagcaatggatttcactgtg

SEQ ID NO: 3871682 - DNA, 25 bp, Homo sapien
gtaagggccttcttgttttgtcata

SEQ ID NO: 3871683 - DNA, 25 bp, Homo sapien
aaggtgctggcatcttgtaagggcc

SEQ ID NO: 3871684 - DNA, 25 bp, Homo sapien
ggcatcttgtaagggccttcttgtt

SEQ ID NO: 3871685 - DNA, 25 bp, Homo sapien
caaggtgctggcatcttgtaagggc

SEQ ID NO: 3871686 - DNA, 25 bp, Homo sapien
tctgactccgttggagtctggcagc

SEQ ID NO: 3871687 - DNA, 25 bp, Homo sapien
gacagtttggatagcgatctcctgg

SEQ ID NO: 3871688 - DNA, 25 bp, Homo sapien
cttttctgatcagggggtgacagtt

SEQ ID NO: 3871689 - DNA, 25 bp, Homo sapien
tgaggatctgactccgttggagtct

SEQ ID NO: 3871690 - DNA, 25 bp, Homo sapien
tcgctcaggtgctgtcagttactta

SEQ ID NO: 3871691 - DNA, 25 bp, Homo sapien
tgatttaatccaaatgagagatcgc

SEQ ID NO: 3871692 - DNA, 25 bp, Homo sapien
gagagatcgctcaggtgctgtcagt

SEQ ID NO: 3871693 - DNA, 25 bp, Homo sapien
ccaaatgagagatcgctcaggtgct

SEQ ID NO: 3871694 - DNA, 25 bp, Homo sapien
attcagacaaagcagcacagtcggc

SEQ ID NO: 3871695 - DNA, 25 bp, Homo sapien
gattcagacaaagcagcacagtcgg

SEQ ID NO: 3871696 - DNA, 25 bp, Homo sapien
ctagattcagacaaagcagcacagt

SEQ ID NO: 3871697 - DNA, 25 bp, Homo sapien
tagattcagacaaagcagcacagtc

SEQ ID NO: 3871698 - DNA, 25 bp, Homo sapien
tcttcccaggtgtggtgtcaatttt

SEQ ID NO: 3871699 - DNA, 25 bp, Homo sapien
tcagcctccttaagggccgatcctt

SEQ ID NO: 3871700 - DNA, 25 bp, Homo sapien
gatgggctttaacatcgcatcagcc

SEQ ID NO: 3871701 - DNA, 25 bp, Homo sapien
ggtgtcaattttagagtgatgggct

SEQ ID NO: 3871702 - DNA, 25 bp, Homo sapien
caaagctgactgatataccttgtca

SEQ ID NO: 3871703 - DNA, 25 bp, Homo sapien
tatgaaggccatggatggtccaccc

SEQ ID NO: 3871704 - DNA, 25 bp, Homo sapien
catatagccgtagagcttgctggag

SEQ ID NO: 3871705 - DNA, 25 bp, Homo sapien
aacaagtgatggatgtgtcagaaac

SEQ ID NO: 3871706 - DNA, 25 bp, Homo sapien
aggttgcagaaaacatgtggagcag

SEQ ID NO: 3871707 - DNA, 25 bp, Homo sapien
aaaacatgtggagcagaggtacaga

SEQ ID NO: 3871708 - DNA, 25 bp, Homo sapien
tgaaccatgagacctgcatctcagg

SEQ ID NO: 3871709 - DNA, 25 bp, Homo sapien
tggttcattcacagtgctcttctcc

SEQ ID NO: 3871710 - DNA, 25 bp, Homo sapien
cactgatatagcttgacactgggac

SEQ ID NO: 3871711 - DNA, 25 bp, Homo sapien
gattaatggcattgactaactggtg

SEQ ID NO: 3871712 - DNA, 25 bp, Homo sapien
tatgcatgcgttttctgctatagga

SEQ ID NO: 3871713 - DNA, 25 bp, Homo sapien
caagtgcctgaattgttgccatagc

SEQ ID NO: 3871714 - DNA, 25 bp, Homo sapien
ttctgatgcaaaagttcccagtgag

SEQ ID NO: 3871715 - DNA, 25 bp, Homo sapien
tccactatggagtttgggaaggtca

SEQ ID NO: 3871716 - DNA, 25 bp, Homo sapien
gagatggagatggattgacagcccc

SEQ ID NO: 3871717 - DNA, 25 bp, Homo sapien
aaggtcatggacttccctaatttga

SEQ ID NO: 3871718 - DNA, 25 bp, Homo sapien
ccatggtagggactgcctggtggga

SEQ ID NO: 3871719 - DNA, 25 bp, Homo sapien
tggagccatggtagggactgcctgg

SEQ ID NO: 3871720 - DNA, 25 bp, Homo sapien
agccatggtagggactgcctggtgg

SEQ ID NO: 3871721 - DNA, 25 bp, Homo sapien
ggagccatggtagggactgcctggt

SEQ ID NO: 3871722 - DNA, 25 bp, Homo sapien
gatggtgctgactgtgagtaagcac

SEQ ID NO: 3871723 - DNA, 25 bp, Homo sapien
tttgcttggaatagtccctgggctg

SEQ ID NO: 3871724 - DNA, 25 bp, Homo sapien
cacttattaaggaccactacatgca

SEQ ID NO: 3871725 - DNA, 25 bp, Homo sapien
aggaccactacatgcacagttactg

SEQ ID NO: 3871726 - DNA, 25 bp, Homo sapien
gattgatatcttgttgttccctgca

SEQ ID NO: 3871727 - DNA, 25 bp, Homo sapien
attgttttcaccctcctggtgatgc

SEQ ID NO: 3871728 - DNA, 25 bp, Homo sapien
gatatcttgttgttccctgcacaga

SEQ ID NO: 3871729 - DNA, 25 bp, Homo sapien
cctggtgatgctcaaagttgattga

SEQ ID NO: 3871730 - DNA, 25 bp, Homo sapien
agaccccatcacccacttttttgtg

SEQ ID NO: 3871731 - DNA, 25 bp, Homo sapien
gaccccatcacccacttttttgtga

SEQ ID NO: 3871732 - DNA, 25 bp, Homo sapien
agaatgaaacattaagggtcttccg

SEQ ID NO: 3871733 - DNA, 25 bp, Homo sapien
agctgtgtctggaggttaccacccc

SEQ ID NO: 3871734 - DNA, 25 bp, Homo sapien
tcttccgtagccaagagctgtgtct

SEQ ID NO: 3871735 - DNA, 25 bp, Homo sapien
acattaagggtcttccgtagccaag

SEQ ID NO: 3871736 - DNA, 25 bp, Homo sapien
ctcctccgctcggtgttgcagcctc

SEQ ID NO: 3871737 - DNA, 25 bp, Homo sapien
gcgcttcaccgcctcaatggtggtg

SEQ ID NO: 3871738 - DNA, 25 bp, Homo sapien
ggatcttgcgcttcaccgcctcaat

SEQ ID NO: 3871739 - DNA, 25 bp, Homo sapien
ctgcctcctccgctcggtgttgcag

SEQ ID NO: 3871740 - DNA, 25 bp, Homo sapien
tcaacttcttgctggaggcgctcag

SEQ ID NO: 3871741 - DNA, 25 bp, Homo sapien
ctcaacttcttgctggaggcgctca

SEQ ID NO: 3871742 - DNA, 25 bp, Homo sapien
ctcagcctgtttccgggcccgcctt

SEQ ID NO: 3871743 - DNA, 25 bp, Homo sapien
cagcctcagcctgtttccgggcccg

SEQ ID NO: 3871744 - DNA, 25 bp, Homo sapien
gcgctcctgaggacgatccagctct

SEQ ID NO: 3871745 - DNA, 25 bp, Homo sapien
gctcctgaggacgatccagctcttc

SEQ ID NO: 3871746 - DNA, 25 bp, Homo sapien
aggcgctcctgaggacgatccagct

SEQ ID NO: 3871747 - DNA, 25 bp, Homo sapien
ccaggcgctcctgaggacgatccag

SEQ ID NO: 3871748 - DNA, 25 bp, Homo sapien
ttggagttcttggagttccatcttt

SEQ ID NO: 3871749 - DNA, 25 bp, Homo sapien
cttctttgagttggagttcttggag

SEQ ID NO: 3871750 - DNA, 25 bp, Homo sapien
agttggagttcttggagttccatct

SEQ ID NO: 3871751 - DNA, 25 bp, Homo sapien
tttgagttggagttcttggagttcc

SEQ ID NO: 3871752 - DNA, 25 bp, Homo sapien
tcggcaacgggactctgtcagctca

SEQ ID NO: 3871753 - DNA, 25 bp, Homo sapien
catctctcggcaacgggactctgtc

SEQ ID NO: 3871754 - DNA, 25 bp, Homo sapien
tctcggcaacgggactctgtcagct

SEQ ID NO: 3871755 - DNA, 25 bp, Homo sapien
atctctcggcaacgggactctgtca

SEQ ID NO: 3871756 - DNA, 25 bp, Homo sapien
cttgggtttatcagtaaaaatcttg

SEQ ID NO: 3871757 - DNA, 25 bp, Homo sapien
gtttatcagtaaaaatcttgatttc

SEQ ID NO: 3871758 - DNA, 25 bp, Homo sapien
cagcaaactcagcacaggtctctgc

SEQ ID NO: 3871759 - DNA, 25 bp, Homo sapien
tgcctccttgggtttatcagtaaaa

SEQ ID NO: 3871760 - DNA, 25 bp, Homo sapien
cagctggattctccgggaaaaggca

SEQ ID NO: 3871761 - DNA, 25 bp, Homo sapien
acagtttggcgaaaaagacacaggg

SEQ ID NO: 3871762 - DNA, 25 bp, Homo sapien
tacagagcaatgaggtttcccacag

SEQ ID NO: 3871763 - DNA, 25 bp, Homo sapien
tctcagcaaggcaagcctatacctt

SEQ ID NO: 3871764 - DNA, 25 bp, Homo sapien
taagctgcaggatgtacacctaaca

SEQ ID NO: 3871765 - DNA, 25 bp, Homo sapien
caataagctgcaggatgtacaccta

SEQ ID NO: 3871766 - DNA, 25 bp, Homo sapien
tgcaggatgtacacctaacagacct

SEQ ID NO: 3871767 - DNA, 25 bp, Homo sapien
agccaataagctgcaggatgtacac

SEQ ID NO: 3871768 - DNA, 25 bp, Homo sapien
cattttctgccaacacatgaaggtg

SEQ ID NO: 3871769 - DNA, 25 bp, Homo sapien
atagcattttctgccaacacatgaa

SEQ ID NO: 3871770 - DNA, 25 bp, Homo sapien
tctgccaacacatgaaggtggttgg

SEQ ID NO: 3871771 - DNA, 25 bp, Homo sapien
ctaatgttgggaccaaagtaactgg

SEQ ID NO: 3871772 - DNA, 25 bp, Homo sapien
cttcagtcagaaccttggaactggc

SEQ ID NO: 3871773 - DNA, 25 bp, Homo sapien
gaagacaattaaattagagttcagc

SEQ ID NO: 3871774 - DNA, 25 bp, Homo sapien
tagagttcagcttcgaggagttcat

SEQ ID NO: 3871775 - DNA, 25 bp, Homo sapien
ccttcttctcaattaagtagaagac

SEQ ID NO: 3871776 - DNA, 25 bp, Homo sapien
aatgatgatgttcctccacttttca

SEQ ID NO: 3871777 - DNA, 25 bp, Homo sapien
tctggaatgatgatgttcctccact

SEQ ID NO: 3871778 - DNA, 25 bp, Homo sapien
agtgtctggaatgatgatgttcctc

SEQ ID NO: 3871779 - DNA, 25 bp, Homo sapien
tggaatgatgatgttcctccacttt

SEQ ID NO: 3871780 - DNA, 25 bp, Homo sapien
tccaaatctggccaattggtagcag

SEQ ID NO: 3871781 - DNA, 25 bp, Homo sapien
attccttagaattgggggtggcatt

SEQ ID NO: 3871782 - DNA, 25 bp, Homo sapien
tcagatggcattgggatttctccaa

SEQ ID NO: 3871783 - DNA, 25 bp, Homo sapien
ggccaattggtagcagcatcttcat

SEQ ID NO: 3871784 - DNA, 25 bp, Homo sapien
tatggcgagtatatgagggttccct

SEQ ID NO: 3871785 - DNA, 25 bp, Homo sapien
gggttccctgcgtgcaagccatttg

SEQ ID NO: 3871786 - DNA, 25 bp, Homo sapien
tagcttcctagcaaccaatcctcag

SEQ ID NO: 3871787 - DNA, 25 bp, Homo sapien
taaagaggttggctctccccaagct

SEQ ID NO: 3871788 - DNA, 25 bp, Homo sapien
tgtacaaagttgaagaaatgccttc

SEQ ID NO: 3871789 - DNA, 25 bp, Homo sapien
atgtacaaagttgaagaaatgcctt

SEQ ID NO: 3871790 - DNA, 25 bp, Homo sapien
agttgaagaaatgccttcacataca

SEQ ID NO: 3871791 - DNA, 25 bp, Homo sapien
caaagttgaagaaatgccttcacat

SEQ ID NO: 3871792 - DNA, 25 bp, Homo sapien
gggattggttagctgagtggaggct

SEQ ID NO: 3871793 - DNA, 25 bp, Homo sapien
gccttgtttgggattggttagctga

SEQ ID NO: 3871794 - DNA, 25 bp, Homo sapien
ttgggattggttagctgagtggagg

SEQ ID NO: 3871795 - DNA, 25 bp, Homo sapien
ccttgtttgggattggttagctgag

SEQ ID NO: 3871796 - DNA, 25 bp, Homo sapien
tttgcccctcgacatgagtgtttat

SEQ ID NO: 3871797 - DNA, 25 bp, Homo sapien
gtgtcttcatccaggtctatatctt

SEQ ID NO: 3871798 - DNA, 25 bp, Homo sapien
gagtgtttatcgttatgaaagtcag

SEQ ID NO: 3871799 - DNA, 25 bp, Homo sapien
tttcaaaagcctttgcccctcgaca

SEQ ID NO: 3871800 - DNA, 25 bp, Homo sapien
catgacaaaaagcatccaagtgcct

SEQ ID NO: 3871801 - DNA, 25 bp, Homo sapien
aagaaacatgaacatgacaaaaagc

SEQ ID NO: 3871802 - DNA, 25 bp, Homo sapien
catccaagtgcctttggaaagtcac

SEQ ID NO: 3871803 - DNA, 25 bp, Homo sapien
tgaacatgacaaaaagcatccaagt

SEQ ID NO: 3871804 - DNA, 25 bp, Homo sapien
ggaaaggtggccatcgtaggtggaa

SEQ ID NO: 3871805 - DNA, 25 bp, Homo sapien
catcgtaggtggaatgcatactgtc

SEQ ID NO: 3871806 - DNA, 25 bp, Homo sapien
gaagtacagggtgcagaatgggaaa

SEQ ID NO: 3871807 - DNA, 25 bp, Homo sapien
gtggccatcgtaggtggaatgcata

SEQ ID NO: 3871808 - DNA, 25 bp, Homo sapien
tccctgtgactgttgaggtagaacc

SEQ ID NO: 3871809 - DNA, 25 bp, Homo sapien
gaacctggaactgtatgtcaccttt

SEQ ID NO: 3871810 - DNA, 25 bp, Homo sapien
gcactgtcctagcaccagttagaag

SEQ ID NO: 3871811 - DNA, 25 bp, Homo sapien
cctgcactgtcctagcaccagttag

SEQ ID NO: 3871812 - DNA, 25 bp, Homo sapien
gctaaataatattccgtttctgagg

SEQ ID NO: 3871813 - DNA, 25 bp, Homo sapien
ttaatgactcattagtgcagcgaga

SEQ ID NO: 3871814 - DNA, 25 bp, Homo sapien
taatattccgtttctgaggacttca

SEQ ID NO: 3871815 - DNA, 25 bp, Homo sapien
gagaacactttccatcgcttgctaa

SEQ ID NO: 3871816 - DNA, 25 bp, Homo sapien
gtaattttcattggcgggactccag

SEQ ID NO: 3871817 - DNA, 25 bp, Homo sapien
tcttggttgaagagtggtaattttc

SEQ ID NO: 3871818 - DNA, 25 bp, Homo sapien
cagccttgttggagccatcgtgagg

SEQ ID NO: 3871819 - DNA, 25 bp, Homo sapien
aaagggtaatgaagtaatatgatgt

SEQ ID NO: 3871820 - DNA, 25 bp, Homo sapien
gaaggagagaaccttgcaagatgtc

SEQ ID NO: 3871821 - DNA, 25 bp, Homo sapien
aaccttgcaagatgtctgagtcaga

SEQ ID NO: 3871822 - DNA, 25 bp, Homo sapien
agtcagagagggtcatgtacacaga

SEQ ID NO: 3871823 - DNA, 25 bp, Homo sapien
gtcagagagggtcatgtacacagag

SEQ ID NO: 3871824 - DNA, 25 bp, Homo sapien
tatgtggcccaagtaggaccaaggg

SEQ ID NO: 3871825 - DNA, 25 bp, Homo sapien
tctaggcataggcagagcttgtctc

SEQ ID NO: 3871826 - DNA, 25 bp, Homo sapien
tgcagactccaacatgatcaggcca

SEQ ID NO: 3871827 - DNA, 25 bp, Homo sapien
tggtcacaggtccaactttttggga

SEQ ID NO: 3871828 - DNA, 25 bp, Homo sapien
gagtgaatatgcgaatgccccgtcc

SEQ ID NO: 3871829 - DNA, 25 bp, Homo sapien
tatagtcagtgactgctagcagcat

SEQ ID NO: 3871830 - DNA, 25 bp, Homo sapien
taaccgagtaggtcctaggagtgaa

SEQ ID NO: 3871831 - DNA, 25 bp, Homo sapien
ctgcaagtaatggttctccatgtgc

SEQ ID NO: 3871832 - DNA, 25 bp, Homo sapien
ttcacatacattctaggtgctatca

SEQ ID NO: 3871833 - DNA, 25 bp, Homo sapien
cattctaggtgctatcatcatccac

SEQ ID NO: 3871834 - DNA, 25 bp, Homo sapien
cagcacctccatgattccgtggtgt

SEQ ID NO: 3871835 - DNA, 25 bp, Homo sapien
gattccgtggtgtcagtggtgttct

SEQ ID NO: 3871836 - DNA, 25 bp, Homo sapien
gctgtagataagcaaagatggatgt

SEQ ID NO: 3871837 - DNA, 25 bp, Homo sapien
tagataagcaaagatggatgtaaaa

SEQ ID NO: 3871838 - DNA, 25 bp, Homo sapien
tgtagataagcaaagatggatgtaa

SEQ ID NO: 3871839 - DNA, 25 bp, Homo sapien
ctgtagataagcaaagatggatgta

SEQ ID NO: 3871840 - DNA, 25 bp, Homo sapien
ctgcttctcattgtgaggagcccat

SEQ ID NO: 3871841 - DNA, 25 bp, Homo sapien
ggagcccatgcagggttggtgtgca

SEQ ID NO: 3871842 - DNA, 25 bp, Homo sapien
tctcattgtgaggagcccatgcagg

SEQ ID NO: 3871843 - DNA, 25 bp, Homo sapien
cttctcattgtgaggagcccatgca

SEQ ID NO: 3871844 - DNA, 25 bp, Homo sapien
gtagagaactcccatacagcaaagt

SEQ ID NO: 3871845 - DNA, 25 bp, Homo sapien
gactttccaataggacattccaaga

SEQ ID NO: 3871846 - DNA, 25 bp, Homo sapien
gaaactgtaagtactcgtagagaac

SEQ ID NO: 3871847 - DNA, 25 bp, Homo sapien
agtacagacctgatgagagaatttg

SEQ ID NO: 3871848 - DNA, 25 bp, Homo sapien
gcaagaggggccgtattagttcctc

SEQ ID NO: 3871849 - DNA, 25 bp, Homo sapien
gggccgtattagttcctcaccaata

SEQ ID NO: 3871850 - DNA, 25 bp, Homo sapien
gaggggccgtattagttcctcacca

SEQ ID NO: 3871851 - DNA, 25 bp, Homo sapien
agaagcaagaggggccgtattagtt

SEQ ID NO: 3871852 - DNA, 25 bp, Homo sapien
gaaatgagctccttgaatgaatcgc

SEQ ID NO: 3871853 - DNA, 25 bp, Homo sapien
aatgagctccttgaatgaatcgcac

SEQ ID NO: 3871854 - DNA, 25 bp, Homo sapien
ggaaatgagctccttgaatgaatcg

SEQ ID NO: 3871855 - DNA, 25 bp, Homo sapien
ttggaaatgagctccttgaatgaat

SEQ ID NO: 3871856 - DNA, 25 bp, Homo sapien
gataaatgggtccataagcacccaa

SEQ ID NO: 3871857 - DNA, 25 bp, Homo sapien
ttttaaggcattgatgaaatccaca

SEQ ID NO: 3871858 - DNA, 25 bp, Homo sapien
ggtccataagcacccaactgattac

SEQ ID NO: 3871859 - DNA, 25 bp, Homo sapien
ttgatgaaatccacatcagtgataa

SEQ ID NO: 3871860 - DNA, 25 bp, Homo sapien
aattcagaatctttagaacacattc

SEQ ID NO: 3871861 - DNA, 25 bp, Homo sapien
acacattctctagctggtttaccca

SEQ ID NO: 3871862 - DNA, 25 bp, Homo sapien
agaatctttagaacacattctctag

SEQ ID NO: 3871863 - DNA, 25 bp, Homo sapien
tggtttacccatgtttctctcctcc

SEQ ID NO: 3871864 - DNA, 25 bp, Homo sapien
ctgaaaataaccattaagttgattt

SEQ ID NO: 3871865 - DNA, 25 bp, Homo sapien
tgaaaataaccattaagttgattta

SEQ ID NO: 3871866 - DNA, 25 bp, Homo sapien
aacttataaattccacgaagataga

SEQ ID NO: 3871867 - DNA, 25 bp, Homo sapien
cttataaattccacgaagatagatc

SEQ ID NO: 3871868 - DNA, 25 bp, Homo sapien
acttataaattccacgaagatagat

SEQ ID NO: 3871869 - DNA, 25 bp, Homo sapien
gtcagcaggtagataactttgggac

SEQ ID NO: 3871870 - DNA, 25 bp, Homo sapien
ccttctttctctatgtgaagcgcca

SEQ ID NO: 3871871 - DNA, 25 bp, Homo sapien
ttgggactcatgatatctttggcac

SEQ ID NO: 3871872 - DNA, 25 bp, Homo sapien
catgatatctttggcacttccttct

SEQ ID NO: 3871873 - DNA, 25 bp, Homo sapien
gggactatgcatgtgggtcctaaga

SEQ ID NO: 3871874 - DNA, 25 bp, Homo sapien
aataggtgcttcttggggactatgc

SEQ ID NO: 3871875 - DNA, 25 bp, Homo sapien
cctaagaggtgaatctgtgcaaaga

SEQ ID NO: 3871876 - DNA, 25 bp, Homo sapien
catgtgggtcctaagaggtgaatct

SEQ ID NO: 3871877 - DNA, 25 bp, Homo sapien
ggttgggatttgaatcttgtccctg

SEQ ID NO: 3871878 - DNA, 25 bp, Homo sapien
tggttcctttcttgttgagaggagg

SEQ ID NO: 3871879 - DNA, 25 bp, Homo sapien
tgaatcttgtccctgtttccagcac

SEQ ID NO: 3871880 - DNA, 25 bp, Homo sapien
ctctttgcttactttgtggttcctt

SEQ ID NO: 3871881 - DNA, 25 bp, Homo sapien
agagccaagagacacggggcgggct

SEQ ID NO: 3871882 - DNA, 25 bp, Homo sapien
cggagagccaagagacacggggcgg

SEQ ID NO: 3871883 - DNA, 25 bp, Homo sapien
ccggagagccaagagacacggggcg

SEQ ID NO: 3871884 - DNA, 25 bp, Homo sapien
gagagccaagagacacggggcgggc

SEQ ID NO: 3871885 - DNA, 25 bp, Homo sapien
aacctcatgaataggaattcgtctt

SEQ ID NO: 3871886 - DNA, 25 bp, Homo sapien
tcatgaataggaattcgtcttcccc

SEQ ID NO: 3871887 - DNA, 25 bp, Homo sapien
tgaaacctcatgaataggaattcgt

SEQ ID NO: 3871888 - DNA, 25 bp, Homo sapien
cctcatgaataggaattcgtcttcc

SEQ ID NO: 3871889 - DNA, 25 bp, Homo sapien
aaatttttgctctcggatgctttga

SEQ ID NO: 3871890 - DNA, 25 bp, Homo sapien
aatttttgctctcggatgctttgaa

SEQ ID NO: 3871891 - DNA, 25 bp, Homo sapien
gaaaatttttgctctcggatgcttt

SEQ ID NO: 3871892 - DNA, 25 bp, Homo sapien
ctgaaaatttttgctctcggatgct

SEQ ID NO: 3871893 - DNA, 25 bp, Homo sapien
gaaatccttgcatatcctttatatt

SEQ ID NO: 3871894 - DNA, 25 bp, Homo sapien
ctggagcacgggcaagggctatatg

SEQ ID NO: 3871895 - DNA, 25 bp, Homo sapien
cgggcaagggctatatgacctctgg

SEQ ID NO: 3871896 - DNA, 25 bp, Homo sapien
aagaaatccttgcatatcctttata

SEQ ID NO: 3871897 - DNA, 25 bp, Homo sapien
tgttccttgagataccttggaggag

SEQ ID NO: 3871898 - DNA, 25 bp, Homo sapien
ctttgtgttccttgagataccttgg

SEQ ID NO: 3871899 - DNA, 25 bp, Homo sapien
gagataccttggaggagatttctca

SEQ ID NO: 3871900 - DNA, 25 bp, Homo sapien
tccttgagataccttggaggagatt

SEQ ID NO: 3871901 - DNA, 25 bp, Homo sapien
tcactaagctgcaatactgtaacag

SEQ ID NO: 3871902 - DNA, 25 bp, Homo sapien
gcttggacttccagaggcttggatg

SEQ ID NO: 3871903 - DNA, 25 bp, Homo sapien
actgacatagcttggacttccagag

SEQ ID NO: 3871904 - DNA, 25 bp, Homo sapien
ggcttggatgaaaagattgtcttct

SEQ ID NO: 3871905 - DNA, 25 bp, Homo sapien
gggacggaataggtattatttatca

SEQ ID NO: 3871906 - DNA, 25 bp, Homo sapien
ctgctggaccccctcacacctgctt

SEQ ID NO: 3871907 - DNA, 25 bp, Homo sapien
gttttcttctgctggaccccctcac

SEQ ID NO: 3871908 - DNA, 25 bp, Homo sapien
tcttctgctggaccccctcacacct

SEQ ID NO: 3871909 - DNA, 25 bp, Homo sapien
tttcttctgctggaccccctcacac

SEQ ID NO: 3871910 - DNA, 25 bp, Homo sapien
gccaaacttgctgatgaactcaaac

SEQ ID NO: 3871911 - DNA, 25 bp, Homo sapien
aacttgctgatgaactcaaacactt

SEQ ID NO: 3871912 - DNA, 25 bp, Homo sapien
caggccaaacttgctgatgaactca

SEQ ID NO: 3871913 - DNA, 25 bp, Homo sapien
caaacttgctgatgaactcaaacac

SEQ ID NO: 3871914 - DNA, 25 bp, Homo sapien
accagtgatggctggcacattacgt

SEQ ID NO: 3871915 - DNA, 25 bp, Homo sapien
tgatggctggcacattacgtggtcg

SEQ ID NO: 3871916 - DNA, 25 bp, Homo sapien
agtgatggctggcacattacgtggt

SEQ ID NO: 3871917 - DNA, 25 bp, Homo sapien
gcacattacgtggtcgagaagggca

SEQ ID NO: 3871918 - DNA, 25 bp, Homo sapien
cttggtcgtgacggatggcagcacc

SEQ ID NO: 3871919 - DNA, 25 bp, Homo sapien
tggtcgtgacggatggcagcacctg

SEQ ID NO: 3871920 - DNA, 25 bp, Homo sapien
ttggtcgtgacggatggcagcacct

SEQ ID NO: 3871921 - DNA, 25 bp, Homo sapien
ctcgctctgtaagtaaggtcattgc

SEQ ID NO: 3871922 - DNA, 25 bp, Homo sapien
ctctgtaagtaaggtcattgctcac

SEQ ID NO: 3871923 - DNA, 25 bp, Homo sapien
ggtggctgctcgctctgtaagtaag

SEQ ID NO: 3871924 - DNA, 25 bp, Homo sapien
gctgctcgctctgtaagtaaggtca

SEQ ID NO: 3871925 - DNA, 25 bp, Homo sapien
atcagctcagctgccttggagtagc

SEQ ID NO: 3871926 - DNA, 25 bp, Homo sapien
tcagctgccttggagtagccctcag

SEQ ID NO: 3871927 - DNA, 25 bp, Homo sapien
gctcagctgccttggagtagccctc

SEQ ID NO: 3871928 - DNA, 25 bp, Homo sapien
agctgccttggagtagccctcagca

SEQ ID NO: 3871929 - DNA, 25 bp, Homo sapien
actgcccagccggcggataggtgat

SEQ ID NO: 3871930 - DNA, 25 bp, Homo sapien
tgcccagccggcggataggtgatgt

SEQ ID NO: 3871931 - DNA, 25 bp, Homo sapien
cccagccggcggataggtgatgttc

SEQ ID NO: 3871932 - DNA, 25 bp, Homo sapien
gactgcccagccggcggataggtga

SEQ ID NO: 3871933 - DNA, 25 bp, Homo sapien
gaaggcggtgttaagaatcatcgga

SEQ ID NO: 3871934 - DNA, 25 bp, Homo sapien
ccccagtcagcccacggcggtgcag

SEQ ID NO: 3871935 - DNA, 25 bp, Homo sapien
agaatcatcggagctgtgccccagt

SEQ ID NO: 3871936 - DNA, 25 bp, Homo sapien
tcagcccacggcggtgcaggcagga

SEQ ID NO: 3871937 - DNA, 25 bp, Homo sapien
tttaagccagtcatggaatttcacg

SEQ ID NO: 3871938 - DNA, 25 bp, Homo sapien
aagccagtcatggaatttcacgtga

SEQ ID NO: 3871939 - DNA, 25 bp, Homo sapien
ccagtcatggaatttcacgtgattt

SEQ ID NO: 3871940 - DNA, 25 bp, Homo sapien
taagccagtcatggaatttcacgtg

SEQ ID NO: 3871941 - DNA, 25 bp, Homo sapien
tgagccgcatgtgtcctcatccgca

SEQ ID NO: 3871942 - DNA, 25 bp, Homo sapien
tgcatctgcgcaggaacagctgaga

SEQ ID NO: 3871943 - DNA, 25 bp, Homo sapien
tatggtaagagacggaccaagtcct

SEQ ID NO: 3871944 - DNA, 25 bp, Homo sapien
caggacggaggtcacacgtggaccc

SEQ ID NO: 3871945 - DNA, 25 bp, Homo sapien
ctcaacaggggcagattcttcaatc

SEQ ID NO: 3871946 - DNA, 25 bp, Homo sapien
acagagcccttaagaagggcagtct

SEQ ID NO: 3871947 - DNA, 25 bp, Homo sapien
gcacagagcccttaagaagggcagt

SEQ ID NO: 3871948 - DNA, 25 bp, Homo sapien
ttaagaagggcagtctgtgaaccag

SEQ ID NO: 3871949 - DNA, 25 bp, Homo sapien
taagaagggcagtctgtgaaccagg

SEQ ID NO: 3871950 - DNA, 25 bp, Homo sapien
ccaggcattgtacttcactagatta

SEQ ID NO: 3871951 - DNA, 25 bp, Homo sapien
tattgagaactcacagtgtgccaga

SEQ ID NO: 3871952 - DNA, 25 bp, Homo sapien
tggatctaagcctgtcctgaagctg

SEQ ID NO: 3871953 - DNA, 25 bp, Homo sapien
ggcagccttggaacatggatctaag

SEQ ID NO: 3871954 - DNA, 25 bp, Homo sapien
cataaagagttcatatggaggttct

SEQ ID NO: 3871955 - DNA, 25 bp, Homo sapien
gactggtgccatgatggtgacagca

SEQ ID NO: 3871956 - DNA, 25 bp, Homo sapien
gctctggcactaaagataatctggg

SEQ ID NO: 3871957 - DNA, 25 bp, Homo sapien
gatgttaatgaggaatactgtccag

SEQ ID NO: 3871958 - DNA, 25 bp, Homo sapien
gaaagcccagtgtatgtcccaaagg

SEQ ID NO: 3871959 - DNA, 25 bp, Homo sapien
agcccagtgtatgtcccaaagggca

SEQ ID NO: 3871960 - DNA, 25 bp, Homo sapien
cccagtgtatgtcccaaagggcagg

SEQ ID NO: 3871961 - DNA, 25 bp, Homo sapien
ctgaaagcccagtgtatgtcccaaa

SEQ ID NO: 3871962 - DNA, 25 bp, Homo sapien
tcactgacttccagaggatgctgcc

SEQ ID NO: 3871963 - DNA, 25 bp, Homo sapien
ctgtactgtcaatggccggtgatag

SEQ ID NO: 3871964 - DNA, 25 bp, Homo sapien
ggtcctctaccttggtaaggtgctg

SEQ ID NO: 3871965 - DNA, 25 bp, Homo sapien
tcaatggccggtgatagtgtcatgg

SEQ ID NO: 3871966 - DNA, 25 bp, Homo sapien
atttctgatgaatgggtagctttag

SEQ ID NO: 3871967 - DNA, 25 bp, Homo sapien
taatttctgatgaatgggtagcttt

SEQ ID NO: 3871968 - DNA, 25 bp, Homo sapien
aaataatttctgatgaatgggtagc

SEQ ID NO: 3871969 - DNA, 25 bp, Homo sapien
tcaaataatttctgatgaatgggta

SEQ ID NO: 3871970 - DNA, 25 bp, Homo sapien
gacaccctctatctggaactacttg

SEQ ID NO: 3871971 - DNA, 25 bp, Homo sapien
ctacatcagatccagggtaaaaggg

SEQ ID NO: 3871972 - DNA, 25 bp, Homo sapien
gatgtctccagctttagcctcagtt

SEQ ID NO: 3871973 - DNA, 25 bp, Homo sapien
gacatggatcagttctattagaggg

SEQ ID NO: 3871974 - DNA, 25 bp, Homo sapien
acatgtttccttgtcagttaaatcc

SEQ ID NO: 3871975 - DNA, 25 bp, Homo sapien
cttggtatgatcaaacatgatgctg

SEQ ID NO: 3871976 - DNA, 25 bp, Homo sapien
tccattgcttctcacatgtttcctt

SEQ ID NO: 3871977 - DNA, 25 bp, Homo sapien
catgtttccttgtcagttaaatcca

SEQ ID NO: 3871978 - DNA, 25 bp, Homo sapien
atggtttcaaatgcattcgattata

SEQ ID NO: 3871979 - DNA, 25 bp, Homo sapien
tttgtcgggccatggtttcaaatgc

SEQ ID NO: 3871980 - DNA, 25 bp, Homo sapien
gtttcaaatgcattcgattatacat

SEQ ID NO: 3871981 - DNA, 25 bp, Homo sapien
tcaaatgcattcgattatacatttt

SEQ ID NO: 3871982 - DNA, 25 bp, Homo sapien
tacatgctcattagtgctggatgct

SEQ ID NO: 3871983 - DNA, 25 bp, Homo sapien
acatgctcattagtgctggatgctg

SEQ ID NO: 3871984 - DNA, 25 bp, Homo sapien
ttctacatgctcattagtgctggat

SEQ ID NO: 3871985 - DNA, 25 bp, Homo sapien
tgctggatgctggggtctctttggt

SEQ ID NO: 3871986 - DNA, 25 bp, Homo sapien
ggctgccagctgtaattggtttata

SEQ ID NO: 3871987 - DNA, 25 bp, Homo sapien
tatctccaaaacgggctcccaattg

SEQ ID NO: 3871988 - DNA, 25 bp, Homo sapien
cccaattggttccagggaaagtgat

SEQ ID NO: 3871989 - DNA, 25 bp, Homo sapien
ctcccaattggttccagggaaagtg

SEQ ID NO: 3871990 - DNA, 25 bp, Homo sapien
tgagagataatcactcattttgctg

SEQ ID NO: 3871991 - DNA, 25 bp, Homo sapien
tacaattcattggcagggaacccaa

SEQ ID NO: 3871992 - DNA, 25 bp, Homo sapien
catattatcaccgaggtacaattca

SEQ ID NO: 3871993 - DNA, 25 bp, Homo sapien
tgaccaagttatcaataaggcaatt

SEQ ID NO: 3871994 - DNA, 25 bp, Homo sapien
cactgggatcccgtaaattgaaggc

SEQ ID NO: 3871995 - DNA, 25 bp, Homo sapien
ttttcaacagctggcggagtagcca

SEQ ID NO: 3871996 - DNA, 25 bp, Homo sapien
tcctgaagtcagaaggcgccttggt

SEQ ID NO: 3871997 - DNA, 25 bp, Homo sapien
ggaaaatatcaggatcccactggga

SEQ ID NO: 3871998 - DNA, 25 bp, Homo sapien
tcccagaagcttgaagaagagcgcg

SEQ ID NO: 3871999 - DNA, 25 bp, Homo sapien
aaggatgccccgctgaaggatggaa

SEQ ID NO: 3872000 - DNA, 25 bp, Homo sapien
tgagaagctccgatcactgggagga

SEQ ID NO: 3872001 - DNA, 25 bp, Homo sapien
ccagctttgggattcaggcttcaga

SEQ ID NO: 3872002 - DNA, 25 bp, Homo sapien
agggaggcccttcgcctatcagcaa

SEQ ID NO: 3872003 - DNA, 25 bp, Homo sapien
gaccatccgaggctggggttctctc

SEQ ID NO: 3872004 - DNA, 25 bp, Homo sapien
ccctgaatgagagaaacagcctgct

SEQ ID NO: 3872005 - DNA, 25 bp, Homo sapien
tctctatgttgccctggtggctctt

SEQ ID NO: 3872006 - DNA, 25 bp, Homo sapien
actcaggttcgagctgtcgctgtcg

SEQ ID NO: 3872007 - DNA, 25 bp, Homo sapien
agtccccggaatcctgggactcagg

SEQ ID NO: 3872008 - DNA, 25 bp, Homo sapien
ctccagtccccggaatcctgggact

SEQ ID NO: 3872009 - DNA, 25 bp, Homo sapien
ggactcaggttcgagctgtcgctgt

SEQ ID NO: 3872010 - DNA, 25 bp, Homo sapien
cagtggctgctttccgcttcgagga

SEQ ID NO: 3872011 - DNA, 25 bp, Homo sapien
ttatctctgcagaccgcaagcggtg

SEQ ID NO: 3872012 - DNA, 25 bp, Homo sapien
caagggtcctcaaatttggctgcca

SEQ ID NO: 3872013 - DNA, 25 bp, Homo sapien
ttgacagtacaaaggcagaggcatt

SEQ ID NO: 3872014 - DNA, 25 bp, Homo sapien
ggctggctgaattctgtcttactca

SEQ ID NO: 3872015 - DNA, 25 bp, Homo sapien
taaatgtatttccaatgagcgaatg

SEQ ID NO: 3872016 - DNA, 25 bp, Homo sapien
tggaagtgctcagctcacagcagtg

SEQ ID NO: 3872017 - DNA, 25 bp, Homo sapien
tgatagctagtgtttgtgaagacac

SEQ ID NO: 3872018 - DNA, 25 bp, Homo sapien
tacaggcatgagccactgcacccgg

SEQ ID NO: 3872019 - DNA, 25 bp, Homo sapien
aggcatgagccactgcacccggcct

SEQ ID NO: 3872020 - DNA, 25 bp, Homo sapien
tcttgacctcaggtatccacccacc

SEQ ID NO: 3872021 - DNA, 25 bp, Homo sapien
ggattacgggctcttgccaccacgc

SEQ ID NO: 3872022 - DNA, 25 bp, Homo sapien
ctaatcggatgaaatgagagctgcc

SEQ ID NO: 3872023 - DNA, 25 bp, Homo sapien
tgcctggcagatcaatgcataacct

SEQ ID NO: 3872024 - DNA, 25 bp, Homo sapien
caacctgccaggattaccgtgctaa

SEQ ID NO: 3872025 - DNA, 25 bp, Homo sapien
tcataccactacaggaggcatgggt

SEQ ID NO: 3872026 - DNA, 25 bp, Homo sapien
tttgtttacataccatctacggctg

SEQ ID NO: 3872027 - DNA, 25 bp, Homo sapien
gttgcaactgaaaccctatggtcca

SEQ ID NO: 3872028 - DNA, 25 bp, Homo sapien
gaggccgatgcccagacctagtatt

SEQ ID NO: 3872029 - DNA, 25 bp, Homo sapien
cacggtcattatcctgcagagacaa

SEQ ID NO: 3872030 - DNA, 25 bp, Homo sapien
tcttgctaagaatcttagggctggc

SEQ ID NO: 3872031 - DNA, 25 bp, Homo sapien
actctcttgctaagaatcttagggc

SEQ ID NO: 3872032 - DNA, 25 bp, Homo sapien
accgcacagggccagaatactctct

SEQ ID NO: 3872033 - DNA, 25 bp, Homo sapien
cagggccagaatactctcttgctaa

SEQ ID NO: 3872034 - DNA, 25 bp, Homo sapien
tctatatgggtagaaagagaggcca

SEQ ID NO: 3872035 - DNA, 25 bp, Homo sapien
taaggctggtaaaaggtctgcttgc

SEQ ID NO: 3872036 - DNA, 25 bp, Homo sapien
aaagcagcaaactcgatgacttggg

SEQ ID NO: 3872037 - DNA, 25 bp, Homo sapien
gaaaactaggctcaggaggttaagc

SEQ ID NO: 3872038 - DNA, 25 bp, Homo sapien
cactggcgcctatgaattctgcaga

SEQ ID NO: 3872039 - DNA, 25 bp, Homo sapien
tgcagacatttggatacagaggtgg

SEQ ID NO: 3872040 - DNA, 25 bp, Homo sapien
attctgcagacatttggatacagag

SEQ ID NO: 3872041 - DNA, 25 bp, Homo sapien
gtctctagacactggcgcctatgaa

SEQ ID NO: 3872042 - DNA, 25 bp, Homo sapien
acatacatgagactaggaagaaaag

SEQ ID NO: 3872043 - DNA, 25 bp, Homo sapien
gataaagacatacatgagactagga

SEQ ID NO: 3872044 - DNA, 25 bp, Homo sapien
aaaggaggtttaattgttccacatg

SEQ ID NO: 3872045 - DNA, 25 bp, Homo sapien
aaggaggtttaattgttccacatgg

SEQ ID NO: 3872046 - DNA, 25 bp, Homo sapien
gccactgcactgggtcgcattgcat

SEQ ID NO: 3872047 - DNA, 25 bp, Homo sapien
cactgcactgggtcgcattgcatat

SEQ ID NO: 3872048 - DNA, 25 bp, Homo sapien
tgcactgggtcgcattgcatatttc

SEQ ID NO: 3872049 - DNA, 25 bp, Homo sapien
gcactgggtcgcattgcatatttca

SEQ ID NO: 3872050 - DNA, 25 bp, Homo sapien
ttttaaattccagtgcgcaggagac

SEQ ID NO: 3872051 - DNA, 25 bp, Homo sapien
tccagtgcgcaggagacaaagaaca

SEQ ID NO: 3872052 - DNA, 25 bp, Homo sapien
aattccagtgcgcaggagacaaaga

SEQ ID NO: 3872053 - DNA, 25 bp, Homo sapien
accaacaccaaggttaaagcacaga

SEQ ID NO: 3872054 - DNA, 25 bp, Homo sapien
ggcaggaggcctcgtacagtgccat

SEQ ID NO: 3872055 - DNA, 25 bp, Homo sapien
cggcaggaggcctcgtacagtgcca

SEQ ID NO: 3872056 - DNA, 25 bp, Homo sapien
aggaggcctcgtacagtgccatctg

SEQ ID NO: 3872057 - DNA, 25 bp, Homo sapien
caggaggcctcgtacagtgccatct

SEQ ID NO: 3872058 - DNA, 25 bp, Homo sapien
tctgggacgaggaagaccaagtctt

SEQ ID NO: 3872059 - DNA, 25 bp, Homo sapien
catgtgagggtgttcctcgtgtgcc

SEQ ID NO: 3872060 - DNA, 25 bp, Homo sapien
tccctccacatcctggcaaaggatg

SEQ ID NO: 3872061 - DNA, 25 bp, Homo sapien
gtacccagctgcctggtgtaaaggg

SEQ ID NO: 3872062 - DNA, 25 bp, Homo sapien
gagatgtcacttaataccctttcag

SEQ ID NO: 3872063 - DNA, 25 bp, Homo sapien
aactgaccactgtaaaccatatttg

SEQ ID NO: 3872064 - DNA, 25 bp, Homo sapien
taagaagcttgataataccaaattg

SEQ ID NO: 3872065 - DNA, 25 bp, Homo sapien
gaaagaacacagatcaattggatat

SEQ ID NO: 3872066 - DNA, 25 bp, Homo sapien
ttgtgttgggtattggcgacccaaa

SEQ ID NO: 3872067 - DNA, 25 bp, Homo sapien
gttgaataagacagtgacgtggtcc

SEQ ID NO: 3872068 - DNA, 25 bp, Homo sapien
gtttaataatgatgaggtacccggc

SEQ ID NO: 3872069 - DNA, 25 bp, Homo sapien
agtgacgtggtcctaactgggaaag

SEQ ID NO: 3872070 - DNA, 25 bp, Homo sapien
tgtcagttaatatagcacctggcac

SEQ ID NO: 3872071 - DNA, 25 bp, Homo sapien
taggtgtcagatgccagcgttcaga

SEQ ID NO: 3872072 - DNA, 25 bp, Homo sapien
ggcacttaataagcaagcactcaat

SEQ ID NO: 3872073 - DNA, 25 bp, Homo sapien
gattctgggagagacacttagtttc

SEQ ID NO: 3872074 - DNA, 25 bp, Homo sapien
gcctcctttcaagggtgcggcagtt

SEQ ID NO: 3872075 - DNA, 25 bp, Homo sapien
cctttcaagggtgcggcagttgctg

SEQ ID NO: 3872076 - DNA, 25 bp, Homo sapien
ctcctttcaagggtgcggcagttgc

SEQ ID NO: 3872077 - DNA, 25 bp, Homo sapien
tacgggtccacacggcaggggcctc

SEQ ID NO: 3872078 - DNA, 25 bp, Homo sapien
acctgactgggaggtgtgtgactca

SEQ ID NO: 3872079 - DNA, 25 bp, Homo sapien
gtcaaggtgctctcggaagggccca

SEQ ID NO: 3872080 - DNA, 25 bp, Homo sapien
tctctcccgggactcttagagtctg

SEQ ID NO: 3872081 - DNA, 25 bp, Homo sapien
tcatggagagaacggaatataggtc

SEQ ID NO: 3872082 - DNA, 25 bp, Homo sapien
tgaagtgactcctaccaaggccaaa

SEQ ID NO: 3872083 - DNA, 25 bp, Homo sapien
tacactgttgtccttacctggccta

SEQ ID NO: 3872084 - DNA, 25 bp, Homo sapien
gagagttccagattgcaagccactg

SEQ ID NO: 3872085 - DNA, 25 bp, Homo sapien
tacagaaatcaactggaagcggccc

SEQ ID NO: 3872086 - DNA, 25 bp, Homo sapien
ctttgcctactttcttatcatgttc

SEQ ID NO: 3872087 - DNA, 25 bp, Homo sapien
tttgcctactttcttatcatgttcc

SEQ ID NO: 3872088 - DNA, 25 bp, Homo sapien
cctttgcctactttcttatcatgtt

SEQ ID NO: 3872089 - DNA, 25 bp, Homo sapien
caggtagatcaacaaacagggaaag

SEQ ID NO: 3872090 - DNA, 25 bp, Homo sapien
actgaacacgttacacttagaacaa

SEQ ID NO: 3872091 - DNA, 25 bp, Homo sapien
cacatgcttggcatatatctaccac

SEQ ID NO: 3872092 - DNA, 25 bp, Homo sapien
gcttggcatatatctaccaccagag

SEQ ID NO: 3872093 - DNA, 25 bp, Homo sapien
catcccaagctgttcttcggatcat

SEQ ID NO: 3872094 - DNA, 25 bp, Homo sapien
taggttgacagcatcccaagctgtt

SEQ ID NO: 3872095 - DNA, 25 bp, Homo sapien
ggctacccatgttcttattatctgg

SEQ ID NO: 3872096 - DNA, 25 bp, Homo sapien
ggtgagtccttcttaggtcatctag

SEQ ID NO: 3872097 - DNA, 25 bp, Homo sapien
taaccttcatttgcaggtactgtaa

SEQ ID NO: 3872098 - DNA, 25 bp, Homo sapien
ggtaacacttaaccttcatttgcag

SEQ ID NO: 3872099 - DNA, 25 bp, Homo sapien
tcagcaagtatttaaaggggatctg

SEQ ID NO: 3872100 - DNA, 25 bp, Homo sapien
tgaacaagatagatatggtcctctg

SEQ ID NO: 3872101 - DNA, 25 bp, Homo sapien
tagcccctgggagttgtgaaatttc

SEQ ID NO: 3872102 - DNA, 25 bp, Homo sapien
gattctcacttgtaggcccacttaa

SEQ ID NO: 3872103 - DNA, 25 bp, Homo sapien
cagggtcaggtcttagagtctccaa

SEQ ID NO: 3872104 - DNA, 25 bp, Homo sapien
caagggatatgttcagccagagagc

SEQ ID NO: 3872105 - DNA, 25 bp, Homo sapien
ttgtggtgtgcatctataatctcag

SEQ ID NO: 3872106 - DNA, 25 bp, Homo sapien
gcgttgtggtgtgcatctataatct

SEQ ID NO: 3872107 - DNA, 25 bp, Homo sapien
ctgagatacagccactgcattctag

SEQ ID NO: 3872108 - DNA, 25 bp, Homo sapien
caggcgttgtggtgtgcatctataa

SEQ ID NO: 3872109 - DNA, 25 bp, Homo sapien
gcggtatacacagtggtatttgcca

SEQ ID NO: 3872110 - DNA, 25 bp, Homo sapien
tgcggtatacacagtggtatttgcc

SEQ ID NO: 3872111 - DNA, 25 bp, Homo sapien
ctgcggtatacacagtggtatttgc

SEQ ID NO: 3872112 - DNA, 25 bp, Homo sapien
taaggagcgacactgcgcttgttta

SEQ ID NO: 3872113 - DNA, 25 bp, Homo sapien
agcctccgctaaggagcgacactgc

SEQ ID NO: 3872114 - DNA, 25 bp, Homo sapien
tgatatttcacgttcacagttgaca

SEQ ID NO: 3872115 - DNA, 25 bp, Homo sapien
tgttgaccatttccgatccagtgca

SEQ ID NO: 3872116 - DNA, 25 bp, Homo sapien
cgaggaagggcgagagtttccaaag

SEQ ID NO: 3872117 - DNA, 25 bp, Homo sapien
gtcccacgttctcctttcgcgcgga

SEQ ID NO: 3872118 - DNA, 25 bp, Homo sapien
ttaaggagccgtggatttagtccca

SEQ ID NO: 3872119 - DNA, 25 bp, Homo sapien
tgtcacgcgcccgtgctgtagaatc

SEQ ID NO: 3872120 - DNA, 25 bp, Homo sapien
cgacccaatcgctggcgcggttact

SEQ ID NO: 3872121 - DNA, 25 bp, Homo sapien
tgcctaagagggagcgtccccttcg

SEQ ID NO: 3872122 - DNA, 25 bp, Homo sapien
gggtcgttgctccgctccaacatgg

SEQ ID NO: 3872123 - DNA, 25 bp, Homo sapien
tttgcatatttgtgcccgcgccgct

SEQ ID NO: 3872124 - DNA, 25 bp, Homo sapien
gcctgattggcccagttcactcccc

SEQ ID NO: 3872125 - DNA, 25 bp, Homo sapien
ccgcctgattggcccagttcactcc

SEQ ID NO: 3872126 - DNA, 25 bp, Homo sapien
tggcccagttcactcccccagcgcg

SEQ ID NO: 3872127 - DNA, 25 bp, Homo sapien
agttcactcccccagcgcgacccca

SEQ ID NO: 3872128 - DNA, 25 bp, Homo sapien
cccgcctcgactgagactgacactc

SEQ ID NO: 3872129 - DNA, 25 bp, Homo sapien
aggcgaccacccgtctgacacgacc

SEQ ID NO: 3872130 - DNA, 25 bp, Homo sapien
ccccgcctcgactgagactgacact

SEQ ID NO: 3872131 - DNA, 25 bp, Homo sapien
gcggcctcaggcgaccacccgtctg

SEQ ID NO: 3872132 - DNA, 25 bp, Homo sapien
cgctcgctgactctcgcgcttcgcc

SEQ ID NO: 3872133 - DNA, 25 bp, Homo sapien
ctcgctgactctcgcgcttcgccat

SEQ ID NO: 3872134 - DNA, 25 bp, Homo sapien
cgccgctcgctgactctcgcgcttc

SEQ ID NO: 3872135 - DNA, 25 bp, Homo sapien
gccgctcgctgactctcgcgcttcg

SEQ ID NO: 3872136 - DNA, 25 bp, Homo sapien
cgacctcgcgcgggacggggaagag

SEQ ID NO: 3872137 - DNA, 25 bp, Homo sapien
gcaggatggagggaagcccgaccgt

SEQ ID NO: 3872138 - DNA, 25 bp, Homo sapien
ctgcaggatggagggaagcccgacc

SEQ ID NO: 3872139 - DNA, 25 bp, Homo sapien
aggatggagggaagcccgaccgtcg

SEQ ID NO: 3872140 - DNA, 25 bp, Homo sapien
gcgcgggacgccctgtcatgactca

SEQ ID NO: 3872141 - DNA, 25 bp, Homo sapien
cactgcggtcggaaccgagaggcaa

SEQ ID NO: 3872142 - DNA, 25 bp, Homo sapien
cagaaaatgacggcggccgcacaca

SEQ ID NO: 3872143 - DNA, 25 bp, Homo sapien
gctttccgggtagtgcttggctttg

SEQ ID NO: 3872144 - DNA, 25 bp, Homo sapien
tggcagctgtgacagccagtgagac

SEQ ID NO: 3872145 - DNA, 25 bp, Homo sapien
cagtctgagctggcagctgtgacag

SEQ ID NO: 3872146 - DNA, 25 bp, Homo sapien
gcagctgtgacagccagtgagacac

SEQ ID NO: 3872147 - DNA, 25 bp, Homo sapien
tctgagctggcagctgtgacagcca

SEQ ID NO: 3872148 - DNA, 25 bp, Homo sapien
actgtagcactgttaatatcacaac

SEQ ID NO: 3872149 - DNA, 25 bp, Homo sapien
gaattcttaggtatgaatatttcac

SEQ ID NO: 3872150 - DNA, 25 bp, Homo sapien
aatagcgtcaaatcccagactttca

SEQ ID NO: 3872151 - DNA, 25 bp, Homo sapien
aataaatgtcacaatagcgtcaaat

SEQ ID NO: 3872152 - DNA, 25 bp, Homo sapien
ttaagtagaactggagattttaaga

SEQ ID NO: 3872153 - DNA, 25 bp, Homo sapien
taagtagaactggagattttaagaa

SEQ ID NO: 3872154 - DNA, 25 bp, Homo sapien
taatacttatcaaatatcgaacgta

SEQ ID NO: 3872155 - DNA, 25 bp, Homo sapien
tccatgtggcctgttgttacaacac

SEQ ID NO: 3872156 - DNA, 25 bp, Homo sapien
tgttacaacacagcatctctaaatt

SEQ ID NO: 3872157 - DNA, 25 bp, Homo sapien
tatcgaacgtaaggctccatgtggc

SEQ ID NO: 3872158 - DNA, 25 bp, Homo sapien
ccccgattaaagtagcctgctcata

SEQ ID NO: 3872159 - DNA, 25 bp, Homo sapien
tctcctggtcaattaatcacaaggg

SEQ ID NO: 3872160 - DNA, 25 bp, Homo sapien
tctagccagcactctatccaagaag

SEQ ID NO: 3872161 - DNA, 25 bp, Homo sapien
ttaatcaaaactgggaggcaaccac

SEQ ID NO: 3872162 - DNA, 25 bp, Homo sapien
tcacttgatcagctttccaactgtt

SEQ ID NO: 3872163 - DNA, 25 bp, Homo sapien
cacttgatcagctttccaactgttt

SEQ ID NO: 3872164 - DNA, 25 bp, Homo sapien
ggtactcagttccttaaatggaaga

SEQ ID NO: 3872165 - DNA, 25 bp, Homo sapien
tgtaaaacagactacaccaagtctg

SEQ ID NO: 3872166 - DNA, 25 bp, Homo sapien
gaccactagacaagaaaggtcatct

SEQ ID NO: 3872167 - DNA, 25 bp, Homo sapien
tcagtttctctgtacctccgttgct

SEQ ID NO: 3872168 - DNA, 25 bp, Homo sapien
tgagcatcagcagaccaatcttccc

SEQ ID NO: 3872169 - DNA, 25 bp, Homo sapien
tttgagcatcagcagaccaatcttc

SEQ ID NO: 3872170 - DNA, 25 bp, Homo sapien
gagcatcagcagaccaatcttccct

SEQ ID NO: 3872171 - DNA, 25 bp, Homo sapien
gactttgagcatcagcagaccaatc

SEQ ID NO: 3872172 - DNA, 25 bp, Homo sapien
cactcccggcctaaatatttattct

SEQ ID NO: 3872173 - DNA, 25 bp, Homo sapien
tagaaaattgacttaaatgcagaat

SEQ ID NO: 3872174 - DNA, 25 bp, Homo sapien
tattctaatgctaaatttcaattca

SEQ ID NO: 3872175 - DNA, 25 bp, Homo sapien
ccaaagtacctggattatagacata

SEQ ID NO: 3872176 - DNA, 25 bp, Homo sapien
cagctatgtaatcctaggcaagaca

SEQ ID NO: 3872177 - DNA, 25 bp, Homo sapien
attataacagtactggtctcaaaaa

SEQ ID NO: 3872178 - DNA, 25 bp, Homo sapien
gctatgtaatcctaggcaagacact

SEQ ID NO: 3872179 - DNA, 25 bp, Homo sapien
tatgtaatcctaggcaagacactta

SEQ ID NO: 3872180 - DNA, 25 bp, Homo sapien
tctcacgtatcccttagtgaaagaa

SEQ ID NO: 3872181 - DNA, 25 bp, Homo sapien
tactaatttaattcctgccacacag

SEQ ID NO: 3872182 - DNA, 25 bp, Homo sapien
taaatactcatacgctttcaggaat

SEQ ID NO: 3872183 - DNA, 25 bp, Homo sapien
taaacaagatgagtgcagaggctgg

SEQ ID NO: 3872184 - DNA, 25 bp, Homo sapien
tccacaaagctccttaatattaggg

SEQ ID NO: 3872185 - DNA, 25 bp, Homo sapien
cacaaagctccttaatattagggac

SEQ ID NO: 3872186 - DNA, 25 bp, Homo sapien
tgcatagtatcatccacaaagctcc

SEQ ID NO: 3872187 - DNA, 25 bp, Homo sapien
ttctctagaagatgcatagtatcat

SEQ ID NO: 3872188 - DNA, 25 bp, Homo sapien
cgaaggtcatcaactaatccaaaac

SEQ ID NO: 3872189 - DNA, 25 bp, Homo sapien
gatattattggatcatttccgaagg

SEQ ID NO: 3872190 - DNA, 25 bp, Homo sapien
tgacatgtcatgaagtgtcaaaatc

SEQ ID NO: 3872191 - DNA, 25 bp, Homo sapien
ggtcaatattcattattgctctaaa

SEQ ID NO: 3872192 - DNA, 25 bp, Homo sapien
aaattctgtaacaatccgggctgtt

SEQ ID NO: 3872193 - DNA, 25 bp, Homo sapien
aattctgtaacaatccgggctgttc

SEQ ID NO: 3872194 - DNA, 25 bp, Homo sapien
tccaaatggagtatattcagcttct

SEQ ID NO: 3872195 - DNA, 25 bp, Homo sapien
gctgttcactccaaatggagtatat

SEQ ID NO: 3872196 - DNA, 25 bp, Homo sapien
caccaaaaagattggcatcatcaaa

SEQ ID NO: 3872197 - DNA, 25 bp, Homo sapien
caaaaagattggcatcatcaaaaaa

SEQ ID NO: 3872198 - DNA, 25 bp, Homo sapien
cttctaaggtctcaccaaaaagatt

SEQ ID NO: 3872199 - DNA, 25 bp, Homo sapien
ggtctcaccaaaaagattggcatca

SEQ ID NO: 3872200 - DNA, 25 bp, Homo sapien
tcttctgatgtgttggagtaccttg

SEQ ID NO: 3872201 - DNA, 25 bp, Homo sapien
gcaacggttcaaattctgcacccaa

SEQ ID NO: 3872202 - DNA, 25 bp, Homo sapien
ttcatcaactagtgaaacaggtcct

SEQ ID NO: 3872203 - DNA, 25 bp, Homo sapien
tcagtgaatctatgtgcaacggttc

SEQ ID NO: 3872204 - DNA, 25 bp, Homo sapien
gcaaagtcatggtgtgccacaaagc

SEQ ID NO: 3872205 - DNA, 25 bp, Homo sapien
aatggtagtagctgtctgatggccc

SEQ ID NO: 3872206 - DNA, 25 bp, Homo sapien
gagataacacatgttcagctgggct

SEQ ID NO: 3872207 - DNA, 25 bp, Homo sapien
tttagactggctaagagaattctgc

SEQ ID NO: 3872208 - DNA, 25 bp, Homo sapien
tgaattgctataattaccctgagga

SEQ ID NO: 3872209 - DNA, 25 bp, Homo sapien
cattgactctatgtggaccagaaac

SEQ ID NO: 3872210 - DNA, 25 bp, Homo sapien
tcttgatgactgctacacttgtgga

SEQ ID NO: 3872211 - DNA, 25 bp, Homo sapien
gatctgggaagttcatgtgcacagg

SEQ ID NO: 3872212 - DNA, 25 bp, Homo sapien
tatcagaaggccgtgttaccagatg

SEQ ID NO: 3872213 - DNA, 25 bp, Homo sapien
gaaaatgatgaatgccaactccgag

SEQ ID NO: 3872214 - DNA, 25 bp, Homo sapien
ttaccagatgcgaagtaaactgccg

SEQ ID NO: 3872215 - DNA, 25 bp, Homo sapien
aactccgagcctgactttgcaactg

SEQ ID NO: 3872216 - DNA, 25 bp, Homo sapien
tcaactgaggtcttaaaagtttgct

SEQ ID NO: 3872217 - DNA, 25 bp, Homo sapien
tctcaaaggtattcataaacatcac

SEQ ID NO: 3872218 - DNA, 25 bp, Homo sapien
tgctttgagcatatcagtgaatcac

SEQ ID NO: 3872219 - DNA, 25 bp, Homo sapien
ttaacccaatgactaacagtccgcc

SEQ ID NO: 3872220 - DNA, 25 bp, Homo sapien
acaacacttaatgggaaatgtatag

SEQ ID NO: 3872221 - DNA, 25 bp, Homo sapien
tgggaaatgtatagcatcaaatgcc

SEQ ID NO: 3872222 - DNA, 25 bp, Homo sapien
tgttgccgaggctaaataacacatt

SEQ ID NO: 3872223 - DNA, 25 bp, Homo sapien
gatgtttgttagcttccacattaaa

SEQ ID NO: 3872224 - DNA, 25 bp, Homo sapien
caattgtccgtgaaaagattaccca

SEQ ID NO: 3872225 - DNA, 25 bp, Homo sapien
tatacaaaagattgcgctggtccgg

SEQ ID NO: 3872226 - DNA, 25 bp, Homo sapien
aactgtcatccggtagaggactcac

SEQ ID NO: 3872227 - DNA, 25 bp, Homo sapien
gcaaagccactaatagaagccatag

SEQ ID NO: 3872228 - DNA, 25 bp, Homo sapien
taatcagagatactcatccctcagt

SEQ ID NO: 3872229 - DNA, 25 bp, Homo sapien
tgatttgcctatatgaagctctcaa

SEQ ID NO: 3872230 - DNA, 25 bp, Homo sapien
tggtctgctcattcctatatgtaag

SEQ ID NO: 3872231 - DNA, 25 bp, Homo sapien
accctaggtgattcgcccagctcgg

SEQ ID NO: 3872232 - DNA, 25 bp, Homo sapien
tcttttgcttcaaatctctgtcttt

SEQ ID NO: 3872233 - DNA, 25 bp, Homo sapien
cttttgcttcaaatctctgtctttt

SEQ ID NO: 3872234 - DNA, 25 bp, Homo sapien
ttttgcttcaaatctctgtctttta

SEQ ID NO: 3872235 - DNA, 25 bp, Homo sapien
cttcttttgcttcaaatctctgtct

SEQ ID NO: 3872236 - DNA, 25 bp, Homo sapien
gaaagagaaagtgagggccaagcaa

SEQ ID NO: 3872237 - DNA, 25 bp, Homo sapien
gaccatcatcttttgtgagaactaa

SEQ ID NO: 3872238 - DNA, 25 bp, Homo sapien
tacataaggattacgggaactacaa

SEQ ID NO: 3872239 - DNA, 25 bp, Homo sapien
caaaactcgtttaatctggcataga

SEQ ID NO: 3872240 - DNA, 25 bp, Homo sapien
taaaaaacctgataagagatttgta

SEQ ID NO: 3872241 - DNA, 25 bp, Homo sapien
gatacaatgctaggcacggtagctc

SEQ ID NO: 3872242 - DNA, 25 bp, Homo sapien
tctttatatttggaagctacgatct

SEQ ID NO: 3872243 - DNA, 25 bp, Homo sapien
gaagctacgatctttcaaatgaaaa

SEQ ID NO: 3872244 - DNA, 25 bp, Homo sapien
taagaataatttggggaccaatgtg

SEQ ID NO: 3872245 - DNA, 25 bp, Homo sapien
accaatgtggaccagaagtttgttg

SEQ ID NO: 3872246 - DNA, 25 bp, Homo sapien
ctgggaaacacaccagagatatggg

SEQ ID NO: 3872247 - DNA, 25 bp, Homo sapien
cctgttgttagtggcagatactcaa

SEQ ID NO: 3872248 - DNA, 25 bp, Homo sapien
ggatgggaggaagactacctgcaat

SEQ ID NO: 3872249 - DNA, 25 bp, Homo sapien
tctataatttatgctggcctgttgt

SEQ ID NO: 3872250 - DNA, 25 bp, Homo sapien
cccagtaaccccattctgacaatat

SEQ ID NO: 3872251 - DNA, 25 bp, Homo sapien
tacaaatacacatctaatcaatggc

SEQ ID NO: 3872252 - DNA, 25 bp, Homo sapien
cacataaacttgtgacccagtaacc

SEQ ID NO: 3872253 - DNA, 25 bp, Homo sapien
gaatgttcttagaggcattactcat

SEQ ID NO: 3872254 - DNA, 25 bp, Homo sapien
cagaagtcagactagtaacacaata

SEQ ID NO: 3872255 - DNA, 25 bp, Homo sapien
gaaagactgagtgcaaacgggaatg

SEQ ID NO: 3872256 - DNA, 25 bp, Homo sapien
actgcatgattccatccatacaaca

SEQ ID NO: 3872257 - DNA, 25 bp, Homo sapien
agaaaaagctattgatacagggaac

SEQ ID NO: 3872258 - DNA, 25 bp, Homo sapien
tcttggtctggatactggttaaatg

SEQ ID NO: 3872259 - DNA, 25 bp, Homo sapien
aatctatgaaatgctgaaagaggcc

SEQ ID NO: 3872260 - DNA, 25 bp, Homo sapien
ttcctctaataccaggagaaatcta

SEQ ID NO: 3872261 - DNA, 25 bp, Homo sapien
ccatagcaggcttctagaattgtgc

SEQ ID NO: 3872262 - DNA, 25 bp, Homo sapien
tttggtggcaaaataaagagatctt

SEQ ID NO: 3872263 - DNA, 25 bp, Homo sapien
tcttgggactgtgctaactttgcag

SEQ ID NO: 3872264 - DNA, 25 bp, Homo sapien
cagaagtgaggacagtcttgggact

SEQ ID NO: 3872265 - DNA, 25 bp, Homo sapien
tgggtttggttagtcctgctggcaa

SEQ ID NO: 3872266 - DNA, 25 bp, Homo sapien
aaaaaaactgatccaagagcaaatt

SEQ ID NO: 3872267 - DNA, 25 bp, Homo sapien
gtttattgtaagctggtgtactggt

SEQ ID NO: 3872268 - DNA, 25 bp, Homo sapien
catggaagtggaacaattatttcac

SEQ ID NO: 3872269 - DNA, 25 bp, Homo sapien
gctggtgtactggtttttagtctcc

SEQ ID NO: 3872270 - DNA, 25 bp, Homo sapien
cagcacttggtttctcgaccaagaa

SEQ ID NO: 3872271 - DNA, 25 bp, Homo sapien
gcacttggtttctcgaccaagaaaa

SEQ ID NO: 3872272 - DNA, 25 bp, Homo sapien
cacttggtttctcgaccaagaaaag

SEQ ID NO: 3872273 - DNA, 25 bp, Homo sapien
tgtagaaatcaactagacagaggtg

SEQ ID NO: 3872274 - DNA, 25 bp, Homo sapien
gagtttcctcaatagctgtaagcag

SEQ ID NO: 3872275 - DNA, 25 bp, Homo sapien
aaatggcctatttagcaagctgcaa

SEQ ID NO: 3872276 - DNA, 25 bp, Homo sapien
tgaaagaagattcctaaatggccta

SEQ ID NO: 3872277 - DNA, 25 bp, Homo sapien
tgcaaccaagagatgcacaaccctc

SEQ ID NO: 3872278 - DNA, 25 bp, Homo sapien
tcctcttggcctcttcactgaagac

SEQ ID NO: 3872279 - DNA, 25 bp, Homo sapien
ctcttggcctcttcactgaagacat

SEQ ID NO: 3872280 - DNA, 25 bp, Homo sapien
ttcctcttggcctcttcactgaaga

SEQ ID NO: 3872281 - DNA, 25 bp, Homo sapien
ccttcctcttggcctcttcactgaa

SEQ ID NO: 3872282 - DNA, 25 bp, Homo sapien
taaccaagactcgaggaaacagcaa

SEQ ID NO: 3872283 - DNA, 25 bp, Homo sapien
ctcactaaaatgccaccttaaggcc

SEQ ID NO: 3872284 - DNA, 25 bp, Homo sapien
ccaccttaaggcctacaggctataa

SEQ ID NO: 3872285 - DNA, 25 bp, Homo sapien
caggctataacaaataaccaagact

SEQ ID NO: 3872286 - DNA, 25 bp, Homo sapien
catcaaaggtttcatagcagcactg

SEQ ID NO: 3872287 - DNA, 25 bp, Homo sapien
aaggtttcatagcagcactgcagca

SEQ ID NO: 3872288 - DNA, 25 bp, Homo sapien
caaaggtttcatagcagcactgcag

SEQ ID NO: 3872289 - DNA, 25 bp, Homo sapien
tcatcaaaggtttcatagcagcact

SEQ ID NO: 3872290 - DNA, 25 bp, Homo sapien
catgcctctgactataccaaaggaa

SEQ ID NO: 3872291 - DNA, 25 bp, Homo sapien
acatgcctctgactataccaaagga

SEQ ID NO: 3872292 - DNA, 25 bp, Homo sapien
taaacatgcctctgactataccaaa

SEQ ID NO: 3872293 - DNA, 25 bp, Homo sapien
ccgtaaacatgcctctgactatacc

SEQ ID NO: 3872294 - DNA, 25 bp, Homo sapien
tattctgcaacttagtatatgtccc

SEQ ID NO: 3872295 - DNA, 25 bp, Homo sapien
ctgggtattctgcaacttagtatat

SEQ ID NO: 3872296 - DNA, 25 bp, Homo sapien
tatgtcccagaaccatcgctcttct

SEQ ID NO: 3872297 - DNA, 25 bp, Homo sapien
caacttagtatatgtcccagaacca

SEQ ID NO: 3872298 - DNA, 25 bp, Homo sapien
gttttcagggctcattactcgtgga

SEQ ID NO: 3872299 - DNA, 25 bp, Homo sapien
ggaatattgcgttccccacgctcct

SEQ ID NO: 3872300 - DNA, 25 bp, Homo sapien
gctatggcctctgatattatacgat

SEQ ID NO: 3872301 - DNA, 25 bp, Homo sapien
tactcgtggaatattgcgttcccca

SEQ ID NO: 3872302 - DNA, 25 bp, Homo sapien
cttttaatgtatgctgtggcatctg

SEQ ID NO: 3872303 - DNA, 25 bp, Homo sapien
ttgtttcttacccaatgtaataatg

SEQ ID NO: 3872304 - DNA, 25 bp, Homo sapien
cttacccaatgtaataatgagtttg

SEQ ID NO: 3872305 - DNA, 25 bp, Homo sapien
catctgttctgcatcagatatttca

SEQ ID NO: 3872306 - DNA, 25 bp, Homo sapien
ttcacaactgccaccacccctacgg

SEQ ID NO: 3872307 - DNA, 25 bp, Homo sapien
ataattcacaactgccaccacccct

SEQ ID NO: 3872308 - DNA, 25 bp, Homo sapien
ttctggccccataattcacaactgc

SEQ ID NO: 3872309 - DNA, 25 bp, Homo sapien
tttctggccccataattcacaactg

SEQ ID NO: 3872310 - DNA, 25 bp, Homo sapien
gccactactctcccattggataaga

SEQ ID NO: 3872311 - DNA, 25 bp, Homo sapien
ccttgagccactactctcccattgg

SEQ ID NO: 3872312 - DNA, 25 bp, Homo sapien
agccttgagccactactctcccatt

SEQ ID NO: 3872313 - DNA, 25 bp, Homo sapien
agccactactctcccattggataag

SEQ ID NO: 3872314 - DNA, 25 bp, Homo sapien
cacaaacaattgtaaaggctgttca

SEQ ID NO: 3872315 - DNA, 25 bp, Homo sapien
cccttctatatcttctgcgtatttt

SEQ ID NO: 3872316 - DNA, 25 bp, Homo sapien
gctgttcaccaggtaaaggagctga

SEQ ID NO: 3872317 - DNA, 25 bp, Homo sapien
tcttcttcagattgcttcccttcta

SEQ ID NO: 3872318 - DNA, 25 bp, Homo sapien
tagaagatagaattttgtctacaat

SEQ ID NO: 3872319 - DNA, 25 bp, Homo sapien
gaattttgtctacaattgcagcatc

SEQ ID NO: 3872320 - DNA, 25 bp, Homo sapien
gaagatagaattttgtctacaattg

SEQ ID NO: 3872321 - DNA, 25 bp, Homo sapien
gatagaattttgtctacaattgcag

SEQ ID NO: 3872322 - DNA, 25 bp, Homo sapien
cttctgtatcaatcatcactccagg

SEQ ID NO: 3872323 - DNA, 25 bp, Homo sapien
tcttctgtatcaatcatcactccag

SEQ ID NO: 3872324 - DNA, 25 bp, Homo sapien
tatcaatcatcactccaggtgatat

SEQ ID NO: 3872325 - DNA, 25 bp, Homo sapien
ctgtatcaatcatcactccaggtga

SEQ ID NO: 3872326 - DNA, 25 bp, Homo sapien
tctcaatttgaatcgtttgattttc

SEQ ID NO: 3872327 - DNA, 25 bp, Homo sapien
gcttgtctcaatttgaatcgtttga

SEQ ID NO: 3872328 - DNA, 25 bp, Homo sapien
atttgaatcgtttgattttctgctg

SEQ ID NO: 3872329 - DNA, 25 bp, Homo sapien
attttctgctggatccttttatctt

SEQ ID NO: 3872330 - DNA, 25 bp, Homo sapien
cttcaacgtagtctgggttaaatgg

SEQ ID NO: 3872331 - DNA, 25 bp, Homo sapien
acttcaacgtagtctgggttaaatg

SEQ ID NO: 3872332 - DNA, 25 bp, Homo sapien
aaaaagagacttctaatactctgtc

SEQ ID NO: 3872333 - DNA, 25 bp, Homo sapien
ctgtctacttcaacgtagtctgggt

SEQ ID NO: 3872334 - DNA, 25 bp, Homo sapien
ttgaagcttgcagttgttcaaactc

SEQ ID NO: 3872335 - DNA, 25 bp, Homo sapien
actatcttcatatggcaatgagcac

SEQ ID NO: 3872336 - DNA, 25 bp, Homo sapien
aggccttgaagcttgcagttgttca

SEQ ID NO: 3872337 - DNA, 25 bp, Homo sapien
tcttcatatggcaatgagcaccatt

SEQ ID NO: 3872338 - DNA, 25 bp, Homo sapien
caaagaatgaatggtgtttaaatct

SEQ ID NO: 3872339 - DNA, 25 bp, Homo sapien
tgtggaaaaacaaagaatgaatggt

SEQ ID NO: 3872340 - DNA, 25 bp, Homo sapien
aacaaagaatgaatggtgtttaaat

SEQ ID NO: 3872341 - DNA, 25 bp, Homo sapien
tggaaaaacaaagaatgaatggtgt

SEQ ID NO: 3872342 - DNA, 25 bp, Homo sapien
taccaattgaacaagagccagttga

SEQ ID NO: 3872343 - DNA, 25 bp, Homo sapien
gccatttttatagtccctggattga

SEQ ID NO: 3872344 - DNA, 25 bp, Homo sapien
ttgatattccctgagttgattgcca

SEQ ID NO: 3872345 - DNA, 25 bp, Homo sapien
tccaaatattagaaggaggacggtc

SEQ ID NO: 3872346 - DNA, 25 bp, Homo sapien
tgtgaatccctgaagtacatctcgt

SEQ ID NO: 3872347 - DNA, 25 bp, Homo sapien
catttgtctgctaatcaggctccca

SEQ ID NO: 3872348 - DNA, 25 bp, Homo sapien
ggagcaataatcaggaaaggtcctc

SEQ ID NO: 3872349 - DNA, 25 bp, Homo sapien
tatcagtccacgtacgaaattctct

SEQ ID NO: 3872350 - DNA, 25 bp, Homo sapien
tagtaagtatgaaggccctaaggta

SEQ ID NO: 3872351 - DNA, 25 bp, Homo sapien
tggcagcattcagataacagcaaga

SEQ ID NO: 3872352 - DNA, 25 bp, Homo sapien
tctgagcaagacactattgaaggga

SEQ ID NO: 3872353 - DNA, 25 bp, Homo sapien
gccgactgcgggacttgaaaactgt

SEQ ID NO: 3872354 - DNA, 25 bp, Homo sapien
gagtttcaggccctctaagagttta

SEQ ID NO: 3872355 - DNA, 25 bp, Homo sapien
tgatggcttggaatctgtaagctcc

SEQ ID NO: 3872356 - DNA, 25 bp, Homo sapien
tgtaagctcctcgaatgatacgccc

SEQ ID NO: 3872357 - DNA, 25 bp, Homo sapien
cacacatcgccattcaattgcatta

SEQ ID NO: 3872358 - DNA, 25 bp, Homo sapien
tagcattaactctataacctttcac

SEQ ID NO: 3872359 - DNA, 25 bp, Homo sapien
cagatgtactacactctaaaattaa

SEQ ID NO: 3872360 - DNA, 25 bp, Homo sapien
tctcaattatcacagataagattca

SEQ ID NO: 3872361 - DNA, 25 bp, Homo sapien
taaactcaattgtcataatgataat

SEQ ID NO: 3872362 - DNA, 25 bp, Homo sapien
tgccagtcaaaagcaccttgtgttc

SEQ ID NO: 3872363 - DNA, 25 bp, Homo sapien
tgttgattcagaaggaaaccttaag

SEQ ID NO: 3872364 - DNA, 25 bp, Homo sapien
gagaggggtgccagtcaaaagcacc

SEQ ID NO: 3872365 - DNA, 25 bp, Homo sapien
gaagactaaatagttcttcaactgt

SEQ ID NO: 3872366 - DNA, 25 bp, Homo sapien
gatagcccggtagtatttcttttga

SEQ ID NO: 3872367 - DNA, 25 bp, Homo sapien
gagctccatcatggtattgaccaag

SEQ ID NO: 3872368 - DNA, 25 bp, Homo sapien
taagttctacttcaatgatggtttc

SEQ ID NO: 3872369 - DNA, 25 bp, Homo sapien
taggtacattagtttgtcctgctcc

SEQ ID NO: 3872370 - DNA, 25 bp, Homo sapien
gcagactggatcattgcttgaagat

SEQ ID NO: 3872371 - DNA, 25 bp, Homo sapien
ccagaatgtcaaggcaacgaaccat

SEQ ID NO: 3872372 - DNA, 25 bp, Homo sapien
taaggaccaatttaccagcagactg

SEQ ID NO: 3872373 - DNA, 25 bp, Homo sapien
gatgagcactttatgacctccggct

SEQ ID NO: 3872374 - DNA, 25 bp, Homo sapien
gcccggcctgattagacaatattta

SEQ ID NO: 3872375 - DNA, 25 bp, Homo sapien
gcttttcttaattggactcctcagg

SEQ ID NO: 3872376 - DNA, 25 bp, Homo sapien
caatgaaatagatccaaagttcttg

SEQ ID NO: 3872377 - DNA, 25 bp, Homo sapien
catctaatattgcaacatatgcagg

SEQ ID NO: 3872378 - DNA, 25 bp, Homo sapien
ctgcagcattatgttttctctaaaa

SEQ ID NO: 3872379 - DNA, 25 bp, Homo sapien
caagtagtttctgtgactttatact

SEQ ID NO: 3872380 - DNA, 25 bp, Homo sapien
catattctatcaaatgtaaagtcag

SEQ ID NO: 3872381 - DNA, 25 bp, Homo sapien
aattaagaagcaatatcatctcaag

SEQ ID NO: 3872382 - DNA, 25 bp, Homo sapien
aatctatctatagcagcttgccgaa

SEQ ID NO: 3872383 - DNA, 25 bp, Homo sapien
tgccgaagatttcctctgactctgc

SEQ ID NO: 3872384 - DNA, 25 bp, Homo sapien
cagctgcagttaagttgatgcccaa

SEQ ID NO: 3872385 - DNA, 25 bp, Homo sapien
caccagctcgggtacacaggagaaa

SEQ ID NO: 3872386 - DNA, 25 bp, Homo sapien
gatgtggattaccaaaaagttacac

SEQ ID NO: 3872387 - DNA, 25 bp, Homo sapien
ttcatagagaaacatacattagttt

SEQ ID NO: 3872388 - DNA, 25 bp, Homo sapien
taagttagtgagacatataaaaaag

SEQ ID NO: 3872389 - DNA, 25 bp, Homo sapien
aaagtactgtactcaattaggtata

SEQ ID NO: 3872390 - DNA, 25 bp, Homo sapien
ggtctctctcaagtttacataatat

SEQ ID NO: 3872391 - DNA, 25 bp, Homo sapien
ttattcttaaagcttaggtctctct

SEQ ID NO: 3872392 - DNA, 25 bp, Homo sapien
ttcttaaagcttaggtctctctcaa

SEQ ID NO: 3872393 - DNA, 25 bp, Homo sapien
tattcttaaagcttaggtctctctc

SEQ ID NO: 3872394 - DNA, 25 bp, Homo sapien
acttttagaacatccactatgggca

SEQ ID NO: 3872395 - DNA, 25 bp, Homo sapien
gacagagatcttatgtggcacacaa

SEQ ID NO: 3872396 - DNA, 25 bp, Homo sapien
caggactgtaaatgggcaactttgc

SEQ ID NO: 3872397 - DNA, 25 bp, Homo sapien
tctggcttgccaactaagaatggct

SEQ ID NO: 3872398 - DNA, 25 bp, Homo sapien
cacttggtcagaagtacagattgtg

SEQ ID NO: 3872399 - DNA, 25 bp, Homo sapien
agcacttggtcagaagtacagattg

SEQ ID NO: 3872400 - DNA, 25 bp, Homo sapien
acttggtcagaagtacagattgtga

SEQ ID NO: 3872401 - DNA, 25 bp, Homo sapien
gcacttggtcagaagtacagattgt

SEQ ID NO: 3872402 - DNA, 25 bp, Homo sapien
ctttgttctgaccaattctgtggca

SEQ ID NO: 3872403 - DNA, 25 bp, Homo sapien
tctcttccactcatgctctgtaaca

SEQ ID NO: 3872404 - DNA, 25 bp, Homo sapien
ttcaaactggctcggtcaaacatct

SEQ ID NO: 3872405 - DNA, 25 bp, Homo sapien
gagttacgagttaccagtctgtaga

SEQ ID NO: 3872406 - DNA, 25 bp, Homo sapien
aaatctcaagtgaaaaagaaactat

SEQ ID NO: 3872407 - DNA, 25 bp, Homo sapien
acacaaaaatctcaagtgaaaaaga

SEQ ID NO: 3872408 - DNA, 25 bp, Homo sapien
cacacaaaaatctcaagtgaaaaag

SEQ ID NO: 3872409 - DNA, 25 bp, Homo sapien
aaacacacaaaaatctcaagtgaaa

SEQ ID NO: 3872410 - DNA, 25 bp, Homo sapien
caaatgttgacccacgtccttctga

SEQ ID NO: 3872411 - DNA, 25 bp, Homo sapien
aatctgatcgatatcctcttcgcag

SEQ ID NO: 3872412 - DNA, 25 bp, Homo sapien
tgtacgacgtagtaaaatctgatcg

SEQ ID NO: 3872413 - DNA, 25 bp, Homo sapien
cataagcacctcttcgaagcagatc

SEQ ID NO: 3872414 - DNA, 25 bp, Homo sapien
tgtccggtttccagatgccacaaaa

SEQ ID NO: 3872415 - DNA, 25 bp, Homo sapien
gatggcctctatatctatttctgcc

SEQ ID NO: 3872416 - DNA, 25 bp, Homo sapien
tagcccatttttgccagaagttggg

SEQ ID NO: 3872417 - DNA, 25 bp, Homo sapien
tctgccactgatggcctctatatct

SEQ ID NO: 3872418 - DNA, 25 bp, Homo sapien
cctaattcttggagtgtcaataacc

SEQ ID NO: 3872419 - DNA, 25 bp, Homo sapien
taaagcattcagttcttccatagcc

SEQ ID NO: 3872420 - DNA, 25 bp, Homo sapien
ccaattcatcttttgtggcactaaa

SEQ ID NO: 3872421 - DNA, 25 bp, Homo sapien
tagccattggaacggtcacagggtc

SEQ ID NO: 3872422 - DNA, 25 bp, Homo sapien
taatcttctcatctcctcggtagtg

SEQ ID NO: 3872423 - DNA, 25 bp, Homo sapien
ttgaaacggccatgagatagaatct

SEQ ID NO: 3872424 - DNA, 25 bp, Homo sapien
ctcggtagtgaacaaggcaatatgc

SEQ ID NO: 3872425 - DNA, 25 bp, Homo sapien
ggcaatatgctaagagagctcggca

SEQ ID NO: 3872426 - DNA, 25 bp, Homo sapien
tgacctaagattcagccctctcagg

SEQ ID NO: 3872427 - DNA, 25 bp, Homo sapien
tgggctcactgaagggtaactggct

SEQ ID NO: 3872428 - DNA, 25 bp, Homo sapien
tcaatcaggatctaaataaagcccc

SEQ ID NO: 3872429 - DNA, 25 bp, Homo sapien
catcctggctacatggaactgaaga

SEQ ID NO: 3872430 - DNA, 25 bp, Homo sapien
ggagctgctcgggattatattttcg

SEQ ID NO: 3872431 - DNA, 25 bp, Homo sapien
attttcgaagccattctgctttttg

SEQ ID NO: 3872432 - DNA, 25 bp, Homo sapien
tatcaaatgagcttgtttgagtttt

SEQ ID NO: 3872433 - DNA, 25 bp, Homo sapien
cgggattatattttcgaagccattc

SEQ ID NO: 3872434 - DNA, 25 bp, Homo sapien
catgatttgcttgtaggataccttg

SEQ ID NO: 3872435 - DNA, 25 bp, Homo sapien
tctctgtactcaaaatcagcaagct

SEQ ID NO: 3872436 - DNA, 25 bp, Homo sapien
ttaggattaggattggccctagacc

SEQ ID NO: 3872437 - DNA, 25 bp, Homo sapien
ttacttatctgttggtgagaacaat

SEQ ID NO: 3872438 - DNA, 25 bp, Homo sapien
tcttgctttagataatacagcattc

SEQ ID NO: 3872439 - DNA, 25 bp, Homo sapien
cagcattctcacacgaagcaaaacc

SEQ ID NO: 3872440 - DNA, 25 bp, Homo sapien
tctgacactcatttccaataacttc

SEQ ID NO: 3872441 - DNA, 25 bp, Homo sapien
catttccaataacttcttgctttag

SEQ ID NO: 3872442 - DNA, 25 bp, Homo sapien
gcctggtgcttaatgagtactcaaa

SEQ ID NO: 3872443 - DNA, 25 bp, Homo sapien
tattgttacgttgtgacttctagtg

SEQ ID NO: 3872444 - DNA, 25 bp, Homo sapien
aggagccgcctaacatacaatattc

SEQ ID NO: 3872445 - DNA, 25 bp, Homo sapien
tgtgtctgctttaatggcatctagt

SEQ ID NO: 3872446 - DNA, 25 bp, Homo sapien
tctggctattgtagaaggagttgag

SEQ ID NO: 3872447 - DNA, 25 bp, Homo sapien
gactatggcctgatagtacaacttg

SEQ ID NO: 3872448 - DNA, 25 bp, Homo sapien
gagctttcacgtccttggttaggta

SEQ ID NO: 3872449 - DNA, 25 bp, Homo sapien
tggcctgatagtacaacttgaaatc

SEQ ID NO: 3872450 - DNA, 25 bp, Homo sapien
tgggtccttagtcatgaaatccttg

SEQ ID NO: 3872451 - DNA, 25 bp, Homo sapien
atgtacagattatgaagattttttc

SEQ ID NO: 3872452 - DNA, 25 bp, Homo sapien
gatttaagtccatgatccatctcta

SEQ ID NO: 3872453 - DNA, 25 bp, Homo sapien
agtccatgatccatctctagttgat

SEQ ID NO: 3872454 - DNA, 25 bp, Homo sapien
tgtgaaccccttacagatgcttcct

SEQ ID NO: 3872455 - DNA, 25 bp, Homo sapien
gatccacttgccacggccttaagtg

SEQ ID NO: 3872456 - DNA, 25 bp, Homo sapien
tacaggactggtcactgtgaacccc

SEQ ID NO: 3872457 - DNA, 25 bp, Homo sapien
gcttcctaacataaatttggcagtg

SEQ ID NO: 3872458 - DNA, 25 bp, Homo sapien
tatgaaaggctgagtcaatgttggc

SEQ ID NO: 3872459 - DNA, 25 bp, Homo sapien
gagaagagtaactaatcatggccca

SEQ ID NO: 3872460 - DNA, 25 bp, Homo sapien
cacccaagaagagtaagtgacgaga

SEQ ID NO: 3872461 - DNA, 25 bp, Homo sapien
tgacgagaaggcctatgtgaagatt

SEQ ID NO: 3872462 - DNA, 25 bp, Homo sapien
caggaacttctgagtggtctggttc

SEQ ID NO: 3872463 - DNA, 25 bp, Homo sapien
taaggagtgacttatcagcatcaaa

SEQ ID NO: 3872464 - DNA, 25 bp, Homo sapien
gcatcaaaatcccaccactcagcag

SEQ ID NO: 3872465 - DNA, 25 bp, Homo sapien
ttctggtacccaaacatcaatgtca

SEQ ID NO: 3872466 - DNA, 25 bp, Homo sapien
taatgctgggtctgctcgaatagtg

SEQ ID NO: 3872467 - DNA, 25 bp, Homo sapien
gctgggtctgctcgaatagtgttat

SEQ ID NO: 3872468 - DNA, 25 bp, Homo sapien
aagcataatgctgggtctgctcgaa

SEQ ID NO: 3872469 - DNA, 25 bp, Homo sapien
ccaagaagcataatgctgggtctgc

SEQ ID NO: 3872470 - DNA, 25 bp, Homo sapien
ccatataatcattcgctctctgttc

SEQ ID NO: 3872471 - DNA, 25 bp, Homo sapien
agcagcaactgctttctcatcaggt

SEQ ID NO: 3872472 - DNA, 25 bp, Homo sapien
ataatcattcgctctctgttcagca

SEQ ID NO: 3872473 - DNA, 25 bp, Homo sapien
ccatccatataatcattcgctctct

SEQ ID NO: 3872474 - DNA, 25 bp, Homo sapien
aagtttatgaactcagtggccatga

SEQ ID NO: 3872475 - DNA, 25 bp, Homo sapien
gtttatgaactcagtggccatgata

SEQ ID NO: 3872476 - DNA, 25 bp, Homo sapien
agaagtttatgaactcagtggccat

SEQ ID NO: 3872477 - DNA, 25 bp, Homo sapien
gaagtttatgaactcagtggccatg

SEQ ID NO: 3872478 - DNA, 25 bp, Homo sapien
ctatatcatctttaaagatggctgg

SEQ ID NO: 3872479 - DNA, 25 bp, Homo sapien
ggcaggtttgtattctggatcttcc

SEQ ID NO: 3872480 - DNA, 25 bp, Homo sapien
gggcaggtttgtattctggatcttc

SEQ ID NO: 3872481 - DNA, 25 bp, Homo sapien
ggggcaggtttgtattctggatctt

SEQ ID NO: 3872482 - DNA, 25 bp, Homo sapien
aagtagagcaggtgggcaagcccca

SEQ ID NO: 3872483 - DNA, 25 bp, Homo sapien
ttcttagctctaagaagtagagcag

SEQ ID NO: 3872484 - DNA, 25 bp, Homo sapien
gggattttgcccttggacactgtgt

SEQ ID NO: 3872485 - DNA, 25 bp, Homo sapien
ggcaagccccattgcatccacatgt

SEQ ID NO: 3872486 - DNA, 25 bp, Homo sapien
catcagaaattctcaggggtctaat

SEQ ID NO: 3872487 - DNA, 25 bp, Homo sapien
atcagaaattctcaggggtctaatc

SEQ ID NO: 3872488 - DNA, 25 bp, Homo sapien
gatacatcagaaattctcaggggtc

SEQ ID NO: 3872489 - DNA, 25 bp, Homo sapien
tacatcagaaattctcaggggtcta

SEQ ID NO: 3872490 - DNA, 25 bp, Homo sapien
ataacaagatctcctggtgaggaaa

SEQ ID NO: 3872491 - DNA, 25 bp, Homo sapien
taacaagatctcctggtgaggaaac

SEQ ID NO: 3872492 - DNA, 25 bp, Homo sapien
tggtatgcagtgatgagacgcctca

SEQ ID NO: 3872493 - DNA, 25 bp, Homo sapien
cattttaggattaagagtggcttcc

SEQ ID NO: 3872494 - DNA, 25 bp, Homo sapien
aataggctgcattacactggtaggc

SEQ ID NO: 3872495 - DNA, 25 bp, Homo sapien
ggttaaagctgattgagtaggccaa

SEQ ID NO: 3872496 - DNA, 25 bp, Homo sapien
tagatacaaccctataaaagtcagc

SEQ ID NO: 3872497 - DNA, 25 bp, Homo sapien
gcctctgtcagggtcaaaaaccact

SEQ ID NO: 3872498 - DNA, 25 bp, Homo sapien
gacaaaccctccgacacatggacat

SEQ ID NO: 3872499 - DNA, 25 bp, Homo sapien
tcttatgtagcctagccatagctct

SEQ ID NO: 3872500 - DNA, 25 bp, Homo sapien
gaactgttgacaggatgagctatgt

SEQ ID NO: 3872501 - DNA, 25 bp, Homo sapien
tccttagttgagttgcatcaatgcc

SEQ ID NO: 3872502 - DNA, 25 bp, Homo sapien
aatgcatcccagaacaattccttag

SEQ ID NO: 3872503 - DNA, 25 bp, Homo sapien
tttgcttctttgaccgaaaccagga

SEQ ID NO: 3872504 - DNA, 25 bp, Homo sapien
taaaacaggaatagcaggccattgg

SEQ ID NO: 3872505 - DNA, 25 bp, Homo sapien
tataaaacaggaatagcaggccatt

SEQ ID NO: 3872506 - DNA, 25 bp, Homo sapien
tttttactataaaacaggaatagca

SEQ ID NO: 3872507 - DNA, 25 bp, Homo sapien
aaacaggaatagcaggccattgggt

SEQ ID NO: 3872508 - DNA, 25 bp, Homo sapien
catttctgaggaagccctacatttt

SEQ ID NO: 3872509 - DNA, 25 bp, Homo sapien
gttttccagtagacctgaaaacaga

SEQ ID NO: 3872510 - DNA, 25 bp, Homo sapien
aaatgagggcctcttgccaactaca

SEQ ID NO: 3872511 - DNA, 25 bp, Homo sapien
gtgattggctactccattcagtgaa

SEQ ID NO: 3872512 - DNA, 25 bp, Homo sapien
catgtggactgtccgcaacttggcc

SEQ ID NO: 3872513 - DNA, 25 bp, Homo sapien
ccatgtggactgtccgcaacttggc

SEQ ID NO: 3872514 - DNA, 25 bp, Homo sapien
tccatgtggactgtccgcaacttgg

SEQ ID NO: 3872515 - DNA, 25 bp, Homo sapien
agtgcctgctttgagttgctcatgg

SEQ ID NO: 3872516 - DNA, 25 bp, Homo sapien
gaatcccgcatgttcctggacagaa

SEQ ID NO: 3872517 - DNA, 25 bp, Homo sapien
cagaaagggttcaccaaactcagtc

SEQ ID NO: 3872518 - DNA, 25 bp, Homo sapien
gaagatgtgaagtgcaatagtgcac

SEQ ID NO: 3872519 - DNA, 25 bp, Homo sapien
tctgtgtcgacaatagaatcccgca

SEQ ID NO: 3872520 - DNA, 25 bp, Homo sapien
agacactaggctgttccaaagccca

SEQ ID NO: 3872521 - DNA, 25 bp, Homo sapien
tttgccacaattatatcttctgtct

SEQ ID NO: 3872522 - DNA, 25 bp, Homo sapien
ggttgtaatcacataatcaaggtgt

SEQ ID NO: 3872523 - DNA, 25 bp, Homo sapien
aatttggctgtaggcagaacccagt

SEQ ID NO: 3872524 - DNA, 25 bp, Homo sapien
caatttgtgggctaatgctttacat

SEQ ID NO: 3872525 - DNA, 25 bp, Homo sapien
aagtttaatagtcaatttgtgggct

SEQ ID NO: 3872526 - DNA, 25 bp, Homo sapien
taatagtcaatttgtgggctaatgc

SEQ ID NO: 3872527 - DNA, 25 bp, Homo sapien
tgaaagtttaatagtcaatttgtgg

SEQ ID NO: 3872528 - DNA, 25 bp, Homo sapien
gtgagactttctatctcatcaatca

SEQ ID NO: 3872529 - DNA, 25 bp, Homo sapien
atcctgaatcttctggaacgtctta

SEQ ID NO: 3872530 - DNA, 25 bp, Homo sapien
gaacgtcttagttatcagcttgtca

SEQ ID NO: 3872531 - DNA, 25 bp, Homo sapien
ctttcattatgggtggctgtgagac

SEQ ID NO: 3872532 - DNA, 25 bp, Homo sapien
gtcaatcttcacggtgatgttggaa

SEQ ID NO: 3872533 - DNA, 25 bp, Homo sapien
gctggaatcactacattaaaatgcc

SEQ ID NO: 3872534 - DNA, 25 bp, Homo sapien
gtgatgttggaagtagctggaatca

SEQ ID NO: 3872535 - DNA, 25 bp, Homo sapien
tagctggaatcactacattaaaatg

SEQ ID NO: 3872536 - DNA, 25 bp, Homo sapien
cttttggagggttaatagctgctga

SEQ ID NO: 3872537 - DNA, 25 bp, Homo sapien
cagaaaacgtaaattttgaagatgg

SEQ ID NO: 3872538 - DNA, 25 bp, Homo sapien
ctgaggagggtatatgacctggcac

SEQ ID NO: 3872539 - DNA, 25 bp, Homo sapien
gcacttgaccagttcttccaaacag

SEQ ID NO: 3872540 - DNA, 25 bp, Homo sapien
tgtccacgaccagagagaaagcctg

SEQ ID NO: 3872541 - DNA, 25 bp, Homo sapien
cacacagtgtatgcaccagaaaaag

SEQ ID NO: 3872542 - DNA, 25 bp, Homo sapien
tgtcactcaaaaggaagctcaattt

SEQ ID NO: 3872543 - DNA, 25 bp, Homo sapien
aaagcctggtgtagcctggacacac

SEQ ID NO: 3872544 - DNA, 25 bp, Homo sapien
ctgttgtagacaagatttagtatct

SEQ ID NO: 3872545 - DNA, 25 bp, Homo sapien
aaatgcagcataaactaccttaacc

SEQ ID NO: 3872546 - DNA, 25 bp, Homo sapien
gaaacaagatttgtgaagcttaaga

SEQ ID NO: 3872547 - DNA, 25 bp, Homo sapien
caacatcatcagtaataagacatac

SEQ ID NO: 3872548 - DNA, 25 bp, Homo sapien
gaagttcaatgcgatacaaagtcct

SEQ ID NO: 3872549 - DNA, 25 bp, Homo sapien
taagcaaatccctatcatgagggcc

SEQ ID NO: 3872550 - DNA, 25 bp, Homo sapien
aaacaactgtggatgtcgaagggcc

SEQ ID NO: 3872551 - DNA, 25 bp, Homo sapien
ttggatggcaaagcttcaagcgttc

SEQ ID NO: 3872552 - DNA, 25 bp, Homo sapien
tgtggtaaaacaccattctttggac

SEQ ID NO: 3872553 - DNA, 25 bp, Homo sapien
ctgtggtaaaacaccattctttgga

SEQ ID NO: 3872554 - DNA, 25 bp, Homo sapien
gattctgatccccttttgtggactc

SEQ ID NO: 3872555 - DNA, 25 bp, Homo sapien
ctgatccccttttgtggactcttgg

SEQ ID NO: 3872556 - DNA, 25 bp, Homo sapien
gcaaccatgcgtctgtctgtttcac

SEQ ID NO: 3872557 - DNA, 25 bp, Homo sapien
tctgttctggctgcaaccatgcgtc

SEQ ID NO: 3872558 - DNA, 25 bp, Homo sapien
caagatgatctctcagaatctgagt

SEQ ID NO: 3872559 - DNA, 25 bp, Homo sapien
aactagagcctgatcgagagtggga

SEQ ID NO: 3872560 - DNA, 25 bp, Homo sapien
gaagaagatgatctggaagaacaag

SEQ ID NO: 3872561 - DNA, 25 bp, Homo sapien
aagaagaactagagcctgatcgaga

SEQ ID NO: 3872562 - DNA, 25 bp, Homo sapien
tcgtttttgggcttcttcttcatca

SEQ ID NO: 3872563 - DNA, 25 bp, Homo sapien
gggcttcttcttcatcactgtcact

SEQ ID NO: 3872564 - DNA, 25 bp, Homo sapien
ctcgtttttgggcttcttcttcatc

SEQ ID NO: 3872565 - DNA, 25 bp, Homo sapien
tcttcttcatcactgtcactttctt

SEQ ID NO: 3872566 - DNA, 25 bp, Homo sapien
tccaccttgtaagatataagcagac

SEQ ID NO: 3872567 - DNA, 25 bp, Homo sapien
cctgggtagtgctcagtgacgcgac

SEQ ID NO: 3872568 - DNA, 25 bp, Homo sapien
ggctgccagcatatatccaccttgt

SEQ ID NO: 3872569 - DNA, 25 bp, Homo sapien
gtgacgcgacgctttcttcatcata

SEQ ID NO: 3872570 - DNA, 25 bp, Homo sapien
tccagggctgtccagcagttttgtg

SEQ ID NO: 3872571 - DNA, 25 bp, Homo sapien
cataacttcttctagctgaaggcca

SEQ ID NO: 3872572 - DNA, 25 bp, Homo sapien
cactgggatcgctgtattctgtagc

SEQ ID NO: 3872573 - DNA, 25 bp, Homo sapien
gaaagaagccactgtgttagcatca

SEQ ID NO: 3872574 - DNA, 25 bp, Homo sapien
aaaacagaaagtacactgacatact

SEQ ID NO: 3872575 - DNA, 25 bp, Homo sapien
caagatgttactagtacactgtaac

SEQ ID NO: 3872576 - DNA, 25 bp, Homo sapien
tacacacttttctgaccaaaacaag

SEQ ID NO: 3872577 - DNA, 25 bp, Homo sapien
acagggcatgctaaatgtttaaaac

SEQ ID NO: 3872578 - DNA, 25 bp, Homo sapien
tctcgaagccgagtgaggtactgct

SEQ ID NO: 3872579 - DNA, 25 bp, Homo sapien
caagcccttgcttctgaaatgtcaa

SEQ ID NO: 3872580 - DNA, 25 bp, Homo sapien
gaggctggtctctgatgcactttga

SEQ ID NO: 3872581 - DNA, 25 bp, Homo sapien
ttttgggaaattgacgaggctggtc

SEQ ID NO: 3872582 - DNA, 25 bp, Homo sapien
ctctaggccccaaaatgaaaactgc

SEQ ID NO: 3872583 - DNA, 25 bp, Homo sapien
gatgttcccacacaactactctagg

SEQ ID NO: 3872584 - DNA, 25 bp, Homo sapien
tcaatgcctacggagtacacagcac

SEQ ID NO: 3872585 - DNA, 25 bp, Homo sapien
gcacagggcaccaccaattaggtat

SEQ ID NO: 3872586 - DNA, 25 bp, Homo sapien
aagccccactgaggttgggcaaaag

SEQ ID NO: 3872587 - DNA, 25 bp, Homo sapien
tatttaccaaagaatgacttacagg

SEQ ID NO: 3872588 - DNA, 25 bp, Homo sapien
tgggcaaaagaacgcacagcttatc

SEQ ID NO: 3872589 - DNA, 25 bp, Homo sapien
caccggacccctactattgatatta

SEQ ID NO: 3872590 - DNA, 25 bp, Homo sapien
gatgggaacattaagccacttgctc

SEQ ID NO: 3872591 - DNA, 25 bp, Homo sapien
catcccattgtgtgccaagctcttt

SEQ ID NO: 3872592 - DNA, 25 bp, Homo sapien
ccacgcttggcacaattactattga

SEQ ID NO: 3872593 - DNA, 25 bp, Homo sapien
tgtatagctgcaaaagtcgtgttac

SEQ ID NO: 3872594 - DNA, 25 bp, Homo sapien
gcaggtcttgtctaccaatcaacta

SEQ ID NO: 3872595 - DNA, 25 bp, Homo sapien
tgttctgtgtagcaaaatattgaat

SEQ ID NO: 3872596 - DNA, 25 bp, Homo sapien
ctaaaaggaagagatagtgtcctac

SEQ ID NO: 3872597 - DNA, 25 bp, Homo sapien
tattaactataatgttctgtgtagc

SEQ ID NO: 3872598 - DNA, 25 bp, Homo sapien
tactatgcagtatgatggttcaaag

SEQ ID NO: 3872599 - DNA, 25 bp, Homo sapien
tattaagcagctatgtactatgcag

SEQ ID NO: 3872600 - DNA, 25 bp, Homo sapien
gaaacagttccatgcattcatcaat

SEQ ID NO: 3872601 - DNA, 25 bp, Homo sapien
tttttagtcaccaaattagactgac

SEQ ID NO: 3872602 - DNA, 25 bp, Homo sapien
aaagaagatgtcaacaccttctaca

SEQ ID NO: 3872603 - DNA, 25 bp, Homo sapien
tttgactataggctggttgtctaat

SEQ ID NO: 3872604 - DNA, 25 bp, Homo sapien
aaaaagaagatgtcaacaccttcta

SEQ ID NO: 3872605 - DNA, 25 bp, Homo sapien
aagaagatgtcaacaccttctacat

SEQ ID NO: 3872606 - DNA, 25 bp, Homo sapien
agattaataactggaactggacttt

SEQ ID NO: 3872607 - DNA, 25 bp, Homo sapien
gactttctgtatcaggaattccttg

SEQ ID NO: 3872608 - DNA, 25 bp, Homo sapien
gggtgctccttaagccatttttcca

SEQ ID NO: 3872609 - DNA, 25 bp, Homo sapien
tagtgctggatttatccctgtggaa

SEQ ID NO: 3872610 - DNA, 25 bp, Homo sapien
tgttaacctggtcaatgcctactta

SEQ ID NO: 3872611 - DNA, 25 bp, Homo sapien
tcctcagaaactgcctaggcagtta

SEQ ID NO: 3872612 - DNA, 25 bp, Homo sapien
tttcatccacgagacaaatgtcggc

SEQ ID NO: 3872613 - DNA, 25 bp, Homo sapien
aatactacaatagagtgtgagatcc

SEQ ID NO: 3872614 - DNA, 25 bp, Homo sapien
gggtcttccctcatgaagctgcatt

SEQ ID NO: 3872615 - DNA, 25 bp, Homo sapien
tattggggtttctgcaacggtgtct

SEQ ID NO: 3872616 - DNA, 25 bp, Homo sapien
agttgaacacgttcttctccagtga

SEQ ID NO: 3872617 - DNA, 25 bp, Homo sapien
gactattcacatctagtttattggg

SEQ ID NO: 3872618 - DNA, 25 bp, Homo sapien
cagtgagtgcatttaacagacagta

SEQ ID NO: 3872619 - DNA, 25 bp, Homo sapien
tgggtatttttatcctagcagtgag

SEQ ID NO: 3872620 - DNA, 25 bp, Homo sapien
gacagtaaatcagaaccagacctat

SEQ ID NO: 3872621 - DNA, 25 bp, Homo sapien
tgatgtacttacactgacgccattt

SEQ ID NO: 3872622 - DNA, 25 bp, Homo sapien
cccgagagactcaagacaattagaa

SEQ ID NO: 3872623 - DNA, 25 bp, Homo sapien
gaacaaacctctcatgaagttacaa

SEQ ID NO: 3872624 - DNA, 25 bp, Homo sapien
actctacaaattaaggaacatgaac

SEQ ID NO: 3872625 - DNA, 25 bp, Homo sapien
aataactcatcaatccttaagcctg

SEQ ID NO: 3872626 - DNA, 25 bp, Homo sapien
ccattcaggagctactccatattct

SEQ ID NO: 3872627 - DNA, 25 bp, Homo sapien
aacatctccccattcaggagctact

SEQ ID NO: 3872628 - DNA, 25 bp, Homo sapien
tttaggaatctacataaatctttca

SEQ ID NO: 3872629 - DNA, 25 bp, Homo sapien
tttcaaagggggagcaaatgcacct

SEQ ID NO: 3872630 - DNA, 25 bp, Homo sapien
tggaagaaatatatattcattaata

SEQ ID NO: 3872631 - DNA, 25 bp, Homo sapien
ctggaagaaatatatattcattaat

SEQ ID NO: 3872632 - DNA, 25 bp, Homo sapien
agaaatatatattcattaataatcc

SEQ ID NO: 3872633 - DNA, 25 bp, Homo sapien
ggaagaaatatatattcattaataa

SEQ ID NO: 3872634 - DNA, 25 bp, Homo sapien
cgggaccagtgagaatacgttcata

SEQ ID NO: 3872635 - DNA, 25 bp, Homo sapien
tcccagattccgtaggctttgtcag

SEQ ID NO: 3872636 - DNA, 25 bp, Homo sapien
tgtgagatccacacctggaagtagt

SEQ ID NO: 3872637 - DNA, 25 bp, Homo sapien
gaaggaaggccggtaggcattccca

SEQ ID NO: 3872638 - DNA, 25 bp, Homo sapien
ttacttctacagacttagacgagcc

SEQ ID NO: 3872639 - DNA, 25 bp, Homo sapien
gatgacgacgatgtactatcagatc

SEQ ID NO: 3872640 - DNA, 25 bp, Homo sapien
tatgaagattaaggcctggagtgag

SEQ ID NO: 3872641 - DNA, 25 bp, Homo sapien
tagacgagcctaagtcactgttttt

SEQ ID NO: 3872642 - DNA, 25 bp, Homo sapien
gaacctggacctctaccttgtcaga

SEQ ID NO: 3872643 - DNA, 25 bp, Homo sapien
taactcagctgaggtaacaggtagc

SEQ ID NO: 3872644 - DNA, 25 bp, Homo sapien
taaattataggtgtcaaggaggctg

SEQ ID NO: 3872645 - DNA, 25 bp, Homo sapien
tatgtctatagggtgccaaagtcac

SEQ ID NO: 3872646 - DNA, 25 bp, Homo sapien
tagtcaaagaatatgtttaataaaa

SEQ ID NO: 3872647 - DNA, 25 bp, Homo sapien
cctaatccggcatgactacaactaa

SEQ ID NO: 3872648 - DNA, 25 bp, Homo sapien
agttgtaggaacatccctccggtct

SEQ ID NO: 3872649 - DNA, 25 bp, Homo sapien
tccggtctcctttatcacaaaacag

SEQ ID NO: 3872650 - DNA, 25 bp, Homo sapien
caactaattacatttgccaagaccc

SEQ ID NO: 3872651 - DNA, 25 bp, Homo sapien
cccaaaggttaacgattatctctga

SEQ ID NO: 3872652 - DNA, 25 bp, Homo sapien
gaataaatgggcatgcgcaaaacgt

SEQ ID NO: 3872653 - DNA, 25 bp, Homo sapien
tggtatgtacagtataactccgttg

SEQ ID NO: 3872654 - DNA, 25 bp, Homo sapien
tataaatagctactaggagcttcgt

SEQ ID NO: 3872655 - DNA, 25 bp, Homo sapien
ttcaaggggtcacatctcacatatg

SEQ ID NO: 3872656 - DNA, 25 bp, Homo sapien
tgtgcccacgtggtaacaaggttca

SEQ ID NO: 3872657 - DNA, 25 bp, Homo sapien
gatgggtaatgtgcccacgtggtaa

SEQ ID NO: 3872658 - DNA, 25 bp, Homo sapien
aggttcaaggggtcacatctcacat

SEQ ID NO: 3872659 - DNA, 25 bp, Homo sapien
aggcagtcttccatgcaagtactaa

SEQ ID NO: 3872660 - DNA, 25 bp, Homo sapien
agtatttccaggcagtcttccatgc

SEQ ID NO: 3872661 - DNA, 25 bp, Homo sapien
cacccagtatttccaggcagtcttc

SEQ ID NO: 3872662 - DNA, 25 bp, Homo sapien
catgttcagggtggtgtagccatag

SEQ ID NO: 3872663 - DNA, 25 bp, Homo sapien
gctttcatattgctcccttaacatc

SEQ ID NO: 3872664 - DNA, 25 bp, Homo sapien
tttcatattgctcccttaacatcct

SEQ ID NO: 3872665 - DNA, 25 bp, Homo sapien
ctttcatattgctcccttaacatcc

SEQ ID NO: 3872666 - DNA, 25 bp, Homo sapien
tgctttcatattgctcccttaacat

SEQ ID NO: 3872667 - DNA, 25 bp, Homo sapien
tcactccaagccttgccgagccacc

SEQ ID NO: 3872668 - DNA, 25 bp, Homo sapien
taggaaagtgaatcatctcaagttc

SEQ ID NO: 3872669 - DNA, 25 bp, Homo sapien
ccttgccgagccacccacacctttt

SEQ ID NO: 3872670 - DNA, 25 bp, Homo sapien
tttttcagctcaaagaggcttttag

SEQ ID NO: 3872671 - DNA, 25 bp, Homo sapien
gctgcctatcagagcagaggcatta

SEQ ID NO: 3872672 - DNA, 25 bp, Homo sapien
agcagaggcattattgggcaccttg

SEQ ID NO: 3872673 - DNA, 25 bp, Homo sapien
ctcgctgcctatcagagcagaggca

SEQ ID NO: 3872674 - DNA, 25 bp, Homo sapien
cattattgggcaccttgcgaaacat

SEQ ID NO: 3872675 - DNA, 25 bp, Homo sapien
aagtggccaccaagtcctgtctgtc

SEQ ID NO: 3872676 - DNA, 25 bp, Homo sapien
tcgatcaatgaacagcatcccacgc

SEQ ID NO: 3872677 - DNA, 25 bp, Homo sapien
caaaactgggtgtctcttccagacc

SEQ ID NO: 3872678 - DNA, 25 bp, Homo sapien
ccacgctctacacatctgatacaaa

SEQ ID NO: 3872679 - DNA, 25 bp, Homo sapien
ctgggtaaacacacagacatgctgg

SEQ ID NO: 3872680 - DNA, 25 bp, Homo sapien
tgcactgcgccagggagagctctgt

SEQ ID NO: 3872681 - DNA, 25 bp, Homo sapien
cactgcgccagggagagctctgtct

SEQ ID NO: 3872682 - DNA, 25 bp, Homo sapien
gcactgcgccagggagagctctgtc

SEQ ID NO: 3872683 - DNA, 25 bp, Homo sapien
ggagcctgtaaggtcacctgttgag

SEQ ID NO: 3872684 - DNA, 25 bp, Homo sapien
tcccccaacaagtagggagcctgta

SEQ ID NO: 3872685 - DNA, 25 bp, Homo sapien
cctgtaaggtcacctgttgagcaag

SEQ ID NO: 3872686 - DNA, 25 bp, Homo sapien
gagcctgtaaggtcacctgttgagc

SEQ ID NO: 3872687 - DNA, 25 bp, Homo sapien
ggccaaagagttcttggggtctgta

SEQ ID NO: 3872688 - DNA, 25 bp, Homo sapien
ttcttggggtctgtaggtttgacag

SEQ ID NO: 3872689 - DNA, 25 bp, Homo sapien
ttggccaaagagttcttggggtctg

SEQ ID NO: 3872690 - DNA, 25 bp, Homo sapien
caaagagttcttggggtctgtaggt

SEQ ID NO: 3872691 - DNA, 25 bp, Homo sapien
gagggggtggagcatacacaactct

SEQ ID NO: 3872692 - DNA, 25 bp, Homo sapien
agagggggtggagcatacacaactc

SEQ ID NO: 3872693 - DNA, 25 bp, Homo sapien
tctactgcccttcgcatccttcagc

SEQ ID NO: 3872694 - DNA, 25 bp, Homo sapien
gcccttcgcatccttcagctgtgct

SEQ ID NO: 3872695 - DNA, 25 bp, Homo sapien
agaccccagtctgggcgagcctggc

SEQ ID NO: 3872696 - DNA, 25 bp, Homo sapien
gtctgggcgagcctggctgaaagcc

SEQ ID NO: 3872697 - DNA, 25 bp, Homo sapien
tcagaccccagtctgggcgagcctg

SEQ ID NO: 3872698 - DNA, 25 bp, Homo sapien
cccagtctgggcgagcctggctgaa

SEQ ID NO: 3872699 - DNA, 25 bp, Homo sapien
gcaagaagccaatggctggacagtg

SEQ ID NO: 3872700 - DNA, 25 bp, Homo sapien
agaagccaatggctggacagtgaca

SEQ ID NO: 3872701 - DNA, 25 bp, Homo sapien
gaagccaatggctggacagtgacac

SEQ ID NO: 3872702 - DNA, 25 bp, Homo sapien
ccattaagcaagaagccaatggctg

SEQ ID NO: 3872703 - DNA, 25 bp, Homo sapien
ctgctggttcaccctcattagggtg

SEQ ID NO: 3872704 - DNA, 25 bp, Homo sapien
gctggttcaccctcattagggtggc

SEQ ID NO: 3872705 - DNA, 25 bp, Homo sapien
tggttcaccctcattagggtggcag

SEQ ID NO: 3872706 - DNA, 25 bp, Homo sapien
tgctggttcaccctcattagggtgg

SEQ ID NO: 3872707 - DNA, 25 bp, Homo sapien
ctaaaggtcctttctgtaggatgga

SEQ ID NO: 3872708 - DNA, 25 bp, Homo sapien
gagcttcagacagcactctattaca

SEQ ID NO: 3872709 - DNA, 25 bp, Homo sapien
cttcagacagcactctattacagcc

SEQ ID NO: 3872710 - DNA, 25 bp, Homo sapien
aactgagcttcagacagcactctat

SEQ ID NO: 3872711 - DNA, 25 bp, Homo sapien
ctgagcttcagacagcactctatta

SEQ ID NO: 3872712 - DNA, 25 bp, Homo sapien
gtaaactatccttcttgggcttgcg

SEQ ID NO: 3872713 - DNA, 25 bp, Homo sapien
actatccttcttgggcttgcgtttc

SEQ ID NO: 3872714 - DNA, 25 bp, Homo sapien
gccctgctgtaaactatccttcttg

SEQ ID NO: 3872715 - DNA, 25 bp, Homo sapien
tagtccaggccctgctgtaaactat

SEQ ID NO: 3872716 - DNA, 25 bp, Homo sapien
tccagaaatgtgaacaacaaagatt

SEQ ID NO: 3872717 - DNA, 25 bp, Homo sapien
ccagaaatgtgaacaacaaagattt

SEQ ID NO: 3872718 - DNA, 25 bp, Homo sapien
gttccagaaatgtgaacaacaaaga

SEQ ID NO: 3872719 - DNA, 25 bp, Homo sapien
ttccagaaatgtgaacaacaaagat

SEQ ID NO: 3872720 - DNA, 25 bp, Homo sapien
gaacagcagagcaaggtgcaaaaca

SEQ ID NO: 3872721 - DNA, 25 bp, Homo sapien
ccaggaggacctagaagatttacag

SEQ ID NO: 3872722 - DNA, 25 bp, Homo sapien
tgcaaaacacaggacatggaaaacc

SEQ ID NO: 3872723 - DNA, 25 bp, Homo sapien
tcagatatgggtggtgacaatcctg

SEQ ID NO: 3872724 - DNA, 25 bp, Homo sapien
gaagaaagaagccacgagtgaccaa

SEQ ID NO: 3872725 - DNA, 25 bp, Homo sapien
gtgtcaaggcctactcctccagagg

SEQ ID NO: 3872726 - DNA, 25 bp, Homo sapien
cagatcaacttagagcagccagcct

SEQ ID NO: 3872727 - DNA, 25 bp, Homo sapien
agaagacagagctggcatagaagaa

SEQ ID NO: 3872728 - DNA, 25 bp, Homo sapien
ttacaaacaacttgtgcagataatg

SEQ ID NO: 3872729 - DNA, 25 bp, Homo sapien
tacgactctgttctgcccggtcctg

SEQ ID NO: 3872730 - DNA, 25 bp, Homo sapien
acacacacgctttacaaacaacttg

SEQ ID NO: 3872731 - DNA, 25 bp, Homo sapien
gaaatacgactctgttctgcccggt

SEQ ID NO: 3872732 - DNA, 25 bp, Homo sapien
gaacagtcttcaggcctacaacaaa

SEQ ID NO: 3872733 - DNA, 25 bp, Homo sapien
tatacactactcttctgcagacact

SEQ ID NO: 3872734 - DNA, 25 bp, Homo sapien
tttcttagacaggttctcccatccc

SEQ ID NO: 3872735 - DNA, 25 bp, Homo sapien
tagagtaggcagcttgagaggaaaa

SEQ ID NO: 3872736 - DNA, 25 bp, Homo sapien
cagactctgtggttacctgaagaag

SEQ ID NO: 3872737 - DNA, 25 bp, Homo sapien
caggcaatccactaggagtccatgc

SEQ ID NO: 3872738 - DNA, 25 bp, Homo sapien
gaatttttgatagtgctcagactct

SEQ ID NO: 3872739 - DNA, 25 bp, Homo sapien
tcaagaggaaatcccaactctgtat

SEQ ID NO: 3872740 - DNA, 25 bp, Homo sapien
tgggctaatgagaagatcagacagc

SEQ ID NO: 3872741 - DNA, 25 bp, Homo sapien
ccatgtttcagttgccttacgagcc

SEQ ID NO: 3872742 - DNA, 25 bp, Homo sapien
tatactcatagcatgtcccagtgag

SEQ ID NO: 3872743 - DNA, 25 bp, Homo sapien
cagtgcagctctgtatcctgaaaac

SEQ ID NO: 3872744 - DNA, 25 bp, Homo sapien
gaggtctttcacctgactggcacat

SEQ ID NO: 3872745 - DNA, 25 bp, Homo sapien
gatgcctctgatatggagaagttaa

SEQ ID NO: 3872746 - DNA, 25 bp, Homo sapien
gcttagtcataaaatgcaagaggtc

SEQ ID NO: 3872747 - DNA, 25 bp, Homo sapien
tttgtacccagccaacatactgtgg

SEQ ID NO: 3872748 - DNA, 25 bp, Homo sapien
gggcccgcagccattcaaacggcga

SEQ ID NO: 3872749 - DNA, 25 bp, Homo sapien
gcccgcagccattcaaacggcgaag

SEQ ID NO: 3872750 - DNA, 25 bp, Homo sapien
ccgcagccattcaaacggcgaagcg

SEQ ID NO: 3872751 - DNA, 25 bp, Homo sapien
gcagccattcaaacggcgaagcgcc

SEQ ID NO: 3872752 - DNA, 25 bp, Homo sapien
aggcggctgcacagctcgtcgaacc

SEQ ID NO: 3872753 - DNA, 25 bp, Homo sapien
atgctgcggtagctgtcccaggcct

SEQ ID NO: 3872754 - DNA, 25 bp, Homo sapien
tccagcgtgtagctttcgctcatgc

SEQ ID NO: 3872755 - DNA, 25 bp, Homo sapien
tcgtcgaaccgctgctggatctgag

SEQ ID NO: 3872756 - DNA, 25 bp, Homo sapien
gaccaaaaagccctcgaggtagcca

SEQ ID NO: 3872757 - DNA, 25 bp, Homo sapien
tgcaagccctgtccgaaggctgcga

SEQ ID NO: 3872758 - DNA, 25 bp, Homo sapien
cctcgaggtagccacagtcctgatc

SEQ ID NO: 3872759 - DNA, 25 bp, Homo sapien
acccggatcgcaacaacaacaggag

SEQ ID NO: 3872760 - DNA, 25 bp, Homo sapien
tgtcacagcgtacctcactgtaagc

SEQ ID NO: 3872761 - DNA, 25 bp, Homo sapien
ttattttcccttgcactcccatgag

SEQ ID NO: 3872762 - DNA, 25 bp, Homo sapien
aatgacatcccatattgtcacagcg

SEQ ID NO: 3872763 - DNA, 25 bp, Homo sapien
taaccagctattacgtgatacttgc

SEQ ID NO: 3872764 - DNA, 25 bp, Homo sapien
ggcacatgctaaccaatgaagatca

SEQ ID NO: 3872765 - DNA, 25 bp, Homo sapien
ttaaagatacatagtttccttccac

SEQ ID NO: 3872766 - DNA, 25 bp, Homo sapien
tttctgcaagccacatataaggcac

SEQ ID NO: 3872767 - DNA, 25 bp, Homo sapien
cttacagttggaacagattttctgc

SEQ ID NO: 3872768 - DNA, 25 bp, Homo sapien
ctcttgagggtatttaaagatgtcc

SEQ ID NO: 3872769 - DNA, 25 bp, Homo sapien
ctcagtacgttctctgaaatgtggg

SEQ ID NO: 3872770 - DNA, 25 bp, Homo sapien
ctgacgaggttgctcctcttgaggg

SEQ ID NO: 3872771 - DNA, 25 bp, Homo sapien
gggggtagatttgccatgtcttccc

SEQ ID NO: 3872772 - DNA, 25 bp, Homo sapien
gtcatgggacttttataacacactg

SEQ ID NO: 3872773 - DNA, 25 bp, Homo sapien
gaatcttcatacctgcctcatctcg

SEQ ID NO: 3872774 - DNA, 25 bp, Homo sapien
ctggaatcttcatacctgcctcatc

SEQ ID NO: 3872775 - DNA, 25 bp, Homo sapien
tacatctgtattccctctggtagtc

SEQ ID NO: 3872776 - DNA, 25 bp, Homo sapien
aatttcagacacagtacagggctgt

SEQ ID NO: 3872777 - DNA, 25 bp, Homo sapien
tttcagacacagtacagggctgtcg

SEQ ID NO: 3872778 - DNA, 25 bp, Homo sapien
aaaatttcagacacagtacagggct

SEQ ID NO: 3872779 - DNA, 25 bp, Homo sapien
ttcagacacagtacagggctgtcgc

SEQ ID NO: 3872780 - DNA, 25 bp, Homo sapien
aaatgagacatacttgcccaataca

SEQ ID NO: 3872781 - DNA, 25 bp, Homo sapien
tatttcatgccactgatcatgtcgc

SEQ ID NO: 3872782 - DNA, 25 bp, Homo sapien
ggatggcggctctcaccctaattag

SEQ ID NO: 3872783 - DNA, 25 bp, Homo sapien
cattctaaaatttgtagccgctgta

SEQ ID NO: 3872784 - DNA, 25 bp, Homo sapien
tcgcccagactggaggtgcaatctc

SEQ ID NO: 3872785 - DNA, 25 bp, Homo sapien
cccagactggaggtgcaatctcagc

SEQ ID NO: 3872786 - DNA, 25 bp, Homo sapien
gcccagactggaggtgcaatctcag

SEQ ID NO: 3872787 - DNA, 25 bp, Homo sapien
tcactgcagcctccgcttcccaggt

SEQ ID NO: 3872788 - DNA, 25 bp, Homo sapien
cctaaacttgttactggtgtgcact

SEQ ID NO: 3872789 - DNA, 25 bp, Homo sapien
gaaagttaccacttacctcagcgta

SEQ ID NO: 3872790 - DNA, 25 bp, Homo sapien
gccaaagaggcaaacgataatcaac

SEQ ID NO: 3872791 - DNA, 25 bp, Homo sapien
tgctggttgaactctaacactgaac

SEQ ID NO: 3872792 - DNA, 25 bp, Homo sapien
gaattgaccaaatcatcactaatca

SEQ ID NO: 3872793 - DNA, 25 bp, Homo sapien
caggtgataagaattgaccaaatca

SEQ ID NO: 3872794 - DNA, 25 bp, Homo sapien
tttacgattagaacactgaagtgca

SEQ ID NO: 3872795 - DNA, 25 bp, Homo sapien
ggttcacaagttctttacgattaga

SEQ ID NO: 3872796 - DNA, 25 bp, Homo sapien
ggccatcatgtaaggaacacagttt

SEQ ID NO: 3872797 - DNA, 25 bp, Homo sapien
ttctcaatgatacaaggggggtcag

SEQ ID NO: 3872798 - DNA, 25 bp, Homo sapien
aaggtttagaatctttagcatgaaa

SEQ ID NO: 3872799 - DNA, 25 bp, Homo sapien
tcctaatatagggtttccagaaatg

SEQ ID NO: 3872800 - DNA, 25 bp, Homo sapien
agaaacccagtgagattttcttctt

SEQ ID NO: 3872801 - DNA, 25 bp, Homo sapien
ctctctccaaagttcccaggttcta

SEQ ID NO: 3872802 - DNA, 25 bp, Homo sapien
ttcccaggttctagaaacccagtga

SEQ ID NO: 3872803 - DNA, 25 bp, Homo sapien
actctctccaaagttcccaggttct

SEQ ID NO: 3872804 - DNA, 25 bp, Homo sapien
tataatccagaagcttaaagaaact

SEQ ID NO: 3872805 - DNA, 25 bp, Homo sapien
tggtaggtgcaacttccggtgagaa

SEQ ID NO: 3872806 - DNA, 25 bp, Homo sapien
tgtctagctgctctaggcacccctg

SEQ ID NO: 3872807 - DNA, 25 bp, Homo sapien
cacagtacaagtattttgctgacag

SEQ ID NO: 3872808 - DNA, 25 bp, Homo sapien
tcagcatcctctccaagaaatatcc

SEQ ID NO: 3872809 - DNA, 25 bp, Homo sapien
tgcaccctttcagcagtctctgttc

SEQ ID NO: 3872810 - DNA, 25 bp, Homo sapien
cagacaccttgagagagtcccaatt

SEQ ID NO: 3872811 - DNA, 25 bp, Homo sapien
ctctgttcctgaaccagcgttcaga

SEQ ID NO: 3872812 - DNA, 25 bp, Homo sapien
tgtatttctactcttctggcatggc

SEQ ID NO: 3872813 - DNA, 25 bp, Homo sapien
ccctggcttacctgctcctgtattt

SEQ ID NO: 3872814 - DNA, 25 bp, Homo sapien
ggcttacctgctcctgtatttctac

SEQ ID NO: 3872815 - DNA, 25 bp, Homo sapien
actcttctggcatggctaaactcac

SEQ ID NO: 3872816 - DNA, 25 bp, Homo sapien
cagccagcagcatataaccacatca

SEQ ID NO: 3872817 - DNA, 25 bp, Homo sapien
gcatgaaccgatgcctacattggga

SEQ ID NO: 3872818 - DNA, 25 bp, Homo sapien
gccttacaaggtttcttgcagccaa

SEQ ID NO: 3872819 - DNA, 25 bp, Homo sapien
gaggaatctttaacttgggtgcaaa

SEQ ID NO: 3872820 - DNA, 25 bp, Homo sapien
tgtgaagacgactcaagctatgcgt

SEQ ID NO: 3872821 - DNA, 25 bp, Homo sapien
tggtgtggagattctaagtgctttg

SEQ ID NO: 3872822 - DNA, 25 bp, Homo sapien
gtagaaactggagtcacacaagggc

SEQ ID NO: 3872823 - DNA, 25 bp, Homo sapien
gctatgcgtagctgtagaaactgga

SEQ ID NO: 3872824 - DNA, 25 bp, Homo sapien
ttctttcagtctgttagcaatagcc

SEQ ID NO: 3872825 - DNA, 25 bp, Homo sapien
caattactgaaatcctcgtctggct

SEQ ID NO: 3872826 - DNA, 25 bp, Homo sapien
ctgggttggatctctggaacatgtc

SEQ ID NO: 3872827 - DNA, 25 bp, Homo sapien
gaaatcctcgtctggctggaaatgc

SEQ ID NO: 3872828 - DNA, 25 bp, Homo sapien
tcctgctcaataacagattctaata

SEQ ID NO: 3872829 - DNA, 25 bp, Homo sapien
tactttatagtaaagcatctccgca

SEQ ID NO: 3872830 - DNA, 25 bp, Homo sapien
tgctcaataacagattctaatactt

SEQ ID NO: 3872831 - DNA, 25 bp, Homo sapien
agcatctccgcaaaacgaaaatgtt

SEQ ID NO: 3872832 - DNA, 25 bp, Homo sapien
agagagatctgtggaacgcatcttg

SEQ ID NO: 3872833 - DNA, 25 bp, Homo sapien
aagtgacgacctcaaggcagcaggc

SEQ ID NO: 3872834 - DNA, 25 bp, Homo sapien
gaaaattcccaggaggcttataaga

SEQ ID NO: 3872835 - DNA, 25 bp, Homo sapien
taaaaatgataaagaggcacatcaa

SEQ ID NO: 3872836 - DNA, 25 bp, Homo sapien
caagattagctagtgacatgtgtgc

SEQ ID NO: 3872837 - DNA, 25 bp, Homo sapien
gttggtctcatctacaatatcccca

SEQ ID NO: 3872838 - DNA, 25 bp, Homo sapien
aaagaactagctaccaaatcaatgc

SEQ ID NO: 3872839 - DNA, 25 bp, Homo sapien
tatgcctctctgtaacacatgaaag

SEQ ID NO: 3872840 - DNA, 25 bp, Homo sapien
ttcacatgtaggaactctgttttca

SEQ ID NO: 3872841 - DNA, 25 bp, Homo sapien
ctcttcacatgtaggaactctgttt

SEQ ID NO: 3872842 - DNA, 25 bp, Homo sapien
cttcacatgtaggaactctgttttc

SEQ ID NO: 3872843 - DNA, 25 bp, Homo sapien
tcttcacatgtaggaactctgtttt

SEQ ID NO: 3872844 - DNA, 25 bp, Homo sapien
ggcaagtgagcatgcgagcaaagct

SEQ ID NO: 3872845 - DNA, 25 bp, Homo sapien
tgtatgtctgctgcctaaaccctga

SEQ ID NO: 3872846 - DNA, 25 bp, Homo sapien
gtcccatcgtgcacacacatagtag

SEQ ID NO: 3872847 - DNA, 25 bp, Homo sapien
taaaagcagcttagcgatgggaggt

SEQ ID NO: 3872848 - DNA, 25 bp, Homo sapien
tcctccagtatcagcacgaacttca

SEQ ID NO: 3872849 - DNA, 25 bp, Homo sapien
gcacgaacttcagtcacccttctgg

SEQ ID NO: 3872850 - DNA, 25 bp, Homo sapien
cagcaatgcaaatttcatctgccct

SEQ ID NO: 3872851 - DNA, 25 bp, Homo sapien
gggagccagcaatgcaaatttcatc

SEQ ID NO: 3872852 - DNA, 25 bp, Homo sapien
cgtttgcccattgttggctgtgaca

SEQ ID NO: 3872853 - DNA, 25 bp, Homo sapien
aatagccgccttctggtagtgctgg

SEQ ID NO: 3872854 - DNA, 25 bp, Homo sapien
aagtctgtccaggaactggtgtgac

SEQ ID NO: 3872855 - DNA, 25 bp, Homo sapien
cacaggaatggttaccgtttgccca

SEQ ID NO: 3872856 - DNA, 25 bp, Homo sapien
gaaggaactcaatatccaactctgc

SEQ ID NO: 3872857 - DNA, 25 bp, Homo sapien
tgtcactctagccaaacctcgggta

SEQ ID NO: 3872858 - DNA, 25 bp, Homo sapien
gttgataataagaggttctccgggc

SEQ ID NO: 3872859 - DNA, 25 bp, Homo sapien
tctccgggcagaggtttacaatttc

SEQ ID NO: 3872860 - DNA, 25 bp, Homo sapien
ttgagagctcagacttccagccagg

SEQ ID NO: 3872861 - DNA, 25 bp, Homo sapien
ggatggagcctgtcacagcttgtgc

SEQ ID NO: 3872862 - DNA, 25 bp, Homo sapien
cagggaagaatgttatccctccatt

SEQ ID NO: 3872863 - DNA, 25 bp, Homo sapien
ccaacattgacttggacagggaaga

SEQ ID NO: 3872864 - DNA, 25 bp, Homo sapien
tcttcctgggtctattactactgct

SEQ ID NO: 3872865 - DNA, 25 bp, Homo sapien
tactactgctggttacagactggcc

SEQ ID NO: 3872866 - DNA, 25 bp, Homo sapien
gaaatctgttgaatggccacttgac

SEQ ID NO: 3872867 - DNA, 25 bp, Homo sapien
aaaagcgataaagagctggtcttcc

SEQ ID NO: 3872868 - DNA, 25 bp, Homo sapien
tgtctgtccatcataagttcaggac

SEQ ID NO: 3872869 - DNA, 25 bp, Homo sapien
gtttggcacagagatcccgaaggcg

SEQ ID NO: 3872870 - DNA, 25 bp, Homo sapien
tcaggacactgaattatggagaatt

SEQ ID NO: 3872871 - DNA, 25 bp, Homo sapien
taaatggcacacattaataactggt

SEQ ID NO: 3872872 - DNA, 25 bp, Homo sapien
gaagcttagggaagaggatcactta

SEQ ID NO: 3872873 - DNA, 25 bp, Homo sapien
tgggtaacacagcaaaatctcgtat

SEQ ID NO: 3872874 - DNA, 25 bp, Homo sapien
aacacagcaaaatctcgtatctaca

SEQ ID NO: 3872875 - DNA, 25 bp, Homo sapien
ggaaggctgccgtgagcactacact

SEQ ID NO: 3872876 - DNA, 25 bp, Homo sapien
tgagtcctataacaacgcataatgt

SEQ ID NO: 3872877 - DNA, 25 bp, Homo sapien
cctataacaacgcataatgttctgg

SEQ ID NO: 3872878 - DNA, 25 bp, Homo sapien
taacaacgcataatgttctggaagg

SEQ ID NO: 3872879 - DNA, 25 bp, Homo sapien
ctgcggctgagtcctataacaacgc

SEQ ID NO: 3872880 - DNA, 25 bp, Homo sapien
tggccgatttgcctctcagagatga

SEQ ID NO: 3872881 - DNA, 25 bp, Homo sapien
ggattcaatcagagcccatctagca

SEQ ID NO: 3872882 - DNA, 25 bp, Homo sapien
aagtaagatacacagatctggccga

SEQ ID NO: 3872883 - DNA, 25 bp, Homo sapien
tatttgttgagcacacccttggtga

SEQ ID NO: 3872884 - DNA, 25 bp, Homo sapien
ttagttctgttggagaattctgatg

SEQ ID NO: 3872885 - DNA, 25 bp, Homo sapien
tagttctgttggagaattctgatgg

SEQ ID NO: 3872886 - DNA, 25 bp, Homo sapien
ctcataactggactggagtctctac

SEQ ID NO: 3872887 - DNA, 25 bp, Homo sapien
ataactggactggagtctctactgg

SEQ ID NO: 3872888 - DNA, 25 bp, Homo sapien
ggtgctgcttgacctcataactgga

SEQ ID NO: 3872889 - DNA, 25 bp, Homo sapien
tggcaaggtgctgcttgacctcata

SEQ ID NO: 3872890 - DNA, 25 bp, Homo sapien
cctgtgagtacttcatggcaaatgt

SEQ ID NO: 3872891 - DNA, 25 bp, Homo sapien
aactgaatgaggtctcccctctcct

SEQ ID NO: 3872892 - DNA, 25 bp, Homo sapien
cttcatggcaaatgtcttaatctgt

SEQ ID NO: 3872893 - DNA, 25 bp, Homo sapien
tgagtacttcatggcaaatgtctta

SEQ ID NO: 3872894 - DNA, 25 bp, Homo sapien
cgaggggagcctgttcttacaaatg

SEQ ID NO: 3872895 - DNA, 25 bp, Homo sapien
tattcggcgaggggagcctgttctt

SEQ ID NO: 3872896 - DNA, 25 bp, Homo sapien
ctgtattcggcgaggggagcctgtt

SEQ ID NO: 3872897 - DNA, 25 bp, Homo sapien
gttcttacaaatggatagggagaga

SEQ ID NO: 3872898 - DNA, 25 bp, Homo sapien
aaatgtagacaggatgattttgaga

SEQ ID NO: 3872899 - DNA, 25 bp, Homo sapien
tagaaaatcttttctcgaggagaaa

SEQ ID NO: 3872900 - DNA, 25 bp, Homo sapien
atcttttctcgaggagaaagcattg

SEQ ID NO: 3872901 - DNA, 25 bp, Homo sapien
atgtagacaggatgattttgagaca

SEQ ID NO: 3872902 - DNA, 25 bp, Homo sapien
tgtaagggccttcacaatccagttc

SEQ ID NO: 3872903 - DNA, 25 bp, Homo sapien
gcatgatgcccgtaattaagctttg

SEQ ID NO: 3872904 - DNA, 25 bp, Homo sapien
caacccgtttgaaagtaagctgcag

SEQ ID NO: 3872905 - DNA, 25 bp, Homo sapien
caaaccctgggttttgcttcatgag

SEQ ID NO: 3872906 - DNA, 25 bp, Homo sapien
ggatgagagtctaatttaagccgtc

SEQ ID NO: 3872907 - DNA, 25 bp, Homo sapien
ttactatgataggaaaagtgtctcc

SEQ ID NO: 3872908 - DNA, 25 bp, Homo sapien
taaattcattccaaagcacgtgaca

SEQ ID NO: 3872909 - DNA, 25 bp, Homo sapien
tggtcttcttattcagaatcgctgg

SEQ ID NO: 3872910 - DNA, 25 bp, Homo sapien
tcatgagtggtagcatggtataacc

SEQ ID NO: 3872911 - DNA, 25 bp, Homo sapien
gaaacgaccctctttgtcctgataa

SEQ ID NO: 3872912 - DNA, 25 bp, Homo sapien
ttttagtatgttcccagagttccca

SEQ ID NO: 3872913 - DNA, 25 bp, Homo sapien
catttgaagtgtacagctccatggc

SEQ ID NO: 3872914 - DNA, 25 bp, Homo sapien
aaattattttctggacagtggctca

SEQ ID NO: 3872915 - DNA, 25 bp, Homo sapien
aaagcctctaaaagtcgtctgtcac

SEQ ID NO: 3872916 - DNA, 25 bp, Homo sapien
caaaagtagagaagcataatgcatc

SEQ ID NO: 3872917 - DNA, 25 bp, Homo sapien
tgcaattgagaaagacactgccaga

SEQ ID NO: 3872918 - DNA, 25 bp, Homo sapien
tttttgcaggtgattcacttccatc

SEQ ID NO: 3872919 - DNA, 25 bp, Homo sapien
gacggcgtaataaggcagaatgatt

SEQ ID NO: 3872920 - DNA, 25 bp, Homo sapien
gtgggaaccacggtcattagctaca

SEQ ID NO: 3872921 - DNA, 25 bp, Homo sapien
ggagtttctcctgtgcgtatcatac

SEQ ID NO: 3872922 - DNA, 25 bp, Homo sapien
ttactaacaggctgtaactcatcag

SEQ ID NO: 3872923 - DNA, 25 bp, Homo sapien
taatctagatgcattaaaggctgct

SEQ ID NO: 3872924 - DNA, 25 bp, Homo sapien
taactcatcagctggattaaggaaa

SEQ ID NO: 3872925 - DNA, 25 bp, Homo sapien
ggaaaaaagctccataatctagatg

SEQ ID NO: 3872926 - DNA, 25 bp, Homo sapien
tccaagtttggattctaagcagcct

SEQ ID NO: 3872927 - DNA, 25 bp, Homo sapien
agtacgtcaacagaagcctcctatg

SEQ ID NO: 3872928 - DNA, 25 bp, Homo sapien
tcctatgctcacgtttgggtacaca

SEQ ID NO: 3872929 - DNA, 25 bp, Homo sapien
tacaggttcactcagacattgcaca

SEQ ID NO: 3872930 - DNA, 25 bp, Homo sapien
tatatcaccttaatagacatttctt

SEQ ID NO: 3872931 - DNA, 25 bp, Homo sapien
tagctggttgatccctatataacaa

SEQ ID NO: 3872932 - DNA, 25 bp, Homo sapien
tagataattcagctgttaaataaca

SEQ ID NO: 3872933 - DNA, 25 bp, Homo sapien
tagataactccctcctaaaggaaga

SEQ ID NO: 3872934 - DNA, 25 bp, Homo sapien
gcagaacactattctaattgaacaa

SEQ ID NO: 3872935 - DNA, 25 bp, Homo sapien
cagcaatatgaagttacctagtaac

SEQ ID NO: 3872936 - DNA, 25 bp, Homo sapien
tcttcatataaaattacagtagcag

SEQ ID NO: 3872937 - DNA, 25 bp, Homo sapien
tacctagtaactttgtttatactga

SEQ ID NO: 3872938 - DNA, 25 bp, Homo sapien
gctggcagttttagctggagcccct

SEQ ID NO: 3872939 - DNA, 25 bp, Homo sapien
tgagaatggtgggttcctgaagcac

SEQ ID NO: 3872940 - DNA, 25 bp, Homo sapien
cctgtcatgggtaaagcctggctca

SEQ ID NO: 3872941 - DNA, 25 bp, Homo sapien
cagatggactacgtggcttttgtac

SEQ ID NO: 3872942 - DNA, 25 bp, Homo sapien
cagcatcgagctagctgcgaggcca

SEQ ID NO: 3872943 - DNA, 25 bp, Homo sapien
tgtgcgcgtttgcaggcacctgctg

SEQ ID NO: 3872944 - DNA, 25 bp, Homo sapien
tcacctcgagacaggtttgtccaga

SEQ ID NO: 3872945 - DNA, 25 bp, Homo sapien
tgctctgtctcctcttaacgtgtaa

SEQ ID NO: 3872946 - DNA, 25 bp, Homo sapien
gtgggtacgcgagggctgaggtgtc

SEQ ID NO: 3872947 - DNA, 25 bp, Homo sapien
tgaggtgtctgtaaatctggccgcc

SEQ ID NO: 3872948 - DNA, 25 bp, Homo sapien
tgtctgtaaatctggccgccagcct

SEQ ID NO: 3872949 - DNA, 25 bp, Homo sapien
aggctggtgggtacgcgagggctga

SEQ ID NO: 3872950 - DNA, 25 bp, Homo sapien
ccggaagaacgtctttgacgggcag

SEQ ID NO: 3872951 - DNA, 25 bp, Homo sapien
tgtgagagccagttggcgccgggag

SEQ ID NO: 3872952 - DNA, 25 bp, Homo sapien
ggaccgagtgtgttcttcccaacgc

SEQ ID NO: 3872953 - DNA, 25 bp, Homo sapien
ggtgatttgatttgcaggaccgagt

SEQ ID NO: 3872954 - DNA, 25 bp, Homo sapien
gggccgatacttccatgactgacag

SEQ ID NO: 3872955 - DNA, 25 bp, Homo sapien
agcccctgcgcatggcggttgcgct

SEQ ID NO: 3872956 - DNA, 25 bp, Homo sapien
cgctgtgggctgtgcgaataaacct

SEQ ID NO: 3872957 - DNA, 25 bp, Homo sapien
cctggccaattgtgacccggcgctt

SEQ ID NO: 3872958 - DNA, 25 bp, Homo sapien
gaatgcggcttctgagtgtaagaca

SEQ ID NO: 3872959 - DNA, 25 bp, Homo sapien
aacaacccggccagagaatgcggct

SEQ ID NO: 3872960 - DNA, 25 bp, Homo sapien
cgagattggacggactaaccacggg

SEQ ID NO: 3872961 - DNA, 25 bp, Homo sapien
cagacaggtcagtgcctctggtgtc

SEQ ID NO: 3872962 - DNA, 25 bp, Homo sapien
gactcgcccatgatcatatttgagg

SEQ ID NO: 3872963 - DNA, 25 bp, Homo sapien
tcgcccatgatcatatttgaggatc

SEQ ID NO: 3872964 - DNA, 25 bp, Homo sapien
gaaggctgactcgcccatgatcata

SEQ ID NO: 3872965 - DNA, 25 bp, Homo sapien
ggctgactcgcccatgatcatattt

SEQ ID NO: 3872966 - DNA, 25 bp, Homo sapien
gcagagaagttactggactgggttt

SEQ ID NO: 3872967 - DNA, 25 bp, Homo sapien
tgtagtttttgacagggcacctgga

SEQ ID NO: 3872968 - DNA, 25 bp, Homo sapien
tactggactgggtttgcacgcaatg

SEQ ID NO: 3872969 - DNA, 25 bp, Homo sapien
ggtttgcacgcaatgccccttttca

SEQ ID NO: 3872970 - DNA, 25 bp, Homo sapien
tcttgggtgctgacgtgagtttata

SEQ ID NO: 3872971 - DNA, 25 bp, Homo sapien
catccacgggatcccagagttggag

SEQ ID NO: 3872972 - DNA, 25 bp, Homo sapien
tgagatgaggccttcttggctgttt

SEQ ID NO: 3872973 - DNA, 25 bp, Homo sapien
tataaaatacagcatgcacgcagcg

SEQ ID NO: 3872974 - DNA, 25 bp, Homo sapien
tcaatcaaatcgcaataatacgcag

SEQ ID NO: 3872975 - DNA, 25 bp, Homo sapien
cataattgctgtgccgcggaggtga

SEQ ID NO: 3872976 - DNA, 25 bp, Homo sapien
tccgcgtctgctcgacacttgtcag

SEQ ID NO: 3872977 - DNA, 25 bp, Homo sapien
tgtatcatattcacatccgcgtctg

SEQ ID NO: 3872978 - DNA, 25 bp, Homo sapien
tgtgctatgtcacaggacacttctc

SEQ ID NO: 3872979 - DNA, 25 bp, Homo sapien
ttgtgctatgtcacaggacacttct

SEQ ID NO: 3872980 - DNA, 25 bp, Homo sapien
cttatcacacctccataaggcttga

SEQ ID NO: 3872981 - DNA, 25 bp, Homo sapien
tctagatgccgccaagccctctgcc

SEQ ID NO: 3872982 - DNA, 25 bp, Homo sapien
cctccataaggcttgacctgctcta

SEQ ID NO: 3872983 - DNA, 25 bp, Homo sapien
ataaggcttgacctgctctagatgc

SEQ ID NO: 3872984 - DNA, 25 bp, Homo sapien
ttttgtgcaacagcaaccaggactg

SEQ ID NO: 3872985 - DNA, 25 bp, Homo sapien
ttgtgcaacagcaaccaggactgag

SEQ ID NO: 3872986 - DNA, 25 bp, Homo sapien
tttgtgcaacagcaaccaggactga

SEQ ID NO: 3872987 - DNA, 25 bp, Homo sapien
tgtgcaacagcaaccaggactgaga

SEQ ID NO: 3872988 - DNA, 25 bp, Homo sapien
cacgtgttgcaagatgatgggtcca

SEQ ID NO: 3872989 - DNA, 25 bp, Homo sapien
cagaggaggttatcacacgtgttgc

SEQ ID NO: 3872990 - DNA, 25 bp, Homo sapien
caccgctgtggatgctaatgttgct

SEQ ID NO: 3872991 - DNA, 25 bp, Homo sapien
tatcatgcatggtacctgctgggag

SEQ ID NO: 3872992 - DNA, 25 bp, Homo sapien
cactcctccctttcagtaggtaact

SEQ ID NO: 3872993 - DNA, 25 bp, Homo sapien
tgccaccggaaggtccgattccact

SEQ ID NO: 3872994 - DNA, 25 bp, Homo sapien
tgttggattttgccaccggaaggtc

SEQ ID NO: 3872995 - DNA, 25 bp, Homo sapien
gtaactaaagagccaggtatggctg

SEQ ID NO: 3872996 - DNA, 25 bp, Homo sapien
ttgctggttcgtggctgatcttcct

SEQ ID NO: 3872997 - DNA, 25 bp, Homo sapien
ctgcttacaagtgaggctgggattg

SEQ ID NO: 3872998 - DNA, 25 bp, Homo sapien
gcttacaagtgaggctgggattgct

SEQ ID NO: 3872999 - DNA, 25 bp, Homo sapien
ggattgctggttcgtggctgatctt

SEQ ID NO: 3873000 - DNA, 25 bp, Homo sapien
cgagacctctccaaggtgatcggca

SEQ ID NO: 3873001 - DNA, 25 bp, Homo sapien
tgctcgagctgtctttcaaggccgg

SEQ ID NO: 3873002 - DNA, 25 bp, Homo sapien
tgttaacaccgtgaagcaggtgccc

SEQ ID NO: 3873003 - DNA, 25 bp, Homo sapien
ttccttcaagatggccgagacctct

SEQ ID NO: 3873004 - DNA, 25 bp, Homo sapien
atgctgaccccgtggcgccgaagca

SEQ ID NO: 3873005 - DNA, 25 bp, Homo sapien
caggaaatgcgtcccggtgctgtgt

SEQ ID NO: 3873006 - DNA, 25 bp, Homo sapien
ttggatcctaggcttgagcgcctct

SEQ ID NO: 3873007 - DNA, 25 bp, Homo sapien
tggcgccgaagcaggtgctgcccat

SEQ ID NO: 3873008 - DNA, 25 bp, Homo sapien
cgccttcccacaacacctgccaaat

SEQ ID NO: 3873009 - DNA, 25 bp, Homo sapien
cccgccttcccacaacacctgccaa

SEQ ID NO: 3873010 - DNA, 25 bp, Homo sapien
aacacctgccaaatactctccgcac

SEQ ID NO: 3873011 - DNA, 25 bp, Homo sapien
cacaacacctgccaaatactctccg

SEQ ID NO: 3873012 - DNA, 25 bp, Homo sapien
tcttctcttgatggattcgggttgg

SEQ ID NO: 3873013 - DNA, 25 bp, Homo sapien
gaatacctatatttgagccttggag

SEQ ID NO: 3873014 - DNA, 25 bp, Homo sapien
cacacaaacagtatgagcaggaatt

SEQ ID NO: 3873015 - DNA, 25 bp, Homo sapien
ttggagattatcctccagactgaaa

SEQ ID NO: 3873016 - DNA, 25 bp, Homo sapien
gaggaagctcggcagccggctcttc

SEQ ID NO: 3873017 - DNA, 25 bp, Homo sapien
catgccgacaaaaaacgctgctgtt

SEQ ID NO: 3873018 - DNA, 25 bp, Homo sapien
atgtggccaccactcgcctgcttgc

SEQ ID NO: 3873019 - DNA, 25 bp, Homo sapien
agccggctcttcatcatgccgacaa

SEQ ID NO: 3873020 - DNA, 25 bp, Homo sapien
aaatccaacaaatcctggtggtctt

SEQ ID NO: 3873021 - DNA, 25 bp, Homo sapien
aatccaacaaatcctggtggtcttt

SEQ ID NO: 3873022 - DNA, 25 bp, Homo sapien
ttgctgggtgaagatgctcaaagct

SEQ ID NO: 3873023 - DNA, 25 bp, Homo sapien
agctgccacatccatcattgctagg

SEQ ID NO: 3873024 - DNA, 25 bp, Homo sapien
ctggcacagagaaattgctgggtga

SEQ ID NO: 3873025 - DNA, 25 bp, Homo sapien
ccatcattgctaggggtgggtcagt

SEQ ID NO: 3873026 - DNA, 25 bp, Homo sapien
tcaaggtggccagtgtgctatgatc

SEQ ID NO: 3873027 - DNA, 25 bp, Homo sapien
gagttcaaggtggccagtgtgctat

SEQ ID NO: 3873028 - DNA, 25 bp, Homo sapien
ttcaaggtggccagtgtgctatgat

SEQ ID NO: 3873029 - DNA, 25 bp, Homo sapien
tatgatcgcatctgtgaataatcac

SEQ ID NO: 3873030 - DNA, 25 bp, Homo sapien
tcacccagggacagatagcttacca

SEQ ID NO: 3873031 - DNA, 25 bp, Homo sapien
tattgtaacgtcatttcctaggtgg

SEQ ID NO: 3873032 - DNA, 25 bp, Homo sapien
tcaaagttcagtctacaagcctgcc

SEQ ID NO: 3873033 - DNA, 25 bp, Homo sapien
tgtttgatggtttccccacaggtct

SEQ ID NO: 3873034 - DNA, 25 bp, Homo sapien
ccgcagccagtctatataacatgaa

SEQ ID NO: 3873035 - DNA, 25 bp, Homo sapien
cagagggataagatatagtagaaac

SEQ ID NO: 3873036 - DNA, 25 bp, Homo sapien
tgtaaagtatgcactcacattgagt

SEQ ID NO: 3873037 - DNA, 25 bp, Homo sapien
gagtaacagagggataagatatagt

SEQ ID NO: 3873038 - DNA, 25 bp, Homo sapien
ggcctttcagtgtaaccatcactcg

SEQ ID NO: 3873039 - DNA, 25 bp, Homo sapien
tgtctttgtcgaggtgctagctcag

SEQ ID NO: 3873040 - DNA, 25 bp, Homo sapien
gaatccagtcctcctaatgtaatag

SEQ ID NO: 3873041 - DNA, 25 bp, Homo sapien
gaacattcctttgaagtcccagagg

SEQ ID NO: 3873042 - DNA, 25 bp, Homo sapien
tcttcctgttaaattctacatttgc

SEQ ID NO: 3873043 - DNA, 25 bp, Homo sapien
aggtttctatataccctgtggacat

SEQ ID NO: 3873044 - DNA, 25 bp, Homo sapien
tacatttgctttaatctcagtagga

SEQ ID NO: 3873045 - DNA, 25 bp, Homo sapien
tgtaacatataaggtttctatatac

SEQ ID NO: 3873046 - DNA, 25 bp, Homo sapien
tcttatatcatttacaagtagcctg

SEQ ID NO: 3873047 - DNA, 25 bp, Homo sapien
ttgggagagtgagttgtgatttttg

SEQ ID NO: 3873048 - DNA, 25 bp, Homo sapien
tatgttctacataatgcctcattag

SEQ ID NO: 3873049 - DNA, 25 bp, Homo sapien
tttgaagtcaaagcccagtgctgct

SEQ ID NO: 3873050 - DNA, 25 bp, Homo sapien
gctattgaagatgtgcgaccaattt

SEQ ID NO: 3873051 - DNA, 25 bp, Homo sapien
aatcagctattgaagatgtgcgacc

SEQ ID NO: 3873052 - DNA, 25 bp, Homo sapien
gaagatgtgcgaccaattttgtaaa

SEQ ID NO: 3873053 - DNA, 25 bp, Homo sapien
tgaacttgtgtctctcatcaaagcc

SEQ ID NO: 3873054 - DNA, 25 bp, Homo sapien
tcgcgctctcgttcctcggcagtcg

SEQ ID NO: 3873055 - DNA, 25 bp, Homo sapien
gcgctctcgttcctcggcagtcggg

SEQ ID NO: 3873056 - DNA, 25 bp, Homo sapien
ttcctcggcagtcggggtgcgcttc

SEQ ID NO: 3873057 - DNA, 25 bp, Homo sapien
cttagcttcgcgctctcgttcctcg

SEQ ID NO: 3873058 - DNA, 25 bp, Homo sapien
cttagtttaacaccgcgcatccgct

SEQ ID NO: 3873059 - DNA, 25 bp, Homo sapien
aagactcggcctgcatcctgaagag

SEQ ID NO: 3873060 - DNA, 25 bp, Homo sapien
tcctgaagagcacgaatttgtaaca

SEQ ID NO: 3873061 - DNA, 25 bp, Homo sapien
ttttgagccgatccaacaagactcg

SEQ ID NO: 3873062 - DNA, 25 bp, Homo sapien
ggaacaccagggacactagaagctg

SEQ ID NO: 3873063 - DNA, 25 bp, Homo sapien
aacccggcacgtgtgaatgtaacct

SEQ ID NO: 3873064 - DNA, 25 bp, Homo sapien
gagaagttatgaagtgatgctacca

SEQ ID NO: 3873065 - DNA, 25 bp, Homo sapien
tatgtccgaatccaaaaacccggca

SEQ ID NO: 3873066 - DNA, 25 bp, Homo sapien
tgatctaagttatcctgacctcagg

SEQ ID NO: 3873067 - DNA, 25 bp, Homo sapien
aatctaaagaacagagtagattcgt

SEQ ID NO: 3873068 - DNA, 25 bp, Homo sapien
gaacaaagtaccaatatatgctaca

SEQ ID NO: 3873069 - DNA, 25 bp, Homo sapien
catgctcggcctgacactggaattc

SEQ ID NO: 3873070 - DNA, 25 bp, Homo sapien
aaaacactcatgctctggcaacaaa

SEQ ID NO: 3873071 - DNA, 25 bp, Homo sapien
tcttaactgccctttatccatatgg

SEQ ID NO: 3873072 - DNA, 25 bp, Homo sapien
gatgggaaagagctaatcaagcggc

SEQ ID NO: 3873073 - DNA, 25 bp, Homo sapien
tatacaagatgaatcagtgccagag

SEQ ID NO: 3873074 - DNA, 25 bp, Homo sapien
tctgatcaatatgaggcaccgctgc

SEQ ID NO: 3873075 - DNA, 25 bp, Homo sapien
tcacaagacataagaggcggagcgg

SEQ ID NO: 3873076 - DNA, 25 bp, Homo sapien
cactcagtgttgcaagggaaaagcc

SEQ ID NO: 3873077 - DNA, 25 bp, Homo sapien
gagttaaggttgcaacatcagccca

SEQ ID NO: 3873078 - DNA, 25 bp, Homo sapien
gaaaaggtctggcagagaatttcct

SEQ ID NO: 3873079 - DNA, 25 bp, Homo sapien
tctgaagttgttctatcacctagct

SEQ ID NO: 3873080 - DNA, 25 bp, Homo sapien
gaaatgacagtgctaggaatctaaa

SEQ ID NO: 3873081 - DNA, 25 bp, Homo sapien
catcatcagagcatgtctgttcctt

SEQ ID NO: 3873082 - DNA, 25 bp, Homo sapien
tccaaggaatggatcatgagctctc

SEQ ID NO: 3873083 - DNA, 25 bp, Homo sapien
tctaagccaagcgtaggaatcgcat

SEQ ID NO: 3873084 - DNA, 25 bp, Homo sapien
gaatgaccaacaaatccagatctgg

SEQ ID NO: 3873085 - DNA, 25 bp, Homo sapien
cattaattgagtatggcagaagcca

SEQ ID NO: 3873086 - DNA, 25 bp, Homo sapien
gtttccacattaagagcagatttgt

SEQ ID NO: 3873087 - DNA, 25 bp, Homo sapien
cagtttccacattaagagcagattt

SEQ ID NO: 3873088 - DNA, 25 bp, Homo sapien
ttccacattaagagcagatttgttt

SEQ ID NO: 3873089 - DNA, 25 bp, Homo sapien
acagtttccacattaagagcagatt

SEQ ID NO: 3873090 - DNA, 25 bp, Homo sapien
gaagaacacagatgacgtacctcgg

SEQ ID NO: 3873091 - DNA, 25 bp, Homo sapien
gattttagagctgctaacagacaga

SEQ ID NO: 3873092 - DNA, 25 bp, Homo sapien
cctggtttagcccaaaataggagag

SEQ ID NO: 3873093 - DNA, 25 bp, Homo sapien
cactaagataggagtttgacctggt

SEQ ID NO: 3873094 - DNA, 25 bp, Homo sapien
agtaagtgccccctgcctgacaagg

SEQ ID NO: 3873095 - DNA, 25 bp, Homo sapien
agctctgacttcccagagtaagtgc

SEQ ID NO: 3873096 - DNA, 25 bp, Homo sapien
taagtgccccctgcctgacaaggct

SEQ ID NO: 3873097 - DNA, 25 bp, Homo sapien
ctctgacttcccagagtaagtgccc

SEQ ID NO: 3873098 - DNA, 25 bp, Homo sapien
aatgagattcatatatggggggggg

SEQ ID NO: 3873099 - DNA, 25 bp, Homo sapien
atgagattcatatatgggggggggg

SEQ ID NO: 3873100 - DNA, 25 bp, Homo sapien
caatgagattcatatatgggggggg

SEQ ID NO: 3873101 - DNA, 25 bp, Homo sapien
gagattcatatatggggggggggaa

SEQ ID NO: 3873102 - DNA, 25 bp, Homo sapien
tgtatggtcaaagacggtaggagct

SEQ ID NO: 3873103 - DNA, 25 bp, Homo sapien
tgttgtatggtcaaagacggtagga

SEQ ID NO: 3873104 - DNA, 25 bp, Homo sapien
gatgttgtatggtcaaagacggtag

SEQ ID NO: 3873105 - DNA, 25 bp, Homo sapien
ttagatgttgtatggtcaaagacgg

SEQ ID NO: 3873106 - DNA, 25 bp, Homo sapien
gagaattgctggaactcaggagacg

SEQ ID NO: 3873107 - DNA, 25 bp, Homo sapien
gctggagaattgctggaactcagga

SEQ ID NO: 3873108 - DNA, 25 bp, Homo sapien
tggagaattgctggaactcaggaga

SEQ ID NO: 3873109 - DNA, 25 bp, Homo sapien
aattgctggaactcaggagacggag

SEQ ID NO: 3873110 - DNA, 25 bp, Homo sapien
tgcacgccatcatgcacagcaaata

SEQ ID NO: 3873111 - DNA, 25 bp, Homo sapien
cactcggtgcttatattgtctgatc

SEQ ID NO: 3873112 - DNA, 25 bp, Homo sapien
tcattcactcggtgcttatattgtc

SEQ ID NO: 3873113 - DNA, 25 bp, Homo sapien
caagcctctatttctgtctgttaga

SEQ ID NO: 3873114 - DNA, 25 bp, Homo sapien
ctctatttctgtctgttagatactc

SEQ ID NO: 3873115 - DNA, 25 bp, Homo sapien
taaacattcgtacataaataagccc

SEQ ID NO: 3873116 - DNA, 25 bp, Homo sapien
tactacacacaaggctctaaggata

SEQ ID NO: 3873117 - DNA, 25 bp, Homo sapien
gatactgagtgtgactaagacagac

SEQ ID NO: 3873118 - DNA, 25 bp, Homo sapien
aaatggctgcactttgtgtcgaagg

SEQ ID NO: 3873119 - DNA, 25 bp, Homo sapien
tttagtctgctgctcttgattctgt

SEQ ID NO: 3873120 - DNA, 25 bp, Homo sapien
tattttggtatttagactgtaactc

SEQ ID NO: 3873121 - DNA, 25 bp, Homo sapien
ctcttgattctgttattttggtatt

SEQ ID NO: 3873122 - DNA, 25 bp, Homo sapien
caatttagtctgctgctcttgattc

SEQ ID NO: 3873123 - DNA, 25 bp, Homo sapien
tgcaatgactggtaatgaaacctac

SEQ ID NO: 3873124 - DNA, 25 bp, Homo sapien
tgaaacctacttggcaattacctgt

SEQ ID NO: 3873125 - DNA, 25 bp, Homo sapien
tggttgaagagctaacccacatgaa

SEQ ID NO: 3873126 - DNA, 25 bp, Homo sapien
tctgctgagctatgcctggctatct

SEQ ID NO: 3873127 - DNA, 25 bp, Homo sapien
tagatagtgctactcccaccaagac

SEQ ID NO: 3873128 - DNA, 25 bp, Homo sapien
ttccctttggcccataaggtgatag

SEQ ID NO: 3873129 - DNA, 25 bp, Homo sapien
aggtgatagatagtgctactcccac

SEQ ID NO: 3873130 - DNA, 25 bp, Homo sapien
gaagttgtaaagcaaacgctgctgc

SEQ ID NO: 3873131 - DNA, 25 bp, Homo sapien
agatgaagacccctgcacacaggct

SEQ ID NO: 3873132 - DNA, 25 bp, Homo sapien
gatgaagacccctgcacacaggcta

SEQ ID NO: 3873133 - DNA, 25 bp, Homo sapien
ggcagatgaagacccctgcacacag

SEQ ID NO: 3873134 - DNA, 25 bp, Homo sapien
gaggggcagatgaagacccctgcac

SEQ ID NO: 3873135 - DNA, 25 bp, Homo sapien
ccagagagagcgtgaagcctcagct

SEQ ID NO: 3873136 - DNA, 25 bp, Homo sapien
gtcacacttgtgtcaaatacatcaa

SEQ ID NO: 3873137 - DNA, 25 bp, Homo sapien
aatacatcaagctgctcacaaatgc

SEQ ID NO: 3873138 - DNA, 25 bp, Homo sapien
acttgtgtcaaatacatcaagctgc

SEQ ID NO: 3873139 - DNA, 25 bp, Homo sapien
ggagccaagtgtcttcaagctcttc

SEQ ID NO: 3873140 - DNA, 25 bp, Homo sapien
agataagggagccaagtgtcttcaa

SEQ ID NO: 3873141 - DNA, 25 bp, Homo sapien
ggtcagataagggagccaagtgtct

SEQ ID NO: 3873142 - DNA, 25 bp, Homo sapien
taagggagccaagtgtcttcaagct

SEQ ID NO: 3873143 - DNA, 25 bp, Homo sapien
taaccaggtcccgaaataagcagcc

SEQ ID NO: 3873144 - DNA, 25 bp, Homo sapien
taccaatgaggatgcgagataccgg

SEQ ID NO: 3873145 - DNA, 25 bp, Homo sapien
tcttgtccgttgtaggatgaaccca

SEQ ID NO: 3873146 - DNA, 25 bp, Homo sapien
gaaggtctcacaagcagcggctatt

SEQ ID NO: 3873147 - DNA, 25 bp, Homo sapien
cagctataactgtacactgccaccg

SEQ ID NO: 3873148 - DNA, 25 bp, Homo sapien
cttcacagctataactgtacactgc

SEQ ID NO: 3873149 - DNA, 25 bp, Homo sapien
ctataactgtacactgccaccgctg

SEQ ID NO: 3873150 - DNA, 25 bp, Homo sapien
tcacagctataactgtacactgcca

SEQ ID NO: 3873151 - DNA, 25 bp, Homo sapien
tgctttttccaagagcagactgtac

SEQ ID NO: 3873152 - DNA, 25 bp, Homo sapien
ttacatacagggctgctttttccaa

SEQ ID NO: 3873153 - DNA, 25 bp, Homo sapien
agggctgctttttccaagagcagac

SEQ ID NO: 3873154 - DNA, 25 bp, Homo sapien
gctgctttttccaagagcagactgt

SEQ ID NO: 3873155 - DNA, 25 bp, Homo sapien
tgcttctggcaaggaaggacagtag

SEQ ID NO: 3873156 - DNA, 25 bp, Homo sapien
tctggcaaggaaggacagtagttac

SEQ ID NO: 3873157 - DNA, 25 bp, Homo sapien
ggcaaggaaggacagtagttacaaa

SEQ ID NO: 3873158 - DNA, 25 bp, Homo sapien
ctcaactgcttctggcaaggaagga

SEQ ID NO: 3873159 - DNA, 25 bp, Homo sapien
aagctacagcagatgtgggtgagaa

SEQ ID NO: 3873160 - DNA, 25 bp, Homo sapien
tccaatcatctgagagtatgtgctg

SEQ ID NO: 3873161 - DNA, 25 bp, Homo sapien
gagtatgtgctggaaagctacagca

SEQ ID NO: 3873162 - DNA, 25 bp, Homo sapien
tgggtgagaagtaaagctggagaaa

SEQ ID NO: 3873163 - DNA, 25 bp, Homo sapien
tctaatgatgcctcatctgtccagt

SEQ ID NO: 3873164 - DNA, 25 bp, Homo sapien
tccattttgtagaacgaaaggagac

SEQ ID NO: 3873165 - DNA, 25 bp, Homo sapien
aagttgtagatggccagctggtacc

SEQ ID NO: 3873166 - DNA, 25 bp, Homo sapien
agtgctgatcttcgacattcccatg

SEQ ID NO: 3873167 - DNA, 25 bp, Homo sapien
aaatatcaggatccctgccttcgag

SEQ ID NO: 3873168 - DNA, 25 bp, Homo sapien
tctccttggtgaaggggtatcgcca

SEQ ID NO: 3873169 - DNA, 25 bp, Homo sapien
cctgccttcgagatgagagtcatcc

SEQ ID NO: 3873170 - DNA, 25 bp, Homo sapien
caggtgtctctatgtcccatgagat

SEQ ID NO: 3873171 - DNA, 25 bp, Homo sapien
gtagtgtcatattgaacaagatatt

SEQ ID NO: 3873172 - DNA, 25 bp, Homo sapien
gaaagaatagctttggtctcagaaa

SEQ ID NO: 3873173 - DNA, 25 bp, Homo sapien
agtagagatagcatgcgtcagtgga

SEQ ID NO: 3873174 - DNA, 25 bp, Homo sapien
aagaaaaaggataccgtggctatat

SEQ ID NO: 3873175 - DNA, 25 bp, Homo sapien
tccttgtgcatgtagtatttttata

SEQ ID NO: 3873176 - DNA, 25 bp, Homo sapien
cagttacctctaagggatggaactt

SEQ ID NO: 3873177 - DNA, 25 bp, Homo sapien
tcaaagaataaaacgcaaatacagt

SEQ ID NO: 3873178 - DNA, 25 bp, Homo sapien
taataatatgaatgacatactgaca

SEQ ID NO: 3873179 - DNA, 25 bp, Homo sapien
gtaggtggtgaattcatcagttgaa

SEQ ID NO: 3873180 - DNA, 25 bp, Homo sapien
ttccaggcaataaaccaaccaactc

SEQ ID NO: 3873181 - DNA, 25 bp, Homo sapien
caaccaactcagcatgttgcatgtt

SEQ ID NO: 3873182 - DNA, 25 bp, Homo sapien
aactcaagtgtagggattcacaacc

SEQ ID NO: 3873183 - DNA, 25 bp, Homo sapien
aaacaccagaaatgtataaaaccat

SEQ ID NO: 3873184 - DNA, 25 bp, Homo sapien
tacaggaaaaacaccagaaatgtat

SEQ ID NO: 3873185 - DNA, 25 bp, Homo sapien
ctacaggaaaaacaccagaaatgta

SEQ ID NO: 3873186 - DNA, 25 bp, Homo sapien
caggaaaaacaccagaaatgtataa

SEQ ID NO: 3873187 - DNA, 25 bp, Homo sapien
ctctgccactcggtgggtggaacta

SEQ ID NO: 3873188 - DNA, 25 bp, Homo sapien
ctgccactcggtgggtggaactaaa

SEQ ID NO: 3873189 - DNA, 25 bp, Homo sapien
gttgtgaaccggccaaaacacagtg

SEQ ID NO: 3873190 - DNA, 25 bp, Homo sapien
gaggttgtgaaccggccaaaacaca

SEQ ID NO: 3873191 - DNA, 25 bp, Homo sapien
tcccctgtagttccatgaaaggtca

SEQ ID NO: 3873192 - DNA, 25 bp, Homo sapien
cacacttgtcccctgtagttccatg

SEQ ID NO: 3873193 - DNA, 25 bp, Homo sapien
accacttccgcccaattttctcaca

SEQ ID NO: 3873194 - DNA, 25 bp, Homo sapien
ttgtcccctgtagttccatgaaagg

SEQ ID NO: 3873195 - DNA, 25 bp, Homo sapien
tactgccactggaagaccttgcacc

SEQ ID NO: 3873196 - DNA, 25 bp, Homo sapien
aagaccttgcacctgtacctctcac

SEQ ID NO: 3873197 - DNA, 25 bp, Homo sapien
tgtgcccggcctatactcacgaact

SEQ ID NO: 3873198 - DNA, 25 bp, Homo sapien
caagaattactagagtggcctgttc

SEQ ID NO: 3873199 - DNA, 25 bp, Homo sapien
gaggctaacgccctatttatatatg

SEQ ID NO: 3873200 - DNA, 25 bp, Homo sapien
gggcctcatatctctaactaaacat

SEQ ID NO: 3873201 - DNA, 25 bp, Homo sapien
gacagcgttgtaaaatataatccaa

SEQ ID NO: 3873202 - DNA, 25 bp, Homo sapien
tgacagcgttgtaaaatataatcca

SEQ ID NO: 3873203 - DNA, 25 bp, Homo sapien
ctgacagcgttgtaaaatataatcc

SEQ ID NO: 3873204 - DNA, 25 bp, Homo sapien
cagcgttgtaaaatataatccaagg

SEQ ID NO: 3873205 - DNA, 25 bp, Homo sapien
gaggagctggtgataatcttaacct

SEQ ID NO: 3873206 - DNA, 25 bp, Homo sapien
gctggtgataatcttaacctatata

SEQ ID NO: 3873207 - DNA, 25 bp, Homo sapien
gagctggtgataatcttaacctata

SEQ ID NO: 3873208 - DNA, 25 bp, Homo sapien
ggagctggtgataatcttaacctat

SEQ ID NO: 3873209 - DNA, 25 bp, Homo sapien
tctgtatcgattgccttgaaaccaa

SEQ ID NO: 3873210 - DNA, 25 bp, Homo sapien
tccacagtgcttccagttgagccat

SEQ ID NO: 3873211 - DNA, 25 bp, Homo sapien
tcagtgcactttctgtatcgattgc

SEQ ID NO: 3873212 - DNA, 25 bp, Homo sapien
tgggttgacaccaccagtcagtgca

SEQ ID NO: 3873213 - DNA, 25 bp, Homo sapien
tatgtccagcacatgccctatgagg

SEQ ID NO: 3873214 - DNA, 25 bp, Homo sapien
tcatacctggtgatattcgtgcccc

SEQ ID NO: 3873215 - DNA, 25 bp, Homo sapien
ggttgtactgacaaaatcctggcta

SEQ ID NO: 3873216 - DNA, 25 bp, Homo sapien
ggaggatttgtataacacagcagcc

SEQ ID NO: 3873217 - DNA, 25 bp, Homo sapien
tctggattctaatgttcttccccag

SEQ ID NO: 3873218 - DNA, 25 bp, Homo sapien
catccaagggccccaaaaaccacat

SEQ ID NO: 3873219 - DNA, 25 bp, Homo sapien
ctgacttctggccttgtttttagtt

SEQ ID NO: 3873220 - DNA, 25 bp, Homo sapien
ccccatcccatcatactcctcagca

SEQ ID NO: 3873221 - DNA, 25 bp, Homo sapien
caataaaggttattaaggccaactg

SEQ ID NO: 3873222 - DNA, 25 bp, Homo sapien
gctgtagcagctttaagaaacataa

SEQ ID NO: 3873223 - DNA, 25 bp, Homo sapien
tagaattctattcaacacctctgtc

SEQ ID NO: 3873224 - DNA, 25 bp, Homo sapien
tggatgtatcctcagtagaattcta

SEQ ID NO: 3873225 - DNA, 25 bp, Homo sapien
gatactgtcactggatgtatcctca

SEQ ID NO: 3873226 - DNA, 25 bp, Homo sapien
tttcagactgctcatataaagatcg

SEQ ID NO: 3873227 - DNA, 25 bp, Homo sapien
gatcgagttctttcagaggtcttat

SEQ ID NO: 3873228 - DNA, 25 bp, Homo sapien
tataaagatcgagttctttcagagg

SEQ ID NO: 3873229 - DNA, 25 bp, Homo sapien
gactgctcatataaagatcgagttc

SEQ ID NO: 3873230 - DNA, 25 bp, Homo sapien
gacaggtactgatttgtcacaagac

SEQ ID NO: 3873231 - DNA, 25 bp, Homo sapien
ggtactgatttgtcacaagactgcc

SEQ ID NO: 3873232 - DNA, 25 bp, Homo sapien
gtacccacgggccatgacaggtact

SEQ ID NO: 3873233 - DNA, 25 bp, Homo sapien
atggctctgaagtgccaaagtaccc

SEQ ID NO: 3873234 - DNA, 25 bp, Homo sapien
ctgtccttcagactaggtcacccta

SEQ ID NO: 3873235 - DNA, 25 bp, Homo sapien
acctctctcgctgctatctctggct

SEQ ID NO: 3873236 - DNA, 25 bp, Homo sapien
gactaggtcaccctactttgttctc

SEQ ID NO: 3873237 - DNA, 25 bp, Homo sapien
cttcagactaggtcaccctactttg

SEQ ID NO: 3873238 - DNA, 25 bp, Homo sapien
gtatggccacttcttaacttccctg

SEQ ID NO: 3873239 - DNA, 25 bp, Homo sapien
catgatgaatgcaacggtatggcca

SEQ ID NO: 3873240 - DNA, 25 bp, Homo sapien
tattacattcgctgactttcctcca

SEQ ID NO: 3873241 - DNA, 25 bp, Homo sapien
tccctgcagggttcgacactattac

SEQ ID NO: 3873242 - DNA, 25 bp, Homo sapien
taaagtccaagctgaggcaaaccac

SEQ ID NO: 3873243 - DNA, 25 bp, Homo sapien
gatcgtgagaagacgctgtcctcca

SEQ ID NO: 3873244 - DNA, 25 bp, Homo sapien
tccacaaataagagagtccctggga

SEQ ID NO: 3873245 - DNA, 25 bp, Homo sapien
ttcttcgagtcagcaaaaggctctg

SEQ ID NO: 3873246 - DNA, 25 bp, Homo sapien
aagtatggtgcgcttgtgctcagtg

SEQ ID NO: 3873247 - DNA, 25 bp, Homo sapien
cagtggaaaggttcttgacaatata

SEQ ID NO: 3873248 - DNA, 25 bp, Homo sapien
tgcagaagggttaagcatttgacct

SEQ ID NO: 3873249 - DNA, 25 bp, Homo sapien
tgaccttcaagtatggtgcgcttgt

SEQ ID NO: 3873250 - DNA, 25 bp, Homo sapien
agaagtcttcaagaggctgccaaca

SEQ ID NO: 3873251 - DNA, 25 bp, Homo sapien
accactgggtgccacgtctactgga

SEQ ID NO: 3873252 - DNA, 25 bp, Homo sapien
tgaatttgagaaaacgcatcctgga

SEQ ID NO: 3873253 - DNA, 25 bp, Homo sapien
tactggactacttaaggctgctgtc

SEQ ID NO: 3873254 - DNA, 25 bp, Homo sapien
tgacctcggctaagagataacacca

SEQ ID NO: 3873255 - DNA, 25 bp, Homo sapien
aggatggcagtcaagatttcattcc

SEQ ID NO: 3873256 - DNA, 25 bp, Homo sapien
taacttcatgaagcacagcatttgt

SEQ ID NO: 3873257 - DNA, 25 bp, Homo sapien
cgaggcaaggatggcagtcaagatt

SEQ ID NO: 3873258 - DNA, 25 bp, Homo sapien
tggcgtgcagtgagcgaggcaagga

SEQ ID NO: 3873259 - DNA, 25 bp, Homo sapien
aatcccatttcacaacagaactaac

SEQ ID NO: 3873260 - DNA, 25 bp, Homo sapien
tacaattaatgtaggtgccgtgggc

SEQ ID NO: 3873261 - DNA, 25 bp, Homo sapien
tctgccctgcatagagtgatatagg

SEQ ID NO: 3873262 - DNA, 25 bp, Homo sapien
gagcactatatggatttctcagaca

SEQ ID NO: 3873263 - DNA, 25 bp, Homo sapien
tgccgtgggcaggaaagctaacttt

SEQ ID NO: 3873264 - DNA, 25 bp, Homo sapien
tctgagacaaaatatgccatacgct

SEQ ID NO: 3873265 - DNA, 25 bp, Homo sapien
ctggcttagagacggatgacaattc

SEQ ID NO: 3873266 - DNA, 25 bp, Homo sapien
taagcacaggcaactctatggaaag

SEQ ID NO: 3873267 - DNA, 25 bp, Homo sapien
taatcctaacatttgcgagaactag

SEQ ID NO: 3873268 - DNA, 25 bp, Homo sapien
taattccgaagtacacaataggcca

SEQ ID NO: 3873269 - DNA, 25 bp, Homo sapien
aaacaatggcttggcgcctgacctg

SEQ ID NO: 3873270 - DNA, 25 bp, Homo sapien
tttgacggctactcgaggcaatgcc

SEQ ID NO: 3873271 - DNA, 25 bp, Homo sapien
taattggaatcatcgtgagggcgac

SEQ ID NO: 3873272 - DNA, 25 bp, Homo sapien
ggctcgcccagttctttaaaagcta

SEQ ID NO: 3873273 - DNA, 25 bp, Homo sapien
gaaattctgtcccacttctgttaac

SEQ ID NO: 3873274 - DNA, 25 bp, Homo sapien
tctgttaacacttaccctgcattca

SEQ ID NO: 3873275 - DNA, 25 bp, Homo sapien
tggataaacaaaggcgaatcttcag

SEQ ID NO: 3873276 - DNA, 25 bp, Homo sapien
tcctacagtagaccctaagaacctc

SEQ ID NO: 3873277 - DNA, 25 bp, Homo sapien
cagtagaccctaagaacctcagagt

SEQ ID NO: 3873278 - DNA, 25 bp, Homo sapien
gagtttattagctgcagactgacct

SEQ ID NO: 3873279 - DNA, 25 bp, Homo sapien
gaacctcagagtttattagctgcag

SEQ ID NO: 3873280 - DNA, 25 bp, Homo sapien
cactcacgattgcagttaaacttcc

SEQ ID NO: 3873281 - DNA, 25 bp, Homo sapien
cctaaagtagcctatcctgggacac

SEQ ID NO: 3873282 - DNA, 25 bp, Homo sapien
tttcattatcagagagtgaccctaa

SEQ ID NO: 3873283 - DNA, 25 bp, Homo sapien
gccagatgggcctcttcacagttca

SEQ ID NO: 3873284 - DNA, 25 bp, Homo sapien
gagtctatatgtactgctgttattt

SEQ ID NO: 3873285 - DNA, 25 bp, Homo sapien
tactgctgttattttaaaatgtttc

SEQ ID NO: 3873286 - DNA, 25 bp, Homo sapien
tgagtctatatgtactgctgttatt

SEQ ID NO: 3873287 - DNA, 25 bp, Homo sapien
ttccactgtcaccattaaatcttaa

SEQ ID NO: 3873288 - DNA, 25 bp, Homo sapien
gtcaccattaaatcttaatccattc

SEQ ID NO: 3873289 - DNA, 25 bp, Homo sapien
aaatgataatttcttccactgtcac

SEQ ID NO: 3873290 - DNA, 25 bp, Homo sapien
cattaaatcttaatccattccagct

SEQ ID NO: 3873291 - DNA, 25 bp, Homo sapien
tccgttcctgaagctaaactatgaa

SEQ ID NO: 3873292 - DNA, 25 bp, Homo sapien
aacaaggcgctgatttttattatat

SEQ ID NO: 3873293 - DNA, 25 bp, Homo sapien
gacgccagggctttgtagaaaataa

SEQ ID NO: 3873294 - DNA, 25 bp, Homo sapien
gacaactcgggtgtggacattgaac

SEQ ID NO: 3873295 - DNA, 25 bp, Homo sapien
aaatattcttaacaggcttctgagc

SEQ ID NO: 3873296 - DNA, 25 bp, Homo sapien
aatattcttaacaggcttctgagct

SEQ ID NO: 3873297 - DNA, 25 bp, Homo sapien
catcctcaaggtgaggagctccact

SEQ ID NO: 3873298 - DNA, 25 bp, Homo sapien
acagctccaagttctagtccacatg

SEQ ID NO: 3873299 - DNA, 25 bp, Homo sapien
tgccgaatcaccaacgctaaagttc

SEQ ID NO: 3873300 - DNA, 25 bp, Homo sapien
gcagataactgcatcagtctcatta

SEQ ID NO: 3873301 - DNA, 25 bp, Homo sapien
atttatacaatgtttcaattcctac

SEQ ID NO: 3873302 - DNA, 25 bp, Homo sapien
tatggagttatcaggttttatggag

SEQ ID NO: 3873303 - DNA, 25 bp, Homo sapien
tgaggaggttttatggagttatcag

SEQ ID NO: 3873304 - DNA, 25 bp, Homo sapien
tatggagtaatctggatcagaaaca

SEQ ID NO: 3873305 - DNA, 25 bp, Homo sapien
gaaagagagccgtagcacagcatct

SEQ ID NO: 3873306 - DNA, 25 bp, Homo sapien
gagttcagaccaggccctacataag

SEQ ID NO: 3873307 - DNA, 25 bp, Homo sapien
gaaaggtaatcagaagagtcccatc

SEQ ID NO: 3873308 - DNA, 25 bp, Homo sapien
aaaagtaacgtcctgagcaccctat

SEQ ID NO: 3873309 - DNA, 25 bp, Homo sapien
tgtgtacgcgtcactcaaactcaga

SEQ ID NO: 3873310 - DNA, 25 bp, Homo sapien
aaaccaggtctcttatacagccgca

SEQ ID NO: 3873311 - DNA, 25 bp, Homo sapien
gacatctgaatctgcaatccctggt

SEQ ID NO: 3873312 - DNA, 25 bp, Homo sapien
tacagccgcagtgtaatgatctgag

SEQ ID NO: 3873313 - DNA, 25 bp, Homo sapien
agttcaaggcaacacacacgtacac

SEQ ID NO: 3873314 - DNA, 25 bp, Homo sapien
acactcacgcgcaagaacctacatg

SEQ ID NO: 3873315 - DNA, 25 bp, Homo sapien
cacgcgcaagaacctacatggaata

SEQ ID NO: 3873316 - DNA, 25 bp, Homo sapien
aaatagtgccaagttcaaggcaaca

SEQ ID NO: 3873317 - DNA, 25 bp, Homo sapien
gattctgttcgtttatggcaaccca

SEQ ID NO: 3873318 - DNA, 25 bp, Homo sapien
tatttatccaaaaggctgccaaggc

SEQ ID NO: 3873319 - DNA, 25 bp, Homo sapien
ggctgtgatgtcaacctggctccat

SEQ ID NO: 3873320 - DNA, 25 bp, Homo sapien
tgcgtaacagctgacttcggtggcc

SEQ ID NO: 3873321 - DNA, 25 bp, Homo sapien
tcaacacaatgggaacactgctgcc

SEQ ID NO: 3873322 - DNA, 25 bp, Homo sapien
ttaatgatggtacaagattctccag

SEQ ID NO: 3873323 - DNA, 25 bp, Homo sapien
ggaaggcagttgttctccagagcaa

SEQ ID NO: 3873324 - DNA, 25 bp, Homo sapien
tgcttttcatatgggcaattccaca

SEQ ID NO: 3873325 - DNA, 25 bp, Homo sapien
aaatctagtcttgcaatcctgggcc

SEQ ID NO: 3873326 - DNA, 25 bp, Homo sapien
ctcaaaaagtgtcacactggcggct

SEQ ID NO: 3873327 - DNA, 25 bp, Homo sapien
tggcggctttcaccgaaaaatctag

SEQ ID NO: 3873328 - DNA, 25 bp, Homo sapien
taagtgtgtgcaaactagcaacccg

SEQ ID NO: 3873329 - DNA, 25 bp, Homo sapien
tattttgattcacgaaggccacaca

SEQ ID NO: 3873330 - DNA, 25 bp, Homo sapien
aagcctggttcgcttcatggcaaga

SEQ ID NO: 3873331 - DNA, 25 bp, Homo sapien
tccagacaccagattgaataagcca

SEQ ID NO: 3873332 - DNA, 25 bp, Homo sapien
gctggccaggagactagcacttctt

SEQ ID NO: 3873333 - DNA, 25 bp, Homo sapien
cctttggatgccattagaactctac

SEQ ID NO: 3873334 - DNA, 25 bp, Homo sapien
tttaaacttgttgtatggacagagc

SEQ ID NO: 3873335 - DNA, 25 bp, Homo sapien
cattagaactctactcccatttgtt

SEQ ID NO: 3873336 - DNA, 25 bp, Homo sapien
cttgttgtatggacagagcattgct

SEQ ID NO: 3873337 - DNA, 25 bp, Homo sapien
ttttttggaaacagagcttcactct

SEQ ID NO: 3873338 - DNA, 25 bp, Homo sapien
agcctcatgacgagctgggattgca

SEQ ID NO: 3873339 - DNA, 25 bp, Homo sapien
tttggaaacagagcttcactcttgt

SEQ ID NO: 3873340 - DNA, 25 bp, Homo sapien
cagcctcatgacgagctgggattgc

SEQ ID NO: 3873341 - DNA, 25 bp, Homo sapien
catggttagtcctcacaaaggagca

SEQ ID NO: 3873342 - DNA, 25 bp, Homo sapien
tgcccgtcagaaggatccagagttt

SEQ ID NO: 3873343 - DNA, 25 bp, Homo sapien
cagatttgctgggtaacgttcactc

SEQ ID NO: 3873344 - DNA, 25 bp, Homo sapien
tgtgtaccacacaaatgcccgtcag

SEQ ID NO: 3873345 - DNA, 25 bp, Homo sapien
ttttagagcaagacgtattccagcg

SEQ ID NO: 3873346 - DNA, 25 bp, Homo sapien
cagctcagcctagacgcatggaaga

SEQ ID NO: 3873347 - DNA, 25 bp, Homo sapien
ccagcgactggcacgattttgtttc

SEQ ID NO: 3873348 - DNA, 25 bp, Homo sapien
catataaataatggcacagtgctct

SEQ ID NO: 3873349 - DNA, 25 bp, Homo sapien
tagttgggtaagcttggcatgctac

SEQ ID NO: 3873350 - DNA, 25 bp, Homo sapien
cacttgttaaccttagactgtggct

SEQ ID NO: 3873351 - DNA, 25 bp, Homo sapien
gataaaaccaaattccgctccagtc

SEQ ID NO: 3873352 - DNA, 25 bp, Homo sapien
tcttggccaaaaagtcctaaggcag

SEQ ID NO: 3873353 - DNA, 25 bp, Homo sapien
tccgaaaaggaactctagccagcaa

SEQ ID NO: 3873354 - DNA, 25 bp, Homo sapien
aaagactgcttgaactaccatccga

SEQ ID NO: 3873355 - DNA, 25 bp, Homo sapien
caaacagcgggcttggagcctatcc

SEQ ID NO: 3873356 - DNA, 25 bp, Homo sapien
aaactgtggttggtgcaattgggcc

SEQ ID NO: 3873357 - DNA, 25 bp, Homo sapien
ccattaggctgatagatatagggtc

SEQ ID NO: 3873358 - DNA, 25 bp, Homo sapien
cactggtagacttactcaatgcagg

SEQ ID NO: 3873359 - DNA, 25 bp, Homo sapien
tagggtcctgctttctcatatcaag

SEQ ID NO: 3873360 - DNA, 25 bp, Homo sapien
cagtttgtaaagacataccatctcc

SEQ ID NO: 3873361 - DNA, 25 bp, Homo sapien
gcaggcatcacacggagagagagaa

SEQ ID NO: 3873362 - DNA, 25 bp, Homo sapien
taaaacagacagagagcttcaacca

SEQ ID NO: 3873363 - DNA, 25 bp, Homo sapien
tacaagaaacaggacaccagcatca

SEQ ID NO: 3873364 - DNA, 25 bp, Homo sapien
tatatcaggaggtcattgtaagtct

SEQ ID NO: 3873365 - DNA, 25 bp, Homo sapien
ctggcaaacagggatagataataaa

SEQ ID NO: 3873366 - DNA, 25 bp, Homo sapien
tacccgcgcttcacagaatgttgtg

SEQ ID NO: 3873367 - DNA, 25 bp, Homo sapien
tgtgaagcaggtacaatgtacaacg

SEQ ID NO: 3873368 - DNA, 25 bp, Homo sapien
tatttggcatatggtaaggactcag

SEQ ID NO: 3873369 - DNA, 25 bp, Homo sapien
cagtttctgacctctgctgtaggca

SEQ ID NO: 3873370 - DNA, 25 bp, Homo sapien
taaggccagccggttgtcagtttct

SEQ ID NO: 3873371 - DNA, 25 bp, Homo sapien
gggataataactgccacctacctca

SEQ ID NO: 3873372 - DNA, 25 bp, Homo sapien
tgaggcagactgcatgggttcgaat

SEQ ID NO: 3873373 - DNA, 25 bp, Homo sapien
aaaaccagaactcaccaagctcctg

SEQ ID NO: 3873374 - DNA, 25 bp, Homo sapien
gctcctgcacaggtagctatggtat

SEQ ID NO: 3873375 - DNA, 25 bp, Homo sapien
catgctacattgtgttatgtgggaa

SEQ ID NO: 3873376 - DNA, 25 bp, Homo sapien
tatggtatgtgtcacatatactaca

SEQ ID NO: 3873377 - DNA, 25 bp, Homo sapien
gggcctgaacctaaacctatcattc

SEQ ID NO: 3873378 - DNA, 25 bp, Homo sapien
tcctgttaatcaattgtgcactgca

SEQ ID NO: 3873379 - DNA, 25 bp, Homo sapien
ggcagtcagaggatactaagtactc

SEQ ID NO: 3873380 - DNA, 25 bp, Homo sapien
gtttagtacacagctatgactcagg

SEQ ID NO: 3873381 - DNA, 25 bp, Homo sapien
tatgcatatgatttaagtagcaggt

SEQ ID NO: 3873382 - DNA, 25 bp, Homo sapien
ctccccaatatgcatatgatttaag

SEQ ID NO: 3873383 - DNA, 25 bp, Homo sapien
caatatgcatatgatttaagtagca

SEQ ID NO: 3873384 - DNA, 25 bp, Homo sapien
cccaatatgcatatgatttaagtag

SEQ ID NO: 3873385 - DNA, 25 bp, Homo sapien
ccagcttcggagaggagcagttaag

SEQ ID NO: 3873386 - DNA, 25 bp, Homo sapien
gaaatgatcaaaacctctggaggga

SEQ ID NO: 3873387 - DNA, 25 bp, Homo sapien
tgaatcgaggtttgcagggcttcca

SEQ ID NO: 3873388 - DNA, 25 bp, Homo sapien
ctaacgcatactgggtactcaaggt

SEQ ID NO: 3873389 - DNA, 25 bp, Homo sapien
tcttcggtcccatataaaacacaca

SEQ ID NO: 3873390 - DNA, 25 bp, Homo sapien
tctttgaatcgctaggtgggtctac

SEQ ID NO: 3873391 - DNA, 25 bp, Homo sapien
aatagctgtacactcaatgtggaag

SEQ ID NO: 3873392 - DNA, 25 bp, Homo sapien
ggcgtccccaccatgaggaactgtg

SEQ ID NO: 3873393 - DNA, 25 bp, Homo sapien
tggactcatatgacagcagggcagc

SEQ ID NO: 3873394 - DNA, 25 bp, Homo sapien
cggtctaaacagtggaaatcttcct

SEQ ID NO: 3873395 - DNA, 25 bp, Homo sapien
cccctatggactcatatgacagcag

SEQ ID NO: 3873396 - DNA, 25 bp, Homo sapien
aggatactgtcctcagggtcttccg

SEQ ID NO: 3873397 - DNA, 25 bp, Homo sapien
cttccatgaagggagacctacccag

SEQ ID NO: 3873398 - DNA, 25 bp, Homo sapien
cagatggcagccaacctgaatggta

SEQ ID NO: 3873399 - DNA, 25 bp, Homo sapien
cacatttatggcttgcacagcgttg

SEQ ID NO: 3873400 - DNA, 25 bp, Homo sapien
cacagcgttggtggaatgatttact

SEQ ID NO: 3873401 - DNA, 25 bp, Homo sapien
taaacaccagcatgtgctaccggca

SEQ ID NO: 3873402 - DNA, 25 bp, Homo sapien
acacatgcccataaacaccagcatg

SEQ ID NO: 3873403 - DNA, 25 bp, Homo sapien
tccaggtggtagatcagcctgaaat

SEQ ID NO: 3873404 - DNA, 25 bp, Homo sapien
taatttgcttttgatcaattccagg

SEQ ID NO: 3873405 - DNA, 25 bp, Homo sapien
ctatgttctctctcagtagtcataa

SEQ ID NO: 3873406 - DNA, 25 bp, Homo sapien
gaactatgttctctctcagtagtca

SEQ ID NO: 3873407 - DNA, 25 bp, Homo sapien
taaagaactatgttctctctcagta

SEQ ID NO: 3873408 - DNA, 25 bp, Homo sapien
tattaaagaactatgttctctctca

SEQ ID NO: 3873409 - DNA, 25 bp, Homo sapien
tcagagttgccgctaaggaattcct

SEQ ID NO: 3873410 - DNA, 25 bp, Homo sapien
cctgggactcgtagcagctgtcaga

SEQ ID NO: 3873411 - DNA, 25 bp, Homo sapien
aaggagtctcttgtggcagcgcaga

SEQ ID NO: 3873412 - DNA, 25 bp, Homo sapien
tctctaatgctagcagttcatggaa

SEQ ID NO: 3873413 - DNA, 25 bp, Homo sapien
tctcccagcgtgagtagtccagaca

SEQ ID NO: 3873414 - DNA, 25 bp, Homo sapien
cactgacagggagggcattacacaa

SEQ ID NO: 3873415 - DNA, 25 bp, Homo sapien
taagggcttctccatagggttgctc

SEQ ID NO: 3873416 - DNA, 25 bp, Homo sapien
tgggagataagcttccaaaatcgcc

SEQ ID NO: 3873417 - DNA, 25 bp, Homo sapien
cagcaacatattagagcgttttggg

SEQ ID NO: 3873418 - DNA, 25 bp, Homo sapien
attctgttggtggacgcagctgggc

SEQ ID NO: 3873419 - DNA, 25 bp, Homo sapien
ggcccagggtatgactcacatctac

SEQ ID NO: 3873420 - DNA, 25 bp, Homo sapien
ttcctggtgctccttagaagtattc

SEQ ID NO: 3873421 - DNA, 25 bp, Homo sapien
tggagatgtgttcttaccactgtga

SEQ ID NO: 3873422 - DNA, 25 bp, Homo sapien
tccccatggagatgtgttcttacca

SEQ ID NO: 3873423 - DNA, 25 bp, Homo sapien
ggagatgtgttcttaccactgtgat

SEQ ID NO: 3873424 - DNA, 25 bp, Homo sapien
ccatggagatgtgttcttaccactg

SEQ ID NO: 3873425 - DNA, 25 bp, Homo sapien
aggaagaggccgtgggaatgagtct

SEQ ID NO: 3873426 - DNA, 25 bp, Homo sapien
gggcactgtgtcacccacaggaaga

SEQ ID NO: 3873427 - DNA, 25 bp, Homo sapien
tcaggccctatgtcaaccacacagt

SEQ ID NO: 3873428 - DNA, 25 bp, Homo sapien
tccagggcactgtgtcacccacagg

SEQ ID NO: 3873429 - DNA, 25 bp, Homo sapien
tctcctccataacatctgtcaccca

SEQ ID NO: 3873430 - DNA, 25 bp, Homo sapien
ttctcctccataacatctgtcaccc

SEQ ID NO: 3873431 - DNA, 25 bp, Homo sapien
attctcctccataacatctgtcacc

SEQ ID NO: 3873432 - DNA, 25 bp, Homo sapien
ggtcctgttccttcttcctgagccc

SEQ ID NO: 3873433 - DNA, 25 bp, Homo sapien
ctgttccttcttcctgagccccact

SEQ ID NO: 3873434 - DNA, 25 bp, Homo sapien
tcctgttccttcttcctgagcccca

SEQ ID NO: 3873435 - DNA, 25 bp, Homo sapien
ctggtcctgttccttcttcctgagc

SEQ ID NO: 3873436 - DNA, 25 bp, Homo sapien
ggcacctcttgacgggattactggg

SEQ ID NO: 3873437 - DNA, 25 bp, Homo sapien
aaagagtgtgtaggctttcctcctc

SEQ ID NO: 3873438 - DNA, 25 bp, Homo sapien
tgtggcctgcagcagatggaaaaag

SEQ ID NO: 3873439 - DNA, 25 bp, Homo sapien
tgaagtcatctctaaacctgggcac

SEQ ID NO: 3873440 - DNA, 25 bp, Homo sapien
aaggccctgcaaagagatgactagg

SEQ ID NO: 3873441 - DNA, 25 bp, Homo sapien
cctgatatgagttgaaattgctctg

SEQ ID NO: 3873442 - DNA, 25 bp, Homo sapien
taattgccgatcataacctgatatg

SEQ ID NO: 3873443 - DNA, 25 bp, Homo sapien
aagctgggatgatatatgacatttt

SEQ ID NO: 3873444 - DNA, 25 bp, Homo sapien
cagatggcaaaatatctaaagcttc

SEQ ID NO: 3873445 - DNA, 25 bp, Homo sapien
taggctgcgaaagccaagaggcctg

SEQ ID NO: 3873446 - DNA, 25 bp, Homo sapien
cactgtacaatggaagagccctcaa

SEQ ID NO: 3873447 - DNA, 25 bp, Homo sapien
cagcaatgaagtctgaaagttagca

SEQ ID NO: 3873448 - DNA, 25 bp, Homo sapien
gccacaaatgattctctctccttat

SEQ ID NO: 3873449 - DNA, 25 bp, Homo sapien
tgtgtgtcaagccagcgcataacag

SEQ ID NO: 3873450 - DNA, 25 bp, Homo sapien
caagccagcgcataacagcattact

SEQ ID NO: 3873451 - DNA, 25 bp, Homo sapien
aaatgattctctctccttatggctg

SEQ ID NO: 3873452 - DNA, 25 bp, Homo sapien
taaaagcagtcagaagaagggcttg

SEQ ID NO: 3873453 - DNA, 25 bp, Homo sapien
gatcctgatcactgttctagaagca

SEQ ID NO: 3873454 - DNA, 25 bp, Homo sapien
tcttattaacgatagcgatcctgat

SEQ ID NO: 3873455 - DNA, 25 bp, Homo sapien
gacagatgagtcttgggtcccacat

SEQ ID NO: 3873456 - DNA, 25 bp, Homo sapien
taccaacgtgttcttggcaaaataa

SEQ ID NO: 3873457 - DNA, 25 bp, Homo sapien
ggttatctggcgtgcttccctgtca

SEQ ID NO: 3873458 - DNA, 25 bp, Homo sapien
gaagccgcatgaccttagctctcaa

SEQ ID NO: 3873459 - DNA, 25 bp, Homo sapien
tttttaattcacgtatacaggcctg

SEQ ID NO: 3873460 - DNA, 25 bp, Homo sapien
tgtgcaccgggagatttacatccca

SEQ ID NO: 3873461 - DNA, 25 bp, Homo sapien
tacttggctgtgcagtaacttccct

SEQ ID NO: 3873462 - DNA, 25 bp, Homo sapien
gatgggaggcctctacagtgcagta

SEQ ID NO: 3873463 - DNA, 25 bp, Homo sapien
tactggtcctgagctacacctgata

SEQ ID NO: 3873464 - DNA, 25 bp, Homo sapien
taacttcccttgtgatccaagctgg

SEQ ID NO: 3873465 - DNA, 25 bp, Homo sapien
aaagaaatatgagtgtgacctctct

SEQ ID NO: 3873466 - DNA, 25 bp, Homo sapien
tcatttacaaacctaaggagaggga

SEQ ID NO: 3873467 - DNA, 25 bp, Homo sapien
gagcaataacattaatgaaagccaa

SEQ ID NO: 3873468 - DNA, 25 bp, Homo sapien
actgtgcatgtaattaaagcctgac

SEQ ID NO: 3873469 - DNA, 25 bp, Homo sapien
tctgtgggtagtgatatggacggac

SEQ ID NO: 3873470 - DNA, 25 bp, Homo sapien
ttttatgtctactggcatctgtggg

SEQ ID NO: 3873471 - DNA, 25 bp, Homo sapien
gacggactgttaatataaccaacat

SEQ ID NO: 3873472 - DNA, 25 bp, Homo sapien
gagagcaatttttatgtctactggc

SEQ ID NO: 3873473 - DNA, 25 bp, Homo sapien
gcttctcaaagccagggatgtgttc

SEQ ID NO: 3873474 - DNA, 25 bp, Homo sapien
ttcttgttagcccagaggaccgtgg

SEQ ID NO: 3873475 - DNA, 25 bp, Homo sapien
gtagcacacaggcaggtattgaaaa

SEQ ID NO: 3873476 - DNA, 25 bp, Homo sapien
tagaagatagtccaaccaaaaattc

SEQ ID NO: 3873477 - DNA, 25 bp, Homo sapien
gggacccatggatcttctagcattc

SEQ ID NO: 3873478 - DNA, 25 bp, Homo sapien
actgaaggtcaacgaggccctgggt

SEQ ID NO: 3873479 - DNA, 25 bp, Homo sapien
cccagctggctgagaactgaaggtc

SEQ ID NO: 3873480 - DNA, 25 bp, Homo sapien
actttttaggcccaggtggtgcaga

SEQ ID NO: 3873481 - DNA, 25 bp, Homo sapien
ggattgtcattaaccgtcccaagcc

SEQ ID NO: 3873482 - DNA, 25 bp, Homo sapien
aatccggcctcgcatattctagtga

SEQ ID NO: 3873483 - DNA, 25 bp, Homo sapien
aaacaagcatcaagactctgttgcc

SEQ ID NO: 3873484 - DNA, 25 bp, Homo sapien
cgaaagattaagttgtgtcactcaa

SEQ ID NO: 3873485 - DNA, 25 bp, Homo sapien
tcttccaggagcagaatactgacgc

SEQ ID NO: 3873486 - DNA, 25 bp, Homo sapien
gtgacgcctccaagcacgagctgtt

SEQ ID NO: 3873487 - DNA, 25 bp, Homo sapien
tgtggtctattaagcaagcaatgca

SEQ ID NO: 3873488 - DNA, 25 bp, Homo sapien
tcaggccaaactgcacatgagtcag

SEQ ID NO: 3873489 - DNA, 25 bp, Homo sapien
aaaaaatattgatgcgattccaggt

SEQ ID NO: 3873490 - DNA, 25 bp, Homo sapien
ttctctctcccctctacaagttggc

SEQ ID NO: 3873491 - DNA, 25 bp, Homo sapien
tctacaagttggcttctttgtaccc

SEQ ID NO: 3873492 - DNA, 25 bp, Homo sapien
tggcttctttgtacccttgccatac

SEQ ID NO: 3873493 - DNA, 25 bp, Homo sapien
tctcccctctacaagttggcttctt

SEQ ID NO: 3873494 - DNA, 25 bp, Homo sapien
atatctaatcgccttctttggaaag

SEQ ID NO: 3873495 - DNA, 25 bp, Homo sapien
gtagggctgtaaccataagcccctg

SEQ ID NO: 3873496 - DNA, 25 bp, Homo sapien
tgttctcgtatcactttccaacgtg

SEQ ID NO: 3873497 - DNA, 25 bp, Homo sapien
taggacacagtgagaaactatctga

SEQ ID NO: 3873498 - DNA, 25 bp, Homo sapien
gttccgttatgatttgagaaggtca

SEQ ID NO: 3873499 - DNA, 25 bp, Homo sapien
cgtgacatctctgttccgttatgat

SEQ ID NO: 3873500 - DNA, 25 bp, Homo sapien
cttggccagagccacgtgacatctc

SEQ ID NO: 3873501 - DNA, 25 bp, Homo sapien
gagccacgtgacatctctgttccgt

SEQ ID NO: 3873502 - DNA, 25 bp, Homo sapien
tctgtgtgacctacacctggtggct

SEQ ID NO: 3873503 - DNA, 25 bp, Homo sapien
gacttgagccacctgaagagttctg

SEQ ID NO: 3873504 - DNA, 25 bp, Homo sapien
catcaggaatgggtacagaggacat

SEQ ID NO: 3873505 - DNA, 25 bp, Homo sapien
gactcagtgggatacaaatggcttc

SEQ ID NO: 3873506 - DNA, 25 bp, Homo sapien
cagtggtagttcaagggacatggtc

SEQ ID NO: 3873507 - DNA, 25 bp, Homo sapien
cttaccatcaagaaggaggtgtggc

SEQ ID NO: 3873508 - DNA, 25 bp, Homo sapien
gaaaactgtacttgcaaaagctagt

SEQ ID NO: 3873509 - DNA, 25 bp, Homo sapien
tgaacttagttccaaccagataatg

SEQ ID NO: 3873510 - DNA, 25 bp, Homo sapien
ggaaaactgaatactgtgtggaagg

SEQ ID NO: 3873511 - DNA, 25 bp, Homo sapien
ggtaaatggaaaactgaatactgtg

SEQ ID NO: 3873512 - DNA, 25 bp, Homo sapien
aaatggaaaactgaatactgtgtgg

SEQ ID NO: 3873513 - DNA, 25 bp, Homo sapien
ataacgtgggtgttagcaaacaagg

SEQ ID NO: 3873514 - DNA, 25 bp, Homo sapien
ttttaggcactctttacatactctg

SEQ ID NO: 3873515 - DNA, 25 bp, Homo sapien
gaaatgtctaatgaaatccttcgct

SEQ ID NO: 3873516 - DNA, 25 bp, Homo sapien
cattaactcttaaccgtgtctccca

SEQ ID NO: 3873517 - DNA, 25 bp, Homo sapien
gagtgctcagtatagaatgaaagac

SEQ ID NO: 3873518 - DNA, 25 bp, Homo sapien
ctagggttgatcacgtgaatagcct

SEQ ID NO: 3873519 - DNA, 25 bp, Homo sapien
tagggttgatcacgtgaatagcctt

SEQ ID NO: 3873520 - DNA, 25 bp, Homo sapien
gagaccgccttaggcttgcagtatg

SEQ ID NO: 3873521 - DNA, 25 bp, Homo sapien
ttgccaaagagaccgccttaggctt

SEQ ID NO: 3873522 - DNA, 25 bp, Homo sapien
caaagagaccgccttaggcttgcag

SEQ ID NO: 3873523 - DNA, 25 bp, Homo sapien
tgagttgccaaagagaccgccttag

SEQ ID NO: 3873524 - DNA, 25 bp, Homo sapien
gactgaagtttttgcggtgctgcta

SEQ ID NO: 3873525 - DNA, 25 bp, Homo sapien
catcgtagttcaatagagagcaggc

SEQ ID NO: 3873526 - DNA, 25 bp, Homo sapien
tgaacaggccttctgagtcagtgca

SEQ ID NO: 3873527 - DNA, 25 bp, Homo sapien
tatgctgagagccacggaagactga

SEQ ID NO: 3873528 - DNA, 25 bp, Homo sapien
ggaactcagtagcatctaataccaa

SEQ ID NO: 3873529 - DNA, 25 bp, Homo sapien
gggtagggaactcagtagcatctaa

SEQ ID NO: 3873530 - DNA, 25 bp, Homo sapien
tagggtagggaactcagtagcatct

SEQ ID NO: 3873531 - DNA, 25 bp, Homo sapien
tagggaactcagtagcatctaatac

SEQ ID NO: 3873532 - DNA, 25 bp, Homo sapien
gaataccaacataacgccattcagc

SEQ ID NO: 3873533 - DNA, 25 bp, Homo sapien
aacataacgccattcagccacataa

SEQ ID NO: 3873534 - DNA, 25 bp, Homo sapien
ataccaacataacgccattcagcca

SEQ ID NO: 3873535 - DNA, 25 bp, Homo sapien
tttgaataccaacataacgccattc

SEQ ID NO: 3873536 - DNA, 25 bp, Homo sapien
ttccatgtataattctcacctccat

SEQ ID NO: 3873537 - DNA, 25 bp, Homo sapien
ggccccaagaagagtaatgtgttta

SEQ ID NO: 3873538 - DNA, 25 bp, Homo sapien
ccggggccccaagaagagtaatgtg

SEQ ID NO: 3873539 - DNA, 25 bp, Homo sapien
gccccaagaagagtaatgtgtttaa

SEQ ID NO: 3873540 - DNA, 25 bp, Homo sapien
cggggccccaagaagagtaatgtgt

SEQ ID NO: 3873541 - DNA, 25 bp, Homo sapien
cacttgggagcattgcacatgtgcc

SEQ ID NO: 3873542 - DNA, 25 bp, Homo sapien
tgaacaatttctcgactctcctgga

SEQ ID NO: 3873543 - DNA, 25 bp, Homo sapien
caaacactatgaggacacttgggag

SEQ ID NO: 3873544 - DNA, 25 bp, Homo sapien
caagcctgatggtagagagggttcc

SEQ ID NO: 3873545 - DNA, 25 bp, Homo sapien
tggccaatgctccaaagacagtcct

SEQ ID NO: 3873546 - DNA, 25 bp, Homo sapien
ggaagcttggagcaacactggccaa

SEQ ID NO: 3873547 - DNA, 25 bp, Homo sapien
caatgctccaaagacagtcctcggg

SEQ ID NO: 3873548 - DNA, 25 bp, Homo sapien
gcaacactggccaatgctccaaaga

SEQ ID NO: 3873549 - DNA, 25 bp, Homo sapien
tctgatcagcaggtaatgttcgggc

SEQ ID NO: 3873550 - DNA, 25 bp, Homo sapien
tgttcgggcaattcgtgactggcac

SEQ ID NO: 3873551 - DNA, 25 bp, Homo sapien
tcaaacggcagaggcatcgaagcat

SEQ ID NO: 3873552 - DNA, 25 bp, Homo sapien
ggccgacattctggcttctgatcag

SEQ ID NO: 3873553 - DNA, 25 bp, Homo sapien
ctagggttttgcttccagaagctga

SEQ ID NO: 3873554 - DNA, 25 bp, Homo sapien
tagggttttgcttccagaagctgac

SEQ ID NO: 3873555 - DNA, 25 bp, Homo sapien
taacatctccttcccgtgtgctgag

SEQ ID NO: 3873556 - DNA, 25 bp, Homo sapien
caactacacgagaaagcaacaggct

SEQ ID NO: 3873557 - DNA, 25 bp, Homo sapien
cctagctgttttggattgggacccg

SEQ ID NO: 3873558 - DNA, 25 bp, Homo sapien
taggttaggctttgtcacacgctgg

SEQ ID NO: 3873559 - DNA, 25 bp, Homo sapien
tatgggcacctaatgggatataaca

SEQ ID NO: 3873560 - DNA, 25 bp, Homo sapien
ggtcatgccccaactcgcagtggga

SEQ ID NO: 3873561 - DNA, 25 bp, Homo sapien
tatttagcttgctgccatgcgagga

SEQ ID NO: 3873562 - DNA, 25 bp, Homo sapien
aaaatgcagaccttggcttggcgcg

SEQ ID NO: 3873563 - DNA, 25 bp, Homo sapien
ctgtctggatgagaattgccttttc

SEQ ID NO: 3873564 - DNA, 25 bp, Homo sapien
cagtttttagcgtggcatggatcca

SEQ ID NO: 3873565 - DNA, 25 bp, Homo sapien
gcctctgacagatctccaaaataaa

SEQ ID NO: 3873566 - DNA, 25 bp, Homo sapien
tttgcccagtggtaaaatcagccct

SEQ ID NO: 3873567 - DNA, 25 bp, Homo sapien
caaaggcaaacgggataaacggcat

SEQ ID NO: 3873568 - DNA, 25 bp, Homo sapien
gatggatctggcttgtggaccctct

SEQ ID NO: 3873569 - DNA, 25 bp, Homo sapien
gggatggatctggcttgtggaccct

SEQ ID NO: 3873570 - DNA, 25 bp, Homo sapien
ggatggatctggcttgtggaccctc

SEQ ID NO: 3873571 - DNA, 25 bp, Homo sapien
atggatctggcttgtggaccctctc

SEQ ID NO: 3873572 - DNA, 25 bp, Homo sapien
actgattcatctcttgcaagccttg

SEQ ID NO: 3873573 - DNA, 25 bp, Homo sapien
tgagttataagccacggctttggct

SEQ ID NO: 3873574 - DNA, 25 bp, Homo sapien
ctgggttggatgagttataagccac

SEQ ID NO: 3873575 - DNA, 25 bp, Homo sapien
tctggttccaacgtggaaagccgaa

SEQ ID NO: 3873576 - DNA, 25 bp, Homo sapien
caaggcataatcaacgggaaacctc

SEQ ID NO: 3873577 - DNA, 25 bp, Homo sapien
aggcataatcaacgggaaacctctg

SEQ ID NO: 3873578 - DNA, 25 bp, Homo sapien
ttgcttctctcctgactctaatcaa

SEQ ID NO: 3873579 - DNA, 25 bp, Homo sapien
ctctcctgactctaatcaaggcata

SEQ ID NO: 3873580 - DNA, 25 bp, Homo sapien
caggcctctttagttcagaaatagc

SEQ ID NO: 3873581 - DNA, 25 bp, Homo sapien
catctgaaccagaaagccggggagg

SEQ ID NO: 3873582 - DNA, 25 bp, Homo sapien
tggtcctttcactaccttattcagg

SEQ ID NO: 3873583 - DNA, 25 bp, Homo sapien
tctccatccccgtgggaaggctttc

SEQ ID NO: 3873584 - DNA, 25 bp, Homo sapien
tccgcgacccgaagggctcaggagt

SEQ ID NO: 3873585 - DNA, 25 bp, Homo sapien
caggagtgctggaaaaagattcttc

SEQ ID NO: 3873586 - DNA, 25 bp, Homo sapien
agttctagcggagaaaagatcaggc

SEQ ID NO: 3873587 - DNA, 25 bp, Homo sapien
gaataatcttcgcactgttccgcga

SEQ ID NO: 3873588 - DNA, 25 bp, Homo sapien
caccgaaaaagaaaccacagaccag

SEQ ID NO: 3873589 - DNA, 25 bp, Homo sapien
aagaaaccacagaccagattatcac

SEQ ID NO: 3873590 - DNA, 25 bp, Homo sapien
gaaaaagaaaccacagaccagatta

SEQ ID NO: 3873591 - DNA, 25 bp, Homo sapien
aaaagaaaccacagaccagattatc

SEQ ID NO: 3873592 - DNA, 25 bp, Homo sapien
tactgacttataaataggacaccct

SEQ ID NO: 3873593 - DNA, 25 bp, Homo sapien
tatgaagccgctgtgttttactgac

SEQ ID NO: 3873594 - DNA, 25 bp, Homo sapien
tatgaggtacatcttaatagaaact

SEQ ID NO: 3873595 - DNA, 25 bp, Homo sapien
tctgggtaataagcacagagtatga

SEQ ID NO: 3873596 - DNA, 25 bp, Homo sapien
gggacagtgcctccatggacggcgg

SEQ ID NO: 3873597 - DNA, 25 bp, Homo sapien
ctgggacagtgcctccatggacggc

SEQ ID NO: 3873598 - DNA, 25 bp, Homo sapien
accctgggacagtgcctccatggac

SEQ ID NO: 3873599 - DNA, 25 bp, Homo sapien
acggcggggctcagggcgacggcac

SEQ ID NO: 3873600 - DNA, 25 bp, Homo sapien
tgtccccacattgtggccttgcagt

SEQ ID NO: 3873601 - DNA, 25 bp, Homo sapien
cagtgccttgtttggagtgcttcct

SEQ ID NO: 3873602 - DNA, 25 bp, Homo sapien
gttccctcaactccattggccaaag

SEQ ID NO: 3873603 - DNA, 25 bp, Homo sapien
tcagtccagtgccccaagtccatgt

SEQ ID NO: 3873604 - DNA, 25 bp, Homo sapien
taagaatgagtttgccgtggcatct

SEQ ID NO: 3873605 - DNA, 25 bp, Homo sapien
cactccaaaaccctcctttgtagct

SEQ ID NO: 3873606 - DNA, 25 bp, Homo sapien
tcttggatagtttaagaatgagttt

SEQ ID NO: 3873607 - DNA, 25 bp, Homo sapien
aaccctcctttgtagcttcttggat

SEQ ID NO: 3873608 - DNA, 25 bp, Homo sapien
ccctgagccaccaagattagcagtc

SEQ ID NO: 3873609 - DNA, 25 bp, Homo sapien
ccaccaagattagcagtctgctgca

SEQ ID NO: 3873610 - DNA, 25 bp, Homo sapien
agagcgggacagaggagatacccct

SEQ ID NO: 3873611 - DNA, 25 bp, Homo sapien
caggactagaggcaagggccaagtg

SEQ ID NO: 3873612 - DNA, 25 bp, Homo sapien
tctggcacagcaaatggctgtgatt

SEQ ID NO: 3873613 - DNA, 25 bp, Homo sapien
cagaaatctggcacagcaaatggct

SEQ ID NO: 3873614 - DNA, 25 bp, Homo sapien
atctggcacagcaaatggctgtgat

SEQ ID NO: 3873615 - DNA, 25 bp, Homo sapien
ggcacagcaaatggctgtgattcca

SEQ ID NO: 3873616 - DNA, 25 bp, Homo sapien
ttgctttctgtcctcgccttacacg

SEQ ID NO: 3873617 - DNA, 25 bp, Homo sapien
tcttctctaatgtatccccagtgcc

SEQ ID NO: 3873618 - DNA, 25 bp, Homo sapien
ctatacaggaaggttagccccagga

SEQ ID NO: 3873619 - DNA, 25 bp, Homo sapien
tgtcctcgccttacacgctatacag

SEQ ID NO: 3873620 - DNA, 25 bp, Homo sapien
tgctctccgatcttttctctactca

SEQ ID NO: 3873621 - DNA, 25 bp, Homo sapien
cactcccgtactctgctctgagttt

SEQ ID NO: 3873622 - DNA, 25 bp, Homo sapien
tctgagtttaccttcctgctgctct

SEQ ID NO: 3873623 - DNA, 25 bp, Homo sapien
atccttccatcctaccaccaaactc

SEQ ID NO: 3873624 - DNA, 25 bp, Homo sapien
ggtgaaagccgtgtgctcttcctgg

SEQ ID NO: 3873625 - DNA, 25 bp, Homo sapien
tgggtgaaagccgtgtgctcttcct

SEQ ID NO: 3873626 - DNA, 25 bp, Homo sapien
gggtgaaagccgtgtgctcttcctg

SEQ ID NO: 3873627 - DNA, 25 bp, Homo sapien
ctgggtgaaagccgtgtgctcttcc

SEQ ID NO: 3873628 - DNA, 25 bp, Homo sapien
tgtatagtttgccagttcttatcca

SEQ ID NO: 3873629 - DNA, 25 bp, Homo sapien
tatccaattgtaaattagaccaggg

SEQ ID NO: 3873630 - DNA, 25 bp, Homo sapien
gtgtatagtttgccagttcttatcc

SEQ ID NO: 3873631 - DNA, 25 bp, Homo sapien
caattgtaaattagaccagggttgc

SEQ ID NO: 3873632 - DNA, 25 bp, Homo sapien
ccgtggactctgaaaacgtgtaccg

SEQ ID NO: 3873633 - DNA, 25 bp, Homo sapien
agaaatcattacattccgtgtccct

SEQ ID NO: 3873634 - DNA, 25 bp, Homo sapien
aacgtgtaccgcagacagaaatcat

SEQ ID NO: 3873635 - DNA, 25 bp, Homo sapien
tctgaaaacgtgtaccgcagacaga

SEQ ID NO: 3873636 - DNA, 25 bp, Homo sapien
tgttctacggtagagtagtttaata

SEQ ID NO: 3873637 - DNA, 25 bp, Homo sapien
tacggtagagtagtttaatagattc

SEQ ID NO: 3873638 - DNA, 25 bp, Homo sapien
aggtggtcttgttctacggtagagt

SEQ ID NO: 3873639 - DNA, 25 bp, Homo sapien
gagtagtttaatagattcaagagct

SEQ ID NO: 3873640 - DNA, 25 bp, Homo sapien
gactccagtgtgaccggatcagcac

SEQ ID NO: 3873641 - DNA, 25 bp, Homo sapien
taatcttagtgcatgcacacgcctg

SEQ ID NO: 3873642 - DNA, 25 bp, Homo sapien
tcatgtttaagagacgtgcccgtca

SEQ ID NO: 3873643 - DNA, 25 bp, Homo sapien
tcatttggagtcattcggaggtgct

SEQ ID NO: 3873644 - DNA, 25 bp, Homo sapien
aggtccttcccaactccaggatcct

SEQ ID NO: 3873645 - DNA, 25 bp, Homo sapien
tccaggatccttgcttaagcccact

SEQ ID NO: 3873646 - DNA, 25 bp, Homo sapien
tcacgcaaggatccgtggagggaag

SEQ ID NO: 3873647 - DNA, 25 bp, Homo sapien
ggagacatcggtgaaggtccttccc

SEQ ID NO: 3873648 - DNA, 25 bp, Homo sapien
aggaagctggactctgtccggatgg

SEQ ID NO: 3873649 - DNA, 25 bp, Homo sapien
actctgtccggatggggcattaggc

SEQ ID NO: 3873650 - DNA, 25 bp, Homo sapien
caaggcgttccaggtcatcggaggt

SEQ ID NO: 3873651 - DNA, 25 bp, Homo sapien
ggacatgggcatgattccaaatgtc

SEQ ID NO: 3873652 - DNA, 25 bp, Homo sapien
tggcccataagttgggtgctggcca

SEQ ID NO: 3873653 - DNA, 25 bp, Homo sapien
ctggcccataagttgggtgctggcc

SEQ ID NO: 3873654 - DNA, 25 bp, Homo sapien
ggctggcccataagttgggtgctgg

SEQ ID NO: 3873655 - DNA, 25 bp, Homo sapien
ggcccataagttgggtgctggccat

SEQ ID NO: 3873656 - DNA, 25 bp, Homo sapien
tggagacgaccacctggagcagacg

SEQ ID NO: 3873657 - DNA, 25 bp, Homo sapien
cggtacagctggagacgaccacctg

SEQ ID NO: 3873658 - DNA, 25 bp, Homo sapien
gacggctaggaaagatgagctcatt

SEQ ID NO: 3873659 - DNA, 25 bp, Homo sapien
acctggagcagacggctaggaaaga

SEQ ID NO: 3873660 - DNA, 25 bp, Homo sapien
aggtgcttgaaatctggggcgtcca

SEQ ID NO: 3873661 - DNA, 25 bp, Homo sapien
gggcttgcttcatgtgcggttctgt

SEQ ID NO: 3873662 - DNA, 25 bp, Homo sapien
tgtgcggttctgtagtccaggtgct

SEQ ID NO: 3873663 - DNA, 25 bp, Homo sapien
aatctggggcgtccataaggtctcg

SEQ ID NO: 3873664 - DNA, 25 bp, Homo sapien
tctgcgagccgtaatttgacatctg

SEQ ID NO: 3873665 - DNA, 25 bp, Homo sapien
tgcgagccgtaatttgacatctgaa

SEQ ID NO: 3873666 - DNA, 25 bp, Homo sapien
agtctgcgagccgtaatttgacatc

SEQ ID NO: 3873667 - DNA, 25 bp, Homo sapien
ggagtctgcgagccgtaatttgaca

SEQ ID NO: 3873668 - DNA, 25 bp, Homo sapien
cagaacaaacacttttgccaaatgc

SEQ ID NO: 3873669 - DNA, 25 bp, Homo sapien
ttcagaacaaacacttttgccaaat

SEQ ID NO: 3873670 - DNA, 25 bp, Homo sapien
tggcttcagaacaaacacttttgcc

SEQ ID NO: 3873671 - DNA, 25 bp, Homo sapien
gcttcagaacaaacacttttgccaa

SEQ ID NO: 3873672 - DNA, 25 bp, Homo sapien
ttgctgcacagcgtctcctcgacgt

SEQ ID NO: 3873673 - DNA, 25 bp, Homo sapien
gatctagtttgacagaacttgctgc

SEQ ID NO: 3873674 - DNA, 25 bp, Homo sapien
gcgtctcctcgacgtcctggaaatt

SEQ ID NO: 3873675 - DNA, 25 bp, Homo sapien
ggatcagcctggcaagatctagttt

SEQ ID NO: 3873676 - DNA, 25 bp, Homo sapien
tctttacacattataagggcccaag

SEQ ID NO: 3873677 - DNA, 25 bp, Homo sapien
tacacattataagggcccaagcaac

SEQ ID NO: 3873678 - DNA, 25 bp, Homo sapien
tttacacattataagggcccaagca

SEQ ID NO: 3873679 - DNA, 25 bp, Homo sapien
aaataaatgaatctttacacattat

SEQ ID NO: 3873680 - DNA, 25 bp, Homo sapien
cctcctgaaataggttttgagatcc

SEQ ID NO: 3873681 - DNA, 25 bp, Homo sapien
tcacatcgagacacaaaactggcag

SEQ ID NO: 3873682 - DNA, 25 bp, Homo sapien
actttgatgaggcatgagacccagc

SEQ ID NO: 3873683 - DNA, 25 bp, Homo sapien
cacatatacctgtacacactgcaag

SEQ ID NO: 3873684 - DNA, 25 bp, Homo sapien
ctcctgatattatgtggtgaatatt

SEQ ID NO: 3873685 - DNA, 25 bp, Homo sapien
tcctgatattatgtggtgaatattc

SEQ ID NO: 3873686 - DNA, 25 bp, Homo sapien
cctgatattatgtggtgaatattca

SEQ ID NO: 3873687 - DNA, 25 bp, Homo sapien
aggattggcaatggcgtgcggctgg

SEQ ID NO: 3873688 - DNA, 25 bp, Homo sapien
gcgtgcggctggcagtcttgcccaa

SEQ ID NO: 3873689 - DNA, 25 bp, Homo sapien
tggcaatggcgtgcggctggcagtc

SEQ ID NO: 3873690 - DNA, 25 bp, Homo sapien
gctggcagtcttgcccaagccacat

SEQ ID NO: 3873691 - DNA, 25 bp, Homo sapien
aagcagaggaccaagaggagggctg

SEQ ID NO: 3873692 - DNA, 25 bp, Homo sapien
tggtgacaccatcaggccgctcggg

SEQ ID NO: 3873693 - DNA, 25 bp, Homo sapien
gaagaagtgcgctctggtgacacca

SEQ ID NO: 3873694 - DNA, 25 bp, Homo sapien
gcaggtcttccgtggccgcttctct

SEQ ID NO: 3873695 - DNA, 25 bp, Homo sapien
cgttgtgtccttgcctccgattcct

SEQ ID NO: 3873696 - DNA, 25 bp, Homo sapien
tcatgaccctgggccggaactcctt

SEQ ID NO: 3873697 - DNA, 25 bp, Homo sapien
ttcctgtgttctcggctcagaacac

SEQ ID NO: 3873698 - DNA, 25 bp, Homo sapien
ccttcctgtgttctcggctcagaac

SEQ ID NO: 3873699 - DNA, 25 bp, Homo sapien
gtctcatgaccctgggccggaactc

SEQ ID NO: 3873700 - DNA, 25 bp, Homo sapien
gtcacattcgcgcatactgcatggg

SEQ ID NO: 3873701 - DNA, 25 bp, Homo sapien
catgctgtgtgccttagagtcacat

SEQ ID NO: 3873702 - DNA, 25 bp, Homo sapien
aaggccagatcgctgggccaaaggc

SEQ ID NO: 3873703 - DNA, 25 bp, Homo sapien
gactgggaaggccagatcgctgggc

SEQ ID NO: 3873704 - DNA, 25 bp, Homo sapien
caactctccgccatggcccgtgtgg

SEQ ID NO: 3873705 - DNA, 25 bp, Homo sapien
ggcccacgtcgctgtcacagcctcg

SEQ ID NO: 3873706 - DNA, 25 bp, Homo sapien
cctcggcttaattgctgggtaggga

SEQ ID NO: 3873707 - DNA, 25 bp, Homo sapien
gaggggcagcaactctccgccatgg

SEQ ID NO: 3873708 - DNA, 25 bp, Homo sapien
agtgtcttatcccagattccccggg

SEQ ID NO: 3873709 - DNA, 25 bp, Homo sapien
tccagacggtgtcccttggcctttc

SEQ ID NO: 3873710 - DNA, 25 bp, Homo sapien
cgtccagacggtgtcccttggcctt

SEQ ID NO: 3873711 - DNA, 25 bp, Homo sapien
tagagcacgtggtctcggggaaccc

SEQ ID NO: 3873712 - DNA, 25 bp, Homo sapien
accctgcctgggatcagactcgggg

SEQ ID NO: 3873713 - DNA, 25 bp, Homo sapien
tgtgcagaggctttgactcgcaaag

SEQ ID NO: 3873714 - DNA, 25 bp, Homo sapien
ttctctcccagttccgcggccaggg

SEQ ID NO: 3873715 - DNA, 25 bp, Homo sapien
gggccacacaaagacagcggaagga

SEQ ID NO: 3873716 - DNA, 25 bp, Homo sapien
ggacaccattcccatgggggccaca

SEQ ID NO: 3873717 - DNA, 25 bp, Homo sapien
cgctgaggcgtttttacactgtgta

SEQ ID NO: 3873718 - DNA, 25 bp, Homo sapien
tgtgtagtatggtttccagaaggtc

SEQ ID NO: 3873719 - DNA, 25 bp, Homo sapien
tcttcttcccttgccagacggagag

SEQ ID NO: 3873720 - DNA, 25 bp, Homo sapien
ttcccattgccattgcgctgaggcg

SEQ ID NO: 3873721 - DNA, 25 bp, Homo sapien
tcgagcttctcagtccccctggatt

SEQ ID NO: 3873722 - DNA, 25 bp, Homo sapien
atttctgccgcttcgagcttctcag

SEQ ID NO: 3873723 - DNA, 25 bp, Homo sapien
ccctttatttctgccgcttcgagct

SEQ ID NO: 3873724 - DNA, 25 bp, Homo sapien
tgccgcttcgagcttctcagtcccc

SEQ ID NO: 3873725 - DNA, 25 bp, Homo sapien
tcaagaagcaccaaattgtttgagg

SEQ ID NO: 3873726 - DNA, 25 bp, Homo sapien
tgtttgaggtggcatgtgtcagcct

SEQ ID NO: 3873727 - DNA, 25 bp, Homo sapien
gctcatccccatgtgcagctacctg

SEQ ID NO: 3873728 - DNA, 25 bp, Homo sapien
gatggtcgcatgacaggctcatccc

SEQ ID NO: 3873729 - DNA, 25 bp, Homo sapien
tgtccccgagctaaccagaggcaaa

SEQ ID NO: 3873730 - DNA, 25 bp, Homo sapien
agaggcaaaggcaagttgatctgtg

SEQ ID NO: 3873731 - DNA, 25 bp, Homo sapien
tctttgtaagaacttccttgccttc

SEQ ID NO: 3873732 - DNA, 25 bp, Homo sapien
gttatgagagcttctgggcaactgg

SEQ ID NO: 3873733 - DNA, 25 bp, Homo sapien
attcccctgcggtgaaaccaagcgg

SEQ ID NO: 3873734 - DNA, 25 bp, Homo sapien
gcagtcagacccagatgtaaaacag

SEQ ID NO: 3873735 - DNA, 25 bp, Homo sapien
gaggcggctgttagacacctgcaca

SEQ ID NO: 3873736 - DNA, 25 bp, Homo sapien
gaacccacgggagaatgtagcccag

SEQ ID NO: 3873737 - DNA, 25 bp, Homo sapien
cagttaacctgctgaatgccttgca

SEQ ID NO: 3873738 - DNA, 25 bp, Homo sapien
gacagcgttgcctgcgtggatgaat

SEQ ID NO: 3873739 - DNA, 25 bp, Homo sapien
cctgagcaacacttcctgggtgaca

SEQ ID NO: 3873740 - DNA, 25 bp, Homo sapien
gatgcagatccgaattcctccagct

SEQ ID NO: 3873741 - DNA, 25 bp, Homo sapien
ccttgggtggccagagcaggtacac

SEQ ID NO: 3873742 - DNA, 25 bp, Homo sapien
cttgccaagcaggccttgggtggcc

SEQ ID NO: 3873743 - DNA, 25 bp, Homo sapien
ttgccaagcaggccttgggtggcca

SEQ ID NO: 3873744 - DNA, 25 bp, Homo sapien
tggccagagcaggtacacacaggct

SEQ ID NO: 3873745 - DNA, 25 bp, Homo sapien
cgccttcttcttgccttgaccccat

SEQ ID NO: 3873746 - DNA, 25 bp, Homo sapien
agaacgccttcttcttgccttgacc

SEQ ID NO: 3873747 - DNA, 25 bp, Homo sapien
gaacgccttcttcttgccttgaccc

SEQ ID NO: 3873748 - DNA, 25 bp, Homo sapien
aaaagaacgccttcttcttgccttg

SEQ ID NO: 3873749 - DNA, 25 bp, Homo sapien
cactgggcggagatccatggtctcc

SEQ ID NO: 3873750 - DNA, 25 bp, Homo sapien
ctgggcggagatccatggtctccag

SEQ ID NO: 3873751 - DNA, 25 bp, Homo sapien
cacactgggcggagatccatggtct

SEQ ID NO: 3873752 - DNA, 25 bp, Homo sapien
ccacactgggcggagatccatggtc

SEQ ID NO: 3873753 - DNA, 25 bp, Homo sapien
ggcacacaagagaggttcgataaat

SEQ ID NO: 3873754 - DNA, 25 bp, Homo sapien
cacacaagagaggttcgataaatat

SEQ ID NO: 3873755 - DNA, 25 bp, Homo sapien
cttggcacacaagagaggttcgata

SEQ ID NO: 3873756 - DNA, 25 bp, Homo sapien
acaagagaggttcgataaatattgg

SEQ ID NO: 3873757 - DNA, 25 bp, Homo sapien
aatgtaattttgtgggcacagcctg

SEQ ID NO: 3873758 - DNA, 25 bp, Homo sapien
aacattttcaagggagcaggaactg

SEQ ID NO: 3873759 - DNA, 25 bp, Homo sapien
tgcttggagcttgcctgccatctct

SEQ ID NO: 3873760 - DNA, 25 bp, Homo sapien
accttgggagtcctcctgcttggag

SEQ ID NO: 3873761 - DNA, 25 bp, Homo sapien
ggagcaggaactgagaaggtacctt

SEQ ID NO: 3873762 - DNA, 25 bp, Homo sapien
cattggagctgagtgttttgcccct

SEQ ID NO: 3873763 - DNA, 25 bp, Homo sapien
ctttgccctttctcattggagctga

SEQ ID NO: 3873764 - DNA, 25 bp, Homo sapien
gaattctgcaccatggccttctagg

SEQ ID NO: 3873765 - DNA, 25 bp, Homo sapien
tgcataaatgaattctgcaccatgg

SEQ ID NO: 3873766 - DNA, 25 bp, Homo sapien
tcgatcatgtccaaagacagctgct

SEQ ID NO: 3873767 - DNA, 25 bp, Homo sapien
aaaagactcgatcatgtccaaagac

SEQ ID NO: 3873768 - DNA, 25 bp, Homo sapien
gcttccccatgttggaagaaagcag

SEQ ID NO: 3873769 - DNA, 25 bp, Homo sapien
ggcgcacagcatccactggttgaga

SEQ ID NO: 3873770 - DNA, 25 bp, Homo sapien
gttctgaaccagtatagggccctcc

SEQ ID NO: 3873771 - DNA, 25 bp, Homo sapien
tctctccccggagtactttgggata

SEQ ID NO: 3873772 - DNA, 25 bp, Homo sapien
gataatttgaggtgcattctcatag

SEQ ID NO: 3873773 - DNA, 25 bp, Homo sapien
ccggctccacgggaaatgtccagga

SEQ ID NO: 3873774 - DNA, 25 bp, Homo sapien
gggatcctacccatagattaataag

SEQ ID NO: 3873775 - DNA, 25 bp, Homo sapien
ggaaaacacatttgcccactgtaga

SEQ ID NO: 3873776 - DNA, 25 bp, Homo sapien
ctgaagtttcctggtagatccacac

SEQ ID NO: 3873777 - DNA, 25 bp, Homo sapien
tttgcccactgtagatttaacctga

SEQ ID NO: 3873778 - DNA, 25 bp, Homo sapien
ctgagcagggacagtgggggaggga

SEQ ID NO: 3873779 - DNA, 25 bp, Homo sapien
agcagggacagtgggggagggacag

SEQ ID NO: 3873780 - DNA, 25 bp, Homo sapien
ggacagtgggggagggacagagagg

SEQ ID NO: 3873781 - DNA, 25 bp, Homo sapien
gggacagtgggggagggacagagag

SEQ ID NO: 3873782 - DNA, 25 bp, Homo sapien
aaaatataattacccagaaatgtgg

SEQ ID NO: 3873783 - DNA, 25 bp, Homo sapien
ccagaaatgtggaaccgagacaatg

SEQ ID NO: 3873784 - DNA, 25 bp, Homo sapien
cagaagaacaggatggcatggccct

SEQ ID NO: 3873785 - DNA, 25 bp, Homo sapien
tccacagcacgcacaagggccactg

SEQ ID NO: 3873786 - DNA, 25 bp, Homo sapien
ccctgctgcgtgttgcatattaaaa

SEQ ID NO: 3873787 - DNA, 25 bp, Homo sapien
gtctctgagacttggatttccatgg

SEQ ID NO: 3873788 - DNA, 25 bp, Homo sapien
ttgtgccctgctgcgtgttgcatat

SEQ ID NO: 3873789 - DNA, 25 bp, Homo sapien
tgagacttggatttccatgggaaat

SEQ ID NO: 3873790 - DNA, 25 bp, Homo sapien
tataggacaggacgaagatctctgt

SEQ ID NO: 3873791 - DNA, 25 bp, Homo sapien
gacaggacgaagatctctgtccact

SEQ ID NO: 3873792 - DNA, 25 bp, Homo sapien
tcagtaggtataggacaggacgaag

SEQ ID NO: 3873793 - DNA, 25 bp, Homo sapien
gtaggtataggacaggacgaagatc

SEQ ID NO: 3873794 - DNA, 25 bp, Homo sapien
agacagaatgcaagggcatctgaga

SEQ ID NO: 3873795 - DNA, 25 bp, Homo sapien
acgggcatgacactgtcttggatgg

SEQ ID NO: 3873796 - DNA, 25 bp, Homo sapien
ctggcacatcgcatccacctgcctc

SEQ ID NO: 3873797 - DNA, 25 bp, Homo sapien
cactgtcttggatgggccagggtca

SEQ ID NO: 3873798 - DNA, 25 bp, Homo sapien
atgggccagggtcacgtgcagccct

SEQ ID NO: 3873799 - DNA, 25 bp, Homo sapien
ggactgtgtcggcctctgcgtcact

SEQ ID NO: 3873800 - DNA, 25 bp, Homo sapien
cttcgaagctcggcggcagcagagc

SEQ ID NO: 3873801 - DNA, 25 bp, Homo sapien
cagcagagcggagcccgacaggact

SEQ ID NO: 3873802 - DNA, 25 bp, Homo sapien
cgccttgggagttccctccgcgaag

SEQ ID NO: 3873803 - DNA, 25 bp, Homo sapien
tcccacgtgccctagaagaggcatc

SEQ ID NO: 3873804 - DNA, 25 bp, Homo sapien
actgcccagctctagttgagagttg

SEQ ID NO: 3873805 - DNA, 25 bp, Homo sapien
tctgtgcgtcttggcaccctggtgg

SEQ ID NO: 3873806 - DNA, 25 bp, Homo sapien
gggagcatctgtgcgtcttggcacc

SEQ ID NO: 3873807 - DNA, 25 bp, Homo sapien
cttcgtccccattctttgatcgaca

SEQ ID NO: 3873808 - DNA, 25 bp, Homo sapien
ggctttctcactgttacctataaga

SEQ ID NO: 3873809 - DNA, 25 bp, Homo sapien
gatcgacacagttgaggctttctca

SEQ ID NO: 3873810 - DNA, 25 bp, Homo sapien
gaggctgtgcaagcccagattccat

SEQ ID NO: 3873811 - DNA, 25 bp, Homo sapien
ccctcggttgtttgaagaattcgcg

SEQ ID NO: 3873812 - DNA, 25 bp, Homo sapien
ccctcgacggatctgtttggtggtt

SEQ ID NO: 3873813 - DNA, 25 bp, Homo sapien
acgagagacgaatcgggaccgagta

SEQ ID NO: 3873814 - DNA, 25 bp, Homo sapien
tgccactttgactataacccgcctg

SEQ ID NO: 3873815 - DNA, 25 bp, Homo sapien
gtggcaccccgcattcgctgtgagg

SEQ ID NO: 3873816 - DNA, 25 bp, Homo sapien
tacattgcgacaccttcctgacgat

SEQ ID NO: 3873817 - DNA, 25 bp, Homo sapien
caacttgtaagcatgtccgtgtata

SEQ ID NO: 3873818 - DNA, 25 bp, Homo sapien
cgatcggccccaatccaagtaggat

SEQ ID NO: 3873819 - DNA, 25 bp, Homo sapien
gcctcgcagccgcactgacgaggag

SEQ ID NO: 3873820 - DNA, 25 bp, Homo sapien
tgacgaggagggaaacgcttatggg

SEQ ID NO: 3873821 - DNA, 25 bp, Homo sapien
ttatgggagcgagcgcgaggaggaa

SEQ ID NO: 3873822 - DNA, 25 bp, Homo sapien
ataagatgacttgggcgcctcgcag

SEQ ID NO: 3873823 - DNA, 25 bp, Homo sapien
gtcccaagaacgccaccagggagag

SEQ ID NO: 3873824 - DNA, 25 bp, Homo sapien
gcggctgccgcgtttccgcacccgc

SEQ ID NO: 3873825 - DNA, 25 bp, Homo sapien
tacccgtatggccagtaccagttcg

SEQ ID NO: 3873826 - DNA, 25 bp, Homo sapien
gcaccccgccttctacccgtatggc

SEQ ID NO: 3873827 - DNA, 25 bp, Homo sapien
cctacgccgcggagctgcccatctt

SEQ ID NO: 3873828 - DNA, 25 bp, Homo sapien
gagctgcccatcttcccgcagctgg

SEQ ID NO: 3873829 - DNA, 25 bp, Homo sapien
cttcctgccctacgccgcggagctg

SEQ ID NO: 3873830 - DNA, 25 bp, Homo sapien
agctgcccatcttcccgcagctggt

SEQ ID NO: 3873831 - DNA, 25 bp, Homo sapien
gcagtccgacgcagacaggtcgata

SEQ ID NO: 3873832 - DNA, 25 bp, Homo sapien
tctggaggttcatcccctgggctgt

SEQ ID NO: 3873833 - DNA, 25 bp, Homo sapien
caggtcgatagctggttaatgcaga

SEQ ID NO: 3873834 - DNA, 25 bp, Homo sapien
cgccggcgtgactgagtccctaaga

SEQ ID NO: 3873835 - DNA, 25 bp, Homo sapien
ttcattaacctgtaacccgagcgcg

SEQ ID NO: 3873836 - DNA, 25 bp, Homo sapien
cacagagcggagagaaattaacttc

SEQ ID NO: 3873837 - DNA, 25 bp, Homo sapien
cgtgtgcgatggacagacaccctct

SEQ ID NO: 3873838 - DNA, 25 bp, Homo sapien
tgactcccctcttgtgaagtgcgag

SEQ ID NO: 3873839 - DNA, 25 bp, Homo sapien
gagcgcgacggcctttgtggacaaa

SEQ ID NO: 3873840 - DNA, 25 bp, Homo sapien
caaatacgaattccaccctgtgcgg

SEQ ID NO: 3873841 - DNA, 25 bp, Homo sapien
tcttccgcgccaagagcgaagttgg

SEQ ID NO: 3873842 - DNA, 25 bp, Homo sapien
aagaaaatgcacagcgctggccgag

SEQ ID NO: 3873843 - DNA, 25 bp, Homo sapien
tattgaaaggcgttcctgggtcacg

SEQ ID NO: 3873844 - DNA, 25 bp, Homo sapien
ccaagattaacgaggagcgagcgga

SEQ ID NO: 3873845 - DNA, 25 bp, Homo sapien
tgagcgccttggaccttatcaggga

SEQ ID NO: 3873846 - DNA, 25 bp, Homo sapien
aatgtggctgtgtttgatcccgcga

SEQ ID NO: 3873847 - DNA, 25 bp, Homo sapien
tatacgctcctcaacagtcctagct

SEQ ID NO: 3873848 - DNA, 25 bp, Homo sapien
tattttaggtagtgtgcagtcttgg

SEQ ID NO: 3873849 - DNA, 25 bp, Homo sapien
tgtgcagtcttggatcagagaatta

SEQ ID NO: 3873850 - DNA, 25 bp, Homo sapien
ttttttatacgctcctcaacagtcc

SEQ ID NO: 3873851 - DNA, 25 bp, Homo sapien
tttggtaaataataataaatcaaca

SEQ ID NO: 3873852 - DNA, 25 bp, Homo sapien
tggtaaataataataaatcaacatt

SEQ ID NO: 3873853 - DNA, 25 bp, Homo sapien
taaataataataaatcaacattatg

SEQ ID NO: 3873854 - DNA, 25 bp, Homo sapien
tatttggtaaataataataaatcaa

SEQ ID NO: 3873855 - DNA, 25 bp, Homo sapien
gactgagtacagaaccaccaaacac

SEQ ID NO: 3873856 - DNA, 25 bp, Homo sapien
tagcccaatatatccggatggcccc

SEQ ID NO: 3873857 - DNA, 25 bp, Homo sapien
tgtaagttcaacagggcttcccaca

SEQ ID NO: 3873858 - DNA, 25 bp, Homo sapien
tccaggtctagtgacattagcaagt

SEQ ID NO: 3873859 - DNA, 25 bp, Homo sapien
gacacaggactagagaattcacttc

SEQ ID NO: 3873860 - DNA, 25 bp, Homo sapien
gccaacccttggctttgaacagcaa

SEQ ID NO: 3873861 - DNA, 25 bp, Homo sapien
attcacttcaagctaacccacatgg

SEQ ID NO: 3873862 - DNA, 25 bp, Homo sapien
catggttgctggcaagttgcaattc

SEQ ID NO: 3873863 - DNA, 25 bp, Homo sapien
ttccacggggactggttctctctcc

SEQ ID NO: 3873864 - DNA, 25 bp, Homo sapien
aattccacggggactggttctctct

SEQ ID NO: 3873865 - DNA, 25 bp, Homo sapien
tcaattccacggggactggttctct

SEQ ID NO: 3873866 - DNA, 25 bp, Homo sapien
ccacggggactggttctctctccct

SEQ ID NO: 3873867 - DNA, 25 bp, Homo sapien
cttgtgaccttcttttggtgtgggt

SEQ ID NO: 3873868 - DNA, 25 bp, Homo sapien
ccttcttttggtgtgggtgtctgtc

SEQ ID NO: 3873869 - DNA, 25 bp, Homo sapien
ttcttttggtgtgggtgtctgtcct

SEQ ID NO: 3873870 - DNA, 25 bp, Homo sapien
cttttggtgtgggtgtctgtcctct

SEQ ID NO: 3873871 - DNA, 25 bp, Homo sapien
ccagtaaggtatgagccggcttgac

SEQ ID NO: 3873872 - DNA, 25 bp, Homo sapien
ctttgtgtggagacgccagtggcat

SEQ ID NO: 3873873 - DNA, 25 bp, Homo sapien
tctgactagtcatggccagtaaggt

SEQ ID NO: 3873874 - DNA, 25 bp, Homo sapien
cacgtggagggtcgtaattccttgt

SEQ ID NO: 3873875 - DNA, 25 bp, Homo sapien
tcttctgggatatttcgccatcacc

SEQ ID NO: 3873876 - DNA, 25 bp, Homo sapien
gggatatttcgccatcaccagctgg

SEQ ID NO: 3873877 - DNA, 25 bp, Homo sapien
gaaacagcacccacggccttgtagg

SEQ ID NO: 3873878 - DNA, 25 bp, Homo sapien
ttggcagttgaaacagcacccacgg

SEQ ID NO: 3873879 - DNA, 25 bp, Homo sapien
ctgcccgtaagggactggcttctgg

SEQ ID NO: 3873880 - DNA, 25 bp, Homo sapien
tctgcctaaggaaggctcctccaga

SEQ ID NO: 3873881 - DNA, 25 bp, Homo sapien
agagctcagagtgtgtcgccccact

SEQ ID NO: 3873882 - DNA, 25 bp, Homo sapien
ggtgacagtccctgcccgtaaggga

SEQ ID NO: 3873883 - DNA, 25 bp, Homo sapien
tgtttgttcagttttcacacccaga

SEQ ID NO: 3873884 - DNA, 25 bp, Homo sapien
tcagttttcacacccagaaggcagc

SEQ ID NO: 3873885 - DNA, 25 bp, Homo sapien
tgttcagttttcacacccagaaggc

SEQ ID NO: 3873886 - DNA, 25 bp, Homo sapien
agcaggttggcacccaccacactga

SEQ ID NO: 3873887 - DNA, 25 bp, Homo sapien
gaaagcaacggtcacagcagtctgc

SEQ ID NO: 3873888 - DNA, 25 bp, Homo sapien
aaagcaacggtcacagcagtctgca

SEQ ID NO: 3873889 - DNA, 25 bp, Homo sapien
ctgcagaaagcaacggtcacagcag

SEQ ID NO: 3873890 - DNA, 25 bp, Homo sapien
cagaaagcaacggtcacagcagtct

SEQ ID NO: 3873891 - DNA, 25 bp, Homo sapien
gttcatccctggaggatgtgcagca

SEQ ID NO: 3873892 - DNA, 25 bp, Homo sapien
cagcaggagactagctgccctctcc

SEQ ID NO: 3873893 - DNA, 25 bp, Homo sapien
tgcacccacatagccataccaggaa

SEQ ID NO: 3873894 - DNA, 25 bp, Homo sapien
gaagagccagctagttcatccctgg

SEQ ID NO: 3873895 - DNA, 25 bp, Homo sapien
ctgcctttattttctggctctagga

SEQ ID NO: 3873896 - DNA, 25 bp, Homo sapien
ggactttgccaagcctcattctgtc

SEQ ID NO: 3873897 - DNA, 25 bp, Homo sapien
taggactttgccaagcctcattctg

SEQ ID NO: 3873898 - DNA, 25 bp, Homo sapien
ctgccgatcgccatttaaaaagctt

SEQ ID NO: 3873899 - DNA, 25 bp, Homo sapien
tgtcccgcaagaggcggattctggt

SEQ ID NO: 3873900 - DNA, 25 bp, Homo sapien
gattctggtgcaatccagccccagg

SEQ ID NO: 3873901 - DNA, 25 bp, Homo sapien
gctgatgtagttcctattccagagg

SEQ ID NO: 3873902 - DNA, 25 bp, Homo sapien
tcaatttcaacatcattgcgaggcc

SEQ ID NO: 3873903 - DNA, 25 bp, Homo sapien
agcctggtaaagttccagcttctcc

SEQ ID NO: 3873904 - DNA, 25 bp, Homo sapien
atcccaaggcaagtgggaaaagcct

SEQ ID NO: 3873905 - DNA, 25 bp, Homo sapien
tgggaagatgggcagaaaatcccaa

SEQ ID NO: 3873906 - DNA, 25 bp, Homo sapien
aaagcctggtaaagttccagcttct

SEQ ID NO: 3873907 - DNA, 25 bp, Homo sapien
gcctggaagttctgacagcgccctg

SEQ ID NO: 3873908 - DNA, 25 bp, Homo sapien
tgtcatctaaatggtccgtcccctt

SEQ ID NO: 3873909 - DNA, 25 bp, Homo sapien
atgtgaccgttaatagtccccgccg

SEQ ID NO: 3873910 - DNA, 25 bp, Homo sapien
cagcgccctgaagcccatttgtcat

SEQ ID NO: 3873911 - DNA, 25 bp, Homo sapien
acaattaatacctcctcccaggcag

SEQ ID NO: 3873912 - DNA, 25 bp, Homo sapien
ctgtgtacttccgagcaggcggctg

SEQ ID NO: 3873913 - DNA, 25 bp, Homo sapien
gagtggctctcgtttgttatctggg

SEQ ID NO: 3873914 - DNA, 25 bp, Homo sapien
cgagccgtcactcaggatccgaggg

SEQ ID NO: 3873915 - DNA, 25 bp, Homo sapien
acggaggcaacggagcagtgtcatc

SEQ ID NO: 3873916 - DNA, 25 bp, Homo sapien
aggaaacggaggcaacggagcagtg

SEQ ID NO: 3873917 - DNA, 25 bp, Homo sapien
gggcaccgcaaacgcctgatctggg

SEQ ID NO: 3873918 - DNA, 25 bp, Homo sapien
ttgcagacctccagaaggggcaccg

SEQ ID NO: 3873919 - DNA, 25 bp, Homo sapien
gagacaaataagtgaaggtcccacc

SEQ ID NO: 3873920 - DNA, 25 bp, Homo sapien
cttgggcagttggtggtgtcagcgc

SEQ ID NO: 3873921 - DNA, 25 bp, Homo sapien
tgtacccacaagacagagccacatc

SEQ ID NO: 3873922 - DNA, 25 bp, Homo sapien
aaatcatcgtgggttcttgggcagt

SEQ ID NO: 3873923 - DNA, 25 bp, Homo sapien
taagggtaacgcgatcggatgagaa

SEQ ID NO: 3873924 - DNA, 25 bp, Homo sapien
gagaaggcggcaaatgggcaaccac

SEQ ID NO: 3873925 - DNA, 25 bp, Homo sapien
tcctgccagggcgatggttattaag

SEQ ID NO: 3873926 - DNA, 25 bp, Homo sapien
atgagaaggcggcaaatgggcaacc

SEQ ID NO: 3873927 - DNA, 25 bp, Homo sapien
cgcaggcacgcaggagacggaattc

SEQ ID NO: 3873928 - DNA, 25 bp, Homo sapien
acacgcaggcacgcaggagacggaa

SEQ ID NO: 3873929 - DNA, 25 bp, Homo sapien
cacgcaggcacgcaggagacggaat

SEQ ID NO: 3873930 - DNA, 25 bp, Homo sapien
acgcaggcacgcaggagacggaatt

SEQ ID NO: 3873931 - DNA, 25 bp, Homo sapien
ggtccgagcgggaatataaatggat

SEQ ID NO: 3873932 - DNA, 25 bp, Homo sapien
tcattaggatcacttgctcggcaca

SEQ ID NO: 3873933 - DNA, 25 bp, Homo sapien
gtcaggaattttgatcccaaaggtc

SEQ ID NO: 3873934 - DNA, 25 bp, Homo sapien
tttggataagctggaagccgggtct

SEQ ID NO: 3873935 - DNA, 25 bp, Homo sapien
cagaccctgtttctggataagttta

SEQ ID NO: 3873936 - DNA, 25 bp, Homo sapien
ccctgtttctggataagtttaatga

SEQ ID NO: 3873937 - DNA, 25 bp, Homo sapien
tgaaagtggtactttccgcaaggtc

SEQ ID NO: 3873938 - DNA, 25 bp, Homo sapien
atgaaagtggtactttccgcaaggt

SEQ ID NO: 3873939 - DNA, 25 bp, Homo sapien
gatccattcactaggataaggtgca

SEQ ID NO: 3873940 - DNA, 25 bp, Homo sapien
tgtgatccattcactaggataaggt

SEQ ID NO: 3873941 - DNA, 25 bp, Homo sapien
ttttgagacatgtcaaggatagtgt

SEQ ID NO: 3873942 - DNA, 25 bp, Homo sapien
tcaaggatagtgtagttgctttcat

SEQ ID NO: 3873943 - DNA, 25 bp, Homo sapien
taaatgattcccaagataaggcagg

SEQ ID NO: 3873944 - DNA, 25 bp, Homo sapien
cttaaatgattcccaagataaggca

SEQ ID NO: 3873945 - DNA, 25 bp, Homo sapien
aaatgattcccaagataaggcaggc

SEQ ID NO: 3873946 - DNA, 25 bp, Homo sapien
atgattcccaagataaggcaggcat

SEQ ID NO: 3873947 - DNA, 25 bp, Homo sapien
gatgctggtcacactcaacatcctc

SEQ ID NO: 3873948 - DNA, 25 bp, Homo sapien
aagcatgatgctggtcacactcaac

SEQ ID NO: 3873949 - DNA, 25 bp, Homo sapien
gcatgatgctggtcacactcaacat

SEQ ID NO: 3873950 - DNA, 25 bp, Homo sapien
acaaagcatgatgctggtcacactc

SEQ ID NO: 3873951 - DNA, 25 bp, Homo sapien
catttttctccaacagagagagcca

SEQ ID NO: 3873952 - DNA, 25 bp, Homo sapien
gatgggacaaacatgcccatggcct

SEQ ID NO: 3873953 - DNA, 25 bp, Homo sapien
tcagccagtgtcatcgatgggacaa

SEQ ID NO: 3873954 - DNA, 25 bp, Homo sapien
gctaaataacgcagggcacttgccc

SEQ ID NO: 3873955 - DNA, 25 bp, Homo sapien
gactgtttgatcaatgtctccccag

SEQ ID NO: 3873956 - DNA, 25 bp, Homo sapien
aggcttcgtttctgtgtccccgtca

SEQ ID NO: 3873957 - DNA, 25 bp, Homo sapien
acgctctgtgattaatgtaaccaaa

SEQ ID NO: 3873958 - DNA, 25 bp, Homo sapien
tgctcaaagtccaaaaacgctctgt

SEQ ID NO: 3873959 - DNA, 25 bp, Homo sapien
tcaacagctccagatggaccaatct

SEQ ID NO: 3873960 - DNA, 25 bp, Homo sapien
tgtcttaggtaagattgtatcaaca

SEQ ID NO: 3873961 - DNA, 25 bp, Homo sapien
tatctttacaacctattgtcttagg

SEQ ID NO: 3873962 - DNA, 25 bp, Homo sapien
tctccatgggtattggcaaggctgg

SEQ ID NO: 3873963 - DNA, 25 bp, Homo sapien
aatagcccattggcccattcctcag

SEQ ID NO: 3873964 - DNA, 25 bp, Homo sapien
cttcccaaggatgcccgatgctagg

SEQ ID NO: 3873965 - DNA, 25 bp, Homo sapien
gatgctcagatgctacttggagtgt

SEQ ID NO: 3873966 - DNA, 25 bp, Homo sapien
taggtcttgatctcatccttaagtc

SEQ ID NO: 3873967 - DNA, 25 bp, Homo sapien
gatctttgaatcactggctcgagcc

SEQ ID NO: 3873968 - DNA, 25 bp, Homo sapien
tgatctttgaatcactggctcgagc

SEQ ID NO: 3873969 - DNA, 25 bp, Homo sapien
attgatctttgaatcactggctcga

SEQ ID NO: 3873970 - DNA, 25 bp, Homo sapien
atctttgaatcactggctcgagccc

SEQ ID NO: 3873971 - DNA, 25 bp, Homo sapien
ggaaaggagccattctcagctcccc

SEQ ID NO: 3873972 - DNA, 25 bp, Homo sapien
accagccaggaagatcccagggagg

SEQ ID NO: 3873973 - DNA, 25 bp, Homo sapien
tctgaaggccccaaaggagagacca

SEQ ID NO: 3873974 - DNA, 25 bp, Homo sapien
ttgacaccaaacagcctcagagcaa

SEQ ID NO: 3873975 - DNA, 25 bp, Homo sapien
gctgggcagatgacgctgctcctct

SEQ ID NO: 3873976 - DNA, 25 bp, Homo sapien
cagatgctgggcagatgacgctgct

SEQ ID NO: 3873977 - DNA, 25 bp, Homo sapien
ccagatgctgggcagatgacgctgc

SEQ ID NO: 3873978 - DNA, 25 bp, Homo sapien
gatgctgggcagatgacgctgctcc

SEQ ID NO: 3873979 - DNA, 25 bp, Homo sapien
cagatactgccccatagtagatact

SEQ ID NO: 3873980 - DNA, 25 bp, Homo sapien
tatgagttatcacagatactgcccc

SEQ ID NO: 3873981 - DNA, 25 bp, Homo sapien
atctccaggagagaggcgatcagcc

SEQ ID NO: 3873982 - DNA, 25 bp, Homo sapien
atcagccccggttgggtcagggctc

SEQ ID NO: 3873983 - DNA, 25 bp, Homo sapien
cctctgcaatctggtccatgtggca

SEQ ID NO: 3873984 - DNA, 25 bp, Homo sapien
cgggcccgctgacagtctaccccat

SEQ ID NO: 3873985 - DNA, 25 bp, Homo sapien
agtctaccccatcagggcctggctt

SEQ ID NO: 3873986 - DNA, 25 bp, Homo sapien
actgtgctgagctctcgggcccgct

SEQ ID NO: 3873987 - DNA, 25 bp, Homo sapien
ggcctggcttcggaactggcaccaa

SEQ ID NO: 3873988 - DNA, 25 bp, Homo sapien
taggtgagttactgctggactgagc

SEQ ID NO: 3873989 - DNA, 25 bp, Homo sapien
tcctggagggatggttctaaaagct

SEQ ID NO: 3873990 - DNA, 25 bp, Homo sapien
gagctccagactatcacaccaggct

SEQ ID NO: 3873991 - DNA, 25 bp, Homo sapien
tgagtgtcgcacagtgttgccgcct

SEQ ID NO: 3873992 - DNA, 25 bp, Homo sapien
cctggaaaccgatcataaatctgag

SEQ ID NO: 3873993 - DNA, 25 bp, Homo sapien
cgtaggaaaccgagacgaatgtgtc

SEQ ID NO: 3873994 - DNA, 25 bp, Homo sapien
taaatctgaggcgtgtatcacaggt

SEQ ID NO: 3873995 - DNA, 25 bp, Homo sapien
cagcgaggctgttcggctggtccct

SEQ ID NO: 3873996 - DNA, 25 bp, Homo sapien
ataacacgtgtcactgtcagcccag

SEQ ID NO: 3873997 - DNA, 25 bp, Homo sapien
gcctccggtgcccacaatagcaaaa

SEQ ID NO: 3873998 - DNA, 25 bp, Homo sapien
aaaataccagtgtaaggagagcctc

SEQ ID NO: 3873999 - DNA, 25 bp, Homo sapien
ggccctgctggcaacaccttgaaaa

SEQ ID NO: 3874000 - DNA, 25 bp, Homo sapien
atggacagccccatgtgcgacacct

SEQ ID NO: 3874001 - DNA, 25 bp, Homo sapien
caggctggactctaggtgatggaca

SEQ ID NO: 3874002 - DNA, 25 bp, Homo sapien
gccccaggctgagatgtactgccaa

SEQ ID NO: 3874003 - DNA, 25 bp, Homo sapien
gacgtggaccaaggctcgtcttgct

SEQ ID NO: 3874004 - DNA, 25 bp, Homo sapien
tttgcttaaggagaaatcataacag

SEQ ID NO: 3874005 - DNA, 25 bp, Homo sapien
tgggtcagcctcagtcccggatcgg

SEQ ID NO: 3874006 - DNA, 25 bp, Homo sapien
cagatcgggttcgatttcttctttg

SEQ ID NO: 3874007 - DNA, 25 bp, Homo sapien
tcccggatcggcgtcttcattaaag

SEQ ID NO: 3874008 - DNA, 25 bp, Homo sapien
caagaaaggtagcaactggtgagga

SEQ ID NO: 3874009 - DNA, 25 bp, Homo sapien
tccctctgggttctatggaagctta

SEQ ID NO: 3874010 - DNA, 25 bp, Homo sapien
gaaaggtagcaactggtgaggagag

SEQ ID NO: 3874011 - DNA, 25 bp, Homo sapien
ctatggaagcttaggagaacatttc

SEQ ID NO: 3874012 - DNA, 25 bp, Homo sapien
ttggtgaagcaccagcttcagtctg

SEQ ID NO: 3874013 - DNA, 25 bp, Homo sapien
tgcgtctccctggtacttttcccaa

SEQ ID NO: 3874014 - DNA, 25 bp, Homo sapien
tagtgagaggttttgtgcgtctccc

SEQ ID NO: 3874015 - DNA, 25 bp, Homo sapien
ttccccccaaggtagcgatgttcat

SEQ ID NO: 3874016 - DNA, 25 bp, Homo sapien
tcatgtaaatggatgtcgccggcct

SEQ ID NO: 3874017 - DNA, 25 bp, Homo sapien
gagcttagcttgcaacaccaggcag

SEQ ID NO: 3874018 - DNA, 25 bp, Homo sapien
aaagagcacaatgggtgtacagcag

SEQ ID NO: 3874019 - DNA, 25 bp, Homo sapien
tatagagatcattgcggagccgtgc

SEQ ID NO: 3874020 - DNA, 25 bp, Homo sapien
caggttcctcgaaggaagtgctttt

SEQ ID NO: 3874021 - DNA, 25 bp, Homo sapien
catcccctgtttgccggagaatcag

SEQ ID NO: 3874022 - DNA, 25 bp, Homo sapien
gcagcatcccctgtttgccggagaa

SEQ ID NO: 3874023 - DNA, 25 bp, Homo sapien
gggcagcatcccctgtttgccggag

SEQ ID NO: 3874024 - DNA, 25 bp, Homo sapien
ggtttgccacgctcaacagaatctg

SEQ ID NO: 3874025 - DNA, 25 bp, Homo sapien
cagaatctgcattataacttatgca

SEQ ID NO: 3874026 - DNA, 25 bp, Homo sapien
ttcgtgcaactttatggaagccatc

SEQ ID NO: 3874027 - DNA, 25 bp, Homo sapien
gaaatgttttcgtgcaactttatgg

SEQ ID NO: 3874028 - DNA, 25 bp, Homo sapien
ccttattctcagtggagtcatccat

SEQ ID NO: 3874029 - DNA, 25 bp, Homo sapien
ctctggagcccagcatcttatcctt

SEQ ID NO: 3874030 - DNA, 25 bp, Homo sapien
ggagcccagcatcttatccttattc

SEQ ID NO: 3874031 - DNA, 25 bp, Homo sapien
agcatcttatccttattctcagtgg

SEQ ID NO: 3874032 - DNA, 25 bp, Homo sapien
tgggatagagggatgacgtgaaaac

SEQ ID NO: 3874033 - DNA, 25 bp, Homo sapien
atagagggatgacgtgaaaactggc

SEQ ID NO: 3874034 - DNA, 25 bp, Homo sapien
aaaactggcggggacactctggtgt

SEQ ID NO: 3874035 - DNA, 25 bp, Homo sapien
ctggtgtttgagttaagtgctttac

SEQ ID NO: 3874036 - DNA, 25 bp, Homo sapien
ctggtacagattgagatcgaaatgg

SEQ ID NO: 3874037 - DNA, 25 bp, Homo sapien
tagggtgggagctgatacccagatt

SEQ ID NO: 3874038 - DNA, 25 bp, Homo sapien
gaacactggtacagattgagatcga

SEQ ID NO: 3874039 - DNA, 25 bp, Homo sapien
agctgatacccagatttcgctggcc

SEQ ID NO: 3874040 - DNA, 25 bp, Homo sapien
gtgagtatagtcacattatgaagag

SEQ ID NO: 3874041 - DNA, 25 bp, Homo sapien
gggtaatgagcgagaaagccacagc

SEQ ID NO: 3874042 - DNA, 25 bp, Homo sapien
gggtattacttgtgagtatagtcac

SEQ ID NO: 3874043 - DNA, 25 bp, Homo sapien
gaatactggttccaagtgggtccca

SEQ ID NO: 3874044 - DNA, 25 bp, Homo sapien
ggcagccttgtagatacagcttcaa

SEQ ID NO: 3874045 - DNA, 25 bp, Homo sapien
ccttccaaagccgtggcagaaggtg

SEQ ID NO: 3874046 - DNA, 25 bp, Homo sapien
ccctagaaataacattggcagcctt

SEQ ID NO: 3874047 - DNA, 25 bp, Homo sapien
tacgatgtcattagaccctagaaat

SEQ ID NO: 3874048 - DNA, 25 bp, Homo sapien
ttttgttagtttcaccacggtcatg

SEQ ID NO: 3874049 - DNA, 25 bp, Homo sapien
cagtaggcaaggctgcaagtaagca

SEQ ID NO: 3874050 - DNA, 25 bp, Homo sapien
ggtgtttgccacgatagcctctctg

SEQ ID NO: 3874051 - DNA, 25 bp, Homo sapien
tttctgttggatccaagggattcac

SEQ ID NO: 3874052 - DNA, 25 bp, Homo sapien
acttggctacctattgagaaggtca

SEQ ID NO: 3874053 - DNA, 25 bp, Homo sapien
acctattgagaaggtcaggtagaac

SEQ ID NO: 3874054 - DNA, 25 bp, Homo sapien
ttaaaacttggctacctattgagaa

SEQ ID NO: 3874055 - DNA, 25 bp, Homo sapien
ggctacctattgagaaggtcaggta

SEQ ID NO: 3874056 - DNA, 25 bp, Homo sapien
tgacgctgcctctcatctgacagct

SEQ ID NO: 3874057 - DNA, 25 bp, Homo sapien
cggtgacgctgcctctcatctgaca

SEQ ID NO: 3874058 - DNA, 25 bp, Homo sapien
ttccggtgacgctgcctctcatctg

SEQ ID NO: 3874059 - DNA, 25 bp, Homo sapien
ctttattccggtgacgctgcctctc

SEQ ID NO: 3874060 - DNA, 25 bp, Homo sapien
tctgtctcattaccacacatctgcc

SEQ ID NO: 3874061 - DNA, 25 bp, Homo sapien
ttctgtctcattaccacacatctgc

SEQ ID NO: 3874062 - DNA, 25 bp, Homo sapien
gtctcattaccacacatctgcccac

SEQ ID NO: 3874063 - DNA, 25 bp, Homo sapien
tgtctcattaccacacatctgccca

SEQ ID NO: 3874064 - DNA, 25 bp, Homo sapien
tagttatgtcgaaatgtgactgatc

SEQ ID NO: 3874065 - DNA, 25 bp, Homo sapien
atgtgactgatcacctaggggttgg

SEQ ID NO: 3874066 - DNA, 25 bp, Homo sapien
tgacatctagttatgtcgaaatgtg

SEQ ID NO: 3874067 - DNA, 25 bp, Homo sapien
tcttttgacatctagttatgtcgaa

SEQ ID NO: 3874068 - DNA, 25 bp, Homo sapien
tccatatggcccatggaaatggccc

SEQ ID NO: 3874069 - DNA, 25 bp, Homo sapien
acggctctctctttgtgcggcgctg

SEQ ID NO: 3874070 - DNA, 25 bp, Homo sapien
ggtttcctcggcactcaattgctct

SEQ ID NO: 3874071 - DNA, 25 bp, Homo sapien
cccacatatggcagttaaggtcact

SEQ ID NO: 3874072 - DNA, 25 bp, Homo sapien
ttggagcgggctcgagcctccacaa

SEQ ID NO: 3874073 - DNA, 25 bp, Homo sapien
cccgcgcacaaggaaaacattgatt

SEQ ID NO: 3874074 - DNA, 25 bp, Homo sapien
taaaccaagcaggagcctagaaaac

SEQ ID NO: 3874075 - DNA, 25 bp, Homo sapien
cacaagcacggaacggccttcttta

SEQ ID NO: 3874076 - DNA, 25 bp, Homo sapien
tgacaaaggcgcgttgctcgagcca

SEQ ID NO: 3874077 - DNA, 25 bp, Homo sapien
actgggaagcccaaaccatcaagcc

SEQ ID NO: 3874078 - DNA, 25 bp, Homo sapien
ctcgaatatgggaagatctgtggga

SEQ ID NO: 3874079 - DNA, 25 bp, Homo sapien
cattactaataaggctcgaatatgg

SEQ ID NO: 3874080 - DNA, 25 bp, Homo sapien
gaagagccaaataacagcaaggtgt

SEQ ID NO: 3874081 - DNA, 25 bp, Homo sapien
tgggatagtcatgaatctcggcagg

SEQ ID NO: 3874082 - DNA, 25 bp, Homo sapien
catgaatctcggcagggatgaggta

SEQ ID NO: 3874083 - DNA, 25 bp, Homo sapien
agcaaggtgtggcttgggatagtca

SEQ ID NO: 3874084 - DNA, 25 bp, Homo sapien
ctcctgggccggaatggagctcgca

SEQ ID NO: 3874085 - DNA, 25 bp, Homo sapien
tgaatcatctgggaatctgccattg

SEQ ID NO: 3874086 - DNA, 25 bp, Homo sapien
aataccacgtcaggagaatccaaag

SEQ ID NO: 3874087 - DNA, 25 bp, Homo sapien
gagctcgcagggcaaggaataccac

SEQ ID NO: 3874088 - DNA, 25 bp, Homo sapien
aagtttcaaccgctgctccaagggc

SEQ ID NO: 3874089 - DNA, 25 bp, Homo sapien
tcaagtttcaaccgctgctccaagg

SEQ ID NO: 3874090 - DNA, 25 bp, Homo sapien
agtttcaaccgctgctccaagggca

SEQ ID NO: 3874091 - DNA, 25 bp, Homo sapien
tttcaaccgctgctccaagggcaag

SEQ ID NO: 3874092 - DNA, 25 bp, Homo sapien
tgtgcacccatctgtttcatctcta

SEQ ID NO: 3874093 - DNA, 25 bp, Homo sapien
cacccatctgtttcatctctaatat

SEQ ID NO: 3874094 - DNA, 25 bp, Homo sapien
gtgcacccatctgtttcatctctaa

SEQ ID NO: 3874095 - DNA, 25 bp, Homo sapien
catctgtttcatctctaatatccat

SEQ ID NO: 3874096 - DNA, 25 bp, Homo sapien
cctgctgtttctgaggggtcactgg

SEQ ID NO: 3874097 - DNA, 25 bp, Homo sapien
aaaagccagtcagttgtggagcgca

SEQ ID NO: 3874098 - DNA, 25 bp, Homo sapien
agctgccctacattttccactgatg

SEQ ID NO: 3874099 - DNA, 25 bp, Homo sapien
atctgacagctgccctacattttcc

SEQ ID NO: 3874100 - DNA, 25 bp, Homo sapien
tacatagaatctagtgtctcagtta

SEQ ID NO: 3874101 - DNA, 25 bp, Homo sapien
gtctcagttagagccccagtcttag

SEQ ID NO: 3874102 - DNA, 25 bp, Homo sapien
aatctagtgtctcagttagagcccc

SEQ ID NO: 3874103 - DNA, 25 bp, Homo sapien
gagccccagtcttagaagcactcac

SEQ ID NO: 3874104 - DNA, 25 bp, Homo sapien
agagtggtatgttgacaggtacctc

SEQ ID NO: 3874105 - DNA, 25 bp, Homo sapien
cacctgcatagtgaagggatggaca

SEQ ID NO: 3874106 - DNA, 25 bp, Homo sapien
ccttccccacctgcatagtgaaggg

SEQ ID NO: 3874107 - DNA, 25 bp, Homo sapien
tggacaggagagtggtatgttgaca

SEQ ID NO: 3874108 - DNA, 25 bp, Homo sapien
tttatcatgtgaattccgcagttct

SEQ ID NO: 3874109 - DNA, 25 bp, Homo sapien
atgtgaattccgcagttctttgccc

SEQ ID NO: 3874110 - DNA, 25 bp, Homo sapien
aattagcaaacaataatttggataa

SEQ ID NO: 3874111 - DNA, 25 bp, Homo sapien
gaattccgcagttctttgcccaatg

SEQ ID NO: 3874112 - DNA, 25 bp, Homo sapien
gaaaggtttccagcggcttttcatg

SEQ ID NO: 3874113 - DNA, 25 bp, Homo sapien
ggtttccagcggcttttcatgtgca

SEQ ID NO: 3874114 - DNA, 25 bp, Homo sapien
gagctgagaaaggtttccagcggct

SEQ ID NO: 3874115 - DNA, 25 bp, Homo sapien
tgaggaccacaacatctgaacagct

SEQ ID NO: 3874116 - DNA, 25 bp, Homo sapien
gataactttgttgcatctgcccaga

SEQ ID NO: 3874117 - DNA, 25 bp, Homo sapien
agatggcccgtggaactgttctaca

SEQ ID NO: 3874118 - DNA, 25 bp, Homo sapien
tcatcgattcctttgatcgctggca

SEQ ID NO: 3874119 - DNA, 25 bp, Homo sapien
tgttctacatcatcgattcctttga

SEQ ID NO: 3874120 - DNA, 25 bp, Homo sapien
taatctaaaacggaggccaagctcc

SEQ ID NO: 3874121 - DNA, 25 bp, Homo sapien
gaaccaagttataaggatttgccgc

SEQ ID NO: 3874122 - DNA, 25 bp, Homo sapien
ggatagtttccgatagaacgggaga

SEQ ID NO: 3874123 - DNA, 25 bp, Homo sapien
aacccgcctgttgtttgtggatcta

SEQ ID NO: 3874124 - DNA, 25 bp, Homo sapien
gcattagaaggaccgaggccagcca

SEQ ID NO: 3874125 - DNA, 25 bp, Homo sapien
gttcctttctcctgggcggattctg

SEQ ID NO: 3874126 - DNA, 25 bp, Homo sapien
ctgcattagaaggaccgaggccagc

SEQ ID NO: 3874127 - DNA, 25 bp, Homo sapien
ctgggcggattctgcattagaagga

SEQ ID NO: 3874128 - DNA, 25 bp, Homo sapien
gcttctgtgggcctatgtagcgtaa

SEQ ID NO: 3874129 - DNA, 25 bp, Homo sapien
tgtctccgagctcttagcaccacca

SEQ ID NO: 3874130 - DNA, 25 bp, Homo sapien
taattgaggttgtcacatctcttgt

SEQ ID NO: 3874131 - DNA, 25 bp, Homo sapien
ctgtgggcctatgtagcgtaaaaaa

SEQ ID NO: 3874132 - DNA, 25 bp, Homo sapien
tctttcttgtgcagatagaaagttc

SEQ ID NO: 3874133 - DNA, 25 bp, Homo sapien
ggcaggacacgggacgcgtttggag

SEQ ID NO: 3874134 - DNA, 25 bp, Homo sapien
gcgtttggaggccagtaatggagaa

SEQ ID NO: 3874135 - DNA, 25 bp, Homo sapien
tcatttcaatccgagagtggctggg

SEQ ID NO: 3874136 - DNA, 25 bp, Homo sapien
gaatgtgtgatcatagacccacctt

SEQ ID NO: 3874137 - DNA, 25 bp, Homo sapien
ccaagactcacaccactatgtttaa

SEQ ID NO: 3874138 - DNA, 25 bp, Homo sapien
tagaaagcctatttaagcaccgatt

SEQ ID NO: 3874139 - DNA, 25 bp, Homo sapien
tccccgcactgccttgagcaataag

SEQ ID NO: 3874140 - DNA, 25 bp, Homo sapien
ttcgttcggcgcaacagcatttaat

SEQ ID NO: 3874141 - DNA, 25 bp, Homo sapien
taatcgaatcatgctttcccacttc

SEQ ID NO: 3874142 - DNA, 25 bp, Homo sapien
gattccagaatctatactaatcgaa

SEQ ID NO: 3874143 - DNA, 25 bp, Homo sapien
ccacttcagccgagagcagttcgtt

SEQ ID NO: 3874144 - DNA, 25 bp, Homo sapien
aaattgtgggatcttaatgcaagcc

SEQ ID NO: 3874145 - DNA, 25 bp, Homo sapien
gtcaatatccttcgtgatggcccag

SEQ ID NO: 3874146 - DNA, 25 bp, Homo sapien
tttgttctagaacaatagtagcagc

SEQ ID NO: 3874147 - DNA, 25 bp, Homo sapien
catgatgttttcaattgtgatggca

SEQ ID NO: 3874148 - DNA, 25 bp, Homo sapien
gtccctggctgaaatgaattagata

SEQ ID NO: 3874149 - DNA, 25 bp, Homo sapien
gaggactacgttctctttccatagg

SEQ ID NO: 3874150 - DNA, 25 bp, Homo sapien
tgtggtaattaaagtagcctaggtc

SEQ ID NO: 3874151 - DNA, 25 bp, Homo sapien
tagcctatcctatttgttagaggac

SEQ ID NO: 3874152 - DNA, 25 bp, Homo sapien
ctggtgggcacaggcattataactt

SEQ ID NO: 3874153 - DNA, 25 bp, Homo sapien
tgggcacaggcattataacttaatt

SEQ ID NO: 3874154 - DNA, 25 bp, Homo sapien
tatggttaaagcagcttgttttaat

SEQ ID NO: 3874155 - DNA, 25 bp, Homo sapien
tgttttaattgagtgcaaaaaggtg

SEQ ID NO: 3874156 - DNA, 25 bp, Homo sapien
ctgatctaagccactggtggcttcc

SEQ ID NO: 3874157 - DNA, 25 bp, Homo sapien
tggagagacgcacaagttggagtct

SEQ ID NO: 3874158 - DNA, 25 bp, Homo sapien
gtccgctgctgacgtttggccgtca

SEQ ID NO: 3874159 - DNA, 25 bp, Homo sapien
acgtttggccgtcacagctctgatc

SEQ ID NO: 3874160 - DNA, 25 bp, Homo sapien
gaaccaagaactgagacatctgctc

SEQ ID NO: 3874161 - DNA, 25 bp, Homo sapien
ttcagagaagtaacccattgtcagg

SEQ ID NO: 3874162 - DNA, 25 bp, Homo sapien
ccattgtcaggtttactagaacttc

SEQ ID NO: 3874163 - DNA, 25 bp, Homo sapien
tcttgggctcgaggttggactgcca

SEQ ID NO: 3874164 - DNA, 25 bp, Homo sapien
caagtttcccacatctctctgatat

SEQ ID NO: 3874165 - DNA, 25 bp, Homo sapien
gctccagagtatggcctcttagagt

SEQ ID NO: 3874166 - DNA, 25 bp, Homo sapien
tatggcctcttagagtcaagtttcc

SEQ ID NO: 3874167 - DNA, 25 bp, Homo sapien
tctttattaatgtccggctccagag

SEQ ID NO: 3874168 - DNA, 25 bp, Homo sapien
tgagcaccgttttctgcctggtttt

SEQ ID NO: 3874169 - DNA, 25 bp, Homo sapien
gaattgtcctagatctacataaaca

SEQ ID NO: 3874170 - DNA, 25 bp, Homo sapien
ggtttttgaattgtcctagatctac

SEQ ID NO: 3874171 - DNA, 25 bp, Homo sapien
ggccaccgtgagcaccgttttctgc

SEQ ID NO: 3874172 - DNA, 25 bp, Homo sapien
gatgggcccctgtgacaatggccag

SEQ ID NO: 3874173 - DNA, 25 bp, Homo sapien
tgtgacaatggccagccaagtggga

SEQ ID NO: 3874174 - DNA, 25 bp, Homo sapien
gggcttgatgggcccctgtgacaat

SEQ ID NO: 3874175 - DNA, 25 bp, Homo sapien
cttgatgggcccctgtgacaatggc

SEQ ID NO: 3874176 - DNA, 25 bp, Homo sapien
cagaataggttaaaaggtgccgaag

SEQ ID NO: 3874177 - DNA, 25 bp, Homo sapien
tttggcccgggaaaccacatgttga

SEQ ID NO: 3874178 - DNA, 25 bp, Homo sapien
tgagaatcagacaccaaacaaagcg

SEQ ID NO: 3874179 - DNA, 25 bp, Homo sapien
tcagcaacaggcagattatcggtta

SEQ ID NO: 3874180 - DNA, 25 bp, Homo sapien
tgagttctagaaagagtcatccaag

SEQ ID NO: 3874181 - DNA, 25 bp, Homo sapien
gacaatcgttccatgggccatcaaa

SEQ ID NO: 3874182 - DNA, 25 bp, Homo sapien
tttttagggcctagcaccagaccag

SEQ ID NO: 3874183 - DNA, 25 bp, Homo sapien
cacaggattttgctagcccaaataa

SEQ ID NO: 3874184 - DNA, 25 bp, Homo sapien
aatgcttatttcttccacaacagca

SEQ ID NO: 3874185 - DNA, 25 bp, Homo sapien
ctgcccccaatgcttatttcttcca

SEQ ID NO: 3874186 - DNA, 25 bp, Homo sapien
cacaacagcacaatccctctccccc

SEQ ID NO: 3874187 - DNA, 25 bp, Homo sapien
cttatttcttccacaacagcacaat

SEQ ID NO: 3874188 - DNA, 25 bp, Homo sapien
gttgtatgaagtatcctcgaatggg

SEQ ID NO: 3874189 - DNA, 25 bp, Homo sapien
ccaaagatgcccctttgtgcatgaa

SEQ ID NO: 3874190 - DNA, 25 bp, Homo sapien
tgcatgaaccctcctgtctggcttt

SEQ ID NO: 3874191 - DNA, 25 bp, Homo sapien
ggtttctagagcctgagaccacctc

SEQ ID NO: 3874192 - DNA, 25 bp, Homo sapien
tggaattcatgccacagcgcgaggc

SEQ ID NO: 3874193 - DNA, 25 bp, Homo sapien
atgccacagcgcgaggctgtgtgca

SEQ ID NO: 3874194 - DNA, 25 bp, Homo sapien
cttccttcgcctggaattcatgcca

SEQ ID NO: 3874195 - DNA, 25 bp, Homo sapien
tgtgtgcagggtgcttctgcggagg

SEQ ID NO: 3874196 - DNA, 25 bp, Homo sapien
ctcggttgatccaggggcttcgtga

SEQ ID NO: 3874197 - DNA, 25 bp, Homo sapien
ttcgtgatccccgtctgctcttgtc

SEQ ID NO: 3874198 - DNA, 25 bp, Homo sapien
caggggcttcgtgatccccgtctgc

SEQ ID NO: 3874199 - DNA, 25 bp, Homo sapien
ttgatccaggggcttcgtgatcccc

SEQ ID NO: 3874200 - DNA, 25 bp, Homo sapien
ctctgccgccttccaagaaaggagt

SEQ ID NO: 3874201 - DNA, 25 bp, Homo sapien
tgccgccttccaagaaaggagtctt

SEQ ID NO: 3874202 - DNA, 25 bp, Homo sapien
ccgccttccaagaaaggagtcttca

SEQ ID NO: 3874203 - DNA, 25 bp, Homo sapien
tctgccgccttccaagaaaggagtc

SEQ ID NO: 3874204 - DNA, 25 bp, Homo sapien
cagcttgaactaatcgtcgggccaa

SEQ ID NO: 3874205 - DNA, 25 bp, Homo sapien
caatgtgctattgtactgggccctg

SEQ ID NO: 3874206 - DNA, 25 bp, Homo sapien
gcacccttttacctcagcagggaag

SEQ ID NO: 3874207 - DNA, 25 bp, Homo sapien
cctccagtccatagaagcctgtttc

SEQ ID NO: 3874208 - DNA, 25 bp, Homo sapien
ataggtgagatccaaatattccatt

SEQ ID NO: 3874209 - DNA, 25 bp, Homo sapien
tcataggtgagatccaaatattcca

SEQ ID NO: 3874210 - DNA, 25 bp, Homo sapien
cataggtgagatccaaatattccat

SEQ ID NO: 3874211 - DNA, 25 bp, Homo sapien
ccccgaaggaaggtagcacaatgag

SEQ ID NO: 3874212 - DNA, 25 bp, Homo sapien
tgagaaaccgtgaagcagggtgttt

SEQ ID NO: 3874213 - DNA, 25 bp, Homo sapien
ttctggaaacttggatgtagctggg

SEQ ID NO: 3874214 - DNA, 25 bp, Homo sapien
ggatcctcatttctggaaacttgga

SEQ ID NO: 3874215 - DNA, 25 bp, Homo sapien
ttctcatttggccaccgttcaccat

SEQ ID NO: 3874216 - DNA, 25 bp, Homo sapien
cgccttgtggacgttccgataaata

SEQ ID NO: 3874217 - DNA, 25 bp, Homo sapien
accgttcaccatcgccttgtggacg

SEQ ID NO: 3874218 - DNA, 25 bp, Homo sapien
cgttccgataaatatcaggcatggg

SEQ ID NO: 3874219 - DNA, 25 bp, Homo sapien
agtgcttggaattgaagacactggt

SEQ ID NO: 3874220 - DNA, 25 bp, Homo sapien
gaattgaagacactggttggagtct

SEQ ID NO: 3874221 - DNA, 25 bp, Homo sapien
cttggaattgaagacactggttgga

SEQ ID NO: 3874222 - DNA, 25 bp, Homo sapien
tgcttggaattgaagacactggttg

SEQ ID NO: 3874223 - DNA, 25 bp, Homo sapien
atctcgccaacccaatagggtctgc

SEQ ID NO: 3874224 - DNA, 25 bp, Homo sapien
ctccaaccccatggacaatcctcca

SEQ ID NO: 3874225 - DNA, 25 bp, Homo sapien
gccaacccaatagggtctgcagagg

SEQ ID NO: 3874226 - DNA, 25 bp, Homo sapien
tcgccaacccaatagggtctgcaga

SEQ ID NO: 3874227 - DNA, 25 bp, Homo sapien
tcctcctggttaatgtatacggctg

SEQ ID NO: 3874228 - DNA, 25 bp, Homo sapien
aaaactgggtgtctaaaagcagctg

SEQ ID NO: 3874229 - DNA, 25 bp, Homo sapien
tatacggctgtagagtaaaaactgg

SEQ ID NO: 3874230 - DNA, 25 bp, Homo sapien
gatctctcggatccagcatgtgtgt

SEQ ID NO: 3874231 - DNA, 25 bp, Homo sapien
tcatgtcttgtgagggcagtatcac

SEQ ID NO: 3874232 - DNA, 25 bp, Homo sapien
ttggattgtctgatcatgtcttgtg

SEQ ID NO: 3874233 - DNA, 25 bp, Homo sapien
tctgatcatgtcttgtgagggcagt

SEQ ID NO: 3874234 - DNA, 25 bp, Homo sapien
tgtgagggcagtatcacagagctga

SEQ ID NO: 3874235 - DNA, 25 bp, Homo sapien
taatgcttagacataaaaaagctga

SEQ ID NO: 3874236 - DNA, 25 bp, Homo sapien
taagtgctaatgcttagacataaaa

SEQ ID NO: 3874237 - DNA, 25 bp, Homo sapien
ccaccataccgagcctgttttgttt

SEQ ID NO: 3874238 - DNA, 25 bp, Homo sapien
ctgtctctgaggcataagtagtagt

SEQ ID NO: 3874239 - DNA, 25 bp, Homo sapien
cgtccagaacgcagacatgtatttt

SEQ ID NO: 3874240 - DNA, 25 bp, Homo sapien
tacggcagcccgttagcaattgcat

SEQ ID NO: 3874241 - DNA, 25 bp, Homo sapien
ctattatgactgtatattggcgtcc

SEQ ID NO: 3874242 - DNA, 25 bp, Homo sapien
ttgctgatgattatacggcagcccg

SEQ ID NO: 3874243 - DNA, 25 bp, Homo sapien
gacaaaggttcgctgttggagaccc

SEQ ID NO: 3874244 - DNA, 25 bp, Homo sapien
cagaggttcatttgcattgcaggac

SEQ ID NO: 3874245 - DNA, 25 bp, Homo sapien
ggctggcattgtctgcgccctgttt

SEQ ID NO: 3874246 - DNA, 25 bp, Homo sapien
catccgcagtgaagatagaccgcct

SEQ ID NO: 3874247 - DNA, 25 bp, Homo sapien
tgttcccgactaactgtgtctacga

SEQ ID NO: 3874248 - DNA, 25 bp, Homo sapien
tcaggtggattgattgaatggcccc

SEQ ID NO: 3874249 - DNA, 25 bp, Homo sapien
ttctcagtcgacagcctctttcagg

SEQ ID NO: 3874250 - DNA, 25 bp, Homo sapien
tctgtgcctgtggaacgcacgggcc

SEQ ID NO: 3874251 - DNA, 25 bp, Homo sapien
tgaaggtttggcagcagaaacattc

SEQ ID NO: 3874252 - DNA, 25 bp, Homo sapien
gaaggtttggcagcagaaacattca

SEQ ID NO: 3874253 - DNA, 25 bp, Homo sapien
aaggtttggcagcagaaacattcat

SEQ ID NO: 3874254 - DNA, 25 bp, Homo sapien
ctgaaggtttggcagcagaaacatt

SEQ ID NO: 3874255 - DNA, 25 bp, Homo sapien
gtctggactccgatgcacaagcaaa

SEQ ID NO: 3874256 - DNA, 25 bp, Homo sapien
gcacagtttccctttgacggtgaga

SEQ ID NO: 3874257 - DNA, 25 bp, Homo sapien
tcttgttggaaagagtgtctggact

SEQ ID NO: 3874258 - DNA, 25 bp, Homo sapien
tttggcaagggcagcataaatccac

SEQ ID NO: 3874259 - DNA, 25 bp, Homo sapien
cccctaaaaaagagctctgtgcctc

SEQ ID NO: 3874260 - DNA, 25 bp, Homo sapien
cattaagctgacattcctgcctcca

SEQ ID NO: 3874261 - DNA, 25 bp, Homo sapien
tggctgaccatgacaccttgcacct

SEQ ID NO: 3874262 - DNA, 25 bp, Homo sapien
tttgatgaatctcaggctccccgta

SEQ ID NO: 3874263 - DNA, 25 bp, Homo sapien
ggtacaggaaggattaatagcctac

SEQ ID NO: 3874264 - DNA, 25 bp, Homo sapien
gattagaatgtagggaaattgctca

SEQ ID NO: 3874265 - DNA, 25 bp, Homo sapien
aaatgtttgtgaattggttgcacgg

SEQ ID NO: 3874266 - DNA, 25 bp, Homo sapien
catttgaatagagaatggtacagga

SEQ ID NO: 3874267 - DNA, 25 bp, Homo sapien
cattatctgaacatgcctacggagc

SEQ ID NO: 3874268 - DNA, 25 bp, Homo sapien
tctcctgcttccgtattaggcctga

SEQ ID NO: 3874269 - DNA, 25 bp, Homo sapien
gaagaacttgcaactccgtggatgt

SEQ ID NO: 3874270 - DNA, 25 bp, Homo sapien
gggactcctcttgtgtcacttgttc

SEQ ID NO: 3874271 - DNA, 25 bp, Homo sapien
tgtggacagtaccatcaatgtgagc

SEQ ID NO: 3874272 - DNA, 25 bp, Homo sapien
tgttcgcaggaagtactctcgtgtg

SEQ ID NO: 3874273 - DNA, 25 bp, Homo sapien
aatgtgagcgcccttagccagtgag

SEQ ID NO: 3874274 - DNA, 25 bp, Homo sapien
tgaataagtatctacccactggctt

SEQ ID NO: 3874275 - DNA, 25 bp, Homo sapien
gtttgcccactaggccttctgcgag

SEQ ID NO: 3874276 - DNA, 25 bp, Homo sapien
tagaggtaatggtagctttctttcc

SEQ ID NO: 3874277 - DNA, 25 bp, Homo sapien
gatccccttgatagagtttgcccac

SEQ ID NO: 3874278 - DNA, 25 bp, Homo sapien
tgaaggctctgggtaagcagatccc

SEQ ID NO: 3874279 - DNA, 25 bp, Homo sapien
tgcgtgcatccgtaccaatgtgcat

SEQ ID NO: 3874280 - DNA, 25 bp, Homo sapien
atggaagtgtgcgtgcatccgtacc

SEQ ID NO: 3874281 - DNA, 25 bp, Homo sapien
gagggagtgccactgattcctcttc

SEQ ID NO: 3874282 - DNA, 25 bp, Homo sapien
ggagtgccactgattcctcttcctg

SEQ ID NO: 3874283 - DNA, 25 bp, Homo sapien
caaggacagtaggtttttggcaaag

SEQ ID NO: 3874284 - DNA, 25 bp, Homo sapien
aagaccctgcaaaactccatcagca

SEQ ID NO: 3874285 - DNA, 25 bp, Homo sapien
tctcacaaagacaggtgttcatagc

SEQ ID NO: 3874286 - DNA, 25 bp, Homo sapien
gtgtccaagaccctgcaaaactcca

SEQ ID NO: 3874287 - DNA, 25 bp, Homo sapien
tgcagcataagcataacctttgatt

SEQ ID NO: 3874288 - DNA, 25 bp, Homo sapien
ctgcagcataagcataacctttgat

SEQ ID NO: 3874289 - DNA, 25 bp, Homo sapien
cataagcataacctttgatttggta

SEQ ID NO: 3874290 - DNA, 25 bp, Homo sapien
cagcataagcataacctttgatttg

SEQ ID NO: 3874291 - DNA, 25 bp, Homo sapien
attcacaaaagctgtacatgggcgg

SEQ ID NO: 3874292 - DNA, 25 bp, Homo sapien
cttatttggggctagaacttgacat

SEQ ID NO: 3874293 - DNA, 25 bp, Homo sapien
ttatttggggctagaacttgacatt

SEQ ID NO: 3874294 - DNA, 25 bp, Homo sapien
tgattagccacgtggaagctgcaag

SEQ ID NO: 3874295 - DNA, 25 bp, Homo sapien
gaagctgcaagatagatatgagaga

SEQ ID NO: 3874296 - DNA, 25 bp, Homo sapien
tgttaggaagttcacccagtctcca

SEQ ID NO: 3874297 - DNA, 25 bp, Homo sapien
catttgggttcctgcagatgattag

SEQ ID NO: 3874298 - DNA, 25 bp, Homo sapien
tctgggatccgatactccctctgag

SEQ ID NO: 3874299 - DNA, 25 bp, Homo sapien
ccttgatacaattttgttgccacaa

SEQ ID NO: 3874300 - DNA, 25 bp, Homo sapien
ggatccgatactccctctgagctgc

SEQ ID NO: 3874301 - DNA, 25 bp, Homo sapien
ctagaattctgggatccgatactcc

SEQ ID NO: 3874302 - DNA, 25 bp, Homo sapien
cttaatctgtgtcattccatctggc

SEQ ID NO: 3874303 - DNA, 25 bp, Homo sapien
taatctgtgtcattccatctggcat

SEQ ID NO: 3874304 - DNA, 25 bp, Homo sapien
ttaatctgtgtcattccatctggca

SEQ ID NO: 3874305 - DNA, 25 bp, Homo sapien
ctcttaatctgtgtcattccatctg

SEQ ID NO: 3874306 - DNA, 25 bp, Homo sapien
cacgtgccaccacgcccagataatt

SEQ ID NO: 3874307 - DNA, 25 bp, Homo sapien
aggcacgtgccaccacgcccagata

SEQ ID NO: 3874308 - DNA, 25 bp, Homo sapien
tgctcactgcagcctccatctcctg

SEQ ID NO: 3874309 - DNA, 25 bp, Homo sapien
tgcactggcacgatcactgctcact

SEQ ID NO: 3874310 - DNA, 25 bp, Homo sapien
cagtgcatcaaatttgggtgggtca

SEQ ID NO: 3874311 - DNA, 25 bp, Homo sapien
ggtgggtcactttctgctgctgcga

SEQ ID NO: 3874312 - DNA, 25 bp, Homo sapien
tttcgcacagtgcatcaaatttggg

SEQ ID NO: 3874313 - DNA, 25 bp, Homo sapien
gactttgagtctttttcgcacagtg

SEQ ID NO: 3874314 - DNA, 25 bp, Homo sapien
tccaagacgtgatacatttattgcc

SEQ ID NO: 3874315 - DNA, 25 bp, Homo sapien
tggagaaattctccaagacgtgata

SEQ ID NO: 3874316 - DNA, 25 bp, Homo sapien
gacgtgatacatttattgccaggga

SEQ ID NO: 3874317 - DNA, 25 bp, Homo sapien
catttattgccagggaaggtaggaa

SEQ ID NO: 3874318 - DNA, 25 bp, Homo sapien
cagcgggttgaatgcctttcttcca

SEQ ID NO: 3874319 - DNA, 25 bp, Homo sapien
gatgtgggattctttccaaacaggt

SEQ ID NO: 3874320 - DNA, 25 bp, Homo sapien
ccaaacaggtagactatggatactg

SEQ ID NO: 3874321 - DNA, 25 bp, Homo sapien
caaatcaagacaaagggcagtgtag

SEQ ID NO: 3874322 - DNA, 25 bp, Homo sapien
gttgtgcatctttgattcgctcctg

SEQ ID NO: 3874323 - DNA, 25 bp, Homo sapien
gacgctcaacgtggttctcagctgt

SEQ ID NO: 3874324 - DNA, 25 bp, Homo sapien
gttctcagctgttgtgcatctttga

SEQ ID NO: 3874325 - DNA, 25 bp, Homo sapien
ccagatggcggcccattgccaataa

SEQ ID NO: 3874326 - DNA, 25 bp, Homo sapien
gtttcctggtaattggtagcattcc

SEQ ID NO: 3874327 - DNA, 25 bp, Homo sapien
catttctgacaattgggtttcctgg

SEQ ID NO: 3874328 - DNA, 25 bp, Homo sapien
ctgaacaatgtttagtaatattctg

SEQ ID NO: 3874329 - DNA, 25 bp, Homo sapien
tccttgttcttgcaggcaaccagac

SEQ ID NO: 3874330 - DNA, 25 bp, Homo sapien
caagatcagctgaacctgaaggcct

SEQ ID NO: 3874331 - DNA, 25 bp, Homo sapien
tcaagatcagctgaacctgaaggcc

SEQ ID NO: 3874332 - DNA, 25 bp, Homo sapien
gagttcaagatcagctgaacctgaa

SEQ ID NO: 3874333 - DNA, 25 bp, Homo sapien
gttcaagatcagctgaacctgaagg

SEQ ID NO: 3874334 - DNA, 25 bp, Homo sapien
gaatgaggtgctcatagacttcttg

SEQ ID NO: 3874335 - DNA, 25 bp, Homo sapien
gaaaggaatgaggtgctcatagact

SEQ ID NO: 3874336 - DNA, 25 bp, Homo sapien
aaggaatgaggtgctcatagacttc

SEQ ID NO: 3874337 - DNA, 25 bp, Homo sapien
ggaatgaggtgctcatagacttctt

SEQ ID NO: 3874338 - DNA, 25 bp, Homo sapien
gaagcaacttgtgcggccacaggca

SEQ ID NO: 3874339 - DNA, 25 bp, Homo sapien
cccatgatgcttggtgaaggcactg

SEQ ID NO: 3874340 - DNA, 25 bp, Homo sapien
ggtgaaggcactggtggagtctcca

SEQ ID NO: 3874341 - DNA, 25 bp, Homo sapien
ggaagcaacttgtgcggccacaggc

SEQ ID NO: 3874342 - DNA, 25 bp, Homo sapien
ttgcttgttggggtactttctgaac

SEQ ID NO: 3874343 - DNA, 25 bp, Homo sapien
tctgaacctctaattttgggtggtg

SEQ ID NO: 3874344 - DNA, 25 bp, Homo sapien
ttgaagtgggggacaagggattgct

SEQ ID NO: 3874345 - DNA, 25 bp, Homo sapien
tcacaggtaaggtgtttgaagtggg

SEQ ID NO: 3874346 - DNA, 25 bp, Homo sapien
tgtcacccttgtggggagcactttc

SEQ ID NO: 3874347 - DNA, 25 bp, Homo sapien
ggagcactttcaaacgagttttggc

SEQ ID NO: 3874348 - DNA, 25 bp, Homo sapien
caaacgagttttggcttccataata

SEQ ID NO: 3874349 - DNA, 25 bp, Homo sapien
ctttcaaacgagttttggcttccat

SEQ ID NO: 3874350 - DNA, 25 bp, Homo sapien
tctttgaaaaactagaggtagaaga

SEQ ID NO: 3874351 - DNA, 25 bp, Homo sapien
tttcttgtgacacctttcttttaca

SEQ ID NO: 3874352 - DNA, 25 bp, Homo sapien
tcttgtgacacctttcttttacagt

SEQ ID NO: 3874353 - DNA, 25 bp, Homo sapien
cagtttcaggtctttgaaaaactag

SEQ ID NO: 3874354 - DNA, 25 bp, Homo sapien
caggaggtagaaggggctgcgagtt

SEQ ID NO: 3874355 - DNA, 25 bp, Homo sapien
gctgcgagttgaaatcaatacccat

SEQ ID NO: 3874356 - DNA, 25 bp, Homo sapien
agaaggggctgcgagttgaaatcaa

SEQ ID NO: 3874357 - DNA, 25 bp, Homo sapien
gggctgcgagttgaaatcaataccc

SEQ ID NO: 3874358 - DNA, 25 bp, Homo sapien
ttggtgctgggacttgatctctcca

SEQ ID NO: 3874359 - DNA, 25 bp, Homo sapien
gaaactggctgcaaagtgagctcca

SEQ ID NO: 3874360 - DNA, 25 bp, Homo sapien
cagatctgtagccactccttggaaa

SEQ ID NO: 3874361 - DNA, 25 bp, Homo sapien
tcttgccatctttagtggtcctcac

SEQ ID NO: 3874362 - DNA, 25 bp, Homo sapien
acagtgccgatgaaggtagctgtga

SEQ ID NO: 3874363 - DNA, 25 bp, Homo sapien
tttccatgcaccagcccattccatt

SEQ ID NO: 3874364 - DNA, 25 bp, Homo sapien
ttttattctcagaagtccaacagtg

SEQ ID NO: 3874365 - DNA, 25 bp, Homo sapien
tagctgtgacatttgcaattttcca

SEQ ID NO: 3874366 - DNA, 25 bp, Homo sapien
tccccagtcgccacaacagcttgag

SEQ ID NO: 3874367 - DNA, 25 bp, Homo sapien
cagcttgaggtagggaatttgtaaa

SEQ ID NO: 3874368 - DNA, 25 bp, Homo sapien
ctcttccccagtcgccacaacagct

SEQ ID NO: 3874369 - DNA, 25 bp, Homo sapien
ccctcttccccagtcgccacaacag

SEQ ID NO: 3874370 - DNA, 25 bp, Homo sapien
gcataagactatcacattccaaact

SEQ ID NO: 3874371 - DNA, 25 bp, Homo sapien
taagactatcacattccaaactatc

SEQ ID NO: 3874372 - DNA, 25 bp, Homo sapien
cagccctcattgcataagactatca

SEQ ID NO: 3874373 - DNA, 25 bp, Homo sapien
tcattgcataagactatcacattcc

SEQ ID NO: 3874374 - DNA, 25 bp, Homo sapien
ctttgaagtcccaccggtgtaatag

SEQ ID NO: 3874375 - DNA, 25 bp, Homo sapien
tatgtcatggagctgattagcatgc

SEQ ID NO: 3874376 - DNA, 25 bp, Homo sapien
ttcaagtgttgtgttatgttatctt

SEQ ID NO: 3874377 - DNA, 25 bp, Homo sapien
agaagccgttattatgtcatggagc

SEQ ID NO: 3874378 - DNA, 25 bp, Homo sapien
tccttagggacaactcagacactgg

SEQ ID NO: 3874379 - DNA, 25 bp, Homo sapien
tatctgggttgcgagctccttaggg

SEQ ID NO: 3874380 - DNA, 25 bp, Homo sapien
tctgggttgcgagctccttagggac

SEQ ID NO: 3874381 - DNA, 25 bp, Homo sapien
ctcagacactggactaggctctggg

SEQ ID NO: 3874382 - DNA, 25 bp, Homo sapien
tcctcagccaatgatcgagtcttgg

SEQ ID NO: 3874383 - DNA, 25 bp, Homo sapien
cagccaatgatcgagtcttggccat

SEQ ID NO: 3874384 - DNA, 25 bp, Homo sapien
gaagtcctcagccaatgatcgagtc

SEQ ID NO: 3874385 - DNA, 25 bp, Homo sapien
tgtgaagtcctcagccaatgatcga

SEQ ID NO: 3874386 - DNA, 25 bp, Homo sapien
ggtgtttatcaggtaacggtgcttc

SEQ ID NO: 3874387 - DNA, 25 bp, Homo sapien
tgtttatcaggtaacggtgcttcgg

SEQ ID NO: 3874388 - DNA, 25 bp, Homo sapien
agaacattttcaaggtgtttatcag

SEQ ID NO: 3874389 - DNA, 25 bp, Homo sapien
ccagaacattttcaaggtgtttatc

SEQ ID NO: 3874390 - DNA, 25 bp, Homo sapien
catctccaagtgtaccagtgtgagg

SEQ ID NO: 3874391 - DNA, 25 bp, Homo sapien
tgattggtaaggctgtagaagagtt

SEQ ID NO: 3874392 - DNA, 25 bp, Homo sapien
tgtcccatggctgttttgtgcatct

SEQ ID NO: 3874393 - DNA, 25 bp, Homo sapien
taattgccgccaggattgattggta

SEQ ID NO: 3874394 - DNA, 25 bp, Homo sapien
tcctgcctggtagtcacttttgcta

SEQ ID NO: 3874395 - DNA, 25 bp, Homo sapien
tgctaacaatttgaaggagtccttt

SEQ ID NO: 3874396 - DNA, 25 bp, Homo sapien
ctaacaatttgaaggagtccttttg

SEQ ID NO: 3874397 - DNA, 25 bp, Homo sapien
gatctattaagatattaccttccat

SEQ ID NO: 3874398 - DNA, 25 bp, Homo sapien
ctgatttatttaaccggctggtgct

SEQ ID NO: 3874399 - DNA, 25 bp, Homo sapien
ttgctgattgactggagattgcttc

SEQ ID NO: 3874400 - DNA, 25 bp, Homo sapien
ggctggtgctatccagttagtcctg

SEQ ID NO: 3874401 - DNA, 25 bp, Homo sapien
ttccatttggagggtcttctctcgt

SEQ ID NO: 3874402 - DNA, 25 bp, Homo sapien
catttggagggtcttctctcgtctc

SEQ ID NO: 3874403 - DNA, 25 bp, Homo sapien
tccatttggagggtcttctctcgtc

SEQ ID NO: 3874404 - DNA, 25 bp, Homo sapien
tttggagggtcttctctcgtctcat

SEQ ID NO: 3874405 - DNA, 25 bp, Homo sapien
acccagggttgaggaatcaacgtct

SEQ ID NO: 3874406 - DNA, 25 bp, Homo sapien
cccagggttgaggaatcaacgtctc

SEQ ID NO: 3874407 - DNA, 25 bp, Homo sapien
ctgttccaccatcagcgatacttga

SEQ ID NO: 3874408 - DNA, 25 bp, Homo sapien
caccatcagcgatacttgaacaaag

SEQ ID NO: 3874409 - DNA, 25 bp, Homo sapien
gctagtaagtgatacgattaaactt

SEQ ID NO: 3874410 - DNA, 25 bp, Homo sapien
gccaacttgaagatgcttgtcccaa

SEQ ID NO: 3874411 - DNA, 25 bp, Homo sapien
tgtcccaacttctggaaattcaccc

SEQ ID NO: 3874412 - DNA, 25 bp, Homo sapien
tggaaattcaccctatcaacgtctg

SEQ ID NO: 3874413 - DNA, 25 bp, Homo sapien
ctttagctcattatggtcatgacca

SEQ ID NO: 3874414 - DNA, 25 bp, Homo sapien
gaccatagttaaataaatgacacga

SEQ ID NO: 3874415 - DNA, 25 bp, Homo sapien
tgggaacccatcataaagaaggcac

SEQ ID NO: 3874416 - DNA, 25 bp, Homo sapien
tgagccgtgttgtagcatcccatct

SEQ ID NO: 3874417 - DNA, 25 bp, Homo sapien
cctttgtagcagctataggaagatg

SEQ ID NO: 3874418 - DNA, 25 bp, Homo sapien
tcttttgtatagacaggtctctagc

SEQ ID NO: 3874419 - DNA, 25 bp, Homo sapien
tggcctttgtagcagctataggaag

SEQ ID NO: 3874420 - DNA, 25 bp, Homo sapien
aggtctctagcctctttggtgtgga

SEQ ID NO: 3874421 - DNA, 25 bp, Homo sapien
agctcctgcacaggggttcttttcc

SEQ ID NO: 3874422 - DNA, 25 bp, Homo sapien
tcacgtaatcttttcctaggttggc

SEQ ID NO: 3874423 - DNA, 25 bp, Homo sapien
gttcagagccttaggtgcctttcca

SEQ ID NO: 3874424 - DNA, 25 bp, Homo sapien
cattgtagtgtcctggaggccggga

SEQ ID NO: 3874425 - DNA, 25 bp, Homo sapien
ctgctggatgatttactgctagaca

SEQ ID NO: 3874426 - DNA, 25 bp, Homo sapien
agtataagacttggtgtttggcagc

SEQ ID NO: 3874427 - DNA, 25 bp, Homo sapien
gacatgaccaaactctgagtataag

SEQ ID NO: 3874428 - DNA, 25 bp, Homo sapien
ctctgctgagaagtagttgggccca

SEQ ID NO: 3874429 - DNA, 25 bp, Homo sapien
tctaaacacataggcagattggttg

SEQ ID NO: 3874430 - DNA, 25 bp, Homo sapien
gcagtagttaatatagccgccaata

SEQ ID NO: 3874431 - DNA, 25 bp, Homo sapien
gaaattgggtttcacgtatgactga

SEQ ID NO: 3874432 - DNA, 25 bp, Homo sapien
gaatactttccgaggcattacagtg

SEQ ID NO: 3874433 - DNA, 25 bp, Homo sapien
ttctgacgccttgtgcgcgcccgaa

SEQ ID NO: 3874434 - DNA, 25 bp, Homo sapien
tttgcaaaggtcctgccaagatgct

SEQ ID NO: 3874435 - DNA, 25 bp, Homo sapien
taagttggaaattgaggattctgac

SEQ ID NO: 3874436 - DNA, 25 bp, Homo sapien
gccaagatgctaagttggaaattga

SEQ ID NO: 3874437 - DNA, 25 bp, Homo sapien
ggcgccctgcgagggcgagcgggcg

SEQ ID NO: 3874438 - DNA, 25 bp, Homo sapien
ccgggcggcgccctgcgagggcgag

SEQ ID NO: 3874439 - DNA, 25 bp, Homo sapien
gcggccgccaacgagccgggcggcg

SEQ ID NO: 3874440 - DNA, 25 bp, Homo sapien
tcccgcgcgcctccggctgcgaccg

SEQ ID NO: 3874441 - DNA, 25 bp, Homo sapien
gacggctggtacaagtagccctgcg

SEQ ID NO: 3874442 - DNA, 25 bp, Homo sapien
agaagagcggccgagctcatccgtg

SEQ ID NO: 3874443 - DNA, 25 bp, Homo sapien
ccgtgaaggcagtcgagccagcgta

SEQ ID NO: 3874444 - DNA, 25 bp, Homo sapien
ggccccgaaatgacgctggtgctgt

SEQ ID NO: 3874445 - DNA, 25 bp, Homo sapien
acgaggagaaggcggcggcggcggc

SEQ ID NO: 3874446 - DNA, 25 bp, Homo sapien
gtacgaggagaaggcggcggcggcg

SEQ ID NO: 3874447 - DNA, 25 bp, Homo sapien
gcggcggcggccgcggggtcggcgc

SEQ ID NO: 3874448 - DNA, 25 bp, Homo sapien
gcagcggggacctcaatttctgggt

SEQ ID NO: 3874449 - DNA, 25 bp, Homo sapien
cctgggcaactgaggcgactccgcg

SEQ ID NO: 3874450 - DNA, 25 bp, Homo sapien
gcccggccctccatgcagatagagg

SEQ ID NO: 3874451 - DNA, 25 bp, Homo sapien
gtccgtaccccgtgcgcagatctgg

SEQ ID NO: 3874452 - DNA, 25 bp, Homo sapien
ctgtgggtggacgaggcccgcactc

SEQ ID NO: 3874453 - DNA, 25 bp, Homo sapien
tgtgggtggacgaggcccgcactcc

SEQ ID NO: 3874454 - DNA, 25 bp, Homo sapien
gtgggtggacgaggcccgcactcca

SEQ ID NO: 3874455 - DNA, 25 bp, Homo sapien
tgagtgtggaccgtggtctccactg

SEQ ID NO: 3874456 - DNA, 25 bp, Homo sapien
gtgtggaccgtggtctccactgcca

SEQ ID NO: 3874457 - DNA, 25 bp, Homo sapien
gagtgtggaccgtggtctccactgc

SEQ ID NO: 3874458 - DNA, 25 bp, Homo sapien
agtgtggaccgtggtctccactgcc

SEQ ID NO: 3874459 - DNA, 25 bp, Homo sapien
ttgtggcgttcttccggtacgctgg

SEQ ID NO: 3874460 - DNA, 25 bp, Homo sapien
gcggcgtccacgtcattttattctc

SEQ ID NO: 3874461 - DNA, 25 bp, Homo sapien
tcgtcgttcttctccaggtcaatgt

SEQ ID NO: 3874462 - DNA, 25 bp, Homo sapien
gcgtaaggatggtaccccaaggagc

SEQ ID NO: 3874463 - DNA, 25 bp, Homo sapien
tcgaggcggccctccgagggcggct

SEQ ID NO: 3874464 - DNA, 25 bp, Homo sapien
gtggtccctgaagccgttcgcagcc

SEQ ID NO: 3874465 - DNA, 25 bp, Homo sapien
cgagggcggctccttaaaatccgag

SEQ ID NO: 3874466 - DNA, 25 bp, Homo sapien
taaaatccgagtcgctgaggctgcc

SEQ ID NO: 3874467 - DNA, 25 bp, Homo sapien
gcggaggcggcgaatggataaccga

SEQ ID NO: 3874468 - DNA, 25 bp, Homo sapien
gcgaatggataaccgagggcccgcc

SEQ ID NO: 3874469 - DNA, 25 bp, Homo sapien
ccaaagaccacagtttgggcttggc

SEQ ID NO: 3874470 - DNA, 25 bp, Homo sapien
gcttggcgagcaccgcaggaggcgg

SEQ ID NO: 3874471 - DNA, 25 bp, Homo sapien
tgcctcctagggcttgcccggctat

SEQ ID NO: 3874472 - DNA, 25 bp, Homo sapien
ggaaaaggacactgcgccgagggcg

SEQ ID NO: 3874473 - DNA, 25 bp, Homo sapien
ttgcccggctatgggcccgggacac

SEQ ID NO: 3874474 - DNA, 25 bp, Homo sapien
accttgtccgacgatgtggcgatct

SEQ ID NO: 3874475 - DNA, 25 bp, Homo sapien
gagccatagttcgtgtagccgggat

SEQ ID NO: 3874476 - DNA, 25 bp, Homo sapien
catagggagagtctttgcacaggtc

SEQ ID NO: 3874477 - DNA, 25 bp, Homo sapien
tccattgaaatgagaccccggaccg

SEQ ID NO: 3874478 - DNA, 25 bp, Homo sapien
gtctttagccaaagcgtccgctcgg

SEQ ID NO: 3874479 - DNA, 25 bp, Homo sapien
ctctctctcggtgatggaaaaataa

SEQ ID NO: 3874480 - DNA, 25 bp, Homo sapien
taatactttagctcatacccagcag

SEQ ID NO: 3874481 - DNA, 25 bp, Homo sapien
gcattttacaaaggcgcctgcagtt

SEQ ID NO: 3874482 - DNA, 25 bp, Homo sapien
ttttgaccaaggcaatggacagttt

SEQ ID NO: 3874483 - DNA, 25 bp, Homo sapien
aatcgaactcattagcaaagttcac

SEQ ID NO: 3874484 - DNA, 25 bp, Homo sapien
tagcccgaagcacccttgaaatagt

SEQ ID NO: 3874485 - DNA, 25 bp, Homo sapien
tagtaataagggctaaatccggcat

SEQ ID NO: 3874486 - DNA, 25 bp, Homo sapien
tgattgctttgcataaaacacgaca

SEQ ID NO: 3874487 - DNA, 25 bp, Homo sapien
gagatggaacgttcataatttaatc

SEQ ID NO: 3874488 - DNA, 25 bp, Homo sapien
gagatcaatgcgcaaatttgaaggg

SEQ ID NO: 3874489 - DNA, 25 bp, Homo sapien
gccacccgcacggtctgagatggaa

SEQ ID NO: 3874490 - DNA, 25 bp, Homo sapien
tgagcgggcacttctgggccgcccg

SEQ ID NO: 3874491 - DNA, 25 bp, Homo sapien
aaccctaaagtcgactgctgtttgc

SEQ ID NO: 3874492 - DNA, 25 bp, Homo sapien
taagcttataaaggagccccgtggc

SEQ ID NO: 3874493 - DNA, 25 bp, Homo sapien
gagcaaattaattcccgtcgctggg

SEQ ID NO: 3874494 - DNA, 25 bp, Homo sapien
tctcgggtgcaaaatggagccgcca

SEQ ID NO: 3874495 - DNA, 25 bp, Homo sapien
ccagcggtttagctccccagccgga

SEQ ID NO: 3874496 - DNA, 25 bp, Homo sapien
gggcagcggacagcgactcaggcag

SEQ ID NO: 3874497 - DNA, 25 bp, Homo sapien
agggcggaagggatgcgggcagcgg

SEQ ID NO: 3874498 - DNA, 25 bp, Homo sapien
cgcggagtccccagcggtttagctc

SEQ ID NO: 3874499 - DNA, 25 bp, Homo sapien
ctagtactgaagaccaagtgcgcac

SEQ ID NO: 3874500 - DNA, 25 bp, Homo sapien
cgcttccgtccgagttggcagctag

SEQ ID NO: 3874501 - DNA, 25 bp, Homo sapien
gctgttccgcgcttccgtccgagtt

SEQ ID NO: 3874502 - DNA, 25 bp, Homo sapien
tgggcggtttgcattgcgctgttcc

SEQ ID NO: 3874503 - DNA, 25 bp, Homo sapien
tgcattgcgctgttccgcgcttccg

SEQ ID NO: 3874504 - DNA, 25 bp, Homo sapien
ttcaccgggaaagtggtgtctgagc

SEQ ID NO: 3874505 - DNA, 25 bp, Homo sapien
ttacatttgcatccatcaggcggga

SEQ ID NO: 3874506 - DNA, 25 bp, Homo sapien
gagcccgaggtttgctcggagcaaa

SEQ ID NO: 3874507 - DNA, 25 bp, Homo sapien
gctcgtcccggtgccggaaacgagc

SEQ ID NO: 3874508 - DNA, 25 bp, Homo sapien
ttagcttcccctccacgcggcgctg

SEQ ID NO: 3874509 - DNA, 25 bp, Homo sapien
cttcattagcttcccctccacgcgg

SEQ ID NO: 3874510 - DNA, 25 bp, Homo sapien
ccacggctgcggagagctcgagtgc

SEQ ID NO: 3874511 - DNA, 25 bp, Homo sapien
ccagcaccgcgctgctccttcatta

SEQ ID NO: 3874512 - DNA, 25 bp, Homo sapien
ttcacggccctcgcgtctttttctg

SEQ ID NO: 3874513 - DNA, 25 bp, Homo sapien
cacggccctcgcgtctttttctgaa

SEQ ID NO: 3874514 - DNA, 25 bp, Homo sapien
ctggtctttttcacggccctcgcgt

SEQ ID NO: 3874515 - DNA, 25 bp, Homo sapien
ttctgaaacctccaattgaagtgga

SEQ ID NO: 3874516 - DNA, 25 bp, Homo sapien
tctcggcaggttgtttcatcaggtc

SEQ ID NO: 3874517 - DNA, 25 bp, Homo sapien
taagtgctttctgatgggctccgcg

SEQ ID NO: 3874518 - DNA, 25 bp, Homo sapien
tgaaccccagttgtgttgagcaccg

SEQ ID NO: 3874519 - DNA, 25 bp, Homo sapien
gactgctgtgtacccattctcggca

SEQ ID NO: 3874520 - DNA, 25 bp, Homo sapien
tcgcagggggcgatggcggcagcta

SEQ ID NO: 3874521 - DNA, 25 bp, Homo sapien
ctaggctgcctcgggtgccacagtc

SEQ ID NO: 3874522 - DNA, 25 bp, Homo sapien
aggcctggacagctggttcgcaggg

SEQ ID NO: 3874523 - DNA, 25 bp, Homo sapien
ggctgcctcgggtgccacagtcaca

SEQ ID NO: 3874524 - DNA, 25 bp, Homo sapien
cagaaagctcaactctgagcaggtc

SEQ ID NO: 3874525 - DNA, 25 bp, Homo sapien
tagcagctccagtcagctccagaaa

SEQ ID NO: 3874526 - DNA, 25 bp, Homo sapien
gtcactccctggtcaaactgccttc

SEQ ID NO: 3874527 - DNA, 25 bp, Homo sapien
tgtaaacaagccacgtagcagctcc

SEQ ID NO: 3874528 - DNA, 25 bp, Homo sapien
tggggatgaagagatactcatgcag

SEQ ID NO: 3874529 - DNA, 25 bp, Homo sapien
gtggggatgaagagatactcatgca

SEQ ID NO: 3874530 - DNA, 25 bp, Homo sapien
ggggatgaagagatactcatgcagc

SEQ ID NO: 3874531 - DNA, 25 bp, Homo sapien
gatactcatgcagcccatataactt

SEQ ID NO: 3874532 - DNA, 25 bp, Homo sapien
tcctcgttgtcctcaatctgggacc

SEQ ID NO: 3874533 - DNA, 25 bp, Homo sapien
cagagatctgtgctcctcgttgtcc

SEQ ID NO: 3874534 - DNA, 25 bp, Homo sapien
cgttgtcctcaatctgggacccagg

SEQ ID NO: 3874535 - DNA, 25 bp, Homo sapien
ctcgttgtcctcaatctgggaccca

SEQ ID NO: 3874536 - DNA, 25 bp, Homo sapien
tcttaattgctgttgcccggaaata

SEQ ID NO: 3874537 - DNA, 25 bp, Homo sapien
tgttgcccggaaataacacatatca

SEQ ID NO: 3874538 - DNA, 25 bp, Homo sapien
tccattcattggcaagaacttgtca

SEQ ID NO: 3874539 - DNA, 25 bp, Homo sapien
cacatgacttgatctagaagagagg

SEQ ID NO: 3874540 - DNA, 25 bp, Homo sapien
gtccaaaatgagcactacgcattgg

SEQ ID NO: 3874541 - DNA, 25 bp, Homo sapien
cctccaaatgatgtatttggaggaa

SEQ ID NO: 3874542 - DNA, 25 bp, Homo sapien
ggaaaatacatcaggaaaccggatg

SEQ ID NO: 3874543 - DNA, 25 bp, Homo sapien
tacgcattggagttggctttcctcc

SEQ ID NO: 3874544 - DNA, 25 bp, Homo sapien
caagcccattttcatagtctgcagc

SEQ ID NO: 3874545 - DNA, 25 bp, Homo sapien
tctgcagctaatgccttctcctctt

SEQ ID NO: 3874546 - DNA, 25 bp, Homo sapien
gaagcagtttagctctcctgagccc

SEQ ID NO: 3874547 - DNA, 25 bp, Homo sapien
ccacaggaagcagtttagctctcct

SEQ ID NO: 3874548 - DNA, 25 bp, Homo sapien
cctgtaaacaagctgttgtgcctga

SEQ ID NO: 3874549 - DNA, 25 bp, Homo sapien
gaacatgataatagcaggtcctgcc

SEQ ID NO: 3874550 - DNA, 25 bp, Homo sapien
cacagccctcctgtaaacaagctgt

SEQ ID NO: 3874551 - DNA, 25 bp, Homo sapien
gctgttgtgcctgagagaacatgat

SEQ ID NO: 3874552 - DNA, 25 bp, Homo sapien
gcctacaatcatattggtatcaaaa

SEQ ID NO: 3874553 - DNA, 25 bp, Homo sapien
taactgagaactaccacactttcca

SEQ ID NO: 3874554 - DNA, 25 bp, Homo sapien
tcaaaaagtacaagtataattgtca

SEQ ID NO: 3874555 - DNA, 25 bp, Homo sapien
ctgagaactaccacactttccaatg

SEQ ID NO: 3874556 - DNA, 25 bp, Homo sapien
cctgcagacttgtaaatagaacctc

SEQ ID NO: 3874557 - DNA, 25 bp, Homo sapien
tgcagacttgtaaatagaacctctt

SEQ ID NO: 3874558 - DNA, 25 bp, Homo sapien
tcctgcagacttgtaaatagaacct

SEQ ID NO: 3874559 - DNA, 25 bp, Homo sapien
ttcctgcagacttgtaaatagaacc

SEQ ID NO: 3874560 - DNA, 25 bp, Homo sapien
agaccttgaaacctctcttgcccat

SEQ ID NO: 3874561 - DNA, 25 bp, Homo sapien
gcagaccttgaaacctctcttgccc

SEQ ID NO: 3874562 - DNA, 25 bp, Homo sapien
cagaccttgaaacctctcttgccca

SEQ ID NO: 3874563 - DNA, 25 bp, Homo sapien
tagtctctaaagtcggtagatagag

SEQ ID NO: 3874564 - DNA, 25 bp, Homo sapien
gacacagggtagtctctaaagtcgg

SEQ ID NO: 3874565 - DNA, 25 bp, Homo sapien
tcatgaggacacagggtagtctcta

SEQ ID NO: 3874566 - DNA, 25 bp, Homo sapien
cagggtagtctctaaagtcggtaga

SEQ ID NO: 3874567 - DNA, 25 bp, Homo sapien
taacattcctcactaaccgtggctc

SEQ ID NO: 3874568 - DNA, 25 bp, Homo sapien
tggcttgttttctcgtgcgggtggg

SEQ ID NO: 3874569 - DNA, 25 bp, Homo sapien
tttgtttgggccaggaattgtcgtg

SEQ ID NO: 3874570 - DNA, 25 bp, Homo sapien
cctctgtttagccagtgctgtctcc

SEQ ID NO: 3874571 - DNA, 25 bp, Homo sapien
tgcttcctgaacctaatttctctga

SEQ ID NO: 3874572 - DNA, 25 bp, Homo sapien
cacaggaagagctgcgggtacatag

SEQ ID NO: 3874573 - DNA, 25 bp, Homo sapien
cgtagctttgggtgagccactcctg

SEQ ID NO: 3874574 - DNA, 25 bp, Homo sapien
gacctattttgagtactgcttcagc

SEQ ID NO: 3874575 - DNA, 25 bp, Homo sapien
tgggtgaccgccgagacgggccact

SEQ ID NO: 3874576 - DNA, 25 bp, Homo sapien
tgaccgccgagacgggccactttgg

SEQ ID NO: 3874577 - DNA, 25 bp, Homo sapien
gtgaccgccgagacgggccactttg

SEQ ID NO: 3874578 - DNA, 25 bp, Homo sapien
attcccggacaagccagcgggccat

SEQ ID NO: 3874579 - DNA, 25 bp, Homo sapien
gcatcgcacactgcccggtgatgct

SEQ ID NO: 3874580 - DNA, 25 bp, Homo sapien
aacgccccattttcccgagcctctg

SEQ ID NO: 3874581 - DNA, 25 bp, Homo sapien
tgggggacgccacattcccggacaa

SEQ ID NO: 3874582 - DNA, 25 bp, Homo sapien
tccacgttgttttctgtaatggttg

SEQ ID NO: 3874583 - DNA, 25 bp, Homo sapien
catccaaattgctgcgaatggcatt

SEQ ID NO: 3874584 - DNA, 25 bp, Homo sapien
aagaccaagtgtcagaatctccacg

SEQ ID NO: 3874585 - DNA, 25 bp, Homo sapien
tgactgtgaacatatgacgtttgtt

SEQ ID NO: 3874586 - DNA, 25 bp, Homo sapien
tctctttcatgtcggttcttttgtt

SEQ ID NO: 3874587 - DNA, 25 bp, Homo sapien
tgtagggtattcatagaaaatgttt

SEQ ID NO: 3874588 - DNA, 25 bp, Homo sapien
tgtaaaactctttgtagggtattca

SEQ ID NO: 3874589 - DNA, 25 bp, Homo sapien
tccacattgaaacaactgttgggtt

SEQ ID NO: 3874590 - DNA, 25 bp, Homo sapien
accaatgaatcattcttgtccagga

SEQ ID NO: 3874591 - DNA, 25 bp, Homo sapien
gctggtaggaactgggtgccaggaa

SEQ ID NO: 3874592 - DNA, 25 bp, Homo sapien
ggcagatccacaccaaccaatgaat

SEQ ID NO: 3874593 - DNA, 25 bp, Homo sapien
taccacctgcaacgtgctcattgta

SEQ ID NO: 3874594 - DNA, 25 bp, Homo sapien
ccagttgtagggtagaaactctcca

SEQ ID NO: 3874595 - DNA, 25 bp, Homo sapien
ggtttgtcccagaagaatgtagcct

SEQ ID NO: 3874596 - DNA, 25 bp, Homo sapien
cagcaatccttctggtgaacgaaag

SEQ ID NO: 3874597 - DNA, 25 bp, Homo sapien
tgtagcctttttgcaccaagatgcc

SEQ ID NO: 3874598 - DNA, 25 bp, Homo sapien
gctgcctgggatggctccacaaaca

SEQ ID NO: 3874599 - DNA, 25 bp, Homo sapien
gtggccagagtaggcgtccggggac

SEQ ID NO: 3874600 - DNA, 25 bp, Homo sapien
acaaacaggcccgtggccagagtag

SEQ ID NO: 3874601 - DNA, 25 bp, Homo sapien
ctaaataggaagacagaagctcggg

SEQ ID NO: 3874602 - DNA, 25 bp, Homo sapien
cctgagtcctaagccttgctgcctg

SEQ ID NO: 3874603 - DNA, 25 bp, Homo sapien
gagtcctaagccttgctgcctggct

SEQ ID NO: 3874604 - DNA, 25 bp, Homo sapien
agccattgccatcctgagtcctaag

SEQ ID NO: 3874605 - DNA, 25 bp, Homo sapien
gcccaagggaagcagccattgccat

SEQ ID NO: 3874606 - DNA, 25 bp, Homo sapien
tcttttacgtgatcatggctctcca

SEQ ID NO: 3874607 - DNA, 25 bp, Homo sapien
gcttcttttacgtgatcatggctct

SEQ ID NO: 3874608 - DNA, 25 bp, Homo sapien
agttgccggcttcttttacgtgatc

SEQ ID NO: 3874609 - DNA, 25 bp, Homo sapien
ccggcttcttttacgtgatcatggc

SEQ ID NO: 3874610 - DNA, 25 bp, Homo sapien
ttgtcttgttggtaagcacagggtt

SEQ ID NO: 3874611 - DNA, 25 bp, Homo sapien
cttgttggtaagcacagggttaatt

SEQ ID NO: 3874612 - DNA, 25 bp, Homo sapien
tcttgttggtaagcacagggttaat

SEQ ID NO: 3874613 - DNA, 25 bp, Homo sapien
tgtcttgttggtaagcacagggtta

SEQ ID NO: 3874614 - DNA, 25 bp, Homo sapien
caaggtgttccttgacctcggtgga

SEQ ID NO: 3874615 - DNA, 25 bp, Homo sapien
agattgccacatgctgatcagctcg

SEQ ID NO: 3874616 - DNA, 25 bp, Homo sapien
ggacatatgtccacctctagagtga

SEQ ID NO: 3874617 - DNA, 25 bp, Homo sapien
gataagcacgagtccacttctggag

SEQ ID NO: 3874618 - DNA, 25 bp, Homo sapien
ccaggaacaatgtgcctgggcccat

SEQ ID NO: 3874619 - DNA, 25 bp, Homo sapien
cccagggggccaggaacaatgtgcc

SEQ ID NO: 3874620 - DNA, 25 bp, Homo sapien
ctctggggtgaacatgcccagggtg

SEQ ID NO: 3874621 - DNA, 25 bp, Homo sapien
tggggtgaacatgcccagggtgagg

SEQ ID NO: 3874622 - DNA, 25 bp, Homo sapien
cctgacccacaagccgctcctttgg

SEQ ID NO: 3874623 - DNA, 25 bp, Homo sapien
tcagatgtggacatcgtatgaccag

SEQ ID NO: 3874624 - DNA, 25 bp, Homo sapien
atgaccagatgtgaaggtgttcttc

SEQ ID NO: 3874625 - DNA, 25 bp, Homo sapien
gacatcgtatgaccagatgtgaagg

SEQ ID NO: 3874626 - DNA, 25 bp, Homo sapien
tttacagactcacccaaaagaggag

SEQ ID NO: 3874627 - DNA, 25 bp, Homo sapien
aaattcactgggttgataggaaggc

SEQ ID NO: 3874628 - DNA, 25 bp, Homo sapien
tagcaactgacctaggcaacaaaga

SEQ ID NO: 3874629 - DNA, 25 bp, Homo sapien
gaaattgaatagtcctgtcggcact

SEQ ID NO: 3874630 - DNA, 25 bp, Homo sapien
ttcccattaaaggccagaggcccca

SEQ ID NO: 3874631 - DNA, 25 bp, Homo sapien
tctgcttttcccattaaaggccaga

SEQ ID NO: 3874632 - DNA, 25 bp, Homo sapien
tcagagaggcctagccccagctttc

SEQ ID NO: 3874633 - DNA, 25 bp, Homo sapien
cttcaaagtcagagaggcctagccc

SEQ ID NO: 3874634 - DNA, 25 bp, Homo sapien
caatttgtaatgattgtgtagcaac

SEQ ID NO: 3874635 - DNA, 25 bp, Homo sapien
ggcacgtgactcaaagccattaaag

SEQ ID NO: 3874636 - DNA, 25 bp, Homo sapien
tgtagcaactctcttcaagggaagc

SEQ ID NO: 3874637 - DNA, 25 bp, Homo sapien
taaagctgccttcatcatgacatgg

SEQ ID NO: 3874638 - DNA, 25 bp, Homo sapien
tttagttccatgtgtagttaggcaa

SEQ ID NO: 3874639 - DNA, 25 bp, Homo sapien
ttcaaccactaggaatttagttcca

SEQ ID NO: 3874640 - DNA, 25 bp, Homo sapien
tctaaccagctgctttgtatcatca

SEQ ID NO: 3874641 - DNA, 25 bp, Homo sapien
ggttcaagatgttcaagcagggcat

SEQ ID NO: 3874642 - DNA, 25 bp, Homo sapien
ccaccagaagtggtagtggcccttg

SEQ ID NO: 3874643 - DNA, 25 bp, Homo sapien
tgtcgcttggataccagctgcccat

SEQ ID NO: 3874644 - DNA, 25 bp, Homo sapien
cgggcacgccagcaggatcttttgg

SEQ ID NO: 3874645 - DNA, 25 bp, Homo sapien
agctgcccatgagtcctcagccggg

SEQ ID NO: 3874646 - DNA, 25 bp, Homo sapien
tctgcgggcctcattgggaaagaga

SEQ ID NO: 3874647 - DNA, 25 bp, Homo sapien
catttgctctggttgcttggttgga

SEQ ID NO: 3874648 - DNA, 25 bp, Homo sapien
ctctaggtctgggatggcacatcca

SEQ ID NO: 3874649 - DNA, 25 bp, Homo sapien
gagcagcttgttcagaagaagctct

SEQ ID NO: 3874650 - DNA, 25 bp, Homo sapien
tagggcggcagctcataagctcctt

SEQ ID NO: 3874651 - DNA, 25 bp, Homo sapien
taaatagggcggcagctcataagct

SEQ ID NO: 3874652 - DNA, 25 bp, Homo sapien
ctgcgttcctggctcaccaatactt

SEQ ID NO: 3874653 - DNA, 25 bp, Homo sapien
tcagggacagtaaatagggcggcag

SEQ ID NO: 3874654 - DNA, 25 bp, Homo sapien
tccacagcctcggtgttgtgcacaa

SEQ ID NO: 3874655 - DNA, 25 bp, Homo sapien
ggtgttgtgcacaacagcatgacta

SEQ ID NO: 3874656 - DNA, 25 bp, Homo sapien
gcctcggtgttgtgcacaacagcat

SEQ ID NO: 3874657 - DNA, 25 bp, Homo sapien
cacagcctcggtgttgtgcacaaca

SEQ ID NO: 3874658 - DNA, 25 bp, Homo sapien
cacgtgtccggaagggccagacttc

SEQ ID NO: 3874659 - DNA, 25 bp, Homo sapien
catttcaccacgtgtccggaagggc

SEQ ID NO: 3874660 - DNA, 25 bp, Homo sapien
ttggacatttcaccacgtgtccgga

SEQ ID NO: 3874661 - DNA, 25 bp, Homo sapien
tttcttggacatttcaccacgtgtc

SEQ ID NO: 3874662 - DNA, 25 bp, Homo sapien
ggagactgtgtgacttcctctcttc

SEQ ID NO: 3874663 - DNA, 25 bp, Homo sapien
ggctccctgtgaaaatccaaataag

SEQ ID NO: 3874664 - DNA, 25 bp, Homo sapien
ctgcattgaggttctcccaggctcc

SEQ ID NO: 3874665 - DNA, 25 bp, Homo sapien
ttccaggtcaccttggggagactgt

SEQ ID NO: 3874666 - DNA, 25 bp, Homo sapien
caggagggctctaagcaaagggaaa

SEQ ID NO: 3874667 - DNA, 25 bp, Homo sapien
gcaggagggctctaagcaaagggaa

SEQ ID NO: 3874668 - DNA, 25 bp, Homo sapien
agcaggagggctctaagcaaaggga

SEQ ID NO: 3874669 - DNA, 25 bp, Homo sapien
tctgtaggcatcagtaacgtcacca

SEQ ID NO: 3874670 - DNA, 25 bp, Homo sapien
ctgtaggcatcagtaacgtcaccat

SEQ ID NO: 3874671 - DNA, 25 bp, Homo sapien
ctttccttgctaacaacaccttcat

SEQ ID NO: 3874672 - DNA, 25 bp, Homo sapien
cctggtctttccttgctaacaacac

SEQ ID NO: 3874673 - DNA, 25 bp, Homo sapien
gtctttccttgctaacaacaccttc

SEQ ID NO: 3874674 - DNA, 25 bp, Homo sapien
tggtctttccttgctaacaacacct

SEQ ID NO: 3874675 - DNA, 25 bp, Homo sapien
gcacaaaaactctaatgcacttaaa

SEQ ID NO: 3874676 - DNA, 25 bp, Homo sapien
aatatagtattgatcatccatttaa

SEQ ID NO: 3874677 - DNA, 25 bp, Homo sapien
atttatgatggcattcacccactcg

SEQ ID NO: 3874678 - DNA, 25 bp, Homo sapien
cccactcggtgcacaaaaactctaa

SEQ ID NO: 3874679 - DNA, 25 bp, Homo sapien
gtaaagccgaaatgaacactaattg

SEQ ID NO: 3874680 - DNA, 25 bp, Homo sapien
cctgccttgcctgaatacatattgt

SEQ ID NO: 3874681 - DNA, 25 bp, Homo sapien
ttttgacggaagtagtgtgcatggc

SEQ ID NO: 3874682 - DNA, 25 bp, Homo sapien
cgcaggtctcatggagtaaagccga

SEQ ID NO: 3874683 - DNA, 25 bp, Homo sapien
aatgtgacgtcacggtaatcccggg

SEQ ID NO: 3874684 - DNA, 25 bp, Homo sapien
aagtaaagtttgttcacgccacagg

SEQ ID NO: 3874685 - DNA, 25 bp, Homo sapien
atctcctccgaaggcaaggcttggc

SEQ ID NO: 3874686 - DNA, 25 bp, Homo sapien
cagctggcgaggaacgtcaaaaacc

SEQ ID NO: 3874687 - DNA, 25 bp, Homo sapien
tctctcttccctgtcgagttcccgt

SEQ ID NO: 3874688 - DNA, 25 bp, Homo sapien
ttccctgtcgagttcccgtctcagc

SEQ ID NO: 3874689 - DNA, 25 bp, Homo sapien
tgtcgagttcccgtctcagcccagc

SEQ ID NO: 3874690 - DNA, 25 bp, Homo sapien
gagttcccgtctcagcccagctgtt

SEQ ID NO: 3874691 - DNA, 25 bp, Homo sapien
ggtgtccaaagtgtgggaaggacat

SEQ ID NO: 3874692 - DNA, 25 bp, Homo sapien
agcgccgcggtacgggtgtccaaag

SEQ ID NO: 3874693 - DNA, 25 bp, Homo sapien
cgcggtacgggtgtccaaagtgtgg

SEQ ID NO: 3874694 - DNA, 25 bp, Homo sapien
ggaagcgccgcggtacgggtgtcca

SEQ ID NO: 3874695 - DNA, 25 bp, Homo sapien
cctgactgggagatccctgtgatcc

SEQ ID NO: 3874696 - DNA, 25 bp, Homo sapien
acaagattttccagcgtgcactccg

SEQ ID NO: 3874697 - DNA, 25 bp, Homo sapien
cctcagacttctgtataggaggagg

SEQ ID NO: 3874698 - DNA, 25 bp, Homo sapien
ccacctcactgagcgcgtggtcaga

SEQ ID NO: 3874699 - DNA, 25 bp, Homo sapien
ctgagacagagcgttgggtagattc

SEQ ID NO: 3874700 - DNA, 25 bp, Homo sapien
gtgctggaacttgccgacgccagaa

SEQ ID NO: 3874701 - DNA, 25 bp, Homo sapien
ggtgctggaacttgccgacgccaga

SEQ ID NO: 3874702 - DNA, 25 bp, Homo sapien
tagattcgcagcatgtggtgctgga

SEQ ID NO: 3874703 - DNA, 25 bp, Homo sapien
cggccgcatagggtgctccatagat

SEQ ID NO: 3874704 - DNA, 25 bp, Homo sapien
tatagggcaggtagccagggtagct

SEQ ID NO: 3874705 - DNA, 25 bp, Homo sapien
actatcgtagggtgcgcagcagaga

SEQ ID NO: 3874706 - DNA, 25 bp, Homo sapien
actgcccagcagtcgactatcgtag

SEQ ID NO: 3874707 - DNA, 25 bp, Homo sapien
catattggtactgccccagagtccg

SEQ ID NO: 3874708 - DNA, 25 bp, Homo sapien
gggataataggctcctggttgtgcc

SEQ ID NO: 3874709 - DNA, 25 bp, Homo sapien
tgccaggctggatgtaaaactccct

SEQ ID NO: 3874710 - DNA, 25 bp, Homo sapien
ccagagtccgctcatagggataata

SEQ ID NO: 3874711 - DNA, 25 bp, Homo sapien
accggcgccactcaattccactgcg

SEQ ID NO: 3874712 - DNA, 25 bp, Homo sapien
gccactcaattccactgcgccatac

SEQ ID NO: 3874713 - DNA, 25 bp, Homo sapien
cttgagtgtactggtggtctcccgg

SEQ ID NO: 3874714 - DNA, 25 bp, Homo sapien
gtcgcgttctttcggcgaccggcgc

SEQ ID NO: 3874715 - DNA, 25 bp, Homo sapien
tgtcagcagttaggcagcctagtga

SEQ ID NO: 3874716 - DNA, 25 bp, Homo sapien
cagcagttaggcagcctagtgagtc

SEQ ID NO: 3874717 - DNA, 25 bp, Homo sapien
ttggtgtcagcagttaggcagccta

SEQ ID NO: 3874718 - DNA, 25 bp, Homo sapien
ggtgtcagcagttaggcagcctagt

SEQ ID NO: 3874719 - DNA, 25 bp, Homo sapien
gaattacaggtagaaggcagtgcac

SEQ ID NO: 3874720 - DNA, 25 bp, Homo sapien
cagtgcacaggctaatgctctgaga

SEQ ID NO: 3874721 - DNA, 25 bp, Homo sapien
aagtgcaagggtaagtctgaggacc

SEQ ID NO: 3874722 - DNA, 25 bp, Homo sapien
aatccaaacaggctggcagaacaga

SEQ ID NO: 3874723 - DNA, 25 bp, Homo sapien
tgagcaccagccatcatttaggtat

SEQ ID NO: 3874724 - DNA, 25 bp, Homo sapien
catttaggtattaggtgtgtagggc

SEQ ID NO: 3874725 - DNA, 25 bp, Homo sapien
taggtattaggtgtgtagggcatat

SEQ ID NO: 3874726 - DNA, 25 bp, Homo sapien
ccagccatcatttaggtattaggtg

SEQ ID NO: 3874727 - DNA, 25 bp, Homo sapien
aggtcactcagccggagcccccggg

SEQ ID NO: 3874728 - DNA, 25 bp, Homo sapien
tttcggaactccgtcagcctgtccc

SEQ ID NO: 3874729 - DNA, 25 bp, Homo sapien
ctttcggaactccgtcagcctgtcc

SEQ ID NO: 3874730 - DNA, 25 bp, Homo sapien
cggaactccgtcagcctgtccccag

SEQ ID NO: 3874731 - DNA, 25 bp, Homo sapien
ttcggaactccgtcagcctgtcccc

SEQ ID NO: 3874732 - DNA, 25 bp, Homo sapien
gcagcgcacggcccaggcagtgact

SEQ ID NO: 3874733 - DNA, 25 bp, Homo sapien
tgcagcgcacggcccaggcagtgac

SEQ ID NO: 3874734 - DNA, 25 bp, Homo sapien
tgtctccgccgagaggaagtcagct

SEQ ID NO: 3874735 - DNA, 25 bp, Homo sapien
gaggctgtccaggaatcatacggca

SEQ ID NO: 3874736 - DNA, 25 bp, Homo sapien
tagtgcatggtcaacctagggctgc

SEQ ID NO: 3874737 - DNA, 25 bp, Homo sapien
tgcgcggtttctccaagcatgggta

SEQ ID NO: 3874738 - DNA, 25 bp, Homo sapien
cccagcgccgctgggggcccactac

SEQ ID NO: 3874739 - DNA, 25 bp, Homo sapien
tcccagcgccgctgggggcccacta

SEQ ID NO: 3874740 - DNA, 25 bp, Homo sapien
ggcagagggtgtgcaattgccgggc

SEQ ID NO: 3874741 - DNA, 25 bp, Homo sapien
agagggtgtgcaattgccgggcggg

SEQ ID NO: 3874742 - DNA, 25 bp, Homo sapien
aggtgggtgtcttttgcatagatac

SEQ ID NO: 3874743 - DNA, 25 bp, Homo sapien
atggcagagggtgtgcaattgccgg

SEQ ID NO: 3874744 - DNA, 25 bp, Homo sapien
tacgcttccgtctgaaagagcgctg

SEQ ID NO: 3874745 - DNA, 25 bp, Homo sapien
gcaatctcccgtcagttctgtggga

SEQ ID NO: 3874746 - DNA, 25 bp, Homo sapien
ccgtctgaaagagcgctgtaaagca

SEQ ID NO: 3874747 - DNA, 25 bp, Homo sapien
gcgctgtaaagcaatctcccgtcag

SEQ ID NO: 3874748 - DNA, 25 bp, Homo sapien
tacactggaccacacgaatgcagag

SEQ ID NO: 3874749 - DNA, 25 bp, Homo sapien
ccacacgaatgcagagatcctggtt

SEQ ID NO: 3874750 - DNA, 25 bp, Homo sapien
tggcagtacactggaccacacgaat

SEQ ID NO: 3874751 - DNA, 25 bp, Homo sapien
gatttggcagtacactggaccacac

SEQ ID NO: 3874752 - DNA, 25 bp, Homo sapien
aaatctgtggtgtgcgtctggccca

SEQ ID NO: 3874753 - DNA, 25 bp, Homo sapien
ggcccacagtcttagacttctctaa

SEQ ID NO: 3874754 - DNA, 25 bp, Homo sapien
cacagtcttagacttctctaaaagc

SEQ ID NO: 3874755 - DNA, 25 bp, Homo sapien
gcccaaccctagtaaactctctgag

SEQ ID NO: 3874756 - DNA, 25 bp, Homo sapien
cattaggttcagttcgatcggagga

SEQ ID NO: 3874757 - DNA, 25 bp, Homo sapien
taggccacactacatgggttcggac

SEQ ID NO: 3874758 - DNA, 25 bp, Homo sapien
actgctaaggttcaagtcggcccac

SEQ ID NO: 3874759 - DNA, 25 bp, Homo sapien
tacgaacccggaaacagatgcagtt

SEQ ID NO: 3874760 - DNA, 25 bp, Homo sapien
cggaccctaagccgcgggtcagcga

SEQ ID NO: 3874761 - DNA, 25 bp, Homo sapien
ttaatcccgcaaagccgactggaaa

SEQ ID NO: 3874762 - DNA, 25 bp, Homo sapien
ccgcaaagccgactggaaataatgt

SEQ ID NO: 3874763 - DNA, 25 bp, Homo sapien
gtcagcgagggcgactggagggtcc

SEQ ID NO: 3874764 - DNA, 25 bp, Homo sapien
aggtcgtgtgaaggtgagattcccc

SEQ ID NO: 3874765 - DNA, 25 bp, Homo sapien
tgggataatcacaggctcagacgtg

SEQ ID NO: 3874766 - DNA, 25 bp, Homo sapien
gatggagaactagatcatccctgta

SEQ ID NO: 3874767 - DNA, 25 bp, Homo sapien
cacaattgagaaggtaaagcaggtt

SEQ ID NO: 3874768 - DNA, 25 bp, Homo sapien
tgacacatggtaagggctctagaag

SEQ ID NO: 3874769 - DNA, 25 bp, Homo sapien
ccagcaggctcagccaaagagagca

SEQ ID NO: 3874770 - DNA, 25 bp, Homo sapien
tttggaggtccagcttgtatacatc

SEQ ID NO: 3874771 - DNA, 25 bp, Homo sapien
ggaagggccactttagccatagaag

SEQ ID NO: 3874772 - DNA, 25 bp, Homo sapien
tgtgaccacagaaggactgacggtg

SEQ ID NO: 3874773 - DNA, 25 bp, Homo sapien
aatggacactggagtgaacgacccc

SEQ ID NO: 3874774 - DNA, 25 bp, Homo sapien
gaagcaaatgcagaggaaacgtgtt

SEQ ID NO: 3874775 - DNA, 25 bp, Homo sapien
tggtgaggtagttccctaaatggac

SEQ ID NO: 3874776 - DNA, 25 bp, Homo sapien
taccatcttactgctcaagctgtga

SEQ ID NO: 3874777 - DNA, 25 bp, Homo sapien
aagctgtgagcagtcggtcttgtag

SEQ ID NO: 3874778 - DNA, 25 bp, Homo sapien
cggcttgtcgccagtccagatgatg

SEQ ID NO: 3874779 - DNA, 25 bp, Homo sapien
cctccctggtatatagcggcttgtc

SEQ ID NO: 3874780 - DNA, 25 bp, Homo sapien
tggtgtgatgtgagaagagccctca

SEQ ID NO: 3874781 - DNA, 25 bp, Homo sapien
ctggtgtgatgtgagaagagccctc

SEQ ID NO: 3874782 - DNA, 25 bp, Homo sapien
ggtgtgatgtgagaagagccctcat

SEQ ID NO: 3874783 - DNA, 25 bp, Homo sapien
gagcttttgggtactgaatgtagat

SEQ ID NO: 3874784 - DNA, 25 bp, Homo sapien
cagggacaggccccgaagaactttg

SEQ ID NO: 3874785 - DNA, 25 bp, Homo sapien
cagagcttttgggtactgaatgtag

SEQ ID NO: 3874786 - DNA, 25 bp, Homo sapien
gcttttgggtactgaatgtagatgt

SEQ ID NO: 3874787 - DNA, 25 bp, Homo sapien
cgtggcaggtgtttggacccgagtc

SEQ ID NO: 3874788 - DNA, 25 bp, Homo sapien
aagcctttgagctctgaatcctggt

SEQ ID NO: 3874789 - DNA, 25 bp, Homo sapien
caggatgggacgggcagtgccagca

SEQ ID NO: 3874790 - DNA, 25 bp, Homo sapien
tgctggcgtggcaggtgtttggacc

SEQ ID NO: 3874791 - DNA, 25 bp, Homo sapien
agcatgggagtcatccaggccctct

SEQ ID NO: 3874792 - DNA, 25 bp, Homo sapien
gtgattttgaacaccaagggctggg

SEQ ID NO: 3874793 - DNA, 25 bp, Homo sapien
cagtcatcgggttctcaatggagat

SEQ ID NO: 3874794 - DNA, 25 bp, Homo sapien
cagccctagggcttgcagatgagca

SEQ ID NO: 3874795 - DNA, 25 bp, Homo sapien
aatgaagtgaattacaccgggcgag

SEQ ID NO: 3874796 - DNA, 25 bp, Homo sapien
cattgagagagtgcctatggccttc

SEQ ID NO: 3874797 - DNA, 25 bp, Homo sapien
tctcggcaccgaaatggcagctttt

SEQ ID NO: 3874798 - DNA, 25 bp, Homo sapien
caaagaattgctccttgtggcctcc

SEQ ID NO: 3874799 - DNA, 25 bp, Homo sapien
tatgtttctcgaactttgtggccaa

SEQ ID NO: 3874800 - DNA, 25 bp, Homo sapien
gctcttgattgttaaatccatccac

SEQ ID NO: 3874801 - DNA, 25 bp, Homo sapien
aacacagctcttgattgttaaatcc

SEQ ID NO: 3874802 - DNA, 25 bp, Homo sapien
ttatgtttctcgaactttgtggcca

SEQ ID NO: 3874803 - DNA, 25 bp, Homo sapien
ctgggctgaattggcagaagggtgt

SEQ ID NO: 3874804 - DNA, 25 bp, Homo sapien
agctgctgggctgaattggcagaag

SEQ ID NO: 3874805 - DNA, 25 bp, Homo sapien
ctggaaatctgacaagctgctacaa

SEQ ID NO: 3874806 - DNA, 25 bp, Homo sapien
gaaatctgacaagctgctacaaatg

SEQ ID NO: 3874807 - DNA, 25 bp, Homo sapien
ttctaccgtgattggaaacctgctg

SEQ ID NO: 3874808 - DNA, 25 bp, Homo sapien
aacctgctgttgtgagtttgcatgg

SEQ ID NO: 3874809 - DNA, 25 bp, Homo sapien
aacatcaaaaggcactgcaccggct

SEQ ID NO: 3874810 - DNA, 25 bp, Homo sapien
tcctgcttgttacttgcaggaaggc

SEQ ID NO: 3874811 - DNA, 25 bp, Homo sapien
tatttcttcgtcctttgttctacag

SEQ ID NO: 3874812 - DNA, 25 bp, Homo sapien
ggtctccaacctgcaataaatgaaa

SEQ ID NO: 3874813 - DNA, 25 bp, Homo sapien
ttcatttggctgattgaaggtctcc

SEQ ID NO: 3874814 - DNA, 25 bp, Homo sapien
gttctacagcccgagtcaaatttcc

SEQ ID NO: 3874815 - DNA, 25 bp, Homo sapien
tctcctatctctagcctgctgtgtg

SEQ ID NO: 3874816 - DNA, 25 bp, Homo sapien
ctctcctatctctagcctgctgtgt

SEQ ID NO: 3874817 - DNA, 25 bp, Homo sapien
ctcctatctctagcctgctgtgtgt

SEQ ID NO: 3874818 - DNA, 25 bp, Homo sapien
tggcctgaagtggaggccaggaaaa

SEQ ID NO: 3874819 - DNA, 25 bp, Homo sapien
tttcatgattaggacctgaacaccc

SEQ ID NO: 3874820 - DNA, 25 bp, Homo sapien
tcatgattaggacctgaacacccat

SEQ ID NO: 3874821 - DNA, 25 bp, Homo sapien
cttttttcatgattaggacctgaac

SEQ ID NO: 3874822 - DNA, 25 bp, Homo sapien
ctaaacagaggtgatgtcagcacaa

SEQ ID NO: 3874823 - DNA, 25 bp, Homo sapien
agcacaaagatcagcattggccttg

SEQ ID NO: 3874824 - DNA, 25 bp, Homo sapien
acaaagatcagcattggccttgggc

SEQ ID NO: 3874825 - DNA, 25 bp, Homo sapien
gtcagcacaaagatcagcattggcc

SEQ ID NO: 3874826 - DNA, 25 bp, Homo sapien
gcaggagaagcctattaagacaagc

SEQ ID NO: 3874827 - DNA, 25 bp, Homo sapien
caggagaagcctattaagacaagct

SEQ ID NO: 3874828 - DNA, 25 bp, Homo sapien
agcaggagaagcctattaagacaag

SEQ ID NO: 3874829 - DNA, 25 bp, Homo sapien
ggagaagcctattaagacaagctct

SEQ ID NO: 3874830 - DNA, 25 bp, Homo sapien
tgttaaagactcgaaatgctgcaat

SEQ ID NO: 3874831 - DNA, 25 bp, Homo sapien
caatagctctctggctgtagcccag

SEQ ID NO: 3874832 - DNA, 25 bp, Homo sapien
ggtgatggatgccactttcctaggc

SEQ ID NO: 3874833 - DNA, 25 bp, Homo sapien
gcaatctcagcaattatggaagcat

SEQ ID NO: 3874834 - DNA, 25 bp, Homo sapien
cgattactgtagctatctggcttgc

SEQ ID NO: 3874835 - DNA, 25 bp, Homo sapien
ttggcccctgggtcatacgatgctc

SEQ ID NO: 3874836 - DNA, 25 bp, Homo sapien
cagtgagccagcagctatcttccct

SEQ ID NO: 3874837 - DNA, 25 bp, Homo sapien
tgcactttgcgagcaagagctctgc

SEQ ID NO: 3874838 - DNA, 25 bp, Homo sapien
agggtccgctggctcggtggcctgg

SEQ ID NO: 3874839 - DNA, 25 bp, Homo sapien
gaagtctggatgcagcggaaacaag

SEQ ID NO: 3874840 - DNA, 25 bp, Homo sapien
cctggcaatccctttgtatgtttaa

SEQ ID NO: 3874841 - DNA, 25 bp, Homo sapien
gtttaaagccccagatgcgcagcct

SEQ ID NO: 3874842 - DNA, 25 bp, Homo sapien
gacagagcgccctcaggggacccgt

SEQ ID NO: 3874843 - DNA, 25 bp, Homo sapien
gcgacatcgccggggaacttgatga

SEQ ID NO: 3874844 - DNA, 25 bp, Homo sapien
tgtccgttttgggggcgacatcgcc

SEQ ID NO: 3874845 - DNA, 25 bp, Homo sapien
ttgatgatgggcgacggcgcggcgg

SEQ ID NO: 3874846 - DNA, 25 bp, Homo sapien
caagagcccttagcaactgcccaga

SEQ ID NO: 3874847 - DNA, 25 bp, Homo sapien
ctagacgcttggcaagagcccttag

SEQ ID NO: 3874848 - DNA, 25 bp, Homo sapien
cgcttggcaagagcccttagcaact

SEQ ID NO: 3874849 - DNA, 25 bp, Homo sapien
tggcaagagcccttagcaactgccc

SEQ ID NO: 3874850 - DNA, 25 bp, Homo sapien
aacagccacatcattatgccagcca

SEQ ID NO: 3874851 - DNA, 25 bp, Homo sapien
ggttcatcctgtgacccattggctg

SEQ ID NO: 3874852 - DNA, 25 bp, Homo sapien
tgtgcaagccaagaacccatgtggc

SEQ ID NO: 3874853 - DNA, 25 bp, Homo sapien
caagtagctttgtcattgtcccaaa

SEQ ID NO: 3874854 - DNA, 25 bp, Homo sapien
catcttctttagtgtgtccttcagc

SEQ ID NO: 3874855 - DNA, 25 bp, Homo sapien
catggtctcgatggtattctggtca

SEQ ID NO: 3874856 - DNA, 25 bp, Homo sapien
ttctggtcaagatcacctgtctggg

SEQ ID NO: 3874857 - DNA, 25 bp, Homo sapien
ttgccgcagcgtggcttccgcatgg

SEQ ID NO: 3874858 - DNA, 25 bp, Homo sapien
cacgagcaaaggcatcatccactgt

SEQ ID NO: 3874859 - DNA, 25 bp, Homo sapien
tccagacttggaaggcacgagcaaa

SEQ ID NO: 3874860 - DNA, 25 bp, Homo sapien
catggattcgagaaaaccgcagtgg

SEQ ID NO: 3874861 - DNA, 25 bp, Homo sapien
cccagcggccaaagttgatcatgat

SEQ ID NO: 3874862 - DNA, 25 bp, Homo sapien
ccctcgtctcaacactgatccctgc

SEQ ID NO: 3874863 - DNA, 25 bp, Homo sapien
cccctcgtctcaacactgatccctg

SEQ ID NO: 3874864 - DNA, 25 bp, Homo sapien
accgtcaaaggggtatccatcgcca

SEQ ID NO: 3874865 - DNA, 25 bp, Homo sapien
tcaaaggggtatccatcgccatgct

SEQ ID NO: 3874866 - DNA, 25 bp, Homo sapien
caggagtccgtccttaccgtcaaag

SEQ ID NO: 3874867 - DNA, 25 bp, Homo sapien
catgagccaggagtccgtccttacc

SEQ ID NO: 3874868 - DNA, 25 bp, Homo sapien
tcccaaggtccatagctcatcgtca

SEQ ID NO: 3874869 - DNA, 25 bp, Homo sapien
tagctcatcgtcatcaaaatgggag

SEQ ID NO: 3874870 - DNA, 25 bp, Homo sapien
catcgtcatcaaaatgggagtctcc

SEQ ID NO: 3874871 - DNA, 25 bp, Homo sapien
ggtccatagctcatcgtcatcaaaa

SEQ ID NO: 3874872 - DNA, 25 bp, Homo sapien
aagagtgacatggaagggggaggtt

SEQ ID NO: 3874873 - DNA, 25 bp, Homo sapien
aaagagtgacatggaagggggaggt

SEQ ID NO: 3874874 - DNA, 25 bp, Homo sapien
gagtgacatggaagggggaggttgg

SEQ ID NO: 3874875 - DNA, 25 bp, Homo sapien
catggaagggggaggttggacttct

SEQ ID NO: 3874876 - DNA, 25 bp, Homo sapien
gggaacttgcagtactccccatcgg

SEQ ID NO: 3874877 - DNA, 25 bp, Homo sapien
caaagttgtaggtggtggagcacca

SEQ ID NO: 3874878 - DNA, 25 bp, Homo sapien
gggacagaagccgtacttgccatcc

SEQ ID NO: 3874879 - DNA, 25 bp, Homo sapien
tgcggccggtatcagtgcagctgtt

SEQ ID NO: 3874880 - DNA, 25 bp, Homo sapien
taacgccacatgtaatccctaccgg

SEQ ID NO: 3874881 - DNA, 25 bp, Homo sapien
taacaaggaccatctgtgcacaacg

SEQ ID NO: 3874882 - DNA, 25 bp, Homo sapien
tgacacagggaagggttaacgccac

SEQ ID NO: 3874883 - DNA, 25 bp, Homo sapien
aagcgttaacttcgaccaatgccag

SEQ ID NO: 3874884 - DNA, 25 bp, Homo sapien
cctcagtggtgcagctgtcatagga

SEQ ID NO: 3874885 - DNA, 25 bp, Homo sapien
tgtcataggatgtgccctggaagcg

SEQ ID NO: 3874886 - DNA, 25 bp, Homo sapien
cctggaagcggaatggaaacttgca

SEQ ID NO: 3874887 - DNA, 25 bp, Homo sapien
tcgcggtcgtagtcctcagtggtgc

SEQ ID NO: 3874888 - DNA, 25 bp, Homo sapien
gctgggccctgagggagggagaggg

SEQ ID NO: 3874889 - DNA, 25 bp, Homo sapien
gtgctgggccctgagggagggagag

SEQ ID NO: 3874890 - DNA, 25 bp, Homo sapien
gtcagacagcaggtgctgggccctg

SEQ ID NO: 3874891 - DNA, 25 bp, Homo sapien
gggagggagagggagtggcacccac

SEQ ID NO: 3874892 - DNA, 25 bp, Homo sapien
gtggtcgcacaccacatctttccgt

SEQ ID NO: 3874893 - DNA, 25 bp, Homo sapien
ggtcatcatcgtagttggctgtggt

SEQ ID NO: 3874894 - DNA, 25 bp, Homo sapien
atctttccgtcactgcggccggcgc

SEQ ID NO: 3874895 - DNA, 25 bp, Homo sapien
gtgcagctctcatatttgttgccca

SEQ ID NO: 3874896 - DNA, 25 bp, Homo sapien
acagacggaagttcttggtgtaggt

SEQ ID NO: 3874897 - DNA, 25 bp, Homo sapien
ggccaaactcgtgggctgccacgag

SEQ ID NO: 3874898 - DNA, 25 bp, Homo sapien
gctgccacgaggaacaggctgtacc

SEQ ID NO: 3874899 - DNA, 25 bp, Homo sapien
gtaaatgggtgccatcagggcccca

SEQ ID NO: 3874900 - DNA, 25 bp, Homo sapien
ctgtttgcagatctcaggagtgaca

SEQ ID NO: 3874901 - DNA, 25 bp, Homo sapien
acaatgtcctgtttgcagatctcag

SEQ ID NO: 3874902 - DNA, 25 bp, Homo sapien
gatctgagcgatgccatcaaataca

SEQ ID NO: 3874903 - DNA, 25 bp, Homo sapien
agaagaagatctcaccacggatctg

SEQ ID NO: 3874904 - DNA, 25 bp, Homo sapien
gggcctcgtataccgcatcaatctt

SEQ ID NO: 3874905 - DNA, 25 bp, Homo sapien
ccatgggcttgtcacgtggcgtcac

SEQ ID NO: 3874906 - DNA, 25 bp, Homo sapien
taccgcatcaatcttttccgggagc

SEQ ID NO: 3874907 - DNA, 25 bp, Homo sapien
ggagctcaggccagaatgtggccac

SEQ ID NO: 3874908 - DNA, 25 bp, Homo sapien
tggcttggggtaccctcgctccagg

SEQ ID NO: 3874909 - DNA, 25 bp, Homo sapien
aggctggtcagtggcttggggtacc

SEQ ID NO: 3874910 - DNA, 25 bp, Homo sapien
cagtggcttggggtaccctcgctcc

SEQ ID NO: 3874911 - DNA, 25 bp, Homo sapien
ggcatccactcgctggacatcaggg

SEQ ID NO: 3874912 - DNA, 25 bp, Homo sapien
cccactatgggagctatggatatcc

SEQ ID NO: 3874913 - DNA, 25 bp, Homo sapien
taaacaagtcttgcccaagtggagc

SEQ ID NO: 3874914 - DNA, 25 bp, Homo sapien
tacgtgtaagtccaaggcctgttag

SEQ ID NO: 3874915 - DNA, 25 bp, Homo sapien
tcaggtaaatactttgggcatcggt

SEQ ID NO: 3874916 - DNA, 25 bp, Homo sapien
caggttatcggggatggcattccag

SEQ ID NO: 3874917 - DNA, 25 bp, Homo sapien
acgacggcatccaggttatcgggga

SEQ ID NO: 3874918 - DNA, 25 bp, Homo sapien
attccaggcatctgcgatgagcttg

SEQ ID NO: 3874919 - DNA, 25 bp, Homo sapien
ttccaggcatctgcgatgagcttgg

SEQ ID NO: 3874920 - DNA, 25 bp, Homo sapien
gatgcttccaaacttcacgctcttc

SEQ ID NO: 3874921 - DNA, 25 bp, Homo sapien
cagcagcctagccagtcggatttga

SEQ ID NO: 3874922 - DNA, 25 bp, Homo sapien
caggtaataggcacccttgaagaag

SEQ ID NO: 3874923 - DNA, 25 bp, Homo sapien
cgctcttcagactttggttctccag

SEQ ID NO: 3874924 - DNA, 25 bp, Homo sapien
tctagttctccaggcccggtgtatc

SEQ ID NO: 3874925 - DNA, 25 bp, Homo sapien
caggtaggagtgagaatgctgatta

SEQ ID NO: 3874926 - DNA, 25 bp, Homo sapien
ccaggcccggtgtatcgaaggcagt

SEQ ID NO: 3874927 - DNA, 25 bp, Homo sapien
ctgtagagctgaaggcacggctgcc

SEQ ID NO: 3874928 - DNA, 25 bp, Homo sapien
cagtgccctcttgagacagtctcca

SEQ ID NO: 3874929 - DNA, 25 bp, Homo sapien
ctgggaggagtacagtcagcatcta

SEQ ID NO: 3874930 - DNA, 25 bp, Homo sapien
gcagggctgcgttgaaaatatcaaa

SEQ ID NO: 3874931 - DNA, 25 bp, Homo sapien
taagaaaggttctaaggcagccagc

SEQ ID NO: 3874932 - DNA, 25 bp, Homo sapien
gatgcactgtgcagtgacttcagac

SEQ ID NO: 3874933 - DNA, 25 bp, Homo sapien
gacatgctaagtagagtgaacaggg

SEQ ID NO: 3874934 - DNA, 25 bp, Homo sapien
atccagtggagaagagactcggtag

SEQ ID NO: 3874935 - DNA, 25 bp, Homo sapien
gaagccacggcttggttttcctcca

SEQ ID NO: 3874936 - DNA, 25 bp, Homo sapien
atttcccatggggaatggttgaagg

SEQ ID NO: 3874937 - DNA, 25 bp, Homo sapien
gacatttcccatggggaatggttga

SEQ ID NO: 3874938 - DNA, 25 bp, Homo sapien
gttgacatttcccatggggaatggt

SEQ ID NO: 3874939 - DNA, 25 bp, Homo sapien
cttgttgacatttcccatggggaat

SEQ ID NO: 3874940 - DNA, 25 bp, Homo sapien
taagtttccgcttctggctgggtct

SEQ ID NO: 3874941 - DNA, 25 bp, Homo sapien
ggaagcaaacctcgaacagatgcca

SEQ ID NO: 3874942 - DNA, 25 bp, Homo sapien
cagggagcagagattcggacttttt

SEQ ID NO: 3874943 - DNA, 25 bp, Homo sapien
caggacagagggactagagcttact

SEQ ID NO: 3874944 - DNA, 25 bp, Homo sapien
gaagttacttagacgcctgctgctg

SEQ ID NO: 3874945 - DNA, 25 bp, Homo sapien
taacattccacagcgagacactagg

SEQ ID NO: 3874946 - DNA, 25 bp, Homo sapien
taatatagtccatcccctcggaggg

SEQ ID NO: 3874947 - DNA, 25 bp, Homo sapien
caaaactgagccgaagacctactag

SEQ ID NO: 3874948 - DNA, 25 bp, Homo sapien
cgatctgcgtctgctgcacgaaggg

SEQ ID NO: 3874949 - DNA, 25 bp, Homo sapien
tgtggccgccacttccgccgcctgg

SEQ ID NO: 3874950 - DNA, 25 bp, Homo sapien
aagaaggacgcctgacggggcacca

SEQ ID NO: 3874951 - DNA, 25 bp, Homo sapien
cggcggcgggaagaaggacgcctga

SEQ ID NO: 3874952 - DNA, 25 bp, Homo sapien
accacctgtgttgtttagctctgca

SEQ ID NO: 3874953 - DNA, 25 bp, Homo sapien
cccactgtagaggacaatggtctta

SEQ ID NO: 3874954 - DNA, 25 bp, Homo sapien
gaggaagtccaaagagtgcaactgc

SEQ ID NO: 3874955 - DNA, 25 bp, Homo sapien
ggcatggaatgtagcctgcgccacc

SEQ ID NO: 3874956 - DNA, 25 bp, Homo sapien
ctggcaggtaggtaaaattctggct

SEQ ID NO: 3874957 - DNA, 25 bp, Homo sapien
tcagttttgaatgcccatttggttc

SEQ ID NO: 3874958 - DNA, 25 bp, Homo sapien
catcttcaatgtgttgttgagccca

SEQ ID NO: 3874959 - DNA, 25 bp, Homo sapien
ctacatttgatcatcttagggtctg

SEQ ID NO: 3874960 - DNA, 25 bp, Homo sapien
tacagtccctcaaggttagtcagag

SEQ ID NO: 3874961 - DNA, 25 bp, Homo sapien
catagccttgagaattaacaaagcc

SEQ ID NO: 3874962 - DNA, 25 bp, Homo sapien
tattttcaggacatgtgcatagcct

SEQ ID NO: 3874963 - DNA, 25 bp, Homo sapien
tcttaagcacctgaaaccagcaagt

SEQ ID NO: 3874964 - DNA, 25 bp, Homo sapien
attgatttctactttcaatccactg

SEQ ID NO: 3874965 - DNA, 25 bp, Homo sapien
ctgtctaacatacagacctaccttg

SEQ ID NO: 3874966 - DNA, 25 bp, Homo sapien
tattattactttggaatcactggtt

SEQ ID NO: 3874967 - DNA, 25 bp, Homo sapien
ttttcagagtaccaacttctggagt

SEQ ID NO: 3874968 - DNA, 25 bp, Homo sapien
ggtatcaaggtaatgttagccccat

SEQ ID NO: 3874969 - DNA, 25 bp, Homo sapien
ctagtaaaataatcttggcgaaacg

SEQ ID NO: 3874970 - DNA, 25 bp, Homo sapien
tgttcccttattagccatttagcct

SEQ ID NO: 3874971 - DNA, 25 bp, Homo sapien
tactttctgaaagagcttgtgtgag

SEQ ID NO: 3874972 - DNA, 25 bp, Homo sapien
gttgcagcaccaaaagacttgacat

SEQ ID NO: 3874973 - DNA, 25 bp, Homo sapien
ttctcaatgaattttcttggtaact

SEQ ID NO: 3874974 - DNA, 25 bp, Homo sapien
tatggatcaaggttcatttttaacc

SEQ ID NO: 3874975 - DNA, 25 bp, Homo sapien
aatcaattgaatattaatgtatgga

SEQ ID NO: 3874976 - DNA, 25 bp, Homo sapien
gcagcaaatggccatgcaagtaata

SEQ ID NO: 3874977 - DNA, 25 bp, Homo sapien
tactgttgaaattgcagcaaatggc

SEQ ID NO: 3874978 - DNA, 25 bp, Homo sapien
gcaagataatcccaagaaggacaat

SEQ ID NO: 3874979 - DNA, 25 bp, Homo sapien
aaattaacgcaaccaataagacacg

SEQ ID NO: 3874980 - DNA, 25 bp, Homo sapien
ctccaaccagttattgggtgggtca

SEQ ID NO: 3874981 - DNA, 25 bp, Homo sapien
tccaaccagttattgggtgggtcag

SEQ ID NO: 3874982 - DNA, 25 bp, Homo sapien
ctcctccaaccagttattgggtggg

SEQ ID NO: 3874983 - DNA, 25 bp, Homo sapien
gcatttgggcagtaatttctacgta

SEQ ID NO: 3874984 - DNA, 25 bp, Homo sapien
cactgactaaactatgatgaactct

SEQ ID NO: 3874985 - DNA, 25 bp, Homo sapien
gaactagggatgtatcgcatttggc

SEQ ID NO: 3874986 - DNA, 25 bp, Homo sapien
cgcatttggcaataactcagaaaac

SEQ ID NO: 3874987 - DNA, 25 bp, Homo sapien
aatttcaaagctgtttgagtaattt

SEQ ID NO: 3874988 - DNA, 25 bp, Homo sapien
agcacgacccagaaatttcaaagct

SEQ ID NO: 3874989 - DNA, 25 bp, Homo sapien
tttcaaagctgtttgagtaattttc

SEQ ID NO: 3874990 - DNA, 25 bp, Homo sapien
cacgacccagaaatttcaaagctgt

SEQ ID NO: 3874991 - DNA, 25 bp, Homo sapien
tacaacacaggcaattccatcaaag

SEQ ID NO: 3874992 - DNA, 25 bp, Homo sapien
gcagcaacaaaaactggtgcttcca

SEQ ID NO: 3874993 - DNA, 25 bp, Homo sapien
catttcgagataccatagaaggtaa

SEQ ID NO: 3874994 - DNA, 25 bp, Homo sapien
gcttccaaaggacttgcaatctttc

SEQ ID NO: 3874995 - DNA, 25 bp, Homo sapien
aaaactggttgcacagcccgtaaca

SEQ ID NO: 3874996 - DNA, 25 bp, Homo sapien
tacacgggacaccaaaactggttgc

SEQ ID NO: 3874997 - DNA, 25 bp, Homo sapien
cctcctgatgttgttcgctttatta

SEQ ID NO: 3874998 - DNA, 25 bp, Homo sapien
ttcgggaatccggatctacacggga

SEQ ID NO: 3874999 - DNA, 25 bp, Homo sapien
caggaacgattagtacaagtacctt

SEQ ID NO: 3875000 - DNA, 25 bp, Homo sapien
gattagtacaagtaccttctgggaa

SEQ ID NO: 3875001 - DNA, 25 bp, Homo sapien
tcaaacaggaacgattagtacaagt

SEQ ID NO: 3875002 - DNA, 25 bp, Homo sapien
aaagtaatcaaacaggaacgattag

SEQ ID NO: 3875003 - DNA, 25 bp, Homo sapien
tgagtcataactttgctgctgagca

SEQ ID NO: 3875004 - DNA, 25 bp, Homo sapien
tgcttgaagcaagaactaccacact

SEQ ID NO: 3875005 - DNA, 25 bp, Homo sapien
gagaggaattatgaccccaaaagag

SEQ ID NO: 3875006 - DNA, 25 bp, Homo sapien
tatgtgtccgtgagggttcccaaac

SEQ ID NO: 3875007 - DNA, 25 bp, Homo sapien
gtatctgaggaggactggctgcact

SEQ ID NO: 3875008 - DNA, 25 bp, Homo sapien
aggaggactggctgcactggaactc

SEQ ID NO: 3875009 - DNA, 25 bp, Homo sapien
cagcttgtttgggtatctgaggagg

SEQ ID NO: 3875010 - DNA, 25 bp, Homo sapien
actggctgcactggaactcctggaa

SEQ ID NO: 3875011 - DNA, 25 bp, Homo sapien
atgtatatccttgccatgtccaggt

SEQ ID NO: 3875012 - DNA, 25 bp, Homo sapien
aatgtatatccttgccatgtccagg

SEQ ID NO: 3875013 - DNA, 25 bp, Homo sapien
tgagaaggctagattaactaaaccc

SEQ ID NO: 3875014 - DNA, 25 bp, Homo sapien
catcacattaacctggactgctggg

SEQ ID NO: 3875015 - DNA, 25 bp, Homo sapien
tatgctatgcatccattgttaaggc

SEQ ID NO: 3875016 - DNA, 25 bp, Homo sapien
catcactatctctgtaaggaactta

SEQ ID NO: 3875017 - DNA, 25 bp, Homo sapien
gaaagtaagcatacaaagctgaatg

SEQ ID NO: 3875018 - DNA, 25 bp, Homo sapien
tggcagaaagtaagcatacaaagct

SEQ ID NO: 3875019 - DNA, 25 bp, Homo sapien
gcagaaagtaagcatacaaagctga

SEQ ID NO: 3875020 - DNA, 25 bp, Homo sapien
ctggcagaaagtaagcatacaaagc

SEQ ID NO: 3875021 - DNA, 25 bp, Homo sapien
gacagtctctaaatggccaaatcac

SEQ ID NO: 3875022 - DNA, 25 bp, Homo sapien
ggtactgctaaaaccgactggatgc

SEQ ID NO: 3875023 - DNA, 25 bp, Homo sapien
tctcttcggagactacctgagggta

SEQ ID NO: 3875024 - DNA, 25 bp, Homo sapien
gcatgacacaggcaaacttaaggtt

SEQ ID NO: 3875025 - DNA, 25 bp, Homo sapien
ttttaaacaatgcttgctgcttcct

SEQ ID NO: 3875026 - DNA, 25 bp, Homo sapien
taaatcttcgaagagaaaaaatgca

SEQ ID NO: 3875027 - DNA, 25 bp, Homo sapien
gcagttctagttctttgtgtaattc

SEQ ID NO: 3875028 - DNA, 25 bp, Homo sapien
atcttaacaaatgtgcagttctagt

SEQ ID NO: 3875029 - DNA, 25 bp, Homo sapien
aatatacctttccataacaatgtct

SEQ ID NO: 3875030 - DNA, 25 bp, Homo sapien
tatacctttccataacaatgtctta

SEQ ID NO: 3875031 - DNA, 25 bp, Homo sapien
tacctttccataacaatgtcttaag

SEQ ID NO: 3875032 - DNA, 25 bp, Homo sapien
acctttccataacaatgtcttaagc

SEQ ID NO: 3875033 - DNA, 25 bp, Homo sapien
tgccattaaattccggactttattg

SEQ ID NO: 3875034 - DNA, 25 bp, Homo sapien
cattaaattccggactttattggca

SEQ ID NO: 3875035 - DNA, 25 bp, Homo sapien
tctgccattaaattccggactttat

SEQ ID NO: 3875036 - DNA, 25 bp, Homo sapien
ctgccattaaattccggactttatt

SEQ ID NO: 3875037 - DNA, 25 bp, Homo sapien
cttccataggcaatgttagctgtcc

SEQ ID NO: 3875038 - DNA, 25 bp, Homo sapien
gatctgttactggtattcccagagc

SEQ ID NO: 3875039 - DNA, 25 bp, Homo sapien
tcttcataggtatgatctgttactg

SEQ ID NO: 3875040 - DNA, 25 bp, Homo sapien
aatgttagctgtcctgctgaaatca

SEQ ID NO: 3875041 - DNA, 25 bp, Homo sapien
cctgtcaaagagtgcaaaaagttgt

SEQ ID NO: 3875042 - DNA, 25 bp, Homo sapien
tgtctcaagacatctgaaacaggca

SEQ ID NO: 3875043 - DNA, 25 bp, Homo sapien
ggaactcgcaatagatgcatattca

SEQ ID NO: 3875044 - DNA, 25 bp, Homo sapien
caggcaactttaaatacttggcgaa

SEQ ID NO: 3875045 - DNA, 25 bp, Homo sapien
gccttgattcttctaacactgacct

SEQ ID NO: 3875046 - DNA, 25 bp, Homo sapien
caaattgcctaccatattgatttac

SEQ ID NO: 3875047 - DNA, 25 bp, Homo sapien
caattaaaccataggctcagccttg

SEQ ID NO: 3875048 - DNA, 25 bp, Homo sapien
tgatttactcactgtaggactgaca

SEQ ID NO: 3875049 - DNA, 25 bp, Homo sapien
gcgaaaatgcggtaaccaaataggc

SEQ ID NO: 3875050 - DNA, 25 bp, Homo sapien
accaaataggctgcaaaggctcacc

SEQ ID NO: 3875051 - DNA, 25 bp, Homo sapien
caaatcagttcatgcgaaaatgcgg

SEQ ID NO: 3875052 - DNA, 25 bp, Homo sapien
caaaggctcaccagtcttccaactg

SEQ ID NO: 3875053 - DNA, 25 bp, Homo sapien
gttgggccttcaaactgtctgccat

SEQ ID NO: 3875054 - DNA, 25 bp, Homo sapien
cttcaaactgtctgccatcaaatat

SEQ ID NO: 3875055 - DNA, 25 bp, Homo sapien
tgttgggccttcaaactgtctgcca

SEQ ID NO: 3875056 - DNA, 25 bp, Homo sapien
gggccttcaaactgtctgccatcaa

SEQ ID NO: 3875057 - DNA, 25 bp, Homo sapien
tgctgtctgtgggaactctaccatc

SEQ ID NO: 3875058 - DNA, 25 bp, Homo sapien
gctgtctgtgggaactctaccatcc

SEQ ID NO: 3875059 - DNA, 25 bp, Homo sapien
tgtctgtgggaactctaccatccat

SEQ ID NO: 3875060 - DNA, 25 bp, Homo sapien
tctgtgggaactctaccatccatat

SEQ ID NO: 3875061 - DNA, 25 bp, Homo sapien
aagcaaatgcggcagcaatcttaga

SEQ ID NO: 3875062 - DNA, 25 bp, Homo sapien
ttcagtttaacaagcaaatgcggca

SEQ ID NO: 3875063 - DNA, 25 bp, Homo sapien
cagtttaacaagcaaatgcggcagc

SEQ ID NO: 3875064 - DNA, 25 bp, Homo sapien
gcagcaatcttagagatggtatgaa

SEQ ID NO: 3875065 - DNA, 25 bp, Homo sapien
aaagcccagcttaccagtcgtgtca

SEQ ID NO: 3875066 - DNA, 25 bp, Homo sapien
catcttcattagcataccggcggac

SEQ ID NO: 3875067 - DNA, 25 bp, Homo sapien
tgacagacacaatgctccggcaggt

SEQ ID NO: 3875068 - DNA, 25 bp, Homo sapien
gacttgaaggcacgaaacatggcat

SEQ ID NO: 3875069 - DNA, 25 bp, Homo sapien
tgtagggttgtgaaagagcttgcca

SEQ ID NO: 3875070 - DNA, 25 bp, Homo sapien
tccagggaggatcttgacttctcag

SEQ ID NO: 3875071 - DNA, 25 bp, Homo sapien
tcagcagtaaaaggcagcacatgat

SEQ ID NO: 3875072 - DNA, 25 bp, Homo sapien
cagggtatcagcaactgtgtacagc

SEQ ID NO: 3875073 - DNA, 25 bp, Homo sapien
ccaatcacatactctcggaagtcaa

SEQ ID NO: 3875074 - DNA, 25 bp, Homo sapien
gttgcacaagacagccaggccaatc

SEQ ID NO: 3875075 - DNA, 25 bp, Homo sapien
ctctgtgttggaagggttgcacaag

SEQ ID NO: 3875076 - DNA, 25 bp, Homo sapien
caggccaatcacatactctcggaag

SEQ ID NO: 3875077 - DNA, 25 bp, Homo sapien
gggctatttccttgaagagaccaga

SEQ ID NO: 3875078 - DNA, 25 bp, Homo sapien
gaatggtggagaactcttcctccgt

SEQ ID NO: 3875079 - DNA, 25 bp, Homo sapien
ttcctccgttatgtagccatcctca

SEQ ID NO: 3875080 - DNA, 25 bp, Homo sapien
agccatcctcatcaacgtcaaacag

SEQ ID NO: 3875081 - DNA, 25 bp, Homo sapien
tgactttattactggcggtggaggg

SEQ ID NO: 3875082 - DNA, 25 bp, Homo sapien
tgtctgaggtactctcttcatgctt

SEQ ID NO: 3875083 - DNA, 25 bp, Homo sapien
tctggaggtctaggtatgttgtaaa

SEQ ID NO: 3875084 - DNA, 25 bp, Homo sapien
atgaaaacacatggcacgtctggag

SEQ ID NO: 3875085 - DNA, 25 bp, Homo sapien
gtattatcaataagtgcctttacaa

SEQ ID NO: 3875086 - DNA, 25 bp, Homo sapien
agtattatcaataagtgcctttaca

SEQ ID NO: 3875087 - DNA, 25 bp, Homo sapien
tattatcaataagtgcctttacaat

SEQ ID NO: 3875088 - DNA, 25 bp, Homo sapien
ttatcaataagtgcctttacaattt

SEQ ID NO: 3875089 - DNA, 25 bp, Homo sapien
tcccttcccatattcagtgatccaa

SEQ ID NO: 3875090 - DNA, 25 bp, Homo sapien
tgtatcaccagtaaatgaatcagta

SEQ ID NO: 3875091 - DNA, 25 bp, Homo sapien
tgctcaccaatagaccattgcattc

SEQ ID NO: 3875092 - DNA, 25 bp, Homo sapien
taagaagctgcgtctaattagtgaa

SEQ ID NO: 3875093 - DNA, 25 bp, Homo sapien
caatcaatgttaccttcaataaggc

SEQ ID NO: 3875094 - DNA, 25 bp, Homo sapien
ttatagggcaagtgctacattctga

SEQ ID NO: 3875095 - DNA, 25 bp, Homo sapien
taccttctggccatagcagttgtct

SEQ ID NO: 3875096 - DNA, 25 bp, Homo sapien
tgttactgttggattcctgcctggg

SEQ ID NO: 3875097 - DNA, 25 bp, Homo sapien
agcaatgggatcactttcaagagcc

SEQ ID NO: 3875098 - DNA, 25 bp, Homo sapien
tacatacttcaacatctctcatgag

SEQ ID NO: 3875099 - DNA, 25 bp, Homo sapien
gacagacactctgataaaaatgtac

SEQ ID NO: 3875100 - DNA, 25 bp, Homo sapien
taatttacaatgctacgctttcatg

SEQ ID NO: 3875101 - DNA, 25 bp, Homo sapien
taaaagggtatattacatttgagac

SEQ ID NO: 3875102 - DNA, 25 bp, Homo sapien
caagcaacttggtctgtaagcagtc

SEQ ID NO: 3875103 - DNA, 25 bp, Homo sapien
gagctttactgctgtgcctcatgca

SEQ ID NO: 3875104 - DNA, 25 bp, Homo sapien
tcttctaaaagcgaggcagtctcct

SEQ ID NO: 3875105 - DNA, 25 bp, Homo sapien
ttagcaaggcatataagcagagtcc

SEQ ID NO: 3875106 - DNA, 25 bp, Homo sapien
ggattatgtttatatcttcccacag

SEQ ID NO: 3875107 - DNA, 25 bp, Homo sapien
attatgtttatatcttcccacagct

SEQ ID NO: 3875108 - DNA, 25 bp, Homo sapien
gtggattatgtttatatcttcccac

SEQ ID NO: 3875109 - DNA, 25 bp, Homo sapien
gattatgtttatatcttcccacagc

SEQ ID NO: 3875110 - DNA, 25 bp, Homo sapien
tcaaaggccgctggctctcttcatc

SEQ ID NO: 3875111 - DNA, 25 bp, Homo sapien
cttcaaaggccgctggctctcttca

SEQ ID NO: 3875112 - DNA, 25 bp, Homo sapien
catggggtaaaaggcaatggctgat

SEQ ID NO: 3875113 - DNA, 25 bp, Homo sapien
ggtaaaaggcaatggctgatgctgt

SEQ ID NO: 3875114 - DNA, 25 bp, Homo sapien
ggcaatggctgatgctgtgagtcca

SEQ ID NO: 3875115 - DNA, 25 bp, Homo sapien
acaggccatggggtaaaaggcaatg

SEQ ID NO: 3875116 - DNA, 25 bp, Homo sapien
cgccatggggccatgtggcttctct

SEQ ID NO: 3875117 - DNA, 25 bp, Homo sapien
ccttcttcctgcccagccaggtggc

SEQ ID NO: 3875118 - DNA, 25 bp, Homo sapien
ggagcccttcttcctgcccagccag

SEQ ID NO: 3875119 - DNA, 25 bp, Homo sapien
tggcttctctgggagcccttcttcc

SEQ ID NO: 3875120 - DNA, 25 bp, Homo sapien
taacgcgccgattgcattaacccag

SEQ ID NO: 3875121 - DNA, 25 bp, Homo sapien
tctgcgtcgcgtcagaaaggaggcc

SEQ ID NO: 3875122 - DNA, 25 bp, Homo sapien
cctgttagcgctaatggagactgac

SEQ ID NO: 3875123 - DNA, 25 bp, Homo sapien
ggtaatgtagcctgcgccccaggta

SEQ ID NO: 3875124 - DNA, 25 bp, Homo sapien
aggctgagggcagcgtgccgacccc

SEQ ID NO: 3875125 - DNA, 25 bp, Homo sapien
tgagggcagcgtgccgaccccctcc

SEQ ID NO: 3875126 - DNA, 25 bp, Homo sapien
ggcagcgtgccgaccccctccccag

SEQ ID NO: 3875127 - DNA, 25 bp, Homo sapien
gctgagggcagcgtgccgaccccct

SEQ ID NO: 3875128 - DNA, 25 bp, Homo sapien
gccttagacactgggatgagcgcgc

SEQ ID NO: 3875129 - DNA, 25 bp, Homo sapien
agaccacccgggagcgccttagaca

SEQ ID NO: 3875130 - DNA, 25 bp, Homo sapien
tgagcggacgcagggttcccagaaa

SEQ ID NO: 3875131 - DNA, 25 bp, Homo sapien
tcccagaaaagagcgcgcgtccgct

SEQ ID NO: 3875132 - DNA, 25 bp, Homo sapien
cgaagccgactacggacagcaggaa

SEQ ID NO: 3875133 - DNA, 25 bp, Homo sapien
agctccgcagttttgcgcgcccgaa

SEQ ID NO: 3875134 - DNA, 25 bp, Homo sapien
ctgcgggttcatccgcgccagaagc

SEQ ID NO: 3875135 - DNA, 25 bp, Homo sapien
agcaggcactggacgccgttgcgct

SEQ ID NO: 3875136 - DNA, 25 bp, Homo sapien
gggggtccctaagactctgagcttc

SEQ ID NO: 3875137 - DNA, 25 bp, Homo sapien
cccagatattttggccacaagggct

SEQ ID NO: 3875138 - DNA, 25 bp, Homo sapien
tcatactcagtattaaggatcccag

SEQ ID NO: 3875139 - DNA, 25 bp, Homo sapien
cagctactgcttcatactcagtatt

SEQ ID NO: 3875140 - DNA, 25 bp, Homo sapien
ctggtaggtgatggaagccggattc

SEQ ID NO: 3875141 - DNA, 25 bp, Homo sapien
agagaagggagtctaatggctcctt

SEQ ID NO: 3875142 - DNA, 25 bp, Homo sapien
ttccggccttgtgacccactaggtc

SEQ ID NO: 3875143 - DNA, 25 bp, Homo sapien
ggaagccggattcacattccggcct

SEQ ID NO: 3875144 - DNA, 25 bp, Homo sapien
tcccggttgtactgtcccagagcca

SEQ ID NO: 3875145 - DNA, 25 bp, Homo sapien
cagattttccaaacggtggcagccc

SEQ ID NO: 3875146 - DNA, 25 bp, Homo sapien
ggcatccccgcgatgataaggaaca

SEQ ID NO: 3875147 - DNA, 25 bp, Homo sapien
cagtgtgtacgggatcaagaaggca

SEQ ID NO: 3875148 - DNA, 25 bp, Homo sapien
ccttttcagcaccagtgacctgtcg

SEQ ID NO: 3875149 - DNA, 25 bp, Homo sapien
gtaaggtaggagtctcccaggccca

SEQ ID NO: 3875150 - DNA, 25 bp, Homo sapien
tcagcaccagtgacctgtcgcatgg

SEQ ID NO: 3875151 - DNA, 25 bp, Homo sapien
tgacctgtcgcatggaagacaattt

SEQ ID NO: 3875152 - DNA, 25 bp, Homo sapien
cataaaactcggctgccggcgtgaa

SEQ ID NO: 3875153 - DNA, 25 bp, Homo sapien
tagtagagtgaccaggcgatgatga

SEQ ID NO: 3875154 - DNA, 25 bp, Homo sapien
tgtggttgccaagcacggagccatt

SEQ ID NO: 3875155 - DNA, 25 bp, Homo sapien
tgtagtagaagccaacgtacagggc

SEQ ID NO: 3875156 - DNA, 25 bp, Homo sapien
gctctcgtgaaggtgcaggacacca

SEQ ID NO: 3875157 - DNA, 25 bp, Homo sapien
tgacgacgaccatcagacagagcaa

SEQ ID NO: 3875158 - DNA, 25 bp, Homo sapien
gggcaggccgatgtcatgaatcccg

SEQ ID NO: 3875159 - DNA, 25 bp, Homo sapien
taaaatacaagacgatgacgacgac

SEQ ID NO: 3875160 - DNA, 25 bp, Homo sapien
tagagacccaagaagctagtgacat

SEQ ID NO: 3875161 - DNA, 25 bp, Homo sapien
ccaagaagctagtgacattggttga

SEQ ID NO: 3875162 - DNA, 25 bp, Homo sapien
gtgacattggttgatccataacctg

SEQ ID NO: 3875163 - DNA, 25 bp, Homo sapien
tgacattggttgatccataacctgc

SEQ ID NO: 3875164 - DNA, 25 bp, Homo sapien
gaggtggtcctgcattggccatgtt

SEQ ID NO: 3875165 - DNA, 25 bp, Homo sapien
tttgttggccatggattcagtttcc

SEQ ID NO: 3875166 - DNA, 25 bp, Homo sapien
ctgcattggccatgtttgttggcca

SEQ ID NO: 3875167 - DNA, 25 bp, Homo sapien
ctggaggtggtcctgcattggccat

SEQ ID NO: 3875168 - DNA, 25 bp, Homo sapien
ttcaggtgagagcctcgctctggcc

SEQ ID NO: 3875169 - DNA, 25 bp, Homo sapien
ggtgagagcctcgctctggccccaa

SEQ ID NO: 3875170 - DNA, 25 bp, Homo sapien
aggtgagagcctcgctctggcccca

SEQ ID NO: 3875171 - DNA, 25 bp, Homo sapien
tagaagtcgatgtgcaggtaggcat

SEQ ID NO: 3875172 - DNA, 25 bp, Homo sapien
agcgtgacgccatggaccaggagca

SEQ ID NO: 3875173 - DNA, 25 bp, Homo sapien
cacgaacagcacgaagtaaggcagc

SEQ ID NO: 3875174 - DNA, 25 bp, Homo sapien
cgtggcctctttcaagcggtagaag

SEQ ID NO: 3875175 - DNA, 25 bp, Homo sapien
acacctcactggtccggaagggctg

SEQ ID NO: 3875176 - DNA, 25 bp, Homo sapien
acactggaacacctcactggtccgg

SEQ ID NO: 3875177 - DNA, 25 bp, Homo sapien
tgcttcctacaacactggaacacct

SEQ ID NO: 3875178 - DNA, 25 bp, Homo sapien
tcactggtccggaagggctgagaaa

SEQ ID NO: 3875179 - DNA, 25 bp, Homo sapien
tctgagttgcggcatcaatccatac

SEQ ID NO: 3875180 - DNA, 25 bp, Homo sapien
tgttgtaactggcaaatgcaatcaa

SEQ ID NO: 3875181 - DNA, 25 bp, Homo sapien
aaaaatatctgagttgcggcatcaa

SEQ ID NO: 3875182 - DNA, 25 bp, Homo sapien
tgttgtcaaatttgttgtaactggc

SEQ ID NO: 3875183 - DNA, 25 bp, Homo sapien
cacatcctcaatgttgaccttgtgt

SEQ ID NO: 3875184 - DNA, 25 bp, Homo sapien
agaagatggcgaacccagagacgaa

SEQ ID NO: 3875185 - DNA, 25 bp, Homo sapien
gctggtgatacagttgatgctgctg

SEQ ID NO: 3875186 - DNA, 25 bp, Homo sapien
catgggccatgtaaccaaggatgga

SEQ ID NO: 3875187 - DNA, 25 bp, Homo sapien
ggcctctggatacaggatgaacact

SEQ ID NO: 3875188 - DNA, 25 bp, Homo sapien
cacaacagcccagaatgtagatcca

SEQ ID NO: 3875189 - DNA, 25 bp, Homo sapien
cagaatgtagatccagacagggtag

SEQ ID NO: 3875190 - DNA, 25 bp, Homo sapien
gatacaggatgaacactaggccagc

SEQ ID NO: 3875191 - DNA, 25 bp, Homo sapien
aagagtttccggtgtcgcttcagga

SEQ ID NO: 3875192 - DNA, 25 bp, Homo sapien
cagaacagggcgagaaggaaagtgc

SEQ ID NO: 3875193 - DNA, 25 bp, Homo sapien
tgaaggtgacgccaaatgtgaagag

SEQ ID NO: 3875194 - DNA, 25 bp, Homo sapien
aagtcatctgccaggcccgtgatga

SEQ ID NO: 3875195 - DNA, 25 bp, Homo sapien
caggagggtcaagacgtaaattcca

SEQ ID NO: 3875196 - DNA, 25 bp, Homo sapien
gtgtccaggagggtcaagacgtaaa

SEQ ID NO: 3875197 - DNA, 25 bp, Homo sapien
caggaaactccgatggcttccatga

SEQ ID NO: 3875198 - DNA, 25 bp, Homo sapien
actccgatggcttccatgaggacag

SEQ ID NO: 3875199 - DNA, 25 bp, Homo sapien
acagggcaggcctgttaccatggcc

SEQ ID NO: 3875200 - DNA, 25 bp, Homo sapien
atggcccccatgatagccagggcca

SEQ ID NO: 3875201 - DNA, 25 bp, Homo sapien
gcccccatgatagccagggccaggt

SEQ ID NO: 3875202 - DNA, 25 bp, Homo sapien
agcacagtctccagtatagacccgg

SEQ ID NO: 3875203 - DNA, 25 bp, Homo sapien
tctgctggatgtcgttgctgaacct

SEQ ID NO: 3875204 - DNA, 25 bp, Homo sapien
tctccagtatagacccggcctgaac

SEQ ID NO: 3875205 - DNA, 25 bp, Homo sapien
aaggcaggactgacgaacttccagc

SEQ ID NO: 3875206 - DNA, 25 bp, Homo sapien
cctgcgtgctgaggaacttatagat

SEQ ID NO: 3875207 - DNA, 25 bp, Homo sapien
tcgtcgtaggtgagtggcttgaagt

SEQ ID NO: 3875208 - DNA, 25 bp, Homo sapien
cccagggcgggaagatgtagtcgtc

SEQ ID NO: 3875209 - DNA, 25 bp, Homo sapien
aacttatagatgacgtagatgggca

SEQ ID NO: 3875210 - DNA, 25 bp, Homo sapien
atgtccctctgagccaccaggtggt

SEQ ID NO: 3875211 - DNA, 25 bp, Homo sapien
cgttctctggcgtgatgccataggc

SEQ ID NO: 3875212 - DNA, 25 bp, Homo sapien
tggtgctcgttctctggcgtgatgc

SEQ ID NO: 3875213 - DNA, 25 bp, Homo sapien
ctggcgtgatgccataggccagtct

SEQ ID NO: 3875214 - DNA, 25 bp, Homo sapien
gaatcccaagatggtgtccgaggtg

SEQ ID NO: 3875215 - DNA, 25 bp, Homo sapien
ccaacaagggtgtaagagactctaa

SEQ ID NO: 3875216 - DNA, 25 bp, Homo sapien
gcaagagcagcatgaggcctcagta

SEQ ID NO: 3875217 - DNA, 25 bp, Homo sapien
caagaggagggtctatgtaccttcc

SEQ ID NO: 3875218 - DNA, 25 bp, Homo sapien
gaattgaaggcccaactcgatctgt

SEQ ID NO: 3875219 - DNA, 25 bp, Homo sapien
caagagtgactaaaatgctgggcct

SEQ ID NO: 3875220 - DNA, 25 bp, Homo sapien
gattcaccccgggacaaatgtctgg

SEQ ID NO: 3875221 - DNA, 25 bp, Homo sapien
gaaatggcaggctctctcggaagca

SEQ ID NO: 3875222 - DNA, 25 bp, Homo sapien
tgcttcagtctcacattagcgaggc

SEQ ID NO: 3875223 - DNA, 25 bp, Homo sapien
cagagctgtggatcctgggactcac

SEQ ID NO: 3875224 - DNA, 25 bp, Homo sapien
ttagcgaggctagaaaacagatcat

SEQ ID NO: 3875225 - DNA, 25 bp, Homo sapien
gatcatatagcaggaactggctccc

SEQ ID NO: 3875226 - DNA, 25 bp, Homo sapien
tctgtccagggtgctttccacaggg

SEQ ID NO: 3875227 - DNA, 25 bp, Homo sapien
catagaacatagatgcccttatctg

SEQ ID NO: 3875228 - DNA, 25 bp, Homo sapien
tgagcccaagggagtaactaatatc

SEQ ID NO: 3875229 - DNA, 25 bp, Homo sapien
taatatcaggccatagaacatagat

SEQ ID NO: 3875230 - DNA, 25 bp, Homo sapien
tatttggaatttatatacaacctgc

SEQ ID NO: 3875231 - DNA, 25 bp, Homo sapien
ctatttggaatttatatacaacctg

SEQ ID NO: 3875232 - DNA, 25 bp, Homo sapien
gggtcatcgtcatcaaggtcatttc

SEQ ID NO: 3875233 - DNA, 25 bp, Homo sapien
ctcatggcccccactaggtacatga

SEQ ID NO: 3875234 - DNA, 25 bp, Homo sapien
tgacacagctgtcaagaatcagagc

SEQ ID NO: 3875235 - DNA, 25 bp, Homo sapien
tcatggcccccactaggtacatgag

SEQ ID NO: 3875236 - DNA, 25 bp, Homo sapien
cacagctgtcaagaatcagagccag

SEQ ID NO: 3875237 - DNA, 25 bp, Homo sapien
gagaaactgccctaccttgggatct

SEQ ID NO: 3875238 - DNA, 25 bp, Homo sapien
agttctgagagaaactgccctacct

SEQ ID NO: 3875239 - DNA, 25 bp, Homo sapien
tttcggttggtcaatagttctgaga

SEQ ID NO: 3875240 - DNA, 25 bp, Homo sapien
tcctttcggttggtcaatagttctg

SEQ ID NO: 3875241 - DNA, 25 bp, Homo sapien
cttgaccaggggatcccacaactta

SEQ ID NO: 3875242 - DNA, 25 bp, Homo sapien
ttgaccaggggatcccacaacttac

SEQ ID NO: 3875243 - DNA, 25 bp, Homo sapien
gaggttgatgcggtgcccaccatca

SEQ ID NO: 3875244 - DNA, 25 bp, Homo sapien
ccatcagaggttgatgcggtgccca

SEQ ID NO: 3875245 - DNA, 25 bp, Homo sapien
cgagtacccgcccatcagaggttga

SEQ ID NO: 3875246 - DNA, 25 bp, Homo sapien
tgggctgcgagtacccgcccatcag

SEQ ID NO: 3875247 - DNA, 25 bp, Homo sapien
agatgcccaggcagtgctgaatggt

SEQ ID NO: 3875248 - DNA, 25 bp, Homo sapien
tgcccaggcagtgctgaatggtcac

SEQ ID NO: 3875249 - DNA, 25 bp, Homo sapien
ctgaagaatccccagatgcccaggc

SEQ ID NO: 3875250 - DNA, 25 bp, Homo sapien
cccagatgcccaggcagtgctgaat

SEQ ID NO: 3875251 - DNA, 25 bp, Homo sapien
gggcttgacgtcacccttctccacc

SEQ ID NO: 3875252 - DNA, 25 bp, Homo sapien
ggggcttgacgtcacccttctccac

SEQ ID NO: 3875253 - DNA, 25 bp, Homo sapien
ggcttgacgtcacccttctccacca

SEQ ID NO: 3875254 - DNA, 25 bp, Homo sapien
aggggcttgacgtcacccttctcca

SEQ ID NO: 3875255 - DNA, 25 bp, Homo sapien
ttcacacccaacagtgttagcaatt

SEQ ID NO: 3875256 - DNA, 25 bp, Homo sapien
gtcaccagaaactgtcaacccattg

SEQ ID NO: 3875257 - DNA, 25 bp, Homo sapien
cagagaggacaggattgtaagattc

SEQ ID NO: 3875258 - DNA, 25 bp, Homo sapien
gatcaggaggatattgttggagact

SEQ ID NO: 3875259 - DNA, 25 bp, Homo sapien
ttgtaagattcgtcagaggtgatgt

SEQ ID NO: 3875260 - DNA, 25 bp, Homo sapien
ccatcaatcaccgtgggtgtgtggg

SEQ ID NO: 3875261 - DNA, 25 bp, Homo sapien
gtgtttttggcagcaccactccatc

SEQ ID NO: 3875262 - DNA, 25 bp, Homo sapien
ttccttcctgttaaatccgacaatg

SEQ ID NO: 3875263 - DNA, 25 bp, Homo sapien
ttcctgttaaatccgacaatgtagg

SEQ ID NO: 3875264 - DNA, 25 bp, Homo sapien
aacaaagggataggacttccagaag

SEQ ID NO: 3875265 - DNA, 25 bp, Homo sapien
acaaagggataggacttccagaaga

SEQ ID NO: 3875266 - DNA, 25 bp, Homo sapien
cagtacgtcccccattaagtccagg

SEQ ID NO: 3875267 - DNA, 25 bp, Homo sapien
cacagatgggacaccgaacagtacg

SEQ ID NO: 3875268 - DNA, 25 bp, Homo sapien
tttcttcttgacagggtcatctgtt

SEQ ID NO: 3875269 - DNA, 25 bp, Homo sapien
ttcttcttgacagggtcatctgttc

SEQ ID NO: 3875270 - DNA, 25 bp, Homo sapien
agcttggacggtactgaaactcata

SEQ ID NO: 3875271 - DNA, 25 bp, Homo sapien
tcatgtctgatgagaagcttggacg

SEQ ID NO: 3875272 - DNA, 25 bp, Homo sapien
tctgatgagaagcttggacggtact

SEQ ID NO: 3875273 - DNA, 25 bp, Homo sapien
tgggtttcatgtctgatgagaagct

SEQ ID NO: 3875274 - DNA, 25 bp, Homo sapien
cttgttgatgacatagcccaggatt

SEQ ID NO: 3875275 - DNA, 25 bp, Homo sapien
tgacatagcccaggattctgagtgt

SEQ ID NO: 3875276 - DNA, 25 bp, Homo sapien
gttgatgacatagcccaggattctg

SEQ ID NO: 3875277 - DNA, 25 bp, Homo sapien
ctgtcttgttgatgacatagcccag

SEQ ID NO: 3875278 - DNA, 25 bp, Homo sapien
catcttgctaagtctgatctcctct

SEQ ID NO: 3875279 - DNA, 25 bp, Homo sapien
ccattgcgagcaaagttggcccaga

SEQ ID NO: 3875280 - DNA, 25 bp, Homo sapien
caccatcttgctaagtctgatctcc

SEQ ID NO: 3875281 - DNA, 25 bp, Homo sapien
ttgcgagcaaagttggcccagaatt

SEQ ID NO: 3875282 - DNA, 25 bp, Homo sapien
tgcaggtacccttcctcctggttgt

SEQ ID NO: 3875283 - DNA, 25 bp, Homo sapien
gggctgcctgggtgttagcaccaat

SEQ ID NO: 3875284 - DNA, 25 bp, Homo sapien
cctgggtgttagcaccaatctgcag

SEQ ID NO: 3875285 - DNA, 25 bp, Homo sapien
ttgtactctggccagtgcggcagcc

SEQ ID NO: 3875286 - DNA, 25 bp, Homo sapien
ctccaggttcccgaggctggatgga

SEQ ID NO: 3875287 - DNA, 25 bp, Homo sapien
ggaccttccgttcacagcgcaatgt

SEQ ID NO: 3875288 - DNA, 25 bp, Homo sapien
cacagcgcaatgtgttctatctggg

SEQ ID NO: 3875289 - DNA, 25 bp, Homo sapien
ggctggatggaccttccgttcacag

SEQ ID NO: 3875290 - DNA, 25 bp, Homo sapien
tggcaagggtcatcatcaccaaggt

SEQ ID NO: 3875291 - DNA, 25 bp, Homo sapien
caagggtcatcatcaccaaggtcat

SEQ ID NO: 3875292 - DNA, 25 bp, Homo sapien
gcaagggtcatcatcaccaaggtca

SEQ ID NO: 3875293 - DNA, 25 bp, Homo sapien
ctttggcaagggtcatcatcaccaa

SEQ ID NO: 3875294 - DNA, 25 bp, Homo sapien
gggcgacagttccgggggcctgcga

SEQ ID NO: 3875295 - DNA, 25 bp, Homo sapien
ccgggggcctgcgaggtctccgtgc

SEQ ID NO: 3875296 - DNA, 25 bp, Homo sapien
gggcctgcgaggtctccgtgcagct

SEQ ID NO: 3875297 - DNA, 25 bp, Homo sapien
gcctgcgaggtctccgtgcagctca

SEQ ID NO: 3875298 - DNA, 25 bp, Homo sapien
cgcggaagcagcgagagtggccagg

SEQ ID NO: 3875299 - DNA, 25 bp, Homo sapien
cggaagcagcgagagtggccaggac

SEQ ID NO: 3875300 - DNA, 25 bp, Homo sapien
gccgcggaagcagcgagagtggcca

SEQ ID NO: 3875301 - DNA, 25 bp, Homo sapien
caagccgcggaagcagcgagagtgg

SEQ ID NO: 3875302 - DNA, 25 bp, Homo sapien
ccacggagccggaccttttgtgtct

SEQ ID NO: 3875303 - DNA, 25 bp, Homo sapien
gccacggagccggaccttttgtgtc

SEQ ID NO: 3875304 - DNA, 25 bp, Homo sapien
agtccaattccaagtacggaggtcg

SEQ ID NO: 3875305 - DNA, 25 bp, Homo sapien
caattccaagtacggaggtcgcgcc

SEQ ID NO: 3875306 - DNA, 25 bp, Homo sapien
tgtcctgggagaggtacccataagg

SEQ ID NO: 3875307 - DNA, 25 bp, Homo sapien
taaggcagtctaggaattagaagag

SEQ ID NO: 3875308 - DNA, 25 bp, Homo sapien
ggcaaggccttctgattgcgggcat

SEQ ID NO: 3875309 - DNA, 25 bp, Homo sapien
gattgcgggcatcatggaggagctg

SEQ ID NO: 3875310 - DNA, 25 bp, Homo sapien
ttatagggaagggtcacatatacac

SEQ ID NO: 3875311 - DNA, 25 bp, Homo sapien
attatagggaagggtcacatataca

SEQ ID NO: 3875312 - DNA, 25 bp, Homo sapien
cattatagggaagggtcacatatac

SEQ ID NO: 3875313 - DNA, 25 bp, Homo sapien
gagggtacgaggtggcattcttcac

SEQ ID NO: 3875314 - DNA, 25 bp, Homo sapien
ccagcactttgccatgcacggtgtc

SEQ ID NO: 3875315 - DNA, 25 bp, Homo sapien
ggctgtgcaaatccttctaagctga

SEQ ID NO: 3875316 - DNA, 25 bp, Homo sapien
caggctgcggtggagtaaacctcag

SEQ ID NO: 3875317 - DNA, 25 bp, Homo sapien
tgctggaaagcctccgaacacctgg

SEQ ID NO: 3875318 - DNA, 25 bp, Homo sapien
tactgatagttgttctctctgggtg

SEQ ID NO: 3875319 - DNA, 25 bp, Homo sapien
agggtctgctctgatgtctgtaggg

SEQ ID NO: 3875320 - DNA, 25 bp, Homo sapien
tctgggtggtggaatattgtatgtg

SEQ ID NO: 3875321 - DNA, 25 bp, Homo sapien
atagctctgagagtaactgccccgc

SEQ ID NO: 3875322 - DNA, 25 bp, Homo sapien
tgtaaatagctctgagagtaactgc

SEQ ID NO: 3875323 - DNA, 25 bp, Homo sapien
ctgagagtaactgccccgccttggg

SEQ ID NO: 3875324 - DNA, 25 bp, Homo sapien
ggtttgtaaatagctctgagagtaa

SEQ ID NO: 3875325 - DNA, 25 bp, Homo sapien
ggagtgtaaatattgaggtaaagac

SEQ ID NO: 3875326 - DNA, 25 bp, Homo sapien
aaatattgaggtaaagacagtcttc

SEQ ID NO: 3875327 - DNA, 25 bp, Homo sapien
tgtaaatattgaggtaaagacagtc

SEQ ID NO: 3875328 - DNA, 25 bp, Homo sapien
ttgaggtaaagacagtcttcagaaa

SEQ ID NO: 3875329 - DNA, 25 bp, Homo sapien
accaccaccacgttttcatgggcag

SEQ ID NO: 3875330 - DNA, 25 bp, Homo sapien
gcagcaagggccagcccatcatagg

SEQ ID NO: 3875331 - DNA, 25 bp, Homo sapien
catcataggttgatgccgcacccac

SEQ ID NO: 3875332 - DNA, 25 bp, Homo sapien
caggcgatattgaatggtcaccacc

SEQ ID NO: 3875333 - DNA, 25 bp, Homo sapien
cagttcccccggctgtgttcatccc

SEQ ID NO: 3875334 - DNA, 25 bp, Homo sapien
tccctccaaagctggcaatgttgtc

SEQ ID NO: 3875335 - DNA, 25 bp, Homo sapien
ccaaagctggcaatgttgtcctgga

SEQ ID NO: 3875336 - DNA, 25 bp, Homo sapien
ggttccctccaaagctggcaatgtt

SEQ ID NO: 3875337 - DNA, 25 bp, Homo sapien
tgggttccctccaaagctggcaatg

SEQ ID NO: 3875338 - DNA, 25 bp, Homo sapien
agagacactttctcctcccgctgac

SEQ ID NO: 3875339 - DNA, 25 bp, Homo sapien
cctcccgctgactctccaaagatgg

SEQ ID NO: 3875340 - DNA, 25 bp, Homo sapien
tcctcccgctgactctccaaagatg

SEQ ID NO: 3875341 - DNA, 25 bp, Homo sapien
agacactttctcctcccgctgactc

SEQ ID NO: 3875342 - DNA, 25 bp, Homo sapien
aagcgtggggttgggcctggtgaca

SEQ ID NO: 3875343 - DNA, 25 bp, Homo sapien
ctcagccaagggcttgacatcacct

SEQ ID NO: 3875344 - DNA, 25 bp, Homo sapien
cactctcagaaatggcccggtggaa

SEQ ID NO: 3875345 - DNA, 25 bp, Homo sapien
accagaacagaagtgagggccacgc

SEQ ID NO: 3875346 - DNA, 25 bp, Homo sapien
gaacagaagtgagggccacgccact

SEQ ID NO: 3875347 - DNA, 25 bp, Homo sapien
tgcacccagcagtgatagcaatttg

SEQ ID NO: 3875348 - DNA, 25 bp, Homo sapien
gttttgcacccagcagtgatagcaa

SEQ ID NO: 3875349 - DNA, 25 bp, Homo sapien
ggttttgcacccagcagtgatagca

SEQ ID NO: 3875350 - DNA, 25 bp, Homo sapien
tttgcacccagcagtgatagcaatt

SEQ ID NO: 3875351 - DNA, 25 bp, Homo sapien
caatgtcgtctccaagagctcctct

SEQ ID NO: 3875352 - DNA, 25 bp, Homo sapien
tcaatgtcgtctccaagagctcctc

SEQ ID NO: 3875353 - DNA, 25 bp, Homo sapien
tttcaatgtcgtctccaagagctcc

SEQ ID NO: 3875354 - DNA, 25 bp, Homo sapien
ttcaatgtcgtctccaagagctcct

SEQ ID NO: 3875355 - DNA, 25 bp, Homo sapien
tccgtgaattcgtatatctatatgt

SEQ ID NO: 3875356 - DNA, 25 bp, Homo sapien
actccgtgaattcgtatatctatat

SEQ ID NO: 3875357 - DNA, 25 bp, Homo sapien
cactccgtgaattcgtatatctata

SEQ ID NO: 3875358 - DNA, 25 bp, Homo sapien
ctccgtgaattcgtatatctatatg

SEQ ID NO: 3875359 - DNA, 25 bp, Homo sapien
gcaacagaggtgtcaggttcttccc

SEQ ID NO: 3875360 - DNA, 25 bp, Homo sapien
cagaggtgtcaggttcttcccgcat

SEQ ID NO: 3875361 - DNA, 25 bp, Homo sapien
aacagaggtgtcaggttcttcccgc

SEQ ID NO: 3875362 - DNA, 25 bp, Homo sapien
gggcaacagaggtgtcaggttcttc

SEQ ID NO: 3875363 - DNA, 25 bp, Homo sapien
aagctcttcaggtgttttcagcagc

SEQ ID NO: 3875364 - DNA, 25 bp, Homo sapien
agcagcatcccatcaatcacagtgc

SEQ ID NO: 3875365 - DNA, 25 bp, Homo sapien
tgcttgttaattccgaccatgtagg

SEQ ID NO: 3875366 - DNA, 25 bp, Homo sapien
aatcaaccagccaaactcctgcttg

SEQ ID NO: 3875367 - DNA, 25 bp, Homo sapien
gagtgcagctcggagagggaagcat

SEQ ID NO: 3875368 - DNA, 25 bp, Homo sapien
tcagagtgcagctcggagagggaag

SEQ ID NO: 3875369 - DNA, 25 bp, Homo sapien
gatgggggtggttgagtccctccaa

SEQ ID NO: 3875370 - DNA, 25 bp, Homo sapien
gcagctcggagagggaagcattcct

SEQ ID NO: 3875371 - DNA, 25 bp, Homo sapien
gtcaatggtaactcaagaagaagcc

SEQ ID NO: 3875372 - DNA, 25 bp, Homo sapien
tccgtggaaatgttaactcctgctg

SEQ ID NO: 3875373 - DNA, 25 bp, Homo sapien
tgataccccggtgaaaactgtgccc

SEQ ID NO: 3875374 - DNA, 25 bp, Homo sapien
tattgagcatagcacccgattaggt

SEQ ID NO: 3875375 - DNA, 25 bp, Homo sapien
gatccctacagtggtcagtgacatg

SEQ ID NO: 3875376 - DNA, 25 bp, Homo sapien
tccctgtcgaaagagtagagcctga

SEQ ID NO: 3875377 - DNA, 25 bp, Homo sapien
ttaaggctgtgtccctagaatgacc

SEQ ID NO: 3875378 - DNA, 25 bp, Homo sapien
cttaacataactgcctgggaaggct

SEQ ID NO: 3875379 - DNA, 25 bp, Homo sapien
catttatgaatcattgggaattaat

SEQ ID NO: 3875380 - DNA, 25 bp, Homo sapien
tcattgggaattaatgataagaaac

SEQ ID NO: 3875381 - DNA, 25 bp, Homo sapien
gaatcattgggaattaatgataaga

SEQ ID NO: 3875382 - DNA, 25 bp, Homo sapien
ttatgaatcattgggaattaatgat

SEQ ID NO: 3875383 - DNA, 25 bp, Homo sapien
tgtcttctggtccagttgcccttcg

SEQ ID NO: 3875384 - DNA, 25 bp, Homo sapien
tctctgggtctcagccaattcccat

SEQ ID NO: 3875385 - DNA, 25 bp, Homo sapien
tcaatggtgaaccccataagccctg

SEQ ID NO: 3875386 - DNA, 25 bp, Homo sapien
caactccccgctagggtggaaaatg

SEQ ID NO: 3875387 - DNA, 25 bp, Homo sapien
gccatttaattgctctatgatttgg

SEQ ID NO: 3875388 - DNA, 25 bp, Homo sapien
attctgccatttaattgctctatga

SEQ ID NO: 3875389 - DNA, 25 bp, Homo sapien
tctttttgacagtgtcgtctgttcc

SEQ ID NO: 3875390 - DNA, 25 bp, Homo sapien
agtgtcgtctgttcctcctaagtat

SEQ ID NO: 3875391 - DNA, 25 bp, Homo sapien
tcacagatgggacaccaaacatcac

SEQ ID NO: 3875392 - DNA, 25 bp, Homo sapien
acatcacatctgctatcaagtccag

SEQ ID NO: 3875393 - DNA, 25 bp, Homo sapien
agcttggacggtactgaaactcata

SEQ ID NO: 3875394 - DNA, 25 bp, Homo sapien
aactcatacatgtaggtgggtgctc

SEQ ID NO: 3875395 - DNA, 25 bp, Homo sapien
tctgatgagaagcttggacggtact

SEQ ID NO: 3875396 - DNA, 25 bp, Homo sapien
tgggtttcatgtctgatgagaagct

SEQ ID NO: 3875397 - DNA, 25 bp, Homo sapien
aaagacggagaagagctcatccccg

SEQ ID NO: 3875398 - DNA, 25 bp, Homo sapien
gccccaaagacggagaagagctcat

SEQ ID NO: 3875399 - DNA, 25 bp, Homo sapien
gggccccaaagacggagaagagctc

SEQ ID NO: 3875400 - DNA, 25 bp, Homo sapien
ggagaagagctcatccccgtggtct

SEQ ID NO: 3875401 - DNA, 25 bp, Homo sapien
catcttgctaagtctgatctcctct

SEQ ID NO: 3875402 - DNA, 25 bp, Homo sapien
ccattgcgagcaaagttggcccaga

SEQ ID NO: 3875403 - DNA, 25 bp, Homo sapien
caccatcttgctaagtctgatctcc

SEQ ID NO: 3875404 - DNA, 25 bp, Homo sapien
ttgcgagcaaagttggcccagaatt

SEQ ID NO: 3875405 - DNA, 25 bp, Homo sapien
gaatcaattagaattgccccaaagc

SEQ ID NO: 3875406 - DNA, 25 bp, Homo sapien
ctggaaacagaatcaattagaattg

SEQ ID NO: 3875407 - DNA, 25 bp, Homo sapien
cagaatcaattagaattgccccaaa

SEQ ID NO: 3875408 - DNA, 25 bp, Homo sapien
gaaacagaatcaattagaattgccc

SEQ ID NO: 3875409 - DNA, 25 bp, Homo sapien
cctgggtgttggcaccaatctgcag

SEQ ID NO: 3875410 - DNA, 25 bp, Homo sapien
ccttccttctggttgtactctggcc

SEQ ID NO: 3875411 - DNA, 25 bp, Homo sapien
gccgcctgggtgttggcaccaatct

SEQ ID NO: 3875412 - DNA, 25 bp, Homo sapien
tgggtgttggcaccaatctgcagat

SEQ ID NO: 3875413 - DNA, 25 bp, Homo sapien
tcacagctctatgtgttctgtctgg

SEQ ID NO: 3875414 - DNA, 25 bp, Homo sapien
cacagctctatgtgttctgtctggg

SEQ ID NO: 3875415 - DNA, 25 bp, Homo sapien
ttctgaacctgcaatccctttcgca

SEQ ID NO: 3875416 - DNA, 25 bp, Homo sapien
tgaacctgcaatccctttcgcaaaa

SEQ ID NO: 3875417 - DNA, 25 bp, Homo sapien
tctgaacctgcaatccctttcgcaa

SEQ ID NO: 3875418 - DNA, 25 bp, Homo sapien
ctgaacctgcaatccctttcgcaaa

SEQ ID NO: 3875419 - DNA, 25 bp, Homo sapien
aagctgaggtcacaaatacaaaact

SEQ ID NO: 3875420 - DNA, 25 bp, Homo sapien
ttcccaaagctgaggtcacaaatac

SEQ ID NO: 3875421 - DNA, 25 bp, Homo sapien
catggatgctgttgtgtaactgggc

SEQ ID NO: 3875422 - DNA, 25 bp, Homo sapien
gaccggaaatcccatacagtgctga

SEQ ID NO: 3875423 - DNA, 25 bp, Homo sapien
aaacaggccacatgtaatgccacca

SEQ ID NO: 3875424 - DNA, 25 bp, Homo sapien
tgattggatattcccctttaagacc

SEQ ID NO: 3875425 - DNA, 25 bp, Homo sapien
tatacatccaagacgtgataggtgg

SEQ ID NO: 3875426 - DNA, 25 bp, Homo sapien
tgctttgaagacacgaagccggctt

SEQ ID NO: 3875427 - DNA, 25 bp, Homo sapien
tacttctatgagtttcggcaccggc

SEQ ID NO: 3875428 - DNA, 25 bp, Homo sapien
cactagggatatgagcactgctgta

SEQ ID NO: 3875429 - DNA, 25 bp, Homo sapien
tatccagaatagaagaacccttaca

SEQ ID NO: 3875430 - DNA, 25 bp, Homo sapien
ctgtttgaagataaggttcttttgt

SEQ ID NO: 3875431 - DNA, 25 bp, Homo sapien
tgaagataaggttcttttgttccca

SEQ ID NO: 3875432 - DNA, 25 bp, Homo sapien
gctgtttgaagataaggttcttttg

SEQ ID NO: 3875433 - DNA, 25 bp, Homo sapien
tcttcagcccctggaagtggctgtg

SEQ ID NO: 3875434 - DNA, 25 bp, Homo sapien
ggtcttcagcccctggaagtggctg

SEQ ID NO: 3875435 - DNA, 25 bp, Homo sapien
ttcagcccctggaagtggctgtggc

SEQ ID NO: 3875436 - DNA, 25 bp, Homo sapien
cttcagcccctggaagtggctgtgg

SEQ ID NO: 3875437 - DNA, 25 bp, Homo sapien
tggacaatcaccaggggccttctca

SEQ ID NO: 3875438 - DNA, 25 bp, Homo sapien
gagcaagctcgactcttgttcctca

SEQ ID NO: 3875439 - DNA, 25 bp, Homo sapien
gcttttggctgcagagtgagagcaa

SEQ ID NO: 3875440 - DNA, 25 bp, Homo sapien
agtgagagcaagctcgactcttgtt

SEQ ID NO: 3875441 - DNA, 25 bp, Homo sapien
tgcagctccgtgtggcccactttgg

SEQ ID NO: 3875442 - DNA, 25 bp, Homo sapien
ctgaatggagacatctttctgccct

SEQ ID NO: 3875443 - DNA, 25 bp, Homo sapien
tctttgctgactgggagaatccaga

SEQ ID NO: 3875444 - DNA, 25 bp, Homo sapien
tccagacatctcgtacagctgcagc

SEQ ID NO: 3875445 - DNA, 25 bp, Homo sapien
tcatgaacgtggaagtctatttccc

SEQ ID NO: 3875446 - DNA, 25 bp, Homo sapien
tttccctttctgacaaagcatggct

SEQ ID NO: 3875447 - DNA, 25 bp, Homo sapien
gtcccttctgacaaaacatggctga

SEQ ID NO: 3875448 - DNA, 25 bp, Homo sapien
agaaacagagagtcccttattgccc

SEQ ID NO: 3875449 - DNA, 25 bp, Homo sapien
cagagtggactcaggccagtggctg

SEQ ID NO: 3875450 - DNA, 25 bp, Homo sapien
gcagagtggactcaggccagtggct

SEQ ID NO: 3875451 - DNA, 25 bp, Homo sapien
gtcaggcccatgagaatacatgttc

SEQ ID NO: 3875452 - DNA, 25 bp, Homo sapien
gccgacagtcaggcccatgagaata

SEQ ID NO: 3875453 - DNA, 25 bp, Homo sapien
gggagttgatacaaggcctgtgagc

SEQ ID NO: 3875454 - DNA, 25 bp, Homo sapien
ggagttgatacaaggcctgtgagct

SEQ ID NO: 3875455 - DNA, 25 bp, Homo sapien
atcctgcttccctgtctgatgcctg

SEQ ID NO: 3875456 - DNA, 25 bp, Homo sapien
tgacgacagcgagaagatgacttca

SEQ ID NO: 3875457 - DNA, 25 bp, Homo sapien
actgacgacagcgagaagatgactt

SEQ ID NO: 3875458 - DNA, 25 bp, Homo sapien
tggtggcccaatcctgcttccctgt

SEQ ID NO: 3875459 - DNA, 25 bp, Homo sapien
caggtaaagagacaaagggaggtca

SEQ ID NO: 3875460 - DNA, 25 bp, Homo sapien
gtcgtaggagcaaaagagtccatac

SEQ ID NO: 3875461 - DNA, 25 bp, Homo sapien
tctgggctgagagtcgtaggagcaa

SEQ ID NO: 3875462 - DNA, 25 bp, Homo sapien
ctgagagtcgtaggagcaaaagagt

SEQ ID NO: 3875463 - DNA, 25 bp, Homo sapien
ttgggaagccattttaccaggagag

SEQ ID NO: 3875464 - DNA, 25 bp, Homo sapien
cgaggctgttgggaagccattttac

SEQ ID NO: 3875465 - DNA, 25 bp, Homo sapien
gcatctcatggtctgactcggccat

SEQ ID NO: 3875466 - DNA, 25 bp, Homo sapien
tgggaagcatctcatggtctgactc

SEQ ID NO: 3875467 - DNA, 25 bp, Homo sapien
gttgctgaattgtggggggttctga

SEQ ID NO: 3875468 - DNA, 25 bp, Homo sapien
ttgctgaattgtggggggttctgac

SEQ ID NO: 3875469 - DNA, 25 bp, Homo sapien
ggttgctgaattgtggggggttctg

SEQ ID NO: 3875470 - DNA, 25 bp, Homo sapien
tcagacattggtcctttggttgctg

SEQ ID NO: 3875471 - DNA, 25 bp, Homo sapien
gcctttgcacacaagtagatatcat

SEQ ID NO: 3875472 - DNA, 25 bp, Homo sapien
ctggggcatagggagagggactgta

SEQ ID NO: 3875473 - DNA, 25 bp, Homo sapien
caggagggtcaaatcctggggcata

SEQ ID NO: 3875474 - DNA, 25 bp, Homo sapien
tggggaattgctcaggagggtcaaa

SEQ ID NO: 3875475 - DNA, 25 bp, Homo sapien
catagggagagggactgtagtgttc

SEQ ID NO: 3875476 - DNA, 25 bp, Homo sapien
gcctcttgcggttctcatgttctga

SEQ ID NO: 3875477 - DNA, 25 bp, Homo sapien
ttctttggtgtacactgagctctcc

SEQ ID NO: 3875478 - DNA, 25 bp, Homo sapien
tggtagcctcttgcggttctcatgt

SEQ ID NO: 3875479 - DNA, 25 bp, Homo sapien
tttggtagcctcttgcggttctcat

SEQ ID NO: 3875480 - DNA, 25 bp, Homo sapien
ggctgggctaaggaactgagaggca

SEQ ID NO: 3875481 - DNA, 25 bp, Homo sapien
cttgactgccaggagaacccagggc

SEQ ID NO: 3875482 - DNA, 25 bp, Homo sapien
tcagttcttcttaaaggtcgaatga

SEQ ID NO: 3875483 - DNA, 25 bp, Homo sapien
tgaagctcatagacagttctggcaa

SEQ ID NO: 3875484 - DNA, 25 bp, Homo sapien
gaagctcatagacagttctggcaaa

SEQ ID NO: 3875485 - DNA, 25 bp, Homo sapien
tcttaaaggtcgaatgaagctcata

SEQ ID NO: 3875486 - DNA, 25 bp, Homo sapien
ggaacatcgttgatagtgtcttggg

SEQ ID NO: 3875487 - DNA, 25 bp, Homo sapien
cagaacagccactggaagggcctga

SEQ ID NO: 3875488 - DNA, 25 bp, Homo sapien
gggttggaacatcgttgatagtgtc

SEQ ID NO: 3875489 - DNA, 25 bp, Homo sapien
aggctgctgatcatacagtgttgcc

SEQ ID NO: 3875490 - DNA, 25 bp, Homo sapien
tttctcatccacgatctcatcgatc

SEQ ID NO: 3875491 - DNA, 25 bp, Homo sapien
tctcatccacgatctcatcgatcat

SEQ ID NO: 3875492 - DNA, 25 bp, Homo sapien
ttctcatccacgatctcatcgatca

SEQ ID NO: 3875493 - DNA, 25 bp, Homo sapien
aaggtaataaaatcctccaggtgtg

SEQ ID NO: 3875494 - DNA, 25 bp, Homo sapien
ctgctctagtgaaatggtaagggag

SEQ ID NO: 3875495 - DNA, 25 bp, Homo sapien
cctgctctagtgaaatggtaaggga

SEQ ID NO: 3875496 - DNA, 25 bp, Homo sapien
tgctctagtgaaatggtaagggaga

SEQ ID NO: 3875497 - DNA, 25 bp, Homo sapien
tcagatacaattggacaatccagac

SEQ ID NO: 3875498 - DNA, 25 bp, Homo sapien
ggctccattctcgtgaagcactggt

SEQ ID NO: 3875499 - DNA, 25 bp, Homo sapien
cctgaagggctccattctcgtgaag

SEQ ID NO: 3875500 - DNA, 25 bp, Homo sapien
cgtgaagcactggtgtgaccatagc

SEQ ID NO: 3875501 - DNA, 25 bp, Homo sapien
agctgcaggtagtgaagcaaaagca

SEQ ID NO: 3875502 - DNA, 25 bp, Homo sapien
tagctgcaggtagtgaagcaaaagc

SEQ ID NO: 3875503 - DNA, 25 bp, Homo sapien
aagaaaagcctttgcccaattgtgg

SEQ ID NO: 3875504 - DNA, 25 bp, Homo sapien
agaaaagcctttgcccaattgtggg

SEQ ID NO: 3875505 - DNA, 25 bp, Homo sapien
caattgtggggctcagttggtccat

SEQ ID NO: 3875506 - DNA, 25 bp, Homo sapien
gcccaattgtggggctcagttggtc

SEQ ID NO: 3875507 - DNA, 25 bp, Homo sapien
cttgtcccaggttggggcagcaacg

SEQ ID NO: 3875508 - DNA, 25 bp, Homo sapien
cctgggtgtggactgagatgaagtc

SEQ ID NO: 3875509 - DNA, 25 bp, Homo sapien
tgagaggtgaatgctgctgacatgc

SEQ ID NO: 3875510 - DNA, 25 bp, Homo sapien
tctgctgtactgagaggtgaatgct

SEQ ID NO: 3875511 - DNA, 25 bp, Homo sapien
cactgccctctgctgtactgagagg

SEQ ID NO: 3875512 - DNA, 25 bp, Homo sapien
tctcttgaacaaaaccaaactccat

SEQ ID NO: 3875513 - DNA, 25 bp, Homo sapien
ccaggatttctgattttgccctttc

SEQ ID NO: 3875514 - DNA, 25 bp, Homo sapien
tctccaggatttctgattttgccct

SEQ ID NO: 3875515 - DNA, 25 bp, Homo sapien
tttctctttcaagtatgatcagatt

SEQ ID NO: 3875516 - DNA, 25 bp, Homo sapien
gttgctgctgatggccaataccatt

SEQ ID NO: 3875517 - DNA, 25 bp, Homo sapien
ccttgaccagggctatggcctggaa

SEQ ID NO: 3875518 - DNA, 25 bp, Homo sapien
gctgatggccaataccatttccttg

SEQ ID NO: 3875519 - DNA, 25 bp, Homo sapien
ttccttgaccagggctatggcctgg

SEQ ID NO: 3875520 - DNA, 25 bp, Homo sapien
ttgatacccctttacgccagtgagc

SEQ ID NO: 3875521 - DNA, 25 bp, Homo sapien
gatacccctttacgccagtgagcat

SEQ ID NO: 3875522 - DNA, 25 bp, Homo sapien
ccctttacgccagtgagcatgtttc

SEQ ID NO: 3875523 - DNA, 25 bp, Homo sapien
ctcttgatacccctttacgccagtg

SEQ ID NO: 3875524 - DNA, 25 bp, Homo sapien
ccttggatgtggcaagtcccccaag

SEQ ID NO: 3875525 - DNA, 25 bp, Homo sapien
ggcaccttggatgtggcaagtcccc

SEQ ID NO: 3875526 - DNA, 25 bp, Homo sapien
tccaggcaccttggatgtggcaagt

SEQ ID NO: 3875527 - DNA, 25 bp, Homo sapien
cttggatgtggcaagtcccccaagc

SEQ ID NO: 3875528 - DNA, 25 bp, Homo sapien
cacaccttcatcagtgcttggtcag

SEQ ID NO: 3875529 - DNA, 25 bp, Homo sapien
gtcccacaccttcatcagtgcttgg

SEQ ID NO: 3875530 - DNA, 25 bp, Homo sapien
ccagagccttcattatagagctgtc

SEQ ID NO: 3875531 - DNA, 25 bp, Homo sapien
gccttcattatagagctgtcccaca

SEQ ID NO: 3875532 - DNA, 25 bp, Homo sapien
cctgcattttgaccatgtggtcccc

SEQ ID NO: 3875533 - DNA, 25 bp, Homo sapien
ggccctgcattttgaccatgtggtc

SEQ ID NO: 3875534 - DNA, 25 bp, Homo sapien
ctgcattttgaccatgtggtcccca

SEQ ID NO: 3875535 - DNA, 25 bp, Homo sapien
gccctgcattttgaccatgtggtcc

SEQ ID NO: 3875536 - DNA, 25 bp, Homo sapien
catggggggcaggcacaggtggagt

SEQ ID NO: 3875537 - DNA, 25 bp, Homo sapien
ctgcatggggggcaggcacaggtgg

SEQ ID NO: 3875538 - DNA, 25 bp, Homo sapien
tggggggcaggcacaggtggagtga

SEQ ID NO: 3875539 - DNA, 25 bp, Homo sapien
gcatggggggcaggcacaggtggag

SEQ ID NO: 3875540 - DNA, 25 bp, Homo sapien
aatacaagaggcactgtagcagcag

SEQ ID NO: 3875541 - DNA, 25 bp, Homo sapien
gaaaacggacatgtaagcgagtggc

SEQ ID NO: 3875542 - DNA, 25 bp, Homo sapien
aagcgagtggccgtaaaacaataca

SEQ ID NO: 3875543 - DNA, 25 bp, Homo sapien
cgtaaaacaatacaagaggcactgt

SEQ ID NO: 3875544 - DNA, 25 bp, Homo sapien
gagcccctcttttgaccattggaaa

SEQ ID NO: 3875545 - DNA, 25 bp, Homo sapien
gctcctgggcagcaagaagctttga

SEQ ID NO: 3875546 - DNA, 25 bp, Homo sapien
ggcatttgtatccagcagggtctca

SEQ ID NO: 3875547 - DNA, 25 bp, Homo sapien
gaagcttgtatagggtacgtgccac

SEQ ID NO: 3875548 - DNA, 25 bp, Homo sapien
aaaccaatgttcaggccagtaatta

SEQ ID NO: 3875549 - DNA, 25 bp, Homo sapien
aatacatgtaaattgaaaccaatgt

SEQ ID NO: 3875550 - DNA, 25 bp, Homo sapien
tcagagagtaataggtgaacccttc

SEQ ID NO: 3875551 - DNA, 25 bp, Homo sapien
taattaaagtgaggtactctctggg

SEQ ID NO: 3875552 - DNA, 25 bp, Homo sapien
cctgcatttcaggaggaaacggttg

SEQ ID NO: 3875553 - DNA, 25 bp, Homo sapien
tgcaaaattctgtatagccctctgc

SEQ ID NO: 3875554 - DNA, 25 bp, Homo sapien
tttggtggcagaaactgacagtcca

SEQ ID NO: 3875555 - DNA, 25 bp, Homo sapien
gcaaacatacccgtgcagcttgatt

SEQ ID NO: 3875556 - DNA, 25 bp, Homo sapien
ctaacatgctgtcttggggttgtgg

SEQ ID NO: 3875557 - DNA, 25 bp, Homo sapien
ccttctactatgtcattgttggcat

SEQ ID NO: 3875558 - DNA, 25 bp, Homo sapien
gcagccagtgccttctactatgtca

SEQ ID NO: 3875559 - DNA, 25 bp, Homo sapien
gccagtgccttctactatgtcattg

SEQ ID NO: 3875560 - DNA, 25 bp, Homo sapien
aatcaaatacattgagaacttccat

SEQ ID NO: 3875561 - DNA, 25 bp, Homo sapien
catctggtcagcttatcactggaga

SEQ ID NO: 3875562 - DNA, 25 bp, Homo sapien
ctgtacttaattcaaggcatctggt

SEQ ID NO: 3875563 - DNA, 25 bp, Homo sapien
ctggtcagcttatcactggagacag

SEQ ID NO: 3875564 - DNA, 25 bp, Homo sapien
cttaattcaaggcatctggtcagct

SEQ ID NO: 3875565 - DNA, 25 bp, Homo sapien
caaagatcaatatatgggtcaggta

SEQ ID NO: 3875566 - DNA, 25 bp, Homo sapien
tatatgggtcaggtatcgtattctg

SEQ ID NO: 3875567 - DNA, 25 bp, Homo sapien
cagttggaccaaagatcaatatatg

SEQ ID NO: 3875568 - DNA, 25 bp, Homo sapien
tcgtattctgcttcccatggccagt

SEQ ID NO: 3875569 - DNA, 25 bp, Homo sapien
tctattccacagttggattctatta

SEQ ID NO: 3875570 - DNA, 25 bp, Homo sapien
ggatccacttcttagacgaaatagt

SEQ ID NO: 3875571 - DNA, 25 bp, Homo sapien
caacagcgattttttatttgacagc

SEQ ID NO: 3875572 - DNA, 25 bp, Homo sapien
gctaggatccacttcttagacgaaa

SEQ ID NO: 3875573 - DNA, 25 bp, Homo sapien
ggataccttagtaattcattctgga

SEQ ID NO: 3875574 - DNA, 25 bp, Homo sapien
cattggagactccttaagaaactct

SEQ ID NO: 3875575 - DNA, 25 bp, Homo sapien
taagctctaaattgtacatgggtgt

SEQ ID NO: 3875576 - DNA, 25 bp, Homo sapien
tttctgaatagcaaaaccacttttg

SEQ ID NO: 3875577 - DNA, 25 bp, Homo sapien
ctctgctgtattgcggcttcctggg

SEQ ID NO: 3875578 - DNA, 25 bp, Homo sapien
ggctatgctctgagaagtggagcac

SEQ ID NO: 3875579 - DNA, 25 bp, Homo sapien
actctgctgtattgcggcttcctgg

SEQ ID NO: 3875580 - DNA, 25 bp, Homo sapien
gctctgagaagtggagcacgagcat

SEQ ID NO: 3875581 - DNA, 25 bp, Homo sapien
tcataagtatcatgtagtgacatcc

SEQ ID NO: 3875582 - DNA, 25 bp, Homo sapien
gtaactgggatccatagtcataagt

SEQ ID NO: 3875583 - DNA, 25 bp, Homo sapien
ggcatcttctgggtgtaactgggat

SEQ ID NO: 3875584 - DNA, 25 bp, Homo sapien
agtatcatgtagtgacatcctgcca

SEQ ID NO: 3875585 - DNA, 25 bp, Homo sapien
aagtgttctcccattttgtgggttg

SEQ ID NO: 3875586 - DNA, 25 bp, Homo sapien
tgcaaaagtgttctcccattttgtg

SEQ ID NO: 3875587 - DNA, 25 bp, Homo sapien
caaaagtgttctcccattttgtggg

SEQ ID NO: 3875588 - DNA, 25 bp, Homo sapien
gtgttctcccattttgtgggttgcc

SEQ ID NO: 3875589 - DNA, 25 bp, Homo sapien
tatccgtaattctaaatccgagttg

SEQ ID NO: 3875590 - DNA, 25 bp, Homo sapien
ggacagagaacctggaggactgaca

SEQ ID NO: 3875591 - DNA, 25 bp, Homo sapien
ttaggcatcttttatccgtaattct

SEQ ID NO: 3875592 - DNA, 25 bp, Homo sapien
tccgagttgcgaggacagagaacct

SEQ ID NO: 3875593 - DNA, 25 bp, Homo sapien
cagttgggcatttctgtagctctga

SEQ ID NO: 3875594 - DNA, 25 bp, Homo sapien
gaagaaacgacttttttactgcaca

SEQ ID NO: 3875595 - DNA, 25 bp, Homo sapien
taagagaggcaagcggccagtggaa

SEQ ID NO: 3875596 - DNA, 25 bp, Homo sapien
tgtttgtttcatttcaacgatagaa

SEQ ID NO: 3875597 - DNA, 25 bp, Homo sapien
gggcaggtctctagcgggaggcggc

SEQ ID NO: 3875598 - DNA, 25 bp, Homo sapien
ggcggcgtcgctgtctcccagagct

SEQ ID NO: 3875599 - DNA, 25 bp, Homo sapien
aaaaaatgggagagcgaacaagcgc

SEQ ID NO: 3875600 - DNA, 25 bp, Homo sapien
tcccagagctcgcatcgctcggtga

SEQ ID NO: 3875601 - DNA, 25 bp, Homo sapien
aagattccagcagcggagactcgcg

SEQ ID NO: 3875602 - DNA, 25 bp, Homo sapien
gtgcatgtgcatcgccgctcttcag

SEQ ID NO: 3875603 - DNA, 25 bp, Homo sapien
tgctgctagtgcatgtgcatcgccg

SEQ ID NO: 3875604 - DNA, 25 bp, Homo sapien
taaaataatagtcgaggctggagcc

SEQ ID NO: 3875605 - DNA, 25 bp, Homo sapien
gaaaatcacgatatcctctcctggg

SEQ ID NO: 3875606 - DNA, 25 bp, Homo sapien
gggaaaatcacgatatcctctcctg

SEQ ID NO: 3875607 - DNA, 25 bp, Homo sapien
aggggggaaaatcacgatatcctct

SEQ ID NO: 3875608 - DNA, 25 bp, Homo sapien
aaatcacgatatcctctcctgggct

SEQ ID NO: 3875609 - DNA, 25 bp, Homo sapien
agcccgcacgactcggctggcacgg

SEQ ID NO: 3875610 - DNA, 25 bp, Homo sapien
tgccacagcccgcacgactcggctg

SEQ ID NO: 3875611 - DNA, 25 bp, Homo sapien
actcggctggcacggctccccggct

SEQ ID NO: 3875612 - DNA, 25 bp, Homo sapien
gctggcacggctccccggcttggag

SEQ ID NO: 3875613 - DNA, 25 bp, Homo sapien
cgctgatgccatcctctttgaggtt

SEQ ID NO: 3875614 - DNA, 25 bp, Homo sapien
ttgctccgctcgagggcggctctct

SEQ ID NO: 3875615 - DNA, 25 bp, Homo sapien
ggtttttctcaatcgccttgctccg

SEQ ID NO: 3875616 - DNA, 25 bp, Homo sapien
cgagcaggagtaatttcacgtcttt

SEQ ID NO: 3875617 - DNA, 25 bp, Homo sapien
gttgggacacagacagtggggaaaa

SEQ ID NO: 3875618 - DNA, 25 bp, Homo sapien
cagtggggaaaaactggtgagtgtc

SEQ ID NO: 3875619 - DNA, 25 bp, Homo sapien
gtggggaaaaactggtgagtgtcag

SEQ ID NO: 3875620 - DNA, 25 bp, Homo sapien
ctgttgggacacagacagtggggaa

SEQ ID NO: 3875621 - DNA, 25 bp, Homo sapien
ggtgctttttcctgattctccagcc

SEQ ID NO: 3875622 - DNA, 25 bp, Homo sapien
cacaatggtgctttttcctgattct

SEQ ID NO: 3875623 - DNA, 25 bp, Homo sapien
gtgctttttcctgattctccagccc

SEQ ID NO: 3875624 - DNA, 25 bp, Homo sapien
aatggtgctttttcctgattctcca

SEQ ID NO: 3875625 - DNA, 25 bp, Homo sapien
gtacgaatcccaatgccacagggac

SEQ ID NO: 3875626 - DNA, 25 bp, Homo sapien
aagtacgaatcccaatgccacaggg

SEQ ID NO: 3875627 - DNA, 25 bp, Homo sapien
aaaagtacgaatcccaatgccacag

SEQ ID NO: 3875628 - DNA, 25 bp, Homo sapien
aataaaagtacgaatcccaatgcca

SEQ ID NO: 3875629 - DNA, 25 bp, Homo sapien
tcacagatctgttggacagcttcct

SEQ ID NO: 3875630 - DNA, 25 bp, Homo sapien
tctgaaccagttaacaagccactgc

SEQ ID NO: 3875631 - DNA, 25 bp, Homo sapien
gcttcctttctaccaatgctgtgtg

SEQ ID NO: 3875632 - DNA, 25 bp, Homo sapien
ccaggcagcctgtttgcagagtcta

SEQ ID NO: 3875633 - DNA, 25 bp, Homo sapien
tcccaccctttgaaatgtcacccca

SEQ ID NO: 3875634 - DNA, 25 bp, Homo sapien
gcagctgcgccatcaaaaatgtcac

SEQ ID NO: 3875635 - DNA, 25 bp, Homo sapien
gacaacacagtttgttatataactg

SEQ ID NO: 3875636 - DNA, 25 bp, Homo sapien
tgtcacatcagttatgacaacacag

SEQ ID NO: 3875637 - DNA, 25 bp, Homo sapien
gcctggcttagctgtgagactccga

SEQ ID NO: 3875638 - DNA, 25 bp, Homo sapien
agaattcctagagcgggtcttgacc

SEQ ID NO: 3875639 - DNA, 25 bp, Homo sapien
tcttgaccaaaaagtagcaactggg

SEQ ID NO: 3875640 - DNA, 25 bp, Homo sapien
tatagaaaaagcctgccagatcccc

SEQ ID NO: 3875641 - DNA, 25 bp, Homo sapien
tacaacacttaagatggtgctcggt

SEQ ID NO: 3875642 - DNA, 25 bp, Homo sapien
tgtctcccctaacaagaatgtcaga

SEQ ID NO: 3875643 - DNA, 25 bp, Homo sapien
tgcctgtctcccctaacaagaatgt

SEQ ID NO: 3875644 - DNA, 25 bp, Homo sapien
tacagagtagaagctcaatggatat

SEQ ID NO: 3875645 - DNA, 25 bp, Homo sapien
gtcagcagccctgaatgaggtctgg

SEQ ID NO: 3875646 - DNA, 25 bp, Homo sapien
tgagcacgtctacggtggagcccaa

SEQ ID NO: 3875647 - DNA, 25 bp, Homo sapien
gtgacagcctcagtgctcatggtct

SEQ ID NO: 3875648 - DNA, 25 bp, Homo sapien
gcccaaagctgggtcagcagccctg

SEQ ID NO: 3875649 - DNA, 25 bp, Homo sapien
ttctcttcaattggctcccgcacag

SEQ ID NO: 3875650 - DNA, 25 bp, Homo sapien
cttcaattggctcccgcacagagct

SEQ ID NO: 3875651 - DNA, 25 bp, Homo sapien
ctcttcaattggctcccgcacagag

SEQ ID NO: 3875652 - DNA, 25 bp, Homo sapien
cgcttctcttcaattggctcccgca

SEQ ID NO: 3875653 - DNA, 25 bp, Homo sapien
aaaactccaagatctgtagagatag

SEQ ID NO: 3875654 - DNA, 25 bp, Homo sapien
taaaaactccaagatctgtagagat

SEQ ID NO: 3875655 - DNA, 25 bp, Homo sapien
aaactccaagatctgtagagatagg

SEQ ID NO: 3875656 - DNA, 25 bp, Homo sapien
aaaaactccaagatctgtagagata

SEQ ID NO: 3875657 - DNA, 25 bp, Homo sapien
ccattgagcttagggagagagcagc

SEQ ID NO: 3875658 - DNA, 25 bp, Homo sapien
gagcagctctactcagtacaatggg

SEQ ID NO: 3875659 - DNA, 25 bp, Homo sapien
cagtggaggcccagatacaactcac

SEQ ID NO: 3875660 - DNA, 25 bp, Homo sapien
tcaactactacacaaggcagtggag

SEQ ID NO: 3875661 - DNA, 25 bp, Homo sapien
ggcacgtgtgctccacttgggtttt

SEQ ID NO: 3875662 - DNA, 25 bp, Homo sapien
gggttttctccaccgatactgtcac

SEQ ID NO: 3875663 - DNA, 25 bp, Homo sapien
tatctgccgaaaatctctcctgccg

SEQ ID NO: 3875664 - DNA, 25 bp, Homo sapien
aaaatctctcctgccgagcctgctg

SEQ ID NO: 3875665 - DNA, 25 bp, Homo sapien
tcacggtgatggtatagttgggccc

SEQ ID NO: 3875666 - DNA, 25 bp, Homo sapien
ggcccaccgagccaagtatcacggt

SEQ ID NO: 3875667 - DNA, 25 bp, Homo sapien
ttgggccccaagttcaccaggtctc

SEQ ID NO: 3875668 - DNA, 25 bp, Homo sapien
agcgggttgctgtcaagctctcaca

SEQ ID NO: 3875669 - DNA, 25 bp, Homo sapien
catgcttttatccttgtaccccgtg

SEQ ID NO: 3875670 - DNA, 25 bp, Homo sapien
atgcttttatccttgtaccccgtgg

SEQ ID NO: 3875671 - DNA, 25 bp, Homo sapien
gcttcctttggagaattaacaactg

SEQ ID NO: 3875672 - DNA, 25 bp, Homo sapien
caactgttctcaagaacaagactat

SEQ ID NO: 3875673 - DNA, 25 bp, Homo sapien
tgacatgctctgttcttaataaggc

SEQ ID NO: 3875674 - DNA, 25 bp, Homo sapien
gggcatgccactcttagctgtcagc

SEQ ID NO: 3875675 - DNA, 25 bp, Homo sapien
taaggctcccataaagatctctcct

SEQ ID NO: 3875676 - DNA, 25 bp, Homo sapien
tctctcctgcgagataatcatagac

SEQ ID NO: 3875677 - DNA, 25 bp, Homo sapien
gatccataggggcacagaagaaaac

SEQ ID NO: 3875678 - DNA, 25 bp, Homo sapien
ccggctcagggccggcaagctcaag

SEQ ID NO: 3875679 - DNA, 25 bp, Homo sapien
caggatccataggggcacagaagaa

SEQ ID NO: 3875680 - DNA, 25 bp, Homo sapien
aagctcaaggtgtgagtcaggatcc

SEQ ID NO: 3875681 - DNA, 25 bp, Homo sapien
gaattagatacacttgagtttctgg

SEQ ID NO: 3875682 - DNA, 25 bp, Homo sapien
ggttgtcagcagagatccaattatt

SEQ ID NO: 3875683 - DNA, 25 bp, Homo sapien
caattatttatagctcctggtcccc

SEQ ID NO: 3875684 - DNA, 25 bp, Homo sapien
ggtacctgcattctgtttagtcatg

SEQ ID NO: 3875685 - DNA, 25 bp, Homo sapien
aggcctgaaacaacagatggctggg

SEQ ID NO: 3875686 - DNA, 25 bp, Homo sapien
caggcgaggcactgtttgctgaagg

SEQ ID NO: 3875687 - DNA, 25 bp, Homo sapien
acagggggcgaatggcacaagatcc

SEQ ID NO: 3875688 - DNA, 25 bp, Homo sapien
gaatgtcccgcttcctctggacaag

SEQ ID NO: 3875689 - DNA, 25 bp, Homo sapien
atctgctggagaggtaaacccctta

SEQ ID NO: 3875690 - DNA, 25 bp, Homo sapien
ctggagaggtaaaccccttatcagg

SEQ ID NO: 3875691 - DNA, 25 bp, Homo sapien
tctgctggagaggtaaaccccttat

SEQ ID NO: 3875692 - DNA, 25 bp, Homo sapien
tgctggagaggtaaaccccttatca

SEQ ID NO: 3875693 - DNA, 25 bp, Homo sapien
gcaggccaagggttaacatgtcatt

SEQ ID NO: 3875694 - DNA, 25 bp, Homo sapien
tcccaccagagaggttgagacaggt

SEQ ID NO: 3875695 - DNA, 25 bp, Homo sapien
gaagtgaatcaacctcccagcttag

SEQ ID NO: 3875696 - DNA, 25 bp, Homo sapien
caagggtaaatggtggcaactctct

SEQ ID NO: 3875697 - DNA, 25 bp, Homo sapien
tgtctggtcagcgaataggtgtctt

SEQ ID NO: 3875698 - DNA, 25 bp, Homo sapien
tcttcgaactgcaccctgagagttg

SEQ ID NO: 3875699 - DNA, 25 bp, Homo sapien
gcagaactcaagtgccgcagcacct

SEQ ID NO: 3875700 - DNA, 25 bp, Homo sapien
cagccttcaagggagcatgagcttt

SEQ ID NO: 3875701 - DNA, 25 bp, Homo sapien
gctgggctacatgctctgtctaagc

SEQ ID NO: 3875702 - DNA, 25 bp, Homo sapien
acctgcaatcagagggaagtcctgc

SEQ ID NO: 3875703 - DNA, 25 bp, Homo sapien
ttcatctgttgatgggctgggctac

SEQ ID NO: 3875704 - DNA, 25 bp, Homo sapien
tgatctgagtggattgagccacctg

SEQ ID NO: 3875705 - DNA, 25 bp, Homo sapien
ataatgggagaacatgcctctttac

SEQ ID NO: 3875706 - DNA, 25 bp, Homo sapien
tctcagaagcaataatgggagaaca

SEQ ID NO: 3875707 - DNA, 25 bp, Homo sapien
gcaataatgggagaacatgcctctt

SEQ ID NO: 3875708 - DNA, 25 bp, Homo sapien
gaaagatctcagaagcaataatggg

SEQ ID NO: 3875709 - DNA, 25 bp, Homo sapien
cagcaaaggtcaaccagttcatcat

SEQ ID NO: 3875710 - DNA, 25 bp, Homo sapien
agcagactaatgtggacttgtcagc

SEQ ID NO: 3875711 - DNA, 25 bp, Homo sapien
cccacagcagactaatgtggacttg

SEQ ID NO: 3875712 - DNA, 25 bp, Homo sapien
tgtcagcaaaggtcaaccagttcat

SEQ ID NO: 3875713 - DNA, 25 bp, Homo sapien
tcttttatccgttgccagctggcct

SEQ ID NO: 3875714 - DNA, 25 bp, Homo sapien
ttatccgttgccagctggccttgca

SEQ ID NO: 3875715 - DNA, 25 bp, Homo sapien
ggtcttttatccgttgccagctggc

SEQ ID NO: 3875716 - DNA, 25 bp, Homo sapien
ttgggtcttttatccgttgccagct

SEQ ID NO: 3875717 - DNA, 25 bp, Homo sapien
tctcagagcgaattagtaggtggtc

SEQ ID NO: 3875718 - DNA, 25 bp, Homo sapien
ctactttcatgaaccccaggatggg

SEQ ID NO: 3875719 - DNA, 25 bp, Homo sapien
ctgtagtatagcatggcgagtggcc

SEQ ID NO: 3875720 - DNA, 25 bp, Homo sapien
caagtagattacagctccccatggg

SEQ ID NO: 3875721 - DNA, 25 bp, Homo sapien
gccactgatgggaaacatcagccag

SEQ ID NO: 3875722 - DNA, 25 bp, Homo sapien
cactgatgggaaacatcagccaggc

SEQ ID NO: 3875723 - DNA, 25 bp, Homo sapien
tcagccactgatgggaaacatcagc

SEQ ID NO: 3875724 - DNA, 25 bp, Homo sapien
agccactgatgggaaacatcagcca

SEQ ID NO: 3875725 - DNA, 25 bp, Homo sapien
gccctttgtgattacagctgggagg

SEQ ID NO: 3875726 - DNA, 25 bp, Homo sapien
gaagtaggggttttccacaacatga

SEQ ID NO: 3875727 - DNA, 25 bp, Homo sapien
ctgggcatgttaccaagaacagaca

SEQ ID NO: 3875728 - DNA, 25 bp, Homo sapien
aaggctttctcactgatgccctttg

SEQ ID NO: 3875729 - DNA, 25 bp, Homo sapien
ttctgtgaacgggactctgatgttc

SEQ ID NO: 3875730 - DNA, 25 bp, Homo sapien
ttgatcgtccagtatccagaagtac

SEQ ID NO: 3875731 - DNA, 25 bp, Homo sapien
gggccagagtgcctgcaacaggatc

SEQ ID NO: 3875732 - DNA, 25 bp, Homo sapien
ccaggagacactgaacttgatcgtc

SEQ ID NO: 3875733 - DNA, 25 bp, Homo sapien
ttgggaaaaccatgacattttgcgg

SEQ ID NO: 3875734 - DNA, 25 bp, Homo sapien
tgggaaaaccatgacattttgcggc

SEQ ID NO: 3875735 - DNA, 25 bp, Homo sapien
agggaagatggcagcctcgctgact

SEQ ID NO: 3875736 - DNA, 25 bp, Homo sapien
aagatggcagcctcgctgactggtg

SEQ ID NO: 3875737 - DNA, 25 bp, Homo sapien
gaagatggcagcctcgctgactggt

SEQ ID NO: 3875738 - DNA, 25 bp, Homo sapien
gggaagatggcagcctcgctgactg

SEQ ID NO: 3875739 - DNA, 25 bp, Homo sapien
ctgggatacaccagctcacaaaaca

SEQ ID NO: 3875740 - DNA, 25 bp, Homo sapien
tgggatacaccagctcacaaaacat

SEQ ID NO: 3875741 - DNA, 25 bp, Homo sapien
caagggtcacggtcatatctatgtc

SEQ ID NO: 3875742 - DNA, 25 bp, Homo sapien
tcctgtggttgccccgtttctcagg

SEQ ID NO: 3875743 - DNA, 25 bp, Homo sapien
gctgggttgcatcaacttcctgtgg

SEQ ID NO: 3875744 - DNA, 25 bp, Homo sapien
tacgtctacatctttgccaaatgca

SEQ ID NO: 3875745 - DNA, 25 bp, Homo sapien
agacagtgcttggataaagtgggac

SEQ ID NO: 3875746 - DNA, 25 bp, Homo sapien
acagtgcttggataaagtgggacat

SEQ ID NO: 3875747 - DNA, 25 bp, Homo sapien
gacagtgcttggataaagtgggaca

SEQ ID NO: 3875748 - DNA, 25 bp, Homo sapien
tctcctggcatagggttgagctcca

SEQ ID NO: 3875749 - DNA, 25 bp, Homo sapien
caggatttgctggtccccatgctat

SEQ ID NO: 3875750 - DNA, 25 bp, Homo sapien
accctttgggtgacctgagtggtgc

SEQ ID NO: 3875751 - DNA, 25 bp, Homo sapien
catgctatgatatgcttccccagaa

SEQ ID NO: 3875752 - DNA, 25 bp, Homo sapien
ccctttgggtgacctgagtggtgca

SEQ ID NO: 3875753 - DNA, 25 bp, Homo sapien
tctctccttatcaccatattcgatg

SEQ ID NO: 3875754 - DNA, 25 bp, Homo sapien
gtccatggcccggacgatggctgcc

SEQ ID NO: 3875755 - DNA, 25 bp, Homo sapien
tattcgatgcccaaagtgtccatgg

SEQ ID NO: 3875756 - DNA, 25 bp, Homo sapien
tactgtttcacgtcttctccggaga

SEQ ID NO: 3875757 - DNA, 25 bp, Homo sapien
tccgggagttttgtagcccctgcaa

SEQ ID NO: 3875758 - DNA, 25 bp, Homo sapien
tatctttcaaacatagcggagtctc

SEQ ID NO: 3875759 - DNA, 25 bp, Homo sapien
ttctcgttcatttaaggcagcccag

SEQ ID NO: 3875760 - DNA, 25 bp, Homo sapien
gatgcaatggcttaggttggtgact

SEQ ID NO: 3875761 - DNA, 25 bp, Homo sapien
ccaaggacaggtacttagacagtgt

SEQ ID NO: 3875762 - DNA, 25 bp, Homo sapien
ttctgtacaagttaattgcccaagg

SEQ ID NO: 3875763 - DNA, 25 bp, Homo sapien
tagaactgtcaccaactcttcctca

SEQ ID NO: 3875764 - DNA, 25 bp, Homo sapien
acttagacagtgttgtggcagctcc

SEQ ID NO: 3875765 - DNA, 25 bp, Homo sapien
tcaaatcacacagcaatcagagatg

SEQ ID NO: 3875766 - DNA, 25 bp, Homo sapien
tagccttgccagtgtagctgtatat

SEQ ID NO: 3875767 - DNA, 25 bp, Homo sapien
tcagagatgaatgctctccatccag

SEQ ID NO: 3875768 - DNA, 25 bp, Homo sapien
actgagattcagtcccaaacaggga

SEQ ID NO: 3875769 - DNA, 25 bp, Homo sapien
tgactccacaccagagaggctgaag

SEQ ID NO: 3875770 - DNA, 25 bp, Homo sapien
acgcacagtcacggggccccaagtg

SEQ ID NO: 3875771 - DNA, 25 bp, Homo sapien
gggccccaagtgactccacaccaga

SEQ ID NO: 3875772 - DNA, 25 bp, Homo sapien
tgaaggaaaaaccagccagtcctct

SEQ ID NO: 3875773 - DNA, 25 bp, Homo sapien
taagttctgccaggggaatttatag

SEQ ID NO: 3875774 - DNA, 25 bp, Homo sapien
acttagcaattaagttctgccaggg

SEQ ID NO: 3875775 - DNA, 25 bp, Homo sapien
aaacttagcaattaagttctgccag

SEQ ID NO: 3875776 - DNA, 25 bp, Homo sapien
ctaaacttagcaattaagttctgcc

SEQ ID NO: 3875777 - DNA, 25 bp, Homo sapien
tgtgattcagctacaacacggaaaa

SEQ ID NO: 3875778 - DNA, 25 bp, Homo sapien
attcagctacaacacggaaaaacct

SEQ ID NO: 3875779 - DNA, 25 bp, Homo sapien
tgattcagctacaacacggaaaaac

SEQ ID NO: 3875780 - DNA, 25 bp, Homo sapien
tcagctacaacacggaaaaaccttg

SEQ ID NO: 3875781 - DNA, 25 bp, Homo sapien
caagaaaatggacctgtcaccccag

SEQ ID NO: 3875782 - DNA, 25 bp, Homo sapien
gagactggctccctattgacaaaag

SEQ ID NO: 3875783 - DNA, 25 bp, Homo sapien
catgttcatatcagaagggcaatcc

SEQ ID NO: 3875784 - DNA, 25 bp, Homo sapien
tctgcacacagaacatgggactcat

SEQ ID NO: 3875785 - DNA, 25 bp, Homo sapien
gccagttgggcaagcgacttaacct

SEQ ID NO: 3875786 - DNA, 25 bp, Homo sapien
gattgcaagtaaactcccctcgcag

SEQ ID NO: 3875787 - DNA, 25 bp, Homo sapien
tgcacaaagagttatgctggtcccc

SEQ ID NO: 3875788 - DNA, 25 bp, Homo sapien
cacactagcaagtccggtgaggcgg

SEQ ID NO: 3875789 - DNA, 25 bp, Homo sapien
tcactgtttgaaggccagtcctgca

SEQ ID NO: 3875790 - DNA, 25 bp, Homo sapien
gctcagcatctgtgtgtccccctgg

SEQ ID NO: 3875791 - DNA, 25 bp, Homo sapien
gggcagaggcaccctgaatagcctt

SEQ ID NO: 3875792 - DNA, 25 bp, Homo sapien
gcatctgtgtgtccccctgggtagg

SEQ ID NO: 3875793 - DNA, 25 bp, Homo sapien
gttactgcccttgtcatcatcactg

SEQ ID NO: 3875794 - DNA, 25 bp, Homo sapien
gggaagttgttactgcccttgtcat

SEQ ID NO: 3875795 - DNA, 25 bp, Homo sapien
cactgtcgctgatcaataagggcaa

SEQ ID NO: 3875796 - DNA, 25 bp, Homo sapien
gtcatcatcactgtcgctgatcaat

SEQ ID NO: 3875797 - DNA, 25 bp, Homo sapien
cacattggtggttcaactggcagcc

SEQ ID NO: 3875798 - DNA, 25 bp, Homo sapien
aaacttgctcgctggaactttgaca

SEQ ID NO: 3875799 - DNA, 25 bp, Homo sapien
tattgttcaccggtatcctctgtcc

SEQ ID NO: 3875800 - DNA, 25 bp, Homo sapien
tcagaggtctgaggaaatgtggcct

SEQ ID NO: 3875801 - DNA, 25 bp, Homo sapien
cacagacggctgagttctaaacaag

SEQ ID NO: 3875802 - DNA, 25 bp, Homo sapien
actccgccgggcagaatggtttagc

SEQ ID NO: 3875803 - DNA, 25 bp, Homo sapien
tgaggactgaacacggcacacaagt

SEQ ID NO: 3875804 - DNA, 25 bp, Homo sapien
caccttctgagaagagggagcccgg

SEQ ID NO: 3875805 - DNA, 25 bp, Homo sapien
tggcatcaatttacacctaaggacc

SEQ ID NO: 3875806 - DNA, 25 bp, Homo sapien
tacacctaaggacctttgaagagaa

SEQ ID NO: 3875807 - DNA, 25 bp, Homo sapien
ttacacctaaggacctttgaagaga

SEQ ID NO: 3875808 - DNA, 25 bp, Homo sapien
tcaatttacacctaaggacctttga

SEQ ID NO: 3875809 - DNA, 25 bp, Homo sapien
tgcagtactttgcttccatctgagc

SEQ ID NO: 3875810 - DNA, 25 bp, Homo sapien
gcagtactttgcttccatctgagcc

SEQ ID NO: 3875811 - DNA, 25 bp, Homo sapien
ggtatgcggttatgtcttaaaagaa

SEQ ID NO: 3875812 - DNA, 25 bp, Homo sapien
aaatagaaggtatgcggttatgtct

SEQ ID NO: 3875813 - DNA, 25 bp, Homo sapien
ggaatcagatcattaaagatgtggc

SEQ ID NO: 3875814 - DNA, 25 bp, Homo sapien
gaaaatattagcagtaggaatcaga

SEQ ID NO: 3875815 - DNA, 25 bp, Homo sapien
tcaggctatccacgccttcatcaag

SEQ ID NO: 3875816 - DNA, 25 bp, Homo sapien
tgccttcaggctatccacgccttca

SEQ ID NO: 3875817 - DNA, 25 bp, Homo sapien
gctgccttcaggctatccacgcctt

SEQ ID NO: 3875818 - DNA, 25 bp, Homo sapien
cttcaggctatccacgccttcatca

SEQ ID NO: 3875819 - DNA, 25 bp, Homo sapien
tgggttcctctgtgtactgcacgca

SEQ ID NO: 3875820 - DNA, 25 bp, Homo sapien
tcacccttgaagtccagataggcct

SEQ ID NO: 3875821 - DNA, 25 bp, Homo sapien
tactgcacgcaaagcacagactcca

SEQ ID NO: 3875822 - DNA, 25 bp, Homo sapien
catgatctgatccatgtcacccttg

SEQ ID NO: 3875823 - DNA, 25 bp, Homo sapien
tcccagtctcggtcttgggtgagca

SEQ ID NO: 3875824 - DNA, 25 bp, Homo sapien
gcggcgggtggcgtcctccttgtcg

SEQ ID NO: 3875825 - DNA, 25 bp, Homo sapien
gcgtcctccttgtcgccctcaccca

SEQ ID NO: 3875826 - DNA, 25 bp, Homo sapien
gcgggtggcgtcctccttgtcgccc

SEQ ID NO: 3875827 - DNA, 25 bp, Homo sapien
ggtggcgtcctccttgtcgccctca

SEQ ID NO: 3875828 - DNA, 25 bp, Homo sapien
ttgtggtagcctcgtcggacctcgc

SEQ ID NO: 3875829 - DNA, 25 bp, Homo sapien
ctgcagggacaccttgtggtagcct

SEQ ID NO: 3875830 - DNA, 25 bp, Homo sapien
acaccttgtggtagcctcgtcggac

SEQ ID NO: 3875831 - DNA, 25 bp, Homo sapien
gggacaccttgtggtagcctcgtcg

SEQ ID NO: 3875832 - DNA, 25 bp, Homo sapien
ggactgcttctttttcgcgcccaaa

SEQ ID NO: 3875833 - DNA, 25 bp, Homo sapien
cagctgcgccgggtacaacccagga

SEQ ID NO: 3875834 - DNA, 25 bp, Homo sapien
caaaaagcccagggcgcctgcgtca

SEQ ID NO: 3875835 - DNA, 25 bp, Homo sapien
gatacgaccccggaggaagcagccg

SEQ ID NO: 3875836 - DNA, 25 bp, Homo sapien
ttacggcggccgcaaaatgaggtgt

SEQ ID NO: 3875837 - DNA, 25 bp, Homo sapien
gaagtgatgttgctcgggtctctcc

SEQ ID NO: 3875838 - DNA, 25 bp, Homo sapien
gtaacgccggcatgtggagtcacag

SEQ ID NO: 3875839 - DNA, 25 bp, Homo sapien
ccgcgcgcaggagctaggtcttcag

SEQ ID NO: 3875840 - DNA, 25 bp, Homo sapien
tattagcttgaatttacaaactgct

SEQ ID NO: 3875841 - DNA, 25 bp, Homo sapien
ttcttgaaaggaataggtaaagctg

SEQ ID NO: 3875842 - DNA, 25 bp, Homo sapien
taagtagaaaacggccaaacatcag

SEQ ID NO: 3875843 - DNA, 25 bp, Homo sapien
tggttcaacttaacagatgtgtttt

SEQ ID NO: 3875844 - DNA, 25 bp, Homo sapien
tgccctggcatcaaagtctcaaagc

SEQ ID NO: 3875845 - DNA, 25 bp, Homo sapien
tgaacatgttggatcccaggtggca

SEQ ID NO: 3875846 - DNA, 25 bp, Homo sapien
gctaagtgaatacccgagttggcag

SEQ ID NO: 3875847 - DNA, 25 bp, Homo sapien
tacacattggtggagagagataaca

SEQ ID NO: 3875848 - DNA, 25 bp, Homo sapien
tatgctctagccaaattatgtaatg

SEQ ID NO: 3875849 - DNA, 25 bp, Homo sapien
tcaaattattatgctctagccaaat

SEQ ID NO: 3875850 - DNA, 25 bp, Homo sapien
gaaatatccttttattgcaactcaa

SEQ ID NO: 3875851 - DNA, 25 bp, Homo sapien
tatccttttattgcaactcaaattt

SEQ ID NO: 3875852 - DNA, 25 bp, Homo sapien
gccccaatggtatctttatattatt

SEQ ID NO: 3875853 - DNA, 25 bp, Homo sapien
ggaactatgggtgagcaacaccaca

SEQ ID NO: 3875854 - DNA, 25 bp, Homo sapien
gagccactgccccaatggtatcttt

SEQ ID NO: 3875855 - DNA, 25 bp, Homo sapien
ctggaactatgggtgagcaacacca

SEQ ID NO: 3875856 - DNA, 25 bp, Homo sapien
taaagatcccttatagattactggc

SEQ ID NO: 3875857 - DNA, 25 bp, Homo sapien
taagaatatgcattaaggctaggag

SEQ ID NO: 3875858 - DNA, 25 bp, Homo sapien
cagtttatcctaacacagagcagcc

SEQ ID NO: 3875859 - DNA, 25 bp, Homo sapien
ggtgcatgcttgtagctccccggct

SEQ ID NO: 3875860 - DNA, 25 bp, Homo sapien
gcaggaagtcttggaagccagtaaa

SEQ ID NO: 3875861 - DNA, 25 bp, Homo sapien
tcttgcacttgtgggatgaacatga

SEQ ID NO: 3875862 - DNA, 25 bp, Homo sapien
ctgaatgggccatgaatagtctggc

SEQ ID NO: 3875863 - DNA, 25 bp, Homo sapien
aagctaattagtacccacacccagc

SEQ ID NO: 3875864 - DNA, 25 bp, Homo sapien
caaaattaagatcgctgcagtgttt

SEQ ID NO: 3875865 - DNA, 25 bp, Homo sapien
tgctatgctcactaaagtcagctca

SEQ ID NO: 3875866 - DNA, 25 bp, Homo sapien
ggaccttgaccttgttcccactgct

SEQ ID NO: 3875867 - DNA, 25 bp, Homo sapien
aacaaaattaagatcgctgcagtgt

SEQ ID NO: 3875868 - DNA, 25 bp, Homo sapien
tctgtagcctctgtatctgtagctt

SEQ ID NO: 3875869 - DNA, 25 bp, Homo sapien
ctgtatctgtagcttctgcatctgt

SEQ ID NO: 3875870 - DNA, 25 bp, Homo sapien
tagcctctgtatctgtagcttctgc

SEQ ID NO: 3875871 - DNA, 25 bp, Homo sapien
ttatgtttctgtagcctctgtatct

SEQ ID NO: 3875872 - DNA, 25 bp, Homo sapien
acgtgcccgtttccttcgcagtctc

SEQ ID NO: 3875873 - DNA, 25 bp, Homo sapien
ttcacgtgcccgtttccttcgcagt

SEQ ID NO: 3875874 - DNA, 25 bp, Homo sapien
tgcccgtttccttcgcagtctctca

SEQ ID NO: 3875875 - DNA, 25 bp, Homo sapien
gcccgtttccttcgcagtctctcag

SEQ ID NO: 3875876 - DNA, 25 bp, Homo sapien
tagaacggccgattggtgcagccac

SEQ ID NO: 3875877 - DNA, 25 bp, Homo sapien
ccaatgacggatcctgtctaggttg

SEQ ID NO: 3875878 - DNA, 25 bp, Homo sapien
gttgagggcaacgagtttttctcca

SEQ ID NO: 3875879 - DNA, 25 bp, Homo sapien
cacaatgcggtagaacggccgattg

SEQ ID NO: 3875880 - DNA, 25 bp, Homo sapien
ttcaggttcgggttgcctccatcgc

SEQ ID NO: 3875881 - DNA, 25 bp, Homo sapien
gcttgccattcactaggctctgtga

SEQ ID NO: 3875882 - DNA, 25 bp, Homo sapien
gatcaaatgtaaggcagtgtggctg

SEQ ID NO: 3875883 - DNA, 25 bp, Homo sapien
tctgtgaccttgtcggagccttagc

SEQ ID NO: 3875884 - DNA, 25 bp, Homo sapien
ctcggagagccccgctacccgcacg

SEQ ID NO: 3875885 - DNA, 25 bp, Homo sapien
tacccgcacgcaccagctctacggc

SEQ ID NO: 3875886 - DNA, 25 bp, Homo sapien
tgccgccggcgtgcggctcctcgga

SEQ ID NO: 3875887 - DNA, 25 bp, Homo sapien
gccggcgtgcggctcctcggagagc

SEQ ID NO: 3875888 - DNA, 25 bp, Homo sapien
ggcagagaacaaacacagaaagaac

SEQ ID NO: 3875889 - DNA, 25 bp, Homo sapien
gcagggcagagaacaaacacagaaa

SEQ ID NO: 3875890 - DNA, 25 bp, Homo sapien
cttggcagggcagagaacaaacaca

SEQ ID NO: 3875891 - DNA, 25 bp, Homo sapien
cagggcagagaacaaacacagaaag

SEQ ID NO: 3875892 - DNA, 25 bp, Homo sapien
tcgactccggaagcggatgatccgc

SEQ ID NO: 3875893 - DNA, 25 bp, Homo sapien
gaagcggatgatccgctcgccacgc

SEQ ID NO: 3875894 - DNA, 25 bp, Homo sapien
aggccgcaccgccaagcggtacaag

SEQ ID NO: 3875895 - DNA, 25 bp, Homo sapien
aaaacctcgactccggaagcggatg

SEQ ID NO: 3875896 - DNA, 25 bp, Homo sapien
caaaagaggcgtttctcgtggtgtc

SEQ ID NO: 3875897 - DNA, 25 bp, Homo sapien
tggcggtgcgatccctctcagactt

SEQ ID NO: 3875898 - DNA, 25 bp, Homo sapien
agttttaggcgaatcccaggcgcgc

SEQ ID NO: 3875899 - DNA, 25 bp, Homo sapien
ggcgcgccaaggaaagtgctacaaa

SEQ ID NO: 3875900 - DNA, 25 bp, Homo sapien
tctttgccctaatacagtgacccag

SEQ ID NO: 3875901 - DNA, 25 bp, Homo sapien
ccttggagccctagtggtttagatc

SEQ ID NO: 3875902 - DNA, 25 bp, Homo sapien
tactgttagttccaaagggctagca

SEQ ID NO: 3875903 - DNA, 25 bp, Homo sapien
gaacctgtccagaaaccttagcacc

SEQ ID NO: 3875904 - DNA, 25 bp, Homo sapien
gagtcccatgcagaaaattgttcag

SEQ ID NO: 3875905 - DNA, 25 bp, Homo sapien
ggcttcatacggtaaaactctctgg

SEQ ID NO: 3875906 - DNA, 25 bp, Homo sapien
gtaaaacatccagtaacacagccaa

SEQ ID NO: 3875907 - DNA, 25 bp, Homo sapien
gacccagtttctcgtcaaccagtaa

SEQ ID NO: 3875908 - DNA, 25 bp, Homo sapien
tttcctgtagtgtgtggatctctgc

SEQ ID NO: 3875909 - DNA, 25 bp, Homo sapien
ctgtttcctgtagtgtgtggatctc

SEQ ID NO: 3875910 - DNA, 25 bp, Homo sapien
gtttcctgtagtgtgtggatctctg

SEQ ID NO: 3875911 - DNA, 25 bp, Homo sapien
actgtttcctgtagtgtgtggatct

SEQ ID NO: 3875912 - DNA, 25 bp, Homo sapien
tccctgggatggaattggctcttcc

SEQ ID NO: 3875913 - DNA, 25 bp, Homo sapien
gaaaactccagtagaagaccttaga

SEQ ID NO: 3875914 - DNA, 25 bp, Homo sapien
gctaaagaacatagttccctgggat

SEQ ID NO: 3875915 - DNA, 25 bp, Homo sapien
tatgtggctttgaagacccctcttt

SEQ ID NO: 3875916 - DNA, 25 bp, Homo sapien
tatgtatcacctatagctgcttgtg

SEQ ID NO: 3875917 - DNA, 25 bp, Homo sapien
tgtgtactacaagtgcagagtttag

SEQ ID NO: 3875918 - DNA, 25 bp, Homo sapien
tgctgatccctagactagaccaacc

SEQ ID NO: 3875919 - DNA, 25 bp, Homo sapien
caacccctacatattacacgaggaa

SEQ ID NO: 3875920 - DNA, 25 bp, Homo sapien
atcatgtacttgtaggcctgctcag

SEQ ID NO: 3875921 - DNA, 25 bp, Homo sapien
gatcatgtacttgtaggcctgctca

SEQ ID NO: 3875922 - DNA, 25 bp, Homo sapien
ggcctgctcagcttctaattgccgt

SEQ ID NO: 3875923 - DNA, 25 bp, Homo sapien
gctcagcttctaattgccgtccaac

SEQ ID NO: 3875924 - DNA, 25 bp, Homo sapien
tatacaccctgttccccaatgactg

SEQ ID NO: 3875925 - DNA, 25 bp, Homo sapien
tgtccatccacttctttgcgttaat

SEQ ID NO: 3875926 - DNA, 25 bp, Homo sapien
gaacttcctgcccatggacatggta

SEQ ID NO: 3875927 - DNA, 25 bp, Homo sapien
caatgactgccctgactagtaacca

SEQ ID NO: 3875928 - DNA, 25 bp, Homo sapien
gcccatacttcagcattgtagttgt

SEQ ID NO: 3875929 - DNA, 25 bp, Homo sapien
agagccagatatgcccatacttcag

SEQ ID NO: 3875930 - DNA, 25 bp, Homo sapien
cattgtagttgttcaatgcattggc

SEQ ID NO: 3875931 - DNA, 25 bp, Homo sapien
tcagcattgtagttgttcaatgcat

SEQ ID NO: 3875932 - DNA, 25 bp, Homo sapien
catgtgagttagcttagctgaaacc

SEQ ID NO: 3875933 - DNA, 25 bp, Homo sapien
ccactatgtcccaataatactggtg

SEQ ID NO: 3875934 - DNA, 25 bp, Homo sapien
aaggaaatcttatgtggtggttcaa

SEQ ID NO: 3875935 - DNA, 25 bp, Homo sapien
aatactggtgtatatgacctatacc

SEQ ID NO: 3875936 - DNA, 25 bp, Homo sapien
tgatctcttacaggcttgcatatag

SEQ ID NO: 3875937 - DNA, 25 bp, Homo sapien
gaaggtgatctcttacaggcttgca

SEQ ID NO: 3875938 - DNA, 25 bp, Homo sapien
cttacaggcttgcatataggttttc

SEQ ID NO: 3875939 - DNA, 25 bp, Homo sapien
aggcatgaaggtgatctcttacagg

SEQ ID NO: 3875940 - DNA, 25 bp, Homo sapien
catccactacaaagctaatggttcg

SEQ ID NO: 3875941 - DNA, 25 bp, Homo sapien
tgaagtgcatctcagaagcatccac

SEQ ID NO: 3875942 - DNA, 25 bp, Homo sapien
ttccagatagatgagccccagtctc

SEQ ID NO: 3875943 - DNA, 25 bp, Homo sapien
ttcgttcatagcatgccttggcctc

SEQ ID NO: 3875944 - DNA, 25 bp, Homo sapien
gcaccaagtaatattcacagctggg

SEQ ID NO: 3875945 - DNA, 25 bp, Homo sapien
agaatgtgtgtttgggccagcacca

SEQ ID NO: 3875946 - DNA, 25 bp, Homo sapien
ctccttgagggcataacagctcatg

SEQ ID NO: 3875947 - DNA, 25 bp, Homo sapien
gctgcttgttgaaggtattcctctg

SEQ ID NO: 3875948 - DNA, 25 bp, Homo sapien
cctgcccttgagtagggcatgcact

SEQ ID NO: 3875949 - DNA, 25 bp, Homo sapien
tcctgagtcttgatctctcctactg

SEQ ID NO: 3875950 - DNA, 25 bp, Homo sapien
gcctgcccttgagtagggcatgcac

SEQ ID NO: 3875951 - DNA, 25 bp, Homo sapien
gatctctcctactgcttgctcatga

SEQ ID NO: 3875952 - DNA, 25 bp, Homo sapien
gcaacatatgcctttagagtctgat

SEQ ID NO: 3875953 - DNA, 25 bp, Homo sapien
tccattgggcttaaagtatgctctc

SEQ ID NO: 3875954 - DNA, 25 bp, Homo sapien
gagcagaacttgcagcgaggtcttc

SEQ ID NO: 3875955 - DNA, 25 bp, Homo sapien
tctgttggtattctacagggagcag

SEQ ID NO: 3875956 - DNA, 25 bp, Homo sapien
ctgcacagccttgactttcatcaag

SEQ ID NO: 3875957 - DNA, 25 bp, Homo sapien
gactttcatcaagaaatgtatggtc

SEQ ID NO: 3875958 - DNA, 25 bp, Homo sapien
tcatcaagaaatgtatggtctccat

SEQ ID NO: 3875959 - DNA, 25 bp, Homo sapien
gcacagccttgactttcatcaagaa

SEQ ID NO: 3875960 - DNA, 25 bp, Homo sapien
tgagaaacaccataatgaaggccgg

SEQ ID NO: 3875961 - DNA, 25 bp, Homo sapien
ttgagaaacaccataatgaaggccg

SEQ ID NO: 3875962 - DNA, 25 bp, Homo sapien
atgcagaagagctgatgaatcttga

SEQ ID NO: 3875963 - DNA, 25 bp, Homo sapien
gatgaatcttgacattttgatgctt

SEQ ID NO: 3875964 - DNA, 25 bp, Homo sapien
agtcaaaatgggttcttgtgaatca

SEQ ID NO: 3875965 - DNA, 25 bp, Homo sapien
gtttttggcttatacttggatccca

SEQ ID NO: 3875966 - DNA, 25 bp, Homo sapien
tctccttgataaatgtgttagatgg

SEQ ID NO: 3875967 - DNA, 25 bp, Homo sapien
tctttgttggtatctccttgataaa

SEQ ID NO: 3875968 - DNA, 25 bp, Homo sapien
agaatagataatgcagctcctggtc

SEQ ID NO: 3875969 - DNA, 25 bp, Homo sapien
ctagaatagataatgcagctcctgg

SEQ ID NO: 3875970 - DNA, 25 bp, Homo sapien
tagaatagataatgcagctcctggt

SEQ ID NO: 3875971 - DNA, 25 bp, Homo sapien
gatacattttgcaaagcataagaaa

SEQ ID NO: 3875972 - DNA, 25 bp, Homo sapien
gagatacattttgcaaagcataaga

SEQ ID NO: 3875973 - DNA, 25 bp, Homo sapien
taaagagtataagctaaactgacaa

SEQ ID NO: 3875974 - DNA, 25 bp, Homo sapien
atttaaagagtataagctaaactga

SEQ ID NO: 3875975 - DNA, 25 bp, Homo sapien
ccaaggagtactgcgcagcacaaaa

SEQ ID NO: 3875976 - DNA, 25 bp, Homo sapien
cactgggtacttgtggacataccga

SEQ ID NO: 3875977 - DNA, 25 bp, Homo sapien
gacataccgacgtgattctagtgaa

SEQ ID NO: 3875978 - DNA, 25 bp, Homo sapien
gacatggaatctagctaaggtgccc

SEQ ID NO: 3875979 - DNA, 25 bp, Homo sapien
tgaaaatccccctcacacatatcca

SEQ ID NO: 3875980 - DNA, 25 bp, Homo sapien
caaaactgcaccactcatgtcacac

SEQ ID NO: 3875981 - DNA, 25 bp, Homo sapien
aaactgcaccactcatgtcacacag

SEQ ID NO: 3875982 - DNA, 25 bp, Homo sapien
tcacacatatccaaaactgcaccac

SEQ ID NO: 3875983 - DNA, 25 bp, Homo sapien
tccggagttaaagtgattgtcctgt

SEQ ID NO: 3875984 - DNA, 25 bp, Homo sapien
aactactgacttcaagtgagctgtc

SEQ ID NO: 3875985 - DNA, 25 bp, Homo sapien
ggttctgtcatggtctgagatcata

SEQ ID NO: 3875986 - DNA, 25 bp, Homo sapien
tgtgttaaggtcagttttattgcct

SEQ ID NO: 3875987 - DNA, 25 bp, Homo sapien
gattgctgttgcagaaccatttgtg

SEQ ID NO: 3875988 - DNA, 25 bp, Homo sapien
ctgttgcagaaccatttgtgattcc

SEQ ID NO: 3875989 - DNA, 25 bp, Homo sapien
ttgctgttgcagaaccatttgtgat

SEQ ID NO: 3875990 - DNA, 25 bp, Homo sapien
cttgattgctgttgcagaaccattt

SEQ ID NO: 3875991 - DNA, 25 bp, Homo sapien
tcctcagtgtcttctacaccagtgc

SEQ ID NO: 3875992 - DNA, 25 bp, Homo sapien
ccaagggcctaaactagattctctc

SEQ ID NO: 3875993 - DNA, 25 bp, Homo sapien
gggcctaaactagattctctcttcc

SEQ ID NO: 3875994 - DNA, 25 bp, Homo sapien
tcagtgtcttctacaccagtgctct

SEQ ID NO: 3875995 - DNA, 25 bp, Homo sapien
tgccatttccattcgaatatcattg

SEQ ID NO: 3875996 - DNA, 25 bp, Homo sapien
catgaaatgccatttccattcgaat

SEQ ID NO: 3875997 - DNA, 25 bp, Homo sapien
gaaatgccatttccattcgaatatc

SEQ ID NO: 3875998 - DNA, 25 bp, Homo sapien
gccatttccattcgaatatcattgt

SEQ ID NO: 3875999 - DNA, 25 bp, Homo sapien
tggttccaagcaagtagcatcctca

SEQ ID NO: 3876000 - DNA, 25 bp, Homo sapien
caagtaaagtccaggctacaacatt

SEQ ID NO: 3876001 - DNA, 25 bp, Homo sapien
cttgctcatagttctccaacaggac

SEQ ID NO: 3876002 - DNA, 25 bp, Homo sapien
tacaacattagttggttccaagcaa

SEQ ID NO: 3876003 - DNA, 25 bp, Homo sapien
tggatatgactctggttgagggaaa

SEQ ID NO: 3876004 - DNA, 25 bp, Homo sapien
gatgttgtcttcagttaggaggcag

SEQ ID NO: 3876005 - DNA, 25 bp, Homo sapien
gattctggggctcacggaccaatct

SEQ ID NO: 3876006 - DNA, 25 bp, Homo sapien
caaccagtgatccagattctggggc

SEQ ID NO: 3876007 - DNA, 25 bp, Homo sapien
tgcaaagagttgaagctgttcactg

SEQ ID NO: 3876008 - DNA, 25 bp, Homo sapien
taaatggttgcaacagtgccttgga

SEQ ID NO: 3876009 - DNA, 25 bp, Homo sapien
gagttgaagctgttcactgcttgta

SEQ ID NO: 3876010 - DNA, 25 bp, Homo sapien
gtataaatggttgcaacagtgcctt

SEQ ID NO: 3876011 - DNA, 25 bp, Homo sapien
tcagatctctgtcttgggcaaaacc

SEQ ID NO: 3876012 - DNA, 25 bp, Homo sapien
gaaaaaggttggcaagccctcgcta

SEQ ID NO: 3876013 - DNA, 25 bp, Homo sapien
tctcagagaaagaggtattgcagcc

SEQ ID NO: 3876014 - DNA, 25 bp, Homo sapien
tcattccaagacaagagcagctaac

SEQ ID NO: 3876015 - DNA, 25 bp, Homo sapien
gttgtcttcaagtatttatctctca

SEQ ID NO: 3876016 - DNA, 25 bp, Homo sapien
ctcactgataaatgtctgaagttcc

SEQ ID NO: 3876017 - DNA, 25 bp, Homo sapien
gcatctgatctactaagaacacata

SEQ ID NO: 3876018 - DNA, 25 bp, Homo sapien
ctggtttagggctacatgcatctga

SEQ ID NO: 3876019 - DNA, 25 bp, Homo sapien
tgctcctccaaggtttcactatcca

SEQ ID NO: 3876020 - DNA, 25 bp, Homo sapien
caattaagttcatagctgagctggc

SEQ ID NO: 3876021 - DNA, 25 bp, Homo sapien
tgtagtattcatctagaatggctct

SEQ ID NO: 3876022 - DNA, 25 bp, Homo sapien
tatccatatcactctccagtttggc

SEQ ID NO: 3876023 - DNA, 25 bp, Homo sapien
cctcctgtccgacgggtaagaggag

SEQ ID NO: 3876024 - DNA, 25 bp, Homo sapien
gaggccttggaggaatcatttcctt

SEQ ID NO: 3876025 - DNA, 25 bp, Homo sapien
taagaggaggccttggaggaatcat

SEQ ID NO: 3876026 - DNA, 25 bp, Homo sapien
gagctcctcctgtccgacgggtaag

SEQ ID NO: 3876027 - DNA, 25 bp, Homo sapien
atcggacaggtaatatgatgatgtc

SEQ ID NO: 3876028 - DNA, 25 bp, Homo sapien
ggacaggtaatatgatgatgtcaca

SEQ ID NO: 3876029 - DNA, 25 bp, Homo sapien
cggacaggtaatatgatgatgtcac

SEQ ID NO: 3876030 - DNA, 25 bp, Homo sapien
catcggacaggtaatatgatgatgt

SEQ ID NO: 3876031 - DNA, 25 bp, Homo sapien
tcttatacagtgacatagatttagc

SEQ ID NO: 3876032 - DNA, 25 bp, Homo sapien
tacccagcctaagtacaattttcta

SEQ ID NO: 3876033 - DNA, 25 bp, Homo sapien
caggctcagcctgcaacgaaaggca

SEQ ID NO: 3876034 - DNA, 25 bp, Homo sapien
tttggtatacccatgcctcaggctc

SEQ ID NO: 3876035 - DNA, 25 bp, Homo sapien
cagatttgatgcttatttatgagag

SEQ ID NO: 3876036 - DNA, 25 bp, Homo sapien
cacccggcccatttatggtaaatat

SEQ ID NO: 3876037 - DNA, 25 bp, Homo sapien
gaatatgtgaagaaacagtagtctc

SEQ ID NO: 3876038 - DNA, 25 bp, Homo sapien
tatgagagctctatttaatgcggcc

SEQ ID NO: 3876039 - DNA, 25 bp, Homo sapien
ccaacacaatgtatgtccctgcttc

SEQ ID NO: 3876040 - DNA, 25 bp, Homo sapien
ggcattcgctttggaaccaaggctt

SEQ ID NO: 3876041 - DNA, 25 bp, Homo sapien
ggctagctcctctggcattcgcttt

SEQ ID NO: 3876042 - DNA, 25 bp, Homo sapien
ggctttgtccagctgaatttccaac

SEQ ID NO: 3876043 - DNA, 25 bp, Homo sapien
cagttcactttacagagtttcaaca

SEQ ID NO: 3876044 - DNA, 25 bp, Homo sapien
taaaattaacctggcaccagttcac

SEQ ID NO: 3876045 - DNA, 25 bp, Homo sapien
agtcatagacaactagtcatgggca

SEQ ID NO: 3876046 - DNA, 25 bp, Homo sapien
ggcaaatatggaatgataactaaca

SEQ ID NO: 3876047 - DNA, 25 bp, Homo sapien
tccaaaggagtatctgagctctgag

SEQ ID NO: 3876048 - DNA, 25 bp, Homo sapien
ccttccaaaggagtatctgagctct

SEQ ID NO: 3876049 - DNA, 25 bp, Homo sapien
ctgtccttcaggattgtgacttaga

SEQ ID NO: 3876050 - DNA, 25 bp, Homo sapien
attgtgacttagagggggttcacct

SEQ ID NO: 3876051 - DNA, 25 bp, Homo sapien
tatcccggaacaagctcaataaaca

SEQ ID NO: 3876052 - DNA, 25 bp, Homo sapien
tgaatcaagtgatggccaatatccc

SEQ ID NO: 3876053 - DNA, 25 bp, Homo sapien
cagcttgtttggacagcagagaatt

SEQ ID NO: 3876054 - DNA, 25 bp, Homo sapien
caggcctaggccttccatctatatc

SEQ ID NO: 3876055 - DNA, 25 bp, Homo sapien
cttttcatggactacactgtctagg

SEQ ID NO: 3876056 - DNA, 25 bp, Homo sapien
gactacactgtctaggtaagggtaa

SEQ ID NO: 3876057 - DNA, 25 bp, Homo sapien
taaacatgaaaagctccccgaattc

SEQ ID NO: 3876058 - DNA, 25 bp, Homo sapien
acatgaaaagctccccgaattctct

SEQ ID NO: 3876059 - DNA, 25 bp, Homo sapien
ctggatacaacaatgggaccatatt

SEQ ID NO: 3876060 - DNA, 25 bp, Homo sapien
ccatattaacataagccacaccatg

SEQ ID NO: 3876061 - DNA, 25 bp, Homo sapien
aacataagccacaccatgaaacgaa

SEQ ID NO: 3876062 - DNA, 25 bp, Homo sapien
tacaacaatgggaccatattaacat

SEQ ID NO: 3876063 - DNA, 25 bp, Homo sapien
ctttgggtatagtgaccagaggaac

SEQ ID NO: 3876064 - DNA, 25 bp, Homo sapien
ctttccctttgggtatagtgaccag

SEQ ID NO: 3876065 - DNA, 25 bp, Homo sapien
ttccctttgggtatagtgaccagag

SEQ ID NO: 3876066 - DNA, 25 bp, Homo sapien
cagctttccctttgggtatagtgac

SEQ ID NO: 3876067 - DNA, 25 bp, Homo sapien
gtgatctctacaggccaaagccggc

SEQ ID NO: 3876068 - DNA, 25 bp, Homo sapien
ggccaaagccggcaatcggcaattc

SEQ ID NO: 3876069 - DNA, 25 bp, Homo sapien
tctctacaggccaaagccggcaatc

SEQ ID NO: 3876070 - DNA, 25 bp, Homo sapien
gcaatcggcaattcgcttctgaaaa

SEQ ID NO: 3876071 - DNA, 25 bp, Homo sapien
cagaaggatcaaggtagcagcgact

SEQ ID NO: 3876072 - DNA, 25 bp, Homo sapien
gatcaaggtagcagcgactttccaa

SEQ ID NO: 3876073 - DNA, 25 bp, Homo sapien
cactgcagaaggatcaaggtagcag

SEQ ID NO: 3876074 - DNA, 25 bp, Homo sapien
tagcagcgactttccaagtcccaaa

SEQ ID NO: 3876075 - DNA, 25 bp, Homo sapien
ctcaggatggttgagttctccttct

SEQ ID NO: 3876076 - DNA, 25 bp, Homo sapien
tggcaattggccactttttgggccg

SEQ ID NO: 3876077 - DNA, 25 bp, Homo sapien
accaacaatgaatgcatcaggaatg

SEQ ID NO: 3876078 - DNA, 25 bp, Homo sapien
aatgttattagctcctggagccaga

SEQ ID NO: 3876079 - DNA, 25 bp, Homo sapien
aacgtgaccttcagtagattgcccc

SEQ ID NO: 3876080 - DNA, 25 bp, Homo sapien
tgatggaacttgcagaccgaccatg

SEQ ID NO: 3876081 - DNA, 25 bp, Homo sapien
accgaccatgtagttctgcccagga

SEQ ID NO: 3876082 - DNA, 25 bp, Homo sapien
gctgtggtcagtaaaggctctgcca

SEQ ID NO: 3876083 - DNA, 25 bp, Homo sapien
cttagcacttgatctaggagtttct

SEQ ID NO: 3876084 - DNA, 25 bp, Homo sapien
agcacttgatctaggagtttctaag

SEQ ID NO: 3876085 - DNA, 25 bp, Homo sapien
gatctaggagtttctaagggtgagc

SEQ ID NO: 3876086 - DNA, 25 bp, Homo sapien
cttgcacagggtgcaatggaactgt

SEQ ID NO: 3876087 - DNA, 25 bp, Homo sapien
ggaagaaggtccaccacagcctgac

SEQ ID NO: 3876088 - DNA, 25 bp, Homo sapien
aaggtccaccacagcctgaccaaga

SEQ ID NO: 3876089 - DNA, 25 bp, Homo sapien
agggaagaaggtccaccacagcctg

SEQ ID NO: 3876090 - DNA, 25 bp, Homo sapien
aagaaggtccaccacagcctgacca

SEQ ID NO: 3876091 - DNA, 25 bp, Homo sapien
tgatatgttatcaaactctgtgacc

SEQ ID NO: 3876092 - DNA, 25 bp, Homo sapien
cctacttgggttcagcttcagcatt

SEQ ID NO: 3876093 - DNA, 25 bp, Homo sapien
tgacctttgtaacctgacagatgaa

SEQ ID NO: 3876094 - DNA, 25 bp, Homo sapien
gacaccaggccaatagttacataga

SEQ ID NO: 3876095 - DNA, 25 bp, Homo sapien
aactgctagtgaagttgtattttgc

SEQ ID NO: 3876096 - DNA, 25 bp, Homo sapien
tccttcaggattaaactcaaaactg

SEQ ID NO: 3876097 - DNA, 25 bp, Homo sapien
cacaggtttgtgagcgaggtcatct

SEQ ID NO: 3876098 - DNA, 25 bp, Homo sapien
gattgaattctgctcgaataaaggt

SEQ ID NO: 3876099 - DNA, 25 bp, Homo sapien
tcaaatagagaattttcccacacat

SEQ ID NO: 3876100 - DNA, 25 bp, Homo sapien
caaatcatatccctctgtcacggtg

SEQ ID NO: 3876101 - DNA, 25 bp, Homo sapien
tatccctctgtcacggtgatctgca

SEQ ID NO: 3876102 - DNA, 25 bp, Homo sapien
tctgtcacggtgatctgcacgagtc

SEQ ID NO: 3876103 - DNA, 25 bp, Homo sapien
tctgcacgagtctgcctgctgatgg

SEQ ID NO: 3876104 - DNA, 25 bp, Homo sapien
atcaccaactgggaaaagtccctct

SEQ ID NO: 3876105 - DNA, 25 bp, Homo sapien
caccaactgggaaaagtccctctgt

SEQ ID NO: 3876106 - DNA, 25 bp, Homo sapien
tcaccaactgggaaaagtccctctg

SEQ ID NO: 3876107 - DNA, 25 bp, Homo sapien
gcacaagtacccatattccatcata

SEQ ID NO: 3876108 - DNA, 25 bp, Homo sapien
tgaatcaacctgtcccctcatgtac

SEQ ID NO: 3876109 - DNA, 25 bp, Homo sapien
acagctgcacaagtacccatattcc

SEQ ID NO: 3876110 - DNA, 25 bp, Homo sapien
aacagaatgaatcaacctgtcccct

SEQ ID NO: 3876111 - DNA, 25 bp, Homo sapien
ggactcttgttgcccccggcaaggc

SEQ ID NO: 3876112 - DNA, 25 bp, Homo sapien
actcttgttgcccccggcaaggcac

SEQ ID NO: 3876113 - DNA, 25 bp, Homo sapien
tggggactcttgttgcccccggcaa

SEQ ID NO: 3876114 - DNA, 25 bp, Homo sapien
gtggggactcttgttgcccccggca

SEQ ID NO: 3876115 - DNA, 25 bp, Homo sapien
ggccagcggcttttcggtctaaata

SEQ ID NO: 3876116 - DNA, 25 bp, Homo sapien
taaaggaaggtctacgtccgcgctc

SEQ ID NO: 3876117 - DNA, 25 bp, Homo sapien
aatgaggaggcctccgacgagaagc

SEQ ID NO: 3876118 - DNA, 25 bp, Homo sapien
atctgctcggaagaagctgcaaggg

SEQ ID NO: 3876119 - DNA, 25 bp, Homo sapien
cagcctcagttatgtttttgacaac

SEQ ID NO: 3876120 - DNA, 25 bp, Homo sapien
ctgcagcagcctcagttatgttttt

SEQ ID NO: 3876121 - DNA, 25 bp, Homo sapien
cagcagcctcagttatgtttttgac

SEQ ID NO: 3876122 - DNA, 25 bp, Homo sapien
gcagcagcctcagttatgtttttga

SEQ ID NO: 3876123 - DNA, 25 bp, Homo sapien
ttattccaagactcgcgataaccct

SEQ ID NO: 3876124 - DNA, 25 bp, Homo sapien
gtttattccaagactcgcgataacc

SEQ ID NO: 3876125 - DNA, 25 bp, Homo sapien
agcaagtttattccaagactcgcga

SEQ ID NO: 3876126 - DNA, 25 bp, Homo sapien
caagtttattccaagactcgcgata

SEQ ID NO: 3876127 - DNA, 25 bp, Homo sapien
gcctgcgccctagcgccggctgcag

SEQ ID NO: 3876128 - DNA, 25 bp, Homo sapien
agcagggagcgagacgctgagcttc

SEQ ID NO: 3876129 - DNA, 25 bp, Homo sapien
ccgggagcagggagcgagacgctga

SEQ ID NO: 3876130 - DNA, 25 bp, Homo sapien
ggagcagggagcgagacgctgagct

SEQ ID NO: 3876131 - DNA, 25 bp, Homo sapien
cctgctgtttccgcggatgctttac

SEQ ID NO: 3876132 - DNA, 25 bp, Homo sapien
gcctgctgtttccgcggatgcttta

SEQ ID NO: 3876133 - DNA, 25 bp, Homo sapien
agcctgctgtttccgcggatgcttt

SEQ ID NO: 3876134 - DNA, 25 bp, Homo sapien
cttgccaagagttgggtttaagtgc

SEQ ID NO: 3876135 - DNA, 25 bp, Homo sapien
tgccaagagttgggtttaagtgcat

SEQ ID NO: 3876136 - DNA, 25 bp, Homo sapien
ttgccaagagttgggtttaagtgca

SEQ ID NO: 3876137 - DNA, 25 bp, Homo sapien
acattttgctttctcgactctttga

SEQ ID NO: 3876138 - DNA, 25 bp, Homo sapien
ctcgactctttgatttcaatatttc

SEQ ID NO: 3876139 - DNA, 25 bp, Homo sapien
ctttctcgactctttgatttcaata

SEQ ID NO: 3876140 - DNA, 25 bp, Homo sapien
ttttgctttctcgactctttgattt

SEQ ID NO: 3876141 - DNA, 25 bp, Homo sapien
taagagccagcttgaagggactccc

SEQ ID NO: 3876142 - DNA, 25 bp, Homo sapien
cccaagtgcccgtcgaaggaatagt

SEQ ID NO: 3876143 - DNA, 25 bp, Homo sapien
ccatttgacaactactgaggaggat

SEQ ID NO: 3876144 - DNA, 25 bp, Homo sapien
gatgccaacccagaagtgtagcgag

SEQ ID NO: 3876145 - DNA, 25 bp, Homo sapien
aaatttgaatgccttagtctgagtt

SEQ ID NO: 3876146 - DNA, 25 bp, Homo sapien
caagatgatctactgggatgtggga

SEQ ID NO: 3876147 - DNA, 25 bp, Homo sapien
agtgccaagatgatctactgggatg

SEQ ID NO: 3876148 - DNA, 25 bp, Homo sapien
aaataatcaattgaattgagagttc

SEQ ID NO: 3876149 - DNA, 25 bp, Homo sapien
caagagtgccaagatgatctactgg

SEQ ID NO: 3876150 - DNA, 25 bp, Homo sapien
aaagctttcaacgtgtcctcattca

SEQ ID NO: 3876151 - DNA, 25 bp, Homo sapien
tttcaacgtgtcctcattcagtatg

SEQ ID NO: 3876152 - DNA, 25 bp, Homo sapien
gaaaaagctttcaacgtgtcctcat

SEQ ID NO: 3876153 - DNA, 25 bp, Homo sapien
tgacaaggggttaatgtccagagta

SEQ ID NO: 3876154 - DNA, 25 bp, Homo sapien
aaataggctcattagtcacaaggga

SEQ ID NO: 3876155 - DNA, 25 bp, Homo sapien
gctgggtaaaccaatcactgtgatg

SEQ ID NO: 3876156 - DNA, 25 bp, Homo sapien
gaatcatccactgatctgcgcaagt

SEQ ID NO: 3876157 - DNA, 25 bp, Homo sapien
tcatatctgcctcccgaaaataagg

SEQ ID NO: 3876158 - DNA, 25 bp, Homo sapien
tgcaagtcccacctcctgggttgac

SEQ ID NO: 3876159 - DNA, 25 bp, Homo sapien
caagtcccacctcctgggttgacag

SEQ ID NO: 3876160 - DNA, 25 bp, Homo sapien
agtcccacctcctgggttgacagca

SEQ ID NO: 3876161 - DNA, 25 bp, Homo sapien
cccacctcctgggttgacagcattc

SEQ ID NO: 3876162 - DNA, 25 bp, Homo sapien
gctagaggtttaatgtagagcacag

SEQ ID NO: 3876163 - DNA, 25 bp, Homo sapien
aattagcctgaccttaattgtggaa

SEQ ID NO: 3876164 - DNA, 25 bp, Homo sapien
tagctgaacttaaacacagtggtgg

SEQ ID NO: 3876165 - DNA, 25 bp, Homo sapien
caaggtgacagatacgtaattagcc

SEQ ID NO: 3876166 - DNA, 25 bp, Homo sapien
cagacttagagggattccggaaggc

SEQ ID NO: 3876167 - DNA, 25 bp, Homo sapien
tatccactctatcaagcagacttag

SEQ ID NO: 3876168 - DNA, 25 bp, Homo sapien
cttaaaaggtgccacaggtaatact

SEQ ID NO: 3876169 - DNA, 25 bp, Homo sapien
aaaagtaggctatgtatcttaagca

SEQ ID NO: 3876170 - DNA, 25 bp, Homo sapien
aaccaagcacattaccctgatacgg

SEQ ID NO: 3876171 - DNA, 25 bp, Homo sapien
cagaaagctctttcggttagctgat

SEQ ID NO: 3876172 - DNA, 25 bp, Homo sapien
cctgatacggtccttgacagaaagc

SEQ ID NO: 3876173 - DNA, 25 bp, Homo sapien
cattgctctgaaggataagctatga

SEQ ID NO: 3876174 - DNA, 25 bp, Homo sapien
gagtcttctgatacatctgagcgaa

SEQ ID NO: 3876175 - DNA, 25 bp, Homo sapien
taatctccactcgtgtcacctgcaa

SEQ ID NO: 3876176 - DNA, 25 bp, Homo sapien
tcacctgcaatcattgtgcccagag

SEQ ID NO: 3876177 - DNA, 25 bp, Homo sapien
cagaagaagtcttcggtaatctcca

SEQ ID NO: 3876178 - DNA, 25 bp, Homo sapien
ttttatggctggcactcataccaat

SEQ ID NO: 3876179 - DNA, 25 bp, Homo sapien
caatgctagcactacccaatgaagg

SEQ ID NO: 3876180 - DNA, 25 bp, Homo sapien
aatatttctgtcagaaaaacatctg

SEQ ID NO: 3876181 - DNA, 25 bp, Homo sapien
cactacccaatgaaggtctgattca

SEQ ID NO: 3876182 - DNA, 25 bp, Homo sapien
gagattatgccactgtatttcagcc

SEQ ID NO: 3876183 - DNA, 25 bp, Homo sapien
aagccgagattatgccactgtattt

SEQ ID NO: 3876184 - DNA, 25 bp, Homo sapien
ccgagattatgccactgtatttcag

SEQ ID NO: 3876185 - DNA, 25 bp, Homo sapien
agccgagattatgccactgtatttc

SEQ ID NO: 3876186 - DNA, 25 bp, Homo sapien
cactaggattaatctacataggcct

SEQ ID NO: 3876187 - DNA, 25 bp, Homo sapien
ttatcttcattagggtagagtggcc

SEQ ID NO: 3876188 - DNA, 25 bp, Homo sapien
caagtaagacccgacaaaaagagag

SEQ ID NO: 3876189 - DNA, 25 bp, Homo sapien
tttgagggactgacaaccaactggg

SEQ ID NO: 3876190 - DNA, 25 bp, Homo sapien
tcacttcgagtgaccacaatccgga

SEQ ID NO: 3876191 - DNA, 25 bp, Homo sapien
atagtagagcctctcagcaaagaag

SEQ ID NO: 3876192 - DNA, 25 bp, Homo sapien
cagcacctttcatagcatagtagag

SEQ ID NO: 3876193 - DNA, 25 bp, Homo sapien
caatccggaccagggtggagtcatc

SEQ ID NO: 3876194 - DNA, 25 bp, Homo sapien
ccactttctacatatccggaaaact

SEQ ID NO: 3876195 - DNA, 25 bp, Homo sapien
ctttctacatatccggaaaactcac

SEQ ID NO: 3876196 - DNA, 25 bp, Homo sapien
cactttctacatatccggaaaactc

SEQ ID NO: 3876197 - DNA, 25 bp, Homo sapien
actttctacatatccggaaaactca

SEQ ID NO: 3876198 - DNA, 25 bp, Homo sapien
cacactgcttaacaagtctcgatta

SEQ ID NO: 3876199 - DNA, 25 bp, Homo sapien
tgcttaacaagtctcgattagccat

SEQ ID NO: 3876200 - DNA, 25 bp, Homo sapien
ggctcacactgcttaacaagtctcg

SEQ ID NO: 3876201 - DNA, 25 bp, Homo sapien
cactgcttaacaagtctcgattagc

SEQ ID NO: 3876202 - DNA, 25 bp, Homo sapien
aagattcatcggtccctagtctccc

SEQ ID NO: 3876203 - DNA, 25 bp, Homo sapien
gatcatgttaaagcaagattcatcg

SEQ ID NO: 3876204 - DNA, 25 bp, Homo sapien
ctccatggtagctctcagctgagga

SEQ ID NO: 3876205 - DNA, 25 bp, Homo sapien
gcctccatggtagctctcagctgag

SEQ ID NO: 3876206 - DNA, 25 bp, Homo sapien
tactctggttctcatcacgatttcc

SEQ ID NO: 3876207 - DNA, 25 bp, Homo sapien
ctgagccatttggtggtttatactc

SEQ ID NO: 3876208 - DNA, 25 bp, Homo sapien
cagcttgatagagacgctgagcatc

SEQ ID NO: 3876209 - DNA, 25 bp, Homo sapien
gatagagacgctgagcatcttcctg

SEQ ID NO: 3876210 - DNA, 25 bp, Homo sapien
ccagattattgcctttggattcaca

SEQ ID NO: 3876211 - DNA, 25 bp, Homo sapien
aagttactcctctactcatgccctg

SEQ ID NO: 3876212 - DNA, 25 bp, Homo sapien
tctcaggaagttactcctctactca

SEQ ID NO: 3876213 - DNA, 25 bp, Homo sapien
tcccagattattgcctttggattca

SEQ ID NO: 3876214 - DNA, 25 bp, Homo sapien
aagtgtgtttctaatgccattccaa

SEQ ID NO: 3876215 - DNA, 25 bp, Homo sapien
gggaatcaaaataaagaaggtgcta

SEQ ID NO: 3876216 - DNA, 25 bp, Homo sapien
gatggtttcttgctatggtacccaa

SEQ ID NO: 3876217 - DNA, 25 bp, Homo sapien
tcacagttattactgggaaccctaa

SEQ ID NO: 3876218 - DNA, 25 bp, Homo sapien
tggcacatggacacaagtaaacgtt

SEQ ID NO: 3876219 - DNA, 25 bp, Homo sapien
tctgacaatttctcggatttcctga

SEQ ID NO: 3876220 - DNA, 25 bp, Homo sapien
cctgatgtatctgacctaatgtcct

SEQ ID NO: 3876221 - DNA, 25 bp, Homo sapien
ttttcaaggtctcgtccaaattctg

SEQ ID NO: 3876222 - DNA, 25 bp, Homo sapien
tcttccatatttccacttaactctg

SEQ ID NO: 3876223 - DNA, 25 bp, Homo sapien
gagggccaggatcagttcttccata

SEQ ID NO: 3876224 - DNA, 25 bp, Homo sapien
gcattgctttccgtaagctccaggc

SEQ ID NO: 3876225 - DNA, 25 bp, Homo sapien
cgtaatacgtaggaggcatgaagag

SEQ ID NO: 3876226 - DNA, 25 bp, Homo sapien
atccacaattgcctgctcatctgtc

SEQ ID NO: 3876227 - DNA, 25 bp, Homo sapien
tttttgcctctgatcattggaacgg

SEQ ID NO: 3876228 - DNA, 25 bp, Homo sapien
attggaacggttggccaccacatcc

SEQ ID NO: 3876229 - DNA, 25 bp, Homo sapien
ccataggaggtcttaaatgctgctt

SEQ ID NO: 3876230 - DNA, 25 bp, Homo sapien
gcttacaaggcactagacatcagat

SEQ ID NO: 3876231 - DNA, 25 bp, Homo sapien
caggctgacacataaacttgggttt

SEQ ID NO: 3876232 - DNA, 25 bp, Homo sapien
ttaaatccaggtatgcgcacccagg

SEQ ID NO: 3876233 - DNA, 25 bp, Homo sapien
cttgggtttatgagataaggtttat

SEQ ID NO: 3876234 - DNA, 25 bp, Homo sapien
cattgccttacgaagaatttctgca

SEQ ID NO: 3876235 - DNA, 25 bp, Homo sapien
agttggcagctggtcggatagttcc

SEQ ID NO: 3876236 - DNA, 25 bp, Homo sapien
gatagttccttgagtgacctgagtc

SEQ ID NO: 3876237 - DNA, 25 bp, Homo sapien
ctcttatagcatcgaagttggcagc

SEQ ID NO: 3876238 - DNA, 25 bp, Homo sapien
tctaatgaggaaacttaaagacttc

SEQ ID NO: 3876239 - DNA, 25 bp, Homo sapien
aatccgtgtcagcatttccagtaag

SEQ ID NO: 3876240 - DNA, 25 bp, Homo sapien
gaagactgatccctgaatggtgtga

SEQ ID NO: 3876241 - DNA, 25 bp, Homo sapien
tggctttagtgaagtagcacatgaa

SEQ ID NO: 3876242 - DNA, 25 bp, Homo sapien
aggaagaaaaagaatctgtattgat

SEQ ID NO: 3876243 - DNA, 25 bp, Homo sapien
tcactgctataatccaaagaaacag

SEQ ID NO: 3876244 - DNA, 25 bp, Homo sapien
aacaggagagaaaacaggataggaa

SEQ ID NO: 3876245 - DNA, 25 bp, Homo sapien
caggagagaaaacaggataggaaga

SEQ ID NO: 3876246 - DNA, 25 bp, Homo sapien
tgactagggtaagtaggttgtcctc

SEQ ID NO: 3876247 - DNA, 25 bp, Homo sapien
ctagggtaagtaggttgtcctccag

SEQ ID NO: 3876248 - DNA, 25 bp, Homo sapien
ctgactagggtaagtaggttgtcct

SEQ ID NO: 3876249 - DNA, 25 bp, Homo sapien
cacctggtgggactccaaatccttg

SEQ ID NO: 3876250 - DNA, 25 bp, Homo sapien
ctcccattggaggaaagccactagg

SEQ ID NO: 3876251 - DNA, 25 bp, Homo sapien
tgggtagccactacttggcacttgt

SEQ ID NO: 3876252 - DNA, 25 bp, Homo sapien
ggataacctccaggcgcagggtagc

SEQ ID NO: 3876253 - DNA, 25 bp, Homo sapien
cttgtgggtaggcacctcctcccat

SEQ ID NO: 3876254 - DNA, 25 bp, Homo sapien
cagaagggggaaaagatgactcctg

SEQ ID NO: 3876255 - DNA, 25 bp, Homo sapien
ctgaccagaagggggaaaagatgac

SEQ ID NO: 3876256 - DNA, 25 bp, Homo sapien
gaccagaagggggaaaagatgactc

SEQ ID NO: 3876257 - DNA, 25 bp, Homo sapien
gaagggggaaaagatgactcctgac

SEQ ID NO: 3876258 - DNA, 25 bp, Homo sapien
ttgggggatagcctgggtatgacat

SEQ ID NO: 3876259 - DNA, 25 bp, Homo sapien
aaaaagtcctttctaggtgccacag

SEQ ID NO: 3876260 - DNA, 25 bp, Homo sapien
taagagttaacattctggagtcaca

SEQ ID NO: 3876261 - DNA, 25 bp, Homo sapien
cacatatacgtggattaaaccctag

SEQ ID NO: 3876262 - DNA, 25 bp, Homo sapien
acagaaatcccctcatatggtgata

SEQ ID NO: 3876263 - DNA, 25 bp, Homo sapien
tgcactccagttgaaagaaaagaca

SEQ ID NO: 3876264 - DNA, 25 bp, Homo sapien
agtagatagaccaagggcaaaaggg

SEQ ID NO: 3876265 - DNA, 25 bp, Homo sapien
gtgagtcgtgtttgcatcattgcac

SEQ ID NO: 3876266 - DNA, 25 bp, Homo sapien
aggcggcagtgagtcgtgtttgcat

SEQ ID NO: 3876267 - DNA, 25 bp, Homo sapien
agtgagccaccgcgctcgggctttt

SEQ ID NO: 3876268 - DNA, 25 bp, Homo sapien
gacctcgtgaatctctcgcctcggc

SEQ ID NO: 3876269 - DNA, 25 bp, Homo sapien
ggagtgagccaccgcgctcgggctt

SEQ ID NO: 3876270 - DNA, 25 bp, Homo sapien
tcctgacctcgtgaatctctcgcct

SEQ ID NO: 3876271 - DNA, 25 bp, Homo sapien
tgcacggacaggtaggtagccaacc

SEQ ID NO: 3876272 - DNA, 25 bp, Homo sapien
aggcatggctagtcctctgcacgga

SEQ ID NO: 3876273 - DNA, 25 bp, Homo sapien
caattttgcaaaaccggcttctagg

SEQ ID NO: 3876274 - DNA, 25 bp, Homo sapien
aagggctgggtctcaccgtttctca

SEQ ID NO: 3876275 - DNA, 25 bp, Homo sapien
ggcagtcggaagacaacagcgtcat

SEQ ID NO: 3876276 - DNA, 25 bp, Homo sapien
tcacagcccaacccggtctcccgca

SEQ ID NO: 3876277 - DNA, 25 bp, Homo sapien
cacagcccaacccggtctcccgcaa

SEQ ID NO: 3876278 - DNA, 25 bp, Homo sapien
gaatggttatatcccatatccttta

SEQ ID NO: 3876279 - DNA, 25 bp, Homo sapien
catttctcatgggtacaaacctatg

SEQ ID NO: 3876280 - DNA, 25 bp, Homo sapien
taattcacccatataatgtgtacaa

SEQ ID NO: 3876281 - DNA, 25 bp, Homo sapien
tatttccttgtaaggatttaccaca

SEQ ID NO: 3876282 - DNA, 25 bp, Homo sapien
attgccagataagttcacaaagatt

SEQ ID NO: 3876283 - DNA, 25 bp, Homo sapien
gtcatacctaagaaaacattgccag

SEQ ID NO: 3876284 - DNA, 25 bp, Homo sapien
gagttaatctatgtatattgtgtga

SEQ ID NO: 3876285 - DNA, 25 bp, Homo sapien
ccaattaattgtttatgtacccttg

SEQ ID NO: 3876286 - DNA, 25 bp, Homo sapien
taaatttgatgtttacaagccacac

SEQ ID NO: 3876287 - DNA, 25 bp, Homo sapien
caaagctttttgagtaccgagatcc

SEQ ID NO: 3876288 - DNA, 25 bp, Homo sapien
gcactcaaaggatacgctcacagga

SEQ ID NO: 3876289 - DNA, 25 bp, Homo sapien
gaaacttttggagtgccgacatagc

SEQ ID NO: 3876290 - DNA, 25 bp, Homo sapien
ttaatcaaagcttgtatataagatt

SEQ ID NO: 3876291 - DNA, 25 bp, Homo sapien
ttcaagttttaatcaaagcttgtat

SEQ ID NO: 3876292 - DNA, 25 bp, Homo sapien
atcaaagcttgtatataagattact

SEQ ID NO: 3876293 - DNA, 25 bp, Homo sapien
tttcaagttttaatcaaagcttgta

SEQ ID NO: 3876294 - DNA, 25 bp, Homo sapien
cacaattgtttcttccttgtatttg

SEQ ID NO: 3876295 - DNA, 25 bp, Homo sapien
tcacaattgtttcttccttgtattt

SEQ ID NO: 3876296 - DNA, 25 bp, Homo sapien
cttcacaattgtttcttccttgtat

SEQ ID NO: 3876297 - DNA, 25 bp, Homo sapien
atcttcacaattgtttcttccttgt

SEQ ID NO: 3876298 - DNA, 25 bp, Homo sapien
agtgatgaccaccttgctagggtga

SEQ ID NO: 3876299 - DNA, 25 bp, Homo sapien
agcctagtgatgaccaccttgctag

SEQ ID NO: 3876300 - DNA, 25 bp, Homo sapien
tgatgaccaccttgctagggtgaat

SEQ ID NO: 3876301 - DNA, 25 bp, Homo sapien
ctagtgatgaccaccttgctagggt

SEQ ID NO: 3876302 - DNA, 25 bp, Homo sapien
acagttgtgccattagctttttccc

SEQ ID NO: 3876303 - DNA, 25 bp, Homo sapien
gtggacagttgtgccattagctttt

SEQ ID NO: 3876304 - DNA, 25 bp, Homo sapien
cagttgtgccattagctttttccca

SEQ ID NO: 3876305 - DNA, 25 bp, Homo sapien
tatgtggacagttgtgccattagct

SEQ ID NO: 3876306 - DNA, 25 bp, Homo sapien
tatttcttcctgtaaacctggacta

SEQ ID NO: 3876307 - DNA, 25 bp, Homo sapien
gcacccattcattgtagataacata

SEQ ID NO: 3876308 - DNA, 25 bp, Homo sapien
tcctgtaaacctggactactttgcc

SEQ ID NO: 3876309 - DNA, 25 bp, Homo sapien
ctgcacccattcattgtagataaca

SEQ ID NO: 3876310 - DNA, 25 bp, Homo sapien
tggatgggcatgcatcgcacgttgt

SEQ ID NO: 3876311 - DNA, 25 bp, Homo sapien
tttggatgggcatgcatcgcacgtt

SEQ ID NO: 3876312 - DNA, 25 bp, Homo sapien
atccttttggatgggcatgcatcgc

SEQ ID NO: 3876313 - DNA, 25 bp, Homo sapien
cttttggatgggcatgcatcgcacg

SEQ ID NO: 3876314 - DNA, 25 bp, Homo sapien
aaggtgcattgaaatgccttttgca

SEQ ID NO: 3876315 - DNA, 25 bp, Homo sapien
ctgtgaatgtgggaaggtgcattga

SEQ ID NO: 3876316 - DNA, 25 bp, Homo sapien
gtgcattgaaatgccttttgcaatt

SEQ ID NO: 3876317 - DNA, 25 bp, Homo sapien
tgaatgtgggaaggtgcattgaaat

SEQ ID NO: 3876318 - DNA, 25 bp, Homo sapien
aaacttcattttggccgctcctgct

SEQ ID NO: 3876319 - DNA, 25 bp, Homo sapien
ttcattttggccgctcctgcttcag

SEQ ID NO: 3876320 - DNA, 25 bp, Homo sapien
cattttggccgctcctgcttcagtg

SEQ ID NO: 3876321 - DNA, 25 bp, Homo sapien
attaaacttcattttggccgctcct

SEQ ID NO: 3876322 - DNA, 25 bp, Homo sapien
tctagggtcaaaagtccccaagaga

SEQ ID NO: 3876323 - DNA, 25 bp, Homo sapien
tctggaaagaccagcatcagggcct

SEQ ID NO: 3876324 - DNA, 25 bp, Homo sapien
taacaccagggctactctagggtca

SEQ ID NO: 3876325 - DNA, 25 bp, Homo sapien
aagggtttgatacgagcctggccaa

SEQ ID NO: 3876326 - DNA, 25 bp, Homo sapien
tcttctaattgcctattatccagct

SEQ ID NO: 3876327 - DNA, 25 bp, Homo sapien
ttgcctattatccagctgacaggag

SEQ ID NO: 3876328 - DNA, 25 bp, Homo sapien
taattgcctattatccagctgacag

SEQ ID NO: 3876329 - DNA, 25 bp, Homo sapien
gcctattatccagctgacaggagct

SEQ ID NO: 3876330 - DNA, 25 bp, Homo sapien
gttgggactggaatagacctgttca

SEQ ID NO: 3876331 - DNA, 25 bp, Homo sapien
gattagacccaaaggcagtgatgtg

SEQ ID NO: 3876332 - DNA, 25 bp, Homo sapien
ttgagggacatgaaaggattagacc

SEQ ID NO: 3876333 - DNA, 25 bp, Homo sapien
tgcactgcagtatactggctgcttg

SEQ ID NO: 3876334 - DNA, 25 bp, Homo sapien
taactagcaaaggactgttccaagg

SEQ ID NO: 3876335 - DNA, 25 bp, Homo sapien
cctaaggctggactaggcaagggct

SEQ ID NO: 3876336 - DNA, 25 bp, Homo sapien
catatgcggaaaagaacatcctcac

SEQ ID NO: 3876337 - DNA, 25 bp, Homo sapien
taaaaaagccatatgcggaaaagaa

SEQ ID NO: 3876338 - DNA, 25 bp, Homo sapien
cagaaggtagatgagcaagaggggg

SEQ ID NO: 3876339 - DNA, 25 bp, Homo sapien
caagaggggggcaaaaatgagctca

SEQ ID NO: 3876340 - DNA, 25 bp, Homo sapien
aagaggggggcaaaaatgagctcat

SEQ ID NO: 3876341 - DNA, 25 bp, Homo sapien
ggtagatgagcaagaggggggcaaa

SEQ ID NO: 3876342 - DNA, 25 bp, Homo sapien
gaagtatcacaaataggatgaggtc

SEQ ID NO: 3876343 - DNA, 25 bp, Homo sapien
tatagtcacgaagtagcagcagggt

SEQ ID NO: 3876344 - DNA, 25 bp, Homo sapien
tgtaggaatcttatagtcacgaagt

SEQ ID NO: 3876345 - DNA, 25 bp, Homo sapien
gggtgggcagccaagcctccatcaa

SEQ ID NO: 3876346 - DNA, 25 bp, Homo sapien
ctgtaaacagtaatcaatgtaggaa

SEQ ID NO: 3876347 - DNA, 25 bp, Homo sapien
aaattctgaacccaagtgtagtaca

SEQ ID NO: 3876348 - DNA, 25 bp, Homo sapien
gattcaggatggaaaattctcaggg

SEQ ID NO: 3876349 - DNA, 25 bp, Homo sapien
ctaaagcagaccctaagagcaagat

SEQ ID NO: 3876350 - DNA, 25 bp, Homo sapien
tatttctttgactgtgagcacccca

SEQ ID NO: 3876351 - DNA, 25 bp, Homo sapien
ggaatgccgccaccaaatctggatg

SEQ ID NO: 3876352 - DNA, 25 bp, Homo sapien
cactaagctgaattgtgccaggttc

SEQ ID NO: 3876353 - DNA, 25 bp, Homo sapien
ttgctcctcccagaagtcatggtag

SEQ ID NO: 3876354 - DNA, 25 bp, Homo sapien
aatctggatggtgtgtctgcccggt

SEQ ID NO: 3876355 - DNA, 25 bp, Homo sapien
tcccctgggcgagtaagaaatgtct

SEQ ID NO: 3876356 - DNA, 25 bp, Homo sapien
aaagatccctgcaggacatccgggt

SEQ ID NO: 3876357 - DNA, 25 bp, Homo sapien
caatgtagcatctaggtgtaacccc

SEQ ID NO: 3876358 - DNA, 25 bp, Homo sapien
tacactggcccataaggtggtcaca

SEQ ID NO: 3876359 - DNA, 25 bp, Homo sapien
actatgaccattatggcagagatcc

SEQ ID NO: 3876360 - DNA, 25 bp, Homo sapien
tgaccattatggcagagatcctcaa

SEQ ID NO: 3876361 - DNA, 25 bp, Homo sapien
tcaactatgaccattatggcagaga

SEQ ID NO: 3876362 - DNA, 25 bp, Homo sapien
tgcaatcaactatgaccattatggc

SEQ ID NO: 3876363 - DNA, 25 bp, Homo sapien
tccacagccacaagacgaagctctt

SEQ ID NO: 3876364 - DNA, 25 bp, Homo sapien
gaagctcttgacaaaccctcctgtg

SEQ ID NO: 3876365 - DNA, 25 bp, Homo sapien
tgacttctggcactctggaccacag

SEQ ID NO: 3876366 - DNA, 25 bp, Homo sapien
agccattccatgagacggtccacag

SEQ ID NO: 3876367 - DNA, 25 bp, Homo sapien
tcatttctgaatgtctccctattag

SEQ ID NO: 3876368 - DNA, 25 bp, Homo sapien
atacaggatcatttctgaatgtctc

SEQ ID NO: 3876369 - DNA, 25 bp, Homo sapien
catgcccggctaatacaggatcatt

SEQ ID NO: 3876370 - DNA, 25 bp, Homo sapien
ttctgaatgtctccctattagcccc

SEQ ID NO: 3876371 - DNA, 25 bp, Homo sapien
tccatcctctggaacatttcttgag

SEQ ID NO: 3876372 - DNA, 25 bp, Homo sapien
cagtgagcacagaatcgaaatgtgt

SEQ ID NO: 3876373 - DNA, 25 bp, Homo sapien
tctgaaagcccactagggagtgctc

SEQ ID NO: 3876374 - DNA, 25 bp, Homo sapien
ggacatcgaaatccaaagcctgata

SEQ ID NO: 3876375 - DNA, 25 bp, Homo sapien
aaggatcagctgcgataggccagga

SEQ ID NO: 3876376 - DNA, 25 bp, Homo sapien
taggccaggaacattatcatccaag

SEQ ID NO: 3876377 - DNA, 25 bp, Homo sapien
tgaaggatcagctgcgataggccag

SEQ ID NO: 3876378 - DNA, 25 bp, Homo sapien
tgttcagcttttgaaggatcagctg

SEQ ID NO: 3876379 - DNA, 25 bp, Homo sapien
ggcacaggggtcacaattgtggttg

SEQ ID NO: 3876380 - DNA, 25 bp, Homo sapien
tttcttgtgccttcgtcgccgggac

SEQ ID NO: 3876381 - DNA, 25 bp, Homo sapien
gaggtttcttgtgccttcgtcgccg

SEQ ID NO: 3876382 - DNA, 25 bp, Homo sapien
gatgagggaggtttcttgtgccttc

SEQ ID NO: 3876383 - DNA, 25 bp, Homo sapien
ttgtgccttcgtcgccgggaccgtg

SEQ ID NO: 3876384 - DNA, 25 bp, Homo sapien
tgagtttatataccccaggcccaga

SEQ ID NO: 3876385 - DNA, 25 bp, Homo sapien
taaatctcctgtaaagagccccagg

SEQ ID NO: 3876386 - DNA, 25 bp, Homo sapien
ggaagcaagccacttaaggtcagaa

SEQ ID NO: 3876387 - DNA, 25 bp, Homo sapien
gaatgctctccacttagaaagggaa

SEQ ID NO: 3876388 - DNA, 25 bp, Homo sapien
gaaatgagtgcttgatctcttcaga

SEQ ID NO: 3876389 - DNA, 25 bp, Homo sapien
tgaaatgagtgcttgatctcttcag

SEQ ID NO: 3876390 - DNA, 25 bp, Homo sapien
ctcttcagatctaggttgtggctta

SEQ ID NO: 3876391 - DNA, 25 bp, Homo sapien
cagatctaggttgtggcttacttgc

SEQ ID NO: 3876392 - DNA, 25 bp, Homo sapien
ctgaagttgttagggcagtggtcct

SEQ ID NO: 3876393 - DNA, 25 bp, Homo sapien
gcttctttctacttacagctagcct

SEQ ID NO: 3876394 - DNA, 25 bp, Homo sapien
aattcaattccacagtcctagcttc

SEQ ID NO: 3876395 - DNA, 25 bp, Homo sapien
ttatcctccttgtaattgcagctga

SEQ ID NO: 3876396 - DNA, 25 bp, Homo sapien
gggaacagaatcactcgcaatgagg

SEQ ID NO: 3876397 - DNA, 25 bp, Homo sapien
aatcaaatccacacaggaaccccaa

SEQ ID NO: 3876398 - DNA, 25 bp, Homo sapien
tcgcaatgaggtcccggaatgtggc

SEQ ID NO: 3876399 - DNA, 25 bp, Homo sapien
ggtcccggaatgtggcaaatcaaat

SEQ ID NO: 3876400 - DNA, 25 bp, Homo sapien
ttaatattttggcaagcagagagtt

SEQ ID NO: 3876401 - DNA, 25 bp, Homo sapien
gccaactcatggactgctttgtaag

SEQ ID NO: 3876402 - DNA, 25 bp, Homo sapien
tttggcaagcagagagttataataa

SEQ ID NO: 3876403 - DNA, 25 bp, Homo sapien
tgcaatgcataataactttagagcc

SEQ ID NO: 3876404 - DNA, 25 bp, Homo sapien
aaattaccatgaactatccacgaga

SEQ ID NO: 3876405 - DNA, 25 bp, Homo sapien
tagaacacccagtaaattcccaata

SEQ ID NO: 3876406 - DNA, 25 bp, Homo sapien
ggacatcccagctctagtaacagga

SEQ ID NO: 3876407 - DNA, 25 bp, Homo sapien
cattcaaagtcctctagtgctcagt

SEQ ID NO: 3876408 - DNA, 25 bp, Homo sapien
gcccatgcatggaatttattgtgtg

SEQ ID NO: 3876409 - DNA, 25 bp, Homo sapien
ggaatttattgtgtgctactgttta

SEQ ID NO: 3876410 - DNA, 25 bp, Homo sapien
catgcatggaatttattgtgtgcta

SEQ ID NO: 3876411 - DNA, 25 bp, Homo sapien
tttattgtgtgctactgtttataaa

SEQ ID NO: 3876412 - DNA, 25 bp, Homo sapien
aatatttccaacttagacaggagac

SEQ ID NO: 3876413 - DNA, 25 bp, Homo sapien
tacagggtgcactttctggcaaaca

SEQ ID NO: 3876414 - DNA, 25 bp, Homo sapien
tactcgaatagtcctgcacatgcat

SEQ ID NO: 3876415 - DNA, 25 bp, Homo sapien
aaacaatagatggttccgctgcctg

SEQ ID NO: 3876416 - DNA, 25 bp, Homo sapien
gaaaagtccacattagctcttagga

SEQ ID NO: 3876417 - DNA, 25 bp, Homo sapien
gcagcgatgacccaatcttatcaga

SEQ ID NO: 3876418 - DNA, 25 bp, Homo sapien
tgttcaagtaagagagcctgcctgg

SEQ ID NO: 3876419 - DNA, 25 bp, Homo sapien
gaaatttacagtcagcttggccgac

SEQ ID NO: 3876420 - DNA, 25 bp, Homo sapien
tatgtggtggagagaatcctcgtat

SEQ ID NO: 3876421 - DNA, 25 bp, Homo sapien
ttgcccgtcccgtggttctcagtgg

SEQ ID NO: 3876422 - DNA, 25 bp, Homo sapien
ttctcagtggcatgtgcggtgttca

SEQ ID NO: 3876423 - DNA, 25 bp, Homo sapien
tcactgggcagtatggttgcccgtc

SEQ ID NO: 3876424 - DNA, 25 bp, Homo sapien
tgactatcacagtaaggcagcaatg

SEQ ID NO: 3876425 - DNA, 25 bp, Homo sapien
tccaggcaatggtctcagggtctca

SEQ ID NO: 3876426 - DNA, 25 bp, Homo sapien
catcatagctttataggtgacaagt

SEQ ID NO: 3876427 - DNA, 25 bp, Homo sapien
aattagtagctgtaagtagcaacac

SEQ ID NO: 3876428 - DNA, 25 bp, Homo sapien
tctcgtaatttagaagatgttctcc

SEQ ID NO: 3876429 - DNA, 25 bp, Homo sapien
catactgcacagtctttggaaactc

SEQ ID NO: 3876430 - DNA, 25 bp, Homo sapien
tcatctagaatgatgcatcctccat

SEQ ID NO: 3876431 - DNA, 25 bp, Homo sapien
ccttaattcattggccatactgcac

SEQ ID NO: 3876432 - DNA, 25 bp, Homo sapien
gaacagatctctatttgcaggtcag

SEQ ID NO: 3876433 - DNA, 25 bp, Homo sapien
gctaggagtaaaacacacccacagg

SEQ ID NO: 3876434 - DNA, 25 bp, Homo sapien
tcatcttgggctgtaaaagctagga

SEQ ID NO: 3876435 - DNA, 25 bp, Homo sapien
tctgattgcatattacaccggaaag

SEQ ID NO: 3876436 - DNA, 25 bp, Homo sapien
tcagcctcaatagcctcaactgtgg

SEQ ID NO: 3876437 - DNA, 25 bp, Homo sapien
ttttcagcctcaatagcctcaactg

SEQ ID NO: 3876438 - DNA, 25 bp, Homo sapien
ctttttcagcctcaatagcctcaac

SEQ ID NO: 3876439 - DNA, 25 bp, Homo sapien
ttcagcctcaatagcctcaactgtg

SEQ ID NO: 3876440 - DNA, 25 bp, Homo sapien
atagtacccaaattagagagcccca

SEQ ID NO: 3876441 - DNA, 25 bp, Homo sapien
gtacccaaattagagagccccatcc

SEQ ID NO: 3876442 - DNA, 25 bp, Homo sapien
aaatatcacagtatcccatactaca

SEQ ID NO: 3876443 - DNA, 25 bp, Homo sapien
cagaaaaggcaatgatcacttaaaa

SEQ ID NO: 3876444 - DNA, 25 bp, Homo sapien
ggcaaaacataagctgcaagagctg

SEQ ID NO: 3876445 - DNA, 25 bp, Homo sapien
ataaggcaaaacataagctgcaaga

SEQ ID NO: 3876446 - DNA, 25 bp, Homo sapien
acataagctgcaagagctgatatga

SEQ ID NO: 3876447 - DNA, 25 bp, Homo sapien
caaaacataagctgcaagagctgat

SEQ ID NO: 3876448 - DNA, 25 bp, Homo sapien
cccaaaagaattaggacgaacactg

SEQ ID NO: 3876449 - DNA, 25 bp, Homo sapien
tatttgtaaaagtaatgccctggtc

SEQ ID NO: 3876450 - DNA, 25 bp, Homo sapien
gaagtgatcttttagcaattaacat

SEQ ID NO: 3876451 - DNA, 25 bp, Homo sapien
taaccagacagtaaagtgaattggg

SEQ ID NO: 3876452 - DNA, 25 bp, Homo sapien
gacaaataggcacgaggtcttagaa

SEQ ID NO: 3876453 - DNA, 25 bp, Homo sapien
tccatgctgagaatagagagtccct

SEQ ID NO: 3876454 - DNA, 25 bp, Homo sapien
ccctgcagttgagggtggtttcaaa

SEQ ID NO: 3876455 - DNA, 25 bp, Homo sapien
gagcttcaagccgtgtacaaattaa

SEQ ID NO: 3876456 - DNA, 25 bp, Homo sapien
tataaaatattcaatgagccagatt

SEQ ID NO: 3876457 - DNA, 25 bp, Homo sapien
taaaatattcaatgagccagattac

SEQ ID NO: 3876458 - DNA, 25 bp, Homo sapien
aatattcaatgagccagattacagg

SEQ ID NO: 3876459 - DNA, 25 bp, Homo sapien
cagtatttacacaaatatttacgcc

SEQ ID NO: 3876460 - DNA, 25 bp, Homo sapien
gcttctacattgcaagacagacaag

SEQ ID NO: 3876461 - DNA, 25 bp, Homo sapien
gacattatgatatgagctgctccca

SEQ ID NO: 3876462 - DNA, 25 bp, Homo sapien
caaactttggcatcatttaccaggg

SEQ ID NO: 3876463 - DNA, 25 bp, Homo sapien
tcaaaacaaggtgctacaaagctgc

SEQ ID NO: 3876464 - DNA, 25 bp, Homo sapien
aggaattccctgcatgcattatgtg

SEQ ID NO: 3876465 - DNA, 25 bp, Homo sapien
tatgtgaattgttagcaaaagagtg

SEQ ID NO: 3876466 - DNA, 25 bp, Homo sapien
tgtgaattgttagcaaaagagtgag

SEQ ID NO: 3876467 - DNA, 25 bp, Homo sapien
aacagaaggaattccctgcatgcat

SEQ ID NO: 3876468 - DNA, 25 bp, Homo sapien
gcacagcaagttgcataacatcatt

SEQ ID NO: 3876469 - DNA, 25 bp, Homo sapien
ggcacagcaagttgcataacatcat

SEQ ID NO: 3876470 - DNA, 25 bp, Homo sapien
acagcaagttgcataacatcattac

SEQ ID NO: 3876471 - DNA, 25 bp, Homo sapien
aggcacagcaagttgcataacatca

SEQ ID NO: 3876472 - DNA, 25 bp, Homo sapien
gtcctccagctaacactccactagg

SEQ ID NO: 3876473 - DNA, 25 bp, Homo sapien
ttgagtgtcagcacactttcactct

SEQ ID NO: 3876474 - DNA, 25 bp, Homo sapien
cactaggcaacatccctgtgggagt

SEQ ID NO: 3876475 - DNA, 25 bp, Homo sapien
gagtgtcagcacactttcactctcc

SEQ ID NO: 3876476 - DNA, 25 bp, Homo sapien
ctgagaacagagaagactcttgcca

SEQ ID NO: 3876477 - DNA, 25 bp, Homo sapien
tgagaacagagaagactcttgccat

SEQ ID NO: 3876478 - DNA, 25 bp, Homo sapien
cgaattttgtttcttatgatttctt

SEQ ID NO: 3876479 - DNA, 25 bp, Homo sapien
tgccaattgctcgaattttgtttct

SEQ ID NO: 3876480 - DNA, 25 bp, Homo sapien
gccaattgctcgaattttgtttctt

SEQ ID NO: 3876481 - DNA, 25 bp, Homo sapien
caattgctcgaattttgtttcttat

SEQ ID NO: 3876482 - DNA, 25 bp, Homo sapien
gaaggagctactgtgcaggtaatcc

SEQ ID NO: 3876483 - DNA, 25 bp, Homo sapien
catttcaacaatgcaccaggtgcct

SEQ ID NO: 3876484 - DNA, 25 bp, Homo sapien
caggtaatcctgaactaagggccat

SEQ ID NO: 3876485 - DNA, 25 bp, Homo sapien
gcctatggcatgcagactaacagac

SEQ ID NO: 3876486 - DNA, 25 bp, Homo sapien
tttttattgccatatatgagccgtt

SEQ ID NO: 3876487 - DNA, 25 bp, Homo sapien
cttttttattgccatatatgagccg

SEQ ID NO: 3876488 - DNA, 25 bp, Homo sapien
ttttttattgccatatatgagccgt

SEQ ID NO: 3876489 - DNA, 25 bp, Homo sapien
aactgcctcagtagaaaacctcacc

SEQ ID NO: 3876490 - DNA, 25 bp, Homo sapien
cccagtccaatctgggaaatttggg

SEQ ID NO: 3876491 - DNA, 25 bp, Homo sapien
tcaggagcaacagtatgtgctttct

SEQ ID NO: 3876492 - DNA, 25 bp, Homo sapien
gaacttttgcatatactcaggagca

SEQ ID NO: 3876493 - DNA, 25 bp, Homo sapien
taaacccttactctgattccacagc

SEQ ID NO: 3876494 - DNA, 25 bp, Homo sapien
taccacttaacaacagtcttatgcc

SEQ ID NO: 3876495 - DNA, 25 bp, Homo sapien
taacacttctaaaacggatgctatg

SEQ ID NO: 3876496 - DNA, 25 bp, Homo sapien
aaagtcagatatctccccagaccag

SEQ ID NO: 3876497 - DNA, 25 bp, Homo sapien
gtcattagttcatcatcagagcaaa

SEQ ID NO: 3876498 - DNA, 25 bp, Homo sapien
ttcagtcattagttcatcatcagag

SEQ ID NO: 3876499 - DNA, 25 bp, Homo sapien
cagtcattagttcatcatcagagca

SEQ ID NO: 3876500 - DNA, 25 bp, Homo sapien
accttcagtcattagttcatcatca

SEQ ID NO: 3876501 - DNA, 25 bp, Homo sapien
accttgagaccatggaaagaatcca

SEQ ID NO: 3876502 - DNA, 25 bp, Homo sapien
cattattagtaagtccaagagtaga

SEQ ID NO: 3876503 - DNA, 25 bp, Homo sapien
ttgcacatgcatattcttcgcagca

SEQ ID NO: 3876504 - DNA, 25 bp, Homo sapien
tgtactgcttcatgctacaccacag

SEQ ID NO: 3876505 - DNA, 25 bp, Homo sapien
tataaacggtatgagggtcctactg

SEQ ID NO: 3876506 - DNA, 25 bp, Homo sapien
gatggctggatttgactagacctaa

SEQ ID NO: 3876507 - DNA, 25 bp, Homo sapien
tagagtggagtgatcagctaactgc

SEQ ID NO: 3876508 - DNA, 25 bp, Homo sapien
caagtccgtaaaaatctccagcagc

SEQ ID NO: 3876509 - DNA, 25 bp, Homo sapien
gagactcttatgtccacacccactg

SEQ ID NO: 3876510 - DNA, 25 bp, Homo sapien
ccaagaatttcggtggaatgcccaa

SEQ ID NO: 3876511 - DNA, 25 bp, Homo sapien
cactgacacaaggagagctgtaacc

SEQ ID NO: 3876512 - DNA, 25 bp, Homo sapien
cagaagggcccatttcaagcaaagc

SEQ ID NO: 3876513 - DNA, 25 bp, Homo sapien
gacatccataaaattaggcaaccag

SEQ ID NO: 3876514 - DNA, 25 bp, Homo sapien
gaccacgtgaagacatccataaaat

SEQ ID NO: 3876515 - DNA, 25 bp, Homo sapien
gaacagttaaactgtcgaatattca

SEQ ID NO: 3876516 - DNA, 25 bp, Homo sapien
agaacagttaaactgtcgaatattc

SEQ ID NO: 3876517 - DNA, 25 bp, Homo sapien
tttagaggaaacacagaatggcaat

SEQ ID NO: 3876518 - DNA, 25 bp, Homo sapien
gatctttctagcttcaggcaacctg

SEQ ID NO: 3876519 - DNA, 25 bp, Homo sapien
gaatggcaatgagcaattttctagg

SEQ ID NO: 3876520 - DNA, 25 bp, Homo sapien
caacctgaaaaggatagctgaatgg

SEQ ID NO: 3876521 - DNA, 25 bp, Homo sapien
taagacagtcaatggtttgagcctc

SEQ ID NO: 3876522 - DNA, 25 bp, Homo sapien
tgtacagactcaggactacaaagag

SEQ ID NO: 3876523 - DNA, 25 bp, Homo sapien
agtcacagttgaggaattagagcac

SEQ ID NO: 3876524 - DNA, 25 bp, Homo sapien
cagtaaggcagtactcaactggaca

SEQ ID NO: 3876525 - DNA, 25 bp, Homo sapien
gacatctaagtaattaggtgccgaa

SEQ ID NO: 3876526 - DNA, 25 bp, Homo sapien
atgaagggaaccctgtagtttgact

SEQ ID NO: 3876527 - DNA, 25 bp, Homo sapien
gtagacatctaagtaattaggtgcc

SEQ ID NO: 3876528 - DNA, 25 bp, Homo sapien
taatgaagggaaccctgtagtttga

SEQ ID NO: 3876529 - DNA, 25 bp, Homo sapien
tgagctctaataatcgataacaaat

SEQ ID NO: 3876530 - DNA, 25 bp, Homo sapien
gcttcatgagctctaataatcgata

SEQ ID NO: 3876531 - DNA, 25 bp, Homo sapien
tcttgagcttcatgagctctaataa

SEQ ID NO: 3876532 - DNA, 25 bp, Homo sapien
tcatgagctctaataatcgataaca

SEQ ID NO: 3876533 - DNA, 25 bp, Homo sapien
caggtggctctttgaatctatctaa

SEQ ID NO: 3876534 - DNA, 25 bp, Homo sapien
gaaggatcggaccataacaagtcac

SEQ ID NO: 3876535 - DNA, 25 bp, Homo sapien
caaaatcttcagaaggatcggacca

SEQ ID NO: 3876536 - DNA, 25 bp, Homo sapien
tcctcgaactgtattgtgactaaaa

SEQ ID NO: 3876537 - DNA, 25 bp, Homo sapien
aatagaaatcaatctcggaagtaaa

SEQ ID NO: 3876538 - DNA, 25 bp, Homo sapien
gaagtaactcatcaaaaagtaagga

SEQ ID NO: 3876539 - DNA, 25 bp, Homo sapien
ctaatcttggcagtgaagtgaagtt

SEQ ID NO: 3876540 - DNA, 25 bp, Homo sapien
cataggaaaacgataccaactttga

SEQ ID NO: 3876541 - DNA, 25 bp, Homo sapien
atcaaaagcttccatacaagcttca

SEQ ID NO: 3876542 - DNA, 25 bp, Homo sapien
agcttcatagactctttccgaatac

SEQ ID NO: 3876543 - DNA, 25 bp, Homo sapien
catagactctttccgaatacttaat

SEQ ID NO: 3876544 - DNA, 25 bp, Homo sapien
cttccatacaagcttcatagactct

SEQ ID NO: 3876545 - DNA, 25 bp, Homo sapien
ttgaaaattacattactggtggtgg

SEQ ID NO: 3876546 - DNA, 25 bp, Homo sapien
gaaaattacattactggtggtggtg

SEQ ID NO: 3876547 - DNA, 25 bp, Homo sapien
aattacattactggtggtggtgtga

SEQ ID NO: 3876548 - DNA, 25 bp, Homo sapien
tggtggtgtgaccattttaaaaaca

SEQ ID NO: 3876549 - DNA, 25 bp, Homo sapien
aaacatttcttctggcagtactcac

SEQ ID NO: 3876550 - DNA, 25 bp, Homo sapien
ttaagtccaaaagaatactgaggaa

SEQ ID NO: 3876551 - DNA, 25 bp, Homo sapien
ccaaaagaatactgaggaagtgaaa

SEQ ID NO: 3876552 - DNA, 25 bp, Homo sapien
gaagtgaaaacatttcttctggcag

SEQ ID NO: 3876553 - DNA, 25 bp, Homo sapien
aggtgtctgcattcatggttgcctc

SEQ ID NO: 3876554 - DNA, 25 bp, Homo sapien
tagaatcttcagaacccataaatat

SEQ ID NO: 3876555 - DNA, 25 bp, Homo sapien
aatattcagtaaggtgtctgcattc

SEQ ID NO: 3876556 - DNA, 25 bp, Homo sapien
gaaataatgtgcttgggtatagaat

SEQ ID NO: 3876557 - DNA, 25 bp, Homo sapien
caaggacatgcacaccaacttagtt

SEQ ID NO: 3876558 - DNA, 25 bp, Homo sapien
agtcagctacatccaggcgcagtgg

SEQ ID NO: 3876559 - DNA, 25 bp, Homo sapien
gagtcagctgcaaaacaatcttaca

SEQ ID NO: 3876560 - DNA, 25 bp, Homo sapien
ttggccaacctgtgctgcgattaca

SEQ ID NO: 3876561 - DNA, 25 bp, Homo sapien
tattgtgaggattaatcgatatgtc

SEQ ID NO: 3876562 - DNA, 25 bp, Homo sapien
aatcgatatgtcttcagtgcctaga

SEQ ID NO: 3876563 - DNA, 25 bp, Homo sapien
gaggattaatcgatatgtcttcagt

SEQ ID NO: 3876564 - DNA, 25 bp, Homo sapien
gattaatcgatatgtcttcagtgcc

SEQ ID NO: 3876565 - DNA, 25 bp, Homo sapien
aaacagaagcactagggctcaagca

SEQ ID NO: 3876566 - DNA, 25 bp, Homo sapien
tacacaaagattccataggatatac

SEQ ID NO: 3876567 - DNA, 25 bp, Homo sapien
aaaggtcattttaatgcctcaagtt

SEQ ID NO: 3876568 - DNA, 25 bp, Homo sapien
tatacttgagtcttaatagctacac

SEQ ID NO: 3876569 - DNA, 25 bp, Homo sapien
taatcgccaagaaaaaggtatcgtg

SEQ ID NO: 3876570 - DNA, 25 bp, Homo sapien
agtttcatcagatcaaaaaattggc

SEQ ID NO: 3876571 - DNA, 25 bp, Homo sapien
tctgtccacataatcgccaagaaaa

SEQ ID NO: 3876572 - DNA, 25 bp, Homo sapien
cgtgtattagcaggtgatcctccta

SEQ ID NO: 3876573 - DNA, 25 bp, Homo sapien
tgggtatcccatccaaatcaaatac

SEQ ID NO: 3876574 - DNA, 25 bp, Homo sapien
ggttttctctctccgaaggatggca

SEQ ID NO: 3876575 - DNA, 25 bp, Homo sapien
gatggcagcaccctcattgataatt

SEQ ID NO: 3876576 - DNA, 25 bp, Homo sapien
tactcgaccttctttcaccaagtgg

SEQ ID NO: 3876577 - DNA, 25 bp, Homo sapien
agatgtcaagcgatgtgttgggggg

SEQ ID NO: 3876578 - DNA, 25 bp, Homo sapien
ttcagatgtcaagcgatgtgttggg

SEQ ID NO: 3876579 - DNA, 25 bp, Homo sapien
atgtcaagcgatgtgttggggggaa

SEQ ID NO: 3876580 - DNA, 25 bp, Homo sapien
cttcagatgtcaagcgatgtgttgg

SEQ ID NO: 3876581 - DNA, 25 bp, Homo sapien
tatactaacatgttctttgttgaga

SEQ ID NO: 3876582 - DNA, 25 bp, Homo sapien
tggatctagataagactaaaaactg

SEQ ID NO: 3876583 - DNA, 25 bp, Homo sapien
gagaaatgagttgtctcacaaaatt

SEQ ID NO: 3876584 - DNA, 25 bp, Homo sapien
aacatttttaggcagaactctcaaa

SEQ ID NO: 3876585 - DNA, 25 bp, Homo sapien
tgagtcacctaacacacattctgaa

SEQ ID NO: 3876586 - DNA, 25 bp, Homo sapien
catatattcgaaaccagtgcattcc

SEQ ID NO: 3876587 - DNA, 25 bp, Homo sapien
tactcatttccacctaaactgtttg

SEQ ID NO: 3876588 - DNA, 25 bp, Homo sapien
gaccaacttgactatacacttttag

SEQ ID NO: 3876589 - DNA, 25 bp, Homo sapien
tggcctatccctacaaatttaacca

SEQ ID NO: 3876590 - DNA, 25 bp, Homo sapien
tttcactccgcagtacatatttatg

SEQ ID NO: 3876591 - DNA, 25 bp, Homo sapien
catttcatcatagttaagtagttgg

SEQ ID NO: 3876592 - DNA, 25 bp, Homo sapien
tagttggttttttcactccgcagta

SEQ ID NO: 3876593 - DNA, 25 bp, Homo sapien
ggtaagaactaaggcagagagatgc

SEQ ID NO: 3876594 - DNA, 25 bp, Homo sapien
tatctctgagcatatagtatacagt

SEQ ID NO: 3876595 - DNA, 25 bp, Homo sapien
gatcaattattacagagaagcttgg

SEQ ID NO: 3876596 - DNA, 25 bp, Homo sapien
gaagaactcaatcctttacaagtga

SEQ ID NO: 3876597 - DNA, 25 bp, Homo sapien
gagacattaagttgcttctccaggg

SEQ ID NO: 3876598 - DNA, 25 bp, Homo sapien
tgtttaacgacactaatttatgtag

SEQ ID NO: 3876599 - DNA, 25 bp, Homo sapien
gacatcctttgagtttggtcaggca

SEQ ID NO: 3876600 - DNA, 25 bp, Homo sapien
tacataatcctacatgattcccagg

SEQ ID NO: 3876601 - DNA, 25 bp, Homo sapien
actagaaaacactttagccaaatga

SEQ ID NO: 3876602 - DNA, 25 bp, Homo sapien
ctagaaaacactttagccaaatgac

SEQ ID NO: 3876603 - DNA, 25 bp, Homo sapien
gcacacatgcagatacggttagata

SEQ ID NO: 3876604 - DNA, 25 bp, Homo sapien
tatgcccaatactgacaatgctctc

SEQ ID NO: 3876605 - DNA, 25 bp, Homo sapien
caggtgggttagatcaactttcaaa

SEQ ID NO: 3876606 - DNA, 25 bp, Homo sapien
ggtatctgggcaattcaggtcaagt

SEQ ID NO: 3876607 - DNA, 25 bp, Homo sapien
ttggactcacaactcacccctaagg

SEQ ID NO: 3876608 - DNA, 25 bp, Homo sapien
tctaacagtctggtgaaaagtgccc

SEQ ID NO: 3876609 - DNA, 25 bp, Homo sapien
caggaatgtgattggttaccccatc

SEQ ID NO: 3876610 - DNA, 25 bp, Homo sapien
gaagattcacaaacgtaaggatagc

SEQ ID NO: 3876611 - DNA, 25 bp, Homo sapien
tgggccaaagccgaggtgatttctg

SEQ ID NO: 3876612 - DNA, 25 bp, Homo sapien
ggttgtcgccagctagacgcggata

SEQ ID NO: 3876613 - DNA, 25 bp, Homo sapien
gcaagccagaagtgcagctgtcgcg

SEQ ID NO: 3876614 - DNA, 25 bp, Homo sapien
gccgctttgacaggccgagtgaaga

SEQ ID NO: 3876615 - DNA, 25 bp, Homo sapien
tttgacgacgcggtcagccccggga

SEQ ID NO: 3876616 - DNA, 25 bp, Homo sapien
ctttgacgacgcggtcagccccggg

SEQ ID NO: 3876617 - DNA, 25 bp, Homo sapien
ttgacgacgcggtcagccccgggag

SEQ ID NO: 3876618 - DNA, 25 bp, Homo sapien
gggggcggcggctaccagagccaag

SEQ ID NO: 3876619 - DNA, 25 bp, Homo sapien
ggcggcggctaccagagccaagcgg

SEQ ID NO: 3876620 - DNA, 25 bp, Homo sapien
gcggcggctaccagagccaagcggc

SEQ ID NO: 3876621 - DNA, 25 bp, Homo sapien
gggcggcggctaccagagccaagcg

SEQ ID NO: 3876622 - DNA, 25 bp, Homo sapien
agaggggctaagaccggcatgcact

SEQ ID NO: 3876623 - DNA, 25 bp, Homo sapien
cctacagaggggctaagaccggcat

SEQ ID NO: 3876624 - DNA, 25 bp, Homo sapien
ggctaagaccggcatgcactgcgcg

SEQ ID NO: 3876625 - DNA, 25 bp, Homo sapien
ctaagaccggcatgcactgcgcgtg

SEQ ID NO: 3876626 - DNA, 25 bp, Homo sapien
caaagaaaggtgtagctccaggaaa

SEQ ID NO: 3876627 - DNA, 25 bp, Homo sapien
tgaatgttatgttggcagctccgca

SEQ ID NO: 3876628 - DNA, 25 bp, Homo sapien
tctaggcctaaggtttggagggcac

SEQ ID NO: 3876629 - DNA, 25 bp, Homo sapien
tacattgacgactgagcaagtggca

SEQ ID NO: 3876630 - DNA, 25 bp, Homo sapien
ggaacaggatctgaattccaagctg

SEQ ID NO: 3876631 - DNA, 25 bp, Homo sapien
tacatgaagactgctagatggtggg

SEQ ID NO: 3876632 - DNA, 25 bp, Homo sapien
catatctactcttcgaggaccaggg

SEQ ID NO: 3876633 - DNA, 25 bp, Homo sapien
gactgtgctgcaggactctagccct

SEQ ID NO: 3876634 - DNA, 25 bp, Homo sapien
cagtgtaggttagttgaggattgca

SEQ ID NO: 3876635 - DNA, 25 bp, Homo sapien
agtagtcaggaatctggtcccaata

SEQ ID NO: 3876636 - DNA, 25 bp, Homo sapien
caatatgctggttggtctctgacca

SEQ ID NO: 3876637 - DNA, 25 bp, Homo sapien
gaggattgcaccctggagtagtcag

SEQ ID NO: 3876638 - DNA, 25 bp, Homo sapien
ttggggaccgaggagaaacacagaa

SEQ ID NO: 3876639 - DNA, 25 bp, Homo sapien
aagaggagctggaacaacggtgccc

SEQ ID NO: 3876640 - DNA, 25 bp, Homo sapien
gtctattgggctcccctgccatggt

SEQ ID NO: 3876641 - DNA, 25 bp, Homo sapien
caaaggcttcctcacgtttgatgaa

SEQ ID NO: 3876642 - DNA, 25 bp, Homo sapien
tatcctctcttgtcaacactctcca

SEQ ID NO: 3876643 - DNA, 25 bp, Homo sapien
ggctgtctgtggtccataatattct

SEQ ID NO: 3876644 - DNA, 25 bp, Homo sapien
atcctctcttgtcaacactctccat

SEQ ID NO: 3876645 - DNA, 25 bp, Homo sapien
gctgtctgtggtccataatattctt

SEQ ID NO: 3876646 - DNA, 25 bp, Homo sapien
cactgagactgcgtgagatgcgacg

SEQ ID NO: 3876647 - DNA, 25 bp, Homo sapien
tgagacaacggtgccactgagactg

SEQ ID NO: 3876648 - DNA, 25 bp, Homo sapien
cctgctgaggcctcggcaaggtgta

SEQ ID NO: 3876649 - DNA, 25 bp, Homo sapien
taaattctctgcactgtactgctca

SEQ ID NO: 3876650 - DNA, 25 bp, Homo sapien
tacaggcagacacataataccagac

SEQ ID NO: 3876651 - DNA, 25 bp, Homo sapien
gaagactcagtagtaatagacacct

SEQ ID NO: 3876652 - DNA, 25 bp, Homo sapien
gtggccatgtaacaatctcctctaa

SEQ ID NO: 3876653 - DNA, 25 bp, Homo sapien
tatcctcagggtatgggaaagagta

SEQ ID NO: 3876654 - DNA, 25 bp, Homo sapien
ccatgcctctgccttatcatcatcc

SEQ ID NO: 3876655 - DNA, 25 bp, Homo sapien
gatcatgggctgagtgcaacctcct

SEQ ID NO: 3876656 - DNA, 25 bp, Homo sapien
tgaagtctttgagagaccaggatca

SEQ ID NO: 3876657 - DNA, 25 bp, Homo sapien
ttcatggagaccatgctccatttct

SEQ ID NO: 3876658 - DNA, 25 bp, Homo sapien
tctttgagagaccaggatcatgggc

SEQ ID NO: 3876659 - DNA, 25 bp, Homo sapien
taaaccttgcctgtggaatgcagag

SEQ ID NO: 3876660 - DNA, 25 bp, Homo sapien
gaagtttcaccattaggcagcccag

SEQ ID NO: 3876661 - DNA, 25 bp, Homo sapien
gagaattcttctcagtccaccctgg

SEQ ID NO: 3876662 - DNA, 25 bp, Homo sapien
gaaacctgtactatccctcatggag

SEQ ID NO: 3876663 - DNA, 25 bp, Homo sapien
gccggattccagttgggcctcttgg

SEQ ID NO: 3876664 - DNA, 25 bp, Homo sapien
ccggattccagttgggcctcttggc

SEQ ID NO: 3876665 - DNA, 25 bp, Homo sapien
tccagttgggcctcttggcttaaca

SEQ ID NO: 3876666 - DNA, 25 bp, Homo sapien
agttgggcctcttggcttaacaata

SEQ ID NO: 3876667 - DNA, 25 bp, Homo sapien
aacatgaaatgtagcctggattgcc

SEQ ID NO: 3876668 - DNA, 25 bp, Homo sapien
tcgcgttattacacaagtccagggc

SEQ ID NO: 3876669 - DNA, 25 bp, Homo sapien
tcagtcgccaagacaatgagagctc

SEQ ID NO: 3876670 - DNA, 25 bp, Homo sapien
gccttttgaacattgaacccaggag

SEQ ID NO: 3876671 - DNA, 25 bp, Homo sapien
gcttttcgaatactgatttgcaact

SEQ ID NO: 3876672 - DNA, 25 bp, Homo sapien
gcaggctccgtgcttttcgaatact

SEQ ID NO: 3876673 - DNA, 25 bp, Homo sapien
gctgctgctgcatgcgatcctgcag

SEQ ID NO: 3876674 - DNA, 25 bp, Homo sapien
tatcgactagggctctgctgtgcgt

SEQ ID NO: 3876675 - DNA, 25 bp, Homo sapien
caccatgcagggcaagtcttagttt

SEQ ID NO: 3876676 - DNA, 25 bp, Homo sapien
ccatgcagggcaagtcttagtttag

SEQ ID NO: 3876677 - DNA, 25 bp, Homo sapien
accatgcagggcaagtcttagttta

SEQ ID NO: 3876678 - DNA, 25 bp, Homo sapien
tacagagagccaaagctgcagcaca

SEQ ID NO: 3876679 - DNA, 25 bp, Homo sapien
tctcctttctgttccagatgtagtg

SEQ ID NO: 3876680 - DNA, 25 bp, Homo sapien
ttgcagggacctctcaaagccgtca

SEQ ID NO: 3876681 - DNA, 25 bp, Homo sapien
gtgactcttcaaacactgactctgc

SEQ ID NO: 3876682 - DNA, 25 bp, Homo sapien
aagtgaatgtgtgccaaagcaggtg

SEQ ID NO: 3876683 - DNA, 25 bp, Homo sapien
tcctctcaaagtgaatgtgtgccaa

SEQ ID NO: 3876684 - DNA, 25 bp, Homo sapien
tcaaagtgaatgtgtgccaaagcag

SEQ ID NO: 3876685 - DNA, 25 bp, Homo sapien
aatgtgtgccaaagcaggtgcagaa

SEQ ID NO: 3876686 - DNA, 25 bp, Homo sapien
tcatccaagtccatgaagcggctag

SEQ ID NO: 3876687 - DNA, 25 bp, Homo sapien
gatgagggttaaaccctttcgctgc

SEQ ID NO: 3876688 - DNA, 25 bp, Homo sapien
tcacttttagaagatatctcctcac

SEQ ID NO: 3876689 - DNA, 25 bp, Homo sapien
ttcttcgaagttcctgttcctgcgc

SEQ ID NO: 3876690 - DNA, 25 bp, Homo sapien
catggatgctgtggagtctacctcc

SEQ ID NO: 3876691 - DNA, 25 bp, Homo sapien
tacctccaggatgctactgctgtgc

SEQ ID NO: 3876692 - DNA, 25 bp, Homo sapien
ggaaccaacccagctgatctcttag

SEQ ID NO: 3876693 - DNA, 25 bp, Homo sapien
atatgacgccaggaaggaaccaacc

SEQ ID NO: 3876694 - DNA, 25 bp, Homo sapien
tcttctcataagtaaaactcaacag

SEQ ID NO: 3876695 - DNA, 25 bp, Homo sapien
ctcataagtaaaactcaacaggatc

SEQ ID NO: 3876696 - DNA, 25 bp, Homo sapien
tagcatcttctcataagtaaaactc

SEQ ID NO: 3876697 - DNA, 25 bp, Homo sapien
gcatcttctcataagtaaaactcaa

SEQ ID NO: 3876698 - DNA, 25 bp, Homo sapien
tgtgccacctttgagcaggagccat

SEQ ID NO: 3876699 - DNA, 25 bp, Homo sapien
ttttgtgccacctttgagcaggagc

SEQ ID NO: 3876700 - DNA, 25 bp, Homo sapien
acaaatttttgtgccacctttgagc

SEQ ID NO: 3876701 - DNA, 25 bp, Homo sapien
ttcacaaatttttgtgccacctttg

SEQ ID NO: 3876702 - DNA, 25 bp, Homo sapien
cacatagagataatagcaaaggcca

SEQ ID NO: 3876703 - DNA, 25 bp, Homo sapien
ttgtctcagccatgcctgaaagccc

SEQ ID NO: 3876704 - DNA, 25 bp, Homo sapien
tgaaagccccaagtaggtggctcac

SEQ ID NO: 3876705 - DNA, 25 bp, Homo sapien
aaggccatccctccacttgtctcag

SEQ ID NO: 3876706 - DNA, 25 bp, Homo sapien
gcaagagacaatgttgctgttcaaa

SEQ ID NO: 3876707 - DNA, 25 bp, Homo sapien
tgctgcaagagacaatgttgctgtt

SEQ ID NO: 3876708 - DNA, 25 bp, Homo sapien
attgctgcaagagacaatgttgctg

SEQ ID NO: 3876709 - DNA, 25 bp, Homo sapien
gctgcaagagacaatgttgctgttc

SEQ ID NO: 3876710 - DNA, 25 bp, Homo sapien
gattagtcgggggtgctgctctaaa

SEQ ID NO: 3876711 - DNA, 25 bp, Homo sapien
tgctgctctaaaaggtgagagcctg

SEQ ID NO: 3876712 - DNA, 25 bp, Homo sapien
ttcatagccagattccattcgctgg

SEQ ID NO: 3876713 - DNA, 25 bp, Homo sapien
gacatttgagctctcaggcagggct

SEQ ID NO: 3876714 - DNA, 25 bp, Homo sapien
ggcttggtccaccaaatttaatgtc

SEQ ID NO: 3876715 - DNA, 25 bp, Homo sapien
gcttggttcatctggtataaattct

SEQ ID NO: 3876716 - DNA, 25 bp, Homo sapien
tggcttgcttggttcatctggtata

SEQ ID NO: 3876717 - DNA, 25 bp, Homo sapien
taatgtcgtaagaaggtggcttgct

SEQ ID NO: 3876718 - DNA, 25 bp, Homo sapien
tctccatgtgggacgatacttgctg

SEQ ID NO: 3876719 - DNA, 25 bp, Homo sapien
tttggaggcatttctaggagcctgc

SEQ ID NO: 3876720 - DNA, 25 bp, Homo sapien
gcccctgcagtgagagcctacattg

SEQ ID NO: 3876721 - DNA, 25 bp, Homo sapien
tcacgagagtgtaaaggcagggtcc

SEQ ID NO: 3876722 - DNA, 25 bp, Homo sapien
gggctcatcgcctttcctcctaacc

SEQ ID NO: 3876723 - DNA, 25 bp, Homo sapien
gctcatcgcctttcctcctaacccg

SEQ ID NO: 3876724 - DNA, 25 bp, Homo sapien
ctcatcgcctttcctcctaacccga

SEQ ID NO: 3876725 - DNA, 25 bp, Homo sapien
tcatcgcctttcctcctaacccgac

SEQ ID NO: 3876726 - DNA, 25 bp, Homo sapien
attacattcactatcagtcaggtgt

SEQ ID NO: 3876727 - DNA, 25 bp, Homo sapien
cctcttgcgctctatcagtgaccct

SEQ ID NO: 3876728 - DNA, 25 bp, Homo sapien
gctcctcttgcgctctatcagtgac

SEQ ID NO: 3876729 - DNA, 25 bp, Homo sapien
ttacattcactatcagtcaggtgtc

SEQ ID NO: 3876730 - DNA, 25 bp, Homo sapien
tcttcctctgacatgggcatactct

SEQ ID NO: 3876731 - DNA, 25 bp, Homo sapien
cttcctctgacatgggcatactctc

SEQ ID NO: 3876732 - DNA, 25 bp, Homo sapien
cttccctgtattgatttcttcctct

SEQ ID NO: 3876733 - DNA, 25 bp, Homo sapien
ttgtagggatagctctccgttgagg

SEQ ID NO: 3876734 - DNA, 25 bp, Homo sapien
cgttgaggaatctgttcgagtgtca

SEQ ID NO: 3876735 - DNA, 25 bp, Homo sapien
tgtgtcccgactgctctgagacatg

SEQ ID NO: 3876736 - DNA, 25 bp, Homo sapien
acattatagatgactgtcccctgag

SEQ ID NO: 3876737 - DNA, 25 bp, Homo sapien
ctctaatggatcctctttctccaag

SEQ ID NO: 3876738 - DNA, 25 bp, Homo sapien
caactgtttgatcgcatggggtgag

SEQ ID NO: 3876739 - DNA, 25 bp, Homo sapien
ctaggttacgagctaagcacataat

SEQ ID NO: 3876740 - DNA, 25 bp, Homo sapien
taattaactatgagtcccaactgtt

SEQ ID NO: 3876741 - DNA, 25 bp, Homo sapien
gagaggtaaagagcctggctgctca

SEQ ID NO: 3876742 - DNA, 25 bp, Homo sapien
ctgtatgactggaactcagcttggg

SEQ ID NO: 3876743 - DNA, 25 bp, Homo sapien
cactgtcgtagcatgtcctgctgta

SEQ ID NO: 3876744 - DNA, 25 bp, Homo sapien
tgaatcttcactgtcgtagcatgtc

SEQ ID NO: 3876745 - DNA, 25 bp, Homo sapien
tgctgtatgactggaactcagcttg

SEQ ID NO: 3876746 - DNA, 25 bp, Homo sapien
cagcaggggctgataatgccccttg

SEQ ID NO: 3876747 - DNA, 25 bp, Homo sapien
ggtaccctggggatctgcataaagc

SEQ ID NO: 3876748 - DNA, 25 bp, Homo sapien
ccctggggatctgcataaagcagca

SEQ ID NO: 3876749 - DNA, 25 bp, Homo sapien
tgatgcatttggtcaccacatcctt

SEQ ID NO: 3876750 - DNA, 25 bp, Homo sapien
tagaaatctgcatttccttagtttt

SEQ ID NO: 3876751 - DNA, 25 bp, Homo sapien
aaatattaaaatcactttcatgaag

SEQ ID NO: 3876752 - DNA, 25 bp, Homo sapien
tctcccaaatattaaaatcactttc

SEQ ID NO: 3876753 - DNA, 25 bp, Homo sapien
agaaatctgcatttccttagttttc

SEQ ID NO: 3876754 - DNA, 25 bp, Homo sapien
ccttcgagtgctgacccatgagctc

SEQ ID NO: 3876755 - DNA, 25 bp, Homo sapien
accttcgagtgctgacccatgagct

SEQ ID NO: 3876756 - DNA, 25 bp, Homo sapien
tcaaaaaggacttgactactcctac

SEQ ID NO: 3876757 - DNA, 25 bp, Homo sapien
cagttcagattgcttggcccggtca

SEQ ID NO: 3876758 - DNA, 25 bp, Homo sapien
tgccatagtaacagatcattccaac

SEQ ID NO: 3876759 - DNA, 25 bp, Homo sapien
ggtcatccgtcactctgaaaaacag

SEQ ID NO: 3876760 - DNA, 25 bp, Homo sapien
catccatttgcgaatctttgtttga

SEQ ID NO: 3876761 - DNA, 25 bp, Homo sapien
ccaggctgtggataacatcttctgc

SEQ ID NO: 3876762 - DNA, 25 bp, Homo sapien
tggagcattcatcaacacacggcga

SEQ ID NO: 3876763 - DNA, 25 bp, Homo sapien
agcttaaggcaggttcccaggctgt

SEQ ID NO: 3876764 - DNA, 25 bp, Homo sapien
tgagtggtctgagtcccataccagc

SEQ ID NO: 3876765 - DNA, 25 bp, Homo sapien
gacagttccgcagatcccccatggt

SEQ ID NO: 3876766 - DNA, 25 bp, Homo sapien
tctgcagcagctcaccaaacatgct

SEQ ID NO: 3876767 - DNA, 25 bp, Homo sapien
ctgcagcagctcaccaaacatgctt

SEQ ID NO: 3876768 - DNA, 25 bp, Homo sapien
tggacagttccgcagatcccccatg

SEQ ID NO: 3876769 - DNA, 25 bp, Homo sapien
atgatggtttgtatttagttactgc

SEQ ID NO: 3876770 - DNA, 25 bp, Homo sapien
gatggtttgtatttagttactgcta

SEQ ID NO: 3876771 - DNA, 25 bp, Homo sapien
taatgtacattcctaactcacacat

SEQ ID NO: 3876772 - DNA, 25 bp, Homo sapien
ttcctctgccccctataccaaagcc

SEQ ID NO: 3876773 - DNA, 25 bp, Homo sapien
atccaaagctcatagaatccccact

SEQ ID NO: 3876774 - DNA, 25 bp, Homo sapien
ccaaagctcatagaatccccactcc

SEQ ID NO: 3876775 - DNA, 25 bp, Homo sapien
gatccaaagctcatagaatccccac

SEQ ID NO: 3876776 - DNA, 25 bp, Homo sapien
tccaaagctcatagaatccccactc

SEQ ID NO: 3876777 - DNA, 25 bp, Homo sapien
aagtggtggagatataatgtaccat

SEQ ID NO: 3876778 - DNA, 25 bp, Homo sapien
agggaagtggtggagatataatgta

SEQ ID NO: 3876779 - DNA, 25 bp, Homo sapien
ggaagtggtggagatataatgtacc

SEQ ID NO: 3876780 - DNA, 25 bp, Homo sapien
caaagggaagtggtggagatataat

SEQ ID NO: 3876781 - DNA, 25 bp, Homo sapien
aaaggcagcggatcagaagtggcac

SEQ ID NO: 3876782 - DNA, 25 bp, Homo sapien
agcggatcagaagtggcaccacagc

SEQ ID NO: 3876783 - DNA, 25 bp, Homo sapien
tggatgaaaggcagcggatcagaag

SEQ ID NO: 3876784 - DNA, 25 bp, Homo sapien
aagtggcaccacagctagtacatac

SEQ ID NO: 3876785 - DNA, 25 bp, Homo sapien
gcagtgttgggcagtacatatatcc

SEQ ID NO: 3876786 - DNA, 25 bp, Homo sapien
tgggaaatgcagtgttgggcagtac

SEQ ID NO: 3876787 - DNA, 25 bp, Homo sapien
ctgatgggaaatgcagtgttgggca

SEQ ID NO: 3876788 - DNA, 25 bp, Homo sapien
tgttgggcagtacatatatcctctt

SEQ ID NO: 3876789 - DNA, 25 bp, Homo sapien
caccataaagtagccagtccctgat

SEQ ID NO: 3876790 - DNA, 25 bp, Homo sapien
gataagggcacagcaaattccacca

SEQ ID NO: 3876791 - DNA, 25 bp, Homo sapien
aaaactcctagttctaactgtagag

SEQ ID NO: 3876792 - DNA, 25 bp, Homo sapien
taacacactgctataacagagacat

SEQ ID NO: 3876793 - DNA, 25 bp, Homo sapien
tacactgaaactggttaaagattcc

SEQ ID NO: 3876794 - DNA, 25 bp, Homo sapien
tggaagcactttttcactactacac

SEQ ID NO: 3876795 - DNA, 25 bp, Homo sapien
tctttgccagagcactgcggagagt

SEQ ID NO: 3876796 - DNA, 25 bp, Homo sapien
gaaacgttgttcatcctggaaagtc

SEQ ID NO: 3876797 - DNA, 25 bp, Homo sapien
gctatgaaaccaaatgtgcttccca

SEQ ID NO: 3876798 - DNA, 25 bp, Homo sapien
ccatgggttgacatgcttgcagtta

SEQ ID NO: 3876799 - DNA, 25 bp, Homo sapien
agtctgtcatgctagcatctccatg

SEQ ID NO: 3876800 - DNA, 25 bp, Homo sapien
cagaatgaagggcatgatctgtgct

SEQ ID NO: 3876801 - DNA, 25 bp, Homo sapien
taattattgttgtcagtcttgctct

SEQ ID NO: 3876802 - DNA, 25 bp, Homo sapien
aggcagccttcctcatacacactga

SEQ ID NO: 3876803 - DNA, 25 bp, Homo sapien
gcagccttcctcatacacactgaga

SEQ ID NO: 3876804 - DNA, 25 bp, Homo sapien
ttttaattattgttgtcagtcttgc

SEQ ID NO: 3876805 - DNA, 25 bp, Homo sapien
gttcagcagtaagaacaggtggcag

SEQ ID NO: 3876806 - DNA, 25 bp, Homo sapien
gaaagccaagaacatttagttcagc

SEQ ID NO: 3876807 - DNA, 25 bp, Homo sapien
agcaccaataaggaacaaaaactgg

SEQ ID NO: 3876808 - DNA, 25 bp, Homo sapien
ggcagcaccaataaggaacaaaaac

SEQ ID NO: 3876809 - DNA, 25 bp, Homo sapien
aactagtttcttggatgcagtacaa

SEQ ID NO: 3876810 - DNA, 25 bp, Homo sapien
tttaacgactaaaagcaggtgcttc

SEQ ID NO: 3876811 - DNA, 25 bp, Homo sapien
agcaaacaattctatccacatgagc

SEQ ID NO: 3876812 - DNA, 25 bp, Homo sapien
ttcttcacagggtgaaaccaaagag

SEQ ID NO: 3876813 - DNA, 25 bp, Homo sapien
ttgagattgtctaaactgtaggatc

SEQ ID NO: 3876814 - DNA, 25 bp, Homo sapien
ctggatatgcacaaggttttgagat

SEQ ID NO: 3876815 - DNA, 25 bp, Homo sapien
gtctaaactgtaggatctgccataa

SEQ ID NO: 3876816 - DNA, 25 bp, Homo sapien
cacaaggttttgagattgtctaaac

SEQ ID NO: 3876817 - DNA, 25 bp, Homo sapien
aattagccaccacctactggggaga

SEQ ID NO: 3876818 - DNA, 25 bp, Homo sapien
tagccaccacctactggggagacag

SEQ ID NO: 3876819 - DNA, 25 bp, Homo sapien
acaaaaattagccaccacctactgg

SEQ ID NO: 3876820 - DNA, 25 bp, Homo sapien
aaattagccaccacctactggggag

SEQ ID NO: 3876821 - DNA, 25 bp, Homo sapien
tgatatctggtaaagtatgctagtc

SEQ ID NO: 3876822 - DNA, 25 bp, Homo sapien
caagtagcaagtttcctatatgact

SEQ ID NO: 3876823 - DNA, 25 bp, Homo sapien
tccctatagggagaactaattgtct

SEQ ID NO: 3876824 - DNA, 25 bp, Homo sapien
gccatactgtgtagataccacatta

SEQ ID NO: 3876825 - DNA, 25 bp, Homo sapien
gatgcaggaatctcccatgcacttg

SEQ ID NO: 3876826 - DNA, 25 bp, Homo sapien
cttgagagcgcaaaagatgcaggaa

SEQ ID NO: 3876827 - DNA, 25 bp, Homo sapien
acttgtgagttgtaagctgcctaaa

SEQ ID NO: 3876828 - DNA, 25 bp, Homo sapien
gctgcctaaagctacgtcggaagat

SEQ ID NO: 3876829 - DNA, 25 bp, Homo sapien
tcgaggtgcaaacatcccttgtaca

SEQ ID NO: 3876830 - DNA, 25 bp, Homo sapien
ttgagcttcgaggtgcaaacatccc

SEQ ID NO: 3876831 - DNA, 25 bp, Homo sapien
ctatggaggttgagcttcgaggtgc

SEQ ID NO: 3876832 - DNA, 25 bp, Homo sapien
aaacatcccttgtacactaccacga

SEQ ID NO: 3876833 - DNA, 25 bp, Homo sapien
ctgtctgctaaagttctaaaaggaa

SEQ ID NO: 3876834 - DNA, 25 bp, Homo sapien
aggaaagggaatccagaatttagtg

SEQ ID NO: 3876835 - DNA, 25 bp, Homo sapien
gggaatccagaatttagtgaattta

SEQ ID NO: 3876836 - DNA, 25 bp, Homo sapien
atttctgtctgctaaagttctaaaa

SEQ ID NO: 3876837 - DNA, 25 bp, Homo sapien
ccataaagtcctggtgaagtggatg

SEQ ID NO: 3876838 - DNA, 25 bp, Homo sapien
tcttctgggactagaatagccagct

SEQ ID NO: 3876839 - DNA, 25 bp, Homo sapien
tgcaaaaggttccacaaagccaaga

SEQ ID NO: 3876840 - DNA, 25 bp, Homo sapien
gtaacatggcacaggactaatgcaa

SEQ ID NO: 3876841 - DNA, 25 bp, Homo sapien
gaatgacaagtaccaagcctccact

SEQ ID NO: 3876842 - DNA, 25 bp, Homo sapien
gaagtgagagcataaaggaccagac

SEQ ID NO: 3876843 - DNA, 25 bp, Homo sapien
tgccctatgacacacactcctgagt

SEQ ID NO: 3876844 - DNA, 25 bp, Homo sapien
gaggcagtaacaagtggtccagaga

SEQ ID NO: 3876845 - DNA, 25 bp, Homo sapien
ctggcttgtgcataaagggagatga

SEQ ID NO: 3876846 - DNA, 25 bp, Homo sapien
aggaactggcttgtgcataaaggga

SEQ ID NO: 3876847 - DNA, 25 bp, Homo sapien
ggcctggaaggacactgggccagga

SEQ ID NO: 3876848 - DNA, 25 bp, Homo sapien
gaactggcttgtgcataaagggaga

SEQ ID NO: 3876849 - DNA, 25 bp, Homo sapien
caaaatatttaatggctcctagagg

SEQ ID NO: 3876850 - DNA, 25 bp, Homo sapien
ttcctatttagaaacagagggcctg

SEQ ID NO: 3876851 - DNA, 25 bp, Homo sapien
gacttgagaccagagataaccgacc

SEQ ID NO: 3876852 - DNA, 25 bp, Homo sapien
gctgctactaaggttcagatcctca

SEQ ID NO: 3876853 - DNA, 25 bp, Homo sapien
atgacagaccgcaaagggaagccca

SEQ ID NO: 3876854 - DNA, 25 bp, Homo sapien
cagctaatggttctgcactgtgtat

SEQ ID NO: 3876855 - DNA, 25 bp, Homo sapien
cagggagcttacgatcatgacagac

SEQ ID NO: 3876856 - DNA, 25 bp, Homo sapien
cactgtgtatgggaagcatggcacc

SEQ ID NO: 3876857 - DNA, 25 bp, Homo sapien
tttggattacaatactcacattctc

SEQ ID NO: 3876858 - DNA, 25 bp, Homo sapien
ctctcagtgcatggtggggtttgga

SEQ ID NO: 3876859 - DNA, 25 bp, Homo sapien
ggtggggtttggattacaatactca

SEQ ID NO: 3876860 - DNA, 25 bp, Homo sapien
gtgctctcagtgcatggtggggttt

SEQ ID NO: 3876861 - DNA, 25 bp, Homo sapien
tcaacctccagcaaaagacctctaa

SEQ ID NO: 3876862 - DNA, 25 bp, Homo sapien
acagtcaacctccagcaaaagacct

SEQ ID NO: 3876863 - DNA, 25 bp, Homo sapien
tccagcaaaagacctctaatcacga

SEQ ID NO: 3876864 - DNA, 25 bp, Homo sapien
aaagacctctaatcacgagggtatc

SEQ ID NO: 3876865 - DNA, 25 bp, Homo sapien
aaatcatacaagaaatctctatatt

SEQ ID NO: 3876866 - DNA, 25 bp, Homo sapien
aatcatacaagaaatctctatattt

SEQ ID NO: 3876867 - DNA, 25 bp, Homo sapien
atcatacaagaaatctctatatttc

SEQ ID NO: 3876868 - DNA, 25 bp, Homo sapien
tctttccttatacatgcctagtgcc

SEQ ID NO: 3876869 - DNA, 25 bp, Homo sapien
gatgcacacctgatcctcaagaagc

SEQ ID NO: 3876870 - DNA, 25 bp, Homo sapien
cattcagtcagcgtctagagcaggt

SEQ ID NO: 3876871 - DNA, 25 bp, Homo sapien
tttgccagagccaaagtaagtcttt

SEQ ID NO: 3876872 - DNA, 25 bp, Homo sapien
ctgctgctactatggctttgttaga

SEQ ID NO: 3876873 - DNA, 25 bp, Homo sapien
gctgctgctactatggctttgttag

SEQ ID NO: 3876874 - DNA, 25 bp, Homo sapien
gctgctactatggctttgttagaga

SEQ ID NO: 3876875 - DNA, 25 bp, Homo sapien
tgctgctactatggctttgttagag

SEQ ID NO: 3876876 - DNA, 25 bp, Homo sapien
gtcagatcttaccagaatcatgcct

SEQ ID NO: 3876877 - DNA, 25 bp, Homo sapien
ccatttttctgaaccaacaatgtag

SEQ ID NO: 3876878 - DNA, 25 bp, Homo sapien
cagatcttaccagaatcatgccttc

SEQ ID NO: 3876879 - DNA, 25 bp, Homo sapien
acaatgtagcacctcaacatctgcc

SEQ ID NO: 3876880 - DNA, 25 bp, Homo sapien
acaaacaggtcggatgcggtggctc

SEQ ID NO: 3876881 - DNA, 25 bp, Homo sapien
aaacaaacaggtcggatgcggtggc

SEQ ID NO: 3876882 - DNA, 25 bp, Homo sapien
ggattacagacataatctcacgtag

SEQ ID NO: 3876883 - DNA, 25 bp, Homo sapien
taatctcacgtagatttttaaagaa

SEQ ID NO: 3876884 - DNA, 25 bp, Homo sapien
tctaatcaactacataaagcgggtg

SEQ ID NO: 3876885 - DNA, 25 bp, Homo sapien
tattgttgcgcattcctatcgggct

SEQ ID NO: 3876886 - DNA, 25 bp, Homo sapien
ctttgtggaacatggcagtaggcct

SEQ ID NO: 3876887 - DNA, 25 bp, Homo sapien
gagtccccatccttgtaatgagcaa

SEQ ID NO: 3876888 - DNA, 25 bp, Homo sapien
tattgactgttactggtggcagagc

SEQ ID NO: 3876889 - DNA, 25 bp, Homo sapien
acaatgggggctatctgctcagcat

SEQ ID NO: 3876890 - DNA, 25 bp, Homo sapien
aattccataaacgagcaggttccat

SEQ ID NO: 3876891 - DNA, 25 bp, Homo sapien
caggttccatatggagcaagtagaa

SEQ ID NO: 3876892 - DNA, 25 bp, Homo sapien
acgttgtagtctacaggctccccag

SEQ ID NO: 3876893 - DNA, 25 bp, Homo sapien
catctggaaggtcatgcgtttggag

SEQ ID NO: 3876894 - DNA, 25 bp, Homo sapien
ccaaggggatgccaatatccacgtt

SEQ ID NO: 3876895 - DNA, 25 bp, Homo sapien
tcatatccaccatagggcattgccg

SEQ ID NO: 3876896 - DNA, 25 bp, Homo sapien
ctcccatggggaaatataggtcttg

SEQ ID NO: 3876897 - DNA, 25 bp, Homo sapien
ctgttgaaggacttatatttgggaa

SEQ ID NO: 3876898 - DNA, 25 bp, Homo sapien
tataggtcttgaacacagtgatatg

SEQ ID NO: 3876899 - DNA, 25 bp, Homo sapien
tggctcgctcccatggggaaatata

SEQ ID NO: 3876900 - DNA, 25 bp, Homo sapien
tacactagggaaattgcaagagcca

SEQ ID NO: 3876901 - DNA, 25 bp, Homo sapien
caatgaaaggtaatcccacgcccct

SEQ ID NO: 3876902 - DNA, 25 bp, Homo sapien
gcaagagccagggactaaagatata

SEQ ID NO: 3876903 - DNA, 25 bp, Homo sapien
tcaaataatagcatttagtagccaa

SEQ ID NO: 3876904 - DNA, 25 bp, Homo sapien
agagccatactgtccggcagagcca

SEQ ID NO: 3876905 - DNA, 25 bp, Homo sapien
gctgatcagagccatactgtccggc

SEQ ID NO: 3876906 - DNA, 25 bp, Homo sapien
gctcttgctgtatgagaatccctga

SEQ ID NO: 3876907 - DNA, 25 bp, Homo sapien
ctctgccgttgctcttgctgtatga

SEQ ID NO: 3876908 - DNA, 25 bp, Homo sapien
ttggaaggaacttctggaagtgatc

SEQ ID NO: 3876909 - DNA, 25 bp, Homo sapien
gctgtccccccactgttggaaggaa

SEQ ID NO: 3876910 - DNA, 25 bp, Homo sapien
ccccactgttggaaggaacttctgg

SEQ ID NO: 3876911 - DNA, 25 bp, Homo sapien
cagctgtccccccactgttggaagg

SEQ ID NO: 3876912 - DNA, 25 bp, Homo sapien
ggagcacccagtcttaattacaagg

SEQ ID NO: 3876913 - DNA, 25 bp, Homo sapien
tgcctgttggacctcactggtgaca

SEQ ID NO: 3876914 - DNA, 25 bp, Homo sapien
tacaaggactagagaaattctgccc

SEQ ID NO: 3876915 - DNA, 25 bp, Homo sapien
gcttgtccaacagtcagaactctct

SEQ ID NO: 3876916 - DNA, 25 bp, Homo sapien
tgtcagagaaaacatcagggtggtt

SEQ ID NO: 3876917 - DNA, 25 bp, Homo sapien
tggtaagcagcgacagttcctccaa

SEQ ID NO: 3876918 - DNA, 25 bp, Homo sapien
agccccggttggtaagcagcgacag

SEQ ID NO: 3876919 - DNA, 25 bp, Homo sapien
atctgccgcagtttgaacatcttgg

SEQ ID NO: 3876920 - DNA, 25 bp, Homo sapien
ccatgatcagcttgctggatttcct

SEQ ID NO: 3876921 - DNA, 25 bp, Homo sapien
tccatgatcagcttgctggatttcc

SEQ ID NO: 3876922 - DNA, 25 bp, Homo sapien
ctccagtgagttccatgatcagctt

SEQ ID NO: 3876923 - DNA, 25 bp, Homo sapien
cagtgagttccatgatcagcttgct

SEQ ID NO: 3876924 - DNA, 25 bp, Homo sapien
aaggaggagttggtggatggacagg

SEQ ID NO: 3876925 - DNA, 25 bp, Homo sapien
gaaggaggagttggtggatggacag

SEQ ID NO: 3876926 - DNA, 25 bp, Homo sapien
tgctcgggcagtggtcagctctccc

SEQ ID NO: 3876927 - DNA, 25 bp, Homo sapien
cggctgctcgggcagtggtcagctc

SEQ ID NO: 3876928 - DNA, 25 bp, Homo sapien
ctgctcgggcagtggtcagctctcc

SEQ ID NO: 3876929 - DNA, 25 bp, Homo sapien
gctgctcgggcagtggtcagctctc

SEQ ID NO: 3876930 - DNA, 25 bp, Homo sapien
gtgaccggagaacacgagctgggca

SEQ ID NO: 3876931 - DNA, 25 bp, Homo sapien
gaccggagaacacgagctgggcagg

SEQ ID NO: 3876932 - DNA, 25 bp, Homo sapien
tgtgaccggagaacacgagctgggc

SEQ ID NO: 3876933 - DNA, 25 bp, Homo sapien
ctgtgaccggagaacacgagctggg

SEQ ID NO: 3876934 - DNA, 25 bp, Homo sapien
tgagaccctggaaccaagatccctc

SEQ ID NO: 3876935 - DNA, 25 bp, Homo sapien
ctccttgcccggaggctcaggaagg

SEQ ID NO: 3876936 - DNA, 25 bp, Homo sapien
aatagagatgatgagcgcaagcagc

SEQ ID NO: 3876937 - DNA, 25 bp, Homo sapien
tcacattgcacctagagcctgagat

SEQ ID NO: 3876938 - DNA, 25 bp, Homo sapien
actgttccagcggagtctctgggca

SEQ ID NO: 3876939 - DNA, 25 bp, Homo sapien
cagtagctgcatgatcttcctccac

SEQ ID NO: 3876940 - DNA, 25 bp, Homo sapien
gactgtgccatttgtactgttccag

SEQ ID NO: 3876941 - DNA, 25 bp, Homo sapien
tagattctggaaccagttgctgcag

SEQ ID NO: 3876942 - DNA, 25 bp, Homo sapien
tcactttccagattacacagcaaac

SEQ ID NO: 3876943 - DNA, 25 bp, Homo sapien
acagcaaacgtagctggtggtggtc

SEQ ID NO: 3876944 - DNA, 25 bp, Homo sapien
tttattcttgtgcacaaaccaaagt

SEQ ID NO: 3876945 - DNA, 25 bp, Homo sapien
tcacacccaacaagcaaaggaaatt

SEQ ID NO: 3876946 - DNA, 25 bp, Homo sapien
taagattggagatcaggacctgaag

SEQ ID NO: 3876947 - DNA, 25 bp, Homo sapien
tgaaaagaagcaatagctggggttt

SEQ ID NO: 3876948 - DNA, 25 bp, Homo sapien
ttggctctgggtatttccctactct

SEQ ID NO: 3876949 - DNA, 25 bp, Homo sapien
tccctactctttcccaggcagtcat

SEQ ID NO: 3876950 - DNA, 25 bp, Homo sapien
ctctttcccaggcagtcatggcaag

SEQ ID NO: 3876951 - DNA, 25 bp, Homo sapien
tttggctctgggtatttccctactc

SEQ ID NO: 3876952 - DNA, 25 bp, Homo sapien
acacagacaccaaccgttctttcaa

SEQ ID NO: 3876953 - DNA, 25 bp, Homo sapien
agacaccaaccgttctttcaacact

SEQ ID NO: 3876954 - DNA, 25 bp, Homo sapien
acaccaaccgttctttcaacactca

SEQ ID NO: 3876955 - DNA, 25 bp, Homo sapien
acagacaccaaccgttctttcaaca

SEQ ID NO: 3876956 - DNA, 25 bp, Homo sapien
tcaatcacttacactcatttctgcc

SEQ ID NO: 3876957 - DNA, 25 bp, Homo sapien
ctcaatcacttacactcatttctgc

SEQ ID NO: 3876958 - DNA, 25 bp, Homo sapien
gattttggcctcacttgccacactc

SEQ ID NO: 3876959 - DNA, 25 bp, Homo sapien
tctgattttggcctcacttgccaca

SEQ ID NO: 3876960 - DNA, 25 bp, Homo sapien
tcaacttggaaaccatctctggcag

SEQ ID NO: 3876961 - DNA, 25 bp, Homo sapien
tattcatgccttagacggaagagca

SEQ ID NO: 3876962 - DNA, 25 bp, Homo sapien
tatgccagtcaagcttgggaaagca

SEQ ID NO: 3876963 - DNA, 25 bp, Homo sapien
cctgggtactgggttgctcagcact

SEQ ID NO: 3876964 - DNA, 25 bp, Homo sapien
ctggtggctgaaaatcggggcctgg

SEQ ID NO: 3876965 - DNA, 25 bp, Homo sapien
ccaggcctccacacatgagcttgca

SEQ ID NO: 3876966 - DNA, 25 bp, Homo sapien
ggcctccacacatgagcttgcaatc

SEQ ID NO: 3876967 - DNA, 25 bp, Homo sapien
tggctgaaaatcggggcctggctac

SEQ ID NO: 3876968 - DNA, 25 bp, Homo sapien
tggaaaaccggcgaatctcctggac

SEQ ID NO: 3876969 - DNA, 25 bp, Homo sapien
tcacgtgaggcagggtcttgtaact

SEQ ID NO: 3876970 - DNA, 25 bp, Homo sapien
aaaatctagagccttgatgccctgc

SEQ ID NO: 3876971 - DNA, 25 bp, Homo sapien
tcatccagtgtagtggctgctcggg

SEQ ID NO: 3876972 - DNA, 25 bp, Homo sapien
cggcccgaggcttttcatccaggtt

SEQ ID NO: 3876973 - DNA, 25 bp, Homo sapien
tcctgcaggatacccgtgcgggcag

SEQ ID NO: 3876974 - DNA, 25 bp, Homo sapien
tctgtaccagcgatagcagctcggg

SEQ ID NO: 3876975 - DNA, 25 bp, Homo sapien
tgcatgaagttgcaggcttcagccc

SEQ ID NO: 3876976 - DNA, 25 bp, Homo sapien
tctgggcgcgcagagggtcgcaaag

SEQ ID NO: 3876977 - DNA, 25 bp, Homo sapien
aaggcgcagataggaagatagaagc

SEQ ID NO: 3876978 - DNA, 25 bp, Homo sapien
gcagagggtcgcaaaggcgcagata

SEQ ID NO: 3876979 - DNA, 25 bp, Homo sapien
gtcgcaaaggcgcagataggaagat

SEQ ID NO: 3876980 - DNA, 25 bp, Homo sapien
tggcgcgtggctgggaacccctgaa

SEQ ID NO: 3876981 - DNA, 25 bp, Homo sapien
gtgggcccctgcgaagacaagaagg

SEQ ID NO: 3876982 - DNA, 25 bp, Homo sapien
ccaggctgtcgttcgcccttttggg

SEQ ID NO: 3876983 - DNA, 25 bp, Homo sapien
gagctggtggctgtcacagggcccg

SEQ ID NO: 3876984 - DNA, 25 bp, Homo sapien
agaaggcttcttcgtccagctcgga

SEQ ID NO: 3876985 - DNA, 25 bp, Homo sapien
tgagcatggctgctggttcgacccg

SEQ ID NO: 3876986 - DNA, 25 bp, Homo sapien
catgtccagatagggactgtcccag

SEQ ID NO: 3876987 - DNA, 25 bp, Homo sapien
ttggaggctctctgcacgttgcagt

SEQ ID NO: 3876988 - DNA, 25 bp, Homo sapien
ttggctgatgggctcaaaggtctcc

SEQ ID NO: 3876989 - DNA, 25 bp, Homo sapien
agtcttggagctcaggaactgggtc

SEQ ID NO: 3876990 - DNA, 25 bp, Homo sapien
ctgcatagaacgagtcttggagctc

SEQ ID NO: 3876991 - DNA, 25 bp, Homo sapien
gctttgtcatagctggcttggctga

SEQ ID NO: 3876992 - DNA, 25 bp, Homo sapien
ggagcaggaccagcttgagccaccc

SEQ ID NO: 3876993 - DNA, 25 bp, Homo sapien
ctggagcaggaccagcttgagccac

SEQ ID NO: 3876994 - DNA, 25 bp, Homo sapien
accagcttgagccaccccccacgcc

SEQ ID NO: 3876995 - DNA, 25 bp, Homo sapien
cagcttgagccaccccccacgcctt

SEQ ID NO: 3876996 - DNA, 25 bp, Homo sapien
ttaaggctcagattgaaggatcctg

SEQ ID NO: 3876997 - DNA, 25 bp, Homo sapien
taaggctcagattgaaggatcctgg

SEQ ID NO: 3876998 - DNA, 25 bp, Homo sapien
aggctcagattgaaggatcctggct

SEQ ID NO: 3876999 - DNA, 25 bp, Homo sapien
aaggctcagattgaaggatcctggc

SEQ ID NO: 3877000 - DNA, 25 bp, Homo sapien
ccttctgggtgtaggtggtagtaag

SEQ ID NO: 3877001 - DNA, 25 bp, Homo sapien
gggtgtaggtggtagtaagatcttc

SEQ ID NO: 3877002 - DNA, 25 bp, Homo sapien
tctgggtgtaggtggtagtaagatc

SEQ ID NO: 3877003 - DNA, 25 bp, Homo sapien
gtgtaggtggtagtaagatcttctg

SEQ ID NO: 3877004 - DNA, 25 bp, Homo sapien
aagacggggagctcacacggctgtc

SEQ ID NO: 3877005 - DNA, 25 bp, Homo sapien
catggggtaacagcagagcctcagc

SEQ ID NO: 3877006 - DNA, 25 bp, Homo sapien
gggaacaggccccaccatagggatg

SEQ ID NO: 3877007 - DNA, 25 bp, Homo sapien
cccaccatagggatgagatgaggac

SEQ ID NO: 3877008 - DNA, 25 bp, Homo sapien
agacaggtagacctcatcaggtggg

SEQ ID NO: 3877009 - DNA, 25 bp, Homo sapien
gtcagtctctccgtagtaagcctca

SEQ ID NO: 3877010 - DNA, 25 bp, Homo sapien
actgtcagtctctccgtagtaagcc

SEQ ID NO: 3877011 - DNA, 25 bp, Homo sapien
ctgtcagacaggtagacctcatcag

SEQ ID NO: 3877012 - DNA, 25 bp, Homo sapien
tatcaggaggtgaacgaaggctccc

SEQ ID NO: 3877013 - DNA, 25 bp, Homo sapien
cttagtggagataagggtgacagca

SEQ ID NO: 3877014 - DNA, 25 bp, Homo sapien
gatggagattgcacaggaccctcgt

SEQ ID NO: 3877015 - DNA, 25 bp, Homo sapien
ggtgacagcacctgaagctcatggg

SEQ ID NO: 3877016 - DNA, 25 bp, Homo sapien
tgggagaggttggtgcaagagaccc

SEQ ID NO: 3877017 - DNA, 25 bp, Homo sapien
tttcctgaggcatcgatgaggctca

SEQ ID NO: 3877018 - DNA, 25 bp, Homo sapien
caagagaccccattgattgccaaga

SEQ ID NO: 3877019 - DNA, 25 bp, Homo sapien
acagtgaggacaagctgatttcctg

SEQ ID NO: 3877020 - DNA, 25 bp, Homo sapien
tgtaacggtttcctctgctcggccc

SEQ ID NO: 3877021 - DNA, 25 bp, Homo sapien
cacctgtaacggtttcctctgctcg

SEQ ID NO: 3877022 - DNA, 25 bp, Homo sapien
tagacacctgtaacggtttcctctg

SEQ ID NO: 3877023 - DNA, 25 bp, Homo sapien
cccatgaagtcggaagccccagggg

SEQ ID NO: 3877024 - DNA, 25 bp, Homo sapien
agcttggcctatggcccccggagtt

SEQ ID NO: 3877025 - DNA, 25 bp, Homo sapien
aagttgaggtgctcgaaccccgtct

SEQ ID NO: 3877026 - DNA, 25 bp, Homo sapien
gagagaagttgaggtgctcgaaccc

SEQ ID NO: 3877027 - DNA, 25 bp, Homo sapien
gaggtgctcgaaccccgtctgggct

SEQ ID NO: 3877028 - DNA, 25 bp, Homo sapien
gaaccaaaccaggatacaaggtcca

SEQ ID NO: 3877029 - DNA, 25 bp, Homo sapien
ttgaaagtcatcaggaaccaaacca

SEQ ID NO: 3877030 - DNA, 25 bp, Homo sapien
tttgaaagtcatcaggaaccaaacc

SEQ ID NO: 3877031 - DNA, 25 bp, Homo sapien
ttctaggatgattgagcagtgactc

SEQ ID NO: 3877032 - DNA, 25 bp, Homo sapien
tccagggcttgatgtacacatttca

SEQ ID NO: 3877033 - DNA, 25 bp, Homo sapien
cagggcttgatgtacacatttcacc

SEQ ID NO: 3877034 - DNA, 25 bp, Homo sapien
ggcttgatgtacacatttcacccat

SEQ ID NO: 3877035 - DNA, 25 bp, Homo sapien
taaatccagggcttgatgtacacat

SEQ ID NO: 3877036 - DNA, 25 bp, Homo sapien
gtggccttctcggtgcggtgggcca

SEQ ID NO: 3877037 - DNA, 25 bp, Homo sapien
cggtggccttctcggtgcggtgggc

SEQ ID NO: 3877038 - DNA, 25 bp, Homo sapien
ctcggtggccttctcggtgcggtgg

SEQ ID NO: 3877039 - DNA, 25 bp, Homo sapien
ggccttctcggtgcggtgggccagg

SEQ ID NO: 3877040 - DNA, 25 bp, Homo sapien
tgacagcatgaagcttctataaccc

SEQ ID NO: 3877041 - DNA, 25 bp, Homo sapien
cctgacagcatgaagcttctataac

SEQ ID NO: 3877042 - DNA, 25 bp, Homo sapien
cccctgacagcatgaagcttctata

SEQ ID NO: 3877043 - DNA, 25 bp, Homo sapien
acagcatgaagcttctataaccctg

SEQ ID NO: 3877044 - DNA, 25 bp, Homo sapien
tggagacaaggcctaggattccaag

SEQ ID NO: 3877045 - DNA, 25 bp, Homo sapien
caaggcctaggattccaagcctgct

SEQ ID NO: 3877046 - DNA, 25 bp, Homo sapien
ggcctaggattccaagcctgctgct

SEQ ID NO: 3877047 - DNA, 25 bp, Homo sapien
gagacaaggcctaggattccaagcc

SEQ ID NO: 3877048 - DNA, 25 bp, Homo sapien
tctccaccagtccccgctttcagga

SEQ ID NO: 3877049 - DNA, 25 bp, Homo sapien
tccaccagtccccgctttcaggagc

SEQ ID NO: 3877050 - DNA, 25 bp, Homo sapien
ctccaccagtccccgctttcaggag

SEQ ID NO: 3877051 - DNA, 25 bp, Homo sapien
gactcagacagcctgttgtcagagc

SEQ ID NO: 3877052 - DNA, 25 bp, Homo sapien
agacagcctgttgtcagagctcagc

SEQ ID NO: 3877053 - DNA, 25 bp, Homo sapien
ctcagacagcctgttgtcagagctc

SEQ ID NO: 3877054 - DNA, 25 bp, Homo sapien
cagacagcctgttgtcagagctcag

SEQ ID NO: 3877055 - DNA, 25 bp, Homo sapien
aattcttggaactgggattaatcag

SEQ ID NO: 3877056 - DNA, 25 bp, Homo sapien
tgtagatgaattcttggaactggga

SEQ ID NO: 3877057 - DNA, 25 bp, Homo sapien
gaatatggcagattagcctccaaga

SEQ ID NO: 3877058 - DNA, 25 bp, Homo sapien
aattgtagatgaattcttggaactg

SEQ ID NO: 3877059 - DNA, 25 bp, Homo sapien
gcagaaatatgcatgtcctcagtgt

SEQ ID NO: 3877060 - DNA, 25 bp, Homo sapien
tccaggaatttgcttcacagctctt

SEQ ID NO: 3877061 - DNA, 25 bp, Homo sapien
tgtgtaaattcaggacgcaaaaggg

SEQ ID NO: 3877062 - DNA, 25 bp, Homo sapien
taaggaaaacaactctgtatacagc

SEQ ID NO: 3877063 - DNA, 25 bp, Homo sapien
tgtacaaaaatcaatgcatatttat

SEQ ID NO: 3877064 - DNA, 25 bp, Homo sapien
taaaatatgtcttatggtcagaaaa

SEQ ID NO: 3877065 - DNA, 25 bp, Homo sapien
tacttagtttatgaaaagtactgaa

SEQ ID NO: 3877066 - DNA, 25 bp, Homo sapien
gtactgaaaatgctattactagctg

SEQ ID NO: 3877067 - DNA, 25 bp, Homo sapien
tcagtgcagggtagtggggccagaa

SEQ ID NO: 3877068 - DNA, 25 bp, Homo sapien
cagtgcagggtagtggggccagaaa

SEQ ID NO: 3877069 - DNA, 25 bp, Homo sapien
tggactttactgagggttttgtctg

SEQ ID NO: 3877070 - DNA, 25 bp, Homo sapien
cttccctcgtggactttactgaggg

SEQ ID NO: 3877071 - DNA, 25 bp, Homo sapien
ttactgagggttttgtctgcccctg

SEQ ID NO: 3877072 - DNA, 25 bp, Homo sapien
ctcgtggactttactgagggttttg

SEQ ID NO: 3877073 - DNA, 25 bp, Homo sapien
cagctccagagatcgcacacgggaa

SEQ ID NO: 3877074 - DNA, 25 bp, Homo sapien
ccagctccagagatcgcacacggga

SEQ ID NO: 3877075 - DNA, 25 bp, Homo sapien
ctccagagatcgcacacgggaaagg

SEQ ID NO: 3877076 - DNA, 25 bp, Homo sapien
agctccagagatcgcacacgggaaa

SEQ ID NO: 3877077 - DNA, 25 bp, Homo sapien
ccacttaggattctgggtctcatag

SEQ ID NO: 3877078 - DNA, 25 bp, Homo sapien
gcccacttaggattctgggtctcat

SEQ ID NO: 3877079 - DNA, 25 bp, Homo sapien
ttaggattctgggtctcatagtcca

SEQ ID NO: 3877080 - DNA, 25 bp, Homo sapien
ggattctgggtctcatagtccacac

SEQ ID NO: 3877081 - DNA, 25 bp, Homo sapien
cccacgcatgttttggatcgactgc

SEQ ID NO: 3877082 - DNA, 25 bp, Homo sapien
tcccacgcatgttttggatcgactg

SEQ ID NO: 3877083 - DNA, 25 bp, Homo sapien
ttcccacgcatgttttggatcgact

SEQ ID NO: 3877084 - DNA, 25 bp, Homo sapien
gttcccacgcatgttttggatcgac

SEQ ID NO: 3877085 - DNA, 25 bp, Homo sapien
ctggtcagctgggacttgcttttac

SEQ ID NO: 3877086 - DNA, 25 bp, Homo sapien
tcagctgggacttgcttttactgct

SEQ ID NO: 3877087 - DNA, 25 bp, Homo sapien
gggacttgcttttactgctctcgca

SEQ ID NO: 3877088 - DNA, 25 bp, Homo sapien
ttttactgctctcgcatgactgcag

SEQ ID NO: 3877089 - DNA, 25 bp, Homo sapien
cctaagcttgaataataggtgagca

SEQ ID NO: 3877090 - DNA, 25 bp, Homo sapien
atgtggctagggatggccactttcc

SEQ ID NO: 3877091 - DNA, 25 bp, Homo sapien
tcttcatataatcacctaagcttga

SEQ ID NO: 3877092 - DNA, 25 bp, Homo sapien
gatgtggctagggatggccactttc

SEQ ID NO: 3877093 - DNA, 25 bp, Homo sapien
cttcgctttaagagcatgccctgtt

SEQ ID NO: 3877094 - DNA, 25 bp, Homo sapien
ttcgctttaagagcatgccctgttt

SEQ ID NO: 3877095 - DNA, 25 bp, Homo sapien
tcgctttaagagcatgccctgttta

SEQ ID NO: 3877096 - DNA, 25 bp, Homo sapien
tgttcttcgtaatgtgcacggtgga

SEQ ID NO: 3877097 - DNA, 25 bp, Homo sapien
tccatttctgttcttcgtaatgtgc

SEQ ID NO: 3877098 - DNA, 25 bp, Homo sapien
tcttcgtaatgtgcacggtggaaac

SEQ ID NO: 3877099 - DNA, 25 bp, Homo sapien
tttctgttcttcgtaatgtgcacgg

SEQ ID NO: 3877100 - DNA, 25 bp, Homo sapien
tgttcatcaggtatgctcaaagatc

SEQ ID NO: 3877101 - DNA, 25 bp, Homo sapien
caggtatgctcaaagatctatctgc

SEQ ID NO: 3877102 - DNA, 25 bp, Homo sapien
tgtaactgttcatcaggtatgctca

SEQ ID NO: 3877103 - DNA, 25 bp, Homo sapien
cgcaaatgagtgtaactgttcatca

SEQ ID NO: 3877104 - DNA, 25 bp, Homo sapien
ctttgtgtgatatgatgaggtatct

SEQ ID NO: 3877105 - DNA, 25 bp, Homo sapien
tgtgtgatatgatgaggtatctcca

SEQ ID NO: 3877106 - DNA, 25 bp, Homo sapien
atatgatgaggtatctccaaggtca

SEQ ID NO: 3877107 - DNA, 25 bp, Homo sapien
tatgatgaggtatctccaaggtcac

SEQ ID NO: 3877108 - DNA, 25 bp, Homo sapien
aaaaaattcataacaatagatgtta

SEQ ID NO: 3877109 - DNA, 25 bp, Homo sapien
taagtgatctcagcgagtgccacct

SEQ ID NO: 3877110 - DNA, 25 bp, Homo sapien
tcttgaagccaatttgccctattaa

SEQ ID NO: 3877111 - DNA, 25 bp, Homo sapien
tctcagtgcctacagatagagggaa

SEQ ID NO: 3877112 - DNA, 25 bp, Homo sapien
gacaacagtgcactactgattcatg

SEQ ID NO: 3877113 - DNA, 25 bp, Homo sapien
tattgttgactgaaacgctcagtag

SEQ ID NO: 3877114 - DNA, 25 bp, Homo sapien
tcgaacacgagctgtattgttgact

SEQ ID NO: 3877115 - DNA, 25 bp, Homo sapien
attgtcattgtaagataatgctggc

SEQ ID NO: 3877116 - DNA, 25 bp, Homo sapien
tcatcaaggaatattgtcgaacacg

SEQ ID NO: 3877117 - DNA, 25 bp, Homo sapien
tttgtacagttgcttcttcttattt

SEQ ID NO: 3877118 - DNA, 25 bp, Homo sapien
atggtttgtacagttgcttcttctt

SEQ ID NO: 3877119 - DNA, 25 bp, Homo sapien
ggtttgtacagttgcttcttcttat

SEQ ID NO: 3877120 - DNA, 25 bp, Homo sapien
cagttgcttcttcttatttctacaa

SEQ ID NO: 3877121 - DNA, 25 bp, Homo sapien
ggcagtggattccttatgaatggct

SEQ ID NO: 3877122 - DNA, 25 bp, Homo sapien
ttaatgttggagatagggcctagtg

SEQ ID NO: 3877123 - DNA, 25 bp, Homo sapien
gagttcctctggaatattgtgcttg

SEQ ID NO: 3877124 - DNA, 25 bp, Homo sapien
ggattggcagaagggttaaactcca

SEQ ID NO: 3877125 - DNA, 25 bp, Homo sapien
tggaatattgtgcttgcctctggat

SEQ ID NO: 3877126 - DNA, 25 bp, Homo sapien
tgcttgcctctggattggcagaagg

SEQ ID NO: 3877127 - DNA, 25 bp, Homo sapien
cttgcctctggattggcagaaaggc

SEQ ID NO: 3877128 - DNA, 25 bp, Homo sapien
ctggattggcagaaaggctaaactc

SEQ ID NO: 3877129 - DNA, 25 bp, Homo sapien
ttggcagaaaggctaaactccaaag

SEQ ID NO: 3877130 - DNA, 25 bp, Homo sapien
tgcttgcctctggattggcagaaag

SEQ ID NO: 3877131 - DNA, 25 bp, Homo sapien
tggactcggtgaggaaagactaagg

SEQ ID NO: 3877132 - DNA, 25 bp, Homo sapien
agctcaaagtgggggatgccgtaaa

SEQ ID NO: 3877133 - DNA, 25 bp, Homo sapien
ggaaagctggctacaagcagaaagg

SEQ ID NO: 3877134 - DNA, 25 bp, Homo sapien
agcccccgggaaagctggctacaag

SEQ ID NO: 3877135 - DNA, 25 bp, Homo sapien
catgtggaggtcctcaccaacttca

SEQ ID NO: 3877136 - DNA, 25 bp, Homo sapien
atgtggaggtcctcaccaacttcaa

SEQ ID NO: 3877137 - DNA, 25 bp, Homo sapien
tgtggaggtcctcaccaacttcaac

SEQ ID NO: 3877138 - DNA, 25 bp, Homo sapien
gcatgtggaggtcctcaccaacttc

SEQ ID NO: 3877139 - DNA, 25 bp, Homo sapien
tctcagattcagagggacacaccga

SEQ ID NO: 3877140 - DNA, 25 bp, Homo sapien
ctcagattcagagggacacaccgac

SEQ ID NO: 3877141 - DNA, 25 bp, Homo sapien
ggtgcacacaacaggtcagtatgtt

SEQ ID NO: 3877142 - DNA, 25 bp, Homo sapien
tagggtgcacacaacaggtcagtat

SEQ ID NO: 3877143 - DNA, 25 bp, Homo sapien
ctagggtgcacacaacaggtcagta

SEQ ID NO: 3877144 - DNA, 25 bp, Homo sapien
gcacacaacaggtcagtatgttccc

SEQ ID NO: 3877145 - DNA, 25 bp, Homo sapien
gcctagctaatgtagtgaaatcctg

SEQ ID NO: 3877146 - DNA, 25 bp, Homo sapien
agcctagctaatgtagtgaaatcct

SEQ ID NO: 3877147 - DNA, 25 bp, Homo sapien
cctagctaatgtagtgaaatcctgt

SEQ ID NO: 3877148 - DNA, 25 bp, Homo sapien
ctagctaatgtagtgaaatcctgtc

SEQ ID NO: 3877149 - DNA, 25 bp, Homo sapien
gtgattctcattcaagtgcctaagc

SEQ ID NO: 3877150 - DNA, 25 bp, Homo sapien
caacattgattaagtcccttctaca

SEQ ID NO: 3877151 - DNA, 25 bp, Homo sapien
ttctcattcaagtgcctaagcctcc

SEQ ID NO: 3877152 - DNA, 25 bp, Homo sapien
cactcccgaacagaacaacattttt

SEQ ID NO: 3877153 - DNA, 25 bp, Homo sapien
aagtctacacttcttgatacaacta

SEQ ID NO: 3877154 - DNA, 25 bp, Homo sapien
cacttcttgatacaactaactaaaa

SEQ ID NO: 3877155 - DNA, 25 bp, Homo sapien
tactgtgggaaaaaggatattatgt

SEQ ID NO: 3877156 - DNA, 25 bp, Homo sapien
tattatgtatagaaaagtctacact

SEQ ID NO: 3877157 - DNA, 25 bp, Homo sapien
tggagagacactcattagtgactgt

SEQ ID NO: 3877158 - DNA, 25 bp, Homo sapien
gagagacactcattagtgactgtta

SEQ ID NO: 3877159 - DNA, 25 bp, Homo sapien
cttggagagacactcattagtgact

SEQ ID NO: 3877160 - DNA, 25 bp, Homo sapien
ccttggagagacactcattagtgac

SEQ ID NO: 3877161 - DNA, 25 bp, Homo sapien
tcaggtctctcatgatcccaggcag

SEQ ID NO: 3877162 - DNA, 25 bp, Homo sapien
gttcaggtctctcatgatcccaggc

SEQ ID NO: 3877163 - DNA, 25 bp, Homo sapien
agttcaggtctctcatgatcccagg

SEQ ID NO: 3877164 - DNA, 25 bp, Homo sapien
ttcaggtctctcatgatcccaggca

SEQ ID NO: 3877165 - DNA, 25 bp, Homo sapien
agctttgcctacatagtgaaacctc

SEQ ID NO: 3877166 - DNA, 25 bp, Homo sapien
agttcgagaccagctttgcctacat

SEQ ID NO: 3877167 - DNA, 25 bp, Homo sapien
tcgagaccagctttgcctacatagt

SEQ ID NO: 3877168 - DNA, 25 bp, Homo sapien
cagctttgcctacatagtgaaacct

SEQ ID NO: 3877169 - DNA, 25 bp, Homo sapien
aaatccaatctgtctccttctacct

SEQ ID NO: 3877170 - DNA, 25 bp, Homo sapien
atctcatccttggatgagcccgact

SEQ ID NO: 3877171 - DNA, 25 bp, Homo sapien
tctcatccttggatgagcccgactt

SEQ ID NO: 3877172 - DNA, 25 bp, Homo sapien
aatctcatccttggatgagcccgac

SEQ ID NO: 3877173 - DNA, 25 bp, Homo sapien
aaatctcatccttggatgagcccga

SEQ ID NO: 3877174 - DNA, 25 bp, Homo sapien
ggagaaatctgagagccatgtgttc

SEQ ID NO: 3877175 - DNA, 25 bp, Homo sapien
tgggagaaatctgagagccatgtgt

SEQ ID NO: 3877176 - DNA, 25 bp, Homo sapien
aaatctgagagccatgtgttccaca

SEQ ID NO: 3877177 - DNA, 25 bp, Homo sapien
agaaatctgagagccatgtgttcca

SEQ ID NO: 3877178 - DNA, 25 bp, Homo sapien
actgaagcccaagaatggggtcttg

SEQ ID NO: 3877179 - DNA, 25 bp, Homo sapien
ggggtcttgctcaccataggatgat

SEQ ID NO: 3877180 - DNA, 25 bp, Homo sapien
ctgcaaggaaagagactgaagccca

SEQ ID NO: 3877181 - DNA, 25 bp, Homo sapien
ccataggatgatggctcagtgtgca

SEQ ID NO: 3877182 - DNA, 25 bp, Homo sapien
tatggattacgacagtgggctatgt

SEQ ID NO: 3877183 - DNA, 25 bp, Homo sapien
gtatggattacgacagtgggctatg

SEQ ID NO: 3877184 - DNA, 25 bp, Homo sapien
tgtatggattacgacagtgggctat

SEQ ID NO: 3877185 - DNA, 25 bp, Homo sapien
gctgtaagactcggaaaaacacgga

SEQ ID NO: 3877186 - DNA, 25 bp, Homo sapien
tgctgtaagactcggaaaaacacgg

SEQ ID NO: 3877187 - DNA, 25 bp, Homo sapien
ctgctgtaagactcggaaaaacacg

SEQ ID NO: 3877188 - DNA, 25 bp, Homo sapien
tctgctgtaagactcggaaaaacac

SEQ ID NO: 3877189 - DNA, 25 bp, Homo sapien
tcctctcagtacttcaccagttggg

SEQ ID NO: 3877190 - DNA, 25 bp, Homo sapien
cttttgtgtagcttcctctcagtac

SEQ ID NO: 3877191 - DNA, 25 bp, Homo sapien
tcagtacttcaccagttgggattga

SEQ ID NO: 3877192 - DNA, 25 bp, Homo sapien
ttgctgccttttgtgtagcttcctc

SEQ ID NO: 3877193 - DNA, 25 bp, Homo sapien
aggagccagacagcagcacacagaa

SEQ ID NO: 3877194 - DNA, 25 bp, Homo sapien
cacagaacggggaatccaaagccat

SEQ ID NO: 3877195 - DNA, 25 bp, Homo sapien
cacacagaacggggaatccaaagcc

SEQ ID NO: 3877196 - DNA, 25 bp, Homo sapien
cagaacggggaatccaaagccatct

SEQ ID NO: 3877197 - DNA, 25 bp, Homo sapien
gattgatatcaagtaaagcaagaag

SEQ ID NO: 3877198 - DNA, 25 bp, Homo sapien
aacactttcatgcactgattctatg

SEQ ID NO: 3877199 - DNA, 25 bp, Homo sapien
caaatacccagttgaattgcaagat

SEQ ID NO: 3877200 - DNA, 25 bp, Homo sapien
cagggtacaatctaatctgggctac

SEQ ID NO: 3877201 - DNA, 25 bp, Homo sapien
ggactgccagtcactattatttagt

SEQ ID NO: 3877202 - DNA, 25 bp, Homo sapien
aaataatacttcttcggccaatgga

SEQ ID NO: 3877203 - DNA, 25 bp, Homo sapien
ggcaacttagaaatactgatcccag

SEQ ID NO: 3877204 - DNA, 25 bp, Homo sapien
aattgcagtgtttcacatcgaagca

SEQ ID NO: 3877205 - DNA, 25 bp, Homo sapien
tcccggacggggcattatactgctt

SEQ ID NO: 3877206 - DNA, 25 bp, Homo sapien
gaaatctgaaagacaacatctattt

SEQ ID NO: 3877207 - DNA, 25 bp, Homo sapien
gcttacattcttatgtgggaaaata

SEQ ID NO: 3877208 - DNA, 25 bp, Homo sapien
atggctggtaattcaaccagaaatc

SEQ ID NO: 3877209 - DNA, 25 bp, Homo sapien
agtgtagtcctctggaacaaatgac

SEQ ID NO: 3877210 - DNA, 25 bp, Homo sapien
ccactgctgaactgccatggcctga

SEQ ID NO: 3877211 - DNA, 25 bp, Homo sapien
acaaatgacttggttcacaggcagc

SEQ ID NO: 3877212 - DNA, 25 bp, Homo sapien
cctttagcatatggtgcccctgcat

SEQ ID NO: 3877213 - DNA, 25 bp, Homo sapien
aatacaagacagagaatacgcaaag

SEQ ID NO: 3877214 - DNA, 25 bp, Homo sapien
gcaaagtaagtcctgcattgtaaat

SEQ ID NO: 3877215 - DNA, 25 bp, Homo sapien
agtgggctgaccaatcatttaatta

SEQ ID NO: 3877216 - DNA, 25 bp, Homo sapien
tattaagtgggctgaccaatcattt

SEQ ID NO: 3877217 - DNA, 25 bp, Homo sapien
ggatgttagcatagaatcatctcca

SEQ ID NO: 3877218 - DNA, 25 bp, Homo sapien
atgttagcatagaatcatctccaaa

SEQ ID NO: 3877219 - DNA, 25 bp, Homo sapien
aggatgttagcatagaatcatctcc

SEQ ID NO: 3877220 - DNA, 25 bp, Homo sapien
agaggatgttagcatagaatcatct

SEQ ID NO: 3877221 - DNA, 25 bp, Homo sapien
agcaataataggccagccgtagtgg

SEQ ID NO: 3877222 - DNA, 25 bp, Homo sapien
gcaataataggccagccgtagtggc

SEQ ID NO: 3877223 - DNA, 25 bp, Homo sapien
ataacaacaaaaaaatattagatgg

SEQ ID NO: 3877224 - DNA, 25 bp, Homo sapien
ctacttgcggggctgaagagggagg

SEQ ID NO: 3877225 - DNA, 25 bp, Homo sapien
gaagagggaggatccacttgagcct

SEQ ID NO: 3877226 - DNA, 25 bp, Homo sapien
tattagatgggggtggtggtgcact

SEQ ID NO: 3877227 - DNA, 25 bp, Homo sapien
tgacccaagtggcttggaatcagaa

SEQ ID NO: 3877228 - DNA, 25 bp, Homo sapien
tctgacccaagtggcttggaatcag

SEQ ID NO: 3877229 - DNA, 25 bp, Homo sapien
ctctgacccaagtggcttggaatca

SEQ ID NO: 3877230 - DNA, 25 bp, Homo sapien
gacccaagtggcttggaatcagaaa

SEQ ID NO: 3877231 - DNA, 25 bp, Homo sapien
cagcgtctttgtcatacagcacacc

SEQ ID NO: 3877232 - DNA, 25 bp, Homo sapien
agcgtctttgtcatacagcacaccc

SEQ ID NO: 3877233 - DNA, 25 bp, Homo sapien
accgtaaagtaacatctgctggtca

SEQ ID NO: 3877234 - DNA, 25 bp, Homo sapien
taaataaccgtaaagtaacatctgc

SEQ ID NO: 3877235 - DNA, 25 bp, Homo sapien
atctgctggtcacatctgatgtttg

SEQ ID NO: 3877236 - DNA, 25 bp, Homo sapien
aaagtaacatctgctggtcacatct

SEQ ID NO: 3877237 - DNA, 25 bp, Homo sapien
tccactaagcacattgtttagaaaa

SEQ ID NO: 3877238 - DNA, 25 bp, Homo sapien
actcttgtccactaagcacattgtt

SEQ ID NO: 3877239 - DNA, 25 bp, Homo sapien
cttgtccactaagcacattgtttag

SEQ ID NO: 3877240 - DNA, 25 bp, Homo sapien
cacactcttgtccactaagcacatt

SEQ ID NO: 3877241 - DNA, 25 bp, Homo sapien
gagaggcctaaacttcataactgta

SEQ ID NO: 3877242 - DNA, 25 bp, Homo sapien
gaggcctaaacttcataactgtaat

SEQ ID NO: 3877243 - DNA, 25 bp, Homo sapien
tgagaggcctaaacttcataactgt

SEQ ID NO: 3877244 - DNA, 25 bp, Homo sapien
agaggcctaaacttcataactgtaa

SEQ ID NO: 3877245 - DNA, 25 bp, Homo sapien
tcagttgcttattgtgtttgaagaa

SEQ ID NO: 3877246 - DNA, 25 bp, Homo sapien
ttcagttgcttattgtgtttgaaga

SEQ ID NO: 3877247 - DNA, 25 bp, Homo sapien
agccacctcacccagctaattttgc

SEQ ID NO: 3877248 - DNA, 25 bp, Homo sapien
tcctaagtagctgaggttataggca

SEQ ID NO: 3877249 - DNA, 25 bp, Homo sapien
ctaagtagctgaggttataggcatg

SEQ ID NO: 3877250 - DNA, 25 bp, Homo sapien
cctaagtagctgaggttataggcat

SEQ ID NO: 3877251 - DNA, 25 bp, Homo sapien
aagagcgtgtacatttttccacaca

SEQ ID NO: 3877252 - DNA, 25 bp, Homo sapien
tattatcactaaggataaaggttct

SEQ ID NO: 3877253 - DNA, 25 bp, Homo sapien
aatgcaagagcgtgtacatttttcc

SEQ ID NO: 3877254 - DNA, 25 bp, Homo sapien
tacttattatcactaaggataaagg

SEQ ID NO: 3877255 - DNA, 25 bp, Homo sapien
tcatcatgttaatgtcacacccaca

SEQ ID NO: 3877256 - DNA, 25 bp, Homo sapien
gccagatcaatcatcatgttaatgt

SEQ ID NO: 3877257 - DNA, 25 bp, Homo sapien
gatcaatcatcatgttaatgtcaca

SEQ ID NO: 3877258 - DNA, 25 bp, Homo sapien
catgttaatgtcacacccacattca

SEQ ID NO: 3877259 - DNA, 25 bp, Homo sapien
tacgagaagttcacatttaccggta

SEQ ID NO: 3877260 - DNA, 25 bp, Homo sapien
tgtatccagtaaaacaccatatacg

SEQ ID NO: 3877261 - DNA, 25 bp, Homo sapien
caggagtgtacgagaagttcacatt

SEQ ID NO: 3877262 - DNA, 25 bp, Homo sapien
aaaacaccatatacgtttacaggag

SEQ ID NO: 3877263 - DNA, 25 bp, Homo sapien
cagggcctctgatctcggtcaactt

SEQ ID NO: 3877264 - DNA, 25 bp, Homo sapien
tgacacgatcatcacagggcctctg

SEQ ID NO: 3877265 - DNA, 25 bp, Homo sapien
catcacagggcctctgatctcggtc

SEQ ID NO: 3877266 - DNA, 25 bp, Homo sapien
tcacagggcctctgatctcggtcaa

SEQ ID NO: 3877267 - DNA, 25 bp, Homo sapien
gaatgaggcattgtatcaaagtgct

SEQ ID NO: 3877268 - DNA, 25 bp, Homo sapien
ctgccgggtgaagttccgaatgagg

SEQ ID NO: 3877269 - DNA, 25 bp, Homo sapien
ccgggtgaagttccgaatgaggcat

SEQ ID NO: 3877270 - DNA, 25 bp, Homo sapien
cgaatgaggcattgtatcaaagtgc

SEQ ID NO: 3877271 - DNA, 25 bp, Homo sapien
ctttccaactttggaggccccatca

SEQ ID NO: 3877272 - DNA, 25 bp, Homo sapien
tttccaactttggaggccccatcac

SEQ ID NO: 3877273 - DNA, 25 bp, Homo sapien
ctagtggagttcgatcaaccactgg

SEQ ID NO: 3877274 - DNA, 25 bp, Homo sapien
cactggaatatgatgcttttttgtc

SEQ ID NO: 3877275 - DNA, 25 bp, Homo sapien
tggagttcgatcaaccactggaata

SEQ ID NO: 3877276 - DNA, 25 bp, Homo sapien
gagttcgatcaaccactggaatatg

SEQ ID NO: 3877277 - DNA, 25 bp, Homo sapien
aaatgcaaaagctttgggatttctc

SEQ ID NO: 3877278 - DNA, 25 bp, Homo sapien
tccaggcatcttcttcgtctcctag

SEQ ID NO: 3877279 - DNA, 25 bp, Homo sapien
tctcttccaggcatcttcttcgtct

SEQ ID NO: 3877280 - DNA, 25 bp, Homo sapien
tttctttgcagctttgggtccacta

SEQ ID NO: 3877281 - DNA, 25 bp, Homo sapien
tggctatttaccaataacaagtaat

SEQ ID NO: 3877282 - DNA, 25 bp, Homo sapien
tatttaccaataacaagtaattcta

SEQ ID NO: 3877283 - DNA, 25 bp, Homo sapien
agtggctatttaccaataacaagta

SEQ ID NO: 3877284 - DNA, 25 bp, Homo sapien
gctatttaccaataacaagtaattc

SEQ ID NO: 3877285 - DNA, 25 bp, Homo sapien
tgctcctcaggaggaaagatgaccc

SEQ ID NO: 3877286 - DNA, 25 bp, Homo sapien
tccggcagatgcgaaatatgctgct

SEQ ID NO: 3877287 - DNA, 25 bp, Homo sapien
ggaggaccttcccactcgcgatctt

SEQ ID NO: 3877288 - DNA, 25 bp, Homo sapien
ggaccttcccactcgcgatcttccc

SEQ ID NO: 3877289 - DNA, 25 bp, Homo sapien
tgctcacaactgtgactcctcaggt

SEQ ID NO: 3877290 - DNA, 25 bp, Homo sapien
gctcacaactgtgactcctcaggtc

SEQ ID NO: 3877291 - DNA, 25 bp, Homo sapien
gccggagaccggctcccgaggaaga

SEQ ID NO: 3877292 - DNA, 25 bp, Homo sapien
agaccggctcccgaggaagatgatg

SEQ ID NO: 3877293 - DNA, 25 bp, Homo sapien
gagaccggctcccgaggaagatgat

SEQ ID NO: 3877294 - DNA, 25 bp, Homo sapien
cggagaccggctcccgaggaagatg

SEQ ID NO: 3877295 - DNA, 25 bp, Homo sapien
actatgcccggcctcctactatttg

SEQ ID NO: 3877296 - DNA, 25 bp, Homo sapien
gcccggcctcctactatttgtaata

SEQ ID NO: 3877297 - DNA, 25 bp, Homo sapien
ctatgcccggcctcctactatttgt

SEQ ID NO: 3877298 - DNA, 25 bp, Homo sapien
tgcccggcctcctactatttgtaat

SEQ ID NO: 3877299 - DNA, 25 bp, Homo sapien
tcgtttctttggtggaaggcattcc

SEQ ID NO: 3877300 - DNA, 25 bp, Homo sapien
ggtctcgtttctttggtggaaggca

SEQ ID NO: 3877301 - DNA, 25 bp, Homo sapien
gtttctttggtggaaggcattcctg

SEQ ID NO: 3877302 - DNA, 25 bp, Homo sapien
tctcgtttctttggtggaaggcatt

SEQ ID NO: 3877303 - DNA, 25 bp, Homo sapien
gatccacttgctcgtcctggagctg

SEQ ID NO: 3877304 - DNA, 25 bp, Homo sapien
ggatccacttgctcgtcctggagct

SEQ ID NO: 3877305 - DNA, 25 bp, Homo sapien
cgggatccacttgctcgtcctggag

SEQ ID NO: 3877306 - DNA, 25 bp, Homo sapien
ccgggatccacttgctcgtcctgga

SEQ ID NO: 3877307 - DNA, 25 bp, Homo sapien
caggttgaagacggaatcacaggga

SEQ ID NO: 3877308 - DNA, 25 bp, Homo sapien
ctgattgagccaggttactggtcta

SEQ ID NO: 3877309 - DNA, 25 bp, Homo sapien
aggtagtcagctgatccaatgagtg

SEQ ID NO: 3877310 - DNA, 25 bp, Homo sapien
ttgaagacggaatcacagggagtca

SEQ ID NO: 3877311 - DNA, 25 bp, Homo sapien
gctctgcacctaaacaaaggcgctg

SEQ ID NO: 3877312 - DNA, 25 bp, Homo sapien
gaactatcttttccaacagagcgca

SEQ ID NO: 3877313 - DNA, 25 bp, Homo sapien
tgcttactatgatgccaagcggcct

SEQ ID NO: 3877314 - DNA, 25 bp, Homo sapien
acagcagtgctcgaaaaattatgaa

SEQ ID NO: 3877315 - DNA, 25 bp, Homo sapien
caggttgacaacagttggtgccctt

SEQ ID NO: 3877316 - DNA, 25 bp, Homo sapien
gttgacaacagttggtgccctttac

SEQ ID NO: 3877317 - DNA, 25 bp, Homo sapien
cacatgcaggttgacaacagttggt

SEQ ID NO: 3877318 - DNA, 25 bp, Homo sapien
tgcaggttgacaacagttggtgccc

SEQ ID NO: 3877319 - DNA, 25 bp, Homo sapien
cacgttccgcaaatctcataaccag

SEQ ID NO: 3877320 - DNA, 25 bp, Homo sapien
agcaaacgccatgggtgagagcaac

SEQ ID NO: 3877321 - DNA, 25 bp, Homo sapien
cataaccagcaaacgccatgggtga

SEQ ID NO: 3877322 - DNA, 25 bp, Homo sapien
gcaaatctcataaccagcaaacgcc

SEQ ID NO: 3877323 - DNA, 25 bp, Homo sapien
tacaagactctagctcagaggtcac

SEQ ID NO: 3877324 - DNA, 25 bp, Homo sapien
taatacgtcacaggcagagtgaagg

SEQ ID NO: 3877325 - DNA, 25 bp, Homo sapien
gccataaagtgactggaacatctga

SEQ ID NO: 3877326 - DNA, 25 bp, Homo sapien
tcaccaggaagtgactacaagactc

SEQ ID NO: 3877327 - DNA, 25 bp, Homo sapien
tggcccggccctaaagcgtggagga

SEQ ID NO: 3877328 - DNA, 25 bp, Homo sapien
cagacgtggcagaagaagtggcccg

SEQ ID NO: 3877329 - DNA, 25 bp, Homo sapien
tgaaagaggcgcatgcgcggcatcc

SEQ ID NO: 3877330 - DNA, 25 bp, Homo sapien
ccgggtccccgaaatgcagacgtgg

SEQ ID NO: 3877331 - DNA, 25 bp, Homo sapien
ggcttctcggttttgatcctcggct

SEQ ID NO: 3877332 - DNA, 25 bp, Homo sapien
ccatccaggagcaggtcctagacca

SEQ ID NO: 3877333 - DNA, 25 bp, Homo sapien
caagacgtttggtctctgtgcttaa

SEQ ID NO: 3877334 - DNA, 25 bp, Homo sapien
ctgccccgagcctgttaaaaggtgc

SEQ ID NO: 3877335 - DNA, 25 bp, Homo sapien
cttaggctagccgatgatttagggt

SEQ ID NO: 3877336 - DNA, 25 bp, Homo sapien
tagtactctaccgattctccagagg

SEQ ID NO: 3877337 - DNA, 25 bp, Homo sapien
ttctcaagaagagcagctagtactc

SEQ ID NO: 3877338 - DNA, 25 bp, Homo sapien
gggtatgccaaactctatgctttca

SEQ ID NO: 3877339 - DNA, 25 bp, Homo sapien
gaattctggccgtagcttaccgtgg

SEQ ID NO: 3877340 - DNA, 25 bp, Homo sapien
cactccgtggatagagaggcacact

SEQ ID NO: 3877341 - DNA, 25 bp, Homo sapien
tgtcaagtcctcacctagaagtggg

SEQ ID NO: 3877342 - DNA, 25 bp, Homo sapien
tcttgcacggagcaaagggcctctt

SEQ ID NO: 3877343 - DNA, 25 bp, Homo sapien
ggattacccgctgtcgctgcagtgg

SEQ ID NO: 3877344 - DNA, 25 bp, Homo sapien
ggagtcgcccctcaacaacttcttg

SEQ ID NO: 3877345 - DNA, 25 bp, Homo sapien
ttctacggcacagacttccgcgcgt

SEQ ID NO: 3877346 - DNA, 25 bp, Homo sapien
gcttttagtcctggccgtcggctga

SEQ ID NO: 3877347 - DNA, 25 bp, Homo sapien
caactcctggatcaagcaatccatc

SEQ ID NO: 3877348 - DNA, 25 bp, Homo sapien
aactcctggatcaagcaatccatcc

SEQ ID NO: 3877349 - DNA, 25 bp, Homo sapien
cctggatcaagcaatccatccgcct

SEQ ID NO: 3877350 - DNA, 25 bp, Homo sapien
ctcctggatcaagcaatccatccgc

SEQ ID NO: 3877351 - DNA, 25 bp, Homo sapien
tgagaccatcctagcaagaccttgt

SEQ ID NO: 3877352 - DNA, 25 bp, Homo sapien
gagaccatcctagcaagaccttgtc

SEQ ID NO: 3877353 - DNA, 25 bp, Homo sapien
gaggagaggcgactgcttgaagcca

SEQ ID NO: 3877354 - DNA, 25 bp, Homo sapien
aggccgaggagaggcgactgcttga

SEQ ID NO: 3877355 - DNA, 25 bp, Homo sapien
caaggatagtctcgatttcttgact

SEQ ID NO: 3877356 - DNA, 25 bp, Homo sapien
gccatgttggcaaggatagtctcga

SEQ ID NO: 3877357 - DNA, 25 bp, Homo sapien
gttggcaaggatagtctcgatttct

SEQ ID NO: 3877358 - DNA, 25 bp, Homo sapien
catgttggcaaggatagtctcgatt

SEQ ID NO: 3877359 - DNA, 25 bp, Homo sapien
ctgatggaaatacagaaaccttgcc

SEQ ID NO: 3877360 - DNA, 25 bp, Homo sapien
taggccaatatgagtcaaagtgcaa

SEQ ID NO: 3877361 - DNA, 25 bp, Homo sapien
gccttgtcaatttaatgtattgccc

SEQ ID NO: 3877362 - DNA, 25 bp, Homo sapien
cattcttactgctggtttgcatctc

SEQ ID NO: 3877363 - DNA, 25 bp, Homo sapien
ctccatcaccaaggctagagtgcag

SEQ ID NO: 3877364 - DNA, 25 bp, Homo sapien
cgtgtctcagcctccagagtggtgg

SEQ ID NO: 3877365 - DNA, 25 bp, Homo sapien
tggcgtgattttggctcactgcagc

SEQ ID NO: 3877366 - DNA, 25 bp, Homo sapien
ctctgcctcccaggttcaagcaatt

SEQ ID NO: 3877367 - DNA, 25 bp, Homo sapien
gaccttagggctactctagttgtaa

SEQ ID NO: 3877368 - DNA, 25 bp, Homo sapien
tatactgacatctaaggatgcggcc

SEQ ID NO: 3877369 - DNA, 25 bp, Homo sapien
tgcggccaagaaaagctgtaattag

SEQ ID NO: 3877370 - DNA, 25 bp, Homo sapien
gaacatacagtctaatgagcaggga

SEQ ID NO: 3877371 - DNA, 25 bp, Homo sapien
tgagtgcgcctatgagtgccaactg

SEQ ID NO: 3877372 - DNA, 25 bp, Homo sapien
gtgatggcatgggtctgcagtccca

SEQ ID NO: 3877373 - DNA, 25 bp, Homo sapien
ctgtgagtgcgcctatgagtgccaa

SEQ ID NO: 3877374 - DNA, 25 bp, Homo sapien
agtgcgcctatgagtgccaactggg

SEQ ID NO: 3877375 - DNA, 25 bp, Homo sapien
caaatgcaggactgatttctaagct

SEQ ID NO: 3877376 - DNA, 25 bp, Homo sapien
caagtacagacctaggttagggctt

SEQ ID NO: 3877377 - DNA, 25 bp, Homo sapien
aaatgcagatgctaatttagagtgc

SEQ ID NO: 3877378 - DNA, 25 bp, Homo sapien
taggcactgacaaaagaggtcaaat

SEQ ID NO: 3877379 - DNA, 25 bp, Homo sapien
ggccataataagacaattcagactg

SEQ ID NO: 3877380 - DNA, 25 bp, Homo sapien
gataggtgctatggagaaaacaggt

SEQ ID NO: 3877381 - DNA, 25 bp, Homo sapien
ccctctgtgacatgaactgagactt

SEQ ID NO: 3877382 - DNA, 25 bp, Homo sapien
tccaaagtagtcatgagctacaggc

SEQ ID NO: 3877383 - DNA, 25 bp, Homo sapien
tgtaagactggcgagaggactgaaa

SEQ ID NO: 3877384 - DNA, 25 bp, Homo sapien
gagcaaacggtatctaactagtagc

SEQ ID NO: 3877385 - DNA, 25 bp, Homo sapien
taggcagtgaaaaacgacagttctt

SEQ ID NO: 3877386 - DNA, 25 bp, Homo sapien
gactgaaaaagacgatgaatgccaa

SEQ ID NO: 3877387 - DNA, 25 bp, Homo sapien
gcggaagtggtggtggcccgcgcgg

SEQ ID NO: 3877388 - DNA, 25 bp, Homo sapien
gtacccgatccggatcccgagcgcg

SEQ ID NO: 3877389 - DNA, 25 bp, Homo sapien
cgcgcgagggcggaagtggtggtgg

SEQ ID NO: 3877390 - DNA, 25 bp, Homo sapien
cgcgcggccggaagtccagatcagc

SEQ ID NO: 3877391 - DNA, 25 bp, Homo sapien
gtccaagtgagatgagtaccatgcg

SEQ ID NO: 3877392 - DNA, 25 bp, Homo sapien
gggacactctgtgactatcggcctg

SEQ ID NO: 3877393 - DNA, 25 bp, Homo sapien
catctttgacgttctctgtgctcca

SEQ ID NO: 3877394 - DNA, 25 bp, Homo sapien
tgtgttgcctctcatgctggccagt

SEQ ID NO: 3877395 - DNA, 25 bp, Homo sapien
gacatgtaaaccaggaggtcatcct

SEQ ID NO: 3877396 - DNA, 25 bp, Homo sapien
ctccctgaggatgtagcaattggct

SEQ ID NO: 3877397 - DNA, 25 bp, Homo sapien
ccctgtggtgttaatggaggatacc

SEQ ID NO: 3877398 - DNA, 25 bp, Homo sapien
tagaagtcaggagctaaagggcatc

SEQ ID NO: 3877399 - DNA, 25 bp, Homo sapien
gtgcccctgaaacaacatcggatag

SEQ ID NO: 3877400 - DNA, 25 bp, Homo sapien
tcatcctccagtggaagtcgccggg

SEQ ID NO: 3877401 - DNA, 25 bp, Homo sapien
cttaagccggagaccacttcgaggg

SEQ ID NO: 3877402 - DNA, 25 bp, Homo sapien
taggcatggccagcattgacagcag

SEQ ID NO: 3877403 - DNA, 25 bp, Homo sapien
gcacacttctacttcgagctggcga

SEQ ID NO: 3877404 - DNA, 25 bp, Homo sapien
aacctgcacctttgcgccttcgaga

SEQ ID NO: 3877405 - DNA, 25 bp, Homo sapien
tatgcccttggcctgcacaactttg

SEQ ID NO: 3877406 - DNA, 25 bp, Homo sapien
gagctggcgaagacagtgctgatca

SEQ ID NO: 3877407 - DNA, 25 bp, Homo sapien
tggattacaggtaaatcatttgacc

SEQ ID NO: 3877408 - DNA, 25 bp, Homo sapien
ctggattacaggtaaatcatttgac

SEQ ID NO: 3877409 - DNA, 25 bp, Homo sapien
ggattacaggtaaatcatttgacct

SEQ ID NO: 3877410 - DNA, 25 bp, Homo sapien
attacaggtaaatcatttgacctga

SEQ ID NO: 3877411 - DNA, 25 bp, Homo sapien
ctgcagttgtgccagtggctcttca

SEQ ID NO: 3877412 - DNA, 25 bp, Homo sapien
cagttgtgccagtggctcttcagag

SEQ ID NO: 3877413 - DNA, 25 bp, Homo sapien
tgtgccagtggctcttcagaggacc

SEQ ID NO: 3877414 - DNA, 25 bp, Homo sapien
cttcagaggacccttcctctagctc

SEQ ID NO: 3877415 - DNA, 25 bp, Homo sapien
ggccaagatgtctcacaccctagaa

SEQ ID NO: 3877416 - DNA, 25 bp, Homo sapien
tcctgcggactacgacgactttgtg

SEQ ID NO: 3877417 - DNA, 25 bp, Homo sapien
gaaacttggctggacagatcatcct

SEQ ID NO: 3877418 - DNA, 25 bp, Homo sapien
ttgtgaatgcgatccggagtgcccg

SEQ ID NO: 3877419 - DNA, 25 bp, Homo sapien
tagatacactgctgcggatgaagag

SEQ ID NO: 3877420 - DNA, 25 bp, Homo sapien
ttaaggacatttctagcccacagct

SEQ ID NO: 3877421 - DNA, 25 bp, Homo sapien
gatgggtcaaaggtacctagcacta

SEQ ID NO: 3877422 - DNA, 25 bp, Homo sapien
cagctagggctcatactcggctcta

SEQ ID NO: 3877423 - DNA, 25 bp, Homo sapien
agccacgagggcactggctgtccaa

SEQ ID NO: 3877424 - DNA, 25 bp, Homo sapien
gcttcgacaactccaaattatggtt

SEQ ID NO: 3877425 - DNA, 25 bp, Homo sapien
ggctcagcagcttcgacaactccaa

SEQ ID NO: 3877426 - DNA, 25 bp, Homo sapien
gctgcagttcttcccgaagccacga

SEQ ID NO: 3877427 - DNA, 25 bp, Homo sapien
agaaatggtaagaagtgggacacag

SEQ ID NO: 3877428 - DNA, 25 bp, Homo sapien
gaaatggtaagaagtgggacacaga

SEQ ID NO: 3877429 - DNA, 25 bp, Homo sapien
agtccctggcaccaaaatcccttat

SEQ ID NO: 3877430 - DNA, 25 bp, Homo sapien
agcgagtcttaccaccttcaagtcc

SEQ ID NO: 3877431 - DNA, 25 bp, Homo sapien
tatctggatacctccggcctttgct

SEQ ID NO: 3877432 - DNA, 25 bp, Homo sapien
ctttgctccggcctagacagcgagt

SEQ ID NO: 3877433 - DNA, 25 bp, Homo sapien
ctgagggtccgtgtgtagttcagaa

SEQ ID NO: 3877434 - DNA, 25 bp, Homo sapien
gtgtagttcagaaagggtgtgatac

SEQ ID NO: 3877435 - DNA, 25 bp, Homo sapien
tccgtgtgtagttcagaaagggtgt

SEQ ID NO: 3877436 - DNA, 25 bp, Homo sapien
tgagggtccgtgtgtagttcagaaa

SEQ ID NO: 3877437 - DNA, 25 bp, Homo sapien
gctgggttggtacgcagctcttgcc

SEQ ID NO: 3877438 - DNA, 25 bp, Homo sapien
gctgctgggttggtacgcagctctt

SEQ ID NO: 3877439 - DNA, 25 bp, Homo sapien
gctcttgcccatccacaatcagcaa

SEQ ID NO: 3877440 - DNA, 25 bp, Homo sapien
ttggtacgcagctcttgcccatcca

SEQ ID NO: 3877441 - DNA, 25 bp, Homo sapien
ctgggtctccatgggctcgctgatg

SEQ ID NO: 3877442 - DNA, 25 bp, Homo sapien
tagtaagtcagccagcgttgtagat

SEQ ID NO: 3877443 - DNA, 25 bp, Homo sapien
ggtagaatagtagccagggacaaga

SEQ ID NO: 3877444 - DNA, 25 bp, Homo sapien
tatagttcagagcaactgggtctcc

SEQ ID NO: 3877445 - DNA, 25 bp, Homo sapien
gatttgacagtattctgcccttacg

SEQ ID NO: 3877446 - DNA, 25 bp, Homo sapien
gactggtgatttgacagtattctgc

SEQ ID NO: 3877447 - DNA, 25 bp, Homo sapien
tgaaggactggtgatttgacagtat

SEQ ID NO: 3877448 - DNA, 25 bp, Homo sapien
ggtgatttgacagtattctgccctt

SEQ ID NO: 3877449 - DNA, 25 bp, Homo sapien
ctttagcctgtgtgtccctagcttc

SEQ ID NO: 3877450 - DNA, 25 bp, Homo sapien
ttagcctgtgtgtccctagcttcag

SEQ ID NO: 3877451 - DNA, 25 bp, Homo sapien
gcctgtgtgtccctagcttcaggca

SEQ ID NO: 3877452 - DNA, 25 bp, Homo sapien
tagcctgtgtgtccctagcttcagg

SEQ ID NO: 3877453 - DNA, 25 bp, Homo sapien
tcagtgctggcattggaaggaacag

SEQ ID NO: 3877454 - DNA, 25 bp, Homo sapien
gaaatcagtgctggcattggaagga

SEQ ID NO: 3877455 - DNA, 25 bp, Homo sapien
tggtgagcactgtgatgatcttggc

SEQ ID NO: 3877456 - DNA, 25 bp, Homo sapien
ccgccgtggtacaacttcagagtca

SEQ ID NO: 3877457 - DNA, 25 bp, Homo sapien
ggctagggaagctgctagttacagc

SEQ ID NO: 3877458 - DNA, 25 bp, Homo sapien
cccttgtggtaattagggctgttga

SEQ ID NO: 3877459 - DNA, 25 bp, Homo sapien
ccttgtggtaattagggctgttgaa

SEQ ID NO: 3877460 - DNA, 25 bp, Homo sapien
aagctgctagttacagctgggtgca

SEQ ID NO: 3877461 - DNA, 25 bp, Homo sapien
ttcgggagacgatcacaggttttct

SEQ ID NO: 3877462 - DNA, 25 bp, Homo sapien
gaacttcgggagacgatcacaggtt

SEQ ID NO: 3877463 - DNA, 25 bp, Homo sapien
caatgaggaacttcgggagacgatc

SEQ ID NO: 3877464 - DNA, 25 bp, Homo sapien
ggtcccacaatgaggaacttcggga

SEQ ID NO: 3877465 - DNA, 25 bp, Homo sapien
ggaagcgcaccaagctctcaaaggt

SEQ ID NO: 3877466 - DNA, 25 bp, Homo sapien
gcccagccggtcatttccataattg

SEQ ID NO: 3877467 - DNA, 25 bp, Homo sapien
tctcaaaggtgtataggcccagccg

SEQ ID NO: 3877468 - DNA, 25 bp, Homo sapien
tcaaagtacttctgtgcaagtggga

SEQ ID NO: 3877469 - DNA, 25 bp, Homo sapien
cctccaggatactcattatagaaga

SEQ ID NO: 3877470 - DNA, 25 bp, Homo sapien
tctagttcacgagagcctccaggat

SEQ ID NO: 3877471 - DNA, 25 bp, Homo sapien
gaaagagctctccacctcggatgct

SEQ ID NO: 3877472 - DNA, 25 bp, Homo sapien
gattaagcagcactgtcagaaagag

SEQ ID NO: 3877473 - DNA, 25 bp, Homo sapien
tggatgccccacacggatttccagg

SEQ ID NO: 3877474 - DNA, 25 bp, Homo sapien
cagcataccccaggtccgtgggaat

SEQ ID NO: 3877475 - DNA, 25 bp, Homo sapien
gggatactcctcagtgctggtcacc

SEQ ID NO: 3877476 - DNA, 25 bp, Homo sapien
ggcggtagcgggcagggcggagatg

SEQ ID NO: 3877477 - DNA, 25 bp, Homo sapien
ctgggaatggcatagactctcacca

SEQ ID NO: 3877478 - DNA, 25 bp, Homo sapien
tggcatagactctcaccaggacctg

SEQ ID NO: 3877479 - DNA, 25 bp, Homo sapien
aatggcatagactctcaccaggacc

SEQ ID NO: 3877480 - DNA, 25 bp, Homo sapien
ggaatggcatagactctcaccagga

SEQ ID NO: 3877481 - DNA, 25 bp, Homo sapien
agaaattatggggaagagatccaag

SEQ ID NO: 3877482 - DNA, 25 bp, Homo sapien
gagaaattatggggaagagatccaa

SEQ ID NO: 3877483 - DNA, 25 bp, Homo sapien
aactctttgcggtgcttcagcagca

SEQ ID NO: 3877484 - DNA, 25 bp, Homo sapien
ttcagcagcatgtcgtcccctgcat

SEQ ID NO: 3877485 - DNA, 25 bp, Homo sapien
tgttgagcctcatctggtcagccag

SEQ ID NO: 3877486 - DNA, 25 bp, Homo sapien
tcagccagcacggagcgattgtgga

SEQ ID NO: 3877487 - DNA, 25 bp, Homo sapien
cagtgaagggacaggtcaaactatg

SEQ ID NO: 3877488 - DNA, 25 bp, Homo sapien
caaactatgatatgccaaaggagta

SEQ ID NO: 3877489 - DNA, 25 bp, Homo sapien
tcttcaacttgtctgcccagggagg

SEQ ID NO: 3877490 - DNA, 25 bp, Homo sapien
acagcagtctgaccccaaaccttga

SEQ ID NO: 3877491 - DNA, 25 bp, Homo sapien
cagtatgatagaacttgcccgagaa

SEQ ID NO: 3877492 - DNA, 25 bp, Homo sapien
cttgcccgagaagcccaagttgaag

SEQ ID NO: 3877493 - DNA, 25 bp, Homo sapien
gaagcccaagttgaaggtgaagttg

SEQ ID NO: 3877494 - DNA, 25 bp, Homo sapien
gtttgttctgggtggtcaacagagc

SEQ ID NO: 3877495 - DNA, 25 bp, Homo sapien
gcagtaccggtctagcagttcccga

SEQ ID NO: 3877496 - DNA, 25 bp, Homo sapien
tatcagtcaatgtgggcatgtcccc

SEQ ID NO: 3877497 - DNA, 25 bp, Homo sapien
aaaacgactagactccaggatggcc

SEQ ID NO: 3877498 - DNA, 25 bp, Homo sapien
aagatgtagcggtcaaggtccaggc

SEQ ID NO: 3877499 - DNA, 25 bp, Homo sapien
gagctgggcgtaccaccttccacaa

SEQ ID NO: 3877500 - DNA, 25 bp, Homo sapien
tatgaggcggtgcagttccagctgc

SEQ ID NO: 3877501 - DNA, 25 bp, Homo sapien
gcagcagtatgaggcggtgcagttc

SEQ ID NO: 3877502 - DNA, 25 bp, Homo sapien
cagtatgaggcggtgcagttccagc

SEQ ID NO: 3877503 - DNA, 25 bp, Homo sapien
gacgagtccccttagcatagggtag

SEQ ID NO: 3877504 - DNA, 25 bp, Homo sapien
tgagcgcctcacatcaaaggtcagc

SEQ ID NO: 3877505 - DNA, 25 bp, Homo sapien
tcctttacgaggtggagacgagtcc

SEQ ID NO: 3877506 - DNA, 25 bp, Homo sapien
tataggctaggactgtcttggaagg

SEQ ID NO: 3877507 - DNA, 25 bp, Homo sapien
tgcaaatgataggaacaaatctccc

SEQ ID NO: 3877508 - DNA, 25 bp, Homo sapien
aaatctcccatcaacaagaggctaa

SEQ ID NO: 3877509 - DNA, 25 bp, Homo sapien
ctaggagaatctacaagctgagtcc

SEQ ID NO: 3877510 - DNA, 25 bp, Homo sapien
gagtcctataccttagcttcacagc

SEQ ID NO: 3877511 - DNA, 25 bp, Homo sapien
agtcttcagaagtcccatgctccaa

SEQ ID NO: 3877512 - DNA, 25 bp, Homo sapien
gaaaggagttcctagcccatgaccg

SEQ ID NO: 3877513 - DNA, 25 bp, Homo sapien
ggaactcatgagtctgttaatcttc

SEQ ID NO: 3877514 - DNA, 25 bp, Homo sapien
taacgaacttgcagtcaggtggaca

SEQ ID NO: 3877515 - DNA, 25 bp, Homo sapien
ttcacatatgagtaactcagagaag

SEQ ID NO: 3877516 - DNA, 25 bp, Homo sapien
ggtacatgctccattatccccattt

SEQ ID NO: 3877517 - DNA, 25 bp, Homo sapien
gggaaaaggtacatgctccattatc

SEQ ID NO: 3877518 - DNA, 25 bp, Homo sapien
atttcacatatgagtaactcagaga

SEQ ID NO: 3877519 - DNA, 25 bp, Homo sapien
gacgtcaggcctgtcaagctccaga

SEQ ID NO: 3877520 - DNA, 25 bp, Homo sapien
tccagagccgcgttcttagccgctg

SEQ ID NO: 3877521 - DNA, 25 bp, Homo sapien
gctgggattcgacgtcaggcctgtc

SEQ ID NO: 3877522 - DNA, 25 bp, Homo sapien
tcttagccgctgcattttagcttca

SEQ ID NO: 3877523 - DNA, 25 bp, Homo sapien
ccggggtgacatcgagacagcctct

SEQ ID NO: 3877524 - DNA, 25 bp, Homo sapien
gggtgacatcgagacagcctctggg

SEQ ID NO: 3877525 - DNA, 25 bp, Homo sapien
gcgactccggggtgacatcgagaca

SEQ ID NO: 3877526 - DNA, 25 bp, Homo sapien
cggatgtgggacaccaaaggggaag

SEQ ID NO: 3877527 - DNA, 25 bp, Homo sapien
ggggccacgggccgcgtcgcggctg

SEQ ID NO: 3877528 - DNA, 25 bp, Homo sapien
cctgctttcggggccacgggccgcg

SEQ ID NO: 3877529 - DNA, 25 bp, Homo sapien
tgctttcggggccacgggccgcgtc

SEQ ID NO: 3877530 - DNA, 25 bp, Homo sapien
tcggggccacgggccgcgtcgcggc

SEQ ID NO: 3877531 - DNA, 25 bp, Homo sapien
cccgctcggatccaccggctccggc

SEQ ID NO: 3877532 - DNA, 25 bp, Homo sapien
cgcgccgccgctggtggcacccgct

SEQ ID NO: 3877533 - DNA, 25 bp, Homo sapien
ctggcccaaccaccgctcccaccgg

SEQ ID NO: 3877534 - DNA, 25 bp, Homo sapien
ggctccggccctagcagccgcgcga

SEQ ID NO: 3877535 - DNA, 25 bp, Homo sapien
cctccgagacggcgggctccgcgcc

SEQ ID NO: 3877536 - DNA, 25 bp, Homo sapien
gaaatcaagcggccctccgcagtgc

SEQ ID NO: 3877537 - DNA, 25 bp, Homo sapien
tccgggaaatcaagcggccctccgc

SEQ ID NO: 3877538 - DNA, 25 bp, Homo sapien
cgggaaatcaagcggccctccgcag

SEQ ID NO: 3877539 - DNA, 25 bp, Homo sapien
tgctaaaatctacgcctctggccgt

SEQ ID NO: 3877540 - DNA, 25 bp, Homo sapien
gcctctggccgtaaacctccaacag

SEQ ID NO: 3877541 - DNA, 25 bp, Homo sapien
cgcctctggccgtaaacctccaaca

SEQ ID NO: 3877542 - DNA, 25 bp, Homo sapien
gctgctaaaatctacgcctctggcc

SEQ ID NO: 3877543 - DNA, 25 bp, Homo sapien
gccagcaaaacgaaaccctgtggtg

SEQ ID NO: 3877544 - DNA, 25 bp, Homo sapien
ggagcctggctaaatccaagcacca

SEQ ID NO: 3877545 - DNA, 25 bp, Homo sapien
caaagctatgaagggtctaccaaca

SEQ ID NO: 3877546 - DNA, 25 bp, Homo sapien
atgctgacattagccccagaagagg

SEQ ID NO: 3877547 - DNA, 25 bp, Homo sapien
tgtgcagataaatctgcagcgttgt

SEQ ID NO: 3877548 - DNA, 25 bp, Homo sapien
cttctttgctatctgcttagggtat

SEQ ID NO: 3877549 - DNA, 25 bp, Homo sapien
tctgcttagggtatagatctcttcc

SEQ ID NO: 3877550 - DNA, 25 bp, Homo sapien
aaggccatgaccaattgctcctcca

SEQ ID NO: 3877551 - DNA, 25 bp, Homo sapien
gcttcatggcgggtacacttctgca

SEQ ID NO: 3877552 - DNA, 25 bp, Homo sapien
tattagggcccacatgcattgtgca

SEQ ID NO: 3877553 - DNA, 25 bp, Homo sapien
gatgcccatgcagattgtccagcag

SEQ ID NO: 3877554 - DNA, 25 bp, Homo sapien
aagacagtacagcaacgtccgggct

SEQ ID NO: 3877555 - DNA, 25 bp, Homo sapien
gccacctcaggagctgcaatcacat

SEQ ID NO: 3877556 - DNA, 25 bp, Homo sapien
aagctctgtcagagttcttgcctgg

SEQ ID NO: 3877557 - DNA, 25 bp, Homo sapien
tctgtcagagttcttgcctggtccc

SEQ ID NO: 3877558 - DNA, 25 bp, Homo sapien
aggagctgcaatcacatcacggccc

SEQ ID NO: 3877559 - DNA, 25 bp, Homo sapien
tcttgccaacccaagggctgtcggt

SEQ ID NO: 3877560 - DNA, 25 bp, Homo sapien
cactggctgcgaaggttggacctcc

SEQ ID NO: 3877561 - DNA, 25 bp, Homo sapien
taaaaaacacctcggtacagcagag

SEQ ID NO: 3877562 - DNA, 25 bp, Homo sapien
gagccactgctcatgccaggatgga

SEQ ID NO: 3877563 - DNA, 25 bp, Homo sapien
tgattaaatgaggtaggcaccactc

SEQ ID NO: 3877564 - DNA, 25 bp, Homo sapien
caatttggagtcacggagccagacc

SEQ ID NO: 3877565 - DNA, 25 bp, Homo sapien
cagatgagttccagcgactttagca

SEQ ID NO: 3877566 - DNA, 25 bp, Homo sapien
tagcacgctaaacacatggccaagt

SEQ ID NO: 3877567 - DNA, 25 bp, Homo sapien
ggtatggataggcttgctgttcttg

SEQ ID NO: 3877568 - DNA, 25 bp, Homo sapien
gaccctgcccgtcgatgtactgggt

SEQ ID NO: 3877569 - DNA, 25 bp, Homo sapien
gatgtaggcgatgcacgctgcgtcc

SEQ ID NO: 3877570 - DNA, 25 bp, Homo sapien
tcctccccaatcacgtggacgtgtg

SEQ ID NO: 3877571 - DNA, 25 bp, Homo sapien
cagaaagatgggtaacagtgacagt

SEQ ID NO: 3877572 - DNA, 25 bp, Homo sapien
catgcccgagctgtatttcttggtg

SEQ ID NO: 3877573 - DNA, 25 bp, Homo sapien
ggccaggatgccacattacattagt

SEQ ID NO: 3877574 - DNA, 25 bp, Homo sapien
gtaagaggacatcaggcctgggcac

SEQ ID NO: 3877575 - DNA, 25 bp, Homo sapien
gagccagcggagaagttagtgacta

SEQ ID NO: 3877576 - DNA, 25 bp, Homo sapien
gactaactataactcagggcaggat

SEQ ID NO: 3877577 - DNA, 25 bp, Homo sapien
tgaactgtccagaatgtacacccca

SEQ ID NO: 3877578 - DNA, 25 bp, Homo sapien
ccatagtcaggaagattctagccac

SEQ ID NO: 3877579 - DNA, 25 bp, Homo sapien
gcaggagtatatcagcagcacgaac

SEQ ID NO: 3877580 - DNA, 25 bp, Homo sapien
catacagagtaggagtgcagcacga

SEQ ID NO: 3877581 - DNA, 25 bp, Homo sapien
ggacaagcatacagagtaggagtgc

SEQ ID NO: 3877582 - DNA, 25 bp, Homo sapien
caggagcagggccttcaaaggtgcc

SEQ ID NO: 3877583 - DNA, 25 bp, Homo sapien
acgaggttaccaagggcctcaggct

SEQ ID NO: 3877584 - DNA, 25 bp, Homo sapien
ctccacgaggttaccaagggcctca

SEQ ID NO: 3877585 - DNA, 25 bp, Homo sapien
atccatcccctccacgaggttacca

SEQ ID NO: 3877586 - DNA, 25 bp, Homo sapien
catcccctccacgaggttaccaagg

SEQ ID NO: 3877587 - DNA, 25 bp, Homo sapien
caaagtccccattgttgatggcttc

SEQ ID NO: 3877588 - DNA, 25 bp, Homo sapien
ctcaaagtccccattgttgatggct

SEQ ID NO: 3877589 - DNA, 25 bp, Homo sapien
aagtccccattgttgatggcttcaa

SEQ ID NO: 3877590 - DNA, 25 bp, Homo sapien
gtgtaggcctcaaagtccccattgt

SEQ ID NO: 3877591 - DNA, 25 bp, Homo sapien
taatcttaatgatctcctgttttcg

SEQ ID NO: 3877592 - DNA, 25 bp, Homo sapien
ctgttctgtaatcttaatgatctcc

SEQ ID NO: 3877593 - DNA, 25 bp, Homo sapien
tctgtaatcttaatgatctcctgtt

SEQ ID NO: 3877594 - DNA, 25 bp, Homo sapien
atcttaatgatctcctgttttcgca

SEQ ID NO: 3877595 - DNA, 25 bp, Homo sapien
aggagtcccctgtgatcgcttatga

SEQ ID NO: 3877596 - DNA, 25 bp, Homo sapien
ttggcaggaagagcgaacacacctt

SEQ ID NO: 3877597 - DNA, 25 bp, Homo sapien
tacatcgtgaatgctgtgagcccct

SEQ ID NO: 3877598 - DNA, 25 bp, Homo sapien
tcttctctgtctctagggcccttgg

SEQ ID NO: 3877599 - DNA, 25 bp, Homo sapien
caactgcaagcgttagaacagcacc

SEQ ID NO: 3877600 - DNA, 25 bp, Homo sapien
caaggagttcgatcggcttccaaaa

SEQ ID NO: 3877601 - DNA, 25 bp, Homo sapien
ccaagcagcacagttgggacagggc

SEQ ID NO: 3877602 - DNA, 25 bp, Homo sapien
ctctcgaggcttgggaaagctgcac

SEQ ID NO: 3877603 - DNA, 25 bp, Homo sapien
tgaggtgcgtgccattttatttcca

SEQ ID NO: 3877604 - DNA, 25 bp, Homo sapien
tatgaggatgagctactgataaccc

SEQ ID NO: 3877605 - DNA, 25 bp, Homo sapien
cgaggcaccgtatcaagacttccta

SEQ ID NO: 3877606 - DNA, 25 bp, Homo sapien
cactcttgaaggcagtgtagctggg

SEQ ID NO: 3877607 - DNA, 25 bp, Homo sapien
aacagcacctccagtctacccccca

SEQ ID NO: 3877608 - DNA, 25 bp, Homo sapien
caacagcacctccagtctacccccc

SEQ ID NO: 3877609 - DNA, 25 bp, Homo sapien
acagcacctccagtctaccccccac

SEQ ID NO: 3877610 - DNA, 25 bp, Homo sapien
ccagagcttactaccacgggcaggt

SEQ ID NO: 3877611 - DNA, 25 bp, Homo sapien
cagagcttactaccacgggcaggtg

SEQ ID NO: 3877612 - DNA, 25 bp, Homo sapien
agagcttactaccacgggcaggtgg

SEQ ID NO: 3877613 - DNA, 25 bp, Homo sapien
cagaatgtgcctccctcacacttac

SEQ ID NO: 3877614 - DNA, 25 bp, Homo sapien
gccagggagacggaagccagaatgt

SEQ ID NO: 3877615 - DNA, 25 bp, Homo sapien
cagggagacggaagccagaatgtgc

SEQ ID NO: 3877616 - DNA, 25 bp, Homo sapien
gagacggaagccagaatgtgcctcc

SEQ ID NO: 3877617 - DNA, 25 bp, Homo sapien
tgcagagggggctgttctgtcccgg

SEQ ID NO: 3877618 - DNA, 25 bp, Homo sapien
cgggagctccgtccttcaggcaccg

SEQ ID NO: 3877619 - DNA, 25 bp, Homo sapien
gcagagggggctgttctgtcccggg

SEQ ID NO: 3877620 - DNA, 25 bp, Homo sapien
ggagctccgtccttcaggcaccgag

SEQ ID NO: 3877621 - DNA, 25 bp, Homo sapien
gccattcccagtgcggagcggggca

SEQ ID NO: 3877622 - DNA, 25 bp, Homo sapien
ctgccattcccagtgcggagcgggg

SEQ ID NO: 3877623 - DNA, 25 bp, Homo sapien
ccattcccagtgcggagcggggcag

SEQ ID NO: 3877624 - DNA, 25 bp, Homo sapien
tgccattcccagtgcggagcggggc

SEQ ID NO: 3877625 - DNA, 25 bp, Homo sapien
ggcagggcaaggcagagcagccaaa

SEQ ID NO: 3877626 - DNA, 25 bp, Homo sapien
ccaggagtgattggtcactctattt

SEQ ID NO: 3877627 - DNA, 25 bp, Homo sapien
tgtccgaggaaaaccaggagtgatt

SEQ ID NO: 3877628 - DNA, 25 bp, Homo sapien
agttctgtgtccgaggaaaaccagg

SEQ ID NO: 3877629 - DNA, 25 bp, Homo sapien
ggaaaaccaggagtgattggtcact

SEQ ID NO: 3877630 - DNA, 25 bp, Homo sapien
cagcaacaccagacaggggcctcat

SEQ ID NO: 3877631 - DNA, 25 bp, Homo sapien
gggtacccctgttcttggatggcac

SEQ ID NO: 3877632 - DNA, 25 bp, Homo sapien
ggagaatctctagcttagctatttt

SEQ ID NO: 3877633 - DNA, 25 bp, Homo sapien
ctcttgcccaactcagcaacaccag

SEQ ID NO: 3877634 - DNA, 25 bp, Homo sapien
aagccctctcctaggggcataggag

SEQ ID NO: 3877635 - DNA, 25 bp, Homo sapien
cagaaaaggcaggtgccccattgga

SEQ ID NO: 3877636 - DNA, 25 bp, Homo sapien
aggcaggtgccccattggagcccag

SEQ ID NO: 3877637 - DNA, 25 bp, Homo sapien
tggctcgtggaaagtagcttttata

SEQ ID NO: 3877638 - DNA, 25 bp, Homo sapien
ctgtggtggtgttgcagctctctgt

SEQ ID NO: 3877639 - DNA, 25 bp, Homo sapien
cttctgtggtggtgttgcagctctc

SEQ ID NO: 3877640 - DNA, 25 bp, Homo sapien
catcttctgtggtggtgttgcagct

SEQ ID NO: 3877641 - DNA, 25 bp, Homo sapien
ttgaggtcctcatcttctgtggtgg

SEQ ID NO: 3877642 - DNA, 25 bp, Homo sapien
caccattcagtttctagctcagata

SEQ ID NO: 3877643 - DNA, 25 bp, Homo sapien
gcttagggcactcagcctcagagct

SEQ ID NO: 3877644 - DNA, 25 bp, Homo sapien
gactacttaattcaaggccctgttc

SEQ ID NO: 3877645 - DNA, 25 bp, Homo sapien
tagctcagatatcacctcctgaaag

SEQ ID NO: 3877646 - DNA, 25 bp, Homo sapien
cttgatcccatctgtagcgttgtgt

SEQ ID NO: 3877647 - DNA, 25 bp, Homo sapien
atcccatctgtagcgttgtgtacca

SEQ ID NO: 3877648 - DNA, 25 bp, Homo sapien
tgatcccatctgtagcgttgtgtac

SEQ ID NO: 3877649 - DNA, 25 bp, Homo sapien
cccatctgtagcgttgtgtaccaca

SEQ ID NO: 3877650 - DNA, 25 bp, Homo sapien
atgaagattacccttccgacttggg

SEQ ID NO: 3877651 - DNA, 25 bp, Homo sapien
tccgacttggggacagactatggct

SEQ ID NO: 3877652 - DNA, 25 bp, Homo sapien
gaagatgaagattacccttccgact

SEQ ID NO: 3877653 - DNA, 25 bp, Homo sapien
gggacagactatggctcttccctga

SEQ ID NO: 3877654 - DNA, 25 bp, Homo sapien
caggacccccgcagaccctatgatg

SEQ ID NO: 3877655 - DNA, 25 bp, Homo sapien
ccgcagaccctatgatgaccactga

SEQ ID NO: 3877656 - DNA, 25 bp, Homo sapien
aggacccccgcagaccctatgatga

SEQ ID NO: 3877657 - DNA, 25 bp, Homo sapien
cccccgcagaccctatgatgaccac

SEQ ID NO: 3877658 - DNA, 25 bp, Homo sapien
cgggcagctgggatagccctggatt

SEQ ID NO: 3877659 - DNA, 25 bp, Homo sapien
atatcccggctcaactggggtcccg

SEQ ID NO: 3877660 - DNA, 25 bp, Homo sapien
gaagacaaaatatcccggctcaact

SEQ ID NO: 3877661 - DNA, 25 bp, Homo sapien
gacaaaatatcccggctcaactggg

SEQ ID NO: 3877662 - DNA, 25 bp, Homo sapien
aggagcaggagcagcacttctgcca

SEQ ID NO: 3877663 - DNA, 25 bp, Homo sapien
caggagcaggagcagcacttctgcc

SEQ ID NO: 3877664 - DNA, 25 bp, Homo sapien
ggagcaggagcagcacttctgccat

SEQ ID NO: 3877665 - DNA, 25 bp, Homo sapien
catggccgtctgcaagggcgcgggc

SEQ ID NO: 3877666 - DNA, 25 bp, Homo sapien
ggccgtctgcaagggcgcgggctct

SEQ ID NO: 3877667 - DNA, 25 bp, Homo sapien
ctgcaagggcgcgggctcttgggct

SEQ ID NO: 3877668 - DNA, 25 bp, Homo sapien
gcaagggcgcgggctcttgggctgg

SEQ ID NO: 3877669 - DNA, 25 bp, Homo sapien
agactgtttttgttgttgctctgtg

SEQ ID NO: 3877670 - DNA, 25 bp, Homo sapien
gagactgtttttgttgttgctctgt

SEQ ID NO: 3877671 - DNA, 25 bp, Homo sapien
gactgtttttgttgttgctctgtgg

SEQ ID NO: 3877672 - DNA, 25 bp, Homo sapien
ccaggtgccaggtcattgcaaaatc

SEQ ID NO: 3877673 - DNA, 25 bp, Homo sapien
tcttacaacaccagctcgaagcctg

SEQ ID NO: 3877674 - DNA, 25 bp, Homo sapien
aaagcagaacaaaattcagaaactc

SEQ ID NO: 3877675 - DNA, 25 bp, Homo sapien
cctgacccaaagaagttcaagatct

SEQ ID NO: 3877676 - DNA, 25 bp, Homo sapien
ggatgagtgaggcacacgcacgtgg

SEQ ID NO: 3877677 - DNA, 25 bp, Homo sapien
gcacaggcagcatggagtgggcgat

SEQ ID NO: 3877678 - DNA, 25 bp, Homo sapien
acagacatgcagtgaggatgagtga

SEQ ID NO: 3877679 - DNA, 25 bp, Homo sapien
tgaggcacacgcacgtggcagaaca

SEQ ID NO: 3877680 - DNA, 25 bp, Homo sapien
ggtgcacgctggaactcgacttcct

SEQ ID NO: 3877681 - DNA, 25 bp, Homo sapien
taggtgcacgctggaactcgacttc

SEQ ID NO: 3877682 - DNA, 25 bp, Homo sapien
gcacgctggaactcgacttcctttt

SEQ ID NO: 3877683 - DNA, 25 bp, Homo sapien
attaggtgcacgctggaactcgact

SEQ ID NO: 3877684 - DNA, 25 bp, Homo sapien
cagcctccaatctttccacagctat

SEQ ID NO: 3877685 - DNA, 25 bp, Homo sapien
gctataaataatgtcatgttcaaca

SEQ ID NO: 3877686 - DNA, 25 bp, Homo sapien
taggaaaaactctcagaagtagaat

SEQ ID NO: 3877687 - DNA, 25 bp, Homo sapien
tcagaagtagaattaacagggtaaa

SEQ ID NO: 3877688 - DNA, 25 bp, Homo sapien
ccagcttctactgggttttaagagg

SEQ ID NO: 3877689 - DNA, 25 bp, Homo sapien
atcacaacggctgcgaatacgcggt

SEQ ID NO: 3877690 - DNA, 25 bp, Homo sapien
tgcgaatacgcggttggccttttaa

SEQ ID NO: 3877691 - DNA, 25 bp, Homo sapien
ttaagagggattatttgtcacagaa

SEQ ID NO: 3877692 - DNA, 25 bp, Homo sapien
ggtatttcccatggtctgacacaga

SEQ ID NO: 3877693 - DNA, 25 bp, Homo sapien
gcttccctgctcaatggcctatggt

SEQ ID NO: 3877694 - DNA, 25 bp, Homo sapien
caggcaccggtcattatgactggct

SEQ ID NO: 3877695 - DNA, 25 bp, Homo sapien
tctgcctgataagactgatccaacc

SEQ ID NO: 3877696 - DNA, 25 bp, Homo sapien
tcctatggcgactgaaagccacacc

SEQ ID NO: 3877697 - DNA, 25 bp, Homo sapien
aaaccatctcgcgtgggtccactag

SEQ ID NO: 3877698 - DNA, 25 bp, Homo sapien
cagaacagaatgctgcgtggacatc

SEQ ID NO: 3877699 - DNA, 25 bp, Homo sapien
tacacctctgttgtgtacccctcag

SEQ ID NO: 3877700 - DNA, 25 bp, Homo sapien
tcagctgttgacacaagatcttggg

SEQ ID NO: 3877701 - DNA, 25 bp, Homo sapien
cagctccatgtcagagggtgtgcgc

SEQ ID NO: 3877702 - DNA, 25 bp, Homo sapien
gatagcatgagctcctacccaatgc

SEQ ID NO: 3877703 - DNA, 25 bp, Homo sapien
gctgggaggcttcaagatagcatga

SEQ ID NO: 3877704 - DNA, 25 bp, Homo sapien
catgggaaaagctccctcacccagt

SEQ ID NO: 3877705 - DNA, 25 bp, Homo sapien
ctcacccagtgggaacaagccgtga

SEQ ID NO: 3877706 - DNA, 25 bp, Homo sapien
cccagtgggaacaagccgtgatcca

SEQ ID NO: 3877707 - DNA, 25 bp, Homo sapien
gaacaagccgtgatccaccatggcc

SEQ ID NO: 3877708 - DNA, 25 bp, Homo sapien
tctgaaagtgttgtagagagaagga

SEQ ID NO: 3877709 - DNA, 25 bp, Homo sapien
caagaaagctcgaggctgttgcact

SEQ ID NO: 3877710 - DNA, 25 bp, Homo sapien
aggttccaagccctataccctgcct

SEQ ID NO: 3877711 - DNA, 25 bp, Homo sapien
tgttgcactcagtgggatctgaaag

SEQ ID NO: 3877712 - DNA, 25 bp, Homo sapien
gcatccgtgtagaagtcaggttccg

SEQ ID NO: 3877713 - DNA, 25 bp, Homo sapien
tatgatttggatcacttcccctgag

SEQ ID NO: 3877714 - DNA, 25 bp, Homo sapien
tcaggttccggattcagctctggta

SEQ ID NO: 3877715 - DNA, 25 bp, Homo sapien
tgagtcattcccatccagctagggc

SEQ ID NO: 3877716 - DNA, 25 bp, Homo sapien
cgccatccgacttcttgttcaatag

SEQ ID NO: 3877717 - DNA, 25 bp, Homo sapien
tgacaccgccatccgacttcttgtt

SEQ ID NO: 3877718 - DNA, 25 bp, Homo sapien
cttgacaccgccatccgacttcttg

SEQ ID NO: 3877719 - DNA, 25 bp, Homo sapien
accgccatccgacttcttgttcaat

SEQ ID NO: 3877720 - DNA, 25 bp, Homo sapien
aaaacaaagaggaatatcaagtctc

SEQ ID NO: 3877721 - DNA, 25 bp, Homo sapien
gaaaacaaagaggaatatcaagtct

SEQ ID NO: 3877722 - DNA, 25 bp, Homo sapien
gccggcggcgctcgcggcaggcgag

SEQ ID NO: 3877723 - DNA, 25 bp, Homo sapien
gccaggccggcggcgctcgcggcag

SEQ ID NO: 3877724 - DNA, 25 bp, Homo sapien
aggcgaggcgggggcggagctctgc

SEQ ID NO: 3877725 - DNA, 25 bp, Homo sapien
ggcggcgctcgcggcaggcgaggcg

SEQ ID NO: 3877726 - DNA, 25 bp, Homo sapien
caggacgccgaggaaacccagcggt

SEQ ID NO: 3877727 - DNA, 25 bp, Homo sapien
gcccaggacgccgaggaaacccagc

SEQ ID NO: 3877728 - DNA, 25 bp, Homo sapien
tgcccgggatggcaacagcccattc

SEQ ID NO: 3877729 - DNA, 25 bp, Homo sapien
ccgggatggcaacagcccattcctg

SEQ ID NO: 3877730 - DNA, 25 bp, Homo sapien
ctcggcataatcaaagtacacagct

SEQ ID NO: 3877731 - DNA, 25 bp, Homo sapien
cggcataatcaaagtacacagctgg

SEQ ID NO: 3877732 - DNA, 25 bp, Homo sapien
tcggcataatcaaagtacacagctg

SEQ ID NO: 3877733 - DNA, 25 bp, Homo sapien
agacaagcatggtcgtgaggatggc

SEQ ID NO: 3877734 - DNA, 25 bp, Homo sapien
ggagacaagcatggtcgtgaggatg

SEQ ID NO: 3877735 - DNA, 25 bp, Homo sapien
caagcatggtcgtgaggatggcacc

SEQ ID NO: 3877736 - DNA, 25 bp, Homo sapien
ctggagacaagcatggtcgtgagga

SEQ ID NO: 3877737 - DNA, 25 bp, Homo sapien
cagttttctccgggcattgaacttg

SEQ ID NO: 3877738 - DNA, 25 bp, Homo sapien
ggcattgaacttgcgcaaacactcc

SEQ ID NO: 3877739 - DNA, 25 bp, Homo sapien
cgatgcatcatggatgccaccgtgg

SEQ ID NO: 3877740 - DNA, 25 bp, Homo sapien
gacgatgcatcatggatgccaccgt

SEQ ID NO: 3877741 - DNA, 25 bp, Homo sapien
tcaatgactcagctgtcaataccag

SEQ ID NO: 3877742 - DNA, 25 bp, Homo sapien
gacacagtctacacttcctcaatga

SEQ ID NO: 3877743 - DNA, 25 bp, Homo sapien
ggtagggcctgcaaaaatgacccca

SEQ ID NO: 3877744 - DNA, 25 bp, Homo sapien
ttcagaatatagtgatgtcctcagg

SEQ ID NO: 3877745 - DNA, 25 bp, Homo sapien
aggacctcgttatttgccaagaaca

SEQ ID NO: 3877746 - DNA, 25 bp, Homo sapien
gcaggttaacgttctgaggacctcg

SEQ ID NO: 3877747 - DNA, 25 bp, Homo sapien
gcagaaacttgtatgtcagggaatc

SEQ ID NO: 3877748 - DNA, 25 bp, Homo sapien
gatatttgcagcctcatcgacaacc

SEQ ID NO: 3877749 - DNA, 25 bp, Homo sapien
gagttgagatctgagtatgaacccc

SEQ ID NO: 3877750 - DNA, 25 bp, Homo sapien
tgaaccccagcttgggaattcactt

SEQ ID NO: 3877751 - DNA, 25 bp, Homo sapien
tctgagtatgaaccccagcttggga

SEQ ID NO: 3877752 - DNA, 25 bp, Homo sapien
cactccagtggagttgagatctgag

SEQ ID NO: 3877753 - DNA, 25 bp, Homo sapien
gaatgaatctctgctggtaagaagg

SEQ ID NO: 3877754 - DNA, 25 bp, Homo sapien
tcagttattgcttggggcccagaat

SEQ ID NO: 3877755 - DNA, 25 bp, Homo sapien
acagaaggctgacacccctgagctc

SEQ ID NO: 3877756 - DNA, 25 bp, Homo sapien
ctgagctccttggccactagcaaag

SEQ ID NO: 3877757 - DNA, 25 bp, Homo sapien
cgctttgctgggtttatggtcagca

SEQ ID NO: 3877758 - DNA, 25 bp, Homo sapien
ccgtgatgcgctttgctgggtttat

SEQ ID NO: 3877759 - DNA, 25 bp, Homo sapien
agagcctggtcagccgtgatgcgct

SEQ ID NO: 3877760 - DNA, 25 bp, Homo sapien
tgcttgagagcctggtcagccgtga

SEQ ID NO: 3877761 - DNA, 25 bp, Homo sapien
ggaggatagcccaccaggaggatat

SEQ ID NO: 3877762 - DNA, 25 bp, Homo sapien
caccaggaggatatacaggatgacc

SEQ ID NO: 3877763 - DNA, 25 bp, Homo sapien
gcccaccaggaggatatacaggatg

SEQ ID NO: 3877764 - DNA, 25 bp, Homo sapien
ggatagcccaccaggaggatataca

SEQ ID NO: 3877765 - DNA, 25 bp, Homo sapien
caggtcatgggggtcagtcgcctac

SEQ ID NO: 3877766 - DNA, 25 bp, Homo sapien
ctacgagacagaacacacaggtcat

SEQ ID NO: 3877767 - DNA, 25 bp, Homo sapien
tcatgggggtcagtcgcctacttcc

SEQ ID NO: 3877768 - DNA, 25 bp, Homo sapien
acacacaggtcatgggggtcagtcg

SEQ ID NO: 3877769 - DNA, 25 bp, Homo sapien
aaccaagaaaaaccatgcagggctc

SEQ ID NO: 3877770 - DNA, 25 bp, Homo sapien
ctgaggaaccaagaaaaaccatgca

SEQ ID NO: 3877771 - DNA, 25 bp, Homo sapien
ggaaccaagaaaaaccatgcagggc

SEQ ID NO: 3877772 - DNA, 25 bp, Homo sapien
ccaagaaaaaccatgcagggctcag

SEQ ID NO: 3877773 - DNA, 25 bp, Homo sapien
tgtcatcccagaagtacgcagggag

SEQ ID NO: 3877774 - DNA, 25 bp, Homo sapien
gaagtggatgccagccgataatgct

SEQ ID NO: 3877775 - DNA, 25 bp, Homo sapien
tcctctaaggcgtgggcaaatccct

SEQ ID NO: 3877776 - DNA, 25 bp, Homo sapien
cacaccagggatttctttaggcaca

SEQ ID NO: 3877777 - DNA, 25 bp, Homo sapien
tgagggcccttaacagcgaaaagct

SEQ ID NO: 3877778 - DNA, 25 bp, Homo sapien
ctgcaaggaatagcgatgcctcttt

SEQ ID NO: 3877779 - DNA, 25 bp, Homo sapien
gaatagcgatgcctctttcttgcca

SEQ ID NO: 3877780 - DNA, 25 bp, Homo sapien
taacagcgaaaagctgagagcgtgg

SEQ ID NO: 3877781 - DNA, 25 bp, Homo sapien
gggatctttcctcaagacctcaggg

SEQ ID NO: 3877782 - DNA, 25 bp, Homo sapien
cacaggttttccatagggatctttc

SEQ ID NO: 3877783 - DNA, 25 bp, Homo sapien
agatatccacaggttttccataggg

SEQ ID NO: 3877784 - DNA, 25 bp, Homo sapien
ggacaagtaacctggggtgccagca

SEQ ID NO: 3877785 - DNA, 25 bp, Homo sapien
ctcggaggccaggaccattaagggt

SEQ ID NO: 3877786 - DNA, 25 bp, Homo sapien
cattaagggtctggcttctagttct

SEQ ID NO: 3877787 - DNA, 25 bp, Homo sapien
gtactgagtcgcgtacggccaagag

SEQ ID NO: 3877788 - DNA, 25 bp, Homo sapien
cttctagttctaatagaggaaggca

SEQ ID NO: 3877789 - DNA, 25 bp, Homo sapien
tccctgtacttcgatggctaggcca

SEQ ID NO: 3877790 - DNA, 25 bp, Homo sapien
gcatttactcgccagcagcaggttc

SEQ ID NO: 3877791 - DNA, 25 bp, Homo sapien
aaatcagccagcttgacggcggcac

SEQ ID NO: 3877792 - DNA, 25 bp, Homo sapien
ttgacggcggcacccttgcatttac

SEQ ID NO: 3877793 - DNA, 25 bp, Homo sapien
acacagagaaccttgtgagcaccca

SEQ ID NO: 3877794 - DNA, 25 bp, Homo sapien
aagaaacacagagaaccttgtgagc

SEQ ID NO: 3877795 - DNA, 25 bp, Homo sapien
aacacagagaaccttgtgagcaccc

SEQ ID NO: 3877796 - DNA, 25 bp, Homo sapien
gaaacacagagaaccttgtgagcac

SEQ ID NO: 3877797 - DNA, 25 bp, Homo sapien
ggtggcgccaacacttcatgagcag

SEQ ID NO: 3877798 - DNA, 25 bp, Homo sapien
cactatctggcaccaggtggcgcca

SEQ ID NO: 3877799 - DNA, 25 bp, Homo sapien
ggcgccaacacttcatgagcagagg

SEQ ID NO: 3877800 - DNA, 25 bp, Homo sapien
accaggtggcgccaacacttcatga

SEQ ID NO: 3877801 - DNA, 25 bp, Homo sapien
tggatgtggttaacactctccagaa

SEQ ID NO: 3877802 - DNA, 25 bp, Homo sapien
ctccagaatctgatgtatacagtgg

SEQ ID NO: 3877803 - DNA, 25 bp, Homo sapien
gacgatgtcatgctggtggatgtgg

SEQ ID NO: 3877804 - DNA, 25 bp, Homo sapien
tgtggacgatgtcatgctggtggat

SEQ ID NO: 3877805 - DNA, 25 bp, Homo sapien
gaacggtcctcaagttggaggagcc

SEQ ID NO: 3877806 - DNA, 25 bp, Homo sapien
catgtggccggggaacggtcctcaa

SEQ ID NO: 3877807 - DNA, 25 bp, Homo sapien
tcctcaagttggaggagccccacgg

SEQ ID NO: 3877808 - DNA, 25 bp, Homo sapien
caagttggaggagccccacggcaag

SEQ ID NO: 3877809 - DNA, 25 bp, Homo sapien
aagggcagagggggacattgggcat

SEQ ID NO: 3877810 - DNA, 25 bp, Homo sapien
aagaaaagggcagagggggacattg

SEQ ID NO: 3877811 - DNA, 25 bp, Homo sapien
cagaatttgtcaaaggaaagaaaag

SEQ ID NO: 3877812 - DNA, 25 bp, Homo sapien
ttgtcaaaggaaagaaaagggcaga

SEQ ID NO: 3877813 - DNA, 25 bp, Homo sapien
atgtcttcaaacagctccccgccgg

SEQ ID NO: 3877814 - DNA, 25 bp, Homo sapien
gtcttcaaacagctccccgccggta

SEQ ID NO: 3877815 - DNA, 25 bp, Homo sapien
tgtcttcaaacagctccccgccggt

SEQ ID NO: 3877816 - DNA, 25 bp, Homo sapien
tcttcaaacagctccccgccggtaa

SEQ ID NO: 3877817 - DNA, 25 bp, Homo sapien
taaacactaaaatatcgctgcccag

SEQ ID NO: 3877818 - DNA, 25 bp, Homo sapien
ccaggaaggacagagctactactga

SEQ ID NO: 3877819 - DNA, 25 bp, Homo sapien
gtccaggaggtaagagccactttta

SEQ ID NO: 3877820 - DNA, 25 bp, Homo sapien
tgaagagtaatgagaccaatgacac

SEQ ID NO: 3877821 - DNA, 25 bp, Homo sapien
gtagtgaaacccttcttcagaaata

SEQ ID NO: 3877822 - DNA, 25 bp, Homo sapien
gaggtagtgaaacccttcttcagaa

SEQ ID NO: 3877823 - DNA, 25 bp, Homo sapien
cacgaggtagtgaaacccttcttca

SEQ ID NO: 3877824 - DNA, 25 bp, Homo sapien
cgaggtagtgaaacccttcttcaga

SEQ ID NO: 3877825 - DNA, 25 bp, Homo sapien
catggggaattaacgggacagcagc

SEQ ID NO: 3877826 - DNA, 25 bp, Homo sapien
cagcagcatggggaattaacgggac

SEQ ID NO: 3877827 - DNA, 25 bp, Homo sapien
agctccattagggaggtgactaaca

SEQ ID NO: 3877828 - DNA, 25 bp, Homo sapien
ctccattagggaggtgactaacagc

SEQ ID NO: 3877829 - DNA, 25 bp, Homo sapien
cagctaccccggagcaggcgaggct

SEQ ID NO: 3877830 - DNA, 25 bp, Homo sapien
gcgaggctgtacatgccatggatgt

SEQ ID NO: 3877831 - DNA, 25 bp, Homo sapien
ggccattctgactggctcgacaatg

SEQ ID NO: 3877832 - DNA, 25 bp, Homo sapien
gactggctcgacaatgtccactggg

SEQ ID NO: 3877833 - DNA, 25 bp, Homo sapien
tcccaccggatgctggagctcccag

SEQ ID NO: 3877834 - DNA, 25 bp, Homo sapien
cagttctgaaggacagcgcagtgga

SEQ ID NO: 3877835 - DNA, 25 bp, Homo sapien
ctcaaccccagaatcggtcctcgga

SEQ ID NO: 3877836 - DNA, 25 bp, Homo sapien
caggtccagatccatggcaaccaca

SEQ ID NO: 3877837 - DNA, 25 bp, Homo sapien
accaatctgcttcgggtgtaatcca

SEQ ID NO: 3877838 - DNA, 25 bp, Homo sapien
gcatcaggcaaagccgatcaccact

SEQ ID NO: 3877839 - DNA, 25 bp, Homo sapien
tccaagctgctgattgccatctaga

SEQ ID NO: 3877840 - DNA, 25 bp, Homo sapien
gacgttctgactacctcagagctgc

SEQ ID NO: 3877841 - DNA, 25 bp, Homo sapien
cgagcctcacgttctagtttctggt

SEQ ID NO: 3877842 - DNA, 25 bp, Homo sapien
gaagtcgacatatccgagcctcacg

SEQ ID NO: 3877843 - DNA, 25 bp, Homo sapien
tggatgtttcagaagtcgacatatc

SEQ ID NO: 3877844 - DNA, 25 bp, Homo sapien
tatccgagcctcacgttctagtttc

SEQ ID NO: 3877845 - DNA, 25 bp, Homo sapien
agccccaaagctacagacccacggc

SEQ ID NO: 3877846 - DNA, 25 bp, Homo sapien
accctccagcccataactctcaggc

SEQ ID NO: 3877847 - DNA, 25 bp, Homo sapien
tgagatggaggtaccaagccagcca

SEQ ID NO: 3877848 - DNA, 25 bp, Homo sapien
agacccacggccctctctctgggca

SEQ ID NO: 3877849 - DNA, 25 bp, Homo sapien
gcatcttgcaatgcggaggtggcag

SEQ ID NO: 3877850 - DNA, 25 bp, Homo sapien
agcatcttgcaatgcggaggtggca

SEQ ID NO: 3877851 - DNA, 25 bp, Homo sapien
acacttcctgtcctgtagtcacatc

SEQ ID NO: 3877852 - DNA, 25 bp, Homo sapien
tgccccgctctccccgttcctgctg

SEQ ID NO: 3877853 - DNA, 25 bp, Homo sapien
ctgccacatactgcccggccaccac

SEQ ID NO: 3877854 - DNA, 25 bp, Homo sapien
ctgtcctgtagtcacatccagggct

SEQ ID NO: 3877855 - DNA, 25 bp, Homo sapien
caaaaaagcagagggtccatcccag

SEQ ID NO: 3877856 - DNA, 25 bp, Homo sapien
tccaggatggagtagtggtttctag

SEQ ID NO: 3877857 - DNA, 25 bp, Homo sapien
aaaagcaagggcatcccagctggac

SEQ ID NO: 3877858 - DNA, 25 bp, Homo sapien
cccaaaaagggcgaggccactgaat

SEQ ID NO: 3877859 - DNA, 25 bp, Homo sapien
ttcccgcttttgcacagggccactt

SEQ ID NO: 3877860 - DNA, 25 bp, Homo sapien
ttcctgtttgacaactgccacttcc

SEQ ID NO: 3877861 - DNA, 25 bp, Homo sapien
tgacaactgccacttcccgcttttg

SEQ ID NO: 3877862 - DNA, 25 bp, Homo sapien
tgccacttcccgcttttgcacaggg

SEQ ID NO: 3877863 - DNA, 25 bp, Homo sapien
cagcagaggccgccgtctggtcccc

SEQ ID NO: 3877864 - DNA, 25 bp, Homo sapien
aggccgccgtctggtccccttggca

SEQ ID NO: 3877865 - DNA, 25 bp, Homo sapien
agaggccgccgtctggtccccttgg

SEQ ID NO: 3877866 - DNA, 25 bp, Homo sapien
gcagaggccgccgtctggtcccctt

SEQ ID NO: 3877867 - DNA, 25 bp, Homo sapien
ttccagcagccgtatcaggtctgca

SEQ ID NO: 3877868 - DNA, 25 bp, Homo sapien
ctcttccagcagccgtatcaggtct

SEQ ID NO: 3877869 - DNA, 25 bp, Homo sapien
agccgtatcaggtctgcagcttggc

SEQ ID NO: 3877870 - DNA, 25 bp, Homo sapien
cagcagccgtatcaggtctgcagct

SEQ ID NO: 3877871 - DNA, 25 bp, Homo sapien
ctctggcaacttgactctgagtttc

SEQ ID NO: 3877872 - DNA, 25 bp, Homo sapien
tagcagggtacaagggctctggcaa

SEQ ID NO: 3877873 - DNA, 25 bp, Homo sapien
agaaagggaggacccaagtctgtag

SEQ ID NO: 3877874 - DNA, 25 bp, Homo sapien
gacccaagtctgtagcagggtacaa

SEQ ID NO: 3877875 - DNA, 25 bp, Homo sapien
taaggccaagggcattaccccagta

SEQ ID NO: 3877876 - DNA, 25 bp, Homo sapien
ggtagcatctcttagtaaggccaag

SEQ ID NO: 3877877 - DNA, 25 bp, Homo sapien
caaaacactgtttccggtagcatct

SEQ ID NO: 3877878 - DNA, 25 bp, Homo sapien
gacgtagaagaaaggaccatttgcc

SEQ ID NO: 3877879 - DNA, 25 bp, Homo sapien
gggcccacgacattcccagacacag

SEQ ID NO: 3877880 - DNA, 25 bp, Homo sapien
cacagatgaccctggtgggcccacg

SEQ ID NO: 3877881 - DNA, 25 bp, Homo sapien
tcacagatgaccctggtgggcccac

SEQ ID NO: 3877882 - DNA, 25 bp, Homo sapien
tggtgggcccacgacattcccagac

SEQ ID NO: 3877883 - DNA, 25 bp, Homo sapien
agtactggctggcacttacacattc

SEQ ID NO: 3877884 - DNA, 25 bp, Homo sapien
tggcatctgtgcctatcatctgtgc

SEQ ID NO: 3877885 - DNA, 25 bp, Homo sapien
ccacctccacacagtactggctggc

SEQ ID NO: 3877886 - DNA, 25 bp, Homo sapien
ggctggcacttacacattctgaccc

SEQ ID NO: 3877887 - DNA, 25 bp, Homo sapien
tcccagagcacttcacacattgctg

SEQ ID NO: 3877888 - DNA, 25 bp, Homo sapien
ctcctgcgtggaggttttcttcaca

SEQ ID NO: 3877889 - DNA, 25 bp, Homo sapien
tgctgcgtactcctgcgtggaggtt

SEQ ID NO: 3877890 - DNA, 25 bp, Homo sapien
cccgggcagacaacttcttggtatt

SEQ ID NO: 3877891 - DNA, 25 bp, Homo sapien
attgatgatttttgctgcgtactcc

SEQ ID NO: 3877892 - DNA, 25 bp, Homo sapien
agccctgcggtcccggccaagagaa

SEQ ID NO: 3877893 - DNA, 25 bp, Homo sapien
tgcatctcagacagccctgcggtcc

SEQ ID NO: 3877894 - DNA, 25 bp, Homo sapien
ccggccaagagaaccagggcagaag

SEQ ID NO: 3877895 - DNA, 25 bp, Homo sapien
tgcggtcccggccaagagaaccagg

SEQ ID NO: 3877896 - DNA, 25 bp, Homo sapien
gtcgtcggtgaaacgggtgcaggtg

SEQ ID NO: 3877897 - DNA, 25 bp, Homo sapien
cgtcggtgaaacgggtgcaggtggc

SEQ ID NO: 3877898 - DNA, 25 bp, Homo sapien
gaagagctggtagtcgtcggtgaaa

SEQ ID NO: 3877899 - DNA, 25 bp, Homo sapien
aagagctggtagtcgtcggtgaaac

SEQ ID NO: 3877900 - DNA, 25 bp, Homo sapien
gcagcccgcgccgacgtcggtgcac

SEQ ID NO: 3877901 - DNA, 25 bp, Homo sapien
ggctgagcccggcagcaccgcgaga

SEQ ID NO: 3877902 - DNA, 25 bp, Homo sapien
gacgtcggtgcacagtcaccgccgc

SEQ ID NO: 3877903 - DNA, 25 bp, Homo sapien
cccggccgagggagcaagaggagga

SEQ ID NO: 3877904 - DNA, 25 bp, Homo sapien
gcatgcgagggtgcatgtgttagga

SEQ ID NO: 3877905 - DNA, 25 bp, Homo sapien
tgacctctctggacgggtcctacac

SEQ ID NO: 3877906 - DNA, 25 bp, Homo sapien
ctctggacgggtcctacacgcgggt

SEQ ID NO: 3877907 - DNA, 25 bp, Homo sapien
ttaggagtgtaggagtctggaccac

SEQ ID NO: 3877908 - DNA, 25 bp, Homo sapien
gccagaggctgccactcagtcttga

SEQ ID NO: 3877909 - DNA, 25 bp, Homo sapien
gggagtcgggtctccctcgccagca

SEQ ID NO: 3877910 - DNA, 25 bp, Homo sapien
cttgattacagcaggacgcccactg

SEQ ID NO: 3877911 - DNA, 25 bp, Homo sapien
actgggagtcgggtctccctcgcca

SEQ ID NO: 3877912 - DNA, 25 bp, Homo sapien
cagaaacagctgaggcggcttcagg

SEQ ID NO: 3877913 - DNA, 25 bp, Homo sapien
tggctcagccaaagtctataaaatg

SEQ ID NO: 3877914 - DNA, 25 bp, Homo sapien
tttggatgtgaccagaaacccaagc

SEQ ID NO: 3877915 - DNA, 25 bp, Homo sapien
gcaactccctccgtagctatttgga

SEQ ID NO: 3877916 - DNA, 25 bp, Homo sapien
tgagctgagctaatatcacagggaa

SEQ ID NO: 3877917 - DNA, 25 bp, Homo sapien
aggtgagctgagctaatatcacagg

SEQ ID NO: 3877918 - DNA, 25 bp, Homo sapien
cttccctcgtgccaagaggccaggt

SEQ ID NO: 3877919 - DNA, 25 bp, Homo sapien
ctcgtgccaagaggccaggtgagct

SEQ ID NO: 3877920 - DNA, 25 bp, Homo sapien
cgggcatttcttgccgctctagcag

SEQ ID NO: 3877921 - DNA, 25 bp, Homo sapien
gccacgggcatttcttgccgctcta

SEQ ID NO: 3877922 - DNA, 25 bp, Homo sapien
ttcttgccgctctagcagaacactc

SEQ ID NO: 3877923 - DNA, 25 bp, Homo sapien
gggagccacgggcatttcttgccgc

SEQ ID NO: 3877924 - DNA, 25 bp, Homo sapien
agaggctcagcaaaccagagaaaag

SEQ ID NO: 3877925 - DNA, 25 bp, Homo sapien
tttagtcctctagcagccttctcaa

SEQ ID NO: 3877926 - DNA, 25 bp, Homo sapien
ctgtcccctctgcaggacgtggctg

SEQ ID NO: 3877927 - DNA, 25 bp, Homo sapien
caaaccctcctcagaggctcagcaa

SEQ ID NO: 3877928 - DNA, 25 bp, Homo sapien
gggaaagaggcgcttcaggccacac

SEQ ID NO: 3877929 - DNA, 25 bp, Homo sapien
gttgaagagtccgtctgccccatgt

SEQ ID NO: 3877930 - DNA, 25 bp, Homo sapien
gaactgctggccaaggatacagcat

SEQ ID NO: 3877931 - DNA, 25 bp, Homo sapien
ggagtgaacagcacatgcagctgtg

SEQ ID NO: 3877932 - DNA, 25 bp, Homo sapien
caattcctctactcagaggtgagaa

SEQ ID NO: 3877933 - DNA, 25 bp, Homo sapien
tggaatgggctatacagagatgtgc

SEQ ID NO: 3877934 - DNA, 25 bp, Homo sapien
ctccacagttagaactgtctacatg

SEQ ID NO: 3877935 - DNA, 25 bp, Homo sapien
gaataaacaaggctctatgatgaag

SEQ ID NO: 3877936 - DNA, 25 bp, Homo sapien
tttgactgatgctgcccaaggacct

SEQ ID NO: 3877937 - DNA, 25 bp, Homo sapien
cagaagaactgattagaggacccca

SEQ ID NO: 3877938 - DNA, 25 bp, Homo sapien
aaatctttgtgagcgttgcggaagc

SEQ ID NO: 3877939 - DNA, 25 bp, Homo sapien
ttactgccgaaagcaataagcccgg

SEQ ID NO: 3877940 - DNA, 25 bp, Homo sapien
actagatacgaacagggtgaggcga

SEQ ID NO: 3877941 - DNA, 25 bp, Homo sapien
gcttgggtcaatccatttctcctgg

SEQ ID NO: 3877942 - DNA, 25 bp, Homo sapien
tccagggcagcaatgaacttcatca

SEQ ID NO: 3877943 - DNA, 25 bp, Homo sapien
gcatgggacctttgatgaagcctcc

SEQ ID NO: 3877944 - DNA, 25 bp, Homo sapien
gtgagtatccacccctacaacagtt

SEQ ID NO: 3877945 - DNA, 25 bp, Homo sapien
gagtatccacccctacaacagttgg

SEQ ID NO: 3877946 - DNA, 25 bp, Homo sapien
tgagtatccacccctacaacagttg

SEQ ID NO: 3877947 - DNA, 25 bp, Homo sapien
tacttctccaacattcactggtgca

SEQ ID NO: 3877948 - DNA, 25 bp, Homo sapien
ctttgttctctccagcgaactgtga

SEQ ID NO: 3877949 - DNA, 25 bp, Homo sapien
ggaacatgtgtgtccaacaagtact

SEQ ID NO: 3877950 - DNA, 25 bp, Homo sapien
tctccagcgaactgtgactgtctaa

SEQ ID NO: 3877951 - DNA, 25 bp, Homo sapien
atgcccacagatctgatgctcttca

SEQ ID NO: 3877952 - DNA, 25 bp, Homo sapien
tgcccacagatctgatgctcttcag

SEQ ID NO: 3877953 - DNA, 25 bp, Homo sapien
catgcccacagatctgatgctcttc

SEQ ID NO: 3877954 - DNA, 25 bp, Homo sapien
gcttgtccaagagtgcatggtgcat

SEQ ID NO: 3877955 - DNA, 25 bp, Homo sapien
caggtgggcctaaagctgcttgtcc

SEQ ID NO: 3877956 - DNA, 25 bp, Homo sapien
catgactgcgcagatggtgagcatc

SEQ ID NO: 3877957 - DNA, 25 bp, Homo sapien
tagcacaagagaagtgcggcctctg

SEQ ID NO: 3877958 - DNA, 25 bp, Homo sapien
cccgctttcttgctggttgtcattt

SEQ ID NO: 3877959 - DNA, 25 bp, Homo sapien
gggcaccacccgctttcttgctggt

SEQ ID NO: 3877960 - DNA, 25 bp, Homo sapien
ctggatccgcagtcacaccaaggaa

SEQ ID NO: 3877961 - DNA, 25 bp, Homo sapien
gatccgcagtcacaccaaggaagag

SEQ ID NO: 3877962 - DNA, 25 bp, Homo sapien
ccatttattctttctcttttctaga

SEQ ID NO: 3877963 - DNA, 25 bp, Homo sapien
atttattctttctcttttctagaga

SEQ ID NO: 3877964 - DNA, 25 bp, Homo sapien
tattctttctcttttctagagacag

SEQ ID NO: 3877965 - DNA, 25 bp, Homo sapien
ctcaaactcctaggccagagtgatc

SEQ ID NO: 3877966 - DNA, 25 bp, Homo sapien
tattgctgttttctactgcagggag

SEQ ID NO: 3877967 - DNA, 25 bp, Homo sapien
ttgctgttttctactgcagggagtt

SEQ ID NO: 3877968 - DNA, 25 bp, Homo sapien
ttttctactgcagggagttgctgct

SEQ ID NO: 3877969 - DNA, 25 bp, Homo sapien
ctgttttctactgcagggagttgct

SEQ ID NO: 3877970 - DNA, 25 bp, Homo sapien
gaggaggatgttggatttctggtgg

SEQ ID NO: 3877971 - DNA, 25 bp, Homo sapien
aggatgttggatttctggtggattt

SEQ ID NO: 3877972 - DNA, 25 bp, Homo sapien
ggtggggtgtatgcctaaggccagg

SEQ ID NO: 3877973 - DNA, 25 bp, Homo sapien
gtgtatgcctaaggccagggtcccc

SEQ ID NO: 3877974 - DNA, 25 bp, Homo sapien
tcgctgtccaactgtgttccccaag

SEQ ID NO: 3877975 - DNA, 25 bp, Homo sapien
tctttctctactgtggtggcaagtt

SEQ ID NO: 3877976 - DNA, 25 bp, Homo sapien
tggaggctgatacagagagcagccc

SEQ ID NO: 3877977 - DNA, 25 bp, Homo sapien
ggataatggaccaaggtggagactt

SEQ ID NO: 3877978 - DNA, 25 bp, Homo sapien
cttctccacttttcattgagtataa

SEQ ID NO: 3877979 - DNA, 25 bp, Homo sapien
atttcttggtggcctggaccatgag

SEQ ID NO: 3877980 - DNA, 25 bp, Homo sapien
cagtaactttggactccctggcttc

SEQ ID NO: 3877981 - DNA, 25 bp, Homo sapien
tttcttggtggcctggaccatgagg

SEQ ID NO: 3877982 - DNA, 25 bp, Homo sapien
gtaaggagagctccaaaccggagcc

SEQ ID NO: 3877983 - DNA, 25 bp, Homo sapien
gctgggctggcggtgaaaggcgacc

SEQ ID NO: 3877984 - DNA, 25 bp, Homo sapien
actgggcacttggactgagcgtcaa

SEQ ID NO: 3877985 - DNA, 25 bp, Homo sapien
gctggagtaggagacactgcgtggg

SEQ ID NO: 3877986 - DNA, 25 bp, Homo sapien
tcatggtctttatccctctggggtg

SEQ ID NO: 3877987 - DNA, 25 bp, Homo sapien
tctggggtggaaggtaggattcagg

SEQ ID NO: 3877988 - DNA, 25 bp, Homo sapien
tttccctgagcatactggttaccca

SEQ ID NO: 3877989 - DNA, 25 bp, Homo sapien
gagcatactggttacccagtgggtc

SEQ ID NO: 3877990 - DNA, 25 bp, Homo sapien
gacaggttgactgcccagacccttg

SEQ ID NO: 3877991 - DNA, 25 bp, Homo sapien
gggaatatccgatttgtagtaattg

SEQ ID NO: 3877992 - DNA, 25 bp, Homo sapien
cagttttactggtggacaataaagg

SEQ ID NO: 3877993 - DNA, 25 bp, Homo sapien
attggcctgacaggttgactgccca

SEQ ID NO: 3877994 - DNA, 25 bp, Homo sapien
gcccctgtgacccttggacaattga

SEQ ID NO: 3877995 - DNA, 25 bp, Homo sapien
tccaggaggctccagtgactagaaa

SEQ ID NO: 3877996 - DNA, 25 bp, Homo sapien
tagaactctcgtacagggctgttgg

SEQ ID NO: 3877997 - DNA, 25 bp, Homo sapien
aatagtctcattttgatccgggtgg

SEQ ID NO: 3877998 - DNA, 25 bp, Homo sapien
aatgttacccctgggtgcccctgtg

SEQ ID NO: 3877999 - DNA, 25 bp, Homo sapien
gggcaaccgtcccttccactcagag

SEQ ID NO: 3878000 - DNA, 25 bp, Homo sapien
tcagccaatctgtggggcaaccgtc

SEQ ID NO: 3878001 - DNA, 25 bp, Homo sapien
tggctttggcaggataatgttaccc

SEQ ID NO: 3878002 - DNA, 25 bp, Homo sapien
caggcaggactgacatgccgggagt

SEQ ID NO: 3878003 - DNA, 25 bp, Homo sapien
ggcaggactgacatgccgggagtga

SEQ ID NO: 3878004 - DNA, 25 bp, Homo sapien
caggactgacatgccgggagtgagc

SEQ ID NO: 3878005 - DNA, 25 bp, Homo sapien
agccaggcaggactgacatgccggg

SEQ ID NO: 3878006 - DNA, 25 bp, Homo sapien
gaaagcaaatctgccctcctagttc

SEQ ID NO: 3878007 - DNA, 25 bp, Homo sapien
catcactggtttctaaattacgctc

SEQ ID NO: 3878008 - DNA, 25 bp, Homo sapien
taaattacgctccattcccaattgc

SEQ ID NO: 3878009 - DNA, 25 bp, Homo sapien
tctcaggaaagcaaatctgccctcc

SEQ ID NO: 3878010 - DNA, 25 bp, Homo sapien
gaggctcccagacaataggcaaagt

SEQ ID NO: 3878011 - DNA, 25 bp, Homo sapien
acccagagtccaagaggctcccaga

SEQ ID NO: 3878012 - DNA, 25 bp, Homo sapien
cctcttgttattgtaaaacccagag

SEQ ID NO: 3878013 - DNA, 25 bp, Homo sapien
gacaataggcaaagtaggcaaagtt

SEQ ID NO: 3878014 - DNA, 25 bp, Homo sapien
ggacccaggaagggctgagctctgg

SEQ ID NO: 3878015 - DNA, 25 bp, Homo sapien
caggaagggctgagctctggaaggg

SEQ ID NO: 3878016 - DNA, 25 bp, Homo sapien
acccaggaagggctgagctctggaa

SEQ ID NO: 3878017 - DNA, 25 bp, Homo sapien
taggggttcgctccaggacccagga

SEQ ID NO: 3878018 - DNA, 25 bp, Homo sapien
gaacagcaaaagcctgttcccaagt

SEQ ID NO: 3878019 - DNA, 25 bp, Homo sapien
ttggttaaaaggctgcaggtctccc

SEQ ID NO: 3878020 - DNA, 25 bp, Homo sapien
tcaaaggtccaaactatcaatggag

SEQ ID NO: 3878021 - DNA, 25 bp, Homo sapien
taccccgtttggagctcctggtgag

SEQ ID NO: 3878022 - DNA, 25 bp, Homo sapien
cagggtcaaagcactattttccagc

SEQ ID NO: 3878023 - DNA, 25 bp, Homo sapien
cttaatggatatatgccgtctttgc

SEQ ID NO: 3878024 - DNA, 25 bp, Homo sapien
tgcagtcatttaggtagctcatatg

SEQ ID NO: 3878025 - DNA, 25 bp, Homo sapien
tggatatatgccgtctttgcagtca

SEQ ID NO: 3878026 - DNA, 25 bp, Homo sapien
cacagctgattaagccaccacgcca

SEQ ID NO: 3878027 - DNA, 25 bp, Homo sapien
cttaggcccgtggggatctcctcct

SEQ ID NO: 3878028 - DNA, 25 bp, Homo sapien
gggatctcctcctgcttggaatttg

SEQ ID NO: 3878029 - DNA, 25 bp, Homo sapien
tctcctcctgcttggaatttgagca

SEQ ID NO: 3878030 - DNA, 25 bp, Homo sapien
gatctcctcctgcttggaatttgag

SEQ ID NO: 3878031 - DNA, 25 bp, Homo sapien
gtttcatgatgattccttagtctag

SEQ ID NO: 3878032 - DNA, 25 bp, Homo sapien
ttccttagtctagcccgtgcaatga

SEQ ID NO: 3878033 - DNA, 25 bp, Homo sapien
gccacatatttgcaacttagtttca

SEQ ID NO: 3878034 - DNA, 25 bp, Homo sapien
gcccgtgcaatgaactgacctctct

SEQ ID NO: 3878035 - DNA, 25 bp, Homo sapien
tccctgtaccttggatctgtagaag

SEQ ID NO: 3878036 - DNA, 25 bp, Homo sapien
gaggaaggtccattcagtcagttct

SEQ ID NO: 3878037 - DNA, 25 bp, Homo sapien
gatatattggaggaaggacgtccca

SEQ ID NO: 3878038 - DNA, 25 bp, Homo sapien
tttaggtcatggttccgacagcggg

SEQ ID NO: 3878039 - DNA, 25 bp, Homo sapien
aactggaagctccaacttgggctgt

SEQ ID NO: 3878040 - DNA, 25 bp, Homo sapien
gacatataccagaagactctgtctc

SEQ ID NO: 3878041 - DNA, 25 bp, Homo sapien
ctggaagctccaacttgggctgttc

SEQ ID NO: 3878042 - DNA, 25 bp, Homo sapien
tgacatataccagaagactctgtct

SEQ ID NO: 3878043 - DNA, 25 bp, Homo sapien
tgtagtctacattgggaatcatatt

SEQ ID NO: 3878044 - DNA, 25 bp, Homo sapien
catatttctccatactaagttgacc

SEQ ID NO: 3878045 - DNA, 25 bp, Homo sapien
gcaaagttgtagtctacattgggaa

SEQ ID NO: 3878046 - DNA, 25 bp, Homo sapien
gttgacctcgaagaataacattttc

SEQ ID NO: 3878047 - DNA, 25 bp, Homo sapien
agatctttacaaagtggttctttgg

SEQ ID NO: 3878048 - DNA, 25 bp, Homo sapien
agtggttctttggaagttctcgact

SEQ ID NO: 3878049 - DNA, 25 bp, Homo sapien
ctgtagatctttacaaagtggttct

SEQ ID NO: 3878050 - DNA, 25 bp, Homo sapien
tggaagttctcgacttgttattttg

SEQ ID NO: 3878051 - DNA, 25 bp, Homo sapien
ttagcatacaaagtcctgaactaac

SEQ ID NO: 3878052 - DNA, 25 bp, Homo sapien
ctaactgaactttcctttctagcct

SEQ ID NO: 3878053 - DNA, 25 bp, Homo sapien
gcatacaaagtcctgaactaactga

SEQ ID NO: 3878054 - DNA, 25 bp, Homo sapien
ctttctagcctcatttcctctgctg

SEQ ID NO: 3878055 - DNA, 25 bp, Homo sapien
tggcctccttgtactcgcatatctg

SEQ ID NO: 3878056 - DNA, 25 bp, Homo sapien
tgtactcgcatatctgactgaacct

SEQ ID NO: 3878057 - DNA, 25 bp, Homo sapien
tcgcatatctgactgaaccttcttt

SEQ ID NO: 3878058 - DNA, 25 bp, Homo sapien
tgtctttctagtcctggcctccttg

SEQ ID NO: 3878059 - DNA, 25 bp, Homo sapien
aacagtgccgttcgttgtccctaat

SEQ ID NO: 3878060 - DNA, 25 bp, Homo sapien
taattctagccagagtgtattgagc

SEQ ID NO: 3878061 - DNA, 25 bp, Homo sapien
cctaatctaattctagccagagtgt

SEQ ID NO: 3878062 - DNA, 25 bp, Homo sapien
tcgttgtccctaatctaattctagc

SEQ ID NO: 3878063 - DNA, 25 bp, Homo sapien
tcagttgtcattttcttcttcgtca

SEQ ID NO: 3878064 - DNA, 25 bp, Homo sapien
cttcgtcatcatcatcatcagactg

SEQ ID NO: 3878065 - DNA, 25 bp, Homo sapien
cagttgtcattttcttcttcgtcat

SEQ ID NO: 3878066 - DNA, 25 bp, Homo sapien
cttcttcgtcatcatcatcatcaga

SEQ ID NO: 3878067 - DNA, 25 bp, Homo sapien
ctgatggaccaggaggtagcagagt

SEQ ID NO: 3878068 - DNA, 25 bp, Homo sapien
tggaccaggaggtagcagagttctt

SEQ ID NO: 3878069 - DNA, 25 bp, Homo sapien
caaccctagtatgagatggaggaag

SEQ ID NO: 3878070 - DNA, 25 bp, Homo sapien
tgctgcaaccctagtatgagatgga

SEQ ID NO: 3878071 - DNA, 25 bp, Homo sapien
gcttgggcagctgtaacgtttgttc

SEQ ID NO: 3878072 - DNA, 25 bp, Homo sapien
gcagctgtaacgtttgttcctctcc

SEQ ID NO: 3878073 - DNA, 25 bp, Homo sapien
tcagttatcaattgacttggacaga

SEQ ID NO: 3878074 - DNA, 25 bp, Homo sapien
cagttatcaattgacttggacagag

SEQ ID NO: 3878075 - DNA, 25 bp, Homo sapien
agttatcaattgacttggacagagt

SEQ ID NO: 3878076 - DNA, 25 bp, Homo sapien
gttatcaattgacttggacagagtc

SEQ ID NO: 3878077 - DNA, 25 bp, Homo sapien
aatagattctaagactgtattttaa

SEQ ID NO: 3878078 - DNA, 25 bp, Homo sapien
aactgaagcaagtagtaggccttac

SEQ ID NO: 3878079 - DNA, 25 bp, Homo sapien
taaggccttcgtaggactgactacc

SEQ ID NO: 3878080 - DNA, 25 bp, Homo sapien
cactgaagccatgaagagagcattg

SEQ ID NO: 3878081 - DNA, 25 bp, Homo sapien
caaaggttggctccgtgaccctagt

SEQ ID NO: 3878082 - DNA, 25 bp, Homo sapien
agggtaactatggtcctgcttcaca

SEQ ID NO: 3878083 - DNA, 25 bp, Homo sapien
tcctttcttaagtgtacccagctgt

SEQ ID NO: 3878084 - DNA, 25 bp, Homo sapien
tcacacagggtttctaggttgctag

SEQ ID NO: 3878085 - DNA, 25 bp, Homo sapien
tagtggctgaaatgcggtaacaatt

SEQ ID NO: 3878086 - DNA, 25 bp, Homo sapien
taagagaaaactctgtgggccgggc

SEQ ID NO: 3878087 - DNA, 25 bp, Homo sapien
tatttaagagaaaactctgtgggcc

SEQ ID NO: 3878088 - DNA, 25 bp, Homo sapien
agagaaaactctgtgggccgggcat

SEQ ID NO: 3878089 - DNA, 25 bp, Homo sapien
aatttatttaagagaaaactctgtg

SEQ ID NO: 3878090 - DNA, 25 bp, Homo sapien
caaggcatggctagtaagtttggga

SEQ ID NO: 3878091 - DNA, 25 bp, Homo sapien
aagtttactatgtgataggttttct

SEQ ID NO: 3878092 - DNA, 25 bp, Homo sapien
tgtgtaacaaggcatggctagtaag

SEQ ID NO: 3878093 - DNA, 25 bp, Homo sapien
tttctacttattgtgtaacaaggca

SEQ ID NO: 3878094 - DNA, 25 bp, Homo sapien
ctctgcgcttttttagtgctgggat

SEQ ID NO: 3878095 - DNA, 25 bp, Homo sapien
acctctgcgcttttttagtgctggg

SEQ ID NO: 3878096 - DNA, 25 bp, Homo sapien
cgtgcccaacctctgcgctttttta

SEQ ID NO: 3878097 - DNA, 25 bp, Homo sapien
ccaacctctgcgcttttttagtgct

SEQ ID NO: 3878098 - DNA, 25 bp, Homo sapien
cctgggatgcaaccaaaacagtagc

SEQ ID NO: 3878099 - DNA, 25 bp, Homo sapien
gagaatccttcatctggtagcactg

SEQ ID NO: 3878100 - DNA, 25 bp, Homo sapien
tagaggtcatttggtctagctaccc

SEQ ID NO: 3878101 - DNA, 25 bp, Homo sapien
ggtagaaccaggaccacaacttaca

SEQ ID NO: 3878102 - DNA, 25 bp, Homo sapien
caagtagattggtatcttagaagcc

SEQ ID NO: 3878103 - DNA, 25 bp, Homo sapien
tacagcagtcttgccctatgaataa

SEQ ID NO: 3878104 - DNA, 25 bp, Homo sapien
gaatattattgctaaccctgcagtg

SEQ ID NO: 3878105 - DNA, 25 bp, Homo sapien
ccctgcagtgaaaggtagctcttag

SEQ ID NO: 3878106 - DNA, 25 bp, Homo sapien
tgtagctgaggcagatgcggccgat

SEQ ID NO: 3878107 - DNA, 25 bp, Homo sapien
agatgcggccgatgctgctggcttc

SEQ ID NO: 3878108 - DNA, 25 bp, Homo sapien
ttcccgccatcgacaaagccgggca

SEQ ID NO: 3878109 - DNA, 25 bp, Homo sapien
ccgctgaggtgggtataggtgttgt

SEQ ID NO: 3878110 - DNA, 25 bp, Homo sapien
caatatcagtgctcgagacacagtg

SEQ ID NO: 3878111 - DNA, 25 bp, Homo sapien
gaaaaatcatgtttgctctcccggt

SEQ ID NO: 3878112 - DNA, 25 bp, Homo sapien
ttcctactaggcaaaatgagagggc

SEQ ID NO: 3878113 - DNA, 25 bp, Homo sapien
cccatcgctgtgtgttagttcccaa

SEQ ID NO: 3878114 - DNA, 25 bp, Homo sapien
ttctagctatctgtggagaccacca

SEQ ID NO: 3878115 - DNA, 25 bp, Homo sapien
caagatcagcattttcctagggtcc

SEQ ID NO: 3878116 - DNA, 25 bp, Homo sapien
gttttcagggatccaccagggctat

SEQ ID NO: 3878117 - DNA, 25 bp, Homo sapien
taaaatgatggtgactcccacacgc

SEQ ID NO: 3878118 - DNA, 25 bp, Homo sapien
ttttattgatagcacagccagagct

SEQ ID NO: 3878119 - DNA, 25 bp, Homo sapien
tttttattgatagcacagccagagc

SEQ ID NO: 3878120 - DNA, 25 bp, Homo sapien
gagctcctggcgtacattctacttg

SEQ ID NO: 3878121 - DNA, 25 bp, Homo sapien
tgagattagggattcagcagaaagc

SEQ ID NO: 3878122 - DNA, 25 bp, Homo sapien
aatttggaagctgcaaaacgttgcc

SEQ ID NO: 3878123 - DNA, 25 bp, Homo sapien
gaaattgctagagggaaggagctcc

SEQ ID NO: 3878124 - DNA, 25 bp, Homo sapien
ttaaaaagactgatgactgtgaggc

SEQ ID NO: 3878125 - DNA, 25 bp, Homo sapien
tccaaaaccacggtgatcggtagag

SEQ ID NO: 3878126 - DNA, 25 bp, Homo sapien
cacaaatgcttgtgcttgcagtaac

SEQ ID NO: 3878127 - DNA, 25 bp, Homo sapien
gggcatgaggcatttaggttaacca

SEQ ID NO: 3878128 - DNA, 25 bp, Homo sapien
tcctctcgggacagatactggtttg

SEQ ID NO: 3878129 - DNA, 25 bp, Homo sapien
gctacagtgcttgcttaatggcaca

SEQ ID NO: 3878130 - DNA, 25 bp, Homo sapien
gaataaggcaaacacttgaagaggc

SEQ ID NO: 3878131 - DNA, 25 bp, Homo sapien
ttacaatgtgcagccgccagatggt

SEQ ID NO: 3878132 - DNA, 25 bp, Homo sapien
tatatttctccccatacatgtccaa

SEQ ID NO: 3878133 - DNA, 25 bp, Homo sapien
ttggaactttccagctttcgtgacg

SEQ ID NO: 3878134 - DNA, 25 bp, Homo sapien
cccatacatgtccaaacggtttact

SEQ ID NO: 3878135 - DNA, 25 bp, Homo sapien
gacgtatttgactcctttaaatggc

SEQ ID NO: 3878136 - DNA, 25 bp, Homo sapien
tgttgaggctcggattctcttctgg

SEQ ID NO: 3878137 - DNA, 25 bp, Homo sapien
cttaaactgtatgttgaggctcgga

SEQ ID NO: 3878138 - DNA, 25 bp, Homo sapien
tttgtggagtaatttttcccacatc

SEQ ID NO: 3878139 - DNA, 25 bp, Homo sapien
tgggggctccagactgtaaatttac

SEQ ID NO: 3878140 - DNA, 25 bp, Homo sapien
tgaaggcacactctgaaaaaggaca

SEQ ID NO: 3878141 - DNA, 25 bp, Homo sapien
cttattagatagcagagtcaggctc

SEQ ID NO: 3878142 - DNA, 25 bp, Homo sapien
cctagccctgtgaaagagtatgaaa

SEQ ID NO: 3878143 - DNA, 25 bp, Homo sapien
gcacagcacagtatgctctctaggt

SEQ ID NO: 3878144 - DNA, 25 bp, Homo sapien
tgctcactcttgatttgaagtggct

SEQ ID NO: 3878145 - DNA, 25 bp, Homo sapien
ttgctcactcttgatttgaagtggc

SEQ ID NO: 3878146 - DNA, 25 bp, Homo sapien
gctcactcttgatttgaagtggctg

SEQ ID NO: 3878147 - DNA, 25 bp, Homo sapien
aaatctgccgcaagaactgttctcc

SEQ ID NO: 3878148 - DNA, 25 bp, Homo sapien
gatcaaatgtatagctgccttgtgt

SEQ ID NO: 3878149 - DNA, 25 bp, Homo sapien
tgtgtgggtgtcaggttcatgttca

SEQ ID NO: 3878150 - DNA, 25 bp, Homo sapien
caacttttggcatgtgaactgtcac

SEQ ID NO: 3878151 - DNA, 25 bp, Homo sapien
ctcctggtgagctatggttaaagtg

SEQ ID NO: 3878152 - DNA, 25 bp, Homo sapien
aagtatacggattattttaggtgcg

SEQ ID NO: 3878153 - DNA, 25 bp, Homo sapien
tattttcacccgttctcactgggtc

SEQ ID NO: 3878154 - DNA, 25 bp, Homo sapien
ctatggttaaagtgagcagtgatga

SEQ ID NO: 3878155 - DNA, 25 bp, Homo sapien
acttgatatgtatgatggcagattc

SEQ ID NO: 3878156 - DNA, 25 bp, Homo sapien
ggaaaggtgagttgtacttgatatg

SEQ ID NO: 3878157 - DNA, 25 bp, Homo sapien
gttgtacttgatatgtatgatggca

SEQ ID NO: 3878158 - DNA, 25 bp, Homo sapien
gattctggctgatgcatcaacatac

SEQ ID NO: 3878159 - DNA, 25 bp, Homo sapien
gacacggtatgatatgagtcggaaa

SEQ ID NO: 3878160 - DNA, 25 bp, Homo sapien
ctttcagattcccaacgcttgaacc

SEQ ID NO: 3878161 - DNA, 25 bp, Homo sapien
gctgacacggtatgatatgagtcgg

SEQ ID NO: 3878162 - DNA, 25 bp, Homo sapien
tcccaacgcttgaaccggatgcagg

SEQ ID NO: 3878163 - DNA, 25 bp, Homo sapien
aaaaacagaagacagtcgttcatag

SEQ ID NO: 3878164 - DNA, 25 bp, Homo sapien
aaaacagaagacagtcgttcataga

SEQ ID NO: 3878165 - DNA, 25 bp, Homo sapien
taatgcaagcatcaatgaccccctg

SEQ ID NO: 3878166 - DNA, 25 bp, Homo sapien
aatgcaagcatcaatgaccccctga

SEQ ID NO: 3878167 - DNA, 25 bp, Homo sapien
tgcaagcatcaatgaccccctgaat

SEQ ID NO: 3878168 - DNA, 25 bp, Homo sapien
caagcatcaatgaccccctgaattt

SEQ ID NO: 3878169 - DNA, 25 bp, Homo sapien
tagcccaacaatcactacatctaga

SEQ ID NO: 3878170 - DNA, 25 bp, Homo sapien
gaacaatagagataccctctgggtg

SEQ ID NO: 3878171 - DNA, 25 bp, Homo sapien
gagcgtagtggtgctatgatagcca

SEQ ID NO: 3878172 - DNA, 25 bp, Homo sapien
caggtatgccactgtagaatataat

SEQ ID NO: 3878173 - DNA, 25 bp, Homo sapien
tgtctggttaaaaagataatcagat

SEQ ID NO: 3878174 - DNA, 25 bp, Homo sapien
aaagataatcagattgggtgtggtg

SEQ ID NO: 3878175 - DNA, 25 bp, Homo sapien
aattttacgattcttatagagtact

SEQ ID NO: 3878176 - DNA, 25 bp, Homo sapien
gagtactattgttttgtctggttaa

SEQ ID NO: 3878177 - DNA, 25 bp, Homo sapien
ctgatttatctataattgcgtctat

SEQ ID NO: 3878178 - DNA, 25 bp, Homo sapien
cctgcccgacgccatggtatgttgg

SEQ ID NO: 3878179 - DNA, 25 bp, Homo sapien
catggtatgttggacagctgcccgg

SEQ ID NO: 3878180 - DNA, 25 bp, Homo sapien
tgtactttacccctgcccgacgcca

SEQ ID NO: 3878181 - DNA, 25 bp, Homo sapien
tatccttaattgcagcctctgaaca

SEQ ID NO: 3878182 - DNA, 25 bp, Homo sapien
gccagtggaaatccattgtctaaca

SEQ ID NO: 3878183 - DNA, 25 bp, Homo sapien
tttcaaaatgttagattcggtagcc

SEQ ID NO: 3878184 - DNA, 25 bp, Homo sapien
agttgacaacagagcgtagaattgt

SEQ ID NO: 3878185 - DNA, 25 bp, Homo sapien
ggcaaaaagaaaggcctgctaaata

SEQ ID NO: 3878186 - DNA, 25 bp, Homo sapien
cacacaatggaaggcaaaaagaaag

SEQ ID NO: 3878187 - DNA, 25 bp, Homo sapien
agaaaggcctgctaaatactttttg

SEQ ID NO: 3878188 - DNA, 25 bp, Homo sapien
cacaaaatatcacacaatggaaggc

SEQ ID NO: 3878189 - DNA, 25 bp, Homo sapien
tgtcagcaactcgatgtaggaactc

SEQ ID NO: 3878190 - DNA, 25 bp, Homo sapien
agacagactggctcacaacgctctt

SEQ ID NO: 3878191 - DNA, 25 bp, Homo sapien
caaagaagagcttatcccggtagat

SEQ ID NO: 3878192 - DNA, 25 bp, Homo sapien
gaggtggcacttcggtctgtatgac

SEQ ID NO: 3878193 - DNA, 25 bp, Homo sapien
ctagaaatatgtcaccggaacagtt

SEQ ID NO: 3878194 - DNA, 25 bp, Homo sapien
tgtcaccggaacagtttatgagaaa

SEQ ID NO: 3878195 - DNA, 25 bp, Homo sapien
aatatgtcaccggaacagtttatga

SEQ ID NO: 3878196 - DNA, 25 bp, Homo sapien
caccggaacagtttatgagaaatag

SEQ ID NO: 3878197 - DNA, 25 bp, Homo sapien
ggaggaagatcgacgctgtagagag

SEQ ID NO: 3878198 - DNA, 25 bp, Homo sapien
caggaggaagatcgacgctgtagag

SEQ ID NO: 3878199 - DNA, 25 bp, Homo sapien
gaggaagatcgacgctgtagagagc

SEQ ID NO: 3878200 - DNA, 25 bp, Homo sapien
cccaggaggaagatcgacgctgtag

SEQ ID NO: 3878201 - DNA, 25 bp, Homo sapien
agcaagcttgcaggacacaagtcaa

SEQ ID NO: 3878202 - DNA, 25 bp, Homo sapien
ttgcaggacacaagtcaatataaaa

SEQ ID NO: 3878203 - DNA, 25 bp, Homo sapien
ctgtagaagatacaatcttatatat

SEQ ID NO: 3878204 - DNA, 25 bp, Homo sapien
caagcttgcaggacacaagtcaata

SEQ ID NO: 3878205 - DNA, 25 bp, Homo sapien
cagcgccttcaaagcggggtcttct

SEQ ID NO: 3878206 - DNA, 25 bp, Homo sapien
cccttctgtgccgaccagcgccttc

SEQ ID NO: 3878207 - DNA, 25 bp, Homo sapien
tctgtgccgaccagcgccttcaaag

SEQ ID NO: 3878208 - DNA, 25 bp, Homo sapien
caaagcggggtcttctgcctttact

SEQ ID NO: 3878209 - DNA, 25 bp, Homo sapien
gacatgattgacaaaaggtctgaaa

SEQ ID NO: 3878210 - DNA, 25 bp, Homo sapien
cttcccctcacacttgacatgattg

SEQ ID NO: 3878211 - DNA, 25 bp, Homo sapien
cacttgacatgattgacaaaaggtc

SEQ ID NO: 3878212 - DNA, 25 bp, Homo sapien
ccctcacacttgacatgattgacaa

SEQ ID NO: 3878213 - DNA, 25 bp, Homo sapien
tgggtctcaccttgaaagtctttcg

SEQ ID NO: 3878214 - DNA, 25 bp, Homo sapien
cataaaatacctcctcctgtcactg

SEQ ID NO: 3878215 - DNA, 25 bp, Homo sapien
aagtctttcgggcttaattctcata

SEQ ID NO: 3878216 - DNA, 25 bp, Homo sapien
acctgctcagcttagaaccccgtta

SEQ ID NO: 3878217 - DNA, 25 bp, Homo sapien
ctctctcctgaagaactgcaacacc

SEQ ID NO: 3878218 - DNA, 25 bp, Homo sapien
tctcctgaagaactgcaacaccctt

SEQ ID NO: 3878219 - DNA, 25 bp, Homo sapien
acacccttctcactgcattcctcac

SEQ ID NO: 3878220 - DNA, 25 bp, Homo sapien
tcctgaagaactgcaacacccttct

SEQ ID NO: 3878221 - DNA, 25 bp, Homo sapien
taacaggacgtctgctcaggtccgt

SEQ ID NO: 3878222 - DNA, 25 bp, Homo sapien
gagattcctgccgtctgtactccag

SEQ ID NO: 3878223 - DNA, 25 bp, Homo sapien
tctggccttgctggcgagaaagccc

SEQ ID NO: 3878224 - DNA, 25 bp, Homo sapien
tcaggcgcctgagaacactgggctg

SEQ ID NO: 3878225 - DNA, 25 bp, Homo sapien
tcggagtcgggggccccagctattc

SEQ ID NO: 3878226 - DNA, 25 bp, Homo sapien
cagctattcagcctactcccgggtt

SEQ ID NO: 3878227 - DNA, 25 bp, Homo sapien
cagtccacagatttcccgcccctca

SEQ ID NO: 3878228 - DNA, 25 bp, Homo sapien
gggttttggagctgtccccagtcca

SEQ ID NO: 3878229 - DNA, 25 bp, Homo sapien
ggatcctctcctaccgaagctggag

SEQ ID NO: 3878230 - DNA, 25 bp, Homo sapien
gctggagtgcccaggaaattgcctg

SEQ ID NO: 3878231 - DNA, 25 bp, Homo sapien
catctagattcaggcggtcatctgc

SEQ ID NO: 3878232 - DNA, 25 bp, Homo sapien
cagtcagtgattcggcgccggatcc

SEQ ID NO: 3878233 - DNA, 25 bp, Homo sapien
ccttcgccagtcgtggcccgcaggg

SEQ ID NO: 3878234 - DNA, 25 bp, Homo sapien
tggccgcgaccccttgccagacgtt

SEQ ID NO: 3878235 - DNA, 25 bp, Homo sapien
ctgagtccccgcctgtctggtgcag

SEQ ID NO: 3878236 - DNA, 25 bp, Homo sapien
ccagacgttctctccgtttggctga

SEQ ID NO: 3878237 - DNA, 25 bp, Homo sapien
gggatggcgggaaagaggctcggca

SEQ ID NO: 3878238 - DNA, 25 bp, Homo sapien
ttttcagagtgttgcggaagggcac

SEQ ID NO: 3878239 - DNA, 25 bp, Homo sapien
gaccttccttttcgtgcacattctg

SEQ ID NO: 3878240 - DNA, 25 bp, Homo sapien
ggctcggcaactgctgtacactggg

SEQ ID NO: 3878241 - DNA, 25 bp, Homo sapien
gaaggaatcactcacaattgaaaag

SEQ ID NO: 3878242 - DNA, 25 bp, Homo sapien
cagacccctccgatgctttgcaggg

SEQ ID NO: 3878243 - DNA, 25 bp, Homo sapien
gattaaacaggacatatcccatttc

SEQ ID NO: 3878244 - DNA, 25 bp, Homo sapien
tattaggacactcctgattaaacag

SEQ ID NO: 3878245 - DNA, 25 bp, Homo sapien
taagcagtctctttaccttcagcct

SEQ ID NO: 3878246 - DNA, 25 bp, Homo sapien
tgctgccacaccttacgtttagact

SEQ ID NO: 3878247 - DNA, 25 bp, Homo sapien
tcctacctcactatggaccctgtgt

SEQ ID NO: 3878248 - DNA, 25 bp, Homo sapien
ggcacagctctacttattcatcacg

SEQ ID NO: 3878249 - DNA, 25 bp, Homo sapien
aggctgttaaatcccactcccgaag

SEQ ID NO: 3878250 - DNA, 25 bp, Homo sapien
ttgactctcaaaggctgcggactgg

SEQ ID NO: 3878251 - DNA, 25 bp, Homo sapien
taaaaataccgatgtccaggcctac

SEQ ID NO: 3878252 - DNA, 25 bp, Homo sapien
ttagtacgtcgtgctgccgttgcca

SEQ ID NO: 3878253 - DNA, 25 bp, Homo sapien
tacagggagctgagcttgccgaggt

SEQ ID NO: 3878254 - DNA, 25 bp, Homo sapien
ccggttgccagaggcgcggccattt

SEQ ID NO: 3878255 - DNA, 25 bp, Homo sapien
tggccacgtgactgctaaaccggtt

SEQ ID NO: 3878256 - DNA, 25 bp, Homo sapien
ttgccgaggtagacagtggccacgt

SEQ ID NO: 3878257 - DNA, 25 bp, Homo sapien
gctcccagtcgctgagtgcctgagc

SEQ ID NO: 3878258 - DNA, 25 bp, Homo sapien
ggacgatctccagcccttcgcacgg

SEQ ID NO: 3878259 - DNA, 25 bp, Homo sapien
gcgtctggggacgatctccagccct

SEQ ID NO: 3878260 - DNA, 25 bp, Homo sapien
cggggtgtgtgaggacgcgctccca

SEQ ID NO: 3878261 - DNA, 25 bp, Homo sapien
cccgagcggacgtagagcatcggac

SEQ ID NO: 3878262 - DNA, 25 bp, Homo sapien
tagagcatcggacgcgggcgccgtg

SEQ ID NO: 3878263 - DNA, 25 bp, Homo sapien
tgctgctgcccgagcggacgtagag

SEQ ID NO: 3878264 - DNA, 25 bp, Homo sapien
ctgcccgagcggacgtagagcatcg

SEQ ID NO: 3878265 - DNA, 25 bp, Homo sapien
cactttgagccctctagagaatggt

SEQ ID NO: 3878266 - DNA, 25 bp, Homo sapien
tatgcatcctaccagtgttgttgga

SEQ ID NO: 3878267 - DNA, 25 bp, Homo sapien
ggtgcgatccggctcacttgaagct

SEQ ID NO: 3878268 - DNA, 25 bp, Homo sapien
gtagcagagatactaatatgcatcc

SEQ ID NO: 3878269 - DNA, 25 bp, Homo sapien
ctttaaggcttggtagttctgagaa

SEQ ID NO: 3878270 - DNA, 25 bp, Homo sapien
tagagagtactttttaactgagaag

SEQ ID NO: 3878271 - DNA, 25 bp, Homo sapien
tccagtttcaaatgatacttatgcc

SEQ ID NO: 3878272 - DNA, 25 bp, Homo sapien
gggacagtagtcatacttctacttt

SEQ ID NO: 3878273 - DNA, 25 bp, Homo sapien
tctggtactagctatcaggaggctg

SEQ ID NO: 3878274 - DNA, 25 bp, Homo sapien
agtcactcagcaaaggtaagattag

SEQ ID NO: 3878275 - DNA, 25 bp, Homo sapien
cttgtagaaagaataggctaggcac

SEQ ID NO: 3878276 - DNA, 25 bp, Homo sapien
tatgcaaagagacattggttagctc

SEQ ID NO: 3878277 - DNA, 25 bp, Homo sapien
tagaatttctcatagatcctggcat

SEQ ID NO: 3878278 - DNA, 25 bp, Homo sapien
cctggcatttggtacatctgagttg

SEQ ID NO: 3878279 - DNA, 25 bp, Homo sapien
gcatttggtacatctgagttgaata

SEQ ID NO: 3878280 - DNA, 25 bp, Homo sapien
tttctcatagatcctggcatttggt

SEQ ID NO: 3878281 - DNA, 25 bp, Homo sapien
ttttgcagttatctctccatggaca

SEQ ID NO: 3878282 - DNA, 25 bp, Homo sapien
ccatggacagtcagaacaggtattc

SEQ ID NO: 3878283 - DNA, 25 bp, Homo sapien
cagttatctctccatggacagtcag

SEQ ID NO: 3878284 - DNA, 25 bp, Homo sapien
tatctctccatggacagtcagaaca

SEQ ID NO: 3878285 - DNA, 25 bp, Homo sapien
tatgtacctctggaatggaactttg

SEQ ID NO: 3878286 - DNA, 25 bp, Homo sapien
aaagtgaacataggctgagcgcagt

SEQ ID NO: 3878287 - DNA, 25 bp, Homo sapien
catcaacttgaagtacagtgaatca

SEQ ID NO: 3878288 - DNA, 25 bp, Homo sapien
gagacaaggtagttgcctattggaa

SEQ ID NO: 3878289 - DNA, 25 bp, Homo sapien
catgtctcttccaattagataagcc

SEQ ID NO: 3878290 - DNA, 25 bp, Homo sapien
gatggtcccatacaaagctggactc

SEQ ID NO: 3878291 - DNA, 25 bp, Homo sapien
tggtgtcatttctatgatggtccca

SEQ ID NO: 3878292 - DNA, 25 bp, Homo sapien
ttctatgatggtcccatacaaagct

SEQ ID NO: 3878293 - DNA, 25 bp, Homo sapien
aactctttcacccaccaaatctgtg

SEQ ID NO: 3878294 - DNA, 25 bp, Homo sapien
tctgcatagacaggagggttcccta

SEQ ID NO: 3878295 - DNA, 25 bp, Homo sapien
gattccctgactacagcaggagagg

SEQ ID NO: 3878296 - DNA, 25 bp, Homo sapien
gatgtgcttgtcatgttggctcaga

SEQ ID NO: 3878297 - DNA, 25 bp, Homo sapien
aactgcagtgagacgagccaaagct

SEQ ID NO: 3878298 - DNA, 25 bp, Homo sapien
ctgactgctcagagtggtggcttct

SEQ ID NO: 3878299 - DNA, 25 bp, Homo sapien
aacagcattcatagcgtgttcacca

SEQ ID NO: 3878300 - DNA, 25 bp, Homo sapien
tttgaaattggagtcagccctctct

SEQ ID NO: 3878301 - DNA, 25 bp, Homo sapien
taacagttatgtttatgcagtattc

SEQ ID NO: 3878302 - DNA, 25 bp, Homo sapien
tgatgaattattttcaggaggtttt

SEQ ID NO: 3878303 - DNA, 25 bp, Homo sapien
tgttgttttagcagccgtgaaaaca

SEQ ID NO: 3878304 - DNA, 25 bp, Homo sapien
gaatgttgttttagcagccgtgaaa

SEQ ID NO: 3878305 - DNA, 25 bp, Homo sapien
gatgaattattttcaggaggttttc

SEQ ID NO: 3878306 - DNA, 25 bp, Homo sapien
agccagtctagctgcagcagcccag

SEQ ID NO: 3878307 - DNA, 25 bp, Homo sapien
agcagcccaggcggcaacagcagtg

SEQ ID NO: 3878308 - DNA, 25 bp, Homo sapien
agcccaggcggcaacagcagtgcca

SEQ ID NO: 3878309 - DNA, 25 bp, Homo sapien
acagccagtctagctgcagcagccc

SEQ ID NO: 3878310 - DNA, 25 bp, Homo sapien
taggaatcttcttagctctcgccgt

SEQ ID NO: 3878311 - DNA, 25 bp, Homo sapien
tcttcttagctctcgccgtgtaaac

SEQ ID NO: 3878312 - DNA, 25 bp, Homo sapien
ttagctctcgccgtgtaaacttcat

SEQ ID NO: 3878313 - DNA, 25 bp, Homo sapien
ctctcgccgtgtaaacttcattcac

SEQ ID NO: 3878314 - DNA, 25 bp, Homo sapien
cttgctggccaggtctgccttgtta

SEQ ID NO: 3878315 - DNA, 25 bp, Homo sapien
tcttgctggccaggtctgccttgtt

SEQ ID NO: 3878316 - DNA, 25 bp, Homo sapien
tgctggccaggtctgccttgttacc

SEQ ID NO: 3878317 - DNA, 25 bp, Homo sapien
gctggccaggtctgccttgttaccc

SEQ ID NO: 3878318 - DNA, 25 bp, Homo sapien
gggctgggctatgataccgctcctg

SEQ ID NO: 3878319 - DNA, 25 bp, Homo sapien
gccaccatagactcattgttcccag

SEQ ID NO: 3878320 - DNA, 25 bp, Homo sapien
taagcagacagtctgtgtaaggaag

SEQ ID NO: 3878321 - DNA, 25 bp, Homo sapien
ctcaaacttgactattgtgtcgtct

SEQ ID NO: 3878322 - DNA, 25 bp, Homo sapien
gtcgtgtgctgtgccttgccgaccc

SEQ ID NO: 3878323 - DNA, 25 bp, Homo sapien
caggtcgtgtgctgtgccttgccga

SEQ ID NO: 3878324 - DNA, 25 bp, Homo sapien
tccaccaggtcgtgtgctgtgcctt

SEQ ID NO: 3878325 - DNA, 25 bp, Homo sapien
ctggtccaccaggtcgtgtgctgtg

SEQ ID NO: 3878326 - DNA, 25 bp, Homo sapien
agagagcatggggacgggagccatt

SEQ ID NO: 3878327 - DNA, 25 bp, Homo sapien
gagagcatggggacgggagccattg

SEQ ID NO: 3878328 - DNA, 25 bp, Homo sapien
tatactctggaacatacaatagact

SEQ ID NO: 3878329 - DNA, 25 bp, Homo sapien
caaatacccatagtgctacttgtca

SEQ ID NO: 3878330 - DNA, 25 bp, Homo sapien
gaccagttctagaagattggttgaa

SEQ ID NO: 3878331 - DNA, 25 bp, Homo sapien
tgtgaaggttattcatgcagcatta

SEQ ID NO: 3878332 - DNA, 25 bp, Homo sapien
gacttggatattggggtatactttc

SEQ ID NO: 3878333 - DNA, 25 bp, Homo sapien
gtatactttcttggcatagtttcaa

SEQ ID NO: 3878334 - DNA, 25 bp, Homo sapien
gggtatactttcttggcatagtttc

SEQ ID NO: 3878335 - DNA, 25 bp, Homo sapien
tgagacttggatattggggtatact

SEQ ID NO: 3878336 - DNA, 25 bp, Homo sapien
gaaccatatcataaccatcatattg

SEQ ID NO: 3878337 - DNA, 25 bp, Homo sapien
cataaccatcatattgacactgata

SEQ ID NO: 3878338 - DNA, 25 bp, Homo sapien
gctccaaatatatctgtcaccacaa

SEQ ID NO: 3878339 - DNA, 25 bp, Homo sapien
gtcaaggctccaaatatatctgtca

SEQ ID NO: 3878340 - DNA, 25 bp, Homo sapien
cggctggaaggagatgagttctaca

SEQ ID NO: 3878341 - DNA, 25 bp, Homo sapien
tagatggtggttgggcaagtgttga

SEQ ID NO: 3878342 - DNA, 25 bp, Homo sapien
ttctacaaggcagctatgagccagg

SEQ ID NO: 3878343 - DNA, 25 bp, Homo sapien
catggggaactattaagaggctgcc

SEQ ID NO: 3878344 - DNA, 25 bp, Homo sapien
cttcagtaaaagggtcactgtactg

SEQ ID NO: 3878345 - DNA, 25 bp, Homo sapien
aaatttacaggcagctttgaagaca

SEQ ID NO: 3878346 - DNA, 25 bp, Homo sapien
ccttcagtaaaagggtcactgtact

SEQ ID NO: 3878347 - DNA, 25 bp, Homo sapien
tcatcactatggactgttagccagg

SEQ ID NO: 3878348 - DNA, 25 bp, Homo sapien
aaagctataatgattagtcctggta

SEQ ID NO: 3878349 - DNA, 25 bp, Homo sapien
taatgattagtcctggtagtctcca

SEQ ID NO: 3878350 - DNA, 25 bp, Homo sapien
tgtctctgtcagaaattatgtcatc

SEQ ID NO: 3878351 - DNA, 25 bp, Homo sapien
atgatactcaactttgtctatatcc

SEQ ID NO: 3878352 - DNA, 25 bp, Homo sapien
acatgatactcaactttgtctatat

SEQ ID NO: 3878353 - DNA, 25 bp, Homo sapien
gtatacatgatactcaactttgtct

SEQ ID NO: 3878354 - DNA, 25 bp, Homo sapien
cgtatacatgatactcaactttgtc

SEQ ID NO: 3878355 - DNA, 25 bp, Homo sapien
ttcatacacaggaactgcaggatta

SEQ ID NO: 3878356 - DNA, 25 bp, Homo sapien
gggaaaagctgaattcatacacagg

SEQ ID NO: 3878357 - DNA, 25 bp, Homo sapien
gctgaattcatacacaggaactgca

SEQ ID NO: 3878358 - DNA, 25 bp, Homo sapien
aaaagctgaattcatacacaggaac

SEQ ID NO: 3878359 - DNA, 25 bp, Homo sapien
ttgcagcactcgcaagtcccataaa

SEQ ID NO: 3878360 - DNA, 25 bp, Homo sapien
tctggcgttttactagtcccttgca

SEQ ID NO: 3878361 - DNA, 25 bp, Homo sapien
tactagtcccttgcagcactcgcaa

SEQ ID NO: 3878362 - DNA, 25 bp, Homo sapien
gcagcactcgcaagtcccataaata

SEQ ID NO: 3878363 - DNA, 25 bp, Homo sapien
ttttgagatcaaatttatgttgctg

SEQ ID NO: 3878364 - DNA, 25 bp, Homo sapien
agtgggtagattaaagttgctgatt

SEQ ID NO: 3878365 - DNA, 25 bp, Homo sapien
gtgggtagattaaagttgctgattt

SEQ ID NO: 3878366 - DNA, 25 bp, Homo sapien
tgggtagattaaagttgctgatttt

SEQ ID NO: 3878367 - DNA, 25 bp, Homo sapien
gtaagatgtagggttcactcagaga

SEQ ID NO: 3878368 - DNA, 25 bp, Homo sapien
aagatgtagggttcactcagagatg

SEQ ID NO: 3878369 - DNA, 25 bp, Homo sapien
gatgtagggttcactcagagatgat

SEQ ID NO: 3878370 - DNA, 25 bp, Homo sapien
gatgattagcatcagatgtcatttt

SEQ ID NO: 3878371 - DNA, 25 bp, Homo sapien
tgggaggcagaagactttctaactt

SEQ ID NO: 3878372 - DNA, 25 bp, Homo sapien
cagaagactttctaactttcttgtt

SEQ ID NO: 3878373 - DNA, 25 bp, Homo sapien
ctgatgggaggcagaagactttcta

SEQ ID NO: 3878374 - DNA, 25 bp, Homo sapien
ttttctgatgggaggcagaagactt

SEQ ID NO: 3878375 - DNA, 25 bp, Homo sapien
tgcccggcccataatgatgttttga

SEQ ID NO: 3878376 - DNA, 25 bp, Homo sapien
gtgcccggcccataatgatgttttg

SEQ ID NO: 3878377 - DNA, 25 bp, Homo sapien
gatctcttgacctcttcatatgcct

SEQ ID NO: 3878378 - DNA, 25 bp, Homo sapien
ttgacctcttcatatgcctgcctca

SEQ ID NO: 3878379 - DNA, 25 bp, Homo sapien
tttataacatacctgaagttgggag

SEQ ID NO: 3878380 - DNA, 25 bp, Homo sapien
tctcacactttatgttcaacagagc

SEQ ID NO: 3878381 - DNA, 25 bp, Homo sapien
tatgctcctatgtattcccttaaag

SEQ ID NO: 3878382 - DNA, 25 bp, Homo sapien
cacaacacgtgggagcacaattaaa

SEQ ID NO: 3878383 - DNA, 25 bp, Homo sapien
cagtctgaagttggtgagaagccta

SEQ ID NO: 3878384 - DNA, 25 bp, Homo sapien
taatccacagctggcagaatgctag

SEQ ID NO: 3878385 - DNA, 25 bp, Homo sapien
gagaagcctaattatttgaccaggt

SEQ ID NO: 3878386 - DNA, 25 bp, Homo sapien
gggcacagtgttctgtaccttaaat

SEQ ID NO: 3878387 - DNA, 25 bp, Homo sapien
tgactgaaccctctgtaacgaaaca

SEQ ID NO: 3878388 - DNA, 25 bp, Homo sapien
actaagactaagatttgttgcctct

SEQ ID NO: 3878389 - DNA, 25 bp, Homo sapien
ccatcgcaagggtcatgactgaacc

SEQ ID NO: 3878390 - DNA, 25 bp, Homo sapien
gaatttcactagcagtactttaaag

SEQ ID NO: 3878391 - DNA, 25 bp, Homo sapien
cctttgccggtgcagtgagagcagc

SEQ ID NO: 3878392 - DNA, 25 bp, Homo sapien
gataacgagatagctgcctctgcct

SEQ ID NO: 3878393 - DNA, 25 bp, Homo sapien
tatagcagagcacgcagaaaactct

SEQ ID NO: 3878394 - DNA, 25 bp, Homo sapien
ttatttctgcattgtccactggacg

SEQ ID NO: 3878395 - DNA, 25 bp, Homo sapien
tgccagccagatctctaacatacgt

SEQ ID NO: 3878396 - DNA, 25 bp, Homo sapien
gatccttaatagagtggccctcttg

SEQ ID NO: 3878397 - DNA, 25 bp, Homo sapien
taacatacgtcagtacaggaaaagg

SEQ ID NO: 3878398 - DNA, 25 bp, Homo sapien
tgggcatacttcagcgatccttaat

SEQ ID NO: 3878399 - DNA, 25 bp, Homo sapien
gctcaaatttgtaaaagacatgtaa

SEQ ID NO: 3878400 - DNA, 25 bp, Homo sapien
aaacatacagtgacaacactgaact

SEQ ID NO: 3878401 - DNA, 25 bp, Homo sapien
tggtatgtccatgatccttatcaga

SEQ ID NO: 3878402 - DNA, 25 bp, Homo sapien
tcagggaatgatgctaaaagtttgg

SEQ ID NO: 3878403 - DNA, 25 bp, Homo sapien
tattggtaaggatatatggagcagc

SEQ ID NO: 3878404 - DNA, 25 bp, Homo sapien
ctttttgacaagtcgttctggagca

SEQ ID NO: 3878405 - DNA, 25 bp, Homo sapien
tggactagagtagccaaaccaacgt

SEQ ID NO: 3878406 - DNA, 25 bp, Homo sapien
caactgcacggctattagaatgtct

SEQ ID NO: 3878407 - DNA, 25 bp, Homo sapien
gcttctcttgtactgttatttgcca

SEQ ID NO: 3878408 - DNA, 25 bp, Homo sapien
ctgctgttgtatatttagccataga

SEQ ID NO: 3878409 - DNA, 25 bp, Homo sapien
actagctttgaccaccagggactct

SEQ ID NO: 3878410 - DNA, 25 bp, Homo sapien
cttgtactgttatttgccactgagc

SEQ ID NO: 3878411 - DNA, 25 bp, Homo sapien
cctgcagttgccaccctgctgtgtg

SEQ ID NO: 3878412 - DNA, 25 bp, Homo sapien
ctgcagttgccaccctgctgtgtgt

SEQ ID NO: 3878413 - DNA, 25 bp, Homo sapien
tagaaaaaggacctatgttgcccag

SEQ ID NO: 3878414 - DNA, 25 bp, Homo sapien
tgtaaatacttcttgcagtttgtcc

SEQ ID NO: 3878415 - DNA, 25 bp, Homo sapien
ccatacccagcctgtctgttgattt

SEQ ID NO: 3878416 - DNA, 25 bp, Homo sapien
tgttagtcttgtcctttatcccttc

SEQ ID NO: 3878417 - DNA, 25 bp, Homo sapien
ctgaggattctagcactatttaata

SEQ ID NO: 3878418 - DNA, 25 bp, Homo sapien
actcttattttagtgtcagaaacaa

SEQ ID NO: 3878419 - DNA, 25 bp, Homo sapien
ttattttagtgtcagaaacaatcat

SEQ ID NO: 3878420 - DNA, 25 bp, Homo sapien
gcactatttaatactcttattttag

SEQ ID NO: 3878421 - DNA, 25 bp, Homo sapien
ggcctaaattgtagacttttctgaa

SEQ ID NO: 3878422 - DNA, 25 bp, Homo sapien
gacttttctgaacactcagaattct

SEQ ID NO: 3878423 - DNA, 25 bp, Homo sapien
tgttttcaactggaagactggtgct

SEQ ID NO: 3878424 - DNA, 25 bp, Homo sapien
gactggtgctatcacatcaaaatca

SEQ ID NO: 3878425 - DNA, 25 bp, Homo sapien
ctaaaactattcatgcccagtcttt

SEQ ID NO: 3878426 - DNA, 25 bp, Homo sapien
gcaagcaagtggagctgatgattgt

SEQ ID NO: 3878427 - DNA, 25 bp, Homo sapien
taaaactattcatgcccagtctttt

SEQ ID NO: 3878428 - DNA, 25 bp, Homo sapien
caagtggagctgatgattgtccctt

SEQ ID NO: 3878429 - DNA, 25 bp, Homo sapien
ttcagtgggacacataatgaggcca

SEQ ID NO: 3878430 - DNA, 25 bp, Homo sapien
ggcccggcaacaacagattctgtta

SEQ ID NO: 3878431 - DNA, 25 bp, Homo sapien
gatggtgacctaaatagccactacc

SEQ ID NO: 3878432 - DNA, 25 bp, Homo sapien
tctgtaatgctaccgatactaggtg

SEQ ID NO: 3878433 - DNA, 25 bp, Homo sapien
tttcatttggaaccctctttgtcac

SEQ ID NO: 3878434 - DNA, 25 bp, Homo sapien
tgtcactgccatagtaacaaatgga

SEQ ID NO: 3878435 - DNA, 25 bp, Homo sapien
gtgacaggcactgtcattgttccca

SEQ ID NO: 3878436 - DNA, 25 bp, Homo sapien
gaaacattgagaacattttgtgaca

SEQ ID NO: 3878437 - DNA, 25 bp, Homo sapien
ccattcttcttaattgctgcttcat

SEQ ID NO: 3878438 - DNA, 25 bp, Homo sapien
tttggtcccaaacatttatagcttc

SEQ ID NO: 3878439 - DNA, 25 bp, Homo sapien
ttctttggtcccaaacatttatagc

SEQ ID NO: 3878440 - DNA, 25 bp, Homo sapien
ttggtcccaaacatttatagcttcc

SEQ ID NO: 3878441 - DNA, 25 bp, Homo sapien
taaaattctatcatctacacagaca

SEQ ID NO: 3878442 - DNA, 25 bp, Homo sapien
agcacttgtagtaccattttgagcc

SEQ ID NO: 3878443 - DNA, 25 bp, Homo sapien
gaaagtgctactcttttgtatgttg

SEQ ID NO: 3878444 - DNA, 25 bp, Homo sapien
ccgatgcatgaacaaaggatatctt

SEQ ID NO: 3878445 - DNA, 25 bp, Homo sapien
tgctacccaggctgtgccgtcccac

SEQ ID NO: 3878446 - DNA, 25 bp, Homo sapien
ttaggtagttgttctgctacccagg

SEQ ID NO: 3878447 - DNA, 25 bp, Homo sapien
ttctgctacccaggctgtgccgtcc

SEQ ID NO: 3878448 - DNA, 25 bp, Homo sapien
gttctgctacccaggctgtgccgtc

SEQ ID NO: 3878449 - DNA, 25 bp, Homo sapien
aatatttttacatggcccggacgca

SEQ ID NO: 3878450 - DNA, 25 bp, Homo sapien
tggagtttcgaagggtgcacacgct

SEQ ID NO: 3878451 - DNA, 25 bp, Homo sapien
ggaacagcataagctccaagctgga

SEQ ID NO: 3878452 - DNA, 25 bp, Homo sapien
gcctcagagcgttattatagatgcc

SEQ ID NO: 3878453 - DNA, 25 bp, Homo sapien
ccatgtgtcgcttctcctgcacttt

SEQ ID NO: 3878454 - DNA, 25 bp, Homo sapien
tcgcgatgctccgtgtgtgcgtcca

SEQ ID NO: 3878455 - DNA, 25 bp, Homo sapien
caggatcctttccatgtgtcgcttc

SEQ ID NO: 3878456 - DNA, 25 bp, Homo sapien
tgtgcgtccaggtgtctgctgaagt

SEQ ID NO: 3878457 - DNA, 25 bp, Homo sapien
tagggtcagcttgaacaggccgcac

SEQ ID NO: 3878458 - DNA, 25 bp, Homo sapien
tctcctcattctttttgcttgttcc

SEQ ID NO: 3878459 - DNA, 25 bp, Homo sapien
cctcattctttttgcttgttcccat

SEQ ID NO: 3878460 - DNA, 25 bp, Homo sapien
acttctcctcattctttttgcttgt

SEQ ID NO: 3878461 - DNA, 25 bp, Homo sapien
cacttctcctcattctttttgcttg

SEQ ID NO: 3878462 - DNA, 25 bp, Homo sapien
tctgtgatgcctttcggcttcaggg

SEQ ID NO: 3878463 - DNA, 25 bp, Homo sapien
ctctgtgatgcctttcggcttcagg

SEQ ID NO: 3878464 - DNA, 25 bp, Homo sapien
tgtgatgcctttcggcttcaggggt

SEQ ID NO: 3878465 - DNA, 25 bp, Homo sapien
tgatgcctttcggcttcaggggtcc

SEQ ID NO: 3878466 - DNA, 25 bp, Homo sapien
gcagttcggtaggtagcagaatttt

SEQ ID NO: 3878467 - DNA, 25 bp, Homo sapien
taggcccccaggtcactagcctgca

SEQ ID NO: 3878468 - DNA, 25 bp, Homo sapien
cctgcagttcggtaggtagcagaat

SEQ ID NO: 3878469 - DNA, 25 bp, Homo sapien
caggtcactagcctgcagttcggta

SEQ ID NO: 3878470 - DNA, 25 bp, Homo sapien
gctgtaatgtaaggtgtctggccta

SEQ ID NO: 3878471 - DNA, 25 bp, Homo sapien
ccagccttatgggatctcaggcaaa

SEQ ID NO: 3878472 - DNA, 25 bp, Homo sapien
ggcctaatgatgtctgaagtccctc

SEQ ID NO: 3878473 - DNA, 25 bp, Homo sapien
caggtacaggacactatgctgtcag

SEQ ID NO: 3878474 - DNA, 25 bp, Homo sapien
gcacagtcaagagcggactgtttcc

SEQ ID NO: 3878475 - DNA, 25 bp, Homo sapien
ggcagcacagtcaagagcggactgt

SEQ ID NO: 3878476 - DNA, 25 bp, Homo sapien
cagtcaagagcggactgtttccttg

SEQ ID NO: 3878477 - DNA, 25 bp, Homo sapien
agtcaagagcggactgtttccttgc

SEQ ID NO: 3878478 - DNA, 25 bp, Homo sapien
gtgcccttgccggactcttcatgga

SEQ ID NO: 3878479 - DNA, 25 bp, Homo sapien
ctgcgcggggtgtgtagcaagccct

SEQ ID NO: 3878480 - DNA, 25 bp, Homo sapien
gggcggtgcccttgccggactcttc

SEQ ID NO: 3878481 - DNA, 25 bp, Homo sapien
cggactcttcatggactaaatccca

SEQ ID NO: 3878482 - DNA, 25 bp, Homo sapien
tgccagcatcccattcacctccgga

SEQ ID NO: 3878483 - DNA, 25 bp, Homo sapien
tcccattcacctccggaaagaacca

SEQ ID NO: 3878484 - DNA, 25 bp, Homo sapien
aaagaaccaggggcgctctcttcag

SEQ ID NO: 3878485 - DNA, 25 bp, Homo sapien
cggaaagaaccaggggcgctctctt

SEQ ID NO: 3878486 - DNA, 25 bp, Homo sapien
tgtgggcagcgtcagagtggcctcg

SEQ ID NO: 3878487 - DNA, 25 bp, Homo sapien
ggcagcgtcagagtggcctcgcctg

SEQ ID NO: 3878488 - DNA, 25 bp, Homo sapien
ggcatgtgggcagcgtcagagtggc

SEQ ID NO: 3878489 - DNA, 25 bp, Homo sapien
agcctggaaaaccgaacttcgccat

SEQ ID NO: 3878490 - DNA, 25 bp, Homo sapien
ttcctcccgatcagggtagacacag

SEQ ID NO: 3878491 - DNA, 25 bp, Homo sapien
aaaactgccgcgatcgcccgaaggc

SEQ ID NO: 3878492 - DNA, 25 bp, Homo sapien
tgtccgcagtcgctgaatgtcactg

SEQ ID NO: 3878493 - DNA, 25 bp, Homo sapien
aagaaagcacccagaacgcggctga

SEQ ID NO: 3878494 - DNA, 25 bp, Homo sapien
cctcccccgagggcggcgagaggag

SEQ ID NO: 3878495 - DNA, 25 bp, Homo sapien
tcccccgagggcggcgagaggagcc

SEQ ID NO: 3878496 - DNA, 25 bp, Homo sapien
ctcccccgagggcggcgagaggagc

SEQ ID NO: 3878497 - DNA, 25 bp, Homo sapien
cgagggcggcgagaggagccccccg

SEQ ID NO: 3878498 - DNA, 25 bp, Homo sapien
ggcgggatggaacgctccgggcggc

SEQ ID NO: 3878499 - DNA, 25 bp, Homo sapien
tcgaattttaacttcgcgtgcccgc

SEQ ID NO: 3878500 - DNA, 25 bp, Homo sapien
ccaccgaaggagctggcgactgaga

SEQ ID NO: 3878501 - DNA, 25 bp, Homo sapien
ggcgactgagaacctcgaattttaa

SEQ ID NO: 3878502 - DNA, 25 bp, Homo sapien
tctgctgcgagtagacccaatcctt

SEQ ID NO: 3878503 - DNA, 25 bp, Homo sapien
gattggtattggcagtggaccctcc

SEQ ID NO: 3878504 - DNA, 25 bp, Homo sapien
aataaggctacgctcctctgctgcg

SEQ ID NO: 3878505 - DNA, 25 bp, Homo sapien
ttatgtggaagcgagatgaccggca

SEQ ID NO: 3878506 - DNA, 25 bp, Homo sapien
agtcaggcacatggacttggtgtcc

SEQ ID NO: 3878507 - DNA, 25 bp, Homo sapien
tagtcaggcacatggacttggtgtc

SEQ ID NO: 3878508 - DNA, 25 bp, Homo sapien
gtcaggcacatggacttggtgtccc

SEQ ID NO: 3878509 - DNA, 25 bp, Homo sapien
tctagtcaggcacatggacttggtg

SEQ ID NO: 3878510 - DNA, 25 bp, Homo sapien
tacttgtgatggaagagtcagtaca

SEQ ID NO: 3878511 - DNA, 25 bp, Homo sapien
gactaattcaggtagctttaggcaa

SEQ ID NO: 3878512 - DNA, 25 bp, Homo sapien
tgatccttcgctttaaccttgcccg

SEQ ID NO: 3878513 - DNA, 25 bp, Homo sapien
tataatgaacaggtacgtggactaa

SEQ ID NO: 3878514 - DNA, 25 bp, Homo sapien
tgaccacactgggatagtcgctgcc

SEQ ID NO: 3878515 - DNA, 25 bp, Homo sapien
aaggtcagctgaacagactccaagg

SEQ ID NO: 3878516 - DNA, 25 bp, Homo sapien
gaaaagctgtaaaccgatgtcctca

SEQ ID NO: 3878517 - DNA, 25 bp, Homo sapien
gggatgataatatagcactgaccac

SEQ ID NO: 3878518 - DNA, 25 bp, Homo sapien
tctcttacgccaagaatggctagaa

SEQ ID NO: 3878519 - DNA, 25 bp, Homo sapien
ctagaatccgtttctctttgtggct

SEQ ID NO: 3878520 - DNA, 25 bp, Homo sapien
agaatggctagaatccgtttctctt

SEQ ID NO: 3878521 - DNA, 25 bp, Homo sapien
cttgctctcttacgccaagaatggc

SEQ ID NO: 3878522 - DNA, 25 bp, Homo sapien
aggcacacaccgtcatacccggctg

SEQ ID NO: 3878523 - DNA, 25 bp, Homo sapien
acacaccgtcatacccggctgattt

SEQ ID NO: 3878524 - DNA, 25 bp, Homo sapien
gcacacaccgtcatacccggctgat

SEQ ID NO: 3878525 - DNA, 25 bp, Homo sapien
ttacaggcacacaccgtcatacccg

SEQ ID NO: 3878526 - DNA, 25 bp, Homo sapien
tctgtataaagtaaggtgctggcct

SEQ ID NO: 3878527 - DNA, 25 bp, Homo sapien
cactcagtagtggtgatttcactgc

SEQ ID NO: 3878528 - DNA, 25 bp, Homo sapien
gatgccattaaccagcacacagatg

SEQ ID NO: 3878529 - DNA, 25 bp, Homo sapien
ttaaaccctgtgttgcaaggatgcc

SEQ ID NO: 3878530 - DNA, 25 bp, Homo sapien
aagggagtagcttagagcacagaat

SEQ ID NO: 3878531 - DNA, 25 bp, Homo sapien
gggagtagcttagagcacagaatgc

SEQ ID NO: 3878532 - DNA, 25 bp, Homo sapien
ggagtagcttagagcacagaatgcc

SEQ ID NO: 3878533 - DNA, 25 bp, Homo sapien
ctaagggagtagcttagagcacaga

SEQ ID NO: 3878534 - DNA, 25 bp, Homo sapien
ggatttcagtttgtgcaagcacgat

SEQ ID NO: 3878535 - DNA, 25 bp, Homo sapien
cagtttgtgcaagcacgatggttgg

SEQ ID NO: 3878536 - DNA, 25 bp, Homo sapien
tttcagtttgtgcaagcacgatggt

SEQ ID NO: 3878537 - DNA, 25 bp, Homo sapien
tcagtttgtgcaagcacgatggttg

SEQ ID NO: 3878538 - DNA, 25 bp, Homo sapien
aagtgctatgttcttgactaaataa

SEQ ID NO: 3878539 - DNA, 25 bp, Homo sapien
ctgcccattaagtgctatgttcttg

SEQ ID NO: 3878540 - DNA, 25 bp, Homo sapien
aaataattcatgtatcgcagagagg

SEQ ID NO: 3878541 - DNA, 25 bp, Homo sapien
catgtatcgcagagagggaaggtat

SEQ ID NO: 3878542 - DNA, 25 bp, Homo sapien
aggaaccagagctcacttcaccctg

SEQ ID NO: 3878543 - DNA, 25 bp, Homo sapien
gtattacactgacccaggaaccaga

SEQ ID NO: 3878544 - DNA, 25 bp, Homo sapien
tcagggaactcggaacctaactgtc

SEQ ID NO: 3878545 - DNA, 25 bp, Homo sapien
tctttctggtagttgggtgagtcct

SEQ ID NO: 3878546 - DNA, 25 bp, Homo sapien
cgtgaggtttggacaggctgggcag

SEQ ID NO: 3878547 - DNA, 25 bp, Homo sapien
atacgtgaggtttggacaggctggg

SEQ ID NO: 3878548 - DNA, 25 bp, Homo sapien
ggctgggcagtaggttatggcatat

SEQ ID NO: 3878549 - DNA, 25 bp, Homo sapien
ctgatacgtgaggtttggacaggct

SEQ ID NO: 3878550 - DNA, 25 bp, Homo sapien
gatggttgatagagcgttcagcttc

SEQ ID NO: 3878551 - DNA, 25 bp, Homo sapien
gattatgcttgatattcagctttga

SEQ ID NO: 3878552 - DNA, 25 bp, Homo sapien
gcctggatggttgatagagcgttca

SEQ ID NO: 3878553 - DNA, 25 bp, Homo sapien
tgagaactttaaggcctggatggtt

SEQ ID NO: 3878554 - DNA, 25 bp, Homo sapien
ttattcctggcaattcctgacagca

SEQ ID NO: 3878555 - DNA, 25 bp, Homo sapien
tactgcaagggctgcctttggcagg

SEQ ID NO: 3878556 - DNA, 25 bp, Homo sapien
tggttttggctctgcacatgccttg

SEQ ID NO: 3878557 - DNA, 25 bp, Homo sapien
ccttgatgttagctggtgctgctac

SEQ ID NO: 3878558 - DNA, 25 bp, Homo sapien
tataagtcagttgcttgcaaggaac

SEQ ID NO: 3878559 - DNA, 25 bp, Homo sapien
agagtataagtcagttgcttgcaag

SEQ ID NO: 3878560 - DNA, 25 bp, Homo sapien
cagttgcttgcaaggaactcttagg

SEQ ID NO: 3878561 - DNA, 25 bp, Homo sapien
agttgcttgcaaggaactcttaggg

SEQ ID NO: 3878562 - DNA, 25 bp, Homo sapien
tctggctctccttgtcctcctgtcc

SEQ ID NO: 3878563 - DNA, 25 bp, Homo sapien
tcctgtccacccatccctccaccca

SEQ ID NO: 3878564 - DNA, 25 bp, Homo sapien
ggctctccttgtcctcctgtccacc

SEQ ID NO: 3878565 - DNA, 25 bp, Homo sapien
ctcctgtccacccatccctccaccc

SEQ ID NO: 3878566 - DNA, 25 bp, Homo sapien
tccctcaatctctgtttcgtgtact

SEQ ID NO: 3878567 - DNA, 25 bp, Homo sapien
ctgcacgatagcctgtctgctctct

SEQ ID NO: 3878568 - DNA, 25 bp, Homo sapien
tgtctctgtcttgggcgtcctctgc

SEQ ID NO: 3878569 - DNA, 25 bp, Homo sapien
tgtttcgtgtacttctctctagccc

SEQ ID NO: 3878570 - DNA, 25 bp, Homo sapien
tccaaattcagctgttgcctctcag

SEQ ID NO: 3878571 - DNA, 25 bp, Homo sapien
ctaatagacgatgacatccaaattc

SEQ ID NO: 3878572 - DNA, 25 bp, Homo sapien
gcctctcagctgaacccaaccctgg

SEQ ID NO: 3878573 - DNA, 25 bp, Homo sapien
ttgcctctcagctgaacccaaccct

SEQ ID NO: 3878574 - DNA, 25 bp, Homo sapien
caactgtgaattgttccgcagcttc

SEQ ID NO: 3878575 - DNA, 25 bp, Homo sapien
ctgaaccaaggtttcttaattagag

SEQ ID NO: 3878576 - DNA, 25 bp, Homo sapien
gtttcttaattagagtatccacaag

SEQ ID NO: 3878577 - DNA, 25 bp, Homo sapien
ttggtctctgaaccaaggtttctta

SEQ ID NO: 3878578 - DNA, 25 bp, Homo sapien
tgtgaagaggttgagggaaaagtaa

SEQ ID NO: 3878579 - DNA, 25 bp, Homo sapien
tatatgtgaagaggttgagggaaaa

SEQ ID NO: 3878580 - DNA, 25 bp, Homo sapien
ctatatgtgaagaggttgagggaaa

SEQ ID NO: 3878581 - DNA, 25 bp, Homo sapien
tatgtgaagaggttgagggaaaagt

SEQ ID NO: 3878582 - DNA, 25 bp, Homo sapien
tgggttctggatggatactggcctt

SEQ ID NO: 3878583 - DNA, 25 bp, Homo sapien
ttctctgcctcacagctgtgcgctg

SEQ ID NO: 3878584 - DNA, 25 bp, Homo sapien
tcccttagctttcttgggttctgga

SEQ ID NO: 3878585 - DNA, 25 bp, Homo sapien
cagctgtgcgctggtttcccttagc

SEQ ID NO: 3878586 - DNA, 25 bp, Homo sapien
ctggtgtccgtgtccctgtgaatgt

SEQ ID NO: 3878587 - DNA, 25 bp, Homo sapien
tggtgtccgtgtccctgtgaatgtg

SEQ ID NO: 3878588 - DNA, 25 bp, Homo sapien
gtgtccgtgtccctgtgaatgtgtc

SEQ ID NO: 3878589 - DNA, 25 bp, Homo sapien
gtccgtgtccctgtgaatgtgtcat

SEQ ID NO: 3878590 - DNA, 25 bp, Homo sapien
tatgtttcttcatagtgatgataat

SEQ ID NO: 3878591 - DNA, 25 bp, Homo sapien
cttcatagtgatgataatcataatg

SEQ ID NO: 3878592 - DNA, 25 bp, Homo sapien
ttcttcatagtgatgataatcataa

SEQ ID NO: 3878593 - DNA, 25 bp, Homo sapien
gtttcttcatagtgatgataatcat

SEQ ID NO: 3878594 - DNA, 25 bp, Homo sapien
ccacattaccttcagttgttgtttc

SEQ ID NO: 3878595 - DNA, 25 bp, Homo sapien
tatatataaccttatgcagtttccc

SEQ ID NO: 3878596 - DNA, 25 bp, Homo sapien
tgataaccacttatataaccatagc

SEQ ID NO: 3878597 - DNA, 25 bp, Homo sapien
ttagatttataggaaagttgtcaaa

SEQ ID NO: 3878598 - DNA, 25 bp, Homo sapien
tgggcatctatcaaggcatttgttc

SEQ ID NO: 3878599 - DNA, 25 bp, Homo sapien
tcctgagtgtgaactgtcccttgct

SEQ ID NO: 3878600 - DNA, 25 bp, Homo sapien
tcccttgctgttttttgggcatcta

SEQ ID NO: 3878601 - DNA, 25 bp, Homo sapien
gttaaatggcgagatcttgcctcac

SEQ ID NO: 3878602 - DNA, 25 bp, Homo sapien
caaggtgttaatgagacatcggtca

SEQ ID NO: 3878603 - DNA, 25 bp, Homo sapien
caagctaggactgcaagacccttat

SEQ ID NO: 3878604 - DNA, 25 bp, Homo sapien
tgtgtggctacctcccaagctagga

SEQ ID NO: 3878605 - DNA, 25 bp, Homo sapien
catcggtcataggtccaggctctgg

SEQ ID NO: 3878606 - DNA, 25 bp, Homo sapien
gaatactgcaattgaaagggtcaga

SEQ ID NO: 3878607 - DNA, 25 bp, Homo sapien
ctgcaattgaaagggtcagaggtag

SEQ ID NO: 3878608 - DNA, 25 bp, Homo sapien
ctactgcttatgaatactgcaattg

SEQ ID NO: 3878609 - DNA, 25 bp, Homo sapien
cttatgaatactgcaattgaaaggg

SEQ ID NO: 3878610 - DNA, 25 bp, Homo sapien
gtttctttacatgtcgtgtttgtgg

SEQ ID NO: 3878611 - DNA, 25 bp, Homo sapien
gatggtttctttacatgtcgtgttt

SEQ ID NO: 3878612 - DNA, 25 bp, Homo sapien
tctttacatgtcgtgtttgtggtca

SEQ ID NO: 3878613 - DNA, 25 bp, Homo sapien
ctttacatgtcgtgtttgtggtcat

SEQ ID NO: 3878614 - DNA, 25 bp, Homo sapien
catcacctgatggtcgcagatcacg

SEQ ID NO: 3878615 - DNA, 25 bp, Homo sapien
cacctgatggtcgcagatcacgagg

SEQ ID NO: 3878616 - DNA, 25 bp, Homo sapien
atcacctgatggtcgcagatcacga

SEQ ID NO: 3878617 - DNA, 25 bp, Homo sapien
tcacctgatggtcgcagatcacgag

SEQ ID NO: 3878618 - DNA, 25 bp, Homo sapien
catatgttgagggtttcaccttagc

SEQ ID NO: 3878619 - DNA, 25 bp, Homo sapien
taggcattcacttcggggaattccc

SEQ ID NO: 3878620 - DNA, 25 bp, Homo sapien
gaattaggcattcacttcggggaat

SEQ ID NO: 3878621 - DNA, 25 bp, Homo sapien
cagaagtgattgaatgaattaggca

SEQ ID NO: 3878622 - DNA, 25 bp, Homo sapien
tgcccttttaagtccataaagcgaa

SEQ ID NO: 3878623 - DNA, 25 bp, Homo sapien
tttcttgaggaagcaccgcattgga

SEQ ID NO: 3878624 - DNA, 25 bp, Homo sapien
cgtccgtagagatccccgggcttgt

SEQ ID NO: 3878625 - DNA, 25 bp, Homo sapien
taaagcgaattaggaagaaagccac

SEQ ID NO: 3878626 - DNA, 25 bp, Homo sapien
ggctgtgcaggagccaccggcttct

SEQ ID NO: 3878627 - DNA, 25 bp, Homo sapien
actgtattacgccccctggaaccag

SEQ ID NO: 3878628 - DNA, 25 bp, Homo sapien
aggagccaccggcttctcccagagg

SEQ ID NO: 3878629 - DNA, 25 bp, Homo sapien
ctgactgtattacgccccctggaac

SEQ ID NO: 3878630 - DNA, 25 bp, Homo sapien
ctcacctctagcagcctcaggagct

SEQ ID NO: 3878631 - DNA, 25 bp, Homo sapien
gctgtgtaaattctgtcatatacat

SEQ ID NO: 3878632 - DNA, 25 bp, Homo sapien
agcagcctcaggagctgtgtaaatt

SEQ ID NO: 3878633 - DNA, 25 bp, Homo sapien
gcctcaggagctgtgtaaattctgt

SEQ ID NO: 3878634 - DNA, 25 bp, Homo sapien
aaacaagcctcagaaatgtgtttgg

SEQ ID NO: 3878635 - DNA, 25 bp, Homo sapien
caaacaagcctcagaaatgtgtttg

SEQ ID NO: 3878636 - DNA, 25 bp, Homo sapien
aacaagcctcagaaatgtgtttgga

SEQ ID NO: 3878637 - DNA, 25 bp, Homo sapien
aatgctgtaaaatgcgttcaaaagc

SEQ ID NO: 3878638 - DNA, 25 bp, Homo sapien
tgtaaaatgcgttcaaaagcttaag

SEQ ID NO: 3878639 - DNA, 25 bp, Homo sapien
gctgtaaaatgcgttcaaaagctta

SEQ ID NO: 3878640 - DNA, 25 bp, Homo sapien
cagtaatgctgtaaaatgcgttcaa

SEQ ID NO: 3878641 - DNA, 25 bp, Homo sapien
cctgcaaaagtacaatcgaaaaata

SEQ ID NO: 3878642 - DNA, 25 bp, Homo sapien
gaaatcctgtcaactagagctaaca

SEQ ID NO: 3878643 - DNA, 25 bp, Homo sapien
ctagagctaacagtaggcaatcacc

SEQ ID NO: 3878644 - DNA, 25 bp, Homo sapien
taaatatttgcattccccggagagc

SEQ ID NO: 3878645 - DNA, 25 bp, Homo sapien
gaagctgtacccgaatctgacgagg

SEQ ID NO: 3878646 - DNA, 25 bp, Homo sapien
gcaaccatggaaatcgactctgaga

SEQ ID NO: 3878647 - DNA, 25 bp, Homo sapien
tcttaatggactgtggcgtcgacct

SEQ ID NO: 3878648 - DNA, 25 bp, Homo sapien
gtctttgacccaggagagcagcgaa

SEQ ID NO: 3878649 - DNA, 25 bp, Homo sapien
caatggctcctacatgagaaggtag

SEQ ID NO: 3878650 - DNA, 25 bp, Homo sapien
gccccaataccctatgcagatgcag

SEQ ID NO: 3878651 - DNA, 25 bp, Homo sapien
gacatcacggctacatgaacacagg

SEQ ID NO: 3878652 - DNA, 25 bp, Homo sapien
aaggtagacaacgtgggcagtccac

SEQ ID NO: 3878653 - DNA, 25 bp, Homo sapien
aatagaaaagtagcttgtgaatagc

SEQ ID NO: 3878654 - DNA, 25 bp, Homo sapien
tcaaactaagcttacaaatcgcatg

SEQ ID NO: 3878655 - DNA, 25 bp, Homo sapien
tatttgtgtctgtttatattgcttc

SEQ ID NO: 3878656 - DNA, 25 bp, Homo sapien
tggaaatgcctctaactttacattt

SEQ ID NO: 3878657 - DNA, 25 bp, Homo sapien
tataaaataggatccagcgacactc

SEQ ID NO: 3878658 - DNA, 25 bp, Homo sapien
acagggtgacagtaagggccaagca

SEQ ID NO: 3878659 - DNA, 25 bp, Homo sapien
ggaactgtatcatgtgtcacgcctc

SEQ ID NO: 3878660 - DNA, 25 bp, Homo sapien
gccaagcaggagaggcgtaatcctt

SEQ ID NO: 3878661 - DNA, 25 bp, Homo sapien
aagagatcccgcacaaatatccagc

SEQ ID NO: 3878662 - DNA, 25 bp, Homo sapien
tattcacaagtatagcgttcagaga

SEQ ID NO: 3878663 - DNA, 25 bp, Homo sapien
aaatgaatgcttgacctagcacccg

SEQ ID NO: 3878664 - DNA, 25 bp, Homo sapien
tagcacccgtgtgaaactagcccgt

SEQ ID NO: 3878665 - DNA, 25 bp, Homo sapien
ctggaagcaatctgatcgggaagca

SEQ ID NO: 3878666 - DNA, 25 bp, Homo sapien
cagtgggccacacatcgggcaagag

SEQ ID NO: 3878667 - DNA, 25 bp, Homo sapien
ggtggtctatgcctgcacaaatcga

SEQ ID NO: 3878668 - DNA, 25 bp, Homo sapien
gaacactgcgtccattcaggagtgg

SEQ ID NO: 3878669 - DNA, 25 bp, Homo sapien
acagcagcaactctctttggtttct

SEQ ID NO: 3878670 - DNA, 25 bp, Homo sapien
tggccctggaagctgtcactacccg

SEQ ID NO: 3878671 - DNA, 25 bp, Homo sapien
catttccatgcctggtccttgacgg

SEQ ID NO: 3878672 - DNA, 25 bp, Homo sapien
ttgacggccggcatctccaacagca

SEQ ID NO: 3878673 - DNA, 25 bp, Homo sapien
ttcagacaaagccaaacgtttaatc

SEQ ID NO: 3878674 - DNA, 25 bp, Homo sapien
agacttggtgcagcgtggcatgctc

SEQ ID NO: 3878675 - DNA, 25 bp, Homo sapien
taatcacaacatactgcctacacat

SEQ ID NO: 3878676 - DNA, 25 bp, Homo sapien
gagcccgtccctcccattttgctga

SEQ ID NO: 3878677 - DNA, 25 bp, Homo sapien
cctaggccagggctatgttctgcct

SEQ ID NO: 3878678 - DNA, 25 bp, Homo sapien
tcctaggccagggctatgttctgcc

SEQ ID NO: 3878679 - DNA, 25 bp, Homo sapien
aggccagggctatgttctgcctctc

SEQ ID NO: 3878680 - DNA, 25 bp, Homo sapien
taggccagggctatgttctgcctct

SEQ ID NO: 3878681 - DNA, 25 bp, Homo sapien
ctacagctccctgccatcctcctcc

SEQ ID NO: 3878682 - DNA, 25 bp, Homo sapien
acagctccctgccatcctcctcctc

SEQ ID NO: 3878683 - DNA, 25 bp, Homo sapien
cagctccctgccatcctcctcctca

SEQ ID NO: 3878684 - DNA, 25 bp, Homo sapien
agctccctgccatcctcctcctcac

SEQ ID NO: 3878685 - DNA, 25 bp, Homo sapien
aggacgcagcggttcttggccactt

SEQ ID NO: 3878686 - DNA, 25 bp, Homo sapien
tggccacttgctggatggcgtccac

SEQ ID NO: 3878687 - DNA, 25 bp, Homo sapien
ggcccatgacgcagtgaaccaggat

SEQ ID NO: 3878688 - DNA, 25 bp, Homo sapien
agctgcttcaaaaagccccggttcg

SEQ ID NO: 3878689 - DNA, 25 bp, Homo sapien
ccagctttgcgacaaagatttcgca

SEQ ID NO: 3878690 - DNA, 25 bp, Homo sapien
tttgcgacaaagatttcgcacgcgc

SEQ ID NO: 3878691 - DNA, 25 bp, Homo sapien
aaagatttcgcacgcgcacatcccg

SEQ ID NO: 3878692 - DNA, 25 bp, Homo sapien
cccagtggcccagctttgcgacaaa

SEQ ID NO: 3878693 - DNA, 25 bp, Homo sapien
tgccgccgggtagaagaagacactg

SEQ ID NO: 3878694 - DNA, 25 bp, Homo sapien
tagcgctctgtcgatgaaggctgcc

SEQ ID NO: 3878695 - DNA, 25 bp, Homo sapien
ttctgcagcctatagcggtccagcg

SEQ ID NO: 3878696 - DNA, 25 bp, Homo sapien
tactggatgtccatgtcgcggtagt

SEQ ID NO: 3878697 - DNA, 25 bp, Homo sapien
aagttcacaaattcacgttggcacg

SEQ ID NO: 3878698 - DNA, 25 bp, Homo sapien
tagggtttggagatggacgctcaac

SEQ ID NO: 3878699 - DNA, 25 bp, Homo sapien
cctctacggtggtcgcagatctgga

SEQ ID NO: 3878700 - DNA, 25 bp, Homo sapien
tggacctgccaaatcgcctgaaagc

SEQ ID NO: 3878701 - DNA, 25 bp, Homo sapien
tgagggtgaagctcctccgtgttga

SEQ ID NO: 3878702 - DNA, 25 bp, Homo sapien
tgtcttgggtgttcttgttacttga

SEQ ID NO: 3878703 - DNA, 25 bp, Homo sapien
ccttccggtgtcttgggtgttcttg

SEQ ID NO: 3878704 - DNA, 25 bp, Homo sapien
agtgaaatgaaccggccttccggtg

SEQ ID NO: 3878705 - DNA, 25 bp, Homo sapien
tgccttaaggcggaattagttcctc

SEQ ID NO: 3878706 - DNA, 25 bp, Homo sapien
ggctctcaacgccaggccagctgtg

SEQ ID NO: 3878707 - DNA, 25 bp, Homo sapien
gcaggttaatttcattcgtgctcgg

SEQ ID NO: 3878708 - DNA, 25 bp, Homo sapien
agctgtctcagctgactgacttgcc

SEQ ID NO: 3878709 - DNA, 25 bp, Homo sapien
catgagcagcagaagtttaacctca

SEQ ID NO: 3878710 - DNA, 25 bp, Homo sapien
gagcagcagaagtttaacctcaccc

SEQ ID NO: 3878711 - DNA, 25 bp, Homo sapien
aagtttaacctcaccctggcactgg

SEQ ID NO: 3878712 - DNA, 25 bp, Homo sapien
gcagaagtttaacctcaccctggca

SEQ ID NO: 3878713 - DNA, 25 bp, Homo sapien
actgggacgctgtgccgagtcatgc

SEQ ID NO: 3878714 - DNA, 25 bp, Homo sapien
cagttccacttgtggcagattcaga

SEQ ID NO: 3878715 - DNA, 25 bp, Homo sapien
tgtgccgagtcatgcctgagccctc

SEQ ID NO: 3878716 - DNA, 25 bp, Homo sapien
ttccacttgtggcagattcagaccc

SEQ ID NO: 3878717 - DNA, 25 bp, Homo sapien
tgagtaggcattcttgaggcttgtc

SEQ ID NO: 3878718 - DNA, 25 bp, Homo sapien
cagcctcttggcagatgagtaggca

SEQ ID NO: 3878719 - DNA, 25 bp, Homo sapien
tcatcgccaatgtagagcttgggcc

SEQ ID NO: 3878720 - DNA, 25 bp, Homo sapien
cttgggccagacctcgttgacgtgg

SEQ ID NO: 3878721 - DNA, 25 bp, Homo sapien
tagagccaagggattttctctcctt

SEQ ID NO: 3878722 - DNA, 25 bp, Homo sapien
gagccaagggattttctctcctttc

SEQ ID NO: 3878723 - DNA, 25 bp, Homo sapien
ttagagccaagggattttctctcct

SEQ ID NO: 3878724 - DNA, 25 bp, Homo sapien
tttagagccaagggattttctctcc

SEQ ID NO: 3878725 - DNA, 25 bp, Homo sapien
ggaaggcccagaagattcctgacat

SEQ ID NO: 3878726 - DNA, 25 bp, Homo sapien
gaaggcccagaagattcctgacatt

SEQ ID NO: 3878727 - DNA, 25 bp, Homo sapien
ccagtggaaagagtacatcgccaag

SEQ ID NO: 3878728 - DNA, 25 bp, Homo sapien
cagccagtggaaagagtacatcgcc

SEQ ID NO: 3878729 - DNA, 25 bp, Homo sapien
tcagccagtggaaagagtacatcgc

SEQ ID NO: 3878730 - DNA, 25 bp, Homo sapien
gccagtggaaagagtacatcgccaa

SEQ ID NO: 3878731 - DNA, 25 bp, Homo sapien
tgggagaggactttccattgtcccc

SEQ ID NO: 3878732 - DNA, 25 bp, Homo sapien
gagtaaatgatgcacctatggtcag

SEQ ID NO: 3878733 - DNA, 25 bp, Homo sapien
cccaagatagaaagctgtgcctcga

SEQ ID NO: 3878734 - DNA, 25 bp, Homo sapien
gattggaagagatgccccaagatag

SEQ ID NO: 3878735 - DNA, 25 bp, Homo sapien
tccaaatcctgaaggcggcctgtgt

SEQ ID NO: 3878736 - DNA, 25 bp, Homo sapien
atcctgaaggcggcctgtgtgcacc

SEQ ID NO: 3878737 - DNA, 25 bp, Homo sapien
ctgaaggcggcctgtgtgcaccctc

SEQ ID NO: 3878738 - DNA, 25 bp, Homo sapien
ctgtaatctttccaaatcctgaagg

SEQ ID NO: 3878739 - DNA, 25 bp, Homo sapien
ccgagtgcctcctgtcaagtgggag

SEQ ID NO: 3878740 - DNA, 25 bp, Homo sapien
gagtgcctcctgtcaagtgggagcc

SEQ ID NO: 3878741 - DNA, 25 bp, Homo sapien
atctctccagtggcaccgagtgcct

SEQ ID NO: 3878742 - DNA, 25 bp, Homo sapien
gtgcctcctgtcaagtgggagcccc

SEQ ID NO: 3878743 - DNA, 25 bp, Homo sapien
ttccttctcagacaagggagccggc

SEQ ID NO: 3878744 - DNA, 25 bp, Homo sapien
cgggatggactttctcgagcggcca

SEQ ID NO: 3878745 - DNA, 25 bp, Homo sapien
gaccaggcccgttgtggttcctgaa

SEQ ID NO: 3878746 - DNA, 25 bp, Homo sapien
tcctgaatcctaagcagctgggcct

SEQ ID NO: 3878747 - DNA, 25 bp, Homo sapien
ttcggggaagggcaagactccgcag

SEQ ID NO: 3878748 - DNA, 25 bp, Homo sapien
aagggcaagactccgcaggtgcagc

SEQ ID NO: 3878749 - DNA, 25 bp, Homo sapien
ctcagaacaagccttccttgttcgg

SEQ ID NO: 3878750 - DNA, 25 bp, Homo sapien
tcagaacaagccttccttgttcggg

SEQ ID NO: 3878751 - DNA, 25 bp, Homo sapien
atgctacacagaggacgctctgggc

SEQ ID NO: 3878752 - DNA, 25 bp, Homo sapien
tcctgtccaggccacttattcgtca

SEQ ID NO: 3878753 - DNA, 25 bp, Homo sapien
acttattcgtcactggtcctgtctc

SEQ ID NO: 3878754 - DNA, 25 bp, Homo sapien
caggccacttattcgtcactggtcc

SEQ ID NO: 3878755 - DNA, 25 bp, Homo sapien
tgatggcagaggaccactggctctc

SEQ ID NO: 3878756 - DNA, 25 bp, Homo sapien
tgtccccagtaagggctccagtttg

SEQ ID NO: 3878757 - DNA, 25 bp, Homo sapien
ctcatctactgtggggtcaacaaca

SEQ ID NO: 3878758 - DNA, 25 bp, Homo sapien
gtcaacaacagccacgggagtgcca

SEQ ID NO: 3878759 - DNA, 25 bp, Homo sapien
ttccgctttcccgaacgatcagagc

SEQ ID NO: 3878760 - DNA, 25 bp, Homo sapien
tctccagacatcctcctcgtgccct

SEQ ID NO: 3878761 - DNA, 25 bp, Homo sapien
gctggcggccgtgagtgtggcaacc

SEQ ID NO: 3878762 - DNA, 25 bp, Homo sapien
ccgtgagtgtggcaacctctccaga

SEQ ID NO: 3878763 - DNA, 25 bp, Homo sapien
gcctggccgcgtcgggaggttctgg

SEQ ID NO: 3878764 - DNA, 25 bp, Homo sapien
ggcctggccgcgtcgggaggttctg

SEQ ID NO: 3878765 - DNA, 25 bp, Homo sapien
ggaggttctggtccgtggggcatgt

SEQ ID NO: 3878766 - DNA, 25 bp, Homo sapien
gttctggtccgtggggcatgtagca

SEQ ID NO: 3878767 - DNA, 25 bp, Homo sapien
tacggatcaagaagcacggatgagg

SEQ ID NO: 3878768 - DNA, 25 bp, Homo sapien
catcatacggatcaagaagcacgga

SEQ ID NO: 3878769 - DNA, 25 bp, Homo sapien
tgacatcatacggatcaagaagcac

SEQ ID NO: 3878770 - DNA, 25 bp, Homo sapien
caagaagcacggatgaggagatgaa

SEQ ID NO: 3878771 - DNA, 25 bp, Homo sapien
tgatcttcttgctggtcttgccatt

SEQ ID NO: 3878772 - DNA, 25 bp, Homo sapien
ccacaatattcatgccttctttcac

SEQ ID NO: 3878773 - DNA, 25 bp, Homo sapien
tagagttgtccacagtcagcaatgg

SEQ ID NO: 3878774 - DNA, 25 bp, Homo sapien
ttacagaaggaatggtctggaggtt

SEQ ID NO: 3878775 - DNA, 25 bp, Homo sapien
ttctcccagtagatggacttgccac

SEQ ID NO: 3878776 - DNA, 25 bp, Homo sapien
aagttttctgctgtctttgaaactt

SEQ ID NO: 3878777 - DNA, 25 bp, Homo sapien
cccagtagatggacttgccaccagt

SEQ ID NO: 3878778 - DNA, 25 bp, Homo sapien
gttttctgctgtctttgaaactttg

SEQ ID NO: 3878779 - DNA, 25 bp, Homo sapien
gctcggcctcgatttcctcagtact

SEQ ID NO: 3878780 - DNA, 25 bp, Homo sapien
tcagattctgcacccaatccacaga

SEQ ID NO: 3878781 - DNA, 25 bp, Homo sapien
agattctgcacccaatccacagaga

SEQ ID NO: 3878782 - DNA, 25 bp, Homo sapien
tggagctcggcctcgatttcctcag

SEQ ID NO: 3878783 - DNA, 25 bp, Homo sapien
caagccatctggaaccttgtgacca

SEQ ID NO: 3878784 - DNA, 25 bp, Homo sapien
cgagagtaagtccttgccccacaga

SEQ ID NO: 3878785 - DNA, 25 bp, Homo sapien
gaaccttgtgaccatcccgagagta

SEQ ID NO: 3878786 - DNA, 25 bp, Homo sapien
ccactgaatcagagttggcaagcca

SEQ ID NO: 3878787 - DNA, 25 bp, Homo sapien
tattatagagatggactgaactcac

SEQ ID NO: 3878788 - DNA, 25 bp, Homo sapien
cataaagaatctctgaattgggtca

SEQ ID NO: 3878789 - DNA, 25 bp, Homo sapien
tctcagggtcactagaaacagcaga

SEQ ID NO: 3878790 - DNA, 25 bp, Homo sapien
cagggaaatccacccgctaagaggt

SEQ ID NO: 3878791 - DNA, 25 bp, Homo sapien
ctcccgccccagtcggttgtccaga

SEQ ID NO: 3878792 - DNA, 25 bp, Homo sapien
tctcccgccccagtcggttgtccag

SEQ ID NO: 3878793 - DNA, 25 bp, Homo sapien
gtctcccgccccagtcggttgtcca

SEQ ID NO: 3878794 - DNA, 25 bp, Homo sapien
tcccgccccagtcggttgtccagaa

SEQ ID NO: 3878795 - DNA, 25 bp, Homo sapien
cctgagttagggcagatattgcggt

SEQ ID NO: 3878796 - DNA, 25 bp, Homo sapien
gacaagtgtggcagagcggcttacc

SEQ ID NO: 3878797 - DNA, 25 bp, Homo sapien
ggatggcctctaccagcgtcatgtt

SEQ ID NO: 3878798 - DNA, 25 bp, Homo sapien
catgttctcacagatcatgaggaag

SEQ ID NO: 3878799 - DNA, 25 bp, Homo sapien
acttagcatcagctacctgcccttg

SEQ ID NO: 3878800 - DNA, 25 bp, Homo sapien
agggagaaccaacttagcatcagct

SEQ ID NO: 3878801 - DNA, 25 bp, Homo sapien
tagcatcagctacctgcccttgaac

SEQ ID NO: 3878802 - DNA, 25 bp, Homo sapien
tagggagaaccaacttagcatcagc

SEQ ID NO: 3878803 - DNA, 25 bp, Homo sapien
tccaccatgcctgatccagaagtgc

SEQ ID NO: 3878804 - DNA, 25 bp, Homo sapien
caccatgcctgatccagaagtgcac

SEQ ID NO: 3878805 - DNA, 25 bp, Homo sapien
accctccaccatgcctgatccagaa

SEQ ID NO: 3878806 - DNA, 25 bp, Homo sapien
cctccaccatgcctgatccagaagt

SEQ ID NO: 3878807 - DNA, 25 bp, Homo sapien
gagggcagctcggatgtatcgagca

SEQ ID NO: 3878808 - DNA, 25 bp, Homo sapien
cgcctcgatgccatagtactccagg

SEQ ID NO: 3878809 - DNA, 25 bp, Homo sapien
agaaggggttgtcgtccgcctcgat

SEQ ID NO: 3878810 - DNA, 25 bp, Homo sapien
cattccacggtagaatttggcacct

SEQ ID NO: 3878811 - DNA, 25 bp, Homo sapien
ggcattcacaacgtgggtgattccc

SEQ ID NO: 3878812 - DNA, 25 bp, Homo sapien
cagcggcattcacaacgtgggtgat

SEQ ID NO: 3878813 - DNA, 25 bp, Homo sapien
gcggcattcacaacgtgggtgattc

SEQ ID NO: 3878814 - DNA, 25 bp, Homo sapien
ctgcagcggcattcacaacgtgggt

SEQ ID NO: 3878815 - DNA, 25 bp, Homo sapien
tgacggacccacagcaagcgctgca

SEQ ID NO: 3878816 - DNA, 25 bp, Homo sapien
gggccagacctcatcgatatggttc

SEQ ID NO: 3878817 - DNA, 25 bp, Homo sapien
aagcgctgcagcgaagccaatgtgg

SEQ ID NO: 3878818 - DNA, 25 bp, Homo sapien
agtgtggcagcctgacggacccaca

SEQ ID NO: 3878819 - DNA, 25 bp, Homo sapien
tcaggccagcactggatgtcaggcc

SEQ ID NO: 3878820 - DNA, 25 bp, Homo sapien
ttttcagcggcaccagaatatgggc

SEQ ID NO: 3878821 - DNA, 25 bp, Homo sapien
tgtcaggccccacccgggtcaggta

SEQ ID NO: 3878822 - DNA, 25 bp, Homo sapien
ctgcggagctggattttcagcggca

SEQ ID NO: 3878823 - DNA, 25 bp, Homo sapien
ggtcctgtctttgctaactgcccct

SEQ ID NO: 3878824 - DNA, 25 bp, Homo sapien
gggtcctgtctttgctaactgcccc

SEQ ID NO: 3878825 - DNA, 25 bp, Homo sapien
ggggtcctgtctttgctaactgccc

SEQ ID NO: 3878826 - DNA, 25 bp, Homo sapien
gggggtcctgtctttgctaactgcc

SEQ ID NO: 3878827 - DNA, 25 bp, Homo sapien
catactgggaagaacatcttttccc

SEQ ID NO: 3878828 - DNA, 25 bp, Homo sapien
ctagggaaggtgcatactgggaaga

SEQ ID NO: 3878829 - DNA, 25 bp, Homo sapien
cacaaacactgtgaagcggctagaa

SEQ ID NO: 3878830 - DNA, 25 bp, Homo sapien
gcctgagagccgactgaggccttgt

SEQ ID NO: 3878831 - DNA, 25 bp, Homo sapien
tctgtttgggattgaagaccgttgg

SEQ ID NO: 3878832 - DNA, 25 bp, Homo sapien
ggttccataaacctccatgaagatg

SEQ ID NO: 3878833 - DNA, 25 bp, Homo sapien
gcctctgtaggcagggcttttcctg

SEQ ID NO: 3878834 - DNA, 25 bp, Homo sapien
ctgggtgaagcacaggcccaacgtc

SEQ ID NO: 3878835 - DNA, 25 bp, Homo sapien
tgcaagtccatgcacttcttttctg

SEQ ID NO: 3878836 - DNA, 25 bp, Homo sapien
tgagacttggtcttcggagggccct

SEQ ID NO: 3878837 - DNA, 25 bp, Homo sapien
agatagtcccctggactttcttcct

SEQ ID NO: 3878838 - DNA, 25 bp, Homo sapien
ctgtgcacttctctgacgggcagtt

SEQ ID NO: 3878839 - DNA, 25 bp, Homo sapien
gcctgtctccgcacacttgatgctg

SEQ ID NO: 3878840 - DNA, 25 bp, Homo sapien
tgtgggagtatctggcccaggctgt

SEQ ID NO: 3878841 - DNA, 25 bp, Homo sapien
gcacttctctgacgggcagttcgtg

SEQ ID NO: 3878842 - DNA, 25 bp, Homo sapien
aggataaagacctagaagactcagg

SEQ ID NO: 3878843 - DNA, 25 bp, Homo sapien
ggtccaggataaagacctagaagac

SEQ ID NO: 3878844 - DNA, 25 bp, Homo sapien
gggccaaggccgatgggacaggtcc

SEQ ID NO: 3878845 - DNA, 25 bp, Homo sapien
gccaaggccgatgggacaggtccag

SEQ ID NO: 3878846 - DNA, 25 bp, Homo sapien
gctgtggccaacagctatcacaaat

SEQ ID NO: 3878847 - DNA, 25 bp, Homo sapien
ggccaacagctatcacaaatatctg

SEQ ID NO: 3878848 - DNA, 25 bp, Homo sapien
gtggccaacagctatcacaaatatc

SEQ ID NO: 3878849 - DNA, 25 bp, Homo sapien
ccaacagctatcacaaatatctgga

SEQ ID NO: 3878850 - DNA, 25 bp, Homo sapien
gtagcaggctctagggccgacccca

SEQ ID NO: 3878851 - DNA, 25 bp, Homo sapien
tggagtagcaggctctagggccgac

SEQ ID NO: 3878852 - DNA, 25 bp, Homo sapien
gctgagagggggtgtaggcgccagg

SEQ ID NO: 3878853 - DNA, 25 bp, Homo sapien
agccagatggagtagcaggctctag

SEQ ID NO: 3878854 - DNA, 25 bp, Homo sapien
cagtgccagggtggcaaagtggcag

SEQ ID NO: 3878855 - DNA, 25 bp, Homo sapien
aggatcagtgccagggtggcaaagt

SEQ ID NO: 3878856 - DNA, 25 bp, Homo sapien
ggatcagtgccagggtggcaaagtg

SEQ ID NO: 3878857 - DNA, 25 bp, Homo sapien
atcagtgccagggtggcaaagtggc

SEQ ID NO: 3878858 - DNA, 25 bp, Homo sapien
gggaagacccatcggtgctgcctca

SEQ ID NO: 3878859 - DNA, 25 bp, Homo sapien
tcggttggggaagacccatcggtgc

SEQ ID NO: 3878860 - DNA, 25 bp, Homo sapien
ctggtgcaggaagcctcggttgggg

SEQ ID NO: 3878861 - DNA, 25 bp, Homo sapien
tgcaggaagcctcggttggggaaga

SEQ ID NO: 3878862 - DNA, 25 bp, Homo sapien
ggacagccgctggtgcagcatgagg

SEQ ID NO: 3878863 - DNA, 25 bp, Homo sapien
cagccgctggtgcagcatgaggtag

SEQ ID NO: 3878864 - DNA, 25 bp, Homo sapien
gacagccgctggtgcagcatgaggt

SEQ ID NO: 3878865 - DNA, 25 bp, Homo sapien
acagccgctggtgcagcatgaggta

SEQ ID NO: 3878866 - DNA, 25 bp, Homo sapien
tgaggaagacatcctggtgaaaaac

SEQ ID NO: 3878867 - DNA, 25 bp, Homo sapien
ctgaggaagacatcctggtgaaaaa

SEQ ID NO: 3878868 - DNA, 25 bp, Homo sapien
gaggaagacatcctggtgaaaaacc

SEQ ID NO: 3878869 - DNA, 25 bp, Homo sapien
agaagtaggcactgatgtcaaaatc

SEQ ID NO: 3878870 - DNA, 25 bp, Homo sapien
aagtaggcactgatgtcaaaatcag

SEQ ID NO: 3878871 - DNA, 25 bp, Homo sapien
gcacggtggatgaagtcagccgcag

SEQ ID NO: 3878872 - DNA, 25 bp, Homo sapien
tgaagtcagccgcagaggagaagta

SEQ ID NO: 3878873 - DNA, 25 bp, Homo sapien
cctgacagtagaggcccttgtgggc

SEQ ID NO: 3878874 - DNA, 25 bp, Homo sapien
ctcaaagcggttgtttgccgtggcc

SEQ ID NO: 3878875 - DNA, 25 bp, Homo sapien
cttgtgggcggcgttcagcacgtgg

SEQ ID NO: 3878876 - DNA, 25 bp, Homo sapien
ccgtagaagtcagggccgccctgac

SEQ ID NO: 3878877 - DNA, 25 bp, Homo sapien
gcatctcctatgaaaaggttgggcc

SEQ ID NO: 3878878 - DNA, 25 bp, Homo sapien
ttgggccaaacttcgtccacacggc

SEQ ID NO: 3878879 - DNA, 25 bp, Homo sapien
cacacggctgcaagaagacttccct

SEQ ID NO: 3878880 - DNA, 25 bp, Homo sapien
gggcaaggcgtggctttgtcctctc

SEQ ID NO: 3878881 - DNA, 25 bp, Homo sapien
gcccgcccacccctctgcctctgtg

SEQ ID NO: 3878882 - DNA, 25 bp, Homo sapien
gcctctgtggtcactcctctctgcc

SEQ ID NO: 3878883 - DNA, 25 bp, Homo sapien
ctgcctctgtggtcactcctctctg

SEQ ID NO: 3878884 - DNA, 25 bp, Homo sapien
gggccagcccgcccacccctctgcc

SEQ ID NO: 3878885 - DNA, 25 bp, Homo sapien
tttggcctccggcatgacgcatgcg

SEQ ID NO: 3878886 - DNA, 25 bp, Homo sapien
gagcctcgcgtcttttccagtgtgg

SEQ ID NO: 3878887 - DNA, 25 bp, Homo sapien
gcagcatctcggttctcctctcggg

SEQ ID NO: 3878888 - DNA, 25 bp, Homo sapien
tcccgaagcagttccggttcggctc

SEQ ID NO: 3878889 - DNA, 25 bp, Homo sapien
gccggcgcggcggtgacggcggccg

SEQ ID NO: 3878890 - DNA, 25 bp, Homo sapien
gcgcggcggtgacggcggccgggac

SEQ ID NO: 3878891 - DNA, 25 bp, Homo sapien
cggcggtgacggcggccgggacgat

SEQ ID NO: 3878892 - DNA, 25 bp, Homo sapien
gcggtgacggcggccgggacgatgc

SEQ ID NO: 3878893 - DNA, 25 bp, Homo sapien
tgagggaaccgggatagtcagctct

SEQ ID NO: 3878894 - DNA, 25 bp, Homo sapien
gagcccgactcggaccgcggaggtg

SEQ ID NO: 3878895 - DNA, 25 bp, Homo sapien
gctcggacgccgactcggaggtggg

SEQ ID NO: 3878896 - DNA, 25 bp, Homo sapien
gaatctgaagcaaatggaggttgtc

SEQ ID NO: 3878897 - DNA, 25 bp, Homo sapien
taagtggaggccgaggaacgagagg

SEQ ID NO: 3878898 - DNA, 25 bp, Homo sapien
tcctgcgggaatgtggacccggaag

SEQ ID NO: 3878899 - DNA, 25 bp, Homo sapien
aaaagatcgaaggtcctgcgggaat

SEQ ID NO: 3878900 - DNA, 25 bp, Homo sapien
tggacccggaagaagagatgctctg

SEQ ID NO: 3878901 - DNA, 25 bp, Homo sapien
ctttagctgagttcagtgacttcat

SEQ ID NO: 3878902 - DNA, 25 bp, Homo sapien
cctgcctcgacctccaacagtgcta

SEQ ID NO: 3878903 - DNA, 25 bp, Homo sapien
tgcctcgacctccaacagtgctagg

SEQ ID NO: 3878904 - DNA, 25 bp, Homo sapien
ctgcctcgacctccaacagtgctag

SEQ ID NO: 3878905 - DNA, 25 bp, Homo sapien
ttagtggatttccatttctcccaac

SEQ ID NO: 3878906 - DNA, 25 bp, Homo sapien
agtggatttccatttctcccaacct

SEQ ID NO: 3878907 - DNA, 25 bp, Homo sapien
tggtattattttagctgatattagt

SEQ ID NO: 3878908 - DNA, 25 bp, Homo sapien
gtgctattgttaacatatgttttac

SEQ ID NO: 3878909 - DNA, 25 bp, Homo sapien
gaaatcagaacttatccttagaacc

SEQ ID NO: 3878910 - DNA, 25 bp, Homo sapien
gaaacctttcgtggctgtgctgcaa

SEQ ID NO: 3878911 - DNA, 25 bp, Homo sapien
ccagtcagttaaataatgcggacta

SEQ ID NO: 3878912 - DNA, 25 bp, Homo sapien
tcctctccatagttttctgaccaga

SEQ ID NO: 3878913 - DNA, 25 bp, Homo sapien
gaacccattggatcaagagacctgc

SEQ ID NO: 3878914 - DNA, 25 bp, Homo sapien
catcaaaggtcagaatgcttcaggt

SEQ ID NO: 3878915 - DNA, 25 bp, Homo sapien
tgtgagcagcggtgtttcgtgccct

SEQ ID NO: 3878916 - DNA, 25 bp, Homo sapien
gacctgcagggattataactcttta

SEQ ID NO: 3878917 - DNA, 25 bp, Homo sapien
agaaagtggaaactggtacttaatg

SEQ ID NO: 3878918 - DNA, 25 bp, Homo sapien
tgaagatgtgaaagttcctgtggta

SEQ ID NO: 3878919 - DNA, 25 bp, Homo sapien
gagaaactagtattacttgaagatg

SEQ ID NO: 3878920 - DNA, 25 bp, Homo sapien
tggtagccataccttgaagcacagt

SEQ ID NO: 3878921 - DNA, 25 bp, Homo sapien
gctgtggcatccgaggggactctga

SEQ ID NO: 3878922 - DNA, 25 bp, Homo sapien
ggtccagtatctgagctgtggcatc

SEQ ID NO: 3878923 - DNA, 25 bp, Homo sapien
ctgtggcatccgaggggactctgag

SEQ ID NO: 3878924 - DNA, 25 bp, Homo sapien
agagttcctgaatgggtccagtatc

SEQ ID NO: 3878925 - DNA, 25 bp, Homo sapien
gctcctgtttacacagcttcatcca

SEQ ID NO: 3878926 - DNA, 25 bp, Homo sapien
tgctgctaaacctaaaggtagccat

SEQ ID NO: 3878927 - DNA, 25 bp, Homo sapien
caagcagctcctgtttacacagctt

SEQ ID NO: 3878928 - DNA, 25 bp, Homo sapien
accctctgctgctaaacctaaaggt

SEQ ID NO: 3878929 - DNA, 25 bp, Homo sapien
tgtgacctgaattggcacaggtggc

SEQ ID NO: 3878930 - DNA, 25 bp, Homo sapien
tgaacttgtagctggtaagacagaa

SEQ ID NO: 3878931 - DNA, 25 bp, Homo sapien
caaaccgtgatttgggaattgcctg

SEQ ID NO: 3878932 - DNA, 25 bp, Homo sapien
caaggaggcattctaggtacagtga

SEQ ID NO: 3878933 - DNA, 25 bp, Homo sapien
caggcccataatccagaggaggttg

SEQ ID NO: 3878934 - DNA, 25 bp, Homo sapien
gccaagctccggctccgtgcgtgtg

SEQ ID NO: 3878935 - DNA, 25 bp, Homo sapien
ctccggctccgtgcgtgtgtgaagc

SEQ ID NO: 3878936 - DNA, 25 bp, Homo sapien
cggagcaggcttgcctcgccaagct

SEQ ID NO: 3878937 - DNA, 25 bp, Homo sapien
ggttggagttggcagcgggctgcgc

SEQ ID NO: 3878938 - DNA, 25 bp, Homo sapien
tggcagcgggctgcgctgcagggac

SEQ ID NO: 3878939 - DNA, 25 bp, Homo sapien
tgtcggtccacgtggccgctctgga

SEQ ID NO: 3878940 - DNA, 25 bp, Homo sapien
tgcagggacaggcgcggcggacagc

SEQ ID NO: 3878941 - DNA, 25 bp, Homo sapien
ttcttgtccctcccgcagattcccc

SEQ ID NO: 3878942 - DNA, 25 bp, Homo sapien
tgtccctcccgcagattcccctctt

SEQ ID NO: 3878943 - DNA, 25 bp, Homo sapien
cttgtccctcccgcagattcccctc

SEQ ID NO: 3878944 - DNA, 25 bp, Homo sapien
cttcttgtccctcccgcagattccc

SEQ ID NO: 3878945 - DNA, 25 bp, Homo sapien
gagtatggtctgactttcacagaaa

SEQ ID NO: 3878946 - DNA, 25 bp, Homo sapien
aatacagacactggtaaagttactg

SEQ ID NO: 3878947 - DNA, 25 bp, Homo sapien
caacgtccggttcatctaatacaga

SEQ ID NO: 3878948 - DNA, 25 bp, Homo sapien
ccaaatacaagtggtgtgagtatgg

SEQ ID NO: 3878949 - DNA, 25 bp, Homo sapien
ggcctctttcaaccacatctgaact

SEQ ID NO: 3878950 - DNA, 25 bp, Homo sapien
cacatctgaacttatgttaatgagg

SEQ ID NO: 3878951 - DNA, 25 bp, Homo sapien
ttttaacaggcctctttcaaccaca

SEQ ID NO: 3878952 - DNA, 25 bp, Homo sapien
tgccggggtaacaggaacgagccac

SEQ ID NO: 3878953 - DNA, 25 bp, Homo sapien
gaacatcatatgtccttaccttgca

SEQ ID NO: 3878954 - DNA, 25 bp, Homo sapien
catcatatgtccttaccttgcattg

SEQ ID NO: 3878955 - DNA, 25 bp, Homo sapien
tcatatgtccttaccttgcattgac

SEQ ID NO: 3878956 - DNA, 25 bp, Homo sapien
aatgaacatcatatgtccttacctt

SEQ ID NO: 3878957 - DNA, 25 bp, Homo sapien
cccagactgagtgacgtgccaggta

SEQ ID NO: 3878958 - DNA, 25 bp, Homo sapien
tgactgtgaaagaaggcccagactg

SEQ ID NO: 3878959 - DNA, 25 bp, Homo sapien
tctggtggccagcactagtaggtca

SEQ ID NO: 3878960 - DNA, 25 bp, Homo sapien
gccttagctagaatggtaacccagt

SEQ ID NO: 3878961 - DNA, 25 bp, Homo sapien
gagacaacccctttaggctgcgtgg

SEQ ID NO: 3878962 - DNA, 25 bp, Homo sapien
taactgttaaatgcgctacccacca

SEQ ID NO: 3878963 - DNA, 25 bp, Homo sapien
tatttgcggagttccacgtttgcca

SEQ ID NO: 3878964 - DNA, 25 bp, Homo sapien
gatcaaatccccgtggtagctagcc

SEQ ID NO: 3878965 - DNA, 25 bp, Homo sapien
tgccccttagctaatgggtggccct

SEQ ID NO: 3878966 - DNA, 25 bp, Homo sapien
taatttggactgaggtgtggcacga

SEQ ID NO: 3878967 - DNA, 25 bp, Homo sapien
tggccctttattgggcagtggctac

SEQ ID NO: 3878968 - DNA, 25 bp, Homo sapien
actgttttgtcaaggatttccttag

SEQ ID NO: 3878969 - DNA, 25 bp, Homo sapien
tgtcccaggagctgtgagctcgtgt

SEQ ID NO: 3878970 - DNA, 25 bp, Homo sapien
gcaaagtttgtcccaggagctgtga

SEQ ID NO: 3878971 - DNA, 25 bp, Homo sapien
cccaggagctgtgagctcgtgtggc

SEQ ID NO: 3878972 - DNA, 25 bp, Homo sapien
ttgtcccaggagctgtgagctcgtg

SEQ ID NO: 3878973 - DNA, 25 bp, Homo sapien
gggagatttaaataagcagagcacc

SEQ ID NO: 3878974 - DNA, 25 bp, Homo sapien
gaaagaatttgaccatctgccagtg

SEQ ID NO: 3878975 - DNA, 25 bp, Homo sapien
caccaccgaggcttaccaggtagtg

SEQ ID NO: 3878976 - DNA, 25 bp, Homo sapien
cctcccctcataggcagatggttca

SEQ ID NO: 3878977 - DNA, 25 bp, Homo sapien
cggcaggatactcaagtcaacccca

SEQ ID NO: 3878978 - DNA, 25 bp, Homo sapien
cacttaagaatttcaaggagacggc

SEQ ID NO: 3878979 - DNA, 25 bp, Homo sapien
aggatactcaagtcaaccccgaggt

SEQ ID NO: 3878980 - DNA, 25 bp, Homo sapien
aagtcaaccccacggcaggatactc

SEQ ID NO: 3878981 - DNA, 25 bp, Homo sapien
gcagaactggcatcacctacaaaag

SEQ ID NO: 3878982 - DNA, 25 bp, Homo sapien
tgagcaagccgccagcagaactggc

SEQ ID NO: 3878983 - DNA, 25 bp, Homo sapien
gggcctccactggagaggtgaggct

SEQ ID NO: 3878984 - DNA, 25 bp, Homo sapien
actgtgctgtgaagacatgagcaag

SEQ ID NO: 3878985 - DNA, 25 bp, Homo sapien
catgttgtcagacaccagacgtggc

SEQ ID NO: 3878986 - DNA, 25 bp, Homo sapien
cctctttcatgttgtcagacaccag

SEQ ID NO: 3878987 - DNA, 25 bp, Homo sapien
tgtcagacaccagacgtggctctct

SEQ ID NO: 3878988 - DNA, 25 bp, Homo sapien
ctttcatgttgtcagacaccagacg

SEQ ID NO: 3878989 - DNA, 25 bp, Homo sapien
tgggccacagacctggcgccaggga

SEQ ID NO: 3878990 - DNA, 25 bp, Homo sapien
ggggtctctggccattacacgtggc

SEQ ID NO: 3878991 - DNA, 25 bp, Homo sapien
aggaggcagacaagcccgaggtgct

SEQ ID NO: 3878992 - DNA, 25 bp, Homo sapien
ggccacagacctggcgccagggagg

SEQ ID NO: 3878993 - DNA, 25 bp, Homo sapien
gagctgtctgtgctgggccttccct

SEQ ID NO: 3878994 - DNA, 25 bp, Homo sapien
agctgtctgtgctgggccttccctc

SEQ ID NO: 3878995 - DNA, 25 bp, Homo sapien
cagcgccacacacggaggctcagga

SEQ ID NO: 3878996 - DNA, 25 bp, Homo sapien
cccatccagcgccacacacggaggc

SEQ ID NO: 3878997 - DNA, 25 bp, Homo sapien
ccaggcaaccctccctcgagcccac

SEQ ID NO: 3878998 - DNA, 25 bp, Homo sapien
gcaaccctccctcgagcccactcac

SEQ ID NO: 3878999 - DNA, 25 bp, Homo sapien
aggcaaccctccctcgagcccactc

SEQ ID NO: 3879000 - DNA, 25 bp, Homo sapien
ggcaaccctccctcgagcccactca

SEQ ID NO: 3879001 - DNA, 25 bp, Homo sapien
ggccaaggtgagtccatcgcccagg

SEQ ID NO: 3879002 - DNA, 25 bp, Homo sapien
cgtcccgccggatgcgttcgtttag

SEQ ID NO: 3879003 - DNA, 25 bp, Homo sapien
ggctgatgtagaccctgacgtcccg

SEQ ID NO: 3879004 - DNA, 25 bp, Homo sapien
gtttaggtttcgcacacactcggcc

SEQ ID NO: 3879005 - DNA, 25 bp, Homo sapien
agaaccaaagcggaggaaagcctgg

SEQ ID NO: 3879006 - DNA, 25 bp, Homo sapien
tgaccagagctggagacagaaccaa

SEQ ID NO: 3879007 - DNA, 25 bp, Homo sapien
cttcggagggaggtgctcgggcgga

SEQ ID NO: 3879008 - DNA, 25 bp, Homo sapien
aggtgcccgggcaggaggtgaccag

SEQ ID NO: 3879009 - DNA, 25 bp, Homo sapien
cggagggggtgtagcctacgtgact

SEQ ID NO: 3879010 - DNA, 25 bp, Homo sapien
tagcctacgtgactggactgggtgg

SEQ ID NO: 3879011 - DNA, 25 bp, Homo sapien
gggtgtagcctacgtgactggactg

SEQ ID NO: 3879012 - DNA, 25 bp, Homo sapien
gtgtagcctacgtgactggactggg

SEQ ID NO: 3879013 - DNA, 25 bp, Homo sapien
ccggcccgacagggtgctttctcct

SEQ ID NO: 3879014 - DNA, 25 bp, Homo sapien
tcctcccccgcagtggatcccttac

SEQ ID NO: 3879015 - DNA, 25 bp, Homo sapien
tctcctcccccgcagtggatccctt

SEQ ID NO: 3879016 - DNA, 25 bp, Homo sapien
ggcccgacagggtgctttctcctcc

SEQ ID NO: 3879017 - DNA, 25 bp, Homo sapien
tctgaggacggcgaggatgcctccg

SEQ ID NO: 3879018 - DNA, 25 bp, Homo sapien
gagcagttctccttgtccgcatcca

SEQ ID NO: 3879019 - DNA, 25 bp, Homo sapien
atccaccacggccacgtcgaaggtg

SEQ ID NO: 3879020 - DNA, 25 bp, Homo sapien
tgcaggcagcgctcgtagtaggcgg

SEQ ID NO: 3879021 - DNA, 25 bp, Homo sapien
aggcccagtcacagctcggccacac

SEQ ID NO: 3879022 - DNA, 25 bp, Homo sapien
gggctctgtgacaaccggccctgcc

SEQ ID NO: 3879023 - DNA, 25 bp, Homo sapien
gcaggtgcggctgagtccgcggccc

SEQ ID NO: 3879024 - DNA, 25 bp, Homo sapien
gcccggcaggcccagtcacagctcg

SEQ ID NO: 3879025 - DNA, 25 bp, Homo sapien
aagcccttcccgcttcggtgctcac

SEQ ID NO: 3879026 - DNA, 25 bp, Homo sapien
agcagcctcgtttgcaatgaatggc

SEQ ID NO: 3879027 - DNA, 25 bp, Homo sapien
cttcaaagcccttcccgcttcggtg

SEQ ID NO: 3879028 - DNA, 25 bp, Homo sapien
cctcgtttgcaatgaatggcttcaa

SEQ ID NO: 3879029 - DNA, 25 bp, Homo sapien
aggtcgatcttgtgctccgcctcgg

SEQ ID NO: 3879030 - DNA, 25 bp, Homo sapien
aaggcgggcttcagccggaggtcga

SEQ ID NO: 3879031 - DNA, 25 bp, Homo sapien
ggcttcagccggaggtcgatcttgt

SEQ ID NO: 3879032 - DNA, 25 bp, Homo sapien
tcagccggaggtcgatcttgtgctc

SEQ ID NO: 3879033 - DNA, 25 bp, Homo sapien
gggtcagccgttgcgcccccgcctg

SEQ ID NO: 3879034 - DNA, 25 bp, Homo sapien
gggagcgggtcagccgttgcgcccc

SEQ ID NO: 3879035 - DNA, 25 bp, Homo sapien
agggagcgggtcagccgttgcgccc

SEQ ID NO: 3879036 - DNA, 25 bp, Homo sapien
agcgggtcagccgttgcgcccccgc

SEQ ID NO: 3879037 - DNA, 25 bp, Homo sapien
tccacaggggccgtcccagctccgg

SEQ ID NO: 3879038 - DNA, 25 bp, Homo sapien
acctcgcaggtcaccacgcgcccgt

SEQ ID NO: 3879039 - DNA, 25 bp, Homo sapien
agggccagggcggagtagcccgtga

SEQ ID NO: 3879040 - DNA, 25 bp, Homo sapien
accacgcgcccgtccgcgggcagcg

SEQ ID NO: 3879041 - DNA, 25 bp, Homo sapien
gccctccgggatcccggccgcgtgc

SEQ ID NO: 3879042 - DNA, 25 bp, Homo sapien
ggatgagccgcgccaggttggccaa

SEQ ID NO: 3879043 - DNA, 25 bp, Homo sapien
ctggatgagccgcgccaggttggcc

SEQ ID NO: 3879044 - DNA, 25 bp, Homo sapien
tgggcctgctcgcaggtcatcatag

SEQ ID NO: 3879045 - DNA, 25 bp, Homo sapien
ttcttggcctggatgagccgcgcca

SEQ ID NO: 3879046 - DNA, 25 bp, Homo sapien
aggggcgcggttctgggcgtggcct

SEQ ID NO: 3879047 - DNA, 25 bp, Homo sapien
ctggcccttcggaacgcccaccgca

SEQ ID NO: 3879048 - DNA, 25 bp, Homo sapien
atgcaggtcacccaccttcgccctg

SEQ ID NO: 3879049 - DNA, 25 bp, Homo sapien
caagccccaggggcgcggttctggg

SEQ ID NO: 3879050 - DNA, 25 bp, Homo sapien
acagccacgtgggacccgcaggggt

SEQ ID NO: 3879051 - DNA, 25 bp, Homo sapien
cccgtttccgtcccgcgccctgctg

SEQ ID NO: 3879052 - DNA, 25 bp, Homo sapien
cgtttccgtcccgcgccctgctgac

SEQ ID NO: 3879053 - DNA, 25 bp, Homo sapien
cgcaggggtcgagagggacgcccgt

SEQ ID NO: 3879054 - DNA, 25 bp, Homo sapien
gcaggcactgctctcgccggcctcg

SEQ ID NO: 3879055 - DNA, 25 bp, Homo sapien
ctcaggcttcgcagcgccgggtgct

SEQ ID NO: 3879056 - DNA, 25 bp, Homo sapien
catggagcggctcagaagatactgc

SEQ ID NO: 3879057 - DNA, 25 bp, Homo sapien
tcagaagatactgccacaggcggct

SEQ ID NO: 3879058 - DNA, 25 bp, Homo sapien
gcccgccgggaccaggtcctgctca

SEQ ID NO: 3879059 - DNA, 25 bp, Homo sapien
agccacgccgcgccctactctgcgc

SEQ ID NO: 3879060 - DNA, 25 bp, Homo sapien
ggagagggtgttggattaacctgag

SEQ ID NO: 3879061 - DNA, 25 bp, Homo sapien
acgccgcgccctactctgcgcccgc

SEQ ID NO: 3879062 - DNA, 25 bp, Homo sapien
gaaggcggcgcccagtgcggctgag

SEQ ID NO: 3879063 - DNA, 25 bp, Homo sapien
gcccagggccagcgcggcgggcacg

SEQ ID NO: 3879064 - DNA, 25 bp, Homo sapien
aagaggccagtggcgaaggcggcgc

SEQ ID NO: 3879065 - DNA, 25 bp, Homo sapien
aggcggcgcccagtgcggctgagcc

SEQ ID NO: 3879066 - DNA, 25 bp, Homo sapien
tgacaggtcacgtgagctggagctc

SEQ ID NO: 3879067 - DNA, 25 bp, Homo sapien
ctgggacaggtctcggactcgcggg

SEQ ID NO: 3879068 - DNA, 25 bp, Homo sapien
aggcagtgacaggtcacgtgagctg

SEQ ID NO: 3879069 - DNA, 25 bp, Homo sapien
gacaggtctcggactcgcgggcccg

SEQ ID NO: 3879070 - DNA, 25 bp, Homo sapien
tagcagcactgctcgaggacaagct

SEQ ID NO: 3879071 - DNA, 25 bp, Homo sapien
gcttggcctctaacttgaccgtgaa

SEQ ID NO: 3879072 - DNA, 25 bp, Homo sapien
cattctgcgggtaaggactgaggct

SEQ ID NO: 3879073 - DNA, 25 bp, Homo sapien
tcttgactagagttctggcgctgcc

SEQ ID NO: 3879074 - DNA, 25 bp, Homo sapien
caggcacaatgcatccaggatccgg

SEQ ID NO: 3879075 - DNA, 25 bp, Homo sapien
ttattgaggacctgccgggcaccag

SEQ ID NO: 3879076 - DNA, 25 bp, Homo sapien
aatagtaacagcagggcccctttat

SEQ ID NO: 3879077 - DNA, 25 bp, Homo sapien
aggcacaatgcatccaggatccggg

SEQ ID NO: 3879078 - DNA, 25 bp, Homo sapien
caggtggtgccgctgaccgctctct

SEQ ID NO: 3879079 - DNA, 25 bp, Homo sapien
agctcacactgaaactccctcctac

SEQ ID NO: 3879080 - DNA, 25 bp, Homo sapien
ctgcgctcaggtggtgccgctgacc

SEQ ID NO: 3879081 - DNA, 25 bp, Homo sapien
gagggcccagctcgagctggcctga

SEQ ID NO: 3879082 - DNA, 25 bp, Homo sapien
gctttaggacggttcaggccaagtg

SEQ ID NO: 3879083 - DNA, 25 bp, Homo sapien
ctccaggggctttaggacggttcag

SEQ ID NO: 3879084 - DNA, 25 bp, Homo sapien
tttaggacggttcaggccaagtgca

SEQ ID NO: 3879085 - DNA, 25 bp, Homo sapien
ctttaggacggttcaggccaagtgc

SEQ ID NO: 3879086 - DNA, 25 bp, Homo sapien
tcccgggttcacaccttatcctgcc

SEQ ID NO: 3879087 - DNA, 25 bp, Homo sapien
gtgattctcctgcttcagcctcctg

SEQ ID NO: 3879088 - DNA, 25 bp, Homo sapien
ctcccgggttcacaccttatcctgc

SEQ ID NO: 3879089 - DNA, 25 bp, Homo sapien
ttttttgagactgtgtctctgtcac

SEQ ID NO: 3879090 - DNA, 25 bp, Homo sapien
tgggcccagatccgtcacactggca

SEQ ID NO: 3879091 - DNA, 25 bp, Homo sapien
ccagatccgtcacactggcacccat

SEQ ID NO: 3879092 - DNA, 25 bp, Homo sapien
ggcccagatccgtcacactggcacc

SEQ ID NO: 3879093 - DNA, 25 bp, Homo sapien
tctgggcccagatccgtcacactgg

SEQ ID NO: 3879094 - DNA, 25 bp, Homo sapien
ccacagctccaatcagccagtcctt

SEQ ID NO: 3879095 - DNA, 25 bp, Homo sapien
ccttcagaggacaaagggccttctg

SEQ ID NO: 3879096 - DNA, 25 bp, Homo sapien
cactatgtagggtgaccacagctcc

SEQ ID NO: 3879097 - DNA, 25 bp, Homo sapien
gccttctgcctaagttggtctgcca

SEQ ID NO: 3879098 - DNA, 25 bp, Homo sapien
aagaatttagcaaatatctcagtgg

SEQ ID NO: 3879099 - DNA, 25 bp, Homo sapien
cactctatttgggaacagggtaatt

SEQ ID NO: 3879100 - DNA, 25 bp, Homo sapien
atgggaggaggtaaatgaaagaatt

SEQ ID NO: 3879101 - DNA, 25 bp, Homo sapien
cagggtaattgaatacagatgggag

SEQ ID NO: 3879102 - DNA, 25 bp, Homo sapien
ggctgaacttcctctactcgggtga

SEQ ID NO: 3879103 - DNA, 25 bp, Homo sapien
aaaggtgagtggaaaagctgtgagg

SEQ ID NO: 3879104 - DNA, 25 bp, Homo sapien
agcagctcggatggtggcgtaacct

SEQ ID NO: 3879105 - DNA, 25 bp, Homo sapien
tcatgcgtgaattaggctgtcccct

SEQ ID NO: 3879106 - DNA, 25 bp, Homo sapien
ggaatcacctgaccctgaaaagtct

SEQ ID NO: 3879107 - DNA, 25 bp, Homo sapien
aatcacctgaccctgaaaagtcttg

SEQ ID NO: 3879108 - DNA, 25 bp, Homo sapien
cacctgaccctgaaaagtcttgtga

SEQ ID NO: 3879109 - DNA, 25 bp, Homo sapien
gccaggaatcacctgaccctgaaaa

SEQ ID NO: 3879110 - DNA, 25 bp, Homo sapien
agcctgacacatgcagcccctcttg

SEQ ID NO: 3879111 - DNA, 25 bp, Homo sapien
ctgggactgaggtggttcataagca

SEQ ID NO: 3879112 - DNA, 25 bp, Homo sapien
tgctatgttcagttcagtccccttt

SEQ ID NO: 3879113 - DNA, 25 bp, Homo sapien
ggactgaggtggttcataagcagcc

SEQ ID NO: 3879114 - DNA, 25 bp, Homo sapien
tgtgagcagaataagaggtaatgag

SEQ ID NO: 3879115 - DNA, 25 bp, Homo sapien
tggcgctctcgaaggccgagctctt

SEQ ID NO: 3879116 - DNA, 25 bp, Homo sapien
gagcagcagccgtgatagatgttaa

SEQ ID NO: 3879117 - DNA, 25 bp, Homo sapien
taatgaggatggacattcggttctg

SEQ ID NO: 3879118 - DNA, 25 bp, Homo sapien
acaataggtgaccctgcatctgcat

SEQ ID NO: 3879119 - DNA, 25 bp, Homo sapien
catctgcatcactgcaatagagact

SEQ ID NO: 3879120 - DNA, 25 bp, Homo sapien
tgcatcactgcaatagagactcgga

SEQ ID NO: 3879121 - DNA, 25 bp, Homo sapien
ctgcaatagagactcggatcccaga

SEQ ID NO: 3879122 - DNA, 25 bp, Homo sapien
gagtagggtacgccagaataagagg

SEQ ID NO: 3879123 - DNA, 25 bp, Homo sapien
agtagggtacgccagaataagaggg

SEQ ID NO: 3879124 - DNA, 25 bp, Homo sapien
tacgccagaataagaggggcttggg

SEQ ID NO: 3879125 - DNA, 25 bp, Homo sapien
gccagaataagaggggcttgggctc

SEQ ID NO: 3879126 - DNA, 25 bp, Homo sapien
ggtgtggctaagtgggacgcaaggt

SEQ ID NO: 3879127 - DNA, 25 bp, Homo sapien
actgctccccagtcgaccggcaggg

SEQ ID NO: 3879128 - DNA, 25 bp, Homo sapien
caaggtgtggcgcaagtgtgtgcat

SEQ ID NO: 3879129 - DNA, 25 bp, Homo sapien
aatgtccgtaccgacatgcgcgtgg

SEQ ID NO: 3879130 - DNA, 25 bp, Homo sapien
gtggtggtgagagggcagggtgaag

SEQ ID NO: 3879131 - DNA, 25 bp, Homo sapien
ctgcgcggcgcagggggtggtggtg

SEQ ID NO: 3879132 - DNA, 25 bp, Homo sapien
gcggcgcagggggtggtggtgagag

SEQ ID NO: 3879133 - DNA, 25 bp, Homo sapien
tgagagggcagggtgaagcggtggg

SEQ ID NO: 3879134 - DNA, 25 bp, Homo sapien
ctcactataactcacatggcagaag

SEQ ID NO: 3879135 - DNA, 25 bp, Homo sapien
tggtgtctgatgacggtctgattcc

SEQ ID NO: 3879136 - DNA, 25 bp, Homo sapien
ggcacaagggatctctccgatgtct

SEQ ID NO: 3879137 - DNA, 25 bp, Homo sapien
tctgattcctagtagatggctgtct

SEQ ID NO: 3879138 - DNA, 25 bp, Homo sapien
gatggataatcagtccaagaattct

SEQ ID NO: 3879139 - DNA, 25 bp, Homo sapien
taaatttgattcaaggcctcctttg

SEQ ID NO: 3879140 - DNA, 25 bp, Homo sapien
gtcaagatggataatcagtccaaga

SEQ ID NO: 3879141 - DNA, 25 bp, Homo sapien
caagatggataatcagtccaagaat

SEQ ID NO: 3879142 - DNA, 25 bp, Homo sapien
agttggaggtaatctggctgctgtc

SEQ ID NO: 3879143 - DNA, 25 bp, Homo sapien
gagttggaggtaatctggctgctgt

SEQ ID NO: 3879144 - DNA, 25 bp, Homo sapien
gtggtggtctggagttggaggtaat

SEQ ID NO: 3879145 - DNA, 25 bp, Homo sapien
ggtctggagttggaggtaatctggc

SEQ ID NO: 3879146 - DNA, 25 bp, Homo sapien
gggctataggactcagaaacctcct

SEQ ID NO: 3879147 - DNA, 25 bp, Homo sapien
tggggctataggactcagaaacctc

SEQ ID NO: 3879148 - DNA, 25 bp, Homo sapien
gctataggactcagaaacctcctac

SEQ ID NO: 3879149 - DNA, 25 bp, Homo sapien
atggggctataggactcagaaacct

SEQ ID NO: 3879150 - DNA, 25 bp, Homo sapien
cctgaagaagatttggagagtatca

SEQ ID NO: 3879151 - DNA, 25 bp, Homo sapien
gggtaaatgagcgaggcagccagga

SEQ ID NO: 3879152 - DNA, 25 bp, Homo sapien
atttggagagtatcagaagtcttgg

SEQ ID NO: 3879153 - DNA, 25 bp, Homo sapien
gacacctgaagaagatttggagagt

SEQ ID NO: 3879154 - DNA, 25 bp, Homo sapien
atggtgctttgcacattagtgcgtt

SEQ ID NO: 3879155 - DNA, 25 bp, Homo sapien
gaagaggacaaggatggtgctttgc

SEQ ID NO: 3879156 - DNA, 25 bp, Homo sapien
gcacattagtgcgtttcccacccgg

SEQ ID NO: 3879157 - DNA, 25 bp, Homo sapien
cagggaattggatggaagaggacaa

SEQ ID NO: 3879158 - DNA, 25 bp, Homo sapien
aggtgtccccctgtcatgggcggct

SEQ ID NO: 3879159 - DNA, 25 bp, Homo sapien
ccctgtcatgggcggctctgtcctg

SEQ ID NO: 3879160 - DNA, 25 bp, Homo sapien
gccctccaaggcgtgcgcacatttg

SEQ ID NO: 3879161 - DNA, 25 bp, Homo sapien
gtcagcagcagacatacgtgtggct

SEQ ID NO: 3879162 - DNA, 25 bp, Homo sapien
cctgtgatttatggacaccgagtga

SEQ ID NO: 3879163 - DNA, 25 bp, Homo sapien
gcctgtgatttatggacaccgagtg

SEQ ID NO: 3879164 - DNA, 25 bp, Homo sapien
tgatttatggacaccgagtgaactc

SEQ ID NO: 3879165 - DNA, 25 bp, Homo sapien
tgtgatttatggacaccgagtgaac

SEQ ID NO: 3879166 - DNA, 25 bp, Homo sapien
aaacatctttattccacggagccat

SEQ ID NO: 3879167 - DNA, 25 bp, Homo sapien
gggaaacatctttattccacggagc

SEQ ID NO: 3879168 - DNA, 25 bp, Homo sapien
atgtgctcatcagaggggaaacatc

SEQ ID NO: 3879169 - DNA, 25 bp, Homo sapien
tgtgctcatcagaggggaaacatct

SEQ ID NO: 3879170 - DNA, 25 bp, Homo sapien
gcttatggtggtgaccatctgttgg

SEQ ID NO: 3879171 - DNA, 25 bp, Homo sapien
tcagcttctgatcctagcaggaggg

SEQ ID NO: 3879172 - DNA, 25 bp, Homo sapien
ctcccctacaatatctgaacacaag

SEQ ID NO: 3879173 - DNA, 25 bp, Homo sapien
ccagctcagggagattgtaatgctc

SEQ ID NO: 3879174 - DNA, 25 bp, Homo sapien
tggacctgtgacttaaggcttcctg

SEQ ID NO: 3879175 - DNA, 25 bp, Homo sapien
tgagggtaggttgaacagagtgagc

SEQ ID NO: 3879176 - DNA, 25 bp, Homo sapien
ttgtgatactttctggacctgtgac

SEQ ID NO: 3879177 - DNA, 25 bp, Homo sapien
cagggtctggcctttgtgatacttt

SEQ ID NO: 3879178 - DNA, 25 bp, Homo sapien
caggtgggctgtggaacaactcagg

SEQ ID NO: 3879179 - DNA, 25 bp, Homo sapien
agtcacagatacagtggacactccg

SEQ ID NO: 3879180 - DNA, 25 bp, Homo sapien
caactcagggtaagggggtgactca

SEQ ID NO: 3879181 - DNA, 25 bp, Homo sapien
tggacactccgatttgccaccacct

SEQ ID NO: 3879182 - DNA, 25 bp, Homo sapien
tgtctgaagattgggacctgtggtc

SEQ ID NO: 3879183 - DNA, 25 bp, Homo sapien
gtacccagtacctgttcctgtcttg

SEQ ID NO: 3879184 - DNA, 25 bp, Homo sapien
tgccagacacttgcagtacccagta

SEQ ID NO: 3879185 - DNA, 25 bp, Homo sapien
gaggtcaatttttggccctggagga

SEQ ID NO: 3879186 - DNA, 25 bp, Homo sapien
tttccttgtgaacattggctttggt

SEQ ID NO: 3879187 - DNA, 25 bp, Homo sapien
tgtgaacattggctttggtattttt

SEQ ID NO: 3879188 - DNA, 25 bp, Homo sapien
ccttgtgaacattggctttggtatt

SEQ ID NO: 3879189 - DNA, 25 bp, Homo sapien
tcctcgttcttctgtttccttgtga

SEQ ID NO: 3879190 - DNA, 25 bp, Homo sapien
aatcagctagaatcaaactccaggg

SEQ ID NO: 3879191 - DNA, 25 bp, Homo sapien
gctggtgggcttcttactgcagata

SEQ ID NO: 3879192 - DNA, 25 bp, Homo sapien
tgtcttgctgaaatacaggtcctgg

SEQ ID NO: 3879193 - DNA, 25 bp, Homo sapien
gaactgcattgttgggaatccctgg

SEQ ID NO: 3879194 - DNA, 25 bp, Homo sapien
gctttttgttgacacctaacataca

SEQ ID NO: 3879195 - DNA, 25 bp, Homo sapien
gaagtgtggagtcaaggccaacctc

SEQ ID NO: 3879196 - DNA, 25 bp, Homo sapien
tcacatttccagacagagatcagac

SEQ ID NO: 3879197 - DNA, 25 bp, Homo sapien
tgagatggcactgcagtcaaaatgg

SEQ ID NO: 3879198 - DNA, 25 bp, Homo sapien
ctgggtgaacagcagttctaacttg

SEQ ID NO: 3879199 - DNA, 25 bp, Homo sapien
caggtggctgcaagtggtggtggca

SEQ ID NO: 3879200 - DNA, 25 bp, Homo sapien
tctaacttgctgatgctcagaatgc

SEQ ID NO: 3879201 - DNA, 25 bp, Homo sapien
tcaggagtctgtgctaggaagggat

SEQ ID NO: 3879202 - DNA, 25 bp, Homo sapien
gagaacatggggttaccccacaaca

SEQ ID NO: 3879203 - DNA, 25 bp, Homo sapien
catggggttaccccacaacacaatt

SEQ ID NO: 3879204 - DNA, 25 bp, Homo sapien
gacaagagaacatggggttacccca

SEQ ID NO: 3879205 - DNA, 25 bp, Homo sapien
gaacatggggttaccccacaacaca

SEQ ID NO: 3879206 - DNA, 25 bp, Homo sapien
tccataccaacccaggaaaaagtga

SEQ ID NO: 3879207 - DNA, 25 bp, Homo sapien
ggtccttctgccaagatgccttcat

SEQ ID NO: 3879208 - DNA, 25 bp, Homo sapien
ccataccaacccaggaaaaagtgat

SEQ ID NO: 3879209 - DNA, 25 bp, Homo sapien
ccctcccaacacgaagccatgcctg

SEQ ID NO: 3879210 - DNA, 25 bp, Homo sapien
tctctggacatcagtataaggccca

SEQ ID NO: 3879211 - DNA, 25 bp, Homo sapien
ccccataaatctaggtacagagtag

SEQ ID NO: 3879212 - DNA, 25 bp, Homo sapien
catgagcctgatagctgcccaggtg

SEQ ID NO: 3879213 - DNA, 25 bp, Homo sapien
tacagagtaggtctctggacatcag

SEQ ID NO: 3879214 - DNA, 25 bp, Homo sapien
ctatggaagcccagcagcccagaag

SEQ ID NO: 3879215 - DNA, 25 bp, Homo sapien
agaggaggctccagtccacctttac

SEQ ID NO: 3879216 - DNA, 25 bp, Homo sapien
gcccagaagaggaggctccagtcca

SEQ ID NO: 3879217 - DNA, 25 bp, Homo sapien
cagaagaggaggctccagtccacct

SEQ ID NO: 3879218 - DNA, 25 bp, Homo sapien
cccacagctaggcttagtcacagcc

SEQ ID NO: 3879219 - DNA, 25 bp, Homo sapien
agctaggcttagtcacagcccccag

SEQ ID NO: 3879220 - DNA, 25 bp, Homo sapien
cacagctaggcttagtcacagcccc

SEQ ID NO: 3879221 - DNA, 25 bp, Homo sapien
acagctaggcttagtcacagccccc

SEQ ID NO: 3879222 - DNA, 25 bp, Homo sapien
ttggagaatgtcctcttgtgagttg

SEQ ID NO: 3879223 - DNA, 25 bp, Homo sapien
aatgtcctcttgtgagttgttgtga

SEQ ID NO: 3879224 - DNA, 25 bp, Homo sapien
ctggggctgtattgtgggtctttct

SEQ ID NO: 3879225 - DNA, 25 bp, Homo sapien
tgacttggctcgagcagtccctgtg

SEQ ID NO: 3879226 - DNA, 25 bp, Homo sapien
cagagtctccatctaagggttaaga

SEQ ID NO: 3879227 - DNA, 25 bp, Homo sapien
gagaagctgagtcagcacccctggt

SEQ ID NO: 3879228 - DNA, 25 bp, Homo sapien
actgtgcctggagcggagacagcat

SEQ ID NO: 3879229 - DNA, 25 bp, Homo sapien
cagaggttaggatctgagaggacca

SEQ ID NO: 3879230 - DNA, 25 bp, Homo sapien
tccttgatttcacacccagagccag

SEQ ID NO: 3879231 - DNA, 25 bp, Homo sapien
gaagtccattgtattaagtccgcag

SEQ ID NO: 3879232 - DNA, 25 bp, Homo sapien
tgacttctttctcgggtctcagcac

SEQ ID NO: 3879233 - DNA, 25 bp, Homo sapien
ccagcttggatcaggtaggtgccca

SEQ ID NO: 3879234 - DNA, 25 bp, Homo sapien
tctatgccaaacctgtgcccagact

SEQ ID NO: 3879235 - DNA, 25 bp, Homo sapien
cagagatggaaaaggcagggctact

SEQ ID NO: 3879236 - DNA, 25 bp, Homo sapien
tagaagtgtgtgaaccagacctgct

SEQ ID NO: 3879237 - DNA, 25 bp, Homo sapien
taccccttggaagactgcggaggca

SEQ ID NO: 3879238 - DNA, 25 bp, Homo sapien
gtttcctcatgtcggagactatctg

SEQ ID NO: 3879239 - DNA, 25 bp, Homo sapien
cctcatgtcggagactatctgtttc

SEQ ID NO: 3879240 - DNA, 25 bp, Homo sapien
tctgtttcctcatgtcggagactat

SEQ ID NO: 3879241 - DNA, 25 bp, Homo sapien
tgtcggagactatctgtttccattc

SEQ ID NO: 3879242 - DNA, 25 bp, Homo sapien
cctcagaagagtctaagatggtgac

SEQ ID NO: 3879243 - DNA, 25 bp, Homo sapien
ttcctcagaagagtctaagatggtg

SEQ ID NO: 3879244 - DNA, 25 bp, Homo sapien
tcctcagaagagtctaagatggtga

SEQ ID NO: 3879245 - DNA, 25 bp, Homo sapien
gaatctcgtgggtcagctctttaag

SEQ ID NO: 3879246 - DNA, 25 bp, Homo sapien
tgctgcaaaagctgtatattatctg

SEQ ID NO: 3879247 - DNA, 25 bp, Homo sapien
aaatccttgcagaattcagtagtgg

SEQ ID NO: 3879248 - DNA, 25 bp, Homo sapien
tgtatattatctggttgctctctca

SEQ ID NO: 3879249 - DNA, 25 bp, Homo sapien
cttgctcttgatgtcaggacactgg

SEQ ID NO: 3879250 - DNA, 25 bp, Homo sapien
acttgctcttgatgtcaggacactg

SEQ ID NO: 3879251 - DNA, 25 bp, Homo sapien
agtcctcatgatttttctcaaacgg

SEQ ID NO: 3879252 - DNA, 25 bp, Homo sapien
catgatttttctcaaacggattctt

SEQ ID NO: 3879253 - DNA, 25 bp, Homo sapien
ttgggcttttacacatgagtcctca

SEQ ID NO: 3879254 - DNA, 25 bp, Homo sapien
ggcttttacacatgagtcctcatga

SEQ ID NO: 3879255 - DNA, 25 bp, Homo sapien
tgcagcctcttgacagagcacccat

SEQ ID NO: 3879256 - DNA, 25 bp, Homo sapien
accttgcagcctcttgacagagcac

SEQ ID NO: 3879257 - DNA, 25 bp, Homo sapien
acacaccttgcagcctcttgacaga

SEQ ID NO: 3879258 - DNA, 25 bp, Homo sapien
cagcctcttgacagagcacccatcc

SEQ ID NO: 3879259 - DNA, 25 bp, Homo sapien
ctaggattttcagacctccagggtc

SEQ ID NO: 3879260 - DNA, 25 bp, Homo sapien
ttttctaggattttcagacctccag

SEQ ID NO: 3879261 - DNA, 25 bp, Homo sapien
ttgcctgagtttccccccacttctg

SEQ ID NO: 3879262 - DNA, 25 bp, Homo sapien
ggtccaatcctcttcctctaaggct

SEQ ID NO: 3879263 - DNA, 25 bp, Homo sapien
ggactacccattggtcttgagtctt

SEQ ID NO: 3879264 - DNA, 25 bp, Homo sapien
cctgggactacccattggtcttgag

SEQ ID NO: 3879265 - DNA, 25 bp, Homo sapien
tgggactacccattggtcttgagtc

SEQ ID NO: 3879266 - DNA, 25 bp, Homo sapien
cccctgggactacccattggtcttg

SEQ ID NO: 3879267 - DNA, 25 bp, Homo sapien
tgcctctccaagtctgatgttgttc

SEQ ID NO: 3879268 - DNA, 25 bp, Homo sapien
ccttggtgctgagaccccatgctat

SEQ ID NO: 3879269 - DNA, 25 bp, Homo sapien
caaagggaactcggacacctttctg

SEQ ID NO: 3879270 - DNA, 25 bp, Homo sapien
ccagttctctgctaccagaccaccc

SEQ ID NO: 3879271 - DNA, 25 bp, Homo sapien
caaattggcaatttcggtgaggctt

SEQ ID NO: 3879272 - DNA, 25 bp, Homo sapien
cctgggccaggagttgtctgaacct

SEQ ID NO: 3879273 - DNA, 25 bp, Homo sapien
gagtgtcagctccatagtgtgagaa

SEQ ID NO: 3879274 - DNA, 25 bp, Homo sapien
tcatgtggctggcacttgacactgc

SEQ ID NO: 3879275 - DNA, 25 bp, Homo sapien
gcacaggtgatcagggttgtcttcc

SEQ ID NO: 3879276 - DNA, 25 bp, Homo sapien
ggaataactgaagggtgctgtcctc

SEQ ID NO: 3879277 - DNA, 25 bp, Homo sapien
catagctggaggctcacaactctgt

SEQ ID NO: 3879278 - DNA, 25 bp, Homo sapien
tggccttgagggcttccccggagaa

SEQ ID NO: 3879279 - DNA, 25 bp, Homo sapien
gaaggagcagctgtgaacattctgt

SEQ ID NO: 3879280 - DNA, 25 bp, Homo sapien
ggagcagctgtgaacattctgtttg

SEQ ID NO: 3879281 - DNA, 25 bp, Homo sapien
cattctgtttgctctgagtgcagaa

SEQ ID NO: 3879282 - DNA, 25 bp, Homo sapien
gaacattctgtttgctctgagtgca

SEQ ID NO: 3879283 - DNA, 25 bp, Homo sapien
ttcctctggtgtaaaggatctggat

SEQ ID NO: 3879284 - DNA, 25 bp, Homo sapien
cagtttcctctggtgtaaaggatct

SEQ ID NO: 3879285 - DNA, 25 bp, Homo sapien
tcagtttcctctggtgtaaaggatc

SEQ ID NO: 3879286 - DNA, 25 bp, Homo sapien
gtttcctctggtgtaaaggatctgg

SEQ ID NO: 3879287 - DNA, 25 bp, Homo sapien
tccttgttgagacctaaggctggag

SEQ ID NO: 3879288 - DNA, 25 bp, Homo sapien
accaaaaggctcacattcatactca

SEQ ID NO: 3879289 - DNA, 25 bp, Homo sapien
ctcttggacccagtataggtgtccg

SEQ ID NO: 3879290 - DNA, 25 bp, Homo sapien
ctccttactccctctagtttcccag

SEQ ID NO: 3879291 - DNA, 25 bp, Homo sapien
cagtataggtgtccgctgggccacc

SEQ ID NO: 3879292 - DNA, 25 bp, Homo sapien
tggacccagtataggtgtccgctgg

SEQ ID NO: 3879293 - DNA, 25 bp, Homo sapien
tgaaagcttcctgggttggcagaac

SEQ ID NO: 3879294 - DNA, 25 bp, Homo sapien
tctacacaatgaggtgcaggctgag

SEQ ID NO: 3879295 - DNA, 25 bp, Homo sapien
cctaggttcttggtgaccgagggct

SEQ ID NO: 3879296 - DNA, 25 bp, Homo sapien
tatccaggaagacctattcaaaggg

SEQ ID NO: 3879297 - DNA, 25 bp, Homo sapien
gctttggttttgggttgtgttgata

SEQ ID NO: 3879298 - DNA, 25 bp, Homo sapien
catgaaggcacgaacgtcccgggtt

SEQ ID NO: 3879299 - DNA, 25 bp, Homo sapien
cggcaaggtgtggtcgctcagggac

SEQ ID NO: 3879300 - DNA, 25 bp, Homo sapien
tcccgggttcgtctccctgctggtc

SEQ ID NO: 3879301 - DNA, 25 bp, Homo sapien
atgtctaggtccttccgggccggca

SEQ ID NO: 3879302 - DNA, 25 bp, Homo sapien
aaaagaggcacagcctgtgggtcgc

SEQ ID NO: 3879303 - DNA, 25 bp, Homo sapien
agagagtggtagacgcctggctttc

SEQ ID NO: 3879304 - DNA, 25 bp, Homo sapien
gacgcctggctttcaggtcctgagc

SEQ ID NO: 3879305 - DNA, 25 bp, Homo sapien
ctgcgggcaccggagcgtgggaccc

SEQ ID NO: 3879306 - DNA, 25 bp, Homo sapien
caatcccggtgcaaatggcggcagg

SEQ ID NO: 3879307 - DNA, 25 bp, Homo sapien
ttcccgcagtgtccgggaggtcgct

SEQ ID NO: 3879308 - DNA, 25 bp, Homo sapien
tggctttgcgtgcaacccgggtaaa

SEQ ID NO: 3879309 - DNA, 25 bp, Homo sapien
gagggtggaaaatctcaaagtcacc

SEQ ID NO: 3879310 - DNA, 25 bp, Homo sapien
tcagagctcccaactagccggagga

SEQ ID NO: 3879311 - DNA, 25 bp, Homo sapien
aatccttggaaagggcgctctgggc

SEQ ID NO: 3879312 - DNA, 25 bp, Homo sapien
ttttttctgcgtgcttccttcggcg

SEQ ID NO: 3879313 - DNA, 25 bp, Homo sapien
gactcggagaaaccggaagagcctg

SEQ ID NO: 3879314 - DNA, 25 bp, Homo sapien
tgtctattattttagtacatgacgt

SEQ ID NO: 3879315 - DNA, 25 bp, Homo sapien
aatctttaaagcgatacattgtcta

SEQ ID NO: 3879316 - DNA, 25 bp, Homo sapien
acatcaaatatacggaattttaatc

SEQ ID NO: 3879317 - DNA, 25 bp, Homo sapien
catgacgtaaaccttgtccccttct

SEQ ID NO: 3879318 - DNA, 25 bp, Homo sapien
aaatacccattctcttcgatggtat

SEQ ID NO: 3879319 - DNA, 25 bp, Homo sapien
caatttgaaatcagagctgacaaat

SEQ ID NO: 3879320 - DNA, 25 bp, Homo sapien
gaaatcagagctgacaaattgtgac

SEQ ID NO: 3879321 - DNA, 25 bp, Homo sapien
tctcttcgatggtatacaccttaaa

SEQ ID NO: 3879322 - DNA, 25 bp, Homo sapien
tttcaatcagacattaaataacgta

SEQ ID NO: 3879323 - DNA, 25 bp, Homo sapien
tgtttcaatcagacattaaataacg

SEQ ID NO: 3879324 - DNA, 25 bp, Homo sapien
gtttcaatcagacattaaataacgt

SEQ ID NO: 3879325 - DNA, 25 bp, Homo sapien
tgtgtttcaatcagacattaaataa

SEQ ID NO: 3879326 - DNA, 25 bp, Homo sapien
tacagagctcaaactaaataatgca

SEQ ID NO: 3879327 - DNA, 25 bp, Homo sapien
cataaataaataccagtgtccaccg

SEQ ID NO: 3879328 - DNA, 25 bp, Homo sapien
aatgcacttttgaaccaccggtccg

SEQ ID NO: 3879329 - DNA, 25 bp, Homo sapien
ccggtccgcttggagctaacataaa

SEQ ID NO: 3879330 - DNA, 25 bp, Homo sapien
atagatacggtatacatttctttcc

SEQ ID NO: 3879331 - DNA, 25 bp, Homo sapien
gtgtcccaccgggtctcggtcgctg

SEQ ID NO: 3879332 - DNA, 25 bp, Homo sapien
ctcggtcgctgctgtcgggtagata

SEQ ID NO: 3879333 - DNA, 25 bp, Homo sapien
tgtcgggtagatagatacggtatac

SEQ ID NO: 3879334 - DNA, 25 bp, Homo sapien
cgttggccgacacccagttgcagat

SEQ ID NO: 3879335 - DNA, 25 bp, Homo sapien
ggaaatgccgtatgggtccgcaagt

SEQ ID NO: 3879336 - DNA, 25 bp, Homo sapien
acagcagtttgtctgtcccgggaaa

SEQ ID NO: 3879337 - DNA, 25 bp, Homo sapien
tcgttagggagcataaagccgtagg

SEQ ID NO: 3879338 - DNA, 25 bp, Homo sapien
ctgaggcagtaagggtcccggcaca

SEQ ID NO: 3879339 - DNA, 25 bp, Homo sapien
gcggccgttagcgaggagtgcacac

SEQ ID NO: 3879340 - DNA, 25 bp, Homo sapien
gatcatgtgcgcaagaagcgctggc

SEQ ID NO: 3879341 - DNA, 25 bp, Homo sapien
tacaccagcgggtatccggacttca

SEQ ID NO: 3879342 - DNA, 25 bp, Homo sapien
tgtcatcacggacggcggagacgct

SEQ ID NO: 3879343 - DNA, 25 bp, Homo sapien
gctccggccaaagggctggagccgg

SEQ ID NO: 3879344 - DNA, 25 bp, Homo sapien
ggcggagacgctccggccaaagggc

SEQ ID NO: 3879345 - DNA, 25 bp, Homo sapien
ctgtcatcacggacggcggagacgc

SEQ ID NO: 3879346 - DNA, 25 bp, Homo sapien
gagggaacactgtctggcccggctt

SEQ ID NO: 3879347 - DNA, 25 bp, Homo sapien
caggctgcctgggtaggtcataccc

SEQ ID NO: 3879348 - DNA, 25 bp, Homo sapien
cttgtagggtgacacgggagccacc

SEQ ID NO: 3879349 - DNA, 25 bp, Homo sapien
aagtgccacgccgtgtggcaggaac

SEQ ID NO: 3879350 - DNA, 25 bp, Homo sapien
cgaggacagcatacctcccggcgag

SEQ ID NO: 3879351 - DNA, 25 bp, Homo sapien
gacagcatacctcccggcgagcagg

SEQ ID NO: 3879352 - DNA, 25 bp, Homo sapien
tgtctttcttgtcgtccttgccctc

SEQ ID NO: 3879353 - DNA, 25 bp, Homo sapien
ccgcccacgtcggtgtctttcttgt

SEQ ID NO: 3879354 - DNA, 25 bp, Homo sapien
gctggcaggtggcgctcggtacccg

SEQ ID NO: 3879355 - DNA, 25 bp, Homo sapien
ctggcaggtggcgctcggtacccgg

SEQ ID NO: 3879356 - DNA, 25 bp, Homo sapien
ctgcctgtcctgggcgtgaatggct

SEQ ID NO: 3879357 - DNA, 25 bp, Homo sapien
tgtcctgggcgtgaatggctggcag

SEQ ID NO: 3879358 - DNA, 25 bp, Homo sapien
tttggagtacggcttgaaactcgac

SEQ ID NO: 3879359 - DNA, 25 bp, Homo sapien
ttgaaactcgacttgtcctccacgc

SEQ ID NO: 3879360 - DNA, 25 bp, Homo sapien
cttcttatccgagccgggtttggag

SEQ ID NO: 3879361 - DNA, 25 bp, Homo sapien
cgatttggtgtccttgtcgcccgca

SEQ ID NO: 3879362 - DNA, 25 bp, Homo sapien
agcgccagcgggctcttcttggcat

SEQ ID NO: 3879363 - DNA, 25 bp, Homo sapien
tgcgaacatgtttgcgccaacagcg

SEQ ID NO: 3879364 - DNA, 25 bp, Homo sapien
ggcttcccgatctgcgaacatgttt

SEQ ID NO: 3879365 - DNA, 25 bp, Homo sapien
atgtttgcgccaacagcgccagcgg

SEQ ID NO: 3879366 - DNA, 25 bp, Homo sapien
gctcgggcggctggcgcctcagagg

SEQ ID NO: 3879367 - DNA, 25 bp, Homo sapien
attcttcagagtaagggctcgggcg

SEQ ID NO: 3879368 - DNA, 25 bp, Homo sapien
ggcggctggcgcctcagaggctgtg

SEQ ID NO: 3879369 - DNA, 25 bp, Homo sapien
aattcttcagagtaagggctcgggc

SEQ ID NO: 3879370 - DNA, 25 bp, Homo sapien
gatacgaaggacggcgactttggaa

SEQ ID NO: 3879371 - DNA, 25 bp, Homo sapien
cggcgactttggaaccgtatttcag

SEQ ID NO: 3879372 - DNA, 25 bp, Homo sapien
gcgactttggaaccgtatttcagac

SEQ ID NO: 3879373 - DNA, 25 bp, Homo sapien
ctgcggatacgaaggacggcgactt

SEQ ID NO: 3879374 - DNA, 25 bp, Homo sapien
ttcggtgccgagtgaaggggcctgg

SEQ ID NO: 3879375 - DNA, 25 bp, Homo sapien
cggtgccgagtgaaggggcctgggt

SEQ ID NO: 3879376 - DNA, 25 bp, Homo sapien
tgccgagtgaaggggcctgggtcgg

SEQ ID NO: 3879377 - DNA, 25 bp, Homo sapien
ggtgccgagtgaaggggcctgggtc

SEQ ID NO: 3879378 - DNA, 25 bp, Homo sapien
gtactcggggtgcaaaatgtggcca

SEQ ID NO: 3879379 - DNA, 25 bp, Homo sapien
gcacggcgtgcacaaaaggcttggt

SEQ ID NO: 3879380 - DNA, 25 bp, Homo sapien
gttcgtgccgtcagcatcttcagca

SEQ ID NO: 3879381 - DNA, 25 bp, Homo sapien
tcttcagcaccttgattggcaggcg

SEQ ID NO: 3879382 - DNA, 25 bp, Homo sapien
gagagcgcgctggtccaggcagggt

SEQ ID NO: 3879383 - DNA, 25 bp, Homo sapien
tatttccagagagcgcgctggtcca

SEQ ID NO: 3879384 - DNA, 25 bp, Homo sapien
tccagagagcgcgctggtccaggca

SEQ ID NO: 3879385 - DNA, 25 bp, Homo sapien
ctatttccagagagcgcgctggtcc

SEQ ID NO: 3879386 - DNA, 25 bp, Homo sapien
cagaaagcgagggcgctgtgctcat

SEQ ID NO: 3879387 - DNA, 25 bp, Homo sapien
gcttactgcttcttagggcagaaag

SEQ ID NO: 3879388 - DNA, 25 bp, Homo sapien
gccgccgctgtgcttactgcttctt

SEQ ID NO: 3879389 - DNA, 25 bp, Homo sapien
tactgcttcttagggcagaaagcga

SEQ ID NO: 3879390 - DNA, 25 bp, Homo sapien
cgcgagtaatcctgggtggcccgca

SEQ ID NO: 3879391 - DNA, 25 bp, Homo sapien
cagcggagccgtggccgggctagag

SEQ ID NO: 3879392 - DNA, 25 bp, Homo sapien
cctggagccagacgcgagtaatcct

SEQ ID NO: 3879393 - DNA, 25 bp, Homo sapien
ttctcggcgcctggagccagacgcg

SEQ ID NO: 3879394 - DNA, 25 bp, Homo sapien
agtgccgggcggctcgcggtgtccg

SEQ ID NO: 3879395 - DNA, 25 bp, Homo sapien
atgcgagccgctgcgtgtccagccg

SEQ ID NO: 3879396 - DNA, 25 bp, Homo sapien
ggcggctcgcggtgtccgcctcggg

SEQ ID NO: 3879397 - DNA, 25 bp, Homo sapien
ccggcgctgcgctctgcgatgcgag

SEQ ID NO: 3879398 - DNA, 25 bp, Homo sapien
tcgatttgcaccgtcactcgggttg

SEQ ID NO: 3879399 - DNA, 25 bp, Homo sapien
gggctgctctctcgaatttattgga

SEQ ID NO: 3879400 - DNA, 25 bp, Homo sapien
cgccgagtcggaatgagctgcgcta

SEQ ID NO: 3879401 - DNA, 25 bp, Homo sapien
ctgcctgtgggaacgcgggttcttc

SEQ ID NO: 3879402 - DNA, 25 bp, Homo sapien
cttcctcggaacgacttagaagact

SEQ ID NO: 3879403 - DNA, 25 bp, Homo sapien
tagaagactttgaatctcccctcct

SEQ ID NO: 3879404 - DNA, 25 bp, Homo sapien
ggagctctgggagtcgggagccagt

SEQ ID NO: 3879405 - DNA, 25 bp, Homo sapien
cttttgataaatggtggggctggga

SEQ ID NO: 3879406 - DNA, 25 bp, Homo sapien
gggagctctgggagtcgggagccag

SEQ ID NO: 3879407 - DNA, 25 bp, Homo sapien
agggcgggacagtcctacgctgtct

SEQ ID NO: 3879408 - DNA, 25 bp, Homo sapien
cccacgctgagggaggcggttgtct

SEQ ID NO: 3879409 - DNA, 25 bp, Homo sapien
agcaagtcccaggtgcgcgtttcgg

SEQ ID NO: 3879410 - DNA, 25 bp, Homo sapien
tagtgtccgtgcgacatctgaggga

SEQ ID NO: 3879411 - DNA, 25 bp, Homo sapien
cgaggcccgggcactgaaattctgg

SEQ ID NO: 3879412 - DNA, 25 bp, Homo sapien
cccgcgaggcccgggcactgaaatt

SEQ ID NO: 3879413 - DNA, 25 bp, Homo sapien
ttgggccgctatcgccgcggcctcc

SEQ ID NO: 3879414 - DNA, 25 bp, Homo sapien
ctttgggccgctatcgccgcggcct

SEQ ID NO: 3879415 - DNA, 25 bp, Homo sapien
ccagcagcagttggcgtggatgtcc

SEQ ID NO: 3879416 - DNA, 25 bp, Homo sapien
aggcgccagcgtccgagcctgcgca

SEQ ID NO: 3879417 - DNA, 25 bp, Homo sapien
gatgtcctgcggattttatttgcaa

SEQ ID NO: 3879418 - DNA, 25 bp, Homo sapien
gggccattaattactctgcgccagg

SEQ ID NO: 3879419 - DNA, 25 bp, Homo sapien
ctgaagtgtctgtgacgaaagggct

SEQ ID NO: 3879420 - DNA, 25 bp, Homo sapien
cgaggccacggacatccaatagagc

SEQ ID NO: 3879421 - DNA, 25 bp, Homo sapien
tcatatgtcgggttcagtgcgccgc

SEQ ID NO: 3879422 - DNA, 25 bp, Homo sapien
cagagcgctgcagtattgggcgtca

SEQ ID NO: 3879423 - DNA, 25 bp, Homo sapien
cactggacgtggagctgtttgtata

SEQ ID NO: 3879424 - DNA, 25 bp, Homo sapien
tatccgaatacatccagctcgcagg

SEQ ID NO: 3879425 - DNA, 25 bp, Homo sapien
gactcgaggtggtttctagtgcccg

SEQ ID NO: 3879426 - DNA, 25 bp, Homo sapien
tagaatcgacgggatttctctggct

SEQ ID NO: 3879427 - DNA, 25 bp, Homo sapien
ttagcaagagagattcgatggcggc

SEQ ID NO: 3879428 - DNA, 25 bp, Homo sapien
ccctcctgcgcctgtgtctggagaa

SEQ ID NO: 3879429 - DNA, 25 bp, Homo sapien
ccagagcgctgcaagttagcaagag

SEQ ID NO: 3879430 - DNA, 25 bp, Homo sapien
cagaggtagccggaactttcctcga

SEQ ID NO: 3879431 - DNA, 25 bp, Homo sapien
agaagggcgcccataaatcgcgggt

SEQ ID NO: 3879432 - DNA, 25 bp, Homo sapien
gtgtcagggcgaaaaactctcttta

SEQ ID NO: 3879433 - DNA, 25 bp, Homo sapien
tgaatagccgtatccggaaaccgag

SEQ ID NO: 3879434 - DNA, 25 bp, Homo sapien
gggaacacattttccgcggccataa

SEQ ID NO: 3879435 - DNA, 25 bp, Homo sapien
gaggggaggctgtcaaaacccagtc

SEQ ID NO: 3879436 - DNA, 25 bp, Homo sapien
gatgggggacaattctccgacgccg

SEQ ID NO: 3879437 - DNA, 25 bp, Homo sapien
tttgccactgcatcgattttattga

SEQ ID NO: 3879438 - DNA, 25 bp, Homo sapien
caaacctgggaatgtgcgcgctcgg

SEQ ID NO: 3879439 - DNA, 25 bp, Homo sapien
ccaaccggcgcaccacctcccaggc

SEQ ID NO: 3879440 - DNA, 25 bp, Homo sapien
caagcccccactgtcaatacaatcc

SEQ ID NO: 3879441 - DNA, 25 bp, Homo sapien
gcgctcccagggtccgtgtctgccc

SEQ ID NO: 3879442 - DNA, 25 bp, Homo sapien
cccaagcccccactgtcaatacaat

SEQ ID NO: 3879443 - DNA, 25 bp, Homo sapien
tgcagcgctcccagggtccgtgtct

SEQ ID NO: 3879444 - DNA, 25 bp, Homo sapien
cgcgcaggtaaccgagaaatggaag

SEQ ID NO: 3879445 - DNA, 25 bp, Homo sapien
cgcaggtaaccgagaaatggaaggg

SEQ ID NO: 3879446 - DNA, 25 bp, Homo sapien
caggtaaccgagaaatggaagggag

SEQ ID NO: 3879447 - DNA, 25 bp, Homo sapien
ccgcgcaggtaaccgagaaatggaa

SEQ ID NO: 3879448 - DNA, 25 bp, Homo sapien
tctacttttctgatgggggagtacc

SEQ ID NO: 3879449 - DNA, 25 bp, Homo sapien
tattggagggagaattctacttttc

SEQ ID NO: 3879450 - DNA, 25 bp, Homo sapien
gcatgccaactccttactctggggg

SEQ ID NO: 3879451 - DNA, 25 bp, Homo sapien
agtaccagcctgttaaccacaacca

SEQ ID NO: 3879452 - DNA, 25 bp, Homo sapien
gtctcagactcaaggggtgagcaga

SEQ ID NO: 3879453 - DNA, 25 bp, Homo sapien
aggattgtggtagtttggaaactct

SEQ ID NO: 3879454 - DNA, 25 bp, Homo sapien
agtgagcccagtgcaatagcattga

SEQ ID NO: 3879455 - DNA, 25 bp, Homo sapien
agcagtgagcccagtgcaatagcat

SEQ ID NO: 3879456 - DNA, 25 bp, Homo sapien
tacttgaacagccaaaggctttatc

SEQ ID NO: 3879457 - DNA, 25 bp, Homo sapien
catattcacaacgttttacttgaac

SEQ ID NO: 3879458 - DNA, 25 bp, Homo sapien
ttgtaactgaacatgctgccccgca

SEQ ID NO: 3879459 - DNA, 25 bp, Homo sapien
aactgaacatgctgccccgcagtga

SEQ ID NO: 3879460 - DNA, 25 bp, Homo sapien
tgggacaaattggagcactgagtag

SEQ ID NO: 3879461 - DNA, 25 bp, Homo sapien
tgaggaaaatggttgcaacgtgaca

SEQ ID NO: 3879462 - DNA, 25 bp, Homo sapien
gcgtgaggctccatatgaggaaaat

SEQ ID NO: 3879463 - DNA, 25 bp, Homo sapien
tatttctgatctatcagcgtgaggc

SEQ ID NO: 3879464 - DNA, 25 bp, Homo sapien
tagggcccacggcatgattaattac

SEQ ID NO: 3879465 - DNA, 25 bp, Homo sapien
gagcatttcttaagtagacaccccg

SEQ ID NO: 3879466 - DNA, 25 bp, Homo sapien
caaagagcatttcataagcggagca

SEQ ID NO: 3879467 - DNA, 25 bp, Homo sapien
tgcaagtactttgaagagggccctg

SEQ ID NO: 3879468 - DNA, 25 bp, Homo sapien
aagggagagccgttctccaatctca

SEQ ID NO: 3879469 - DNA, 25 bp, Homo sapien
tgtctgcagaacagcctatgctcag

SEQ ID NO: 3879470 - DNA, 25 bp, Homo sapien
ggaaagatgccagcccactttggtg

SEQ ID NO: 3879471 - DNA, 25 bp, Homo sapien
ctcagatgacccagctgtgtatgga

SEQ ID NO: 3879472 - DNA, 25 bp, Homo sapien
cagttgatatctggtagctctgtgc

SEQ ID NO: 3879473 - DNA, 25 bp, Homo sapien
ctgacaagggcccacctaacaatgt

SEQ ID NO: 3879474 - DNA, 25 bp, Homo sapien
ctgggctggctcttagctgcagcaa

SEQ ID NO: 3879475 - DNA, 25 bp, Homo sapien
agacgatgccagttaaggctgggct

SEQ ID NO: 3879476 - DNA, 25 bp, Homo sapien
ctgcgcggagaccgggccgaggggc

SEQ ID NO: 3879477 - DNA, 25 bp, Homo sapien
tgcgcggagaccgggccgaggggcg

SEQ ID NO: 3879478 - DNA, 25 bp, Homo sapien
atttccaggtgtcctacataggcca

SEQ ID NO: 3879479 - DNA, 25 bp, Homo sapien
agtaatttcagggttgggagcagct

SEQ ID NO: 3879480 - DNA, 25 bp, Homo sapien
aagcaatcattggatcagtaatttc

SEQ ID NO: 3879481 - DNA, 25 bp, Homo sapien
tccaggtgtcctacataggccagga

SEQ ID NO: 3879482 - DNA, 25 bp, Homo sapien
cagggactgtggacatttcgcaaag

SEQ ID NO: 3879483 - DNA, 25 bp, Homo sapien
agagaaattccagagcaccttggca

SEQ ID NO: 3879484 - DNA, 25 bp, Homo sapien
gctttaaccttctgaggtatgtaac

SEQ ID NO: 3879485 - DNA, 25 bp, Homo sapien
tcgcaaagaggcttgatctgagctt

SEQ ID NO: 3879486 - DNA, 25 bp, Homo sapien
cttactcccaaagggtttgtgtgca

SEQ ID NO: 3879487 - DNA, 25 bp, Homo sapien
gagggttgtagtggatggagagtgg

SEQ ID NO: 3879488 - DNA, 25 bp, Homo sapien
tggatggagagtggccgctgtctgt

SEQ ID NO: 3879489 - DNA, 25 bp, Homo sapien
cctgagggttgtagtggatggagag

SEQ ID NO: 3879490 - DNA, 25 bp, Homo sapien
catcagtgcatgtggatcatgggac

SEQ ID NO: 3879491 - DNA, 25 bp, Homo sapien
ccagagcagacttaggcaaaaggct

SEQ ID NO: 3879492 - DNA, 25 bp, Homo sapien
tattgggtttgaggaaacacagcca

SEQ ID NO: 3879493 - DNA, 25 bp, Homo sapien
cgagtgcgtggccttgagtgctcca

SEQ ID NO: 3879494 - DNA, 25 bp, Homo sapien
cagatgtcagattaccctctggaga

SEQ ID NO: 3879495 - DNA, 25 bp, Homo sapien
tcaagtctttccttagtgttggaca

SEQ ID NO: 3879496 - DNA, 25 bp, Homo sapien
tctggagaggtgataccagtttctt

SEQ ID NO: 3879497 - DNA, 25 bp, Homo sapien
caaaatagggcagctttggtacaga

SEQ ID NO: 3879498 - DNA, 25 bp, Homo sapien
ccttgagatggacaactgcatgctt

SEQ ID NO: 3879499 - DNA, 25 bp, Homo sapien
tgagatggacaactgcatgcttgaa

SEQ ID NO: 3879500 - DNA, 25 bp, Homo sapien
gggaccttgagatggacaactgcat

SEQ ID NO: 3879501 - DNA, 25 bp, Homo sapien
gaccttgagatggacaactgcatgc

SEQ ID NO: 3879502 - DNA, 25 bp, Homo sapien
ggagcgattatgctttttgctgggt

SEQ ID NO: 3879503 - DNA, 25 bp, Homo sapien
ggtgatttcagctgttccctgctcc

SEQ ID NO: 3879504 - DNA, 25 bp, Homo sapien
tccctgctccttgatgatgaaaggg

SEQ ID NO: 3879505 - DNA, 25 bp, Homo sapien
tcctcagggactgtagtgttggtga

SEQ ID NO: 3879506 - DNA, 25 bp, Homo sapien
atacagaacccaatttttcagtctc

SEQ ID NO: 3879507 - DNA, 25 bp, Homo sapien
tacagaacccaatttttcagtctct

SEQ ID NO: 3879508 - DNA, 25 bp, Homo sapien
acagaacccaatttttcagtctctt

SEQ ID NO: 3879509 - DNA, 25 bp, Homo sapien
tatacagaacccaatttttcagtct

SEQ ID NO: 3879510 - DNA, 25 bp, Homo sapien
taattgggtaactcttaatagtagc

SEQ ID NO: 3879511 - DNA, 25 bp, Homo sapien
caattgcatatttatcagtgtgagg

SEQ ID NO: 3879512 - DNA, 25 bp, Homo sapien
gttattaatgtaactgtcaggccca

SEQ ID NO: 3879513 - DNA, 25 bp, Homo sapien
ggtaactcttaatagtagcaattgc

SEQ ID NO: 3879514 - DNA, 25 bp, Homo sapien
tgatgccgtttctggggagacacta

SEQ ID NO: 3879515 - DNA, 25 bp, Homo sapien
cagctggcatgtgatgccgtttctg

SEQ ID NO: 3879516 - DNA, 25 bp, Homo sapien
ctggggagacactagcaaagttgat

SEQ ID NO: 3879517 - DNA, 25 bp, Homo sapien
gcagctggcatgtgatgccgtttct

SEQ ID NO: 3879518 - DNA, 25 bp, Homo sapien
cacatccgccagtttgccgagaatc

SEQ ID NO: 3879519 - DNA, 25 bp, Homo sapien
tgctttcttgatgcccgacaaatgc

SEQ ID NO: 3879520 - DNA, 25 bp, Homo sapien
gaatcacctctcgacagtttgcttt

SEQ ID NO: 3879521 - DNA, 25 bp, Homo sapien
tttgctgaagccacatccgccagtt

SEQ ID NO: 3879522 - DNA, 25 bp, Homo sapien
ggctcacgtgaattcttcccagatg

SEQ ID NO: 3879523 - DNA, 25 bp, Homo sapien
agtctgtcctggttggctcacgtga

SEQ ID NO: 3879524 - DNA, 25 bp, Homo sapien
gatcacgagtctgtcctggttggct

SEQ ID NO: 3879525 - DNA, 25 bp, Homo sapien
gtgctggcagttggatcacgagtct

SEQ ID NO: 3879526 - DNA, 25 bp, Homo sapien
tgtgctcgttcagaaggggaggaac

SEQ ID NO: 3879527 - DNA, 25 bp, Homo sapien
gctcgttcagaaggggaggaaccaa

SEQ ID NO: 3879528 - DNA, 25 bp, Homo sapien
gctggctctgtgctcgttcagaagg

SEQ ID NO: 3879529 - DNA, 25 bp, Homo sapien
ctggctctgtgctcgttcagaaggg

SEQ ID NO: 3879530 - DNA, 25 bp, Homo sapien
ccgtttatctggacggcattttcca

SEQ ID NO: 3879531 - DNA, 25 bp, Homo sapien
ttgctgctgccgtttatctggacgg

SEQ ID NO: 3879532 - DNA, 25 bp, Homo sapien
gctgccgtttatctggacggcattt

SEQ ID NO: 3879533 - DNA, 25 bp, Homo sapien
ttatctggacggcattttccatcag

SEQ ID NO: 3879534 - DNA, 25 bp, Homo sapien
tgtacctgatgggacaagctttccg

SEQ ID NO: 3879535 - DNA, 25 bp, Homo sapien
ttgctcttccacagactgtacctga

SEQ ID NO: 3879536 - DNA, 25 bp, Homo sapien
aactaaatttactcttcctgccttg

SEQ ID NO: 3879537 - DNA, 25 bp, Homo sapien
acaagctttccgtcaggtagcagga

SEQ ID NO: 3879538 - DNA, 25 bp, Homo sapien
tttcctggctgacccttaaatgctc

SEQ ID NO: 3879539 - DNA, 25 bp, Homo sapien
ttttcctggctgacccttaaatgct

SEQ ID NO: 3879540 - DNA, 25 bp, Homo sapien
tcctggctgacccttaaatgctctg

SEQ ID NO: 3879541 - DNA, 25 bp, Homo sapien
ttcctggctgacccttaaatgctct

SEQ ID NO: 3879542 - DNA, 25 bp, Homo sapien
ttttcattgccagctgtcacggaga

SEQ ID NO: 3879543 - DNA, 25 bp, Homo sapien
ttcattgccagctgtcacggagaat

SEQ ID NO: 3879544 - DNA, 25 bp, Homo sapien
cttggtttttcattgccagctgtca

SEQ ID NO: 3879545 - DNA, 25 bp, Homo sapien
gtttttcattgccagctgtcacgga

SEQ ID NO: 3879546 - DNA, 25 bp, Homo sapien
gggctgttctgtgagcattaacata

SEQ ID NO: 3879547 - DNA, 25 bp, Homo sapien
ctgataagttcttcagttgccccct

SEQ ID NO: 3879548 - DNA, 25 bp, Homo sapien
tgttctgtgagcattaacatacctt

SEQ ID NO: 3879549 - DNA, 25 bp, Homo sapien
gataagttcttcagttgccccctgc

SEQ ID NO: 3879550 - DNA, 25 bp, Homo sapien
gccccactcattgtccgttggaaca

SEQ ID NO: 3879551 - DNA, 25 bp, Homo sapien
ctccgaggagaagggccgcttactt

SEQ ID NO: 3879552 - DNA, 25 bp, Homo sapien
tcagtctgagcagccccactcattg

SEQ ID NO: 3879553 - DNA, 25 bp, Homo sapien
cacgtcccagggtacataaggttgt

SEQ ID NO: 3879554 - DNA, 25 bp, Homo sapien
aaggattcattccagattgggaagt

SEQ ID NO: 3879555 - DNA, 25 bp, Homo sapien
cttccctgttgaatccgcagccctg

SEQ ID NO: 3879556 - DNA, 25 bp, Homo sapien
tccctgttgaatccgcagccctggc

SEQ ID NO: 3879557 - DNA, 25 bp, Homo sapien
aggattcattccagattgggaagtc

SEQ ID NO: 3879558 - DNA, 25 bp, Homo sapien
gggtgggttggtttgtgagctcaga

SEQ ID NO: 3879559 - DNA, 25 bp, Homo sapien
ggtgggttggtttgtgagctcagag

SEQ ID NO: 3879560 - DNA, 25 bp, Homo sapien
tctgtgcaacagttctagaggtttg

SEQ ID NO: 3879561 - DNA, 25 bp, Homo sapien
ttggtctgtgcaacagttctagagg

SEQ ID NO: 3879562 - DNA, 25 bp, Homo sapien
tagcatggggtttggtctgtgcaac

SEQ ID NO: 3879563 - DNA, 25 bp, Homo sapien
ggtctgtgcaacagttctagaggtt

SEQ ID NO: 3879564 - DNA, 25 bp, Homo sapien
tgaacccctcattgtaataccagtg

SEQ ID NO: 3879565 - DNA, 25 bp, Homo sapien
aaattgtccctaacacttggcgctg

SEQ ID NO: 3879566 - DNA, 25 bp, Homo sapien
ggtgggacgcaaacatctagaccct

SEQ ID NO: 3879567 - DNA, 25 bp, Homo sapien
cagagtgggatgtatcctgaacccc

SEQ ID NO: 3879568 - DNA, 25 bp, Homo sapien
tgaagacccaggaggccatagtgct

SEQ ID NO: 3879569 - DNA, 25 bp, Homo sapien
ctgaggacataagcataagagcccc

SEQ ID NO: 3879570 - DNA, 25 bp, Homo sapien
tgtccctggagattagcatgggtgt

SEQ ID NO: 3879571 - DNA, 25 bp, Homo sapien
ggcacatgtggaattctgaagaccc

SEQ ID NO: 3879572 - DNA, 25 bp, Homo sapien
ctgaaaagtacacccaaccggcttg

SEQ ID NO: 3879573 - DNA, 25 bp, Homo sapien
ttaattgtatctggacctgcacccc

SEQ ID NO: 3879574 - DNA, 25 bp, Homo sapien
tgatctttgcactactccttgactg

SEQ ID NO: 3879575 - DNA, 25 bp, Homo sapien
cctgtgtgaacctgcctaaaagagt

SEQ ID NO: 3879576 - DNA, 25 bp, Homo sapien
taataaaaggccttgtcagtggctt

SEQ ID NO: 3879577 - DNA, 25 bp, Homo sapien
ctggtttaagaagccgccagggcca

SEQ ID NO: 3879578 - DNA, 25 bp, Homo sapien
agtgatggacaaggatactctccca

SEQ ID NO: 3879579 - DNA, 25 bp, Homo sapien
tccactgagaaacatagacactttc

SEQ ID NO: 3879580 - DNA, 25 bp, Homo sapien
gctatggacccacttctcagaaaaa

SEQ ID NO: 3879581 - DNA, 25 bp, Homo sapien
aattggaagcatgaactgacctagc

SEQ ID NO: 3879582 - DNA, 25 bp, Homo sapien
gagaaggcgcttttacaactagaaa

SEQ ID NO: 3879583 - DNA, 25 bp, Homo sapien
tctgggccatagatctctgagaatc

SEQ ID NO: 3879584 - DNA, 25 bp, Homo sapien
ggccggtgcccagtgaccatgatga

SEQ ID NO: 3879585 - DNA, 25 bp, Homo sapien
aaacctgagccagaagcaatggcag

SEQ ID NO: 3879586 - DNA, 25 bp, Homo sapien
tcagcgccatgttggtcccttggcc

SEQ ID NO: 3879587 - DNA, 25 bp, Homo sapien
gattgatttcactgactgctatgtc

SEQ ID NO: 3879588 - DNA, 25 bp, Homo sapien
tgaagcctcttgagacagcaaactc

SEQ ID NO: 3879589 - DNA, 25 bp, Homo sapien
ttgctctcttggccagttgaatgga

SEQ ID NO: 3879590 - DNA, 25 bp, Homo sapien
tgctctcttggccagttgaatggat

SEQ ID NO: 3879591 - DNA, 25 bp, Homo sapien
catttctaaggggcaaggaggttct

SEQ ID NO: 3879592 - DNA, 25 bp, Homo sapien
gtttgtagtaggttctcacttggca

SEQ ID NO: 3879593 - DNA, 25 bp, Homo sapien
ggcaataaaactactagcaccacca

SEQ ID NO: 3879594 - DNA, 25 bp, Homo sapien
ttggacaagtacatcaatactattg

SEQ ID NO: 3879595 - DNA, 25 bp, Homo sapien
aacaccacatcatctacactttcat

SEQ ID NO: 3879596 - DNA, 25 bp, Homo sapien
tttaggagggctgcgagtgagtcgt

SEQ ID NO: 3879597 - DNA, 25 bp, Homo sapien
ggctgcgagtgagtcgtgatggttc

SEQ ID NO: 3879598 - DNA, 25 bp, Homo sapien
tgagtcgtgatggttcttgggaact

SEQ ID NO: 3879599 - DNA, 25 bp, Homo sapien
tttgttttaggagggctgcgagtga

SEQ ID NO: 3879600 - DNA, 25 bp, Homo sapien
gacttgaaggtgctgtgaaatgctt

SEQ ID NO: 3879601 - DNA, 25 bp, Homo sapien
ccactccggtgtaacaaacttcagg

SEQ ID NO: 3879602 - DNA, 25 bp, Homo sapien
gatgtgaaaaatttgtgattgaagg

SEQ ID NO: 3879603 - DNA, 25 bp, Homo sapien
cagggccatctgacttgaaggtgct

SEQ ID NO: 3879604 - DNA, 25 bp, Homo sapien
taaagcagatactgatgaggccgct

SEQ ID NO: 3879605 - DNA, 25 bp, Homo sapien
tgctccaccacagtatacggttggg

SEQ ID NO: 3879606 - DNA, 25 bp, Homo sapien
cccagggagctttgcataacacaga

SEQ ID NO: 3879607 - DNA, 25 bp, Homo sapien
tgaaactgtatctggccacctgctg

SEQ ID NO: 3879608 - DNA, 25 bp, Homo sapien
aatttaattgtgattgatgctctgt

SEQ ID NO: 3879609 - DNA, 25 bp, Homo sapien
atttaattgtgattgatgctctgtc

SEQ ID NO: 3879610 - DNA, 25 bp, Homo sapien
agctttgacggattgctttcccgca

SEQ ID NO: 3879611 - DNA, 25 bp, Homo sapien
gacggattgctttcccgcagtaatg

SEQ ID NO: 3879612 - DNA, 25 bp, Homo sapien
tttcccgcagtaatgacttaggcat

SEQ ID NO: 3879613 - DNA, 25 bp, Homo sapien
agagcaacccagctttgacggattg

SEQ ID NO: 3879614 - DNA, 25 bp, Homo sapien
ttctgatacaagtgtcgctgaatgt

SEQ ID NO: 3879615 - DNA, 25 bp, Homo sapien
caagtgtcgctgaatgtgcttcctt

SEQ ID NO: 3879616 - DNA, 25 bp, Homo sapien
tgtcgctgaatgtgcttccttgctg

SEQ ID NO: 3879617 - DNA, 25 bp, Homo sapien
tgatacaagtgtcgctgaatgtgct

SEQ ID NO: 3879618 - DNA, 25 bp, Homo sapien
tacagtattaagcttcatggtctag

SEQ ID NO: 3879619 - DNA, 25 bp, Homo sapien
accatgaaactcacaggaactctgt

SEQ ID NO: 3879620 - DNA, 25 bp, Homo sapien
agctctggattctggaaggtcttag

SEQ ID NO: 3879621 - DNA, 25 bp, Homo sapien
ggagagtccaacatgtctgaaataa

SEQ ID NO: 3879622 - DNA, 25 bp, Homo sapien
tggtgctgggaagccttattttatg

SEQ ID NO: 3879623 - DNA, 25 bp, Homo sapien
tactgagtgttgaccagtgttgggc

SEQ ID NO: 3879624 - DNA, 25 bp, Homo sapien
ttatggtgtaagttggaatctttca

SEQ ID NO: 3879625 - DNA, 25 bp, Homo sapien
aatagacacccagaggaggaatgag

SEQ ID NO: 3879626 - DNA, 25 bp, Homo sapien
tattcatcagtgcacccaagattct

SEQ ID NO: 3879627 - DNA, 25 bp, Homo sapien
gcattactgagtatctctggaccaa

SEQ ID NO: 3879628 - DNA, 25 bp, Homo sapien
taatatgaccttccagagaaccctg

SEQ ID NO: 3879629 - DNA, 25 bp, Homo sapien
caccaagtgcttgttgccagtgagg

SEQ ID NO: 3879630 - DNA, 25 bp, Homo sapien
tggctctgacaggagtatctttcct

SEQ ID NO: 3879631 - DNA, 25 bp, Homo sapien
aattaaagactctggtggcccttgt

SEQ ID NO: 3879632 - DNA, 25 bp, Homo sapien
tggcccttgtgaagacctttctgac

SEQ ID NO: 3879633 - DNA, 25 bp, Homo sapien
tttctgactcaagtgactgtggctc

SEQ ID NO: 3879634 - DNA, 25 bp, Homo sapien
gccaaaaccactgtggccacaataa

SEQ ID NO: 3879635 - DNA, 25 bp, Homo sapien
ggagtttcaggtcaagcccaattta

SEQ ID NO: 3879636 - DNA, 25 bp, Homo sapien
tagaaacctggtctgtgatcacaat

SEQ ID NO: 3879637 - DNA, 25 bp, Homo sapien
gcagcagcttactgccccatctgag

SEQ ID NO: 3879638 - DNA, 25 bp, Homo sapien
tccagactaaataccagtgctcaag

SEQ ID NO: 3879639 - DNA, 25 bp, Homo sapien
ggaccttttcttgaaccgcagctgg

SEQ ID NO: 3879640 - DNA, 25 bp, Homo sapien
tttggaccttttcttgaaccgcagc

SEQ ID NO: 3879641 - DNA, 25 bp, Homo sapien
ctttggaccttttcttgaaccgcag

SEQ ID NO: 3879642 - DNA, 25 bp, Homo sapien
tggaccttttcttgaaccgcagctg

SEQ ID NO: 3879643 - DNA, 25 bp, Homo sapien
agctgagattgtaatgaaaaacagt

SEQ ID NO: 3879644 - DNA, 25 bp, Homo sapien
caagaagagggcttattttatcaag

SEQ ID NO: 3879645 - DNA, 25 bp, Homo sapien
aaattactcacaagaagagggctta

SEQ ID NO: 3879646 - DNA, 25 bp, Homo sapien
tatcaagcgctctcctaatttgatt

SEQ ID NO: 3879647 - DNA, 25 bp, Homo sapien
caggagatatgtaggtgtagaagca

SEQ ID NO: 3879648 - DNA, 25 bp, Homo sapien
taagtctgatcggttcagcacaggc

SEQ ID NO: 3879649 - DNA, 25 bp, Homo sapien
agtctgatcggttcagcacaggcat

SEQ ID NO: 3879650 - DNA, 25 bp, Homo sapien
cagagttaagtctgatcggttcagc

SEQ ID NO: 3879651 - DNA, 25 bp, Homo sapien
gttgccttcagagttaagtctgatc

SEQ ID NO: 3879652 - DNA, 25 bp, Homo sapien
tggcattatttcttgagggcacgtc

SEQ ID NO: 3879653 - DNA, 25 bp, Homo sapien
tgacaccacctcttggatgaatgtg

SEQ ID NO: 3879654 - DNA, 25 bp, Homo sapien
gaagccttggtttctagggctgcct

SEQ ID NO: 3879655 - DNA, 25 bp, Homo sapien
gaggcaaccccttcataaatatctg

SEQ ID NO: 3879656 - DNA, 25 bp, Homo sapien
cctgggacactcaagcttagtggga

SEQ ID NO: 3879657 - DNA, 25 bp, Homo sapien
cactgctgccagactgcctctccag

SEQ ID NO: 3879658 - DNA, 25 bp, Homo sapien
ccaagtgtctggcttggcgggtccc

SEQ ID NO: 3879659 - DNA, 25 bp, Homo sapien
ccctgaaaagtgggctgaagccaga

SEQ ID NO: 3879660 - DNA, 25 bp, Homo sapien
agccgaaggtcaccgacttcaaaga

SEQ ID NO: 3879661 - DNA, 25 bp, Homo sapien
ctcaaagaccccagccgaaggtcac

SEQ ID NO: 3879662 - DNA, 25 bp, Homo sapien
agaccccagccgaaggtcaccgact

SEQ ID NO: 3879663 - DNA, 25 bp, Homo sapien
ccccagccgaaggtcaccgacttca

SEQ ID NO: 3879664 - DNA, 25 bp, Homo sapien
tccctgatggttagtgacattgagc

SEQ ID NO: 3879665 - DNA, 25 bp, Homo sapien
cttcaccgtgttgtcctgagctcaa

SEQ ID NO: 3879666 - DNA, 25 bp, Homo sapien
tgacaggtatgaggtgataactcat

SEQ ID NO: 3879667 - DNA, 25 bp, Homo sapien
tgtatgttttctagagatagggctt

SEQ ID NO: 3879668 - DNA, 25 bp, Homo sapien
tcatatccatgacatcattgctgag

SEQ ID NO: 3879669 - DNA, 25 bp, Homo sapien
gtcatatccatgacatcattgctga

SEQ ID NO: 3879670 - DNA, 25 bp, Homo sapien
tgtcatatccatgacatcattgctg

SEQ ID NO: 3879671 - DNA, 25 bp, Homo sapien
cagtgcgtgatggttgtttcttgta

SEQ ID NO: 3879672 - DNA, 25 bp, Homo sapien
gaaatcttaaagaggcagtgcgtga

SEQ ID NO: 3879673 - DNA, 25 bp, Homo sapien
tcttggtgaaactggaccctgtttc

SEQ ID NO: 3879674 - DNA, 25 bp, Homo sapien
tataacccctaaaatcttgtgtcca

SEQ ID NO: 3879675 - DNA, 25 bp, Homo sapien
aataaagatgtcatcttgaagtttc

SEQ ID NO: 3879676 - DNA, 25 bp, Homo sapien
tcttgaagtttcctcgcagttctcc

SEQ ID NO: 3879677 - DNA, 25 bp, Homo sapien
gcagttctccccgtaatcgggaatc

SEQ ID NO: 3879678 - DNA, 25 bp, Homo sapien
cgggaatcctcatttgcactcagaa

SEQ ID NO: 3879679 - DNA, 25 bp, Homo sapien
tctgctgcccgaagttgtaataaag

SEQ ID NO: 3879680 - DNA, 25 bp, Homo sapien
aaagtcttcacagtctcatttcctg

SEQ ID NO: 3879681 - DNA, 25 bp, Homo sapien
gatctgggacggcaaggctatccgt

SEQ ID NO: 3879682 - DNA, 25 bp, Homo sapien
ctgttctgagaggacgtgcaaagta

SEQ ID NO: 3879683 - DNA, 25 bp, Homo sapien
caaaggttctgtcaagccggccagt

SEQ ID NO: 3879684 - DNA, 25 bp, Homo sapien
tgatgtcatgcggaaaagagtcaac

SEQ ID NO: 3879685 - DNA, 25 bp, Homo sapien
ctgctgaacacccatgccaaaggtt

SEQ ID NO: 3879686 - DNA, 25 bp, Homo sapien
gttgagcactttgaaacacattgtc

SEQ ID NO: 3879687 - DNA, 25 bp, Homo sapien
ccttgggggcgccagacaagccatg

SEQ ID NO: 3879688 - DNA, 25 bp, Homo sapien
ggtgcctggccaagcggcttccagc

SEQ ID NO: 3879689 - DNA, 25 bp, Homo sapien
tgtcgcccttatttcctggccagct

SEQ ID NO: 3879690 - DNA, 25 bp, Homo sapien
tctcggtggccgtcagcctgagaga

SEQ ID NO: 3879691 - DNA, 25 bp, Homo sapien
gggatgatcctcaaccttgcctggt

SEQ ID NO: 3879692 - DNA, 25 bp, Homo sapien
acttttcccgtaaaaggagctgctg

SEQ ID NO: 3879693 - DNA, 25 bp, Homo sapien
tgtgtgcttgacatctgatctcagg

SEQ ID NO: 3879694 - DNA, 25 bp, Homo sapien
aaaatgtagcatcagggtgccccgg

SEQ ID NO: 3879695 - DNA, 25 bp, Homo sapien
aatgtatgtggcatttagcaaagca

SEQ ID NO: 3879696 - DNA, 25 bp, Homo sapien
tgcacctttggacagagtgtccagg

SEQ ID NO: 3879697 - DNA, 25 bp, Homo sapien
taatcagttgtatgatttccgctga

SEQ ID NO: 3879698 - DNA, 25 bp, Homo sapien
tctgtctagatgtttaagcctttgc

SEQ ID NO: 3879699 - DNA, 25 bp, Homo sapien
cagagtttgtcttgtaaaagtgcag

SEQ ID NO: 3879700 - DNA, 25 bp, Homo sapien
tgagcctctgagctaaaaagtctgc

SEQ ID NO: 3879701 - DNA, 25 bp, Homo sapien
tgcagagagtctcctggcgctacag

SEQ ID NO: 3879702 - DNA, 25 bp, Homo sapien
ggctggcgttcacggcctctgagcc

SEQ ID NO: 3879703 - DNA, 25 bp, Homo sapien
gggccattaagaggtgtagaacatt

SEQ ID NO: 3879704 - DNA, 25 bp, Homo sapien
cattagcagggccattaagaggtgt

SEQ ID NO: 3879705 - DNA, 25 bp, Homo sapien
ctacagcattagcagggccattaag

SEQ ID NO: 3879706 - DNA, 25 bp, Homo sapien
cattaagaggtgtagaacatttcca

SEQ ID NO: 3879707 - DNA, 25 bp, Homo sapien
tccacaggtaattgtagggtgagag

SEQ ID NO: 3879708 - DNA, 25 bp, Homo sapien
tcggatcaaacagccgccaagctgg

SEQ ID NO: 3879709 - DNA, 25 bp, Homo sapien
agctggtgagggctttatggtccac

SEQ ID NO: 3879710 - DNA, 25 bp, Homo sapien
cgtcattcggatcaaacagccgcca

SEQ ID NO: 3879711 - DNA, 25 bp, Homo sapien
ttggcttgagtaagtcgattggcat

SEQ ID NO: 3879712 - DNA, 25 bp, Homo sapien
ctttggcttgagtaagtcgattggc

SEQ ID NO: 3879713 - DNA, 25 bp, Homo sapien
tttggcttgagtaagtcgattggca

SEQ ID NO: 3879714 - DNA, 25 bp, Homo sapien
gcaacagccagtgtttcgtgcaggg

SEQ ID NO: 3879715 - DNA, 25 bp, Homo sapien
ctgttactttgaccagattcggttt

SEQ ID NO: 3879716 - DNA, 25 bp, Homo sapien
ctccagagcaacagccagtgtttcg

SEQ ID NO: 3879717 - DNA, 25 bp, Homo sapien
cactgacatatggatgtgatctctg

SEQ ID NO: 3879718 - DNA, 25 bp, Homo sapien
cgcctgagctttgttattgacacca

SEQ ID NO: 3879719 - DNA, 25 bp, Homo sapien
cattaaagccgcctgagctttgtta

SEQ ID NO: 3879720 - DNA, 25 bp, Homo sapien
agttttcattaaagccgcctgagct

SEQ ID NO: 3879721 - DNA, 25 bp, Homo sapien
taaagccgcctgagctttgttattg

SEQ ID NO: 3879722 - DNA, 25 bp, Homo sapien
gatgatcccatcctacacactggct

SEQ ID NO: 3879723 - DNA, 25 bp, Homo sapien
gacagcaactctccttgaagtacaa

SEQ ID NO: 3879724 - DNA, 25 bp, Homo sapien
agctcattttctctgaacgtttctt

SEQ ID NO: 3879725 - DNA, 25 bp, Homo sapien
actggctcactgtgagacagcaact

SEQ ID NO: 3879726 - DNA, 25 bp, Homo sapien
aagcaatgtgacttgtcacactcca

SEQ ID NO: 3879727 - DNA, 25 bp, Homo sapien
taagcaatgtgacttgtcacactcc

SEQ ID NO: 3879728 - DNA, 25 bp, Homo sapien
tttaagcaatgtgacttgtcacact

SEQ ID NO: 3879729 - DNA, 25 bp, Homo sapien
ttttaagcaatgtgacttgtcacac

SEQ ID NO: 3879730 - DNA, 25 bp, Homo sapien
cagagaattgccgtctcctggtggt

SEQ ID NO: 3879731 - DNA, 25 bp, Homo sapien
gagaattgccgtctcctggtggtgg

SEQ ID NO: 3879732 - DNA, 25 bp, Homo sapien
agagaattgccgtctcctggtggtg

SEQ ID NO: 3879733 - DNA, 25 bp, Homo sapien
gcatcctgctccaggtaattaattg

SEQ ID NO: 3879734 - DNA, 25 bp, Homo sapien
ctttcagttcagtggagtaataatg

SEQ ID NO: 3879735 - DNA, 25 bp, Homo sapien
cagtggagtaataatgcaataaatt

SEQ ID NO: 3879736 - DNA, 25 bp, Homo sapien
tgctccaggtaattaattgctttca

SEQ ID NO: 3879737 - DNA, 25 bp, Homo sapien
caaacagggaggtagagagcatgcc

SEQ ID NO: 3879738 - DNA, 25 bp, Homo sapien
taaatgtgctctagcagagaacctg

SEQ ID NO: 3879739 - DNA, 25 bp, Homo sapien
taccatttggcaggttacagtgcaa

SEQ ID NO: 3879740 - DNA, 25 bp, Homo sapien
caagtgtcttaccaagttgctaggg

SEQ ID NO: 3879741 - DNA, 25 bp, Homo sapien
cactgttagcctctgacagccggca

SEQ ID NO: 3879742 - DNA, 25 bp, Homo sapien
gtgctcccttctgcaagccaaagcc

SEQ ID NO: 3879743 - DNA, 25 bp, Homo sapien
ttttcatagaagtctccacagcttg

SEQ ID NO: 3879744 - DNA, 25 bp, Homo sapien
aagcccagcaaacatcagtggaatg

SEQ ID NO: 3879745 - DNA, 25 bp, Homo sapien
cacttcagtaatagacctctgctgg

SEQ ID NO: 3879746 - DNA, 25 bp, Homo sapien
aatagacctctgctggctattgttg

SEQ ID NO: 3879747 - DNA, 25 bp, Homo sapien
tcagtaatagacctctgctggctat

SEQ ID NO: 3879748 - DNA, 25 bp, Homo sapien
gtaatagacctctgctggctattgt

SEQ ID NO: 3879749 - DNA, 25 bp, Homo sapien
tgggtatggtgtgattgcagaaagc

SEQ ID NO: 3879750 - DNA, 25 bp, Homo sapien
ccttctcgtggagttggcagaccca

SEQ ID NO: 3879751 - DNA, 25 bp, Homo sapien
aatgcccagggcttgtatttgtgtg

SEQ ID NO: 3879752 - DNA, 25 bp, Homo sapien
actctgtggctctcattgttaaggc

SEQ ID NO: 3879753 - DNA, 25 bp, Homo sapien
ctagcatagtttcggagaccagtct

SEQ ID NO: 3879754 - DNA, 25 bp, Homo sapien
ttttgcgggcaatgcaaataccaag

SEQ ID NO: 3879755 - DNA, 25 bp, Homo sapien
caagatggcctctccatcgttgagt

SEQ ID NO: 3879756 - DNA, 25 bp, Homo sapien
cagtcttcgctggtttttgcgggca

SEQ ID NO: 3879757 - DNA, 25 bp, Homo sapien
tgtctgtcttgcagtttctaggcat

SEQ ID NO: 3879758 - DNA, 25 bp, Homo sapien
taatataaatgtctgtcttgcagtt

SEQ ID NO: 3879759 - DNA, 25 bp, Homo sapien
gcaagcaagcaagcataatataaat

SEQ ID NO: 3879760 - DNA, 25 bp, Homo sapien
ctggcaagcaagcaagcataatata

SEQ ID NO: 3879761 - DNA, 25 bp, Homo sapien
aggaaggaaatttctagctgtgatc

SEQ ID NO: 3879762 - DNA, 25 bp, Homo sapien
cttcttaggaaggaaatttctagct

SEQ ID NO: 3879763 - DNA, 25 bp, Homo sapien
ggaaggaaatttctagctgtgatcc

SEQ ID NO: 3879764 - DNA, 25 bp, Homo sapien
gaagtgggccttctttgactcgaag

SEQ ID NO: 3879765 - DNA, 25 bp, Homo sapien
gactcgaagtgacagctcttggccc

SEQ ID NO: 3879766 - DNA, 25 bp, Homo sapien
tagagtgatctcctatgactggcat

SEQ ID NO: 3879767 - DNA, 25 bp, Homo sapien
tgtaattcgccttgacatcactggc

SEQ ID NO: 3879768 - DNA, 25 bp, Homo sapien
cgacaactccatgcaagtgtttctg

SEQ ID NO: 3879769 - DNA, 25 bp, Homo sapien
cacgtctgccccaagatgtctggtc

SEQ ID NO: 3879770 - DNA, 25 bp, Homo sapien
gctgtaaggattttctcgacaactc

SEQ ID NO: 3879771 - DNA, 25 bp, Homo sapien
gccttgtcattgactttgctgtaag

SEQ ID NO: 3879772 - DNA, 25 bp, Homo sapien
caattttgtaagtcaagtttagtga

SEQ ID NO: 3879773 - DNA, 25 bp, Homo sapien
agtgtttgtatgaatttgagtgtac

SEQ ID NO: 3879774 - DNA, 25 bp, Homo sapien
gtttaaacatcctctttgatagtgt

SEQ ID NO: 3879775 - DNA, 25 bp, Homo sapien
ccctgtgtgggtttgtattctttag

SEQ ID NO: 3879776 - DNA, 25 bp, Homo sapien
taactgtatcaaagtggacttggga

SEQ ID NO: 3879777 - DNA, 25 bp, Homo sapien
cagtagactagaataagttgttgga

SEQ ID NO: 3879778 - DNA, 25 bp, Homo sapien
tcaaagctggtagtgtagactgagt

SEQ ID NO: 3879779 - DNA, 25 bp, Homo sapien
agttgatgatggatccagttgtaaa

SEQ ID NO: 3879780 - DNA, 25 bp, Homo sapien
caaaagcagacatcttcttttgtgg

SEQ ID NO: 3879781 - DNA, 25 bp, Homo sapien
aaagcagacatcttcttttgtggcc

SEQ ID NO: 3879782 - DNA, 25 bp, Homo sapien
ctcaaatcaaaagcagacatcttct

SEQ ID NO: 3879783 - DNA, 25 bp, Homo sapien
atcaaaagcagacatcttcttttgt

SEQ ID NO: 3879784 - DNA, 25 bp, Homo sapien
tatattagagaaagtcagggtggag

SEQ ID NO: 3879785 - DNA, 25 bp, Homo sapien
ctatattagagaaagtcagggtgga

SEQ ID NO: 3879786 - DNA, 25 bp, Homo sapien
tattagagaaagtcagggtggagat

SEQ ID NO: 3879787 - DNA, 25 bp, Homo sapien
tagagaaagtcagggtggagataag

SEQ ID NO: 3879788 - DNA, 25 bp, Homo sapien
gaactgtttgtagccagttctgttc

SEQ ID NO: 3879789 - DNA, 25 bp, Homo sapien
gtgaactgtttgtagccagttctgt

SEQ ID NO: 3879790 - DNA, 25 bp, Homo sapien
tgtgaactgtttgtagccagttctg

SEQ ID NO: 3879791 - DNA, 25 bp, Homo sapien
aactgtttgtagccagttctgttct

SEQ ID NO: 3879792 - DNA, 25 bp, Homo sapien
gcatttgtttagtaaactccagcaa

SEQ ID NO: 3879793 - DNA, 25 bp, Homo sapien
gatgctggatatagcacacaagagg

SEQ ID NO: 3879794 - DNA, 25 bp, Homo sapien
tattacgtttgcctttgagatctag

SEQ ID NO: 3879795 - DNA, 25 bp, Homo sapien
taagaaataccagtagttcagcagt

SEQ ID NO: 3879796 - DNA, 25 bp, Homo sapien
ccagggccaagcagtaggtccatct

SEQ ID NO: 3879797 - DNA, 25 bp, Homo sapien
gctcggagagcggacattaagatta

SEQ ID NO: 3879798 - DNA, 25 bp, Homo sapien
ccatcttggtggcatctgatgttga

SEQ ID NO: 3879799 - DNA, 25 bp, Homo sapien
attggctttgtcctgcgcggctgcg

SEQ ID NO: 3879800 - DNA, 25 bp, Homo sapien
tccatttcactaaagtaattggctt

SEQ ID NO: 3879801 - DNA, 25 bp, Homo sapien
attggcttggcctgttgtaaaaaat

SEQ ID NO: 3879802 - DNA, 25 bp, Homo sapien
tggcttggcctgttgtaaaaaataa

SEQ ID NO: 3879803 - DNA, 25 bp, Homo sapien
ttccatttcactaaagtaattggct

SEQ ID NO: 3879804 - DNA, 25 bp, Homo sapien
agggacctgcctgataatggacaca

SEQ ID NO: 3879805 - DNA, 25 bp, Homo sapien
gagatggagcttgcccaacgctgct

SEQ ID NO: 3879806 - DNA, 25 bp, Homo sapien
cagagagcaaacttggccggcagtc

SEQ ID NO: 3879807 - DNA, 25 bp, Homo sapien
cccatgcagattagggagatggagc

SEQ ID NO: 3879808 - DNA, 25 bp, Homo sapien
tcataaaatgtacagtccactgtcc

SEQ ID NO: 3879809 - DNA, 25 bp, Homo sapien
tcttccggtgagttcctttgaggga

SEQ ID NO: 3879810 - DNA, 25 bp, Homo sapien
tgggtctatcagacatgtattctgg

SEQ ID NO: 3879811 - DNA, 25 bp, Homo sapien
tgggagatgccatatctgggtctat

SEQ ID NO: 3879812 - DNA, 25 bp, Homo sapien
cattctgtgaaaatagggtcccctt

SEQ ID NO: 3879813 - DNA, 25 bp, Homo sapien
tgtgaaaatagggtcccctttgatc

SEQ ID NO: 3879814 - DNA, 25 bp, Homo sapien
tgaaaatagggtcccctttgatcac

SEQ ID NO: 3879815 - DNA, 25 bp, Homo sapien
aagcattctgtgaaaatagggtccc

SEQ ID NO: 3879816 - DNA, 25 bp, Homo sapien
aagtccccgggttggcctctatgtg

SEQ ID NO: 3879817 - DNA, 25 bp, Homo sapien
cagccttctctacgtctgctaagaa

SEQ ID NO: 3879818 - DNA, 25 bp, Homo sapien
catttggtccccagtgccggaagtc

SEQ ID NO: 3879819 - DNA, 25 bp, Homo sapien
ttttgttgcctgctaggtataccct

SEQ ID NO: 3879820 - DNA, 25 bp, Homo sapien
tggcggagggatgggctaatgtgaa

SEQ ID NO: 3879821 - DNA, 25 bp, Homo sapien
ggcggagggatgggctaatgtgaag

SEQ ID NO: 3879822 - DNA, 25 bp, Homo sapien
tttggcggagggatgggctaatgtg

SEQ ID NO: 3879823 - DNA, 25 bp, Homo sapien
ctttggcggagggatgggctaatgt

SEQ ID NO: 3879824 - DNA, 25 bp, Homo sapien
gttgagtaaatgcacaatgaacttc

SEQ ID NO: 3879825 - DNA, 25 bp, Homo sapien
aatgaacttcaaaacctagtaattg

SEQ ID NO: 3879826 - DNA, 25 bp, Homo sapien
cccactttacgttaatgtgaagaga

SEQ ID NO: 3879827 - DNA, 25 bp, Homo sapien
tgtgaagagacagttgagtaaatgc

SEQ ID NO: 3879828 - DNA, 25 bp, Homo sapien
cagggctgattagtgtttgtgaggg

SEQ ID NO: 3879829 - DNA, 25 bp, Homo sapien
tgaggggcgcctgccggacggctct

SEQ ID NO: 3879830 - DNA, 25 bp, Homo sapien
attagtgtttgtgaggggcgcctgc

SEQ ID NO: 3879831 - DNA, 25 bp, Homo sapien
ggcgcctgccggacggctctgacac

SEQ ID NO: 3879832 - DNA, 25 bp, Homo sapien
tccgcagtgaaccaccttgtcagac

SEQ ID NO: 3879833 - DNA, 25 bp, Homo sapien
tcagactcaccaattcatgggacgc

SEQ ID NO: 3879834 - DNA, 25 bp, Homo sapien
ggagttaaaaggctccgcagtgaac

SEQ ID NO: 3879835 - DNA, 25 bp, Homo sapien
tgaaccaccttgtcagactcaccaa

SEQ ID NO: 3879836 - DNA, 25 bp, Homo sapien
aatgccagagtgactgctttgccag

SEQ ID NO: 3879837 - DNA, 25 bp, Homo sapien
gcagccaggcggatcttaattaatg

SEQ ID NO: 3879838 - DNA, 25 bp, Homo sapien
gatcttaattaatgactctgctgtg

SEQ ID NO: 3879839 - DNA, 25 bp, Homo sapien
caggcagacagggaatgccagagtg

SEQ ID NO: 3879840 - DNA, 25 bp, Homo sapien
ttcttttctgttacttggtctgcca

SEQ ID NO: 3879841 - DNA, 25 bp, Homo sapien
ggttcttttctgttacttggtctgc

SEQ ID NO: 3879842 - DNA, 25 bp, Homo sapien
gttcttttctgttacttggtctgcc

SEQ ID NO: 3879843 - DNA, 25 bp, Homo sapien
ctggttcttttctgttacttggtct

SEQ ID NO: 3879844 - DNA, 25 bp, Homo sapien
gtgttctgttgaccacgtaaggctc

SEQ ID NO: 3879845 - DNA, 25 bp, Homo sapien
tgttgaccacgtaaggctcttttct

SEQ ID NO: 3879846 - DNA, 25 bp, Homo sapien
cgctttgcatcaggagtttggtgtt

SEQ ID NO: 3879847 - DNA, 25 bp, Homo sapien
cctcccatcgctttgcatcaggagt

SEQ ID NO: 3879848 - DNA, 25 bp, Homo sapien
gatggaaggttttaagatcttctgg

SEQ ID NO: 3879849 - DNA, 25 bp, Homo sapien
gattggatagtgatacagagatgga

SEQ ID NO: 3879850 - DNA, 25 bp, Homo sapien
ccctgctggattggatagtgataca

SEQ ID NO: 3879851 - DNA, 25 bp, Homo sapien
tcttctgggtgttcagtgatataag

SEQ ID NO: 3879852 - DNA, 25 bp, Homo sapien
cagtcttgttaaggaccaaggactc

SEQ ID NO: 3879853 - DNA, 25 bp, Homo sapien
ccagtaagtgacagtcaaaattagc

SEQ ID NO: 3879854 - DNA, 25 bp, Homo sapien
tatagtgagtccagtcaaatttgtc

SEQ ID NO: 3879855 - DNA, 25 bp, Homo sapien
tttgtagtattggaagatagtgcgg

SEQ ID NO: 3879856 - DNA, 25 bp, Homo sapien
ggccacatccttaaatcacactcct

SEQ ID NO: 3879857 - DNA, 25 bp, Homo sapien
catccttaaatcacactcctgatgc

SEQ ID NO: 3879858 - DNA, 25 bp, Homo sapien
tacctcaccatcattaaacacagag

SEQ ID NO: 3879859 - DNA, 25 bp, Homo sapien
gctcagtccctacctcaccatcatt

SEQ ID NO: 3879860 - DNA, 25 bp, Homo sapien
gcccaattaacattattgatttgag

SEQ ID NO: 3879861 - DNA, 25 bp, Homo sapien
ccaattaacattattgatttgagtc

SEQ ID NO: 3879862 - DNA, 25 bp, Homo sapien
caattaacattattgatttgagtca

SEQ ID NO: 3879863 - DNA, 25 bp, Homo sapien
agcccaattaacattattgatttga

SEQ ID NO: 3879864 - DNA, 25 bp, Homo sapien
gctcttctcatggtggatcagtgga

SEQ ID NO: 3879865 - DNA, 25 bp, Homo sapien
gacagaggtcgcatggagcatgctc

SEQ ID NO: 3879866 - DNA, 25 bp, Homo sapien
gtggagtaccagagccacgccaaat

SEQ ID NO: 3879867 - DNA, 25 bp, Homo sapien
gcgaaatttcgttgtcctgagcaag

SEQ ID NO: 3879868 - DNA, 25 bp, Homo sapien
ccaaggcacctggtgctcaggttct

SEQ ID NO: 3879869 - DNA, 25 bp, Homo sapien
ggaattctgcatatttccaaggcac

SEQ ID NO: 3879870 - DNA, 25 bp, Homo sapien
tgagtatgcaactcacaccaatagc

SEQ ID NO: 3879871 - DNA, 25 bp, Homo sapien
tgtgtgcagacctgtgtcctcttgc

SEQ ID NO: 3879872 - DNA, 25 bp, Homo sapien
tgagtccattcattatctgcacata

SEQ ID NO: 3879873 - DNA, 25 bp, Homo sapien
ctgaaatgagtccattcattatctg

SEQ ID NO: 3879874 - DNA, 25 bp, Homo sapien
attcattatctgcacatagacaggc

SEQ ID NO: 3879875 - DNA, 25 bp, Homo sapien
ccattcattatctgcacatagacag

SEQ ID NO: 3879876 - DNA, 25 bp, Homo sapien
ggagtcagcttcctcatcaagaaag

SEQ ID NO: 3879877 - DNA, 25 bp, Homo sapien
gcttcctcatcaagaaagctttcag

SEQ ID NO: 3879878 - DNA, 25 bp, Homo sapien
tcagcttcctcatcaagaaagcttt

SEQ ID NO: 3879879 - DNA, 25 bp, Homo sapien
ttaaaaggagtcagcttcctcatca

SEQ ID NO: 3879880 - DNA, 25 bp, Homo sapien
tatgagtcgcctttgtttcactgtc

SEQ ID NO: 3879881 - DNA, 25 bp, Homo sapien
actgtctgaggttgctgtgtttccg

SEQ ID NO: 3879882 - DNA, 25 bp, Homo sapien
ttgtttcactgtctgaggttgctgt

SEQ ID NO: 3879883 - DNA, 25 bp, Homo sapien
ctatgagtcgcctttgtttcactgt

SEQ ID NO: 3879884 - DNA, 25 bp, Homo sapien
tgagaagttggtggaataatggaca

SEQ ID NO: 3879885 - DNA, 25 bp, Homo sapien
cgttgaaaagtgagtcattggctcc

SEQ ID NO: 3879886 - DNA, 25 bp, Homo sapien
tactcttactggaaagggccattac

SEQ ID NO: 3879887 - DNA, 25 bp, Homo sapien
tatattccgggtatatggtacctgc

SEQ ID NO: 3879888 - DNA, 25 bp, Homo sapien
gcagaaagtgcgatagagaactcct

SEQ ID NO: 3879889 - DNA, 25 bp, Homo sapien
tttgcctgaacgcgagaggctgtga

SEQ ID NO: 3879890 - DNA, 25 bp, Homo sapien
tgttggactaactcatctcctcggc

SEQ ID NO: 3879891 - DNA, 25 bp, Homo sapien
ttcttgtggcaggcagctttaggct

SEQ ID NO: 3879892 - DNA, 25 bp, Homo sapien
ccagggataactgcagatctgccga

SEQ ID NO: 3879893 - DNA, 25 bp, Homo sapien
ttccaggcagcagatagaggtgcca

SEQ ID NO: 3879894 - DNA, 25 bp, Homo sapien
gtggtgtaatacctttcctgcattc

SEQ ID NO: 3879895 - DNA, 25 bp, Homo sapien
gatctgccgatctgagagagttccg

SEQ ID NO: 3879896 - DNA, 25 bp, Homo sapien
ccgtgcgtgagcgatgatgatgagt

SEQ ID NO: 3879897 - DNA, 25 bp, Homo sapien
aattttggaggaggggccgaatgat

SEQ ID NO: 3879898 - DNA, 25 bp, Homo sapien
gatgatgatgagtaggtggtgatgt

SEQ ID NO: 3879899 - DNA, 25 bp, Homo sapien
cagagtcaaggctagagccgtgcgt

SEQ ID NO: 3879900 - DNA, 25 bp, Homo sapien
tgattaggacatattaacccacatt

SEQ ID NO: 3879901 - DNA, 25 bp, Homo sapien
cactttgctgcctctcggtcaggat

SEQ ID NO: 3879902 - DNA, 25 bp, Homo sapien
cttgttcagtcctagttcctgggtc

SEQ ID NO: 3879903 - DNA, 25 bp, Homo sapien
aacccacattcattcggccactttg

SEQ ID NO: 3879904 - DNA, 25 bp, Homo sapien
gcttagcaaaccgtggcctccaatt

SEQ ID NO: 3879905 - DNA, 25 bp, Homo sapien
gagcttagcaaaccgtggcctccaa

SEQ ID NO: 3879906 - DNA, 25 bp, Homo sapien
ttagcaaaccgtggcctccaattcc

SEQ ID NO: 3879907 - DNA, 25 bp, Homo sapien
caattccctagttctagtgttttca

SEQ ID NO: 3879908 - DNA, 25 bp, Homo sapien
tttgcatggattccctcgccccact

SEQ ID NO: 3879909 - DNA, 25 bp, Homo sapien
cacttatttgcattgtcatttgcat

SEQ ID NO: 3879910 - DNA, 25 bp, Homo sapien
catttgcatggattccctcgcccca

SEQ ID NO: 3879911 - DNA, 25 bp, Homo sapien
cttatttgcattgtcatttgcatgg

SEQ ID NO: 3879912 - DNA, 25 bp, Homo sapien
actgaacacccaaggaccgtttgca

SEQ ID NO: 3879913 - DNA, 25 bp, Homo sapien
ctgaacacccaaggaccgtttgcat

SEQ ID NO: 3879914 - DNA, 25 bp, Homo sapien
tgggatagtgatagtaatgcacact

SEQ ID NO: 3879915 - DNA, 25 bp, Homo sapien
ggcatgggatagtgatagtaatgca

SEQ ID NO: 3879916 - DNA, 25 bp, Homo sapien
gatagtgatagtaatgcacacttct

SEQ ID NO: 3879917 - DNA, 25 bp, Homo sapien
tctggaaagggatctattgttgctt

SEQ ID NO: 3879918 - DNA, 25 bp, Homo sapien
gatgctgtccttcgatgtcctcttg

SEQ ID NO: 3879919 - DNA, 25 bp, Homo sapien
gaaggcttgagcacataaaacggaa

SEQ ID NO: 3879920 - DNA, 25 bp, Homo sapien
cgatgggatggtaaatcaggcttcc

SEQ ID NO: 3879921 - DNA, 25 bp, Homo sapien
tcgtgggatcctgcaacagaaggct

SEQ ID NO: 3879922 - DNA, 25 bp, Homo sapien
gaagtgtgagcttgccatttgcttg

SEQ ID NO: 3879923 - DNA, 25 bp, Homo sapien
ctttgtcttgccggcttttctgttc

SEQ ID NO: 3879924 - DNA, 25 bp, Homo sapien
gttcttcctcactttggacttcagt

SEQ ID NO: 3879925 - DNA, 25 bp, Homo sapien
ctcactttggacttcagttgcccca

SEQ ID NO: 3879926 - DNA, 25 bp, Homo sapien
cttcctcactttggacttcagttgc

SEQ ID NO: 3879927 - DNA, 25 bp, Homo sapien
tgtaatacgctcatctaagaatctc

SEQ ID NO: 3879928 - DNA, 25 bp, Homo sapien
ctcagcgagtgggttaagctaaagg

SEQ ID NO: 3879929 - DNA, 25 bp, Homo sapien
catctaagaatctcagcgagtgggt

SEQ ID NO: 3879930 - DNA, 25 bp, Homo sapien
tggaaaattgtaatacgctcatcta

SEQ ID NO: 3879931 - DNA, 25 bp, Homo sapien
ttctcagtgtctgattatgcaaggt

SEQ ID NO: 3879932 - DNA, 25 bp, Homo sapien
tctcagtgtctgattatgcaaggtt

SEQ ID NO: 3879933 - DNA, 25 bp, Homo sapien
ttgacgttcccagtaaaggtcactg

SEQ ID NO: 3879934 - DNA, 25 bp, Homo sapien
tgcattgtgtgtggcctgtttcgct

SEQ ID NO: 3879935 - DNA, 25 bp, Homo sapien
gcgttcgggttctagcttgcttctc

SEQ ID NO: 3879936 - DNA, 25 bp, Homo sapien
taattttgtgagcaatgtccctggc

SEQ ID NO: 3879937 - DNA, 25 bp, Homo sapien
tctcgatcagttaaaaagcgtagga

SEQ ID NO: 3879938 - DNA, 25 bp, Homo sapien
caaatctgtcctctgagcgtgtgta

SEQ ID NO: 3879939 - DNA, 25 bp, Homo sapien
atgtgtgtttgggtagctgagctca

SEQ ID NO: 3879940 - DNA, 25 bp, Homo sapien
agcgtaggagatatgaaaggtcagc

SEQ ID NO: 3879941 - DNA, 25 bp, Homo sapien
ttcacaactttctgatatggtaact

SEQ ID NO: 3879942 - DNA, 25 bp, Homo sapien
caactttctgatatggtaacttcaa

SEQ ID NO: 3879943 - DNA, 25 bp, Homo sapien
cacaactttctgatatggtaacttc

SEQ ID NO: 3879944 - DNA, 25 bp, Homo sapien
ctttctgatatggtaacttcaagga

SEQ ID NO: 3879945 - DNA, 25 bp, Homo sapien
ctctatagtcctttctgtagatttc

SEQ ID NO: 3879946 - DNA, 25 bp, Homo sapien
agtcctctatagtcctttctgtaga

SEQ ID NO: 3879947 - DNA, 25 bp, Homo sapien
cattaagtcctctatagtcctttct

SEQ ID NO: 3879948 - DNA, 25 bp, Homo sapien
taagtcctctatagtcctttctgta

SEQ ID NO: 3879949 - DNA, 25 bp, Homo sapien
tttgctgcttcttgccgtgccattg

SEQ ID NO: 3879950 - DNA, 25 bp, Homo sapien
agaggaattgagtcacattctctct

SEQ ID NO: 3879951 - DNA, 25 bp, Homo sapien
gcttcaggtcatccaagccagtctc

SEQ ID NO: 3879952 - DNA, 25 bp, Homo sapien
gaggaattgagtcacattctctctc

SEQ ID NO: 3879953 - DNA, 25 bp, Homo sapien
cctgaggagacagtttttctcgagc

SEQ ID NO: 3879954 - DNA, 25 bp, Homo sapien
gggccagagtgagtcaaacgctctc

SEQ ID NO: 3879955 - DNA, 25 bp, Homo sapien
tttctcgttcacaagtcagtggcac

SEQ ID NO: 3879956 - DNA, 25 bp, Homo sapien
tctcgagctggtctgccgagagtct

SEQ ID NO: 3879957 - DNA, 25 bp, Homo sapien
tgacaaagtactgcagggtgacctg

SEQ ID NO: 3879958 - DNA, 25 bp, Homo sapien
acctggtagtctcgggtcagagtga

SEQ ID NO: 3879959 - DNA, 25 bp, Homo sapien
ccagtgcggcgactttgacaaagta

SEQ ID NO: 3879960 - DNA, 25 bp, Homo sapien
tcacctcaatatggctgacatgttc

SEQ ID NO: 3879961 - DNA, 25 bp, Homo sapien
ctgaagtattgaatgtttttgtgac

SEQ ID NO: 3879962 - DNA, 25 bp, Homo sapien
tatcgttggcgggtttgacagcttc

SEQ ID NO: 3879963 - DNA, 25 bp, Homo sapien
tgttggtcaggccatatattatcgt

SEQ ID NO: 3879964 - DNA, 25 bp, Homo sapien
ttattggaggatacaaactgtttcc

SEQ ID NO: 3879965 - DNA, 25 bp, Homo sapien
tcagttcaaatgtttttcatctgaa

SEQ ID NO: 3879966 - DNA, 25 bp, Homo sapien
ctgcacggggtgaacttttatattt

SEQ ID NO: 3879967 - DNA, 25 bp, Homo sapien
acttgtcacagttgctggtattagt

SEQ ID NO: 3879968 - DNA, 25 bp, Homo sapien
tattagttcactagtaagtaatgac

SEQ ID NO: 3879969 - DNA, 25 bp, Homo sapien
tttttcgcctaactgcacggggtga

SEQ ID NO: 3879970 - DNA, 25 bp, Homo sapien
tcatctactgtcaacacagacacag

SEQ ID NO: 3879971 - DNA, 25 bp, Homo sapien
taggtatggtcagcttatgtagtac

SEQ ID NO: 3879972 - DNA, 25 bp, Homo sapien
catagcaggtgttcggcaaagattt

SEQ ID NO: 3879973 - DNA, 25 bp, Homo sapien
ttaccatgtcattgtgcctagcaca

SEQ ID NO: 3879974 - DNA, 25 bp, Homo sapien
tccctgtgggatcccttctccatca

SEQ ID NO: 3879975 - DNA, 25 bp, Homo sapien
cctgcccactgtgaggaatgtcgcc

SEQ ID NO: 3879976 - DNA, 25 bp, Homo sapien
cactgtgaggaatgtcgcccatgaa

SEQ ID NO: 3879977 - DNA, 25 bp, Homo sapien
tgtcgcccatgaaattccttccctg

SEQ ID NO: 3879978 - DNA, 25 bp, Homo sapien
catggatacaatcagtggtgctgca

SEQ ID NO: 3879979 - DNA, 25 bp, Homo sapien
aaggttagcaaattccgtacatgga

SEQ ID NO: 3879980 - DNA, 25 bp, Homo sapien
tccgtacatggatacaatcagtggt

SEQ ID NO: 3879981 - DNA, 25 bp, Homo sapien
tgaagataaaggttagcaaattccg

SEQ ID NO: 3879982 - DNA, 25 bp, Homo sapien
ctaatcctttactgacttcttttca

SEQ ID NO: 3879983 - DNA, 25 bp, Homo sapien
taatcctttactgacttcttttcac

SEQ ID NO: 3879984 - DNA, 25 bp, Homo sapien
ttctttggcatcagggcatacactt

SEQ ID NO: 3879985 - DNA, 25 bp, Homo sapien
ggcatcagggcatacacttgcttgt

SEQ ID NO: 3879986 - DNA, 25 bp, Homo sapien
agatctgtgtggacttgagtcacat

SEQ ID NO: 3879987 - DNA, 25 bp, Homo sapien
gaaaatcaggtaatgagagatctgt

SEQ ID NO: 3879988 - DNA, 25 bp, Homo sapien
ggtggaaagcaatctggttgtcatt

SEQ ID NO: 3879989 - DNA, 25 bp, Homo sapien
gcaagcagcaaaccgtatttttcac

SEQ ID NO: 3879990 - DNA, 25 bp, Homo sapien
tcacatgttcccaaaattggtggtg

SEQ ID NO: 3879991 - DNA, 25 bp, Homo sapien
cagcaagcagcaaaccgtatttttc

SEQ ID NO: 3879992 - DNA, 25 bp, Homo sapien
cattttccgagtctccaggtagcat

SEQ ID NO: 3879993 - DNA, 25 bp, Homo sapien
gagtctccaggtagcatcagacaca

SEQ ID NO: 3879994 - DNA, 25 bp, Homo sapien
tccgagtctccaggtagcatcagac

SEQ ID NO: 3879995 - DNA, 25 bp, Homo sapien
agtctccaggtagcatcagacacat

SEQ ID NO: 3879996 - DNA, 25 bp, Homo sapien
gtagacctggaaacatgacaagtgc

SEQ ID NO: 3879997 - DNA, 25 bp, Homo sapien
aaaacctctagagatctccagcgta

SEQ ID NO: 3879998 - DNA, 25 bp, Homo sapien
gatctccagcgtagaggtagacctg

SEQ ID NO: 3879999 - DNA, 25 bp, Homo sapien
tagacctggaaacatgacaagtgca

SEQ ID NO: 3880000 - DNA, 25 bp, Homo sapien
ttgtggaccaatgatggagaaagcc

SEQ ID NO: 3880001 - DNA, 25 bp, Homo sapien
aatttgggtcctggaagaactcaca

SEQ ID NO: 3880002 - DNA, 25 bp, Homo sapien
tcagtgccacttagatgctgaacac

SEQ ID NO: 3880003 - DNA, 25 bp, Homo sapien
tgattcagtccagtagttcgcaagg

SEQ ID NO: 3880004 - DNA, 25 bp, Homo sapien
catctgggggcatattggaggaaga

SEQ ID NO: 3880005 - DNA, 25 bp, Homo sapien
cctgtactatttgttggacttgatt

SEQ ID NO: 3880006 - DNA, 25 bp, Homo sapien
gcatattggaggaagaagggaccct

SEQ ID NO: 3880007 - DNA, 25 bp, Homo sapien
ttcctgtactatttgttggacttga

SEQ ID NO: 3880008 - DNA, 25 bp, Homo sapien
tctttgttgtagatccgatatgacg

SEQ ID NO: 3880009 - DNA, 25 bp, Homo sapien
gtctttaattatggccgtgctgtca

SEQ ID NO: 3880010 - DNA, 25 bp, Homo sapien
ttgtctttaattatggccgtgctgt

SEQ ID NO: 3880011 - DNA, 25 bp, Homo sapien
ccgatatgacgtttgaggttttcaa

SEQ ID NO: 3880012 - DNA, 25 bp, Homo sapien
ctggttaaagagattagtcagttta

SEQ ID NO: 3880013 - DNA, 25 bp, Homo sapien
tatcttgtcactatttccaaggaat

SEQ ID NO: 3880014 - DNA, 25 bp, Homo sapien
tttccaaggaatagactagcagtat

SEQ ID NO: 3880015 - DNA, 25 bp, Homo sapien
gagattagtcagtttattcactatc

SEQ ID NO: 3880016 - DNA, 25 bp, Homo sapien
tagagacctggaatatagatctccc

SEQ ID NO: 3880017 - DNA, 25 bp, Homo sapien
ctgctgacagagatgctttcaggag

SEQ ID NO: 3880018 - DNA, 25 bp, Homo sapien
taccaagagtaagggatagagacct

SEQ ID NO: 3880019 - DNA, 25 bp, Homo sapien
tactttgggtacagtaccaagagta

SEQ ID NO: 3880020 - DNA, 25 bp, Homo sapien
tctgtgtgtctccagttgctagcac

SEQ ID NO: 3880021 - DNA, 25 bp, Homo sapien
tgctagcactgtgtgggtacccagc

SEQ ID NO: 3880022 - DNA, 25 bp, Homo sapien
tgcttgagagcaggcgagtctccct

SEQ ID NO: 3880023 - DNA, 25 bp, Homo sapien
gagtgtgtcaggatagttttgctca

SEQ ID NO: 3880024 - DNA, 25 bp, Homo sapien
tgccattacctaaaggaataagtct

SEQ ID NO: 3880025 - DNA, 25 bp, Homo sapien
tttcaagctcaaacttgccattacc

SEQ ID NO: 3880026 - DNA, 25 bp, Homo sapien
tctttagtatgattggaacttcccc

SEQ ID NO: 3880027 - DNA, 25 bp, Homo sapien
ccataggctgtatgatagcaatttc

SEQ ID NO: 3880028 - DNA, 25 bp, Homo sapien
cagcgccggcgtgcatgtgttttag

SEQ ID NO: 3880029 - DNA, 25 bp, Homo sapien
gccagcgccggcgtgcatgtgtttt

SEQ ID NO: 3880030 - DNA, 25 bp, Homo sapien
ttgttgagaacctttagccagcgcc

SEQ ID NO: 3880031 - DNA, 25 bp, Homo sapien
aacctttagccagcgccggcgtgca

SEQ ID NO: 3880032 - DNA, 25 bp, Homo sapien
ctgctgttgctctcatgcctcttgc

SEQ ID NO: 3880033 - DNA, 25 bp, Homo sapien
aagttgagtgtgtagcacattttac

SEQ ID NO: 3880034 - DNA, 25 bp, Homo sapien
gtggtcatcatcttgcatgctaaat

SEQ ID NO: 3880035 - DNA, 25 bp, Homo sapien
gtgtagcacattttacaagctccaa

SEQ ID NO: 3880036 - DNA, 25 bp, Homo sapien
tgctaaattcggaagttgagtgtgt

SEQ ID NO: 3880037 - DNA, 25 bp, Homo sapien
tcgggtaaatagcctttacttgctg

SEQ ID NO: 3880038 - DNA, 25 bp, Homo sapien
tggaggaattttgagctaggctgat

SEQ ID NO: 3880039 - DNA, 25 bp, Homo sapien
tgagctaggctgattccaaaaacat

SEQ ID NO: 3880040 - DNA, 25 bp, Homo sapien
ttgaatgtgaaggttaaaggaacac

SEQ ID NO: 3880041 - DNA, 25 bp, Homo sapien
cttctgcataatgagagaagttggc

SEQ ID NO: 3880042 - DNA, 25 bp, Homo sapien
tcagctgattggttgtatgtgagct

SEQ ID NO: 3880043 - DNA, 25 bp, Homo sapien
tcctgtcttctgaatttatgctatt

SEQ ID NO: 3880044 - DNA, 25 bp, Homo sapien
tggcagaagacaattccagataaac

SEQ ID NO: 3880045 - DNA, 25 bp, Homo sapien
gagatgtaagaccacaccgaacact

SEQ ID NO: 3880046 - DNA, 25 bp, Homo sapien
caaaactaatggttctgtggaagtc

SEQ ID NO: 3880047 - DNA, 25 bp, Homo sapien
ggagcaaagctctcccagttcccag

SEQ ID NO: 3880048 - DNA, 25 bp, Homo sapien
gaacactgagcatggtcaccaggct

SEQ ID NO: 3880049 - DNA, 25 bp, Homo sapien
ttttctggctcttccgcatgcttgg

SEQ ID NO: 3880050 - DNA, 25 bp, Homo sapien
tccacattgtcaggattcctgggtg

SEQ ID NO: 3880051 - DNA, 25 bp, Homo sapien
catgcttggtggtggttcgatattc

SEQ ID NO: 3880052 - DNA, 25 bp, Homo sapien
tgtacttctttgataccgtctctgg

SEQ ID NO: 3880053 - DNA, 25 bp, Homo sapien
tttgggtctggtgcaatagcaagct

SEQ ID NO: 3880054 - DNA, 25 bp, Homo sapien
tctgtgtacaagagaatgactgtcc

SEQ ID NO: 3880055 - DNA, 25 bp, Homo sapien
acggaaggctctgtgtacaagagaa

SEQ ID NO: 3880056 - DNA, 25 bp, Homo sapien
caatagcaagctcgtggtcacggaa

SEQ ID NO: 3880057 - DNA, 25 bp, Homo sapien
cactgtgaaggtgatggttagtcag

SEQ ID NO: 3880058 - DNA, 25 bp, Homo sapien
gcagtgtactgggttgctctaacaa

SEQ ID NO: 3880059 - DNA, 25 bp, Homo sapien
cagtagctggcagagtctggtcaca

SEQ ID NO: 3880060 - DNA, 25 bp, Homo sapien
gctatactccatcttcttagagcct

SEQ ID NO: 3880061 - DNA, 25 bp, Homo sapien
aatatttaccaagcgccttcaccat

SEQ ID NO: 3880062 - DNA, 25 bp, Homo sapien
aaatatttaccaagcgccttcacca

SEQ ID NO: 3880063 - DNA, 25 bp, Homo sapien
cagcgctgttgtacatcttgtttca

SEQ ID NO: 3880064 - DNA, 25 bp, Homo sapien
gagtgcccaggcagcgtgtcatgtc

SEQ ID NO: 3880065 - DNA, 25 bp, Homo sapien
tctgtgaccttttccattgagtgag

SEQ ID NO: 3880066 - DNA, 25 bp, Homo sapien
tcaaagatagcgtggcctttgtgga

SEQ ID NO: 3880067 - DNA, 25 bp, Homo sapien
tattcctctgtaactgtgaaggacc

SEQ ID NO: 3880068 - DNA, 25 bp, Homo sapien
taatgcaacagtaccaccagaagac

SEQ ID NO: 3880069 - DNA, 25 bp, Homo sapien
tggttcaacttagaaatcccgagta

SEQ ID NO: 3880070 - DNA, 25 bp, Homo sapien
cgagtaccccttacaaattgcaggc

SEQ ID NO: 3880071 - DNA, 25 bp, Homo sapien
catcttttcgatcttctcttgccaa

SEQ ID NO: 3880072 - DNA, 25 bp, Homo sapien
gagaaagccagccagatacataggc

SEQ ID NO: 3880073 - DNA, 25 bp, Homo sapien
taacagattactattcgagttgaca

SEQ ID NO: 3880074 - DNA, 25 bp, Homo sapien
tcttgccaagtgctggaaactgtca

SEQ ID NO: 3880075 - DNA, 25 bp, Homo sapien
tcccctgagatcatttttgcataaa

SEQ ID NO: 3880076 - DNA, 25 bp, Homo sapien
cagatacaaatctgttgtacagatg

SEQ ID NO: 3880077 - DNA, 25 bp, Homo sapien
taaatccggccttctattttcagat

SEQ ID NO: 3880078 - DNA, 25 bp, Homo sapien
tttcatggaaaatacctctctgggc

SEQ ID NO: 3880079 - DNA, 25 bp, Homo sapien
gaaagatggtgatctttggtgttcc

SEQ ID NO: 3880080 - DNA, 25 bp, Homo sapien
tgtggcttcatatgaggtctgaaag

SEQ ID NO: 3880081 - DNA, 25 bp, Homo sapien
ggctttctgagaactacagcataag

SEQ ID NO: 3880082 - DNA, 25 bp, Homo sapien
cataagagccggcattgctgatggg

SEQ ID NO: 3880083 - DNA, 25 bp, Homo sapien
gatgtctgatgctaagtcctccaca

SEQ ID NO: 3880084 - DNA, 25 bp, Homo sapien
gccaacacatgttatagagctcaag

SEQ ID NO: 3880085 - DNA, 25 bp, Homo sapien
tctgaggtctgagtaaagggtttct

SEQ ID NO: 3880086 - DNA, 25 bp, Homo sapien
tccgaaggtccgtgtctccagtagg

SEQ ID NO: 3880087 - DNA, 25 bp, Homo sapien
gttcagctgctttgagatccaagca

SEQ ID NO: 3880088 - DNA, 25 bp, Homo sapien
tgatgacagttcagctgctttgaga

SEQ ID NO: 3880089 - DNA, 25 bp, Homo sapien
tatgttcaagcctggtgatgacagt

SEQ ID NO: 3880090 - DNA, 25 bp, Homo sapien
ctgtgaatgaggtctggtggtaact

SEQ ID NO: 3880091 - DNA, 25 bp, Homo sapien
acttagtcatcacgacgatgaggcc

SEQ ID NO: 3880092 - DNA, 25 bp, Homo sapien
catattcttgcgtctctttttggag

SEQ ID NO: 3880093 - DNA, 25 bp, Homo sapien
ttcaggtggacacttagtcatcacg

SEQ ID NO: 3880094 - DNA, 25 bp, Homo sapien
catcacgacgatgaggccatattct

SEQ ID NO: 3880095 - DNA, 25 bp, Homo sapien
gctgaaggagtacggctgcctgcaa

SEQ ID NO: 3880096 - DNA, 25 bp, Homo sapien
gagtacggctgcctgcaaattgctt

SEQ ID NO: 3880097 - DNA, 25 bp, Homo sapien
gaaagctgaaggagtacggctgcct

SEQ ID NO: 3880098 - DNA, 25 bp, Homo sapien
aaggagtacggctgcctgcaaattg

SEQ ID NO: 3880099 - DNA, 25 bp, Homo sapien
cattgcttcaggaaacgaagaaggt

SEQ ID NO: 3880100 - DNA, 25 bp, Homo sapien
tgcttcaggaaacgaagaaggtccc

SEQ ID NO: 3880101 - DNA, 25 bp, Homo sapien
cgaagaaggtcccttcggttgagat

SEQ ID NO: 3880102 - DNA, 25 bp, Homo sapien
agaaggtcccttcggttgagatcca

SEQ ID NO: 3880103 - DNA, 25 bp, Homo sapien
ggtcattgaatattaaagtgaaaga

SEQ ID NO: 3880104 - DNA, 25 bp, Homo sapien
taagaacactaggtcattgaatatt

SEQ ID NO: 3880105 - DNA, 25 bp, Homo sapien
agaacactaggtcattgaatattaa

SEQ ID NO: 3880106 - DNA, 25 bp, Homo sapien
ctaaatgtaagaacactaggtcatt

SEQ ID NO: 3880107 - DNA, 25 bp, Homo sapien
aagatggagcattgcatttggggta

SEQ ID NO: 3880108 - DNA, 25 bp, Homo sapien
caagatggagcattgcatttggggt

SEQ ID NO: 3880109 - DNA, 25 bp, Homo sapien
agatggagcattgcatttggggtat

SEQ ID NO: 3880110 - DNA, 25 bp, Homo sapien
gatggagcattgcatttggggtatg

SEQ ID NO: 3880111 - DNA, 25 bp, Homo sapien
ttaggtcccctcaatccagaagagg

SEQ ID NO: 3880112 - DNA, 25 bp, Homo sapien
ccatgaggggaggtgactgagaaag

SEQ ID NO: 3880113 - DNA, 25 bp, Homo sapien
ccattaggtcccctcaatccagaag

SEQ ID NO: 3880114 - DNA, 25 bp, Homo sapien
gcacagtcccttcccattaggtccc

SEQ ID NO: 3880115 - DNA, 25 bp, Homo sapien
tgtgcatcgctttacagttaaagct

SEQ ID NO: 3880116 - DNA, 25 bp, Homo sapien
ggctggttgtgcatcgctttacagt

SEQ ID NO: 3880117 - DNA, 25 bp, Homo sapien
tacatacttttatggctggttgtgc

SEQ ID NO: 3880118 - DNA, 25 bp, Homo sapien
acttttatggctggttgtgcatcgc

SEQ ID NO: 3880119 - DNA, 25 bp, Homo sapien
tttccctggcttcagacatccaagt

SEQ ID NO: 3880120 - DNA, 25 bp, Homo sapien
gcctgtaaggggactggctggctgc

SEQ ID NO: 3880121 - DNA, 25 bp, Homo sapien
cctttccctggcttcagacatccaa

SEQ ID NO: 3880122 - DNA, 25 bp, Homo sapien
tccctggcttcagacatccaagtac

SEQ ID NO: 3880123 - DNA, 25 bp, Homo sapien
gatgtaaagctttggtagcaatgaa

SEQ ID NO: 3880124 - DNA, 25 bp, Homo sapien
gcaatgaagattgcttgttggtttt

SEQ ID NO: 3880125 - DNA, 25 bp, Homo sapien
ttgcaaacaacaagatgtaaagctt

SEQ ID NO: 3880126 - DNA, 25 bp, Homo sapien
gggagcttgcaaacaacaagatgta

SEQ ID NO: 3880127 - DNA, 25 bp, Homo sapien
tgtttgctggtcgtgtcaagagctg

SEQ ID NO: 3880128 - DNA, 25 bp, Homo sapien
caataaatctagatctgtttgaagc

SEQ ID NO: 3880129 - DNA, 25 bp, Homo sapien
aatcttcgtcttgactgtttgctgg

SEQ ID NO: 3880130 - DNA, 25 bp, Homo sapien
aagctaacgtcactaaatcttcgtc

SEQ ID NO: 3880131 - DNA, 25 bp, Homo sapien
tgtgtctcatctttagcaaactccc

SEQ ID NO: 3880132 - DNA, 25 bp, Homo sapien
tgtctgcttagaccttgtgatctct

SEQ ID NO: 3880133 - DNA, 25 bp, Homo sapien
tacccctgtctccatgccgatgatt

SEQ ID NO: 3880134 - DNA, 25 bp, Homo sapien
cctttcttgtagagtgcttgtagca

SEQ ID NO: 3880135 - DNA, 25 bp, Homo sapien
gctcttctcgtgttcacttctcttt

SEQ ID NO: 3880136 - DNA, 25 bp, Homo sapien
tgcacagggtagctgccagtattcc

SEQ ID NO: 3880137 - DNA, 25 bp, Homo sapien
cacagggtagctgccagtattccct

SEQ ID NO: 3880138 - DNA, 25 bp, Homo sapien
cagggtagctgccagtattcccttt

SEQ ID NO: 3880139 - DNA, 25 bp, Homo sapien
atgcacagggtagctgccagtattc

SEQ ID NO: 3880140 - DNA, 25 bp, Homo sapien
ggtccctatagatgtcactgcttgt

SEQ ID NO: 3880141 - DNA, 25 bp, Homo sapien
tgctgatggaaaatgccggccaggt

SEQ ID NO: 3880142 - DNA, 25 bp, Homo sapien
gttgttgcgctgatgtatacatgcc

SEQ ID NO: 3880143 - DNA, 25 bp, Homo sapien
gcgctgatgtatacatgcctatttc

SEQ ID NO: 3880144 - DNA, 25 bp, Homo sapien
agagtgctttagttaattccaccca

SEQ ID NO: 3880145 - DNA, 25 bp, Homo sapien
aatgtagagtgctttagttaattcc

SEQ ID NO: 3880146 - DNA, 25 bp, Homo sapien
gctgttacaaatctggggctatgga

SEQ ID NO: 3880147 - DNA, 25 bp, Homo sapien
tccacccaaggacagatgatatcat

SEQ ID NO: 3880148 - DNA, 25 bp, Homo sapien
gactctcaggaaaccggtatttgct

SEQ ID NO: 3880149 - DNA, 25 bp, Homo sapien
actctcaggaaaccggtatttgcta

SEQ ID NO: 3880150 - DNA, 25 bp, Homo sapien
aggaaaccggtatttgctaagctgg

SEQ ID NO: 3880151 - DNA, 25 bp, Homo sapien
ctcaggaaaccggtatttgctaagc

SEQ ID NO: 3880152 - DNA, 25 bp, Homo sapien
tcattacatgttaataccaccagag

SEQ ID NO: 3880153 - DNA, 25 bp, Homo sapien
gagttgaagatttctgatggcatcc

SEQ ID NO: 3880154 - DNA, 25 bp, Homo sapien
tgttaataccaccagagacactttg

SEQ ID NO: 3880155 - DNA, 25 bp, Homo sapien
taccaccagagacactttgaggtca

SEQ ID NO: 3880156 - DNA, 25 bp, Homo sapien
tgtgcttcctcaccctgcaatgctg

SEQ ID NO: 3880157 - DNA, 25 bp, Homo sapien
tgattggagtggctctcctgaagct

SEQ ID NO: 3880158 - DNA, 25 bp, Homo sapien
attggagtggctctcctgaagctgg

SEQ ID NO: 3880159 - DNA, 25 bp, Homo sapien
aggcattgctgtgcttcctcaccct

SEQ ID NO: 3880160 - DNA, 25 bp, Homo sapien
agaggagttctctaggctgcaagct

SEQ ID NO: 3880161 - DNA, 25 bp, Homo sapien
gatcacgtagaggagttctctaggc

SEQ ID NO: 3880162 - DNA, 25 bp, Homo sapien
cgtagaggagttctctaggctgcaa

SEQ ID NO: 3880163 - DNA, 25 bp, Homo sapien
ctgaaagatcacgtagaggagttct

SEQ ID NO: 3880164 - DNA, 25 bp, Homo sapien
gcttaaaacagcctaaattgcagac

SEQ ID NO: 3880165 - DNA, 25 bp, Homo sapien
gaaccgttgtcactagaaactccac

SEQ ID NO: 3880166 - DNA, 25 bp, Homo sapien
gaagcaaatattaggctcgggctga

SEQ ID NO: 3880167 - DNA, 25 bp, Homo sapien
gacaaaacaagccatcagctgagta

SEQ ID NO: 3880168 - DNA, 25 bp, Homo sapien
aagctgttgagaggtccctgccctt

SEQ ID NO: 3880169 - DNA, 25 bp, Homo sapien
gctgttgagaggtccctgcccttcc

SEQ ID NO: 3880170 - DNA, 25 bp, Homo sapien
ccaggaagctgttgagaggtccctg

SEQ ID NO: 3880171 - DNA, 25 bp, Homo sapien
gagaaaactgccaggaagctgttga

SEQ ID NO: 3880172 - DNA, 25 bp, Homo sapien
tccaatgtgttcaactcccttgcag

SEQ ID NO: 3880173 - DNA, 25 bp, Homo sapien
tgggggagcactctgcaaatccaca

SEQ ID NO: 3880174 - DNA, 25 bp, Homo sapien
ttcctctccaatgtgttcaactccc

SEQ ID NO: 3880175 - DNA, 25 bp, Homo sapien
ttgggggagcactctgcaaatccac

SEQ ID NO: 3880176 - DNA, 25 bp, Homo sapien
tcagggatctcacgggcttttcaaa

SEQ ID NO: 3880177 - DNA, 25 bp, Homo sapien
aggaaaataaggtctctcccttcag

SEQ ID NO: 3880178 - DNA, 25 bp, Homo sapien
ccaagctctaggacacaggaaaata

SEQ ID NO: 3880179 - DNA, 25 bp, Homo sapien
tcccttcagggatctcacgggcttt

SEQ ID NO: 3880180 - DNA, 25 bp, Homo sapien
ccagatctgccttgtattctgtcct

SEQ ID NO: 3880181 - DNA, 25 bp, Homo sapien
cagatctgccttgtattctgtcctc

SEQ ID NO: 3880182 - DNA, 25 bp, Homo sapien
agatctgccttgtattctgtcctct

SEQ ID NO: 3880183 - DNA, 25 bp, Homo sapien
gtgctgctcctttagggctccccag

SEQ ID NO: 3880184 - DNA, 25 bp, Homo sapien
gacaaccccccgtgctgctccttta

SEQ ID NO: 3880185 - DNA, 25 bp, Homo sapien
gggactgactctggttcccccgaca

SEQ ID NO: 3880186 - DNA, 25 bp, Homo sapien
gtgaggagggccaacccagggctta

SEQ ID NO: 3880187 - DNA, 25 bp, Homo sapien
gaagcagataaatggagagtctggc

SEQ ID NO: 3880188 - DNA, 25 bp, Homo sapien
tcagaagcagataaatggagagtct

SEQ ID NO: 3880189 - DNA, 25 bp, Homo sapien
cagaagcagataaatggagagtctg

SEQ ID NO: 3880190 - DNA, 25 bp, Homo sapien
agcagataaatggagagtctggcag

SEQ ID NO: 3880191 - DNA, 25 bp, Homo sapien
caaaaacgatgtccacatttgcata

SEQ ID NO: 3880192 - DNA, 25 bp, Homo sapien
tgccattattgatgcctagctcctc

SEQ ID NO: 3880193 - DNA, 25 bp, Homo sapien
tgttgaatttccttcgctggctaaa

SEQ ID NO: 3880194 - DNA, 25 bp, Homo sapien
attggtacattagggcaaaaacgat

SEQ ID NO: 3880195 - DNA, 25 bp, Homo sapien
tgatgaagacgctccctgaagcctg

SEQ ID NO: 3880196 - DNA, 25 bp, Homo sapien
ctgatgaagacgctccctgaagcct

SEQ ID NO: 3880197 - DNA, 25 bp, Homo sapien
tgcctgatgaagacgctccctgaag

SEQ ID NO: 3880198 - DNA, 25 bp, Homo sapien
gtggctctgagcatgactcttgggc

SEQ ID NO: 3880199 - DNA, 25 bp, Homo sapien
ctctctgcatcctcttggcctgctc

SEQ ID NO: 3880200 - DNA, 25 bp, Homo sapien
tgcatcctcttggcctgctctgatg

SEQ ID NO: 3880201 - DNA, 25 bp, Homo sapien
cttggcctgctctgatgtccctgca

SEQ ID NO: 3880202 - DNA, 25 bp, Homo sapien
ctctgatgtccctgcagccctggat

SEQ ID NO: 3880203 - DNA, 25 bp, Homo sapien
caagtgtgagtattcagagcagcca

SEQ ID NO: 3880204 - DNA, 25 bp, Homo sapien
ggagagacaagtgtgagtattcaga

SEQ ID NO: 3880205 - DNA, 25 bp, Homo sapien
tgtgagtattcagagcagccaggga

SEQ ID NO: 3880206 - DNA, 25 bp, Homo sapien
ccagggagggatcaagtgagaggta

SEQ ID NO: 3880207 - DNA, 25 bp, Homo sapien
tttaggtatacctggtggccggcat

SEQ ID NO: 3880208 - DNA, 25 bp, Homo sapien
tgagaagctcgagggcacaatgtgg

SEQ ID NO: 3880209 - DNA, 25 bp, Homo sapien
gagtgagaagctcgagggcacaatg

SEQ ID NO: 3880210 - DNA, 25 bp, Homo sapien
ccctgagtgagaagctcgagggcac

SEQ ID NO: 3880211 - DNA, 25 bp, Homo sapien
tattttcccgtatgaatcccttgtg

SEQ ID NO: 3880212 - DNA, 25 bp, Homo sapien
tgtgagcttatcctccaaaaggctt

SEQ ID NO: 3880213 - DNA, 25 bp, Homo sapien
ccactgtcagtgttgctagagaagc

SEQ ID NO: 3880214 - DNA, 25 bp, Homo sapien
tgatatcatccgaaaaaagcctgcg

SEQ ID NO: 3880215 - DNA, 25 bp, Homo sapien
gctagagtaggtcttattgggccca

SEQ ID NO: 3880216 - DNA, 25 bp, Homo sapien
gatgattctcatagtcctgctttgt

SEQ ID NO: 3880217 - DNA, 25 bp, Homo sapien
gagacaatgacatctgaagtgggtt

SEQ ID NO: 3880218 - DNA, 25 bp, Homo sapien
gcccattggtattaattgtgtccag

SEQ ID NO: 3880219 - DNA, 25 bp, Homo sapien
cacaggtacaggaaagctcagcacc

SEQ ID NO: 3880220 - DNA, 25 bp, Homo sapien
caggtgcaattggagcatacagatc

SEQ ID NO: 3880221 - DNA, 25 bp, Homo sapien
cagcacctgggcctttagggttttg

SEQ ID NO: 3880222 - DNA, 25 bp, Homo sapien
tgtgcaccgccactcgttgagctgt

SEQ ID NO: 3880223 - DNA, 25 bp, Homo sapien
aatgccagtcataggaggtgctcaa

SEQ ID NO: 3880224 - DNA, 25 bp, Homo sapien
taatgccagtcataggaggtgctca

SEQ ID NO: 3880225 - DNA, 25 bp, Homo sapien
tataatgccagtcataggaggtgct

SEQ ID NO: 3880226 - DNA, 25 bp, Homo sapien
ttttataatgccagtcataggaggt

SEQ ID NO: 3880227 - DNA, 25 bp, Homo sapien
gcaggcatgattccagcctctggag

SEQ ID NO: 3880228 - DNA, 25 bp, Homo sapien
tctgatagggtgtgcggatgggcca

SEQ ID NO: 3880229 - DNA, 25 bp, Homo sapien
catagcttcgcgcagttgcaggcat

SEQ ID NO: 3880230 - DNA, 25 bp, Homo sapien
gccatgttgttccactagagtaatt

SEQ ID NO: 3880231 - DNA, 25 bp, Homo sapien
cccagagatgacaccaataccaagt

SEQ ID NO: 3880232 - DNA, 25 bp, Homo sapien
tgggactggcttattgtctgacaaa

SEQ ID NO: 3880233 - DNA, 25 bp, Homo sapien
aataccaagtcgtcctgggactggc

SEQ ID NO: 3880234 - DNA, 25 bp, Homo sapien
ttctcctcatcggagtatgcagtcc

SEQ ID NO: 3880235 - DNA, 25 bp, Homo sapien
tggctctgaaagcactctgggtcct

SEQ ID NO: 3880236 - DNA, 25 bp, Homo sapien
gctctgaaagcactctgggtcctgt

SEQ ID NO: 3880237 - DNA, 25 bp, Homo sapien
caagtttgaactggctctgaaagca

SEQ ID NO: 3880238 - DNA, 25 bp, Homo sapien
gccaagtttgaactggctctgaaag

SEQ ID NO: 3880239 - DNA, 25 bp, Homo sapien
ggggtccaggagacagggcagtgca

SEQ ID NO: 3880240 - DNA, 25 bp, Homo sapien
tacagtgcccagaaaggacctcggg

SEQ ID NO: 3880241 - DNA, 25 bp, Homo sapien
gacctcggggtccaggagacagggc

SEQ ID NO: 3880242 - DNA, 25 bp, Homo sapien
ctacagtgcccagaaaggacctcgg

SEQ ID NO: 3880243 - DNA, 25 bp, Homo sapien
tagagaagatgtatgcacagccata

SEQ ID NO: 3880244 - DNA, 25 bp, Homo sapien
tatgcacagccataccatcgttggc

SEQ ID NO: 3880245 - DNA, 25 bp, Homo sapien
cataccatcgttggccaactgttgt

SEQ ID NO: 3880246 - DNA, 25 bp, Homo sapien
gatgtatgcacagccataccatcgt

SEQ ID NO: 3880247 - DNA, 25 bp, Homo sapien
attagggccctggtccacatagccc

SEQ ID NO: 3880248 - DNA, 25 bp, Homo sapien
tattagggccctggtccacatagcc

SEQ ID NO: 3880249 - DNA, 25 bp, Homo sapien
gtctgaatttaaggaagttgtggac

SEQ ID NO: 3880250 - DNA, 25 bp, Homo sapien
tcctgactcatcaccttcaagcaaa

SEQ ID NO: 3880251 - DNA, 25 bp, Homo sapien
agatgctatcatttctgacagtggg

SEQ ID NO: 3880252 - DNA, 25 bp, Homo sapien
gttgtggacaggaaccttatctgag

SEQ ID NO: 3880253 - DNA, 25 bp, Homo sapien
aacaaaggattgacttctcctgcag

SEQ ID NO: 3880254 - DNA, 25 bp, Homo sapien
caatgattgtgtggttgaagacctg

SEQ ID NO: 3880255 - DNA, 25 bp, Homo sapien
tgtgtcaggtactgattggaagcat

SEQ ID NO: 3880256 - DNA, 25 bp, Homo sapien
tgaagacctggctgaataagtgtgt

SEQ ID NO: 3880257 - DNA, 25 bp, Homo sapien
tgcaccatcgagttgccaaaagctc

SEQ ID NO: 3880258 - DNA, 25 bp, Homo sapien
tcaagcatgtgcaccatcgagttgc

SEQ ID NO: 3880259 - DNA, 25 bp, Homo sapien
cccgtaactcaagcatgtgcaccat

SEQ ID NO: 3880260 - DNA, 25 bp, Homo sapien
gcatgtgcaccatcgagttgccaaa

SEQ ID NO: 3880261 - DNA, 25 bp, Homo sapien
cagtgtcattaaagttagctctctt

SEQ ID NO: 3880262 - DNA, 25 bp, Homo sapien
ggtgaccctaccaacttaatgacat

SEQ ID NO: 3880263 - DNA, 25 bp, Homo sapien
gcatgtatgatacacaaggtgaccc

SEQ ID NO: 3880264 - DNA, 25 bp, Homo sapien
ccaatatattagcaggcatgtatga

SEQ ID NO: 3880265 - DNA, 25 bp, Homo sapien
tgtagtatctgttatagtggcactg

SEQ ID NO: 3880266 - DNA, 25 bp, Homo sapien
cactgcctgaagaccctgaaatgag

SEQ ID NO: 3880267 - DNA, 25 bp, Homo sapien
aatcaaggtacgagtaatgaaagac

SEQ ID NO: 3880268 - DNA, 25 bp, Homo sapien
taatgaaagactgagaatttattcc

SEQ ID NO: 3880269 - DNA, 25 bp, Homo sapien
gcactggcctgtttcaatagcacca

SEQ ID NO: 3880270 - DNA, 25 bp, Homo sapien
gaagcaatcctaacaaatattgatc

SEQ ID NO: 3880271 - DNA, 25 bp, Homo sapien
cctctccgtgcccagaggcgaggag

SEQ ID NO: 3880272 - DNA, 25 bp, Homo sapien
ttaccttagtgaaaccagcgctcgg

SEQ ID NO: 3880273 - DNA, 25 bp, Homo sapien
gccacctgtcccctcatgcatctgt

SEQ ID NO: 3880274 - DNA, 25 bp, Homo sapien
cacactgttctgaggacagctgaag

SEQ ID NO: 3880275 - DNA, 25 bp, Homo sapien
tttctggtggttgctctcacactgt

SEQ ID NO: 3880276 - DNA, 25 bp, Homo sapien
cttctttctggtggttgctctcaca

SEQ ID NO: 3880277 - DNA, 25 bp, Homo sapien
ctctgaacagctagcattggtgtct

SEQ ID NO: 3880278 - DNA, 25 bp, Homo sapien
cctctctgggtaacaaacacatttt

SEQ ID NO: 3880279 - DNA, 25 bp, Homo sapien
cattttggagggattgttaacttga

SEQ ID NO: 3880280 - DNA, 25 bp, Homo sapien
tatctgaatggactagtgatgtctg

SEQ ID NO: 3880281 - DNA, 25 bp, Homo sapien
tgtctgtcaggacccatggctgctg

SEQ ID NO: 3880282 - DNA, 25 bp, Homo sapien
tatgtgagaccagctgagagaacct

SEQ ID NO: 3880283 - DNA, 25 bp, Homo sapien
gataggcctggattttccgagacag

SEQ ID NO: 3880284 - DNA, 25 bp, Homo sapien
tagatgagcgtatgttggcgacaga

SEQ ID NO: 3880285 - DNA, 25 bp, Homo sapien
taatttgtcaggaggacttgttaaa

SEQ ID NO: 3880286 - DNA, 25 bp, Homo sapien
ttggcagtacagttaagttgtcaac

SEQ ID NO: 3880287 - DNA, 25 bp, Homo sapien
atttaatttgtcaggaggacttgtt

SEQ ID NO: 3880288 - DNA, 25 bp, Homo sapien
tgattggcagtacagttaagttgtc

SEQ ID NO: 3880289 - DNA, 25 bp, Homo sapien
tctgctgcacggtattgtgaaatct

SEQ ID NO: 3880290 - DNA, 25 bp, Homo sapien
cagattaggtcagtagaactgctgc

SEQ ID NO: 3880291 - DNA, 25 bp, Homo sapien
gaactgctgctaggttgagcatgat

SEQ ID NO: 3880292 - DNA, 25 bp, Homo sapien
tctccagtgagtaccgaggcattgc

SEQ ID NO: 3880293 - DNA, 25 bp, Homo sapien
cttgcatgctcaagtgcctctgtag

SEQ ID NO: 3880294 - DNA, 25 bp, Homo sapien
gcattaggggcttgccggatacttt

SEQ ID NO: 3880295 - DNA, 25 bp, Homo sapien
tagcattaggggcttgccggatact

SEQ ID NO: 3880296 - DNA, 25 bp, Homo sapien
agcattaggggcttgccggatactt

SEQ ID NO: 3880297 - DNA, 25 bp, Homo sapien
cacttggaggtttgtcctgtggtca

SEQ ID NO: 3880298 - DNA, 25 bp, Homo sapien
gacacctttagaagcatcagcccaa

SEQ ID NO: 3880299 - DNA, 25 bp, Homo sapien
tacacctgatgtgatgggcatactg

SEQ ID NO: 3880300 - DNA, 25 bp, Homo sapien
cctaagcaaggagacagtttcagtc

SEQ ID NO: 3880301 - DNA, 25 bp, Homo sapien
agctgaattaagatgaataatgaca

SEQ ID NO: 3880302 - DNA, 25 bp, Homo sapien
gacagcaccgtgacttgggggcggt

SEQ ID NO: 3880303 - DNA, 25 bp, Homo sapien
gaaaggccacctgaactcaaaggga

SEQ ID NO: 3880304 - DNA, 25 bp, Homo sapien
agaaaggccacctgaactcaaaggg

SEQ ID NO: 3880305 - DNA, 25 bp, Homo sapien
tgactttgaccatgactcatggtgt

SEQ ID NO: 3880306 - DNA, 25 bp, Homo sapien
tgaccatgactcatggtgttcaggc

SEQ ID NO: 3880307 - DNA, 25 bp, Homo sapien
ctttgaccatgactcatggtgttca

SEQ ID NO: 3880308 - DNA, 25 bp, Homo sapien
ccaaagcattcaggggatgagctac

SEQ ID NO: 3880309 - DNA, 25 bp, Homo sapien
cctccaaaatatcattgttagtcat

SEQ ID NO: 3880310 - DNA, 25 bp, Homo sapien
ttccccagcttcagtaaacaacagg

SEQ ID NO: 3880311 - DNA, 25 bp, Homo sapien
caggcactccgccaggtttttgact

SEQ ID NO: 3880312 - DNA, 25 bp, Homo sapien
ttttgactgaacatgtgccaggcct

SEQ ID NO: 3880313 - DNA, 25 bp, Homo sapien
caggcctgggaaatatgagttaact

SEQ ID NO: 3880314 - DNA, 25 bp, Homo sapien
cccacggcctatgatggtgaagccc

SEQ ID NO: 3880315 - DNA, 25 bp, Homo sapien
agccctttgagcttcgaagaagcca

SEQ ID NO: 3880316 - DNA, 25 bp, Homo sapien
ggagctgcccacggcctatgatggt

SEQ ID NO: 3880317 - DNA, 25 bp, Homo sapien
gagcttcgaagaagccagtccctct

SEQ ID NO: 3880318 - DNA, 25 bp, Homo sapien
actgccctgtccatcatctgtgttc

SEQ ID NO: 3880319 - DNA, 25 bp, Homo sapien
tcagaactgccctgtccatcatctg

SEQ ID NO: 3880320 - DNA, 25 bp, Homo sapien
ctagtccatatgtgccagctgtttc

SEQ ID NO: 3880321 - DNA, 25 bp, Homo sapien
ccactctcagaactgccctgtccat

SEQ ID NO: 3880322 - DNA, 25 bp, Homo sapien
gcaggggggctataatgttctgtca

SEQ ID NO: 3880323 - DNA, 25 bp, Homo sapien
gtttggttgggcctcgtgaacttga

SEQ ID NO: 3880324 - DNA, 25 bp, Homo sapien
tgtcatcctggacccgtgcgtgtct

SEQ ID NO: 3880325 - DNA, 25 bp, Homo sapien
gttctgtcatgcaggtcagcttgct

SEQ ID NO: 3880326 - DNA, 25 bp, Homo sapien
agaggttgagcagacttggtttctg

SEQ ID NO: 3880327 - DNA, 25 bp, Homo sapien
ctgcagaggttgagcagacttggtt

SEQ ID NO: 3880328 - DNA, 25 bp, Homo sapien
cagaggttgagcagacttggtttct

SEQ ID NO: 3880329 - DNA, 25 bp, Homo sapien
gcagaggttgagcagacttggtttc

SEQ ID NO: 3880330 - DNA, 25 bp, Homo sapien
ggttgggtggcaaaaagtatctaca

SEQ ID NO: 3880331 - DNA, 25 bp, Homo sapien
tggccagtattccacaatgcttggg

SEQ ID NO: 3880332 - DNA, 25 bp, Homo sapien
cccctgttagcttgagtggccagta

SEQ ID NO: 3880333 - DNA, 25 bp, Homo sapien
gttcccatacacgagaccattgtgg

SEQ ID NO: 3880334 - DNA, 25 bp, Homo sapien
tcagtgtctgggcatatcacatggc

SEQ ID NO: 3880335 - DNA, 25 bp, Homo sapien
tagccgtgcaccacaaggtcgtgtg

SEQ ID NO: 3880336 - DNA, 25 bp, Homo sapien
aagtctttccttcaacgacatcatg

SEQ ID NO: 3880337 - DNA, 25 bp, Homo sapien
tgaacagggaaggaactagccgtgc

SEQ ID NO: 3880338 - DNA, 25 bp, Homo sapien
tcttgctgagctaatctccctgcag

SEQ ID NO: 3880339 - DNA, 25 bp, Homo sapien
ctgggttcttgctgagctaatctcc

SEQ ID NO: 3880340 - DNA, 25 bp, Homo sapien
tgcagcaagaggacactaagtactg

SEQ ID NO: 3880341 - DNA, 25 bp, Homo sapien
tactggccgtatggctggagaaagc

SEQ ID NO: 3880342 - DNA, 25 bp, Homo sapien
ctgcggggaggatatccaaaccagc

SEQ ID NO: 3880343 - DNA, 25 bp, Homo sapien
ggggaggatatccaaaccagcaggt

SEQ ID NO: 3880344 - DNA, 25 bp, Homo sapien
agagctcaggcctacgcagagcttc

SEQ ID NO: 3880345 - DNA, 25 bp, Homo sapien
gagctcaggcctacgcagagcttcc

SEQ ID NO: 3880346 - DNA, 25 bp, Homo sapien
tgctgcatgagcaggagcagatagt

SEQ ID NO: 3880347 - DNA, 25 bp, Homo sapien
gagcagatagtgtttacctcttttg

SEQ ID NO: 3880348 - DNA, 25 bp, Homo sapien
cttcatgctgcatgagcaggagcag

SEQ ID NO: 3880349 - DNA, 25 bp, Homo sapien
tacctcttttgtccgtggccctgtg

SEQ ID NO: 3880350 - DNA, 25 bp, Homo sapien
tccacttcgaagtctttccagatgg

SEQ ID NO: 3880351 - DNA, 25 bp, Homo sapien
catcaccctctccacttcgaagtct

SEQ ID NO: 3880352 - DNA, 25 bp, Homo sapien
gagaatgagctttggaccctgttgc

SEQ ID NO: 3880353 - DNA, 25 bp, Homo sapien
tgtgggcaaatcagtgaaaatctgt

SEQ ID NO: 3880354 - DNA, 25 bp, Homo sapien
tcattaattggattcaggttatatg

SEQ ID NO: 3880355 - DNA, 25 bp, Homo sapien
tatgtgtttcgtttaaaagcagctg

SEQ ID NO: 3880356 - DNA, 25 bp, Homo sapien
tggaatgacctctgtgtcactttcc

SEQ ID NO: 3880357 - DNA, 25 bp, Homo sapien
aaagcagctgcgatcactaatggaa

SEQ ID NO: 3880358 - DNA, 25 bp, Homo sapien
cttggtacttgttaaccctgctctg

SEQ ID NO: 3880359 - DNA, 25 bp, Homo sapien
ggcctccagaatttgtagtttcatt

SEQ ID NO: 3880360 - DNA, 25 bp, Homo sapien
ttggcagcccctaccagtagtttgt

SEQ ID NO: 3880361 - DNA, 25 bp, Homo sapien
tagatacttgccatggtggacagaa

SEQ ID NO: 3880362 - DNA, 25 bp, Homo sapien
gctctcttgctccttaaatttggaa

SEQ ID NO: 3880363 - DNA, 25 bp, Homo sapien
cattggaatggctccctgtgaaata

SEQ ID NO: 3880364 - DNA, 25 bp, Homo sapien
taatgaaacgggcagagaatcagct

SEQ ID NO: 3880365 - DNA, 25 bp, Homo sapien
cttgtggaggccatcgtgggaccat

SEQ ID NO: 3880366 - DNA, 25 bp, Homo sapien
tgtaggctacagtcagaaacctgac

SEQ ID NO: 3880367 - DNA, 25 bp, Homo sapien
tctgcgagaacattccttaggtgcc

SEQ ID NO: 3880368 - DNA, 25 bp, Homo sapien
gaaacctgactctgcgagaacattc

SEQ ID NO: 3880369 - DNA, 25 bp, Homo sapien
cattccttaggtgccgggagcagga

SEQ ID NO: 3880370 - DNA, 25 bp, Homo sapien
gggcccattacctccatctgcaagt

SEQ ID NO: 3880371 - DNA, 25 bp, Homo sapien
tgtgtggcaagtcatcttaaaaggg

SEQ ID NO: 3880372 - DNA, 25 bp, Homo sapien
gacattctccttgttgtgggattga

SEQ ID NO: 3880373 - DNA, 25 bp, Homo sapien
tgcgagagccctgacattatatgtg

SEQ ID NO: 3880374 - DNA, 25 bp, Homo sapien
gctgcccttggagaaccccaaatgg

SEQ ID NO: 3880375 - DNA, 25 bp, Homo sapien
cctcttctaaaatccctgggactgg

SEQ ID NO: 3880376 - DNA, 25 bp, Homo sapien
tgagtgtcatggaagtgaccctgag

SEQ ID NO: 3880377 - DNA, 25 bp, Homo sapien
tgagggctcaagaagaactgccgtt

SEQ ID NO: 3880378 - DNA, 25 bp, Homo sapien
tgagttcagaaggagagtcagcctg

SEQ ID NO: 3880379 - DNA, 25 bp, Homo sapien
aaggctctgggtgactctgccgctt

SEQ ID NO: 3880380 - DNA, 25 bp, Homo sapien
gagctccgctgagcaaaggctctgg

SEQ ID NO: 3880381 - DNA, 25 bp, Homo sapien
gaggactgtgaaagacccaagagcc

SEQ ID NO: 3880382 - DNA, 25 bp, Homo sapien
ctggagagaaccgttttgcctctgt

SEQ ID NO: 3880383 - DNA, 25 bp, Homo sapien
cctctgtccggccatgtgaagaccg

SEQ ID NO: 3880384 - DNA, 25 bp, Homo sapien
gccatgtgaagaccggctggctagt

SEQ ID NO: 3880385 - DNA, 25 bp, Homo sapien
gttttgcctctgtccggccatgtga

SEQ ID NO: 3880386 - DNA, 25 bp, Homo sapien
agtctaaagtgctcaaattgagcca

SEQ ID NO: 3880387 - DNA, 25 bp, Homo sapien
ttgtatctcatgctagccaatttcg

SEQ ID NO: 3880388 - DNA, 25 bp, Homo sapien
gcctgcagtcttctgtagccgatgt

SEQ ID NO: 3880389 - DNA, 25 bp, Homo sapien
tcttctgtagccgatgtaacaatcc

SEQ ID NO: 3880390 - DNA, 25 bp, Homo sapien
gatacttggctctctcgagctctca

SEQ ID NO: 3880391 - DNA, 25 bp, Homo sapien
ggcagcaaatgacttcatcgtcaga

SEQ ID NO: 3880392 - DNA, 25 bp, Homo sapien
catcgtcagagatgatgagtgttcc

SEQ ID NO: 3880393 - DNA, 25 bp, Homo sapien
gagatgatgagtgttccgaactgtg

SEQ ID NO: 3880394 - DNA, 25 bp, Homo sapien
aatggttctttcagagtggggcatg

SEQ ID NO: 3880395 - DNA, 25 bp, Homo sapien
gctacacaatagactgtcaaaatgg

SEQ ID NO: 3880396 - DNA, 25 bp, Homo sapien
tcctctctgcttataggtttctgca

SEQ ID NO: 3880397 - DNA, 25 bp, Homo sapien
ctgcagcattgcctctaggatttga

SEQ ID NO: 3880398 - DNA, 25 bp, Homo sapien
cagtgtttcggatcagagaatttct

SEQ ID NO: 3880399 - DNA, 25 bp, Homo sapien
tttgatgggtgttggagagctctct

SEQ ID NO: 3880400 - DNA, 25 bp, Homo sapien
gctggacaaactggctggcagtgtt

SEQ ID NO: 3880401 - DNA, 25 bp, Homo sapien
aagcaatgtttgatgggtgttggag

SEQ ID NO: 3880402 - DNA, 25 bp, Homo sapien
tgcactgggttcctctcctcgatgg

SEQ ID NO: 3880403 - DNA, 25 bp, Homo sapien
cactgggttcctctcctcgatggac

SEQ ID NO: 3880404 - DNA, 25 bp, Homo sapien
ggttcctctcctcgatggaccactg

SEQ ID NO: 3880405 - DNA, 25 bp, Homo sapien
gtctgcactgggttcctctcctcga

SEQ ID NO: 3880406 - DNA, 25 bp, Homo sapien
gcccagatacagcatgagagctttc

SEQ ID NO: 3880407 - DNA, 25 bp, Homo sapien
ccagatacagcatgagagctttcat

SEQ ID NO: 3880408 - DNA, 25 bp, Homo sapien
agcccagatacagcatgagagcttt

SEQ ID NO: 3880409 - DNA, 25 bp, Homo sapien
cccagatacagcatgagagctttca

SEQ ID NO: 3880410 - DNA, 25 bp, Homo sapien
gaagagtggagttgacaagccacac

SEQ ID NO: 3880411 - DNA, 25 bp, Homo sapien
tgggttcatcaccatgacagttcct

SEQ ID NO: 3880412 - DNA, 25 bp, Homo sapien
ccttacaagtccagtagggcaggga

SEQ ID NO: 3880413 - DNA, 25 bp, Homo sapien
gacagttccttacaagtccagtagg

SEQ ID NO: 3880414 - DNA, 25 bp, Homo sapien
gctcccaatcccctcaccatggcaa

SEQ ID NO: 3880415 - DNA, 25 bp, Homo sapien
agcgagagcccccactgctgttcag

SEQ ID NO: 3880416 - DNA, 25 bp, Homo sapien
ggcagctcccaatcccctcaccatg

SEQ ID NO: 3880417 - DNA, 25 bp, Homo sapien
gagcccccactgctgttcagaaaac

SEQ ID NO: 3880418 - DNA, 25 bp, Homo sapien
ctgcttcattttctgaggcaactaa

SEQ ID NO: 3880419 - DNA, 25 bp, Homo sapien
attttctgaggcaactaatttcttc

SEQ ID NO: 3880420 - DNA, 25 bp, Homo sapien
cttcattttctgaggcaactaattt

SEQ ID NO: 3880421 - DNA, 25 bp, Homo sapien
cattttctgaggcaactaatttctt

SEQ ID NO: 3880422 - DNA, 25 bp, Homo sapien
gtagcaagccacttttggaggtcac

SEQ ID NO: 3880423 - DNA, 25 bp, Homo sapien
tgtgaaccatagagctagagctatt

SEQ ID NO: 3880424 - DNA, 25 bp, Homo sapien
aaaatggctccggtagcaagccact

SEQ ID NO: 3880425 - DNA, 25 bp, Homo sapien
ttttgtgaaccatagagctagagct

SEQ ID NO: 3880426 - DNA, 25 bp, Homo sapien
gcaaacagttcatgaggttgaagag

SEQ ID NO: 3880427 - DNA, 25 bp, Homo sapien
tcttggcccaacatatgtttgccca

SEQ ID NO: 3880428 - DNA, 25 bp, Homo sapien
aggttgaagagcagcgttcttggcc

SEQ ID NO: 3880429 - DNA, 25 bp, Homo sapien
ttatctttcaagcaaacagttcatg

SEQ ID NO: 3880430 - DNA, 25 bp, Homo sapien
atgctaagggagtaatggtaatggc

SEQ ID NO: 3880431 - DNA, 25 bp, Homo sapien
tcaccagagataagcaggcctcttg

SEQ ID NO: 3880432 - DNA, 25 bp, Homo sapien
cagagataagcaggcctcttggctt

SEQ ID NO: 3880433 - DNA, 25 bp, Homo sapien
tttccaatctgtagcagtaatgcta

SEQ ID NO: 3880434 - DNA, 25 bp, Homo sapien
caccagctctggagtacctcagtct

SEQ ID NO: 3880435 - DNA, 25 bp, Homo sapien
tgtcacatcactgatttggagaacc

SEQ ID NO: 3880436 - DNA, 25 bp, Homo sapien
gcctgtcccaacgagctggtcagct

SEQ ID NO: 3880437 - DNA, 25 bp, Homo sapien
ctggtcagcttggaaaaggatgagg

SEQ ID NO: 3880438 - DNA, 25 bp, Homo sapien
tttaatgaccttttcatggacctct

SEQ ID NO: 3880439 - DNA, 25 bp, Homo sapien
tcccgatagcccctgttgacagtct

SEQ ID NO: 3880440 - DNA, 25 bp, Homo sapien
tgattgaaccatcaatagctcgtgg

SEQ ID NO: 3880441 - DNA, 25 bp, Homo sapien
tttaccttcaaaacaaactgattga

SEQ ID NO: 3880442 - DNA, 25 bp, Homo sapien
gacagtctgaataagtttagtgccc

SEQ ID NO: 3880443 - DNA, 25 bp, Homo sapien
tgcggtctgttgtcatcatggttcc

SEQ ID NO: 3880444 - DNA, 25 bp, Homo sapien
ggcaaaatgacaatgtgcggtctgt

SEQ ID NO: 3880445 - DNA, 25 bp, Homo sapien
atggttcctgccagccccgtgaagg

SEQ ID NO: 3880446 - DNA, 25 bp, Homo sapien
gctgtgatccaaagtgaggcaaaat

SEQ ID NO: 3880447 - DNA, 25 bp, Homo sapien
taaaatggttagacagttggcagct

SEQ ID NO: 3880448 - DNA, 25 bp, Homo sapien
ttacagcattgtgggtttatcagac

SEQ ID NO: 3880449 - DNA, 25 bp, Homo sapien
catacacgcaataaaacataaacct

SEQ ID NO: 3880450 - DNA, 25 bp, Homo sapien
taaccaataagggagtcatacacgc

SEQ ID NO: 3880451 - DNA, 25 bp, Homo sapien
gagtagtcttgaagtaggccttcca

SEQ ID NO: 3880452 - DNA, 25 bp, Homo sapien
tggtgtttccagcatcgcagatgaa

SEQ ID NO: 3880453 - DNA, 25 bp, Homo sapien
aaagggaggtgtgcaacactgttcc

SEQ ID NO: 3880454 - DNA, 25 bp, Homo sapien
gtctccatgtttccagatgcatagg

SEQ ID NO: 3880455 - DNA, 25 bp, Homo sapien
agggctttttagattgccgtttgat

SEQ ID NO: 3880456 - DNA, 25 bp, Homo sapien
ggctttttagattgccgtttgatct

SEQ ID NO: 3880457 - DNA, 25 bp, Homo sapien
gggctttttagattgccgtttgatc

SEQ ID NO: 3880458 - DNA, 25 bp, Homo sapien
ctttttagattgccgtttgatctga

SEQ ID NO: 3880459 - DNA, 25 bp, Homo sapien
tatccgtggtcatttgctgccagct

SEQ ID NO: 3880460 - DNA, 25 bp, Homo sapien
cttctgtctggggtatccgtggtca

SEQ ID NO: 3880461 - DNA, 25 bp, Homo sapien
tcatagcatagagccttctgtctgg

SEQ ID NO: 3880462 - DNA, 25 bp, Homo sapien
cttcatagcatagagccttctgtct

SEQ ID NO: 3880463 - DNA, 25 bp, Homo sapien
gtttaactagatcagtgtatgtctc

SEQ ID NO: 3880464 - DNA, 25 bp, Homo sapien
gatcagtgtatgtctcaagttcttc

SEQ ID NO: 3880465 - DNA, 25 bp, Homo sapien
taactagatcagtgtatgtctcaag

SEQ ID NO: 3880466 - DNA, 25 bp, Homo sapien
ctagatcagtgtatgtctcaagttc

SEQ ID NO: 3880467 - DNA, 25 bp, Homo sapien
agagtcggtctctttcctgtctccc

SEQ ID NO: 3880468 - DNA, 25 bp, Homo sapien
cgtcttgctgcagaatgctgtggga

SEQ ID NO: 3880469 - DNA, 25 bp, Homo sapien
tgtgtccttggagagtcggtctctt

SEQ ID NO: 3880470 - DNA, 25 bp, Homo sapien
caagggaggacagtcctgcctggaa

SEQ ID NO: 3880471 - DNA, 25 bp, Homo sapien
aactcactgtgtcccttatatctct

SEQ ID NO: 3880472 - DNA, 25 bp, Homo sapien
tcactgtgtcccttatatctctctt

SEQ ID NO: 3880473 - DNA, 25 bp, Homo sapien
actgtgtcccttatatctctctttc

SEQ ID NO: 3880474 - DNA, 25 bp, Homo sapien
gaacaaactcactgtgtcccttata

SEQ ID NO: 3880475 - DNA, 25 bp, Homo sapien
cctgaaagatgaagtttcattgatc

SEQ ID NO: 3880476 - DNA, 25 bp, Homo sapien
gctccttctcccacctgaaagatga

SEQ ID NO: 3880477 - DNA, 25 bp, Homo sapien
tagctccttctcccacctgaaagat

SEQ ID NO: 3880478 - DNA, 25 bp, Homo sapien
ccacctgaaagatgaagtttcattg

SEQ ID NO: 3880479 - DNA, 25 bp, Homo sapien
caccatgcctatctattttttaaaa

SEQ ID NO: 3880480 - DNA, 25 bp, Homo sapien
ggctggcctttaactcttgggttca

SEQ ID NO: 3880481 - DNA, 25 bp, Homo sapien
attttttgtagagatagggtcctct

SEQ ID NO: 3880482 - DNA, 25 bp, Homo sapien
tgtagagatagggtcctctgttgcc

SEQ ID NO: 3880483 - DNA, 25 bp, Homo sapien
aatagcagagtcctgatcatgtcca

SEQ ID NO: 3880484 - DNA, 25 bp, Homo sapien
tctgtagcgacagaaggtgccatta

SEQ ID NO: 3880485 - DNA, 25 bp, Homo sapien
tgccagattctctgcgggacaagag

SEQ ID NO: 3880486 - DNA, 25 bp, Homo sapien
tctcccagtggtgctagcaatagca

SEQ ID NO: 3880487 - DNA, 25 bp, Homo sapien
ttgtagctctccctcgctgagaggt

SEQ ID NO: 3880488 - DNA, 25 bp, Homo sapien
tcatatctcaacttggttgtagctc

SEQ ID NO: 3880489 - DNA, 25 bp, Homo sapien
cagtcatatctcaacttggttgtag

SEQ ID NO: 3880490 - DNA, 25 bp, Homo sapien
gtagctctccctcgctgagaggtca

SEQ ID NO: 3880491 - DNA, 25 bp, Homo sapien
acccagtatggctacatttgaaaat

SEQ ID NO: 3880492 - DNA, 25 bp, Homo sapien
tcaaacccagtatggctacatttga

SEQ ID NO: 3880493 - DNA, 25 bp, Homo sapien
ctgtcaaacccagtatggctacatt

SEQ ID NO: 3880494 - DNA, 25 bp, Homo sapien
caaacccagtatggctacatttgaa

SEQ ID NO: 3880495 - DNA, 25 bp, Homo sapien
catcctggaactctggcaatcattc

SEQ ID NO: 3880496 - DNA, 25 bp, Homo sapien
ggcccatcctggaactctggcaatc

SEQ ID NO: 3880497 - DNA, 25 bp, Homo sapien
aagtcctaggcttggcttccacttt

SEQ ID NO: 3880498 - DNA, 25 bp, Homo sapien
tggcttccacttttggaagtgaaaa

SEQ ID NO: 3880499 - DNA, 25 bp, Homo sapien
tgagaggcttgtagtgaacatctgt

SEQ ID NO: 3880500 - DNA, 25 bp, Homo sapien
gacatttcttgtaaaagaggaggca

SEQ ID NO: 3880501 - DNA, 25 bp, Homo sapien
ggcatttgttcatattgacattagc

SEQ ID NO: 3880502 - DNA, 25 bp, Homo sapien
tgcctctgtatctctcggtggtaca

SEQ ID NO: 3880503 - DNA, 25 bp, Homo sapien
atggcagggcagcatagattgcttc

SEQ ID NO: 3880504 - DNA, 25 bp, Homo sapien
cagggcagcatagattgcttctgct

SEQ ID NO: 3880505 - DNA, 25 bp, Homo sapien
gccaaggctcctcacacttaaatgg

SEQ ID NO: 3880506 - DNA, 25 bp, Homo sapien
ctcctcacacttaaatggcagggca

SEQ ID NO: 3880507 - DNA, 25 bp, Homo sapien
catctgctgcggcagattgtctcct

SEQ ID NO: 3880508 - DNA, 25 bp, Homo sapien
gaatcagatgctcagacatctgctg

SEQ ID NO: 3880509 - DNA, 25 bp, Homo sapien
tgcggcagattgtctcctgcttggg

SEQ ID NO: 3880510 - DNA, 25 bp, Homo sapien
ctgtgtccagtctcggtgccagcag

SEQ ID NO: 3880511 - DNA, 25 bp, Homo sapien
cagcaacttggcgtattcacccacg

SEQ ID NO: 3880512 - DNA, 25 bp, Homo sapien
tttcagcaacttggcgtattcaccc

SEQ ID NO: 3880513 - DNA, 25 bp, Homo sapien
tgcatttcagcaacttggcgtattc

SEQ ID NO: 3880514 - DNA, 25 bp, Homo sapien
aacttggcgtattcacccacgccag

SEQ ID NO: 3880515 - DNA, 25 bp, Homo sapien
atgtggaaaatgattgatgagctgc

SEQ ID NO: 3880516 - DNA, 25 bp, Homo sapien
gagcttcgcctgcagggtttgcatc

SEQ ID NO: 3880517 - DNA, 25 bp, Homo sapien
ggtttgcatcaattactcgacgaca

SEQ ID NO: 3880518 - DNA, 25 bp, Homo sapien
gaagtacactttgtcaaccgctcat

SEQ ID NO: 3880519 - DNA, 25 bp, Homo sapien
tgttggagtcttccattaaaatgca

SEQ ID NO: 3880520 - DNA, 25 bp, Homo sapien
tatagttcttgaatgcctttgggtc

SEQ ID NO: 3880521 - DNA, 25 bp, Homo sapien
ggtctgttggagtcttccattaaaa

SEQ ID NO: 3880522 - DNA, 25 bp, Homo sapien
ggggagagcctttaagctcattatc

SEQ ID NO: 3880523 - DNA, 25 bp, Homo sapien
cagggattaattgatcagatccttc

SEQ ID NO: 3880524 - DNA, 25 bp, Homo sapien
ctaaatcttccacagggattaattg

SEQ ID NO: 3880525 - DNA, 25 bp, Homo sapien
gattaattgatcagatccttcccca

SEQ ID NO: 3880526 - DNA, 25 bp, Homo sapien
cttccacagggattaattgatcaga

SEQ ID NO: 3880527 - DNA, 25 bp, Homo sapien
tggaaacagagcctgtgggaatggg

SEQ ID NO: 3880528 - DNA, 25 bp, Homo sapien
ggaatgggcacctggttgatgaggg

SEQ ID NO: 3880529 - DNA, 25 bp, Homo sapien
aatgggcacctggttgatgagggga

SEQ ID NO: 3880530 - DNA, 25 bp, Homo sapien
tcagacacctggttggaaacagagc

SEQ ID NO: 3880531 - DNA, 25 bp, Homo sapien
gtccattaagcggatgtttgtgtgt

SEQ ID NO: 3880532 - DNA, 25 bp, Homo sapien
tgttcactgttgtgtttaaatcccc

SEQ ID NO: 3880533 - DNA, 25 bp, Homo sapien
gtcgatcgagccttgggcctttgtc

SEQ ID NO: 3880534 - DNA, 25 bp, Homo sapien
acagcctgtctcagtttgtgggcag

SEQ ID NO: 3880535 - DNA, 25 bp, Homo sapien
cgtcagaaatgtctgtgctgtcatc

SEQ ID NO: 3880536 - DNA, 25 bp, Homo sapien
tcagaaatgtctgtgctgtcatcag

SEQ ID NO: 3880537 - DNA, 25 bp, Homo sapien
gtcagaaatgtctgtgctgtcatca

SEQ ID NO: 3880538 - DNA, 25 bp, Homo sapien
tcttgggagcccctgaaatattctt

SEQ ID NO: 3880539 - DNA, 25 bp, Homo sapien
gtcttgggagcccctgaaatattct

SEQ ID NO: 3880540 - DNA, 25 bp, Homo sapien
ttctctatcccacaggagcagacgg

SEQ ID NO: 3880541 - DNA, 25 bp, Homo sapien
gcctctcgtgttggatcttctctat

SEQ ID NO: 3880542 - DNA, 25 bp, Homo sapien
gagcagacgggatgttggagccctt

SEQ ID NO: 3880543 - DNA, 25 bp, Homo sapien
tcccacaggagcagacgggatgttg

SEQ ID NO: 3880544 - DNA, 25 bp, Homo sapien
ctccagtgaagtttcctgtagcctg

SEQ ID NO: 3880545 - DNA, 25 bp, Homo sapien
ttctccagtgaagtttcctgtagcc

SEQ ID NO: 3880546 - DNA, 25 bp, Homo sapien
ccagtgaagtttcctgtagcctgtg

SEQ ID NO: 3880547 - DNA, 25 bp, Homo sapien
agtgaagtttcctgtagcctgtgtc

SEQ ID NO: 3880548 - DNA, 25 bp, Homo sapien
aactgcagaagttgtgtgtgactgt

SEQ ID NO: 3880549 - DNA, 25 bp, Homo sapien
ccgattacaatagaagggcagcttc

SEQ ID NO: 3880550 - DNA, 25 bp, Homo sapien
aatgaataccgattacaatagaagg

SEQ ID NO: 3880551 - DNA, 25 bp, Homo sapien
agggcggtaatgaataccgattaca

SEQ ID NO: 3880552 - DNA, 25 bp, Homo sapien
tccagagcagtgtatgaatctagat

SEQ ID NO: 3880553 - DNA, 25 bp, Homo sapien
agtcatctccagagcagtgtatgaa

SEQ ID NO: 3880554 - DNA, 25 bp, Homo sapien
gagcagtgtatgaatctagatctac

SEQ ID NO: 3880555 - DNA, 25 bp, Homo sapien
cagagcagtgtatgaatctagatct

SEQ ID NO: 3880556 - DNA, 25 bp, Homo sapien
cccagataggggatagctttgaaag

SEQ ID NO: 3880557 - DNA, 25 bp, Homo sapien
tagctttcgctgttgtggagcccag

SEQ ID NO: 3880558 - DNA, 25 bp, Homo sapien
ttcgctgttgtggagcccagatagg

SEQ ID NO: 3880559 - DNA, 25 bp, Homo sapien
ggtcgttagctttcgctgttgtgga

SEQ ID NO: 3880560 - DNA, 25 bp, Homo sapien
ccaggctgatgatgtgtaacccaaa

SEQ ID NO: 3880561 - DNA, 25 bp, Homo sapien
ttccaggctgatgatgtgtaaccca

SEQ ID NO: 3880562 - DNA, 25 bp, Homo sapien
tccaggctgatgatgtgtaacccaa

SEQ ID NO: 3880563 - DNA, 25 bp, Homo sapien
agttggctttgagatgtttgactca

SEQ ID NO: 3880564 - DNA, 25 bp, Homo sapien
tcatcgtcagtacttcccaatttcc

SEQ ID NO: 3880565 - DNA, 25 bp, Homo sapien
ccccaggatctcagttggctttgag

SEQ ID NO: 3880566 - DNA, 25 bp, Homo sapien
gtcattcagtccatcctcccagagg

SEQ ID NO: 3880567 - DNA, 25 bp, Homo sapien
cctgtctggctttcgatggagctca

SEQ ID NO: 3880568 - DNA, 25 bp, Homo sapien
agtttttggcagcaagcaggacccc

SEQ ID NO: 3880569 - DNA, 25 bp, Homo sapien
ggttttcccatcaagctatctgcca

SEQ ID NO: 3880570 - DNA, 25 bp, Homo sapien
gggtaactcccaggtgttattgcaa

SEQ ID NO: 3880571 - DNA, 25 bp, Homo sapien
ctcggatttttctaaagtggcatca

SEQ ID NO: 3880572 - DNA, 25 bp, Homo sapien
tgaacaagaatacgccctggaagta

SEQ ID NO: 3880573 - DNA, 25 bp, Homo sapien
gacttctgtgcaaaattggcaacag

SEQ ID NO: 3880574 - DNA, 25 bp, Homo sapien
gaatacgccctggaagtacaggaaa

SEQ ID NO: 3880575 - DNA, 25 bp, Homo sapien
taattggtaatgattagggctgtct

SEQ ID NO: 3880576 - DNA, 25 bp, Homo sapien
aggatgtcagcagacgtggttaatt

SEQ ID NO: 3880577 - DNA, 25 bp, Homo sapien
cagcagacgtggttaattggtaatg

SEQ ID NO: 3880578 - DNA, 25 bp, Homo sapien
attggtaatgattagggctgtctgc

SEQ ID NO: 3880579 - DNA, 25 bp, Homo sapien
aattgttgtatgtaaccccgagcgg

SEQ ID NO: 3880580 - DNA, 25 bp, Homo sapien
tatgtaaccccgagcggctttgctc

SEQ ID NO: 3880581 - DNA, 25 bp, Homo sapien
tgttgtatgtaaccccgagcggctt

SEQ ID NO: 3880582 - DNA, 25 bp, Homo sapien
aaccccgagcggctttgctctttca

SEQ ID NO: 3880583 - DNA, 25 bp, Homo sapien
gaaagcagctgtttagtgacagact

SEQ ID NO: 3880584 - DNA, 25 bp, Homo sapien
tcccatgaagggattccagtggctg

SEQ ID NO: 3880585 - DNA, 25 bp, Homo sapien
tgaagggattccagtggctggttaa

SEQ ID NO: 3880586 - DNA, 25 bp, Homo sapien
tccttaaatcccatgaagggattcc

SEQ ID NO: 3880587 - DNA, 25 bp, Homo sapien
ctgatcatgacaaaggttccaggac

SEQ ID NO: 3880588 - DNA, 25 bp, Homo sapien
cactggaaacgatcgttagaaaaag

SEQ ID NO: 3880589 - DNA, 25 bp, Homo sapien
ccacacaggccctgatcatgacaaa

SEQ ID NO: 3880590 - DNA, 25 bp, Homo sapien
ttccaagtcactggaaacgatcgtt

SEQ ID NO: 3880591 - DNA, 25 bp, Homo sapien
ttgcaaagacacaacttccggttct

SEQ ID NO: 3880592 - DNA, 25 bp, Homo sapien
ttccggttctggtgggcagaatggg

SEQ ID NO: 3880593 - DNA, 25 bp, Homo sapien
gttctcagtaatgcctgccacaaag

SEQ ID NO: 3880594 - DNA, 25 bp, Homo sapien
gaaccccataaatttagcatttgca

SEQ ID NO: 3880595 - DNA, 25 bp, Homo sapien
gataagggtactattataaaacagc

SEQ ID NO: 3880596 - DNA, 25 bp, Homo sapien
tgagagcagccgacatattgttgac

SEQ ID NO: 3880597 - DNA, 25 bp, Homo sapien
ttcatctctgtatttatggctctgt

SEQ ID NO: 3880598 - DNA, 25 bp, Homo sapien
gcttttttattgaattggaagagga

SEQ ID NO: 3880599 - DNA, 25 bp, Homo sapien
ctctgtatttatggctctgttgtgc

SEQ ID NO: 3880600 - DNA, 25 bp, Homo sapien
ctgtatttatggctctgttgtgctt

SEQ ID NO: 3880601 - DNA, 25 bp, Homo sapien
tcatctttccaggcccagctgagac

SEQ ID NO: 3880602 - DNA, 25 bp, Homo sapien
tctttccaggcccagctgagaccca

SEQ ID NO: 3880603 - DNA, 25 bp, Homo sapien
aggcccagctgagacccaggcttcc

SEQ ID NO: 3880604 - DNA, 25 bp, Homo sapien
ccaggcccagctgagacccaggctt

SEQ ID NO: 3880605 - DNA, 25 bp, Homo sapien
gaattagtatattgtacgtgatcca

SEQ ID NO: 3880606 - DNA, 25 bp, Homo sapien
gattgacggcataagaattagtata

SEQ ID NO: 3880607 - DNA, 25 bp, Homo sapien
ctctctctggattgacggcataaga

SEQ ID NO: 3880608 - DNA, 25 bp, Homo sapien
tctctggattgacggcataagaatt

SEQ ID NO: 3880609 - DNA, 25 bp, Homo sapien
cctgtgagggactggatgttaccat

SEQ ID NO: 3880610 - DNA, 25 bp, Homo sapien
tcctgtgagggactggatgttacca

SEQ ID NO: 3880611 - DNA, 25 bp, Homo sapien
ctcctgtgagggactggatgttacc

SEQ ID NO: 3880612 - DNA, 25 bp, Homo sapien
ggctcctgtgagggactggatgtta

SEQ ID NO: 3880613 - DNA, 25 bp, Homo sapien
ggaatcctgtgccaaggagtttgct

SEQ ID NO: 3880614 - DNA, 25 bp, Homo sapien
caggcaatgtccataaattcagtcc

SEQ ID NO: 3880615 - DNA, 25 bp, Homo sapien
gacttggatcttgcaataactaggg

SEQ ID NO: 3880616 - DNA, 25 bp, Homo sapien
caagatcagtgtaggtggaagtgac

SEQ ID NO: 3880617 - DNA, 25 bp, Homo sapien
ccattttgtgaactgtgctgttttg

SEQ ID NO: 3880618 - DNA, 25 bp, Homo sapien
ttttgtgaactgtgctgttttgcat

SEQ ID NO: 3880619 - DNA, 25 bp, Homo sapien
gaagatggatcaccattttgtgaac

SEQ ID NO: 3880620 - DNA, 25 bp, Homo sapien
gtgggagaagatggatcaccatttt

SEQ ID NO: 3880621 - DNA, 25 bp, Homo sapien
tacacagtgcttgtaatggagtgga

SEQ ID NO: 3880622 - DNA, 25 bp, Homo sapien
aatgatggcagtgccgagagacccg

SEQ ID NO: 3880623 - DNA, 25 bp, Homo sapien
tcttgcccgaacagtgccattagtg

SEQ ID NO: 3880624 - DNA, 25 bp, Homo sapien
gaaaagaggtccttttacacagtgc

SEQ ID NO: 3880625 - DNA, 25 bp, Homo sapien
ggaaacaggtgctagagaggatgtg

SEQ ID NO: 3880626 - DNA, 25 bp, Homo sapien
caggaaacaggtgctagagaggatg

SEQ ID NO: 3880627 - DNA, 25 bp, Homo sapien
aagtcaggaaacaggtgctagagag

SEQ ID NO: 3880628 - DNA, 25 bp, Homo sapien
gtcaggaaacaggtgctagagagga

SEQ ID NO: 3880629 - DNA, 25 bp, Homo sapien
ttggaaatatttgacgccgccaaat

SEQ ID NO: 3880630 - DNA, 25 bp, Homo sapien
tgggaagacctgttcacaaagataa

SEQ ID NO: 3880631 - DNA, 25 bp, Homo sapien
cccagctagtatgtcaggtatccac

SEQ ID NO: 3880632 - DNA, 25 bp, Homo sapien
catcttgaagtaaagtcccagctag

SEQ ID NO: 3880633 - DNA, 25 bp, Homo sapien
tatcaattaaaacaactagcatgat

SEQ ID NO: 3880634 - DNA, 25 bp, Homo sapien
taaaacaactagcatgattttattt

SEQ ID NO: 3880635 - DNA, 25 bp, Homo sapien
tcaattaaaacaactagcatgattt

SEQ ID NO: 3880636 - DNA, 25 bp, Homo sapien
attaaaacaactagcatgattttat

SEQ ID NO: 3880637 - DNA, 25 bp, Homo sapien
gctggatcactcctccttagtcaac

SEQ ID NO: 3880638 - DNA, 25 bp, Homo sapien
tgggctggatcactcctccttagtc

SEQ ID NO: 3880639 - DNA, 25 bp, Homo sapien
ctcctgagtcaccaggactactgac

SEQ ID NO: 3880640 - DNA, 25 bp, Homo sapien
gcctcctgagtcaccaggactactg

SEQ ID NO: 3880641 - DNA, 25 bp, Homo sapien
cacctccaaagacaggataggagca

SEQ ID NO: 3880642 - DNA, 25 bp, Homo sapien
ggaaacatcagccagaacatctcgt

SEQ ID NO: 3880643 - DNA, 25 bp, Homo sapien
tcttccacgtttagacccagagcag

SEQ ID NO: 3880644 - DNA, 25 bp, Homo sapien
gacacttgaataagtcgttctccac

SEQ ID NO: 3880645 - DNA, 25 bp, Homo sapien
caaattcaggggctgtgtttctctg

SEQ ID NO: 3880646 - DNA, 25 bp, Homo sapien
ggtcacaaactttctggataacaaa

SEQ ID NO: 3880647 - DNA, 25 bp, Homo sapien
tccacttggtcacaaactttctgga

SEQ ID NO: 3880648 - DNA, 25 bp, Homo sapien
caaactttctggataacaaattcag

SEQ ID NO: 3880649 - DNA, 25 bp, Homo sapien
tctgacaacgtagtgagaaaatgag

SEQ ID NO: 3880650 - DNA, 25 bp, Homo sapien
gggcaggaaataatctgacaacgta

SEQ ID NO: 3880651 - DNA, 25 bp, Homo sapien
gaaataatctgacaacgtagtgaga

SEQ ID NO: 3880652 - DNA, 25 bp, Homo sapien
taatctgacaacgtagtgagaaaat

SEQ ID NO: 3880653 - DNA, 25 bp, Homo sapien
gagaaagcatggtacagctggtgtt

SEQ ID NO: 3880654 - DNA, 25 bp, Homo sapien
tttcatcttctacgcctcctaaaat

SEQ ID NO: 3880655 - DNA, 25 bp, Homo sapien
atcttctacgcctcctaaaatgtct

SEQ ID NO: 3880656 - DNA, 25 bp, Homo sapien
gtttttgcggcagttgggtgagagc

SEQ ID NO: 3880657 - DNA, 25 bp, Homo sapien
ggctttgtgcaggataacatatcat

SEQ ID NO: 3880658 - DNA, 25 bp, Homo sapien
aatttttctgggagaggaacatctc

SEQ ID NO: 3880659 - DNA, 25 bp, Homo sapien
cacatctgccacagcggaaggcttt

SEQ ID NO: 3880660 - DNA, 25 bp, Homo sapien
gaagaattccagaatttttctggga

SEQ ID NO: 3880661 - DNA, 25 bp, Homo sapien
ttaagtttgaagaagcaggactgag

SEQ ID NO: 3880662 - DNA, 25 bp, Homo sapien
cattggacattctttctgatgaata

SEQ ID NO: 3880663 - DNA, 25 bp, Homo sapien
gaataagtattaaaactgctttgaa

SEQ ID NO: 3880664 - DNA, 25 bp, Homo sapien
gaggtcacatttttctccattggac

SEQ ID NO: 3880665 - DNA, 25 bp, Homo sapien
ctctctctattggaaatacctttct

SEQ ID NO: 3880666 - DNA, 25 bp, Homo sapien
tctctctctattggaaatacctttc

SEQ ID NO: 3880667 - DNA, 25 bp, Homo sapien
ctttcttttcagcaaggtgttctct

SEQ ID NO: 3880668 - DNA, 25 bp, Homo sapien
ctctctattggaaatacctttcttt

SEQ ID NO: 3880669 - DNA, 25 bp, Homo sapien
taattttggacttagatgttccctg

SEQ ID NO: 3880670 - DNA, 25 bp, Homo sapien
cattttattcgttgtttcctggttg

SEQ ID NO: 3880671 - DNA, 25 bp, Homo sapien
ccctgtagtgataggtttctcttct

SEQ ID NO: 3880672 - DNA, 25 bp, Homo sapien
gacttagatgttccctgtagtgata

SEQ ID NO: 3880673 - DNA, 25 bp, Homo sapien
tataatttgagtataggtaccactg

SEQ ID NO: 3880674 - DNA, 25 bp, Homo sapien
ttataatttgagtataggtaccact

SEQ ID NO: 3880675 - DNA, 25 bp, Homo sapien
taatttgagtataggtaccactgaa

SEQ ID NO: 3880676 - DNA, 25 bp, Homo sapien
ataatttgagtataggtaccactga

SEQ ID NO: 3880677 - DNA, 25 bp, Homo sapien
gacttgtgacactctgtttccacag

SEQ ID NO: 3880678 - DNA, 25 bp, Homo sapien
cagggtaagtcatgctggccagggt

SEQ ID NO: 3880679 - DNA, 25 bp, Homo sapien
cctttcttaagcccttgctaaccat

SEQ ID NO: 3880680 - DNA, 25 bp, Homo sapien
tgtgtctgattgttaccagccattt

SEQ ID NO: 3880681 - DNA, 25 bp, Homo sapien
gggcctgcacaggggcactctctgt

SEQ ID NO: 3880682 - DNA, 25 bp, Homo sapien
caactttcgaaacttatatttgatc

SEQ ID NO: 3880683 - DNA, 25 bp, Homo sapien
gcctgcacaggggcactctctgtga

SEQ ID NO: 3880684 - DNA, 25 bp, Homo sapien
cctcttcaactttcgaaacttatat

SEQ ID NO: 3880685 - DNA, 25 bp, Homo sapien
tagaactgtgggcatctgcactgtg

SEQ ID NO: 3880686 - DNA, 25 bp, Homo sapien
ctgtgggcatctgcactgtgtccat

SEQ ID NO: 3880687 - DNA, 25 bp, Homo sapien
ttcatttagaactgtgggcatctgc

SEQ ID NO: 3880688 - DNA, 25 bp, Homo sapien
cttcatttagaactgtgggcatctg

SEQ ID NO: 3880689 - DNA, 25 bp, Homo sapien
ctacagctcttcaatagaacctgga

SEQ ID NO: 3880690 - DNA, 25 bp, Homo sapien
tacagctcttcaatagaacctggaa

SEQ ID NO: 3880691 - DNA, 25 bp, Homo sapien
gacagcatataggtaattccccatg

SEQ ID NO: 3880692 - DNA, 25 bp, Homo sapien
ctgcctttgttagtagcactcagac

SEQ ID NO: 3880693 - DNA, 25 bp, Homo sapien
tgttagtagcactcagacagcatat

SEQ ID NO: 3880694 - DNA, 25 bp, Homo sapien
cagacagcatataggtaattcccca

SEQ ID NO: 3880695 - DNA, 25 bp, Homo sapien
acagtttaagacagctactttttat

SEQ ID NO: 3880696 - DNA, 25 bp, Homo sapien
tacagtttaagacagctacttttta

SEQ ID NO: 3880697 - DNA, 25 bp, Homo sapien
cagtttaagacagctactttttatt

SEQ ID NO: 3880698 - DNA, 25 bp, Homo sapien
ctgcaaaccattcaccttcacaagt

SEQ ID NO: 3880699 - DNA, 25 bp, Homo sapien
tatatccccttcgtctgcaaaccat

SEQ ID NO: 3880700 - DNA, 25 bp, Homo sapien
aaccattcaccttcacaagtccttt

SEQ ID NO: 3880701 - DNA, 25 bp, Homo sapien
cttttatatccccttcgtctgcaaa

SEQ ID NO: 3880702 - DNA, 25 bp, Homo sapien
gtctttgtgccagcttcagagggag

SEQ ID NO: 3880703 - DNA, 25 bp, Homo sapien
ggttagaaggccaaagattgaagtc

SEQ ID NO: 3880704 - DNA, 25 bp, Homo sapien
ttttcccttggtgtgttgctgatac

SEQ ID NO: 3880705 - DNA, 25 bp, Homo sapien
gactggttcaaactggctctgactg

SEQ ID NO: 3880706 - DNA, 25 bp, Homo sapien
gagaatagataatacagggatgctt

SEQ ID NO: 3880707 - DNA, 25 bp, Homo sapien
gataatacagggatgctttttgatt

SEQ ID NO: 3880708 - DNA, 25 bp, Homo sapien
tagcagtatgagaatagataataca

SEQ ID NO: 3880709 - DNA, 25 bp, Homo sapien
ctttgttagcagtatgagaatagat

SEQ ID NO: 3880710 - DNA, 25 bp, Homo sapien
catcagagtggcagaattggcctct

SEQ ID NO: 3880711 - DNA, 25 bp, Homo sapien
tcttttatgactatttccaatgtta

SEQ ID NO: 3880712 - DNA, 25 bp, Homo sapien
tgtgaggtcgccttcttttatgact

SEQ ID NO: 3880713 - DNA, 25 bp, Homo sapien
agtggcagaattggcctctgagaat

SEQ ID NO: 3880714 - DNA, 25 bp, Homo sapien
gacttcatgtctttaggtttggaca

SEQ ID NO: 3880715 - DNA, 25 bp, Homo sapien
ggtgccaggttattgacttcatgtc

SEQ ID NO: 3880716 - DNA, 25 bp, Homo sapien
tccttttcgagcatctgatggtgcc

SEQ ID NO: 3880717 - DNA, 25 bp, Homo sapien
ggattattccgaagaaccacgatca

SEQ ID NO: 3880718 - DNA, 25 bp, Homo sapien
taaaacagtatattggaccaaggag

SEQ ID NO: 3880719 - DNA, 25 bp, Homo sapien
tctcaagtgcaaagaagtggcgtga

SEQ ID NO: 3880720 - DNA, 25 bp, Homo sapien
caacagatggtgactagcatcagag

SEQ ID NO: 3880721 - DNA, 25 bp, Homo sapien
tatttgatggatacctagtgatccc

SEQ ID NO: 3880722 - DNA, 25 bp, Homo sapien
aaagcattcagggtggctaaccact

SEQ ID NO: 3880723 - DNA, 25 bp, Homo sapien
gcagccccactcttgtaagaggtat

SEQ ID NO: 3880724 - DNA, 25 bp, Homo sapien
ggctaaccactatttcagatatggc

SEQ ID NO: 3880725 - DNA, 25 bp, Homo sapien
tgtaaatcgcaaatattccactctt

SEQ ID NO: 3880726 - DNA, 25 bp, Homo sapien
gtctgggggcctgtcgtttctgtca

SEQ ID NO: 3880727 - DNA, 25 bp, Homo sapien
taagtaggaggtcgttctgttcgac

SEQ ID NO: 3880728 - DNA, 25 bp, Homo sapien
tcgactctggttggaatcattctgt

SEQ ID NO: 3880729 - DNA, 25 bp, Homo sapien
aagtagaatcctaaatatgggcagc

SEQ ID NO: 3880730 - DNA, 25 bp, Homo sapien
tcagggccttttggcgtgctgcaaa

SEQ ID NO: 3880731 - DNA, 25 bp, Homo sapien
cttttggcgtgctgcaaatgtttac

SEQ ID NO: 3880732 - DNA, 25 bp, Homo sapien
gggccttttggcgtgctgcaaatgt

SEQ ID NO: 3880733 - DNA, 25 bp, Homo sapien
ggccttttggcgtgctgcaaatgtt

SEQ ID NO: 3880734 - DNA, 25 bp, Homo sapien
taaaagcacatagttaaagcttcca

SEQ ID NO: 3880735 - DNA, 25 bp, Homo sapien
acatagttaaagcttccagctgcaa

SEQ ID NO: 3880736 - DNA, 25 bp, Homo sapien
gcacatagttaaagcttccagctgc

SEQ ID NO: 3880737 - DNA, 25 bp, Homo sapien
aataggtaaaagcacatagttaaag

SEQ ID NO: 3880738 - DNA, 25 bp, Homo sapien
aaaatgcagccgcatgtgccgactg

SEQ ID NO: 3880739 - DNA, 25 bp, Homo sapien
tgtcttacacacagctgcgtgcgag

SEQ ID NO: 3880740 - DNA, 25 bp, Homo sapien
taactgcctgttgtacgtaacctct

SEQ ID NO: 3880741 - DNA, 25 bp, Homo sapien
gctggtatgagccattaactgcctg

SEQ ID NO: 3880742 - DNA, 25 bp, Homo sapien
aacatcccacaggacgaagaagcgc

SEQ ID NO: 3880743 - DNA, 25 bp, Homo sapien
aatcacttggaatccaaagctgcca

SEQ ID NO: 3880744 - DNA, 25 bp, Homo sapien
tgacagcagcttctaaaacatccca

SEQ ID NO: 3880745 - DNA, 25 bp, Homo sapien
gaacagatcttggtaatgtgacagc

SEQ ID NO: 3880746 - DNA, 25 bp, Homo sapien
ctgaggatgtgttcatgggaagaga

SEQ ID NO: 3880747 - DNA, 25 bp, Homo sapien
gaagagaaaaatctccctgttgctc

SEQ ID NO: 3880748 - DNA, 25 bp, Homo sapien
tgaggatgtgttcatgggaagagaa

SEQ ID NO: 3880749 - DNA, 25 bp, Homo sapien
tcatgggaagagaaaaatctccctg

SEQ ID NO: 3880750 - DNA, 25 bp, Homo sapien
gagcagtgacaagcaggaatatgac

SEQ ID NO: 3880751 - DNA, 25 bp, Homo sapien
cagctcgggagacactctatttgca

SEQ ID NO: 3880752 - DNA, 25 bp, Homo sapien
gaatatgacattcagtactgctgag

SEQ ID NO: 3880753 - DNA, 25 bp, Homo sapien
gctcgctttcatctgcagctcggga

SEQ ID NO: 3880754 - DNA, 25 bp, Homo sapien
gaagactaggctttgcaaagatctc

SEQ ID NO: 3880755 - DNA, 25 bp, Homo sapien
ttgcaaagatctccagcaggatggg

SEQ ID NO: 3880756 - DNA, 25 bp, Homo sapien
aggaaggaagactaggctttgcaaa

SEQ ID NO: 3880757 - DNA, 25 bp, Homo sapien
gaaggaagactaggctttgcaaaga

SEQ ID NO: 3880758 - DNA, 25 bp, Homo sapien
tatattcaaggcaaacatccttggc

SEQ ID NO: 3880759 - DNA, 25 bp, Homo sapien
tattcaaggcaaacatccttggcat

SEQ ID NO: 3880760 - DNA, 25 bp, Homo sapien
tgtccaggacacattgtcctcatcc

SEQ ID NO: 3880761 - DNA, 25 bp, Homo sapien
cctcatcctcaacacaatgaacctg

SEQ ID NO: 3880762 - DNA, 25 bp, Homo sapien
gtagcaagtggtccccatagagtca

SEQ ID NO: 3880763 - DNA, 25 bp, Homo sapien
aatgtagcaagtggtccccatagag

SEQ ID NO: 3880764 - DNA, 25 bp, Homo sapien
gaaatgtagcaagtggtccccatag

SEQ ID NO: 3880765 - DNA, 25 bp, Homo sapien
tggaaatgtagcaagtggtccccat

SEQ ID NO: 3880766 - DNA, 25 bp, Homo sapien
caagccaagtggaattgaagatgga

SEQ ID NO: 3880767 - DNA, 25 bp, Homo sapien
tgttagactattaccaagactggca

SEQ ID NO: 3880768 - DNA, 25 bp, Homo sapien
caatagcttcactctgtacagagcc

SEQ ID NO: 3880769 - DNA, 25 bp, Homo sapien
tagccaggaactttaagcaacctcc

SEQ ID NO: 3880770 - DNA, 25 bp, Homo sapien
cctcctggacttgtgcaagcacagg

SEQ ID NO: 3880771 - DNA, 25 bp, Homo sapien
ctggacttgtgcaagcacagggaga

SEQ ID NO: 3880772 - DNA, 25 bp, Homo sapien
cttgaccctcctggacttgtgcaag

SEQ ID NO: 3880773 - DNA, 25 bp, Homo sapien
gaccctcctggacttgtgcaagcac

SEQ ID NO: 3880774 - DNA, 25 bp, Homo sapien
tctgaagttcgattctttaggctgc

SEQ ID NO: 3880775 - DNA, 25 bp, Homo sapien
cctccaactaggctgatttatggac

SEQ ID NO: 3880776 - DNA, 25 bp, Homo sapien
cagtgcacagtctggagtcttggct

SEQ ID NO: 3880777 - DNA, 25 bp, Homo sapien
gatgaaagctcattccaggtgctgg

SEQ ID NO: 3880778 - DNA, 25 bp, Homo sapien
gatgttcggcaagggacagcattcc

SEQ ID NO: 3880779 - DNA, 25 bp, Homo sapien
tccactagggctcctgtgacagtca

SEQ ID NO: 3880780 - DNA, 25 bp, Homo sapien
tctcatcagcacacagatgttcggc

SEQ ID NO: 3880781 - DNA, 25 bp, Homo sapien
tggcgtcccgctggaactgtgtgct

SEQ ID NO: 3880782 - DNA, 25 bp, Homo sapien
gctaggtgcagaaactgtccaccac

SEQ ID NO: 3880783 - DNA, 25 bp, Homo sapien
gagctaggtgcagaaactgtccacc

SEQ ID NO: 3880784 - DNA, 25 bp, Homo sapien
agctaggtgcagaaactgtccacca

SEQ ID NO: 3880785 - DNA, 25 bp, Homo sapien
ggagctaggtgcagaaactgtccac

SEQ ID NO: 3880786 - DNA, 25 bp, Homo sapien
aataatccataagagttttctggta

SEQ ID NO: 3880787 - DNA, 25 bp, Homo sapien
caagcccttgtggagtgtccctttc

SEQ ID NO: 3880788 - DNA, 25 bp, Homo sapien
catataccctcatatccggtaagca

SEQ ID NO: 3880789 - DNA, 25 bp, Homo sapien
catggaagtagacatataccctcat

SEQ ID NO: 3880790 - DNA, 25 bp, Homo sapien
ccttctgttgaagttttctagctcc

SEQ ID NO: 3880791 - DNA, 25 bp, Homo sapien
gtagtagtcttgtgtcccgaatctc

SEQ ID NO: 3880792 - DNA, 25 bp, Homo sapien
ctagtagtagtaaaagaagcaggca

SEQ ID NO: 3880793 - DNA, 25 bp, Homo sapien
tcatcatgctctacatttctggaag

SEQ ID NO: 3880794 - DNA, 25 bp, Homo sapien
caattgcaagttgctcctcagtgct

SEQ ID NO: 3880795 - DNA, 25 bp, Homo sapien
aattgcaagttgctcctcagtgcta

SEQ ID NO: 3880796 - DNA, 25 bp, Homo sapien
tgcaagttgctcctcagtgctagaa

SEQ ID NO: 3880797 - DNA, 25 bp, Homo sapien
attgcaagttgctcctcagtgctag

SEQ ID NO: 3880798 - DNA, 25 bp, Homo sapien
tctggctgaaatacttccatggcag

SEQ ID NO: 3880799 - DNA, 25 bp, Homo sapien
aaaatccttaaactgcctgtatgcc

SEQ ID NO: 3880800 - DNA, 25 bp, Homo sapien
aatccttaaactgcctgtatgcccc

SEQ ID NO: 3880801 - DNA, 25 bp, Homo sapien
aaatccttaaactgcctgtatgccc

SEQ ID NO: 3880802 - DNA, 25 bp, Homo sapien
taatcttcagagataagtactgttc

SEQ ID NO: 3880803 - DNA, 25 bp, Homo sapien
cttgctgtcagccaagtaattaaag

SEQ ID NO: 3880804 - DNA, 25 bp, Homo sapien
tcagtgcataatgagttcgaattgt

SEQ ID NO: 3880805 - DNA, 25 bp, Homo sapien
tcagagataagtactgttcagtgca

SEQ ID NO: 3880806 - DNA, 25 bp, Homo sapien
cgagtcatgggccccttaaaatctt

SEQ ID NO: 3880807 - DNA, 25 bp, Homo sapien
aatcttcacttaggtccccatggat

SEQ ID NO: 3880808 - DNA, 25 bp, Homo sapien
cacttaggtccccatggatgccaga

SEQ ID NO: 3880809 - DNA, 25 bp, Homo sapien
cttaggtccccatggatgccagaga

SEQ ID NO: 3880810 - DNA, 25 bp, Homo sapien
atgcactgacacaggctttgtgaag

SEQ ID NO: 3880811 - DNA, 25 bp, Homo sapien
gaaggctgactccatgtcttgttct

SEQ ID NO: 3880812 - DNA, 25 bp, Homo sapien
agatgcactgacacaggctttgtga

SEQ ID NO: 3880813 - DNA, 25 bp, Homo sapien
aggctgactccatgtcttgttctcc

SEQ ID NO: 3880814 - DNA, 25 bp, Homo sapien
gaactttctgaaatgtcgtgggtgt

SEQ ID NO: 3880815 - DNA, 25 bp, Homo sapien
ggtgtggtgctcctttactggctct

SEQ ID NO: 3880816 - DNA, 25 bp, Homo sapien
ttagttccagtgtgtataaaagtga

SEQ ID NO: 3880817 - DNA, 25 bp, Homo sapien
actttctgaaatgtcgtgggtgtgg

SEQ ID NO: 3880818 - DNA, 25 bp, Homo sapien
ggacctggcgtgcatttcttggaca

SEQ ID NO: 3880819 - DNA, 25 bp, Homo sapien
tgtgcgattagtattgatgcctgtc

SEQ ID NO: 3880820 - DNA, 25 bp, Homo sapien
gttgattctgtgaaagaccaaagac

SEQ ID NO: 3880821 - DNA, 25 bp, Homo sapien
ggttatctggtaatcaacactgctc

SEQ ID NO: 3880822 - DNA, 25 bp, Homo sapien
gccaggtaaccattcttatttgtca

SEQ ID NO: 3880823 - DNA, 25 bp, Homo sapien
agcccatccaaatgctctgactcag

SEQ ID NO: 3880824 - DNA, 25 bp, Homo sapien
tcttatttgtcatgggatcaaattc

SEQ ID NO: 3880825 - DNA, 25 bp, Homo sapien
aattctaaccctcttagagtgagcc

SEQ ID NO: 3880826 - DNA, 25 bp, Homo sapien
gacaaattcccacacctttgacaaa

SEQ ID NO: 3880827 - DNA, 25 bp, Homo sapien
caaattcccacacctttgacaaatt

SEQ ID NO: 3880828 - DNA, 25 bp, Homo sapien
ttgacaaattcccacacctttgaca

SEQ ID NO: 3880829 - DNA, 25 bp, Homo sapien
ctttgacaaattcccacacctttga

SEQ ID NO: 3880830 - DNA, 25 bp, Homo sapien
gcttctcaagctgctgagtgacagt

SEQ ID NO: 3880831 - DNA, 25 bp, Homo sapien
gaggtgtggcactccctgtgccttt

SEQ ID NO: 3880832 - DNA, 25 bp, Homo sapien
gtgaacccttgtgcagggaggtgtg

SEQ ID NO: 3880833 - DNA, 25 bp, Homo sapien
tctcaagctgctgagtgacagtgac

SEQ ID NO: 3880834 - DNA, 25 bp, Homo sapien
aaacaggacttctctggtttgtgaa

SEQ ID NO: 3880835 - DNA, 25 bp, Homo sapien
aacaggacttctctggtttgtgaac

SEQ ID NO: 3880836 - DNA, 25 bp, Homo sapien
tgtgctcaaagttctgggcaggctt

SEQ ID NO: 3880837 - DNA, 25 bp, Homo sapien
atttatcaccgctcacattttcctc

SEQ ID NO: 3880838 - DNA, 25 bp, Homo sapien
gtgtcagtttagagatcttcccaga

SEQ ID NO: 3880839 - DNA, 25 bp, Homo sapien
cccagatacatctaaatgtggacat

SEQ ID NO: 3880840 - DNA, 25 bp, Homo sapien
tgtggcagaaagagattagctccaa

SEQ ID NO: 3880841 - DNA, 25 bp, Homo sapien
gtaaatcttccgcttgcattccttc

SEQ ID NO: 3880842 - DNA, 25 bp, Homo sapien
ctggtaaatcttccgcttgcattcc

SEQ ID NO: 3880843 - DNA, 25 bp, Homo sapien
cttactggtaaatcttccgcttgca

SEQ ID NO: 3880844 - DNA, 25 bp, Homo sapien
ttcttactggtaaatcttccgcttg

SEQ ID NO: 3880845 - DNA, 25 bp, Homo sapien
ggttctgattctgaagcattaacat

SEQ ID NO: 3880846 - DNA, 25 bp, Homo sapien
ttctgattctgaagcattaacattc

SEQ ID NO: 3880847 - DNA, 25 bp, Homo sapien
ctgattctgaagcattaacattctt

SEQ ID NO: 3880848 - DNA, 25 bp, Homo sapien
caggttctgattctgaagcattaac

SEQ ID NO: 3880849 - DNA, 25 bp, Homo sapien
gcatctctacccgaaaatagtcgtt

SEQ ID NO: 3880850 - DNA, 25 bp, Homo sapien
ccttgcatagcatctctacccgaaa

SEQ ID NO: 3880851 - DNA, 25 bp, Homo sapien
agagaacatccccttgcatagcatc

SEQ ID NO: 3880852 - DNA, 25 bp, Homo sapien
aatagtcgttcggtctccattttgt

SEQ ID NO: 3880853 - DNA, 25 bp, Homo sapien
tgtaattgggcatgacccagcaaaa

SEQ ID NO: 3880854 - DNA, 25 bp, Homo sapien
atattctgtaattgggcatgaccca

SEQ ID NO: 3880855 - DNA, 25 bp, Homo sapien
tctgtaattgggcatgacccagcaa

SEQ ID NO: 3880856 - DNA, 25 bp, Homo sapien
aatgttccactctgaagttttatca

SEQ ID NO: 3880857 - DNA, 25 bp, Homo sapien
ggaagcattgcagataccaccagca

SEQ ID NO: 3880858 - DNA, 25 bp, Homo sapien
ccaaggaaacgtagaagggtggatg

SEQ ID NO: 3880859 - DNA, 25 bp, Homo sapien
tttcttgattctctcagggtgccca

SEQ ID NO: 3880860 - DNA, 25 bp, Homo sapien
taacttgaatagtgttaaccaagga

SEQ ID NO: 3880861 - DNA, 25 bp, Homo sapien
tattggtgtaaggaaatggcgccag

SEQ ID NO: 3880862 - DNA, 25 bp, Homo sapien
tggtaacccaaatctataggaacaa

SEQ ID NO: 3880863 - DNA, 25 bp, Homo sapien
aagggaaatataacaagctctatga

SEQ ID NO: 3880864 - DNA, 25 bp, Homo sapien
taacaccactgaattatgcacaata

SEQ ID NO: 3880865 - DNA, 25 bp, Homo sapien
tccccaacgcgataaaggacatctg

SEQ ID NO: 3880866 - DNA, 25 bp, Homo sapien
ggaacaagaccaagaaatccactat

SEQ ID NO: 3880867 - DNA, 25 bp, Homo sapien
caaaatcaactggatgcagattgga

SEQ ID NO: 3880868 - DNA, 25 bp, Homo sapien
cattacagttaaagtgttagcccag

SEQ ID NO: 3880869 - DNA, 25 bp, Homo sapien
ccacagctgccatggaagctcaggt

SEQ ID NO: 3880870 - DNA, 25 bp, Homo sapien
tgccatggaagctcaggtctctgga

SEQ ID NO: 3880871 - DNA, 25 bp, Homo sapien
ttatgccattatgctgctgccactg

SEQ ID NO: 3880872 - DNA, 25 bp, Homo sapien
ggtctctggatgacactggccttgg

SEQ ID NO: 3880873 - DNA, 25 bp, Homo sapien
cttcctttggggacattgccttcat

SEQ ID NO: 3880874 - DNA, 25 bp, Homo sapien
ctgatgcttcctttggggacattgc

SEQ ID NO: 3880875 - DNA, 25 bp, Homo sapien
gatgcttcctttggggacattgcct

SEQ ID NO: 3880876 - DNA, 25 bp, Homo sapien
ctggctgatgcttcctttggggaca

SEQ ID NO: 3880877 - DNA, 25 bp, Homo sapien
ctcattgttgggatggttccctttc

SEQ ID NO: 3880878 - DNA, 25 bp, Homo sapien
atcactgcgtgggaaagatctgaca

SEQ ID NO: 3880879 - DNA, 25 bp, Homo sapien
ttcagcctcgtggtaagtacaacac

SEQ ID NO: 3880880 - DNA, 25 bp, Homo sapien
aacagtggtttgcaggatcactgcg

SEQ ID NO: 3880881 - DNA, 25 bp, Homo sapien
tgctgatttctggtgcgggcaactc

SEQ ID NO: 3880882 - DNA, 25 bp, Homo sapien
cctcaagctgcatttctaggatgat

SEQ ID NO: 3880883 - DNA, 25 bp, Homo sapien
gagggcctgaaaagttgtatgctgc

SEQ ID NO: 3880884 - DNA, 25 bp, Homo sapien
cacaagccgaataaaactcctcaag

SEQ ID NO: 3880885 - DNA, 25 bp, Homo sapien
tccactggggtgcttattccattta

SEQ ID NO: 3880886 - DNA, 25 bp, Homo sapien
ttgtgtgtcgaagggctttccactg

SEQ ID NO: 3880887 - DNA, 25 bp, Homo sapien
ttcccccgtgtgctttattgtcctc

SEQ ID NO: 3880888 - DNA, 25 bp, Homo sapien
cctccccaaagtggcttgtgtgtcg

SEQ ID NO: 3880889 - DNA, 25 bp, Homo sapien
gagagagttggttcaaatgccactg

SEQ ID NO: 3880890 - DNA, 25 bp, Homo sapien
tgtccctgagatcacagctccaagt

SEQ ID NO: 3880891 - DNA, 25 bp, Homo sapien
aacacgccgctatttagctgggcac

SEQ ID NO: 3880892 - DNA, 25 bp, Homo sapien
gctccaagttcctctaggctatgca

SEQ ID NO: 3880893 - DNA, 25 bp, Homo sapien
gagaaacagcgtgatggctctcagc

SEQ ID NO: 3880894 - DNA, 25 bp, Homo sapien
tgtattccatagatctttccttttg

SEQ ID NO: 3880895 - DNA, 25 bp, Homo sapien
aggagaaacagcgtgatggctctca

SEQ ID NO: 3880896 - DNA, 25 bp, Homo sapien
gaacggtgtccaatgacttcgaata

SEQ ID NO: 3880897 - DNA, 25 bp, Homo sapien
ttttgtacctctgccgtgagtctgg

SEQ ID NO: 3880898 - DNA, 25 bp, Homo sapien
aatattttgtacctctgccgtgagt

SEQ ID NO: 3880899 - DNA, 25 bp, Homo sapien
tattttgtacctctgccgtgagtct

SEQ ID NO: 3880900 - DNA, 25 bp, Homo sapien
caatattttgtacctctgccgtgag

SEQ ID NO: 3880901 - DNA, 25 bp, Homo sapien
tacgtactgtgttatgtgccagaca

SEQ ID NO: 3880902 - DNA, 25 bp, Homo sapien
tatttactggttactacatgctggg

SEQ ID NO: 3880903 - DNA, 25 bp, Homo sapien
tgatagatcctgtgctttgccccac

SEQ ID NO: 3880904 - DNA, 25 bp, Homo sapien
cccacaggtcaaggcactaatatag

SEQ ID NO: 3880905 - DNA, 25 bp, Homo sapien
gaacactggatctcacataagtcat

SEQ ID NO: 3880906 - DNA, 25 bp, Homo sapien
aacaggatagttataagatggctca

SEQ ID NO: 3880907 - DNA, 25 bp, Homo sapien
aaacttctattgtgttgggccactg

SEQ ID NO: 3880908 - DNA, 25 bp, Homo sapien
gacagattatcaaggcatattccaa

SEQ ID NO: 3880909 - DNA, 25 bp, Homo sapien
tgaaaatgttagacacaggcagcgt

SEQ ID NO: 3880910 - DNA, 25 bp, Homo sapien
gatgtctgcgttcagtgagtctatc

SEQ ID NO: 3880911 - DNA, 25 bp, Homo sapien
cagcgtggagtatcagccaggcaag

SEQ ID NO: 3880912 - DNA, 25 bp, Homo sapien
ccttgattgattgcagagttgatga

SEQ ID NO: 3880913 - DNA, 25 bp, Homo sapien
cttgatgttaagagctatatccttc

SEQ ID NO: 3880914 - DNA, 25 bp, Homo sapien
gtcttcccttgacatattgatggcc

SEQ ID NO: 3880915 - DNA, 25 bp, Homo sapien
tcttcccttgacatattgatggccc

SEQ ID NO: 3880916 - DNA, 25 bp, Homo sapien
gctatatccttcagatatgtcttcc

SEQ ID NO: 3880917 - DNA, 25 bp, Homo sapien
ttaatttgtgttgccgaatgtggct

SEQ ID NO: 3880918 - DNA, 25 bp, Homo sapien
gctcagcgtgggcaatgtctacgct

SEQ ID NO: 3880919 - DNA, 25 bp, Homo sapien
gcaatgtctacgctgttaatttgtg

SEQ ID NO: 3880920 - DNA, 25 bp, Homo sapien
ccgaatgtggcttagagctgggcat

SEQ ID NO: 3880921 - DNA, 25 bp, Homo sapien
cccaagccatcaaagtagtacattc

SEQ ID NO: 3880922 - DNA, 25 bp, Homo sapien
gaatcctgacaaattcaagccagcc

SEQ ID NO: 3880923 - DNA, 25 bp, Homo sapien
cccactgtcagcagtgtctgtctga

SEQ ID NO: 3880924 - DNA, 25 bp, Homo sapien
tacattctagggacagataacacct

SEQ ID NO: 3880925 - DNA, 25 bp, Homo sapien
tgacagcctggttgatgtgacatcc

SEQ ID NO: 3880926 - DNA, 25 bp, Homo sapien
aagggattcgcatcccatctcggca

SEQ ID NO: 3880927 - DNA, 25 bp, Homo sapien
tctcggcatgcactttggaatccag

SEQ ID NO: 3880928 - DNA, 25 bp, Homo sapien
tgaggccagagcacttgaccactgt

SEQ ID NO: 3880929 - DNA, 25 bp, Homo sapien
ttcttcttctaagatgacaagcctc

SEQ ID NO: 3880930 - DNA, 25 bp, Homo sapien
ccccttcttcttctaagatgacaag

SEQ ID NO: 3880931 - DNA, 25 bp, Homo sapien
ccttcttcttctaagatgacaagcc

SEQ ID NO: 3880932 - DNA, 25 bp, Homo sapien
cttcttctaagatgacaagcctcat

SEQ ID NO: 3880933 - DNA, 25 bp, Homo sapien
ggtctcagtgaggttccatccaagc

SEQ ID NO: 3880934 - DNA, 25 bp, Homo sapien
tttgaggccgtggaacaatgtcacc

SEQ ID NO: 3880935 - DNA, 25 bp, Homo sapien
ttaggtcccaagaagggtctcagtg

SEQ ID NO: 3880936 - DNA, 25 bp, Homo sapien
gactcaagtccgattagcgctaaga

SEQ ID NO: 3880937 - DNA, 25 bp, Homo sapien
gccacacatatatccttgtctttat

SEQ ID NO: 3880938 - DNA, 25 bp, Homo sapien
aaaagcacttgtgaactgaccacag

SEQ ID NO: 3880939 - DNA, 25 bp, Homo sapien
tcatatccaatctagccacacatat

SEQ ID NO: 3880940 - DNA, 25 bp, Homo sapien
gaaccatttgtatcatgcgcaggaa

SEQ ID NO: 3880941 - DNA, 25 bp, Homo sapien
aacaataatggtgtttagtacttgc

SEQ ID NO: 3880942 - DNA, 25 bp, Homo sapien
tagtacttgctacttgcaagggcag

SEQ ID NO: 3880943 - DNA, 25 bp, Homo sapien
ggtgtttagtacttgctacttgcaa

SEQ ID NO: 3880944 - DNA, 25 bp, Homo sapien
ttgctacttgcaagggcagcctaaa

SEQ ID NO: 3880945 - DNA, 25 bp, Homo sapien
tgaccacttgcttcttccggttctg

SEQ ID NO: 3880946 - DNA, 25 bp, Homo sapien
tgtagctgatccaatgtgacctttg

SEQ ID NO: 3880947 - DNA, 25 bp, Homo sapien
cctgctgtccatcattgtagctgat

SEQ ID NO: 3880948 - DNA, 25 bp, Homo sapien
acaggtaatgcccagcgtggacaca

SEQ ID NO: 3880949 - DNA, 25 bp, Homo sapien
tggagacttccacttcatacttgta

SEQ ID NO: 3880950 - DNA, 25 bp, Homo sapien
gaggcttcaaagtaccagtggattt

SEQ ID NO: 3880951 - DNA, 25 bp, Homo sapien
caaatgacgatggtctgggcaataa

SEQ ID NO: 3880952 - DNA, 25 bp, Homo sapien
caataatctgtagtggaagtatgga

SEQ ID NO: 3880953 - DNA, 25 bp, Homo sapien
aaccttctccaaagcacttatgcag

SEQ ID NO: 3880954 - DNA, 25 bp, Homo sapien
taaccttctccaaagcacttatgca

SEQ ID NO: 3880955 - DNA, 25 bp, Homo sapien
ttaaccttctccaaagcacttatgc

SEQ ID NO: 3880956 - DNA, 25 bp, Homo sapien
gagcatgtctcatgatattccaggg

SEQ ID NO: 3880957 - DNA, 25 bp, Homo sapien
cctcagagcatgtctcatgatattc

SEQ ID NO: 3880958 - DNA, 25 bp, Homo sapien
atgtctcatgatattccagggcctc

SEQ ID NO: 3880959 - DNA, 25 bp, Homo sapien
tcagagcatgtctcatgatattcca

SEQ ID NO: 3880960 - DNA, 25 bp, Homo sapien
aatcccaggtcacaaggtgggagct

SEQ ID NO: 3880961 - DNA, 25 bp, Homo sapien
caatcccaggtcacaaggtgggagc

SEQ ID NO: 3880962 - DNA, 25 bp, Homo sapien
cttgcaatcccaggtcacaaggtgg

SEQ ID NO: 3880963 - DNA, 25 bp, Homo sapien
tgcaatcccaggtcacaaggtggga

SEQ ID NO: 3880964 - DNA, 25 bp, Homo sapien
ctggtatgaaaccacggcaccagct

SEQ ID NO: 3880965 - DNA, 25 bp, Homo sapien
gtaattgtgccaagctaccgctgcc

SEQ ID NO: 3880966 - DNA, 25 bp, Homo sapien
cagcttccagtccttcattaagtga

SEQ ID NO: 3880967 - DNA, 25 bp, Homo sapien
gcttgtgatggactagcctagggta

SEQ ID NO: 3880968 - DNA, 25 bp, Homo sapien
aagtttttatcagaggggcagagga

SEQ ID NO: 3880969 - DNA, 25 bp, Homo sapien
ggaagggctacttgatgtcggacac

SEQ ID NO: 3880970 - DNA, 25 bp, Homo sapien
actctggaagggctacttgatgtcg

SEQ ID NO: 3880971 - DNA, 25 bp, Homo sapien
acacagacgtcagcctgagaactgc

SEQ ID NO: 3880972 - DNA, 25 bp, Homo sapien
cagcaaaggaactatgggacgatcc

SEQ ID NO: 3880973 - DNA, 25 bp, Homo sapien
aggccagcaaaggaactatgggacg

SEQ ID NO: 3880974 - DNA, 25 bp, Homo sapien
gcaaaggaactatgggacgatccat

SEQ ID NO: 3880975 - DNA, 25 bp, Homo sapien
gccagcaaaggaactatgggacgat

SEQ ID NO: 3880976 - DNA, 25 bp, Homo sapien
ggcaatcctgataaagaaacaagca

SEQ ID NO: 3880977 - DNA, 25 bp, Homo sapien
acaagcaggctcttgaaagtttctg

SEQ ID NO: 3880978 - DNA, 25 bp, Homo sapien
caagggatgaagcttgacgtgacag

SEQ ID NO: 3880979 - DNA, 25 bp, Homo sapien
tctgacaggtgtcatgggcgcagcc

SEQ ID NO: 3880980 - DNA, 25 bp, Homo sapien
cttcttaggtgtacataagtacacc

SEQ ID NO: 3880981 - DNA, 25 bp, Homo sapien
tatccctccacagaggaatctactg

SEQ ID NO: 3880982 - DNA, 25 bp, Homo sapien
cctccacagaggaatctactgtcct

SEQ ID NO: 3880983 - DNA, 25 bp, Homo sapien
tcttaggtgtccttccctcatttat

SEQ ID NO: 3880984 - DNA, 25 bp, Homo sapien
aatgtaatccagcatataaacagag

SEQ ID NO: 3880985 - DNA, 25 bp, Homo sapien
gcatcattctgataccaaagccggg

SEQ ID NO: 3880986 - DNA, 25 bp, Homo sapien
ttcaatatacgcaaatcaataaatg

SEQ ID NO: 3880987 - DNA, 25 bp, Homo sapien
cagcatataaacagagccaaagaca

SEQ ID NO: 3880988 - DNA, 25 bp, Homo sapien
atagattagaggcagtgtcaccaga

SEQ ID NO: 3880989 - DNA, 25 bp, Homo sapien
gtgtcaccagaacagagccacacac

SEQ ID NO: 3880990 - DNA, 25 bp, Homo sapien
gtaactgaggcccatagattagagg

SEQ ID NO: 3880991 - DNA, 25 bp, Homo sapien
agtgtcaccagaacagagccacaca

SEQ ID NO: 3880992 - DNA, 25 bp, Homo sapien
ttgactttccaagtatagctttcca

SEQ ID NO: 3880993 - DNA, 25 bp, Homo sapien
gcataatcatattcctgtaaattta

SEQ ID NO: 3880994 - DNA, 25 bp, Homo sapien
gctccagcaggtatagctccagcag

SEQ ID NO: 3880995 - DNA, 25 bp, Homo sapien
tctgtttgcattgactttccaagta

SEQ ID NO: 3880996 - DNA, 25 bp, Homo sapien
ggattctggtatccctgataatgag

SEQ ID NO: 3880997 - DNA, 25 bp, Homo sapien
cctgggattctggtatccctgataa

SEQ ID NO: 3880998 - DNA, 25 bp, Homo sapien
ctggtatccctgataatgagtgagt

SEQ ID NO: 3880999 - DNA, 25 bp, Homo sapien
ttctggtatccctgataatgagtga

SEQ ID NO: 3881000 - DNA, 25 bp, Homo sapien
gttaaagttgttcttccctgccaga

SEQ ID NO: 3881001 - DNA, 25 bp, Homo sapien
tgttgcaggagaactccagctacac

SEQ ID NO: 3881002 - DNA, 25 bp, Homo sapien
tgtatatagcaatacagctgagctt

SEQ ID NO: 3881003 - DNA, 25 bp, Homo sapien
aatcttttaacttggctgttgcagg

SEQ ID NO: 3881004 - DNA, 25 bp, Homo sapien
cagctgccggtgttgcttgcagttt

SEQ ID NO: 3881005 - DNA, 25 bp, Homo sapien
ccagaaacagctgccggtgttgctt

SEQ ID NO: 3881006 - DNA, 25 bp, Homo sapien
aaacagctgccggtgttgcttgcag

SEQ ID NO: 3881007 - DNA, 25 bp, Homo sapien
aaaccagaaacagctgccggtgttg

SEQ ID NO: 3881008 - DNA, 25 bp, Homo sapien
taaagcccatgttgaaaatactgtg

SEQ ID NO: 3881009 - DNA, 25 bp, Homo sapien
taaaatgcacgaagcacctggcagg

SEQ ID NO: 3881010 - DNA, 25 bp, Homo sapien
tgacagtcctaggtcatctgattgg

SEQ ID NO: 3881011 - DNA, 25 bp, Homo sapien
gcattcaatgagacagtcatcaccg

SEQ ID NO: 3881012 - DNA, 25 bp, Homo sapien
acaccactgcagatttcaggctctc

SEQ ID NO: 3881013 - DNA, 25 bp, Homo sapien
cttcctccttgggcctttgcagcag

SEQ ID NO: 3881014 - DNA, 25 bp, Homo sapien
caccactgcagatttcaggctctct

SEQ ID NO: 3881015 - DNA, 25 bp, Homo sapien
tccccaggtagagtcagctctctga

SEQ ID NO: 3881016 - DNA, 25 bp, Homo sapien
agctctctgaatggaaaccctagag

SEQ ID NO: 3881017 - DNA, 25 bp, Homo sapien
tctgaatggaaaccctagagtaact

SEQ ID NO: 3881018 - DNA, 25 bp, Homo sapien
ccaggtagagtcagctctctgaatg

SEQ ID NO: 3881019 - DNA, 25 bp, Homo sapien
aatattatcaggagcagcacccaag

SEQ ID NO: 3881020 - DNA, 25 bp, Homo sapien
gagcaatgcatctcatgaaagtgta

SEQ ID NO: 3881021 - DNA, 25 bp, Homo sapien
tacttgacttgactatgccactgct

SEQ ID NO: 3881022 - DNA, 25 bp, Homo sapien
gacttaagaaggcatcccaaaaaca

SEQ ID NO: 3881023 - DNA, 25 bp, Homo sapien
aaggtgggaagtccagctggtaatg

SEQ ID NO: 3881024 - DNA, 25 bp, Homo sapien
aggtgggaagtccagctggtaatgg

SEQ ID NO: 3881025 - DNA, 25 bp, Homo sapien
ggtgggaagtccagctggtaatggc

SEQ ID NO: 3881026 - DNA, 25 bp, Homo sapien
taaggtgggaagtccagctggtaat

SEQ ID NO: 3881027 - DNA, 25 bp, Homo sapien
tgcaacatgtttcgggcatccagca

SEQ ID NO: 3881028 - DNA, 25 bp, Homo sapien
ccagagttgcaacatgtttcgggca

SEQ ID NO: 3881029 - DNA, 25 bp, Homo sapien
tgtttctgaccccagagttgcaaca

SEQ ID NO: 3881030 - DNA, 25 bp, Homo sapien
catgtttcgggcatccagcaggctt

SEQ ID NO: 3881031 - DNA, 25 bp, Homo sapien
tcttttgccgctggcagatcaagtc

SEQ ID NO: 3881032 - DNA, 25 bp, Homo sapien
ttttgccgctggcagatcaagtccc

SEQ ID NO: 3881033 - DNA, 25 bp, Homo sapien
cttttgccgctggcagatcaagtcc

SEQ ID NO: 3881034 - DNA, 25 bp, Homo sapien
ggcttgaatttcaaggtgaggttca

SEQ ID NO: 3881035 - DNA, 25 bp, Homo sapien
tcagccacatggtatatggcttgaa

SEQ ID NO: 3881036 - DNA, 25 bp, Homo sapien
atggcttgaatttcaaggtgaggtt

SEQ ID NO: 3881037 - DNA, 25 bp, Homo sapien
gcctggtggggtgaactcagccaca

SEQ ID NO: 3881038 - DNA, 25 bp, Homo sapien
taatactgggtgatagggctcagac

SEQ ID NO: 3881039 - DNA, 25 bp, Homo sapien
gaagcaatgggatctcaagcacaaa

SEQ ID NO: 3881040 - DNA, 25 bp, Homo sapien
aaagtgtggcccatgttggactgga

SEQ ID NO: 3881041 - DNA, 25 bp, Homo sapien
aaagggttcctccatgtgccgtcaa

SEQ ID NO: 3881042 - DNA, 25 bp, Homo sapien
aacaactggaagtgggatgcagaga

SEQ ID NO: 3881043 - DNA, 25 bp, Homo sapien
gcagagatgggctttataagggttt

SEQ ID NO: 3881044 - DNA, 25 bp, Homo sapien
agctggcgagtgtgccttgagccca

SEQ ID NO: 3881045 - DNA, 25 bp, Homo sapien
aggtagagctcagggttactgagct

SEQ ID NO: 3881046 - DNA, 25 bp, Homo sapien
ctggggcactctgaacatggttgtt

SEQ ID NO: 3881047 - DNA, 25 bp, Homo sapien
tggggcactctgaacatggttgttc

SEQ ID NO: 3881048 - DNA, 25 bp, Homo sapien
tctggggcactctgaacatggttgt

SEQ ID NO: 3881049 - DNA, 25 bp, Homo sapien
cctgaaggaatcttctgtggtgctc

SEQ ID NO: 3881050 - DNA, 25 bp, Homo sapien
tctcttatgtagacccagattcttg

SEQ ID NO: 3881051 - DNA, 25 bp, Homo sapien
caatgatgagttttcctactgttcc

SEQ ID NO: 3881052 - DNA, 25 bp, Homo sapien
gctcaacagagggtaccacatgccc

SEQ ID NO: 3881053 - DNA, 25 bp, Homo sapien
cccaagttaccaccaaggcacaaag

SEQ ID NO: 3881054 - DNA, 25 bp, Homo sapien
tgtctccatatctgatggtaacatt

SEQ ID NO: 3881055 - DNA, 25 bp, Homo sapien
tatgtctccatatctgatggtaaca

SEQ ID NO: 3881056 - DNA, 25 bp, Homo sapien
ctccatatctgatggtaacattcat

SEQ ID NO: 3881057 - DNA, 25 bp, Homo sapien
gcgagagaagatgccttaatcggcc

SEQ ID NO: 3881058 - DNA, 25 bp, Homo sapien
cagtggtggcccagtactattgaca

SEQ ID NO: 3881059 - DNA, 25 bp, Homo sapien
tgacactgtgtcagctgcgagagaa

SEQ ID NO: 3881060 - DNA, 25 bp, Homo sapien
gacaccctctgcattgatttgacaa

SEQ ID NO: 3881061 - DNA, 25 bp, Homo sapien
tcctcatggtactagcccaggagcc

SEQ ID NO: 3881062 - DNA, 25 bp, Homo sapien
aagtatggcatattccagaaagggc

SEQ ID NO: 3881063 - DNA, 25 bp, Homo sapien
cagaaagggcttgggatagctatgc

SEQ ID NO: 3881064 - DNA, 25 bp, Homo sapien
gattgctgaacctcgaatgtgtatt

SEQ ID NO: 3881065 - DNA, 25 bp, Homo sapien
cctcttctggaagcatctgagaata

SEQ ID NO: 3881066 - DNA, 25 bp, Homo sapien
tataaagttctaaagaaacaactca

SEQ ID NO: 3881067 - DNA, 25 bp, Homo sapien
gaataatggtataaagttctaaaga

SEQ ID NO: 3881068 - DNA, 25 bp, Homo sapien
catctgagaataatggtataaagtt

SEQ ID NO: 3881069 - DNA, 25 bp, Homo sapien
gatgcaggaggccagaatttgttca

SEQ ID NO: 3881070 - DNA, 25 bp, Homo sapien
gaatttgttcagagtctacagccag

SEQ ID NO: 3881071 - DNA, 25 bp, Homo sapien
gtcttcctactggtggccacgactg

SEQ ID NO: 3881072 - DNA, 25 bp, Homo sapien
tgagttaggacatatcaaccggatg

SEQ ID NO: 3881073 - DNA, 25 bp, Homo sapien
ccagtatcttccatgagatctcttg

SEQ ID NO: 3881074 - DNA, 25 bp, Homo sapien
tgcagggtggatttcaatgagggaa

SEQ ID NO: 3881075 - DNA, 25 bp, Homo sapien
gggaaaatcccagtatcttccatga

SEQ ID NO: 3881076 - DNA, 25 bp, Homo sapien
ttggtgcagggtggatttcaatgag

SEQ ID NO: 3881077 - DNA, 25 bp, Homo sapien
tgtagtccagacagtcccatgcagg

SEQ ID NO: 3881078 - DNA, 25 bp, Homo sapien
tgattttgcctagtgtagtccagac

SEQ ID NO: 3881079 - DNA, 25 bp, Homo sapien
ccatgcaggagccacttatgtcgtt

SEQ ID NO: 3881080 - DNA, 25 bp, Homo sapien
acttatgtcgtttcctgacagatga

SEQ ID NO: 3881081 - DNA, 25 bp, Homo sapien
tatgtcagaaggtttacttggttta

SEQ ID NO: 3881082 - DNA, 25 bp, Homo sapien
cattttatagttatgtcagaaggtt

SEQ ID NO: 3881083 - DNA, 25 bp, Homo sapien
taagattgctgtcaaaaaactccat

SEQ ID NO: 3881084 - DNA, 25 bp, Homo sapien
ttatgaattctccaagctctaagat

SEQ ID NO: 3881085 - DNA, 25 bp, Homo sapien
ctagaattctttgactctgtggcca

SEQ ID NO: 3881086 - DNA, 25 bp, Homo sapien
ccaacaaccgtggaattttagagct

SEQ ID NO: 3881087 - DNA, 25 bp, Homo sapien
ttagagctagaaagagttcacccac

SEQ ID NO: 3881088 - DNA, 25 bp, Homo sapien
gaggtgactctgagccaacaaccgt

SEQ ID NO: 3881089 - DNA, 25 bp, Homo sapien
caagtcaacccacgtgctgccgtga

SEQ ID NO: 3881090 - DNA, 25 bp, Homo sapien
gaatgcatttctctggacttgcaga

SEQ ID NO: 3881091 - DNA, 25 bp, Homo sapien
tctgtcactataggcagctcttggt

SEQ ID NO: 3881092 - DNA, 25 bp, Homo sapien
ccttcacgagggtcagttgcaccaa

SEQ ID NO: 3881093 - DNA, 25 bp, Homo sapien
tctggatctagctaagcaggaattt

SEQ ID NO: 3881094 - DNA, 25 bp, Homo sapien
caggcttctgtgatcataagggtta

SEQ ID NO: 3881095 - DNA, 25 bp, Homo sapien
taatgcaaaattttgcaggcttctg

SEQ ID NO: 3881096 - DNA, 25 bp, Homo sapien
cataagggttatgtatctggatcta

SEQ ID NO: 3881097 - DNA, 25 bp, Homo sapien
catgaattcccaattgttggtctac

SEQ ID NO: 3881098 - DNA, 25 bp, Homo sapien
ctgctgctactgtagactgttgtac

SEQ ID NO: 3881099 - DNA, 25 bp, Homo sapien
ggtctacatgctggtgtgtctctct

SEQ ID NO: 3881100 - DNA, 25 bp, Homo sapien
tttcttagtctgctgctactgtaga

SEQ ID NO: 3881101 - DNA, 25 bp, Homo sapien
caggatggtcttctcctagctggat

SEQ ID NO: 3881102 - DNA, 25 bp, Homo sapien
aggatggtcttctcctagctggatt

SEQ ID NO: 3881103 - DNA, 25 bp, Homo sapien
atcatgaaagatgcacacttgaaag

SEQ ID NO: 3881104 - DNA, 25 bp, Homo sapien
tgcagcacgactattgatcaaacct

SEQ ID NO: 3881105 - DNA, 25 bp, Homo sapien
tattgacatcctgtaagacataact

SEQ ID NO: 3881106 - DNA, 25 bp, Homo sapien
cacttgaaaggttaatattgacatc

SEQ ID NO: 3881107 - DNA, 25 bp, Homo sapien
gtctcagccctatatattgctgttt

SEQ ID NO: 3881108 - DNA, 25 bp, Homo sapien
agtctcagccctatatattgctgtt

SEQ ID NO: 3881109 - DNA, 25 bp, Homo sapien
ccagtgttgtctcacggaacattga

SEQ ID NO: 3881110 - DNA, 25 bp, Homo sapien
tgttgtctcacggaacattgacaca

SEQ ID NO: 3881111 - DNA, 25 bp, Homo sapien
gaccagtgttgtctcacggaacatt

SEQ ID NO: 3881112 - DNA, 25 bp, Homo sapien
tgtctcacggaacattgacacagca

SEQ ID NO: 3881113 - DNA, 25 bp, Homo sapien
gaacagtgtttggtagcttgatcat

SEQ ID NO: 3881114 - DNA, 25 bp, Homo sapien
ctcttcggtttgatggctgccttcc

SEQ ID NO: 3881115 - DNA, 25 bp, Homo sapien
tcaggggttggcattggaacagtgt

SEQ ID NO: 3881116 - DNA, 25 bp, Homo sapien
acttggggctcttcggtttgatggc

SEQ ID NO: 3881117 - DNA, 25 bp, Homo sapien
cttatctgacattgcaaagcagtta

SEQ ID NO: 3881118 - DNA, 25 bp, Homo sapien
gcagaatctatcttatctgacattg

SEQ ID NO: 3881119 - DNA, 25 bp, Homo sapien
gattctggtgaatggtctactttga

SEQ ID NO: 3881120 - DNA, 25 bp, Homo sapien
gcagttaacattgattctggtgaat

SEQ ID NO: 3881121 - DNA, 25 bp, Homo sapien
catttctttagtggccggcttgctg

SEQ ID NO: 3881122 - DNA, 25 bp, Homo sapien
gcacccactgactggctccttgaag

SEQ ID NO: 3881123 - DNA, 25 bp, Homo sapien
ggctctcaggcaccacgttgaatga

SEQ ID NO: 3881124 - DNA, 25 bp, Homo sapien
ctattgcagtcttgggcagcaccca

SEQ ID NO: 3881125 - DNA, 25 bp, Homo sapien
atgaaaccatgtacaagttatgtac

SEQ ID NO: 3881126 - DNA, 25 bp, Homo sapien
cataaatttttaatctgcgaaaaat

SEQ ID NO: 3881127 - DNA, 25 bp, Homo sapien
tgaacatgtaggctgaactctgcat

SEQ ID NO: 3881128 - DNA, 25 bp, Homo sapien
ggtcaaaggcgtgtcaggctgcatt

SEQ ID NO: 3881129 - DNA, 25 bp, Homo sapien
catggccgagagcattggtgtcact

SEQ ID NO: 3881130 - DNA, 25 bp, Homo sapien
gacccctgaaactaaggatgcagtg

SEQ ID NO: 3881131 - DNA, 25 bp, Homo sapien
gactgccgatcaccacaggttctgt

SEQ ID NO: 3881132 - DNA, 25 bp, Homo sapien
agaaagactgccgatcaccacaggt

SEQ ID NO: 3881133 - DNA, 25 bp, Homo sapien
tccagaaagactgccgatcaccaca

SEQ ID NO: 3881134 - DNA, 25 bp, Homo sapien
aaagactgccgatcaccacaggttc

SEQ ID NO: 3881135 - DNA, 25 bp, Homo sapien
agtaccctagatctcctgtcccaag

SEQ ID NO: 3881136 - DNA, 25 bp, Homo sapien
cctgcccttcgagtgagtcttttga

SEQ ID NO: 3881137 - DNA, 25 bp, Homo sapien
tgaatatactctagacccacagcca

SEQ ID NO: 3881138 - DNA, 25 bp, Homo sapien
cagtgatacatagtggccgagtgac

SEQ ID NO: 3881139 - DNA, 25 bp, Homo sapien
ctaacttagatcacgtcccctggga

SEQ ID NO: 3881140 - DNA, 25 bp, Homo sapien
aatagtctgcatgggcttagccaag

SEQ ID NO: 3881141 - DNA, 25 bp, Homo sapien
cctgggacctgaaagagaccttaga

SEQ ID NO: 3881142 - DNA, 25 bp, Homo sapien
tccagtcctggacacaatagtctgc

SEQ ID NO: 3881143 - DNA, 25 bp, Homo sapien
ggtgttttataatggttcaagatga

SEQ ID NO: 3881144 - DNA, 25 bp, Homo sapien
taaacagcctgttggtgacccacag

SEQ ID NO: 3881145 - DNA, 25 bp, Homo sapien
ggaatgttctccaacgtgccttagt

SEQ ID NO: 3881146 - DNA, 25 bp, Homo sapien
tagtttgggagaatggcttttctgg

SEQ ID NO: 3881147 - DNA, 25 bp, Homo sapien
tgacgacagagtaaccacagtccga

SEQ ID NO: 3881148 - DNA, 25 bp, Homo sapien
gcctacgaggtggaagcacgactat

SEQ ID NO: 3881149 - DNA, 25 bp, Homo sapien
cctacgctggtaattggagtactta

SEQ ID NO: 3881150 - DNA, 25 bp, Homo sapien
gcacgactatattggctctgcaggg

SEQ ID NO: 3881151 - DNA, 25 bp, Homo sapien
ccttagttggccagacaaacctgat

SEQ ID NO: 3881152 - DNA, 25 bp, Homo sapien
cattactcgctcaggtggtttggaa

SEQ ID NO: 3881153 - DNA, 25 bp, Homo sapien
gaaaaacacattaaggagtctgacc

SEQ ID NO: 3881154 - DNA, 25 bp, Homo sapien
gcataacagcacgtaggagtctcca

SEQ ID NO: 3881155 - DNA, 25 bp, Homo sapien
ttcagcatgtaagaagaaaagtcac

SEQ ID NO: 3881156 - DNA, 25 bp, Homo sapien
cacatcaccatttatgaagtttgtc

SEQ ID NO: 3881157 - DNA, 25 bp, Homo sapien
tggcaattcttgcttatcctaacgt

SEQ ID NO: 3881158 - DNA, 25 bp, Homo sapien
taacgtttccaccagtgattcagca

SEQ ID NO: 3881159 - DNA, 25 bp, Homo sapien
ttggttgatctggttagccatgtgg

SEQ ID NO: 3881160 - DNA, 25 bp, Homo sapien
gcttgtggatttatattggttgatc

SEQ ID NO: 3881161 - DNA, 25 bp, Homo sapien
tgtgggtactcatgggcttgatttg

SEQ ID NO: 3881162 - DNA, 25 bp, Homo sapien
gataggcattatccggttcatctgt

SEQ ID NO: 3881163 - DNA, 25 bp, Homo sapien
tggcattttgacctttcgcggcaga

SEQ ID NO: 3881164 - DNA, 25 bp, Homo sapien
aagttggcattttgacctttcgcgg

SEQ ID NO: 3881165 - DNA, 25 bp, Homo sapien
attttgacctttcgcggcagagaga

SEQ ID NO: 3881166 - DNA, 25 bp, Homo sapien
gacctttcgcggcagagagaatatc

SEQ ID NO: 3881167 - DNA, 25 bp, Homo sapien
gctgcaagtaggacaatgataattt

SEQ ID NO: 3881168 - DNA, 25 bp, Homo sapien
atgatcgccagccattcagcatcca

SEQ ID NO: 3881169 - DNA, 25 bp, Homo sapien
taatttgatgtattgaatcttgcct

SEQ ID NO: 3881170 - DNA, 25 bp, Homo sapien
tcagcatccatggagagtgctgcaa

SEQ ID NO: 3881171 - DNA, 25 bp, Homo sapien
gatttccaggggctttattttcatc

SEQ ID NO: 3881172 - DNA, 25 bp, Homo sapien
tctctaagatgagaagggcaattga

SEQ ID NO: 3881173 - DNA, 25 bp, Homo sapien
gaagggcaattgatcggggtgggag

SEQ ID NO: 3881174 - DNA, 25 bp, Homo sapien
cagaaagatttccaggggctttatt

SEQ ID NO: 3881175 - DNA, 25 bp, Homo sapien
aggatgatgtaagcatgggtcgtac

SEQ ID NO: 3881176 - DNA, 25 bp, Homo sapien
tatcagtactaaaggatgatgtaag

SEQ ID NO: 3881177 - DNA, 25 bp, Homo sapien
tactaaaggatgatgtaagcatggg

SEQ ID NO: 3881178 - DNA, 25 bp, Homo sapien
taaaggatgatgtaagcatgggtcg

SEQ ID NO: 3881179 - DNA, 25 bp, Homo sapien
caaatgatgcccttcagcagagatt

SEQ ID NO: 3881180 - DNA, 25 bp, Homo sapien
acaaatgatgcccttcagcagagat

SEQ ID NO: 3881181 - DNA, 25 bp, Homo sapien
ttgaatgtgatgacaaatgatgccc

SEQ ID NO: 3881182 - DNA, 25 bp, Homo sapien
ctcttgaatgtgatgacaaatgatg

SEQ ID NO: 3881183 - DNA, 25 bp, Homo sapien
caggggtgtgtatatcggggtgtat

SEQ ID NO: 3881184 - DNA, 25 bp, Homo sapien
gggtagagaacaggggtgtgtatat

SEQ ID NO: 3881185 - DNA, 25 bp, Homo sapien
tagagaacaggggtgtgtatatcgg

SEQ ID NO: 3881186 - DNA, 25 bp, Homo sapien
gaacaggggtgtgtatatcggggtg

SEQ ID NO: 3881187 - DNA, 25 bp, Homo sapien
tgagcttctctgttggctctgtggg

SEQ ID NO: 3881188 - DNA, 25 bp, Homo sapien
cagtgccatgggatttagccttttc

SEQ ID NO: 3881189 - DNA, 25 bp, Homo sapien
aggtcaccctggaggaatgggctct

SEQ ID NO: 3881190 - DNA, 25 bp, Homo sapien
tatcccatctgagagccatctgttt

SEQ ID NO: 3881191 - DNA, 25 bp, Homo sapien
gttgctataggaacctggcaggttg

SEQ ID NO: 3881192 - DNA, 25 bp, Homo sapien
ccttcaaggagcctgttgctatagg

SEQ ID NO: 3881193 - DNA, 25 bp, Homo sapien
ataggaacctggcaggttgatttaa

SEQ ID NO: 3881194 - DNA, 25 bp, Homo sapien
tcaaggagcctgttgctataggaac

SEQ ID NO: 3881195 - DNA, 25 bp, Homo sapien
ctatctgcccggtctctggttggga

SEQ ID NO: 3881196 - DNA, 25 bp, Homo sapien
taatacagtgactgaaccatcagct

SEQ ID NO: 3881197 - DNA, 25 bp, Homo sapien
tcacttgattgagtaggtcttgcca

SEQ ID NO: 3881198 - DNA, 25 bp, Homo sapien
taacaaatgtctgaaaggcagctgg

SEQ ID NO: 3881199 - DNA, 25 bp, Homo sapien
ggtcatgcagaaccattaattgtca

SEQ ID NO: 3881200 - DNA, 25 bp, Homo sapien
agttttcacaaggacaacgttatag

SEQ ID NO: 3881201 - DNA, 25 bp, Homo sapien
ttatagaagaaaacccccagcagtg

SEQ ID NO: 3881202 - DNA, 25 bp, Homo sapien
ccagcagtggctaggtcatgcagaa

SEQ ID NO: 3881203 - DNA, 25 bp, Homo sapien
gcccattctattcatccttgttgca

SEQ ID NO: 3881204 - DNA, 25 bp, Homo sapien
ggcccattctattcatccttgttgc

SEQ ID NO: 3881205 - DNA, 25 bp, Homo sapien
cttggcccattctattcatccttgt

SEQ ID NO: 3881206 - DNA, 25 bp, Homo sapien
tggcccattctattcatccttgttg

SEQ ID NO: 3881207 - DNA, 25 bp, Homo sapien
gcttcgcaatacttcggcccagaga

SEQ ID NO: 3881208 - DNA, 25 bp, Homo sapien
aaggagcagctctctattgccgtca

SEQ ID NO: 3881209 - DNA, 25 bp, Homo sapien
cagtttcacacagtggcggtggata

SEQ ID NO: 3881210 - DNA, 25 bp, Homo sapien
tactggtttgaatactacgctgccc

SEQ ID NO: 3881211 - DNA, 25 bp, Homo sapien
tcaaagccgctcttcctgcacgtac

SEQ ID NO: 3881212 - DNA, 25 bp, Homo sapien
tcggcacgagctcaaactcataggg

SEQ ID NO: 3881213 - DNA, 25 bp, Homo sapien
actccctggacttgggccggttctg

SEQ ID NO: 3881214 - DNA, 25 bp, Homo sapien
agaagatcaggtccgtcggcacgag

SEQ ID NO: 3881215 - DNA, 25 bp, Homo sapien
tgcattaagcagaagatcaggtccg

SEQ ID NO: 3881216 - DNA, 25 bp, Homo sapien
ccgcaagaggtttcatgaagtgtga

SEQ ID NO: 3881217 - DNA, 25 bp, Homo sapien
gtcactttcaagtagcccaaccgca

SEQ ID NO: 3881218 - DNA, 25 bp, Homo sapien
ttcatgaagtgtgatgcaactttca

SEQ ID NO: 3881219 - DNA, 25 bp, Homo sapien
tttctatacaaggtcaaagtcactt

SEQ ID NO: 3881220 - DNA, 25 bp, Homo sapien
ctctcagccggtaaattccaaaaca

SEQ ID NO: 3881221 - DNA, 25 bp, Homo sapien
gtgagcatctctcagccggtaaatt

SEQ ID NO: 3881222 - DNA, 25 bp, Homo sapien
agagctttgcagaacagatcaccat

SEQ ID NO: 3881223 - DNA, 25 bp, Homo sapien
gctttgcagaacagatcaccataac

SEQ ID NO: 3881224 - DNA, 25 bp, Homo sapien
cctacactaggcagatacatggaat

SEQ ID NO: 3881225 - DNA, 25 bp, Homo sapien
tatttagtctttctgggcgacacca

SEQ ID NO: 3881226 - DNA, 25 bp, Homo sapien
catgagggaacgtgactgggtccac

SEQ ID NO: 3881227 - DNA, 25 bp, Homo sapien
tggccacttccgtcacagggaggac

SEQ ID NO: 3881228 - DNA, 25 bp, Homo sapien
cggtcaccagggtccgtatcagggt

SEQ ID NO: 3881229 - DNA, 25 bp, Homo sapien
cagcggtccctattggccagtgtct

SEQ ID NO: 3881230 - DNA, 25 bp, Homo sapien
tggcccatcgagcagagctaactgg

SEQ ID NO: 3881231 - DNA, 25 bp, Homo sapien
ctaagtccgcaaatggcccatcgag

SEQ ID NO: 3881232 - DNA, 25 bp, Homo sapien
gataaatctagaaggtcaggctggg

SEQ ID NO: 3881233 - DNA, 25 bp, Homo sapien
gatttgaccctaacatgttcccact

SEQ ID NO: 3881234 - DNA, 25 bp, Homo sapien
tgagcacctactaatcgttgggcct

SEQ ID NO: 3881235 - DNA, 25 bp, Homo sapien
aacaaagggcactataggttatcca

SEQ ID NO: 3881236 - DNA, 25 bp, Homo sapien
cttttagaattgctcatcaacaggt

SEQ ID NO: 3881237 - DNA, 25 bp, Homo sapien
ttagcctgaaattgtgtgaaagtca

SEQ ID NO: 3881238 - DNA, 25 bp, Homo sapien
gaaagtcaaagagtgcatgactttt

SEQ ID NO: 3881239 - DNA, 25 bp, Homo sapien
tttagaattgctcatcaacaggtac

SEQ ID NO: 3881240 - DNA, 25 bp, Homo sapien
actctgggaccactcatatctctga

SEQ ID NO: 3881241 - DNA, 25 bp, Homo sapien
gagcataattgtctgctctctgagc

SEQ ID NO: 3881242 - DNA, 25 bp, Homo sapien
cagggtttcacaggtgtctgaacaa

SEQ ID NO: 3881243 - DNA, 25 bp, Homo sapien
ccagatgatggctctccttgatttt

SEQ ID NO: 3881244 - DNA, 25 bp, Homo sapien
ttttctggaaaagggtgtcaggtca

SEQ ID NO: 3881245 - DNA, 25 bp, Homo sapien
ctatctcttcaggatctgaataatt

SEQ ID NO: 3881246 - DNA, 25 bp, Homo sapien
tggaaaagggtgtcaggtcagtcat

SEQ ID NO: 3881247 - DNA, 25 bp, Homo sapien
tctggaaaagggtgtcaggtcagtc

SEQ ID NO: 3881248 - DNA, 25 bp, Homo sapien
agggtccaagtggagcttaagttgg

SEQ ID NO: 3881249 - DNA, 25 bp, Homo sapien
cagggtccaagtggagcttaagttg

SEQ ID NO: 3881250 - DNA, 25 bp, Homo sapien
tcagggtccaagtggagcttaagtt

SEQ ID NO: 3881251 - DNA, 25 bp, Homo sapien
ttcagggtccaagtggagcttaagt

SEQ ID NO: 3881252 - DNA, 25 bp, Homo sapien
cttgttggcttggaaagccatggca

SEQ ID NO: 3881253 - DNA, 25 bp, Homo sapien
tccttgttggcttggaaagccatgg

SEQ ID NO: 3881254 - DNA, 25 bp, Homo sapien
ccttgttggcttggaaagccatggc

SEQ ID NO: 3881255 - DNA, 25 bp, Homo sapien
caaagggctgcgtgaggtacagttc

SEQ ID NO: 3881256 - DNA, 25 bp, Homo sapien
catcatcatcgtcttggtccaaaaa

SEQ ID NO: 3881257 - DNA, 25 bp, Homo sapien
cgctcatgagtgagtccaggacact

SEQ ID NO: 3881258 - DNA, 25 bp, Homo sapien
ccaggacactgacggcaaatgctgt

SEQ ID NO: 3881259 - DNA, 25 bp, Homo sapien
tttcctgattgactgataccaaagg

SEQ ID NO: 3881260 - DNA, 25 bp, Homo sapien
tatcattagaatgtgcgtcccactg

SEQ ID NO: 3881261 - DNA, 25 bp, Homo sapien
ttagaatgtgcgtcccactgttttt

SEQ ID NO: 3881262 - DNA, 25 bp, Homo sapien
cagttcagttatcattagaatgtgc

SEQ ID NO: 3881263 - DNA, 25 bp, Homo sapien
ttgacgtaacatcccgtgcactggg

SEQ ID NO: 3881264 - DNA, 25 bp, Homo sapien
ctggagaggatctatccattcctgg

SEQ ID NO: 3881265 - DNA, 25 bp, Homo sapien
gaggatctatccattcctggaggtg

SEQ ID NO: 3881266 - DNA, 25 bp, Homo sapien
atgttgaccccagttgtgatggatg

SEQ ID NO: 3881267 - DNA, 25 bp, Homo sapien
cattagagacatggaatgagaagtc

SEQ ID NO: 3881268 - DNA, 25 bp, Homo sapien
agccaaagctatcaccagatgggct

SEQ ID NO: 3881269 - DNA, 25 bp, Homo sapien
gccaaagctatcaccagatgggctc

SEQ ID NO: 3881270 - DNA, 25 bp, Homo sapien
ttagagacatggaatgagaagtcct

SEQ ID NO: 3881271 - DNA, 25 bp, Homo sapien
tcatctcccctagaatagatggaga

SEQ ID NO: 3881272 - DNA, 25 bp, Homo sapien
caccccgatagacttaacataaagg

SEQ ID NO: 3881273 - DNA, 25 bp, Homo sapien
gaattggttcaaatggtgggccaaa

SEQ ID NO: 3881274 - DNA, 25 bp, Homo sapien
tcttccctagttaaatccctgagcc

SEQ ID NO: 3881275 - DNA, 25 bp, Homo sapien
ttgcagtatgtattccaacgaatgc

SEQ ID NO: 3881276 - DNA, 25 bp, Homo sapien
tgtattccaacgaatgcttcagcag

SEQ ID NO: 3881277 - DNA, 25 bp, Homo sapien
tagccacagcagtcatttttgcagt

SEQ ID NO: 3881278 - DNA, 25 bp, Homo sapien
ggtaatagccacagcagtcattttt

SEQ ID NO: 3881279 - DNA, 25 bp, Homo sapien
cttccttgcttgcctttaggcccat

SEQ ID NO: 3881280 - DNA, 25 bp, Homo sapien
gaaatggctcacactctgcacaagg

SEQ ID NO: 3881281 - DNA, 25 bp, Homo sapien
gaatagctggctagatttatctgcc

SEQ ID NO: 3881282 - DNA, 25 bp, Homo sapien
tgaaatgttccaagccctgtatcct

SEQ ID NO: 3881283 - DNA, 25 bp, Homo sapien
gaggcatgtgtgctatcttcacagc

SEQ ID NO: 3881284 - DNA, 25 bp, Homo sapien
gacatgaatgcttccactaaaagac

SEQ ID NO: 3881285 - DNA, 25 bp, Homo sapien
ttgaacacaaagacagtgccgttca

SEQ ID NO: 3881286 - DNA, 25 bp, Homo sapien
cgttcaggaaggacatgaatgcttc

SEQ ID NO: 3881287 - DNA, 25 bp, Homo sapien
aaagacagtgccgttcaggaaggac

SEQ ID NO: 3881288 - DNA, 25 bp, Homo sapien
aaagagctgtaaagtggttctgagc

SEQ ID NO: 3881289 - DNA, 25 bp, Homo sapien
taaataatacaccagctctccagcc

SEQ ID NO: 3881290 - DNA, 25 bp, Homo sapien
tgttttccccagataaatgcgtgct

SEQ ID NO: 3881291 - DNA, 25 bp, Homo sapien
cacttagttgctggtaaagagctgt

SEQ ID NO: 3881292 - DNA, 25 bp, Homo sapien
ggtgaccgcaggtttcactgccagg

SEQ ID NO: 3881293 - DNA, 25 bp, Homo sapien
gagtgaaggatatccctcttgccag

SEQ ID NO: 3881294 - DNA, 25 bp, Homo sapien
gaattactgagtgaaggatatccct

SEQ ID NO: 3881295 - DNA, 25 bp, Homo sapien
ccaggcaggctgatgtgagcctctt

SEQ ID NO: 3881296 - DNA, 25 bp, Homo sapien
tgtcctgcagcgaagtatcatcaat

SEQ ID NO: 3881297 - DNA, 25 bp, Homo sapien
tgagtgacgccaagatgcattcctt

SEQ ID NO: 3881298 - DNA, 25 bp, Homo sapien
caggataacgcacatgtcacagagg

SEQ ID NO: 3881299 - DNA, 25 bp, Homo sapien
tgttgacagcccttaaatcagcccg

SEQ ID NO: 3881300 - DNA, 25 bp, Homo sapien
ggtttgccaactgtcacatatctgg

SEQ ID NO: 3881301 - DNA, 25 bp, Homo sapien
gattgtgtagaccaagggtttgcca

SEQ ID NO: 3881302 - DNA, 25 bp, Homo sapien
cttcaactcactgattgtgtagacc

SEQ ID NO: 3881303 - DNA, 25 bp, Homo sapien
gaccaagggtttgccaactgtcaca

SEQ ID NO: 3881304 - DNA, 25 bp, Homo sapien
catggccactcaggacggtcatggc

SEQ ID NO: 3881305 - DNA, 25 bp, Homo sapien
taatgaaagttgctggcacggagcg

SEQ ID NO: 3881306 - DNA, 25 bp, Homo sapien
gctgagctgacgtcgccaaagatgc

SEQ ID NO: 3881307 - DNA, 25 bp, Homo sapien
ccaaagatgcagaccacgacatggc

SEQ ID NO: 3881308 - DNA, 25 bp, Homo sapien
tactacaccaatatccaggcaagtc

SEQ ID NO: 3881309 - DNA, 25 bp, Homo sapien
tatcagttggcatgcatactacacc

SEQ ID NO: 3881310 - DNA, 25 bp, Homo sapien
aaccctaggtcccagatacggcatc

SEQ ID NO: 3881311 - DNA, 25 bp, Homo sapien
taaacttttttatgctggcaggaga

SEQ ID NO: 3881312 - DNA, 25 bp, Homo sapien
ggagtccatgttgtcaatctgatca

SEQ ID NO: 3881313 - DNA, 25 bp, Homo sapien
cttgggtgcacaccagtgaaacatc

SEQ ID NO: 3881314 - DNA, 25 bp, Homo sapien
gtgaaacatcccagtagagtcgtac

SEQ ID NO: 3881315 - DNA, 25 bp, Homo sapien
agagtcgtacttcttcacattggag

SEQ ID NO: 3881316 - DNA, 25 bp, Homo sapien
accccacttctggaagtgcaggtga

SEQ ID NO: 3881317 - DNA, 25 bp, Homo sapien
tgcaggtgacctttgtcagggagca

SEQ ID NO: 3881318 - DNA, 25 bp, Homo sapien
gtgcaggtgacctttgtcagggagc

SEQ ID NO: 3881319 - DNA, 25 bp, Homo sapien
cccacttctggaagtgcaggtgacc

SEQ ID NO: 3881320 - DNA, 25 bp, Homo sapien
gagaatttgcttttagactacacca

SEQ ID NO: 3881321 - DNA, 25 bp, Homo sapien
tgtccttctgaaatgtctccgatac

SEQ ID NO: 3881322 - DNA, 25 bp, Homo sapien
tcttccatggcccaaaaacctagga

SEQ ID NO: 3881323 - DNA, 25 bp, Homo sapien
caaatactatgtgaagccaacttgc

SEQ ID NO: 3881324 - DNA, 25 bp, Homo sapien
cagtgtccacagctagaaattcagt

SEQ ID NO: 3881325 - DNA, 25 bp, Homo sapien
cctccagtgtccacagctagaaatt

SEQ ID NO: 3881326 - DNA, 25 bp, Homo sapien
acagctagaaattcagtgtgcctaa

SEQ ID NO: 3881327 - DNA, 25 bp, Homo sapien
gtgtccacagctagaaattcagtgt

SEQ ID NO: 3881328 - DNA, 25 bp, Homo sapien
tacgtgcaactatgtggaggtggct

SEQ ID NO: 3881329 - DNA, 25 bp, Homo sapien
ccaaaaagcatttgtacgtgcaact

SEQ ID NO: 3881330 - DNA, 25 bp, Homo sapien
tgaatgtgattgtaaccagggatcc

SEQ ID NO: 3881331 - DNA, 25 bp, Homo sapien
gatttcaggaatccattaacctgct

SEQ ID NO: 3881332 - DNA, 25 bp, Homo sapien
tgggacatagaaagacgtggtaagg

SEQ ID NO: 3881333 - DNA, 25 bp, Homo sapien
acttgtcatgggatggcccattcca

SEQ ID NO: 3881334 - DNA, 25 bp, Homo sapien
tctcacttgtcatgggatggcccat

SEQ ID NO: 3881335 - DNA, 25 bp, Homo sapien
ggagtgtctaagactttctcacttg

SEQ ID NO: 3881336 - DNA, 25 bp, Homo sapien
cgcaggcaaactaaccacacgagtt

SEQ ID NO: 3881337 - DNA, 25 bp, Homo sapien
tggccttaagtacagaaaacagtcc

SEQ ID NO: 3881338 - DNA, 25 bp, Homo sapien
gatttcaatcgacaggataaaagga

SEQ ID NO: 3881339 - DNA, 25 bp, Homo sapien
tgatgatacatctcacatatggcct

SEQ ID NO: 3881340 - DNA, 25 bp, Homo sapien
tagtgttgacggctgctcatcttca

SEQ ID NO: 3881341 - DNA, 25 bp, Homo sapien
ctcatcagcttaggcgaggtgttgg

SEQ ID NO: 3881342 - DNA, 25 bp, Homo sapien
ttggtgatagtgttgacggctgctc

SEQ ID NO: 3881343 - DNA, 25 bp, Homo sapien
gcgaggtgttgggtgagttccgcat

SEQ ID NO: 3881344 - DNA, 25 bp, Homo sapien
cacaaaggcatctagctaacagggc

SEQ ID NO: 3881345 - DNA, 25 bp, Homo sapien
taaacatgagtcaaccgctatctcc

SEQ ID NO: 3881346 - DNA, 25 bp, Homo sapien
gagtcactcagaataagagtcatgc

SEQ ID NO: 3881347 - DNA, 25 bp, Homo sapien
gactgaagtcttgcacaagctgcca

SEQ ID NO: 3881348 - DNA, 25 bp, Homo sapien
tgaaatccacagtagtgcatcgctc

SEQ ID NO: 3881349 - DNA, 25 bp, Homo sapien
tgcccaacaagctaagtgcaagctg

SEQ ID NO: 3881350 - DNA, 25 bp, Homo sapien
tgagctcagcatggtaaagtagaat

SEQ ID NO: 3881351 - DNA, 25 bp, Homo sapien
caagctaagtgcaagctgaaatcca

SEQ ID NO: 3881352 - DNA, 25 bp, Homo sapien
tcacaagccgagaattgggagtctc

SEQ ID NO: 3881353 - DNA, 25 bp, Homo sapien
tgggagtctccttcttgaactcaaa

SEQ ID NO: 3881354 - DNA, 25 bp, Homo sapien
caaatggatctttggaatagcgtga

SEQ ID NO: 3881355 - DNA, 25 bp, Homo sapien
tggaatagcgtgatctagctgcaac

SEQ ID NO: 3881356 - DNA, 25 bp, Homo sapien
aaattaatccatagtgaaatttctt

SEQ ID NO: 3881357 - DNA, 25 bp, Homo sapien
aattaatccatagtgaaatttcttt

SEQ ID NO: 3881358 - DNA, 25 bp, Homo sapien
gaatgccatgtgtccatcgacgagg

SEQ ID NO: 3881359 - DNA, 25 bp, Homo sapien
cgacgaggctgagctattaagcaca

SEQ ID NO: 3881360 - DNA, 25 bp, Homo sapien
tgtttctcacacgaaccagacgggt

SEQ ID NO: 3881361 - DNA, 25 bp, Homo sapien
cttaagcgatgatgggaaaacaacc

SEQ ID NO: 3881362 - DNA, 25 bp, Homo sapien
gacccctgcagtagtttaatcttct

SEQ ID NO: 3881363 - DNA, 25 bp, Homo sapien
ttgctgacccctgcagtagtttaat

SEQ ID NO: 3881364 - DNA, 25 bp, Homo sapien
tgacccctgcagtagtttaatcttc

SEQ ID NO: 3881365 - DNA, 25 bp, Homo sapien
gctgacccctgcagtagtttaatct

SEQ ID NO: 3881366 - DNA, 25 bp, Homo sapien
ctcgaagctgtcagcgtgtgctgcc

SEQ ID NO: 3881367 - DNA, 25 bp, Homo sapien
gcaaggcgaaccacatctaccgtga

SEQ ID NO: 3881368 - DNA, 25 bp, Homo sapien
acatctaccgtgagcaattcctcga

SEQ ID NO: 3881369 - DNA, 25 bp, Homo sapien
tttggaaagcaaggcgaaccacatc

SEQ ID NO: 3881370 - DNA, 25 bp, Homo sapien
gagagccccgtacaagacaacagat

SEQ ID NO: 3881371 - DNA, 25 bp, Homo sapien
tgcgagagccccgtacaagacaaca

SEQ ID NO: 3881372 - DNA, 25 bp, Homo sapien
cccgtacaagacaacagattaacca

SEQ ID NO: 3881373 - DNA, 25 bp, Homo sapien
gagccccgtacaagacaacagatta

SEQ ID NO: 3881374 - DNA, 25 bp, Homo sapien
aataactcctggattcatctgcccc

SEQ ID NO: 3881375 - DNA, 25 bp, Homo sapien
tcagctgccgcatagatttaaacct

SEQ ID NO: 3881376 - DNA, 25 bp, Homo sapien
tctgccccttgtcaaacttgcacag

SEQ ID NO: 3881377 - DNA, 25 bp, Homo sapien
gaatgatccagacggctgctgtctc

SEQ ID NO: 3881378 - DNA, 25 bp, Homo sapien
tacttactacaatggatggcaggcc

SEQ ID NO: 3881379 - DNA, 25 bp, Homo sapien
gatgcttatgtggagaacggaacta

SEQ ID NO: 3881380 - DNA, 25 bp, Homo sapien
ccatgggacagtgtgctgacccctg

SEQ ID NO: 3881381 - DNA, 25 bp, Homo sapien
tcacagagatggcagtacttgagct

SEQ ID NO: 3881382 - DNA, 25 bp, Homo sapien
tacaatgtagattcataggaggcat

SEQ ID NO: 3881383 - DNA, 25 bp, Homo sapien
gagacggacttgacatttgctccaa

SEQ ID NO: 3881384 - DNA, 25 bp, Homo sapien
cataaagcctaaggcgctgcaaact

SEQ ID NO: 3881385 - DNA, 25 bp, Homo sapien
gggtctaatcgaggctcctggtgca

SEQ ID NO: 3881386 - DNA, 25 bp, Homo sapien
ggaagatgaggagctaactggccac

SEQ ID NO: 3881387 - DNA, 25 bp, Homo sapien
catctgtcgcctgagatagtggagg

SEQ ID NO: 3881388 - DNA, 25 bp, Homo sapien
tatttcatacagtaaaggtcaggat

SEQ ID NO: 3881389 - DNA, 25 bp, Homo sapien
acaagaaagctcaagtggaaggcgg

SEQ ID NO: 3881390 - DNA, 25 bp, Homo sapien
taagaggaagcattcactgcctggt

SEQ ID NO: 3881391 - DNA, 25 bp, Homo sapien
agtatcctgagaaccggccactgtc

SEQ ID NO: 3881392 - DNA, 25 bp, Homo sapien
aagctgtcaggatgagtatcctgag

SEQ ID NO: 3881393 - DNA, 25 bp, Homo sapien
accatggaggtaagaggaagcattc

SEQ ID NO: 3881394 - DNA, 25 bp, Homo sapien
tagtttgtccttaaagagccgagtc

SEQ ID NO: 3881395 - DNA, 25 bp, Homo sapien
ggtatacacaaaggaccctgtcagc

SEQ ID NO: 3881396 - DNA, 25 bp, Homo sapien
tcttctgggcttacatgaggcatgc

SEQ ID NO: 3881397 - DNA, 25 bp, Homo sapien
gagccgagtcatttattacagcatg

SEQ ID NO: 3881398 - DNA, 25 bp, Homo sapien
caagctccataatagtataatgacc

SEQ ID NO: 3881399 - DNA, 25 bp, Homo sapien
gcgaccaaagcaagctccataatag

SEQ ID NO: 3881400 - DNA, 25 bp, Homo sapien
tggctcaactgggaaactgcgacca

SEQ ID NO: 3881401 - DNA, 25 bp, Homo sapien
tagtataatgacctttaatgagtgt

SEQ ID NO: 3881402 - DNA, 25 bp, Homo sapien
aggttttcttctccctggtctccat

SEQ ID NO: 3881403 - DNA, 25 bp, Homo sapien
tcttgctgcacatcgtagacagaca

SEQ ID NO: 3881404 - DNA, 25 bp, Homo sapien
gattttaggcccatatggcagtcca

SEQ ID NO: 3881405 - DNA, 25 bp, Homo sapien
tatggctcgatgcacaaatcatgct

SEQ ID NO: 3881406 - DNA, 25 bp, Homo sapien
aaacataagcacctggcatggcaca

SEQ ID NO: 3881407 - DNA, 25 bp, Homo sapien
gaaagtgtagctcaaccagctctga

SEQ ID NO: 3881408 - DNA, 25 bp, Homo sapien
tgtgctatggactcagggatatcac

SEQ ID NO: 3881409 - DNA, 25 bp, Homo sapien
caagtaaagtcctccagtggaacca

SEQ ID NO: 3881410 - DNA, 25 bp, Homo sapien
ggaagtgcagaaacgagaaccatct

SEQ ID NO: 3881411 - DNA, 25 bp, Homo sapien
gccttcctaggcacgtacacagaga

SEQ ID NO: 3881412 - DNA, 25 bp, Homo sapien
gggcaacatgtcagcacacaggagt

SEQ ID NO: 3881413 - DNA, 25 bp, Homo sapien
tcacactgggaagaagacatcagcc

SEQ ID NO: 3881414 - DNA, 25 bp, Homo sapien
tcctgcatgctgttacgagaagcgt

SEQ ID NO: 3881415 - DNA, 25 bp, Homo sapien
cacacggcctgacatgcatgagcag

SEQ ID NO: 3881416 - DNA, 25 bp, Homo sapien
gaaactggtggagcaatcattaaca

SEQ ID NO: 3881417 - DNA, 25 bp, Homo sapien
aaggctctctcaagggtgtccacgt

SEQ ID NO: 3881418 - DNA, 25 bp, Homo sapien
tgagcagtcacgctcagaacgtccg

SEQ ID NO: 3881419 - DNA, 25 bp, Homo sapien
tacactcgggttctcaaatgggaag

SEQ ID NO: 3881420 - DNA, 25 bp, Homo sapien
aattaatggcaaggtcacacacagc

SEQ ID NO: 3881421 - DNA, 25 bp, Homo sapien
gaatgttacagtcaccaggaagagg

SEQ ID NO: 3881422 - DNA, 25 bp, Homo sapien
aagggcatggctgaatacactcggg

SEQ ID NO: 3881423 - DNA, 25 bp, Homo sapien
tccgaagacctaggtcctggcagtt

SEQ ID NO: 3881424 - DNA, 25 bp, Homo sapien
gaagtggatattcaaccaacatttc

SEQ ID NO: 3881425 - DNA, 25 bp, Homo sapien
cttcctccgaagacctaggtcctgg

SEQ ID NO: 3881426 - DNA, 25 bp, Homo sapien
tcaccacagtgaagtggatattcaa

SEQ ID NO: 3881427 - DNA, 25 bp, Homo sapien
tctagcaagcacttctcatacagag

SEQ ID NO: 3881428 - DNA, 25 bp, Homo sapien
cattcataaagcaactgggtgtgtc

SEQ ID NO: 3881429 - DNA, 25 bp, Homo sapien
caagggaacttcatagactgcagat

SEQ ID NO: 3881430 - DNA, 25 bp, Homo sapien
gacaattgagatacttacagtccca

SEQ ID NO: 3881431 - DNA, 25 bp, Homo sapien
gacaattaccccagctgatgaagca

SEQ ID NO: 3881432 - DNA, 25 bp, Homo sapien
cactaggagtccacactttggcaaa

SEQ ID NO: 3881433 - DNA, 25 bp, Homo sapien
aaataagacagtgcccgaagctggc

SEQ ID NO: 3881434 - DNA, 25 bp, Homo sapien
tagtagaccctgagaacttgctcct

SEQ ID NO: 3881435 - DNA, 25 bp, Homo sapien
tttctccggatgagatgacgtgaaa

SEQ ID NO: 3881436 - DNA, 25 bp, Homo sapien
gttgaaggttactgaatgaaagtga

SEQ ID NO: 3881437 - DNA, 25 bp, Homo sapien
gatgacgtgaaatgttgaaggttac

SEQ ID NO: 3881438 - DNA, 25 bp, Homo sapien
gatatttctccggatgagatgacgt

SEQ ID NO: 3881439 - DNA, 25 bp, Homo sapien
gccagtgactgtcatgagctctgcc

SEQ ID NO: 3881440 - DNA, 25 bp, Homo sapien
accaagcaatgtctgttcgaaggca

SEQ ID NO: 3881441 - DNA, 25 bp, Homo sapien
catgggatctaccattccagggtga

SEQ ID NO: 3881442 - DNA, 25 bp, Homo sapien
tggactaacacgtttggacagatga

SEQ ID NO: 3881443 - DNA, 25 bp, Homo sapien
agccctttggcagtggaaagttctt

SEQ ID NO: 3881444 - DNA, 25 bp, Homo sapien
tctaccccaaagagcgatgatgctt

SEQ ID NO: 3881445 - DNA, 25 bp, Homo sapien
ggacgatggcaactgaagccctttg

SEQ ID NO: 3881446 - DNA, 25 bp, Homo sapien
ggtatcacagttgccaactctggcc

SEQ ID NO: 3881447 - DNA, 25 bp, Homo sapien
gacaggccttgcagtaaaaaaatgc

SEQ ID NO: 3881448 - DNA, 25 bp, Homo sapien
acaggccttgcagtaaaaaaatgcc

SEQ ID NO: 3881449 - DNA, 25 bp, Homo sapien
gccgtttgcagccacatttttttat

SEQ ID NO: 3881450 - DNA, 25 bp, Homo sapien
tgagttagtgctccttttcataaac

SEQ ID NO: 3881451 - DNA, 25 bp, Homo sapien
gaacagcctttgatgctactcgtgg

SEQ ID NO: 3881452 - DNA, 25 bp, Homo sapien
ggcagaagtatgtcgtttctcagtc

SEQ ID NO: 3881453 - DNA, 25 bp, Homo sapien
aaaattcccacagtctggtcaaata

SEQ ID NO: 3881454 - DNA, 25 bp, Homo sapien
gcagccaaagggagacagagttgag

SEQ ID NO: 3881455 - DNA, 25 bp, Homo sapien
ttctgggcagccaaagggagacaga

SEQ ID NO: 3881456 - DNA, 25 bp, Homo sapien
cttttctgggcagccaaagggagac

SEQ ID NO: 3881457 - DNA, 25 bp, Homo sapien
tcactctgaaagcaccttttctggg

SEQ ID NO: 3881458 - DNA, 25 bp, Homo sapien
agctatgaacatggccttttcttga

SEQ ID NO: 3881459 - DNA, 25 bp, Homo sapien
tgccagctatgaacatggccttttc

SEQ ID NO: 3881460 - DNA, 25 bp, Homo sapien
gaatgccagctatgaacatggcctt

SEQ ID NO: 3881461 - DNA, 25 bp, Homo sapien
actgaatgccagctatgaacatggc

SEQ ID NO: 3881462 - DNA, 25 bp, Homo sapien
cagcctcctgtacttggtgctgaga

SEQ ID NO: 3881463 - DNA, 25 bp, Homo sapien
tctgggaggtatacgtgatatatgg

SEQ ID NO: 3881464 - DNA, 25 bp, Homo sapien
cctgtacttggtgctgagatgctgt

SEQ ID NO: 3881465 - DNA, 25 bp, Homo sapien
tgatatatggttctcctgtgctccc

SEQ ID NO: 3881466 - DNA, 25 bp, Homo sapien
agtctggacaagggcacaagcttct

SEQ ID NO: 3881467 - DNA, 25 bp, Homo sapien
acaagggcacaagcttcttctccag

SEQ ID NO: 3881468 - DNA, 25 bp, Homo sapien
tctggacaagggcacaagcttcttc

SEQ ID NO: 3881469 - DNA, 25 bp, Homo sapien
ggacaagggcacaagcttcttctcc

SEQ ID NO: 3881470 - DNA, 25 bp, Homo sapien
tcactacatgaactggagtccgtgg

SEQ ID NO: 3881471 - DNA, 25 bp, Homo sapien
tacagccgggccagaaagaaagcca

SEQ ID NO: 3881472 - DNA, 25 bp, Homo sapien
catgttgtgctgcaaagggccctgt

SEQ ID NO: 3881473 - DNA, 25 bp, Homo sapien
tccgtgggtcaaggtgtctacagcc

SEQ ID NO: 3881474 - DNA, 25 bp, Homo sapien
tcttggatcttaagatggtttccag

SEQ ID NO: 3881475 - DNA, 25 bp, Homo sapien
tcacttgcgatgaaaaatcctaaag

SEQ ID NO: 3881476 - DNA, 25 bp, Homo sapien
taacttctttggcatcacttgcgat

SEQ ID NO: 3881477 - DNA, 25 bp, Homo sapien
ttggcatcacttgcgatgaaaaatc

SEQ ID NO: 3881478 - DNA, 25 bp, Homo sapien
gaaactgctattggtggtcaacacg

SEQ ID NO: 3881479 - DNA, 25 bp, Homo sapien
taccgcagggaatggtacaagacac

SEQ ID NO: 3881480 - DNA, 25 bp, Homo sapien
ccaatgcggaagcaagctgaacgtc

SEQ ID NO: 3881481 - DNA, 25 bp, Homo sapien
tgacagagcattaatgggaccccta

SEQ ID NO: 3881482 - DNA, 25 bp, Homo sapien
cagtcccgcagggaaatgcctctat

SEQ ID NO: 3881483 - DNA, 25 bp, Homo sapien
tacaattctcatcagtcaggccgat

SEQ ID NO: 3881484 - DNA, 25 bp, Homo sapien
catctacgtgcaattggctagcggg

SEQ ID NO: 3881485 - DNA, 25 bp, Homo sapien
ggagtgaccacacctctgctagggc

SEQ ID NO: 3881486 - DNA, 25 bp, Homo sapien
aaatggttagtcctgtggttaggag

SEQ ID NO: 3881487 - DNA, 25 bp, Homo sapien
aatggttagtcctgtggttaggagt

SEQ ID NO: 3881488 - DNA, 25 bp, Homo sapien
tcctgtggttaggagtgaagataga

SEQ ID NO: 3881489 - DNA, 25 bp, Homo sapien
ttagtcctgtggttaggagtgaaga

SEQ ID NO: 3881490 - DNA, 25 bp, Homo sapien
gagaccaagccacatttgagaatta

SEQ ID NO: 3881491 - DNA, 25 bp, Homo sapien
agaccaagccacatttgagaattaa

SEQ ID NO: 3881492 - DNA, 25 bp, Homo sapien
tgagaccaagccacatttgagaatt

SEQ ID NO: 3881493 - DNA, 25 bp, Homo sapien
ccaatgtgcttccacactgagacca

SEQ ID NO: 3881494 - DNA, 25 bp, Homo sapien
gcacaaagaaagcccaaacaaagcc

SEQ ID NO: 3881495 - DNA, 25 bp, Homo sapien
tgcacaaagaaagcccaaacaaagc

SEQ ID NO: 3881496 - DNA, 25 bp, Homo sapien
ctgcacaaagaaagcccaaacaaag

SEQ ID NO: 3881497 - DNA, 25 bp, Homo sapien
cacaaagaaagcccaaacaaagcca

SEQ ID NO: 3881498 - DNA, 25 bp, Homo sapien
cactctacatttgggcatctgcagg

SEQ ID NO: 3881499 - DNA, 25 bp, Homo sapien
tctggctgtattgggttattcaccc

SEQ ID NO: 3881500 - DNA, 25 bp, Homo sapien
tagacacagactatacacttgaaag

SEQ ID NO: 3881501 - DNA, 25 bp, Homo sapien
caatctgatctggtagttaaggtaa

SEQ ID NO: 3881502 - DNA, 25 bp, Homo sapien
tatggtacacaataggctgcttgta

SEQ ID NO: 3881503 - DNA, 25 bp, Homo sapien
gattttggttgcaccgggagaagca

SEQ ID NO: 3881504 - DNA, 25 bp, Homo sapien
tatcaagagagttggtgtctcccct

SEQ ID NO: 3881505 - DNA, 25 bp, Homo sapien
agctgatattctgccacctggattt

SEQ ID NO: 3881506 - DNA, 25 bp, Homo sapien
gcagacttgtactcaatggctatca

SEQ ID NO: 3881507 - DNA, 25 bp, Homo sapien
ctcaatggctatcattaggagcttg

SEQ ID NO: 3881508 - DNA, 25 bp, Homo sapien
gctatcattaggagcttgagcttca

SEQ ID NO: 3881509 - DNA, 25 bp, Homo sapien
cggctctctcggttggcagacttgt

SEQ ID NO: 3881510 - DNA, 25 bp, Homo sapien
tcttctgaatgaccagagccacata

SEQ ID NO: 3881511 - DNA, 25 bp, Homo sapien
aatgcagtcattaccgaggggatcc

SEQ ID NO: 3881512 - DNA, 25 bp, Homo sapien
cgatctttcggtctcctaatgcagt

SEQ ID NO: 3881513 - DNA, 25 bp, Homo sapien
ggagaagcctcccaatcagttcttc

SEQ ID NO: 3881514 - DNA, 25 bp, Homo sapien
caaatggctcatattgttgttccga

SEQ ID NO: 3881515 - DNA, 25 bp, Homo sapien
attgttgttccgagcagacccctgt

SEQ ID NO: 3881516 - DNA, 25 bp, Homo sapien
ccctgtgtgcttgcaatgatggtaa

SEQ ID NO: 3881517 - DNA, 25 bp, Homo sapien
aatacttggcctctgtgtaagtgcc

SEQ ID NO: 3881518 - DNA, 25 bp, Homo sapien
tgcttggtgctctcgactgcagagc

SEQ ID NO: 3881519 - DNA, 25 bp, Homo sapien
tctaatcttgcaagcagtgggtctt

SEQ ID NO: 3881520 - DNA, 25 bp, Homo sapien
gctactgctaccctgtgattttcta

SEQ ID NO: 3881521 - DNA, 25 bp, Homo sapien
tcacaggccacgtcaactctaatct

SEQ ID NO: 3881522 - DNA, 25 bp, Homo sapien
tttgctacatcaaactggagccagt

SEQ ID NO: 3881523 - DNA, 25 bp, Homo sapien
gaaggccagtgaagttccacaccac

SEQ ID NO: 3881524 - DNA, 25 bp, Homo sapien
tagtgactatcccagttagagcctg

SEQ ID NO: 3881525 - DNA, 25 bp, Homo sapien
ttacccataagaggaacggactcag

SEQ ID NO: 3881526 - DNA, 25 bp, Homo sapien
gtgggattgcaaacatgaggattct

SEQ ID NO: 3881527 - DNA, 25 bp, Homo sapien
tgaggcactgtcatgcctcacggca

SEQ ID NO: 3881528 - DNA, 25 bp, Homo sapien
atgcctcacggcagacacctggagc

SEQ ID NO: 3881529 - DNA, 25 bp, Homo sapien
gtcatcccccataggtgaccatcta

SEQ ID NO: 3881530 - DNA, 25 bp, Homo sapien
tcagcaaagggtgaaaacactttga

SEQ ID NO: 3881531 - DNA, 25 bp, Homo sapien
tcaaggcctccttctgtatatttgg

SEQ ID NO: 3881532 - DNA, 25 bp, Homo sapien
ccagtggaaagagaagctaagactt

SEQ ID NO: 3881533 - DNA, 25 bp, Homo sapien
aagggtgaaaacactttgaatggct

SEQ ID NO: 3881534 - DNA, 25 bp, Homo sapien
cctattcatcacatggggccgagca

SEQ ID NO: 3881535 - DNA, 25 bp, Homo sapien
gcaattgtcaagtgctccaactgta

SEQ ID NO: 3881536 - DNA, 25 bp, Homo sapien
gggccgagcacacgggataccctcg

SEQ ID NO: 3881537 - DNA, 25 bp, Homo sapien
ggataccctcggcaattgtcaagtg

SEQ ID NO: 3881538 - DNA, 25 bp, Homo sapien
ctgtgtacatttcatttgagactcc

SEQ ID NO: 3881539 - DNA, 25 bp, Homo sapien
caagtagtatttctgccatgtgtct

SEQ ID NO: 3881540 - DNA, 25 bp, Homo sapien
ttccaagtagtatttctgccatgtg

SEQ ID NO: 3881541 - DNA, 25 bp, Homo sapien
ctggagagatattctgtgtacattt

SEQ ID NO: 3881542 - DNA, 25 bp, Homo sapien
gacttctaatggtgcggagacatgg

SEQ ID NO: 3881543 - DNA, 25 bp, Homo sapien
tgggaaataaccgtaaatggcacac

SEQ ID NO: 3881544 - DNA, 25 bp, Homo sapien
gcaaccctcttcatgctaggcatct

SEQ ID NO: 3881545 - DNA, 25 bp, Homo sapien
cattagtgggcaaggaaattgatac

SEQ ID NO: 3881546 - DNA, 25 bp, Homo sapien
tattgagtgtgaggacgaaaacgct

SEQ ID NO: 3881547 - DNA, 25 bp, Homo sapien
gggtacttatgtctcctatcgccat

SEQ ID NO: 3881548 - DNA, 25 bp, Homo sapien
cccattttaggacacagtattgagt

SEQ ID NO: 3881549 - DNA, 25 bp, Homo sapien
gcagattctgggtacttatgtctcc

SEQ ID NO: 3881550 - DNA, 25 bp, Homo sapien
ctcagactgatgcttggccagaggc

SEQ ID NO: 3881551 - DNA, 25 bp, Homo sapien
gacccagtctgtggatacccaggtg

SEQ ID NO: 3881552 - DNA, 25 bp, Homo sapien
tacccaggtggactcaggaatgcat

SEQ ID NO: 3881553 - DNA, 25 bp, Homo sapien
tcactaacagtggatggcactcaaa

SEQ ID NO: 3881554 - DNA, 25 bp, Homo sapien
gagctggagcggacatccttggctt

SEQ ID NO: 3881555 - DNA, 25 bp, Homo sapien
ggaacttggcaatgggattagctga

SEQ ID NO: 3881556 - DNA, 25 bp, Homo sapien
gattagctgagctggagcggacatc

SEQ ID NO: 3881557 - DNA, 25 bp, Homo sapien
taggaacttggcaatgggattagct

SEQ ID NO: 3881558 - DNA, 25 bp, Homo sapien
aatcaaaacatacgcatgtcaaggg

SEQ ID NO: 3881559 - DNA, 25 bp, Homo sapien
aacacgaggaagcagagcacagctc

SEQ ID NO: 3881560 - DNA, 25 bp, Homo sapien
tgacagacagctctagttaccatgc

SEQ ID NO: 3881561 - DNA, 25 bp, Homo sapien
aaagcccatgttacatcaacacgag

SEQ ID NO: 3881562 - DNA, 25 bp, Homo sapien
gagaagttctcgtggtgacagtcct

SEQ ID NO: 3881563 - DNA, 25 bp, Homo sapien
ccagagcttgattgaaagagccaga

SEQ ID NO: 3881564 - DNA, 25 bp, Homo sapien
gggccatgccctggaagaaaaccac

SEQ ID NO: 3881565 - DNA, 25 bp, Homo sapien
catgtgcttggtcccatgggccatg

SEQ ID NO: 3881566 - DNA, 25 bp, Homo sapien
ggagacacgtggctacatctggctt

SEQ ID NO: 3881567 - DNA, 25 bp, Homo sapien
gagcagcctggattaaagaagatac

SEQ ID NO: 3881568 - DNA, 25 bp, Homo sapien
cagttccacccatgcaggatgagag

SEQ ID NO: 3881569 - DNA, 25 bp, Homo sapien
ttcagggtctcgtctctaaacacag

SEQ ID NO: 3881570 - DNA, 25 bp, Homo sapien
ctctgggctatgaagcccaacttca

SEQ ID NO: 3881571 - DNA, 25 bp, Homo sapien
tcaactctgcgaggcagattgcgtc

SEQ ID NO: 3881572 - DNA, 25 bp, Homo sapien
ggctatgaagcccaacttcaactct

SEQ ID NO: 3881573 - DNA, 25 bp, Homo sapien
aagcatggtggagaggccttgagcc

SEQ ID NO: 3881574 - DNA, 25 bp, Homo sapien
ccagctcgggatgtttagcagatgg

SEQ ID NO: 3881575 - DNA, 25 bp, Homo sapien
ttccaattccagctcgggatgttta

SEQ ID NO: 3881576 - DNA, 25 bp, Homo sapien
ccaattccagctcgggatgtttagc

SEQ ID NO: 3881577 - DNA, 25 bp, Homo sapien
attccagctcgggatgtttagcaga

SEQ ID NO: 3881578 - DNA, 25 bp, Homo sapien
gggaaagaaaagcaggtatgagacc

SEQ ID NO: 3881579 - DNA, 25 bp, Homo sapien
agaaaagcaggtatgagaccttgct

SEQ ID NO: 3881580 - DNA, 25 bp, Homo sapien
gaaagaaaagcaggtatgagacctt

SEQ ID NO: 3881581 - DNA, 25 bp, Homo sapien
aagaaaagcaggtatgagaccttgc

SEQ ID NO: 3881582 - DNA, 25 bp, Homo sapien
acaaacaggcgaatgtgaccttggg

SEQ ID NO: 3881583 - DNA, 25 bp, Homo sapien
gagacaaacaggcgaatgtgacctt

SEQ ID NO: 3881584 - DNA, 25 bp, Homo sapien
cagagacaaacaggcgaatgtgacc

SEQ ID NO: 3881585 - DNA, 25 bp, Homo sapien
gacaaacaggcgaatgtgaccttgg

SEQ ID NO: 3881586 - DNA, 25 bp, Homo sapien
gaacaacacgttctgcaagggagcc

SEQ ID NO: 3881587 - DNA, 25 bp, Homo sapien
gagaacaacacgttctgcaagggag

SEQ ID NO: 3881588 - DNA, 25 bp, Homo sapien
ctggagaacaacacgttctgcaagg

SEQ ID NO: 3881589 - DNA, 25 bp, Homo sapien
aacaacacgttctgcaagggagcca

SEQ ID NO: 3881590 - DNA, 25 bp, Homo sapien
caattaagaaataacggcatggcac

SEQ ID NO: 3881591 - DNA, 25 bp, Homo sapien
cagcagtcagccgttctggatggtg

SEQ ID NO: 3881592 - DNA, 25 bp, Homo sapien
ctgacagcaggctccactcagtgac

SEQ ID NO: 3881593 - DNA, 25 bp, Homo sapien
aatgggccagcacttgccagcaatt

SEQ ID NO: 3881594 - DNA, 25 bp, Homo sapien
ctggagcgggctctcgcactcctac

SEQ ID NO: 3881595 - DNA, 25 bp, Homo sapien
gcagcatttgagtgatgattcttat

SEQ ID NO: 3881596 - DNA, 25 bp, Homo sapien
tgtgatactgcagcatttgagtgat

SEQ ID NO: 3881597 - DNA, 25 bp, Homo sapien
tcggatggtagttctttatggagat

SEQ ID NO: 3881598 - DNA, 25 bp, Homo sapien
gatgattcttatcttcggatggtag

SEQ ID NO: 3881599 - DNA, 25 bp, Homo sapien
ctcatgatattcgaggcatcctccg

SEQ ID NO: 3881600 - DNA, 25 bp, Homo sapien
gcatccgggtcagcgcagtacttgt

SEQ ID NO: 3881601 - DNA, 25 bp, Homo sapien
tggcaaggatcaggcatgcatctgc

SEQ ID NO: 3881602 - DNA, 25 bp, Homo sapien
ttcgaggcatcctccgcatccgggt

SEQ ID NO: 3881603 - DNA, 25 bp, Homo sapien
ctttttcacatcttcattttctata

SEQ ID NO: 3881604 - DNA, 25 bp, Homo sapien
ttttcacatcttcattttctatagg

SEQ ID NO: 3881605 - DNA, 25 bp, Homo sapien
tttttcacatcttcattttctatag

SEQ ID NO: 3881606 - DNA, 25 bp, Homo sapien
gataaaattccacctgagtaaaatg

SEQ ID NO: 3881607 - DNA, 25 bp, Homo sapien
gagtaaaatgtcgtttgaacagagc

SEQ ID NO: 3881608 - DNA, 25 bp, Homo sapien
cttgactcttgcaagatcatgtgga

SEQ ID NO: 3881609 - DNA, 25 bp, Homo sapien
gattgaggacggaaccctgataaaa

SEQ ID NO: 3881610 - DNA, 25 bp, Homo sapien
tcttgaaatgcccaactcatgtggg

SEQ ID NO: 3881611 - DNA, 25 bp, Homo sapien
tcagcatcccttggataacacaggg

SEQ ID NO: 3881612 - DNA, 25 bp, Homo sapien
ccgggtaataccatagactgatgct

SEQ ID NO: 3881613 - DNA, 25 bp, Homo sapien
gaccagtctttcagacccatgacaa

SEQ ID NO: 3881614 - DNA, 25 bp, Homo sapien
gtccttcaggaagttggaaacactc

SEQ ID NO: 3881615 - DNA, 25 bp, Homo sapien
actctccagagtgatgtgtccgcag

SEQ ID NO: 3881616 - DNA, 25 bp, Homo sapien
aagaaaaacgatctccacattgacg

SEQ ID NO: 3881617 - DNA, 25 bp, Homo sapien
cgtcatcccggtccttgtgcagaaa

SEQ ID NO: 3881618 - DNA, 25 bp, Homo sapien
cctgatgctgcacaaaatcctatta

SEQ ID NO: 3881619 - DNA, 25 bp, Homo sapien
tgctagcaggtgctgagactcctag

SEQ ID NO: 3881620 - DNA, 25 bp, Homo sapien
cctggcaagacagcagaagccaggc

SEQ ID NO: 3881621 - DNA, 25 bp, Homo sapien
gccagttagatcaggccaggcacca

SEQ ID NO: 3881622 - DNA, 25 bp, Homo sapien
tgcattatcaagtcccttgcagatt

SEQ ID NO: 3881623 - DNA, 25 bp, Homo sapien
tgctgcattatcaagtcccttgcag

SEQ ID NO: 3881624 - DNA, 25 bp, Homo sapien
atcaagtcccttgcagattcatatc

SEQ ID NO: 3881625 - DNA, 25 bp, Homo sapien
caagtcccttgcagattcatatctc

SEQ ID NO: 3881626 - DNA, 25 bp, Homo sapien
gcccacaaagcgtcctccggggaga

SEQ ID NO: 3881627 - DNA, 25 bp, Homo sapien
ccacaaagcgtcctccggggagatt

SEQ ID NO: 3881628 - DNA, 25 bp, Homo sapien
cacaaagcgtcctccggggagattt

SEQ ID NO: 3881629 - DNA, 25 bp, Homo sapien
ctgcccacaaagcgtcctccgggga

SEQ ID NO: 3881630 - DNA, 25 bp, Homo sapien
gctgcttccttagggtgcccgggat

SEQ ID NO: 3881631 - DNA, 25 bp, Homo sapien
tgagcattactcagggctaaatggg

SEQ ID NO: 3881632 - DNA, 25 bp, Homo sapien
cccgggatttccaggagagctaaag

SEQ ID NO: 3881633 - DNA, 25 bp, Homo sapien
tgacacgttataggttctgctggcc

SEQ ID NO: 3881634 - DNA, 25 bp, Homo sapien
tgctcgccttgtttgagggtggttt

SEQ ID NO: 3881635 - DNA, 25 bp, Homo sapien
gaattgctcgccttgtttgagggtg

SEQ ID NO: 3881636 - DNA, 25 bp, Homo sapien
aagggatgaggctggaattgctcgc

SEQ ID NO: 3881637 - DNA, 25 bp, Homo sapien
tgaggctggaattgctcgccttgtt

SEQ ID NO: 3881638 - DNA, 25 bp, Homo sapien
aactgttgagactgacagtccctcc

SEQ ID NO: 3881639 - DNA, 25 bp, Homo sapien
gagatgagccccacaactgttgaga

SEQ ID NO: 3881640 - DNA, 25 bp, Homo sapien
gctcggggctcctggccaatctgac

SEQ ID NO: 3881641 - DNA, 25 bp, Homo sapien
acaactgttgagactgacagtccct

SEQ ID NO: 3881642 - DNA, 25 bp, Homo sapien
cacataatgcccagtcaggagtgag

SEQ ID NO: 3881643 - DNA, 25 bp, Homo sapien
gagcatttgatgcaagagtcagcca

SEQ ID NO: 3881644 - DNA, 25 bp, Homo sapien
aagaggctcgactcctgtccctgtg

SEQ ID NO: 3881645 - DNA, 25 bp, Homo sapien
tgactgtggagataaaaccactggc

SEQ ID NO: 3881646 - DNA, 25 bp, Homo sapien
tgcacttagcaatcaggcacgcagc

SEQ ID NO: 3881647 - DNA, 25 bp, Homo sapien
tatgaggctaagacagtgtgacaca

SEQ ID NO: 3881648 - DNA, 25 bp, Homo sapien
gatgccattataagagcctgccctt

SEQ ID NO: 3881649 - DNA, 25 bp, Homo sapien
tcctgctaggttgatgaaggtccct

SEQ ID NO: 3881650 - DNA, 25 bp, Homo sapien
gaatgcagttagaattgatggatgg

SEQ ID NO: 3881651 - DNA, 25 bp, Homo sapien
gttatcaaggagcccacatattgaa

SEQ ID NO: 3881652 - DNA, 25 bp, Homo sapien
gggagaagctgcctctaactcagca

SEQ ID NO: 3881653 - DNA, 25 bp, Homo sapien
ttttccatacagtgaaagttatcaa

SEQ ID NO: 3881654 - DNA, 25 bp, Homo sapien
gcttcagtcacatttcgaccagagc

SEQ ID NO: 3881655 - DNA, 25 bp, Homo sapien
atgcaaagcttcagtcacatttcga

SEQ ID NO: 3881656 - DNA, 25 bp, Homo sapien
aaagcttcagtcacatttcgaccag

SEQ ID NO: 3881657 - DNA, 25 bp, Homo sapien
agtcacatttcgaccagagccatgt

SEQ ID NO: 3881658 - DNA, 25 bp, Homo sapien
tgccagggtgaaagatgaccggatc

SEQ ID NO: 3881659 - DNA, 25 bp, Homo sapien
ggaagtctgtgatctgaagtcatca

SEQ ID NO: 3881660 - DNA, 25 bp, Homo sapien
cagagtggcaggaagtctgtgatct

SEQ ID NO: 3881661 - DNA, 25 bp, Homo sapien
cctgaaagtttgagtggaactgcca

SEQ ID NO: 3881662 - DNA, 25 bp, Homo sapien
tgagagcagcaatttcgggcacgta

SEQ ID NO: 3881663 - DNA, 25 bp, Homo sapien
gtcccgccgaatttattccgactca

SEQ ID NO: 3881664 - DNA, 25 bp, Homo sapien
tttcgggcacgtagcgggcaaacat

SEQ ID NO: 3881665 - DNA, 25 bp, Homo sapien
tattccgactcaggatgagagcagc

SEQ ID NO: 3881666 - DNA, 25 bp, Homo sapien
ataggagcccccgtatttcttgcgg

SEQ ID NO: 3881667 - DNA, 25 bp, Homo sapien
cgcactataggagcccccgtatttc

SEQ ID NO: 3881668 - DNA, 25 bp, Homo sapien
ctattaactctatgatttcagggac

SEQ ID NO: 3881669 - DNA, 25 bp, Homo sapien
tttcagggacgtagctggcaaacat

SEQ ID NO: 3881670 - DNA, 25 bp, Homo sapien
ctgagaagataggagacagaagaga

SEQ ID NO: 3881671 - DNA, 25 bp, Homo sapien
tgagaagataggagacagaagagag

SEQ ID NO: 3881672 - DNA, 25 bp, Homo sapien
gagaagataggagacagaagagaga

SEQ ID NO: 3881673 - DNA, 25 bp, Homo sapien
cataaacatccccataaccaacggt

SEQ ID NO: 3881674 - DNA, 25 bp, Homo sapien
agaccatgaagaggcgcccaagtgt

SEQ ID NO: 3881675 - DNA, 25 bp, Homo sapien
gtcccccgaggatgaagaagaccat

SEQ ID NO: 3881676 - DNA, 25 bp, Homo sapien
caagtgtggtttttgcataaacatc

SEQ ID NO: 3881677 - DNA, 25 bp, Homo sapien
tttcccatgggtcccctgaattctc

SEQ ID NO: 3881678 - DNA, 25 bp, Homo sapien
cattcccagtaggtgagagcctggt

SEQ ID NO: 3881679 - DNA, 25 bp, Homo sapien
tgaccatgagtaaatagacacattc

SEQ ID NO: 3881680 - DNA, 25 bp, Homo sapien
tagacacattcccagtaggtgagag

SEQ ID NO: 3881681 - DNA, 25 bp, Homo sapien
caaatggatgaacccggctgcagtc

SEQ ID NO: 3881682 - DNA, 25 bp, Homo sapien
ctgcagtcagccacgtgctgataaa

SEQ ID NO: 3881683 - DNA, 25 bp, Homo sapien
ccacgtgctgataaatatggagagc

SEQ ID NO: 3881684 - DNA, 25 bp, Homo sapien
tatggagagcagattcaccagcttg

SEQ ID NO: 3881685 - DNA, 25 bp, Homo sapien
gagtctccttggtgctttggaaaaa

SEQ ID NO: 3881686 - DNA, 25 bp, Homo sapien
tcttgggacctgaacacagcagtgt

SEQ ID NO: 3881687 - DNA, 25 bp, Homo sapien
tagggagctcttgccatatgcagaa

SEQ ID NO: 3881688 - DNA, 25 bp, Homo sapien
tgtcccaccaacaaccatgtagagt

SEQ ID NO: 3881689 - DNA, 25 bp, Homo sapien
ttgttttaagaatattcagaaactg

SEQ ID NO: 3881690 - DNA, 25 bp, Homo sapien
ctgaaaactgtatcagtctcagagc

SEQ ID NO: 3881691 - DNA, 25 bp, Homo sapien
tttctgaaaactgtatcagtctcag

SEQ ID NO: 3881692 - DNA, 25 bp, Homo sapien
aaaactgtatcagtctcagagctct

SEQ ID NO: 3881693 - DNA, 25 bp, Homo sapien
caaaacgagatctaaagctactaac

SEQ ID NO: 3881694 - DNA, 25 bp, Homo sapien
cagtgagagggatgactttctgaaa

SEQ ID NO: 3881695 - DNA, 25 bp, Homo sapien
ggtgcaaaagtgatacctattcacc

SEQ ID NO: 3881696 - DNA, 25 bp, Homo sapien
aactgaggaccaaaaactgactctc

SEQ ID NO: 3881697 - DNA, 25 bp, Homo sapien
ttccaataaacgtctgtcgtttcca

SEQ ID NO: 3881698 - DNA, 25 bp, Homo sapien
tgaaaggttccaataaacgtctgtc

SEQ ID NO: 3881699 - DNA, 25 bp, Homo sapien
ctgaaaggttccaataaacgtctgt

SEQ ID NO: 3881700 - DNA, 25 bp, Homo sapien
taaacgtctgtcgtttccaatctct

SEQ ID NO: 3881701 - DNA, 25 bp, Homo sapien
agcactagaggccagttaaattcat

SEQ ID NO: 3881702 - DNA, 25 bp, Homo sapien
cgtttgccaaactttctcccacatt

SEQ ID NO: 3881703 - DNA, 25 bp, Homo sapien
caagctattacatcgtttgccaaac

SEQ ID NO: 3881704 - DNA, 25 bp, Homo sapien
taatagctcaataacattcaggagc

SEQ ID NO: 3881705 - DNA, 25 bp, Homo sapien
aagagccatggacgggtgagtcctt

SEQ ID NO: 3881706 - DNA, 25 bp, Homo sapien
caggaatacggaatacttttgggag

SEQ ID NO: 3881707 - DNA, 25 bp, Homo sapien
cagcctccaggaatacggaatactt

SEQ ID NO: 3881708 - DNA, 25 bp, Homo sapien
ccaaatccagcctagacggaaagca

SEQ ID NO: 3881709 - DNA, 25 bp, Homo sapien
gacaccaatgactgccggaagttcg

SEQ ID NO: 3881710 - DNA, 25 bp, Homo sapien
gacttcacccggtagccattatgga

SEQ ID NO: 3881711 - DNA, 25 bp, Homo sapien
ggatgcacaaacaccacagcaagac

SEQ ID NO: 3881712 - DNA, 25 bp, Homo sapien
cgcctgccgggtctgtaaagctctg

SEQ ID NO: 3881713 - DNA, 25 bp, Homo sapien
taggctttcggctcccttccattca

SEQ ID NO: 3881714 - DNA, 25 bp, Homo sapien
gggctaggctttcggctcccttcca

SEQ ID NO: 3881715 - DNA, 25 bp, Homo sapien
agatgggctaggctttcggctccct

SEQ ID NO: 3881716 - DNA, 25 bp, Homo sapien
gagggagatgggctaggctttcggc

SEQ ID NO: 3881717 - DNA, 25 bp, Homo sapien
gtgttcctctgacccgtgctgcaaa

SEQ ID NO: 3881718 - DNA, 25 bp, Homo sapien
gggtcaccagcatctatgtcctggt

SEQ ID NO: 3881719 - DNA, 25 bp, Homo sapien
gtccctcttgcaagaaccccggcat

SEQ ID NO: 3881720 - DNA, 25 bp, Homo sapien
tcctggtggagccaatagacactct

SEQ ID NO: 3881721 - DNA, 25 bp, Homo sapien
gccttggaaactgacaatgcacatt

SEQ ID NO: 3881722 - DNA, 25 bp, Homo sapien
gcatcttgagaccttatagatccag

SEQ ID NO: 3881723 - DNA, 25 bp, Homo sapien
tcaagggcatcttgagaccttatag

SEQ ID NO: 3881724 - DNA, 25 bp, Homo sapien
cacttcctagccttggaaactgaca

SEQ ID NO: 3881725 - DNA, 25 bp, Homo sapien
gagactggtgaattttacccagaaa

SEQ ID NO: 3881726 - DNA, 25 bp, Homo sapien
ggcctgagactggtgaattttaccc

SEQ ID NO: 3881727 - DNA, 25 bp, Homo sapien
cttaactacacccaaatcttctgat

SEQ ID NO: 3881728 - DNA, 25 bp, Homo sapien
tctgctgacaaatatgtttccttaa

SEQ ID NO: 3881729 - DNA, 25 bp, Homo sapien
aggattctggaggattgcaaatttg

SEQ ID NO: 3881730 - DNA, 25 bp, Homo sapien
caaaaggattctggaggattgcaaa

SEQ ID NO: 3881731 - DNA, 25 bp, Homo sapien
ccaaaaggattctggaggattgcaa

SEQ ID NO: 3881732 - DNA, 25 bp, Homo sapien
aaaaggattctggaggattgcaaat

SEQ ID NO: 3881733 - DNA, 25 bp, Homo sapien
tgaccatgtgcacgttgctccagac

SEQ ID NO: 3881734 - DNA, 25 bp, Homo sapien
caacctgtttggtgttataggcaga

SEQ ID NO: 3881735 - DNA, 25 bp, Homo sapien
tttgtggtggatactgggcaacaga

SEQ ID NO: 3881736 - DNA, 25 bp, Homo sapien
tataggcagatgctaagttacaggc

SEQ ID NO: 3881737 - DNA, 25 bp, Homo sapien
ggagggcatcttatttaaagcgtgt

SEQ ID NO: 3881738 - DNA, 25 bp, Homo sapien
gcaatatcaagggaacacaattgga

SEQ ID NO: 3881739 - DNA, 25 bp, Homo sapien
gaacacaattggaaatctcttggag

SEQ ID NO: 3881740 - DNA, 25 bp, Homo sapien
taaagcgtgtccctgacaaagcaat

SEQ ID NO: 3881741 - DNA, 25 bp, Homo sapien
agcatttcattaaaggtgctttctc

SEQ ID NO: 3881742 - DNA, 25 bp, Homo sapien
aagcatttcattaaaggtgctttct

SEQ ID NO: 3881743 - DNA, 25 bp, Homo sapien
tagtagaccccatgacagcaggaat

SEQ ID NO: 3881744 - DNA, 25 bp, Homo sapien
agtagaccccatgacagcaggaata

SEQ ID NO: 3881745 - DNA, 25 bp, Homo sapien
ctagtagaccccatgacagcaggaa

SEQ ID NO: 3881746 - DNA, 25 bp, Homo sapien
gaagaaatccactacagagttcact

SEQ ID NO: 3881747 - DNA, 25 bp, Homo sapien
cacaatttatcgttggctgcaataa

SEQ ID NO: 3881748 - DNA, 25 bp, Homo sapien
gggcaccgtgaagaaatccactaca

SEQ ID NO: 3881749 - DNA, 25 bp, Homo sapien
tcacttccagccagaaccacaattt

SEQ ID NO: 3881750 - DNA, 25 bp, Homo sapien
gagaaggaagaacacgttgaaagcc

SEQ ID NO: 3881751 - DNA, 25 bp, Homo sapien
gaaggaagaacacgttgaaagccat

SEQ ID NO: 3881752 - DNA, 25 bp, Homo sapien
agaaggaagaacacgttgaaagcca

SEQ ID NO: 3881753 - DNA, 25 bp, Homo sapien
gtaatgtgaaatctttgtagaaatt

SEQ ID NO: 3881754 - DNA, 25 bp, Homo sapien
tgtaatgtgaaatctttgtagaaat

SEQ ID NO: 3881755 - DNA, 25 bp, Homo sapien
tgaagccatacaagaccttttcctt

SEQ ID NO: 3881756 - DNA, 25 bp, Homo sapien
aaaaatttagaaccgatttcatcat

SEQ ID NO: 3881757 - DNA, 25 bp, Homo sapien
gttgaagccatacaagaccttttcc

SEQ ID NO: 3881758 - DNA, 25 bp, Homo sapien
tttagaaccgatttcatcatgtttc

SEQ ID NO: 3881759 - DNA, 25 bp, Homo sapien
atcattccttgcgtactagacttgg

SEQ ID NO: 3881760 - DNA, 25 bp, Homo sapien
tccttgcgtactagacttggagctg

SEQ ID NO: 3881761 - DNA, 25 bp, Homo sapien
cattccttgcgtactagacttggag

SEQ ID NO: 3881762 - DNA, 25 bp, Homo sapien
gcgtactagacttggagctgaaata

SEQ ID NO: 3881763 - DNA, 25 bp, Homo sapien
caactctttagcatccatatacact

SEQ ID NO: 3881764 - DNA, 25 bp, Homo sapien
cagttgtaaggctcaggatgtctac

SEQ ID NO: 3881765 - DNA, 25 bp, Homo sapien
ggatgtctacctgaataattattcc

SEQ ID NO: 3881766 - DNA, 25 bp, Homo sapien
cctgaaacaatgatagcagttgact

SEQ ID NO: 3881767 - DNA, 25 bp, Homo sapien
tataactgctcagcaagttcgcttg

SEQ ID NO: 3881768 - DNA, 25 bp, Homo sapien
gcttgatatcgccacatcttccatt

SEQ ID NO: 3881769 - DNA, 25 bp, Homo sapien
gctttgtgtaaactggccgcacttc

SEQ ID NO: 3881770 - DNA, 25 bp, Homo sapien
ttggctgcttgatatcgccacatct

SEQ ID NO: 3881771 - DNA, 25 bp, Homo sapien
caggtgcaatcttaatcgctcacgc

SEQ ID NO: 3881772 - DNA, 25 bp, Homo sapien
gaaaccttgtgagcaaaaactgaat

SEQ ID NO: 3881773 - DNA, 25 bp, Homo sapien
tgcaatcttaatcgctcacgctttt

SEQ ID NO: 3881774 - DNA, 25 bp, Homo sapien
aacagttcagatgcagaaaccttgt

SEQ ID NO: 3881775 - DNA, 25 bp, Homo sapien
tggtttgccatgaagtctccaggag

SEQ ID NO: 3881776 - DNA, 25 bp, Homo sapien
ttggtttgccatgaagtctccagga

SEQ ID NO: 3881777 - DNA, 25 bp, Homo sapien
ctggtatgtattaaaggaataggaa

SEQ ID NO: 3881778 - DNA, 25 bp, Homo sapien
actgtgccaccaccactgaagaggc

SEQ ID NO: 3881779 - DNA, 25 bp, Homo sapien
ctctgaaccacacggcaggaagcat

SEQ ID NO: 3881780 - DNA, 25 bp, Homo sapien
aaactcctgcggctgtcgtaggtgc

SEQ ID NO: 3881781 - DNA, 25 bp, Homo sapien
tcgtaggtgcccacgggactgctgg

SEQ ID NO: 3881782 - DNA, 25 bp, Homo sapien
ctgtggccccaggaggagacaggaa

SEQ ID NO: 3881783 - DNA, 25 bp, Homo sapien
ggagctagcaggcaccaaggggcca

SEQ ID NO: 3881784 - DNA, 25 bp, Homo sapien
gagctagcaggcaccaaggggccat

SEQ ID NO: 3881785 - DNA, 25 bp, Homo sapien
ctgggagctagcaggcaccaagggg

SEQ ID NO: 3881786 - DNA, 25 bp, Homo sapien
tgggagctagcaggcaccaaggggc

SEQ ID NO: 3881787 - DNA, 25 bp, Homo sapien
ggcatcttcccgtcaatgccctggg

SEQ ID NO: 3881788 - DNA, 25 bp, Homo sapien
caaaggccgcagatccaagcttagg

SEQ ID NO: 3881789 - DNA, 25 bp, Homo sapien
catgtgtctgtgattgcagaaggcc

SEQ ID NO: 3881790 - DNA, 25 bp, Homo sapien
tctgtgattgcagaaggccctattc

SEQ ID NO: 3881791 - DNA, 25 bp, Homo sapien
ggtgagcactcactatacatgatcg

SEQ ID NO: 3881792 - DNA, 25 bp, Homo sapien
aaaatgagattttcagggtgagcac

SEQ ID NO: 3881793 - DNA, 25 bp, Homo sapien
cactcggtttcctggtagccaatct

SEQ ID NO: 3881794 - DNA, 25 bp, Homo sapien
aatctataaagtccccaggagatca

SEQ ID NO: 3881795 - DNA, 25 bp, Homo sapien
ccactgtatcgtacacattaaaatg

SEQ ID NO: 3881796 - DNA, 25 bp, Homo sapien
gggtttacagaaatgtcttgactaa

SEQ ID NO: 3881797 - DNA, 25 bp, Homo sapien
gcataacattgtgaaggtacgaatc

SEQ ID NO: 3881798 - DNA, 25 bp, Homo sapien
gaaacatctagaagaggtaaatcca

SEQ ID NO: 3881799 - DNA, 25 bp, Homo sapien
ggagcagggagacagatattctcct

SEQ ID NO: 3881800 - DNA, 25 bp, Homo sapien
gcagggagacagatattctccttac

SEQ ID NO: 3881801 - DNA, 25 bp, Homo sapien
ttaaattggagcagggagacagata

SEQ ID NO: 3881802 - DNA, 25 bp, Homo sapien
aattggagcagggagacagatattc

SEQ ID NO: 3881803 - DNA, 25 bp, Homo sapien
tcacgggcacacagaggaccattca

SEQ ID NO: 3881804 - DNA, 25 bp, Homo sapien
agattgtactcaaaggcactggaag

SEQ ID NO: 3881805 - DNA, 25 bp, Homo sapien
aacagattgtactcaaaggcactgg

SEQ ID NO: 3881806 - DNA, 25 bp, Homo sapien
ctgataacagattgtactcaaaggc

SEQ ID NO: 3881807 - DNA, 25 bp, Homo sapien
gataacagattgtactcaaaggcac

SEQ ID NO: 3881808 - DNA, 25 bp, Homo sapien
agtctagtagccaaccatgccaggg

SEQ ID NO: 3881809 - DNA, 25 bp, Homo sapien
cacaaaatccttggccggtgaccag

SEQ ID NO: 3881810 - DNA, 25 bp, Homo sapien
catgtaagaacacccctggagagag

SEQ ID NO: 3881811 - DNA, 25 bp, Homo sapien
gcttcagctgaatacccgattggca

SEQ ID NO: 3881812 - DNA, 25 bp, Homo sapien
ctatgaagtatattacaagtgcacc

SEQ ID NO: 3881813 - DNA, 25 bp, Homo sapien
gaagtatattacaagtgcaccgatg

SEQ ID NO: 3881814 - DNA, 25 bp, Homo sapien
tattacaagtgcaccgatgctgaga

SEQ ID NO: 3881815 - DNA, 25 bp, Homo sapien
caagtgcaccgatgctgagagcaaa

SEQ ID NO: 3881816 - DNA, 25 bp, Homo sapien
tgtggagatattgagtactcggtgt

SEQ ID NO: 3881817 - DNA, 25 bp, Homo sapien
tactgtgtggagatattgagtactc

SEQ ID NO: 3881818 - DNA, 25 bp, Homo sapien
aaacacccatatactgtgtggagat

SEQ ID NO: 3881819 - DNA, 25 bp, Homo sapien
gatttactgaaaacacccatatact

SEQ ID NO: 3881820 - DNA, 25 bp, Homo sapien
gagcaccgcggtggtagaggtcgag

SEQ ID NO: 3881821 - DNA, 25 bp, Homo sapien
gagtgagaccctgaagtttataacc

SEQ ID NO: 3881822 - DNA, 25 bp, Homo sapien
taacccggaataaaggtgagatgca

SEQ ID NO: 3881823 - DNA, 25 bp, Homo sapien
gggatccctggtgaaagtggagcag

SEQ ID NO: 3881824 - DNA, 25 bp, Homo sapien
atgcaaaacaccacaaccccacacc

SEQ ID NO: 3881825 - DNA, 25 bp, Homo sapien
tgatgcaaaacaccacaaccccaca

SEQ ID NO: 3881826 - DNA, 25 bp, Homo sapien
ctgatgcaaaacaccacaaccccac

SEQ ID NO: 3881827 - DNA, 25 bp, Homo sapien
gatgcaaaacaccacaaccccacac

SEQ ID NO: 3881828 - DNA, 25 bp, Homo sapien
tagcatatccgtaagtctttgcaaa

SEQ ID NO: 3881829 - DNA, 25 bp, Homo sapien
attagcatatccgtaagtctttgca

SEQ ID NO: 3881830 - DNA, 25 bp, Homo sapien
caatcttattagcatatccgtaagt

SEQ ID NO: 3881831 - DNA, 25 bp, Homo sapien
tcttattagcatatccgtaagtctt

SEQ ID NO: 3881832 - DNA, 25 bp, Homo sapien
cactttctgacaaccctgatggtac

SEQ ID NO: 3881833 - DNA, 25 bp, Homo sapien
aaattctgatctggcgggaaattcc

SEQ ID NO: 3881834 - DNA, 25 bp, Homo sapien
tcaaaatagagcaagtttgtccctc

SEQ ID NO: 3881835 - DNA, 25 bp, Homo sapien
tactcaggtcatgaatgaaggctga

SEQ ID NO: 3881836 - DNA, 25 bp, Homo sapien
cagattaaagggctcatgaaagagg

SEQ ID NO: 3881837 - DNA, 25 bp, Homo sapien
gtcagcaggctcagattaaagggct

SEQ ID NO: 3881838 - DNA, 25 bp, Homo sapien
gaaagagggttatttccagagataa

SEQ ID NO: 3881839 - DNA, 25 bp, Homo sapien
gctcatgaaagagggttatttccag

SEQ ID NO: 3881840 - DNA, 25 bp, Homo sapien
ttctctgctacatcagagagcccct

SEQ ID NO: 3881841 - DNA, 25 bp, Homo sapien
agctctttctctgctacatcagaga

SEQ ID NO: 3881842 - DNA, 25 bp, Homo sapien
gacaaatgtatgctgccaagcaagg

SEQ ID NO: 3881843 - DNA, 25 bp, Homo sapien
tctcatgtcctcaaagtgacaaatg

SEQ ID NO: 3881844 - DNA, 25 bp, Homo sapien
tatcagttccaatgaaagctgatgt

SEQ ID NO: 3881845 - DNA, 25 bp, Homo sapien
atctcccttagttggtctgatggta

SEQ ID NO: 3881846 - DNA, 25 bp, Homo sapien
cacccttgattgatcattctgctgg

SEQ ID NO: 3881847 - DNA, 25 bp, Homo sapien
tatgaaaaacatctcccttagttgg

SEQ ID NO: 3881848 - DNA, 25 bp, Homo sapien
cagataacagcaaagtcgacaattc

SEQ ID NO: 3881849 - DNA, 25 bp, Homo sapien
gcaaagtcgacaattccagctgccg

SEQ ID NO: 3881850 - DNA, 25 bp, Homo sapien
caggtaattcctctaagtgcactat

SEQ ID NO: 3881851 - DNA, 25 bp, Homo sapien
tccagctgccgccttgtcaggaaat

SEQ ID NO: 3881852 - DNA, 25 bp, Homo sapien
ggccatctcaacagtattttcgcca

SEQ ID NO: 3881853 - DNA, 25 bp, Homo sapien
ggttgatccaacatcagcatctttg

SEQ ID NO: 3881854 - DNA, 25 bp, Homo sapien
atctgggccaaccacgtgccggcag

SEQ ID NO: 3881855 - DNA, 25 bp, Homo sapien
caaaactgtatttcctcggttgatc

SEQ ID NO: 3881856 - DNA, 25 bp, Homo sapien
agacaccttggcccctgtccgtggt

SEQ ID NO: 3881857 - DNA, 25 bp, Homo sapien
ctactcagacaccttggcccctgtc

SEQ ID NO: 3881858 - DNA, 25 bp, Homo sapien
tactcagacaccttggcccctgtcc

SEQ ID NO: 3881859 - DNA, 25 bp, Homo sapien
ctcagacaccttggcccctgtccgt

SEQ ID NO: 3881860 - DNA, 25 bp, Homo sapien
tcatgtcaggaggagctccagcaaa

SEQ ID NO: 3881861 - DNA, 25 bp, Homo sapien
gtcaggaggagctccagcaaagtat

SEQ ID NO: 3881862 - DNA, 25 bp, Homo sapien
catgtcaggaggagctccagcaaag

SEQ ID NO: 3881863 - DNA, 25 bp, Homo sapien
tgtcaggaggagctccagcaaagta

SEQ ID NO: 3881864 - DNA, 25 bp, Homo sapien
gctataggtggccacgccacatatt

SEQ ID NO: 3881865 - DNA, 25 bp, Homo sapien
cctcccttgcagctataggtggcca

SEQ ID NO: 3881866 - DNA, 25 bp, Homo sapien
ctgtcctcgaagatggaaagctgaa

SEQ ID NO: 3881867 - DNA, 25 bp, Homo sapien
cttgcctgtcctcgaagatggaaag

SEQ ID NO: 3881868 - DNA, 25 bp, Homo sapien
actgtgacattagcttgggctgctg

SEQ ID NO: 3881869 - DNA, 25 bp, Homo sapien
ggctgctgggatccgtcttgaaaga

SEQ ID NO: 3881870 - DNA, 25 bp, Homo sapien
tcagatcaggagaggtgtgtatgcc

SEQ ID NO: 3881871 - DNA, 25 bp, Homo sapien
gaaaggaggtcagcctggaacagtc

SEQ ID NO: 3881872 - DNA, 25 bp, Homo sapien
gcaggatgaatcttgagcctggggt

SEQ ID NO: 3881873 - DNA, 25 bp, Homo sapien
caggatgaatcttgagcctggggtg

SEQ ID NO: 3881874 - DNA, 25 bp, Homo sapien
ggtgacagcatgagtggctgagtga

SEQ ID NO: 3881875 - DNA, 25 bp, Homo sapien
actggtgacagcatgagtggctgag

SEQ ID NO: 3881876 - DNA, 25 bp, Homo sapien
gagtgtggctggataagcccatttc

SEQ ID NO: 3881877 - DNA, 25 bp, Homo sapien
agtgtggctggataagcccatttca

SEQ ID NO: 3881878 - DNA, 25 bp, Homo sapien
gtgtggctggataagcccatttcag

SEQ ID NO: 3881879 - DNA, 25 bp, Homo sapien
tgtggctggataagcccatttcagc

SEQ ID NO: 3881880 - DNA, 25 bp, Homo sapien
tccagtaacatctaccatgatatta

SEQ ID NO: 3881881 - DNA, 25 bp, Homo sapien
gattcctgctaagacccacagggtg

SEQ ID NO: 3881882 - DNA, 25 bp, Homo sapien
acagacttctccaaaacaagtccac

SEQ ID NO: 3881883 - DNA, 25 bp, Homo sapien
aacaccattcaggatgattcctgct

SEQ ID NO: 3881884 - DNA, 25 bp, Homo sapien
tgaaacaaagcagcagtcggaatct

SEQ ID NO: 3881885 - DNA, 25 bp, Homo sapien
gtgctctgggtgaaacaaagcagca

SEQ ID NO: 3881886 - DNA, 25 bp, Homo sapien
ctgggtgaaacaaagcagcagtcgg

SEQ ID NO: 3881887 - DNA, 25 bp, Homo sapien
gcactcagcccagaagaggtgctct

SEQ ID NO: 3881888 - DNA, 25 bp, Homo sapien
cttggtgtgtgaacttgccgctgac

SEQ ID NO: 3881889 - DNA, 25 bp, Homo sapien
tagtgccgctttcaccttggtgtgt

SEQ ID NO: 3881890 - DNA, 25 bp, Homo sapien
tgccgctgacttcccaaatgagttc

SEQ ID NO: 3881891 - DNA, 25 bp, Homo sapien
gaaccgatttcctgtgctttgtgct

SEQ ID NO: 3881892 - DNA, 25 bp, Homo sapien
tcttgtctttgaaaagcctgtgttc

SEQ ID NO: 3881893 - DNA, 25 bp, Homo sapien
gatcttgtctttgaaaagcctgtgt

SEQ ID NO: 3881894 - DNA, 25 bp, Homo sapien
atagatcttgtctttgaaaagcctg

SEQ ID NO: 3881895 - DNA, 25 bp, Homo sapien
tacaagacatagatcttgtctttga

SEQ ID NO: 3881896 - DNA, 25 bp, Homo sapien
caaccccaggagctagaacaacatt

SEQ ID NO: 3881897 - DNA, 25 bp, Homo sapien
tctgaggccccacctatatttgagg

SEQ ID NO: 3881898 - DNA, 25 bp, Homo sapien
gctgcagtctaagcctccaggtggg

SEQ ID NO: 3881899 - DNA, 25 bp, Homo sapien
tgctttggatgtgcaccaaccccag

SEQ ID NO: 3881900 - DNA, 25 bp, Homo sapien
ccgctgcctgtttgagattgatgcc

SEQ ID NO: 3881901 - DNA, 25 bp, Homo sapien
ccctgccgctgcctgtttgagattg

SEQ ID NO: 3881902 - DNA, 25 bp, Homo sapien
cctctccaatctctagctctttgtt

SEQ ID NO: 3881903 - DNA, 25 bp, Homo sapien
ctgtttgagattgatgcctctccaa

SEQ ID NO: 3881904 - DNA, 25 bp, Homo sapien
ctgtgtgtaggaatcttcaacagct

SEQ ID NO: 3881905 - DNA, 25 bp, Homo sapien
gagcaagattccctctcaaaataaa

SEQ ID NO: 3881906 - DNA, 25 bp, Homo sapien
aaaataaataaatacatacatacat

SEQ ID NO: 3881907 - DNA, 25 bp, Homo sapien
gcaagattccctctcaaaataaata

SEQ ID NO: 3881908 - DNA, 25 bp, Homo sapien
cagagcaagattccctctcaaaata

SEQ ID NO: 3881909 - DNA, 25 bp, Homo sapien
tcatctaggaagagtcatcttggga

SEQ ID NO: 3881910 - DNA, 25 bp, Homo sapien
tctaggaagagtcatcttgggacca

SEQ ID NO: 3881911 - DNA, 25 bp, Homo sapien
catctaggaagagtcatcttgggac

SEQ ID NO: 3881912 - DNA, 25 bp, Homo sapien
ctaggaagagtcatcttgggaccat

SEQ ID NO: 3881913 - DNA, 25 bp, Homo sapien
taaattcaagtcagggcagaaactg

SEQ ID NO: 3881914 - DNA, 25 bp, Homo sapien
tatgacttgtcagccgtcttccaag

SEQ ID NO: 3881915 - DNA, 25 bp, Homo sapien
ttctctatccagtcgtaggtttgca

SEQ ID NO: 3881916 - DNA, 25 bp, Homo sapien
ggtgcaggcacaacaggtagactca

SEQ ID NO: 3881917 - DNA, 25 bp, Homo sapien
tctctttggccttctttccaagtct

SEQ ID NO: 3881918 - DNA, 25 bp, Homo sapien
tctttccaagtcttagcagccaagg

SEQ ID NO: 3881919 - DNA, 25 bp, Homo sapien
ttctctttggccttctttccaagtc

SEQ ID NO: 3881920 - DNA, 25 bp, Homo sapien
tcttttctctttggccttctttcca

SEQ ID NO: 3881921 - DNA, 25 bp, Homo sapien
tcccgagtgtgactttccaagcatg

SEQ ID NO: 3881922 - DNA, 25 bp, Homo sapien
acatagcctcgtaaactaaacttgg

SEQ ID NO: 3881923 - DNA, 25 bp, Homo sapien
ctaaacttggaagcatcagcttgcg

SEQ ID NO: 3881924 - DNA, 25 bp, Homo sapien
cttgcgtgtggtcccgagtgtgact

SEQ ID NO: 3881925 - DNA, 25 bp, Homo sapien
ctgacctgtgctacgctcagttctg

SEQ ID NO: 3881926 - DNA, 25 bp, Homo sapien
ccactgacctgtgctacgctcagtt

SEQ ID NO: 3881927 - DNA, 25 bp, Homo sapien
tgacctgtgctacgctcagttctgt

SEQ ID NO: 3881928 - DNA, 25 bp, Homo sapien
cctgtgctacgctcagttctgtata

SEQ ID NO: 3881929 - DNA, 25 bp, Homo sapien
aaacataggagttcaggtatctttc

SEQ ID NO: 3881930 - DNA, 25 bp, Homo sapien
ttttcctatgggtagccaccaatta

SEQ ID NO: 3881931 - DNA, 25 bp, Homo sapien
tatgggtagccaccaattagtagaa

SEQ ID NO: 3881932 - DNA, 25 bp, Homo sapien
ccaattagtagaaatgctggatcaa

SEQ ID NO: 3881933 - DNA, 25 bp, Homo sapien
taacatataaggttagcacagtgcc

SEQ ID NO: 3881934 - DNA, 25 bp, Homo sapien
tgaattcactgataagattggcctg

SEQ ID NO: 3881935 - DNA, 25 bp, Homo sapien
tggatcacaagaggcgttcaacagt

SEQ ID NO: 3881936 - DNA, 25 bp, Homo sapien
caacagtgtgattgccaggagagtc

SEQ ID NO: 3881937 - DNA, 25 bp, Homo sapien
cgcccagtccttcacggaggtcatc

SEQ ID NO: 3881938 - DNA, 25 bp, Homo sapien
agtgtctgggcggatatcatcaccc

SEQ ID NO: 3881939 - DNA, 25 bp, Homo sapien
catccgcctggcttgagccattgtt

SEQ ID NO: 3881940 - DNA, 25 bp, Homo sapien
ggaggtcatccagccgacctcggcg

SEQ ID NO: 3881941 - DNA, 25 bp, Homo sapien
tcattgtgatttggagtaaggggaa

SEQ ID NO: 3881942 - DNA, 25 bp, Homo sapien
tctggaattaattcccaaggcaaag

SEQ ID NO: 3881943 - DNA, 25 bp, Homo sapien
ccacactggggatcattgtgatttg

SEQ ID NO: 3881944 - DNA, 25 bp, Homo sapien
cactggggatcattgtgatttggag

SEQ ID NO: 3881945 - DNA, 25 bp, Homo sapien
taactatgacatcctgtggcacagt

SEQ ID NO: 3881946 - DNA, 25 bp, Homo sapien
acaataactatgacatcctgtggca

SEQ ID NO: 3881947 - DNA, 25 bp, Homo sapien
cacagtttggcctaagatccagaag

SEQ ID NO: 3881948 - DNA, 25 bp, Homo sapien
cctgtggcacagtttggcctaagat

SEQ ID NO: 3881949 - DNA, 25 bp, Homo sapien
ccgattaccccgagctgtcagaaag

SEQ ID NO: 3881950 - DNA, 25 bp, Homo sapien
cctgcgctgggtgtgaacaactact

SEQ ID NO: 3881951 - DNA, 25 bp, Homo sapien
tactgggtgtctcggctggacctac

SEQ ID NO: 3881952 - DNA, 25 bp, Homo sapien
taactgtgggctgtacctttaggga

SEQ ID NO: 3881953 - DNA, 25 bp, Homo sapien
ggctcctgcaggtagctcacaggtg

SEQ ID NO: 3881954 - DNA, 25 bp, Homo sapien
ggagggagcccattgccatcctgta

SEQ ID NO: 3881955 - DNA, 25 bp, Homo sapien
acaggtgctctgttcccatgggtcc

SEQ ID NO: 3881956 - DNA, 25 bp, Homo sapien
ccaaggagcctcactctcctcagca

SEQ ID NO: 3881957 - DNA, 25 bp, Homo sapien
gttcctcagggcagctacattttca

SEQ ID NO: 3881958 - DNA, 25 bp, Homo sapien
gttgcattgccccagttagcctgga

SEQ ID NO: 3881959 - DNA, 25 bp, Homo sapien
cctaccaggcatgtcagtcaaaaga

SEQ ID NO: 3881960 - DNA, 25 bp, Homo sapien
gcttaacagacacgtaccgattgag

SEQ ID NO: 3881961 - DNA, 25 bp, Homo sapien
actgaacatgttcccgcttcttcca

SEQ ID NO: 3881962 - DNA, 25 bp, Homo sapien
tcaaaagagctgtcccaattaggtc

SEQ ID NO: 3881963 - DNA, 25 bp, Homo sapien
ttaggtcgtcagacagcctttcccc

SEQ ID NO: 3881964 - DNA, 25 bp, Homo sapien
gcttggcttcgggtcaaaagagctg

SEQ ID NO: 3881965 - DNA, 25 bp, Homo sapien
cgagtgtctggaagtgtcggttccc

SEQ ID NO: 3881966 - DNA, 25 bp, Homo sapien
gtctggaagtgtcggttccctacac

SEQ ID NO: 3881967 - DNA, 25 bp, Homo sapien
agtgtctggaagtgtcggttcccta

SEQ ID NO: 3881968 - DNA, 25 bp, Homo sapien
tggaagtgtcggttccctacaccca

SEQ ID NO: 3881969 - DNA, 25 bp, Homo sapien
aacactttcttatcctacacctggg

SEQ ID NO: 3881970 - DNA, 25 bp, Homo sapien
ccaaacaggttgcaaaacactttct

SEQ ID NO: 3881971 - DNA, 25 bp, Homo sapien
aaagactccgcaacttcatattcag

SEQ ID NO: 3881972 - DNA, 25 bp, Homo sapien
gagccttgaacctccctgaaggtga

SEQ ID NO: 3881973 - DNA, 25 bp, Homo sapien
gaaggtatctgctacaccacctgtg

SEQ ID NO: 3881974 - DNA, 25 bp, Homo sapien
gaaatcaagcgcatggaagaaagac

SEQ ID NO: 3881975 - DNA, 25 bp, Homo sapien
tggcagtgacagagctcagaggtct

SEQ ID NO: 3881976 - DNA, 25 bp, Homo sapien
ttttggatgaaccatgggacccaga

SEQ ID NO: 3881977 - DNA, 25 bp, Homo sapien
gccaaatggcccttaagaaatgaag

SEQ ID NO: 3881978 - DNA, 25 bp, Homo sapien
ggccctgctctcaagcaacatcagg

SEQ ID NO: 3881979 - DNA, 25 bp, Homo sapien
gaagcttgcacaagtctggtccaaa

SEQ ID NO: 3881980 - DNA, 25 bp, Homo sapien
caggttgaattcaaggcgtaccaaa

SEQ ID NO: 3881981 - DNA, 25 bp, Homo sapien
gatagagctgggctaacttaacagg

SEQ ID NO: 3881982 - DNA, 25 bp, Homo sapien
ctggatgtaagatggaaggattgta

SEQ ID NO: 3881983 - DNA, 25 bp, Homo sapien
gcagcattgtgtggctgtaccctcc

SEQ ID NO: 3881984 - DNA, 25 bp, Homo sapien
cagaaactctggatgtaagatggaa

SEQ ID NO: 3881985 - DNA, 25 bp, Homo sapien
tggctgtaccctccagaaactctgg

SEQ ID NO: 3881986 - DNA, 25 bp, Homo sapien
tcttccttaaagtaagaggctgcat

SEQ ID NO: 3881987 - DNA, 25 bp, Homo sapien
tcgtcttccttaaagtaagaggctg

SEQ ID NO: 3881988 - DNA, 25 bp, Homo sapien
tggctgactcgggtcgtcttcctta

SEQ ID NO: 3881989 - DNA, 25 bp, Homo sapien
gctgactcgggtcgtcttccttaaa

SEQ ID NO: 3881990 - DNA, 25 bp, Homo sapien
ttaatctttctgttgaccaaaaaca

SEQ ID NO: 3881991 - DNA, 25 bp, Homo sapien
aatctttctgttgaccaaaaacaca

SEQ ID NO: 3881992 - DNA, 25 bp, Homo sapien
taatctttctgttgaccaaaaacac

SEQ ID NO: 3881993 - DNA, 25 bp, Homo sapien
gaatccaaacgcatttccctgactg

SEQ ID NO: 3881994 - DNA, 25 bp, Homo sapien
aatccaaacgcatttccctgactgt

SEQ ID NO: 3881995 - DNA, 25 bp, Homo sapien
gcccttcagggtcaggtcaaactca

SEQ ID NO: 3881996 - DNA, 25 bp, Homo sapien
cagctgtcggttccttcaggctcag

SEQ ID NO: 3881997 - DNA, 25 bp, Homo sapien
tacagaagcacagcaatttgggccc

SEQ ID NO: 3881998 - DNA, 25 bp, Homo sapien
tcagggagacggctttgcaaacagc

SEQ ID NO: 3881999 - DNA, 25 bp, Homo sapien
caggcattttgacagcttcttcgca

SEQ ID NO: 3882000 - DNA, 25 bp, Homo sapien
ccagaatcctctgacctgatgacaa

SEQ ID NO: 3882001 - DNA, 25 bp, Homo sapien
aatgtggccccagaatcctctgacc

SEQ ID NO: 3882002 - DNA, 25 bp, Homo sapien
ctcttgttgaagcacctctggatgc

SEQ ID NO: 3882003 - DNA, 25 bp, Homo sapien
cgatgatccaacagggttccagaca

SEQ ID NO: 3882004 - DNA, 25 bp, Homo sapien
cagatgtaatgctgagcgaataggg

SEQ ID NO: 3882005 - DNA, 25 bp, Homo sapien
cactaatgttgactgagcagtgctc

SEQ ID NO: 3882006 - DNA, 25 bp, Homo sapien
gatggaaagtccgtctccgaagcag

SEQ ID NO: 3882007 - DNA, 25 bp, Homo sapien
ggtcaccaactgcaaggatccagga

SEQ ID NO: 3882008 - DNA, 25 bp, Homo sapien
gccacagatgtaatggagactcagc

SEQ ID NO: 3882009 - DNA, 25 bp, Homo sapien
tatgggctgcttaaacggtgccaca

SEQ ID NO: 3882010 - DNA, 25 bp, Homo sapien
ctgtgtgccgcaaagggaagactcc

SEQ ID NO: 3882011 - DNA, 25 bp, Homo sapien
accacaaagggtgctcttcagtgga

SEQ ID NO: 3882012 - DNA, 25 bp, Homo sapien
cgaccacaaagggtgctcttcagtg

SEQ ID NO: 3882013 - DNA, 25 bp, Homo sapien
ccagcgaccacaaagggtgctcttc

SEQ ID NO: 3882014 - DNA, 25 bp, Homo sapien
gggatctcctcctaaccagcgccag

SEQ ID NO: 3882015 - DNA, 25 bp, Homo sapien
gaaggcacttgaccataatcctgat

SEQ ID NO: 3882016 - DNA, 25 bp, Homo sapien
aaggcacttgaccataatcctgatc

SEQ ID NO: 3882017 - DNA, 25 bp, Homo sapien
cagttgagtcaccatatttcttgtg

SEQ ID NO: 3882018 - DNA, 25 bp, Homo sapien
acagccaatcactccaccctggagt

SEQ ID NO: 3882019 - DNA, 25 bp, Homo sapien
tcgcgtggctgcaggtgaaacatac

SEQ ID NO: 3882020 - DNA, 25 bp, Homo sapien
gaagacttctgggcctcgcgtggct

SEQ ID NO: 3882021 - DNA, 25 bp, Homo sapien
cagtgctctagtgcaagatccgaga

SEQ ID NO: 3882022 - DNA, 25 bp, Homo sapien
tcatggatgcaaaacacgaaaacct

SEQ ID NO: 3882023 - DNA, 25 bp, Homo sapien
cagaggagcccaagagaattgaccc

SEQ ID NO: 3882024 - DNA, 25 bp, Homo sapien
tgctgtgaaactggctggacctgag

SEQ ID NO: 3882025 - DNA, 25 bp, Homo sapien
gaaacatattgaccactgaacacct

SEQ ID NO: 3882026 - DNA, 25 bp, Homo sapien
gaacacctttttggcataacgccaa

SEQ ID NO: 3882027 - DNA, 25 bp, Homo sapien
taacgccaattaacaacacatggag

SEQ ID NO: 3882028 - DNA, 25 bp, Homo sapien
tgtttctgaaacatattgaccactg

SEQ ID NO: 3882029 - DNA, 25 bp, Homo sapien
gatggtgacaaatgccccagagaaa

SEQ ID NO: 3882030 - DNA, 25 bp, Homo sapien
tcagggtagccaaggaaactctcca

SEQ ID NO: 3882031 - DNA, 25 bp, Homo sapien
taaagtactgcctccatgcaacaga

SEQ ID NO: 3882032 - DNA, 25 bp, Homo sapien
gtatcaagcaccactatttcccagg

SEQ ID NO: 3882033 - DNA, 25 bp, Homo sapien
tccccaaacctcacttgatatagtg

SEQ ID NO: 3882034 - DNA, 25 bp, Homo sapien
gatttctggagaccctaagaggact

SEQ ID NO: 3882035 - DNA, 25 bp, Homo sapien
ccaggatccttttgcctagtgggtg

SEQ ID NO: 3882036 - DNA, 25 bp, Homo sapien
agagtaggggactctatgactccac

SEQ ID NO: 3882037 - DNA, 25 bp, Homo sapien
tgtactttagccactgggacctgac

SEQ ID NO: 3882038 - DNA, 25 bp, Homo sapien
gactacatgcgtgtgccaatgccag

SEQ ID NO: 3882039 - DNA, 25 bp, Homo sapien
tgcatctcatgtggtaaggacagcc

SEQ ID NO: 3882040 - DNA, 25 bp, Homo sapien
tacacaatgtatgctttgcacacac

SEQ ID NO: 3882041 - DNA, 25 bp, Homo sapien
gccacaggtgtgtgcgaagaagcct

SEQ ID NO: 3882042 - DNA, 25 bp, Homo sapien
aagaagtggccggtagactcctgct

SEQ ID NO: 3882043 - DNA, 25 bp, Homo sapien
tctggtggccagtaaagaacggacc

SEQ ID NO: 3882044 - DNA, 25 bp, Homo sapien
gagtcacagaagctcccctagaaag

SEQ ID NO: 3882045 - DNA, 25 bp, Homo sapien
gaatctgtccccgaaggtcaacgac

SEQ ID NO: 3882046 - DNA, 25 bp, Homo sapien
cgctagctgattggccttggcaagt

SEQ ID NO: 3882047 - DNA, 25 bp, Homo sapien
gaatcctagctctgatgctcgctag

SEQ ID NO: 3882048 - DNA, 25 bp, Homo sapien
ggtcaacgacatcatcactgacatt

SEQ ID NO: 3882049 - DNA, 25 bp, Homo sapien
acatgtcccagatccttcacgagca

SEQ ID NO: 3882050 - DNA, 25 bp, Homo sapien
catgttcgacgtccttttcttgtgc

SEQ ID NO: 3882051 - DNA, 25 bp, Homo sapien
tggatgcagaccgttgcatgttcga

SEQ ID NO: 3882052 - DNA, 25 bp, Homo sapien
tcataggagcgcagaaaacaagtcc

SEQ ID NO: 3882053 - DNA, 25 bp, Homo sapien
cactcctgttggccgaggtcaaagg

SEQ ID NO: 3882054 - DNA, 25 bp, Homo sapien
tcactcctgttggccgaggtcaaag

SEQ ID NO: 3882055 - DNA, 25 bp, Homo sapien
tcctgttggccgaggtcaaaggact

SEQ ID NO: 3882056 - DNA, 25 bp, Homo sapien
ctcctgttggccgaggtcaaaggac

SEQ ID NO: 3882057 - DNA, 25 bp, Homo sapien
gctgggcccaaggttctagtaagat

SEQ ID NO: 3882058 - DNA, 25 bp, Homo sapien
gaattttagacagaggtcccgtgct

SEQ ID NO: 3882059 - DNA, 25 bp, Homo sapien
ttagcctggaggcaaagggtgcctc

SEQ ID NO: 3882060 - DNA, 25 bp, Homo sapien
cccgtgctaggcctggattgaaacc

SEQ ID NO: 3882061 - DNA, 25 bp, Homo sapien
gcgaatgatattgttcccagcagca

SEQ ID NO: 3882062 - DNA, 25 bp, Homo sapien
catcttcttggctattttgacgtca

SEQ ID NO: 3882063 - DNA, 25 bp, Homo sapien
ccaaaaaagagcgaatgatattgtt

SEQ ID NO: 3882064 - DNA, 25 bp, Homo sapien
tggctattttgacgtcacagccatc

SEQ ID NO: 3882065 - DNA, 25 bp, Homo sapien
taatgccaactcttcaggttctgag

SEQ ID NO: 3882066 - DNA, 25 bp, Homo sapien
gggatgcgcttgtgataatgccaac

SEQ ID NO: 3882067 - DNA, 25 bp, Homo sapien
ttgtgataatgccaactcttcaggt

SEQ ID NO: 3882068 - DNA, 25 bp, Homo sapien
acggggatgcgcttgtgataatgcc

SEQ ID NO: 3882069 - DNA, 25 bp, Homo sapien
gaggtaacacaggaaagagctggca

SEQ ID NO: 3882070 - DNA, 25 bp, Homo sapien
tgccagggactgtcccggatgccct

SEQ ID NO: 3882071 - DNA, 25 bp, Homo sapien
cctgtgttgggtgcttgctagttgc

SEQ ID NO: 3882072 - DNA, 25 bp, Homo sapien
ttaaggaggtaacacaggaaagagc

SEQ ID NO: 3882073 - DNA, 25 bp, Homo sapien
aggtgcagataagccgcaacaccca

SEQ ID NO: 3882074 - DNA, 25 bp, Homo sapien
caagcaggtgcagataagccgcaac

SEQ ID NO: 3882075 - DNA, 25 bp, Homo sapien
catgccacgctaccctgcttctgcc

SEQ ID NO: 3882076 - DNA, 25 bp, Homo sapien
ctgcctgaacgcaagcaggtgcaga

SEQ ID NO: 3882077 - DNA, 25 bp, Homo sapien
tcatagctactggttcttcaggaga

SEQ ID NO: 3882078 - DNA, 25 bp, Homo sapien
taaaacctcaatagtggtgtggcta

SEQ ID NO: 3882079 - DNA, 25 bp, Homo sapien
tgaacgttctatctccaaggctgcg

SEQ ID NO: 3882080 - DNA, 25 bp, Homo sapien
gttatcttatccctgctttcggcag

SEQ ID NO: 3882081 - DNA, 25 bp, Homo sapien
aatgctccgtggaacagggctgaga

SEQ ID NO: 3882082 - DNA, 25 bp, Homo sapien
tctcaatgtgggcagggcctacatc

SEQ ID NO: 3882083 - DNA, 25 bp, Homo sapien
atatcagctgcccaccgagaaaaca

SEQ ID NO: 3882084 - DNA, 25 bp, Homo sapien
aagagtagacaccattaaaccagac

SEQ ID NO: 3882085 - DNA, 25 bp, Homo sapien
caaaatcaaaaatccggcgctccct

SEQ ID NO: 3882086 - DNA, 25 bp, Homo sapien
tagaggccactggatctgagtcccc

SEQ ID NO: 3882087 - DNA, 25 bp, Homo sapien
ttggccacgtgaagaagtattagtc

SEQ ID NO: 3882088 - DNA, 25 bp, Homo sapien
aatctggtagagaggccagtgaacc

SEQ ID NO: 3882089 - DNA, 25 bp, Homo sapien
gaattcgctttgaaatgcctagagg

SEQ ID NO: 3882090 - DNA, 25 bp, Homo sapien
tggaaccacaaaggcgaccttccag

SEQ ID NO: 3882091 - DNA, 25 bp, Homo sapien
ctggaaccacaaaggcgaccttcca

SEQ ID NO: 3882092 - DNA, 25 bp, Homo sapien
cacaaaggcgaccttccaggggatc

SEQ ID NO: 3882093 - DNA, 25 bp, Homo sapien
aaggcgaccttccaggggatctgca

SEQ ID NO: 3882094 - DNA, 25 bp, Homo sapien
cagggggcaggcagctcttcttttc

SEQ ID NO: 3882095 - DNA, 25 bp, Homo sapien
tcctcctgttgtatgtttggtcaag

SEQ ID NO: 3882096 - DNA, 25 bp, Homo sapien
ctgttgtatgtttggtcaagtttcc

SEQ ID NO: 3882097 - DNA, 25 bp, Homo sapien
tcctgttgtatgtttggtcaagttt

SEQ ID NO: 3882098 - DNA, 25 bp, Homo sapien
cccatactgtcgatgttcgtccact

SEQ ID NO: 3882099 - DNA, 25 bp, Homo sapien
tactgtcgatgttcgtccactgata

SEQ ID NO: 3882100 - DNA, 25 bp, Homo sapien
tcgatgttcgtccactgatacccca

SEQ ID NO: 3882101 - DNA, 25 bp, Homo sapien
tcctggtcccccatactgtcgatgt

SEQ ID NO: 3882102 - DNA, 25 bp, Homo sapien
ggtactaatgaagagatgtcccacg

SEQ ID NO: 3882103 - DNA, 25 bp, Homo sapien
gaatgactgtgaccaagttcccaac

SEQ ID NO: 3882104 - DNA, 25 bp, Homo sapien
caaaaaggtttggtgcgatcccaga

SEQ ID NO: 3882105 - DNA, 25 bp, Homo sapien
gagctctgatgaaatcccacaagga

SEQ ID NO: 3882106 - DNA, 25 bp, Homo sapien
taccgttactgcatataatgagctg

SEQ ID NO: 3882107 - DNA, 25 bp, Homo sapien
aatgagctggctacctatggcttaa

SEQ ID NO: 3882108 - DNA, 25 bp, Homo sapien
cttccagttatgtccactcagcagg

SEQ ID NO: 3882109 - DNA, 25 bp, Homo sapien
gctgtgtttaggaccccaggttcac

SEQ ID NO: 3882110 - DNA, 25 bp, Homo sapien
ggaagacatctctagggacacgact

SEQ ID NO: 3882111 - DNA, 25 bp, Homo sapien
gcagttttctatcagtgtcgggtcc

SEQ ID NO: 3882112 - DNA, 25 bp, Homo sapien
aaccatacatcgaaggtgtcgccag

SEQ ID NO: 3882113 - DNA, 25 bp, Homo sapien
ggcagtgagcctagcaaccatacat

SEQ ID NO: 3882114 - DNA, 25 bp, Homo sapien
acctcgagcgccagggaagacgctc

SEQ ID NO: 3882115 - DNA, 25 bp, Homo sapien
atctagccacctcgagcgccaggga

SEQ ID NO: 3882116 - DNA, 25 bp, Homo sapien
cgccagggaagacgctccgcgtaaa

SEQ ID NO: 3882117 - DNA, 25 bp, Homo sapien
taaagccgacgacatctagccacct

SEQ ID NO: 3882118 - DNA, 25 bp, Homo sapien
gctggtggcatttccggggacccaa

SEQ ID NO: 3882119 - DNA, 25 bp, Homo sapien
ctgctggtggcatttccggggaccc

SEQ ID NO: 3882120 - DNA, 25 bp, Homo sapien
cgctgctggtggcatttccggggac

SEQ ID NO: 3882121 - DNA, 25 bp, Homo sapien
cgcgctgctggtggcatttccgggg

SEQ ID NO: 3882122 - DNA, 25 bp, Homo sapien
ctgggggcaaaggaacagaggccga

SEQ ID NO: 3882123 - DNA, 25 bp, Homo sapien
acttggggtatgttccactagagca

SEQ ID NO: 3882124 - DNA, 25 bp, Homo sapien
cttggggtatgttccactagagcac

SEQ ID NO: 3882125 - DNA, 25 bp, Homo sapien
caaaggaacagaggccgaagaactt

SEQ ID NO: 3882126 - DNA, 25 bp, Homo sapien
tagtgggatggatctccccaacttc

SEQ ID NO: 3882127 - DNA, 25 bp, Homo sapien
gaagtccccctgttatctcgggcca

SEQ ID NO: 3882128 - DNA, 25 bp, Homo sapien
gtgggctacccccaatagtgggatg

SEQ ID NO: 3882129 - DNA, 25 bp, Homo sapien
ggttacatcagatatgcgacctcga

SEQ ID NO: 3882130 - DNA, 25 bp, Homo sapien
ggcacccgagcctgtgagtccccga

SEQ ID NO: 3882131 - DNA, 25 bp, Homo sapien
gagcctgtgagtccccgaccccggc

SEQ ID NO: 3882132 - DNA, 25 bp, Homo sapien
gcacccgagcctgtgagtccccgac

SEQ ID NO: 3882133 - DNA, 25 bp, Homo sapien
cacccgagcctgtgagtccccgacc

SEQ ID NO: 3882134 - DNA, 25 bp, Homo sapien
agtggcagcacacggtccacaggta

SEQ ID NO: 3882135 - DNA, 25 bp, Homo sapien
gaagaaagtcaccatggaggaggcc

SEQ ID NO: 3882136 - DNA, 25 bp, Homo sapien
aggaaagcccaccacatgcgttggc

SEQ ID NO: 3882137 - DNA, 25 bp, Homo sapien
tgagcgtccgccagagcaagatgat

SEQ ID NO: 3882138 - DNA, 25 bp, Homo sapien
ggctgagatggttcgcgtggatatt

SEQ ID NO: 3882139 - DNA, 25 bp, Homo sapien
aggaggacgcgtctaggctgagatg

SEQ ID NO: 3882140 - DNA, 25 bp, Homo sapien
ggttcgcgtggatattgctactcat

SEQ ID NO: 3882141 - DNA, 25 bp, Homo sapien
gagatggttcgcgtggatattgcta

SEQ ID NO: 3882142 - DNA, 25 bp, Homo sapien
cgccgccgccgccaccatttgccat

SEQ ID NO: 3882143 - DNA, 25 bp, Homo sapien
gccgccgccgccgccaccatttgcc

SEQ ID NO: 3882144 - DNA, 25 bp, Homo sapien
aagactgctgcctccgccgccgccg

SEQ ID NO: 3882145 - DNA, 25 bp, Homo sapien
actgctgcctccgccgccgccgccg

SEQ ID NO: 3882146 - DNA, 25 bp, Homo sapien
ccgagatatatacagcgagccgccg

SEQ ID NO: 3882147 - DNA, 25 bp, Homo sapien
tcgttaataatggataatcggcccc

SEQ ID NO: 3882148 - DNA, 25 bp, Homo sapien
catcaacagccatattgctgctact

SEQ ID NO: 3882149 - DNA, 25 bp, Homo sapien
taacgagccgctctccgcttattag

SEQ ID NO: 3882150 - DNA, 25 bp, Homo sapien
gtcgccacgccgctgagcccctcgg

SEQ ID NO: 3882151 - DNA, 25 bp, Homo sapien
agcccctcggcctccgctcgctctt

SEQ ID NO: 3882152 - DNA, 25 bp, Homo sapien
ggaccccctagtcctgtcgccacgc

SEQ ID NO: 3882153 - DNA, 25 bp, Homo sapien
tagcccatgttctcgggacccccta

SEQ ID NO: 3882154 - DNA, 25 bp, Homo sapien
tacttcgctcttcctgctacctatg

SEQ ID NO: 3882155 - DNA, 25 bp, Homo sapien
tcaggaaggccagcgggtggtctgt

SEQ ID NO: 3882156 - DNA, 25 bp, Homo sapien
cagggtcccgcgtgtggctggaggg

SEQ ID NO: 3882157 - DNA, 25 bp, Homo sapien
ttcgctcttcctgctacctatgtgc

SEQ ID NO: 3882158 - DNA, 25 bp, Homo sapien
tctccccacttaagatgaagaagga

SEQ ID NO: 3882159 - DNA, 25 bp, Homo sapien
tgaacagcgtccgtcctcgtgctac

SEQ ID NO: 3882160 - DNA, 25 bp, Homo sapien
tgaagaaggagtccgtgtttgttcc

SEQ ID NO: 3882161 - DNA, 25 bp, Homo sapien
ttccgtagcgtgtctccgtacacca

SEQ ID NO: 3882162 - DNA, 25 bp, Homo sapien
gtctccgtgagagtcagatcagccc

SEQ ID NO: 3882163 - DNA, 25 bp, Homo sapien
tgtctccgtgagagtcagatcagcc

SEQ ID NO: 3882164 - DNA, 25 bp, Homo sapien
ctgaggctgtctccgtgagagtcag

SEQ ID NO: 3882165 - DNA, 25 bp, Homo sapien
aggctgtctccgtgagagtcagatc

SEQ ID NO: 3882166 - DNA, 25 bp, Homo sapien
ctgggccttttctggtactgggttg

SEQ ID NO: 3882167 - DNA, 25 bp, Homo sapien
atgcatccctgccacaccagaccca

SEQ ID NO: 3882168 - DNA, 25 bp, Homo sapien
accagacccaagcatgcaaaggccc

SEQ ID NO: 3882169 - DNA, 25 bp, Homo sapien
tctgtgttcagccactctgaatgca

SEQ ID NO: 3882170 - DNA, 25 bp, Homo sapien
tgcttggaggcccctcagatgccat

SEQ ID NO: 3882171 - DNA, 25 bp, Homo sapien
gtgcttggaggcccctcagatgcca

SEQ ID NO: 3882172 - DNA, 25 bp, Homo sapien
gcatctttggagagggtgcttggag

SEQ ID NO: 3882173 - DNA, 25 bp, Homo sapien
cagactggcggtgtcaaggtgttca

SEQ ID NO: 3882174 - DNA, 25 bp, Homo sapien
taatcgtggcactcgtccggatatc

SEQ ID NO: 3882175 - DNA, 25 bp, Homo sapien
aattatgaccgaaaatacctcctga

SEQ ID NO: 3882176 - DNA, 25 bp, Homo sapien
ggtgttcagctttttccaagaatgg

SEQ ID NO: 3882177 - DNA, 25 bp, Homo sapien
gccacagccaagaggttgctcaggg

SEQ ID NO: 3882178 - DNA, 25 bp, Homo sapien
gtgggtgcagattcccacacagtta

SEQ ID NO: 3882179 - DNA, 25 bp, Homo sapien
gcccttgccacagccaagaggttgc

SEQ ID NO: 3882180 - DNA, 25 bp, Homo sapien
gggtgggtgcagattcccacacagt

SEQ ID NO: 3882181 - DNA, 25 bp, Homo sapien
gaaggaatgtactccgggaaggcca

SEQ ID NO: 3882182 - DNA, 25 bp, Homo sapien
gaaaggcatcaagagggatagaagg

SEQ ID NO: 3882183 - DNA, 25 bp, Homo sapien
aaggaatgtactccgggaaggccag

SEQ ID NO: 3882184 - DNA, 25 bp, Homo sapien
ttgatcaggaaggtcattgctgaag

SEQ ID NO: 3882185 - DNA, 25 bp, Homo sapien
ctgtccaacagggtcccactggcct

SEQ ID NO: 3882186 - DNA, 25 bp, Homo sapien
tgatcaggaaggtcattgctgaagt

SEQ ID NO: 3882187 - DNA, 25 bp, Homo sapien
actgggcatccataggaccctgcag

SEQ ID NO: 3882188 - DNA, 25 bp, Homo sapien
ggagacccatacagacatcgttttc

SEQ ID NO: 3882189 - DNA, 25 bp, Homo sapien
gcaaaaccggggagacccatacaga

SEQ ID NO: 3882190 - DNA, 25 bp, Homo sapien
ggctccactgggcatccataggacc

SEQ ID NO: 3882191 - DNA, 25 bp, Homo sapien
gggaagcagccgcagtccccgaaag

SEQ ID NO: 3882192 - DNA, 25 bp, Homo sapien
gaagcagccgcagtccccgaaagga

SEQ ID NO: 3882193 - DNA, 25 bp, Homo sapien
aagcagccgcagtccccgaaaggac

SEQ ID NO: 3882194 - DNA, 25 bp, Homo sapien
agggaagcagccgcagtccccgaaa

SEQ ID NO: 3882195 - DNA, 25 bp, Homo sapien
gggcgcgctctgaagggcggcggac

SEQ ID NO: 3882196 - DNA, 25 bp, Homo sapien
tgaagggcggcggacttcagggcca

SEQ ID NO: 3882197 - DNA, 25 bp, Homo sapien
gagggaccggagcgggcgcgggcac

SEQ ID NO: 3882198 - DNA, 25 bp, Homo sapien
tttccttccgcagaaggcggaggga

SEQ ID NO: 3882199 - DNA, 25 bp, Homo sapien
tctaagatcgtttgcacatgttttc

SEQ ID NO: 3882200 - DNA, 25 bp, Homo sapien
taatctactgtctatgaggtgaaga

SEQ ID NO: 3882201 - DNA, 25 bp, Homo sapien
aggaaaggtctaagatcgtttgcac

SEQ ID NO: 3882202 - DNA, 25 bp, Homo sapien
aaccactaatctactgtctatgagg

SEQ ID NO: 3882203 - DNA, 25 bp, Homo sapien
tgaagagaacaatgtccatagaggt

SEQ ID NO: 3882204 - DNA, 25 bp, Homo sapien
tagaggttacaactgccctctgccc

SEQ ID NO: 3882205 - DNA, 25 bp, Homo sapien
tctgccccctgagtaaaatgagttg

SEQ ID NO: 3882206 - DNA, 25 bp, Homo sapien
aaatatgatgccgttcatgaaattg

SEQ ID NO: 3882207 - DNA, 25 bp, Homo sapien
tgttggaactaagaaacccctcaca

SEQ ID NO: 3882208 - DNA, 25 bp, Homo sapien
aaaatgcctagaaaatgttgggtgc

SEQ ID NO: 3882209 - DNA, 25 bp, Homo sapien
tctggagaatgaagcataagtgcct

SEQ ID NO: 3882210 - DNA, 25 bp, Homo sapien
gagactgagcatccttacactgtgt

SEQ ID NO: 3882211 - DNA, 25 bp, Homo sapien
cacaattgtaagctgccattgcttc

SEQ ID NO: 3882212 - DNA, 25 bp, Homo sapien
ctccattctcttggcgagagttaag

SEQ ID NO: 3882213 - DNA, 25 bp, Homo sapien
gagttaagaaccagccacaattgta

SEQ ID NO: 3882214 - DNA, 25 bp, Homo sapien
tctgctgcttccatagggtgttgct

SEQ ID NO: 3882215 - DNA, 25 bp, Homo sapien
actaatttgagtgtcatccttacag

SEQ ID NO: 3882216 - DNA, 25 bp, Homo sapien
gaatccttcactaatttgagtgtca

SEQ ID NO: 3882217 - DNA, 25 bp, Homo sapien
atggaatccttcactaatttgagtg

SEQ ID NO: 3882218 - DNA, 25 bp, Homo sapien
taatttgagtgtcatccttacaggg

SEQ ID NO: 3882219 - DNA, 25 bp, Homo sapien
tgatctgggccgacatggtctgctt

SEQ ID NO: 3882220 - DNA, 25 bp, Homo sapien
cccttgatctgggccgacatggtct

SEQ ID NO: 3882221 - DNA, 25 bp, Homo sapien
agtgcaggccatggacaccaccctt

SEQ ID NO: 3882222 - DNA, 25 bp, Homo sapien
accacccttgatctgggccgacatg

SEQ ID NO: 3882223 - DNA, 25 bp, Homo sapien
aaaggacagacaggctgcgggcccc

SEQ ID NO: 3882224 - DNA, 25 bp, Homo sapien
tggagcccgagacaccctgtgcgat

SEQ ID NO: 3882225 - DNA, 25 bp, Homo sapien
gatggagcccgagacaccctgtgcg

SEQ ID NO: 3882226 - DNA, 25 bp, Homo sapien
gggccccgatatcctggcagctgtg

SEQ ID NO: 3882227 - DNA, 25 bp, Homo sapien
tgccctggtacttcttgagctgcac

SEQ ID NO: 3882228 - DNA, 25 bp, Homo sapien
cctggtacttcttgagctgcaccct

SEQ ID NO: 3882229 - DNA, 25 bp, Homo sapien
tggtacttcttgagctgcacccttt

SEQ ID NO: 3882230 - DNA, 25 bp, Homo sapien
catgccctggtacttcttgagctgc

SEQ ID NO: 3882231 - DNA, 25 bp, Homo sapien
caggtgcctccgtggtggtggccag

SEQ ID NO: 3882232 - DNA, 25 bp, Homo sapien
gtggtggccagcaggagcccatcat

SEQ ID NO: 3882233 - DNA, 25 bp, Homo sapien
ggtggccagcaggagcccatcatca

SEQ ID NO: 3882234 - DNA, 25 bp, Homo sapien
ggtgcctccgtggtggtggccagca

SEQ ID NO: 3882235 - DNA, 25 bp, Homo sapien
aggctccaagggccagggccttgac

SEQ ID NO: 3882236 - DNA, 25 bp, Homo sapien
ggaggctccaagggccagggccttg

SEQ ID NO: 3882237 - DNA, 25 bp, Homo sapien
ctgtggaggctccaagggccagggc

SEQ ID NO: 3882238 - DNA, 25 bp, Homo sapien
gtggaggctccaagggccagggcct

SEQ ID NO: 3882239 - DNA, 25 bp, Homo sapien
gcagcccgtccacacgagcgtccat

SEQ ID NO: 3882240 - DNA, 25 bp, Homo sapien
cacatgcagcccgtccacacgagcg

SEQ ID NO: 3882241 - DNA, 25 bp, Homo sapien
atgcagcccgtccacacgagcgtcc

SEQ ID NO: 3882242 - DNA, 25 bp, Homo sapien
acatgcagcccgtccacacgagcgt

SEQ ID NO: 3882243 - DNA, 25 bp, Homo sapien
ctgtcaccacgttccccccaatcac

SEQ ID NO: 3882244 - DNA, 25 bp, Homo sapien
ggtggcattcgtcatcctcacgggt

SEQ ID NO: 3882245 - DNA, 25 bp, Homo sapien
ctacaacattgacacccgcctgggt

SEQ ID NO: 3882246 - DNA, 25 bp, Homo sapien
aggtggcattcgtcatcctcacggg

SEQ ID NO: 3882247 - DNA, 25 bp, Homo sapien
gggatgagtccaagactacaacatt

SEQ ID NO: 3882248 - DNA, 25 bp, Homo sapien
caacgtcagccaccaccagttccat

SEQ ID NO: 3882249 - DNA, 25 bp, Homo sapien
ctttcaacgtcagccaccaccagtt

SEQ ID NO: 3882250 - DNA, 25 bp, Homo sapien
aacgtcagccaccaccagttccatc

SEQ ID NO: 3882251 - DNA, 25 bp, Homo sapien
ttcaacgtcagccaccaccagttcc

SEQ ID NO: 3882252 - DNA, 25 bp, Homo sapien
gctccttcttagcaagaaagtcgac

SEQ ID NO: 3882253 - DNA, 25 bp, Homo sapien
cgtgctccttcttagcaagaaagtc

SEQ ID NO: 3882254 - DNA, 25 bp, Homo sapien
ctccttcttagcaagaaagtcgacg

SEQ ID NO: 3882255 - DNA, 25 bp, Homo sapien
ggcgtgctccttcttagcaagaaag

SEQ ID NO: 3882256 - DNA, 25 bp, Homo sapien
ggtgcccgtctcagtgagggggata

SEQ ID NO: 3882257 - DNA, 25 bp, Homo sapien
agggggataccagagaagccatgca

SEQ ID NO: 3882258 - DNA, 25 bp, Homo sapien
tgagggggataccagagaagccatg

SEQ ID NO: 3882259 - DNA, 25 bp, Homo sapien
tgcccgtctcagtgagggggatacc

SEQ ID NO: 3882260 - DNA, 25 bp, Homo sapien
tcttgaccttcagcacctcattggc

SEQ ID NO: 3882261 - DNA, 25 bp, Homo sapien
ccttcagcacctcattggcctcgaa

SEQ ID NO: 3882262 - DNA, 25 bp, Homo sapien
tgaccttcagcacctcattggcctc

SEQ ID NO: 3882263 - DNA, 25 bp, Homo sapien
ttcttgaccttcagcacctcattgg

SEQ ID NO: 3882264 - DNA, 25 bp, Homo sapien
gcagttgtggtgaatgaaaccaata

SEQ ID NO: 3882265 - DNA, 25 bp, Homo sapien
tgcagttgtggtgaatgaaaccaat

SEQ ID NO: 3882266 - DNA, 25 bp, Homo sapien
ggtgcagttgtggtgaatgaaacca

SEQ ID NO: 3882267 - DNA, 25 bp, Homo sapien
tggggtgcagttgtggtgaatgaaa

SEQ ID NO: 3882268 - DNA, 25 bp, Homo sapien
ctctgtcagtgtccacaggggagga

SEQ ID NO: 3882269 - DNA, 25 bp, Homo sapien
catcagagccatcccgattgccatg

SEQ ID NO: 3882270 - DNA, 25 bp, Homo sapien
gagccatcccgattgccatgtcagc

SEQ ID NO: 3882271 - DNA, 25 bp, Homo sapien
ccgattgccatgtcagcctctgtca

SEQ ID NO: 3882272 - DNA, 25 bp, Homo sapien
tcagcccttgtgggtcagggctgag

SEQ ID NO: 3882273 - DNA, 25 bp, Homo sapien
ttgtgggtcagggctgaggtcaggt

SEQ ID NO: 3882274 - DNA, 25 bp, Homo sapien
gtgggtcagggctgaggtcaggtcc

SEQ ID NO: 3882275 - DNA, 25 bp, Homo sapien
gggtcagggctgaggtcaggtccac

SEQ ID NO: 3882276 - DNA, 25 bp, Homo sapien
cctcgggcacgtagctggtgccgct

SEQ ID NO: 3882277 - DNA, 25 bp, Homo sapien
tcaggaagtcattgtaggtgaggcc

SEQ ID NO: 3882278 - DNA, 25 bp, Homo sapien
gctgctgatcaggtagtctgccagg

SEQ ID NO: 3882279 - DNA, 25 bp, Homo sapien
ggtgaggccgttggtgctggtgaag

SEQ ID NO: 3882280 - DNA, 25 bp, Homo sapien
gacccgacataaacacccgagtggc

SEQ ID NO: 3882281 - DNA, 25 bp, Homo sapien
ccgcgacccgacataaacacccgag

SEQ ID NO: 3882282 - DNA, 25 bp, Homo sapien
gcgacccgacataaacacccgagtg

SEQ ID NO: 3882283 - DNA, 25 bp, Homo sapien
gtgacaccccgcgacccgacataaa

SEQ ID NO: 3882284 - DNA, 25 bp, Homo sapien
gcacaggtcaaactttccgagagcc

SEQ ID NO: 3882285 - DNA, 25 bp, Homo sapien
caggtcaaactttccgagagccttt

SEQ ID NO: 3882286 - DNA, 25 bp, Homo sapien
tgggcacaggtcaaactttccgaga

SEQ ID NO: 3882287 - DNA, 25 bp, Homo sapien
catctgggcacaggtcaaactttcc

SEQ ID NO: 3882288 - DNA, 25 bp, Homo sapien
aatagacagcatgaaggctttaaac

SEQ ID NO: 3882289 - DNA, 25 bp, Homo sapien
tcagttcccacttgtgaatagacag

SEQ ID NO: 3882290 - DNA, 25 bp, Homo sapien
ttcccacttgtgaatagacagcatg

SEQ ID NO: 3882291 - DNA, 25 bp, Homo sapien
acttgtgaatagacagcatgaaggc

SEQ ID NO: 3882292 - DNA, 25 bp, Homo sapien
cagcattggcaatgatcttctgcag

SEQ ID NO: 3882293 - DNA, 25 bp, Homo sapien
tattgacacaacttcatctgcagtt

SEQ ID NO: 3882294 - DNA, 25 bp, Homo sapien
taatactaacgacattgacagtacc

SEQ ID NO: 3882295 - DNA, 25 bp, Homo sapien
gctccgttcccaggcagcgtagata

SEQ ID NO: 3882296 - DNA, 25 bp, Homo sapien
gctttggcattgttccccaatacct

SEQ ID NO: 3882297 - DNA, 25 bp, Homo sapien
caggaaaatcaagcccagtggtaca

SEQ ID NO: 3882298 - DNA, 25 bp, Homo sapien
tggctccagccaggatcaagcattg

SEQ ID NO: 3882299 - DNA, 25 bp, Homo sapien
ccaattgttggggtaactggagtga

SEQ ID NO: 3882300 - DNA, 25 bp, Homo sapien
tcctctctaattaaagcctggccaa

SEQ ID NO: 3882301 - DNA, 25 bp, Homo sapien
cgtctgctgtacttgtgcctgtgga

SEQ ID NO: 3882302 - DNA, 25 bp, Homo sapien
gattctggacttgcttagccagcac

SEQ ID NO: 3882303 - DNA, 25 bp, Homo sapien
tatcctgaaagatctgggtgagccc

SEQ ID NO: 3882304 - DNA, 25 bp, Homo sapien
gtctgtgcacactgtaccatctcag

SEQ ID NO: 3882305 - DNA, 25 bp, Homo sapien
ctttatttgttgtactaaagcctgt

SEQ ID NO: 3882306 - DNA, 25 bp, Homo sapien
aaaatcccagtctgtcagctcagta

SEQ ID NO: 3882307 - DNA, 25 bp, Homo sapien
cagagggtctgcgagttaatacctt

SEQ ID NO: 3882308 - DNA, 25 bp, Homo sapien
tttcatagtttgtctgagctagaaa

SEQ ID NO: 3882309 - DNA, 25 bp, Homo sapien
ttttcatagtttgtctgagctagaa

SEQ ID NO: 3882310 - DNA, 25 bp, Homo sapien
gcatgccgtgagtgctgtaatcaag

SEQ ID NO: 3882311 - DNA, 25 bp, Homo sapien
gacgcatagcttaaggaggaaccac

SEQ ID NO: 3882312 - DNA, 25 bp, Homo sapien
gacttacagagcctaaggaggaccc

SEQ ID NO: 3882313 - DNA, 25 bp, Homo sapien
ccacactgagtagggtgcatgccgt

SEQ ID NO: 3882314 - DNA, 25 bp, Homo sapien
cacagtcctcaagtaataagcacag

SEQ ID NO: 3882315 - DNA, 25 bp, Homo sapien
ggagcagacacagtcctcaagtaat

SEQ ID NO: 3882316 - DNA, 25 bp, Homo sapien
gtcctcaagtaataagcacagatgg

SEQ ID NO: 3882317 - DNA, 25 bp, Homo sapien
gcagacacagtcctcaagtaataag

SEQ ID NO: 3882318 - DNA, 25 bp, Homo sapien
tgttaaagcacacgtgtgacacggg

SEQ ID NO: 3882319 - DNA, 25 bp, Homo sapien
taaacgagtgatccgaaaggttctc

SEQ ID NO: 3882320 - DNA, 25 bp, Homo sapien
ggagttgtgacgtccttccaggaga

SEQ ID NO: 3882321 - DNA, 25 bp, Homo sapien
tgctgaagacgggaacgaaaccaac

SEQ ID NO: 3882322 - DNA, 25 bp, Homo sapien
ctagagcgggcaggctggaatccac

SEQ ID NO: 3882323 - DNA, 25 bp, Homo sapien
tctgagtgcaaatgcttgacagggc

SEQ ID NO: 3882324 - DNA, 25 bp, Homo sapien
ttgttcttgattgaccattgccaag

SEQ ID NO: 3882325 - DNA, 25 bp, Homo sapien
tgttcttgattgaccattgccaaga

SEQ ID NO: 3882326 - DNA, 25 bp, Homo sapien
caagatctgagtgcaaatgcttgac

SEQ ID NO: 3882327 - DNA, 25 bp, Homo sapien
ttaaggagccagatagctcatggcc

SEQ ID NO: 3882328 - DNA, 25 bp, Homo sapien
actgcagttaacaccctgggttggg

SEQ ID NO: 3882329 - DNA, 25 bp, Homo sapien
cagacacgtcattcagctcagagta

SEQ ID NO: 3882330 - DNA, 25 bp, Homo sapien
ggattctgcaggaaacgacaagttt

SEQ ID NO: 3882331 - DNA, 25 bp, Homo sapien
cctgaggccaagatcggtgagctta

SEQ ID NO: 3882332 - DNA, 25 bp, Homo sapien
tgcgggcttctccacggctaagaaa

SEQ ID NO: 3882333 - DNA, 25 bp, Homo sapien
gggactgcaatctgaacacctgact

SEQ ID NO: 3882334 - DNA, 25 bp, Homo sapien
cctgtaagaatcctgacgttggcca

SEQ ID NO: 3882335 - DNA, 25 bp, Homo sapien
tttggaatgcctctgagtcaccttg

SEQ ID NO: 3882336 - DNA, 25 bp, Homo sapien
ctgcgccgcctcaaactgctctttg

SEQ ID NO: 3882337 - DNA, 25 bp, Homo sapien
tacctgctgtactcctgctcaagct

SEQ ID NO: 3882338 - DNA, 25 bp, Homo sapien
tgagtcaccttgtccctcaggtaga

SEQ ID NO: 3882339 - DNA, 25 bp, Homo sapien
tgatgtgcttggcgctcttgtagtg

SEQ ID NO: 3882340 - DNA, 25 bp, Homo sapien
tagatgtgcatgtggtggagccgct

SEQ ID NO: 3882341 - DNA, 25 bp, Homo sapien
cgctcttgtagtggatgaagatgac

SEQ ID NO: 3882342 - DNA, 25 bp, Homo sapien
caatagcgtgcggagcaatgtccag

SEQ ID NO: 3882343 - DNA, 25 bp, Homo sapien
ttggactccgagtgtttgccccacc

SEQ ID NO: 3882344 - DNA, 25 bp, Homo sapien
agatacagggaccttctgaaagccc

SEQ ID NO: 3882345 - DNA, 25 bp, Homo sapien
gaagccttatttttgccagactgag

SEQ ID NO: 3882346 - DNA, 25 bp, Homo sapien
gtctgtcgtcccaggcatccaggtg

SEQ ID NO: 3882347 - DNA, 25 bp, Homo sapien
gatctcctttattgacgccacagtg

SEQ ID NO: 3882348 - DNA, 25 bp, Homo sapien
ggcaatctttgacaccccgctcaat

SEQ ID NO: 3882349 - DNA, 25 bp, Homo sapien
tatagtcgacaaacaggcaatcttt

SEQ ID NO: 3882350 - DNA, 25 bp, Homo sapien
gaaatggccgcttctccgcttatag

SEQ ID NO: 3882351 - DNA, 25 bp, Homo sapien
agaatcaggacaggcctcagagcgg

SEQ ID NO: 3882352 - DNA, 25 bp, Homo sapien
cgctgataggccaggctcaccgaat

SEQ ID NO: 3882353 - DNA, 25 bp, Homo sapien
aggcctcagagcggtgcagtccacc

SEQ ID NO: 3882354 - DNA, 25 bp, Homo sapien
gtccaccttctggacccgctgatag

SEQ ID NO: 3882355 - DNA, 25 bp, Homo sapien
cataaggattatacaagacttgttc

SEQ ID NO: 3882356 - DNA, 25 bp, Homo sapien
tgcagaaaccgacagctcttggtca

SEQ ID NO: 3882357 - DNA, 25 bp, Homo sapien
ggactagcatcttgctccataagga

SEQ ID NO: 3882358 - DNA, 25 bp, Homo sapien
ctgaggccagaaatgccgaagttct

SEQ ID NO: 3882359 - DNA, 25 bp, Homo sapien
tcagacttgcgcacaaaagcaaagt

SEQ ID NO: 3882360 - DNA, 25 bp, Homo sapien
tggatccacagcaagccccatctgg

SEQ ID NO: 3882361 - DNA, 25 bp, Homo sapien
gtccctgttgtggagctcctggatc

SEQ ID NO: 3882362 - DNA, 25 bp, Homo sapien
aaagcaaagtaagactctcttttgt

SEQ ID NO: 3882363 - DNA, 25 bp, Homo sapien
tccttggacccgctgcgtttgtgct

SEQ ID NO: 3882364 - DNA, 25 bp, Homo sapien
gcatccaaggcgagcaggtctttcc

SEQ ID NO: 3882365 - DNA, 25 bp, Homo sapien
cgctgacagcgtctttgtggcgcta

SEQ ID NO: 3882366 - DNA, 25 bp, Homo sapien
agagtggaatggagtcactggaaaa

SEQ ID NO: 3882367 - DNA, 25 bp, Homo sapien
gccatcgagaccctgctgccctgcc

SEQ ID NO: 3882368 - DNA, 25 bp, Homo sapien
ggccatcgagaccctgctgccctgc

SEQ ID NO: 3882369 - DNA, 25 bp, Homo sapien
ttggtgacatgacgagttacgcttc

SEQ ID NO: 3882370 - DNA, 25 bp, Homo sapien
cagctcggtgtcaaaaggaactgct

SEQ ID NO: 3882371 - DNA, 25 bp, Homo sapien
tgtcaaaaggaactgctaggacagc

SEQ ID NO: 3882372 - DNA, 25 bp, Homo sapien
cagccttcaattggtgacatgacga

SEQ ID NO: 3882373 - DNA, 25 bp, Homo sapien
aatctgcccgcgctggatcttctgg

SEQ ID NO: 3882374 - DNA, 25 bp, Homo sapien
ccgcgctggatcttctgggcattct

SEQ ID NO: 3882375 - DNA, 25 bp, Homo sapien
tcttctgggcattctcgtccagctg

SEQ ID NO: 3882376 - DNA, 25 bp, Homo sapien
tgctgggaatctgcccgcgctggat

SEQ ID NO: 3882377 - DNA, 25 bp, Homo sapien
ggtaaggtgtcatccacgtagagga

SEQ ID NO: 3882378 - DNA, 25 bp, Homo sapien
atctgccagccggtcgtacagggcc

SEQ ID NO: 3882379 - DNA, 25 bp, Homo sapien
atccaggacccgaacgtgccctggg

SEQ ID NO: 3882380 - DNA, 25 bp, Homo sapien
ggatgtcgtccttcttaaagctcaa

SEQ ID NO: 3882381 - DNA, 25 bp, Homo sapien
aaagagtctccagtgaaagcctctc

SEQ ID NO: 3882382 - DNA, 25 bp, Homo sapien
gaaaagagtctccagtgaaagcctc

SEQ ID NO: 3882383 - DNA, 25 bp, Homo sapien
gagtctccagtgaaagcctctcctc

SEQ ID NO: 3882384 - DNA, 25 bp, Homo sapien
aagagtctccagtgaaagcctctcc

SEQ ID NO: 3882385 - DNA, 25 bp, Homo sapien
cactgtcttgttccgcacgtccagg

SEQ ID NO: 3882386 - DNA, 25 bp, Homo sapien
tcctcagggcggtactgcaccttca

SEQ ID NO: 3882387 - DNA, 25 bp, Homo sapien
tcaggcggacgccatccctgggctt

SEQ ID NO: 3882388 - DNA, 25 bp, Homo sapien
tggccttcgtgaactcctcagggcg

SEQ ID NO: 3882389 - DNA, 25 bp, Homo sapien
atgaggtcccctggcacgaggccgt

SEQ ID NO: 3882390 - DNA, 25 bp, Homo sapien
ttgatgaagacaacgcgtggctcca

SEQ ID NO: 3882391 - DNA, 25 bp, Homo sapien
gccgtcaggacccttggcaggactg

SEQ ID NO: 3882392 - DNA, 25 bp, Homo sapien
gctccagctgggactttttgatgaa

SEQ ID NO: 3882393 - DNA, 25 bp, Homo sapien
gtggagtgggtaccggcagggtcca

SEQ ID NO: 3882394 - DNA, 25 bp, Homo sapien
tcctgctccatcagtgggtcgatga

SEQ ID NO: 3882395 - DNA, 25 bp, Homo sapien
tgggtcgatgacagatggatgctcc

SEQ ID NO: 3882396 - DNA, 25 bp, Homo sapien
gtgctaggcccctcgtcctgctcca

SEQ ID NO: 3882397 - DNA, 25 bp, Homo sapien
ctgctgagctggtgcacgtgggggt

SEQ ID NO: 3882398 - DNA, 25 bp, Homo sapien
tgagctggtgcacgtgggggttgta

SEQ ID NO: 3882399 - DNA, 25 bp, Homo sapien
ctggaccgggagtggctgctgagct

SEQ ID NO: 3882400 - DNA, 25 bp, Homo sapien
tgctgagctggtgcacgtgggggtt

SEQ ID NO: 3882401 - DNA, 25 bp, Homo sapien
gctccgtggcgctccgcaggtttat

SEQ ID NO: 3882402 - DNA, 25 bp, Homo sapien
gatggtatcacactgctgcccgatg

SEQ ID NO: 3882403 - DNA, 25 bp, Homo sapien
tgcccgatgatgagccgcgcctgct

SEQ ID NO: 3882404 - DNA, 25 bp, Homo sapien
cgctccgcaggtttatgccgttgaa

SEQ ID NO: 3882405 - DNA, 25 bp, Homo sapien
ggggacttgggagcactgctgttcc

SEQ ID NO: 3882406 - DNA, 25 bp, Homo sapien
ctggggaaacaccaggatgggctca

SEQ ID NO: 3882407 - DNA, 25 bp, Homo sapien
gaaacaccaggatgggctcagtggg

SEQ ID NO: 3882408 - DNA, 25 bp, Homo sapien
tcagtgggggggtcggggctgtgga

SEQ ID NO: 3882409 - DNA, 25 bp, Homo sapien
cttctgcaccttcacgtggcgtggc

SEQ ID NO: 3882410 - DNA, 25 bp, Homo sapien
ggtgagcgatgctccccacggtcac

SEQ ID NO: 3882411 - DNA, 25 bp, Homo sapien
ctccactcacgatggagatgcccag

SEQ ID NO: 3882412 - DNA, 25 bp, Homo sapien
gtcaccttggagacgtagatgccgc

SEQ ID NO: 3882413 - DNA, 25 bp, Homo sapien
aaaagaaagctgttgctcagtcagg

SEQ ID NO: 3882414 - DNA, 25 bp, Homo sapien
cagaatctgggaaacggggccattt

SEQ ID NO: 3882415 - DNA, 25 bp, Homo sapien
gaaagctgttgctcagtcaggtcac

SEQ ID NO: 3882416 - DNA, 25 bp, Homo sapien
gttgctcagtcaggtcacacatgtc

SEQ ID NO: 3882417 - DNA, 25 bp, Homo sapien
ccacatggtaagagctccgtcagca

SEQ ID NO: 3882418 - DNA, 25 bp, Homo sapien
gagctaagggaatgcttggcagtgg

SEQ ID NO: 3882419 - DNA, 25 bp, Homo sapien
atgctcctgcgcgtgccacatggta

SEQ ID NO: 3882420 - DNA, 25 bp, Homo sapien
ttccacaactgaagaacccacttca

SEQ ID NO: 3882421 - DNA, 25 bp, Homo sapien
agggtaagaatgagtcccggtgcca

SEQ ID NO: 3882422 - DNA, 25 bp, Homo sapien
caacagaaagcttcgaatgagaggg

SEQ ID NO: 3882423 - DNA, 25 bp, Homo sapien
ggccacaggtctgtcactccaacgt

SEQ ID NO: 3882424 - DNA, 25 bp, Homo sapien
gtcactccaacgtctggatccagtt

SEQ ID NO: 3882425 - DNA, 25 bp, Homo sapien
gggttgacagcgattctgggcaatg

SEQ ID NO: 3882426 - DNA, 25 bp, Homo sapien
ttgacagcgattctgggcaatgtgg

SEQ ID NO: 3882427 - DNA, 25 bp, Homo sapien
caagaggacagggtgtcgatgttca

SEQ ID NO: 3882428 - DNA, 25 bp, Homo sapien
tgacagcgattctgggcaatgtgga

SEQ ID NO: 3882429 - DNA, 25 bp, Homo sapien
ctgcattcagaatgtgacactgaac

SEQ ID NO: 3882430 - DNA, 25 bp, Homo sapien
ttgaactgcaagttactcgaagaac

SEQ ID NO: 3882431 - DNA, 25 bp, Homo sapien
aatgcgttccgccttgaactgcaag

SEQ ID NO: 3882432 - DNA, 25 bp, Homo sapien
cttggtgttgatgggattttaatgc

SEQ ID NO: 3882433 - DNA, 25 bp, Homo sapien
gacactccgcggatatcttggtgtt

SEQ ID NO: 3882434 - DNA, 25 bp, Homo sapien
tggagggcagtgagttggacccatg

SEQ ID NO: 3882435 - DNA, 25 bp, Homo sapien
agggcagtgagttggacccatgggt

SEQ ID NO: 3882436 - DNA, 25 bp, Homo sapien
ccaggcgggcgctggagggcagtga

SEQ ID NO: 3882437 - DNA, 25 bp, Homo sapien
ggcagtgagttggacccatgggtgg

SEQ ID NO: 3882438 - DNA, 25 bp, Homo sapien
tcggagtagtcgctgcaggtcctgt

SEQ ID NO: 3882439 - DNA, 25 bp, Homo sapien
ctcggagtagtcgctgcaggtcctg

SEQ ID NO: 3882440 - DNA, 25 bp, Homo sapien
ggttccgcaggatggagctcacagt

SEQ ID NO: 3882441 - DNA, 25 bp, Homo sapien
ggccgaccctgtgactgcgcacagt

SEQ ID NO: 3882442 - DNA, 25 bp, Homo sapien
cgcacagtgtagatggggttccgca

SEQ ID NO: 3882443 - DNA, 25 bp, Homo sapien
gggccagcatctcgggccgcaggtg

SEQ ID NO: 3882444 - DNA, 25 bp, Homo sapien
tggtgagaaaagacgccccaaagga

SEQ ID NO: 3882445 - DNA, 25 bp, Homo sapien
aggacgcagccgcagtcttttggga

SEQ ID NO: 3882446 - DNA, 25 bp, Homo sapien
aggacttacacaagcctttcccctg

SEQ ID NO: 3882447 - DNA, 25 bp, Homo sapien
ttgggagatgagttttaaccaccaa

SEQ ID NO: 3882448 - DNA, 25 bp, Homo sapien
aaagcatgttgacaagctaagacat

SEQ ID NO: 3882449 - DNA, 25 bp, Homo sapien
gggctgaaaacacatggcagctctc

SEQ ID NO: 3882450 - DNA, 25 bp, Homo sapien
taagacatgtcatggctataagaca

SEQ ID NO: 3882451 - DNA, 25 bp, Homo sapien
ctaggcatcccgagtttacaccgac

SEQ ID NO: 3882452 - DNA, 25 bp, Homo sapien
ggagagttctccactggccgggaca

SEQ ID NO: 3882453 - DNA, 25 bp, Homo sapien
gaatgcccaggcgagtaaggtgccc

SEQ ID NO: 3882454 - DNA, 25 bp, Homo sapien
cacagacggcctgctagggtatagc

SEQ ID NO: 3882455 - DNA, 25 bp, Homo sapien
aggcgagtaaggtgcccactcctgg

SEQ ID NO: 3882456 - DNA, 25 bp, Homo sapien
ctgcagatgcaagggcaagagtgtc

SEQ ID NO: 3882457 - DNA, 25 bp, Homo sapien
tgcagatgcaagggcaagagtgtct

SEQ ID NO: 3882458 - DNA, 25 bp, Homo sapien
gcagatgcaagggcaagagtgtctg

SEQ ID NO: 3882459 - DNA, 25 bp, Homo sapien
aaaggtgagaatgcacaagtgcatc

SEQ ID NO: 3882460 - DNA, 25 bp, Homo sapien
cacagagatcacgtaaaaggtgaga

SEQ ID NO: 3882461 - DNA, 25 bp, Homo sapien
tgagcagtgtggactggtgcctgag

SEQ ID NO: 3882462 - DNA, 25 bp, Homo sapien
gctgtgcgaagctctttgtccccag

SEQ ID NO: 3882463 - DNA, 25 bp, Homo sapien
agtgagcagtgtggactggtgcctg

SEQ ID NO: 3882464 - DNA, 25 bp, Homo sapien
ggtgcctgagatgctttccacagtc

SEQ ID NO: 3882465 - DNA, 25 bp, Homo sapien
ctatgacagcacacgcaatcaggcc

SEQ ID NO: 3882466 - DNA, 25 bp, Homo sapien
ttcaaggcaagtctatgccctaggt

SEQ ID NO: 3882467 - DNA, 25 bp, Homo sapien
tgtgtaagttcaaaagcttcttatt

SEQ ID NO: 3882468 - DNA, 25 bp, Homo sapien
aaatgctatgcccaataaagtgttc

SEQ ID NO: 3882469 - DNA, 25 bp, Homo sapien
tacctcctagctgggccacttccca

SEQ ID NO: 3882470 - DNA, 25 bp, Homo sapien
cttcggccaactgcccctctctagg

SEQ ID NO: 3882471 - DNA, 25 bp, Homo sapien
ggccaactgcccctctctaggcctc

SEQ ID NO: 3882472 - DNA, 25 bp, Homo sapien
agggccacttagcagccctccttcg

SEQ ID NO: 3882473 - DNA, 25 bp, Homo sapien
ttagcagccctccttcggccaactg

SEQ ID NO: 3882474 - DNA, 25 bp, Homo sapien
tggagcaagcttcggccgaaaactg

SEQ ID NO: 3882475 - DNA, 25 bp, Homo sapien
agcagattttggccggcgacgcttc

SEQ ID NO: 3882476 - DNA, 25 bp, Homo sapien
actactggagcaagcttcggccgaa

SEQ ID NO: 3882477 - DNA, 25 bp, Homo sapien
aagcttcggccgaaaactgggagca

SEQ ID NO: 3882478 - DNA, 25 bp, Homo sapien
gggccatgggctcgaaaactcagca

SEQ ID NO: 3882479 - DNA, 25 bp, Homo sapien
tcatcacaggatttcttggccggca

SEQ ID NO: 3882480 - DNA, 25 bp, Homo sapien
aatgttctggccactccacgaggag

SEQ ID NO: 3882481 - DNA, 25 bp, Homo sapien
tccagcctgtccgtgtagaagatgt

SEQ ID NO: 3882482 - DNA, 25 bp, Homo sapien
agacttgttgtccagtgcaatgcca

SEQ ID NO: 3882483 - DNA, 25 bp, Homo sapien
cagagattcacattcattcagagac

SEQ ID NO: 3882484 - DNA, 25 bp, Homo sapien
aggagggacagggtcagggagtcct

SEQ ID NO: 3882485 - DNA, 25 bp, Homo sapien
gcagctgcgcagcagagattcacat

SEQ ID NO: 3882486 - DNA, 25 bp, Homo sapien
cagtcaggatctctgcctacctaac

SEQ ID NO: 3882487 - DNA, 25 bp, Homo sapien
ttggcaaaggatagaggtctttctg

SEQ ID NO: 3882488 - DNA, 25 bp, Homo sapien
taacctcctgtgctagacagtcacc

SEQ ID NO: 3882489 - DNA, 25 bp, Homo sapien
ccaactaaggggattctgaggtaga

SEQ ID NO: 3882490 - DNA, 25 bp, Homo sapien
ttctttagcggcagggcttccaggc

SEQ ID NO: 3882491 - DNA, 25 bp, Homo sapien
acagcggcagcatacactccattct

SEQ ID NO: 3882492 - DNA, 25 bp, Homo sapien
agcacagcggcagcatacactccat

SEQ ID NO: 3882493 - DNA, 25 bp, Homo sapien
cccacagcaagggacccttctttag

SEQ ID NO: 3882494 - DNA, 25 bp, Homo sapien
tccccattgaggagcgccttgatgg

SEQ ID NO: 3882495 - DNA, 25 bp, Homo sapien
tccactgaggttgatgtgcagcggc

SEQ ID NO: 3882496 - DNA, 25 bp, Homo sapien
ctccgccgcacgaccatgttgatgg

SEQ ID NO: 3882497 - DNA, 25 bp, Homo sapien
ggtccacatcgttgattctcagcag

SEQ ID NO: 3882498 - DNA, 25 bp, Homo sapien
tcccccgggaaacaaggctcattca

SEQ ID NO: 3882499 - DNA, 25 bp, Homo sapien
cagtcccccgggaaacaaggctcat

SEQ ID NO: 3882500 - DNA, 25 bp, Homo sapien
ccgggaaacaaggctcattcacacc

SEQ ID NO: 3882501 - DNA, 25 bp, Homo sapien
cgggaaacaaggctcattcacacct

SEQ ID NO: 3882502 - DNA, 25 bp, Homo sapien
ccactccatggaatccgtgtcaatg

SEQ ID NO: 3882503 - DNA, 25 bp, Homo sapien
ctgtgggccatcagctgtcggaacc

SEQ ID NO: 3882504 - DNA, 25 bp, Homo sapien
tctcgaactctacaacttccgtttc

SEQ ID NO: 3882505 - DNA, 25 bp, Homo sapien
atccgtgtcaatggccgagtcgtgg

SEQ ID NO: 3882506 - DNA, 25 bp, Homo sapien
ccgcctcaggttgtcacacagtgtc

SEQ ID NO: 3882507 - DNA, 25 bp, Homo sapien
tcccgcctcaggttgtcacacagtg

SEQ ID NO: 3882508 - DNA, 25 bp, Homo sapien
ttcagctcgcggctgacatcattct

SEQ ID NO: 3882509 - DNA, 25 bp, Homo sapien
cattcttctgcttgcgggtgtcatc

SEQ ID NO: 3882510 - DNA, 25 bp, Homo sapien
tgctttcgaaggatttcaacctcct

SEQ ID NO: 3882511 - DNA, 25 bp, Homo sapien
tacaatcttgtctcgctcctggaag

SEQ ID NO: 3882512 - DNA, 25 bp, Homo sapien
gcactgctttcgaaggatttcaacc

SEQ ID NO: 3882513 - DNA, 25 bp, Homo sapien
gcatccattgtcaccgtgtctttga

SEQ ID NO: 3882514 - DNA, 25 bp, Homo sapien
ccaaggctgaggctctagggagctg

SEQ ID NO: 3882515 - DNA, 25 bp, Homo sapien
gccaaggctgaggctctagggagct

SEQ ID NO: 3882516 - DNA, 25 bp, Homo sapien
ggccaaggctgaggctctagggagc

SEQ ID NO: 3882517 - DNA, 25 bp, Homo sapien
aaaggcagaatagagggatgtgaat

SEQ ID NO: 3882518 - DNA, 25 bp, Homo sapien
gcagaatagagggatgtgaatatct

SEQ ID NO: 3882519 - DNA, 25 bp, Homo sapien
ctgcattctaactgacctgcacaga

SEQ ID NO: 3882520 - DNA, 25 bp, Homo sapien
attctaactgacctgcacagaaagg

SEQ ID NO: 3882521 - DNA, 25 bp, Homo sapien
gagatgacctggtcacgctcactca

SEQ ID NO: 3882522 - DNA, 25 bp, Homo sapien
cacgctcactcatgatgagcttgta

SEQ ID NO: 3882523 - DNA, 25 bp, Homo sapien
tccacttcggtctgcagcttgtcca

SEQ ID NO: 3882524 - DNA, 25 bp, Homo sapien
gctgctcttgagcttggactcggcc

SEQ ID NO: 3882525 - DNA, 25 bp, Homo sapien
tcctccctgtatttctccgactcct

SEQ ID NO: 3882526 - DNA, 25 bp, Homo sapien
gcgtcccgctcctccctgtatttct

SEQ ID NO: 3882527 - DNA, 25 bp, Homo sapien
cgctcctccctgtatttctccgact

SEQ ID NO: 3882528 - DNA, 25 bp, Homo sapien
acagcgtcccgctcctccctgtatt

SEQ ID NO: 3882529 - DNA, 25 bp, Homo sapien
tgcgtggttctcagctcggtcagct

SEQ ID NO: 3882530 - DNA, 25 bp, Homo sapien
gtcttcacctgcgtggttctcagct

SEQ ID NO: 3882531 - DNA, 25 bp, Homo sapien
ggtccttgttctgcgccgtggcctt

SEQ ID NO: 3882532 - DNA, 25 bp, Homo sapien
cagctcatggtggatcgcctcaaac

SEQ ID NO: 3882533 - DNA, 25 bp, Homo sapien
tggatggcgactttctcactgtacc

SEQ ID NO: 3882534 - DNA, 25 bp, Homo sapien
gagaatctcggatgacccgttgtgc

SEQ ID NO: 3882535 - DNA, 25 bp, Homo sapien
tccaggcggctcaggtctgcattgt

SEQ ID NO: 3882536 - DNA, 25 bp, Homo sapien
caacttgtccatggccgtgtcatac

SEQ ID NO: 3882537 - DNA, 25 bp, Homo sapien
ctccaacagccgaggaatcacctgg

SEQ ID NO: 3882538 - DNA, 25 bp, Homo sapien
cagaagctgggacgatggaacactc

SEQ ID NO: 3882539 - DNA, 25 bp, Homo sapien
cagcctggtttatcaagcgtttgca

SEQ ID NO: 3882540 - DNA, 25 bp, Homo sapien
gcgtttgcagcctagagaaccagaa

SEQ ID NO: 3882541 - DNA, 25 bp, Homo sapien
agatcaggccccgtactgcttgctt

SEQ ID NO: 3882542 - DNA, 25 bp, Homo sapien
gatactcaaagaggctcgcaggccc

SEQ ID NO: 3882543 - DNA, 25 bp, Homo sapien
aaagctccttgggatagggtcgtgc

SEQ ID NO: 3882544 - DNA, 25 bp, Homo sapien
tctggttctcactctagccttggag

SEQ ID NO: 3882545 - DNA, 25 bp, Homo sapien
tccaagaaggtgcactcggactgcc

SEQ ID NO: 3882546 - DNA, 25 bp, Homo sapien
gacacagcctagaagaatccaagaa

SEQ ID NO: 3882547 - DNA, 25 bp, Homo sapien
cctcttcaagtttacaaggcgtggg

SEQ ID NO: 3882548 - DNA, 25 bp, Homo sapien
catatggacaaaacacctgtgtgct

SEQ ID NO: 3882549 - DNA, 25 bp, Homo sapien
gaagttcatccacactatagcatgg

SEQ ID NO: 3882550 - DNA, 25 bp, Homo sapien
cattcatcggtcagtagacctttgg

SEQ ID NO: 3882551 - DNA, 25 bp, Homo sapien
ttcacaaggttatgaatccacaaag

SEQ ID NO: 3882552 - DNA, 25 bp, Homo sapien
ttcatgtacctggaatcatagtttg

SEQ ID NO: 3882553 - DNA, 25 bp, Homo sapien
ccaagcgtagaccaagaagaacaaa

SEQ ID NO: 3882554 - DNA, 25 bp, Homo sapien
gccaagcgtagaccaagaagaacaa

SEQ ID NO: 3882555 - DNA, 25 bp, Homo sapien
gagccaagcgtagaccaagaagaac

SEQ ID NO: 3882556 - DNA, 25 bp, Homo sapien
ctgagccaagcgtagaccaagaaga

SEQ ID NO: 3882557 - DNA, 25 bp, Homo sapien
agtactgaccagagctagcacggca

SEQ ID NO: 3882558 - DNA, 25 bp, Homo sapien
gtcaagacctatgggctaaatacca

SEQ ID NO: 3882559 - DNA, 25 bp, Homo sapien
tgctgccggctttccattaccaagg

SEQ ID NO: 3882560 - DNA, 25 bp, Homo sapien
cctcctgaatctataaagggtggga

SEQ ID NO: 3882561 - DNA, 25 bp, Homo sapien
gaatgaggactacttgggagaaatg

SEQ ID NO: 3882562 - DNA, 25 bp, Homo sapien
aggaatgaggactacttgggagaaa

SEQ ID NO: 3882563 - DNA, 25 bp, Homo sapien
cccggcccagcatttacttctcaat

SEQ ID NO: 3882564 - DNA, 25 bp, Homo sapien
ggaatgaggactacttgggagaaat

SEQ ID NO: 3882565 - DNA, 25 bp, Homo sapien
atgtccacgtcatccttcagccgag

SEQ ID NO: 3882566 - DNA, 25 bp, Homo sapien
ttcagccgagtctggtcactcagga

SEQ ID NO: 3882567 - DNA, 25 bp, Homo sapien
tgctgggcacggaggtcaccgatct

SEQ ID NO: 3882568 - DNA, 25 bp, Homo sapien
gactgctgcagcaggtttcgctccc

SEQ ID NO: 3882569 - DNA, 25 bp, Homo sapien
caggtcccaacacttcccgtagata

SEQ ID NO: 3882570 - DNA, 25 bp, Homo sapien
ctgtagcactcagaggcaagccaaa

SEQ ID NO: 3882571 - DNA, 25 bp, Homo sapien
atacagcggacaggagccaatggca

SEQ ID NO: 3882572 - DNA, 25 bp, Homo sapien
aacctgctaacagcccaattccaga

SEQ ID NO: 3882573 - DNA, 25 bp, Homo sapien
gcccctctggtacagacctagtgcc

SEQ ID NO: 3882574 - DNA, 25 bp, Homo sapien
tctggtacagacctagtgcctccaa

SEQ ID NO: 3882575 - DNA, 25 bp, Homo sapien
gcacatgtatctccagggaagggag

SEQ ID NO: 3882576 - DNA, 25 bp, Homo sapien
aagggcacatgtatctccagggaag

SEQ ID NO: 3882577 - DNA, 25 bp, Homo sapien
tggtagaagtcagtctccttggcca

SEQ ID NO: 3882578 - DNA, 25 bp, Homo sapien
gtagaagtcagtctccttggccacc

SEQ ID NO: 3882579 - DNA, 25 bp, Homo sapien
agtctccttggccacctcctcacac

SEQ ID NO: 3882580 - DNA, 25 bp, Homo sapien
tcagtctccttggccacctcctcac

SEQ ID NO: 3882581 - DNA, 25 bp, Homo sapien
tcagcctctcatagtcaggattcag

SEQ ID NO: 3882582 - DNA, 25 bp, Homo sapien
tggctcgcacgcactggatcttcag

SEQ ID NO: 3882583 - DNA, 25 bp, Homo sapien
ggtccgacatggctcgcacgcactg

SEQ ID NO: 3882584 - DNA, 25 bp, Homo sapien
cagcctctcatagtcaggattcagc

SEQ ID NO: 3882585 - DNA, 25 bp, Homo sapien
ctggcccagagagcgaatggcccca

SEQ ID NO: 3882586 - DNA, 25 bp, Homo sapien
tggcccagagagcgaatggccccat

SEQ ID NO: 3882587 - DNA, 25 bp, Homo sapien
cgtgccatgcgtagcaaaggccagg

SEQ ID NO: 3882588 - DNA, 25 bp, Homo sapien
gcgcttgcggagctcgtttctctcc

SEQ ID NO: 3882589 - DNA, 25 bp, Homo sapien
caaaggccgtgccatgcgtagcaaa

SEQ ID NO: 3882590 - DNA, 25 bp, Homo sapien
caggcgcttgcggagctcgtttctc

SEQ ID NO: 3882591 - DNA, 25 bp, Homo sapien
ccgcagctgaatggagaggttctcc

SEQ ID NO: 3882592 - DNA, 25 bp, Homo sapien
tccaccttctcattcacttgctggt

SEQ ID NO: 3882593 - DNA, 25 bp, Homo sapien
cattcacttgctggtcagtgaggag

SEQ ID NO: 3882594 - DNA, 25 bp, Homo sapien
cagccgcagctgaatggagaggttc

SEQ ID NO: 3882595 - DNA, 25 bp, Homo sapien
aaatattctttggcggtgaggccag

SEQ ID NO: 3882596 - DNA, 25 bp, Homo sapien
aaaatattctttggcggtgaggcca

SEQ ID NO: 3882597 - DNA, 25 bp, Homo sapien
tccaggccctgtatgcctgtgcttc

SEQ ID NO: 3882598 - DNA, 25 bp, Homo sapien
tttgcttccaggccctgtatgcctg

SEQ ID NO: 3882599 - DNA, 25 bp, Homo sapien
caggccctgtatgcctgtgcttcca

SEQ ID NO: 3882600 - DNA, 25 bp, Homo sapien
gcttccaggccctgtatgcctgtgc

SEQ ID NO: 3882601 - DNA, 25 bp, Homo sapien
ctgctacagacaccccgccatgaga

SEQ ID NO: 3882602 - DNA, 25 bp, Homo sapien
tggagctgctgctacagacaccccg

SEQ ID NO: 3882603 - DNA, 25 bp, Homo sapien
ctggacactgtcaggtctggatgtg

SEQ ID NO: 3882604 - DNA, 25 bp, Homo sapien
gctgctgctacagacaccccgccat

SEQ ID NO: 3882605 - DNA, 25 bp, Homo sapien
ccacactgctgagggagctgctgct

SEQ ID NO: 3882606 - DNA, 25 bp, Homo sapien
gagctgctgctttctgagtctgagg

SEQ ID NO: 3882607 - DNA, 25 bp, Homo sapien
tgctgctttctgagtctgagggcat

SEQ ID NO: 3882608 - DNA, 25 bp, Homo sapien
gctgctgctttctgagtctgagggc

SEQ ID NO: 3882609 - DNA, 25 bp, Homo sapien
gtggacaggacgctgtaggtagaac

SEQ ID NO: 3882610 - DNA, 25 bp, Homo sapien
ggtggacaggacgctgtaggtagaa

SEQ ID NO: 3882611 - DNA, 25 bp, Homo sapien
agaaatctctatgctcaacccatcc

SEQ ID NO: 3882612 - DNA, 25 bp, Homo sapien
ctccagaaatctctatgctcaaccc

SEQ ID NO: 3882613 - DNA, 25 bp, Homo sapien
ccagaaatctctatgctcaacccat

SEQ ID NO: 3882614 - DNA, 25 bp, Homo sapien
ctatgctcaacccatcccagcttac

SEQ ID NO: 3882615 - DNA, 25 bp, Homo sapien
tgctggaacgctcccctctttctta

SEQ ID NO: 3882616 - DNA, 25 bp, Homo sapien
tctttcttactcttggcatcagcag

SEQ ID NO: 3882617 - DNA, 25 bp, Homo sapien
tcttccagtaaactgcccctcctct

SEQ ID NO: 3882618 - DNA, 25 bp, Homo sapien
agatgcctctgctggaacgctcccc

SEQ ID NO: 3882619 - DNA, 25 bp, Homo sapien
cctgccctgaaacctaggatgggct

SEQ ID NO: 3882620 - DNA, 25 bp, Homo sapien
tgccatggcccaatccaggaggaga

SEQ ID NO: 3882621 - DNA, 25 bp, Homo sapien
tttcaaggccggttgcttccatggg

SEQ ID NO: 3882622 - DNA, 25 bp, Homo sapien
ggtgtcggcgtcatctacctctggg

SEQ ID NO: 3882623 - DNA, 25 bp, Homo sapien
caaactgggaagcggacaaggccca

SEQ ID NO: 3882624 - DNA, 25 bp, Homo sapien
gacaaggcccagtatttcagggagg

SEQ ID NO: 3882625 - DNA, 25 bp, Homo sapien
cccagtatttcagggaggtataggt

SEQ ID NO: 3882626 - DNA, 25 bp, Homo sapien
caaggctacagacactgaaacccaa

SEQ ID NO: 3882627 - DNA, 25 bp, Homo sapien
agtttgttgaatttcgagggatgaa

SEQ ID NO: 3882628 - DNA, 25 bp, Homo sapien
gtctgatgaaagccaccctctttgt

SEQ ID NO: 3882629 - DNA, 25 bp, Homo sapien
agtccacagttggatagcctgcttg

SEQ ID NO: 3882630 - DNA, 25 bp, Homo sapien
gtgggaggacctaagaccatcaaac

SEQ ID NO: 3882631 - DNA, 25 bp, Homo sapien
caggtgggaccacctctcggttcct

SEQ ID NO: 3882632 - DNA, 25 bp, Homo sapien
cacttctggccagactaagacagtt

SEQ ID NO: 3882633 - DNA, 25 bp, Homo sapien
gctgtcacttctggccagactaaga

SEQ ID NO: 3882634 - DNA, 25 bp, Homo sapien
tcggttcctgctttccatcaccaaa

SEQ ID NO: 3882635 - DNA, 25 bp, Homo sapien
taatgctgctcttatgggctgaagt

SEQ ID NO: 3882636 - DNA, 25 bp, Homo sapien
cacctcccaggttcgcctcaacctc

SEQ ID NO: 3882637 - DNA, 25 bp, Homo sapien
tgccagtaatgctgctcttatgggc

SEQ ID NO: 3882638 - DNA, 25 bp, Homo sapien
aacgcgccctgccagtaatgctgct

SEQ ID NO: 3882639 - DNA, 25 bp, Homo sapien
tttcatcacatttcagaaaaacaaa

SEQ ID NO: 3882640 - DNA, 25 bp, Homo sapien
tcatcacatttcagaaaaacaaaga

SEQ ID NO: 3882641 - DNA, 25 bp, Homo sapien
gttccatttcatcacatttcagaaa

SEQ ID NO: 3882642 - DNA, 25 bp, Homo sapien
ccatttcatcacatttcagaaaaac

SEQ ID NO: 3882643 - DNA, 25 bp, Homo sapien
agccggcgattttcatctgaaaaac

SEQ ID NO: 3882644 - DNA, 25 bp, Homo sapien
gagttccacaccgagctgccatcat

SEQ ID NO: 3882645 - DNA, 25 bp, Homo sapien
gcagagagagttccacaccgagctg

SEQ ID NO: 3882646 - DNA, 25 bp, Homo sapien
agcagcagccgtgcctacagccagc

SEQ ID NO: 3882647 - DNA, 25 bp, Homo sapien
cctagggcctgctgggctcccaact

SEQ ID NO: 3882648 - DNA, 25 bp, Homo sapien
ttcctagggcctgctgggctcccaa

SEQ ID NO: 3882649 - DNA, 25 bp, Homo sapien
ctagggcctgctgggctcccaactt

SEQ ID NO: 3882650 - DNA, 25 bp, Homo sapien
atttcctagggcctgctgggctccc

SEQ ID NO: 3882651 - DNA, 25 bp, Homo sapien
ggccacttgtttcccatgagtgtcc

SEQ ID NO: 3882652 - DNA, 25 bp, Homo sapien
tgtccaccagctcatgacaaaggcc

SEQ ID NO: 3882653 - DNA, 25 bp, Homo sapien
gtgctgacagcgcactctgtccacc

SEQ ID NO: 3882654 - DNA, 25 bp, Homo sapien
gctgacagcgcactctgtccaccag

SEQ ID NO: 3882655 - DNA, 25 bp, Homo sapien
tggaacttcgatacaaccttatgag

SEQ ID NO: 3882656 - DNA, 25 bp, Homo sapien
gaccccagcacagcggtcttgaggg

SEQ ID NO: 3882657 - DNA, 25 bp, Homo sapien
actccagaggtcttgtaccggtctc

SEQ ID NO: 3882658 - DNA, 25 bp, Homo sapien
gcaaggagttctactgcccaaagca

SEQ ID NO: 3882659 - DNA, 25 bp, Homo sapien
cactttcttgaatcgtcagggactt

SEQ ID NO: 3882660 - DNA, 25 bp, Homo sapien
gctcattgataagtctccactgtga

SEQ ID NO: 3882661 - DNA, 25 bp, Homo sapien
tgtaccgtaagcatcactggtgtga

SEQ ID NO: 3882662 - DNA, 25 bp, Homo sapien
gtgaaatggaaacaactgctcattg

SEQ ID NO: 3882663 - DNA, 25 bp, Homo sapien
ggattcaaacccagtatcttggctc

SEQ ID NO: 3882664 - DNA, 25 bp, Homo sapien
tcctcacttgtaaggtcaggtaagg

SEQ ID NO: 3882665 - DNA, 25 bp, Homo sapien
aagcaatttggccatggtcacggta

SEQ ID NO: 3882666 - DNA, 25 bp, Homo sapien
gacccctaaaaggttgctggtgaga

SEQ ID NO: 3882667 - DNA, 25 bp, Homo sapien
tggcactatctgtactactagatac

SEQ ID NO: 3882668 - DNA, 25 bp, Homo sapien
tgttcaagttttccaacaagacaat

SEQ ID NO: 3882669 - DNA, 25 bp, Homo sapien
tccaacaagacaataaactcctggg

SEQ ID NO: 3882670 - DNA, 25 bp, Homo sapien
gaatctgatggatttttagacacaa

SEQ ID NO: 3882671 - DNA, 25 bp, Homo sapien
catctgctgaatgaatggacgaatg

SEQ ID NO: 3882672 - DNA, 25 bp, Homo sapien
tcagaacacatctgctgaatgaatg

SEQ ID NO: 3882673 - DNA, 25 bp, Homo sapien
cagaacacatctgctgaatgaatgg

SEQ ID NO: 3882674 - DNA, 25 bp, Homo sapien
acacatctgctgaatgaatggacga

SEQ ID NO: 3882675 - DNA, 25 bp, Homo sapien
gatggccatctctaatggcaccgct

SEQ ID NO: 3882676 - DNA, 25 bp, Homo sapien
gagatggccatctctaatggcaccg

SEQ ID NO: 3882677 - DNA, 25 bp, Homo sapien
ggccatctctaatggcaccgctttc

SEQ ID NO: 3882678 - DNA, 25 bp, Homo sapien
tggccatctctaatggcaccgcttt

SEQ ID NO: 3882679 - DNA, 25 bp, Homo sapien
ccaaactggccacctgattagcata

SEQ ID NO: 3882680 - DNA, 25 bp, Homo sapien
aactggccacctgattagcatagca

SEQ ID NO: 3882681 - DNA, 25 bp, Homo sapien
aaactggccacctgattagcatagc

SEQ ID NO: 3882682 - DNA, 25 bp, Homo sapien
ctggccacctgattagcatagcaca

SEQ ID NO: 3882683 - DNA, 25 bp, Homo sapien
tctgggatcaaagagaatcaggtct

SEQ ID NO: 3882684 - DNA, 25 bp, Homo sapien
gaaaatgagcagcatctaagtccct

SEQ ID NO: 3882685 - DNA, 25 bp, Homo sapien
ggtccttttggaactgaactcacag

SEQ ID NO: 3882686 - DNA, 25 bp, Homo sapien
aactcacaggtcacagcaatgccct

SEQ ID NO: 3882687 - DNA, 25 bp, Homo sapien
gttctctactcagggacaagctacc

SEQ ID NO: 3882688 - DNA, 25 bp, Homo sapien
taaagagctaagatttaagccccag

SEQ ID NO: 3882689 - DNA, 25 bp, Homo sapien
tattagcccctcttctacagatggg

SEQ ID NO: 3882690 - DNA, 25 bp, Homo sapien
cccaggaggttaagcgacttgaagt

SEQ ID NO: 3882691 - DNA, 25 bp, Homo sapien
ccacttaggaatctgcatgtatatt

SEQ ID NO: 3882692 - DNA, 25 bp, Homo sapien
ggtcaccacttaggaatctgcatgt

SEQ ID NO: 3882693 - DNA, 25 bp, Homo sapien
caccacttaggaatctgcatgtata

SEQ ID NO: 3882694 - DNA, 25 bp, Homo sapien
gaggtcaccacttaggaatctgcat

SEQ ID NO: 3882695 - DNA, 25 bp, Homo sapien
taaaaccacctaaattagccatgca

SEQ ID NO: 3882696 - DNA, 25 bp, Homo sapien
gccacttcctcttaaataacacaat

SEQ ID NO: 3882697 - DNA, 25 bp, Homo sapien
gagcttttacttatgtcccttgccc

SEQ ID NO: 3882698 - DNA, 25 bp, Homo sapien
aaaggtaccctgaaatgatacacag

SEQ ID NO: 3882699 - DNA, 25 bp, Homo sapien
gcttctccagcggacgctgctggct

SEQ ID NO: 3882700 - DNA, 25 bp, Homo sapien
gtcccagcacattcgtgaagctctc

SEQ ID NO: 3882701 - DNA, 25 bp, Homo sapien
taagtttgatgaagcaagccagcca

SEQ ID NO: 3882702 - DNA, 25 bp, Homo sapien
caccaagtcccagcacattcgtgaa

SEQ ID NO: 3882703 - DNA, 25 bp, Homo sapien
gcattgttcacagcgaacggcggga

SEQ ID NO: 3882704 - DNA, 25 bp, Homo sapien
ccaactgggccagaggagcgagtcc

SEQ ID NO: 3882705 - DNA, 25 bp, Homo sapien
gaccctgtcgtcgaggcacctgaga

SEQ ID NO: 3882706 - DNA, 25 bp, Homo sapien
caccgaggccatcgccaggtggagc

SEQ ID NO: 3882707 - DNA, 25 bp, Homo sapien
aggtcctggaagtggtcccgctcct

SEQ ID NO: 3882708 - DNA, 25 bp, Homo sapien
acgacgccgttcaggtagagaatgg

SEQ ID NO: 3882709 - DNA, 25 bp, Homo sapien
cgcggcctcgagcagcccgagcacg

SEQ ID NO: 3882710 - DNA, 25 bp, Homo sapien
gagcacggcttccacctccgtcatg

SEQ ID NO: 3882711 - DNA, 25 bp, Homo sapien
gcatttgagaagagctggtccccag

SEQ ID NO: 3882712 - DNA, 25 bp, Homo sapien
tggtccccagagtgtaaaggagtta

SEQ ID NO: 3882713 - DNA, 25 bp, Homo sapien
caactgcggtaaataggctgttccc

SEQ ID NO: 3882714 - DNA, 25 bp, Homo sapien
cagagggtcctaatctgagaactcc

SEQ ID NO: 3882715 - DNA, 25 bp, Homo sapien
gagtgggaacccaggtccatttcaa

SEQ ID NO: 3882716 - DNA, 25 bp, Homo sapien
tctgactgcgctcagtgatcccgca

SEQ ID NO: 3882717 - DNA, 25 bp, Homo sapien
gcaggacaaggtccttcaaagctgg

SEQ ID NO: 3882718 - DNA, 25 bp, Homo sapien
cacgacagccgtttgtggacacata

SEQ ID NO: 3882719 - DNA, 25 bp, Homo sapien
cgtggtgattccagtaggctgtatc

SEQ ID NO: 3882720 - DNA, 25 bp, Homo sapien
caactgaccaatttctgcattctag

SEQ ID NO: 3882721 - DNA, 25 bp, Homo sapien
taattgtgtctgagcaagttggaag

SEQ ID NO: 3882722 - DNA, 25 bp, Homo sapien
aattagctttccaactgaccaattt

SEQ ID NO: 3882723 - DNA, 25 bp, Homo sapien
tgtagccggctttcaaatgtagatc

SEQ ID NO: 3882724 - DNA, 25 bp, Homo sapien
ttgaagcctagggagcatgtagccg

SEQ ID NO: 3882725 - DNA, 25 bp, Homo sapien
caaaaggcatgctcacaagtgagtc

SEQ ID NO: 3882726 - DNA, 25 bp, Homo sapien
tcacagttcccaagtagagagggcg

SEQ ID NO: 3882727 - DNA, 25 bp, Homo sapien
gcataattgtatatctatcaccaca

SEQ ID NO: 3882728 - DNA, 25 bp, Homo sapien
cagactggtaagagtaatggtccac

SEQ ID NO: 3882729 - DNA, 25 bp, Homo sapien
tagcatatttgcataattgtatatc

SEQ ID NO: 3882730 - DNA, 25 bp, Homo sapien
taagaagaaactccttagctcaggg

SEQ ID NO: 3882731 - DNA, 25 bp, Homo sapien
tcctcggtggtggaacagactgcaa

SEQ ID NO: 3882732 - DNA, 25 bp, Homo sapien
tgaagtttggaagcacaggcctact

SEQ ID NO: 3882733 - DNA, 25 bp, Homo sapien
gagctttactgcaggccactcgggt

SEQ ID NO: 3882734 - DNA, 25 bp, Homo sapien
tcgggtctggatacactgggctctc

SEQ ID NO: 3882735 - DNA, 25 bp, Homo sapien
ttcatgcagggaccttccccaaggg

SEQ ID NO: 3882736 - DNA, 25 bp, Homo sapien
catgtgcaccagatggaaagggaga

SEQ ID NO: 3882737 - DNA, 25 bp, Homo sapien
taaatcctgacactgattgtagaac

SEQ ID NO: 3882738 - DNA, 25 bp, Homo sapien
tagaactcaggctcttaacaagatg

SEQ ID NO: 3882739 - DNA, 25 bp, Homo sapien
gactggattagctgcatctcagagg

SEQ ID NO: 3882740 - DNA, 25 bp, Homo sapien
tttcagcgcctcctactgggactgg

SEQ ID NO: 3882741 - DNA, 25 bp, Homo sapien
ttaagctatgcacctgatcctggcc

SEQ ID NO: 3882742 - DNA, 25 bp, Homo sapien
tgaaatagaaacacggcaccatagt

SEQ ID NO: 3882743 - DNA, 25 bp, Homo sapien
tgctggcataaagcccaaggcctgg

SEQ ID NO: 3882744 - DNA, 25 bp, Homo sapien
caaacagtagggtttaccaggcaat

SEQ ID NO: 3882745 - DNA, 25 bp, Homo sapien
ttgatgttgatagtcctagcaaggc

SEQ ID NO: 3882746 - DNA, 25 bp, Homo sapien
tgcagcgcccaactgagtactcact

SEQ ID NO: 3882747 - DNA, 25 bp, Homo sapien
ccatttaaagtgtgcgtcacccgca

SEQ ID NO: 3882748 - DNA, 25 bp, Homo sapien
caacaggtgccggagttcactccta

SEQ ID NO: 3882749 - DNA, 25 bp, Homo sapien
ggcctttgcacggatcccagtggtc

SEQ ID NO: 3882750 - DNA, 25 bp, Homo sapien
tatggctcttcccaggttacatgag

SEQ ID NO: 3882751 - DNA, 25 bp, Homo sapien
tcttgtcacagggtagagccccatg

SEQ ID NO: 3882752 - DNA, 25 bp, Homo sapien
ggaaaatccaagaatgtgccctggc

SEQ ID NO: 3882753 - DNA, 25 bp, Homo sapien
tcagttacaaatcccagacggctct

SEQ ID NO: 3882754 - DNA, 25 bp, Homo sapien
tgagctgcaccctatcagaggagaa

SEQ ID NO: 3882755 - DNA, 25 bp, Homo sapien
tgggagggttcgggtccctgtcagc

SEQ ID NO: 3882756 - DNA, 25 bp, Homo sapien
aattcatttgtgtcgaagatcaggg

SEQ ID NO: 3882757 - DNA, 25 bp, Homo sapien
agagcccggttccaatgttcattgg

SEQ ID NO: 3882758 - DNA, 25 bp, Homo sapien
ggatgtggaattcatttgtgtcgaa

SEQ ID NO: 3882759 - DNA, 25 bp, Homo sapien
aggccaaacctagtgatgcccagga

SEQ ID NO: 3882760 - DNA, 25 bp, Homo sapien
tggtcagccgtcttctcaaaggagg

SEQ ID NO: 3882761 - DNA, 25 bp, Homo sapien
tccttctgcccgaagtaggcagcgt

SEQ ID NO: 3882762 - DNA, 25 bp, Homo sapien
agtaggcagcgtcaaagagatggtc

SEQ ID NO: 3882763 - DNA, 25 bp, Homo sapien
gggcggcctcgatgcccagagtttt

SEQ ID NO: 3882764 - DNA, 25 bp, Homo sapien
gatgctcatgccgtggttcaccatg

SEQ ID NO: 3882765 - DNA, 25 bp, Homo sapien
cattgatgatcgttgtccgggcggc

SEQ ID NO: 3882766 - DNA, 25 bp, Homo sapien
cacgtgcctcctgtcgatgctcatg

SEQ ID NO: 3882767 - DNA, 25 bp, Homo sapien
tcataggtgttattggaggtggttc

SEQ ID NO: 3882768 - DNA, 25 bp, Homo sapien
tcacaccgtgtgtggccatgactgc

SEQ ID NO: 3882769 - DNA, 25 bp, Homo sapien
tcctttccactctgctcgtcaatgt

SEQ ID NO: 3882770 - DNA, 25 bp, Homo sapien
tgactgcccgcaggttatcaccttc

SEQ ID NO: 3882771 - DNA, 25 bp, Homo sapien
ggtctccatgagaagcgacttctgt

SEQ ID NO: 3882772 - DNA, 25 bp, Homo sapien
tctccatgagaagcgacttctgttt

SEQ ID NO: 3882773 - DNA, 25 bp, Homo sapien
tgggtctccatgagaagcgacttct

SEQ ID NO: 3882774 - DNA, 25 bp, Homo sapien
ccatgagaagcgacttctgtttcac

SEQ ID NO: 3882775 - DNA, 25 bp, Homo sapien
gatcctctttcaggaactgcagcac

SEQ ID NO: 3882776 - DNA, 25 bp, Homo sapien
agatcctctttcaggaactgcagca

SEQ ID NO: 3882777 - DNA, 25 bp, Homo sapien
ggagatcctctttcaggaactgcag

SEQ ID NO: 3882778 - DNA, 25 bp, Homo sapien
gagatcctctttcaggaactgcagc

SEQ ID NO: 3882779 - DNA, 25 bp, Homo sapien
acaccacagcctcaccatgaacagc

SEQ ID NO: 3882780 - DNA, 25 bp, Homo sapien
acatcaccgggcttcacacggagct

SEQ ID NO: 3882781 - DNA, 25 bp, Homo sapien
catgaacagccacatcaccgggctt

SEQ ID NO: 3882782 - DNA, 25 bp, Homo sapien
gcttcacacggagcttggatgtgca

SEQ ID NO: 3882783 - DNA, 25 bp, Homo sapien
gaagcctaatccgttccagggagag

SEQ ID NO: 3882784 - DNA, 25 bp, Homo sapien
ccagggagagcttgacgagaataaa

SEQ ID NO: 3882785 - DNA, 25 bp, Homo sapien
gcttgacgagaataaagcagtcatc

SEQ ID NO: 3882786 - DNA, 25 bp, Homo sapien
tccagtctcagaagcctaatccgtt

SEQ ID NO: 3882787 - DNA, 25 bp, Homo sapien
acacttcttcaatatactcggaaat

SEQ ID NO: 3882788 - DNA, 25 bp, Homo sapien
ctcccaagagggttttctcaattct

SEQ ID NO: 3882789 - DNA, 25 bp, Homo sapien
ctctcccaagagggttttctcaatt

SEQ ID NO: 3882790 - DNA, 25 bp, Homo sapien
tctcccaagagggttttctcaattc

SEQ ID NO: 3882791 - DNA, 25 bp, Homo sapien
tcccaagagggttttctcaattctc

SEQ ID NO: 3882792 - DNA, 25 bp, Homo sapien
gcgtcgtcatccttgtctagctgtg

SEQ ID NO: 3882793 - DNA, 25 bp, Homo sapien
agcataatccgcgtcgtcatccttg

SEQ ID NO: 3882794 - DNA, 25 bp, Homo sapien
tctagctgtgctgtgataattggag

SEQ ID NO: 3882795 - DNA, 25 bp, Homo sapien
tccttgtctagctgtgctgtgataa

SEQ ID NO: 3882796 - DNA, 25 bp, Homo sapien
gaagcgttgatgatctctttaatcc

SEQ ID NO: 3882797 - DNA, 25 bp, Homo sapien
ttggaagcgttgatgatctctttaa

SEQ ID NO: 3882798 - DNA, 25 bp, Homo sapien
gcgttgatgatctctttaatccggg

SEQ ID NO: 3882799 - DNA, 25 bp, Homo sapien
ttaatccggggcacgcccagggtga

SEQ ID NO: 3882800 - DNA, 25 bp, Homo sapien
tacgtgagacctatgtggatgaccg

SEQ ID NO: 3882801 - DNA, 25 bp, Homo sapien
gatgaccgtcagtccaagacaaaag

SEQ ID NO: 3882802 - DNA, 25 bp, Homo sapien
gccatattcgttagcagtttcccca

SEQ ID NO: 3882803 - DNA, 25 bp, Homo sapien
tactggcagttaacaagtgagctgg

SEQ ID NO: 3882804 - DNA, 25 bp, Homo sapien
cttgtccctacaggtctccagaaac

SEQ ID NO: 3882805 - DNA, 25 bp, Homo sapien
tgtccctacaggtctccagaaactt

SEQ ID NO: 3882806 - DNA, 25 bp, Homo sapien
ttgtccctacaggtctccagaaact

SEQ ID NO: 3882807 - DNA, 25 bp, Homo sapien
ccagcggcaactacaaacagctcgg

SEQ ID NO: 3882808 - DNA, 25 bp, Homo sapien
cagagttagggccagcggcaactac

SEQ ID NO: 3882809 - DNA, 25 bp, Homo sapien
gggagaatacaagccaagcacagag

SEQ ID NO: 3882810 - DNA, 25 bp, Homo sapien
ggttctaacgcgtcttggagggata

SEQ ID NO: 3882811 - DNA, 25 bp, Homo sapien
ctcagagacccccttaatgaatttt

SEQ ID NO: 3882812 - DNA, 25 bp, Homo sapien
cattgatgccatatttatctctggt

SEQ ID NO: 3882813 - DNA, 25 bp, Homo sapien
gccgttatcattgatgccatattta

SEQ ID NO: 3882814 - DNA, 25 bp, Homo sapien
ctctgttgtgccgttatcattgatg

SEQ ID NO: 3882815 - DNA, 25 bp, Homo sapien
aaagtgcgtgggagcctttgttctt

SEQ ID NO: 3882816 - DNA, 25 bp, Homo sapien
gtgtctctaagaccttctcctccaa

SEQ ID NO: 3882817 - DNA, 25 bp, Homo sapien
tgctctcatggcactatctacagag

SEQ ID NO: 3882818 - DNA, 25 bp, Homo sapien
gacacacactccattggttaatgtg

SEQ ID NO: 3882819 - DNA, 25 bp, Homo sapien
cacttacagaggagcggttaacatc

SEQ ID NO: 3882820 - DNA, 25 bp, Homo sapien
tgtggcctagggatgatatagtctc

SEQ ID NO: 3882821 - DNA, 25 bp, Homo sapien
tcatcacggactacagactggctct

SEQ ID NO: 3882822 - DNA, 25 bp, Homo sapien
tgtgtctgtgaaatagacccagccc

SEQ ID NO: 3882823 - DNA, 25 bp, Homo sapien
cctggctgtcagttcccatgaatac

SEQ ID NO: 3882824 - DNA, 25 bp, Homo sapien
tgaatactgctttctcatgactctc

SEQ ID NO: 3882825 - DNA, 25 bp, Homo sapien
gctgtcagttcccatgaatactgct

SEQ ID NO: 3882826 - DNA, 25 bp, Homo sapien
agttcccatgaatactgctttctca

SEQ ID NO: 3882827 - DNA, 25 bp, Homo sapien
tttcataacctgtctcagttaaggt

SEQ ID NO: 3882828 - DNA, 25 bp, Homo sapien
tcgttatagctttcataacctgtct

SEQ ID NO: 3882829 - DNA, 25 bp, Homo sapien
ctcgttatagctttcataacctgtc

SEQ ID NO: 3882830 - DNA, 25 bp, Homo sapien
agctttcataacctgtctcagttaa

SEQ ID NO: 3882831 - DNA, 25 bp, Homo sapien
agtggtgccatcccggtgtactgca

SEQ ID NO: 3882832 - DNA, 25 bp, Homo sapien
gtggtcaggatcagctcgtttttgc

SEQ ID NO: 3882833 - DNA, 25 bp, Homo sapien
caggatcagctcgtttttgctgaga

SEQ ID NO: 3882834 - DNA, 25 bp, Homo sapien
ctgagagcaggctcactgggacacg

SEQ ID NO: 3882835 - DNA, 25 bp, Homo sapien
cagctcgtttttgctgagagcaggc

SEQ ID NO: 3882836 - DNA, 25 bp, Homo sapien
ttcggactgtcagatcatactggga

SEQ ID NO: 3882837 - DNA, 25 bp, Homo sapien
catagctgcaggatctaagccatct

SEQ ID NO: 3882838 - DNA, 25 bp, Homo sapien
taatatcgccagtagagcttcggac

SEQ ID NO: 3882839 - DNA, 25 bp, Homo sapien
cttcaagagatttgacaagccttcg

SEQ ID NO: 3882840 - DNA, 25 bp, Homo sapien
tacagccgtgtcgactagaccttcc

SEQ ID NO: 3882841 - DNA, 25 bp, Homo sapien
aactcagttggtgtcaaaccggaat

SEQ ID NO: 3882842 - DNA, 25 bp, Homo sapien
tgcatgtatcccgtttcagctgtct

SEQ ID NO: 3882843 - DNA, 25 bp, Homo sapien
cccggccggccattgtgtggaagaa

SEQ ID NO: 3882844 - DNA, 25 bp, Homo sapien
cactcgagagccactgatggcctgc

SEQ ID NO: 3882845 - DNA, 25 bp, Homo sapien
caaaatgaggcaaggacctgttttc

SEQ ID NO: 3882846 - DNA, 25 bp, Homo sapien
ctgtcccacacaggcaatcatctgt

SEQ ID NO: 3882847 - DNA, 25 bp, Homo sapien
tcaaagccgtctggcactcgagagc

SEQ ID NO: 3882848 - DNA, 25 bp, Homo sapien
tgccagcgtggtcacggatcacaga

SEQ ID NO: 3882849 - DNA, 25 bp, Homo sapien
caggcactgccagcgtggtcacgga

SEQ ID NO: 3882850 - DNA, 25 bp, Homo sapien
gcactgccagcgtggtcacggatca

SEQ ID NO: 3882851 - DNA, 25 bp, Homo sapien
agcgtggtcacggatcacagacagc

SEQ ID NO: 3882852 - DNA, 25 bp, Homo sapien
tgctgctgcagcttgcccgtgttca

SEQ ID NO: 3882853 - DNA, 25 bp, Homo sapien
tgttcagggcttcgatgtactcatc

SEQ ID NO: 3882854 - DNA, 25 bp, Homo sapien
tgtagccggcattcagcaactcata

SEQ ID NO: 3882855 - DNA, 25 bp, Homo sapien
gatcccaattgagaaaccacggtta

SEQ ID NO: 3882856 - DNA, 25 bp, Homo sapien
cctggcgagccgtgacatggcatct

SEQ ID NO: 3882857 - DNA, 25 bp, Homo sapien
catgctgccactcatcaactcactg

SEQ ID NO: 3882858 - DNA, 25 bp, Homo sapien
tccccagtctcgcagcaaaatgtaa

SEQ ID NO: 3882859 - DNA, 25 bp, Homo sapien
tgaccctagggttcctttgtccatg

SEQ ID NO: 3882860 - DNA, 25 bp, Homo sapien
aagatctgctttcccgtccacaggg

SEQ ID NO: 3882861 - DNA, 25 bp, Homo sapien
tttgccacagtactgcttgcccttg

SEQ ID NO: 3882862 - DNA, 25 bp, Homo sapien
caggttggccctcactggattgtca

SEQ ID NO: 3882863 - DNA, 25 bp, Homo sapien
ctaggcctgaggatgacactgaaga

SEQ ID NO: 3882864 - DNA, 25 bp, Homo sapien
tggctcgatcaaagaaagtgtcctt

SEQ ID NO: 3882865 - DNA, 25 bp, Homo sapien
catccttgccaaccagtattgaagc

SEQ ID NO: 3882866 - DNA, 25 bp, Homo sapien
gatttggcaagccttggctcgatca

SEQ ID NO: 3882867 - DNA, 25 bp, Homo sapien
tgggaggcgaactttaattttctca

SEQ ID NO: 3882868 - DNA, 25 bp, Homo sapien
tgttagaaaatcctgaatagcagca

SEQ ID NO: 3882869 - DNA, 25 bp, Homo sapien
tcctgaatagcagcaatcagcggtt

SEQ ID NO: 3882870 - DNA, 25 bp, Homo sapien
aatagcagcaatcagcggttcccca

SEQ ID NO: 3882871 - DNA, 25 bp, Homo sapien
cattcctcggggttacaagatttgc

SEQ ID NO: 3882872 - DNA, 25 bp, Homo sapien
gaaaatcccctcaacgcatctgtta

SEQ ID NO: 3882873 - DNA, 25 bp, Homo sapien
gcatcctctaagaagacgaagtatg

SEQ ID NO: 3882874 - DNA, 25 bp, Homo sapien
gcagttagtggtcggtttaagaaca

SEQ ID NO: 3882875 - DNA, 25 bp, Homo sapien
taccttgtcataactggccctcatg

SEQ ID NO: 3882876 - DNA, 25 bp, Homo sapien
caaagtcagcattatagggtgtaca

SEQ ID NO: 3882877 - DNA, 25 bp, Homo sapien
cccatcagaacaagggcctctgctt

SEQ ID NO: 3882878 - DNA, 25 bp, Homo sapien
tagggtgtacagacacactcattaa

SEQ ID NO: 3882879 - DNA, 25 bp, Homo sapien
aacaagggcctctgctttagcttct

SEQ ID NO: 3882880 - DNA, 25 bp, Homo sapien
gaggtgtctctctacgatgtcacca

SEQ ID NO: 3882881 - DNA, 25 bp, Homo sapien
tgcagcgagggctgccgattgaaca

SEQ ID NO: 3882882 - DNA, 25 bp, Homo sapien
cacatctccatcgatgaggtgtctc

SEQ ID NO: 3882883 - DNA, 25 bp, Homo sapien
tcaccatacttgagctcttgagcca

SEQ ID NO: 3882884 - DNA, 25 bp, Homo sapien
tgaacctcagggccgttttgaacca

SEQ ID NO: 3882885 - DNA, 25 bp, Homo sapien
tcatctgcgtatgtctctgctgaat

SEQ ID NO: 3882886 - DNA, 25 bp, Homo sapien
cttttcatctgcgtatgtctctgct

SEQ ID NO: 3882887 - DNA, 25 bp, Homo sapien
gaatgaagtttgctcctgggtgaac

SEQ ID NO: 3882888 - DNA, 25 bp, Homo sapien
aatcaatattctcgttagcaggccc

SEQ ID NO: 3882889 - DNA, 25 bp, Homo sapien
cctagaaacaggtggcgacttgatc

SEQ ID NO: 3882890 - DNA, 25 bp, Homo sapien
tgaggacacacaacacaagctgacc

SEQ ID NO: 3882891 - DNA, 25 bp, Homo sapien
tcactggtaaaacgggtaggctaga

SEQ ID NO: 3882892 - DNA, 25 bp, Homo sapien
gtcgggcgagatgactgttctgcca

SEQ ID NO: 3882893 - DNA, 25 bp, Homo sapien
agctacctcatcaatccggaggttg

SEQ ID NO: 3882894 - DNA, 25 bp, Homo sapien
ggcgagatgactgttctgccagaaa

SEQ ID NO: 3882895 - DNA, 25 bp, Homo sapien
aattttggccacatgaactggcaca

SEQ ID NO: 3882896 - DNA, 25 bp, Homo sapien
tctgggtcttggctcctgagatccg

SEQ ID NO: 3882897 - DNA, 25 bp, Homo sapien
ttcccttcaggcgttggacgaagcc

SEQ ID NO: 3882898 - DNA, 25 bp, Homo sapien
gggtcttggctcctgagatccgatg

SEQ ID NO: 3882899 - DNA, 25 bp, Homo sapien
aagcctctggtccacttcttgggtg

SEQ ID NO: 3882900 - DNA, 25 bp, Homo sapien
caaaggaggcaccaaaagtcgtgtg

SEQ ID NO: 3882901 - DNA, 25 bp, Homo sapien
agacttcaaatcactcacaacggag

SEQ ID NO: 3882902 - DNA, 25 bp, Homo sapien
gaatcaaatcagacggctttccggc

SEQ ID NO: 3882903 - DNA, 25 bp, Homo sapien
cacaacggagggtctgatacacaaa

SEQ ID NO: 3882904 - DNA, 25 bp, Homo sapien
ttattatgttcaatggctgtttcaa

SEQ ID NO: 3882905 - DNA, 25 bp, Homo sapien
atgggatccaccacttttttgttgg

SEQ ID NO: 3882906 - DNA, 25 bp, Homo sapien
ttgatacaatgggatccaccacttt

SEQ ID NO: 3882907 - DNA, 25 bp, Homo sapien
aaaagactgaaggaaatttgataca

SEQ ID NO: 3882908 - DNA, 25 bp, Homo sapien
gggcctctttagatagtccagaaac

SEQ ID NO: 3882909 - DNA, 25 bp, Homo sapien
agtcctcgcttctgaaggtaggtca

SEQ ID NO: 3882910 - DNA, 25 bp, Homo sapien
tttttcttccggcacttgtcagaga

SEQ ID NO: 3882911 - DNA, 25 bp, Homo sapien
taaaagcgccacagtgatggcagat

SEQ ID NO: 3882912 - DNA, 25 bp, Homo sapien
ggtttcacatggacgatccttctca

SEQ ID NO: 3882913 - DNA, 25 bp, Homo sapien
tgtaagatgcctatgactgctctga

SEQ ID NO: 3882914 - DNA, 25 bp, Homo sapien
ggtcgatatacccatagtggcctag

SEQ ID NO: 3882915 - DNA, 25 bp, Homo sapien
gaagtaccctacatgaaaacacggc

SEQ ID NO: 3882916 - DNA, 25 bp, Homo sapien
cctggctgtacaggttcttactcac

SEQ ID NO: 3882917 - DNA, 25 bp, Homo sapien
ggtcgagcaccccatatagcaaggg

SEQ ID NO: 3882918 - DNA, 25 bp, Homo sapien
acaacttggatgtgcgcctgctggc

SEQ ID NO: 3882919 - DNA, 25 bp, Homo sapien
gacttcattccaaaacagatgtggc

SEQ ID NO: 3882920 - DNA, 25 bp, Homo sapien
caagtccagggacctctcgaggtgc

SEQ ID NO: 3882921 - DNA, 25 bp, Homo sapien
atctctgaccctgcaagacccggga

SEQ ID NO: 3882922 - DNA, 25 bp, Homo sapien
tgggcgctggtcacacctatggact

SEQ ID NO: 3882923 - DNA, 25 bp, Homo sapien
tgaccaatgctctttgaccaacgct

SEQ ID NO: 3882924 - DNA, 25 bp, Homo sapien
gccacatccgtctcccggaactgct

SEQ ID NO: 3882925 - DNA, 25 bp, Homo sapien
tcttggccacatccgtctcccggaa

SEQ ID NO: 3882926 - DNA, 25 bp, Homo sapien
ttggccacatccgtctcccggaact

SEQ ID NO: 3882927 - DNA, 25 bp, Homo sapien
tttcttggccacatccgtctcccgg

SEQ ID NO: 3882928 - DNA, 25 bp, Homo sapien
ggccagattagagaaacgatgcccc

SEQ ID NO: 3882929 - DNA, 25 bp, Homo sapien
ggaggccagattagagaaacgatgc

SEQ ID NO: 3882930 - DNA, 25 bp, Homo sapien
cactcgggaggccagattagagaaa

SEQ ID NO: 3882931 - DNA, 25 bp, Homo sapien
cctccttggcactcgggaggccaga

SEQ ID NO: 3882932 - DNA, 25 bp, Homo sapien
acgtaatcagacacccgcagagaaa

SEQ ID NO: 3882933 - DNA, 25 bp, Homo sapien
ggcactatctgtggaggaccaacaa

SEQ ID NO: 3882934 - DNA, 25 bp, Homo sapien
aaaatatgggcgcacatgtgcctcc

SEQ ID NO: 3882935 - DNA, 25 bp, Homo sapien
gaagctaaaatgaaccggcccatcc

SEQ ID NO: 3882936 - DNA, 25 bp, Homo sapien
tccgtgcgcgttgatatgattggcc

SEQ ID NO: 3882937 - DNA, 25 bp, Homo sapien
gcctaaatcaggcatcggcgcggtc

SEQ ID NO: 3882938 - DNA, 25 bp, Homo sapien
tacttgagctataggcacgcgaagc

SEQ ID NO: 3882939 - DNA, 25 bp, Homo sapien
tgcgcttgttgacttcgtggagcac

SEQ ID NO: 3882940 - DNA, 25 bp, Homo sapien
tgtcttgccaccaccaaaatgagtt

SEQ ID NO: 3882941 - DNA, 25 bp, Homo sapien
gttgtcttgccaccaccaaaatgag

SEQ ID NO: 3882942 - DNA, 25 bp, Homo sapien
ttgtcttgccaccaccaaaatgagt

SEQ ID NO: 3882943 - DNA, 25 bp, Homo sapien
ctcattttggtggtggcaagacaac

SEQ ID NO: 3882944 - DNA, 25 bp, Homo sapien
actcattttggtggtggcaagacaa

SEQ ID NO: 3882945 - DNA, 25 bp, Homo sapien
aactcattttggtggtggcaagaca

SEQ ID NO: 3882946 - DNA, 25 bp, Homo sapien
tctgttcttgcgttcctttcgttgc

SEQ ID NO: 3882947 - DNA, 25 bp, Homo sapien
ctttcgttgctttcttgaggtcttt

SEQ ID NO: 3882948 - DNA, 25 bp, Homo sapien
cattctgttcttgcgttcctttcgt

SEQ ID NO: 3882949 - DNA, 25 bp, Homo sapien
tcattctgttcttgcgttcctttcg

SEQ ID NO: 3882950 - DNA, 25 bp, Homo sapien
gcgttcctttcgttgctttcttgag

SEQ ID NO: 3882951 - DNA, 25 bp, Homo sapien
gaggtctttttcttctcatacaggc

SEQ ID NO: 3882952 - DNA, 25 bp, Homo sapien
gcaacgaaaggaacgcaagaacaga

SEQ ID NO: 3882953 - DNA, 25 bp, Homo sapien
gcctgtatgagaagaaaaagacctc

SEQ ID NO: 3882954 - DNA, 25 bp, Homo sapien
gaaagcaacgaaaggaacgcaagaa

SEQ ID NO: 3882955 - DNA, 25 bp, Homo sapien
gaaaaagacctcaagaaagcaacga

SEQ ID NO: 3882956 - DNA, 25 bp, Homo sapien
cgaaaggaacgcaagaacagaatga

SEQ ID NO: 3882957 - DNA, 25 bp, Homo sapien
ctcaagaaagcaacgaaaggaacgc

SEQ ID NO: 3882958 - DNA, 25 bp, Homo sapien
tgaaggtgatgcatccccacaccgt

SEQ ID NO: 3882959 - DNA, 25 bp, Homo sapien
actgtcgtccaaaggccaacatgca

SEQ ID NO: 3882960 - DNA, 25 bp, Homo sapien
tataaaactgtcgtccaaaggccaa

SEQ ID NO: 3882961 - DNA, 25 bp, Homo sapien
tttgcaccagcctaaatagcactgg

SEQ ID NO: 3882962 - DNA, 25 bp, Homo sapien
ctggcattataatcgaccatactat

SEQ ID NO: 3882963 - DNA, 25 bp, Homo sapien
cgtgcttacaatctcagtacctgct

SEQ ID NO: 3882964 - DNA, 25 bp, Homo sapien
tctagcaggtactgagattgtaagc

SEQ ID NO: 3882965 - DNA, 25 bp, Homo sapien
tagtatggtcgattataatgccagt

SEQ ID NO: 3882966 - DNA, 25 bp, Homo sapien
ccagtgctatttaggctggtgcaaa

SEQ ID NO: 3882967 - DNA, 25 bp, Homo sapien
tggacgacagttttatagtatggtc

SEQ ID NO: 3882968 - DNA, 25 bp, Homo sapien
tactgagattgtaagcacggtgtgg

SEQ ID NO: 3882969 - DNA, 25 bp, Homo sapien
tgcatgttggcctttggacgacagt

SEQ ID NO: 3882970 - DNA, 25 bp, Homo sapien
gggaaaaagcatatccaccaaagac

SEQ ID NO: 3882971 - DNA, 25 bp, Homo sapien
ggccattctaaccaagtgcttgtgg

SEQ ID NO: 3882972 - DNA, 25 bp, Homo sapien
aagcaatggaaatggtaaaaggcag

SEQ ID NO: 3882973 - DNA, 25 bp, Homo sapien
aaacaaatgaggtaatgggccattc

SEQ ID NO: 3882974 - DNA, 25 bp, Homo sapien
gacaccaggcacaaagttgggagat

SEQ ID NO: 3882975 - DNA, 25 bp, Homo sapien
gcccgggaggtacagtaacccatga

SEQ ID NO: 3882976 - DNA, 25 bp, Homo sapien
ccacaagcacttggttagaatggcc

SEQ ID NO: 3882977 - DNA, 25 bp, Homo sapien
gatcatgggttactgtacctcccgg

SEQ ID NO: 3882978 - DNA, 25 bp, Homo sapien
tctttggtggatatgctttttccca

SEQ ID NO: 3882979 - DNA, 25 bp, Homo sapien
taatctcccaactttgtgcctggtg

SEQ ID NO: 3882980 - DNA, 25 bp, Homo sapien
tagaatggcccattacctcatttgt

SEQ ID NO: 3882981 - DNA, 25 bp, Homo sapien
actgccttttaccatttccattgct

SEQ ID NO: 3882982 - DNA, 25 bp, Homo sapien
gacacacaccaggaacagttacgag

SEQ ID NO: 3882983 - DNA, 25 bp, Homo sapien
tcttatgcaaacgaggtagccggac

SEQ ID NO: 3882984 - DNA, 25 bp, Homo sapien
taagccaatgtggtacccaggatgg

SEQ ID NO: 3882985 - DNA, 25 bp, Homo sapien
tgaagtacatacctgagcctctgcc

SEQ ID NO: 3882986 - DNA, 25 bp, Homo sapien
gaggtagccggacttcacaatgaag

SEQ ID NO: 3882987 - DNA, 25 bp, Homo sapien
catttaagtgcatgcaatcaggtac

SEQ ID NO: 3882988 - DNA, 25 bp, Homo sapien
catttagagcactcccattgaggtt

SEQ ID NO: 3882989 - DNA, 25 bp, Homo sapien
taatgattctcgtaactgttcctgg

SEQ ID NO: 3882990 - DNA, 25 bp, Homo sapien
catcctgggtaccacattggcttaa

SEQ ID NO: 3882991 - DNA, 25 bp, Homo sapien
gaagtccggctacctcgtttgcata

SEQ ID NO: 3882992 - DNA, 25 bp, Homo sapien
ggcagaggctcaggtatgtacttca

SEQ ID NO: 3882993 - DNA, 25 bp, Homo sapien
tttaaggtacctgattgcatgcact

SEQ ID NO: 3882994 - DNA, 25 bp, Homo sapien
gttatcccattaattctcctaatat

SEQ ID NO: 3882995 - DNA, 25 bp, Homo sapien
ccttggaggcattacatctgttatc

SEQ ID NO: 3882996 - DNA, 25 bp, Homo sapien
tctcctaatatctttgggtggaagg

SEQ ID NO: 3882997 - DNA, 25 bp, Homo sapien
ggcccgtttccttggaggcattaca

SEQ ID NO: 3882998 - DNA, 25 bp, Homo sapien
tgtctcccagcaggaagctcctgtg

SEQ ID NO: 3882999 - DNA, 25 bp, Homo sapien
tgttgggcacagtatattggtgcat

SEQ ID NO: 3883000 - DNA, 25 bp, Homo sapien
tgcataagtctccaggtggactctt

SEQ ID NO: 3883001 - DNA, 25 bp, Homo sapien
agcaggaagctcctgtgttgggcac

SEQ ID NO: 3883002 - DNA, 25 bp, Homo sapien
agtaggagcactttgagtgtcaggg

SEQ ID NO: 3883003 - DNA, 25 bp, Homo sapien
taggtgtagcagtaggagcactttg

SEQ ID NO: 3883004 - DNA, 25 bp, Homo sapien
aggtgtagcagtaggagcactttga

SEQ ID NO: 3883005 - DNA, 25 bp, Homo sapien
agcagtaggagcactttgagtgtca

SEQ ID NO: 3883006 - DNA, 25 bp, Homo sapien
caagcctgcacagaagatggtggct

SEQ ID NO: 3883007 - DNA, 25 bp, Homo sapien
ggtgaagggcgtctttaagcagctc

SEQ ID NO: 3883008 - DNA, 25 bp, Homo sapien
catcttgaagagagtaggtccctgg

SEQ ID NO: 3883009 - DNA, 25 bp, Homo sapien
tcagacttgctgacccctgtgtact

SEQ ID NO: 3883010 - DNA, 25 bp, Homo sapien
tgtggctccaggtcgttcaggtgga

SEQ ID NO: 3883011 - DNA, 25 bp, Homo sapien
gtgtcctgtggctccaggtcgttca

SEQ ID NO: 3883012 - DNA, 25 bp, Homo sapien
tccaggtcgttcaggtggaaggcgg

SEQ ID NO: 3883013 - DNA, 25 bp, Homo sapien
tcactctgtgtcctgtggctccagg

SEQ ID NO: 3883014 - DNA, 25 bp, Homo sapien
gagcaaatccaatgggcagcccaga

SEQ ID NO: 3883015 - DNA, 25 bp, Homo sapien
tccggatgacgctggacagcttcag

SEQ ID NO: 3883016 - DNA, 25 bp, Homo sapien
catcccatggagcaaatccaatggg

SEQ ID NO: 3883017 - DNA, 25 bp, Homo sapien
ccaaagcaggatgaaacaggcatcc

SEQ ID NO: 3883018 - DNA, 25 bp, Homo sapien
cacaactgtgtaagacattgcaaac

SEQ ID NO: 3883019 - DNA, 25 bp, Homo sapien
cattgcaaactgttgcctggcatca

SEQ ID NO: 3883020 - DNA, 25 bp, Homo sapien
tgtgtaagacattgcaaactgttgc

SEQ ID NO: 3883021 - DNA, 25 bp, Homo sapien
gcctggcatcatccgtatggaaggg

SEQ ID NO: 3883022 - DNA, 25 bp, Homo sapien
ctgtagatgactgccctgcacagcc

SEQ ID NO: 3883023 - DNA, 25 bp, Homo sapien
gtgtggctgtagatgactgccctgc

SEQ ID NO: 3883024 - DNA, 25 bp, Homo sapien
tggcctggagggtgtggctgtagat

SEQ ID NO: 3883025 - DNA, 25 bp, Homo sapien
gatggcctggagggtgtggctgtag

SEQ ID NO: 3883026 - DNA, 25 bp, Homo sapien
ctcttggatgatctgctttgaggtc

SEQ ID NO: 3883027 - DNA, 25 bp, Homo sapien
cctgtcctcgattctgctcctcctg

SEQ ID NO: 3883028 - DNA, 25 bp, Homo sapien
attaatccacatgcagaacgcagtt

SEQ ID NO: 3883029 - DNA, 25 bp, Homo sapien
ttaatccacatgcagaacgcagttt

SEQ ID NO: 3883030 - DNA, 25 bp, Homo sapien
cagtgttccaccaaagctcgttgag

SEQ ID NO: 3883031 - DNA, 25 bp, Homo sapien
ggcagcatctcatttgctggattgt

SEQ ID NO: 3883032 - DNA, 25 bp, Homo sapien
ggaacctgatgggtatccaagagga

SEQ ID NO: 3883033 - DNA, 25 bp, Homo sapien
ctctggaacctgatgggtatccaag

SEQ ID NO: 3883034 - DNA, 25 bp, Homo sapien
ctggaacctgatgggtatccaagag

SEQ ID NO: 3883035 - DNA, 25 bp, Homo sapien
gaggccacaatactcacatgagctg

SEQ ID NO: 3883036 - DNA, 25 bp, Homo sapien
caatactcacatgagctgtcttttg

SEQ ID NO: 3883037 - DNA, 25 bp, Homo sapien
tgccttcccaggtagtttattccag

SEQ ID NO: 3883038 - DNA, 25 bp, Homo sapien
aggtggaggccacaatactcacatg

SEQ ID NO: 3883039 - DNA, 25 bp, Homo sapien
gctcatcaagtagcagtggatctcg

SEQ ID NO: 3883040 - DNA, 25 bp, Homo sapien
tcccttgctcatcaagtagcagtgg

SEQ ID NO: 3883041 - DNA, 25 bp, Homo sapien
caagtagcagtggatctcgggccat

SEQ ID NO: 3883042 - DNA, 25 bp, Homo sapien
ttcattaggcgagtgagaatagaag

SEQ ID NO: 3883043 - DNA, 25 bp, Homo sapien
ctgtggggatcgtacaaaatctgct

SEQ ID NO: 3883044 - DNA, 25 bp, Homo sapien
ggggatcgtacaaaatctgctcctt

SEQ ID NO: 3883045 - DNA, 25 bp, Homo sapien
tgtggggatcgtacaaaatctgctc

SEQ ID NO: 3883046 - DNA, 25 bp, Homo sapien
gtggggatcgtacaaaatctgctcc

SEQ ID NO: 3883047 - DNA, 25 bp, Homo sapien
cccagtgttgatctaaaatattagc

SEQ ID NO: 3883048 - DNA, 25 bp, Homo sapien
cctagaggaaagttggcttgaagag

SEQ ID NO: 3883049 - DNA, 25 bp, Homo sapien
ccatcttggaatgtccttatctcat

SEQ ID NO: 3883050 - DNA, 25 bp, Homo sapien
gaatgtgaccggaatttgttcaacc

SEQ ID NO: 3883051 - DNA, 25 bp, Homo sapien
gaggccccgttccaagagtattgga

SEQ ID NO: 3883052 - DNA, 25 bp, Homo sapien
cggaggccccgttccaagagtattg

SEQ ID NO: 3883053 - DNA, 25 bp, Homo sapien
cacggaggccccgttccaagagtat

SEQ ID NO: 3883054 - DNA, 25 bp, Homo sapien
tcatggatgtccaggcggtcaactc

SEQ ID NO: 3883055 - DNA, 25 bp, Homo sapien
tgggcctggtcactcatcatggatg

SEQ ID NO: 3883056 - DNA, 25 bp, Homo sapien
gaaacagtttgctacgggaacagcc

SEQ ID NO: 3883057 - DNA, 25 bp, Homo sapien
gaacagccgtgcttaaaactcctcg

SEQ ID NO: 3883058 - DNA, 25 bp, Homo sapien
tgtgtacctacagttatgatccagc

SEQ ID NO: 3883059 - DNA, 25 bp, Homo sapien
gaaaagaaagcacgtgtccatacaa

SEQ ID NO: 3883060 - DNA, 25 bp, Homo sapien
cacagctagctacgcactgaagaga

SEQ ID NO: 3883061 - DNA, 25 bp, Homo sapien
catacactgccgctgggaagtaaaa

SEQ ID NO: 3883062 - DNA, 25 bp, Homo sapien
tagagagaaccagctacaaaagagg

SEQ ID NO: 3883063 - DNA, 25 bp, Homo sapien
ttgggttggcccctgatgagacagt

SEQ ID NO: 3883064 - DNA, 25 bp, Homo sapien
gtgtgcctaagggaaagccgtgctc

SEQ ID NO: 3883065 - DNA, 25 bp, Homo sapien
gctattcttgataggcaggccccaa

SEQ ID NO: 3883066 - DNA, 25 bp, Homo sapien
gttgtccttacccacaagcaggagt

SEQ ID NO: 3883067 - DNA, 25 bp, Homo sapien
gctaagctgtgtgtatccgaatgat

SEQ ID NO: 3883068 - DNA, 25 bp, Homo sapien
gaacaatgccatcgagctaagctgt

SEQ ID NO: 3883069 - DNA, 25 bp, Homo sapien
cactgatacagtggaggacccttca

SEQ ID NO: 3883070 - DNA, 25 bp, Homo sapien
tgtccaggttgcaggctgtcccggc

SEQ ID NO: 3883071 - DNA, 25 bp, Homo sapien
gaaaaataatgtccaggttgcaggc

SEQ ID NO: 3883072 - DNA, 25 bp, Homo sapien
aatgtccaggttgcaggctgtcccg

SEQ ID NO: 3883073 - DNA, 25 bp, Homo sapien
aggttgcaggctgtcccggccctca

SEQ ID NO: 3883074 - DNA, 25 bp, Homo sapien
tcccatcttctcatagggcattgtc

SEQ ID NO: 3883075 - DNA, 25 bp, Homo sapien
tcttctcatagggcattgtcctcat

SEQ ID NO: 3883076 - DNA, 25 bp, Homo sapien
ccatcttctcatagggcattgtcct

SEQ ID NO: 3883077 - DNA, 25 bp, Homo sapien
catcttctcatagggcattgtcctc

SEQ ID NO: 3883078 - DNA, 25 bp, Homo sapien
agatgatgccatctaccaacctcgg

SEQ ID NO: 3883079 - DNA, 25 bp, Homo sapien
ttgtaggagtcagaatcaggtgtgc

SEQ ID NO: 3883080 - DNA, 25 bp, Homo sapien
aagcagggctcttgcctttagcgga

SEQ ID NO: 3883081 - DNA, 25 bp, Homo sapien
gcatgttcactgacccgcagtaaga

SEQ ID NO: 3883082 - DNA, 25 bp, Homo sapien
cagagtggaagggttgtaaccctgt

SEQ ID NO: 3883083 - DNA, 25 bp, Homo sapien
ccagagtggaagggttgtaaccctg

SEQ ID NO: 3883084 - DNA, 25 bp, Homo sapien
aagtcatgggctggccactgtctga

SEQ ID NO: 3883085 - DNA, 25 bp, Homo sapien
gggctgtaagctgggctgattccga

SEQ ID NO: 3883086 - DNA, 25 bp, Homo sapien
catcgtaagtcatgggctggccact

SEQ ID NO: 3883087 - DNA, 25 bp, Homo sapien
gtaagtcatgggctggccactgtct

SEQ ID NO: 3883088 - DNA, 25 bp, Homo sapien
tgccacgacctccagcagcccttta

SEQ ID NO: 3883089 - DNA, 25 bp, Homo sapien
tgcactgcagctgccacgacctcca

SEQ ID NO: 3883090 - DNA, 25 bp, Homo sapien
tccagcagccctttagaccaacgtc

SEQ ID NO: 3883091 - DNA, 25 bp, Homo sapien
ctgcagctgccacgacctccagcag

SEQ ID NO: 3883092 - DNA, 25 bp, Homo sapien
aagcagcccgactactttgaattcc

SEQ ID NO: 3883093 - DNA, 25 bp, Homo sapien
gtccttgcacttggcaggtggcgat

SEQ ID NO: 3883094 - DNA, 25 bp, Homo sapien
gcatcttgcacgtttctccaagcag

SEQ ID NO: 3883095 - DNA, 25 bp, Homo sapien
ctgatttgcatcttgcacgtttctc

SEQ ID NO: 3883096 - DNA, 25 bp, Homo sapien
taactcatggctggtcattggaggc

SEQ ID NO: 3883097 - DNA, 25 bp, Homo sapien
caaggaaataggcacgtctggtcgt

SEQ ID NO: 3883098 - DNA, 25 bp, Homo sapien
agtgggcaggtagctggtcatctac

SEQ ID NO: 3883099 - DNA, 25 bp, Homo sapien
cagcttacggtgagtgttacccttc

SEQ ID NO: 3883100 - DNA, 25 bp, Homo sapien
gccactcctcttgtcgttggaagaa

SEQ ID NO: 3883101 - DNA, 25 bp, Homo sapien
agcctgagctcatgaccaacaagcc

SEQ ID NO: 3883102 - DNA, 25 bp, Homo sapien
caagccactcctcttgtcgttggaa

SEQ ID NO: 3883103 - DNA, 25 bp, Homo sapien
gagcctgagctcatgaccaacaagc

SEQ ID NO: 3883104 - DNA, 25 bp, Homo sapien
cccaaaccccactcgacttcagcca

SEQ ID NO: 3883105 - DNA, 25 bp, Homo sapien
aaccccactcgacttcagccagacc

SEQ ID NO: 3883106 - DNA, 25 bp, Homo sapien
ccaaaccccactcgacttcagccag

SEQ ID NO: 3883107 - DNA, 25 bp, Homo sapien
aaaccccactcgacttcagccagac

SEQ ID NO: 3883108 - DNA, 25 bp, Homo sapien
aatggcacggtggagcacagacttc

SEQ ID NO: 3883109 - DNA, 25 bp, Homo sapien
cacattcttggtaagcttggagacc

SEQ ID NO: 3883110 - DNA, 25 bp, Homo sapien
catgtgtgttccatcagagagaagc

SEQ ID NO: 3883111 - DNA, 25 bp, Homo sapien
gagaccttctatgtgtgagacccag

SEQ ID NO: 3883112 - DNA, 25 bp, Homo sapien
caaaggcctatctgcagagttgatt

SEQ ID NO: 3883113 - DNA, 25 bp, Homo sapien
acaaaggcctatctgcagagttgat

SEQ ID NO: 3883114 - DNA, 25 bp, Homo sapien
gacaaaggcctatctgcagagttga

SEQ ID NO: 3883115 - DNA, 25 bp, Homo sapien
tgacaaaggcctatctgcagagttg

SEQ ID NO: 3883116 - DNA, 25 bp, Homo sapien
ccaatattgtgcacacggcagaatg

SEQ ID NO: 3883117 - DNA, 25 bp, Homo sapien
gggatgtggactgcttgcactccca

SEQ ID NO: 3883118 - DNA, 25 bp, Homo sapien
atggcagagttggtcactgacagca

SEQ ID NO: 3883119 - DNA, 25 bp, Homo sapien
gactgcttgcactcccaatattgtg

SEQ ID NO: 3883120 - DNA, 25 bp, Homo sapien
tctcctgagctactgtgaacgtggc

SEQ ID NO: 3883121 - DNA, 25 bp, Homo sapien
tagtggactctgaataacattggaa

SEQ ID NO: 3883122 - DNA, 25 bp, Homo sapien
tctggtgtgaacaggcaatcgagct

SEQ ID NO: 3883123 - DNA, 25 bp, Homo sapien
gaacgtggcagaagatagtggactc

SEQ ID NO: 3883124 - DNA, 25 bp, Homo sapien
tcacctcgttgactttgcagttaac

SEQ ID NO: 3883125 - DNA, 25 bp, Homo sapien
cacctcgttgactttgcagttaact

SEQ ID NO: 3883126 - DNA, 25 bp, Homo sapien
acctcgttgactttgcagttaactt

SEQ ID NO: 3883127 - DNA, 25 bp, Homo sapien
ttcacctcgttgactttgcagttaa

SEQ ID NO: 3883128 - DNA, 25 bp, Homo sapien
tagggcacgtctcgctaaaagcatt

SEQ ID NO: 3883129 - DNA, 25 bp, Homo sapien
gaaagcgtagctatttgggtcctga

SEQ ID NO: 3883130 - DNA, 25 bp, Homo sapien
taccgcgagcggttttaggcagata

SEQ ID NO: 3883131 - DNA, 25 bp, Homo sapien
cacgcgagccatccttcttgaaagc

SEQ ID NO: 3883132 - DNA, 25 bp, Homo sapien
ctggaaggattatgaggggatttga

SEQ ID NO: 3883133 - DNA, 25 bp, Homo sapien
gatttgatggggtcatctttctgtc

SEQ ID NO: 3883134 - DNA, 25 bp, Homo sapien
tcatctttctgtcttgcctggggtg

SEQ ID NO: 3883135 - DNA, 25 bp, Homo sapien
ttctgtcttgcctggggtgtctctc

SEQ ID NO: 3883136 - DNA, 25 bp, Homo sapien
catgctttgcaatgctcgctctgcc

SEQ ID NO: 3883137 - DNA, 25 bp, Homo sapien
cagctcttctgacccgcaggatttg

SEQ ID NO: 3883138 - DNA, 25 bp, Homo sapien
actgggtgtgctgaactttcagctc

SEQ ID NO: 3883139 - DNA, 25 bp, Homo sapien
ctcccatcagagcactttccagctg

SEQ ID NO: 3883140 - DNA, 25 bp, Homo sapien
ggttggggcagagcacgcgcccact

SEQ ID NO: 3883141 - DNA, 25 bp, Homo sapien
cctagcagggttggggcagagcacg

SEQ ID NO: 3883142 - DNA, 25 bp, Homo sapien
agcacgcgcccactcggggggtggc

SEQ ID NO: 3883143 - DNA, 25 bp, Homo sapien
ggggcagagcacgcgcccactcggg

SEQ ID NO: 3883144 - DNA, 25 bp, Homo sapien
acacctgcagaggaatacggtcttc

SEQ ID NO: 3883145 - DNA, 25 bp, Homo sapien
tgcagaggaatacggtcttcatcgt

SEQ ID NO: 3883146 - DNA, 25 bp, Homo sapien
gtcttcatcgttgttgaaacacctg

SEQ ID NO: 3883147 - DNA, 25 bp, Homo sapien
ggaatacggtcttcatcgttgttga

SEQ ID NO: 3883148 - DNA, 25 bp, Homo sapien
tattcaagtgacattcaaacgtgtg

SEQ ID NO: 3883149 - DNA, 25 bp, Homo sapien
gaaaaacggttgcatatgccagagc

SEQ ID NO: 3883150 - DNA, 25 bp, Homo sapien
aatggttacgctttaccaagtcatt

SEQ ID NO: 3883151 - DNA, 25 bp, Homo sapien
taatgaaatcattacgtacaaatgg

SEQ ID NO: 3883152 - DNA, 25 bp, Homo sapien
gcatcaaccgtggtactttctttga

SEQ ID NO: 3883153 - DNA, 25 bp, Homo sapien
ttgcttctattaatggcatcaaccg

SEQ ID NO: 3883154 - DNA, 25 bp, Homo sapien
tattaatggcatcaaccgtggtact

SEQ ID NO: 3883155 - DNA, 25 bp, Homo sapien
taaattaaattctcgtcttgaagtg

SEQ ID NO: 3883156 - DNA, 25 bp, Homo sapien
tgttgtgctggcaaactcggcgttt

SEQ ID NO: 3883157 - DNA, 25 bp, Homo sapien
gagcgacattactgccccagtgctg

SEQ ID NO: 3883158 - DNA, 25 bp, Homo sapien
ggaaggccttcccaatgggtatcga

SEQ ID NO: 3883159 - DNA, 25 bp, Homo sapien
ggtatcgagtcctcattatcctctc

SEQ ID NO: 3883160 - DNA, 25 bp, Homo sapien
tggaggggtcagttgagaaggcagc

SEQ ID NO: 3883161 - DNA, 25 bp, Homo sapien
gaggggtcagttgagaaggcagcat

SEQ ID NO: 3883162 - DNA, 25 bp, Homo sapien
ctggaggggtcagttgagaaggcag

SEQ ID NO: 3883163 - DNA, 25 bp, Homo sapien
ggaggggtcagttgagaaggcagca

SEQ ID NO: 3883164 - DNA, 25 bp, Homo sapien
tcagcagtggcgatgatcattgtca

SEQ ID NO: 3883165 - DNA, 25 bp, Homo sapien
agcagtggcgatgatcattgtcagg

SEQ ID NO: 3883166 - DNA, 25 bp, Homo sapien
agacagcctgctctgttgtgccggc

SEQ ID NO: 3883167 - DNA, 25 bp, Homo sapien
ctgttgtgccggctcctggctgcac

SEQ ID NO: 3883168 - DNA, 25 bp, Homo sapien
aatgggcactgaatccgttgaagac

SEQ ID NO: 3883169 - DNA, 25 bp, Homo sapien
ggcactgaatccgttgaagactgaa

SEQ ID NO: 3883170 - DNA, 25 bp, Homo sapien
tccgttgaagactgaatgagttcta

SEQ ID NO: 3883171 - DNA, 25 bp, Homo sapien
gcactgaatgggcactgaatccgtt

SEQ ID NO: 3883172 - DNA, 25 bp, Homo sapien
tgtctggctgcccaaagtggctgac

SEQ ID NO: 3883173 - DNA, 25 bp, Homo sapien
gctgcccaaagtggctgacacccat

SEQ ID NO: 3883174 - DNA, 25 bp, Homo sapien
aaagtggctgacacccataagtcat

SEQ ID NO: 3883175 - DNA, 25 bp, Homo sapien
gctgacacccataagtcattgtcca

SEQ ID NO: 3883176 - DNA, 25 bp, Homo sapien
tagcggctgcaaacaccggcccata

SEQ ID NO: 3883177 - DNA, 25 bp, Homo sapien
gcccataccggagcctatatgcatg

SEQ ID NO: 3883178 - DNA, 25 bp, Homo sapien
gcaggtgcacgaacccacggtcaca

SEQ ID NO: 3883179 - DNA, 25 bp, Homo sapien
gcatgtgcattaactcgcaggtgca

SEQ ID NO: 3883180 - DNA, 25 bp, Homo sapien
caaaatgtctttgagtgtgttcaca

SEQ ID NO: 3883181 - DNA, 25 bp, Homo sapien
cataggtacacgcatcacgtgtgga

SEQ ID NO: 3883182 - DNA, 25 bp, Homo sapien
atcacgtgtggactcgcgcagccat

SEQ ID NO: 3883183 - DNA, 25 bp, Homo sapien
caaatataggaacacccatgggcat

SEQ ID NO: 3883184 - DNA, 25 bp, Homo sapien
tgtgcacgtgactccactgtgctgg

SEQ ID NO: 3883185 - DNA, 25 bp, Homo sapien
tagtggtgatagataaggcttcatg

SEQ ID NO: 3883186 - DNA, 25 bp, Homo sapien
tcatatggtgtgcacgtgactccac

SEQ ID NO: 3883187 - DNA, 25 bp, Homo sapien
caccatggctcatatggtgtgcacg

SEQ ID NO: 3883188 - DNA, 25 bp, Homo sapien
ggtggcaggagcggatgctgagcac

SEQ ID NO: 3883189 - DNA, 25 bp, Homo sapien
gtggcaggagcggatgctgagcacc

SEQ ID NO: 3883190 - DNA, 25 bp, Homo sapien
tggcaggagcggatgctgagcacca

SEQ ID NO: 3883191 - DNA, 25 bp, Homo sapien
aggtggcaggagcggatgctgagca

SEQ ID NO: 3883192 - DNA, 25 bp, Homo sapien
gtaattgatggtcaatgagggccat

SEQ ID NO: 3883193 - DNA, 25 bp, Homo sapien
ctgtggtaattgatggtcaatgagg

SEQ ID NO: 3883194 - DNA, 25 bp, Homo sapien
tttaaggatgacattgatctgacac

SEQ ID NO: 3883195 - DNA, 25 bp, Homo sapien
gtggtaattgatggtcaatgagggc

SEQ ID NO: 3883196 - DNA, 25 bp, Homo sapien
tccagaaacgcttatcactgtctgt

SEQ ID NO: 3883197 - DNA, 25 bp, Homo sapien
tcaagcatggatccagaaacgctta

SEQ ID NO: 3883198 - DNA, 25 bp, Homo sapien
gcatggatccagaaacgcttatcac

SEQ ID NO: 3883199 - DNA, 25 bp, Homo sapien
gaaacgcttatcactgtctgtagca

SEQ ID NO: 3883200 - DNA, 25 bp, Homo sapien
cattcatttcttccgaacagcagaa

SEQ ID NO: 3883201 - DNA, 25 bp, Homo sapien
ccattcatttcttccgaacagcaga

SEQ ID NO: 3883202 - DNA, 25 bp, Homo sapien
gaagaagcagcccttctctgttgat

SEQ ID NO: 3883203 - DNA, 25 bp, Homo sapien
gtctcacataagtgggtctgggaac

SEQ ID NO: 3883204 - DNA, 25 bp, Homo sapien
gacagggagctgtcaagtctcacat

SEQ ID NO: 3883205 - DNA, 25 bp, Homo sapien
gagctcaacaaggactcctgagtgg

SEQ ID NO: 3883206 - DNA, 25 bp, Homo sapien
ccgattatggagagttcctttttat

SEQ ID NO: 3883207 - DNA, 25 bp, Homo sapien
gccgattatggagagttccttttta

SEQ ID NO: 3883208 - DNA, 25 bp, Homo sapien
ccgctttgtctgctaggaagcacag

SEQ ID NO: 3883209 - DNA, 25 bp, Homo sapien
ctttgtctgctaggaagcacagagc

SEQ ID NO: 3883210 - DNA, 25 bp, Homo sapien
tgagactgcgtcttcctctccgctt

SEQ ID NO: 3883211 - DNA, 25 bp, Homo sapien
ctgtggaaaccaggctgaatgagac

SEQ ID NO: 3883212 - DNA, 25 bp, Homo sapien
cagcagacctgtgtcttcctggcat

SEQ ID NO: 3883213 - DNA, 25 bp, Homo sapien
ccttgtctagtgattgactggagcc

SEQ ID NO: 3883214 - DNA, 25 bp, Homo sapien
ccccagccccatcaagtcagctgga

SEQ ID NO: 3883215 - DNA, 25 bp, Homo sapien
tagtgattgactggagcctgctggt

SEQ ID NO: 3883216 - DNA, 25 bp, Homo sapien
tccattgctgacataatattgcacc

SEQ ID NO: 3883217 - DNA, 25 bp, Homo sapien
cataatattgcaccggggtccatcc

SEQ ID NO: 3883218 - DNA, 25 bp, Homo sapien
tctccattgctgacataatattgca

SEQ ID NO: 3883219 - DNA, 25 bp, Homo sapien
attgctgacataatattgcaccggg

SEQ ID NO: 3883220 - DNA, 25 bp, Homo sapien
gaataattagcgattgcaacccctg

SEQ ID NO: 3883221 - DNA, 25 bp, Homo sapien
ccatgagagtaaggaccgctgctgg

SEQ ID NO: 3883222 - DNA, 25 bp, Homo sapien
tcttattaatgatcccgctcgacag

SEQ ID NO: 3883223 - DNA, 25 bp, Homo sapien
caacccctgataatgagtagctcca

SEQ ID NO: 3883224 - DNA, 25 bp, Homo sapien
caccaagcaatcatccccagaagtg

SEQ ID NO: 3883225 - DNA, 25 bp, Homo sapien
cttccattcccatgcaccaagcaat

SEQ ID NO: 3883226 - DNA, 25 bp, Homo sapien
catccccagaagtggggtcctctaa

SEQ ID NO: 3883227 - DNA, 25 bp, Homo sapien
taaaaacttggctgcatctgccaga

SEQ ID NO: 3883228 - DNA, 25 bp, Homo sapien
gggtccttcccggcatcacaagcca

SEQ ID NO: 3883229 - DNA, 25 bp, Homo sapien
tgggtccttcccggcatcacaagcc

SEQ ID NO: 3883230 - DNA, 25 bp, Homo sapien
ggtccttcccggcatcacaagccac

SEQ ID NO: 3883231 - DNA, 25 bp, Homo sapien
tccattgtaaggcccactagcctct

SEQ ID NO: 3883232 - DNA, 25 bp, Homo sapien
gatgtagaggaacggacttggaggt

SEQ ID NO: 3883233 - DNA, 25 bp, Homo sapien
ggtgggaaccacatgatctccattg

SEQ ID NO: 3883234 - DNA, 25 bp, Homo sapien
tctcaggatgtagaggaacggactt

SEQ ID NO: 3883235 - DNA, 25 bp, Homo sapien
agggcaataacaggcctgatttcca

SEQ ID NO: 3883236 - DNA, 25 bp, Homo sapien
gatccagggcaataacaggcctgat

SEQ ID NO: 3883237 - DNA, 25 bp, Homo sapien
cagacacgatccagggcaataacag

SEQ ID NO: 3883238 - DNA, 25 bp, Homo sapien
tcaaaataccagacacgatccaggg

SEQ ID NO: 3883239 - DNA, 25 bp, Homo sapien
gagggtttctgtacaccttcaccta

SEQ ID NO: 3883240 - DNA, 25 bp, Homo sapien
gcatccttgccgtccatgaccttga

SEQ ID NO: 3883241 - DNA, 25 bp, Homo sapien
tacaaatatagcacagagggtttct

SEQ ID NO: 3883242 - DNA, 25 bp, Homo sapien
ctttgagacaattcgaacatgctgc

SEQ ID NO: 3883243 - DNA, 25 bp, Homo sapien
tctagaaataactcgctgagaaaca

SEQ ID NO: 3883244 - DNA, 25 bp, Homo sapien
caggaactctagaaataactcgctg

SEQ ID NO: 3883245 - DNA, 25 bp, Homo sapien
aaataactcgctgagaaacatctcc

SEQ ID NO: 3883246 - DNA, 25 bp, Homo sapien
aacatctccatctcatactcaccac

SEQ ID NO: 3883247 - DNA, 25 bp, Homo sapien
ccaggtagttagacagacctccggg

SEQ ID NO: 3883248 - DNA, 25 bp, Homo sapien
gcagtcccagtagggatggctttct

SEQ ID NO: 3883249 - DNA, 25 bp, Homo sapien
gacctccgggctctttaggaatatg

SEQ ID NO: 3883250 - DNA, 25 bp, Homo sapien
cgggctctttaggaatatgggcctt

SEQ ID NO: 3883251 - DNA, 25 bp, Homo sapien
gatatgcccacctgtgaaccagtca

SEQ ID NO: 3883252 - DNA, 25 bp, Homo sapien
ggctcaaggctcattggaccactgt

SEQ ID NO: 3883253 - DNA, 25 bp, Homo sapien
tagcagctccaagcttgcaggaact

SEQ ID NO: 3883254 - DNA, 25 bp, Homo sapien
gaaagatctccccacgaggttgcaa

SEQ ID NO: 3883255 - DNA, 25 bp, Homo sapien
ttccctgagcgctggtggccgcctg

SEQ ID NO: 3883256 - DNA, 25 bp, Homo sapien
tgttaactcaatggccttgttccct

SEQ ID NO: 3883257 - DNA, 25 bp, Homo sapien
tgggccccatcatgggagagctgga

SEQ ID NO: 3883258 - DNA, 25 bp, Homo sapien
gtgggtgcagacgatccctgaccac

SEQ ID NO: 3883259 - DNA, 25 bp, Homo sapien
tagcacagtggacggctctcattag

SEQ ID NO: 3883260 - DNA, 25 bp, Homo sapien
atttgcacgttcagatcaggctcag

SEQ ID NO: 3883261 - DNA, 25 bp, Homo sapien
gtcattagctagctgcctcatttgc

SEQ ID NO: 3883262 - DNA, 25 bp, Homo sapien
cagtggacggctctcattagggtgt

SEQ ID NO: 3883263 - DNA, 25 bp, Homo sapien
tcttcaattctggaggatcatcagc

SEQ ID NO: 3883264 - DNA, 25 bp, Homo sapien
tatctttcttggaactcaagctaca

SEQ ID NO: 3883265 - DNA, 25 bp, Homo sapien
caagctacagtgttgatataagagc

SEQ ID NO: 3883266 - DNA, 25 bp, Homo sapien
tctgttagacatagttggaaaccct

SEQ ID NO: 3883267 - DNA, 25 bp, Homo sapien
gacattctgtggcatcgagtctcca

SEQ ID NO: 3883268 - DNA, 25 bp, Homo sapien
cctctttaaatgtcaccgtgcagtg

SEQ ID NO: 3883269 - DNA, 25 bp, Homo sapien
ggctgagatttagagtagacccctc

SEQ ID NO: 3883270 - DNA, 25 bp, Homo sapien
caagggagctttttggtagtggaga

SEQ ID NO: 3883271 - DNA, 25 bp, Homo sapien
ttccttagcctgttcctctttacac

SEQ ID NO: 3883272 - DNA, 25 bp, Homo sapien
tgagccagggggcatcaaggctact

SEQ ID NO: 3883273 - DNA, 25 bp, Homo sapien
catcaaggctacttccttagcctgt

SEQ ID NO: 3883274 - DNA, 25 bp, Homo sapien
gggcatcaaggctacttccttagcc

SEQ ID NO: 3883275 - DNA, 25 bp, Homo sapien
tctgaatgcctactatctgcatgcc

SEQ ID NO: 3883276 - DNA, 25 bp, Homo sapien
ttgcaggatgttcttgtataaatcc

SEQ ID NO: 3883277 - DNA, 25 bp, Homo sapien
tggtgcaactcacttcttctgaatg

SEQ ID NO: 3883278 - DNA, 25 bp, Homo sapien
gcagagccttggtgcaactcacttc

SEQ ID NO: 3883279 - DNA, 25 bp, Homo sapien
gaccacttggtattgggtatcagga

SEQ ID NO: 3883280 - DNA, 25 bp, Homo sapien
gggaccacttggtattgggtatcag

SEQ ID NO: 3883281 - DNA, 25 bp, Homo sapien
ccacttggtattgggtatcaggaga

SEQ ID NO: 3883282 - DNA, 25 bp, Homo sapien
tggggaccacttggtattgggtatc

SEQ ID NO: 3883283 - DNA, 25 bp, Homo sapien
tatgtcagcttccagaccaaggcct

SEQ ID NO: 3883284 - DNA, 25 bp, Homo sapien
ttggctccgggagatgtttttcagc

SEQ ID NO: 3883285 - DNA, 25 bp, Homo sapien
tcagcacagtatgcttgctgtagac

SEQ ID NO: 3883286 - DNA, 25 bp, Homo sapien
gatgtttttcagcacagtatgcttg

SEQ ID NO: 3883287 - DNA, 25 bp, Homo sapien
aaatccacaactacctttgctcttc

SEQ ID NO: 3883288 - DNA, 25 bp, Homo sapien
tatctgccacattaagaggaagcac

SEQ ID NO: 3883289 - DNA, 25 bp, Homo sapien
ggttgcactcaatcatccctattat

SEQ ID NO: 3883290 - DNA, 25 bp, Homo sapien
gaatttgggatgaggttgcactcaa

SEQ ID NO: 3883291 - DNA, 25 bp, Homo sapien
gatgaggttgcactcaatcatccct

SEQ ID NO: 3883292 - DNA, 25 bp, Homo sapien
caatcatccctattatcttgcctgg

SEQ ID NO: 3883293 - DNA, 25 bp, Homo sapien
caggcacgctggacagtcagtcatt

SEQ ID NO: 3883294 - DNA, 25 bp, Homo sapien
acacatgcaccaggcacgctggaca

SEQ ID NO: 3883295 - DNA, 25 bp, Homo sapien
gcaccaggcacgctggacagtcagt

SEQ ID NO: 3883296 - DNA, 25 bp, Homo sapien
atgaaccacacatgcaccaggcacg

SEQ ID NO: 3883297 - DNA, 25 bp, Homo sapien
tgggagggccagtgagaccacatcc

SEQ ID NO: 3883298 - DNA, 25 bp, Homo sapien
gggagggccagtgagaccacatcca

SEQ ID NO: 3883299 - DNA, 25 bp, Homo sapien
gtgggagggccagtgagaccacatc

SEQ ID NO: 3883300 - DNA, 25 bp, Homo sapien
tgtgactagcttatccttggtgacc

SEQ ID NO: 3883301 - DNA, 25 bp, Homo sapien
gaccctgccagtgaatcatgggcct

SEQ ID NO: 3883302 - DNA, 25 bp, Homo sapien
tgtatcgcatctactaggcacctag

SEQ ID NO: 3883303 - DNA, 25 bp, Homo sapien
aacaaaagttctgactgtgactagc

SEQ ID NO: 3883304 - DNA, 25 bp, Homo sapien
tcaaaaattgcacttagccttgaat

SEQ ID NO: 3883305 - DNA, 25 bp, Homo sapien
tgtaggaggcgtcgaaatcttgagc

SEQ ID NO: 3883306 - DNA, 25 bp, Homo sapien
aatcttgagcctgaagtatagaaac

SEQ ID NO: 3883307 - DNA, 25 bp, Homo sapien
tccttataggggtcatcatttctca

SEQ ID NO: 3883308 - DNA, 25 bp, Homo sapien
taggaagattatgctggcctccagc

SEQ ID NO: 3883309 - DNA, 25 bp, Homo sapien
ggaccaaggcccaccattaatctca

SEQ ID NO: 3883310 - DNA, 25 bp, Homo sapien
cagcccagttaagtggacatttgga

SEQ ID NO: 3883311 - DNA, 25 bp, Homo sapien
gtcaccagaaggttcggaccaaggc

SEQ ID NO: 3883312 - DNA, 25 bp, Homo sapien
ctgggcttgggttcaggtgtgaatc

SEQ ID NO: 3883313 - DNA, 25 bp, Homo sapien
catgcattcacttgtaacatacttg

SEQ ID NO: 3883314 - DNA, 25 bp, Homo sapien
catacttgctgagggactcctgggt

SEQ ID NO: 3883315 - DNA, 25 bp, Homo sapien
cacttgtaacatacttgctgaggga

SEQ ID NO: 3883316 - DNA, 25 bp, Homo sapien
taactttcaaactgagagcatgaaa

SEQ ID NO: 3883317 - DNA, 25 bp, Homo sapien
ctttcaaactgagagcatgaaaatt

SEQ ID NO: 3883318 - DNA, 25 bp, Homo sapien
ttaactttcaaactgagagcatgaa

SEQ ID NO: 3883319 - DNA, 25 bp, Homo sapien
aactttcaaactgagagcatgaaaa

SEQ ID NO: 3883320 - DNA, 25 bp, Homo sapien
tggttttatagaggaccagctgttg

SEQ ID NO: 3883321 - DNA, 25 bp, Homo sapien
gaccagctgttgttaattggggaag

SEQ ID NO: 3883322 - DNA, 25 bp, Homo sapien
ggttttatagaggaccagctgttgt

SEQ ID NO: 3883323 - DNA, 25 bp, Homo sapien
cagctgttgttaattggggaagatg

SEQ ID NO: 3883324 - DNA, 25 bp, Homo sapien
tggcatctttgtgtacctgtgggag

SEQ ID NO: 3883325 - DNA, 25 bp, Homo sapien
ctgtggcatctttgtgtacctgtgg

SEQ ID NO: 3883326 - DNA, 25 bp, Homo sapien
tctttgtgtacctgtgggagtccct

SEQ ID NO: 3883327 - DNA, 25 bp, Homo sapien
catgctgtggcatctttgtgtacct

SEQ ID NO: 3883328 - DNA, 25 bp, Homo sapien
ctgtttgcctttattctcagcattg

SEQ ID NO: 3883329 - DNA, 25 bp, Homo sapien
tgcttaagctgctcacgcagggtga

SEQ ID NO: 3883330 - DNA, 25 bp, Homo sapien
caccacggtgtttgggaaggtgcct

SEQ ID NO: 3883331 - DNA, 25 bp, Homo sapien
cctgagagccggcacaggattagct

SEQ ID NO: 3883332 - DNA, 25 bp, Homo sapien
tagctgtaagctgcttaagctgctc

SEQ ID NO: 3883333 - DNA, 25 bp, Homo sapien
agcttcttgcgccaaaggagcagat

SEQ ID NO: 3883334 - DNA, 25 bp, Homo sapien
ctgctttcagcaggcctgcgtcctc

SEQ ID NO: 3883335 - DNA, 25 bp, Homo sapien
tgacctggccctcatggaggaccct

SEQ ID NO: 3883336 - DNA, 25 bp, Homo sapien
gggaccctgttagaaggctgagctt

SEQ ID NO: 3883337 - DNA, 25 bp, Homo sapien
ctccttgacatacatggtatgagga

SEQ ID NO: 3883338 - DNA, 25 bp, Homo sapien
catacatggtatgaggaagagggcc

SEQ ID NO: 3883339 - DNA, 25 bp, Homo sapien
agagtgcaccccaatctcacccacc

SEQ ID NO: 3883340 - DNA, 25 bp, Homo sapien
tgacatacatggtatgaggaagagg

SEQ ID NO: 3883341 - DNA, 25 bp, Homo sapien
cctgaagaggctgcacaaaagctca

SEQ ID NO: 3883342 - DNA, 25 bp, Homo sapien
tgtttgcgtgacatttcttggttct

SEQ ID NO: 3883343 - DNA, 25 bp, Homo sapien
tcttcatagcttcacaggacagggt

SEQ ID NO: 3883344 - DNA, 25 bp, Homo sapien
gaaaccaccctgtgtgtaatgtttg

SEQ ID NO: 3883345 - DNA, 25 bp, Homo sapien
gagggaaagttatcagccaaaggtc

SEQ ID NO: 3883346 - DNA, 25 bp, Homo sapien
tctcctgattcccagtacagtgttc

SEQ ID NO: 3883347 - DNA, 25 bp, Homo sapien
gccaaaggtcacttagagtattcat

SEQ ID NO: 3883348 - DNA, 25 bp, Homo sapien
catggcaggtctgagtctgcaactt

SEQ ID NO: 3883349 - DNA, 25 bp, Homo sapien
atgggagaatgcaccatgttggtgg

SEQ ID NO: 3883350 - DNA, 25 bp, Homo sapien
gatccaggagttcttgagtcatcac

SEQ ID NO: 3883351 - DNA, 25 bp, Homo sapien
aatgcaccatgttggtggaggcagc

SEQ ID NO: 3883352 - DNA, 25 bp, Homo sapien
cttgagtcatcacagaccaccatca

SEQ ID NO: 3883353 - DNA, 25 bp, Homo sapien
aaaggacaggatgcattagtcagta

SEQ ID NO: 3883354 - DNA, 25 bp, Homo sapien
caaaggacaggatgcattagtcagt

SEQ ID NO: 3883355 - DNA, 25 bp, Homo sapien
acaaaggacaggatgcattagtcag

SEQ ID NO: 3883356 - DNA, 25 bp, Homo sapien
atggccacaacagtgctatgtaaca

SEQ ID NO: 3883357 - DNA, 25 bp, Homo sapien
ttatagtccccacttctgcaaccgg

SEQ ID NO: 3883358 - DNA, 25 bp, Homo sapien
caaccggttacatgatcttagctgc

SEQ ID NO: 3883359 - DNA, 25 bp, Homo sapien
gaaaacgtgctaacccttctgcaga

SEQ ID NO: 3883360 - DNA, 25 bp, Homo sapien
aatgtgatgtacttgggtgatgccc

SEQ ID NO: 3883361 - DNA, 25 bp, Homo sapien
tgtcaacactcatagcagatgccat

SEQ ID NO: 3883362 - DNA, 25 bp, Homo sapien
gtcaacactcatagcagatgccatc

SEQ ID NO: 3883363 - DNA, 25 bp, Homo sapien
caacactcatagcagatgccatctt

SEQ ID NO: 3883364 - DNA, 25 bp, Homo sapien
tcaacactcatagcagatgccatct

SEQ ID NO: 3883365 - DNA, 25 bp, Homo sapien
tgacaagctggaggcctatttgccc

SEQ ID NO: 3883366 - DNA, 25 bp, Homo sapien
gctgccgaacatcgcgtttgaaaat

SEQ ID NO: 3883367 - DNA, 25 bp, Homo sapien
gaatcagctgggacgccatgctgcc

SEQ ID NO: 3883368 - DNA, 25 bp, Homo sapien
cagaaatccggaactggagaaccca

SEQ ID NO: 3883369 - DNA, 25 bp, Homo sapien
cctcccgagttactgatgatccata

SEQ ID NO: 3883370 - DNA, 25 bp, Homo sapien
taaaatgatacgtctcgccttcggg

SEQ ID NO: 3883371 - DNA, 25 bp, Homo sapien
ttgtcatagaaacgacctttggggc

SEQ ID NO: 3883372 - DNA, 25 bp, Homo sapien
gcctgccagggtcattaaggacccc

SEQ ID NO: 3883373 - DNA, 25 bp, Homo sapien
cctgccagggtcattaaggaccccg

SEQ ID NO: 3883374 - DNA, 25 bp, Homo sapien
cgtgagtaccagagagtaagaagcg

SEQ ID NO: 3883375 - DNA, 25 bp, Homo sapien
gagtaccagagagtaagaagcgaag

SEQ ID NO: 3883376 - DNA, 25 bp, Homo sapien
ctgcgtgagtaccagagagtaagaa

SEQ ID NO: 3883377 - DNA, 25 bp, Homo sapien
ccagagagtaagaagcgaagaatct

SEQ ID NO: 3883378 - DNA, 25 bp, Homo sapien
tgtttttaaaatctgcacaactgat

SEQ ID NO: 3883379 - DNA, 25 bp, Homo sapien
tgcacaactgatttgcataactgtc

SEQ ID NO: 3883380 - DNA, 25 bp, Homo sapien
taaaatctgcacaactgatttgcat

SEQ ID NO: 3883381 - DNA, 25 bp, Homo sapien
tgatttgcataactgtcagggccat

SEQ ID NO: 3883382 - DNA, 25 bp, Homo sapien
aacctgaatttgcattgcacaatgc

SEQ ID NO: 3883383 - DNA, 25 bp, Homo sapien
ttcatacggcatggagagcaattat

SEQ ID NO: 3883384 - DNA, 25 bp, Homo sapien
caacagcttgtgatttgtccagtgc

SEQ ID NO: 3883385 - DNA, 25 bp, Homo sapien
tttaaagacaggactcattatcagg

SEQ ID NO: 3883386 - DNA, 25 bp, Homo sapien
tctcagcaaactgcttgttaggtcc

SEQ ID NO: 3883387 - DNA, 25 bp, Homo sapien
catctttgggattcatatcattttc

SEQ ID NO: 3883388 - DNA, 25 bp, Homo sapien
ccatctttgggattcatatcatttt

SEQ ID NO: 3883389 - DNA, 25 bp, Homo sapien
gcaaactgcttgttaggtcctcctt

SEQ ID NO: 3883390 - DNA, 25 bp, Homo sapien
ccattccctggacggaagtagaagt

SEQ ID NO: 3883391 - DNA, 25 bp, Homo sapien
ctccattccctggacggaagtagaa

SEQ ID NO: 3883392 - DNA, 25 bp, Homo sapien
ctttgaagatttccaggcaataatt

SEQ ID NO: 3883393 - DNA, 25 bp, Homo sapien
ccctggacggaagtagaagttatct

SEQ ID NO: 3883394 - DNA, 25 bp, Homo sapien
ggtatctccatagcttggactattt

SEQ ID NO: 3883395 - DNA, 25 bp, Homo sapien
tttttccactggatctgcagtttct

SEQ ID NO: 3883396 - DNA, 25 bp, Homo sapien
tccactggatctgcagtttctgggt

SEQ ID NO: 3883397 - DNA, 25 bp, Homo sapien
ctaattggtatctccatagcttgga

SEQ ID NO: 3883398 - DNA, 25 bp, Homo sapien
gagttcctctggtcgtttctcaagg

SEQ ID NO: 3883399 - DNA, 25 bp, Homo sapien
aataatacgatctaacccacagccc

SEQ ID NO: 3883400 - DNA, 25 bp, Homo sapien
tatctcattgcagggcacgtcatgc

SEQ ID NO: 3883401 - DNA, 25 bp, Homo sapien
gacaggtcagctgctttgtaagagg

SEQ ID NO: 3883402 - DNA, 25 bp, Homo sapien
gaaccaactcggtgccaggaactgt

SEQ ID NO: 3883403 - DNA, 25 bp, Homo sapien
ccctttgtgctgagtaagttactgg

SEQ ID NO: 3883404 - DNA, 25 bp, Homo sapien
caggaactgtactcaatgatcccag

SEQ ID NO: 3883405 - DNA, 25 bp, Homo sapien
tactggtaaggagagactcgtagac

SEQ ID NO: 3883406 - DNA, 25 bp, Homo sapien
tttgtttcaagaacatgttccttgg

SEQ ID NO: 3883407 - DNA, 25 bp, Homo sapien
tgtgcctggaccagaggaaaacaca

SEQ ID NO: 3883408 - DNA, 25 bp, Homo sapien
ttccccatagcacacttcccctgca

SEQ ID NO: 3883409 - DNA, 25 bp, Homo sapien
ttccttggacccattcaagcctgct

SEQ ID NO: 3883410 - DNA, 25 bp, Homo sapien
gacattggtctgagcccacatggcc

SEQ ID NO: 3883411 - DNA, 25 bp, Homo sapien
gagacattggtctgagcccacatgg

SEQ ID NO: 3883412 - DNA, 25 bp, Homo sapien
acattggtctgagcccacatggcca

SEQ ID NO: 3883413 - DNA, 25 bp, Homo sapien
ctgagacattggtctgagcccacat

SEQ ID NO: 3883414 - DNA, 25 bp, Homo sapien
tgagcaggtatcccccgcatcattt

SEQ ID NO: 3883415 - DNA, 25 bp, Homo sapien
tggctttcatgaaggtcctgtctga

SEQ ID NO: 3883416 - DNA, 25 bp, Homo sapien
ctggctttcatgaaggtcctgtctg

SEQ ID NO: 3883417 - DNA, 25 bp, Homo sapien
tctgagcaggtatcccccgcatcat

SEQ ID NO: 3883418 - DNA, 25 bp, Homo sapien
tcatagatgcttctagaatgtgagc

SEQ ID NO: 3883419 - DNA, 25 bp, Homo sapien
ggaacactgcgtcaagggcagcaaa

SEQ ID NO: 3883420 - DNA, 25 bp, Homo sapien
gacctggaacactgcgtcaagggca

SEQ ID NO: 3883421 - DNA, 25 bp, Homo sapien
tctagaatgtgagctgacctggaac

SEQ ID NO: 3883422 - DNA, 25 bp, Homo sapien
gttttctgcatcctcgggtctggcc

SEQ ID NO: 3883423 - DNA, 25 bp, Homo sapien
tggccccttgggattggtcacttct

SEQ ID NO: 3883424 - DNA, 25 bp, Homo sapien
tctggcctgaacttgcgtgtgcctc

SEQ ID NO: 3883425 - DNA, 25 bp, Homo sapien
cttgggattggtcacttctttctca

SEQ ID NO: 3883426 - DNA, 25 bp, Homo sapien
agagcctagccatgaggcaagcagg

SEQ ID NO: 3883427 - DNA, 25 bp, Homo sapien
tgagtgcactgggaagatcctccag

SEQ ID NO: 3883428 - DNA, 25 bp, Homo sapien
agtcttctgagtgcactgggaagat

SEQ ID NO: 3883429 - DNA, 25 bp, Homo sapien
gggcttccggctccaagagcctagc

SEQ ID NO: 3883430 - DNA, 25 bp, Homo sapien
tccctggggtaatgccaagagagcc

SEQ ID NO: 3883431 - DNA, 25 bp, Homo sapien
ggcactgactctgcgtttccctggg

SEQ ID NO: 3883432 - DNA, 25 bp, Homo sapien
agccatcgcagggcagtctcactgc

SEQ ID NO: 3883433 - DNA, 25 bp, Homo sapien
gttgatggcactgactctgcgtttc

SEQ ID NO: 3883434 - DNA, 25 bp, Homo sapien
tctagaccaggggtctcttctttgg

SEQ ID NO: 3883435 - DNA, 25 bp, Homo sapien
cccagccagtctgtccatgcagggt

SEQ ID NO: 3883436 - DNA, 25 bp, Homo sapien
tctgtccatgcagggttctagacca

SEQ ID NO: 3883437 - DNA, 25 bp, Homo sapien
cagtctgtccatgcagggttctaga

SEQ ID NO: 3883438 - DNA, 25 bp, Homo sapien
tgattgtccgccttcatatgggagc

SEQ ID NO: 3883439 - DNA, 25 bp, Homo sapien
ttgtgtcccggaatatcaggtcctt

SEQ ID NO: 3883440 - DNA, 25 bp, Homo sapien
tcatatgggagcttgtgtcccggaa

SEQ ID NO: 3883441 - DNA, 25 bp, Homo sapien
tttcctggtagtaaatgattgtccg

SEQ ID NO: 3883442 - DNA, 25 bp, Homo sapien
aattatcccgccctcgaggaactcg

SEQ ID NO: 3883443 - DNA, 25 bp, Homo sapien
cagcagggcccttgtaaaccacata

SEQ ID NO: 3883444 - DNA, 25 bp, Homo sapien
tatgctccaaaccaggcatgagtaa

SEQ ID NO: 3883445 - DNA, 25 bp, Homo sapien
cagactgcatttgctccaatgaatt

SEQ ID NO: 3883446 - DNA, 25 bp, Homo sapien
tccgggcaggaggtgtccctggtca

SEQ ID NO: 3883447 - DNA, 25 bp, Homo sapien
agtgaagatgccctcatccgggcag

SEQ ID NO: 3883448 - DNA, 25 bp, Homo sapien
aagttcagcctcaacagtgaagatg

SEQ ID NO: 3883449 - DNA, 25 bp, Homo sapien
aatgctgcaggaagttcagcctcaa

SEQ ID NO: 3883450 - DNA, 25 bp, Homo sapien
aatggatgtgatgcactttgaaagc

SEQ ID NO: 3883451 - DNA, 25 bp, Homo sapien
catggctggttttgaccagatcatg

SEQ ID NO: 3883452 - DNA, 25 bp, Homo sapien
accagatcatgaaatgcagcctctc

SEQ ID NO: 3883453 - DNA, 25 bp, Homo sapien
tctgtgggtcacagaagataatgga

SEQ ID NO: 3883454 - DNA, 25 bp, Homo sapien
tccctgctgctgaactctggctgga

SEQ ID NO: 3883455 - DNA, 25 bp, Homo sapien
ctgaactctggctggagtggtaata

SEQ ID NO: 3883456 - DNA, 25 bp, Homo sapien
aactctggctggagtggtaataaga

SEQ ID NO: 3883457 - DNA, 25 bp, Homo sapien
ctgctgaactctggctggagtggta

SEQ ID NO: 3883458 - DNA, 25 bp, Homo sapien
caccaagcagcctggaggagcctgc

SEQ ID NO: 3883459 - DNA, 25 bp, Homo sapien
aggcgaggaaacacctggagcagcc

SEQ ID NO: 3883460 - DNA, 25 bp, Homo sapien
catggcctccctggattttcagaag

SEQ ID NO: 3883461 - DNA, 25 bp, Homo sapien
gaggaggcgaggaaacacctggagc

SEQ ID NO: 3883462 - DNA, 25 bp, Homo sapien
aaaaagataccctccagcgtcatgg

SEQ ID NO: 3883463 - DNA, 25 bp, Homo sapien
atatttctggccagggaagggtcct

SEQ ID NO: 3883464 - DNA, 25 bp, Homo sapien
tggttgtgcacgtatacctgagtct

SEQ ID NO: 3883465 - DNA, 25 bp, Homo sapien
acctgagtctctgtatgtgtgcatg

SEQ ID NO: 3883466 - DNA, 25 bp, Homo sapien
tgctatactggacgtggctgcctgg

SEQ ID NO: 3883467 - DNA, 25 bp, Homo sapien
aaacataagaacatcgggccgggct

SEQ ID NO: 3883468 - DNA, 25 bp, Homo sapien
taagcttgtatactggactctggcc

SEQ ID NO: 3883469 - DNA, 25 bp, Homo sapien
gattccaaactcatacgctctaggg

SEQ ID NO: 3883470 - DNA, 25 bp, Homo sapien
ttgccagagtgttaggcagctgctt

SEQ ID NO: 3883471 - DNA, 25 bp, Homo sapien
gattgccagagtgttaggcagctgc

SEQ ID NO: 3883472 - DNA, 25 bp, Homo sapien
gccagagtgttaggcagctgcttgt

SEQ ID NO: 3883473 - DNA, 25 bp, Homo sapien
tgattgccagagtgttaggcagctg

SEQ ID NO: 3883474 - DNA, 25 bp, Homo sapien
ctactggatgctgccagcggggatt

SEQ ID NO: 3883475 - DNA, 25 bp, Homo sapien
gttcaaacattttatggacaggaag

SEQ ID NO: 3883476 - DNA, 25 bp, Homo sapien
tgtgccactgtctaactctgccttc

SEQ ID NO: 3883477 - DNA, 25 bp, Homo sapien
ggattgtgccactgtctaactctgc

SEQ ID NO: 3883478 - DNA, 25 bp, Homo sapien
cgtggagggtgcaccattggttacc

SEQ ID NO: 3883479 - DNA, 25 bp, Homo sapien
tgagctcagccgtggagggtgcacc

SEQ ID NO: 3883480 - DNA, 25 bp, Homo sapien
ctcagccgtggagggtgcaccattg

SEQ ID NO: 3883481 - DNA, 25 bp, Homo sapien
actccactgcttctcctcggaaatg

SEQ ID NO: 3883482 - DNA, 25 bp, Homo sapien
ctcctgtcctgctgcatcatctgcc

SEQ ID NO: 3883483 - DNA, 25 bp, Homo sapien
tctcctgtcctgctgcatcatctgc

SEQ ID NO: 3883484 - DNA, 25 bp, Homo sapien
tgtaggaggacttggctcattttca

SEQ ID NO: 3883485 - DNA, 25 bp, Homo sapien
taggctgtaggaggacttggctcat

SEQ ID NO: 3883486 - DNA, 25 bp, Homo sapien
ctaggctgtaggaggacttggctca

SEQ ID NO: 3883487 - DNA, 25 bp, Homo sapien
ggctgtaggaggacttggctcattt

SEQ ID NO: 3883488 - DNA, 25 bp, Homo sapien
tagccttttgtcttctcactctccc

SEQ ID NO: 3883489 - DNA, 25 bp, Homo sapien
ctagccttttgtcttctcactctcc

SEQ ID NO: 3883490 - DNA, 25 bp, Homo sapien
ctgagactggcaggatggccacggg

SEQ ID NO: 3883491 - DNA, 25 bp, Homo sapien
gccacggggccctgctgcgggggct

SEQ ID NO: 3883492 - DNA, 25 bp, Homo sapien
agctgagactggcaggatggccacg

SEQ ID NO: 3883493 - DNA, 25 bp, Homo sapien
ttaagctgagactggcaggatggcc

SEQ ID NO: 3883494 - DNA, 25 bp, Homo sapien
gataaccaaagacggcggaagagca

SEQ ID NO: 3883495 - DNA, 25 bp, Homo sapien
tgacacatggtcgaaggcgatccct

SEQ ID NO: 3883496 - DNA, 25 bp, Homo sapien
tctttggatcctccatgacacatgg

SEQ ID NO: 3883497 - DNA, 25 bp, Homo sapien
gatcggtggcccctccgtttagagc

SEQ ID NO: 3883498 - DNA, 25 bp, Homo sapien
ccatggggcccatgctcagtgactg

SEQ ID NO: 3883499 - DNA, 25 bp, Homo sapien
agctcaacacggacatgaccatggg

SEQ ID NO: 3883500 - DNA, 25 bp, Homo sapien
gctttcccagagctcaacacggaca

SEQ ID NO: 3883501 - DNA, 25 bp, Homo sapien
tcccagagctcaacacggacatgac

SEQ ID NO: 3883502 - DNA, 25 bp, Homo sapien
ttatgatgactcctacttgaaatta

SEQ ID NO: 3883503 - DNA, 25 bp, Homo sapien
gtgtcattatgatgactcctacttg

SEQ ID NO: 3883504 - DNA, 25 bp, Homo sapien
tgatcttgcttcgacactggaaaaa

SEQ ID NO: 3883505 - DNA, 25 bp, Homo sapien
tttctctattgatcttgcttcgaca

SEQ ID NO: 3883506 - DNA, 25 bp, Homo sapien
tgtttattctgaacattgagttccg

SEQ ID NO: 3883507 - DNA, 25 bp, Homo sapien
ttaataggattctgccccattgttt

SEQ ID NO: 3883508 - DNA, 25 bp, Homo sapien
tccgagagtcgagattcagctcttt

SEQ ID NO: 3883509 - DNA, 25 bp, Homo sapien
tagaaactcattaccagggtccctc

SEQ ID NO: 3883510 - DNA, 25 bp, Homo sapien
gatgaccacgtggttgaagagcaag

SEQ ID NO: 3883511 - DNA, 25 bp, Homo sapien
ccacgtggttgaagagcaaggccac

SEQ ID NO: 3883512 - DNA, 25 bp, Homo sapien
tgaccacgtggttgaagagcaaggc

SEQ ID NO: 3883513 - DNA, 25 bp, Homo sapien
gaccacgtggttgaagagcaaggcc

SEQ ID NO: 3883514 - DNA, 25 bp, Homo sapien
acagacttcttcacacgctgcaacg

SEQ ID NO: 3883515 - DNA, 25 bp, Homo sapien
tgcaacgggaaggagccagccttga

SEQ ID NO: 3883516 - DNA, 25 bp, Homo sapien
caacgggaaggagccagccttgaaa

SEQ ID NO: 3883517 - DNA, 25 bp, Homo sapien
tcttcacacgctgcaacgggaagga

SEQ ID NO: 3883518 - DNA, 25 bp, Homo sapien
tgaaagcccacgtctggcagaaaat

SEQ ID NO: 3883519 - DNA, 25 bp, Homo sapien
ctggaaaacctagtgaataatgtaa

SEQ ID NO: 3883520 - DNA, 25 bp, Homo sapien
cccacgtctggcagaaaatattgtt

SEQ ID NO: 3883521 - DNA, 25 bp, Homo sapien
atgtaaatgatgaaagcccacgtct

SEQ ID NO: 3883522 - DNA, 25 bp, Homo sapien
cactgagtatttccgcatggctctg

SEQ ID NO: 3883523 - DNA, 25 bp, Homo sapien
agccactgagtatttccgcatggct

SEQ ID NO: 3883524 - DNA, 25 bp, Homo sapien
gtatttccgcatggctctggtatga

SEQ ID NO: 3883525 - DNA, 25 bp, Homo sapien
tgagtatttccgcatggctctggta

SEQ ID NO: 3883526 - DNA, 25 bp, Homo sapien
tgtgcttcgcagctgcttcccatct

SEQ ID NO: 3883527 - DNA, 25 bp, Homo sapien
ctgtgtgcttcgcagctgcttccca

SEQ ID NO: 3883528 - DNA, 25 bp, Homo sapien
ttcgcagctgcttcccatcttgtct

SEQ ID NO: 3883529 - DNA, 25 bp, Homo sapien
tgcttcgcagctgcttcccatcttg

SEQ ID NO: 3883530 - DNA, 25 bp, Homo sapien
ctggccaagatctagccttaatcga

SEQ ID NO: 3883531 - DNA, 25 bp, Homo sapien
ccaagatctagccttaatcgacaat

SEQ ID NO: 3883532 - DNA, 25 bp, Homo sapien
gatctagccttaatcgacaattgat

SEQ ID NO: 3883533 - DNA, 25 bp, Homo sapien
ggccaagatctagccttaatcgaca

SEQ ID NO: 3883534 - DNA, 25 bp, Homo sapien
caggtacttccgcagttctgaggca

SEQ ID NO: 3883535 - DNA, 25 bp, Homo sapien
ccttttgaggccgtattgccccctg

SEQ ID NO: 3883536 - DNA, 25 bp, Homo sapien
cttccgcagttctgaggcatccggg

SEQ ID NO: 3883537 - DNA, 25 bp, Homo sapien
ttttgaggccgtattgccccctgcc

SEQ ID NO: 3883538 - DNA, 25 bp, Homo sapien
tctcccacaaggcaagaggtgagag

SEQ ID NO: 3883539 - DNA, 25 bp, Homo sapien
aaagcccagccgagcaagtctagag

SEQ ID NO: 3883540 - DNA, 25 bp, Homo sapien
gctgccccagaggaagcttatcttg

SEQ ID NO: 3883541 - DNA, 25 bp, Homo sapien
ctagagccccgtttggaatagatgg

SEQ ID NO: 3883542 - DNA, 25 bp, Homo sapien
ctgcagccctgcattcttcctcctc

SEQ ID NO: 3883543 - DNA, 25 bp, Homo sapien
agccctgcattcttcctcctctcca

SEQ ID NO: 3883544 - DNA, 25 bp, Homo sapien
gccctgcattcttcctcctctccat

SEQ ID NO: 3883545 - DNA, 25 bp, Homo sapien
gcagccctgcattcttcctcctctc

SEQ ID NO: 3883546 - DNA, 25 bp, Homo sapien
aggaatggacgtggcttctggccca

SEQ ID NO: 3883547 - DNA, 25 bp, Homo sapien
ggtctggtagaggaatggacgtggc

SEQ ID NO: 3883548 - DNA, 25 bp, Homo sapien
tagaggaatggacgtggcttctggc

SEQ ID NO: 3883549 - DNA, 25 bp, Homo sapien
tgtccttggtctggtagaggaatgg

SEQ ID NO: 3883550 - DNA, 25 bp, Homo sapien
ctctgacacgtggctccagtccaag

SEQ ID NO: 3883551 - DNA, 25 bp, Homo sapien
catgtagagttcatggtagtcactg

SEQ ID NO: 3883552 - DNA, 25 bp, Homo sapien
agtcactgttcagacaggcaactga

SEQ ID NO: 3883553 - DNA, 25 bp, Homo sapien
agtcaggccaaagagggttagaagt

SEQ ID NO: 3883554 - DNA, 25 bp, Homo sapien
gaattaacctcctttggccagcgca

SEQ ID NO: 3883555 - DNA, 25 bp, Homo sapien
aattaacctcctttggccagcgcat

SEQ ID NO: 3883556 - DNA, 25 bp, Homo sapien
gcacagctcagccagacactttggg

SEQ ID NO: 3883557 - DNA, 25 bp, Homo sapien
taagacagtacagtggcccttggtg

SEQ ID NO: 3883558 - DNA, 25 bp, Homo sapien
tgctgcactctgagtagcctctgga

SEQ ID NO: 3883559 - DNA, 25 bp, Homo sapien
gggcagtgatgctgcactctgagta

SEQ ID NO: 3883560 - DNA, 25 bp, Homo sapien
agccaggccagcaaaatggtgcccg

SEQ ID NO: 3883561 - DNA, 25 bp, Homo sapien
tgtgagtgaggctcgatccagccag

SEQ ID NO: 3883562 - DNA, 25 bp, Homo sapien
tccccttgcggtcctgcaggatgct

SEQ ID NO: 3883563 - DNA, 25 bp, Homo sapien
tgatgttccatcgactccctctcgg

SEQ ID NO: 3883564 - DNA, 25 bp, Homo sapien
tacaacgttcaaggtcagaagtcca

SEQ ID NO: 3883565 - DNA, 25 bp, Homo sapien
cccagggattcggatgtcaaaacct

SEQ ID NO: 3883566 - DNA, 25 bp, Homo sapien
taaggactggtccaagaggacccag

SEQ ID NO: 3883567 - DNA, 25 bp, Homo sapien
tagaagtctgggagacatccaggag

SEQ ID NO: 3883568 - DNA, 25 bp, Homo sapien
caggatttgccagggtttgccacaa

SEQ ID NO: 3883569 - DNA, 25 bp, Homo sapien
aaaatggagattccctgctggccgg

SEQ ID NO: 3883570 - DNA, 25 bp, Homo sapien
gcaagacagttgatccaagaaaggg

SEQ ID NO: 3883571 - DNA, 25 bp, Homo sapien
gaacagctagaggtgattgtcaggc

SEQ ID NO: 3883572 - DNA, 25 bp, Homo sapien
tcacgatgggacaaatcttcagtgc

SEQ ID NO: 3883573 - DNA, 25 bp, Homo sapien
tggtggagtgtaagttccagtgctc

SEQ ID NO: 3883574 - DNA, 25 bp, Homo sapien
agtgctcttgcttcacgatgggaca

SEQ ID NO: 3883575 - DNA, 25 bp, Homo sapien
gagtgtaagttccagtgctcttgct

SEQ ID NO: 3883576 - DNA, 25 bp, Homo sapien
tgtctgattcaaatgcctcgccctc

SEQ ID NO: 3883577 - DNA, 25 bp, Homo sapien
ccaccgcctttccaggtctgactct

SEQ ID NO: 3883578 - DNA, 25 bp, Homo sapien
aggtctgactctccgtgtctgattc

SEQ ID NO: 3883579 - DNA, 25 bp, Homo sapien
gactctccgtgtctgattcaaatgc

SEQ ID NO: 3883580 - DNA, 25 bp, Homo sapien
ggaaggtgttcccattgtaagccat

SEQ ID NO: 3883581 - DNA, 25 bp, Homo sapien
ttcccattgtaagccatcacactga

SEQ ID NO: 3883582 - DNA, 25 bp, Homo sapien
ggtgttcccattgtaagccatcaca

SEQ ID NO: 3883583 - DNA, 25 bp, Homo sapien
tctggaaggtgttcccattgtaagc

SEQ ID NO: 3883584 - DNA, 25 bp, Homo sapien
tgtgttgggtaagtcgggctgccga

SEQ ID NO: 3883585 - DNA, 25 bp, Homo sapien
gggatggcgtagagccaatgtgttg

SEQ ID NO: 3883586 - DNA, 25 bp, Homo sapien
gccgcagacgtgtcgggtctcgcct

SEQ ID NO: 3883587 - DNA, 25 bp, Homo sapien
cactctatagctgatggggatggcg

SEQ ID NO: 3883588 - DNA, 25 bp, Homo sapien
gaagagctcgggcactacctgtatg

SEQ ID NO: 3883589 - DNA, 25 bp, Homo sapien
tatgcaccacctagagtaagtcttc

SEQ ID NO: 3883590 - DNA, 25 bp, Homo sapien
cactgtggggaggattcacactgat

SEQ ID NO: 3883591 - DNA, 25 bp, Homo sapien
gagtaagtcttcacactgtggggag

SEQ ID NO: 3883592 - DNA, 25 bp, Homo sapien
cttccaggcacttttgggatgtggc

SEQ ID NO: 3883593 - DNA, 25 bp, Homo sapien
cacttttgggatgtggccgagtgca

SEQ ID NO: 3883594 - DNA, 25 bp, Homo sapien
ctagcatgagtcctgacacacagta

SEQ ID NO: 3883595 - DNA, 25 bp, Homo sapien
catcactgctccctgttacagcgtt

SEQ ID NO: 3883596 - DNA, 25 bp, Homo sapien
ttcgagctgggccaaaaccagtgga

SEQ ID NO: 3883597 - DNA, 25 bp, Homo sapien
gtcaggctcttcgagctgggccaaa

SEQ ID NO: 3883598 - DNA, 25 bp, Homo sapien
aaagttgatgtcatgtcacaggaag

SEQ ID NO: 3883599 - DNA, 25 bp, Homo sapien
tgggccaaaaccagtggaagtcact

SEQ ID NO: 3883600 - DNA, 25 bp, Homo sapien
ggagcctggagcactatgaaattgg

SEQ ID NO: 3883601 - DNA, 25 bp, Homo sapien
tagaccttgactgagcgtggtgaaa

SEQ ID NO: 3883602 - DNA, 25 bp, Homo sapien
caggaaatgccctcgcatcttggag

SEQ ID NO: 3883603 - DNA, 25 bp, Homo sapien
tggctcatgcgacaaacattccttg

SEQ ID NO: 3883604 - DNA, 25 bp, Homo sapien
ggccccaggggagtgccatgatctg

SEQ ID NO: 3883605 - DNA, 25 bp, Homo sapien
gcccaattaggaggccagccggtca

SEQ ID NO: 3883606 - DNA, 25 bp, Homo sapien
gggccccaggggagtgccatgatct

SEQ ID NO: 3883607 - DNA, 25 bp, Homo sapien
caattaggaggccagccggtcatct

SEQ ID NO: 3883608 - DNA, 25 bp, Homo sapien
tagatttggttgttagcaggaggcc

SEQ ID NO: 3883609 - DNA, 25 bp, Homo sapien
ggaggaagtcccctagttctgagac

SEQ ID NO: 3883610 - DNA, 25 bp, Homo sapien
cacaggacgatggtgaggacattca

SEQ ID NO: 3883611 - DNA, 25 bp, Homo sapien
taatgccagctccagacaaggagga

SEQ ID NO: 3883612 - DNA, 25 bp, Homo sapien
agacagctcagaagccggtccagct

SEQ ID NO: 3883613 - DNA, 25 bp, Homo sapien
tccaccaaagcacttcctggagtca

SEQ ID NO: 3883614 - DNA, 25 bp, Homo sapien
agtcagaagtatggctttcttccag

SEQ ID NO: 3883615 - DNA, 25 bp, Homo sapien
ggagtcagaagtatggctttcttcc

SEQ ID NO: 3883616 - DNA, 25 bp, Homo sapien
cttggattgcaggaacaccatgaaa

SEQ ID NO: 3883617 - DNA, 25 bp, Homo sapien
gagataagcggcacttggattgcag

SEQ ID NO: 3883618 - DNA, 25 bp, Homo sapien
ctgtagagagataagcggcacttgg

SEQ ID NO: 3883619 - DNA, 25 bp, Homo sapien
attgcaggaacaccatgaaagctgg

SEQ ID NO: 3883620 - DNA, 25 bp, Homo sapien
tctgtctccagctccgccagggaag

SEQ ID NO: 3883621 - DNA, 25 bp, Homo sapien
agctccgccagggaaggagctctgc

SEQ ID NO: 3883622 - DNA, 25 bp, Homo sapien
cttcccagtgcccatctgtctccag

SEQ ID NO: 3883623 - DNA, 25 bp, Homo sapien
tccgccagggaaggagctctgcatt

SEQ ID NO: 3883624 - DNA, 25 bp, Homo sapien
ccagatgccgaacttcctggcaata

SEQ ID NO: 3883625 - DNA, 25 bp, Homo sapien
ggcaatataacgtcccactgacggc

SEQ ID NO: 3883626 - DNA, 25 bp, Homo sapien
agggcaggtggactggcataggcca

SEQ ID NO: 3883627 - DNA, 25 bp, Homo sapien
caaagcgcagcatgggtgggcactt

SEQ ID NO: 3883628 - DNA, 25 bp, Homo sapien
tgaaatgaggagtggttacgtggcc

SEQ ID NO: 3883629 - DNA, 25 bp, Homo sapien
gaaatgaggagtggttacgtggcct

SEQ ID NO: 3883630 - DNA, 25 bp, Homo sapien
ctgaaatgaggagtggttacgtggc

SEQ ID NO: 3883631 - DNA, 25 bp, Homo sapien
cttttcggaggatagcactgcagcc

SEQ ID NO: 3883632 - DNA, 25 bp, Homo sapien
ttcggaggatagcactgcagcctgg

SEQ ID NO: 3883633 - DNA, 25 bp, Homo sapien
ggctgttgtagccttttcggaggat

SEQ ID NO: 3883634 - DNA, 25 bp, Homo sapien
ttgtagccttttcggaggatagcac

SEQ ID NO: 3883635 - DNA, 25 bp, Homo sapien
ggcaaaatggccctaaaggttctga

SEQ ID NO: 3883636 - DNA, 25 bp, Homo sapien
gacaaagtaaactgccagggtgcgg

SEQ ID NO: 3883637 - DNA, 25 bp, Homo sapien
gcggcgtggcctctcaaacacacgt

SEQ ID NO: 3883638 - DNA, 25 bp, Homo sapien
ggagcctcacgaacccactgagtaa

SEQ ID NO: 3883639 - DNA, 25 bp, Homo sapien
ttcctctccaggtgagagacgtcag

SEQ ID NO: 3883640 - DNA, 25 bp, Homo sapien
tgagagacgtcagacacagctattg

SEQ ID NO: 3883641 - DNA, 25 bp, Homo sapien
tccaggtgagagacgtcagacacag

SEQ ID NO: 3883642 - DNA, 25 bp, Homo sapien
gagagacgtcagacacagctattgt

SEQ ID NO: 3883643 - DNA, 25 bp, Homo sapien
cagacagtgctcgtgtgtcagcatt

SEQ ID NO: 3883644 - DNA, 25 bp, Homo sapien
gagaagtctgtggatttaatgggac

SEQ ID NO: 3883645 - DNA, 25 bp, Homo sapien
agaagtctgtggatttaatgggaca

SEQ ID NO: 3883646 - DNA, 25 bp, Homo sapien
acattttggtaatataccgcctcat

SEQ ID NO: 3883647 - DNA, 25 bp, Homo sapien
gtgggataatgtccaaactccatag

SEQ ID NO: 3883648 - DNA, 25 bp, Homo sapien
tgtccaaactccatagcctgatatt

SEQ ID NO: 3883649 - DNA, 25 bp, Homo sapien
taatgtccaaactccatagcctgat

SEQ ID NO: 3883650 - DNA, 25 bp, Homo sapien
actcctatgcattcttcacagccct

SEQ ID NO: 3883651 - DNA, 25 bp, Homo sapien
tcacagccctgctcaagtatcactc

SEQ ID NO: 3883652 - DNA, 25 bp, Homo sapien
ctcctatgcattcttcacagccctg

SEQ ID NO: 3883653 - DNA, 25 bp, Homo sapien
gggcattgtgacccctgattggccc

SEQ ID NO: 3883654 - DNA, 25 bp, Homo sapien
tgggcgatatgggacagacccaaca

SEQ ID NO: 3883655 - DNA, 25 bp, Homo sapien
gccctgggcgatatgggacagaccc

SEQ ID NO: 3883656 - DNA, 25 bp, Homo sapien
ggagccctgggcgatatgggacaga

SEQ ID NO: 3883657 - DNA, 25 bp, Homo sapien
ctacaactgtcagaccctgcactgc

SEQ ID NO: 3883658 - DNA, 25 bp, Homo sapien
tcagagcaggtctgattgtcccagc

SEQ ID NO: 3883659 - DNA, 25 bp, Homo sapien
gcacgatgttgtcttgctccccaag

SEQ ID NO: 3883660 - DNA, 25 bp, Homo sapien
ggttcatctcgcaccattacgctgg

SEQ ID NO: 3883661 - DNA, 25 bp, Homo sapien
tacatgctgagcttaggtgtcccag

SEQ ID NO: 3883662 - DNA, 25 bp, Homo sapien
tcaattgtgatgtaggaaggtccct

SEQ ID NO: 3883663 - DNA, 25 bp, Homo sapien
tagtatctcgtgctgatgctgggcc

SEQ ID NO: 3883664 - DNA, 25 bp, Homo sapien
tatgccctgccctttgtgggaccca

SEQ ID NO: 3883665 - DNA, 25 bp, Homo sapien
cctgtgggctcaagggactgctgcc

SEQ ID NO: 3883666 - DNA, 25 bp, Homo sapien
gcagcggcagggacctctgttattc

SEQ ID NO: 3883667 - DNA, 25 bp, Homo sapien
ggcccttatcacaagagagtgatgt

SEQ ID NO: 3883668 - DNA, 25 bp, Homo sapien
gtgatcctgcctgcccgttcagcac

SEQ ID NO: 3883669 - DNA, 25 bp, Homo sapien
tccttcaagggtgcgcactggccct

SEQ ID NO: 3883670 - DNA, 25 bp, Homo sapien
agagtgatgtctgcggcactgagcc

SEQ ID NO: 3883671 - DNA, 25 bp, Homo sapien
gaaaattggcctagcttcctaacca

SEQ ID NO: 3883672 - DNA, 25 bp, Homo sapien
cggccgcaagagacagaaattccat

SEQ ID NO: 3883673 - DNA, 25 bp, Homo sapien
ggcagccagacaggagcagaatgaa

SEQ ID NO: 3883674 - DNA, 25 bp, Homo sapien
atgaaatcaaaagggaggaaaattg

SEQ ID NO: 3883675 - DNA, 25 bp, Homo sapien
caaaccaaggtcttctggcaccgaa

SEQ ID NO: 3883676 - DNA, 25 bp, Homo sapien
aagactaagaacctgtgccagccgc

SEQ ID NO: 3883677 - DNA, 25 bp, Homo sapien
taaatccgctcagtgcgagcaagct

SEQ ID NO: 3883678 - DNA, 25 bp, Homo sapien
ccgaagtctggctccctagaaagta

SEQ ID NO: 3883679 - DNA, 25 bp, Homo sapien
gcttccccaagacgctcggtggata

SEQ ID NO: 3883680 - DNA, 25 bp, Homo sapien
cggtggatacaaagggcccaggact

SEQ ID NO: 3883681 - DNA, 25 bp, Homo sapien
gtcaccgaggcccattaggatgtcc

SEQ ID NO: 3883682 - DNA, 25 bp, Homo sapien
caccgaggcccattaggatgtccag

SEQ ID NO: 3883683 - DNA, 25 bp, Homo sapien
tcttaaagactgagagcccattgca

SEQ ID NO: 3883684 - DNA, 25 bp, Homo sapien
gctggtcttaaagactgagagccca

SEQ ID NO: 3883685 - DNA, 25 bp, Homo sapien
ctgcgcggcaaagctggtcttaaag

SEQ ID NO: 3883686 - DNA, 25 bp, Homo sapien
gcaaagctggtcttaaagactgaga

SEQ ID NO: 3883687 - DNA, 25 bp, Homo sapien
ctgcactattgccccagccgccttt

SEQ ID NO: 3883688 - DNA, 25 bp, Homo sapien
tgcactattgccccagccgcctttt

SEQ ID NO: 3883689 - DNA, 25 bp, Homo sapien
gcactattgccccagccgccttttg

SEQ ID NO: 3883690 - DNA, 25 bp, Homo sapien
gcccaaagatacagatgtggttgta

SEQ ID NO: 3883691 - DNA, 25 bp, Homo sapien
ccttcaaagaattgaccctcagcca

SEQ ID NO: 3883692 - DNA, 25 bp, Homo sapien
aagaattgaccctcagccactacag

SEQ ID NO: 3883693 - DNA, 25 bp, Homo sapien
atccaatgccatctccatcatgaag

SEQ ID NO: 3883694 - DNA, 25 bp, Homo sapien
ttgactggagcacctagacatggcc

SEQ ID NO: 3883695 - DNA, 25 bp, Homo sapien
tagtcatatacaagagggcctgagg

SEQ ID NO: 3883696 - DNA, 25 bp, Homo sapien
aaaggcgttatggtcagtcagggaa

SEQ ID NO: 3883697 - DNA, 25 bp, Homo sapien
tgcacttagagttgagcccagccag

SEQ ID NO: 3883698 - DNA, 25 bp, Homo sapien
ctggcctcttgcacccctcctttga

SEQ ID NO: 3883699 - DNA, 25 bp, Homo sapien
ggcctcttgcacccctcctttgact

SEQ ID NO: 3883700 - DNA, 25 bp, Homo sapien
cactggcctcttgcacccctccttt

SEQ ID NO: 3883701 - DNA, 25 bp, Homo sapien
cctcttgcacccctcctttgactgt

SEQ ID NO: 3883702 - DNA, 25 bp, Homo sapien
acttaaccagggtggcgtgtctgca

SEQ ID NO: 3883703 - DNA, 25 bp, Homo sapien
ggtcaaaccaggcactcagaaaggc

SEQ ID NO: 3883704 - DNA, 25 bp, Homo sapien
cacggttccagtgatgggcagctca

SEQ ID NO: 3883705 - DNA, 25 bp, Homo sapien
cccgcagaggatccacagataatga

SEQ ID NO: 3883706 - DNA, 25 bp, Homo sapien
tggaaatctcaataaacagggcggg

SEQ ID NO: 3883707 - DNA, 25 bp, Homo sapien
tcagattcaagcaagtgaccggcct

SEQ ID NO: 3883708 - DNA, 25 bp, Homo sapien
ttccagcaagggctagaaggcctag

SEQ ID NO: 3883709 - DNA, 25 bp, Homo sapien
cacacagtggtgtctcacggcaagc

SEQ ID NO: 3883710 - DNA, 25 bp, Homo sapien
ttcaatattcaggtcaggcactaac

SEQ ID NO: 3883711 - DNA, 25 bp, Homo sapien
tcaatattcaggtcaggcactaact

SEQ ID NO: 3883712 - DNA, 25 bp, Homo sapien
gactagtgggcaaccaatccagagg

SEQ ID NO: 3883713 - DNA, 25 bp, Homo sapien
caacagggctatgcacggtgaactg

SEQ ID NO: 3883714 - DNA, 25 bp, Homo sapien
tgagtgcagctcatcacgaggactg

SEQ ID NO: 3883715 - DNA, 25 bp, Homo sapien
cagagcagccacgtctataaggagc

SEQ ID NO: 3883716 - DNA, 25 bp, Homo sapien
cagctccagcttcaaacacttcaca

SEQ ID NO: 3883717 - DNA, 25 bp, Homo sapien
ggcattcgtggggtatggacatcac

SEQ ID NO: 3883718 - DNA, 25 bp, Homo sapien
cgtggggtatggacatcacagaatc

SEQ ID NO: 3883719 - DNA, 25 bp, Homo sapien
ttcacactcaaacagtggggcatcc

SEQ ID NO: 3883720 - DNA, 25 bp, Homo sapien
gagggtagacagataaggttccaga

SEQ ID NO: 3883721 - DNA, 25 bp, Homo sapien
ccaagctaagggcctgagagaaatg

SEQ ID NO: 3883722 - DNA, 25 bp, Homo sapien
atgagggtagacagataaggttcca

SEQ ID NO: 3883723 - DNA, 25 bp, Homo sapien
gtagacagataaggttccagaaaga

SEQ ID NO: 3883724 - DNA, 25 bp, Homo sapien
ccccagggccagacgatcaggatgg

SEQ ID NO: 3883725 - DNA, 25 bp, Homo sapien
cagggccagacgatcaggatggtta

SEQ ID NO: 3883726 - DNA, 25 bp, Homo sapien
cccagggccagacgatcaggatggt

SEQ ID NO: 3883727 - DNA, 25 bp, Homo sapien
ggccagacgatcaggatggttaggg

SEQ ID NO: 3883728 - DNA, 25 bp, Homo sapien
ccttctgggcttgacagtcatccat

SEQ ID NO: 3883729 - DNA, 25 bp, Homo sapien
gaagccgggaaccttctgggcttga

SEQ ID NO: 3883730 - DNA, 25 bp, Homo sapien
cacctcggaagccgggaaccttctg

SEQ ID NO: 3883731 - DNA, 25 bp, Homo sapien
agaatgccacctcggaagccgggaa

SEQ ID NO: 3883732 - DNA, 25 bp, Homo sapien
gacaccctgattgtaacccagtggg

SEQ ID NO: 3883733 - DNA, 25 bp, Homo sapien
tcacgtcacaacttcagtggccatt

SEQ ID NO: 3883734 - DNA, 25 bp, Homo sapien
tcgtaactgtaagatgataaactcc

SEQ ID NO: 3883735 - DNA, 25 bp, Homo sapien
caggaggatcgtgccctgctgacac

SEQ ID NO: 3883736 - DNA, 25 bp, Homo sapien
gaggcattgagtaggatggagagca

SEQ ID NO: 3883737 - DNA, 25 bp, Homo sapien
gactagagtacaccatgagcagact

SEQ ID NO: 3883738 - DNA, 25 bp, Homo sapien
cctggatttcaggaggttcccatca

SEQ ID NO: 3883739 - DNA, 25 bp, Homo sapien
ggacatggagcctctaatgagcatc

SEQ ID NO: 3883740 - DNA, 25 bp, Homo sapien
ggtgcctatgtggtgaaccctcaat

SEQ ID NO: 3883741 - DNA, 25 bp, Homo sapien
caagaagggccatgcactgaagctc

SEQ ID NO: 3883742 - DNA, 25 bp, Homo sapien
caaggaggagacttgtgctggcact

SEQ ID NO: 3883743 - DNA, 25 bp, Homo sapien
tgaacaggagagcactgggatttac

SEQ ID NO: 3883744 - DNA, 25 bp, Homo sapien
tgcagagctgttagcgcaaacacct

SEQ ID NO: 3883745 - DNA, 25 bp, Homo sapien
tgtgcggctctgagcaagtggcttc

SEQ ID NO: 3883746 - DNA, 25 bp, Homo sapien
tctatgatgacactgtcaggacaca

SEQ ID NO: 3883747 - DNA, 25 bp, Homo sapien
gacacaatgctgagttggtaatctg

SEQ ID NO: 3883748 - DNA, 25 bp, Homo sapien
ggtgacggtgttgaccatctatgat

SEQ ID NO: 3883749 - DNA, 25 bp, Homo sapien
agcaagcgagtcatcagttctgcag

SEQ ID NO: 3883750 - DNA, 25 bp, Homo sapien
agtgacctcatctgctaaagaaaga

SEQ ID NO: 3883751 - DNA, 25 bp, Homo sapien
ttcaattcacttcaaacaccatcca

SEQ ID NO: 3883752 - DNA, 25 bp, Homo sapien
atttctgcccaccagcaagcgagtc

SEQ ID NO: 3883753 - DNA, 25 bp, Homo sapien
ggagccaccaagtttctgaacaggg

SEQ ID NO: 3883754 - DNA, 25 bp, Homo sapien
caaaaaggccatcgtagaagtacag

SEQ ID NO: 3883755 - DNA, 25 bp, Homo sapien
aagcaaaagtctccggcaagaaagg

SEQ ID NO: 3883756 - DNA, 25 bp, Homo sapien
ttccagcgcgtgcaaaggaacccaa

SEQ ID NO: 3883757 - DNA, 25 bp, Homo sapien
tgcatgccgattctatcttggtcac

SEQ ID NO: 3883758 - DNA, 25 bp, Homo sapien
gggatccaggatcaaggctgttctt

SEQ ID NO: 3883759 - DNA, 25 bp, Homo sapien
ggctgatagaaggatgcccaaaact

SEQ ID NO: 3883760 - DNA, 25 bp, Homo sapien
cctgggatccaggatcaaggctgtt

SEQ ID NO: 3883761 - DNA, 25 bp, Homo sapien
ttggctgagacaccgcagggcgatg

SEQ ID NO: 3883762 - DNA, 25 bp, Homo sapien
gttggctgagacaccgcagggcgat

SEQ ID NO: 3883763 - DNA, 25 bp, Homo sapien
tggggctgttcgaggcccagttggc

SEQ ID NO: 3883764 - DNA, 25 bp, Homo sapien
gctgttcgaggcccagttggctgag

SEQ ID NO: 3883765 - DNA, 25 bp, Homo sapien
ctgagctccactgggtccatagaag

SEQ ID NO: 3883766 - DNA, 25 bp, Homo sapien
tgtctgagctccactgggtccatag

SEQ ID NO: 3883767 - DNA, 25 bp, Homo sapien
gcttggcatcctcataggtgctggc

SEQ ID NO: 3883768 - DNA, 25 bp, Homo sapien
ctgagcttggcatcctcataggtgc

SEQ ID NO: 3883769 - DNA, 25 bp, Homo sapien
cagacttcctcatcagtgccgcatg

SEQ ID NO: 3883770 - DNA, 25 bp, Homo sapien
tcaggtcgcttgtcccagacttcct

SEQ ID NO: 3883771 - DNA, 25 bp, Homo sapien
aattctggaagtcaccctgcatggc

SEQ ID NO: 3883772 - DNA, 25 bp, Homo sapien
gaggcatggtcctcctcaggtcgct

SEQ ID NO: 3883773 - DNA, 25 bp, Homo sapien
cacagtctatggatgaacagagcca

SEQ ID NO: 3883774 - DNA, 25 bp, Homo sapien
gaattctcaatacctaggaggaccc

SEQ ID NO: 3883775 - DNA, 25 bp, Homo sapien
gtcattcacagttgagtttcctctg

SEQ ID NO: 3883776 - DNA, 25 bp, Homo sapien
tagcggcacctaacttaagacaatg

SEQ ID NO: 3883777 - DNA, 25 bp, Homo sapien
ccagaggtatccaatctaccccatt

SEQ ID NO: 3883778 - DNA, 25 bp, Homo sapien
gaggtatccaatctaccccattacc

SEQ ID NO: 3883779 - DNA, 25 bp, Homo sapien
taagtcatagcttcttccaagaccc

SEQ ID NO: 3883780 - DNA, 25 bp, Homo sapien
cacatagtagacagtaaataagtca

SEQ ID NO: 3883781 - DNA, 25 bp, Homo sapien
tttgaacatgagtggtcacctccga

SEQ ID NO: 3883782 - DNA, 25 bp, Homo sapien
tggtcattaaggcaacaagaactgg

SEQ ID NO: 3883783 - DNA, 25 bp, Homo sapien
caagcttaattcctaccttcggagg

SEQ ID NO: 3883784 - DNA, 25 bp, Homo sapien
tgaacaaagagagcaagggcctcag

SEQ ID NO: 3883785 - DNA, 25 bp, Homo sapien
cctggtgtccctagaggtctggaag

SEQ ID NO: 3883786 - DNA, 25 bp, Homo sapien
tggaagtgctttcataccacccacc

SEQ ID NO: 3883787 - DNA, 25 bp, Homo sapien
ccctagaggtctggaagtgctttca

SEQ ID NO: 3883788 - DNA, 25 bp, Homo sapien
gaggtctggaagtgctttcatacca

SEQ ID NO: 3883789 - DNA, 25 bp, Homo sapien
gccttttcttgcacccaatggcata

SEQ ID NO: 3883790 - DNA, 25 bp, Homo sapien
caatggcatagggaggcagaatttc

SEQ ID NO: 3883791 - DNA, 25 bp, Homo sapien
tcttgcacccaatggcatagggagg

SEQ ID NO: 3883792 - DNA, 25 bp, Homo sapien
gcagtcatcacagtccatgtccatg

SEQ ID NO: 3883793 - DNA, 25 bp, Homo sapien
gagacccgcaaatctgtgctgcacg

SEQ ID NO: 3883794 - DNA, 25 bp, Homo sapien
tgaaggagttcaagccgaggtcagc

SEQ ID NO: 3883795 - DNA, 25 bp, Homo sapien
tgagactagcggagccttgagaatg

SEQ ID NO: 3883796 - DNA, 25 bp, Homo sapien
tcagcgaagccctcagaaggatgtt

SEQ ID NO: 3883797 - DNA, 25 bp, Homo sapien
cgcctcgcctccgacacggtggcag

SEQ ID NO: 3883798 - DNA, 25 bp, Homo sapien
ctcgcctcgcctccgacacggtggc

SEQ ID NO: 3883799 - DNA, 25 bp, Homo sapien
cctcgcctcgcctccgacacggtgg

SEQ ID NO: 3883800 - DNA, 25 bp, Homo sapien
gcctcgcctccgacacggtggcagc

SEQ ID NO: 3883801 - DNA, 25 bp, Homo sapien
ctgcgcgggcgccaattatgattgg

SEQ ID NO: 3883802 - DNA, 25 bp, Homo sapien
taactgcgtgtctctgagcgtgcct

SEQ ID NO: 3883803 - DNA, 25 bp, Homo sapien
ctgcaaaacgtggagcgcggagtca

SEQ ID NO: 3883804 - DNA, 25 bp, Homo sapien
cgttaacgtgaggatttagtgccca

SEQ ID NO: 3883805 - DNA, 25 bp, Homo sapien
tccccgggctgtaggaacaattcca

SEQ ID NO: 3883806 - DNA, 25 bp, Homo sapien
gcgctctagtctccctcaaagtcac

SEQ ID NO: 3883807 - DNA, 25 bp, Homo sapien
ggaggtccagttaccaactcgctta

SEQ ID NO: 3883808 - DNA, 25 bp, Homo sapien
gaaggctttggaggtccagttacca

SEQ ID NO: 3883809 - DNA, 25 bp, Homo sapien
ctctcgggtgagcagtgtgattttg

SEQ ID NO: 3883810 - DNA, 25 bp, Homo sapien
aagaaaagctgggagagcgccgaga

SEQ ID NO: 3883811 - DNA, 25 bp, Homo sapien
caaggtggtccctacctaggctcag

SEQ ID NO: 3883812 - DNA, 25 bp, Homo sapien
taggctcagcatttgttcccctctc

SEQ ID NO: 3883813 - DNA, 25 bp, Homo sapien
tacaaacgagaaacgcggaggtgtg

SEQ ID NO: 3883814 - DNA, 25 bp, Homo sapien
tgtgcgccagcagattttcacggga

SEQ ID NO: 3883815 - DNA, 25 bp, Homo sapien
gaagcttgcttcacattcctggcgt

SEQ ID NO: 3883816 - DNA, 25 bp, Homo sapien
cgcgcgcgcgttgcaaatacgaaag

SEQ ID NO: 3883817 - DNA, 25 bp, Homo sapien
tccctgctgcaacctgggaaccggg

SEQ ID NO: 3883818 - DNA, 25 bp, Homo sapien
tgaggacaggctggttacacagggc

SEQ ID NO: 3883819 - DNA, 25 bp, Homo sapien
tgcaacctgggaaccgggcctggta

SEQ ID NO: 3883820 - DNA, 25 bp, Homo sapien
cagagggttaaccagtgccgactcc

SEQ ID NO: 3883821 - DNA, 25 bp, Homo sapien
catccagcggatggtttacctactg

SEQ ID NO: 3883822 - DNA, 25 bp, Homo sapien
tggaaacagtgtcgaaactatagcc

SEQ ID NO: 3883823 - DNA, 25 bp, Homo sapien
ttcctggagaggtggtctgaagcct

SEQ ID NO: 3883824 - DNA, 25 bp, Homo sapien
tgtggtcaagcctttgcaaacgtgc

SEQ ID NO: 3883825 - DNA, 25 bp, Homo sapien
ctgggattcttgtgacttgcagagg

SEQ ID NO: 3883826 - DNA, 25 bp, Homo sapien
ctggccgttgatgattgaactggga

SEQ ID NO: 3883827 - DNA, 25 bp, Homo sapien
ccgttgatgattgaactgggattct

SEQ ID NO: 3883828 - DNA, 25 bp, Homo sapien
tgattgaactgggattcttgtgact

SEQ ID NO: 3883829 - DNA, 25 bp, Homo sapien
cacaggcccctgggtctcctttctt

SEQ ID NO: 3883830 - DNA, 25 bp, Homo sapien
gcacaggcccctgggtctcctttct

SEQ ID NO: 3883831 - DNA, 25 bp, Homo sapien
ctgcacaggcccctgggtctccttt

SEQ ID NO: 3883832 - DNA, 25 bp, Homo sapien
caggcccctgggtctcctttcttca

SEQ ID NO: 3883833 - DNA, 25 bp, Homo sapien
gctccgcattctggtgccgtgccat

SEQ ID NO: 3883834 - DNA, 25 bp, Homo sapien
tggtgccgtgccatgtagatcccgg

SEQ ID NO: 3883835 - DNA, 25 bp, Homo sapien
acgctgcccgctccgcattctggtg

SEQ ID NO: 3883836 - DNA, 25 bp, Homo sapien
tgccatgtagatcccggcctgtgct

SEQ ID NO: 3883837 - DNA, 25 bp, Homo sapien
taagaaagggccttgccatggttga

SEQ ID NO: 3883838 - DNA, 25 bp, Homo sapien
gataggtgaggctccctactccaga

SEQ ID NO: 3883839 - DNA, 25 bp, Homo sapien
ccccaggatgtaatgtgggtctcac

SEQ ID NO: 3883840 - DNA, 25 bp, Homo sapien
gatttgcacttcaccgtgtggacag

SEQ ID NO: 3883841 - DNA, 25 bp, Homo sapien
ctcccggtaccagctaggtcagaca

SEQ ID NO: 3883842 - DNA, 25 bp, Homo sapien
ggacctcctaggcattctcctctgg

SEQ ID NO: 3883843 - DNA, 25 bp, Homo sapien
ccagatagttcagttggccagaaag

SEQ ID NO: 3883844 - DNA, 25 bp, Homo sapien
gaatgatcaagtgaaagccctcagg

SEQ ID NO: 3883845 - DNA, 25 bp, Homo sapien
atgtatctgtccgttgtccctgccc

SEQ ID NO: 3883846 - DNA, 25 bp, Homo sapien
tgattttggacaagaccaaggcctc

SEQ ID NO: 3883847 - DNA, 25 bp, Homo sapien
ccaaggcctcgctgggcatcactgt

SEQ ID NO: 3883848 - DNA, 25 bp, Homo sapien
tcagaaagcaatggggctaggccag

SEQ ID NO: 3883849 - DNA, 25 bp, Homo sapien
gtgtctgttgacatcggagtggaga

SEQ ID NO: 3883850 - DNA, 25 bp, Homo sapien
gtctgttgacatcggagtggagagg

SEQ ID NO: 3883851 - DNA, 25 bp, Homo sapien
cctggggctctttgccagcccggag

SEQ ID NO: 3883852 - DNA, 25 bp, Homo sapien
gggctctttgccagcccggagccag

SEQ ID NO: 3883853 - DNA, 25 bp, Homo sapien
taggtactgctagtaggaggtgcac

SEQ ID NO: 3883854 - DNA, 25 bp, Homo sapien
gcatcagccttaggtactgctagta

SEQ ID NO: 3883855 - DNA, 25 bp, Homo sapien
taaccagaggcagtaatgagctttc

SEQ ID NO: 3883856 - DNA, 25 bp, Homo sapien
tggccacggcactctgagcatcagc

SEQ ID NO: 3883857 - DNA, 25 bp, Homo sapien
tgggaccgtcctggttttagcatgg

SEQ ID NO: 3883858 - DNA, 25 bp, Homo sapien
tgtcccagaaacctgtcacttgtgg

SEQ ID NO: 3883859 - DNA, 25 bp, Homo sapien
caggatggttgaccacccaaggcct

SEQ ID NO: 3883860 - DNA, 25 bp, Homo sapien
ctgagacacagagagtagttgaact

SEQ ID NO: 3883861 - DNA, 25 bp, Homo sapien
tcagatcactgccacgtgcacgagc

SEQ ID NO: 3883862 - DNA, 25 bp, Homo sapien
atcactgccacgtgcacgagcttct

SEQ ID NO: 3883863 - DNA, 25 bp, Homo sapien
tgggtgggcaggtaatattgttccc

SEQ ID NO: 3883864 - DNA, 25 bp, Homo sapien
ttgggtgggcaggtaatattgttcc

SEQ ID NO: 3883865 - DNA, 25 bp, Homo sapien
tgtgccgccagagatctccctctca

SEQ ID NO: 3883866 - DNA, 25 bp, Homo sapien
tcatcagcccctttatcgccctgta

SEQ ID NO: 3883867 - DNA, 25 bp, Homo sapien
tgtacacaatcaggggaagctggga

SEQ ID NO: 3883868 - DNA, 25 bp, Homo sapien
tttatcgccctgtacacaatcaggg

SEQ ID NO: 3883869 - DNA, 25 bp, Homo sapien
ccacatcctgttctcagcgggaggg

SEQ ID NO: 3883870 - DNA, 25 bp, Homo sapien
acacccacatcctgttctcagcggg

SEQ ID NO: 3883871 - DNA, 25 bp, Homo sapien
tcctgacacccacatcctgttctca

SEQ ID NO: 3883872 - DNA, 25 bp, Homo sapien
atcctgttctcagcgggaggggcag

SEQ ID NO: 3883873 - DNA, 25 bp, Homo sapien
ggcctgatacaatgaccagttcttg

SEQ ID NO: 3883874 - DNA, 25 bp, Homo sapien
gtaaatctggtagtctacagcaaga

SEQ ID NO: 3883875 - DNA, 25 bp, Homo sapien
tcttctgcacaacgtttgccaaagc

SEQ ID NO: 3883876 - DNA, 25 bp, Homo sapien
caaagcttggcccaggtaaatctgg

SEQ ID NO: 3883877 - DNA, 25 bp, Homo sapien
caggcacagggatccccctggtccc

SEQ ID NO: 3883878 - DNA, 25 bp, Homo sapien
aggcacagggatccccctggtccct

SEQ ID NO: 3883879 - DNA, 25 bp, Homo sapien
ccggctccggtggaaggcaccaagt

SEQ ID NO: 3883880 - DNA, 25 bp, Homo sapien
ttcctgcagtctttggcaccggctc

SEQ ID NO: 3883881 - DNA, 25 bp, Homo sapien
tgcagtctttggcaccggctccggt

SEQ ID NO: 3883882 - DNA, 25 bp, Homo sapien
accaagttcctcatcagaaggctcc

SEQ ID NO: 3883883 - DNA, 25 bp, Homo sapien
tctaattatgtttttaccgcagtaa

SEQ ID NO: 3883884 - DNA, 25 bp, Homo sapien
accgcagtaattcccatttgatttg

SEQ ID NO: 3883885 - DNA, 25 bp, Homo sapien
atgtttttaccgcagtaattcccat

SEQ ID NO: 3883886 - DNA, 25 bp, Homo sapien
taatttgcagtgttatgtaaattct

SEQ ID NO: 3883887 - DNA, 25 bp, Homo sapien
ctgcccgagggacggtggctctgcc

SEQ ID NO: 3883888 - DNA, 25 bp, Homo sapien
gaaagactgcccgagggacggtggc

SEQ ID NO: 3883889 - DNA, 25 bp, Homo sapien
aagactgcccgagggacggtggctc

SEQ ID NO: 3883890 - DNA, 25 bp, Homo sapien
ctgaaagactgcccgagggacggtg

SEQ ID NO: 3883891 - DNA, 25 bp, Homo sapien
cagatcactgaggtaggtgtgccac

SEQ ID NO: 3883892 - DNA, 25 bp, Homo sapien
acgcaggtgagtcctcatgagggca

SEQ ID NO: 3883893 - DNA, 25 bp, Homo sapien
gccctagcacgctggacctttgact

SEQ ID NO: 3883894 - DNA, 25 bp, Homo sapien
catgagggcaggtgctagccctagc

SEQ ID NO: 3883895 - DNA, 25 bp, Homo sapien
aggggaaccccctgctaattgtctg

SEQ ID NO: 3883896 - DNA, 25 bp, Homo sapien
ggaaccccctgctaattgtctggta

SEQ ID NO: 3883897 - DNA, 25 bp, Homo sapien
gaaccccctgctaattgtctggtaa

SEQ ID NO: 3883898 - DNA, 25 bp, Homo sapien
tcacggtgggttctcttttcggatg

SEQ ID NO: 3883899 - DNA, 25 bp, Homo sapien
ccataaattgccagtggcggagcat

SEQ ID NO: 3883900 - DNA, 25 bp, Homo sapien
cggagcattaggcagctggtaatta

SEQ ID NO: 3883901 - DNA, 25 bp, Homo sapien
tggtaattaatcataggagcagctt

SEQ ID NO: 3883902 - DNA, 25 bp, Homo sapien
tggacaggcctcctaaatccagagc

SEQ ID NO: 3883903 - DNA, 25 bp, Homo sapien
acatcacatgctagccttctgccag

SEQ ID NO: 3883904 - DNA, 25 bp, Homo sapien
gcctgagtttctatgggctgcctca

SEQ ID NO: 3883905 - DNA, 25 bp, Homo sapien
ggcattcaaagtcaccgccatctgg

SEQ ID NO: 3883906 - DNA, 25 bp, Homo sapien
cttgaggtgggatactggacagggc

SEQ ID NO: 3883907 - DNA, 25 bp, Homo sapien
ggaaacgtcggccagcgttgcctcg

SEQ ID NO: 3883908 - DNA, 25 bp, Homo sapien
ggatactggacagggcctctggttc

SEQ ID NO: 3883909 - DNA, 25 bp, Homo sapien
ccagcgttgcctcggtgccttgagg

SEQ ID NO: 3883910 - DNA, 25 bp, Homo sapien
gccttggctgtggataattgtcggg

SEQ ID NO: 3883911 - DNA, 25 bp, Homo sapien
ggctgtggataattgtcgggagcat

SEQ ID NO: 3883912 - DNA, 25 bp, Homo sapien
agcaggacggtgaagccttggctgt

SEQ ID NO: 3883913 - DNA, 25 bp, Homo sapien
caggacggtgaagccttggctgtgg

SEQ ID NO: 3883914 - DNA, 25 bp, Homo sapien
cccaggccaagccttggtctcccat

SEQ ID NO: 3883915 - DNA, 25 bp, Homo sapien
cccctatttggactgccgggaggtg

SEQ ID NO: 3883916 - DNA, 25 bp, Homo sapien
tgctgaagctcataccaagcccaag

SEQ ID NO: 3883917 - DNA, 25 bp, Homo sapien
gctgggaagacctaattccagtgag

SEQ ID NO: 3883918 - DNA, 25 bp, Homo sapien
acgaatgttattcactccaggaagg

SEQ ID NO: 3883919 - DNA, 25 bp, Homo sapien
caccttttcaaggtcgggacagact

SEQ ID NO: 3883920 - DNA, 25 bp, Homo sapien
caggcaggcccttgcccttgaaatg

SEQ ID NO: 3883921 - DNA, 25 bp, Homo sapien
tcagatctgtttagtggacgaaacc

SEQ ID NO: 3883922 - DNA, 25 bp, Homo sapien
tggacgaaacctgttcacgcgctca

SEQ ID NO: 3883923 - DNA, 25 bp, Homo sapien
tcttctcctctagcctggcaggatg

SEQ ID NO: 3883924 - DNA, 25 bp, Homo sapien
gatgctttcctggaaccccagtaac

SEQ ID NO: 3883925 - DNA, 25 bp, Homo sapien
tctatgctctacactcccacgtgtc

SEQ ID NO: 3883926 - DNA, 25 bp, Homo sapien
tggctgtgtgatagctgctccatgc

SEQ ID NO: 3883927 - DNA, 25 bp, Homo sapien
ccggtatgtgtgcatccatttgttg

SEQ ID NO: 3883928 - DNA, 25 bp, Homo sapien
ggctgctgtttgagccttccttggg

SEQ ID NO: 3883929 - DNA, 25 bp, Homo sapien
gcctctttgctgtagatccttatca

SEQ ID NO: 3883930 - DNA, 25 bp, Homo sapien
tgggccccaggcttttgagcaaatc

SEQ ID NO: 3883931 - DNA, 25 bp, Homo sapien
aagcagagactggttggagtgcccg

SEQ ID NO: 3883932 - DNA, 25 bp, Homo sapien
agttggaactcggaacaagtggaga

SEQ ID NO: 3883933 - DNA, 25 bp, Homo sapien
agcgtatattaattctcttctccag

SEQ ID NO: 3883934 - DNA, 25 bp, Homo sapien
tctctggtctcaagccggaggagcg

SEQ ID NO: 3883935 - DNA, 25 bp, Homo sapien
caagccggaggagcgtatattaatt

SEQ ID NO: 3883936 - DNA, 25 bp, Homo sapien
taaaatctctggtctcaagccggag

SEQ ID NO: 3883937 - DNA, 25 bp, Homo sapien
gctcagaaagcactaaggatcagat

SEQ ID NO: 3883938 - DNA, 25 bp, Homo sapien
gctggccacatggtaccaacacata

SEQ ID NO: 3883939 - DNA, 25 bp, Homo sapien
ttggaagtcccaaacatgcgggtct

SEQ ID NO: 3883940 - DNA, 25 bp, Homo sapien
ggtataaacctctgctcaattccag

SEQ ID NO: 3883941 - DNA, 25 bp, Homo sapien
ccgccgtggaccctcattagcatgc

SEQ ID NO: 3883942 - DNA, 25 bp, Homo sapien
ccgtggaccctcattagcatgccca

SEQ ID NO: 3883943 - DNA, 25 bp, Homo sapien
cctccccgccgtggaccctcattag

SEQ ID NO: 3883944 - DNA, 25 bp, Homo sapien
ccccgccgtggaccctcattagcat

SEQ ID NO: 3883945 - DNA, 25 bp, Homo sapien
gggcgggagacacccgaagtcatcc

SEQ ID NO: 3883946 - DNA, 25 bp, Homo sapien
ccactcgcacaagtgttgcttccaa

SEQ ID NO: 3883947 - DNA, 25 bp, Homo sapien
cgggagccccactcgcacaagtgtt

SEQ ID NO: 3883948 - DNA, 25 bp, Homo sapien
tcctcgggcgacagcgctccgggag

SEQ ID NO: 3883949 - DNA, 25 bp, Homo sapien
tggtgggtgccgaatagacttctga

SEQ ID NO: 3883950 - DNA, 25 bp, Homo sapien
ataagaatcggccaggatgccttcg

SEQ ID NO: 3883951 - DNA, 25 bp, Homo sapien
gacttctgacaagtgtttgctggca

SEQ ID NO: 3883952 - DNA, 25 bp, Homo sapien
tgagggtcctcgacttcaagctgct

SEQ ID NO: 3883953 - DNA, 25 bp, Homo sapien
gagactgccagatgagtgttgagca

SEQ ID NO: 3883954 - DNA, 25 bp, Homo sapien
caggtggcatggagttggtgccagt

SEQ ID NO: 3883955 - DNA, 25 bp, Homo sapien
catcaggcgagactgccagatgagt

SEQ ID NO: 3883956 - DNA, 25 bp, Homo sapien
ccagatgagtgttgagcagggctga

SEQ ID NO: 3883957 - DNA, 25 bp, Homo sapien
tgggaggtctgaaaatgcggtggct

SEQ ID NO: 3883958 - DNA, 25 bp, Homo sapien
gaagtgggaggtctgaaaatgcggt

SEQ ID NO: 3883959 - DNA, 25 bp, Homo sapien
tctgaaaatgcggtggctttctgca

SEQ ID NO: 3883960 - DNA, 25 bp, Homo sapien
tgcggtggctttctgcagggacccc

SEQ ID NO: 3883961 - DNA, 25 bp, Homo sapien
gcgacactctcaggtttccagtcct

SEQ ID NO: 3883962 - DNA, 25 bp, Homo sapien
ggacctttggcgacactctcaggtt

SEQ ID NO: 3883963 - DNA, 25 bp, Homo sapien
ggatgcgaggacctttggcgacact

SEQ ID NO: 3883964 - DNA, 25 bp, Homo sapien
tcttcaaggcccatcagggcagctt

SEQ ID NO: 3883965 - DNA, 25 bp, Homo sapien
ggtcctgtatccacttgcctggcag

SEQ ID NO: 3883966 - DNA, 25 bp, Homo sapien
caaggtcctgtatccacttgcctgg

SEQ ID NO: 3883967 - DNA, 25 bp, Homo sapien
caagtccgaggcttcagtgtccacc

SEQ ID NO: 3883968 - DNA, 25 bp, Homo sapien
gcactggcaaggtcctgtatccact

SEQ ID NO: 3883969 - DNA, 25 bp, Homo sapien
tttgtgagaggcccctgagcaaagg

SEQ ID NO: 3883970 - DNA, 25 bp, Homo sapien
tgtgagaggcccctgagcaaaggaa

SEQ ID NO: 3883971 - DNA, 25 bp, Homo sapien
ttgtgagaggcccctgagcaaagga

SEQ ID NO: 3883972 - DNA, 25 bp, Homo sapien
actttgtgagaggcccctgagcaaa

SEQ ID NO: 3883973 - DNA, 25 bp, Homo sapien
gattttcagcacattgcccgatggc

SEQ ID NO: 3883974 - DNA, 25 bp, Homo sapien
cagtcgtgattttcagcacattgcc

SEQ ID NO: 3883975 - DNA, 25 bp, Homo sapien
caccgcagtcgtgattttcagcaca

SEQ ID NO: 3883976 - DNA, 25 bp, Homo sapien
ctttcaccgcagtcgtgattttcag

SEQ ID NO: 3883977 - DNA, 25 bp, Homo sapien
gtgcctactcgcaccccgcagggct

SEQ ID NO: 3883978 - DNA, 25 bp, Homo sapien
gagctgcccacgacagctggtgcct

SEQ ID NO: 3883979 - DNA, 25 bp, Homo sapien
gaagaagggcgtgtggttgaagaaa

SEQ ID NO: 3883980 - DNA, 25 bp, Homo sapien
ctggtgcctactcgcaccccgcagg

SEQ ID NO: 3883981 - DNA, 25 bp, Homo sapien
acactgagtaacaggtgcagccagg

SEQ ID NO: 3883982 - DNA, 25 bp, Homo sapien
tacactgagtaacaggtgcagccag

SEQ ID NO: 3883983 - DNA, 25 bp, Homo sapien
gatctagaaaactcaggaggagctg

SEQ ID NO: 3883984 - DNA, 25 bp, Homo sapien
tataaccaaggagaaggcctagccc

SEQ ID NO: 3883985 - DNA, 25 bp, Homo sapien
gcaataccatcagtctgccggagac

SEQ ID NO: 3883986 - DNA, 25 bp, Homo sapien
caatgccccagaagtgatgttttct

SEQ ID NO: 3883987 - DNA, 25 bp, Homo sapien
ccagaggatgggagtcttgaacttg

SEQ ID NO: 3883988 - DNA, 25 bp, Homo sapien
ggccataagtggtctgtcagagaaa

SEQ ID NO: 3883989 - DNA, 25 bp, Homo sapien
tgttatgggccgaagagccactggc

SEQ ID NO: 3883990 - DNA, 25 bp, Homo sapien
gaccaggctggcacttactctttgg

SEQ ID NO: 3883991 - DNA, 25 bp, Homo sapien
cagttgagatttgatgcccgcaggt

SEQ ID NO: 3883992 - DNA, 25 bp, Homo sapien
tatctggctgtttgaaggctctggg

SEQ ID NO: 3883993 - DNA, 25 bp, Homo sapien
cccaggctattctgaggacacgttg

SEQ ID NO: 3883994 - DNA, 25 bp, Homo sapien
tcattaaggcgacattgagctggag

SEQ ID NO: 3883995 - DNA, 25 bp, Homo sapien
tgccatagcgggtgcacaggagcca

SEQ ID NO: 3883996 - DNA, 25 bp, Homo sapien
agatgctgccatagcgggtgcacag

SEQ ID NO: 3883997 - DNA, 25 bp, Homo sapien
ctgccatagcgggtgcacaggagcc

SEQ ID NO: 3883998 - DNA, 25 bp, Homo sapien
tgtagatgctgccatagcgggtgca

SEQ ID NO: 3883999 - DNA, 25 bp, Homo sapien
catgtaaactgtctactgtgactgc

SEQ ID NO: 3884000 - DNA, 25 bp, Homo sapien
attcagcaaaacctcgatcattgcc

SEQ ID NO: 3884001 - DNA, 25 bp, Homo sapien
cagacatgtaaactgtctactgtga

SEQ ID NO: 3884002 - DNA, 25 bp, Homo sapien
acctcgatcattgcccgtggagctg

SEQ ID NO: 3884003 - DNA, 25 bp, Homo sapien
tcttgccaggaatgcgaagagccag

SEQ ID NO: 3884004 - DNA, 25 bp, Homo sapien
cacactgtgtaggtggtcggtcatc

SEQ ID NO: 3884005 - DNA, 25 bp, Homo sapien
cctgagccctattggtgtgtgaaga

SEQ ID NO: 3884006 - DNA, 25 bp, Homo sapien
gacatcatgcttggctcagggagcc

SEQ ID NO: 3884007 - DNA, 25 bp, Homo sapien
caaatggaaccgttgctgctgacat

SEQ ID NO: 3884008 - DNA, 25 bp, Homo sapien
gaggcccctgtattagggagcagtt

SEQ ID NO: 3884009 - DNA, 25 bp, Homo sapien
agcagttggcaaatggaaccgttgc

SEQ ID NO: 3884010 - DNA, 25 bp, Homo sapien
gcacagaggcccctgtattagggag

SEQ ID NO: 3884011 - DNA, 25 bp, Homo sapien
gagcaggattgttggggccgttttg

SEQ ID NO: 3884012 - DNA, 25 bp, Homo sapien
agcaggattgttggggccgttttgg

SEQ ID NO: 3884013 - DNA, 25 bp, Homo sapien
gggtggagcaggattgttggggccg

SEQ ID NO: 3884014 - DNA, 25 bp, Homo sapien
tggagcaggattgttggggccgttt

SEQ ID NO: 3884015 - DNA, 25 bp, Homo sapien
tgtggaggcaagctagtcctgagac

SEQ ID NO: 3884016 - DNA, 25 bp, Homo sapien
aatgagatgagtcacggtcctgtcg

SEQ ID NO: 3884017 - DNA, 25 bp, Homo sapien
tgtgcacggatgtgtcctccatatg

SEQ ID NO: 3884018 - DNA, 25 bp, Homo sapien
ggcgagagccttctctgcgacagca

SEQ ID NO: 3884019 - DNA, 25 bp, Homo sapien
tgatgaggcagcagttgcccactcc

SEQ ID NO: 3884020 - DNA, 25 bp, Homo sapien
ggtgatgaggcagcagttgcccact

SEQ ID NO: 3884021 - DNA, 25 bp, Homo sapien
tgttcgtgggcctgtgtagcgtcct

SEQ ID NO: 3884022 - DNA, 25 bp, Homo sapien
cagttgggagcttgttcgtgggcct

SEQ ID NO: 3884023 - DNA, 25 bp, Homo sapien
gtgaggaaacttgcaccagggtcct

SEQ ID NO: 3884024 - DNA, 25 bp, Homo sapien
accagggtcctaagcacaaaagtct

SEQ ID NO: 3884025 - DNA, 25 bp, Homo sapien
tggatgtcatcacctgctcagattc

SEQ ID NO: 3884026 - DNA, 25 bp, Homo sapien
gctcagattctgtaacccacagttg

SEQ ID NO: 3884027 - DNA, 25 bp, Homo sapien
atgaaccccgcgagcatggcggctg

SEQ ID NO: 3884028 - DNA, 25 bp, Homo sapien
tctcccgttgaaggtctgttcctct

SEQ ID NO: 3884029 - DNA, 25 bp, Homo sapien
agccaattcatgaaccagcccgggc

SEQ ID NO: 3884030 - DNA, 25 bp, Homo sapien
tgggtcccacccaggcgtataacag

SEQ ID NO: 3884031 - DNA, 25 bp, Homo sapien
ccctccgtccgctctgtgctgcaag

SEQ ID NO: 3884032 - DNA, 25 bp, Homo sapien
tgcaaggactcctcaagaagcgcct

SEQ ID NO: 3884033 - DNA, 25 bp, Homo sapien
gtacaccggccctccgtccgctctg

SEQ ID NO: 3884034 - DNA, 25 bp, Homo sapien
aggactcctcaagaagcgcctcctg

SEQ ID NO: 3884035 - DNA, 25 bp, Homo sapien
aaggtttgcacgtaccacaccccag

SEQ ID NO: 3884036 - DNA, 25 bp, Homo sapien
agtcagggcctccattacatcacag

SEQ ID NO: 3884037 - DNA, 25 bp, Homo sapien
cagtcagggcctccattacatcaca

SEQ ID NO: 3884038 - DNA, 25 bp, Homo sapien
ccacccctccatacaacaaggtttg

SEQ ID NO: 3884039 - DNA, 25 bp, Homo sapien
tttcaggctggtctgtgccccgtga

SEQ ID NO: 3884040 - DNA, 25 bp, Homo sapien
cacatggcctagggtgatgccaggt

SEQ ID NO: 3884041 - DNA, 25 bp, Homo sapien
gtctgtgccccgtgagccacatggc

SEQ ID NO: 3884042 - DNA, 25 bp, Homo sapien
cctgtgttcactttgtttcaggctg

SEQ ID NO: 3884043 - DNA, 25 bp, Homo sapien
gtcactgtcccagacggcacaaggt

SEQ ID NO: 3884044 - DNA, 25 bp, Homo sapien
tgttgacttccagtcactgtcccag

SEQ ID NO: 3884045 - DNA, 25 bp, Homo sapien
ctgctctcccgtccgctgtgggtgg

SEQ ID NO: 3884046 - DNA, 25 bp, Homo sapien
cagacggcacaaggttttctgtagg

SEQ ID NO: 3884047 - DNA, 25 bp, Homo sapien
aaagcttggaactccatcacgtgga

SEQ ID NO: 3884048 - DNA, 25 bp, Homo sapien
agagctacaggtctgctcccgacgg

SEQ ID NO: 3884049 - DNA, 25 bp, Homo sapien
cagtgcagcctgaagtaactcccac

SEQ ID NO: 3884050 - DNA, 25 bp, Homo sapien
gtgtcaacagcagcgactcaaggga

SEQ ID NO: 3884051 - DNA, 25 bp, Homo sapien
gaaacatctgacaaatgcaacccct

SEQ ID NO: 3884052 - DNA, 25 bp, Homo sapien
ttaagcctctggagaaacatctgac

SEQ ID NO: 3884053 - DNA, 25 bp, Homo sapien
acatctgacaaatgcaaccccttac

SEQ ID NO: 3884054 - DNA, 25 bp, Homo sapien
tggagaaacatctgacaaatgcaac

SEQ ID NO: 3884055 - DNA, 25 bp, Homo sapien
tttggttgacccacgcctaaggtgc

SEQ ID NO: 3884056 - DNA, 25 bp, Homo sapien
ccacgcctaaggtgcacttgatgca

SEQ ID NO: 3884057 - DNA, 25 bp, Homo sapien
tggacgcaggatggattcacgaaag

SEQ ID NO: 3884058 - DNA, 25 bp, Homo sapien
cttgatgcaccgatggacgcaggat

SEQ ID NO: 3884059 - DNA, 25 bp, Homo sapien
gagcaacttgggtaatgggggctcc

SEQ ID NO: 3884060 - DNA, 25 bp, Homo sapien
gcagccactggagcaacttgggtaa

SEQ ID NO: 3884061 - DNA, 25 bp, Homo sapien
ggcttggcgctgctggaagcaggaa

SEQ ID NO: 3884062 - DNA, 25 bp, Homo sapien
cctcccctccggccattaccaggag

SEQ ID NO: 3884063 - DNA, 25 bp, Homo sapien
gcagggaagaggctcgggagacacg

SEQ ID NO: 3884064 - DNA, 25 bp, Homo sapien
agggaagaggctcgggagacacgct

SEQ ID NO: 3884065 - DNA, 25 bp, Homo sapien
cagggaagaggctcgggagacacgc

SEQ ID NO: 3884066 - DNA, 25 bp, Homo sapien
gaacaggacgtgcaggcactcagag

SEQ ID NO: 3884067 - DNA, 25 bp, Homo sapien
actcagaggcccacggcagagagtg

SEQ ID NO: 3884068 - DNA, 25 bp, Homo sapien
tgcatctggaagtggcggtttccat

SEQ ID NO: 3884069 - DNA, 25 bp, Homo sapien
tgaggtggaaccgacagtccaggac

SEQ ID NO: 3884070 - DNA, 25 bp, Homo sapien
caggagaggaagacgatgtggggga

SEQ ID NO: 3884071 - DNA, 25 bp, Homo sapien
tgcaggagaggaagacgatgtgggg

SEQ ID NO: 3884072 - DNA, 25 bp, Homo sapien
ggagaggaagacgatgtgggggaat

SEQ ID NO: 3884073 - DNA, 25 bp, Homo sapien
agaggaagacgatgtgggggaatct

SEQ ID NO: 3884074 - DNA, 25 bp, Homo sapien
agcagggcctctacactggacacgc

SEQ ID NO: 3884075 - DNA, 25 bp, Homo sapien
cacaaggcctcctatacagtggcct

SEQ ID NO: 3884076 - DNA, 25 bp, Homo sapien
tgagcaacagtccaactgcagagtc

SEQ ID NO: 3884077 - DNA, 25 bp, Homo sapien
tggacacgcagagtccttcctctct

SEQ ID NO: 3884078 - DNA, 25 bp, Homo sapien
tctggtccactgacgcagtccctat

SEQ ID NO: 3884079 - DNA, 25 bp, Homo sapien
ttcctctggtgtctactaagatcct

SEQ ID NO: 3884080 - DNA, 25 bp, Homo sapien
ggtgtctactaagatccttattttc

SEQ ID NO: 3884081 - DNA, 25 bp, Homo sapien
ctattgtcatttccttgtccagcca

SEQ ID NO: 3884082 - DNA, 25 bp, Homo sapien
ttgcacaacacggagcgcttcctgg

SEQ ID NO: 3884083 - DNA, 25 bp, Homo sapien
ggtttccagcagtagtgcgggccca

SEQ ID NO: 3884084 - DNA, 25 bp, Homo sapien
gagaaagctcaaggtcagatcgcag

SEQ ID NO: 3884085 - DNA, 25 bp, Homo sapien
tcaccagggtagctttagagggaaa

SEQ ID NO: 3884086 - DNA, 25 bp, Homo sapien
aggtagttacggtgacaaaagatat

SEQ ID NO: 3884087 - DNA, 25 bp, Homo sapien
gggaagtccatctacggaagccgct

SEQ ID NO: 3884088 - DNA, 25 bp, Homo sapien
tgctccatggtagccactcagaagg

SEQ ID NO: 3884089 - DNA, 25 bp, Homo sapien
ggaagccgctttcctgacgagaact

SEQ ID NO: 3884090 - DNA, 25 bp, Homo sapien
aaccacaatggcacaggcgggaagt

SEQ ID NO: 3884091 - DNA, 25 bp, Homo sapien
ctcagcatttctggcttgttgagtt

SEQ ID NO: 3884092 - DNA, 25 bp, Homo sapien
tctcagcatttctggcttgttgagt

SEQ ID NO: 3884093 - DNA, 25 bp, Homo sapien
tgtctcagcatttctggcttgttga

SEQ ID NO: 3884094 - DNA, 25 bp, Homo sapien
gtctcagcatttctggcttgttgag

SEQ ID NO: 3884095 - DNA, 25 bp, Homo sapien
ctaatgctggtcctaacaccaacgg

SEQ ID NO: 3884096 - DNA, 25 bp, Homo sapien
atgctggtcctaacaccaacggctc

SEQ ID NO: 3884097 - DNA, 25 bp, Homo sapien
taatgctggtcctaacaccaacggc

SEQ ID NO: 3884098 - DNA, 25 bp, Homo sapien
gctggtcctaacaccaacggctccc

SEQ ID NO: 3884099 - DNA, 25 bp, Homo sapien
tcagctgcataaggaggcgatatag

SEQ ID NO: 3884100 - DNA, 25 bp, Homo sapien
tggcagatgccatgctcaggacgtt

SEQ ID NO: 3884101 - DNA, 25 bp, Homo sapien
gatctttactgagctcgccgtggca

SEQ ID NO: 3884102 - DNA, 25 bp, Homo sapien
gatgaggctcagacaaacgacctta

SEQ ID NO: 3884103 - DNA, 25 bp, Homo sapien
tggacttcctaggataagccagttc

SEQ ID NO: 3884104 - DNA, 25 bp, Homo sapien
aattcacagggaaggcaggattgga

SEQ ID NO: 3884105 - DNA, 25 bp, Homo sapien
taagagcttccctaggtagacaggg

SEQ ID NO: 3884106 - DNA, 25 bp, Homo sapien
tccatttggaattgacttctaggtg

SEQ ID NO: 3884107 - DNA, 25 bp, Homo sapien
tctattcacaattctacggccaggg

SEQ ID NO: 3884108 - DNA, 25 bp, Homo sapien
gatgtttcgattcaggcatgccatg

SEQ ID NO: 3884109 - DNA, 25 bp, Homo sapien
caaacagcagcttggatctacacaa

SEQ ID NO: 3884110 - DNA, 25 bp, Homo sapien
tgtcagcagacccatgatacaagca

SEQ ID NO: 3884111 - DNA, 25 bp, Homo sapien
accaagggcgaaaaacacaatcttg

SEQ ID NO: 3884112 - DNA, 25 bp, Homo sapien
gacccagtttgaagcagcctccacc

SEQ ID NO: 3884113 - DNA, 25 bp, Homo sapien
aaccagctgattgctgcgagaggct

SEQ ID NO: 3884114 - DNA, 25 bp, Homo sapien
agttttcagcttcggccaccagagg

SEQ ID NO: 3884115 - DNA, 25 bp, Homo sapien
gctggaacgctggagaattctgagc

SEQ ID NO: 3884116 - DNA, 25 bp, Homo sapien
aacggaatgccatcccaagggctgc

SEQ ID NO: 3884117 - DNA, 25 bp, Homo sapien
gactcacacgtatggacagacacag

SEQ ID NO: 3884118 - DNA, 25 bp, Homo sapien
gcgagccgtatacagattctccagg

SEQ ID NO: 3884119 - DNA, 25 bp, Homo sapien
caggaataaggcacacaacggaatg

SEQ ID NO: 3884120 - DNA, 25 bp, Homo sapien
tggctttccatacagggcaaaccgg

SEQ ID NO: 3884121 - DNA, 25 bp, Homo sapien
tttgctgaccacaagagagttcccc

SEQ ID NO: 3884122 - DNA, 25 bp, Homo sapien
caaggtgacacaatgcgtcggcagc

SEQ ID NO: 3884123 - DNA, 25 bp, Homo sapien
agtcaatttagtgcacctgtggcca

SEQ ID NO: 3884124 - DNA, 25 bp, Homo sapien
tcactgcacgcgacggcagtagtag

SEQ ID NO: 3884125 - DNA, 25 bp, Homo sapien
tccttgctctggtcggacacgtcca

SEQ ID NO: 3884126 - DNA, 25 bp, Homo sapien
cggacacgtccaggccgtcgggctt

SEQ ID NO: 3884127 - DNA, 25 bp, Homo sapien
ctcgcagaggtgctgcgggtgctcc

SEQ ID NO: 3884128 - DNA, 25 bp, Homo sapien
gggagagggcgcctgtggtcacagg

SEQ ID NO: 3884129 - DNA, 25 bp, Homo sapien
tcctcctgagcccgcatgcaggcgt

SEQ ID NO: 3884130 - DNA, 25 bp, Homo sapien
cctgtggtcacaggttgtttcagcc

SEQ ID NO: 3884131 - DNA, 25 bp, Homo sapien
tcctgagcccgcatgcaggcgtctg

SEQ ID NO: 3884132 - DNA, 25 bp, Homo sapien
tttttcagacagagtctcatttctg

SEQ ID NO: 3884133 - DNA, 25 bp, Homo sapien
tattttttcagacagagtctcattt

SEQ ID NO: 3884134 - DNA, 25 bp, Homo sapien
tttcagacagagtctcatttctgtt

SEQ ID NO: 3884135 - DNA, 25 bp, Homo sapien
attttttcagacagagtctcatttc

SEQ ID NO: 3884136 - DNA, 25 bp, Homo sapien
tactcgccgaagcagcgctttttgc

SEQ ID NO: 3884137 - DNA, 25 bp, Homo sapien
cgctttttgccctggtatggagtca

SEQ ID NO: 3884138 - DNA, 25 bp, Homo sapien
cacttgggacacttgtactcgccga

SEQ ID NO: 3884139 - DNA, 25 bp, Homo sapien
ttgatgcactcctgccccatgttgg

SEQ ID NO: 3884140 - DNA, 25 bp, Homo sapien
ggagggcccggctccaacacgccat

SEQ ID NO: 3884141 - DNA, 25 bp, Homo sapien
caggcggtcagagggacaggtgggc

SEQ ID NO: 3884142 - DNA, 25 bp, Homo sapien
gaagcaggcggtcagagggacaggt

SEQ ID NO: 3884143 - DNA, 25 bp, Homo sapien
aggaagcaggcggtcagagggacag

SEQ ID NO: 3884144 - DNA, 25 bp, Homo sapien
agcaggcggtcagagggacaggtgg

SEQ ID NO: 3884145 - DNA, 25 bp, Homo sapien
tccaggaaaggcgagagacatgatc

SEQ ID NO: 3884146 - DNA, 25 bp, Homo sapien
gaacagccatgtacccttcaagagc

SEQ ID NO: 3884147 - DNA, 25 bp, Homo sapien
ggctaatgcactgctcaggagctca

SEQ ID NO: 3884148 - DNA, 25 bp, Homo sapien
aaacatgcaaggcattcgggcccct

SEQ ID NO: 3884149 - DNA, 25 bp, Homo sapien
ggtggacagcagaagttagggcagg

SEQ ID NO: 3884150 - DNA, 25 bp, Homo sapien
gaggggacaccaggagtggcagtgc

SEQ ID NO: 3884151 - DNA, 25 bp, Homo sapien
gtggaggtcgcacaggtaggaggtg

SEQ ID NO: 3884152 - DNA, 25 bp, Homo sapien
gggcagggtggaggtcgcacaggta

SEQ ID NO: 3884153 - DNA, 25 bp, Homo sapien
tccagtcccaggacgcctccttggg

SEQ ID NO: 3884154 - DNA, 25 bp, Homo sapien
tggcgtgggctctgtccagtcccag

SEQ ID NO: 3884155 - DNA, 25 bp, Homo sapien
tcatggcgtgggctctgtccagtcc

SEQ ID NO: 3884156 - DNA, 25 bp, Homo sapien
gacgcctccttgggcagtgctgagc

SEQ ID NO: 3884157 - DNA, 25 bp, Homo sapien
cctggacggctgtcttgagctagca

SEQ ID NO: 3884158 - DNA, 25 bp, Homo sapien
ctggcaaggcctggatagacatggc

SEQ ID NO: 3884159 - DNA, 25 bp, Homo sapien
gctagcagcgccatttgcacagggc

SEQ ID NO: 3884160 - DNA, 25 bp, Homo sapien
tgtctgaaggcgtccctggcaaggc

SEQ ID NO: 3884161 - DNA, 25 bp, Homo sapien
gggcgtgacttccagcctcgcaaaa

SEQ ID NO: 3884162 - DNA, 25 bp, Homo sapien
gagactgtggcaaccacagaccggg

SEQ ID NO: 3884163 - DNA, 25 bp, Homo sapien
ctggagctcacagcacttaggagac

SEQ ID NO: 3884164 - DNA, 25 bp, Homo sapien
gggattcgatctcctcatctgggta

SEQ ID NO: 3884165 - DNA, 25 bp, Homo sapien
tccactgtccccaaaggcgagggtg

SEQ ID NO: 3884166 - DNA, 25 bp, Homo sapien
tctccactgtccccaaaggcgaggg

SEQ ID NO: 3884167 - DNA, 25 bp, Homo sapien
cactgtccccaaaggcgagggtgtt

SEQ ID NO: 3884168 - DNA, 25 bp, Homo sapien
tgtccccaaaggcgagggtgttctg

SEQ ID NO: 3884169 - DNA, 25 bp, Homo sapien
cccacaggacaataatcccgctggt

SEQ ID NO: 3884170 - DNA, 25 bp, Homo sapien
cacaggacaataatcccgctggtgc

SEQ ID NO: 3884171 - DNA, 25 bp, Homo sapien
gccccacaggacaataatcccgctg

SEQ ID NO: 3884172 - DNA, 25 bp, Homo sapien
acaggacaataatcccgctggtgcc

SEQ ID NO: 3884173 - DNA, 25 bp, Homo sapien
gaacaatgatcatggagcaggaggc

SEQ ID NO: 3884174 - DNA, 25 bp, Homo sapien
ggaacaatgatcatggagcaggagg

SEQ ID NO: 3884175 - DNA, 25 bp, Homo sapien
gggaacaatgatcatggagcaggag

SEQ ID NO: 3884176 - DNA, 25 bp, Homo sapien
cgggaacaatgatcatggagcagga

SEQ ID NO: 3884177 - DNA, 25 bp, Homo sapien
ctggcatgtatctgaccagcttgat

SEQ ID NO: 3884178 - DNA, 25 bp, Homo sapien
tgaccagcttgatgcctggatccca

SEQ ID NO: 3884179 - DNA, 25 bp, Homo sapien
catgtatctgaccagcttgatgcct

SEQ ID NO: 3884180 - DNA, 25 bp, Homo sapien
tgtatctgaccagcttgatgcctgg

SEQ ID NO: 3884181 - DNA, 25 bp, Homo sapien
aggccaaacaaccagccagggagca

SEQ ID NO: 3884182 - DNA, 25 bp, Homo sapien
ggccaaacaaccagccagggagcag

SEQ ID NO: 3884183 - DNA, 25 bp, Homo sapien
gcaggccaaacaaccagccagggag

SEQ ID NO: 3884184 - DNA, 25 bp, Homo sapien
ctgcaggccaaacaaccagccaggg

SEQ ID NO: 3884185 - DNA, 25 bp, Homo sapien
taacagaggctagtttttgccaggc

SEQ ID NO: 3884186 - DNA, 25 bp, Homo sapien
tagttccatgagtagacagcacaca

SEQ ID NO: 3884187 - DNA, 25 bp, Homo sapien
tgtgattttcgtggtgcctgccctg

SEQ ID NO: 3884188 - DNA, 25 bp, Homo sapien
gacttgagttggcattcctgaccta

SEQ ID NO: 3884189 - DNA, 25 bp, Homo sapien
gcaagaggacgtgtttgggctgaac

SEQ ID NO: 3884190 - DNA, 25 bp, Homo sapien
caggcagccaccgtaaagatctggt

SEQ ID NO: 3884191 - DNA, 25 bp, Homo sapien
ggcaccacggcccatagatggtact

SEQ ID NO: 3884192 - DNA, 25 bp, Homo sapien
taaagatctggtagccctccttgct

SEQ ID NO: 3884193 - DNA, 25 bp, Homo sapien
tatttgtatcccagttggcagctga

SEQ ID NO: 3884194 - DNA, 25 bp, Homo sapien
acccatcagcgtgcagaggccaaaa

SEQ ID NO: 3884195 - DNA, 25 bp, Homo sapien
acattgctgctcaggccttcagagt

SEQ ID NO: 3884196 - DNA, 25 bp, Homo sapien
ggccaaaacgagataccaggcgacc

SEQ ID NO: 3884197 - DNA, 25 bp, Homo sapien
ttcagagtcctgacccatcagcgtg

SEQ ID NO: 3884198 - DNA, 25 bp, Homo sapien
agcaccgctgcgtgtgaggtccctt

SEQ ID NO: 3884199 - DNA, 25 bp, Homo sapien
tgtggtttataaaagccctgtcaac

SEQ ID NO: 3884200 - DNA, 25 bp, Homo sapien
gggtagacagcatccaatcaggttc

SEQ ID NO: 3884201 - DNA, 25 bp, Homo sapien
caactccaggcatatacgaaaatca

SEQ ID NO: 3884202 - DNA, 25 bp, Homo sapien
ccgcttgctgggcttgcgagcctcg

SEQ ID NO: 3884203 - DNA, 25 bp, Homo sapien
tcaggtctgagaagtgctcggtgag

SEQ ID NO: 3884204 - DNA, 25 bp, Homo sapien
gggcagtccttgatgtagtgtcctt

SEQ ID NO: 3884205 - DNA, 25 bp, Homo sapien
agccatagggtgaggcgcccttgta

SEQ ID NO: 3884206 - DNA, 25 bp, Homo sapien
tatacagcctctatttataggagtc

SEQ ID NO: 3884207 - DNA, 25 bp, Homo sapien
catactggaatttagcgaaggtggg

SEQ ID NO: 3884208 - DNA, 25 bp, Homo sapien
gacaggaaccagacatcttgcttag

SEQ ID NO: 3884209 - DNA, 25 bp, Homo sapien
ttataggagtcacgggctccgggct

SEQ ID NO: 3884210 - DNA, 25 bp, Homo sapien
aaggaaagtgacccccatgtgtgtc

SEQ ID NO: 3884211 - DNA, 25 bp, Homo sapien
aggaaagtgacccccatgtgtgtcc

SEQ ID NO: 3884212 - DNA, 25 bp, Homo sapien
cggaaggcatcgaaggcgctagcct

SEQ ID NO: 3884213 - DNA, 25 bp, Homo sapien
gacaggtagacccagttgagcagct

SEQ ID NO: 3884214 - DNA, 25 bp, Homo sapien
gcgctagcctggtgcgtgtcctgca

SEQ ID NO: 3884215 - DNA, 25 bp, Homo sapien
gcgctcgtgtcgatggccgacagca

SEQ ID NO: 3884216 - DNA, 25 bp, Homo sapien
cgagccccgacggtgatcgccccgc

SEQ ID NO: 3884217 - DNA, 25 bp, Homo sapien
cccgacggtgatcgccccgcgccct

SEQ ID NO: 3884218 - DNA, 25 bp, Homo sapien
gcctcccgagccccgacggtgatcg

SEQ ID NO: 3884219 - DNA, 25 bp, Homo sapien
ccgcctcccgagccccgacggtgat

SEQ ID NO: 3884220 - DNA, 25 bp, Homo sapien
tggctggaactggagcatccagtga

SEQ ID NO: 3884221 - DNA, 25 bp, Homo sapien
ggctggaactggagcatccagtgag

SEQ ID NO: 3884222 - DNA, 25 bp, Homo sapien
ggccaggtgtgctacagaaatctgg

SEQ ID NO: 3884223 - DNA, 25 bp, Homo sapien
aggtgtgctacagaaatctgggaag

SEQ ID NO: 3884224 - DNA, 25 bp, Homo sapien
ggtgtgctacagaaatctgggaagc

SEQ ID NO: 3884225 - DNA, 25 bp, Homo sapien
tcaggccaggtgtgctacagaaatc

SEQ ID NO: 3884226 - DNA, 25 bp, Homo sapien
aaggagcaaatgccagccatctaac

SEQ ID NO: 3884227 - DNA, 25 bp, Homo sapien
tcccccatctgatacggccaaatat

SEQ ID NO: 3884228 - DNA, 25 bp, Homo sapien
gaggagatcccccatctgatacggc

SEQ ID NO: 3884229 - DNA, 25 bp, Homo sapien
gccatctaactggatgggggggaag

SEQ ID NO: 3884230 - DNA, 25 bp, Homo sapien
cctgccccagatacaagcggcccat

SEQ ID NO: 3884231 - DNA, 25 bp, Homo sapien
gaagtgattcttaccagcaactgcc

SEQ ID NO: 3884232 - DNA, 25 bp, Homo sapien
cacacaggaagtaagatgctgctgt

SEQ ID NO: 3884233 - DNA, 25 bp, Homo sapien
tgctgctgtacagtgggctagctct

SEQ ID NO: 3884234 - DNA, 25 bp, Homo sapien
gtgggctagctcttatcgtcttggg

SEQ ID NO: 3884235 - DNA, 25 bp, Homo sapien
tgatggccgcacagtgaagacagca

SEQ ID NO: 3884236 - DNA, 25 bp, Homo sapien
gccgcacagtgaagacagcaaatgc

SEQ ID NO: 3884237 - DNA, 25 bp, Homo sapien
tggccgcacagtgaagacagcaaat

SEQ ID NO: 3884238 - DNA, 25 bp, Homo sapien
ctgtgatggccgcacagtgaagaca

SEQ ID NO: 3884239 - DNA, 25 bp, Homo sapien
agagatatcctcctcttggtactga

SEQ ID NO: 3884240 - DNA, 25 bp, Homo sapien
cagagatatcctcctcttggtactg

SEQ ID NO: 3884241 - DNA, 25 bp, Homo sapien
cacagagatatcctcctcttggtac

SEQ ID NO: 3884242 - DNA, 25 bp, Homo sapien
tcacagagatatcctcctcttggta

SEQ ID NO: 3884243 - DNA, 25 bp, Homo sapien
tgagatcaaggaaggtcagtcccca

SEQ ID NO: 3884244 - DNA, 25 bp, Homo sapien
tagctgggcgtggtaactagtgcct

SEQ ID NO: 3884245 - DNA, 25 bp, Homo sapien
tagggtttaggagcacccagcctca

SEQ ID NO: 3884246 - DNA, 25 bp, Homo sapien
agactgaccgtgtgctaaggccaag

SEQ ID NO: 3884247 - DNA, 25 bp, Homo sapien
tggtggagacttttccaagatatca

SEQ ID NO: 3884248 - DNA, 25 bp, Homo sapien
catggagcatcaaatatggtggaga

SEQ ID NO: 3884249 - DNA, 25 bp, Homo sapien
atggagcatcaaatatggtggagac

SEQ ID NO: 3884250 - DNA, 25 bp, Homo sapien
atggtggagacttttccaagatatc

SEQ ID NO: 3884251 - DNA, 25 bp, Homo sapien
ttaggatctcttcatctcgtaagga

SEQ ID NO: 3884252 - DNA, 25 bp, Homo sapien
tgctgaatacttctgtgtgtggcca

SEQ ID NO: 3884253 - DNA, 25 bp, Homo sapien
gcctgagctgctacaccctaaggtt

SEQ ID NO: 3884254 - DNA, 25 bp, Homo sapien
gccatatctgtgtctgtatgtcatg

SEQ ID NO: 3884255 - DNA, 25 bp, Homo sapien
gctggtcagaagctctgtgcccttc

SEQ ID NO: 3884256 - DNA, 25 bp, Homo sapien
gtttactcccaggagattctgtctc

SEQ ID NO: 3884257 - DNA, 25 bp, Homo sapien
gggctggtcagaagctctgtgccct

SEQ ID NO: 3884258 - DNA, 25 bp, Homo sapien
tgtttactcccaggagattctgtct

SEQ ID NO: 3884259 - DNA, 25 bp, Homo sapien
ttggtggttgaggtcttacaggcca

SEQ ID NO: 3884260 - DNA, 25 bp, Homo sapien
caagtggtacatgtggagttggtgg

SEQ ID NO: 3884261 - DNA, 25 bp, Homo sapien
tcttacaggccacaatgggtagagg

SEQ ID NO: 3884262 - DNA, 25 bp, Homo sapien
tgaggtcttacaggccacaatgggt

SEQ ID NO: 3884263 - DNA, 25 bp, Homo sapien
aggtcccggaggactgacagctgca

SEQ ID NO: 3884264 - DNA, 25 bp, Homo sapien
agctgtaggaggtggatgaggtccc

SEQ ID NO: 3884265 - DNA, 25 bp, Homo sapien
gtcccggaggactgacagctgcagg

SEQ ID NO: 3884266 - DNA, 25 bp, Homo sapien
tgaggtcccggaggactgacagctg

SEQ ID NO: 3884267 - DNA, 25 bp, Homo sapien
atgaggtcctggaggactgacagct

SEQ ID NO: 3884268 - DNA, 25 bp, Homo sapien
tgcaggaggtggatgaggtcctgga

SEQ ID NO: 3884269 - DNA, 25 bp, Homo sapien
ctgcaggaggtggatgaggtcctgg

SEQ ID NO: 3884270 - DNA, 25 bp, Homo sapien
aggtcctggaggactgacagctgca

SEQ ID NO: 3884271 - DNA, 25 bp, Homo sapien
ggtagatgaggtccgggagaactgc

SEQ ID NO: 3884272 - DNA, 25 bp, Homo sapien
aggtagatgaggtccgggagaactg

SEQ ID NO: 3884273 - DNA, 25 bp, Homo sapien
agatccgggaggactgccagttgca

SEQ ID NO: 3884274 - DNA, 25 bp, Homo sapien
ctgcaggtagatgagatccgggagg

SEQ ID NO: 3884275 - DNA, 25 bp, Homo sapien
caggtagatgagatccgggaggact

SEQ ID NO: 3884276 - DNA, 25 bp, Homo sapien
tagatgagatccgggaggactgcca

SEQ ID NO: 3884277 - DNA, 25 bp, Homo sapien
tatgcctcgggtgatagtcccttgc

SEQ ID NO: 3884278 - DNA, 25 bp, Homo sapien
tgcctcgggtgatagtcccttgcac

SEQ ID NO: 3884279 - DNA, 25 bp, Homo sapien
cttatgcctcgggtgatagtccctt

SEQ ID NO: 3884280 - DNA, 25 bp, Homo sapien
tcgggtgatagtcccttgcaccttt

SEQ ID NO: 3884281 - DNA, 25 bp, Homo sapien
tgttttctggctatgtcttctgatt

SEQ ID NO: 3884282 - DNA, 25 bp, Homo sapien
ttctctgttttctggctatgtcttc

SEQ ID NO: 3884283 - DNA, 25 bp, Homo sapien
cttctctgttttctggctatgtctt

SEQ ID NO: 3884284 - DNA, 25 bp, Homo sapien
tctgttttctggctatgtcttctga

SEQ ID NO: 3884285 - DNA, 25 bp, Homo sapien
tgccatctccctctgcaaggcttga

SEQ ID NO: 3884286 - DNA, 25 bp, Homo sapien
tgctgcttgcaggcagccttcctct

SEQ ID NO: 3884287 - DNA, 25 bp, Homo sapien
ctgtgctgcttgcaggcagccttcc

SEQ ID NO: 3884288 - DNA, 25 bp, Homo sapien
ctccctctgcaaggcttgagcacag

SEQ ID NO: 3884289 - DNA, 25 bp, Homo sapien
cagttgttgaggcctttcttgcagc

SEQ ID NO: 3884290 - DNA, 25 bp, Homo sapien
aggcctttcttgcagcagaaggggc

SEQ ID NO: 3884291 - DNA, 25 bp, Homo sapien
ccagttgttgaggcctttcttgcag

SEQ ID NO: 3884292 - DNA, 25 bp, Homo sapien
cctttcttgcagcagaaggggcgat

SEQ ID NO: 3884293 - DNA, 25 bp, Homo sapien
tcggtttccgaacccacttgcagat

SEQ ID NO: 3884294 - DNA, 25 bp, Homo sapien
tccccaagaggctggtgtcggtttc

SEQ ID NO: 3884295 - DNA, 25 bp, Homo sapien
ggtttccgaacccacttgcagatgg

SEQ ID NO: 3884296 - DNA, 25 bp, Homo sapien
caagaggctggtgtcggtttccgaa

SEQ ID NO: 3884297 - DNA, 25 bp, Homo sapien
ttcgcaatgactgttgaccttcatc

SEQ ID NO: 3884298 - DNA, 25 bp, Homo sapien
ttgcccagagatttcgcaatgactg

SEQ ID NO: 3884299 - DNA, 25 bp, Homo sapien
ttcctcggcagtctttctttgccca

SEQ ID NO: 3884300 - DNA, 25 bp, Homo sapien
tcatcatcaccttttggactttggc

SEQ ID NO: 3884301 - DNA, 25 bp, Homo sapien
tgctgattacatctgaccaagctcc

SEQ ID NO: 3884302 - DNA, 25 bp, Homo sapien
tgattacatctgaccaagctccttt

SEQ ID NO: 3884303 - DNA, 25 bp, Homo sapien
ctgctgattacatctgaccaagctc

SEQ ID NO: 3884304 - DNA, 25 bp, Homo sapien
gctgattacatctgaccaagctcct

SEQ ID NO: 3884305 - DNA, 25 bp, Homo sapien
ttgtttaatctttccagtgacagtt

SEQ ID NO: 3884306 - DNA, 25 bp, Homo sapien
ccagtgacagttttccgcagctccg

SEQ ID NO: 3884307 - DNA, 25 bp, Homo sapien
gacagttttccgcagctccgggaca

SEQ ID NO: 3884308 - DNA, 25 bp, Homo sapien
ttttccgcagctccgggacaaactc

SEQ ID NO: 3884309 - DNA, 25 bp, Homo sapien
ggacttgcatgagactgtcactgac

SEQ ID NO: 3884310 - DNA, 25 bp, Homo sapien
cttccttggggacttgcatgagact

SEQ ID NO: 3884311 - DNA, 25 bp, Homo sapien
tggggacttgcatgagactgtcact

SEQ ID NO: 3884312 - DNA, 25 bp, Homo sapien
cttggggacttgcatgagactgtca

SEQ ID NO: 3884313 - DNA, 25 bp, Homo sapien
ggtcaggacaataaacaccttcacg

SEQ ID NO: 3884314 - DNA, 25 bp, Homo sapien
tcaggacaataaacaccttcacgac

SEQ ID NO: 3884315 - DNA, 25 bp, Homo sapien
agctggtccttgtcacgggacagaa

SEQ ID NO: 3884316 - DNA, 25 bp, Homo sapien
tggtccttgtcacgggacagaaact

SEQ ID NO: 3884317 - DNA, 25 bp, Homo sapien
aaaatacggcaactggtgtttgcca

SEQ ID NO: 3884318 - DNA, 25 bp, Homo sapien
tagaaaatacggcaactggtgtttg

SEQ ID NO: 3884319 - DNA, 25 bp, Homo sapien
agtagaaaatacggcaactggtgtt

SEQ ID NO: 3884320 - DNA, 25 bp, Homo sapien
gaaaatacggcaactggtgtttgcc

SEQ ID NO: 3884321 - DNA, 25 bp, Homo sapien
ccaccatgaattgtatgaataatta

SEQ ID NO: 3884322 - DNA, 25 bp, Homo sapien
aatgggcctgccttggataattttc

SEQ ID NO: 3884323 - DNA, 25 bp, Homo sapien
cggagacttctggtgcttaacggag

SEQ ID NO: 3884324 - DNA, 25 bp, Homo sapien
ggtctgtgaacaccctcgaagtagt

SEQ ID NO: 3884325 - DNA, 25 bp, Homo sapien
cctatgtatgtcaagttggtgaagg

SEQ ID NO: 3884326 - DNA, 25 bp, Homo sapien
tatgtatgtcaagttggtgaaggcc

SEQ ID NO: 3884327 - DNA, 25 bp, Homo sapien
tgcatccaactgtgataagcctatg

SEQ ID NO: 3884328 - DNA, 25 bp, Homo sapien
tgtgtgcttgcatccaactgtgata

SEQ ID NO: 3884329 - DNA, 25 bp, Homo sapien
caatagcctttgtgtgtagtaacgg

SEQ ID NO: 3884330 - DNA, 25 bp, Homo sapien
gaatcgtacatgtcagtcacagggt

SEQ ID NO: 3884331 - DNA, 25 bp, Homo sapien
catggtatgtgctcggtcaatagcc

SEQ ID NO: 3884332 - DNA, 25 bp, Homo sapien
tccccaagagtcaccgggtactgtg

SEQ ID NO: 3884333 - DNA, 25 bp, Homo sapien
tcattatgcttggccggtactgctc

SEQ ID NO: 3884334 - DNA, 25 bp, Homo sapien
attatgcttggccggtactgctcat

SEQ ID NO: 3884335 - DNA, 25 bp, Homo sapien
cattatgcttggccggtactgctca

SEQ ID NO: 3884336 - DNA, 25 bp, Homo sapien
ttctagcatctcacagaccaagtgg

SEQ ID NO: 3884337 - DNA, 25 bp, Homo sapien
gaaagggagttctagcatctcacag

SEQ ID NO: 3884338 - DNA, 25 bp, Homo sapien
tccctgtcccatggcctaaatgcct

SEQ ID NO: 3884339 - DNA, 25 bp, Homo sapien
agtgaattctgttgaaagggagttc

SEQ ID NO: 3884340 - DNA, 25 bp, Homo sapien
tctgagtagcggaagtctccagggc

SEQ ID NO: 3884341 - DNA, 25 bp, Homo sapien
gattccttgggacagcaatgcggcc

SEQ ID NO: 3884342 - DNA, 25 bp, Homo sapien
tcagtcgggagtacaggcagttcct

SEQ ID NO: 3884343 - DNA, 25 bp, Homo sapien
catcaaaagtgatggactgcccatt

SEQ ID NO: 3884344 - DNA, 25 bp, Homo sapien
agtcgtggagtgtggcttggagctc

SEQ ID NO: 3884345 - DNA, 25 bp, Homo sapien
gtcgtggagtgtggcttggagctcc

SEQ ID NO: 3884346 - DNA, 25 bp, Homo sapien
aagtcgtggagtgtggcttggagct

SEQ ID NO: 3884347 - DNA, 25 bp, Homo sapien
tccaggcagcccattattcccagga

SEQ ID NO: 3884348 - DNA, 25 bp, Homo sapien
ccattattcccaggaggacatggtg

SEQ ID NO: 3884349 - DNA, 25 bp, Homo sapien
tggtgtttctccaggcggacccatg

SEQ ID NO: 3884350 - DNA, 25 bp, Homo sapien
tggagggcctctctcgccagcctcc

SEQ ID NO: 3884351 - DNA, 25 bp, Homo sapien
cagggcttccaacacaaacgtcctt

SEQ ID NO: 3884352 - DNA, 25 bp, Homo sapien
tccaacacaaacgtccttcacttcg

SEQ ID NO: 3884353 - DNA, 25 bp, Homo sapien
aacacaaacgtccttcacttcgcac

SEQ ID NO: 3884354 - DNA, 25 bp, Homo sapien
gggcttccaacacaaacgtccttca

SEQ ID NO: 3884355 - DNA, 25 bp, Homo sapien
tcaggcctccggctggaggttgtgg

SEQ ID NO: 3884356 - DNA, 25 bp, Homo sapien
ggcatggcctcatgcttcaggcctc

SEQ ID NO: 3884357 - DNA, 25 bp, Homo sapien
tggcacctggcatggcctcatgctt

SEQ ID NO: 3884358 - DNA, 25 bp, Homo sapien
acctggcatggcctcatgcttcagg

SEQ ID NO: 3884359 - DNA, 25 bp, Homo sapien
catgctctgcagaaaacctgccctg

SEQ ID NO: 3884360 - DNA, 25 bp, Homo sapien
ctcactatgttaccctgggaaactg

SEQ ID NO: 3884361 - DNA, 25 bp, Homo sapien
ctatgttaccctgggaaactggctt

SEQ ID NO: 3884362 - DNA, 25 bp, Homo sapien
taccctgggaaactggcttcacctc

SEQ ID NO: 3884363 - DNA, 25 bp, Homo sapien
tagaaggaaggatgaggtcactcac

SEQ ID NO: 3884364 - DNA, 25 bp, Homo sapien
ttagaaggaaggatgaggtcactca

SEQ ID NO: 3884365 - DNA, 25 bp, Homo sapien
catctgtccctcatatgcccagtta

SEQ ID NO: 3884366 - DNA, 25 bp, Homo sapien
ccatctgtccctcatatgcccagtt

SEQ ID NO: 3884367 - DNA, 25 bp, Homo sapien
tccatctgtccctcatatgcccagt

SEQ ID NO: 3884368 - DNA, 25 bp, Homo sapien
atctgtccctcatatgcccagttac

SEQ ID NO: 3884369 - DNA, 25 bp, Homo sapien
tttcaggctccaagaaatcagcgac

SEQ ID NO: 3884370 - DNA, 25 bp, Homo sapien
tcttttcaggctccaagaaatcagc

SEQ ID NO: 3884371 - DNA, 25 bp, Homo sapien
cttcttttcaggctccaagaaatca

SEQ ID NO: 3884372 - DNA, 25 bp, Homo sapien
ttttcaggctccaagaaatcagcga

SEQ ID NO: 3884373 - DNA, 25 bp, Homo sapien
gagggtctttgtaggtcatccatgt

SEQ ID NO: 3884374 - DNA, 25 bp, Homo sapien
tgcctgcgatcctcaagctggagaa

SEQ ID NO: 3884375 - DNA, 25 bp, Homo sapien
tggacccttcaaggtgatcatcggg

SEQ ID NO: 3884376 - DNA, 25 bp, Homo sapien
cagtcagtgatgaggtcttccttcc

SEQ ID NO: 3884377 - DNA, 25 bp, Homo sapien
acacacagagcctccagctgcttgg

SEQ ID NO: 3884378 - DNA, 25 bp, Homo sapien
ccacacacagagcctccagctgctt

SEQ ID NO: 3884379 - DNA, 25 bp, Homo sapien
acacagagcctccagctgcttgggt

SEQ ID NO: 3884380 - DNA, 25 bp, Homo sapien
acagagcctccagctgcttgggtct

SEQ ID NO: 3884381 - DNA, 25 bp, Homo sapien
aatttccctcttaggttttgatatg

SEQ ID NO: 3884382 - DNA, 25 bp, Homo sapien
ccatgacagaggcactgcacttcat

SEQ ID NO: 3884383 - DNA, 25 bp, Homo sapien
aggcatgcaacgctataaatttccc

SEQ ID NO: 3884384 - DNA, 25 bp, Homo sapien
gaaggtctctggcgctcatgagctg

SEQ ID NO: 3884385 - DNA, 25 bp, Homo sapien
tgatttctatagtttggttttctgg

SEQ ID NO: 3884386 - DNA, 25 bp, Homo sapien
tcagatgaaatgttcttcaagtgtc

SEQ ID NO: 3884387 - DNA, 25 bp, Homo sapien
ggtgaatgtatctttacaattgtca

SEQ ID NO: 3884388 - DNA, 25 bp, Homo sapien
gcgatctatcaatactgagagtgaa

SEQ ID NO: 3884389 - DNA, 25 bp, Homo sapien
tgagccgtggtcatttggctcatcc

SEQ ID NO: 3884390 - DNA, 25 bp, Homo sapien
ccagttgctgtaggtcagcctccca

SEQ ID NO: 3884391 - DNA, 25 bp, Homo sapien
cagttgctgtaggtcagcctcccac

SEQ ID NO: 3884392 - DNA, 25 bp, Homo sapien
ccgtcaagtatatgaactggccttc

SEQ ID NO: 3884393 - DNA, 25 bp, Homo sapien
tgcctcatctgtgatgcccaggaag

SEQ ID NO: 3884394 - DNA, 25 bp, Homo sapien
ctggatggccttattctccttggca

SEQ ID NO: 3884395 - DNA, 25 bp, Homo sapien
ggcagtgtctttggccacatcctgg

SEQ ID NO: 3884396 - DNA, 25 bp, Homo sapien
ccttcactttggagaaaggcatccg

SEQ ID NO: 3884397 - DNA, 25 bp, Homo sapien
ccgctcaccgttggtcatgaaaagc

SEQ ID NO: 3884398 - DNA, 25 bp, Homo sapien
aaggcatccgctcaccgttggtcat

SEQ ID NO: 3884399 - DNA, 25 bp, Homo sapien
tttggagaaaggcatccgctcaccg

SEQ ID NO: 3884400 - DNA, 25 bp, Homo sapien
tgaaaccacaaatggtgagtgaggc

SEQ ID NO: 3884401 - DNA, 25 bp, Homo sapien
cttcttcgtgtggtccagttctgat

SEQ ID NO: 3884402 - DNA, 25 bp, Homo sapien
gtgtggtccagttctgatctcaggc

SEQ ID NO: 3884403 - DNA, 25 bp, Homo sapien
tcttcgtgtggtccagttctgatct

SEQ ID NO: 3884404 - DNA, 25 bp, Homo sapien
ttcgtgtggtccagttctgatctca

SEQ ID NO: 3884405 - DNA, 25 bp, Homo sapien
aggagggccctgcaaacctctgagc

SEQ ID NO: 3884406 - DNA, 25 bp, Homo sapien
cccatgatctcctttttggctcctt

SEQ ID NO: 3884407 - DNA, 25 bp, Homo sapien
ctgaattgtccccatgatctccttt

SEQ ID NO: 3884408 - DNA, 25 bp, Homo sapien
ttttggctccttggtcctggaattc

SEQ ID NO: 3884409 - DNA, 25 bp, Homo sapien
gaggacaaaggactttcaattcgct

SEQ ID NO: 3884410 - DNA, 25 bp, Homo sapien
acaatgttgaagagcccataggccc

SEQ ID NO: 3884411 - DNA, 25 bp, Homo sapien
tggtaaagaagatccctctcaaggc

SEQ ID NO: 3884412 - DNA, 25 bp, Homo sapien
caagaggtgcttccgtggtaaagaa

SEQ ID NO: 3884413 - DNA, 25 bp, Homo sapien
atggtaataattgtgacaacaacaa

SEQ ID NO: 3884414 - DNA, 25 bp, Homo sapien
tccaagcacttctcattgccctgac

SEQ ID NO: 3884415 - DNA, 25 bp, Homo sapien
ctccaagcacttctcattgccctga

SEQ ID NO: 3884416 - DNA, 25 bp, Homo sapien
ttccactgtgtacatctccaagcac

SEQ ID NO: 3884417 - DNA, 25 bp, Homo sapien
tccactgtgtacatctccaagcact

SEQ ID NO: 3884418 - DNA, 25 bp, Homo sapien
ggcaccggttcgtgtagtccacagg

SEQ ID NO: 3884419 - DNA, 25 bp, Homo sapien
caactgcctgtttgtgaagaagacc

SEQ ID NO: 3884420 - DNA, 25 bp, Homo sapien
aaatcttgcaatggcctcgttttcc

SEQ ID NO: 3884421 - DNA, 25 bp, Homo sapien
cctcatctaggtagcagaagtctcc

SEQ ID NO: 3884422 - DNA, 25 bp, Homo sapien
gacagggaggacgctctctggcctt

SEQ ID NO: 3884423 - DNA, 25 bp, Homo sapien
ggccttcgacatgagatggagccct

SEQ ID NO: 3884424 - DNA, 25 bp, Homo sapien
ccatcaggatgagcaatcctggcca

SEQ ID NO: 3884425 - DNA, 25 bp, Homo sapien
atgagcaatcctggccaagcataat

SEQ ID NO: 3884426 - DNA, 25 bp, Homo sapien
acacagaggctattgactgagcacc

SEQ ID NO: 3884427 - DNA, 25 bp, Homo sapien
gtgggcaaggtaatcagtgacagtt

SEQ ID NO: 3884428 - DNA, 25 bp, Homo sapien
cagaactgttactatacacagaggc

SEQ ID NO: 3884429 - DNA, 25 bp, Homo sapien
catttgccaagaaccttgacaagca

SEQ ID NO: 3884430 - DNA, 25 bp, Homo sapien
cctgagctataggtgtggttctcca

SEQ ID NO: 3884431 - DNA, 25 bp, Homo sapien
ccctgctgtatttggtaattgtccc

SEQ ID NO: 3884432 - DNA, 25 bp, Homo sapien
tgtcccatggtgaactcaaattgcc

SEQ ID NO: 3884433 - DNA, 25 bp, Homo sapien
tttccacaatgcaggagatcatgct

SEQ ID NO: 3884434 - DNA, 25 bp, Homo sapien
tggccctgtgaggtgcccaaagaag

SEQ ID NO: 3884435 - DNA, 25 bp, Homo sapien
tccaggcactcttctcggtggagaa

SEQ ID NO: 3884436 - DNA, 25 bp, Homo sapien
gacccctgttctcatgagcttctcg

SEQ ID NO: 3884437 - DNA, 25 bp, Homo sapien
ggattgaagtcagctgcaaataccc

SEQ ID NO: 3884438 - DNA, 25 bp, Homo sapien
agcaaaatgccctcacactgttaaa

SEQ ID NO: 3884439 - DNA, 25 bp, Homo sapien
tgtcttattattaagcaaaatgccc

SEQ ID NO: 3884440 - DNA, 25 bp, Homo sapien
aatgccctcacactgttaaacttgt

SEQ ID NO: 3884441 - DNA, 25 bp, Homo sapien
tattaagcaaaatgccctcacactg

SEQ ID NO: 3884442 - DNA, 25 bp, Homo sapien
tgctctcaaggcagtcagagttcca

SEQ ID NO: 3884443 - DNA, 25 bp, Homo sapien
gcaatggatggtgggatgctctcaa

SEQ ID NO: 3884444 - DNA, 25 bp, Homo sapien
gagttccacttgagttcatgtagca

SEQ ID NO: 3884445 - DNA, 25 bp, Homo sapien
tttttaataccttgatgcagcagca

SEQ ID NO: 3884446 - DNA, 25 bp, Homo sapien
cttctgtatcaacaagccatgatat

SEQ ID NO: 3884447 - DNA, 25 bp, Homo sapien
gctgacaaaggtagttgtataagaa

SEQ ID NO: 3884448 - DNA, 25 bp, Homo sapien
cagtccaatggcaagaatgctgaca

SEQ ID NO: 3884449 - DNA, 25 bp, Homo sapien
tataacagcatcaagggctagacag

SEQ ID NO: 3884450 - DNA, 25 bp, Homo sapien
agactgtgcttaactcaagattgcg

SEQ ID NO: 3884451 - DNA, 25 bp, Homo sapien
taaagatgtattcaccctacaagac

SEQ ID NO: 3884452 - DNA, 25 bp, Homo sapien
caagattgcgttggccaagggatta

SEQ ID NO: 3884453 - DNA, 25 bp, Homo sapien
caagacttaatagtgagactgtgct

SEQ ID NO: 3884454 - DNA, 25 bp, Homo sapien
tatgtggttcttataacactagatg

SEQ ID NO: 3884455 - DNA, 25 bp, Homo sapien
gggaatgataatatctctcaagagt

SEQ ID NO: 3884456 - DNA, 25 bp, Homo sapien
caaattattgacgattatgtggttc

SEQ ID NO: 3884457 - DNA, 25 bp, Homo sapien
ctttacatggcttacctaaaccaca

SEQ ID NO: 3884458 - DNA, 25 bp, Homo sapien
acatgagaattcattcatatcacaa

SEQ ID NO: 3884459 - DNA, 25 bp, Homo sapien
tgagaattcattcatatcacaagaa

SEQ ID NO: 3884460 - DNA, 25 bp, Homo sapien
atgagaattcattcatatcacaaga

SEQ ID NO: 3884461 - DNA, 25 bp, Homo sapien
catgagaattcattcatatcacaag

SEQ ID NO: 3884462 - DNA, 25 bp, Homo sapien
agccaccgtgcccggccgagttgaa

SEQ ID NO: 3884463 - DNA, 25 bp, Homo sapien
ccgtgcccggccgagttgaagtact

SEQ ID NO: 3884464 - DNA, 25 bp, Homo sapien
caccgtgcccggccgagttgaagta

SEQ ID NO: 3884465 - DNA, 25 bp, Homo sapien
gattacaggcgtgcaggcgtgagcc

SEQ ID NO: 3884466 - DNA, 25 bp, Homo sapien
ttgagtggaagaatgctgtcagcac

SEQ ID NO: 3884467 - DNA, 25 bp, Homo sapien
ttccattgtataaagtctcggtagt

SEQ ID NO: 3884468 - DNA, 25 bp, Homo sapien
gaatgctgtcagcacattttgttat

SEQ ID NO: 3884469 - DNA, 25 bp, Homo sapien
aaagtctcggtagtgctctcttcat

SEQ ID NO: 3884470 - DNA, 25 bp, Homo sapien
cactaacagatgaaatacttgtcaa

SEQ ID NO: 3884471 - DNA, 25 bp, Homo sapien
tgatctgcggagaaatatatctctg

SEQ ID NO: 3884472 - DNA, 25 bp, Homo sapien
ggtctgtggattacataatggtcaa

SEQ ID NO: 3884473 - DNA, 25 bp, Homo sapien
tctctgttatttcaaggtctgtgga

SEQ ID NO: 3884474 - DNA, 25 bp, Homo sapien
cataaatcgcactctgtatgacagc

SEQ ID NO: 3884475 - DNA, 25 bp, Homo sapien
caacttacaagtcataaatcgcact

SEQ ID NO: 3884476 - DNA, 25 bp, Homo sapien
tctgtatgacagctacgggagggat

SEQ ID NO: 3884477 - DNA, 25 bp, Homo sapien
tcaagctccatagcacaacttacaa

SEQ ID NO: 3884478 - DNA, 25 bp, Homo sapien
cactttttccttgatgctatgaacc

SEQ ID NO: 3884479 - DNA, 25 bp, Homo sapien
ctttttccttgatgctatgaaccat

SEQ ID NO: 3884480 - DNA, 25 bp, Homo sapien
atcactttttccttgatgctatgaa

SEQ ID NO: 3884481 - DNA, 25 bp, Homo sapien
tgaggccatcactttttccttgatg

SEQ ID NO: 3884482 - DNA, 25 bp, Homo sapien
ttgagacaatcaatgacaagacttt

SEQ ID NO: 3884483 - DNA, 25 bp, Homo sapien
cccctaccagttctaggtcatctaa

SEQ ID NO: 3884484 - DNA, 25 bp, Homo sapien
tcaacaatcccctggattagaaccc

SEQ ID NO: 3884485 - DNA, 25 bp, Homo sapien
tatagacattgtgttcagtagaaat

SEQ ID NO: 3884486 - DNA, 25 bp, Homo sapien
ttttaaattaagatgactcttggga

SEQ ID NO: 3884487 - DNA, 25 bp, Homo sapien
tcaggtcaatggcacatgcgtaggt

SEQ ID NO: 3884488 - DNA, 25 bp, Homo sapien
gaaccatcttgtgttggttaaagac

SEQ ID NO: 3884489 - DNA, 25 bp, Homo sapien
gatgactcttgggatgaaccatctt

SEQ ID NO: 3884490 - DNA, 25 bp, Homo sapien
tcacgggcatggagcttaagcagat

SEQ ID NO: 3884491 - DNA, 25 bp, Homo sapien
tcctagcaggcatgtggaacccgag

SEQ ID NO: 3884492 - DNA, 25 bp, Homo sapien
taaacacgtatgagctcttccagaa

SEQ ID NO: 3884493 - DNA, 25 bp, Homo sapien
gagaagcaccttctggacagcgtct

SEQ ID NO: 3884494 - DNA, 25 bp, Homo sapien
tgtggcactgcgaatgtatccccag

SEQ ID NO: 3884495 - DNA, 25 bp, Homo sapien
tctgcaccaaaaacaatcgcgtctg

SEQ ID NO: 3884496 - DNA, 25 bp, Homo sapien
tgcatcaagctcattcgccactaag

SEQ ID NO: 3884497 - DNA, 25 bp, Homo sapien
aggacttctgcaagatccccttgga

SEQ ID NO: 3884498 - DNA, 25 bp, Homo sapien
aaatgcaaactcagcagctctcttg

SEQ ID NO: 3884499 - DNA, 25 bp, Homo sapien
gactagtgggtaggggtcctctcta

SEQ ID NO: 3884500 - DNA, 25 bp, Homo sapien
ggtcctctctacctggtcgtgtcct

SEQ ID NO: 3884501 - DNA, 25 bp, Homo sapien
cagcctgagtgtggggagcgcaagc

SEQ ID NO: 3884502 - DNA, 25 bp, Homo sapien
tccagtggctaatccaagcaggtgt

SEQ ID NO: 3884503 - DNA, 25 bp, Homo sapien
cagggttgcttcagctatggagagc

SEQ ID NO: 3884504 - DNA, 25 bp, Homo sapien
tactgttggaagatagacttggctc

SEQ ID NO: 3884505 - DNA, 25 bp, Homo sapien
aaatggattcaagctgaacagaggc

SEQ ID NO: 3884506 - DNA, 25 bp, Homo sapien
gattactgcagaatccaatggactg

SEQ ID NO: 3884507 - DNA, 25 bp, Homo sapien
cagctccctgtgtctgaggtttaaa

SEQ ID NO: 3884508 - DNA, 25 bp, Homo sapien
tacagacactgtaatgggtgcccca

SEQ ID NO: 3884509 - DNA, 25 bp, Homo sapien
tggactgaagccataagcattcaca

SEQ ID NO: 3884510 - DNA, 25 bp, Homo sapien
agtggcaacaccaaattctgcgagt

SEQ ID NO: 3884511 - DNA, 25 bp, Homo sapien
tataagtccacctcacgaactctga

SEQ ID NO: 3884512 - DNA, 25 bp, Homo sapien
gaaaatcctataggcataggctcaa

SEQ ID NO: 3884513 - DNA, 25 bp, Homo sapien
cacttgtgtcatgcatcacccagaa

SEQ ID NO: 3884514 - DNA, 25 bp, Homo sapien
gggatttgctccctccaacaggaca

SEQ ID NO: 3884515 - DNA, 25 bp, Homo sapien
ccaggagcatatgttcggtattgac

SEQ ID NO: 3884516 - DNA, 25 bp, Homo sapien
tacacggcatattggtggctccaaa

SEQ ID NO: 3884517 - DNA, 25 bp, Homo sapien
aaactccacatatgctctgcccagg

SEQ ID NO: 3884518 - DNA, 25 bp, Homo sapien
tctatttttaggactattggttagc

SEQ ID NO: 3884519 - DNA, 25 bp, Homo sapien
tcaaacaatagagaactttcctccc

SEQ ID NO: 3884520 - DNA, 25 bp, Homo sapien
agactgtctgtagtgcagcgacaca

SEQ ID NO: 3884521 - DNA, 25 bp, Homo sapien
ggttagctgactttagagcctttaa

SEQ ID NO: 3884522 - DNA, 25 bp, Homo sapien
caatagcccatgtatgaatcactct

SEQ ID NO: 3884523 - DNA, 25 bp, Homo sapien
tcatgttgcctcaatagcccatgta

SEQ ID NO: 3884524 - DNA, 25 bp, Homo sapien
tttgttgtatgtagacccatctttc

SEQ ID NO: 3884525 - DNA, 25 bp, Homo sapien
ttcagttttgttgtatgtagaccca

SEQ ID NO: 3884526 - DNA, 25 bp, Homo sapien
ttacactcaaattgaagcaaccatt

SEQ ID NO: 3884527 - DNA, 25 bp, Homo sapien
acactcaaattgaagcaaccattat

SEQ ID NO: 3884528 - DNA, 25 bp, Homo sapien
tacactcaaattgaagcaaccatta

SEQ ID NO: 3884529 - DNA, 25 bp, Homo sapien
cactcaaattgaagcaaccattatg

SEQ ID NO: 3884530 - DNA, 25 bp, Homo sapien
tagcacaaatcatttcaggtaagga

SEQ ID NO: 3884531 - DNA, 25 bp, Homo sapien
aaggtggcgcagtagttgttattga

SEQ ID NO: 3884532 - DNA, 25 bp, Homo sapien
gagattaagaaagtttagccaggac

SEQ ID NO: 3884533 - DNA, 25 bp, Homo sapien
tagccaggacaagttatatagcaca

SEQ ID NO: 3884534 - DNA, 25 bp, Homo sapien
cctgggcgttagcatgtccgaatat

SEQ ID NO: 3884535 - DNA, 25 bp, Homo sapien
caattatcttgcaaccagggaggag

SEQ ID NO: 3884536 - DNA, 25 bp, Homo sapien
tctttcaattgacagagatgccaat

SEQ ID NO: 3884537 - DNA, 25 bp, Homo sapien
gaattaaacctggagtgtatgttcc

SEQ ID NO: 3884538 - DNA, 25 bp, Homo sapien
tatcaaagggtcttcatcatgtgtc

SEQ ID NO: 3884539 - DNA, 25 bp, Homo sapien
ttaacaataagatctcacaggaagt

SEQ ID NO: 3884540 - DNA, 25 bp, Homo sapien
tcaggaagcctccatcgtggtggaa

SEQ ID NO: 3884541 - DNA, 25 bp, Homo sapien
tgtgtcacatgatcagggaggaaga

SEQ ID NO: 3884542 - DNA, 25 bp, Homo sapien
gaatagaatcgagaggccagaacta

SEQ ID NO: 3884543 - DNA, 25 bp, Homo sapien
cagcaagggttccaggatcactcaa

SEQ ID NO: 3884544 - DNA, 25 bp, Homo sapien
gccagaactaacactcacatctatg

SEQ ID NO: 3884545 - DNA, 25 bp, Homo sapien
tatgggtaattaattttcagcaagg

SEQ ID NO: 3884546 - DNA, 25 bp, Homo sapien
agccaatgtgtgtggagatcacatg

SEQ ID NO: 3884547 - DNA, 25 bp, Homo sapien
aagggaaggcaagccaatgtgtgtg

SEQ ID NO: 3884548 - DNA, 25 bp, Homo sapien
aagccaatgtgtgtggagatcacat

SEQ ID NO: 3884549 - DNA, 25 bp, Homo sapien
caagccaatgtgtgtggagatcaca

SEQ ID NO: 3884550 - DNA, 25 bp, Homo sapien
gcctggcctaagtgtaccactttat

SEQ ID NO: 3884551 - DNA, 25 bp, Homo sapien
gacaatgccatatatagcctagatg

SEQ ID NO: 3884552 - DNA, 25 bp, Homo sapien
tcagtacaataataggctgccaggt

SEQ ID NO: 3884553 - DNA, 25 bp, Homo sapien
aagtaatgcatgaccttaatcagga

SEQ ID NO: 3884554 - DNA, 25 bp, Homo sapien
gcctcccaaagtaagcccagccatt

SEQ ID NO: 3884555 - DNA, 25 bp, Homo sapien
tttaagagataatatctcagtctgt

SEQ ID NO: 3884556 - DNA, 25 bp, Homo sapien
ttttttaagagataatatctcagtc

SEQ ID NO: 3884557 - DNA, 25 bp, Homo sapien
ctcccaaagtaagcccagccatttt

SEQ ID NO: 3884558 - DNA, 25 bp, Homo sapien
tcagtaaccatcaacccatggccaa

SEQ ID NO: 3884559 - DNA, 25 bp, Homo sapien
cattccctacactcacacattattt

SEQ ID NO: 3884560 - DNA, 25 bp, Homo sapien
atggccaatcctgtccctactgcaa

SEQ ID NO: 3884561 - DNA, 25 bp, Homo sapien
aacctcacatgccatcgctcagcct

SEQ ID NO: 3884562 - DNA, 25 bp, Homo sapien
ttttaatagctatgtctccagttcc

SEQ ID NO: 3884563 - DNA, 25 bp, Homo sapien
ccagtcttggtcatagcaggtttta

SEQ ID NO: 3884564 - DNA, 25 bp, Homo sapien
ggtcatagcaggttttagataaata

SEQ ID NO: 3884565 - DNA, 25 bp, Homo sapien
tttaatagctatgtctccagttcct

SEQ ID NO: 3884566 - DNA, 25 bp, Homo sapien
caagcagtgactcaatgtagataac

SEQ ID NO: 3884567 - DNA, 25 bp, Homo sapien
taacataattggaaactgggagaaa

SEQ ID NO: 3884568 - DNA, 25 bp, Homo sapien
cagggactaacactacaaatatgga

SEQ ID NO: 3884569 - DNA, 25 bp, Homo sapien
gatgtggcaacaactcgtgctggac

SEQ ID NO: 3884570 - DNA, 25 bp, Homo sapien
ccctcttcccaacccgctgacaggc

SEQ ID NO: 3884571 - DNA, 25 bp, Homo sapien
ttatgagtgagaaacatgaggtgct

SEQ ID NO: 3884572 - DNA, 25 bp, Homo sapien
tatatttacggatcactttttcaac

SEQ ID NO: 3884573 - DNA, 25 bp, Homo sapien
cttgactttgaaaagtgattatatg

SEQ ID NO: 3884574 - DNA, 25 bp, Homo sapien
tcataagctggaatgcctgggccca

SEQ ID NO: 3884575 - DNA, 25 bp, Homo sapien
cactatgcccaaccaaacagttcct

SEQ ID NO: 3884576 - DNA, 25 bp, Homo sapien
agattcttgttatgttggcaagact

SEQ ID NO: 3884577 - DNA, 25 bp, Homo sapien
taactcactgaaatcataagctgga

SEQ ID NO: 3884578 - DNA, 25 bp, Homo sapien
gctttcttgtaggattgttgggaga

SEQ ID NO: 3884579 - DNA, 25 bp, Homo sapien
tattagctttcttgtaggattgttg

SEQ ID NO: 3884580 - DNA, 25 bp, Homo sapien
tttgctggtactgagtgactttggg

SEQ ID NO: 3884581 - DNA, 25 bp, Homo sapien
ttgctggtactgagtgactttgggc

SEQ ID NO: 3884582 - DNA, 25 bp, Homo sapien
aaggaaaccctcatatgttgttgat

SEQ ID NO: 3884583 - DNA, 25 bp, Homo sapien
agtatagttctaatacttaagaagc

SEQ ID NO: 3884584 - DNA, 25 bp, Homo sapien
gaagcaaaataacaccagggcagta

SEQ ID NO: 3884585 - DNA, 25 bp, Homo sapien
tagaaaacaacaatgtgtcagcttc

SEQ ID NO: 3884586 - DNA, 25 bp, Homo sapien
taaaggaacacccacacatggagat

SEQ ID NO: 3884587 - DNA, 25 bp, Homo sapien
gcctcagcctagtgaaaacagccag

SEQ ID NO: 3884588 - DNA, 25 bp, Homo sapien
taaaacggccagagtgtcatatgtg

SEQ ID NO: 3884589 - DNA, 25 bp, Homo sapien
ttgaggaaggaacgtaaacactgac

SEQ ID NO: 3884590 - DNA, 25 bp, Homo sapien
gaccgcagcgcaataaaaacagaag

SEQ ID NO: 3884591 - DNA, 25 bp, Homo sapien
taatacgaaacacactctctgaccg

SEQ ID NO: 3884592 - DNA, 25 bp, Homo sapien
tatggcatctactctaaaggcaact

SEQ ID NO: 3884593 - DNA, 25 bp, Homo sapien
ggacctgaactcaacattggagcaa

SEQ ID NO: 3884594 - DNA, 25 bp, Homo sapien
tataagccaacatcctcggcaagcc

SEQ ID NO: 3884595 - DNA, 25 bp, Homo sapien
tagctttcttcctgcacttaaaggg

SEQ ID NO: 3884596 - DNA, 25 bp, Homo sapien
gcagcatgagtgattaccgttaggg

SEQ ID NO: 3884597 - DNA, 25 bp, Homo sapien
cactccctgttccagtgggtagaca

SEQ ID NO: 3884598 - DNA, 25 bp, Homo sapien
gtatgtgaacgactgattgtactgg

SEQ ID NO: 3884599 - DNA, 25 bp, Homo sapien
tagttagtggtatgtgaacgactga

SEQ ID NO: 3884600 - DNA, 25 bp, Homo sapien
tcattgtagttagtggtatgtgaac

SEQ ID NO: 3884601 - DNA, 25 bp, Homo sapien
tagtggtatgtgaacgactgattgt

SEQ ID NO: 3884602 - DNA, 25 bp, Homo sapien
gagcataccttacttcatgatgagg

SEQ ID NO: 3884603 - DNA, 25 bp, Homo sapien
cagtgtataagcgttacaaaagatt

SEQ ID NO: 3884604 - DNA, 25 bp, Homo sapien
gcaggatgatttacattccactggg

SEQ ID NO: 3884605 - DNA, 25 bp, Homo sapien
caaggaattgctacgctacttttca

SEQ ID NO: 3884606 - DNA, 25 bp, Homo sapien
aatttactagtaggagcatgtatcc

SEQ ID NO: 3884607 - DNA, 25 bp, Homo sapien
gattaagtaagttggtgcacctggc

SEQ ID NO: 3884608 - DNA, 25 bp, Homo sapien
tggaacaattctgtgctaactttgg

SEQ ID NO: 3884609 - DNA, 25 bp, Homo sapien
gagaccactgtgagatgatgaagct

SEQ ID NO: 3884610 - DNA, 25 bp, Homo sapien
ccaggcattgtatgtagataagcaa

SEQ ID NO: 3884611 - DNA, 25 bp, Homo sapien
aactcttcagccagcggaatgcagg

SEQ ID NO: 3884612 - DNA, 25 bp, Homo sapien
gacaagtttgggacactcagagtta

SEQ ID NO: 3884613 - DNA, 25 bp, Homo sapien
gcagtacgctaccatgaaaccagtt

SEQ ID NO: 3884614 - DNA, 25 bp, Homo sapien
tcctaaagcccagctgaggtatcat

SEQ ID NO: 3884615 - DNA, 25 bp, Homo sapien
gctagaaacacgctgagctcatgga

SEQ ID NO: 3884616 - DNA, 25 bp, Homo sapien
gcaaccccgaagcaggcagtctgtt

SEQ ID NO: 3884617 - DNA, 25 bp, Homo sapien
caatgtgagttttaggcaaccccga

SEQ ID NO: 3884618 - DNA, 25 bp, Homo sapien
gagaagctccggaaggtccaacacg

SEQ ID NO: 3884619 - DNA, 25 bp, Homo sapien
tgagaagctccggaaggtccaacac

SEQ ID NO: 3884620 - DNA, 25 bp, Homo sapien
agaagctccggaaggtccaacacgt

SEQ ID NO: 3884621 - DNA, 25 bp, Homo sapien
tacggactagcatcatagcatcacc

SEQ ID NO: 3884622 - DNA, 25 bp, Homo sapien
ttagctggtctacggactagcatca

SEQ ID NO: 3884623 - DNA, 25 bp, Homo sapien
gctacttagctggtctacggactag

SEQ ID NO: 3884624 - DNA, 25 bp, Homo sapien
ggtctacggactagcatcatagcat

SEQ ID NO: 3884625 - DNA, 25 bp, Homo sapien
acatcaacatgagggaaggcaaggt

SEQ ID NO: 3884626 - DNA, 25 bp, Homo sapien
tgctagggaacgctcttgacatcaa

SEQ ID NO: 3884627 - DNA, 25 bp, Homo sapien
ggcactctgccaacagctttcatag

SEQ ID NO: 3884628 - DNA, 25 bp, Homo sapien
tgagaggaagcttcagccaacctta

SEQ ID NO: 3884629 - DNA, 25 bp, Homo sapien
ttcggttagagattagtggaaatga

SEQ ID NO: 3884630 - DNA, 25 bp, Homo sapien
aaaagactgaatttcggttagagat

SEQ ID NO: 3884631 - DNA, 25 bp, Homo sapien
caaattcacaaaccccacatggacc

SEQ ID NO: 3884632 - DNA, 25 bp, Homo sapien
cacaaaccccacatggaccccaggt

SEQ ID NO: 3884633 - DNA, 25 bp, Homo sapien
cgtcttgtaaatgggagcagattcc

SEQ ID NO: 3884634 - DNA, 25 bp, Homo sapien
ttaatttgacagagtagtgcaggca

SEQ ID NO: 3884635 - DNA, 25 bp, Homo sapien
aatgccagcccagttctaagcactg

SEQ ID NO: 3884636 - DNA, 25 bp, Homo sapien
cctggcagggtagaatccacggaaa

SEQ ID NO: 3884637 - DNA, 25 bp, Homo sapien
acatgtgttccactttagctgcttg

SEQ ID NO: 3884638 - DNA, 25 bp, Homo sapien
cagttgtctctcagacctcattacg

SEQ ID NO: 3884639 - DNA, 25 bp, Homo sapien
gttccactttagctgcttgggtccc

SEQ ID NO: 3884640 - DNA, 25 bp, Homo sapien
cctcattacggttattcttcttaca

SEQ ID NO: 3884641 - DNA, 25 bp, Homo sapien
ctagcacattgtacctggtgcataa

SEQ ID NO: 3884642 - DNA, 25 bp, Homo sapien
tagcacattgtacctggtgtataat

SEQ ID NO: 3884643 - DNA, 25 bp, Homo sapien
ctagcacattgtacctggtgtataa

SEQ ID NO: 3884644 - DNA, 25 bp, Homo sapien
taaaataactgattcaaaggatgta

SEQ ID NO: 3884645 - DNA, 25 bp, Homo sapien
aagtatctgatactatgtccaaata

SEQ ID NO: 3884646 - DNA, 25 bp, Homo sapien
caaaggatgtaaagtatctgatact

SEQ ID NO: 3884647 - DNA, 25 bp, Homo sapien
gatactatgtccaaatatgatttct

SEQ ID NO: 3884648 - DNA, 25 bp, Homo sapien
aagtcattagagtggcaattcaaca

SEQ ID NO: 3884649 - DNA, 25 bp, Homo sapien
tctagtgttgataatgagttggctg

SEQ ID NO: 3884650 - DNA, 25 bp, Homo sapien
aatgtcattaacttgctagtctgtc

SEQ ID NO: 3884651 - DNA, 25 bp, Homo sapien
tgtacgtacctacaagatacttgaa

SEQ ID NO: 3884652 - DNA, 25 bp, Homo sapien
taatgttcaacatgtcgtcaccaag

SEQ ID NO: 3884653 - DNA, 25 bp, Homo sapien
tgtatgtattacttctgctcacatc

SEQ ID NO: 3884654 - DNA, 25 bp, Homo sapien
tcaccaagccagatagaaccatata

SEQ ID NO: 3884655 - DNA, 25 bp, Homo sapien
caatattcagtgtaataaactggaa

SEQ ID NO: 3884656 - DNA, 25 bp, Homo sapien
tacagaccaacaataaacaataagg

SEQ ID NO: 3884657 - DNA, 25 bp, Homo sapien
gaatatacttgaacacatactttgc

SEQ ID NO: 3884658 - DNA, 25 bp, Homo sapien
actttgccagaggaaattcagagac

SEQ ID NO: 3884659 - DNA, 25 bp, Homo sapien
aaattacagaccaacaataaacaat

SEQ ID NO: 3884660 - DNA, 25 bp, Homo sapien
gaactggtatgagcacgccacagaa

SEQ ID NO: 3884661 - DNA, 25 bp, Homo sapien
taagcgaatgaaatatgctcaacat

SEQ ID NO: 3884662 - DNA, 25 bp, Homo sapien
caagccaagactgggagacaatatt

SEQ ID NO: 3884663 - DNA, 25 bp, Homo sapien
tatattgatggcaaataagcgaatg

SEQ ID NO: 3884664 - DNA, 25 bp, Homo sapien
gccgcacagtgaagacagcaaatgc

SEQ ID NO: 3884665 - DNA, 25 bp, Homo sapien
acagcagagccacctgtgatggccg

SEQ ID NO: 3884666 - DNA, 25 bp, Homo sapien
gccacctgtgatggccgcacagtga

SEQ ID NO: 3884667 - DNA, 25 bp, Homo sapien
gcagagccacctgtgatggccgcac

SEQ ID NO: 3884668 - DNA, 25 bp, Homo sapien
agagatatcctcctcttggtactga

SEQ ID NO: 3884669 - DNA, 25 bp, Homo sapien
cagagatatcctcctcttggtactg

SEQ ID NO: 3884670 - DNA, 25 bp, Homo sapien
cacagagatatcctcctcttggtac

SEQ ID NO: 3884671 - DNA, 25 bp, Homo sapien
tcacagagatatcctcctcttggta

SEQ ID NO: 3884672 - DNA, 25 bp, Homo sapien
tctcagtgaaaaagggagaagcatt

SEQ ID NO: 3884673 - DNA, 25 bp, Homo sapien
ctcagtgaaaaagggagaagcattt

SEQ ID NO: 3884674 - DNA, 25 bp, Homo sapien
cagaaagataggactgcaaatgttt

SEQ ID NO: 3884675 - DNA, 25 bp, Homo sapien
tggtggagacttttccaagatatca

SEQ ID NO: 3884676 - DNA, 25 bp, Homo sapien
atggagcatcaaatatggtggagac

SEQ ID NO: 3884677 - DNA, 25 bp, Homo sapien
atggtggagacttttccaagatatc

SEQ ID NO: 3884678 - DNA, 25 bp, Homo sapien
catggagcatcaaatatggtggaga

SEQ ID NO: 3884679 - DNA, 25 bp, Homo sapien
gggctggtcagaagctctgtgccct

SEQ ID NO: 3884680 - DNA, 25 bp, Homo sapien
gtttactcccaggagattctgtctc

SEQ ID NO: 3884681 - DNA, 25 bp, Homo sapien
gctggtcagaagctctgtgcccttc

SEQ ID NO: 3884682 - DNA, 25 bp, Homo sapien
tgtttactcccaggagattctgtct

SEQ ID NO: 3884683 - DNA, 25 bp, Homo sapien
ttggtggttgaggtcttacaggcca

SEQ ID NO: 3884684 - DNA, 25 bp, Homo sapien
caagtggtacatgtggagttggtgg

SEQ ID NO: 3884685 - DNA, 25 bp, Homo sapien
tcttacaggccacaatgggtagagg

SEQ ID NO: 3884686 - DNA, 25 bp, Homo sapien
tgaggtcttacaggccacaatgggt

SEQ ID NO: 3884687 - DNA, 25 bp, Homo sapien
tggagatgtagtcggaggtcccaga

SEQ ID NO: 3884688 - DNA, 25 bp, Homo sapien
taagtggagatgtagtcggaggtcc

SEQ ID NO: 3884689 - DNA, 25 bp, Homo sapien
ttactaagtggagatgtagtcggag

SEQ ID NO: 3884690 - DNA, 25 bp, Homo sapien
agatgtagtcggaggtcccagaggc

SEQ ID NO: 3884691 - DNA, 25 bp, Homo sapien
gatgaggtcccagagaacctaccac

SEQ ID NO: 3884692 - DNA, 25 bp, Homo sapien
gacctactggtgcaggagatggatg

SEQ ID NO: 3884693 - DNA, 25 bp, Homo sapien
gataaggtccgggaggacaaggagc

SEQ ID NO: 3884694 - DNA, 25 bp, Homo sapien
tcccagagaacctaccactgcagga

SEQ ID NO: 3884695 - DNA, 25 bp, Homo sapien
ctacaggaggtggatgaggtcctgg

SEQ ID NO: 3884696 - DNA, 25 bp, Homo sapien
atgaggtcctggaggtctgacagct

SEQ ID NO: 3884697 - DNA, 25 bp, Homo sapien
acagctgcaggtggatgatgtccgg

SEQ ID NO: 3884698 - DNA, 25 bp, Homo sapien
ctgacagctgcaggtggatgatgtc

SEQ ID NO: 3884699 - DNA, 25 bp, Homo sapien
atgaggtcctggaggactgacagct

SEQ ID NO: 3884700 - DNA, 25 bp, Homo sapien
tgcaggaggtggatgaggtcctgga

SEQ ID NO: 3884701 - DNA, 25 bp, Homo sapien
ctgcaggaggtggatgaggtcctgg

SEQ ID NO: 3884702 - DNA, 25 bp, Homo sapien
aggtcctggaggactgacagctgca

SEQ ID NO: 3884703 - DNA, 25 bp, Homo sapien
aggtagatgaggtccgggagaactg

SEQ ID NO: 3884704 - DNA, 25 bp, Homo sapien
ggtagatgaggtccgggagaactgc

SEQ ID NO: 3884705 - DNA, 25 bp, Homo sapien
agatccgggaggactgccagttgca

SEQ ID NO: 3884706 - DNA, 25 bp, Homo sapien
ctgcaggtagatgagatccgggagg

SEQ ID NO: 3884707 - DNA, 25 bp, Homo sapien
caggtagatgagatccgggaggact

SEQ ID NO: 3884708 - DNA, 25 bp, Homo sapien
tagatgagatccgggaggactgcca

SEQ ID NO: 3884709 - DNA, 25 bp, Homo sapien
gagatcgggcaagtagggccattct

SEQ ID NO: 3884710 - DNA, 25 bp, Homo sapien
gctggcagcccatcaatggtcctga

SEQ ID NO: 3884711 - DNA, 25 bp, Homo sapien
ggccagccatgagatcgggcaagta

SEQ ID NO: 3884712 - DNA, 25 bp, Homo sapien
ccattctgagaaaggatgagcttcc

SEQ ID NO: 3884713 - DNA, 25 bp, Homo sapien
ggcagcatgaatgccataaagtctc

SEQ ID NO: 3884714 - DNA, 25 bp, Homo sapien
caaaatggcagcatgaatgccataa

SEQ ID NO: 3884715 - DNA, 25 bp, Homo sapien
gcatgaatgccataaagtctccctt

SEQ ID NO: 3884716 - DNA, 25 bp, Homo sapien
cataaagtctcccttcaactgagtc

SEQ ID NO: 3884717 - DNA, 25 bp, Homo sapien
cagcaggggagtgaagaaaagtcgt

SEQ ID NO: 3884718 - DNA, 25 bp, Homo sapien
agtcgtggggacaaactgctatccc

SEQ ID NO: 3884719 - DNA, 25 bp, Homo sapien
aaaagtcgtggggacaaactgctat

SEQ ID NO: 3884720 - DNA, 25 bp, Homo sapien
ctgctatccccacacgccactctgt

SEQ ID NO: 3884721 - DNA, 25 bp, Homo sapien
ctgcaaatgtacgcaggctgggggc

SEQ ID NO: 3884722 - DNA, 25 bp, Homo sapien
tgcaaatgtacgcaggctgggggcc

SEQ ID NO: 3884723 - DNA, 25 bp, Homo sapien
aatgtacgcaggctgggggcctgtc

SEQ ID NO: 3884724 - DNA, 25 bp, Homo sapien
caaatgtacgcaggctgggggcctg

SEQ ID NO: 3884725 - DNA, 25 bp, Homo sapien
ttctctgttttctggctatgtcttc

SEQ ID NO: 3884726 - DNA, 25 bp, Homo sapien
tctgttttctggctatgtcttctga

SEQ ID NO: 3884727 - DNA, 25 bp, Homo sapien
tgttttctggctatgtcttctgatt

SEQ ID NO: 3884728 - DNA, 25 bp, Homo sapien
cttctctgttttctggctatgtctt

SEQ ID NO: 3884729 - DNA, 25 bp, Homo sapien
tgccatctccctctgcaaggcttga

SEQ ID NO: 3884730 - DNA, 25 bp, Homo sapien
ctccctctgcaaggcttgagcacag

SEQ ID NO: 3884731 - DNA, 25 bp, Homo sapien
tgctgcttgcaggcagccttcctct

SEQ ID NO: 3884732 - DNA, 25 bp, Homo sapien
ctgtgctgcttgcaggcagccttcc

SEQ ID NO: 3884733 - DNA, 25 bp, Homo sapien
atacatccatgtcccgacttggccg

SEQ ID NO: 3884734 - DNA, 25 bp, Homo sapien
aaaatacatccatgtcccgacttgg

SEQ ID NO: 3884735 - DNA, 25 bp, Homo sapien
catccatgtcccgacttggccgaaa

SEQ ID NO: 3884736 - DNA, 25 bp, Homo sapien
ccatgtcccgacttggccgaaaagc

SEQ ID NO: 3884737 - DNA, 25 bp, Homo sapien
cagttgttgaggcctttcttgcagc

SEQ ID NO: 3884738 - DNA, 25 bp, Homo sapien
aggcctttcttgcagcagaaggggc

SEQ ID NO: 3884739 - DNA, 25 bp, Homo sapien
ccagttgttgaggcctttcttgcag

SEQ ID NO: 3884740 - DNA, 25 bp, Homo sapien
cctttcttgcagcagaaggggcgat

SEQ ID NO: 3884741 - DNA, 25 bp, Homo sapien
ccaagaggctggtgtcggtttccga

SEQ ID NO: 3884742 - DNA, 25 bp, Homo sapien
caagaggctggtgtcggtttccgaa

SEQ ID NO: 3884743 - DNA, 25 bp, Homo sapien
cccaagaggctggtgtcggtttccg

SEQ ID NO: 3884744 - DNA, 25 bp, Homo sapien
tccccaagaggctggtgtcggtttc

SEQ ID NO: 3884745 - DNA, 25 bp, Homo sapien
tccttgcggcatctgaaggccgtga

SEQ ID NO: 3884746 - DNA, 25 bp, Homo sapien
aaggccgtgattcaaaggtcccctg

SEQ ID NO: 3884747 - DNA, 25 bp, Homo sapien
actggcctgtgtgggattccttgcg

SEQ ID NO: 3884748 - DNA, 25 bp, Homo sapien
cttcctgagtcgagaagggagagaa

SEQ ID NO: 3884749 - DNA, 25 bp, Homo sapien
gaacccagacaatcagcctcagaga

SEQ ID NO: 3884750 - DNA, 25 bp, Homo sapien
aacccagacaatcagcctcagagag

SEQ ID NO: 3884751 - DNA, 25 bp, Homo sapien
agaacccagacaatcagcctcagag

SEQ ID NO: 3884752 - DNA, 25 bp, Homo sapien
ggtttgtgcacctcggaagttggca

SEQ ID NO: 3884753 - DNA, 25 bp, Homo sapien
tgtgtctctgtgcttgcggtatctg

SEQ ID NO: 3884754 - DNA, 25 bp, Homo sapien
tggcagtcacagagaggcctctcca

SEQ ID NO: 3884755 - DNA, 25 bp, Homo sapien
tgtccgtgggccatactcctgagtg

SEQ ID NO: 3884756 - DNA, 25 bp, Homo sapien
ccagtgacagttttcggcagctccg

SEQ ID NO: 3884757 - DNA, 25 bp, Homo sapien
cttgtttaatctttccagtgacagt

SEQ ID NO: 3884758 - DNA, 25 bp, Homo sapien
ttccagtgacagttttcggcagctc

SEQ ID NO: 3884759 - DNA, 25 bp, Homo sapien
tcggcagctccgggacaaactccat

SEQ ID NO: 3884760 - DNA, 25 bp, Homo sapien
ggacttgcatgagactgtcactgac

SEQ ID NO: 3884761 - DNA, 25 bp, Homo sapien
cttccttggggacttgcatgagact

SEQ ID NO: 3884762 - DNA, 25 bp, Homo sapien
tggggacttgcatgagactgtcact

SEQ ID NO: 3884763 - DNA, 25 bp, Homo sapien
cttggggacttgcatgagactgtca

SEQ ID NO: 3884764 - DNA, 25 bp, Homo sapien
tcaggacaatcaacaccttcacgac

SEQ ID NO: 3884765 - DNA, 25 bp, Homo sapien
ggtcaggacaatcaacaccttcacg

SEQ ID NO: 3884766 - DNA, 25 bp, Homo sapien
agctggtccttgtcacgggacagaa

SEQ ID NO: 3884767 - DNA, 25 bp, Homo sapien
tggtccttgtcacgggacagaaact

SEQ ID NO: 3884768 - DNA, 25 bp, Homo sapien
aaaatacggcaactggtgtttgcca

SEQ ID NO: 3884769 - DNA, 25 bp, Homo sapien
tagaaaatacggcaactggtgtttg

SEQ ID NO: 3884770 - DNA, 25 bp, Homo sapien
gaaaatacggcaactggtgtttgcc

SEQ ID NO: 3884771 - DNA, 25 bp, Homo sapien
agtagaaaatacggcaactggtgtt

SEQ ID NO: 3884772 - DNA, 25 bp, Homo sapien
tgcatccaactgtgataagcctatg

SEQ ID NO: 3884773 - DNA, 25 bp, Homo sapien
tgtgtgcttgcatccaactgtgata

SEQ ID NO: 3884774 - DNA, 25 bp, Homo sapien
cctatgtatgtcaagttggtgaagg

SEQ ID NO: 3884775 - DNA, 25 bp, Homo sapien
tatgtatgtcaagttggtgaaggcc

SEQ ID NO: 3884776 - DNA, 25 bp, Homo sapien
caatagcctttgtgtgtagtaacgg

SEQ ID NO: 3884777 - DNA, 25 bp, Homo sapien
gaatcgtacatgtcagtcacagggt

SEQ ID NO: 3884778 - DNA, 25 bp, Homo sapien
tccccaagagtcaccgggtactgtg

SEQ ID NO: 3884779 - DNA, 25 bp, Homo sapien
catggtatgtgctcggtcaatagcc

SEQ ID NO: 3884780 - DNA, 25 bp, Homo sapien
tgccatctgtaagtgaaggaactgg

SEQ ID NO: 3884781 - DNA, 25 bp, Homo sapien
tgcaaggggagtgtcaaggctggtc

SEQ ID NO: 3884782 - DNA, 25 bp, Homo sapien
ggagtgtcaaggctggtcagtgatt

SEQ ID NO: 3884783 - DNA, 25 bp, Homo sapien
tgtcaaggctggtcagtgattatgg

SEQ ID NO: 3884784 - DNA, 25 bp, Homo sapien
gagtgtcaaggctggtcagtgatta

SEQ ID NO: 3884785 - DNA, 25 bp, Homo sapien
gaaagggagttctagcatctcacag

SEQ ID NO: 3884786 - DNA, 25 bp, Homo sapien
tccctgtcccatggcctaaatgcct

SEQ ID NO: 3884787 - DNA, 25 bp, Homo sapien
ttctagcatctcacagaccaagtgg

SEQ ID NO: 3884788 - DNA, 25 bp, Homo sapien
agtgaattctgttgaaagggagttc

SEQ ID NO: 3884789 - DNA, 25 bp, Homo sapien
tctgagtagcggaagtctccagggc

SEQ ID NO: 3884790 - DNA, 25 bp, Homo sapien
tcagtcgggagtacaggcagttcct

SEQ ID NO: 3884791 - DNA, 25 bp, Homo sapien
gattccttgggacagcaatgcggcc

SEQ ID NO: 3884792 - DNA, 25 bp, Homo sapien
catcaaaagtgatggactgcccatt

SEQ ID NO: 3884793 - DNA, 25 bp, Homo sapien
aagtcgtggagtgtggcttggagct

SEQ ID NO: 3884794 - DNA, 25 bp, Homo sapien
gtcgtggagtgtggcttggagctcc

SEQ ID NO: 3884795 - DNA, 25 bp, Homo sapien
agtcgtggagtgtggcttggagctc

SEQ ID NO: 3884796 - DNA, 25 bp, Homo sapien
caggccagtgaagactcccacttgc

SEQ ID NO: 3884797 - DNA, 25 bp, Homo sapien
ggcaggccagtgaagactcccactt

SEQ ID NO: 3884798 - DNA, 25 bp, Homo sapien
gggcaggccagtgaagactcccact

SEQ ID NO: 3884799 - DNA, 25 bp, Homo sapien
ggccagtgaagactcccacttgctg

SEQ ID NO: 3884800 - DNA, 25 bp, Homo sapien
tccaggcagcccattattcccagga

SEQ ID NO: 3884801 - DNA, 25 bp, Homo sapien
tggtgtttctccaggcggacccatg

SEQ ID NO: 3884802 - DNA, 25 bp, Homo sapien
tggagggcctctctcgccagcctcc

SEQ ID NO: 3884803 - DNA, 25 bp, Homo sapien
ccattattcccaggaggacatggtg

SEQ ID NO: 3884804 - DNA, 25 bp, Homo sapien
cctgcctggcaggccgtgggatcca

SEQ ID NO: 3884805 - DNA, 25 bp, Homo sapien
gggccagggtctcctttgacaccat

SEQ ID NO: 3884806 - DNA, 25 bp, Homo sapien
ggccgtgggatccaggagtgccggg

SEQ ID NO: 3884807 - DNA, 25 bp, Homo sapien
gccagggtctcctttgacaccatct

SEQ ID NO: 3884808 - DNA, 25 bp, Homo sapien
tccaacacaaacgtccttcacttcg

SEQ ID NO: 3884809 - DNA, 25 bp, Homo sapien
aacacaaacgtccttcacttcgcac

SEQ ID NO: 3884810 - DNA, 25 bp, Homo sapien
gggcttccaacacaaacgtccttca

SEQ ID NO: 3884811 - DNA, 25 bp, Homo sapien
cagggcttccaacacaaacgtcctt

SEQ ID NO: 3884812 - DNA, 25 bp, Homo sapien
ggatggccgtgagcccatctgccac

SEQ ID NO: 3884813 - DNA, 25 bp, Homo sapien
gggatggccgtgagcccatctgcca

SEQ ID NO: 3884814 - DNA, 25 bp, Homo sapien
agggatggccgtgagcccatctgcc

SEQ ID NO: 3884815 - DNA, 25 bp, Homo sapien
tcaggcctccggctggaggttgtgg

SEQ ID NO: 3884816 - DNA, 25 bp, Homo sapien
tggcacctggcatggcctcatgctt

SEQ ID NO: 3884817 - DNA, 25 bp, Homo sapien
acctggcatggcctcatgcttcagg

SEQ ID NO: 3884818 - DNA, 25 bp, Homo sapien
ggcatggcctcatgcttcaggcctc

SEQ ID NO: 3884819 - DNA, 25 bp, Homo sapien
ctcactatgttaccctgggaaactg

SEQ ID NO: 3884820 - DNA, 25 bp, Homo sapien
ctatgttaccctgggaaactggctt

SEQ ID NO: 3884821 - DNA, 25 bp, Homo sapien
taccctgggaaactggcttcacctc

SEQ ID NO: 3884822 - DNA, 25 bp, Homo sapien
catgctctgcagaaaacctgccctg

SEQ ID NO: 3884823 - DNA, 25 bp, Homo sapien
tagaaggaaggatgaggtcactcac

SEQ ID NO: 3884824 - DNA, 25 bp, Homo sapien
ttagaaggaaggatgaggtcactca

SEQ ID NO: 3884825 - DNA, 25 bp, Homo sapien
catctgtccctcatatgcccagtta

SEQ ID NO: 3884826 - DNA, 25 bp, Homo sapien
tccatctgtccctcatatgcccagt

SEQ ID NO: 3884827 - DNA, 25 bp, Homo sapien
ccatctgtccctcatatgcccagtt

SEQ ID NO: 3884828 - DNA, 25 bp, Homo sapien
atctgtccctcatatgcccagttac

SEQ ID NO: 3884829 - DNA, 25 bp, Homo sapien
tcttttcaggctccaagaaatcagc

SEQ ID NO: 3884830 - DNA, 25 bp, Homo sapien
cttcttttcaggctccaagaaatca

SEQ ID NO: 3884831 - DNA, 25 bp, Homo sapien
tttcaggctccaagaaatcagcgac

SEQ ID NO: 3884832 - DNA, 25 bp, Homo sapien
ttttcaggctccaagaaatcagcga

SEQ ID NO: 3884833 - DNA, 25 bp, Homo sapien
gagggtctttgtaggtcatccatgt

SEQ ID NO: 3884834 - DNA, 25 bp, Homo sapien
tgcctgcgatcctcaagctggagaa

SEQ ID NO: 3884835 - DNA, 25 bp, Homo sapien
tggacccttcaaggtgatcatcggg

SEQ ID NO: 3884836 - DNA, 25 bp, Homo sapien
cagtcagtgatgaggtcttccttcc

SEQ ID NO: 3884837 - DNA, 25 bp, Homo sapien
acacacagagcctccagctgcttgg

SEQ ID NO: 3884838 - DNA, 25 bp, Homo sapien
ccacacacagagcctccagctgctt

SEQ ID NO: 3884839 - DNA, 25 bp, Homo sapien
acagagcctccagctgcttgggtct

SEQ ID NO: 3884840 - DNA, 25 bp, Homo sapien
acacagagcctccagctgcttgggt

SEQ ID NO: 3884841 - DNA, 25 bp, Homo sapien
tctgccctagcaggttcagctggag

SEQ ID NO: 3884842 - DNA, 25 bp, Homo sapien
taagtgtcccagtgatatatgaagc

SEQ ID NO: 3884843 - DNA, 25 bp, Homo sapien
caatggtgattatgctaagtgtccc

SEQ ID NO: 3884844 - DNA, 25 bp, Homo sapien
ctttgggtgatgtctggcaacctgc

SEQ ID NO: 3884845 - DNA, 25 bp, Homo sapien
ggagcggaagctcagacaacggacc

SEQ ID NO: 3884846 - DNA, 25 bp, Homo sapien
cattgaggagtttggagctcttcca

SEQ ID NO: 3884847 - DNA, 25 bp, Homo sapien
gctgggcagtgccaatttgtagcat

SEQ ID NO: 3884848 - DNA, 25 bp, Homo sapien
tttgtagcatggagtctttcagctg

SEQ ID NO: 3884849 - DNA, 25 bp, Homo sapien
gaaggtctctggcgctcatgagctg

SEQ ID NO: 3884850 - DNA, 25 bp, Homo sapien
ccatgacagaggcactgcacttcat

SEQ ID NO: 3884851 - DNA, 25 bp, Homo sapien
aggcatgcaacgctataaatttccc

SEQ ID NO: 3884852 - DNA, 25 bp, Homo sapien
aatttccctcttaggttttgatatg

SEQ ID NO: 3884853 - DNA, 25 bp, Homo sapien
tcagatgaaatgttcttcaagtgtc

SEQ ID NO: 3884854 - DNA, 25 bp, Homo sapien
ggtgaatgtatctttacaattgtca

SEQ ID NO: 3884855 - DNA, 25 bp, Homo sapien
tgatttctatagtttggttttctgg

SEQ ID NO: 3884856 - DNA, 25 bp, Homo sapien
gcgatctatcaatactgagagtgaa

SEQ ID NO: 3884857 - DNA, 25 bp, Homo sapien
tgagccgtggtcatttggctcatcc

SEQ ID NO: 3884858 - DNA, 25 bp, Homo sapien
cagttgctgtaggtcagcctcccac

SEQ ID NO: 3884859 - DNA, 25 bp, Homo sapien
ccagttgctgtaggtcagcctccca

SEQ ID NO: 3884860 - DNA, 25 bp, Homo sapien
tccgctcaccgttggtcatgaaaag

SEQ ID NO: 3884861 - DNA, 25 bp, Homo sapien
ccgtcaagtatatgaactggccttc

SEQ ID NO: 3884862 - DNA, 25 bp, Homo sapien
ctggatggccttattctccttggca

SEQ ID NO: 3884863 - DNA, 25 bp, Homo sapien
tttggagaaaggcatccgctcaccg

SEQ ID NO: 3884864 - DNA, 25 bp, Homo sapien
cttcccagacattttccccaaggag

SEQ ID NO: 3884865 - DNA, 25 bp, Homo sapien
tcccagacattttccccaaggagaa

SEQ ID NO: 3884866 - DNA, 25 bp, Homo sapien
ccagacattttccccaaggagaagg

SEQ ID NO: 3884867 - DNA, 25 bp, Homo sapien
cccagacattttccccaaggagaag

SEQ ID NO: 3884868 - DNA, 25 bp, Homo sapien
aggagggccctgcaaacctctgagc

SEQ ID NO: 3884869 - DNA, 25 bp, Homo sapien
cccatgatctcctttttggctcctt

SEQ ID NO: 3884870 - DNA, 25 bp, Homo sapien
ccctgcaaacctctgagcccttgat

SEQ ID NO: 3884871 - DNA, 25 bp, Homo sapien
ctgaattgtccccatgatctccttt

SEQ ID NO: 3884872 - DNA, 25 bp, Homo sapien
tagagaataaggagggttgcatctc

SEQ ID NO: 3884873 - DNA, 25 bp, Homo sapien
agagaataaggagggttgcatctca

SEQ ID NO: 3884874 - DNA, 25 bp, Homo sapien
aataaggagggttgcatctcatgcc

SEQ ID NO: 3884875 - DNA, 25 bp, Homo sapien
gatagagaataaggagggttgcatc

SEQ ID NO: 3884876 - DNA, 25 bp, Homo sapien
tccactgtgtacatctccaagcact

SEQ ID NO: 3884877 - DNA, 25 bp, Homo sapien
ctccaagcacttctcattgccctga

SEQ ID NO: 3884878 - DNA, 25 bp, Homo sapien
tccaagcacttctcattgccctgac

SEQ ID NO: 3884879 - DNA, 25 bp, Homo sapien
ttccactgtgtacatctccaagcac

SEQ ID NO: 3884880 - DNA, 25 bp, Homo sapien
aaatcttgcaatggcctcgttttcc

SEQ ID NO: 3884881 - DNA, 25 bp, Homo sapien
ggcaccggttcgtgtagtccacagg

SEQ ID NO: 3884882 - DNA, 25 bp, Homo sapien
caactgcctgtttgtgaagaagacc

SEQ ID NO: 3884883 - DNA, 25 bp, Homo sapien
cctcatctaggtagcagaagtctcc

SEQ ID NO: 3884884 - DNA, 25 bp, Homo sapien
ccggtatggagccctgaagactgag

SEQ ID NO: 3884885 - DNA, 25 bp, Homo sapien
ggtatggagccctgaagactgaggg

SEQ ID NO: 3884886 - DNA, 25 bp, Homo sapien
ctgccggtatggagccctgaagact

SEQ ID NO: 3884887 - DNA, 25 bp, Homo sapien
tgccggtatggagccctgaagactg

SEQ ID NO: 3884888 - DNA, 25 bp, Homo sapien
tgatcactttgtctctaagccacct

SEQ ID NO: 3884889 - DNA, 25 bp, Homo sapien
aggcctctgatcactttgtctctaa

SEQ ID NO: 3884890 - DNA, 25 bp, Homo sapien
ctctgatcactttgtctctaagcca

SEQ ID NO: 3884891 - DNA, 25 bp, Homo sapien
gatcactttgtctctaagccacctc

SEQ ID NO: 3884892 - DNA, 25 bp, Homo sapien
aagacagccagcctaggcctctagg

SEQ ID NO: 3884893 - DNA, 25 bp, Homo sapien
tagggtgacctagagccgccttcag

SEQ ID NO: 3884894 - DNA, 25 bp, Homo sapien
gtggccaagccaaccccatgattga

SEQ ID NO: 3884895 - DNA, 25 bp, Homo sapien
ccgccttcagatgtgacccgagtaa

SEQ ID NO: 3884896 - DNA, 25 bp, Homo sapien
acacagaggctattgactgagcacc

SEQ ID NO: 3884897 - DNA, 25 bp, Homo sapien
gtgggcaaggtaatcagtgacagtt

SEQ ID NO: 3884898 - DNA, 25 bp, Homo sapien
catttgccaagaaccttgacaagca

SEQ ID NO: 3884899 - DNA, 25 bp, Homo sapien
cagaactgttactatacacagaggc

SEQ ID NO: 3884900 - DNA, 25 bp, Homo sapien
tattccatatatgatgaggccctat

SEQ ID NO: 3884901 - DNA, 25 bp, Homo sapien
tcacatggtggagtcgtcatatggt

SEQ ID NO: 3884902 - DNA, 25 bp, Homo sapien
gaccatagcactctcacattagatg

SEQ ID NO: 3884903 - DNA, 25 bp, Homo sapien
gacataatcaccttccagagacctt

SEQ ID NO: 3884904 - DNA, 25 bp, Homo sapien
catgagaattcattcatatcacaag

SEQ ID NO: 3884905 - DNA, 25 bp, Homo sapien
acatgagaattcattcatatcacaa

SEQ ID NO: 3884906 - DNA, 25 bp, Homo sapien
tgagaattcattcatatcacaagaa

SEQ ID NO: 3884907 - DNA, 25 bp, Homo sapien
atgagaattcattcatatcacaaga

SEQ ID NO: 3884908 - DNA, 25 bp, Homo sapien
tgtgaacacccaatagtcaaaggac

SEQ ID NO: 3884909 - DNA, 25 bp, Homo sapien
caaaagccattgctagcacactggt

SEQ ID NO: 3884910 - DNA, 25 bp, Homo sapien
ttttcatagataaagagcatcccta

SEQ ID NO: 3884911 - DNA, 25 bp, Homo sapien
gataaaaggcctttatcttccagaa

SEQ ID NO: 3884912 - DNA, 25 bp, Homo sapien
gcagaaattattacttgaaaggaag

SEQ ID NO: 3884913 - DNA, 25 bp, Homo sapien
gaaaggaagatgtatccatcatcca

SEQ ID NO: 3884914 - DNA, 25 bp, Homo sapien
tagaactaaaaggagcaatagccgc

SEQ ID NO: 3884915 - DNA, 25 bp, Homo sapien
tattcactcacacacagttaacaca

SEQ ID NO: 3884916 - DNA, 25 bp, Homo sapien
taatacagaggacacttctatgacc

SEQ ID NO: 3884917 - DNA, 25 bp, Homo sapien
gctgcaaatctatagcaagactttg

SEQ ID NO: 3884918 - DNA, 25 bp, Homo sapien
tcatatagaagccaatgtgtaacat

SEQ ID NO: 3884919 - DNA, 25 bp, Homo sapien
gcttaggcaaacctcagcttggaga

SEQ ID NO: 3884920 - DNA, 25 bp, Homo sapien
aaatgcaaactcagcagctctcttg

SEQ ID NO: 3884921 - DNA, 25 bp, Homo sapien
ggtcctctctacctggtcgtgtcct

SEQ ID NO: 3884922 - DNA, 25 bp, Homo sapien
gactagtgggtaggggtcctctcta

SEQ ID NO: 3884923 - DNA, 25 bp, Homo sapien
cagcctgagtgtggggagcgcaagc

SEQ ID NO: 3884924 - DNA, 25 bp, Homo sapien
tccagtggctaatccaagcaggtgt

SEQ ID NO: 3884925 - DNA, 25 bp, Homo sapien
tactgttggaagatagacttggctc

SEQ ID NO: 3884926 - DNA, 25 bp, Homo sapien
cagggttgcttcagctatggagagc

SEQ ID NO: 3884927 - DNA, 25 bp, Homo sapien
aaatggattcaagctgaacagaggc

SEQ ID NO: 3884928 - DNA, 25 bp, Homo sapien
cagctccctgtgtctgaggtttaaa

SEQ ID NO: 3884929 - DNA, 25 bp, Homo sapien
gattactgcagaatccaatggactg

SEQ ID NO: 3884930 - DNA, 25 bp, Homo sapien
tggactgaagccataagcattcaca

SEQ ID NO: 3884931 - DNA, 25 bp, Homo sapien
tacagacactgtaatgggtgcccca

SEQ ID NO: 3884932 - DNA, 25 bp, Homo sapien
ccaggagcatatgttcggtattgac

SEQ ID NO: 3884933 - DNA, 25 bp, Homo sapien
gggatttgctccctccaacaggaca

SEQ ID NO: 3884934 - DNA, 25 bp, Homo sapien
tacacggcatattggtggctccaaa

SEQ ID NO: 3884935 - DNA, 25 bp, Homo sapien
aaactccacatatgctctgcccagg

SEQ ID NO: 3884936 - DNA, 25 bp, Homo sapien
caatagcccatgtatgaatcactct

SEQ ID NO: 3884937 - DNA, 25 bp, Homo sapien
ttcagttttgttgtatgtagaccca

SEQ ID NO: 3884938 - DNA, 25 bp, Homo sapien
tcatgttgcctcaatagcccatgta

SEQ ID NO: 3884939 - DNA, 25 bp, Homo sapien
tttgttgtatgtagacccatctttc

SEQ ID NO: 3884940 - DNA, 25 bp, Homo sapien
tagcacaaatcatttcaggtaagga

SEQ ID NO: 3884941 - DNA, 25 bp, Homo sapien
gagattaagaaagtttagccaggac

SEQ ID NO: 3884942 - DNA, 25 bp, Homo sapien
aaggtggcgcagtagttgttattga

SEQ ID NO: 3884943 - DNA, 25 bp, Homo sapien
tagccaggacaagttatatagcaca

SEQ ID NO: 3884944 - DNA, 25 bp, Homo sapien
agaaatgcaaggaagggattactac

SEQ ID NO: 3884945 - DNA, 25 bp, Homo sapien
gaaatgcaaggaagggattactacc

SEQ ID NO: 3884946 - DNA, 25 bp, Homo sapien
tgtgtcacatgatcagggaggaaga

SEQ ID NO: 3884947 - DNA, 25 bp, Homo sapien
tatcaaagggtcttcatcatgtgtc

SEQ ID NO: 3884948 - DNA, 25 bp, Homo sapien
ttaacaataagatctcacaggaagt

SEQ ID NO: 3884949 - DNA, 25 bp, Homo sapien
tcaggaagcctccatcgtggtggaa

SEQ ID NO: 3884950 - DNA, 25 bp, Homo sapien
gaatagaatcgagaggccagaacta

SEQ ID NO: 3884951 - DNA, 25 bp, Homo sapien
gccagaactaacactcacatctatg

SEQ ID NO: 3884952 - DNA, 25 bp, Homo sapien
cagcaagggttccaggatcactcaa

SEQ ID NO: 3884953 - DNA, 25 bp, Homo sapien
tatgggtaattaattttcagcaagg

SEQ ID NO: 3884954 - DNA, 25 bp, Homo sapien
agccaatgtgtgtggagatcacatg

SEQ ID NO: 3884955 - DNA, 25 bp, Homo sapien
caagccaatgtgtgtggagatcaca

SEQ ID NO: 3884956 - DNA, 25 bp, Homo sapien
aagggaaggcaagccaatgtgtgtg

SEQ ID NO: 3884957 - DNA, 25 bp, Homo sapien
aagccaatgtgtgtggagatcacat

SEQ ID NO: 3884958 - DNA, 25 bp, Homo sapien
agctataatcaggccactgtacaac

SEQ ID NO: 3884959 - DNA, 25 bp, Homo sapien
cagcccagaatttcgaggctacagt

SEQ ID NO: 3884960 - DNA, 25 bp, Homo sapien
ctataatcaggccactgtacaacag

SEQ ID NO: 3884961 - DNA, 25 bp, Homo sapien
tcatttcagcccagaatttcgaggc

SEQ ID NO: 3884962 - DNA, 25 bp, Homo sapien
cagaaaacagggtctatgaggtgaa

SEQ ID NO: 3884963 - DNA, 25 bp, Homo sapien
catacagtggtgatgtaaatatgca

SEQ ID NO: 3884964 - DNA, 25 bp, Homo sapien
tcaggaatgagtcagagcagtattg

SEQ ID NO: 3884965 - DNA, 25 bp, Homo sapien
tacaatgcacttgccaaatacaagg

SEQ ID NO: 3884966 - DNA, 25 bp, Homo sapien
tttaagagataatatctcagtctgt

SEQ ID NO: 3884967 - DNA, 25 bp, Homo sapien
ctcccaaagtaagcccagccatttt

SEQ ID NO: 3884968 - DNA, 25 bp, Homo sapien
ttttttaagagataatatctcagtc

SEQ ID NO: 3884969 - DNA, 25 bp, Homo sapien
gcctcccaaagtaagcccagccatt

SEQ ID NO: 3884970 - DNA, 25 bp, Homo sapien
tcagtaaccatcaacccatggccaa

SEQ ID NO: 3884971 - DNA, 25 bp, Homo sapien
cattccctacactcacacattattt

SEQ ID NO: 3884972 - DNA, 25 bp, Homo sapien
atggccaatcctgtccctactgcaa

SEQ ID NO: 3884973 - DNA, 25 bp, Homo sapien
aacctcacatgccatcgctcagcct

SEQ ID NO: 3884974 - DNA, 25 bp, Homo sapien
ttttaatagctatgtctccagttcc

SEQ ID NO: 3884975 - DNA, 25 bp, Homo sapien
ccagtcttggtcatagcaggtttta

SEQ ID NO: 3884976 - DNA, 25 bp, Homo sapien
ggtcatagcaggttttagataaata

SEQ ID NO: 3884977 - DNA, 25 bp, Homo sapien
tttaatagctatgtctccagttcct

SEQ ID NO: 3884978 - DNA, 25 bp, Homo sapien
caagcagtgactcaatgtagataac

SEQ ID NO: 3884979 - DNA, 25 bp, Homo sapien
taacataattggaaactgggagaaa

SEQ ID NO: 3884980 - DNA, 25 bp, Homo sapien
cagggactaacactacaaatatgga

SEQ ID NO: 3884981 - DNA, 25 bp, Homo sapien
gatgtggcaacaactcgtgctggac

SEQ ID NO: 3884982 - DNA, 25 bp, Homo sapien
ccctcttcccaacccgctgacaggc

SEQ ID NO: 3884983 - DNA, 25 bp, Homo sapien
tatatttacggatcactttttcaac

SEQ ID NO: 3884984 - DNA, 25 bp, Homo sapien
ttatgagtgagaaacatgaggtgct

SEQ ID NO: 3884985 - DNA, 25 bp, Homo sapien
cttgactttgaaaagtgattatatg

SEQ ID NO: 3884986 - DNA, 25 bp, Homo sapien
tcataagctggaatgcctgggccca

SEQ ID NO: 3884987 - DNA, 25 bp, Homo sapien
cactatgcccaaccaaacagttcct

SEQ ID NO: 3884988 - DNA, 25 bp, Homo sapien
agattcttgttatgttggcaagact

SEQ ID NO: 3884989 - DNA, 25 bp, Homo sapien
taactcactgaaatcataagctgga

SEQ ID NO: 3884990 - DNA, 25 bp, Homo sapien
ggaacttgctagaggcttgttgatg

SEQ ID NO: 3884991 - DNA, 25 bp, Homo sapien
gttggaatggcttcgaggactcaga

SEQ ID NO: 3884992 - DNA, 25 bp, Homo sapien
gaatggcttcgaggactcagaagaa

SEQ ID NO: 3884993 - DNA, 25 bp, Homo sapien
cttgctagaggcttgttgatggctt

SEQ ID NO: 3884994 - DNA, 25 bp, Homo sapien
gctttcttgtaggattgttgggaga

SEQ ID NO: 3884995 - DNA, 25 bp, Homo sapien
ttgctggtactgagtgactttgggc

SEQ ID NO: 3884996 - DNA, 25 bp, Homo sapien
tttgctggtactgagtgactttggg

SEQ ID NO: 3884997 - DNA, 25 bp, Homo sapien
tattagctttcttgtaggattgttg

SEQ ID NO: 3884998 - DNA, 25 bp, Homo sapien
agtatagttctaatacttaagaagc

SEQ ID NO: 3884999 - DNA, 25 bp, Homo sapien
aaggaaaccctcatatgttgttgat

SEQ ID NO: 3885000 - DNA, 25 bp, Homo sapien
gaagcaaaataacaccagggcagta

SEQ ID NO: 3885001 - DNA, 25 bp, Homo sapien
tagaaaacaacaatgtgtcagcttc

SEQ ID NO: 3885002 - DNA, 25 bp, Homo sapien
tgtatttccattcccttcagcctgg

SEQ ID NO: 3885003 - DNA, 25 bp, Homo sapien
caagctatttacatggctggcttct

SEQ ID NO: 3885004 - DNA, 25 bp, Homo sapien
tatcagtttccggaagacacccatc

SEQ ID NO: 3885005 - DNA, 25 bp, Homo sapien
tatcagcatatctgagccactctga

SEQ ID NO: 3885006 - DNA, 25 bp, Homo sapien
agagagaacccctggcttgagccca

SEQ ID NO: 3885007 - DNA, 25 bp, Homo sapien
ttgtggcccattgaagaccccttgc

SEQ ID NO: 3885008 - DNA, 25 bp, Homo sapien
tttatacctccaacaagctgcaatc

SEQ ID NO: 3885009 - DNA, 25 bp, Homo sapien
gtctggtacatgttgaattgtcaat

SEQ ID NO: 3885010 - DNA, 25 bp, Homo sapien
tatggcatctactctaaaggcaact

SEQ ID NO: 3885011 - DNA, 25 bp, Homo sapien
ggacctgaactcaacattggagcaa

SEQ ID NO: 3885012 - DNA, 25 bp, Homo sapien
taatacgaaacacactctctgaccg

SEQ ID NO: 3885013 - DNA, 25 bp, Homo sapien
gaccgcagcgcaataaaaacagaag

SEQ ID NO: 3885014 - DNA, 25 bp, Homo sapien
cactccctgttccagtgggtagaca

SEQ ID NO: 3885015 - DNA, 25 bp, Homo sapien
gcagcatgagtgattaccgttaggg

SEQ ID NO: 3885016 - DNA, 25 bp, Homo sapien
tagctttcttcctgcacttaaaggg

SEQ ID NO: 3885017 - DNA, 25 bp, Homo sapien
tataagccaacatcctcggcaagcc

SEQ ID NO: 3885018 - DNA, 25 bp, Homo sapien
gtatgtgaacgactgattgtactgg

SEQ ID NO: 3885019 - DNA, 25 bp, Homo sapien
tagtggtatgtgaacgactgattgt

SEQ ID NO: 3885020 - DNA, 25 bp, Homo sapien
tcattgtagttagtggtatgtgaac

SEQ ID NO: 3885021 - DNA, 25 bp, Homo sapien
tagttagtggtatgtgaacgactga

SEQ ID NO: 3885022 - DNA, 25 bp, Homo sapien
gagcataccttacttcatgatgagg

SEQ ID NO: 3885023 - DNA, 25 bp, Homo sapien
cagtgtataagcgttacaaaagatt

SEQ ID NO: 3885024 - DNA, 25 bp, Homo sapien
caaggaattgctacgctacttttca

SEQ ID NO: 3885025 - DNA, 25 bp, Homo sapien
gcaggatgatttacattccactggg

SEQ ID NO: 3885026 - DNA, 25 bp, Homo sapien
aatttactagtaggagcatgtatcc

SEQ ID NO: 3885027 - DNA, 25 bp, Homo sapien
gattaagtaagttggtgcacctggc

SEQ ID NO: 3885028 - DNA, 25 bp, Homo sapien
gagaccactgtgagatgatgaagct

SEQ ID NO: 3885029 - DNA, 25 bp, Homo sapien
tggaacaattctgtgctaactttgg

SEQ ID NO: 3885030 - DNA, 25 bp, Homo sapien
ccaggcattgtatgtagataagcaa

SEQ ID NO: 3885031 - DNA, 25 bp, Homo sapien
aactcttcagccagcggaatgcagg

SEQ ID NO: 3885032 - DNA, 25 bp, Homo sapien
gcagtacgctaccatgaaaccagtt

SEQ ID NO: 3885033 - DNA, 25 bp, Homo sapien
gacaagtttgggacactcagagtta

SEQ ID NO: 3885034 - DNA, 25 bp, Homo sapien
tcctaaagcccagctgaggtatcat

SEQ ID NO: 3885035 - DNA, 25 bp, Homo sapien
gcaaccccgaagcaggcagtctgtt

SEQ ID NO: 3885036 - DNA, 25 bp, Homo sapien
caatgtgagttttaggcaaccccga

SEQ ID NO: 3885037 - DNA, 25 bp, Homo sapien
gctagaaacacgctgagctcatgga

SEQ ID NO: 3885038 - DNA, 25 bp, Homo sapien
tgagaagctccggaaggtccaacac

SEQ ID NO: 3885039 - DNA, 25 bp, Homo sapien
agaagctccggaaggtccaacacgt

SEQ ID NO: 3885040 - DNA, 25 bp, Homo sapien
gagaagctccggaaggtccaacacg

SEQ ID NO: 3885041 - DNA, 25 bp, Homo sapien
aaggaagcacatcccttatttcatc

SEQ ID NO: 3885042 - DNA, 25 bp, Homo sapien
tccccaatgccagatgttaagtctg

SEQ ID NO: 3885043 - DNA, 25 bp, Homo sapien
tgggtttaaggattccccaatgcca

SEQ ID NO: 3885044 - DNA, 25 bp, Homo sapien
catccacagaaaatttcctgccagc

SEQ ID NO: 3885045 - DNA, 25 bp, Homo sapien
tacggactagcatcatagcatcacc

SEQ ID NO: 3885046 - DNA, 25 bp, Homo sapien
ttagctggtctacggactagcatca

SEQ ID NO: 3885047 - DNA, 25 bp, Homo sapien
gctacttagctggtctacggactag

SEQ ID NO: 3885048 - DNA, 25 bp, Homo sapien
ggtctacggactagcatcatagcat

SEQ ID NO: 3885049 - DNA, 25 bp, Homo sapien
ggagaaacgactgtgccctcatgta

SEQ ID NO: 3885050 - DNA, 25 bp, Homo sapien
agagttaggagaaacgactgtgccc

SEQ ID NO: 3885051 - DNA, 25 bp, Homo sapien
ttccagagttaggagaaacgactgt

SEQ ID NO: 3885052 - DNA, 25 bp, Homo sapien
gttaggagaaacgactgtgccctca

SEQ ID NO: 3885053 - DNA, 25 bp, Homo sapien
ttccttgatgaactcgacaccgagt

SEQ ID NO: 3885054 - DNA, 25 bp, Homo sapien
actcgacaccgagtggtttcttcca

SEQ ID NO: 3885055 - DNA, 25 bp, Homo sapien
ccgagtggtttcttccaatagctaa

SEQ ID NO: 3885056 - DNA, 25 bp, Homo sapien
ccaatagctaaataatacctgatga

SEQ ID NO: 3885057 - DNA, 25 bp, Homo sapien
tttctaactattgtttgtactcatc

SEQ ID NO: 3885058 - DNA, 25 bp, Homo sapien
attcatcctttctaactattgtttg

SEQ ID NO: 3885059 - DNA, 25 bp, Homo sapien
tgtactcatcaaccacacccacgta

SEQ ID NO: 3885060 - DNA, 25 bp, Homo sapien
ctgtgtatttacaacctttcctttg

SEQ ID NO: 3885061 - DNA, 25 bp, Homo sapien
gtgaaccaagatcatgccactgcat

SEQ ID NO: 3885062 - DNA, 25 bp, Homo sapien
ttgaaccagaaaggcagaggtttca

SEQ ID NO: 3885063 - DNA, 25 bp, Homo sapien
agtctgggtgacagagagactccat

SEQ ID NO: 3885064 - DNA, 25 bp, Homo sapien
tccagtctgggtgacagagagactc

SEQ ID NO: 3885065 - DNA, 25 bp, Homo sapien
tatttggatatgttcgagtaagcta

SEQ ID NO: 3885066 - DNA, 25 bp, Homo sapien
gaaacaactcatgtccaaccagtcc

SEQ ID NO: 3885067 - DNA, 25 bp, Homo sapien
cattaggtaagttgtggtacatcca

SEQ ID NO: 3885068 - DNA, 25 bp, Homo sapien
tccaactcaatgattaccagtaggt

SEQ ID NO: 3885069 - DNA, 25 bp, Homo sapien
cagtgacaaatttataggttctgca

SEQ ID NO: 3885070 - DNA, 25 bp, Homo sapien
taacattataacatcaatcacagtg

SEQ ID NO: 3885071 - DNA, 25 bp, Homo sapien
gaaagaagatctaggtgtaacatta

SEQ ID NO: 3885072 - DNA, 25 bp, Homo sapien
caaatttataggttctgcaagttcc

SEQ ID NO: 3885073 - DNA, 25 bp, Homo sapien
aggtttctgctgcttacaagctgac

SEQ ID NO: 3885074 - DNA, 25 bp, Homo sapien
gctgcttacaagctgacgtatcttg

SEQ ID NO: 3885075 - DNA, 25 bp, Homo sapien
caagctgacgtatcttgttgaatac

SEQ ID NO: 3885076 - DNA, 25 bp, Homo sapien
tgacgtatcttgttgaatacagaga

SEQ ID NO: 3885077 - DNA, 25 bp, Homo sapien
tgtaatttgtctcaacatgtgtgtc

SEQ ID NO: 3885078 - DNA, 25 bp, Homo sapien
agcatgtaatttgtctcaacatgtg

SEQ ID NO: 3885079 - DNA, 25 bp, Homo sapien
taatttgtctcaacatgtgtgtcct

SEQ ID NO: 3885080 - DNA, 25 bp, Homo sapien
tttgtctcaacatgtgtgtcctttt

SEQ ID NO: 3885081 - DNA, 25 bp, Homo sapien
tagattaatgccctgccatggtgag

SEQ ID NO: 3885082 - DNA, 25 bp, Homo sapien
catgcctcccgatctgtactctttg

SEQ ID NO: 3885083 - DNA, 25 bp, Homo sapien
tacagcctatagaattgtgacctaa

SEQ ID NO: 3885084 - DNA, 25 bp, Homo sapien
tacctgatgtagatactggtgctga

SEQ ID NO: 3885085 - DNA, 25 bp, Homo sapien
agtgagtccagttaaggtgcccttc

SEQ ID NO: 3885086 - DNA, 25 bp, Homo sapien
tactgtgcagtctactatgggagga

SEQ ID NO: 3885087 - DNA, 25 bp, Homo sapien
cccagagatttacaaagaaggccaa

SEQ ID NO: 3885088 - DNA, 25 bp, Homo sapien
tgtagaatatgtgccccaaacggcc

SEQ ID NO: 3885089 - DNA, 25 bp, Homo sapien
gattgttgataaactcagacaactt

SEQ ID NO: 3885090 - DNA, 25 bp, Homo sapien
ttatttctactgaacacaatgtcta

SEQ ID NO: 3885091 - DNA, 25 bp, Homo sapien
ttacattgttactcttaaagtcttg

SEQ ID NO: 3885092 - DNA, 25 bp, Homo sapien
aaagtcttgtcattgattgtctcaa

SEQ ID NO: 3885093 - DNA, 25 bp, Homo sapien
tgtggcttttggctagacaaagatt

SEQ ID NO: 3885094 - DNA, 25 bp, Homo sapien
tggcttttggctagacaaagatttc

SEQ ID NO: 3885095 - DNA, 25 bp, Homo sapien
gtggcttttggctagacaaagattt

SEQ ID NO: 3885096 - DNA, 25 bp, Homo sapien
ttcttagatgtggcccaaaagaaca

SEQ ID NO: 3885097 - DNA, 25 bp, Homo sapien
tgtaaggaaaactgcccactcaaga

SEQ ID NO: 3885098 - DNA, 25 bp, Homo sapien
gagctgtctgaataccacagtctta

SEQ ID NO: 3885099 - DNA, 25 bp, Homo sapien
cactcaagaataccttctatgagag

SEQ ID NO: 3885100 - DNA, 25 bp, Homo sapien
taccttgcattgagaagcctagagc

SEQ ID NO: 3885101 - DNA, 25 bp, Homo sapien
tccagccaccgcacccggccgtaaa

SEQ ID NO: 3885102 - DNA, 25 bp, Homo sapien
aaagaattaagagagtttttcagag

SEQ ID NO: 3885103 - DNA, 25 bp, Homo sapien
attaagagagtttttcagagtagtt

SEQ ID NO: 3885104 - DNA, 25 bp, Homo sapien
ctccagccaccgcacccggccgtaa

SEQ ID NO: 3885105 - DNA, 25 bp, Homo sapien
taaaattatgtaggatggttatatt

SEQ ID NO: 3885106 - DNA, 25 bp, Homo sapien
tttattcaacgaactctgattttta

SEQ ID NO: 3885107 - DNA, 25 bp, Homo sapien
aattatgtaggatggttatattgtg

SEQ ID NO: 3885108 - DNA, 25 bp, Homo sapien
aaaattatgtaggatggttatattg

SEQ ID NO: 3885109 - DNA, 25 bp, Homo sapien
gacttatctgtggaaatatgataga

SEQ ID NO: 3885110 - DNA, 25 bp, Homo sapien
ccactttttccatacagtacacaca

SEQ ID NO: 3885111 - DNA, 25 bp, Homo sapien
tgcacttagatgaggtaattttttc

SEQ ID NO: 3885112 - DNA, 25 bp, Homo sapien
ttctgtgaaagtacaatagaacaca

SEQ ID NO: 3885113 - DNA, 25 bp, Homo sapien
ctgaaaagtgtcttgtctgttaatg

SEQ ID NO: 3885114 - DNA, 25 bp, Homo sapien
tgtcttgtctgttaatgtcatatga

SEQ ID NO: 3885115 - DNA, 25 bp, Homo sapien
agtgtcttgtctgttaatgtcatat

SEQ ID NO: 3885116 - DNA, 25 bp, Homo sapien
tcttgtctgttaatgtcatatgagc

SEQ ID NO: 3885117 - DNA, 25 bp, Homo sapien
tactgatatggtacaaacacatgac

SEQ ID NO: 3885118 - DNA, 25 bp, Homo sapien
gagtatacccctatcagagcactgt

SEQ ID NO: 3885119 - DNA, 25 bp, Homo sapien
tgatccaggagagtatgaatacaac

SEQ ID NO: 3885120 - DNA, 25 bp, Homo sapien
caactggattctaagaatactgggc

SEQ ID NO: 3885121 - DNA, 25 bp, Homo sapien
cagaactaaagtacgagagggaatt

SEQ ID NO: 3885122 - DNA, 25 bp, Homo sapien
tgtggtggtagaagaatgctataaa

SEQ ID NO: 3885123 - DNA, 25 bp, Homo sapien
gtacgagagggaatttttcacagga

SEQ ID NO: 3885124 - DNA, 25 bp, Homo sapien
tttggatccacagaactaaagtacg

SEQ ID NO: 3885125 - DNA, 25 bp, Homo sapien
gagatatatttctccgcagatcaat

SEQ ID NO: 3885126 - DNA, 25 bp, Homo sapien
atatttctccgcagatcaatatcta

SEQ ID NO: 3885127 - DNA, 25 bp, Homo sapien
agatatatttctccgcagatcaata

SEQ ID NO: 3885128 - DNA, 25 bp, Homo sapien
agagatatatttctccgcagatcaa

SEQ ID NO: 3885129 - DNA, 25 bp, Homo sapien
ccagtggattcaacagagcatctgc

SEQ ID NO: 3885130 - DNA, 25 bp, Homo sapien
agttgtgtcacactgaggatttaag

SEQ ID NO: 3885131 - DNA, 25 bp, Homo sapien
tgcagtagaaggactgagttgtgtc

SEQ ID NO: 3885132 - DNA, 25 bp, Homo sapien
tgctgcagtagaaggactgagttgt

SEQ ID NO: 3885133 - DNA, 25 bp, Homo sapien
tgagttgtgtcacactgaggattta

SEQ ID NO: 3885134 - DNA, 25 bp, Homo sapien
ttccccaaactaactctttctctga

SEQ ID NO: 3885135 - DNA, 25 bp, Homo sapien
cttcaatgactaagattgtggtgga

SEQ ID NO: 3885136 - DNA, 25 bp, Homo sapien
tgctagcaatcatctgctagtgatt

SEQ ID NO: 3885137 - DNA, 25 bp, Homo sapien
ggttcattgtaatagtaacaccttg

SEQ ID NO: 3885138 - DNA, 25 bp, Homo sapien
aggtcacatccattagtgaagtcaa

SEQ ID NO: 3885139 - DNA, 25 bp, Homo sapien
aaccaggtcacatccattagtgaag

SEQ ID NO: 3885140 - DNA, 25 bp, Homo sapien
gtcacatccattagtgaagtcaatg

SEQ ID NO: 3885141 - DNA, 25 bp, Homo sapien
ccaaccaggtcacatccattagtga

SEQ ID NO: 3885142 - DNA, 25 bp, Homo sapien
attcaaacctgggtcactgatagta

SEQ ID NO: 3885143 - DNA, 25 bp, Homo sapien
caaacctgggtcactgatagtatca

SEQ ID NO: 3885144 - DNA, 25 bp, Homo sapien
aacctgggtcactgatagtatcatt

SEQ ID NO: 3885145 - DNA, 25 bp, Homo sapien
acattcaaacctgggtcactgatag

SEQ ID NO: 3885146 - DNA, 25 bp, Homo sapien
cttagggctggaacaccagtaaagc

SEQ ID NO: 3885147 - DNA, 25 bp, Homo sapien
tgacagcagcaggaatatggttttg

SEQ ID NO: 3885148 - DNA, 25 bp, Homo sapien
tctcagtgcatcataactgacagca

SEQ ID NO: 3885149 - DNA, 25 bp, Homo sapien
gctggaacaccagtaaagcttctct

SEQ ID NO: 3885150 - DNA, 25 bp, Homo sapien
attaagtcttgtagggtgaatacat

SEQ ID NO: 3885151 - DNA, 25 bp, Homo sapien
tcttgtagggtgaatacatctttac

SEQ ID NO: 3885152 - DNA, 25 bp, Homo sapien
aagtcttgtagggtgaatacatctt

SEQ ID NO: 3885153 - DNA, 25 bp, Homo sapien
acatctttacttccagttttcatcc

SEQ ID NO: 3885154 - DNA, 25 bp, Homo sapien
gagaatgaataacctctaccctgtg

SEQ ID NO: 3885155 - DNA, 25 bp, Homo sapien
ggaaagcatgcagtaaaaacctagc

SEQ ID NO: 3885156 - DNA, 25 bp, Homo sapien
gaagacactaaacctgaacactaag

SEQ ID NO: 3885157 - DNA, 25 bp, Homo sapien
gagaataccttggagtctaacacag

SEQ ID NO: 3885158 - DNA, 25 bp, Homo sapien
tggcccagacgcggctggggcggac

SEQ ID NO: 3885159 - DNA, 25 bp, Homo sapien
gcccagacgcggctggggcggacgg

SEQ ID NO: 3885160 - DNA, 25 bp, Homo sapien
cccagacgcggctggggcggacggg

SEQ ID NO: 3885161 - DNA, 25 bp, Homo sapien
ccagacgcggctggggcggacggga

SEQ ID NO: 3885162 - DNA, 25 bp, Homo sapien
gagagaagctggcctgcgggcgggc

SEQ ID NO: 3885163 - DNA, 25 bp, Homo sapien
ccgagagaagctggcctgcgggcgg

SEQ ID NO: 3885164 - DNA, 25 bp, Homo sapien
gagaagctggcctgcgggcgggccg

SEQ ID NO: 3885165 - DNA, 25 bp, Homo sapien
cccgagagaagctggcctgcgggcg

SEQ ID NO: 3885166 - DNA, 25 bp, Homo sapien
ctagaggtattccccgggcggctgg

SEQ ID NO: 3885167 - DNA, 25 bp, Homo sapien
tagaggtattccccgggcggctgga

SEQ ID NO: 3885168 - DNA, 25 bp, Homo sapien
ctggaggactgagtcgagccgggac

SEQ ID NO: 3885169 - DNA, 25 bp, Homo sapien
agaggtattccccgggcggctggag

SEQ ID NO: 3885170 - DNA, 25 bp, Homo sapien
agtcctccggtggaccacactcctt

SEQ ID NO: 3885171 - DNA, 25 bp, Homo sapien
gggagtcctccggtggaccacactc

SEQ ID NO: 3885172 - DNA, 25 bp, Homo sapien
atgtagggagtcctccggtggacca

SEQ ID NO: 3885173 - DNA, 25 bp, Homo sapien
tagggagtcctccggtggaccacac

SEQ ID NO: 3885174 - DNA, 25 bp, Homo sapien
tcgtgggaccgagtttcaggcagct

SEQ ID NO: 3885175 - DNA, 25 bp, Homo sapien
tagcgagccgcggaaaccatagaga

SEQ ID NO: 3885176 - DNA, 25 bp, Homo sapien
acgtggcctccatccgtgcgcttta

SEQ ID NO: 3885177 - DNA, 25 bp, Homo sapien
accatagagatcagggctcagccgg

SEQ ID NO: 3885178 - DNA, 25 bp, Homo sapien
gcagagcccgtcgggagtcgtagtc

SEQ ID NO: 3885179 - DNA, 25 bp, Homo sapien
cagagcccgtcgggagtcgtagtcc

SEQ ID NO: 3885180 - DNA, 25 bp, Homo sapien
tcgcagagcccgtcgggagtcgtag

SEQ ID NO: 3885181 - DNA, 25 bp, Homo sapien
tcagcggaatacctactgtgcggga

SEQ ID NO: 3885182 - DNA, 25 bp, Homo sapien
tgtgcgggattattcaacaagccga

SEQ ID NO: 3885183 - DNA, 25 bp, Homo sapien
gctaaaataaactgctaggccctga

SEQ ID NO: 3885184 - DNA, 25 bp, Homo sapien
ccagctagagttggcttcagcggaa

SEQ ID NO: 3885185 - DNA, 25 bp, Homo sapien
ggtgtttaatcgtgtcctagccact

SEQ ID NO: 3885186 - DNA, 25 bp, Homo sapien
tattttactgtaactgggccacagt

SEQ ID NO: 3885187 - DNA, 25 bp, Homo sapien
ggccatacagccaaggatttaggat

SEQ ID NO: 3885188 - DNA, 25 bp, Homo sapien
taggcttgctgtaataatcgatggg

SEQ ID NO: 3885189 - DNA, 25 bp, Homo sapien
gccatcaaccgccgcaactggcgct

SEQ ID NO: 3885190 - DNA, 25 bp, Homo sapien
tccctgccatcaaccgccgcaactg

SEQ ID NO: 3885191 - DNA, 25 bp, Homo sapien
gccgttgggtcaccgccctttgctc

SEQ ID NO: 3885192 - DNA, 25 bp, Homo sapien
gccggcctcgcgctggaacctcgcc

SEQ ID NO: 3885193 - DNA, 25 bp, Homo sapien
gcaacgatcactcctaattttcggt

SEQ ID NO: 3885194 - DNA, 25 bp, Homo sapien
ttcggtaatacaaacctgcagtcca

SEQ ID NO: 3885195 - DNA, 25 bp, Homo sapien
gcgtccgcaacgatcactcctaatt

SEQ ID NO: 3885196 - DNA, 25 bp, Homo sapien
ctctgagaaaccagcgcgtccgcaa

SEQ ID NO: 3885197 - DNA, 25 bp, Homo sapien
cttcagaagaaactttaatcgtcac

SEQ ID NO: 3885198 - DNA, 25 bp, Homo sapien
atcctttctgctcatttgcaggatt

SEQ ID NO: 3885199 - DNA, 25 bp, Homo sapien
cctttctgctcatttgcaggattcc

SEQ ID NO: 3885200 - DNA, 25 bp, Homo sapien
ttctgctcatttgcaggattcctat

SEQ ID NO: 3885201 - DNA, 25 bp, Homo sapien
tgctcatttgcaggattcctatcat

SEQ ID NO: 3885202 - DNA, 25 bp, Homo sapien
ccttcacattgatgcaggcccaggg

SEQ ID NO: 3885203 - DNA, 25 bp, Homo sapien
tctcagctgtcagtgcggcccagga

SEQ ID NO: 3885204 - DNA, 25 bp, Homo sapien
tacctttggctaatttgactgtctc

SEQ ID NO: 3885205 - DNA, 25 bp, Homo sapien
gtacagaagcgattgcagaattaag

SEQ ID NO: 3885206 - DNA, 25 bp, Homo sapien
gagcatgtgtcctctgaacagggga

SEQ ID NO: 3885207 - DNA, 25 bp, Homo sapien
ccaggagcatatgttcggtattgac

SEQ ID NO: 3885208 - DNA, 25 bp, Homo sapien
gggatttgctccctccaacaggaca

SEQ ID NO: 3885209 - DNA, 25 bp, Homo sapien
tacacggcatattggtggctccaaa

SEQ ID NO: 3885210 - DNA, 25 bp, Homo sapien
aaactccacatatgctctgcccagg

SEQ ID NO: 3885211 - DNA, 25 bp, Homo sapien
gctgggacctggattcacgtgcaag

SEQ ID NO: 3885212 - DNA, 25 bp, Homo sapien
ggacctggattcacgtgcaaggaga

SEQ ID NO: 3885213 - DNA, 25 bp, Homo sapien
gatgctgggacctggattcacgtgc

SEQ ID NO: 3885214 - DNA, 25 bp, Homo sapien
agatgctgggacctggattcacgtg

SEQ ID NO: 3885215 - DNA, 25 bp, Homo sapien
tcagggttactgacatgctagtctc

SEQ ID NO: 3885216 - DNA, 25 bp, Homo sapien
tgctctggttgatattgtctttccc

SEQ ID NO: 3885217 - DNA, 25 bp, Homo sapien
tgctaagatgctcacctcttcacct

SEQ ID NO: 3885218 - DNA, 25 bp, Homo sapien
tagtctctgctaagatgctcacctc

SEQ ID NO: 3885219 - DNA, 25 bp, Homo sapien
ggtaacatttaccagtgtgaaaata

SEQ ID NO: 3885220 - DNA, 25 bp, Homo sapien
aggtaacatttaccagtgtgaaaat

SEQ ID NO: 3885221 - DNA, 25 bp, Homo sapien
taacatttaccagtgtgaaaatatc

SEQ ID NO: 3885222 - DNA, 25 bp, Homo sapien
aacatttaccagtgtgaaaatatca

SEQ ID NO: 3885223 - DNA, 25 bp, Homo sapien
ctttatgtagccatccatgccccag

SEQ ID NO: 3885224 - DNA, 25 bp, Homo sapien
tttatgtagccatccatgccccagt

SEQ ID NO: 3885225 - DNA, 25 bp, Homo sapien
aatactgattgcaaaaaaggattcc

SEQ ID NO: 3885226 - DNA, 25 bp, Homo sapien
ttaagggcttgtggtatgtaaatac

SEQ ID NO: 3885227 - DNA, 25 bp, Homo sapien
caactataagtctttctggcaattt

SEQ ID NO: 3885228 - DNA, 25 bp, Homo sapien
tttcaactataagtctttctggcaa

SEQ ID NO: 3885229 - DNA, 25 bp, Homo sapien
ttattgttatctgagtctgctcctt

SEQ ID NO: 3885230 - DNA, 25 bp, Homo sapien
attgttatctgagtctgctccttca

SEQ ID NO: 3885231 - DNA, 25 bp, Homo sapien
tattgttatctgagtctgctccttc

SEQ ID NO: 3885232 - DNA, 25 bp, Homo sapien
tttattgttatctgagtctgctcct

SEQ ID NO: 3885233 - DNA, 25 bp, Homo sapien
ggccccacagttgccactgccttcg

SEQ ID NO: 3885234 - DNA, 25 bp, Homo sapien
cccacagttgccactgccttcgcca

SEQ ID NO: 3885235 - DNA, 25 bp, Homo sapien
gaatacttgggattgtacctacagg

SEQ ID NO: 3885236 - DNA, 25 bp, Homo sapien
agaatacttgggattgtacctacag

SEQ ID NO: 3885237 - DNA, 25 bp, Homo sapien
gcccttccagagcaccagttgcact

SEQ ID NO: 3885238 - DNA, 25 bp, Homo sapien
cgttctcctgaacataccggaaggg

SEQ ID NO: 3885239 - DNA, 25 bp, Homo sapien
gctcattcagtgagataagtttgcc

SEQ ID NO: 3885240 - DNA, 25 bp, Homo sapien
ccttcatatggataggatgcctcag

SEQ ID NO: 3885241 - DNA, 25 bp, Homo sapien
caggaagcaggcgttcctggaactg

SEQ ID NO: 3885242 - DNA, 25 bp, Homo sapien
tctggtattgaaaaccattcatcac

SEQ ID NO: 3885243 - DNA, 25 bp, Homo sapien
tgatccttcacaggagtcatgtagc

SEQ ID NO: 3885244 - DNA, 25 bp, Homo sapien
ttcacaggagtcatgtagcctttct

SEQ ID NO: 3885245 - DNA, 25 bp, Homo sapien
gctcaatcatcttcacgtccttctc

SEQ ID NO: 3885246 - DNA, 25 bp, Homo sapien
tcaatcatcttcacgtccttctctc

SEQ ID NO: 3885247 - DNA, 25 bp, Homo sapien
aatcatcttcacgtccttctctcac

SEQ ID NO: 3885248 - DNA, 25 bp, Homo sapien
atcttcacgtccttctctcacactg

SEQ ID NO: 3885249 - DNA, 25 bp, Homo sapien
tgtggtcacgtgttagagcagctga

SEQ ID NO: 3885250 - DNA, 25 bp, Homo sapien
ctgtggtcacgtgttagagcagctg

SEQ ID NO: 3885251 - DNA, 25 bp, Homo sapien
actgtggtcacgtgttagagcagct

SEQ ID NO: 3885252 - DNA, 25 bp, Homo sapien
tgtggttcaaacttcaacaaagatt

SEQ ID NO: 3885253 - DNA, 25 bp, Homo sapien
tttcaaagaataatcccagatactt

SEQ ID NO: 3885254 - DNA, 25 bp, Homo sapien
tcacctgaagattatcaatgctata

SEQ ID NO: 3885255 - DNA, 25 bp, Homo sapien
gacaaagttgtggttcaaacttcaa

SEQ ID NO: 3885256 - DNA, 25 bp, Homo sapien
agtgacaggccacagatcccaaagt

SEQ ID NO: 3885257 - DNA, 25 bp, Homo sapien
gacaggccacagatcccaaagtatg

SEQ ID NO: 3885258 - DNA, 25 bp, Homo sapien
acaggccacagatcccaaagtatgc

SEQ ID NO: 3885259 - DNA, 25 bp, Homo sapien
tgacaggccacagatcccaaagtat

SEQ ID NO: 3885260 - DNA, 25 bp, Homo sapien
tctagtttacccatcagacatagtg

SEQ ID NO: 3885261 - DNA, 25 bp, Homo sapien
tctcaaagttagtgtattggaaaat

SEQ ID NO: 3885262 - DNA, 25 bp, Homo sapien
atttttctcaaagttagtgtattgg

SEQ ID NO: 3885263 - DNA, 25 bp, Homo sapien
tgtctacaggcttattaggtcttcc

SEQ ID NO: 3885264 - DNA, 25 bp, Homo sapien
gagattcaagtccagctccctgtgc

SEQ ID NO: 3885265 - DNA, 25 bp, Homo sapien
ctccatgagattcaagtccagctcc

SEQ ID NO: 3885266 - DNA, 25 bp, Homo sapien
gccagtccattgtcataggacatac

SEQ ID NO: 3885267 - DNA, 25 bp, Homo sapien
ccctgtgccagtccattgtcatagg

SEQ ID NO: 3885268 - DNA, 25 bp, Homo sapien
cggcttaagtcgtctccaagaataa

SEQ ID NO: 3885269 - DNA, 25 bp, Homo sapien
tatttactcggcttaagtcgtctcc

SEQ ID NO: 3885270 - DNA, 25 bp, Homo sapien
ttgagcatatagcaaatacaggaag

SEQ ID NO: 3885271 - DNA, 25 bp, Homo sapien
tgtggccactatcataaggatgagc

SEQ ID NO: 3885272 - DNA, 25 bp, Homo sapien
ctttgatggattgaaaagaataccc

SEQ ID NO: 3885273 - DNA, 25 bp, Homo sapien
gatggattgaaaagaatacccaggt

SEQ ID NO: 3885274 - DNA, 25 bp, Homo sapien
tgatggattgaaaagaatacccagg

SEQ ID NO: 3885275 - DNA, 25 bp, Homo sapien
tggattgaaaagaatacccaggtat

SEQ ID NO: 3885276 - DNA, 25 bp, Homo sapien
ctcggaaaccacagcgatttagatt

SEQ ID NO: 3885277 - DNA, 25 bp, Homo sapien
tcggaaaccacagcgatttagattt

SEQ ID NO: 3885278 - DNA, 25 bp, Homo sapien
aagtgaagaacagcgctccggcaaa

SEQ ID NO: 3885279 - DNA, 25 bp, Homo sapien
tctcaagtgaagaacagcgctccgg

SEQ ID NO: 3885280 - DNA, 25 bp, Homo sapien
tgtctcaagtgaagaacagcgctcc

SEQ ID NO: 3885281 - DNA, 25 bp, Homo sapien
tgcttgtctcaagtgaagaacagcg

SEQ ID NO: 3885282 - DNA, 25 bp, Homo sapien
ctcgaggcagcgctggaaaaatcgc

SEQ ID NO: 3885283 - DNA, 25 bp, Homo sapien
tcgaggcagcgctggaaaaatcgca

SEQ ID NO: 3885284 - DNA, 25 bp, Homo sapien
cgaggcagcgctggaaaaatcgcac

SEQ ID NO: 3885285 - DNA, 25 bp, Homo sapien
cccgcaagaaatccagccgctctcc

SEQ ID NO: 3885286 - DNA, 25 bp, Homo sapien
ccgcaagaaatccagccgctctccc

SEQ ID NO: 3885287 - DNA, 25 bp, Homo sapien
gtgcagatcccgcaagaaatccagc

SEQ ID NO: 3885288 - DNA, 25 bp, Homo sapien
agatcccgcaagaaatccagccgct

SEQ ID NO: 3885289 - DNA, 25 bp, Homo sapien
tagcctctcctcctcagtggccgcc

SEQ ID NO: 3885290 - DNA, 25 bp, Homo sapien
gcctctcctcctcagtggccgccat

SEQ ID NO: 3885291 - DNA, 25 bp, Homo sapien
ctccctgctagcctctcctcctcag

SEQ ID NO: 3885292 - DNA, 25 bp, Homo sapien
cgctccctgctagcctctcctcctc

SEQ ID NO: 3885293 - DNA, 25 bp, Homo sapien
caatagtccttggagacacattttc

SEQ ID NO: 3885294 - DNA, 25 bp, Homo sapien
gatttcaatagtccttggagacaca

SEQ ID NO: 3885295 - DNA, 25 bp, Homo sapien
tttcaatagtccttggagacacatt

SEQ ID NO: 3885296 - DNA, 25 bp, Homo sapien
tcagatttcaatagtccttggagac

SEQ ID NO: 3885297 - DNA, 25 bp, Homo sapien
cactggtgggatcttattgaaagga

SEQ ID NO: 3885298 - DNA, 25 bp, Homo sapien
gcactggtgggatcttattgaaagg

SEQ ID NO: 3885299 - DNA, 25 bp, Homo sapien
ctaccctgaaagtcctccaggcacc

SEQ ID NO: 3885300 - DNA, 25 bp, Homo sapien
cagctgtgagcaggttcggtggtgc

SEQ ID NO: 3885301 - DNA, 25 bp, Homo sapien
tgagcaggttcggtggtgccgcggg

SEQ ID NO: 3885302 - DNA, 25 bp, Homo sapien
agctgtgagcaggttcggtggtgcc

SEQ ID NO: 3885303 - DNA, 25 bp, Homo sapien
tgtgagcaggttcggtggtgccgcg

SEQ ID NO: 3885304 - DNA, 25 bp, Homo sapien
gcctctgacctggaaggctgtttgc

SEQ ID NO: 3885305 - DNA, 25 bp, Homo sapien
ggtctgtgcttttgagcctgccaaa

SEQ ID NO: 3885306 - DNA, 25 bp, Homo sapien
tgtcattatgtaactggtctgtgct

SEQ ID NO: 3885307 - DNA, 25 bp, Homo sapien
ggaaggctgtttgcttgtcattatg

SEQ ID NO: 3885308 - DNA, 25 bp, Homo sapien
tctgctccttgtctatacatctgtc

SEQ ID NO: 3885309 - DNA, 25 bp, Homo sapien
ctgcgtgaccgcaggtcttcagcat

SEQ ID NO: 3885310 - DNA, 25 bp, Homo sapien
ttcctcctctcgacgattgtcctgg

SEQ ID NO: 3885311 - DNA, 25 bp, Homo sapien
ttgtctgcaacttcggatgctcccg

SEQ ID NO: 3885312 - DNA, 25 bp, Homo sapien
caggaatcagaaaaggtcatgaaca

SEQ ID NO: 3885313 - DNA, 25 bp, Homo sapien
tgggtggtcatctctcctacactga

SEQ ID NO: 3885314 - DNA, 25 bp, Homo sapien
tacactgatgggatctggttcccaa

SEQ ID NO: 3885315 - DNA, 25 bp, Homo sapien
cagaggtagaagctcccaaccatgg

SEQ ID NO: 3885316 - DNA, 25 bp, Homo sapien
cttcagggcaaggagtgtaaaatct

SEQ ID NO: 3885317 - DNA, 25 bp, Homo sapien
tatatggtcgtgcttgcctaatgca

SEQ ID NO: 3885318 - DNA, 25 bp, Homo sapien
gatgggaagggatgccaaattccct

SEQ ID NO: 3885319 - DNA, 25 bp, Homo sapien
gagatgtaaaccacctggagcttca

SEQ ID NO: 3885320 - DNA, 25 bp, Homo sapien
ggtgctgctaagtccctctctgtgg

SEQ ID NO: 3885321 - DNA, 25 bp, Homo sapien
gaaggatgggtgctgcagtaacaac

SEQ ID NO: 3885322 - DNA, 25 bp, Homo sapien
tcaaaggtgtttcagccaggtagtc

SEQ ID NO: 3885323 - DNA, 25 bp, Homo sapien
gatccaggcagttgctttccatgca

SEQ ID NO: 3885324 - DNA, 25 bp, Homo sapien
ttccaggccttcaacatcataggag

SEQ ID NO: 3885325 - DNA, 25 bp, Homo sapien
cacattccaggccttcaacatcata

SEQ ID NO: 3885326 - DNA, 25 bp, Homo sapien
tcttcttggggtttgaagtatccac

SEQ ID NO: 3885327 - DNA, 25 bp, Homo sapien
ttggggtttgaagtatccacattcc

SEQ ID NO: 3885328 - DNA, 25 bp, Homo sapien
tgtggtctctgagtagtttgctcat

SEQ ID NO: 3885329 - DNA, 25 bp, Homo sapien
tgtttcggtgtggtctctgagtagt

SEQ ID NO: 3885330 - DNA, 25 bp, Homo sapien
ccctcgatgaatgtgtttcggtgtg

SEQ ID NO: 3885331 - DNA, 25 bp, Homo sapien
gaatgtgtttcggtgtggtctctga

SEQ ID NO: 3885332 - DNA, 25 bp, Homo sapien
gatattggcagcatgagggtctaag

SEQ ID NO: 3885333 - DNA, 25 bp, Homo sapien
tattaggatattggcagcatgaggg

SEQ ID NO: 3885334 - DNA, 25 bp, Homo sapien
ttttattaggatattggcagcatga

SEQ ID NO: 3885335 - DNA, 25 bp, Homo sapien
ttggcagcatgagggtctaagcctt

SEQ ID NO: 3885336 - DNA, 25 bp, Homo sapien
cagctgttgcaaggcggcattctca

SEQ ID NO: 3885337 - DNA, 25 bp, Homo sapien
cagttggaatagaccagggactctc

SEQ ID NO: 3885338 - DNA, 25 bp, Homo sapien
ggtgaacttgccctctgtcttggaa

SEQ ID NO: 3885339 - DNA, 25 bp, Homo sapien
gcagctgtgcctccgtaaatggttt

SEQ ID NO: 3885340 - DNA, 25 bp, Homo sapien
agaagaaagtcaggttggggttgtg

SEQ ID NO: 3885341 - DNA, 25 bp, Homo sapien
aaagtcaggttggggttgtggcatc

SEQ ID NO: 3885342 - DNA, 25 bp, Homo sapien
ggctgtgagacctctgtgctccaac

SEQ ID NO: 3885343 - DNA, 25 bp, Homo sapien
gggctgtgagacctctgtgctccaa

SEQ ID NO: 3885344 - DNA, 25 bp, Homo sapien
ccctgtacaacagtaggggatgtgg

SEQ ID NO: 3885345 - DNA, 25 bp, Homo sapien
ctgcagttagcccactgtcaccctg

SEQ ID NO: 3885346 - DNA, 25 bp, Homo sapien
tcaccctgtacaacagtaggggatg

SEQ ID NO: 3885347 - DNA, 25 bp, Homo sapien
ctgtcaccctgtacaacagtagggg

SEQ ID NO: 3885348 - DNA, 25 bp, Homo sapien
tctgggtctggcctcatgtcggcct

SEQ ID NO: 3885349 - DNA, 25 bp, Homo sapien
aagaggagaggacatctgaaagctg

SEQ ID NO: 3885350 - DNA, 25 bp, Homo sapien
atctgaaagctgtcagatgctaatc

SEQ ID NO: 3885351 - DNA, 25 bp, Homo sapien
gatgctaatctctgctctgggtctg

SEQ ID NO: 3885352 - DNA, 25 bp, Homo sapien
ctgccttgtacccccagagcagaac

SEQ ID NO: 3885353 - DNA, 25 bp, Homo sapien
gcatcactggggactcccatacctg

SEQ ID NO: 3885354 - DNA, 25 bp, Homo sapien
cagaacagtatctggtttctgggct

SEQ ID NO: 3885355 - DNA, 25 bp, Homo sapien
cccagtcctagttcccagaacagta

SEQ ID NO: 3885356 - DNA, 25 bp, Homo sapien
gctaagaaatgcagcccgtgttggg

SEQ ID NO: 3885357 - DNA, 25 bp, Homo sapien
gaaatgcagcccgtgttgggtagcc

SEQ ID NO: 3885358 - DNA, 25 bp, Homo sapien
ctaagaaatgcagcccgtgttgggt

SEQ ID NO: 3885359 - DNA, 25 bp, Homo sapien
tgcagcccgtgttgggtagcccctt

SEQ ID NO: 3885360 - DNA, 25 bp, Homo sapien
tacttgtccctgtaaggcctcaacc

SEQ ID NO: 3885361 - DNA, 25 bp, Homo sapien
ctgtacttgtccctgtaaggcctca

SEQ ID NO: 3885362 - DNA, 25 bp, Homo sapien
gtccctgtaaggcctcaacctgctg

SEQ ID NO: 3885363 - DNA, 25 bp, Homo sapien
tgtacttgtccctgtaaggcctcaa

SEQ ID NO: 3885364 - DNA, 25 bp, Homo sapien
ctttgtctccaggaatgcctttgtc

SEQ ID NO: 3885365 - DNA, 25 bp, Homo sapien
ggaatgcctttgtcccccttcaatc

SEQ ID NO: 3885366 - DNA, 25 bp, Homo sapien
tggaagcccactttctccctttgct

SEQ ID NO: 3885367 - DNA, 25 bp, Homo sapien
tccaggaatgcctttgtcccccttc

SEQ ID NO: 3885368 - DNA, 25 bp, Homo sapien
cccttagggcctgcgaggcctcttg

SEQ ID NO: 3885369 - DNA, 25 bp, Homo sapien
caccagggacacctcgctctccctt

SEQ ID NO: 3885370 - DNA, 25 bp, Homo sapien
ttccagggactccacgctcaccagg

SEQ ID NO: 3885371 - DNA, 25 bp, Homo sapien
agggacacctcgctctcccttaggg

SEQ ID NO: 3885372 - DNA, 25 bp, Homo sapien
tccttttgggcctggcttgccctga

SEQ ID NO: 3885373 - DNA, 25 bp, Homo sapien
tctccttttgggcctggcttgccct

SEQ ID NO: 3885374 - DNA, 25 bp, Homo sapien
ttttgggcctggcttgccctgaggt

SEQ ID NO: 3885375 - DNA, 25 bp, Homo sapien
ccttttgggcctggcttgccctgag

SEQ ID NO: 3885376 - DNA, 25 bp, Homo sapien
tccccaggggaccttctcttccagc

SEQ ID NO: 3885377 - DNA, 25 bp, Homo sapien
ttccagctggaccaggcacaccggg

SEQ ID NO: 3885378 - DNA, 25 bp, Homo sapien
ccagctggaccaggcacaccgggag

SEQ ID NO: 3885379 - DNA, 25 bp, Homo sapien
agctggaccaggcacaccgggaggt

SEQ ID NO: 3885380 - DNA, 25 bp, Homo sapien
tgggatgggctctgtgcgtgcccac

SEQ ID NO: 3885381 - DNA, 25 bp, Homo sapien
acctggaaacacctgaagtcgacac

SEQ ID NO: 3885382 - DNA, 25 bp, Homo sapien
tggaaacacctgaagtcgacaccca

SEQ ID NO: 3885383 - DNA, 25 bp, Homo sapien
cctggaaacacctgaagtcgacacc

SEQ ID NO: 3885384 - DNA, 25 bp, Homo sapien
ctggaaacacctgaagtcgacaccc

SEQ ID NO: 3885385 - DNA, 25 bp, Homo sapien
gtccaggttctccaacagagccatt

SEQ ID NO: 3885386 - DNA, 25 bp, Homo sapien
ggtccaggttctccaacagagccat

SEQ ID NO: 3885387 - DNA, 25 bp, Homo sapien
tgggccagcttgtccaggcatccct

SEQ ID NO: 3885388 - DNA, 25 bp, Homo sapien
gggccagcttgtccaggcatccctg

SEQ ID NO: 3885389 - DNA, 25 bp, Homo sapien
gtccaggcatccctgcttgccctgc

SEQ ID NO: 3885390 - DNA, 25 bp, Homo sapien
agcttgtccaggcatccctgcttgc

SEQ ID NO: 3885391 - DNA, 25 bp, Homo sapien
cacccgagtgccacctgaagtggag

SEQ ID NO: 3885392 - DNA, 25 bp, Homo sapien
tgtatcgtagtgtacccagagacct

SEQ ID NO: 3885393 - DNA, 25 bp, Homo sapien
agtggagctttatggcccagccttt

SEQ ID NO: 3885394 - DNA, 25 bp, Homo sapien
cacaaactatggaggccatgagagc

SEQ ID NO: 3885395 - DNA, 25 bp, Homo sapien
gaggagctagggcagttgggtgctg

SEQ ID NO: 3885396 - DNA, 25 bp, Homo sapien
tgctcttgggataggaaggatccgg

SEQ ID NO: 3885397 - DNA, 25 bp, Homo sapien
cagttgggtgctggaggaggcacat

SEQ ID NO: 3885398 - DNA, 25 bp, Homo sapien
acagccacttgtttgccagctggtg

SEQ ID NO: 3885399 - DNA, 25 bp, Homo sapien
tgagctacacatgaccagggtgcaa

SEQ ID NO: 3885400 - DNA, 25 bp, Homo sapien
tgtgggagtaggtcttcatttctgc

SEQ ID NO: 3885401 - DNA, 25 bp, Homo sapien
accaggcaggccactctccactgag

SEQ ID NO: 3885402 - DNA, 25 bp, Homo sapien
catcccgtccatcgcgaccaggcag

SEQ ID NO: 3885403 - DNA, 25 bp, Homo sapien
tctttttgttaggccccaggagctc

SEQ ID NO: 3885404 - DNA, 25 bp, Homo sapien
gttaggccccaggagctccaagcaa

SEQ ID NO: 3885405 - DNA, 25 bp, Homo sapien
aggccccaggagctccaagcaaact

SEQ ID NO: 3885406 - DNA, 25 bp, Homo sapien
tttgttaggccccaggagctccaag

SEQ ID NO: 3885407 - DNA, 25 bp, Homo sapien
ttgctgcaggtgtccgcacatggag

SEQ ID NO: 3885408 - DNA, 25 bp, Homo sapien
tgatagggtcagcagacaacccgct

SEQ ID NO: 3885409 - DNA, 25 bp, Homo sapien
tgttggtgaccacaggtgggcctat

SEQ ID NO: 3885410 - DNA, 25 bp, Homo sapien
gcctattgctgaaatctgtgggtag

SEQ ID NO: 3885411 - DNA, 25 bp, Homo sapien
aaagagtgactccagtagcatgagg

SEQ ID NO: 3885412 - DNA, 25 bp, Homo sapien
tttggttctgaaaggaaagagtgac

SEQ ID NO: 3885413 - DNA, 25 bp, Homo sapien
cacagaagtggtgggctataccttg

SEQ ID NO: 3885414 - DNA, 25 bp, Homo sapien
aacaagagttctggatacagtggcc

SEQ ID NO: 3885415 - DNA, 25 bp, Homo sapien
cactgtattggtgctctgctcacaa

SEQ ID NO: 3885416 - DNA, 25 bp, Homo sapien
gtgaagaatcctagagttccacagg

SEQ ID NO: 3885417 - DNA, 25 bp, Homo sapien
tcaggtatctgtggtgaaagagccc

SEQ ID NO: 3885418 - DNA, 25 bp, Homo sapien
tgaggccagagagcaacctactagc

SEQ ID NO: 3885419 - DNA, 25 bp, Homo sapien
gtcctccttcagcatgccgaacagt

SEQ ID NO: 3885420 - DNA, 25 bp, Homo sapien
tagcagcggcctatagggcttacag

SEQ ID NO: 3885421 - DNA, 25 bp, Homo sapien
gcatgccgaacagtagcagcggcct

SEQ ID NO: 3885422 - DNA, 25 bp, Homo sapien
tatagggcttacaggactcggtgca

SEQ ID NO: 3885423 - DNA, 25 bp, Homo sapien
tatgtaacaactggaagcagcccag

SEQ ID NO: 3885424 - DNA, 25 bp, Homo sapien
ttatgtaacaactggaagcagccca

SEQ ID NO: 3885425 - DNA, 25 bp, Homo sapien
aatgatgggcgtacagaagagtgga

SEQ ID NO: 3885426 - DNA, 25 bp, Homo sapien
aggagaatgatgggcgtacagaaga

SEQ ID NO: 3885427 - DNA, 25 bp, Homo sapien
tgatgggcgtacagaagagtggaga

SEQ ID NO: 3885428 - DNA, 25 bp, Homo sapien
agaatgatgggcgtacagaagagtg

SEQ ID NO: 3885429 - DNA, 25 bp, Homo sapien
ttataacgccatcctcttcagcaat

SEQ ID NO: 3885430 - DNA, 25 bp, Homo sapien
gtcaagtagtgcgatggctttaaaa

SEQ ID NO: 3885431 - DNA, 25 bp, Homo sapien
cagttgatccctggcagctatacca

SEQ ID NO: 3885432 - DNA, 25 bp, Homo sapien
gaattctaggctctggaatgccaat

SEQ ID NO: 3885433 - DNA, 25 bp, Homo sapien
aacaatcctctttcgccgggcctct

SEQ ID NO: 3885434 - DNA, 25 bp, Homo sapien
cctggagggtatctttttgactctg

SEQ ID NO: 3885435 - DNA, 25 bp, Homo sapien
catttgaacttttggccaaatccat

SEQ ID NO: 3885436 - DNA, 25 bp, Homo sapien
ttcctttataggcaactttggatgc

SEQ ID NO: 3885437 - DNA, 25 bp, Homo sapien
tataggcaactttggatgcattttt

SEQ ID NO: 3885438 - DNA, 25 bp, Homo sapien
tggatgcatttttcggttttggttc

SEQ ID NO: 3885439 - DNA, 25 bp, Homo sapien
gttcccagagggcatttcttacaaa

SEQ ID NO: 3885440 - DNA, 25 bp, Homo sapien
tccttgactctgttcatatatactc

SEQ ID NO: 3885441 - DNA, 25 bp, Homo sapien
tatttccttgactctgttcatatat

SEQ ID NO: 3885442 - DNA, 25 bp, Homo sapien
gactctgttcatatatactctgatt

SEQ ID NO: 3885443 - DNA, 25 bp, Homo sapien
ctctgtccagcttgccagccttttt

SEQ ID NO: 3885444 - DNA, 25 bp, Homo sapien
atcaatggaattcgcaaatgctgac

SEQ ID NO: 3885445 - DNA, 25 bp, Homo sapien
gcatcaatggaattcgcaaatgctg

SEQ ID NO: 3885446 - DNA, 25 bp, Homo sapien
cagcatcaatggaattcgcaaatgc

SEQ ID NO: 3885447 - DNA, 25 bp, Homo sapien
cacagcatcaatggaattcgcaaat

SEQ ID NO: 3885448 - DNA, 25 bp, Homo sapien
tgaagcacggcctttgactccagtc

SEQ ID NO: 3885449 - DNA, 25 bp, Homo sapien
ctgaagcacggcctttgactccagt

SEQ ID NO: 3885450 - DNA, 25 bp, Homo sapien
gtacatactcctttgtttggaacca

SEQ ID NO: 3885451 - DNA, 25 bp, Homo sapien
gagagtggagggactacgctgtgag

SEQ ID NO: 3885452 - DNA, 25 bp, Homo sapien
tacatactcctttgtttggaaccaa

SEQ ID NO: 3885453 - DNA, 25 bp, Homo sapien
ttggagagtggagggactacgctgt

SEQ ID NO: 3885454 - DNA, 25 bp, Homo sapien
ttcctttatgggcaactttggatgt

SEQ ID NO: 3885455 - DNA, 25 bp, Homo sapien
cctttatgggcaactttggatgtat

SEQ ID NO: 3885456 - DNA, 25 bp, Homo sapien
tatgggcaactttggatgtattttt

SEQ ID NO: 3885457 - DNA, 25 bp, Homo sapien
ctttatgggcaactttggatgtatt

SEQ ID NO: 3885458 - DNA, 25 bp, Homo sapien
tccttgactctgttcatatatactc

SEQ ID NO: 3885459 - DNA, 25 bp, Homo sapien
tatttccttgactctgttcatatat

SEQ ID NO: 3885460 - DNA, 25 bp, Homo sapien
gactctgttcatatatactctgatt

SEQ ID NO: 3885461 - DNA, 25 bp, Homo sapien
ctctgtccagcttgccagccttttt

SEQ ID NO: 3885462 - DNA, 25 bp, Homo sapien
gcatcaatggaattcgcaaatgctg

SEQ ID NO: 3885463 - DNA, 25 bp, Homo sapien
cagcatcaatggaattcgcaaatgc

SEQ ID NO: 3885464 - DNA, 25 bp, Homo sapien
cacagcatcaatggaattcgcaaat

SEQ ID NO: 3885465 - DNA, 25 bp, Homo sapien
atcaatggaattcgcaaatgctgac

SEQ ID NO: 3885466 - DNA, 25 bp, Homo sapien
ggctgactcacggccttcgactcca

SEQ ID NO: 3885467 - DNA, 25 bp, Homo sapien
ctgactcacggccttcgactccagt

SEQ ID NO: 3885468 - DNA, 25 bp, Homo sapien
gactcacggccttcgactccagtgt

SEQ ID NO: 3885469 - DNA, 25 bp, Homo sapien
actcacggccttcgactccagtgtc

SEQ ID NO: 3885470 - DNA, 25 bp, Homo sapien
acctctgtccagcttgccagccttt

SEQ ID NO: 3885471 - DNA, 25 bp, Homo sapien
ttccttgactctgttcatatatact

SEQ ID NO: 3885472 - DNA, 25 bp, Homo sapien
gactctgttcatatatactctgatt

SEQ ID NO: 3885473 - DNA, 25 bp, Homo sapien
ctctgtccagcttgccagccttttt

SEQ ID NO: 3885474 - DNA, 25 bp, Homo sapien
atgtgtatgcagaaaccaaatccac

SEQ ID NO: 3885475 - DNA, 25 bp, Homo sapien
aatttaatgtgtatgcagaaaccaa

SEQ ID NO: 3885476 - DNA, 25 bp, Homo sapien
taatgtgtatgcagaaaccaaatcc

SEQ ID NO: 3885477 - DNA, 25 bp, Homo sapien
cattgaatttaatgtgtatgcagaa

SEQ ID NO: 3885478 - DNA, 25 bp, Homo sapien
tttctactggagagtcattaatttc

SEQ ID NO: 3885479 - DNA, 25 bp, Homo sapien
tactggagagtcattaatttcttca

SEQ ID NO: 3885480 - DNA, 25 bp, Homo sapien
tgaatttctactggagagtcattaa

SEQ ID NO: 3885481 - DNA, 25 bp, Homo sapien
catggctgactcacggccttcgact

SEQ ID NO: 3885482 - DNA, 25 bp, Homo sapien
gctgactcacggccttcgactccag

SEQ ID NO: 3885483 - DNA, 25 bp, Homo sapien
gactcacggccttcgactccagtct

SEQ ID NO: 3885484 - DNA, 25 bp, Homo sapien
atggctgactcacggccttcgactc

SEQ ID NO: 3885485 - DNA, 25 bp, Homo sapien
atccaaactatccatatccccacag

SEQ ID NO: 3885486 - DNA, 25 bp, Homo sapien
tgccacccttctacttctctccaac

SEQ ID NO: 3885487 - DNA, 25 bp, Homo sapien
cctttaaggagacaccatgagatga

SEQ ID NO: 3885488 - DNA, 25 bp, Homo sapien
catgagatgaccagggactatccaa

SEQ ID NO: 3885489 - DNA, 25 bp, Homo sapien
tggagagtggagggactacactgtg

SEQ ID NO: 3885490 - DNA, 25 bp, Homo sapien
gagagtggagggactacactgtgag

SEQ ID NO: 3885491 - DNA, 25 bp, Homo sapien
ggagagtggagggactacactgtga

SEQ ID NO: 3885492 - DNA, 25 bp, Homo sapien
ttggagagtggagggactacactgt

SEQ ID NO: 3885493 - DNA, 25 bp, Homo sapien
aggcattcaacttctcgtctgggca

SEQ ID NO: 3885494 - DNA, 25 bp, Homo sapien
tgtcttcaacggagaagcctcaggt

SEQ ID NO: 3885495 - DNA, 25 bp, Homo sapien
ttgctcctctagaaggcaggcgcca

SEQ ID NO: 3885496 - DNA, 25 bp, Homo sapien
caaacagtatgtccgagaacactca

SEQ ID NO: 3885497 - DNA, 25 bp, Homo sapien
cacagggactctccattacttggga

SEQ ID NO: 3885498 - DNA, 25 bp, Homo sapien
cactatttgcaaaggtgtgtgccac

SEQ ID NO: 3885499 - DNA, 25 bp, Homo sapien
ttgggaacatcaaccatgctgctgg

SEQ ID NO: 3885500 - DNA, 25 bp, Homo sapien
tggtcccagcagtaaacacttgcag

SEQ ID NO: 3885501 - DNA, 25 bp, Homo sapien
ccatctcaggcttgtccctttcaga

SEQ ID NO: 3885502 - DNA, 25 bp, Homo sapien
taaggctacagttatttgagccatc

SEQ ID NO: 3885503 - DNA, 25 bp, Homo sapien
tgatctacatcgacaagggccattt

SEQ ID NO: 3885504 - DNA, 25 bp, Homo sapien
gggccattttctgtatcacctggat

SEQ ID NO: 3885505 - DNA, 25 bp, Homo sapien
attgggagtcccctgtgtctccacg

SEQ ID NO: 3885506 - DNA, 25 bp, Homo sapien
gagtcccctgtgtctccacggaaga

SEQ ID NO: 3885507 - DNA, 25 bp, Homo sapien
ctccacggaagagtggccagctcca

SEQ ID NO: 3885508 - DNA, 25 bp, Homo sapien
gttaattgggagtcccctgtgtctc

SEQ ID NO: 3885509 - DNA, 25 bp, Homo sapien
gaatcatgcagttccctggcagtga

SEQ ID NO: 3885510 - DNA, 25 bp, Homo sapien
tcttgtaaatgggtggcctttggca

SEQ ID NO: 3885511 - DNA, 25 bp, Homo sapien
tgggtacaagaagttctgctcaggg

SEQ ID NO: 3885512 - DNA, 25 bp, Homo sapien
gctcagggtcatcattgggagattc

SEQ ID NO: 3885513 - DNA, 25 bp, Homo sapien
tacactcagcttatccttggcaaat

SEQ ID NO: 3885514 - DNA, 25 bp, Homo sapien
tgttcttacttcattatgactggtt

SEQ ID NO: 3885515 - DNA, 25 bp, Homo sapien
taaaattaggataaggattctgtgc

SEQ ID NO: 3885516 - DNA, 25 bp, Homo sapien
tctgtgcaaatgactgctgaagtac

SEQ ID NO: 3885517 - DNA, 25 bp, Homo sapien
tctaaaggcatcacagttgagccat

SEQ ID NO: 3885518 - DNA, 25 bp, Homo sapien
gcatcttcttggaggacttcatgtt

SEQ ID NO: 3885519 - DNA, 25 bp, Homo sapien
caggccacagtgtagcactgactgc

SEQ ID NO: 3885520 - DNA, 25 bp, Homo sapien
gatggaggccattcctatggcatct

SEQ ID NO: 3885521 - DNA, 25 bp, Homo sapien
cccagagaacaggagtgtcagtttc

SEQ ID NO: 3885522 - DNA, 25 bp, Homo sapien
tttgaaaagctccaaattatttctg

SEQ ID NO: 3885523 - DNA, 25 bp, Homo sapien
tcttccatatcccaggtttgaaaag

SEQ ID NO: 3885524 - DNA, 25 bp, Homo sapien
agtttcttccatatcccaggtttga

SEQ ID NO: 3885525 - DNA, 25 bp, Homo sapien
cattcagcttcgcctttgagactca

SEQ ID NO: 3885526 - DNA, 25 bp, Homo sapien
attcagcttcgcctttgagactcac

SEQ ID NO: 3885527 - DNA, 25 bp, Homo sapien
tgctgagatactctcggccctcttg

SEQ ID NO: 3885528 - DNA, 25 bp, Homo sapien
taggtgctgagatactctcggccct

SEQ ID NO: 3885529 - DNA, 25 bp, Homo sapien
tctttgttctaataaccagccttgt

SEQ ID NO: 3885530 - DNA, 25 bp, Homo sapien
ttgttctaataaccagccttgtcca

SEQ ID NO: 3885531 - DNA, 25 bp, Homo sapien
gatgccacagaagagttccaagtga

SEQ ID NO: 3885532 - DNA, 25 bp, Homo sapien
cttcagatgccacagaagagttcca

SEQ ID NO: 3885533 - DNA, 25 bp, Homo sapien
tgccacagaagagttccaagtgact

SEQ ID NO: 3885534 - DNA, 25 bp, Homo sapien
tcagatgccacagaagagttccaag

SEQ ID NO: 3885535 - DNA, 25 bp, Homo sapien
gtgggacttcctatggctgagggcc

SEQ ID NO: 3885536 - DNA, 25 bp, Homo sapien
aacatcaaaggccatcaaatcttta

SEQ ID NO: 3885537 - DNA, 25 bp, Homo sapien
caacatcaaaggccatcaaatcttt

SEQ ID NO: 3885538 - DNA, 25 bp, Homo sapien
gtcccttggtgggacttcctatggc

SEQ ID NO: 3885539 - DNA, 25 bp, Homo sapien
tcttccacaaccctgggtctagagg

SEQ ID NO: 3885540 - DNA, 25 bp, Homo sapien
aactcttccacaaccctgggtctag

SEQ ID NO: 3885541 - DNA, 25 bp, Homo sapien
tgtacccaactcttccacaaccctg

SEQ ID NO: 3885542 - DNA, 25 bp, Homo sapien
ccacaaccctgggtctagagggagg

SEQ ID NO: 3885543 - DNA, 25 bp, Homo sapien
gaagtcgtgcaagcacaatcccgac

SEQ ID NO: 3885544 - DNA, 25 bp, Homo sapien
gaccagactccgcaatgagagcaag

SEQ ID NO: 3885545 - DNA, 25 bp, Homo sapien
tggagcgctacggtctgacgaacga

SEQ ID NO: 3885546 - DNA, 25 bp, Homo sapien
gagcaagcatactggtccgccaggg

SEQ ID NO: 3885547 - DNA, 25 bp, Homo sapien
taagcctctcacgaagcggaaagtc

SEQ ID NO: 3885548 - DNA, 25 bp, Homo sapien
caagtcagaatagggcttccgaagc

SEQ ID NO: 3885549 - DNA, 25 bp, Homo sapien
tcaagttaacagactgccataggcc

SEQ ID NO: 3885550 - DNA, 25 bp, Homo sapien
acgggttatccgagcctaagcctct

SEQ ID NO: 3885551 - DNA, 25 bp, Homo sapien
gcacacaggtgctctaaccatgttt

SEQ ID NO: 3885552 - DNA, 25 bp, Homo sapien
cctgatggcactgctagattgctcc

SEQ ID NO: 3885553 - DNA, 25 bp, Homo sapien
catagaggcacgctgagaacctgga

SEQ ID NO: 3885554 - DNA, 25 bp, Homo sapien
catgctacagagaaagataaggaag

SEQ ID NO: 3885555 - DNA, 25 bp, Homo sapien
ttacctctcctgttcacttagttat

SEQ ID NO: 3885556 - DNA, 25 bp, Homo sapien
attacctctcctgttcacttagtta

SEQ ID NO: 3885557 - DNA, 25 bp, Homo sapien
tacctctcctgttcacttagttata

SEQ ID NO: 3885558 - DNA, 25 bp, Homo sapien
tcaggtagttcctccaccggtgctt

SEQ ID NO: 3885559 - DNA, 25 bp, Homo sapien
ggtgcttccaaccaaatcgccagga

SEQ ID NO: 3885560 - DNA, 25 bp, Homo sapien
gaaaattccagccaaaggagcgact

SEQ ID NO: 3885561 - DNA, 25 bp, Homo sapien
ggtcgctggattctcaatccttaca

SEQ ID NO: 3885562 - DNA, 25 bp, Homo sapien
ctgaaaagctgggaaacttggcgga

SEQ ID NO: 3885563 - DNA, 25 bp, Homo sapien
tgaaaagctgggaaacttggcggag

SEQ ID NO: 3885564 - DNA, 25 bp, Homo sapien
cgcagattgtgacggtatctgccag

SEQ ID NO: 3885565 - DNA, 25 bp, Homo sapien
agtccacgcagattgtgacggtatc

SEQ ID NO: 3885566 - DNA, 25 bp, Homo sapien
ccctggcaggtagcctcacagtcca

SEQ ID NO: 3885567 - DNA, 25 bp, Homo sapien
attctgtatgctcccatgaccctgg

SEQ ID NO: 3885568 - DNA, 25 bp, Homo sapien
tgatgccggtctcccctatctttaa

SEQ ID NO: 3885569 - DNA, 25 bp, Homo sapien
tttgtcaactgggtccactggctcc

SEQ ID NO: 3885570 - DNA, 25 bp, Homo sapien
gtatatggttggcatatttctctag

SEQ ID NO: 3885571 - DNA, 25 bp, Homo sapien
ttcaagaatattggaaggaggaggt

SEQ ID NO: 3885572 - DNA, 25 bp, Homo sapien
gctttttagaccatgagccaccacg

SEQ ID NO: 3885573 - DNA, 25 bp, Homo sapien
tcagagaaacctttatccctgatgg

SEQ ID NO: 3885574 - DNA, 25 bp, Homo sapien
agcagcactcagagaaacctttatc

SEQ ID NO: 3885575 - DNA, 25 bp, Homo sapien
cacttgaagaatagttttctgctgc

SEQ ID NO: 3885576 - DNA, 25 bp, Homo sapien
taccatgatgcgttcaagtcagcgc

SEQ ID NO: 3885577 - DNA, 25 bp, Homo sapien
ggacagttgctccagggtgcacaaa

SEQ ID NO: 3885578 - DNA, 25 bp, Homo sapien
gctgagccatgttgggagcgacctc

SEQ ID NO: 3885579 - DNA, 25 bp, Homo sapien
catcacagacacgtagagaacaggg

SEQ ID NO: 3885580 - DNA, 25 bp, Homo sapien
ccctgcaggttttgcacagtgagcc

SEQ ID NO: 3885581 - DNA, 25 bp, Homo sapien
tgcaggttttgcacagtgagccctg

SEQ ID NO: 3885582 - DNA, 25 bp, Homo sapien
ctccctgcaggttttgcacagtgag

SEQ ID NO: 3885583 - DNA, 25 bp, Homo sapien
gcaggttttgcacagtgagccctgc

SEQ ID NO: 3885584 - DNA, 25 bp, Homo sapien
cagagcctgagtgaggaaaacccag

SEQ ID NO: 3885585 - DNA, 25 bp, Homo sapien
tgatgaagcggaacgtggaaccact

SEQ ID NO: 3885586 - DNA, 25 bp, Homo sapien
gggtccatggcatacacagggaaaa

SEQ ID NO: 3885587 - DNA, 25 bp, Homo sapien
tagagaagaccgtggatcacctggg

SEQ ID NO: 3885588 - DNA, 25 bp, Homo sapien
ttagataccagctcaaccacaggac

SEQ ID NO: 3885589 - DNA, 25 bp, Homo sapien
tgcctgttaactgaagagcccttgg

SEQ ID NO: 3885590 - DNA, 25 bp, Homo sapien
tgaataaccagcagagatacctggg

SEQ ID NO: 3885591 - DNA, 25 bp, Homo sapien
ggtttcaggttcagattcagccagc

SEQ ID NO: 3885592 - DNA, 25 bp, Homo sapien
ttcttgtacgtgtccagtggctctt

SEQ ID NO: 3885593 - DNA, 25 bp, Homo sapien
gagtgtctctttgagttgaccctac

SEQ ID NO: 3885594 - DNA, 25 bp, Homo sapien
gatgaacatctacaagtatcaagac

SEQ ID NO: 3885595 - DNA, 25 bp, Homo sapien
tgtttcaatgtcacactgagtgtct

SEQ ID NO: 3885596 - DNA, 25 bp, Homo sapien
tgcctcgtagcatttgcagatgtgt

SEQ ID NO: 3885597 - DNA, 25 bp, Homo sapien
gtggccactaagtctttggttagct

SEQ ID NO: 3885598 - DNA, 25 bp, Homo sapien
ccactaagtctttggttagcttagt

SEQ ID NO: 3885599 - DNA, 25 bp, Homo sapien
tcagctagtgattcaaaagatttct

SEQ ID NO: 3885600 - DNA, 25 bp, Homo sapien
ggttacagatgcagtttcccagtcc

SEQ ID NO: 3885601 - DNA, 25 bp, Homo sapien
caggcttgaaaaccaccactttagg

SEQ ID NO: 3885602 - DNA, 25 bp, Homo sapien
tcaaaatgcatgagggtctgaccgc

SEQ ID NO: 3885603 - DNA, 25 bp, Homo sapien
gatgtgtagcatggactggccttga

SEQ ID NO: 3885604 - DNA, 25 bp, Homo sapien
tcaggtccacaactatgccaaatgt

SEQ ID NO: 3885605 - DNA, 25 bp, Homo sapien
ggttggatctcttgggagtgaccat

SEQ ID NO: 3885606 - DNA, 25 bp, Homo sapien
gagaaacaggactaggacaaacaca

SEQ ID NO: 3885607 - DNA, 25 bp, Homo sapien
gatgggcgatagctgaaagaaaacc

SEQ ID NO: 3885608 - DNA, 25 bp, Homo sapien
cagggtcaccttgagttcatggcaa

SEQ ID NO: 3885609 - DNA, 25 bp, Homo sapien
tggagacccctgatgcaaggtaagc

SEQ ID NO: 3885610 - DNA, 25 bp, Homo sapien
tatacgcctgtgacctaaactcgct

SEQ ID NO: 3885611 - DNA, 25 bp, Homo sapien
cctggctacagggtcagcggcttaa

SEQ ID NO: 3885612 - DNA, 25 bp, Homo sapien
taagctctaggacggtgaatctcgg

SEQ ID NO: 3885613 - DNA, 25 bp, Homo sapien
aagacaggcctaagctctaggacgg

SEQ ID NO: 3885614 - DNA, 25 bp, Homo sapien
catcctgagagagttctagaccgac

SEQ ID NO: 3885615 - DNA, 25 bp, Homo sapien
tgtggcacactatacgggtcaggag

SEQ ID NO: 3885616 - DNA, 25 bp, Homo sapien
cagaatcttccggtaatcccctgaa

SEQ ID NO: 3885617 - DNA, 25 bp, Homo sapien
tccggtaatcccctgaagtatctcc

SEQ ID NO: 3885618 - DNA, 25 bp, Homo sapien
acagatcttcagcagaatcttccgg

SEQ ID NO: 3885619 - DNA, 25 bp, Homo sapien
tcagcagaatcttccggtaatcccc

SEQ ID NO: 3885620 - DNA, 25 bp, Homo sapien
ccccatcagaagacggaaagcagca

SEQ ID NO: 3885621 - DNA, 25 bp, Homo sapien
catccgttaagggagggacagtcac

SEQ ID NO: 3885622 - DNA, 25 bp, Homo sapien
ttcccagggctaaccaatattgctg

SEQ ID NO: 3885623 - DNA, 25 bp, Homo sapien
caatgtaacgcaacacagtgtcctg

SEQ ID NO: 3885624 - DNA, 25 bp, Homo sapien
ttccttccaccctaagcaacttgag

SEQ ID NO: 3885625 - DNA, 25 bp, Homo sapien
tctaagagtgcaggctcggcttggc

SEQ ID NO: 3885626 - DNA, 25 bp, Homo sapien
tcttccagatgtccatagcttgctg

SEQ ID NO: 3885627 - DNA, 25 bp, Homo sapien
gctcggcttggctcatttctaatca

SEQ ID NO: 3885628 - DNA, 25 bp, Homo sapien
ctgtaatgaattattaactctcttt

SEQ ID NO: 3885629 - DNA, 25 bp, Homo sapien
tgtaatgaattattaactctctttt

SEQ ID NO: 3885630 - DNA, 25 bp, Homo sapien
tgccgcagcctacctaattagctgg

SEQ ID NO: 3885631 - DNA, 25 bp, Homo sapien
ggacgtggtccccatggtgcaattg

SEQ ID NO: 3885632 - DNA, 25 bp, Homo sapien
cagcttcattcatacagccaaggaa

SEQ ID NO: 3885633 - DNA, 25 bp, Homo sapien
gagtttcctgtgatgacatgcccac

SEQ ID NO: 3885634 - DNA, 25 bp, Homo sapien
tcagggagatttaagggagccattc

SEQ ID NO: 3885635 - DNA, 25 bp, Homo sapien
taatagacacttgacctgcactgcc

SEQ ID NO: 3885636 - DNA, 25 bp, Homo sapien
tggcctacgccataaagctgagtgc

SEQ ID NO: 3885637 - DNA, 25 bp, Homo sapien
cacagagcctttgggacatgagttc

SEQ ID NO: 3885638 - DNA, 25 bp, Homo sapien
tcacacggtgatcggaacgctgaag

SEQ ID NO: 3885639 - DNA, 25 bp, Homo sapien
cacggtgatcggaacgctgaaggtc

SEQ ID NO: 3885640 - DNA, 25 bp, Homo sapien
tcggaacgctgaaggtcacggtcaa

SEQ ID NO: 3885641 - DNA, 25 bp, Homo sapien
acgctgaaggtcacggtcaaggttg

SEQ ID NO: 3885642 - DNA, 25 bp, Homo sapien
gggcgacagcaaggtcatgatccac

SEQ ID NO: 3885643 - DNA, 25 bp, Homo sapien
ctgggggatgcaaggtgggggcgac

SEQ ID NO: 3885644 - DNA, 25 bp, Homo sapien
ggggatgcaaggtgggggcgacagc

SEQ ID NO: 3885645 - DNA, 25 bp, Homo sapien
ggggcgacagcaaggtcatgatcca

SEQ ID NO: 3885646 - DNA, 25 bp, Homo sapien
ggccaagcatatggccactccaagg

SEQ ID NO: 3885647 - DNA, 25 bp, Homo sapien
cataatcaagatgcccacacacagc

SEQ ID NO: 3885648 - DNA, 25 bp, Homo sapien
gggatgaacaagtccgaggtccata

SEQ ID NO: 3885649 - DNA, 25 bp, Homo sapien
acagaggccaagcatatggccactc

SEQ ID NO: 3885650 - DNA, 25 bp, Homo sapien
gatgtcgtggtacagcgacttgccg

SEQ ID NO: 3885651 - DNA, 25 bp, Homo sapien
tctcgctgcgagacaccatgatgcg

SEQ ID NO: 3885652 - DNA, 25 bp, Homo sapien
tgatgtccaggaggtcggtctcgct

SEQ ID NO: 3885653 - DNA, 25 bp, Homo sapien
catgatgcgaatcagggtccggtcc

SEQ ID NO: 3885654 - DNA, 25 bp, Homo sapien
tcagctgagatttagctctccccag

SEQ ID NO: 3885655 - DNA, 25 bp, Homo sapien
caggtcctcggaactctcagctgag

SEQ ID NO: 3885656 - DNA, 25 bp, Homo sapien
cacaggcgaggctaaggttccatcg

SEQ ID NO: 3885657 - DNA, 25 bp, Homo sapien
caacctgcacatggaagttacatac

SEQ ID NO: 3885658 - DNA, 25 bp, Homo sapien
ctcatggccttgttgagcctctccg

SEQ ID NO: 3885659 - DNA, 25 bp, Homo sapien
gccttgttgagcctctccgcaaaga

SEQ ID NO: 3885660 - DNA, 25 bp, Homo sapien
tggccttgttgagcctctccgcaaa

SEQ ID NO: 3885661 - DNA, 25 bp, Homo sapien
catggccttgttgagcctctccgca

SEQ ID NO: 3885662 - DNA, 25 bp, Homo sapien
gacatctcccggcagatgctcttct

SEQ ID NO: 3885663 - DNA, 25 bp, Homo sapien
gtccccggacatctcccggcagatg

SEQ ID NO: 3885664 - DNA, 25 bp, Homo sapien
tccaggtccccggacatctcccggc

SEQ ID NO: 3885665 - DNA, 25 bp, Homo sapien
tgctcttctcaatgtcccggcctgt

SEQ ID NO: 3885666 - DNA, 25 bp, Homo sapien
tgagtaaatgaatggcacccagttt

SEQ ID NO: 3885667 - DNA, 25 bp, Homo sapien
gcacccagttttattgttatgactg

SEQ ID NO: 3885668 - DNA, 25 bp, Homo sapien
aaatgaatggcacccagttttattg

SEQ ID NO: 3885669 - DNA, 25 bp, Homo sapien
gaatggcacccagttttattgttat

SEQ ID NO: 3885670 - DNA, 25 bp, Homo sapien
gaggaacgaccaagtgttcccatag

SEQ ID NO: 3885671 - DNA, 25 bp, Homo sapien
gaaaccctctgacagtgtcttttaa

SEQ ID NO: 3885672 - DNA, 25 bp, Homo sapien
ttgaggaggcgaaagccccacgcag

SEQ ID NO: 3885673 - DNA, 25 bp, Homo sapien
catctaactggcctctgagggaccc

SEQ ID NO: 3885674 - DNA, 25 bp, Homo sapien
gaacttggactcgtctgttcccagg

SEQ ID NO: 3885675 - DNA, 25 bp, Homo sapien
agcacagaaccgcattgaacttgga

SEQ ID NO: 3885676 - DNA, 25 bp, Homo sapien
accgcattgaacttggactcgtctg

SEQ ID NO: 3885677 - DNA, 25 bp, Homo sapien
gactcgtctgttcccaggcggttct

SEQ ID NO: 3885678 - DNA, 25 bp, Homo sapien
acctctgaactagatggcctctaaa

SEQ ID NO: 3885679 - DNA, 25 bp, Homo sapien
gagaggaagacgcacatgtggcaca

SEQ ID NO: 3885680 - DNA, 25 bp, Homo sapien
aactagatggcctctaaagtgcctg

SEQ ID NO: 3885681 - DNA, 25 bp, Homo sapien
aacttctgaaggtttgagcctaaag

SEQ ID NO: 3885682 - DNA, 25 bp, Homo sapien
tctctctgggcgagtgacatgtcca

SEQ ID NO: 3885683 - DNA, 25 bp, Homo sapien
tgacatgtccacgtttgtgctttca

SEQ ID NO: 3885684 - DNA, 25 bp, Homo sapien
tgggcgagtgacatgtccacgtttg

SEQ ID NO: 3885685 - DNA, 25 bp, Homo sapien
gggcatctctctgggcgagtgacat

SEQ ID NO: 3885686 - DNA, 25 bp, Homo sapien
cctgatgtgtcgcttcgaatggcct

SEQ ID NO: 3885687 - DNA, 25 bp, Homo sapien
gccgctggaagtgccctgatgtgtc

SEQ ID NO: 3885688 - DNA, 25 bp, Homo sapien
tgtgtcgcttcgaatggcctcttcc

SEQ ID NO: 3885689 - DNA, 25 bp, Homo sapien
aagtgccctgatgtgtcgcttcgaa

SEQ ID NO: 3885690 - DNA, 25 bp, Homo sapien
cgaggatctcaatcaggcaggcttc

SEQ ID NO: 3885691 - DNA, 25 bp, Homo sapien
taattctcggatgtgctcattgctg

SEQ ID NO: 3885692 - DNA, 25 bp, Homo sapien
tgcgggaagcgaggatctcaatcag

SEQ ID NO: 3885693 - DNA, 25 bp, Homo sapien
ttctcggatgtgctcattgctgcgg

SEQ ID NO: 3885694 - DNA, 25 bp, Homo sapien
ctcaccagcactcgggaagaagggt

SEQ ID NO: 3885695 - DNA, 25 bp, Homo sapien
tgggggctacgctgctgccttaatc

SEQ ID NO: 3885696 - DNA, 25 bp, Homo sapien
cagagaatacaaccaaccatgtgct

SEQ ID NO: 3885697 - DNA, 25 bp, Homo sapien
gcctcaccagcactcgggaagaagg

SEQ ID NO: 3885698 - DNA, 25 bp, Homo sapien
tcatcagagccaagattgtcttctc

SEQ ID NO: 3885699 - DNA, 25 bp, Homo sapien
cttgatggcttcctttatctcataa

SEQ ID NO: 3885700 - DNA, 25 bp, Homo sapien
taaatgtcaaagaggactggggtct

SEQ ID NO: 3885701 - DNA, 25 bp, Homo sapien
ttctcaaagtttcctgacagttcag

SEQ ID NO: 3885702 - DNA, 25 bp, Homo sapien
attggatattcaaacaaacaaccaa

SEQ ID NO: 3885703 - DNA, 25 bp, Homo sapien
tggatattcaaacaaacaaccaaca

SEQ ID NO: 3885704 - DNA, 25 bp, Homo sapien
ggatattcaaacaaacaaccaacaa

SEQ ID NO: 3885705 - DNA, 25 bp, Homo sapien
gatattcaaacaaacaaccaacaaa

SEQ ID NO: 3885706 - DNA, 25 bp, Homo sapien
actgggctagaacacgaatctaatc

SEQ ID NO: 3885707 - DNA, 25 bp, Homo sapien
gggctagaacacgaatctaatcaat

SEQ ID NO: 3885708 - DNA, 25 bp, Homo sapien
gctagaacacgaatctaatcaatat

SEQ ID NO: 3885709 - DNA, 25 bp, Homo sapien
ctgggctagaacacgaatctaatca

SEQ ID NO: 3885710 - DNA, 25 bp, Homo sapien
gcaagggctagaacccagggataga

SEQ ID NO: 3885711 - DNA, 25 bp, Homo sapien
aaaatatgctcatacacgcccctcg

SEQ ID NO: 3885712 - DNA, 25 bp, Homo sapien
tggatgggcagaaggaaatgccctc

SEQ ID NO: 3885713 - DNA, 25 bp, Homo sapien
cagggatagatgtctggagcctctc

SEQ ID NO: 3885714 - DNA, 25 bp, Homo sapien
tgtccatccgggagatccgggccca

SEQ ID NO: 3885715 - DNA, 25 bp, Homo sapien
gtccatccgggagatccgggcccac

SEQ ID NO: 3885716 - DNA, 25 bp, Homo sapien
ggacacgcctcactgtcccgcgccc

SEQ ID NO: 3885717 - DNA, 25 bp, Homo sapien
gacacgcctcactgtcccgcgcccc

SEQ ID NO: 3885718 - DNA, 25 bp, Homo sapien
acacgcctcactgtcccgcgccccc

SEQ ID NO: 3885719 - DNA, 25 bp, Homo sapien
acgcctcactgtcccgcgcccccac

SEQ ID NO: 3885720 - DNA, 25 bp, Homo sapien
ggagcgactccccaggcagtcaatg

SEQ ID NO: 3885721 - DNA, 25 bp, Homo sapien
tgctgccgctgcttgttggagcgac

SEQ ID NO: 3885722 - DNA, 25 bp, Homo sapien
cttgccgtaagccgtcttgaaggaa

SEQ ID NO: 3885723 - DNA, 25 bp, Homo sapien
aaggaaagtaggatctgctgccgct

SEQ ID NO: 3885724 - DNA, 25 bp, Homo sapien
cagtgatggtgcctcggcttccaaa

SEQ ID NO: 3885725 - DNA, 25 bp, Homo sapien
acctcggcatctcgcagggggtcaa

SEQ ID NO: 3885726 - DNA, 25 bp, Homo sapien
tttcatggccttccgcaggacctcg

SEQ ID NO: 3885727 - DNA, 25 bp, Homo sapien
ggtcaaagccgggagcatcagtgat

SEQ ID NO: 3885728 - DNA, 25 bp, Homo sapien
cagaaccatgacaacgaattctagg

SEQ ID NO: 3885729 - DNA, 25 bp, Homo sapien
taggctctgcaaacacgaactgttc

SEQ ID NO: 3885730 - DNA, 25 bp, Homo sapien
gagccaagatcaaccctggaggaac

SEQ ID NO: 3885731 - DNA, 25 bp, Homo sapien
gaattctaggctctgcaaacacgaa

SEQ ID NO: 3885732 - DNA, 25 bp, Homo sapien
gagcgtctcatcacaccaggagaaa

SEQ ID NO: 3885733 - DNA, 25 bp, Homo sapien
taaggagtactcgccaggggtgttc

SEQ ID NO: 3885734 - DNA, 25 bp, Homo sapien
aactcggatgtggagcgtctcatca

SEQ ID NO: 3885735 - DNA, 25 bp, Homo sapien
ccaactcggatgtggagcgtctcat

SEQ ID NO: 3885736 - DNA, 25 bp, Homo sapien
agcaacacaacccagaggtggggag

SEQ ID NO: 3885737 - DNA, 25 bp, Homo sapien
ttaagcaacacaacccagaggtggg

SEQ ID NO: 3885738 - DNA, 25 bp, Homo sapien
cttaagcaacacaacccagaggtgg

SEQ ID NO: 3885739 - DNA, 25 bp, Homo sapien
taagcaacacaacccagaggtgggg

SEQ ID NO: 3885740 - DNA, 25 bp, Homo sapien
cactggaggctgaccagggtaggtc

SEQ ID NO: 3885741 - DNA, 25 bp, Homo sapien
tatggcggatatgagggcatcctgg

SEQ ID NO: 3885742 - DNA, 25 bp, Homo sapien
atcctgggtagctcggcactggctg

SEQ ID NO: 3885743 - DNA, 25 bp, Homo sapien
atacatcccatagggaggaacaggc

SEQ ID NO: 3885744 - DNA, 25 bp, Homo sapien
cccagaggccagcagctttgattcc

SEQ ID NO: 3885745 - DNA, 25 bp, Homo sapien
ccagggctgcctcagcaggagagct

SEQ ID NO: 3885746 - DNA, 25 bp, Homo sapien
atagacaactctggagccccagagg

SEQ ID NO: 3885747 - DNA, 25 bp, Homo sapien
attcctctggccacgcaggtgtggc

SEQ ID NO: 3885748 - DNA, 25 bp, Homo sapien
tgccccgcataggtggccacgttat

SEQ ID NO: 3885749 - DNA, 25 bp, Homo sapien
tggccacgttatccagcccgatggg

SEQ ID NO: 3885750 - DNA, 25 bp, Homo sapien
agatagtcctggttgaactgccccg

SEQ ID NO: 3885751 - DNA, 25 bp, Homo sapien
cctggttgaactgccccgcataggt

SEQ ID NO: 3885752 - DNA, 25 bp, Homo sapien
gaggagggtaggcagcacctcccca

SEQ ID NO: 3885753 - DNA, 25 bp, Homo sapien
gagggtaggcagcacctccccaggg

SEQ ID NO: 3885754 - DNA, 25 bp, Homo sapien
gggtaggcagcacctccccagggac

SEQ ID NO: 3885755 - DNA, 25 bp, Homo sapien
ctgggcggaggagggtaggcagcac

SEQ ID NO: 3885756 - DNA, 25 bp, Homo sapien
gctcagctgtgctagcaaaggtggc

SEQ ID NO: 3885757 - DNA, 25 bp, Homo sapien
ctacatggcagcttcggatcggctc

SEQ ID NO: 3885758 - DNA, 25 bp, Homo sapien
ttcggatcggctcttcatctccagg

SEQ ID NO: 3885759 - DNA, 25 bp, Homo sapien
ggcagcttcggatcggctcttcatc

SEQ ID NO: 3885760 - DNA, 25 bp, Homo sapien
gccacctgggggcgggggatagcca

SEQ ID NO: 3885761 - DNA, 25 bp, Homo sapien
gcgggggatagccagggtagctcat

SEQ ID NO: 3885762 - DNA, 25 bp, Homo sapien
tgcagctggtgggtagccacctggg

SEQ ID NO: 3885763 - DNA, 25 bp, Homo sapien
tggtgcagctggtgggtagccacct

SEQ ID NO: 3885764 - DNA, 25 bp, Homo sapien
ttgtcgcagaccagttcactgtctc

SEQ ID NO: 3885765 - DNA, 25 bp, Homo sapien
cttgtcgcagaccagttcactgtct

SEQ ID NO: 3885766 - DNA, 25 bp, Homo sapien
gacgaaagcacattcaggctctgcc

SEQ ID NO: 3885767 - DNA, 25 bp, Homo sapien
aagagaagacgaaagcacattcagg

SEQ ID NO: 3885768 - DNA, 25 bp, Homo sapien
tgtgtccttattgccatccctccag

SEQ ID NO: 3885769 - DNA, 25 bp, Homo sapien
aggactccaggtctgtctatttatc

SEQ ID NO: 3885770 - DNA, 25 bp, Homo sapien
ccagcaacaggggaagtcagaggcc

SEQ ID NO: 3885771 - DNA, 25 bp, Homo sapien
cctggtaaggtatggaatcatcgtt

SEQ ID NO: 3885772 - DNA, 25 bp, Homo sapien
gcaatgtcccctgccagttaaattg

SEQ ID NO: 3885773 - DNA, 25 bp, Homo sapien
tcacgaagtccctctgaacacggat

SEQ ID NO: 3885774 - DNA, 25 bp, Homo sapien
gaacacggatcccttggcaatgtcc

SEQ ID NO: 3885775 - DNA, 25 bp, Homo sapien
tgtgacaccagccacattgtgcaac

SEQ ID NO: 3885776 - DNA, 25 bp, Homo sapien
cttctgtaagtctcttccccagaca

SEQ ID NO: 3885777 - DNA, 25 bp, Homo sapien
tctgtaagtctcttccccagacaca

SEQ ID NO: 3885778 - DNA, 25 bp, Homo sapien
tgtaagtctcttccccagacacaca

SEQ ID NO: 3885779 - DNA, 25 bp, Homo sapien
gcaactccacttctgtaagtctctt

SEQ ID NO: 3885780 - DNA, 25 bp, Homo sapien
tgcttctaatcacggccctctgaca

SEQ ID NO: 3885781 - DNA, 25 bp, Homo sapien
gctctacgcctgcttctaatcacgg

SEQ ID NO: 3885782 - DNA, 25 bp, Homo sapien
gcatgtcccccgctctacgcctgct

SEQ ID NO: 3885783 - DNA, 25 bp, Homo sapien
tctaatcacggccctctgacatggg

SEQ ID NO: 3885784 - DNA, 25 bp, Homo sapien
gctggcctccttaaggatgggtcca

SEQ ID NO: 3885785 - DNA, 25 bp, Homo sapien
aggctgcagcacaaataccgccctt

SEQ ID NO: 3885786 - DNA, 25 bp, Homo sapien
gcagctgtgcacctgatttcatcca

SEQ ID NO: 3885787 - DNA, 25 bp, Homo sapien
ttccttcctcactgcgaccatccac

SEQ ID NO: 3885788 - DNA, 25 bp, Homo sapien
cctccagagtctttgaatcagtgtc

SEQ ID NO: 3885789 - DNA, 25 bp, Homo sapien
tcacctggagagctcactaaacatg

SEQ ID NO: 3885790 - DNA, 25 bp, Homo sapien
taaggtattggacactctctagctc

SEQ ID NO: 3885791 - DNA, 25 bp, Homo sapien
ttctgtggtccacactctaggaaac

SEQ ID NO: 3885792 - DNA, 25 bp, Homo sapien
tctacccaacaattggaggtggaga

SEQ ID NO: 3885793 - DNA, 25 bp, Homo sapien
tggagatatgggctccagccaccag

SEQ ID NO: 3885794 - DNA, 25 bp, Homo sapien
taggccatgcacatttgctggtgtc

SEQ ID NO: 3885795 - DNA, 25 bp, Homo sapien
tgcctgacttcagggatacagaagg

SEQ ID NO: 3885796 - DNA, 25 bp, Homo sapien
tcatgtgctgcaaacttaatggtca

SEQ ID NO: 3885797 - DNA, 25 bp, Homo sapien
ctgagaggcggtacttttaagaggc

SEQ ID NO: 3885798 - DNA, 25 bp, Homo sapien
agtgggctccttaccaccagtgtgt

SEQ ID NO: 3885799 - DNA, 25 bp, Homo sapien
taagaggctctaccctcacgaatgg

SEQ ID NO: 3885800 - DNA, 25 bp, Homo sapien
tgtgagccaaataagctactattgc

SEQ ID NO: 3885801 - DNA, 25 bp, Homo sapien
tagtttaaaccaggcaggtccaata

SEQ ID NO: 3885802 - DNA, 25 bp, Homo sapien
cttgccagatgcagcctcacgatct

SEQ ID NO: 3885803 - DNA, 25 bp, Homo sapien
taagacaatagtttaaaccaggcag

SEQ ID NO: 3885804 - DNA, 25 bp, Homo sapien
accatggcatgcgactgtggtccca

SEQ ID NO: 3885805 - DNA, 25 bp, Homo sapien
taggacacccagttagagtcagaga

SEQ ID NO: 3885806 - DNA, 25 bp, Homo sapien
gaagacttacttagccctgagctga

SEQ ID NO: 3885807 - DNA, 25 bp, Homo sapien
taacctatagggtctgcagtgactc

SEQ ID NO: 3885808 - DNA, 25 bp, Homo sapien
gaggcagaaacgtctactacggtag

SEQ ID NO: 3885809 - DNA, 25 bp, Homo sapien
agaagagagtttgtgcagggaaatt

SEQ ID NO: 3885810 - DNA, 25 bp, Homo sapien
gaagagagtttgtgcagggaaattt

SEQ ID NO: 3885811 - DNA, 25 bp, Homo sapien
aagagagtttgtgcagggaaatttc

SEQ ID NO: 3885812 - DNA, 25 bp, Homo sapien
cagtgctggtgaagcatacccttac

SEQ ID NO: 3885813 - DNA, 25 bp, Homo sapien
gggtgttgcagagaaaaatccagag

SEQ ID NO: 3885814 - DNA, 25 bp, Homo sapien
aatccagagaaagtgaaaagtctac

SEQ ID NO: 3885815 - DNA, 25 bp, Homo sapien
ttccccatgggaacaagtgccagga

SEQ ID NO: 3885816 - DNA, 25 bp, Homo sapien
aacctagtccctgttgcgtgggcag

SEQ ID NO: 3885817 - DNA, 25 bp, Homo sapien
tgaagggtgagcataccaggccctg

SEQ ID NO: 3885818 - DNA, 25 bp, Homo sapien
aattgactgccgcataaaaggaatg

SEQ ID NO: 3885819 - DNA, 25 bp, Homo sapien
tgttaatcccctggaatccccaaca

SEQ ID NO: 3885820 - DNA, 25 bp, Homo sapien
tgctcccagtttcggaggaaagttc

SEQ ID NO: 3885821 - DNA, 25 bp, Homo sapien
caggaatgtgcgtgctcccagtttc

SEQ ID NO: 3885822 - DNA, 25 bp, Homo sapien
aaataaactgcaatggtagcagctc

SEQ ID NO: 3885823 - DNA, 25 bp, Homo sapien
taaactgcaatggtagcagctccca

SEQ ID NO: 3885824 - DNA, 25 bp, Homo sapien
gggagtggctctctccgcgggcgtc

SEQ ID NO: 3885825 - DNA, 25 bp, Homo sapien
cgcgaggggcgaaatgggacgtggg

SEQ ID NO: 3885826 - DNA, 25 bp, Homo sapien
ggacgtgggcgggagtggctctctc

SEQ ID NO: 3885827 - DNA, 25 bp, Homo sapien
tggccacggggactccggacgcgag

SEQ ID NO: 3885828 - DNA, 25 bp, Homo sapien
agccgtcagcgccgggcggaaaact

SEQ ID NO: 3885829 - DNA, 25 bp, Homo sapien
gggcgcagcagccgtcagcgccggg

SEQ ID NO: 3885830 - DNA, 25 bp, Homo sapien
gcggaaaactccgcgggcgcggctg

SEQ ID NO: 3885831 - DNA, 25 bp, Homo sapien
tcagcgccgggcggaaaactccgcg

SEQ ID NO: 3885832 - DNA, 25 bp, Homo sapien
agcagcagccttccggctgcggagc

SEQ ID NO: 3885833 - DNA, 25 bp, Homo sapien
ctgggcacggcgggcccgcgaggag

SEQ ID NO: 3885834 - DNA, 25 bp, Homo sapien
cggcgggcccgcgaggagcagcagc

SEQ ID NO: 3885835 - DNA, 25 bp, Homo sapien
cgggcccgcgaggagcagcagcctt

SEQ ID NO: 3885836 - DNA, 25 bp, Homo sapien
cgagtgagggtgaaactcaggccaa

SEQ ID NO: 3885837 - DNA, 25 bp, Homo sapien
cagagccgctcggagaaaacgctgc

SEQ ID NO: 3885838 - DNA, 25 bp, Homo sapien
tcaggccaaagtctccagagccgct

SEQ ID NO: 3885839 - DNA, 25 bp, Homo sapien
gcattttttggacatgagtcggcga

SEQ ID NO: 3885840 - DNA, 25 bp, Homo sapien
tgaagtactgttcgatgacatcctt

SEQ ID NO: 3885841 - DNA, 25 bp, Homo sapien
tttgaagtactgttcgatgacatcc

SEQ ID NO: 3885842 - DNA, 25 bp, Homo sapien
agtactgttcgatgacatccttggc

SEQ ID NO: 3885843 - DNA, 25 bp, Homo sapien
gcatttgaagtactgttcgatgaca

SEQ ID NO: 3885844 - DNA, 25 bp, Homo sapien
tctgtcaattgtacaggggccttcc

SEQ ID NO: 3885845 - DNA, 25 bp, Homo sapien
tgtcaattgtacaggggccttccca

SEQ ID NO: 3885846 - DNA, 25 bp, Homo sapien
ctgtcaattgtacaggggccttccc

SEQ ID NO: 3885847 - DNA, 25 bp, Homo sapien
tctctgtcaattgtacaggggcctt

SEQ ID NO: 3885848 - DNA, 25 bp, Homo sapien
tttctactgttactggcacaaaaag

SEQ ID NO: 3885849 - DNA, 25 bp, Homo sapien
ccagcctcatcagcggggctggata

SEQ ID NO: 3885850 - DNA, 25 bp, Homo sapien
cctctttgatagtggcaaacaccag

SEQ ID NO: 3885851 - DNA, 25 bp, Homo sapien
ccctgctggacgtaagggcccaggt

SEQ ID NO: 3885852 - DNA, 25 bp, Homo sapien
tatgacgtacatttgcaacaggatt

SEQ ID NO: 3885853 - DNA, 25 bp, Homo sapien
tgctccacagaagatcaggaaggag

SEQ ID NO: 3885854 - DNA, 25 bp, Homo sapien
tagaagattcaactcatatgcggtc

SEQ ID NO: 3885855 - DNA, 25 bp, Homo sapien
tgttaggttccaaccagcctcagtg

SEQ ID NO: 3885856 - DNA, 25 bp, Homo sapien
ggtggtgctcagggtaaagggctat

SEQ ID NO: 3885857 - DNA, 25 bp, Homo sapien
cgtcaaataaattgtgtaggaggag

SEQ ID NO: 3885858 - DNA, 25 bp, Homo sapien
gggagggcacaaggaccatttgcca

SEQ ID NO: 3885859 - DNA, 25 bp, Homo sapien
cacaaggaccatttgccagaatcca

SEQ ID NO: 3885860 - DNA, 25 bp, Homo sapien
caggatctcttctccacagtcgtac

SEQ ID NO: 3885861 - DNA, 25 bp, Homo sapien
tggccttgattgcaacagctgcctc

SEQ ID NO: 3885862 - DNA, 25 bp, Homo sapien
ttattttgccatggccttgattgca

SEQ ID NO: 3885863 - DNA, 25 bp, Homo sapien
gcagacagcaccgtgatcaggatct

SEQ ID NO: 3885864 - DNA, 25 bp, Homo sapien
tctccctcagggagacgaaggtcct

SEQ ID NO: 3885865 - DNA, 25 bp, Homo sapien
caaggtctccctcagggagacgaag

SEQ ID NO: 3885866 - DNA, 25 bp, Homo sapien
ggtctccctcagggagacgaaggtc

SEQ ID NO: 3885867 - DNA, 25 bp, Homo sapien
tccctcagggagacgaaggtcctct

SEQ ID NO: 3885868 - DNA, 25 bp, Homo sapien
ctggaagtcattccttctgatgttg

SEQ ID NO: 3885869 - DNA, 25 bp, Homo sapien
ggaagtcattccttctgatgttggg

SEQ ID NO: 3885870 - DNA, 25 bp, Homo sapien
ctggatgccaatcagctggaagtca

SEQ ID NO: 3885871 - DNA, 25 bp, Homo sapien
ccaatcagctggaagtcattccttc

SEQ ID NO: 3885872 - DNA, 25 bp, Homo sapien
acaaagccattcttacgtaatgctg

SEQ ID NO: 3885873 - DNA, 25 bp, Homo sapien
gcctttgagcaccacaaagccattc

SEQ ID NO: 3885874 - DNA, 25 bp, Homo sapien
agccattcttacgtaatgctgagca

SEQ ID NO: 3885875 - DNA, 25 bp, Homo sapien
aaagccattcttacgtaatgctgag

SEQ ID NO: 3885876 - DNA, 25 bp, Homo sapien
cattgggaaggtggctgaggcccct

SEQ ID NO: 3885877 - DNA, 25 bp, Homo sapien
tctcctgtctcgaagtccaaatcat

SEQ ID NO: 3885878 - DNA, 25 bp, Homo sapien
tgcatctcctgtctcgaagtccaaa

SEQ ID NO: 3885879 - DNA, 25 bp, Homo sapien
gtctcgaagtccaaatcatctgcca

SEQ ID NO: 3885880 - DNA, 25 bp, Homo sapien
tggcgcaaacggcactgactcgacc

SEQ ID NO: 3885881 - DNA, 25 bp, Homo sapien
ctggcgcaaacggcactgactcgac

SEQ ID NO: 3885882 - DNA, 25 bp, Homo sapien
gggctaatgacagcatgtcctggaa

SEQ ID NO: 3885883 - DNA, 25 bp, Homo sapien
gtagtgaaccgcagggctaatgaca

SEQ ID NO: 3885884 - DNA, 25 bp, Homo sapien
ctgaatcatggacatgtgcagtagt

SEQ ID NO: 3885885 - DNA, 25 bp, Homo sapien
ttctctcaaccaggatctttaaagt

SEQ ID NO: 3885886 - DNA, 25 bp, Homo sapien
atacagagcgatgaagatgagctgg

SEQ ID NO: 3885887 - DNA, 25 bp, Homo sapien
gagtaggaatacagagcgatgaaga

SEQ ID NO: 3885888 - DNA, 25 bp, Homo sapien
ttcatttatgggaaggttgtcaggg

SEQ ID NO: 3885889 - DNA, 25 bp, Homo sapien
tagttcatatttactaaagagtagg

SEQ ID NO: 3885890 - DNA, 25 bp, Homo sapien
ttctctcccttctcgactcaggaag

SEQ ID NO: 3885891 - DNA, 25 bp, Homo sapien
atgccacaaggaatcccacacaggc

SEQ ID NO: 3885892 - DNA, 25 bp, Homo sapien
tgaatcacggccttcagatgccaca

SEQ ID NO: 3885893 - DNA, 25 bp, Homo sapien
cacacaggccagtggatcacgtgca

SEQ ID NO: 3885894 - DNA, 25 bp, Homo sapien
agaacgtgaacgagaagaaaaggag

SEQ ID NO: 3885895 - DNA, 25 bp, Homo sapien
gaatgaaagaacgtgaacgagaaga

SEQ ID NO: 3885896 - DNA, 25 bp, Homo sapien
tgaaagaacgtgaacgagaagaaaa

SEQ ID NO: 3885897 - DNA, 25 bp, Homo sapien
tgagaatgaaagaacgtgaacgaga

SEQ ID NO: 3885898 - DNA, 25 bp, Homo sapien
gggtgatgcgagttgtcatcatcct

SEQ ID NO: 3885899 - DNA, 25 bp, Homo sapien
taccagccgttctaggggtgatgcg

SEQ ID NO: 3885900 - DNA, 25 bp, Homo sapien
cctgactgcaatgccagccagactg

SEQ ID NO: 3885901 - DNA, 25 bp, Homo sapien
aagatttactagtgttcaaaacatg

SEQ ID NO: 3885902 - DNA, 25 bp, Homo sapien
gagaacagttatcccgctgggtggc

SEQ ID NO: 3885903 - DNA, 25 bp, Homo sapien
cgtttttctcacgtgccacagctga

SEQ ID NO: 3885904 - DNA, 25 bp, Homo sapien
ctggtcccctgtgaatagcggagca

SEQ ID NO: 3885905 - DNA, 25 bp, Homo sapien
gctgaatgactcttggctggtcccc

SEQ ID NO: 3885906 - DNA, 25 bp, Homo sapien
ctgctgttggaaggactcagttgaa

SEQ ID NO: 3885907 - DNA, 25 bp, Homo sapien
cccctgctgttggaaggactcagtt

SEQ ID NO: 3885908 - DNA, 25 bp, Homo sapien
tgaagggacactttatggcattgat

SEQ ID NO: 3885909 - DNA, 25 bp, Homo sapien
gggatagcagtttgtccccacgact

SEQ ID NO: 3885910 - DNA, 25 bp, Homo sapien
cctgcactagagagtcccctgaaaa

SEQ ID NO: 3885911 - DNA, 25 bp, Homo sapien
ctcctccactcgattgttctctggg

SEQ ID NO: 3885912 - DNA, 25 bp, Homo sapien
cctctgggaattcaaccacctccac

SEQ ID NO: 3885913 - DNA, 25 bp, Homo sapien
tgggaattcaaccacctccactcga

SEQ ID NO: 3885914 - DNA, 25 bp, Homo sapien
gctgttggtcttccgggacctcatt

SEQ ID NO: 3885915 - DNA, 25 bp, Homo sapien
ctgttggtcttccgggacctcattc

SEQ ID NO: 3885916 - DNA, 25 bp, Homo sapien
agctggtggtcctccggaacctcat

SEQ ID NO: 3885917 - DNA, 25 bp, Homo sapien
ttcacatgaatctcctcggttactt

SEQ ID NO: 3885918 - DNA, 25 bp, Homo sapien
gcccctcaataaccaccttcacatg

SEQ ID NO: 3885919 - DNA, 25 bp, Homo sapien
aataaccaccttcacatgaatctcc

SEQ ID NO: 3885920 - DNA, 25 bp, Homo sapien
tgggtggcgtctggcccctcaataa

SEQ ID NO: 3885921 - DNA, 25 bp, Homo sapien
tgggcacctgccctactttcagcat

SEQ ID NO: 3885922 - DNA, 25 bp, Homo sapien
ctggattcacttttcgaaatagtcc

SEQ ID NO: 3885923 - DNA, 25 bp, Homo sapien
tggccttagcacacggtcagtctgt

SEQ ID NO: 3885924 - DNA, 25 bp, Homo sapien
gaaatagtcctcctgctgcaaagtc

SEQ ID NO: 3885925 - DNA, 25 bp, Homo sapien
atccaggtaacccagcatcactctt

SEQ ID NO: 3885926 - DNA, 25 bp, Homo sapien
ccaggtaacccagcatcactcttct

SEQ ID NO: 3885927 - DNA, 25 bp, Homo sapien
tcatccaggtaacccagcatcactc

SEQ ID NO: 3885928 - DNA, 25 bp, Homo sapien
tccaggtaacccagcatcactcttc

SEQ ID NO: 3885929 - DNA, 25 bp, Homo sapien
tctcccgaggagggcatggatacca

SEQ ID NO: 3885930 - DNA, 25 bp, Homo sapien
ggcctgaagagggttgcagagccct

SEQ ID NO: 3885931 - DNA, 25 bp, Homo sapien
cccgaggagggcatggataccatgc

SEQ ID NO: 3885932 - DNA, 25 bp, Homo sapien
gggctgccacgggaagtggaaggca

SEQ ID NO: 3885933 - DNA, 25 bp, Homo sapien
aggaacttggccacctgcaaaccac

SEQ ID NO: 3885934 - DNA, 25 bp, Homo sapien
caggagccgggcttcttttgttgcc

SEQ ID NO: 3885935 - DNA, 25 bp, Homo sapien
gaattttcatgtcgagtgtgagcca

SEQ ID NO: 3885936 - DNA, 25 bp, Homo sapien
aatctgaggcttcctaggtgaccag

SEQ ID NO: 3885937 - DNA, 25 bp, Homo sapien
atgaaagccagggtctttgtgctcc

SEQ ID NO: 3885938 - DNA, 25 bp, Homo sapien
cagcaccatgtaccctagagagagg

SEQ ID NO: 3885939 - DNA, 25 bp, Homo sapien
catgtaccctagagagaggccaagt

SEQ ID NO: 3885940 - DNA, 25 bp, Homo sapien
aagccagggtctttgtgctccaggc

SEQ ID NO: 3885941 - DNA, 25 bp, Homo sapien
gctgctggccatggatggaaaggca

SEQ ID NO: 3885942 - DNA, 25 bp, Homo sapien
agttccaagaccttagcaggccaag

SEQ ID NO: 3885943 - DNA, 25 bp, Homo sapien
gtcagaggtccaggctaaggacaag

SEQ ID NO: 3885944 - DNA, 25 bp, Homo sapien
cagacagtcacctggcaaaggcaga

SEQ ID NO: 3885945 - DNA, 25 bp, Homo sapien
ttaacatgaggccataggaccagcc

SEQ ID NO: 3885946 - DNA, 25 bp, Homo sapien
tccctggatccgaaagggccactca

SEQ ID NO: 3885947 - DNA, 25 bp, Homo sapien
gcaagccccgcctatttaacatgag

SEQ ID NO: 3885948 - DNA, 25 bp, Homo sapien
ttgtccaacaccagaaggcaagccc

SEQ ID NO: 3885949 - DNA, 25 bp, Homo sapien
catctaggtctaaacacgtggctgt

SEQ ID NO: 3885950 - DNA, 25 bp, Homo sapien
ttttcagacaattgcccacggctca

SEQ ID NO: 3885951 - DNA, 25 bp, Homo sapien
tacaggtgcttaggagacatcagtc

SEQ ID NO: 3885952 - DNA, 25 bp, Homo sapien
caacaagagctagtgggttaatccc

SEQ ID NO: 3885953 - DNA, 25 bp, Homo sapien
tttccactaaattaacattgcccca

SEQ ID NO: 3885954 - DNA, 25 bp, Homo sapien
gaattcactcttgacgggggtgcct

SEQ ID NO: 3885955 - DNA, 25 bp, Homo sapien
ggagacgagtgagggaattcactct

SEQ ID NO: 3885956 - DNA, 25 bp, Homo sapien
tccactaaattaacattgccccagt

SEQ ID NO: 3885957 - DNA, 25 bp, Homo sapien
caggagaacaccatgcccatcctta

SEQ ID NO: 3885958 - DNA, 25 bp, Homo sapien
acaggctaaatgagagggacctggc

SEQ ID NO: 3885959 - DNA, 25 bp, Homo sapien
catgatgatgacaggacaggctaaa

SEQ ID NO: 3885960 - DNA, 25 bp, Homo sapien
tggccatgatgatgacaggacaggc

SEQ ID NO: 3885961 - DNA, 25 bp, Homo sapien
ggctaaatgagagggacctggcttt

SEQ ID NO: 3885962 - DNA, 25 bp, Homo sapien
tccagggtgagaccaggcccagctc

SEQ ID NO: 3885963 - DNA, 25 bp, Homo sapien
ctggggaagaggagcatggccacca

SEQ ID NO: 3885964 - DNA, 25 bp, Homo sapien
accaggtgcctccagggtgagacca

SEQ ID NO: 3885965 - DNA, 25 bp, Homo sapien
ggaagaggagcatggccaccaggtg

SEQ ID NO: 3885966 - DNA, 25 bp, Homo sapien
gaactcgcttcttccgaaatggccg

SEQ ID NO: 3885967 - DNA, 25 bp, Homo sapien
ggtagatgggcttcttcaagtccaa

SEQ ID NO: 3885968 - DNA, 25 bp, Homo sapien
tacaagcttcctgggaacctcccat

SEQ ID NO: 3885969 - DNA, 25 bp, Homo sapien
ggccgtagcatgctgtcttctggta

SEQ ID NO: 3885970 - DNA, 25 bp, Homo sapien
tttaacctgacaaccaggctttctg

SEQ ID NO: 3885971 - DNA, 25 bp, Homo sapien
gggcagcctcctttaacctgacaac

SEQ ID NO: 3885972 - DNA, 25 bp, Homo sapien
caaggtcctgtgtaatagcagcgca

SEQ ID NO: 3885973 - DNA, 25 bp, Homo sapien
gatgcactgtgctgtaccaagagct

SEQ ID NO: 3885974 - DNA, 25 bp, Homo sapien
ccggccggaggtcgaagttcttatg

SEQ ID NO: 3885975 - DNA, 25 bp, Homo sapien
agatggaaatggacagcggctcggc

SEQ ID NO: 3885976 - DNA, 25 bp, Homo sapien
cggctcggccacaccaatggcatag

SEQ ID NO: 3885977 - DNA, 25 bp, Homo sapien
ttctgagaggttccgtaggtgaaga

SEQ ID NO: 3885978 - DNA, 25 bp, Homo sapien
gtgcagcgtcagggattgaagcctc

SEQ ID NO: 3885979 - DNA, 25 bp, Homo sapien
ggtgcagcgtcagggattgaagcct

SEQ ID NO: 3885980 - DNA, 25 bp, Homo sapien
ccagcaaggtgcagcgtcagggatt

SEQ ID NO: 3885981 - DNA, 25 bp, Homo sapien
cttccagcaaggtgcagcgtcaggg

SEQ ID NO: 3885982 - DNA, 25 bp, Homo sapien
ttttcctgctatcttcaccgagggc

SEQ ID NO: 3885983 - DNA, 25 bp, Homo sapien
accagcggggaccacatgcctcttg

SEQ ID NO: 3885984 - DNA, 25 bp, Homo sapien
gggcagttcttctacacgcctctct

SEQ ID NO: 3885985 - DNA, 25 bp, Homo sapien
cacatgctcccctgcaattttcctg

SEQ ID NO: 3885986 - DNA, 25 bp, Homo sapien
taccttggtgtagtccttcccagag

SEQ ID NO: 3885987 - DNA, 25 bp, Homo sapien
catatgcagctgagcggtctacctt

SEQ ID NO: 3885988 - DNA, 25 bp, Homo sapien
taggtgtccacaataatcttacggc

SEQ ID NO: 3885989 - DNA, 25 bp, Homo sapien
atcttacggccagtgacacccgcat

SEQ ID NO: 3885990 - DNA, 25 bp, Homo sapien
gctgaactgcaactcaggaaggatg

SEQ ID NO: 3885991 - DNA, 25 bp, Homo sapien
taagaccccttagcccagaactctg

SEQ ID NO: 3885992 - DNA, 25 bp, Homo sapien
tgacaacatattgaaaacaggtaac

SEQ ID NO: 3885993 - DNA, 25 bp, Homo sapien
tcccagctcagtcactgacaacata

SEQ ID NO: 3885994 - DNA, 25 bp, Homo sapien
cagccactccctaatgcctttgtta

SEQ ID NO: 3885995 - DNA, 25 bp, Homo sapien
ttgttactgagtccatcacaatgga

SEQ ID NO: 3885996 - DNA, 25 bp, Homo sapien
caaagcttcattagcaagtgcagaa

SEQ ID NO: 3885997 - DNA, 25 bp, Homo sapien
ctgccaaagcttcattagcaagtgc

SEQ ID NO: 3885998 - DNA, 25 bp, Homo sapien
gaggccaaaattcaccgactttaca

SEQ ID NO: 3885999 - DNA, 25 bp, Homo sapien
ccagtggcgctaagtggaggaatcc

SEQ ID NO: 3886000 - DNA, 25 bp, Homo sapien
tccccagagagtgcactaaatgtac

SEQ ID NO: 3886001 - DNA, 25 bp, Homo sapien
cagcctgtggtgaagatctggaaac

SEQ ID NO: 3886002 - DNA, 25 bp, Homo sapien
tcttcgtccaggtacttggccggca

SEQ ID NO: 3886003 - DNA, 25 bp, Homo sapien
gatgcgcacagggatgactgcgcca

SEQ ID NO: 3886004 - DNA, 25 bp, Homo sapien
acggccctgatgacttgctccttca

SEQ ID NO: 3886005 - DNA, 25 bp, Homo sapien
tcctccagcgtgatgtcttcgttgt

SEQ ID NO: 3886006 - DNA, 25 bp, Homo sapien
catccgggcgttgagcttgtgagca

SEQ ID NO: 3886007 - DNA, 25 bp, Homo sapien
cactcctctgtctcgtcggtagcat

SEQ ID NO: 3886008 - DNA, 25 bp, Homo sapien
aggccggagcgcctgaggtctgcca

SEQ ID NO: 3886009 - DNA, 25 bp, Homo sapien
tctcgtcggtagcatagccgaacat

SEQ ID NO: 3886010 - DNA, 25 bp, Homo sapien
ctagaccaagaggaccgcagctctc

SEQ ID NO: 3886011 - DNA, 25 bp, Homo sapien
aagaggaccgcagctctctccaagc

SEQ ID NO: 3886012 - DNA, 25 bp, Homo sapien
ccaagcctgaaatctccctggtgtg

SEQ ID NO: 3886013 - DNA, 25 bp, Homo sapien
tccacgttgattgggtgcctcctcc

SEQ ID NO: 3886014 - DNA, 25 bp, Homo sapien
tctggggattgctgctccaaagcca

SEQ ID NO: 3886015 - DNA, 25 bp, Homo sapien
caccagcacgttgcaagtcttgaag

SEQ ID NO: 3886016 - DNA, 25 bp, Homo sapien
cactgggcaatatctggggattgct

SEQ ID NO: 3886017 - DNA, 25 bp, Homo sapien
ctgtccagatggacgcactgggcaa

SEQ ID NO: 3886018 - DNA, 25 bp, Homo sapien
cagccccctttattcagtgcatctt

SEQ ID NO: 3886019 - DNA, 25 bp, Homo sapien
cccctttattcagtgcatctttctc

SEQ ID NO: 3886020 - DNA, 25 bp, Homo sapien
aagcctttggcagcgccaagaaggc

SEQ ID NO: 3886021 - DNA, 25 bp, Homo sapien
aaagcctttggcagcgccaagaagg

SEQ ID NO: 3886022 - DNA, 25 bp, Homo sapien
cctggaacctgacagacaagtgtag

SEQ ID NO: 3886023 - DNA, 25 bp, Homo sapien
tcctcctggtagtattgatgctccc

SEQ ID NO: 3886024 - DNA, 25 bp, Homo sapien
cactgggcatagtcgcctgttggcc

SEQ ID NO: 3886025 - DNA, 25 bp, Homo sapien
acaacagatgggcatgtgctgggcc

SEQ ID NO: 3886026 - DNA, 25 bp, Homo sapien
aaaggcacgggtttgactcagcact

SEQ ID NO: 3886027 - DNA, 25 bp, Homo sapien
cagggatttcagacccggaggcctg

SEQ ID NO: 3886028 - DNA, 25 bp, Homo sapien
gcagagagcaacagggatttcagac

SEQ ID NO: 3886029 - DNA, 25 bp, Homo sapien
tcagcactggggtctctatcagcag

SEQ ID NO: 3886030 - DNA, 25 bp, Homo sapien
tggtagtccaccatggccattgagg

SEQ ID NO: 3886031 - DNA, 25 bp, Homo sapien
tagccgatgtgcttgatggtgtccc

SEQ ID NO: 3886032 - DNA, 25 bp, Homo sapien
gcaccatgccggtcttgcacactgt

SEQ ID NO: 3886033 - DNA, 25 bp, Homo sapien
ccttggctgagtcatcgtagccgat

SEQ ID NO: 3886034 - DNA, 25 bp, Homo sapien
gggtcttgcttgagatgggcatcca

SEQ ID NO: 3886035 - DNA, 25 bp, Homo sapien
cttgcttgagatgggcatccagcac

SEQ ID NO: 3886036 - DNA, 25 bp, Homo sapien
gcactgcatcactgatctggtcaca

SEQ ID NO: 3886037 - DNA, 25 bp, Homo sapien
cttggcattggggtcttgcttgaga

SEQ ID NO: 3886038 - DNA, 25 bp, Homo sapien
cccacagactccgatgtgaacatga

SEQ ID NO: 3886039 - DNA, 25 bp, Homo sapien
ccacagactccgatgtgaacatgaa

SEQ ID NO: 3886040 - DNA, 25 bp, Homo sapien
acaagccatccaccggtccattcat

SEQ ID NO: 3886041 - DNA, 25 bp, Homo sapien
tcacttagagagtggtcacacaagc

SEQ ID NO: 3886042 - DNA, 25 bp, Homo sapien
tggaacacgggatgtgtccctccct

SEQ ID NO: 3886043 - DNA, 25 bp, Homo sapien
cacgtgagaacaggcgaggactgct

SEQ ID NO: 3886044 - DNA, 25 bp, Homo sapien
aattttgaggctgtgactttgcctg

SEQ ID NO: 3886045 - DNA, 25 bp, Homo sapien
tccactcacgcttctttcagtgaac

SEQ ID NO: 3886046 - DNA, 25 bp, Homo sapien
cagagttcacaacccaccttggaga

SEQ ID NO: 3886047 - DNA, 25 bp, Homo sapien
tatatatggaaaagcgaaagtgcct

SEQ ID NO: 3886048 - DNA, 25 bp, Homo sapien
tagccaatcttggtagtgctccaga

SEQ ID NO: 3886049 - DNA, 25 bp, Homo sapien
tcatgtgagaaaattggaggagtcc

SEQ ID NO: 3886050 - DNA, 25 bp, Homo sapien
gaaccttggtactggcacctacttg

SEQ ID NO: 3886051 - DNA, 25 bp, Homo sapien
caggaaccttggtactggcacctac

SEQ ID NO: 3886052 - DNA, 25 bp, Homo sapien
cacaggaaccttggtactggcacct

SEQ ID NO: 3886053 - DNA, 25 bp, Homo sapien
ttggtactggcacctacttggcttc

SEQ ID NO: 3886054 - DNA, 25 bp, Homo sapien
ctgtgctgggggacaaaatgtggag

SEQ ID NO: 3886055 - DNA, 25 bp, Homo sapien
caaaggggtccatgaaccttcccat

SEQ ID NO: 3886056 - DNA, 25 bp, Homo sapien
ggacaggtagatgggcagcggtacc

SEQ ID NO: 3886057 - DNA, 25 bp, Homo sapien
ctggagtgctgcatgaatagtggtt

SEQ ID NO: 3886058 - DNA, 25 bp, Homo sapien
caagataaatatccagctgaagtaa

SEQ ID NO: 3886059 - DNA, 25 bp, Homo sapien
cttgggtggtaaatctgggatattt

SEQ ID NO: 3886060 - DNA, 25 bp, Homo sapien
gatatttacaggctctcagtccaca

SEQ ID NO: 3886061 - DNA, 25 bp, Homo sapien
actgaaggttgcacaatatagccaa

SEQ ID NO: 3886062 - DNA, 25 bp, Homo sapien
ttaaacaattgactgaaggttgcac

SEQ ID NO: 3886063 - DNA, 25 bp, Homo sapien
tctgcgccatagcttagaaaaaagc

SEQ ID NO: 3886064 - DNA, 25 bp, Homo sapien
tgttccaaagctatacccaaagaat

SEQ ID NO: 3886065 - DNA, 25 bp, Homo sapien
agctactctaatgccttctgcgcca

SEQ ID NO: 3886066 - DNA, 25 bp, Homo sapien
tcataaaggctcagaacctgcagca

SEQ ID NO: 3886067 - DNA, 25 bp, Homo sapien
ttggctggaccagatccttgcaaaa

SEQ ID NO: 3886068 - DNA, 25 bp, Homo sapien
ggaacctgctttgaacaaggtcacc

SEQ ID NO: 3886069 - DNA, 25 bp, Homo sapien
cttggctggaccagatccttgcaaa

SEQ ID NO: 3886070 - DNA, 25 bp, Homo sapien
ctgctttgaacaaggtcaccacctc

SEQ ID NO: 3886071 - DNA, 25 bp, Homo sapien
ataataatttgaggctactcttgaa

SEQ ID NO: 3886072 - DNA, 25 bp, Homo sapien
aataataatttgaggctactcttga

SEQ ID NO: 3886073 - DNA, 25 bp, Homo sapien
atttattgctcttaggttggttggt

SEQ ID NO: 3886074 - DNA, 25 bp, Homo sapien
tttattgctcttaggttggttggtc

SEQ ID NO: 3886075 - DNA, 25 bp, Homo sapien
catttattgctcttaggttggttgg

SEQ ID NO: 3886076 - DNA, 25 bp, Homo sapien
aatcttgatcaatgtttaatgcaat

SEQ ID NO: 3886077 - DNA, 25 bp, Homo sapien
ctacaaatcttgatcaatgtttaat

SEQ ID NO: 3886078 - DNA, 25 bp, Homo sapien
acaaatcttgatcaatgtttaatgc

SEQ ID NO: 3886079 - DNA, 25 bp, Homo sapien
caaatcttgatcaatgtttaatgca

SEQ ID NO: 3886080 - DNA, 25 bp, Homo sapien
gaattgctaatggttcctccctgag

SEQ ID NO: 3886081 - DNA, 25 bp, Homo sapien
gaatttatatctccggcctgggccc

SEQ ID NO: 3886082 - DNA, 25 bp, Homo sapien
taggaatataatccgcaaccaggga

SEQ ID NO: 3886083 - DNA, 25 bp, Homo sapien
tgaggttcctcaactgtgctggctg

SEQ ID NO: 3886084 - DNA, 25 bp, Homo sapien
aacattggttcatcaagttcttcca

SEQ ID NO: 3886085 - DNA, 25 bp, Homo sapien
tgctcaagttaggtgctccataacg

SEQ ID NO: 3886086 - DNA, 25 bp, Homo sapien
tgttttgcctgagtctagtgttgct

SEQ ID NO: 3886087 - DNA, 25 bp, Homo sapien
taacgatcgctgatttcagctagtg

SEQ ID NO: 3886088 - DNA, 25 bp, Homo sapien
attcctaactagattttccatattc

SEQ ID NO: 3886089 - DNA, 25 bp, Homo sapien
aatatcttcattcctaactagattt

SEQ ID NO: 3886090 - DNA, 25 bp, Homo sapien
tcttcattcctaactagattttcca

SEQ ID NO: 3886091 - DNA, 25 bp, Homo sapien
tcattcctaactagattttccatat

SEQ ID NO: 3886092 - DNA, 25 bp, Homo sapien
ctgattcgttttggctgctagaaga

SEQ ID NO: 3886093 - DNA, 25 bp, Homo sapien
gatttcttgatcatacatatggtca

SEQ ID NO: 3886094 - DNA, 25 bp, Homo sapien
tgatttcttgatcatacatatggtc

SEQ ID NO: 3886095 - DNA, 25 bp, Homo sapien
cctgagctgattcgttttggctgct

SEQ ID NO: 3886096 - DNA, 25 bp, Homo sapien
tagagaaccctactgctcacagaga

SEQ ID NO: 3886097 - DNA, 25 bp, Homo sapien
aaagacatatactactgcctccgag

SEQ ID NO: 3886098 - DNA, 25 bp, Homo sapien
tataagaatccagtgagacggccag

SEQ ID NO: 3886099 - DNA, 25 bp, Homo sapien
tgcctccgagattggaataccctca

SEQ ID NO: 3886100 - DNA, 25 bp, Homo sapien
tgcatttccaactctagctgcaatg

SEQ ID NO: 3886101 - DNA, 25 bp, Homo sapien
gctctctgtagttcttgtattctct

SEQ ID NO: 3886102 - DNA, 25 bp, Homo sapien
tttccaactctagctgcaatgccag

SEQ ID NO: 3886103 - DNA, 25 bp, Homo sapien
tcttgagctctctgtagttcttgta

SEQ ID NO: 3886104 - DNA, 25 bp, Homo sapien
aattctctttcacgctccagcttgg

SEQ ID NO: 3886105 - DNA, 25 bp, Homo sapien
tgctccatcagagctaattctcttt

SEQ ID NO: 3886106 - DNA, 25 bp, Homo sapien
gagctaattctctttcacgctccag

SEQ ID NO: 3886107 - DNA, 25 bp, Homo sapien
ctgctgaagtaagagctcctctgct

SEQ ID NO: 3886108 - DNA, 25 bp, Homo sapien
tgcaagaccttgagttaaacaggcc

SEQ ID NO: 3886109 - DNA, 25 bp, Homo sapien
gatccactgggcgaactcttgccac

SEQ ID NO: 3886110 - DNA, 25 bp, Homo sapien
tccacaatgctaaatattctatcgg

SEQ ID NO: 3886111 - DNA, 25 bp, Homo sapien
ccttatacttgtaaatccacaatgc

SEQ ID NO: 3886112 - DNA, 25 bp, Homo sapien
cctccagcgtgaagaaggtgccaca

SEQ ID NO: 3886113 - DNA, 25 bp, Homo sapien
tgcctccagcgtgaagaaggtgcca

SEQ ID NO: 3886114 - DNA, 25 bp, Homo sapien
gaaacagctgcctccagcgtgaaga

SEQ ID NO: 3886115 - DNA, 25 bp, Homo sapien
cagctgcctccagcgtgaagaaggt

SEQ ID NO: 3886116 - DNA, 25 bp, Homo sapien
gacagctggccgctttcgggagccc

SEQ ID NO: 3886117 - DNA, 25 bp, Homo sapien
gggtgccagatacagtattgtatct

SEQ ID NO: 3886118 - DNA, 25 bp, Homo sapien
tccgcctcaggtgagtcctgctcga

SEQ ID NO: 3886119 - DNA, 25 bp, Homo sapien
agttcgggcctttccggtgcgctca

SEQ ID NO: 3886120 - DNA, 25 bp, Homo sapien
cacacgcgcctgctcgccacccagg

SEQ ID NO: 3886121 - DNA, 25 bp, Homo sapien
tacacacgcgcctgctcgccaccca

SEQ ID NO: 3886122 - DNA, 25 bp, Homo sapien
cacgcgcctgctcgccacccaggag

SEQ ID NO: 3886123 - DNA, 25 bp, Homo sapien
ccctacacacgcgcctgctcgccac

SEQ ID NO: 3886124 - DNA, 25 bp, Homo sapien
ggacacattacaaaggccacaaggg

SEQ ID NO: 3886125 - DNA, 25 bp, Homo sapien
gtctacctatgtcactgatagcaga

SEQ ID NO: 3886126 - DNA, 25 bp, Homo sapien
ggtgtatcaagcgaatgaactacag

SEQ ID NO: 3886127 - DNA, 25 bp, Homo sapien
acttcacagtcaggcctctccgagt

SEQ ID NO: 3886128 - DNA, 25 bp, Homo sapien
cccaatgctgagcatgtgggagatg

SEQ ID NO: 3886129 - DNA, 25 bp, Homo sapien
ggagaagtaagacccaatgctgagc

SEQ ID NO: 3886130 - DNA, 25 bp, Homo sapien
aatcctgtctacctttcagggcagc

SEQ ID NO: 3886131 - DNA, 25 bp, Homo sapien
tcaatggccacacacgagccctgtg

SEQ ID NO: 3886132 - DNA, 25 bp, Homo sapien
tctcattgttgatgtgctcatggcc

SEQ ID NO: 3886133 - DNA, 25 bp, Homo sapien
tgctggcaccctaaaggtacaaatt

SEQ ID NO: 3886134 - DNA, 25 bp, Homo sapien
gagcaagtcagatgaaatagggtgc

SEQ ID NO: 3886135 - DNA, 25 bp, Homo sapien
ggtaaagcctcagcataggtgatat

SEQ ID NO: 3886136 - DNA, 25 bp, Homo sapien
aatcaggtcaccttgaggaaatgaa

SEQ ID NO: 3886137 - DNA, 25 bp, Homo sapien
gcatctggctgcgaatcaggtcacc

SEQ ID NO: 3886138 - DNA, 25 bp, Homo sapien
gctgcgaatcaggtcaccttgagga

SEQ ID NO: 3886139 - DNA, 25 bp, Homo sapien
atgagcatctggctgcgaatcaggt

SEQ ID NO: 3886140 - DNA, 25 bp, Homo sapien
gcacatagtcagacacagaaacagt

SEQ ID NO: 3886141 - DNA, 25 bp, Homo sapien
gttcagattccctgaacagggaatc

SEQ ID NO: 3886142 - DNA, 25 bp, Homo sapien
cagggaatctgaggagctgagagtg

SEQ ID NO: 3886143 - DNA, 25 bp, Homo sapien
aactgggatagaggcacatttgatg

SEQ ID NO: 3886144 - DNA, 25 bp, Homo sapien
aatagcgagtgaggagtaaaagttt

SEQ ID NO: 3886145 - DNA, 25 bp, Homo sapien
gaatagcgagtgaggagtaaaagtt

SEQ ID NO: 3886146 - DNA, 25 bp, Homo sapien
gggaatagcgagtgaggagtaaaag

SEQ ID NO: 3886147 - DNA, 25 bp, Homo sapien
ggaatagcgagtgaggagtaaaagt

SEQ ID NO: 3886148 - DNA, 25 bp, Homo sapien
ggtggaggattgaggttggaaattc

SEQ ID NO: 3886149 - DNA, 25 bp, Homo sapien
tctctgccccatagctggcattgtg

SEQ ID NO: 3886150 - DNA, 25 bp, Homo sapien
gggctcatcgaatgtgtcggtcctt

SEQ ID NO: 3886151 - DNA, 25 bp, Homo sapien
tggagtgaaagggaacgtgggtgga

SEQ ID NO: 3886152 - DNA, 25 bp, Homo sapien
tcggttcgcggacttgaggagtgga

SEQ ID NO: 3886153 - DNA, 25 bp, Homo sapien
aggcagcgccctgaagaacgcgtcg

SEQ ID NO: 3886154 - DNA, 25 bp, Homo sapien
ccgaccgagcgctgtgcgtaaaagg

SEQ ID NO: 3886155 - DNA, 25 bp, Homo sapien
ctaggcagcgccctgaagaacgcgt

SEQ ID NO: 3886156 - DNA, 25 bp, Homo sapien
cttcgcgaattgttgggacaaagaa

SEQ ID NO: 3886157 - DNA, 25 bp, Homo sapien
ttcgcgaattgttgggacaaagaac

SEQ ID NO: 3886158 - DNA, 25 bp, Homo sapien
taagagggcacggtttctagcgttg

SEQ ID NO: 3886159 - DNA, 25 bp, Homo sapien
tgtgcccgcttagggtcgtgtcttt

SEQ ID NO: 3886160 - DNA, 25 bp, Homo sapien
gttgttcagcgtttcggaggcacct

SEQ ID NO: 3886161 - DNA, 25 bp, Homo sapien
tctctgtgcccgcttagggtcgtgt

SEQ ID NO: 3886162 - DNA, 25 bp, Homo sapien
actgccggaccggggttcccagctg

SEQ ID NO: 3886163 - DNA, 25 bp, Homo sapien
tgccggaccggggttcccagctgct

SEQ ID NO: 3886164 - DNA, 25 bp, Homo sapien
gccggaccggggttcccagctgctc

SEQ ID NO: 3886165 - DNA, 25 bp, Homo sapien
cactgccggaccggggttcccagct

SEQ ID NO: 3886166 - DNA, 25 bp, Homo sapien
ccagacctagaacgttcaccagaaa

SEQ ID NO: 3886167 - DNA, 25 bp, Homo sapien
gggctgagacaagccagtgttccca

SEQ ID NO: 3886168 - DNA, 25 bp, Homo sapien
tctggcactgctagtgcaggaggca

SEQ ID NO: 3886169 - DNA, 25 bp, Homo sapien
ctacaggaatagcatggagcgggcc

SEQ ID NO: 3886170 - DNA, 25 bp, Homo sapien
gaagaacagtggtggcaggggttcc

SEQ ID NO: 3886171 - DNA, 25 bp, Homo sapien
ccagcagaagaacagtggtggcagg

SEQ ID NO: 3886172 - DNA, 25 bp, Homo sapien
gcagaagaacagtggtggcaggggt

SEQ ID NO: 3886173 - DNA, 25 bp, Homo sapien
gaacagtggtggcaggggttcccat

SEQ ID NO: 3886174 - DNA, 25 bp, Homo sapien
caaatgcatatgatgtttgagtgct

SEQ ID NO: 3886175 - DNA, 25 bp, Homo sapien
aaaattgattgctgtgcctcattac

SEQ ID NO: 3886176 - DNA, 25 bp, Homo sapien
tgatgattgacttgaagattacaaa

SEQ ID NO: 3886177 - DNA, 25 bp, Homo sapien
gacatgctctgggatagtttgacaa

SEQ ID NO: 3886178 - DNA, 25 bp, Homo sapien
aatcatggctcactgctgccttaac

SEQ ID NO: 3886179 - DNA, 25 bp, Homo sapien
tagaatcttgcttgtcacctaggct

SEQ ID NO: 3886180 - DNA, 25 bp, Homo sapien
agagtgcagtaatgcaatcatggct

SEQ ID NO: 3886181 - DNA, 25 bp, Homo sapien
tcatggctcactgctgccttaactt

SEQ ID NO: 3886182 - DNA, 25 bp, Homo sapien
gaaatgatctgacctaccgtgtttg

SEQ ID NO: 3886183 - DNA, 25 bp, Homo sapien
aagaccagcacactcacgtcaggag

SEQ ID NO: 3886184 - DNA, 25 bp, Homo sapien
taaaaggctcggcatccagtgtgga

SEQ ID NO: 3886185 - DNA, 25 bp, Homo sapien
ggatgcccctgatcatctctgataa

SEQ ID NO: 3886186 - DNA, 25 bp, Homo sapien
aatggaagaggtctaaggcatcacc

SEQ ID NO: 3886187 - DNA, 25 bp, Homo sapien
ttgtgttccttctcagtgaatagcg

SEQ ID NO: 3886188 - DNA, 25 bp, Homo sapien
tgcccacgcagccagaatatgatgt

SEQ ID NO: 3886189 - DNA, 25 bp, Homo sapien
tcacttgtcagttccagctcctaaa

SEQ ID NO: 3886190 - DNA, 25 bp, Homo sapien
tatgcccggtcgatcctttcttgag

SEQ ID NO: 3886191 - DNA, 25 bp, Homo sapien
tacagataagaacagcagggctcag

SEQ ID NO: 3886192 - DNA, 25 bp, Homo sapien
catgctggctttgtgggtattccca

SEQ ID NO: 3886193 - DNA, 25 bp, Homo sapien
tctgggacgttgtcaggatcagccc

SEQ ID NO: 3886194 - DNA, 25 bp, Homo sapien
gacttaaagttgatctccggcgaga

SEQ ID NO: 3886195 - DNA, 25 bp, Homo sapien
agttagtgcctgctgagtgctccgg

SEQ ID NO: 3886196 - DNA, 25 bp, Homo sapien
gagtggcctgccaaatcctcaaaag

SEQ ID NO: 3886197 - DNA, 25 bp, Homo sapien
tgggaccgcaggagcacttgtcttg

SEQ ID NO: 3886198 - DNA, 25 bp, Homo sapien
agaaagcagtggtagcgaggtgact

SEQ ID NO: 3886199 - DNA, 25 bp, Homo sapien
cacttttgtgggactcggggattga

SEQ ID NO: 3886200 - DNA, 25 bp, Homo sapien
ttgagtgtggggctagatccctggt

SEQ ID NO: 3886201 - DNA, 25 bp, Homo sapien
caggagcaggtagcgatacccaggc

SEQ ID NO: 3886202 - DNA, 25 bp, Homo sapien
ctctggtgatttccctcggggccag

SEQ ID NO: 3886203 - DNA, 25 bp, Homo sapien
tctctggtgatttccctcggggcca

SEQ ID NO: 3886204 - DNA, 25 bp, Homo sapien
tctggtgatttccctcggggccagc

SEQ ID NO: 3886205 - DNA, 25 bp, Homo sapien
gtctctggtgatttccctcggggcc

SEQ ID NO: 3886206 - DNA, 25 bp, Homo sapien
tctcatagtgggttccagcaacctc

SEQ ID NO: 3886207 - DNA, 25 bp, Homo sapien
agcaggcttctcatagtgggttcca

SEQ ID NO: 3886208 - DNA, 25 bp, Homo sapien
ttccagcaacctcacgactttgcag

SEQ ID NO: 3886209 - DNA, 25 bp, Homo sapien
cagcaacctcacgactttgcaggac

SEQ ID NO: 3886210 - DNA, 25 bp, Homo sapien
gttacatgcagtccccgtgagaagg

SEQ ID NO: 3886211 - DNA, 25 bp, Homo sapien
atgcagtccccgtgagaaggccaga

SEQ ID NO: 3886212 - DNA, 25 bp, Homo sapien
agtccccgtgagaaggccagagctt

SEQ ID NO: 3886213 - DNA, 25 bp, Homo sapien
cattgcggttacatgcagtccccgt

SEQ ID NO: 3886214 - DNA, 25 bp, Homo sapien
gctgaggaggcgggacctggggcct

SEQ ID NO: 3886215 - DNA, 25 bp, Homo sapien
ctgcttcccattgtagatttttttg

SEQ ID NO: 3886216 - DNA, 25 bp, Homo sapien
tgctgcttcccattgtagatttttt

SEQ ID NO: 3886217 - DNA, 25 bp, Homo sapien
ggctctgccctggtttcctgctgct

SEQ ID NO: 3886218 - DNA, 25 bp, Homo sapien
agtggagctattcaggggctctgcc

SEQ ID NO: 3886219 - DNA, 25 bp, Homo sapien
tgtgacatgaatctgcccactgagc

SEQ ID NO: 3886220 - DNA, 25 bp, Homo sapien
ctgctgaaaagcctgtgtgctggca

SEQ ID NO: 3886221 - DNA, 25 bp, Homo sapien
atgaatctgcccactgagccaaagg

SEQ ID NO: 3886222 - DNA, 25 bp, Homo sapien
catctccgggctcttgaatctcagg

SEQ ID NO: 3886223 - DNA, 25 bp, Homo sapien
ctgtgccagggcagtgtttgtcacc

SEQ ID NO: 3886224 - DNA, 25 bp, Homo sapien
ggctggcggtcaggggcttgatggc

SEQ ID NO: 3886225 - DNA, 25 bp, Homo sapien
ctgcatgtggaggccatccagggct

SEQ ID NO: 3886226 - DNA, 25 bp, Homo sapien
ccacactgtgccagggcagtgtttg

SEQ ID NO: 3886227 - DNA, 25 bp, Homo sapien
cccctagtgtagtttcgagtgttga

SEQ ID NO: 3886228 - DNA, 25 bp, Homo sapien
gagaatccttgctccagagcgctgg

SEQ ID NO: 3886229 - DNA, 25 bp, Homo sapien
agttattccgcagtgtggcccctag

SEQ ID NO: 3886230 - DNA, 25 bp, Homo sapien
ggtgtaggtgtggaccccagcatct

SEQ ID NO: 3886231 - DNA, 25 bp, Homo sapien
tctcctttcgccttgggctgtgtta

SEQ ID NO: 3886232 - DNA, 25 bp, Homo sapien
tcctcacctctagggtggccttgtc

SEQ ID NO: 3886233 - DNA, 25 bp, Homo sapien
gccttgggctgtgttactctcctca

SEQ ID NO: 3886234 - DNA, 25 bp, Homo sapien
gccttgtctcctttcgccttgggct

SEQ ID NO: 3886235 - DNA, 25 bp, Homo sapien
gctggcatgggaccactgccctacg

SEQ ID NO: 3886236 - DNA, 25 bp, Homo sapien
ctggcatgggaccactgccctacgg

SEQ ID NO: 3886237 - DNA, 25 bp, Homo sapien
tggcatgggaccactgccctacggg

SEQ ID NO: 3886238 - DNA, 25 bp, Homo sapien
tgcattgggggcaggggaccgtgga

SEQ ID NO: 3886239 - DNA, 25 bp, Homo sapien
acttcggggtccacctggattgcca

SEQ ID NO: 3886240 - DNA, 25 bp, Homo sapien
tgtgcacttgaggcactccctcctt

SEQ ID NO: 3886241 - DNA, 25 bp, Homo sapien
cgtggaggacttcggggtccacctg

SEQ ID NO: 3886242 - DNA, 25 bp, Homo sapien
cctgtggtccgataactttgcacca

SEQ ID NO: 3886243 - DNA, 25 bp, Homo sapien
tcctgtggtccgataactttgcacc

SEQ ID NO: 3886244 - DNA, 25 bp, Homo sapien
ttcctgtggtccgataactttgcac

SEQ ID NO: 3886245 - DNA, 25 bp, Homo sapien
tgtggtccgataactttgcaccaac

SEQ ID NO: 3886246 - DNA, 25 bp, Homo sapien
attccgataatgtctgcaactccag

SEQ ID NO: 3886247 - DNA, 25 bp, Homo sapien
ctaagtttgccgagtgaatcctcta

SEQ ID NO: 3886248 - DNA, 25 bp, Homo sapien
gcattggctttaatctgcatgcaga

SEQ ID NO: 3886249 - DNA, 25 bp, Homo sapien
tcctctagagggatgattccgataa

SEQ ID NO: 3886250 - DNA, 25 bp, Homo sapien
cttgctcgtgtggtaagtggatttc

SEQ ID NO: 3886251 - DNA, 25 bp, Homo sapien
tggactctggctggaccagcccaga

SEQ ID NO: 3886252 - DNA, 25 bp, Homo sapien
gattgtgcttgggtaaagtaccaca

SEQ ID NO: 3886253 - DNA, 25 bp, Homo sapien
aagaggacctcctgcctttcgcaag

SEQ ID NO: 3886254 - DNA, 25 bp, Homo sapien
tatttattgatccaagcagaagagc

SEQ ID NO: 3886255 - DNA, 25 bp, Homo sapien
gaaacttcaactccataggtctaga

SEQ ID NO: 3886256 - DNA, 25 bp, Homo sapien
gacatgggattgaagcctgggcact

SEQ ID NO: 3886257 - DNA, 25 bp, Homo sapien
ttcagttgcccttgtgtgccggcca

SEQ ID NO: 3886258 - DNA, 25 bp, Homo sapien
gaaagctgcttatcccaattgtcaa

SEQ ID NO: 3886259 - DNA, 25 bp, Homo sapien
catgccccacgtagctgaaagctgc

SEQ ID NO: 3886260 - DNA, 25 bp, Homo sapien
ggatgcacaaccttcctggaacgtg

SEQ ID NO: 3886261 - DNA, 25 bp, Homo sapien
tctgcatggtccacaagaagcctgg

SEQ ID NO: 3886262 - DNA, 25 bp, Homo sapien
ccatgatggatcttggtagagacac

SEQ ID NO: 3886263 - DNA, 25 bp, Homo sapien
caaggcttggccaattcctgttcaa

SEQ ID NO: 3886264 - DNA, 25 bp, Homo sapien
taaaggcatgttcaccatcctggct

SEQ ID NO: 3886265 - DNA, 25 bp, Homo sapien
gggagccatacacctttagagcctt

SEQ ID NO: 3886266 - DNA, 25 bp, Homo sapien
gaatcactgaaacgaaacggtccac

SEQ ID NO: 3886267 - DNA, 25 bp, Homo sapien
cagagtggccatcaactgccaaggg

SEQ ID NO: 3886268 - DNA, 25 bp, Homo sapien
tgtccctttaggaacaaggcttcga

SEQ ID NO: 3886269 - DNA, 25 bp, Homo sapien
ggagcgcagatgctaccagaaacca

SEQ ID NO: 3886270 - DNA, 25 bp, Homo sapien
cccactcataaggagaacagaggcc

SEQ ID NO: 3886271 - DNA, 25 bp, Homo sapien
cctcagaccgggactgggtgctcct

SEQ ID NO: 3886272 - DNA, 25 bp, Homo sapien
gggtgtgctgggacttgcctgaggc

SEQ ID NO: 3886273 - DNA, 25 bp, Homo sapien
ttggacggttggtggaccccatctg

SEQ ID NO: 3886274 - DNA, 25 bp, Homo sapien
ggcagtgaaagactagaatcagata

SEQ ID NO: 3886275 - DNA, 25 bp, Homo sapien
tcaaaggcagtgaaagactagaatc

SEQ ID NO: 3886276 - DNA, 25 bp, Homo sapien
gaatcagataattggaagggtgcac

SEQ ID NO: 3886277 - DNA, 25 bp, Homo sapien
gggtgcaccctaagcaatgcatagt

SEQ ID NO: 3886278 - DNA, 25 bp, Homo sapien
gctcttctaagtcaacagaatgtcg

SEQ ID NO: 3886279 - DNA, 25 bp, Homo sapien
tcaacagaatgtcgggtctgttcta

SEQ ID NO: 3886280 - DNA, 25 bp, Homo sapien
cagaatgtcgggtctgttctaaaag

SEQ ID NO: 3886281 - DNA, 25 bp, Homo sapien
tctaagtcaacagaatgtcgggtct

SEQ ID NO: 3886282 - DNA, 25 bp, Homo sapien
gctcacgcctgtaatcccaacactt

SEQ ID NO: 3886283 - DNA, 25 bp, Homo sapien
tgggaggctgaggcgggcggatcac

SEQ ID NO: 3886284 - DNA, 25 bp, Homo sapien
tggaggctgaggcagtagaatttct

SEQ ID NO: 3886285 - DNA, 25 bp, Homo sapien
aatgtttatttagccgggtgcggtg

SEQ ID NO: 3886286 - DNA, 25 bp, Homo sapien
tctctggtagttgctgggaactagg

SEQ ID NO: 3886287 - DNA, 25 bp, Homo sapien
tgctgggaactagggtgggggattc

SEQ ID NO: 3886288 - DNA, 25 bp, Homo sapien
agtctctggtagttgctgggaacta

SEQ ID NO: 3886289 - DNA, 25 bp, Homo sapien
ctggtagttgctgggaactagggtg

SEQ ID NO: 3886290 - DNA, 25 bp, Homo sapien
tccttcagtgccctccagatttggt

SEQ ID NO: 3886291 - DNA, 25 bp, Homo sapien
cctggatccatcattagcagctatg

SEQ ID NO: 3886292 - DNA, 25 bp, Homo sapien
tcagattaagggacagacggcacat

SEQ ID NO: 3886293 - DNA, 25 bp, Homo sapien
gtagtgtgaccctggaaggactgtc

SEQ ID NO: 3886294 - DNA, 25 bp, Homo sapien
aaaggagtttacaggctctcataga

SEQ ID NO: 3886295 - DNA, 25 bp, Homo sapien
tctcttagggcacgcagacctttcc

SEQ ID NO: 3886296 - DNA, 25 bp, Homo sapien
tacaggctctcatagatgggaagga

SEQ ID NO: 3886297 - DNA, 25 bp, Homo sapien
ggagcctcaccaccgccagtgtgtt

SEQ ID NO: 3886298 - DNA, 25 bp, Homo sapien
tctccacaaaagtaatcggacatac

SEQ ID NO: 3886299 - DNA, 25 bp, Homo sapien
tgtctccacaaaagtaatcggacat

SEQ ID NO: 3886300 - DNA, 25 bp, Homo sapien
caaaagtaatcggacatacagaatt

SEQ ID NO: 3886301 - DNA, 25 bp, Homo sapien
tccacaaaagtaatcggacatacag

SEQ ID NO: 3886302 - DNA, 25 bp, Homo sapien
cacaacattgttgcgtgcgtgggcc

SEQ ID NO: 3886303 - DNA, 25 bp, Homo sapien
gaaaacctgtgtgactactccgtgg

SEQ ID NO: 3886304 - DNA, 25 bp, Homo sapien
caggtggtttccagtcacttgcaca

SEQ ID NO: 3886305 - DNA, 25 bp, Homo sapien
gaagaaactgcgttcgcgtgcaaca

SEQ ID NO: 3886306 - DNA, 25 bp, Homo sapien
ggtgtcattgttaccttccactaac

SEQ ID NO: 3886307 - DNA, 25 bp, Homo sapien
taacagatcactcgacacctaccag

SEQ ID NO: 3886308 - DNA, 25 bp, Homo sapien
catggaatttagtaggcaagtctgc

SEQ ID NO: 3886309 - DNA, 25 bp, Homo sapien
tcctctggtctgtgtttgaaattgg

SEQ ID NO: 3886310 - DNA, 25 bp, Homo sapien
caaatgacagaattaccttctaagg

SEQ ID NO: 3886311 - DNA, 25 bp, Homo sapien
ttctcatgaacgttttaacaaaatg

SEQ ID NO: 3886312 - DNA, 25 bp, Homo sapien
ttatgtgaggacttacttaatacat

SEQ ID NO: 3886313 - DNA, 25 bp, Homo sapien
tccactgtgtacaagtaagtcctta

SEQ ID NO: 3886314 - DNA, 25 bp, Homo sapien
caaagggtgagcaatgactatggac

SEQ ID NO: 3886315 - DNA, 25 bp, Homo sapien
gacatcgttacttgtgtgtacaccc

SEQ ID NO: 3886316 - DNA, 25 bp, Homo sapien
gcaactttatttcggagacccagcg

SEQ ID NO: 3886317 - DNA, 25 bp, Homo sapien
ccgagaagatggcaactagtgtcct

SEQ ID NO: 3886318 - DNA, 25 bp, Homo sapien
tccaaaagcagcctgtaggagggat

SEQ ID NO: 3886319 - DNA, 25 bp, Homo sapien
tcctcatgggttccgtcctgtggag

SEQ ID NO: 3886320 - DNA, 25 bp, Homo sapien
tgctgggcattccaaggactgccga

SEQ ID NO: 3886321 - DNA, 25 bp, Homo sapien
ggcctgcagcttaggtatctccaaa

SEQ ID NO: 3886322 - DNA, 25 bp, Homo sapien
gaatggaaatcgtctggcccaggag

SEQ ID NO: 3886323 - DNA, 25 bp, Homo sapien
cattaatgtacggtgtggcaactga

SEQ ID NO: 3886324 - DNA, 25 bp, Homo sapien
tacacaatgggacggaaagttaaga

SEQ ID NO: 3886325 - DNA, 25 bp, Homo sapien
gaaagttaagagcagggctggtttc

SEQ ID NO: 3886326 - DNA, 25 bp, Homo sapien
cagcaggccgagtcacaaaaggcct

SEQ ID NO: 3886327 - DNA, 25 bp, Homo sapien
gcaggccgagtcacaaaaggcctgt

SEQ ID NO: 3886328 - DNA, 25 bp, Homo sapien
ctccagcaggccgagtcacaaaagg

SEQ ID NO: 3886329 - DNA, 25 bp, Homo sapien
tggctccagcaggccgagtcacaaa

SEQ ID NO: 3886330 - DNA, 25 bp, Homo sapien
tctcaaacagccgtaagacatagct

SEQ ID NO: 3886331 - DNA, 25 bp, Homo sapien
gatgaggacctcaaactcggtttca

SEQ ID NO: 3886332 - DNA, 25 bp, Homo sapien
aggctacccatggaacaagtcccgg

SEQ ID NO: 3886333 - DNA, 25 bp, Homo sapien
taaagatgagttgtctgtgtccgtc

SEQ ID NO: 3886334 - DNA, 25 bp, Homo sapien
ttgattgtccccgtgtgagcagcca

SEQ ID NO: 3886335 - DNA, 25 bp, Homo sapien
ccctggagcacttgattgtccccgt

SEQ ID NO: 3886336 - DNA, 25 bp, Homo sapien
agtaccgcgcaggagagaactttgg

SEQ ID NO: 3886337 - DNA, 25 bp, Homo sapien
gaactttggcaggaacaccgtgcac

SEQ ID NO: 3886338 - DNA, 25 bp, Homo sapien
aggtaccctgcttagtgctctgagg

SEQ ID NO: 3886339 - DNA, 25 bp, Homo sapien
ccgtaggtttctgccaggtaccctg

SEQ ID NO: 3886340 - DNA, 25 bp, Homo sapien
tggctcccagggctatatgatactg

SEQ ID NO: 3886341 - DNA, 25 bp, Homo sapien
tgcagtgcactgtagcacgatggca

SEQ ID NO: 3886342 - DNA, 25 bp, Homo sapien
acactgatttgaggctgttggctgc

SEQ ID NO: 3886343 - DNA, 25 bp, Homo sapien
ttgatgagggcgttgccctccagca

SEQ ID NO: 3886344 - DNA, 25 bp, Homo sapien
tgggggccccgatccttttgcatcc

SEQ ID NO: 3886345 - DNA, 25 bp, Homo sapien
tgttggctgcaggatggagttgatg

SEQ ID NO: 3886346 - DNA, 25 bp, Homo sapien
ctgtcaccaaataaaagcacttgcc

SEQ ID NO: 3886347 - DNA, 25 bp, Homo sapien
aggtcagtatctgtgtcttggagtc

SEQ ID NO: 3886348 - DNA, 25 bp, Homo sapien
taggtcagtatctgtgtcttggagt

SEQ ID NO: 3886349 - DNA, 25 bp, Homo sapien
ggtcagtatctgtgtcttggagtct

SEQ ID NO: 3886350 - DNA, 25 bp, Homo sapien
tgtggcttgattgatcagccctccc

SEQ ID NO: 3886351 - DNA, 25 bp, Homo sapien
ttgtggcttgattgatcagccctcc

SEQ ID NO: 3886352 - DNA, 25 bp, Homo sapien
ggcttgattgatcagccctccctct

SEQ ID NO: 3886353 - DNA, 25 bp, Homo sapien
agttgtggcttgattgatcagccct

SEQ ID NO: 3886354 - DNA, 25 bp, Homo sapien
tgattgatcctgtgaaatgtccaga

SEQ ID NO: 3886355 - DNA, 25 bp, Homo sapien
aaggcgaagatctccccttcctgct

SEQ ID NO: 3886356 - DNA, 25 bp, Homo sapien
cacaagctttctttggaaggcgaag

SEQ ID NO: 3886357 - DNA, 25 bp, Homo sapien
ggtgccatcgccaaagaggagactt

SEQ ID NO: 3886358 - DNA, 25 bp, Homo sapien
gaaggatttcccctgagactagagg

SEQ ID NO: 3886359 - DNA, 25 bp, Homo sapien
ggccagcaccggctgccgcttggtc

SEQ ID NO: 3886360 - DNA, 25 bp, Homo sapien
tagaacttggttgtgggccagcacc

SEQ ID NO: 3886361 - DNA, 25 bp, Homo sapien
gatctgaggcgaaagtgggaggact

SEQ ID NO: 3886362 - DNA, 25 bp, Homo sapien
gaggtaacggtcagatgtgaagcct

SEQ ID NO: 3886363 - DNA, 25 bp, Homo sapien
tgtctcactgtcttcgggcacggtg

SEQ ID NO: 3886364 - DNA, 25 bp, Homo sapien
gatcttgttgcgtggcagaggtaac

SEQ ID NO: 3886365 - DNA, 25 bp, Homo sapien
acactgttgtaagagaagtttccct

SEQ ID NO: 3886366 - DNA, 25 bp, Homo sapien
acaacatctatgatgatgcctgcag

SEQ ID NO: 3886367 - DNA, 25 bp, Homo sapien
ttttctcgtctctacaacatctatg

SEQ ID NO: 3886368 - DNA, 25 bp, Homo sapien
tctctacaacatctatgatgatgcc

SEQ ID NO: 3886369 - DNA, 25 bp, Homo sapien
tctcgtctctacaacatctatgatg

SEQ ID NO: 3886370 - DNA, 25 bp, Homo sapien
cctcctggaaccattaagggctatc

SEQ ID NO: 3886371 - DNA, 25 bp, Homo sapien
ggttgaagaggttgcagctcctcct

SEQ ID NO: 3886372 - DNA, 25 bp, Homo sapien
gcaataagttcagggttttctagct

SEQ ID NO: 3886373 - DNA, 25 bp, Homo sapien
gcgacaccgtcctctgcaataagtt

SEQ ID NO: 3886374 - DNA, 25 bp, Homo sapien
cctgggtacagaggattctcccgat

SEQ ID NO: 3886375 - DNA, 25 bp, Homo sapien
gaggattctcccgatgtgattccca

SEQ ID NO: 3886376 - DNA, 25 bp, Homo sapien
gattctcccgatgtgattcccagac

SEQ ID NO: 3886377 - DNA, 25 bp, Homo sapien
ggtacagaggattctcccgatgtga

SEQ ID NO: 3886378 - DNA, 25 bp, Homo sapien
tcatagaagactgattctcttcctc

SEQ ID NO: 3886379 - DNA, 25 bp, Homo sapien
ctctaaatcgctgcaggcttacagg

SEQ ID NO: 3886380 - DNA, 25 bp, Homo sapien
gcaactgctgacagtggatctctaa

SEQ ID NO: 3886381 - DNA, 25 bp, Homo sapien
ggcagcaggtaccagcggagctcct

SEQ ID NO: 3886382 - DNA, 25 bp, Homo sapien
tctccaaagtgggaacaacgcaaac

SEQ ID NO: 3886383 - DNA, 25 bp, Homo sapien
caccttttatcgtgaatgcactgag

SEQ ID NO: 3886384 - DNA, 25 bp, Homo sapien
tctccttgaggctgtacgcagggca

SEQ ID NO: 3886385 - DNA, 25 bp, Homo sapien
caaatttgcctggttcgttcccaca

SEQ ID NO: 3886386 - DNA, 25 bp, Homo sapien
gatgggggagattctctctcagcaa

SEQ ID NO: 3886387 - DNA, 25 bp, Homo sapien
agccaattctgctgctagattctgg

SEQ ID NO: 3886388 - DNA, 25 bp, Homo sapien
atgggggagattctctctcagcaag

SEQ ID NO: 3886389 - DNA, 25 bp, Homo sapien
gattctggggatagtgccttcttta

SEQ ID NO: 3886390 - DNA, 25 bp, Homo sapien
ctgattaagatgggactgaaaacag

SEQ ID NO: 3886391 - DNA, 25 bp, Homo sapien
gattaagatgggactgaaaacagac

SEQ ID NO: 3886392 - DNA, 25 bp, Homo sapien
tgattaagatgggactgaaaacaga

SEQ ID NO: 3886393 - DNA, 25 bp, Homo sapien
gtttgagcagaacccaggcttccat

SEQ ID NO: 3886394 - DNA, 25 bp, Homo sapien
tgtttgagcagaacccaggcttcca

SEQ ID NO: 3886395 - DNA, 25 bp, Homo sapien
ctgtttgagcagaacccaggcttcc

SEQ ID NO: 3886396 - DNA, 25 bp, Homo sapien
gtccacgtgccaccaccccatgaaa

SEQ ID NO: 3886397 - DNA, 25 bp, Homo sapien
cacgtgccaccaccccatgaaatat

SEQ ID NO: 3886398 - DNA, 25 bp, Homo sapien
gtgccaccaccccatgaaatatcag

SEQ ID NO: 3886399 - DNA, 25 bp, Homo sapien
ccacgtgccaccaccccatgaaata

SEQ ID NO: 3886400 - DNA, 25 bp, Homo sapien
tgaattgcacctgttggagatgctg

SEQ ID NO: 3886401 - DNA, 25 bp, Homo sapien
ctgaattgcacctgttggagatgct

SEQ ID NO: 3886402 - DNA, 25 bp, Homo sapien
ttggagatgctggaggggcagccat

SEQ ID NO: 3886403 - DNA, 25 bp, Homo sapien
ctgttggagatgctggaggggcagc

SEQ ID NO: 3886404 - DNA, 25 bp, Homo sapien
tgctgtgctttgtcccgatgaactt

SEQ ID NO: 3886405 - DNA, 25 bp, Homo sapien
tcaaggattgcatcatgtgtggctg

SEQ ID NO: 3886406 - DNA, 25 bp, Homo sapien
gaatgctagccggtttcacacagat

SEQ ID NO: 3886407 - DNA, 25 bp, Homo sapien
agtttcaaccttgtgccccacgtgg

SEQ ID NO: 3886408 - DNA, 25 bp, Homo sapien
ccatcaacttcaggtttcttgactg

SEQ ID NO: 3886409 - DNA, 25 bp, Homo sapien
actgctgttattttcagctccctga

SEQ ID NO: 3886410 - DNA, 25 bp, Homo sapien
agccttgagatccaagttcatcttc

SEQ ID NO: 3886411 - DNA, 25 bp, Homo sapien
ggtttcttgactgctgttattttca

SEQ ID NO: 3886412 - DNA, 25 bp, Homo sapien
ttgtctggcttctcaccattgggct

SEQ ID NO: 3886413 - DNA, 25 bp, Homo sapien
tcacagttttgtaagagtaagagac

SEQ ID NO: 3886414 - DNA, 25 bp, Homo sapien
tttagtctgcaagcaaacattcaca

SEQ ID NO: 3886415 - DNA, 25 bp, Homo sapien
tagtttttagtctgcaagcaaacat

SEQ ID NO: 3886416 - DNA, 25 bp, Homo sapien
gtctgcaagcaaacattcacagttt

SEQ ID NO: 3886417 - DNA, 25 bp, Homo sapien
cttaaagcgtgtgcggcagggttcc

SEQ ID NO: 3886418 - DNA, 25 bp, Homo sapien
cattcatgagttgcgagccaggcct

SEQ ID NO: 3886419 - DNA, 25 bp, Homo sapien
catgcacagtgcattcatgagttgc

SEQ ID NO: 3886420 - DNA, 25 bp, Homo sapien
ccatctggtcacgtatggagaggga

SEQ ID NO: 3886421 - DNA, 25 bp, Homo sapien
tatttgagggtgacttgcagaatgc

SEQ ID NO: 3886422 - DNA, 25 bp, Homo sapien
cattgagaaaagtgcagacaccgag

SEQ ID NO: 3886423 - DNA, 25 bp, Homo sapien
cctgctatgccttgagaaggttcag

SEQ ID NO: 3886424 - DNA, 25 bp, Homo sapien
agaatgctcatgtctccatgcagcg

SEQ ID NO: 3886425 - DNA, 25 bp, Homo sapien
gttgtccccgattctgctcctccgg

SEQ ID NO: 3886426 - DNA, 25 bp, Homo sapien
tccctgcttgcgtcactcttccagt

SEQ ID NO: 3886427 - DNA, 25 bp, Homo sapien
tttgcgtccactcttctggttgccc

SEQ ID NO: 3886428 - DNA, 25 bp, Homo sapien
ccgattctgctcctccgggttccat

SEQ ID NO: 3886429 - DNA, 25 bp, Homo sapien
tgctccttgttggaaggtccttgat

SEQ ID NO: 3886430 - DNA, 25 bp, Homo sapien
ccttgttggaaggtccttgatggca

SEQ ID NO: 3886431 - DNA, 25 bp, Homo sapien
aaggtccttgatggcaggtgtttag

SEQ ID NO: 3886432 - DNA, 25 bp, Homo sapien
gaaggtccttgatggcaggtgttta

SEQ ID NO: 3886433 - DNA, 25 bp, Homo sapien
caattgaattctgttttagtttttg

SEQ ID NO: 3886434 - DNA, 25 bp, Homo sapien
cacaattgaattctgttttagtttt

SEQ ID NO: 3886435 - DNA, 25 bp, Homo sapien
acagagtgtttaggtggatctgttg

SEQ ID NO: 3886436 - DNA, 25 bp, Homo sapien
aaggtgacagagtgtttaggtggat

SEQ ID NO: 3886437 - DNA, 25 bp, Homo sapien
gagtgtttaggtggatctgttggac

SEQ ID NO: 3886438 - DNA, 25 bp, Homo sapien
tgacagagtgtttaggtggatctgt

SEQ ID NO: 3886439 - DNA, 25 bp, Homo sapien
tgggaaggataaaacctcaaagcac

SEQ ID NO: 3886440 - DNA, 25 bp, Homo sapien
ttggactgggaaggataaaacctca

SEQ ID NO: 3886441 - DNA, 25 bp, Homo sapien
gataaaacctcaaagcaccctgaga

SEQ ID NO: 3886442 - DNA, 25 bp, Homo sapien
tgaagttggactgggaaggataaaa

SEQ ID NO: 3886443 - DNA, 25 bp, Homo sapien
cagcagcagatttacaaacgaaaaa

SEQ ID NO: 3886444 - DNA, 25 bp, Homo sapien
ctgttttgtaactctgctgctcctt

SEQ ID NO: 3886445 - DNA, 25 bp, Homo sapien
gtaacagcagcagatttacaaacga

SEQ ID NO: 3886446 - DNA, 25 bp, Homo sapien
tctgttttgtaactctgctgctcct

SEQ ID NO: 3886447 - DNA, 25 bp, Homo sapien
tttcaacaggaggtacattgcacag

SEQ ID NO: 3886448 - DNA, 25 bp, Homo sapien
ggctcaatattgatttccagggagg

SEQ ID NO: 3886449 - DNA, 25 bp, Homo sapien
gaaagcggttccttttgatgatttg

SEQ ID NO: 3886450 - DNA, 25 bp, Homo sapien
cattgcccagggaagaaagcggttc

SEQ ID NO: 3886451 - DNA, 25 bp, Homo sapien
tgtaattccgtccagatgcatatgg

SEQ ID NO: 3886452 - DNA, 25 bp, Homo sapien
gcatatggatgaccttaaacccagg

SEQ ID NO: 3886453 - DNA, 25 bp, Homo sapien
taaacagcaaagagatgcccatagt

SEQ ID NO: 3886454 - DNA, 25 bp, Homo sapien
tgaatgctgcgcgtaattgagctgt

SEQ ID NO: 3886455 - DNA, 25 bp, Homo sapien
gatgagtgcttcagtgaatccatgt

SEQ ID NO: 3886456 - DNA, 25 bp, Homo sapien
agatgagtgcttcagtgaatccatg

SEQ ID NO: 3886457 - DNA, 25 bp, Homo sapien
ttctcagtgtgattcccattgccga

SEQ ID NO: 3886458 - DNA, 25 bp, Homo sapien
gtgattcccattgccgatgactttg

SEQ ID NO: 3886459 - DNA, 25 bp, Homo sapien
ccgatgactttggacttcaaataca

SEQ ID NO: 3886460 - DNA, 25 bp, Homo sapien
cattgccgatgactttggacttcaa

SEQ ID NO: 3886461 - DNA, 25 bp, Homo sapien
ctcagttgcttcgattgtaaattgg

SEQ ID NO: 3886462 - DNA, 25 bp, Homo sapien
agttgcttcgattgtaaattggttc

SEQ ID NO: 3886463 - DNA, 25 bp, Homo sapien
gcttcgattgtaaattggttctcaa

SEQ ID NO: 3886464 - DNA, 25 bp, Homo sapien
tgtaaattggttctcaatatagtca

SEQ ID NO: 3886465 - DNA, 25 bp, Homo sapien
ggcaccagcaaagtcccatgcctgg

SEQ ID NO: 3886466 - DNA, 25 bp, Homo sapien
ctggcaccagcaaagtcccatgcct

SEQ ID NO: 3886467 - DNA, 25 bp, Homo sapien
cataatagatttggcttttgattgt

SEQ ID NO: 3886468 - DNA, 25 bp, Homo sapien
cttgggtcataatagatttggcttt

SEQ ID NO: 3886469 - DNA, 25 bp, Homo sapien
acaaaaactggtaactcctaatgct

SEQ ID NO: 3886470 - DNA, 25 bp, Homo sapien
tgcctgatcactcatctggaattgc

SEQ ID NO: 3886471 - DNA, 25 bp, Homo sapien
aaaactggtaactcctaatgctcat

SEQ ID NO: 3886472 - DNA, 25 bp, Homo sapien
caaaaactggtaactcctaatgctc

SEQ ID NO: 3886473 - DNA, 25 bp, Homo sapien
tttaccaccactggcctagaccaag

SEQ ID NO: 3886474 - DNA, 25 bp, Homo sapien
ctttaccaccactggcctagaccaa

SEQ ID NO: 3886475 - DNA, 25 bp, Homo sapien
caccactggcctagaccaagacatt

SEQ ID NO: 3886476 - DNA, 25 bp, Homo sapien
cactggcctagaccaagacattttc

SEQ ID NO: 3886477 - DNA, 25 bp, Homo sapien
gctgaacttgccaaactgactggca

SEQ ID NO: 3886478 - DNA, 25 bp, Homo sapien
agctttgctgaacttgccaaactga

SEQ ID NO: 3886479 - DNA, 25 bp, Homo sapien
gaacaccaaagcctctggctcttgc

SEQ ID NO: 3886480 - DNA, 25 bp, Homo sapien
tcagcgaacaccaaagcctctggct

SEQ ID NO: 3886481 - DNA, 25 bp, Homo sapien
agcaagatgaacccaccagcctcct

SEQ ID NO: 3886482 - DNA, 25 bp, Homo sapien
gcaagatgaacccaccagcctcctc

SEQ ID NO: 3886483 - DNA, 25 bp, Homo sapien
cccataggggccctgttgcaatttt

SEQ ID NO: 3886484 - DNA, 25 bp, Homo sapien
agatcccataggggccctgttgcaa

SEQ ID NO: 3886485 - DNA, 25 bp, Homo sapien
ggccactggaacaatcttccggact

SEQ ID NO: 3886486 - DNA, 25 bp, Homo sapien
caatcttccggacttaggtccctga

SEQ ID NO: 3886487 - DNA, 25 bp, Homo sapien
gcagagatttgctgggaggcacata

SEQ ID NO: 3886488 - DNA, 25 bp, Homo sapien
tgctgggaggcacatacatctgggc

SEQ ID NO: 3886489 - DNA, 25 bp, Homo sapien
caatcccaggattagtcttggcagg

SEQ ID NO: 3886490 - DNA, 25 bp, Homo sapien
cctcgatgcctggacaggagttcct

SEQ ID NO: 3886491 - DNA, 25 bp, Homo sapien
tgcctggacaggagttcctatacct

SEQ ID NO: 3886492 - DNA, 25 bp, Homo sapien
tggcaggaaacctcgatgcctggac

SEQ ID NO: 3886493 - DNA, 25 bp, Homo sapien
ttaagcatggaaaggctcttgttcc

SEQ ID NO: 3886494 - DNA, 25 bp, Homo sapien
tggaaaggctcttgttccattgcga

SEQ ID NO: 3886495 - DNA, 25 bp, Homo sapien
ctcttgttccattgcgataggactg

SEQ ID NO: 3886496 - DNA, 25 bp, Homo sapien
aaggctcttgttccattgcgatagg

SEQ ID NO: 3886497 - DNA, 25 bp, Homo sapien
cagcagaggcgtttttactgatttc

SEQ ID NO: 3886498 - DNA, 25 bp, Homo sapien
gcagcagcagaggcgtttttactga

SEQ ID NO: 3886499 - DNA, 25 bp, Homo sapien
cagatggcagcaacgagggactgct

SEQ ID NO: 3886500 - DNA, 25 bp, Homo sapien
cccaggggtcttgaccagaaggctg

SEQ ID NO: 3886501 - DNA, 25 bp, Homo sapien
cctataagcatcagtgcatactcag

SEQ ID NO: 3886502 - DNA, 25 bp, Homo sapien
ctagttttctagcaatagctgtggg

SEQ ID NO: 3886503 - DNA, 25 bp, Homo sapien
gttgggggtacccatgaccccatga

SEQ ID NO: 3886504 - DNA, 25 bp, Homo sapien
gagaatgttcaaaagtgttctctag

SEQ ID NO: 3886505 - DNA, 25 bp, Homo sapien
taaacaataggtctatagttctgtc

SEQ ID NO: 3886506 - DNA, 25 bp, Homo sapien
caataggtctatagttctgtctctc

SEQ ID NO: 3886507 - DNA, 25 bp, Homo sapien
taggtctatagttctgtctctcaca

SEQ ID NO: 3886508 - DNA, 25 bp, Homo sapien
aggtctatagttctgtctctcacag

SEQ ID NO: 3886509 - DNA, 25 bp, Homo sapien
ttttgaccaggattttataatgtgg

SEQ ID NO: 3886510 - DNA, 25 bp, Homo sapien
aggagaggaattcacccgttccctg

SEQ ID NO: 3886511 - DNA, 25 bp, Homo sapien
attttgaccaggattttataatgtg

SEQ ID NO: 3886512 - DNA, 25 bp, Homo sapien
ggaattcacccgttccctgtcataa

SEQ ID NO: 3886513 - DNA, 25 bp, Homo sapien
ttggtgtctgaaaatatgattttgc

SEQ ID NO: 3886514 - DNA, 25 bp, Homo sapien
ctgaaaatatgattttgcctggaga

SEQ ID NO: 3886515 - DNA, 25 bp, Homo sapien
tctgaaaatatgattttgcctggag

SEQ ID NO: 3886516 - DNA, 25 bp, Homo sapien
agcttggtgtctgaaaatatgattt

SEQ ID NO: 3886517 - DNA, 25 bp, Homo sapien
tcttccatatagatagatccacagg

SEQ ID NO: 3886518 - DNA, 25 bp, Homo sapien
tatagatagatccacaggaggtgag

SEQ ID NO: 3886519 - DNA, 25 bp, Homo sapien
tacacatttgtgttcctacagtgca

SEQ ID NO: 3886520 - DNA, 25 bp, Homo sapien
ggtgagagcttgctgtactcatcac

SEQ ID NO: 3886521 - DNA, 25 bp, Homo sapien
gctggaaggtggaactcagctgtca

SEQ ID NO: 3886522 - DNA, 25 bp, Homo sapien
catgttccatggcaaaggcatagaa

SEQ ID NO: 3886523 - DNA, 25 bp, Homo sapien
agagagtaggcatgttccatggcaa

SEQ ID NO: 3886524 - DNA, 25 bp, Homo sapien
aggcatagaaacagttgattcccag

SEQ ID NO: 3886525 - DNA, 25 bp, Homo sapien
acagtgctaattcccgccactggat

SEQ ID NO: 3886526 - DNA, 25 bp, Homo sapien
tggggatctaagctgcccacagtgc

SEQ ID NO: 3886527 - DNA, 25 bp, Homo sapien
cctggtctggggatctaagctgccc

SEQ ID NO: 3886528 - DNA, 25 bp, Homo sapien
aattcccgccactggatctgggtgg

SEQ ID NO: 3886529 - DNA, 25 bp, Homo sapien
gcaagggcttgctccgatctctcca

SEQ ID NO: 3886530 - DNA, 25 bp, Homo sapien
aaagtcattaggaggagtgcatgtg

SEQ ID NO: 3886531 - DNA, 25 bp, Homo sapien
agtgcatgtgaagagtggcaagggc

SEQ ID NO: 3886532 - DNA, 25 bp, Homo sapien
catgtgaagagtggcaagggcttgc

SEQ ID NO: 3886533 - DNA, 25 bp, Homo sapien
ctggtgtaaaagacgaatgtgaatt

SEQ ID NO: 3886534 - DNA, 25 bp, Homo sapien
ctgctgctctggtgtaaaagacgaa

SEQ ID NO: 3886535 - DNA, 25 bp, Homo sapien
taaaagacgaatgtgaattgaacac

SEQ ID NO: 3886536 - DNA, 25 bp, Homo sapien
gctctggtgtaaaagacgaatgtga

SEQ ID NO: 3886537 - DNA, 25 bp, Homo sapien
tagttgagtagcctggtgtagagcc

SEQ ID NO: 3886538 - DNA, 25 bp, Homo sapien
tattgagcaaatagttgagtagcct

SEQ ID NO: 3886539 - DNA, 25 bp, Homo sapien
tcttggtattgagcaaatagttgag

SEQ ID NO: 3886540 - DNA, 25 bp, Homo sapien
cagggcgtttgactattcttggtat

SEQ ID NO: 3886541 - DNA, 25 bp, Homo sapien
ctcccgaccaagggcgagagtagga

SEQ ID NO: 3886542 - DNA, 25 bp, Homo sapien
taggaggtaagttagtctgcagcag

SEQ ID NO: 3886543 - DNA, 25 bp, Homo sapien
tgcagcaggacataaagctggaacc

SEQ ID NO: 3886544 - DNA, 25 bp, Homo sapien
agcaggacataaagctggaacctat

SEQ ID NO: 3886545 - DNA, 25 bp, Homo sapien
gtcttgttaatcatcttaaagttca

SEQ ID NO: 3886546 - DNA, 25 bp, Homo sapien
agaacctacactttgtgtcttgtta

SEQ ID NO: 3886547 - DNA, 25 bp, Homo sapien
ttcgtaactctgtcttccctagagt

SEQ ID NO: 3886548 - DNA, 25 bp, Homo sapien
ttctgcttgttcgtaactctgtctt

SEQ ID NO: 3886549 - DNA, 25 bp, Homo sapien
taaacagagtcaatttagagttcat

SEQ ID NO: 3886550 - DNA, 25 bp, Homo sapien
tttttagatgacagcacattaaaca

SEQ ID NO: 3886551 - DNA, 25 bp, Homo sapien
gtttttagatgacagcacattaaac

SEQ ID NO: 3886552 - DNA, 25 bp, Homo sapien
agtttttagatgacagcacattaaa

SEQ ID NO: 3886553 - DNA, 25 bp, Homo sapien
ggtattttgttctcatcctttcata

SEQ ID NO: 3886554 - DNA, 25 bp, Homo sapien
gatgcaagctgcatgtctatttagc

SEQ ID NO: 3886555 - DNA, 25 bp, Homo sapien
gcctacaacagacatattgtatggg

SEQ ID NO: 3886556 - DNA, 25 bp, Homo sapien
gcatgtctatttagcataataagca

SEQ ID NO: 3886557 - DNA, 25 bp, Homo sapien
cttcctgtttgagggacgaagaagc

SEQ ID NO: 3886558 - DNA, 25 bp, Homo sapien
ccttcctgtttgagggacgaagaag

SEQ ID NO: 3886559 - DNA, 25 bp, Homo sapien
gcttgggtataggagagaggggaga

SEQ ID NO: 3886560 - DNA, 25 bp, Homo sapien
gagaggtttctccagtgatgctgcc

SEQ ID NO: 3886561 - DNA, 25 bp, Homo sapien
tccagtgatgctgccggaggcagac

SEQ ID NO: 3886562 - DNA, 25 bp, Homo sapien
agaggagaggtttctccagtgatgc

SEQ ID NO: 3886563 - DNA, 25 bp, Homo sapien
tttctccagtgatgctgccggaggc

SEQ ID NO: 3886564 - DNA, 25 bp, Homo sapien
cccctgtccataaccagagcctaag

SEQ ID NO: 3886565 - DNA, 25 bp, Homo sapien
ctgtccataaccagagcctaagatg

SEQ ID NO: 3886566 - DNA, 25 bp, Homo sapien
aagtggctgccactttacgcccctg

SEQ ID NO: 3886567 - DNA, 25 bp, Homo sapien
agtggctgccactttacgcccctgt

SEQ ID NO: 3886568 - DNA, 25 bp, Homo sapien
ttccccacgcagaatctctaacttc

SEQ ID NO: 3886569 - DNA, 25 bp, Homo sapien
agaatctctaacttcccactcacag

SEQ ID NO: 3886570 - DNA, 25 bp, Homo sapien
tctaacttcccactcacagctgttc

SEQ ID NO: 3886571 - DNA, 25 bp, Homo sapien
catgtagccagccttctgtgcttcc

SEQ ID NO: 3886572 - DNA, 25 bp, Homo sapien
tctgcccgaagtctggaagagtggc

SEQ ID NO: 3886573 - DNA, 25 bp, Homo sapien
cacaattgccaaaagtctagtaccc

SEQ ID NO: 3886574 - DNA, 25 bp, Homo sapien
tcttcccgctcaacatcctgaaatt

SEQ ID NO: 3886575 - DNA, 25 bp, Homo sapien
gaaattctctggatccagtgagttc

SEQ ID NO: 3886576 - DNA, 25 bp, Homo sapien
cactgctgaactttctgtccatcat

SEQ ID NO: 3886577 - DNA, 25 bp, Homo sapien
actgctgaactttctgtccatcata

SEQ ID NO: 3886578 - DNA, 25 bp, Homo sapien
tcactgctgaactttctgtccatca

SEQ ID NO: 3886579 - DNA, 25 bp, Homo sapien
gcaggcccctaattaaatagttagc

SEQ ID NO: 3886580 - DNA, 25 bp, Homo sapien
ggctgggcaggcccctaattaaata

SEQ ID NO: 3886581 - DNA, 25 bp, Homo sapien
gcccctaattaaatagttagcttca

SEQ ID NO: 3886582 - DNA, 25 bp, Homo sapien
tcatcttcattacccccggtgacca

SEQ ID NO: 3886583 - DNA, 25 bp, Homo sapien
tagtttcagctctgcaagaaagagg

SEQ ID NO: 3886584 - DNA, 25 bp, Homo sapien
gcaggatggtccaatctagtggaaa

SEQ ID NO: 3886585 - DNA, 25 bp, Homo sapien
ggaaggcacgagttctgtttctcaa

SEQ ID NO: 3886586 - DNA, 25 bp, Homo sapien
ggcttttcaatgacctcggaggcag

SEQ ID NO: 3886587 - DNA, 25 bp, Homo sapien
cagttccatggactcattgatatag

SEQ ID NO: 3886588 - DNA, 25 bp, Homo sapien
ctaagtttggaattgctgtctcttc

SEQ ID NO: 3886589 - DNA, 25 bp, Homo sapien
aaataacacgattagctttccaagg

SEQ ID NO: 3886590 - DNA, 25 bp, Homo sapien
gggatgacgcactgttgtgaaaata

SEQ ID NO: 3886591 - DNA, 25 bp, Homo sapien
atactcagtagaaccgtatttatcc

SEQ ID NO: 3886592 - DNA, 25 bp, Homo sapien
catactcagtagaaccgtatttatc

SEQ ID NO: 3886593 - DNA, 25 bp, Homo sapien
actcagtagaaccgtatttatccat

SEQ ID NO: 3886594 - DNA, 25 bp, Homo sapien
tactcagtagaaccgtatttatcca

SEQ ID NO: 3886595 - DNA, 25 bp, Homo sapien
aatgataatcatctacagaagaata

SEQ ID NO: 3886596 - DNA, 25 bp, Homo sapien
ccacagtaggtcctttgctggcatg

SEQ ID NO: 3886597 - DNA, 25 bp, Homo sapien
gaggtctcaaatcgcctgccacaat

SEQ ID NO: 3886598 - DNA, 25 bp, Homo sapien
agctttgcttagtatcatgtgtaca

SEQ ID NO: 3886599 - DNA, 25 bp, Homo sapien
tctttttgtcctgaagaggtctcaa

SEQ ID NO: 3886600 - DNA, 25 bp, Homo sapien
acccactggcgaacatccacaggtg

SEQ ID NO: 3886601 - DNA, 25 bp, Homo sapien
aacccactggcgaacatccacaggt

SEQ ID NO: 3886602 - DNA, 25 bp, Homo sapien
cccactggcgaacatccacaggtgc

SEQ ID NO: 3886603 - DNA, 25 bp, Homo sapien
ccactggcgaacatccacaggtgca

SEQ ID NO: 3886604 - DNA, 25 bp, Homo sapien
gtcatctattttgtaaacaatattt

SEQ ID NO: 3886605 - DNA, 25 bp, Homo sapien
tttgtaaacaatatttgttggagcc

SEQ ID NO: 3886606 - DNA, 25 bp, Homo sapien
attttgtaaacaatatttgttggag

SEQ ID NO: 3886607 - DNA, 25 bp, Homo sapien
tgtaaacaatatttgttggagcctt

SEQ ID NO: 3886608 - DNA, 25 bp, Homo sapien
ctgtatgttggatgatcccccacaa

SEQ ID NO: 3886609 - DNA, 25 bp, Homo sapien
tgtatgttggatgatcccccacaat

SEQ ID NO: 3886610 - DNA, 25 bp, Homo sapien
ctctgtatgttggatgatcccccac

SEQ ID NO: 3886611 - DNA, 25 bp, Homo sapien
tctgtatgttggatgatcccccaca

SEQ ID NO: 3886612 - DNA, 25 bp, Homo sapien
aatgtgctgggctcgacacctgaga

SEQ ID NO: 3886613 - DNA, 25 bp, Homo sapien
cctgagaaggtgtcagcaatccaaa

SEQ ID NO: 3886614 - DNA, 25 bp, Homo sapien
aaggtgtcagcaatccaaaggcccc

SEQ ID NO: 3886615 - DNA, 25 bp, Homo sapien
tgctgggctcgacacctgagaaggt

SEQ ID NO: 3886616 - DNA, 25 bp, Homo sapien
agagcatcgatgtggaggatggagc

SEQ ID NO: 3886617 - DNA, 25 bp, Homo sapien
catcgatgtggaggatggagcttgt

SEQ ID NO: 3886618 - DNA, 25 bp, Homo sapien
gcatcgatgtggaggatggagcttg

SEQ ID NO: 3886619 - DNA, 25 bp, Homo sapien
gagcatcgatgtggaggatggagct

SEQ ID NO: 3886620 - DNA, 25 bp, Homo sapien
aaagaagacactatgcatttgccag

SEQ ID NO: 3886621 - DNA, 25 bp, Homo sapien
gaaacctggtctttaggtctgcatg

SEQ ID NO: 3886622 - DNA, 25 bp, Homo sapien
cagaaagcatcttagctgaggagga

SEQ ID NO: 3886623 - DNA, 25 bp, Homo sapien
aaaaacattcggcttcatcaacatc

SEQ ID NO: 3886624 - DNA, 25 bp, Homo sapien
tgtgctatggtgctagttgcaactc

SEQ ID NO: 3886625 - DNA, 25 bp, Homo sapien
catctcttgtgctatggtgctagtt

SEQ ID NO: 3886626 - DNA, 25 bp, Homo sapien
tctttggctgcccaactaccattcc

SEQ ID NO: 3886627 - DNA, 25 bp, Homo sapien
tggtgctagttgcaactcttgctat

SEQ ID NO: 3886628 - DNA, 25 bp, Homo sapien
ggtaagattgtgaatgtctgcctgg

SEQ ID NO: 3886629 - DNA, 25 bp, Homo sapien
tggtaagattgtgaatgtctgcctg

SEQ ID NO: 3886630 - DNA, 25 bp, Homo sapien
gaagaaagtgaagctcctcctggtt

SEQ ID NO: 3886631 - DNA, 25 bp, Homo sapien
cttttgctggtggttcagttgccct

SEQ ID NO: 3886632 - DNA, 25 bp, Homo sapien
tgctggtggttcagttgccctgtgc

SEQ ID NO: 3886633 - DNA, 25 bp, Homo sapien
tggtggttcagttgccctgtgctgc

SEQ ID NO: 3886634 - DNA, 25 bp, Homo sapien
ggtggttcagttgccctgtgctgct

SEQ ID NO: 3886635 - DNA, 25 bp, Homo sapien
tcctgagcttcatagaaggagcagc

SEQ ID NO: 3886636 - DNA, 25 bp, Homo sapien
taatggggagattctagggcaatac

SEQ ID NO: 3886637 - DNA, 25 bp, Homo sapien
ttctagggcaatacatccacacttc

SEQ ID NO: 3886638 - DNA, 25 bp, Homo sapien
gggagattctagggcaatacatcca

SEQ ID NO: 3886639 - DNA, 25 bp, Homo sapien
tctttgctgtatattctaaccagaa

SEQ ID NO: 3886640 - DNA, 25 bp, Homo sapien
tatattctaaccagaaactgagtca

SEQ ID NO: 3886641 - DNA, 25 bp, Homo sapien
cagtctttgctgtatattctaacca

SEQ ID NO: 3886642 - DNA, 25 bp, Homo sapien
gtatattctaaccagaaactgagtc

SEQ ID NO: 3886643 - DNA, 25 bp, Homo sapien
gctaggttactttctagggtcatac

SEQ ID NO: 3886644 - DNA, 25 bp, Homo sapien
ggtaaatctttacttatggccagaa

SEQ ID NO: 3886645 - DNA, 25 bp, Homo sapien
gcactgagcattataccaagtacta

SEQ ID NO: 3886646 - DNA, 25 bp, Homo sapien
gataacctgctgtcaaaatgaataa

SEQ ID NO: 3886647 - DNA, 25 bp, Homo sapien
tgcctaggaagctccactgatgagg

SEQ ID NO: 3886648 - DNA, 25 bp, Homo sapien
aagctccactgatgaggcgtgggca

SEQ ID NO: 3886649 - DNA, 25 bp, Homo sapien
cacctgcctaggaagctccactgat

SEQ ID NO: 3886650 - DNA, 25 bp, Homo sapien
taggaagctccactgatgaggcgtg

SEQ ID NO: 3886651 - DNA, 25 bp, Homo sapien
gtgatgtggagaatggaaccatgtt

SEQ ID NO: 3886652 - DNA, 25 bp, Homo sapien
aagtgatgtggagaatggaaccatg

SEQ ID NO: 3886653 - DNA, 25 bp, Homo sapien
cagaagcctcaggagctgatgcgat

SEQ ID NO: 3886654 - DNA, 25 bp, Homo sapien
tgcagaagcctcaggagctgatgcg

SEQ ID NO: 3886655 - DNA, 25 bp, Homo sapien
cctattttgccccttaagcatttgc

SEQ ID NO: 3886656 - DNA, 25 bp, Homo sapien
tttgcttatgttgcaaacttgtagc

SEQ ID NO: 3886657 - DNA, 25 bp, Homo sapien
tgcttatgttgcaaacttgtagcat

SEQ ID NO: 3886658 - DNA, 25 bp, Homo sapien
attttgccccttaagcatttgctta

SEQ ID NO: 3886659 - DNA, 25 bp, Homo sapien
caatgtggcccagtaaagaatagtc

SEQ ID NO: 3886660 - DNA, 25 bp, Homo sapien
gaagtttatatctggtgactcctgg

SEQ ID NO: 3886661 - DNA, 25 bp, Homo sapien
cataggactccgcaggaagaggaca

SEQ ID NO: 3886662 - DNA, 25 bp, Homo sapien
gaaatcactatctcgacttccttgg

SEQ ID NO: 3886663 - DNA, 25 bp, Homo sapien
ctgtagcctgatttgctcccaattt

SEQ ID NO: 3886664 - DNA, 25 bp, Homo sapien
atgttgagggacatccatatgtctt

SEQ ID NO: 3886665 - DNA, 25 bp, Homo sapien
ggagatgttgagggacatccatatg

SEQ ID NO: 3886666 - DNA, 25 bp, Homo sapien
gagatgttgagggacatccatatgt

SEQ ID NO: 3886667 - DNA, 25 bp, Homo sapien
gatgttgagggacatccatatgtct

SEQ ID NO: 3886668 - DNA, 25 bp, Homo sapien
tcatttctaaggctcatccccaaac

SEQ ID NO: 3886669 - DNA, 25 bp, Homo sapien
gaatcttagaaggttctgaggctct

SEQ ID NO: 3886670 - DNA, 25 bp, Homo sapien
tgttctctcatcacgaagttgtggc

SEQ ID NO: 3886671 - DNA, 25 bp, Homo sapien
taaaacttcccacggtgttctctca

SEQ ID NO: 3886672 - DNA, 25 bp, Homo sapien
cgtgtgcttgcgtcctgtttgccta

SEQ ID NO: 3886673 - DNA, 25 bp, Homo sapien
gctttccagactacaagccttttga

SEQ ID NO: 3886674 - DNA, 25 bp, Homo sapien
tctcaggcttttgtacccgttcgtg

SEQ ID NO: 3886675 - DNA, 25 bp, Homo sapien
tgtttgcctatttgctttccagact

SEQ ID NO: 3886676 - DNA, 25 bp, Homo sapien
tccacgccaatcagacagtgctggg

SEQ ID NO: 3886677 - DNA, 25 bp, Homo sapien
tatagctgaaagaggtgacagccgc

SEQ ID NO: 3886678 - DNA, 25 bp, Homo sapien
ttcagtgtaacgtttggctctcccc

SEQ ID NO: 3886679 - DNA, 25 bp, Homo sapien
tgcaaagtactctggtaggcaccaa

SEQ ID NO: 3886680 - DNA, 25 bp, Homo sapien
accacggccccgttcttcagtagca

SEQ ID NO: 3886681 - DNA, 25 bp, Homo sapien
ttcagtagcagcacgctgggctccc

SEQ ID NO: 3886682 - DNA, 25 bp, Homo sapien
ggaactccaagtacccaggcaatgc

SEQ ID NO: 3886683 - DNA, 25 bp, Homo sapien
tcctggcctactgcggcatacgcta

SEQ ID NO: 3886684 - DNA, 25 bp, Homo sapien
tttccaaggaagtgtggcctatgct

SEQ ID NO: 3886685 - DNA, 25 bp, Homo sapien
gagcgttctgtcctcgtttccactg

SEQ ID NO: 3886686 - DNA, 25 bp, Homo sapien
ccaaggaagtgtggcctatgctgct

SEQ ID NO: 3886687 - DNA, 25 bp, Homo sapien
catggaaacccagtgcatgccaggg

SEQ ID NO: 3886688 - DNA, 25 bp, Homo sapien
tctctataattaacctcacagggca

SEQ ID NO: 3886689 - DNA, 25 bp, Homo sapien
tcttatagatccatatcacaggcat

SEQ ID NO: 3886690 - DNA, 25 bp, Homo sapien
gggatctctgcgtattttgtgagtt

SEQ ID NO: 3886691 - DNA, 25 bp, Homo sapien
actttcacggatttcagacagtgta

SEQ ID NO: 3886692 - DNA, 25 bp, Homo sapien
tctgcttctggcatgccacattggc

SEQ ID NO: 3886693 - DNA, 25 bp, Homo sapien
cgggcagctgtaagggctgtcctct

SEQ ID NO: 3886694 - DNA, 25 bp, Homo sapien
tgacgtattcctgatggttttctct

SEQ ID NO: 3886695 - DNA, 25 bp, Homo sapien
tgcatgcacagcagtaattattgac

SEQ ID NO: 3886696 - DNA, 25 bp, Homo sapien
tccaaatacccagcggccgttttgc

SEQ ID NO: 3886697 - DNA, 25 bp, Homo sapien
catgcttcggttgaatttcatttcc

SEQ ID NO: 3886698 - DNA, 25 bp, Homo sapien
caaatacccagcggccgttttgcat

SEQ ID NO: 3886699 - DNA, 25 bp, Homo sapien
gcttcggttgaatttcatttccaaa

SEQ ID NO: 3886700 - DNA, 25 bp, Homo sapien
tagaactagctgtttgtctccattc

SEQ ID NO: 3886701 - DNA, 25 bp, Homo sapien
tccagtagcaaaggtctgtgatcct

SEQ ID NO: 3886702 - DNA, 25 bp, Homo sapien
cacaagtctgttggttgagagcccc

SEQ ID NO: 3886703 - DNA, 25 bp, Homo sapien
tgatcctgtggctaggtagataccc

SEQ ID NO: 3886704 - DNA, 25 bp, Homo sapien
ggccagattagagtagccctggttg

SEQ ID NO: 3886705 - DNA, 25 bp, Homo sapien
aggcaggtgcttatctctttggaga

SEQ ID NO: 3886706 - DNA, 25 bp, Homo sapien
cgaggttgttaggtctagagtgcag

SEQ ID NO: 3886707 - DNA, 25 bp, Homo sapien
gccctggttggtggaagtatcacag

SEQ ID NO: 3886708 - DNA, 25 bp, Homo sapien
gatgacttttataataaataatttc

SEQ ID NO: 3886709 - DNA, 25 bp, Homo sapien
tcccatttagcttaggggtctccat

SEQ ID NO: 3886710 - DNA, 25 bp, Homo sapien
tgagctagaatgactctctttgtcc

SEQ ID NO: 3886711 - DNA, 25 bp, Homo sapien
ttgcattattgcaaatacagatttc

SEQ ID NO: 3886712 - DNA, 25 bp, Homo sapien
aacactgtggatgagctagaatgac

SEQ ID NO: 3886713 - DNA, 25 bp, Homo sapien
gacagttgcaaggatattttcagtg

SEQ ID NO: 3886714 - DNA, 25 bp, Homo sapien
ggcttccttccctgaagagaccagc

SEQ ID NO: 3886715 - DNA, 25 bp, Homo sapien
tccgcactctcaaagagcttgacag

SEQ ID NO: 3886716 - DNA, 25 bp, Homo sapien
gctgaagtttgaagctccgcactct

SEQ ID NO: 3886717 - DNA, 25 bp, Homo sapien
caggacacctcaaacttctctgaaa

SEQ ID NO: 3886718 - DNA, 25 bp, Homo sapien
tgagtcccaggacacctcaaacttc

SEQ ID NO: 3886719 - DNA, 25 bp, Homo sapien
ctgaaaagccaaattgccttaccat

SEQ ID NO: 3886720 - DNA, 25 bp, Homo sapien
tctctgaaaagccaaattgccttac

SEQ ID NO: 3886721 - DNA, 25 bp, Homo sapien
ctctgctatactacatgcaattata

SEQ ID NO: 3886722 - DNA, 25 bp, Homo sapien
tgttcattatctctaattttctcac

SEQ ID NO: 3886723 - DNA, 25 bp, Homo sapien
catgcaattatatgtctaatgttat

SEQ ID NO: 3886724 - DNA, 25 bp, Homo sapien
aattttctcactctgctatactaca

SEQ ID NO: 3886725 - DNA, 25 bp, Homo sapien
gacacactgctttggagcccatggg

SEQ ID NO: 3886726 - DNA, 25 bp, Homo sapien
tcaggttgaacctgagctgatgtca

SEQ ID NO: 3886727 - DNA, 25 bp, Homo sapien
gaacctgagctgatgtcaatgacac

SEQ ID NO: 3886728 - DNA, 25 bp, Homo sapien
cactgctttggagcccatgggtagg

SEQ ID NO: 3886729 - DNA, 25 bp, Homo sapien
gtaaacatgaacaagagatgacacc

SEQ ID NO: 3886730 - DNA, 25 bp, Homo sapien
caatgtctggaactgcaatgattat

SEQ ID NO: 3886731 - DNA, 25 bp, Homo sapien
cttttttctactggccttaaacatg

SEQ ID NO: 3886732 - DNA, 25 bp, Homo sapien
taaacatggatgcaatgtctggaac

SEQ ID NO: 3886733 - DNA, 25 bp, Homo sapien
ccagttcatcaaactggtttctgtc

SEQ ID NO: 3886734 - DNA, 25 bp, Homo sapien
gacttcttgagcactccacttgtcc

SEQ ID NO: 3886735 - DNA, 25 bp, Homo sapien
acttgtcctccctgatcaacactag

SEQ ID NO: 3886736 - DNA, 25 bp, Homo sapien
tccatgtttgacttcttgagcactc

SEQ ID NO: 3886737 - DNA, 25 bp, Homo sapien
tgaggatgacgtctacttgcccatc

SEQ ID NO: 3886738 - DNA, 25 bp, Homo sapien
cgtgaggatgacgtctacttgccca

SEQ ID NO: 3886739 - DNA, 25 bp, Homo sapien
agagtctctgatcccgtgaggatga

SEQ ID NO: 3886740 - DNA, 25 bp, Homo sapien
gagtctctgatcccgtgaggatgac

SEQ ID NO: 3886741 - DNA, 25 bp, Homo sapien
agaactgcactggtcaccagagatg

SEQ ID NO: 3886742 - DNA, 25 bp, Homo sapien
aagaactgcactggtcaccagagat

SEQ ID NO: 3886743 - DNA, 25 bp, Homo sapien
caagaactgcactggtcaccagaga

SEQ ID NO: 3886744 - DNA, 25 bp, Homo sapien
ccaagaactgcactggtcaccagag

SEQ ID NO: 3886745 - DNA, 25 bp, Homo sapien
ttggaagatgcctgtactgacctac

SEQ ID NO: 3886746 - DNA, 25 bp, Homo sapien
tctttgttagtggaattattggtgc

SEQ ID NO: 3886747 - DNA, 25 bp, Homo sapien
caggttggaagatgcctgtactgac

SEQ ID NO: 3886748 - DNA, 25 bp, Homo sapien
ttgttagtggaattattggtgcctc

SEQ ID NO: 3886749 - DNA, 25 bp, Homo sapien
ccatttctggattaagccttctctc

SEQ ID NO: 3886750 - DNA, 25 bp, Homo sapien
cccatttctggattaagccttctct

SEQ ID NO: 3886751 - DNA, 25 bp, Homo sapien
ttttgacttccgtaggagacatatt

SEQ ID NO: 3886752 - DNA, 25 bp, Homo sapien
ggctttttgacttccgtaggagaca

SEQ ID NO: 3886753 - DNA, 25 bp, Homo sapien
tccgtaggagacatatttacgtaaa

SEQ ID NO: 3886754 - DNA, 25 bp, Homo sapien
gacttccgtaggagacatatttacg

SEQ ID NO: 3886755 - DNA, 25 bp, Homo sapien
tttgtgctcggcatcatacttggcg

SEQ ID NO: 3886756 - DNA, 25 bp, Homo sapien
tcatacttggcgtagagttggcctt

SEQ ID NO: 3886757 - DNA, 25 bp, Homo sapien
cttcccaaatcctcaaaagcagtgg

SEQ ID NO: 3886758 - DNA, 25 bp, Homo sapien
gactttatcaaacctgtcttttgcc

SEQ ID NO: 3886759 - DNA, 25 bp, Homo sapien
gcctgagttctgcattcacagtggc

SEQ ID NO: 3886760 - DNA, 25 bp, Homo sapien
gcgtgggcctgagttctgcattcac

SEQ ID NO: 3886761 - DNA, 25 bp, Homo sapien
ggaggtctgcaaggcaatccacaga

SEQ ID NO: 3886762 - DNA, 25 bp, Homo sapien
gcaatccacagaggctgttgaagaa

SEQ ID NO: 3886763 - DNA, 25 bp, Homo sapien
ccttcacatcgttgtacctttgcca

SEQ ID NO: 3886764 - DNA, 25 bp, Homo sapien
tgggtcaaaatcagtgtcagcattt

SEQ ID NO: 3886765 - DNA, 25 bp, Homo sapien
gttttgtaatatgcccttcacatcg

SEQ ID NO: 3886766 - DNA, 25 bp, Homo sapien
gaagtgggtcaaaatcagtgtcagc

SEQ ID NO: 3886767 - DNA, 25 bp, Homo sapien
ccactgccatgatgtaatatttgtc

SEQ ID NO: 3886768 - DNA, 25 bp, Homo sapien
tgttccagtgtacctacagcatccc

SEQ ID NO: 3886769 - DNA, 25 bp, Homo sapien
ttgttttgaagcagtacgatcaaaa

SEQ ID NO: 3886770 - DNA, 25 bp, Homo sapien
gcagtacgatcaaaatctgttccag

SEQ ID NO: 3886771 - DNA, 25 bp, Homo sapien
gtgacacatctgttctgtgtttggg

SEQ ID NO: 3886772 - DNA, 25 bp, Homo sapien
atgccccgtatcacatcagtagcag

SEQ ID NO: 3886773 - DNA, 25 bp, Homo sapien
cacatcagtagcagccagtgatgga

SEQ ID NO: 3886774 - DNA, 25 bp, Homo sapien
tgaaaatgccccgtatcacatcagt

SEQ ID NO: 3886775 - DNA, 25 bp, Homo sapien
cccacttaggagcatatgcagggaa

SEQ ID NO: 3886776 - DNA, 25 bp, Homo sapien
tctccacatggtactgccagctgta

SEQ ID NO: 3886777 - DNA, 25 bp, Homo sapien
aaatgatcatcactttgccaagccc

SEQ ID NO: 3886778 - DNA, 25 bp, Homo sapien
tgtaacacagggaatcccacttagg

SEQ ID NO: 3886779 - DNA, 25 bp, Homo sapien
atatttgacagtgtcaacattgagg

SEQ ID NO: 3886780 - DNA, 25 bp, Homo sapien
tttgacagtgtcaacattgaggctc

SEQ ID NO: 3886781 - DNA, 25 bp, Homo sapien
atttgacagtgtcaacattgaggct

SEQ ID NO: 3886782 - DNA, 25 bp, Homo sapien
tgacagtgtcaacattgaggctcac

SEQ ID NO: 3886783 - DNA, 25 bp, Homo sapien
cacagtgtataaatgggtgacaaga

SEQ ID NO: 3886784 - DNA, 25 bp, Homo sapien
cgtgcacagtcacagtgtataaatg

SEQ ID NO: 3886785 - DNA, 25 bp, Homo sapien
gtgcctgaatctgagactccatcta

SEQ ID NO: 3886786 - DNA, 25 bp, Homo sapien
gactccatctaaaacccgtgcacag

SEQ ID NO: 3886787 - DNA, 25 bp, Homo sapien
tttcagtgcaaagagggcatgcatt

SEQ ID NO: 3886788 - DNA, 25 bp, Homo sapien
tggatattcatgctcacagtcttca

SEQ ID NO: 3886789 - DNA, 25 bp, Homo sapien
caaattcagggatatgtgagaggac

SEQ ID NO: 3886790 - DNA, 25 bp, Homo sapien
gaatcaggacaatatcatcaaagac

SEQ ID NO: 3886791 - DNA, 25 bp, Homo sapien
gaatgccggagagccaaccaagggt

SEQ ID NO: 3886792 - DNA, 25 bp, Homo sapien
gctggaatgccggagagccaaccaa

SEQ ID NO: 3886793 - DNA, 25 bp, Homo sapien
tattgaaaggcaatgcatgggacag

SEQ ID NO: 3886794 - DNA, 25 bp, Homo sapien
tgcagctggaatgccggagagccaa

SEQ ID NO: 3886795 - DNA, 25 bp, Homo sapien
ggctgtcttcccctagactaggagt

SEQ ID NO: 3886796 - DNA, 25 bp, Homo sapien
gttatgtgattattggctgtcttcc

SEQ ID NO: 3886797 - DNA, 25 bp, Homo sapien
tttgattagagcagttatgtgatta

SEQ ID NO: 3886798 - DNA, 25 bp, Homo sapien
cctagactaggagttccctgaaggc

SEQ ID NO: 3886799 - DNA, 25 bp, Homo sapien
atataccaagccagggcacaggttt

SEQ ID NO: 3886800 - DNA, 25 bp, Homo sapien
aggaaatataccaagccagggcaca

SEQ ID NO: 3886801 - DNA, 25 bp, Homo sapien
gaaatataccaagccagggcacagg

SEQ ID NO: 3886802 - DNA, 25 bp, Homo sapien
aatataccaagccagggcacaggtt

SEQ ID NO: 3886803 - DNA, 25 bp, Homo sapien
agtagatggtatgcccttctgagaa

SEQ ID NO: 3886804 - DNA, 25 bp, Homo sapien
gaagccactgaacgtgatgaagcaa

SEQ ID NO: 3886805 - DNA, 25 bp, Homo sapien
agagcccagtatgccatttcagaag

SEQ ID NO: 3886806 - DNA, 25 bp, Homo sapien
tccagagcccagtatgccatttcag

SEQ ID NO: 3886807 - DNA, 25 bp, Homo sapien
cttcggaagcagtcctgagtgacat

SEQ ID NO: 3886808 - DNA, 25 bp, Homo sapien
ttcggaagcagtcctgagtgacatc

SEQ ID NO: 3886809 - DNA, 25 bp, Homo sapien
tcggaagcagtcctgagtgacatct

SEQ ID NO: 3886810 - DNA, 25 bp, Homo sapien
tatagaaggccaactagaacaggga

SEQ ID NO: 3886811 - DNA, 25 bp, Homo sapien
atatagaaggccaactagaacaggg

SEQ ID NO: 3886812 - DNA, 25 bp, Homo sapien
tcagacttctgaccgtttttctggt

SEQ ID NO: 3886813 - DNA, 25 bp, Homo sapien
tctggttactaatacagactttcat

SEQ ID NO: 3886814 - DNA, 25 bp, Homo sapien
agatggctcttctcctaacaggtgc

SEQ ID NO: 3886815 - DNA, 25 bp, Homo sapien
ttgctgtcttctctcaggtacctca

SEQ ID NO: 3886816 - DNA, 25 bp, Homo sapien
ggcatgccatacatggcaacatggg

SEQ ID NO: 3886817 - DNA, 25 bp, Homo sapien
gaagaccagagtggtcaggaggcag

SEQ ID NO: 3886818 - DNA, 25 bp, Homo sapien
gtcctagagacaggaggcatgccat

SEQ ID NO: 3886819 - DNA, 25 bp, Homo sapien
caggagcaaggtaagttgtaaggca

SEQ ID NO: 3886820 - DNA, 25 bp, Homo sapien
ttcagccgtgcttgccttgttactg

SEQ ID NO: 3886821 - DNA, 25 bp, Homo sapien
cttgttactgtgtaatcgggatgtg

SEQ ID NO: 3886822 - DNA, 25 bp, Homo sapien
gttgtgaccatgctatgcagcgggt

SEQ ID NO: 3886823 - DNA, 25 bp, Homo sapien
gcagcgggtctccactgataacttt

SEQ ID NO: 3886824 - DNA, 25 bp, Homo sapien
gactttgacatgcatttcttgaggg

SEQ ID NO: 3886825 - DNA, 25 bp, Homo sapien
tcgcatgtaactacttactctgtgg

SEQ ID NO: 3886826 - DNA, 25 bp, Homo sapien
gatattagatcattcccagactggc

SEQ ID NO: 3886827 - DNA, 25 bp, Homo sapien
tactagagaaaacacgaaggatgaa

SEQ ID NO: 3886828 - DNA, 25 bp, Homo sapien
atttaatagttgtccagatgcagca

SEQ ID NO: 3886829 - DNA, 25 bp, Homo sapien
gtcatctctctttgtaaccgctttg

SEQ ID NO: 3886830 - DNA, 25 bp, Homo sapien
tgcctaacacacatcctttaacaga

SEQ ID NO: 3886831 - DNA, 25 bp, Homo sapien
catttatttcccagatagtgcctaa

SEQ ID NO: 3886832 - DNA, 25 bp, Homo sapien
acgcctttctactttgttgttcctg

SEQ ID NO: 3886833 - DNA, 25 bp, Homo sapien
gcctttctactttgttgttcctgaa

SEQ ID NO: 3886834 - DNA, 25 bp, Homo sapien
agcacagggtttacgcctttctact

SEQ ID NO: 3886835 - DNA, 25 bp, Homo sapien
tctactttgttgttcctgaattcaa

SEQ ID NO: 3886836 - DNA, 25 bp, Homo sapien
taatgtttaaatgtgcaatgtttat

SEQ ID NO: 3886837 - DNA, 25 bp, Homo sapien
cagtattctgtctaaagttgctcaa

SEQ ID NO: 3886838 - DNA, 25 bp, Homo sapien
ttctgtctaaagttgctcaaataat

SEQ ID NO: 3886839 - DNA, 25 bp, Homo sapien
agctctcagtattctgtctaaagtt

SEQ ID NO: 3886840 - DNA, 25 bp, Homo sapien
attgaaaaaagctgagtgagtgggc

SEQ ID NO: 3886841 - DNA, 25 bp, Homo sapien
gagcaattggctttcctcgtcgagg

SEQ ID NO: 3886842 - DNA, 25 bp, Homo sapien
gatttgagaactgaaactagagctg

SEQ ID NO: 3886843 - DNA, 25 bp, Homo sapien
cgtcgaggttcgtgcaaacagaatt

SEQ ID NO: 3886844 - DNA, 25 bp, Homo sapien
tctcaggcctgagcctattgttgtt

SEQ ID NO: 3886845 - DNA, 25 bp, Homo sapien
tttgacaacccagaacatgccacat

SEQ ID NO: 3886846 - DNA, 25 bp, Homo sapien
tcacaaaattgaaagatctctcagg

SEQ ID NO: 3886847 - DNA, 25 bp, Homo sapien
aatgaagctttgataatgatttgac

SEQ ID NO: 3886848 - DNA, 25 bp, Homo sapien
atataaccatttcttataggaagac

SEQ ID NO: 3886849 - DNA, 25 bp, Homo sapien
ataaccatttcttataggaagacac

SEQ ID NO: 3886850 - DNA, 25 bp, Homo sapien
tataaccatttcttataggaagaca

SEQ ID NO: 3886851 - DNA, 25 bp, Homo sapien
gatataaccatttcttataggaaga

SEQ ID NO: 3886852 - DNA, 25 bp, Homo sapien
gcctgttttcgcctgtgacttgcct

SEQ ID NO: 3886853 - DNA, 25 bp, Homo sapien
agaagccgggctgatgccagtacca

SEQ ID NO: 3886854 - DNA, 25 bp, Homo sapien
tctgtcccggtgatactgagtaagt

SEQ ID NO: 3886855 - DNA, 25 bp, Homo sapien
tgccccacaagtgctcttgtgcctg

SEQ ID NO: 3886856 - DNA, 25 bp, Homo sapien
actgctggacttgggcacctcttcc

SEQ ID NO: 3886857 - DNA, 25 bp, Homo sapien
tgctggacttgggcacctcttccca

SEQ ID NO: 3886858 - DNA, 25 bp, Homo sapien
gctggacttgggcacctcttcccac

SEQ ID NO: 3886859 - DNA, 25 bp, Homo sapien
tctttccaggagcactgttctcttc

SEQ ID NO: 3886860 - DNA, 25 bp, Homo sapien
catctttccaggagcactgttctct

SEQ ID NO: 3886861 - DNA, 25 bp, Homo sapien
tggcatctttccaggagcactgttc

SEQ ID NO: 3886862 - DNA, 25 bp, Homo sapien
gatggcatctttccaggagcactgt

SEQ ID NO: 3886863 - DNA, 25 bp, Homo sapien
gattgaagtttatccttataataac

SEQ ID NO: 3886864 - DNA, 25 bp, Homo sapien
tgtcacgaagttttgtataatatat

SEQ ID NO: 3886865 - DNA, 25 bp, Homo sapien
ttttctacatatgtgggaatgccaa

SEQ ID NO: 3886866 - DNA, 25 bp, Homo sapien
tcaagttctaatatctgcgatagac

SEQ ID NO: 3886867 - DNA, 25 bp, Homo sapien
tgttgctggcagtgacacctgcatt

SEQ ID NO: 3886868 - DNA, 25 bp, Homo sapien
cagtgacacctgcattcctgctgca

SEQ ID NO: 3886869 - DNA, 25 bp, Homo sapien
acctgcattcctgctgcaccgtcat

SEQ ID NO: 3886870 - DNA, 25 bp, Homo sapien
ttgctggcagtgacacctgcattcc

SEQ ID NO: 3886871 - DNA, 25 bp, Homo sapien
tctgtgctcagtgtccttccaactc

SEQ ID NO: 3886872 - DNA, 25 bp, Homo sapien
gtgctcagtgtccttccaactccat

SEQ ID NO: 3886873 - DNA, 25 bp, Homo sapien
tcttgctagtatctgtgctcagtgt

SEQ ID NO: 3886874 - DNA, 25 bp, Homo sapien
ctcttgctagtatctgtgctcagtg

SEQ ID NO: 3886875 - DNA, 25 bp, Homo sapien
caagcaggagataaagatttggtac

SEQ ID NO: 3886876 - DNA, 25 bp, Homo sapien
tcaagcaggagataaagatttggta

SEQ ID NO: 3886877 - DNA, 25 bp, Homo sapien
gagataaagatttggtacatttcca

SEQ ID NO: 3886878 - DNA, 25 bp, Homo sapien
gcaggagataaagatttggtacatt

SEQ ID NO: 3886879 - DNA, 25 bp, Homo sapien
tagctcctgccgtgaaagtttgggc

SEQ ID NO: 3886880 - DNA, 25 bp, Homo sapien
ctagctcctgccgtgaaagtttggg

SEQ ID NO: 3886881 - DNA, 25 bp, Homo sapien
cagctcctagctcctgccgtgaaag

SEQ ID NO: 3886882 - DNA, 25 bp, Homo sapien
ctcctagctcctgccgtgaaagttt

SEQ ID NO: 3886883 - DNA, 25 bp, Homo sapien
tttccaatcagctggttgtgacctg

SEQ ID NO: 3886884 - DNA, 25 bp, Homo sapien
ctttccaatcagctggttgtgacct

SEQ ID NO: 3886885 - DNA, 25 bp, Homo sapien
tccaatcagctggttgtgacctgtc

SEQ ID NO: 3886886 - DNA, 25 bp, Homo sapien
caatcagctggttgtgacctgtcat

SEQ ID NO: 3886887 - DNA, 25 bp, Homo sapien
ctggccaataggctctccatactgc

SEQ ID NO: 3886888 - DNA, 25 bp, Homo sapien
tccttggattatcacaattttctcc

SEQ ID NO: 3886889 - DNA, 25 bp, Homo sapien
aagtcacctactttcagctgcttct

SEQ ID NO: 3886890 - DNA, 25 bp, Homo sapien
ggccaataggctctccatactgctt

SEQ ID NO: 3886891 - DNA, 25 bp, Homo sapien
gaacctgagctgttccatatgcgga

SEQ ID NO: 3886892 - DNA, 25 bp, Homo sapien
gctgttccatatgcggattagtcaa

SEQ ID NO: 3886893 - DNA, 25 bp, Homo sapien
tgctgtggggagtccccttggttac

SEQ ID NO: 3886894 - DNA, 25 bp, Homo sapien
tatgcggattagtcaatcgcttttt

SEQ ID NO: 3886895 - DNA, 25 bp, Homo sapien
gacatgggactagatgcccagtcca

SEQ ID NO: 3886896 - DNA, 25 bp, Homo sapien
taactgtgtctacaatcaagagagt

SEQ ID NO: 3886897 - DNA, 25 bp, Homo sapien
caggagaaaactacaaggaccaggt

SEQ ID NO: 3886898 - DNA, 25 bp, Homo sapien
ggatgctgtcagcttgccactgtac

SEQ ID NO: 3886899 - DNA, 25 bp, Homo sapien
ggtcactctctacccatgctctttt

SEQ ID NO: 3886900 - DNA, 25 bp, Homo sapien
tggtcactctctacccatgctcttt

SEQ ID NO: 3886901 - DNA, 25 bp, Homo sapien
acctggtcactctctacccatgctc

SEQ ID NO: 3886902 - DNA, 25 bp, Homo sapien
tctctacccatgctcttttcctcaa

SEQ ID NO: 3886903 - DNA, 25 bp, Homo sapien
gtactcttcttggttcataggtagg

SEQ ID NO: 3886904 - DNA, 25 bp, Homo sapien
tgagaaatctacaaggtactcttct

SEQ ID NO: 3886905 - DNA, 25 bp, Homo sapien
ggtaggtacccattgcattgacttt

SEQ ID NO: 3886906 - DNA, 25 bp, Homo sapien
taattttgggtggagtctgagtgtc

SEQ ID NO: 3886907 - DNA, 25 bp, Homo sapien
tggatgcaaatatcactgataggtg

SEQ ID NO: 3886908 - DNA, 25 bp, Homo sapien
tgatacagacttaatatgaggtgga

SEQ ID NO: 3886909 - DNA, 25 bp, Homo sapien
caggaggtgccagcatttattgatt

SEQ ID NO: 3886910 - DNA, 25 bp, Homo sapien
tgcaaaacgatacagagtccatctg

SEQ ID NO: 3886911 - DNA, 25 bp, Homo sapien
ctcattgacaggtaggtactctcat

SEQ ID NO: 3886912 - DNA, 25 bp, Homo sapien
gccatttgtgttgagttttctgaac

SEQ ID NO: 3886913 - DNA, 25 bp, Homo sapien
ctatattagacaacctaggaaccct

SEQ ID NO: 3886914 - DNA, 25 bp, Homo sapien
tgggggttcaataagttaagtcagc

SEQ ID NO: 3886915 - DNA, 25 bp, Homo sapien
gctttgtgatcgaaaccctgaccgg

SEQ ID NO: 3886916 - DNA, 25 bp, Homo sapien
cataaacactgtcggtaagccactg

SEQ ID NO: 3886917 - DNA, 25 bp, Homo sapien
gaaggcctccatacagagatccaga

SEQ ID NO: 3886918 - DNA, 25 bp, Homo sapien
gatccagagccagtgacaggagttg

SEQ ID NO: 3886919 - DNA, 25 bp, Homo sapien
cgagtcttaatttggaaagggcaag

SEQ ID NO: 3886920 - DNA, 25 bp, Homo sapien
tgtcatatccgggatacacacagtc

SEQ ID NO: 3886921 - DNA, 25 bp, Homo sapien
cacagtcccaccgtttgaatagcag

SEQ ID NO: 3886922 - DNA, 25 bp, Homo sapien
tgaatagcagaattgcgagtcttaa

SEQ ID NO: 3886923 - DNA, 25 bp, Homo sapien
tcagtgagggtcctctatatcaaat

SEQ ID NO: 3886924 - DNA, 25 bp, Homo sapien
ggtcctctatatcaaatggttctcc

SEQ ID NO: 3886925 - DNA, 25 bp, Homo sapien
gagggtcctctatatcaaatggttc

SEQ ID NO: 3886926 - DNA, 25 bp, Homo sapien
gtgagggtcctctatatcaaatggt

SEQ ID NO: 3886927 - DNA, 25 bp, Homo sapien
tgaagaaacagggtgatccgtcgca

SEQ ID NO: 3886928 - DNA, 25 bp, Homo sapien
tgacaaaacgccaaaacgctaagtg

SEQ ID NO: 3886929 - DNA, 25 bp, Homo sapien
gtaatatcttagctccagtggacct

SEQ ID NO: 3886930 - DNA, 25 bp, Homo sapien
tctgattcctagcagggtgaccctt

SEQ ID NO: 3886931 - DNA, 25 bp, Homo sapien
tcagatagcccgaacacatgcagag

SEQ ID NO: 3886932 - DNA, 25 bp, Homo sapien
tatctagcaaggctttacaccggag

SEQ ID NO: 3886933 - DNA, 25 bp, Homo sapien
ccataaccagtagagtgaaaccgac

SEQ ID NO: 3886934 - DNA, 25 bp, Homo sapien
taagtgatttccatgggtagccctg

SEQ ID NO: 3886935 - DNA, 25 bp, Homo sapien
atttccccatggctacatgggtctc

SEQ ID NO: 3886936 - DNA, 25 bp, Homo sapien
taacaccgcttgtggcatatttccc

SEQ ID NO: 3886937 - DNA, 25 bp, Homo sapien
gctccccaagcaccaatgctaccac

SEQ ID NO: 3886938 - DNA, 25 bp, Homo sapien
gtctccataattgtcaccttcaagt

SEQ ID NO: 3886939 - DNA, 25 bp, Homo sapien
catgctggtcaccatacccatgttt

SEQ ID NO: 3886940 - DNA, 25 bp, Homo sapien
gctggtcaccatacccatgtttagt

SEQ ID NO: 3886941 - DNA, 25 bp, Homo sapien
caccatacccatgtttagtaaggtt

SEQ ID NO: 3886942 - DNA, 25 bp, Homo sapien
ggtcaccatacccatgtttagtaag

SEQ ID NO: 3886943 - DNA, 25 bp, Homo sapien
ggtgacgcatggaccatttcccctg

SEQ ID NO: 3886944 - DNA, 25 bp, Homo sapien
tcatgtaatggcactgccaggctgg

SEQ ID NO: 3886945 - DNA, 25 bp, Homo sapien
tcttccagctgtgggcgttataaca

SEQ ID NO: 3886946 - DNA, 25 bp, Homo sapien
ctggttggttggcattgtcttaggt

SEQ ID NO: 3886947 - DNA, 25 bp, Homo sapien
ctgtgaccatgatgaatagggagaa

SEQ ID NO: 3886948 - DNA, 25 bp, Homo sapien
ccttacattcatctcaacaagtagt

SEQ ID NO: 3886949 - DNA, 25 bp, Homo sapien
gaaatttagcaaaacccaggagtga

SEQ ID NO: 3886950 - DNA, 25 bp, Homo sapien
taaaatcaataacagcgactgaaaa

SEQ ID NO: 3886951 - DNA, 25 bp, Homo sapien
ccaggtctggccatgtctaagtgct

SEQ ID NO: 3886952 - DNA, 25 bp, Homo sapien
aaaagtatgtgctacaacaactggc

SEQ ID NO: 3886953 - DNA, 25 bp, Homo sapien
tgtctcctgagtaccgggcctgaca

SEQ ID NO: 3886954 - DNA, 25 bp, Homo sapien
tagagctgccattagaaacgctgca

SEQ ID NO: 3886955 - DNA, 25 bp, Homo sapien
tcagttccagacaggctcttcacaa

SEQ ID NO: 3886956 - DNA, 25 bp, Homo sapien
gttccagacaggctcttcacaaaga

SEQ ID NO: 3886957 - DNA, 25 bp, Homo sapien
catcacatgattcccaacccaacca

SEQ ID NO: 3886958 - DNA, 25 bp, Homo sapien
aaagactcctcagttcatcacatga

SEQ ID NO: 3886959 - DNA, 25 bp, Homo sapien
taatattcatgctcagaattttcag

SEQ ID NO: 3886960 - DNA, 25 bp, Homo sapien
tattcatgctcagaattttcagctg

SEQ ID NO: 3886961 - DNA, 25 bp, Homo sapien
aatattcatgctcagaattttcagc

SEQ ID NO: 3886962 - DNA, 25 bp, Homo sapien
ttcatgctcagaattttcagctgca

SEQ ID NO: 3886963 - DNA, 25 bp, Homo sapien
ctggcagtttctcttagattgatac

SEQ ID NO: 3886964 - DNA, 25 bp, Homo sapien
cagtttctcttagattgatacagtc

SEQ ID NO: 3886965 - DNA, 25 bp, Homo sapien
acactgtagccagagcagtttgctc

SEQ ID NO: 3886966 - DNA, 25 bp, Homo sapien
tttctcttagattgatacagtctgc

SEQ ID NO: 3886967 - DNA, 25 bp, Homo sapien
gcagggctgctaccaaataggcctt

SEQ ID NO: 3886968 - DNA, 25 bp, Homo sapien
cttcttgtccatactcctgtaccat

SEQ ID NO: 3886969 - DNA, 25 bp, Homo sapien
gctgctaccaaataggccttcttgt

SEQ ID NO: 3886970 - DNA, 25 bp, Homo sapien
gggctgctaccaaataggccttctt

SEQ ID NO: 3886971 - DNA, 25 bp, Homo sapien
gagctaggccaggaatgcaggcttc

SEQ ID NO: 3886972 - DNA, 25 bp, Homo sapien
gcttcccaaatctcctgggcaagag

SEQ ID NO: 3886973 - DNA, 25 bp, Homo sapien
tacagagtatatggctctctcaaca

SEQ ID NO: 3886974 - DNA, 25 bp, Homo sapien
cttccagcaggcaagtgcatgccct

SEQ ID NO: 3886975 - DNA, 25 bp, Homo sapien
gccgagggctgcctgcattgatggg

SEQ ID NO: 3886976 - DNA, 25 bp, Homo sapien
tcatagctgccgagggctgcctgca

SEQ ID NO: 3886977 - DNA, 25 bp, Homo sapien
cgagggctgcctgcattgatgggtc

SEQ ID NO: 3886978 - DNA, 25 bp, Homo sapien
ctgccgagggctgcctgcattgatg

SEQ ID NO: 3886979 - DNA, 25 bp, Homo sapien
agggctgaagtctgtccggctgtgt

SEQ ID NO: 3886980 - DNA, 25 bp, Homo sapien
ttctgtcccactaataagggctgaa

SEQ ID NO: 3886981 - DNA, 25 bp, Homo sapien
ggctgaagtctgtccggctgtgtac

SEQ ID NO: 3886982 - DNA, 25 bp, Homo sapien
gtccactgtttctgtcccactaata

SEQ ID NO: 3886983 - DNA, 25 bp, Homo sapien
tgggttactagagctgaaaagcact

SEQ ID NO: 3886984 - DNA, 25 bp, Homo sapien
ttcttctatctgcagcagcagttaa

SEQ ID NO: 3886985 - DNA, 25 bp, Homo sapien
ctgggttactagagctgaaaagcac

SEQ ID NO: 3886986 - DNA, 25 bp, Homo sapien
tgaagaacccatgcagaaaggtgat

SEQ ID NO: 3886987 - DNA, 25 bp, Homo sapien
atgaatggagatccagcaggcaggt

SEQ ID NO: 3886988 - DNA, 25 bp, Homo sapien
aagcaggatgctgcctgaagaaccc

SEQ ID NO: 3886989 - DNA, 25 bp, Homo sapien
aaggtgatgaatggagatccagcag

SEQ ID NO: 3886990 - DNA, 25 bp, Homo sapien
gggccccaggaccctaagctgctgg

SEQ ID NO: 3886991 - DNA, 25 bp, Homo sapien
tgtgaatccacaccaaggggcccca

SEQ ID NO: 3886992 - DNA, 25 bp, Homo sapien
gaagactgtgaatccacaccaaggg

SEQ ID NO: 3886993 - DNA, 25 bp, Homo sapien
gagaagactgtgaatccacaccaag

SEQ ID NO: 3886994 - DNA, 25 bp, Homo sapien
gggccttctaccactctgagactta

SEQ ID NO: 3886995 - DNA, 25 bp, Homo sapien
tggtgacttgtgacgatggatgtcc

SEQ ID NO: 3886996 - DNA, 25 bp, Homo sapien
gagctaaggcattcatgctaccaaa

SEQ ID NO: 3886997 - DNA, 25 bp, Homo sapien
ggatgtcctgtgactgatgagctaa

SEQ ID NO: 3886998 - DNA, 25 bp, Homo sapien
taaagcctctaatggccttagttgc

SEQ ID NO: 3886999 - DNA, 25 bp, Homo sapien
tcctgtgtgatctggtatagtccca

SEQ ID NO: 3887000 - DNA, 25 bp, Homo sapien
gagtgtgactcccatattaacatgt

SEQ ID NO: 3887001 - DNA, 25 bp, Homo sapien
tcataaagtgcagcgtgtctgatcc

SEQ ID NO: 3887002 - DNA, 25 bp, Homo sapien
agtttctgtaggcagttttctggaa

SEQ ID NO: 3887003 - DNA, 25 bp, Homo sapien
tgaagtttctgtaggcagttttctg

SEQ ID NO: 3887004 - DNA, 25 bp, Homo sapien
atagggcagtctctgtgtctagagc

SEQ ID NO: 3887005 - DNA, 25 bp, Homo sapien
gctcaagaaaatcagagcctgggtc

SEQ ID NO: 3887006 - DNA, 25 bp, Homo sapien
tctttgaatcaattggcgtttaccc

SEQ ID NO: 3887007 - DNA, 25 bp, Homo sapien
tctgtcacagtcagttgtcctttca

SEQ ID NO: 3887008 - DNA, 25 bp, Homo sapien
tcctcatggacagtgaatctatctg

SEQ ID NO: 3887009 - DNA, 25 bp, Homo sapien
tgaacactgtatttcaataatttga

SEQ ID NO: 3887010 - DNA, 25 bp, Homo sapien
gataactgcttagaatatgaactca

SEQ ID NO: 3887011 - DNA, 25 bp, Homo sapien
tctcactgccagtacaaggcaagga

SEQ ID NO: 3887012 - DNA, 25 bp, Homo sapien
ttcataagcctagtaataacaccac

SEQ ID NO: 3887013 - DNA, 25 bp, Homo sapien
gtaattggcctccagtaaacacctc

SEQ ID NO: 3887014 - DNA, 25 bp, Homo sapien
agaacactggaaccgaagtcaggaa

SEQ ID NO: 3887015 - DNA, 25 bp, Homo sapien
gtttagcagcacaacttcccaggtt

SEQ ID NO: 3887016 - DNA, 25 bp, Homo sapien
tatttctggagttattaaacggtgc

SEQ ID NO: 3887017 - DNA, 25 bp, Homo sapien
ctaggtcttagtatgtgaaatgcac

SEQ ID NO: 3887018 - DNA, 25 bp, Homo sapien
gacataactttatctcttaatctat

SEQ ID NO: 3887019 - DNA, 25 bp, Homo sapien
aagacataactttatctcttaatct

SEQ ID NO: 3887020 - DNA, 25 bp, Homo sapien
cattcaaagacataactttatctct

SEQ ID NO: 3887021 - DNA, 25 bp, Homo sapien
caaagacataactttatctcttaat

SEQ ID NO: 3887022 - DNA, 25 bp, Homo sapien
tttgtgaataaacaccagagtcact

SEQ ID NO: 3887023 - DNA, 25 bp, Homo sapien
gggattttgtgaataaacaccagag

SEQ ID NO: 3887024 - DNA, 25 bp, Homo sapien
ccttcacgtagccttggatgtcctt

SEQ ID NO: 3887025 - DNA, 25 bp, Homo sapien
ttcacgtagccttggatgtccttgt

SEQ ID NO: 3887026 - DNA, 25 bp, Homo sapien
tttttaatcctctcttattctggga

SEQ ID NO: 3887027 - DNA, 25 bp, Homo sapien
caatttagtagccaccacttccagg

SEQ ID NO: 3887028 - DNA, 25 bp, Homo sapien
tatagtatccccattcagggccaac

SEQ ID NO: 3887029 - DNA, 25 bp, Homo sapien
ggtcactaccaccataccattttga

SEQ ID NO: 3887030 - DNA, 25 bp, Homo sapien
tgcttttacaagggtgaccaagagg

SEQ ID NO: 3887031 - DNA, 25 bp, Homo sapien
aatgcttttacaagggtgaccaaga

SEQ ID NO: 3887032 - DNA, 25 bp, Homo sapien
gcttttacaagggtgaccaagaggc

SEQ ID NO: 3887033 - DNA, 25 bp, Homo sapien
atgcttttacaagggtgaccaagag

SEQ ID NO: 3887034 - DNA, 25 bp, Homo sapien
ttctctaacccttccagggaggtca

SEQ ID NO: 3887035 - DNA, 25 bp, Homo sapien
cttggaggagtcaatgtttatcttc

SEQ ID NO: 3887036 - DNA, 25 bp, Homo sapien
tctctaacccttccagggaggtcat

SEQ ID NO: 3887037 - DNA, 25 bp, Homo sapien
tggaggagtcaatgtttatcttctc

SEQ ID NO: 3887038 - DNA, 25 bp, Homo sapien
gataaagggctggaattgttttaca

SEQ ID NO: 3887039 - DNA, 25 bp, Homo sapien
acatttagtcacactaatagggatg

SEQ ID NO: 3887040 - DNA, 25 bp, Homo sapien
gatgactgccgctagagaaaaactg

SEQ ID NO: 3887041 - DNA, 25 bp, Homo sapien
tttacatttagtcacactaataggg

SEQ ID NO: 3887042 - DNA, 25 bp, Homo sapien
ccttttgtttattacatgatcatcc

SEQ ID NO: 3887043 - DNA, 25 bp, Homo sapien
ttttgtttattacatgatcatccat

SEQ ID NO: 3887044 - DNA, 25 bp, Homo sapien
gaccccttttgtttattacatgatc

SEQ ID NO: 3887045 - DNA, 25 bp, Homo sapien
accccttttgtttattacatgatca

SEQ ID NO: 3887046 - DNA, 25 bp, Homo sapien
ccaataccggtcaccattttctgca

SEQ ID NO: 3887047 - DNA, 25 bp, Homo sapien
cagtgttgattgaaagatccaatac

SEQ ID NO: 3887048 - DNA, 25 bp, Homo sapien
gtgccaataattgggaaacttgaca

SEQ ID NO: 3887049 - DNA, 25 bp, Homo sapien
tgatgcttgggtgccaataattggg

SEQ ID NO: 3887050 - DNA, 25 bp, Homo sapien
gacttattagcattcgggtacttgg

SEQ ID NO: 3887051 - DNA, 25 bp, Homo sapien
cattcgggtacttggtttcaatcct

SEQ ID NO: 3887052 - DNA, 25 bp, Homo sapien
ctgggacttattagcattcgggtac

SEQ ID NO: 3887053 - DNA, 25 bp, Homo sapien
attagcattcgggtacttggtttca

SEQ ID NO: 3887054 - DNA, 25 bp, Homo sapien
tctcagagactgctgtaagcatggg

SEQ ID NO: 3887055 - DNA, 25 bp, Homo sapien
gcagccctcttggtaaatgccgacc

SEQ ID NO: 3887056 - DNA, 25 bp, Homo sapien
taagcatgggtatagtgtgagaagt

SEQ ID NO: 3887057 - DNA, 25 bp, Homo sapien
tgctactggtaaggacttcatctct

SEQ ID NO: 3887058 - DNA, 25 bp, Homo sapien
ctataattttcattaggcaaatatt

SEQ ID NO: 3887059 - DNA, 25 bp, Homo sapien
gaatgtacctttgctgctataattt

SEQ ID NO: 3887060 - DNA, 25 bp, Homo sapien
agaatgtacctttgctgctataatt

SEQ ID NO: 3887061 - DNA, 25 bp, Homo sapien
gagaatgtacctttgctgctataat

SEQ ID NO: 3887062 - DNA, 25 bp, Homo sapien
tccagaggcaatagccatttgggct

SEQ ID NO: 3887063 - DNA, 25 bp, Homo sapien
agccatttgggctaggatttgacat

SEQ ID NO: 3887064 - DNA, 25 bp, Homo sapien
taacaaaggagtagaaacaatctca

SEQ ID NO: 3887065 - DNA, 25 bp, Homo sapien
gaatgatttccagaggcaatagcca

SEQ ID NO: 3887066 - DNA, 25 bp, Homo sapien
cctctctgatatgtggttgggataa

SEQ ID NO: 3887067 - DNA, 25 bp, Homo sapien
ggctcaacatttctcagcgtaacac

SEQ ID NO: 3887068 - DNA, 25 bp, Homo sapien
tatttgctggttaccagttcctcct

SEQ ID NO: 3887069 - DNA, 25 bp, Homo sapien
gttaatgggtaacctttcaggctca

SEQ ID NO: 3887070 - DNA, 25 bp, Homo sapien
ctccttataacacggaaactccttg

SEQ ID NO: 3887071 - DNA, 25 bp, Homo sapien
cacggaaactccttgttgtcgttga

SEQ ID NO: 3887072 - DNA, 25 bp, Homo sapien
aactccttgttgtcgttgacactca

SEQ ID NO: 3887073 - DNA, 25 bp, Homo sapien
tataacacggaaactccttgttgtc

SEQ ID NO: 3887074 - DNA, 25 bp, Homo sapien
ttatggagttcaaaggctaaaatga

SEQ ID NO: 3887075 - DNA, 25 bp, Homo sapien
tatggagttcaaaggctaaaatgaa

SEQ ID NO: 3887076 - DNA, 25 bp, Homo sapien
cttatggagttcaaaggctaaaatg

SEQ ID NO: 3887077 - DNA, 25 bp, Homo sapien
atggagttcaaaggctaaaatgaag

SEQ ID NO: 3887078 - DNA, 25 bp, Homo sapien
tagtggaagccacggccagttggca

SEQ ID NO: 3887079 - DNA, 25 bp, Homo sapien
tgtgttttgacagctacggagcagc

SEQ ID NO: 3887080 - DNA, 25 bp, Homo sapien
agccacacagaaagtatccccaggt

SEQ ID NO: 3887081 - DNA, 25 bp, Homo sapien
tgtctactccggcaaatgcgtctaa

SEQ ID NO: 3887082 - DNA, 25 bp, Homo sapien
ctgccaatactgagtttcctctatc

SEQ ID NO: 3887083 - DNA, 25 bp, Homo sapien
cacagttgacctgttaacataggtc

SEQ ID NO: 3887084 - DNA, 25 bp, Homo sapien
cagactcacagttgacctgttaaca

SEQ ID NO: 3887085 - DNA, 25 bp, Homo sapien
tttcctctatcagactcacagttga

SEQ ID NO: 3887086 - DNA, 25 bp, Homo sapien
ggtttgttccagtgcacacctcaag

SEQ ID NO: 3887087 - DNA, 25 bp, Homo sapien
gcagatgtcccaatgaagatgtgat

SEQ ID NO: 3887088 - DNA, 25 bp, Homo sapien
ggaccaggagccaggattcaccttc

SEQ ID NO: 3887089 - DNA, 25 bp, Homo sapien
caccaaagggaatccagggacccat

SEQ ID NO: 3887090 - DNA, 25 bp, Homo sapien
ttttgaactcatgagaacccttggg

SEQ ID NO: 3887091 - DNA, 25 bp, Homo sapien
ggagagccgtcttgctagatgatca

SEQ ID NO: 3887092 - DNA, 25 bp, Homo sapien
cattgactccagaggtttcctagaa

SEQ ID NO: 3887093 - DNA, 25 bp, Homo sapien
aaattccccggatgagggagagccg

SEQ ID NO: 3887094 - DNA, 25 bp, Homo sapien
tagaattgccccacccatatggtcc

SEQ ID NO: 3887095 - DNA, 25 bp, Homo sapien
cagtgttccagttccttgttgcatt

SEQ ID NO: 3887096 - DNA, 25 bp, Homo sapien
tgttcctgaatgcaactgcccaaat

SEQ ID NO: 3887097 - DNA, 25 bp, Homo sapien
catatggtcctctcaacagttcctg

SEQ ID NO: 3887098 - DNA, 25 bp, Homo sapien
gctggtaagaaaggttgcttctcca

SEQ ID NO: 3887099 - DNA, 25 bp, Homo sapien
gtaagaaaggttgcttctccatcag

SEQ ID NO: 3887100 - DNA, 25 bp, Homo sapien
ctgctggtaagaaaggttgcttctc

SEQ ID NO: 3887101 - DNA, 25 bp, Homo sapien
tggtaagaaaggttgcttctccatc

SEQ ID NO: 3887102 - DNA, 25 bp, Homo sapien
catcagatttctgtttaggcaccca

SEQ ID NO: 3887103 - DNA, 25 bp, Homo sapien
taagccgggatgctgtctgacagat

SEQ ID NO: 3887104 - DNA, 25 bp, Homo sapien
tcattgtaagggaattaggaccaca

SEQ ID NO: 3887105 - DNA, 25 bp, Homo sapien
tcctggttaggatctgaacatcaga

SEQ ID NO: 3887106 - DNA, 25 bp, Homo sapien
cagtgcaaggccaacatctaagtgt

SEQ ID NO: 3887107 - DNA, 25 bp, Homo sapien
tcttgcccacaaggatatcatatgc

SEQ ID NO: 3887108 - DNA, 25 bp, Homo sapien
cagcatttttgagggacagttggta

SEQ ID NO: 3887109 - DNA, 25 bp, Homo sapien
cccgattaaatgttcagaaaggcag

SEQ ID NO: 3887110 - DNA, 25 bp, Homo sapien
ttcttggtgctcatatatctttgta

SEQ ID NO: 3887111 - DNA, 25 bp, Homo sapien
ttggcaattgcctctcgtaacccct

SEQ ID NO: 3887112 - DNA, 25 bp, Homo sapien
ctttgtattgctgttggcaattgcc

SEQ ID NO: 3887113 - DNA, 25 bp, Homo sapien
attgcctctcgtaacccctgagcag

SEQ ID NO: 3887114 - DNA, 25 bp, Homo sapien
ttatttccctgtttcattgaatcac

SEQ ID NO: 3887115 - DNA, 25 bp, Homo sapien
tgtttcattgaatcactttcagccc

SEQ ID NO: 3887116 - DNA, 25 bp, Homo sapien
ccctgtttcattgaatcactttcag

SEQ ID NO: 3887117 - DNA, 25 bp, Homo sapien
attgaatcactttcagccctctgtt

SEQ ID NO: 3887118 - DNA, 25 bp, Homo sapien
ctgaagatgtggatggatgccctgc

SEQ ID NO: 3887119 - DNA, 25 bp, Homo sapien
agatgtggatggatgccctgctgtc

SEQ ID NO: 3887120 - DNA, 25 bp, Homo sapien
cacaaaacagtagtcatttcaactc

SEQ ID NO: 3887121 - DNA, 25 bp, Homo sapien
acaaaacagtagtcatttcaactct

SEQ ID NO: 3887122 - DNA, 25 bp, Homo sapien
gctgaatgtacaccatagggctcag

SEQ ID NO: 3887123 - DNA, 25 bp, Homo sapien
gaatgtacaccatagggctcagttt

SEQ ID NO: 3887124 - DNA, 25 bp, Homo sapien
tgaatgtacaccatagggctcagtt

SEQ ID NO: 3887125 - DNA, 25 bp, Homo sapien
atgtacaccatagggctcagtttcc

SEQ ID NO: 3887126 - DNA, 25 bp, Homo sapien
tcatacgtgctgacttcgattcgca

SEQ ID NO: 3887127 - DNA, 25 bp, Homo sapien
tagcatattcctggctgtgatggca

SEQ ID NO: 3887128 - DNA, 25 bp, Homo sapien
cctggaaagatgctaggagcctggt

SEQ ID NO: 3887129 - DNA, 25 bp, Homo sapien
tatacagcttaaacacttggagtcg

SEQ ID NO: 3887130 - DNA, 25 bp, Homo sapien
gctttccaggaagaaccacttcaca

SEQ ID NO: 3887131 - DNA, 25 bp, Homo sapien
tttccaggaagaaccacttcacaag

SEQ ID NO: 3887132 - DNA, 25 bp, Homo sapien
ccaggaagaaccacttcacaagtcc

SEQ ID NO: 3887133 - DNA, 25 bp, Homo sapien
tcagctttccaggaagaaccacttc

SEQ ID NO: 3887134 - DNA, 25 bp, Homo sapien
gtggtccacagctattccacaggac

SEQ ID NO: 3887135 - DNA, 25 bp, Homo sapien
cactctacccgggaagaggattgtt

SEQ ID NO: 3887136 - DNA, 25 bp, Homo sapien
cagcaggtctgaagacagttcccaa

SEQ ID NO: 3887137 - DNA, 25 bp, Homo sapien
actggttctcggttctcctgtgtgg

SEQ ID NO: 3887138 - DNA, 25 bp, Homo sapien
ggcatagccctggatgacactttca

SEQ ID NO: 3887139 - DNA, 25 bp, Homo sapien
gtgttgggcatagccctggatgaca

SEQ ID NO: 3887140 - DNA, 25 bp, Homo sapien
ttgggcatagccctggatgacactt

SEQ ID NO: 3887141 - DNA, 25 bp, Homo sapien
atgaggaagtctgctgaacatctgg

SEQ ID NO: 3887142 - DNA, 25 bp, Homo sapien
ttggtcagtagtctgtagctctcca

SEQ ID NO: 3887143 - DNA, 25 bp, Homo sapien
catctcaccagtgaaggtcttggtc

SEQ ID NO: 3887144 - DNA, 25 bp, Homo sapien
atctcaccagtgaaggtcttggtca

SEQ ID NO: 3887145 - DNA, 25 bp, Homo sapien
ggtcttggtcagtagtctgtagctc

SEQ ID NO: 3887146 - DNA, 25 bp, Homo sapien
ctgtttgcctgggttgcgtacttca

SEQ ID NO: 3887147 - DNA, 25 bp, Homo sapien
cctgggttgcgtacttcatttttgg

SEQ ID NO: 3887148 - DNA, 25 bp, Homo sapien
taaggaccatatattccctgagtat

SEQ ID NO: 3887149 - DNA, 25 bp, Homo sapien
cctcctttggctaaataaggaccat

SEQ ID NO: 3887150 - DNA, 25 bp, Homo sapien
cgtcaacacaaacggacatcctagt

SEQ ID NO: 3887151 - DNA, 25 bp, Homo sapien
gctctattcttggaaacacattatt

SEQ ID NO: 3887152 - DNA, 25 bp, Homo sapien
accagaatatgtctccctcaggagg

SEQ ID NO: 3887153 - DNA, 25 bp, Homo sapien
tgcaaattcctaatacgacgatttt

SEQ ID NO: 3887154 - DNA, 25 bp, Homo sapien
gctgacagacattgtagaagcagag

SEQ ID NO: 3887155 - DNA, 25 bp, Homo sapien
tcagtccaaccaccatgtttaatct

SEQ ID NO: 3887156 - DNA, 25 bp, Homo sapien
taaaccactgtatccatatcagtcc

SEQ ID NO: 3887157 - DNA, 25 bp, Homo sapien
tatccatggtatcgggatcagtaag

SEQ ID NO: 3887158 - DNA, 25 bp, Homo sapien
ctggagagatttatccatggtatcg

SEQ ID NO: 3887159 - DNA, 25 bp, Homo sapien
ggtgtcattgccagatcttgaggcc

SEQ ID NO: 3887160 - DNA, 25 bp, Homo sapien
gaggtgtcattgccagatcttgagg

SEQ ID NO: 3887161 - DNA, 25 bp, Homo sapien
aggtgtcattgccagatcttgaggc

SEQ ID NO: 3887162 - DNA, 25 bp, Homo sapien
agaggtgtcattgccagatcttgag

SEQ ID NO: 3887163 - DNA, 25 bp, Homo sapien
taaatagtctcctctcacagacaat

SEQ ID NO: 3887164 - DNA, 25 bp, Homo sapien
ctaaatagtctcctctcacagacaa

SEQ ID NO: 3887165 - DNA, 25 bp, Homo sapien
aagggggtagatgtatctggtgtta

SEQ ID NO: 3887166 - DNA, 25 bp, Homo sapien
tatcgtaagggggtagatgtatctg

SEQ ID NO: 3887167 - DNA, 25 bp, Homo sapien
cgtaagggggtagatgtatctggtg

SEQ ID NO: 3887168 - DNA, 25 bp, Homo sapien
taagggggtagatgtatctggtgtt

SEQ ID NO: 3887169 - DNA, 25 bp, Homo sapien
tgggcttgcaaaaggcagaactgga

SEQ ID NO: 3887170 - DNA, 25 bp, Homo sapien
catgagtcaatggagacccacagga

SEQ ID NO: 3887171 - DNA, 25 bp, Homo sapien
gcagcagccagtatggtcttcggtt

SEQ ID NO: 3887172 - DNA, 25 bp, Homo sapien
gattccaaaattatagcagcagcca

SEQ ID NO: 3887173 - DNA, 25 bp, Homo sapien
tagacggtagtttcaaggaaggatg

SEQ ID NO: 3887174 - DNA, 25 bp, Homo sapien
aggatgtggattctattcgtttgcc

SEQ ID NO: 3887175 - DNA, 25 bp, Homo sapien
ccttggtaatggctaagtgatgtaa

SEQ ID NO: 3887176 - DNA, 25 bp, Homo sapien
taaattcatccatacgtagcttctg

SEQ ID NO: 3887177 - DNA, 25 bp, Homo sapien
agaatgaattcttttcactacattc

SEQ ID NO: 3887178 - DNA, 25 bp, Homo sapien
aacttgccttcttagaatgaattct

SEQ ID NO: 3887179 - DNA, 25 bp, Homo sapien
tcaacttgccttcttagaatgaatt

SEQ ID NO: 3887180 - DNA, 25 bp, Homo sapien
aatgaattcttttcactacattctc

SEQ ID NO: 3887181 - DNA, 25 bp, Homo sapien
caggacttacaatcctctaccttga

SEQ ID NO: 3887182 - DNA, 25 bp, Homo sapien
cacaaggtgttatccatgacgggaa

SEQ ID NO: 3887183 - DNA, 25 bp, Homo sapien
tggctgctctagatgaatatcttgg

SEQ ID NO: 3887184 - DNA, 25 bp, Homo sapien
cttctagtatcttcatgtcacaagg

SEQ ID NO: 3887185 - DNA, 25 bp, Homo sapien
acactcttgacagttccctgtgctc

SEQ ID NO: 3887186 - DNA, 25 bp, Homo sapien
cacactcttgacagttccctgtgct

SEQ ID NO: 3887187 - DNA, 25 bp, Homo sapien
cactcttgacagttccctgtgctcc

SEQ ID NO: 3887188 - DNA, 25 bp, Homo sapien
actcttgacagttccctgtgctcct

SEQ ID NO: 3887189 - DNA, 25 bp, Homo sapien
caccaaatgctagccctttaagcaa

SEQ ID NO: 3887190 - DNA, 25 bp, Homo sapien
ccaaatgctagccctttaagcaacc

SEQ ID NO: 3887191 - DNA, 25 bp, Homo sapien
accaaatgctagccctttaagcaac

SEQ ID NO: 3887192 - DNA, 25 bp, Homo sapien
caccctttcctaatacatcgttcat

SEQ ID NO: 3887193 - DNA, 25 bp, Homo sapien
tttcctaatacatcgttcatgcaga

SEQ ID NO: 3887194 - DNA, 25 bp, Homo sapien
tcctaatacatcgttcatgcagatc

SEQ ID NO: 3887195 - DNA, 25 bp, Homo sapien
aatacatcgttcatgcagatctgca

SEQ ID NO: 3887196 - DNA, 25 bp, Homo sapien
tgaaggatgtctggaaaatgcgaag

SEQ ID NO: 3887197 - DNA, 25 bp, Homo sapien
catgagagaagaaattcggtttggt

SEQ ID NO: 3887198 - DNA, 25 bp, Homo sapien
tggaaaatgcgaagaccaccaactt

SEQ ID NO: 3887199 - DNA, 25 bp, Homo sapien
ttatcatcacgatacactgtgtatg

SEQ ID NO: 3887200 - DNA, 25 bp, Homo sapien
cttggaaggtaggagtaagcttcat

SEQ ID NO: 3887201 - DNA, 25 bp, Homo sapien
aaggtaggagtaagcttcatgacaa

SEQ ID NO: 3887202 - DNA, 25 bp, Homo sapien
ttgatgggtacaagctgttctttga

SEQ ID NO: 3887203 - DNA, 25 bp, Homo sapien
ttctttgatatcatggacaccccag

SEQ ID NO: 3887204 - DNA, 25 bp, Homo sapien
aaggaccacagggatcttgtgcagc

SEQ ID NO: 3887205 - DNA, 25 bp, Homo sapien
ttcacctgctttccgacaggtttca

SEQ ID NO: 3887206 - DNA, 25 bp, Homo sapien
ggaccacagggatcttgtgcagcat

SEQ ID NO: 3887207 - DNA, 25 bp, Homo sapien
attccttcacctgctttccgacagg

SEQ ID NO: 3887208 - DNA, 25 bp, Homo sapien
gatagctgggtttgccaccaccctg

SEQ ID NO: 3887209 - DNA, 25 bp, Homo sapien
tgtggatggcataaagaacatgttg

SEQ ID NO: 3887210 - DNA, 25 bp, Homo sapien
caccaccctgagctagtagtgtatg

SEQ ID NO: 3887211 - DNA, 25 bp, Homo sapien
taaggtaccaatttgagtatgcaga

SEQ ID NO: 3887212 - DNA, 25 bp, Homo sapien
acagtggagcgtctggcactccctg

SEQ ID NO: 3887213 - DNA, 25 bp, Homo sapien
agatgattccggaaacactgactgc

SEQ ID NO: 3887214 - DNA, 25 bp, Homo sapien
ccagcatccaactcagcaggatcag

SEQ ID NO: 3887215 - DNA, 25 bp, Homo sapien
tctcctgcaagctcacagtggagcg

SEQ ID NO: 3887216 - DNA, 25 bp, Homo sapien
caagtaagcttttatctgtggaggg

SEQ ID NO: 3887217 - DNA, 25 bp, Homo sapien
taataaggttcatgactttagccac

SEQ ID NO: 3887218 - DNA, 25 bp, Homo sapien
cactgagaggatatgaaggctatgg

SEQ ID NO: 3887219 - DNA, 25 bp, Homo sapien
aaatatgctggacttatggccctca

SEQ ID NO: 3887220 - DNA, 25 bp, Homo sapien
ctcttcactacttccagacagtttt

SEQ ID NO: 3887221 - DNA, 25 bp, Homo sapien
cttcactacttccagacagtttttc

SEQ ID NO: 3887222 - DNA, 25 bp, Homo sapien
tcttcactacttccagacagttttt

SEQ ID NO: 3887223 - DNA, 25 bp, Homo sapien
cactacttccagacagtttttcttt

SEQ ID NO: 3887224 - DNA, 25 bp, Homo sapien
tgcttctgtagggatcatatctgcc

SEQ ID NO: 3887225 - DNA, 25 bp, Homo sapien
tctgtttctttattgtcacagacca

SEQ ID NO: 3887226 - DNA, 25 bp, Homo sapien
tattgtcacagaccaccacctgctt

SEQ ID NO: 3887227 - DNA, 25 bp, Homo sapien
ccacctgcttctgtagggatcatat

SEQ ID NO: 3887228 - DNA, 25 bp, Homo sapien
ttttgaagatcactagaatgttcac

SEQ ID NO: 3887229 - DNA, 25 bp, Homo sapien
gaagatcactagaatgttcactatc

SEQ ID NO: 3887230 - DNA, 25 bp, Homo sapien
tgaagatcactagaatgttcactat

SEQ ID NO: 3887231 - DNA, 25 bp, Homo sapien
agatcactagaatgttcactatcat

SEQ ID NO: 3887232 - DNA, 25 bp, Homo sapien
cttcatcctgctactcccaagtgga

SEQ ID NO: 3887233 - DNA, 25 bp, Homo sapien
tcatcctgctactcccaagtggatt

SEQ ID NO: 3887234 - DNA, 25 bp, Homo sapien
tggttgcagaggacacgtgcaaaga

SEQ ID NO: 3887235 - DNA, 25 bp, Homo sapien
cctgctactcccaagtggatttata

SEQ ID NO: 3887236 - DNA, 25 bp, Homo sapien
gattcaagaggtgcgtgtcaggcct

SEQ ID NO: 3887237 - DNA, 25 bp, Homo sapien
tctcctggacaataagtccccagag

SEQ ID NO: 3887238 - DNA, 25 bp, Homo sapien
taaatctctgggcatagactgattc

SEQ ID NO: 3887239 - DNA, 25 bp, Homo sapien
gaaaatggctcattcctgccttacc

SEQ ID NO: 3887240 - DNA, 25 bp, Homo sapien
atatggatgtcttcatggatttcca

SEQ ID NO: 3887241 - DNA, 25 bp, Homo sapien
gatgtcttcatggatttccatttca

SEQ ID NO: 3887242 - DNA, 25 bp, Homo sapien
tggatgtcttcatggatttccattt

SEQ ID NO: 3887243 - DNA, 25 bp, Homo sapien
tatggatgtcttcatggatttccat

SEQ ID NO: 3887244 - DNA, 25 bp, Homo sapien
aggacatctatttcgattttcagaa

SEQ ID NO: 3887245 - DNA, 25 bp, Homo sapien
tactgccctgcaaggactgagggtc

SEQ ID NO: 3887246 - DNA, 25 bp, Homo sapien
gactgagggtcatcttttaggacat

SEQ ID NO: 3887247 - DNA, 25 bp, Homo sapien
gtctcatcattactgccctgcaagg

SEQ ID NO: 3887248 - DNA, 25 bp, Homo sapien
tcagaacttttattagcctcggatc

SEQ ID NO: 3887249 - DNA, 25 bp, Homo sapien
tagcctcggatcttatttggttcca

SEQ ID NO: 3887250 - DNA, 25 bp, Homo sapien
ggttccaagctacatgctgatagag

SEQ ID NO: 3887251 - DNA, 25 bp, Homo sapien
tccatatttcaatcctcagaagtgc

SEQ ID NO: 3887252 - DNA, 25 bp, Homo sapien
gccatgttgtacacacgttgggttt

SEQ ID NO: 3887253 - DNA, 25 bp, Homo sapien
ccttttcaacaatactatatgagga

SEQ ID NO: 3887254 - DNA, 25 bp, Homo sapien
caccttttcaacaatactatatgag

SEQ ID NO: 3887255 - DNA, 25 bp, Homo sapien
ttttcaacaatactatatgaggaaa

SEQ ID NO: 3887256 - DNA, 25 bp, Homo sapien
ttccctccttcatgtgtgggttttg

SEQ ID NO: 3887257 - DNA, 25 bp, Homo sapien
ctggcagtgagagttgaagcaaatt

SEQ ID NO: 3887258 - DNA, 25 bp, Homo sapien
ttcaaataccctctgtcaaggctaa

SEQ ID NO: 3887259 - DNA, 25 bp, Homo sapien
tccttcatgtgtgggttttggtgag

SEQ ID NO: 3887260 - DNA, 25 bp, Homo sapien
gcgtacatccacttctcaaaactct

SEQ ID NO: 3887261 - DNA, 25 bp, Homo sapien
tacaatgttccccacacagtgaaat

SEQ ID NO: 3887262 - DNA, 25 bp, Homo sapien
catgtgtgttgcgtacatccacttc

SEQ ID NO: 3887263 - DNA, 25 bp, Homo sapien
atgttacctacaatgttccccacac

SEQ ID NO: 3887264 - DNA, 25 bp, Homo sapien
cctgctctcttgattcagctcccaa

SEQ ID NO: 3887265 - DNA, 25 bp, Homo sapien
taactttgcggaactccctcttcag

SEQ ID NO: 3887266 - DNA, 25 bp, Homo sapien
tgcccacttttgtgtagacctcatg

SEQ ID NO: 3887267 - DNA, 25 bp, Homo sapien
ctttgcccacttttgtgtagacctc

SEQ ID NO: 3887268 - DNA, 25 bp, Homo sapien
gcctgctccaattctttagtttttc

SEQ ID NO: 3887269 - DNA, 25 bp, Homo sapien
gggcatggcctgctccaattcttta

SEQ ID NO: 3887270 - DNA, 25 bp, Homo sapien
ttggggcatggcctgctccaattct

SEQ ID NO: 3887271 - DNA, 25 bp, Homo sapien
gcatggcctgctccaattctttagt

SEQ ID NO: 3887272 - DNA, 25 bp, Homo sapien
ttctggaaggatatgtatcactggg

SEQ ID NO: 3887273 - DNA, 25 bp, Homo sapien
ttgccttctggaaggatatgtatca

SEQ ID NO: 3887274 - DNA, 25 bp, Homo sapien
tgccttctggaaggatatgtatcac

SEQ ID NO: 3887275 - DNA, 25 bp, Homo sapien
gcttgccttctggaaggatatgtat

SEQ ID NO: 3887276 - DNA, 25 bp, Homo sapien
tatataatttcaaacctaatctcac

SEQ ID NO: 3887277 - DNA, 25 bp, Homo sapien
tttcctacaaggactggcacctctc

SEQ ID NO: 3887278 - DNA, 25 bp, Homo sapien
atccctggcgcagatccggtaccag

SEQ ID NO: 3887279 - DNA, 25 bp, Homo sapien
tcccctctggatgtggtatccatat

SEQ ID NO: 3887280 - DNA, 25 bp, Homo sapien
gaggtggcatctaacacatggcttt

SEQ ID NO: 3887281 - DNA, 25 bp, Homo sapien
gaaagaagtgtggtatgaagatgaa

SEQ ID NO: 3887282 - DNA, 25 bp, Homo sapien
gaagataaagaatgcaggaccttgg

SEQ ID NO: 3887283 - DNA, 25 bp, Homo sapien
tgggttggaccacatactgcttaag

SEQ ID NO: 3887284 - DNA, 25 bp, Homo sapien
gctatcaggaccatctaaatgaccc

SEQ ID NO: 3887285 - DNA, 25 bp, Homo sapien
atctaaatgacccaagaggtcctgt

SEQ ID NO: 3887286 - DNA, 25 bp, Homo sapien
aatgacccaagaggtcctgttccag

SEQ ID NO: 3887287 - DNA, 25 bp, Homo sapien
taaatgacccaagaggtcctgttcc

SEQ ID NO: 3887288 - DNA, 25 bp, Homo sapien
gcagatttggattctgacattgctc

SEQ ID NO: 3887289 - DNA, 25 bp, Homo sapien
tctgacattgctctttcataaggct

SEQ ID NO: 3887290 - DNA, 25 bp, Homo sapien
gctctttcataaggctcataagcat

SEQ ID NO: 3887291 - DNA, 25 bp, Homo sapien
tggattctgacattgctctttcata

SEQ ID NO: 3887292 - DNA, 25 bp, Homo sapien
aattctggtgttcatgaaaaccggc

SEQ ID NO: 3887293 - DNA, 25 bp, Homo sapien
cagatggtgtcagggtgattcgcca

SEQ ID NO: 3887294 - DNA, 25 bp, Homo sapien
gatgtctgaagaaatctccaatggg

SEQ ID NO: 3887295 - DNA, 25 bp, Homo sapien
tgaaaaccggctggcagattagtgg

SEQ ID NO: 3887296 - DNA, 25 bp, Homo sapien
agatatcagtgttgtaacaagctga

SEQ ID NO: 3887297 - DNA, 25 bp, Homo sapien
ctgatataataagtggagctccaat

SEQ ID NO: 3887298 - DNA, 25 bp, Homo sapien
tagctctgggttcgtatctgtgacc

SEQ ID NO: 3887299 - DNA, 25 bp, Homo sapien
tgttccgcagtatgatagctctggg

SEQ ID NO: 3887300 - DNA, 25 bp, Homo sapien
caatggaatagtaataggagagcat

SEQ ID NO: 3887301 - DNA, 25 bp, Homo sapien
gaaggatcagtagcccatagactgc

SEQ ID NO: 3887302 - DNA, 25 bp, Homo sapien
tcagtagcccatagactgcagttgg

SEQ ID NO: 3887303 - DNA, 25 bp, Homo sapien
gtagcccatagactgcagttggcat

SEQ ID NO: 3887304 - DNA, 25 bp, Homo sapien
accagaaggatcagtagcccataga

SEQ ID NO: 3887305 - DNA, 25 bp, Homo sapien
ggcagattgatgtaggaaaaagttc

SEQ ID NO: 3887306 - DNA, 25 bp, Homo sapien
ctagtgatcttgattcgtttccatc

SEQ ID NO: 3887307 - DNA, 25 bp, Homo sapien
tgatggtgtcacatattaagatggg

SEQ ID NO: 3887308 - DNA, 25 bp, Homo sapien
ttccatcaagactaagtagatgatg

SEQ ID NO: 3887309 - DNA, 25 bp, Homo sapien
tgctccttttgtatggccaccatca

SEQ ID NO: 3887310 - DNA, 25 bp, Homo sapien
acaatgacataatcactgtcagcag

SEQ ID NO: 3887311 - DNA, 25 bp, Homo sapien
aattgcacaatgacataatcactgt

SEQ ID NO: 3887312 - DNA, 25 bp, Homo sapien
accacaggctgctggaccactgtga

SEQ ID NO: 3887313 - DNA, 25 bp, Homo sapien
acttaagagggcaaataagctctga

SEQ ID NO: 3887314 - DNA, 25 bp, Homo sapien
aacttaagagggcaaataagctctg

SEQ ID NO: 3887315 - DNA, 25 bp, Homo sapien
tggtaatggtatccaacttaagagg

SEQ ID NO: 3887316 - DNA, 25 bp, Homo sapien
tggtatccaacttaagagggcaaat

SEQ ID NO: 3887317 - DNA, 25 bp, Homo sapien
ccgctattggtcagatgagtagaat

SEQ ID NO: 3887318 - DNA, 25 bp, Homo sapien
ggctgtcaccttattgtacttctgg

SEQ ID NO: 3887319 - DNA, 25 bp, Homo sapien
gaaggagtgccgctattggtcagat

SEQ ID NO: 3887320 - DNA, 25 bp, Homo sapien
actatgctgtcccttatcagacggg

SEQ ID NO: 3887321 - DNA, 25 bp, Homo sapien
cccacttcatgggatacttcgtaga

SEQ ID NO: 3887322 - DNA, 25 bp, Homo sapien
aattacattgggatgattcaaagcc

SEQ ID NO: 3887323 - DNA, 25 bp, Homo sapien
aggctgaaagtcatggatccctctt

SEQ ID NO: 3887324 - DNA, 25 bp, Homo sapien
catgggatacttcgtagaggctgaa

SEQ ID NO: 3887325 - DNA, 25 bp, Homo sapien
tagctagagtgtaggaagcagagca

SEQ ID NO: 3887326 - DNA, 25 bp, Homo sapien
tttgtggccccaccaagctttgcac

SEQ ID NO: 3887327 - DNA, 25 bp, Homo sapien
taaaagcagtgaattattagtgcac

SEQ ID NO: 3887328 - DNA, 25 bp, Homo sapien
gaatgaagaccaatatagctagagt

SEQ ID NO: 3887329 - DNA, 25 bp, Homo sapien
ttttccatcatcacccagatttttg

SEQ ID NO: 3887330 - DNA, 25 bp, Homo sapien
aatggccgagagagccagcttcgta

SEQ ID NO: 3887331 - DNA, 25 bp, Homo sapien
atttttgtccaccagcaatggccga

SEQ ID NO: 3887332 - DNA, 25 bp, Homo sapien
gcttcgtattttatcctgtggaggt

SEQ ID NO: 3887333 - DNA, 25 bp, Homo sapien
tgcaagtaggggtagttctaccatt

SEQ ID NO: 3887334 - DNA, 25 bp, Homo sapien
tttctggttagtacaagccttcagt

SEQ ID NO: 3887335 - DNA, 25 bp, Homo sapien
taccattttctggttagtacaagcc

SEQ ID NO: 3887336 - DNA, 25 bp, Homo sapien
cattttctggttagtacaagccttc

SEQ ID NO: 3887337 - DNA, 25 bp, Homo sapien
gcctttctgctcagcaagtataaca

SEQ ID NO: 3887338 - DNA, 25 bp, Homo sapien
ctgcctttctgctcagcaagtataa

SEQ ID NO: 3887339 - DNA, 25 bp, Homo sapien
tgcctttctgctcagcaagtataac

SEQ ID NO: 3887340 - DNA, 25 bp, Homo sapien
catcttctagtgacagctttgcagg

SEQ ID NO: 3887341 - DNA, 25 bp, Homo sapien
tattcagcagcaaaggtcatggtgt

SEQ ID NO: 3887342 - DNA, 25 bp, Homo sapien
tgtccaaacagtactctgtcttgag

SEQ ID NO: 3887343 - DNA, 25 bp, Homo sapien
tgcaggtcacttcaatttgtccaaa

SEQ ID NO: 3887344 - DNA, 25 bp, Homo sapien
ctgtcagaggacatcacaaatgctt

SEQ ID NO: 3887345 - DNA, 25 bp, Homo sapien
caatgcagcctccagtaggatgaac

SEQ ID NO: 3887346 - DNA, 25 bp, Homo sapien
ttccaacaatgcagcctccagtagg

SEQ ID NO: 3887347 - DNA, 25 bp, Homo sapien
ctgttatttttacggcagtggctga

SEQ ID NO: 3887348 - DNA, 25 bp, Homo sapien
gctgtagcatcctcaagggcagccc

SEQ ID NO: 3887349 - DNA, 25 bp, Homo sapien
ctgtagcatcctcaagggcagccct

SEQ ID NO: 3887350 - DNA, 25 bp, Homo sapien
aagctgtagcatcctcaagggcagc

SEQ ID NO: 3887351 - DNA, 25 bp, Homo sapien
tagcatcctcaagggcagccctcat

SEQ ID NO: 3887352 - DNA, 25 bp, Homo sapien
gaagtgttttcctgagcagaagtaa

SEQ ID NO: 3887353 - DNA, 25 bp, Homo sapien
ctaaggaagtgttttcctgagcaga

SEQ ID NO: 3887354 - DNA, 25 bp, Homo sapien
ggaagtgttttcctgagcagaagta

SEQ ID NO: 3887355 - DNA, 25 bp, Homo sapien
aaggaagtgttttcctgagcagaag

SEQ ID NO: 3887356 - DNA, 25 bp, Homo sapien
cacatcaactctaggggcagctctt

SEQ ID NO: 3887357 - DNA, 25 bp, Homo sapien
gctcttcaggttttagcacaccatt

SEQ ID NO: 3887358 - DNA, 25 bp, Homo sapien
gcacaccattcatagaagtaacact

SEQ ID NO: 3887359 - DNA, 25 bp, Homo sapien
gaagtaacactaccctctagcactt

SEQ ID NO: 3887360 - DNA, 25 bp, Homo sapien
tgttactatgggataatgactgaga

SEQ ID NO: 3887361 - DNA, 25 bp, Homo sapien
ggcaaagacattttgattttgtgca

SEQ ID NO: 3887362 - DNA, 25 bp, Homo sapien
gagagcaacataccaagagaaactg

SEQ ID NO: 3887363 - DNA, 25 bp, Homo sapien
gataatgactgagagcaacatacca

SEQ ID NO: 3887364 - DNA, 25 bp, Homo sapien
ctcctgtaatctttgagacaatggg

SEQ ID NO: 3887365 - DNA, 25 bp, Homo sapien
cctgtaatctttgagacaatggggc

SEQ ID NO: 3887366 - DNA, 25 bp, Homo sapien
aactcctgtaatctttgagacaatg

SEQ ID NO: 3887367 - DNA, 25 bp, Homo sapien
taccaaaaccagtttattgtattca

SEQ ID NO: 3887368 - DNA, 25 bp, Homo sapien
gttgccatggtgataagggaatcaa

SEQ ID NO: 3887369 - DNA, 25 bp, Homo sapien
tcagcaggtcctactgtgagaattt

SEQ ID NO: 3887370 - DNA, 25 bp, Homo sapien
ccatggtgataagggaatcaagtca

SEQ ID NO: 3887371 - DNA, 25 bp, Homo sapien
tgatcaatttaatggcagagaaaca

SEQ ID NO: 3887372 - DNA, 25 bp, Homo sapien
cattctcttttccttcactcacatc

SEQ ID NO: 3887373 - DNA, 25 bp, Homo sapien
tctcttttccttcactcacatccat

SEQ ID NO: 3887374 - DNA, 25 bp, Homo sapien
ctttcatcctgctcattctcttttc

SEQ ID NO: 3887375 - DNA, 25 bp, Homo sapien
tttcatcctgctcattctcttttcc

SEQ ID NO: 3887376 - DNA, 25 bp, Homo sapien
tagtttcacccatggaagcaccaga

SEQ ID NO: 3887377 - DNA, 25 bp, Homo sapien
ttagtttcacccatggaagcaccag

SEQ ID NO: 3887378 - DNA, 25 bp, Homo sapien
ttctttagtttcacccatggaagca

SEQ ID NO: 3887379 - DNA, 25 bp, Homo sapien
ctttagtttcacccatggaagcacc

SEQ ID NO: 3887380 - DNA, 25 bp, Homo sapien
taagagctcattgaggcaagtggaa

SEQ ID NO: 3887381 - DNA, 25 bp, Homo sapien
ccaacagtgaaagccagggatggca

SEQ ID NO: 3887382 - DNA, 25 bp, Homo sapien
caccattgacaatgtgtgcagatca

SEQ ID NO: 3887383 - DNA, 25 bp, Homo sapien
cagttaagccttgggtagacgacaa

SEQ ID NO: 3887384 - DNA, 25 bp, Homo sapien
tttcttagtgttattgtcttctccc

SEQ ID NO: 3887385 - DNA, 25 bp, Homo sapien
gggcttctgaccataagcaggaaga

SEQ ID NO: 3887386 - DNA, 25 bp, Homo sapien
cacaaatgtccccagtgatctgcga

SEQ ID NO: 3887387 - DNA, 25 bp, Homo sapien
cccatagtaactggtatgctttgaa

SEQ ID NO: 3887388 - DNA, 25 bp, Homo sapien
ctgactgactgtacaggcagcgggt

SEQ ID NO: 3887389 - DNA, 25 bp, Homo sapien
tgctaaggcggaagtaatgctgata

SEQ ID NO: 3887390 - DNA, 25 bp, Homo sapien
tggaaaacggaaagaagctctcact

SEQ ID NO: 3887391 - DNA, 25 bp, Homo sapien
gttctcagaacaaggaagcaccatg

SEQ ID NO: 3887392 - DNA, 25 bp, Homo sapien
tgcagaagatatgatgggaaaaggg

SEQ ID NO: 3887393 - DNA, 25 bp, Homo sapien
cagaagatatgatgggaaaagggaa

SEQ ID NO: 3887394 - DNA, 25 bp, Homo sapien
gcagaagatatgatgggaaaaggga

SEQ ID NO: 3887395 - DNA, 25 bp, Homo sapien
gggaatggcgttcatgctagtcaca

SEQ ID NO: 3887396 - DNA, 25 bp, Homo sapien
ttagcggggaatggcgttcatgcta

SEQ ID NO: 3887397 - DNA, 25 bp, Homo sapien
ggaatggcgttcatgctagtcacac

SEQ ID NO: 3887398 - DNA, 25 bp, Homo sapien
gcggggaatggcgttcatgctagtc

SEQ ID NO: 3887399 - DNA, 25 bp, Homo sapien
gtccaaagctgactggtgggtcaaa

SEQ ID NO: 3887400 - DNA, 25 bp, Homo sapien
tccacacacataggtgtaggtgact

SEQ ID NO: 3887401 - DNA, 25 bp, Homo sapien
taggtgactctttgctgtcaaagac

SEQ ID NO: 3887402 - DNA, 25 bp, Homo sapien
tcaaatttgcagatgcgctggctgc

SEQ ID NO: 3887403 - DNA, 25 bp, Homo sapien
tgaccgtgtctttggaagctttttc

SEQ ID NO: 3887404 - DNA, 25 bp, Homo sapien
cttgaccgtgtctttggaagctttt

SEQ ID NO: 3887405 - DNA, 25 bp, Homo sapien
atcttcttccctggctcagcaaggc

SEQ ID NO: 3887406 - DNA, 25 bp, Homo sapien
tcttccctggctcagcaaggctggg

SEQ ID NO: 3887407 - DNA, 25 bp, Homo sapien
ggcagcacgatgccataggcagaga

SEQ ID NO: 3887408 - DNA, 25 bp, Homo sapien
cagcacgatgccataggcagagagc

SEQ ID NO: 3887409 - DNA, 25 bp, Homo sapien
gcacgatgccataggcagagagccc

SEQ ID NO: 3887410 - DNA, 25 bp, Homo sapien
cacgatgccataggcagagagccct

SEQ ID NO: 3887411 - DNA, 25 bp, Homo sapien
tttcccgtcagaggctcaaaattac

SEQ ID NO: 3887412 - DNA, 25 bp, Homo sapien
tgggaatttggaattgagatttccc

SEQ ID NO: 3887413 - DNA, 25 bp, Homo sapien
cttaccaacgccgtcttctgggaat

SEQ ID NO: 3887414 - DNA, 25 bp, Homo sapien
cctttggtgaaggagctcctgggtc

SEQ ID NO: 3887415 - DNA, 25 bp, Homo sapien
cacgaagaaaatgcgccaagggtca

SEQ ID NO: 3887416 - DNA, 25 bp, Homo sapien
tgtggagccctcatcaagcaggtcc

SEQ ID NO: 3887417 - DNA, 25 bp, Homo sapien
tcacaagagcagtttgcgccttccg

SEQ ID NO: 3887418 - DNA, 25 bp, Homo sapien
caccactggacgcatgacatagagc

SEQ ID NO: 3887419 - DNA, 25 bp, Homo sapien
tctctcctgattggccttcttcaca

SEQ ID NO: 3887420 - DNA, 25 bp, Homo sapien
tcaatctttcaactagcttcagttt

SEQ ID NO: 3887421 - DNA, 25 bp, Homo sapien
ctctcctgattggccttcttcacag

SEQ ID NO: 3887422 - DNA, 25 bp, Homo sapien
tcttctctcctgattggccttcttc

SEQ ID NO: 3887423 - DNA, 25 bp, Homo sapien
ttaatcatcatgggtgcttgcatct

SEQ ID NO: 3887424 - DNA, 25 bp, Homo sapien
taatcatcatgggtgcttgcatctt

SEQ ID NO: 3887425 - DNA, 25 bp, Homo sapien
tcctcctcaaccccatcacacacta

SEQ ID NO: 3887426 - DNA, 25 bp, Homo sapien
aatcatcatgggtgcttgcatcttg

SEQ ID NO: 3887427 - DNA, 25 bp, Homo sapien
caatcacggagctttctctgaacat

SEQ ID NO: 3887428 - DNA, 25 bp, Homo sapien
ttgcttcctcaatcacggagctttc

SEQ ID NO: 3887429 - DNA, 25 bp, Homo sapien
tggaccctggctgattcttgcttcc

SEQ ID NO: 3887430 - DNA, 25 bp, Homo sapien
gaccctggctgattcttgcttcctc

SEQ ID NO: 3887431 - DNA, 25 bp, Homo sapien
gatagctattatttcgccaatcata

SEQ ID NO: 3887432 - DNA, 25 bp, Homo sapien
gaatactctcgttcaaatgatagct

SEQ ID NO: 3887433 - DNA, 25 bp, Homo sapien
tgctgaacttggaccgcagaatact

SEQ ID NO: 3887434 - DNA, 25 bp, Homo sapien
aaagagcaaattagaattggctgta

SEQ ID NO: 3887435 - DNA, 25 bp, Homo sapien
tcaataaccgcctaacccaatcagt

SEQ ID NO: 3887436 - DNA, 25 bp, Homo sapien
aaccgcctaacccaatcagtgctaa

SEQ ID NO: 3887437 - DNA, 25 bp, Homo sapien
tcagtgctaaatcaccatcagggta

SEQ ID NO: 3887438 - DNA, 25 bp, Homo sapien
taacccaatcagtgctaaatcacca

SEQ ID NO: 3887439 - DNA, 25 bp, Homo sapien
tgagccacgaactttctgttggaag

SEQ ID NO: 3887440 - DNA, 25 bp, Homo sapien
cccttctgagccacgaactttctgt

SEQ ID NO: 3887441 - DNA, 25 bp, Homo sapien
tctgagccacgaactttctgttgga

SEQ ID NO: 3887442 - DNA, 25 bp, Homo sapien
agccacgaactttctgttggaagca

SEQ ID NO: 3887443 - DNA, 25 bp, Homo sapien
caattaaaggatcagttgatgctcc

SEQ ID NO: 3887444 - DNA, 25 bp, Homo sapien
gaagtttcctctctgcacattgcat

SEQ ID NO: 3887445 - DNA, 25 bp, Homo sapien
ttgatgctccggtctgttcaattgc

SEQ ID NO: 3887446 - DNA, 25 bp, Homo sapien
tggattcctgcatagaacacagctg

SEQ ID NO: 3887447 - DNA, 25 bp, Homo sapien
aagtgtaacagtggccacatcccct

SEQ ID NO: 3887448 - DNA, 25 bp, Homo sapien
cagatcatgcattccaagtgtaaca

SEQ ID NO: 3887449 - DNA, 25 bp, Homo sapien
tgcattccaagtgtaacagtggcca

SEQ ID NO: 3887450 - DNA, 25 bp, Homo sapien
taggtgtgcagatcatgcattccaa

SEQ ID NO: 3887451 - DNA, 25 bp, Homo sapien
tcacttccctccaaaggtggacaca

SEQ ID NO: 3887452 - DNA, 25 bp, Homo sapien
gaaacacagcattgactctgggcca

SEQ ID NO: 3887453 - DNA, 25 bp, Homo sapien
ggccataaatcatggccaacttggt

SEQ ID NO: 3887454 - DNA, 25 bp, Homo sapien
ccccttgctgtttccaatatgcagt

SEQ ID NO: 3887455 - DNA, 25 bp, Homo sapien
tctatccaagattatatgggatcta

SEQ ID NO: 3887456 - DNA, 25 bp, Homo sapien
tttgccaataggttccatgattctg

SEQ ID NO: 3887457 - DNA, 25 bp, Homo sapien
gaagggacagaatgccctttgccaa

SEQ ID NO: 3887458 - DNA, 25 bp, Homo sapien
ggttgaagctacaattgaagggaca

SEQ ID NO: 3887459 - DNA, 25 bp, Homo sapien
ttcctttgctgatttggagtttttg

SEQ ID NO: 3887460 - DNA, 25 bp, Homo sapien
aagaggcttttgtgaccataagaat

SEQ ID NO: 3887461 - DNA, 25 bp, Homo sapien
gatttcttaccctcagaagaggctt

SEQ ID NO: 3887462 - DNA, 25 bp, Homo sapien
ttttgctgatttcttaccctcagaa

SEQ ID NO: 3887463 - DNA, 25 bp, Homo sapien
agactccgaatatgcctgaggcaga

SEQ ID NO: 3887464 - DNA, 25 bp, Homo sapien
ccccatgagactccgaatatgcctg

SEQ ID NO: 3887465 - DNA, 25 bp, Homo sapien
aacttaggctttcttgtgctcgtct

SEQ ID NO: 3887466 - DNA, 25 bp, Homo sapien
ggctttcttgtgctcgtcttcttca

SEQ ID NO: 3887467 - DNA, 25 bp, Homo sapien
aatcttcctaccaaattccctatgt

SEQ ID NO: 3887468 - DNA, 25 bp, Homo sapien
aaaaacatatagcagcgctttctaa

SEQ ID NO: 3887469 - DNA, 25 bp, Homo sapien
catggagtccatctgtaatgatttt

SEQ ID NO: 3887470 - DNA, 25 bp, Homo sapien
tatagcagcgctttctaaacactgg

SEQ ID NO: 3887471 - DNA, 25 bp, Homo sapien
aatgagctttggtgtagccaagggt

SEQ ID NO: 3887472 - DNA, 25 bp, Homo sapien
cacttccttagtattctttgattcc

SEQ ID NO: 3887473 - DNA, 25 bp, Homo sapien
ctccagctgtgggtctctcaccttg

SEQ ID NO: 3887474 - DNA, 25 bp, Homo sapien
tccagctgtgggtctctcaccttgg

SEQ ID NO: 3887475 - DNA, 25 bp, Homo sapien
cttccttagtattctttgattccac

SEQ ID NO: 3887476 - DNA, 25 bp, Homo sapien
gaggaagaattaagtccccagacac

SEQ ID NO: 3887477 - DNA, 25 bp, Homo sapien
taggcaaagcattatagtctccagg

SEQ ID NO: 3887478 - DNA, 25 bp, Homo sapien
caggtgctgactaaggaagttaggc

SEQ ID NO: 3887479 - DNA, 25 bp, Homo sapien
gaacgcatcatcatatccagtgtgg

SEQ ID NO: 3887480 - DNA, 25 bp, Homo sapien
aaacagggcctagtattttggcaat

SEQ ID NO: 3887481 - DNA, 25 bp, Homo sapien
gaagtaccatcagtcccaagctttg

SEQ ID NO: 3887482 - DNA, 25 bp, Homo sapien
gactttagagcacggagaagcacag

SEQ ID NO: 3887483 - DNA, 25 bp, Homo sapien
cacagacatggtaaacggaagcagt

SEQ ID NO: 3887484 - DNA, 25 bp, Homo sapien
gcataggaacaggtgttatgaagtg

SEQ ID NO: 3887485 - DNA, 25 bp, Homo sapien
tgcataggaacaggtgttatgaagt

SEQ ID NO: 3887486 - DNA, 25 bp, Homo sapien
atggagaaatctcagctgccccaca

SEQ ID NO: 3887487 - DNA, 25 bp, Homo sapien
ctgcataggaacaggtgttatgaag

SEQ ID NO: 3887488 - DNA, 25 bp, Homo sapien
gggagttctgtgctactagagacac

SEQ ID NO: 3887489 - DNA, 25 bp, Homo sapien
gtgctactagagacacccaggcaat

SEQ ID NO: 3887490 - DNA, 25 bp, Homo sapien
gaaaataagaggcatcttggctagt

SEQ ID NO: 3887491 - DNA, 25 bp, Homo sapien
aaggaaggctctccataaggggagt

SEQ ID NO: 3887492 - DNA, 25 bp, Homo sapien
tacattccctcgagtagtgttattg

SEQ ID NO: 3887493 - DNA, 25 bp, Homo sapien
tccctcgagtagtgttattgtgccc

SEQ ID NO: 3887494 - DNA, 25 bp, Homo sapien
cgagtagtgttattgtgccctaggt

SEQ ID NO: 3887495 - DNA, 25 bp, Homo sapien
cctcgagtagtgttattgtgcccta

SEQ ID NO: 3887496 - DNA, 25 bp, Homo sapien
tgcagctaaaaaggtcattaacttg

SEQ ID NO: 3887497 - DNA, 25 bp, Homo sapien
gcagctaaaaaggtcattaacttgt

SEQ ID NO: 3887498 - DNA, 25 bp, Homo sapien
aattgcagctaaaaaggtcattaac

SEQ ID NO: 3887499 - DNA, 25 bp, Homo sapien
caaaattgcagctaaaaaggtcatt

SEQ ID NO: 3887500 - DNA, 25 bp, Homo sapien
catgcctatgtccagcttactgaag

SEQ ID NO: 3887501 - DNA, 25 bp, Homo sapien
tggagccatctggagaaacgcgttc

SEQ ID NO: 3887502 - DNA, 25 bp, Homo sapien
gaaaatccctcatgccaggttaggc

SEQ ID NO: 3887503 - DNA, 25 bp, Homo sapien
gacttttactgtgggtgagatcaca

SEQ ID NO: 3887504 - DNA, 25 bp, Homo sapien
acagcagctggaaaatagtcactgc

SEQ ID NO: 3887505 - DNA, 25 bp, Homo sapien
tttgtctgcctctaccacagcagct

SEQ ID NO: 3887506 - DNA, 25 bp, Homo sapien
agctggaaaatagtcactgccccac

SEQ ID NO: 3887507 - DNA, 25 bp, Homo sapien
aacccaacacccatttcactgtcct

SEQ ID NO: 3887508 - DNA, 25 bp, Homo sapien
ggcctgagggtaacctctctaagct

SEQ ID NO: 3887509 - DNA, 25 bp, Homo sapien
catctagtaggcctgagggtaacct

SEQ ID NO: 3887510 - DNA, 25 bp, Homo sapien
tagtaggcctgagggtaacctctct

SEQ ID NO: 3887511 - DNA, 25 bp, Homo sapien
taggcctgagggtaacctctctaag

SEQ ID NO: 3887512 - DNA, 25 bp, Homo sapien
tgctggagccaagaactcgaacatg

SEQ ID NO: 3887513 - DNA, 25 bp, Homo sapien
aggcccgagctccttgccattaact

SEQ ID NO: 3887514 - DNA, 25 bp, Homo sapien
taccaactaccacagctttgctgga

SEQ ID NO: 3887515 - DNA, 25 bp, Homo sapien
ctgggcctgtcattatctcgctgaa

SEQ ID NO: 3887516 - DNA, 25 bp, Homo sapien
gatctttgcctttccagatgttaat

SEQ ID NO: 3887517 - DNA, 25 bp, Homo sapien
ttactcatagggatctttgcctttc

SEQ ID NO: 3887518 - DNA, 25 bp, Homo sapien
ttgcctttccagatgttaattgcag

SEQ ID NO: 3887519 - DNA, 25 bp, Homo sapien
ctttgcctttccagatgttaattgc

SEQ ID NO: 3887520 - DNA, 25 bp, Homo sapien
gagattcttggagcaccactcttgc

SEQ ID NO: 3887521 - DNA, 25 bp, Homo sapien
accactcttgctaacattttctgca

SEQ ID NO: 3887522 - DNA, 25 bp, Homo sapien
tgaaaaatctgtcaagcatgtggtt

SEQ ID NO: 3887523 - DNA, 25 bp, Homo sapien
caagcatgtggttgtaccatggagg

SEQ ID NO: 3887524 - DNA, 25 bp, Homo sapien
cttgttgatccagtcctctaagcat

SEQ ID NO: 3887525 - DNA, 25 bp, Homo sapien
tcttgttgatccagtcctctaagca

SEQ ID NO: 3887526 - DNA, 25 bp, Homo sapien
ggtctgcatatttgtcgtcattctt

SEQ ID NO: 3887527 - DNA, 25 bp, Homo sapien
ctcccttggtctgcatatttgtcgt

SEQ ID NO: 3887528 - DNA, 25 bp, Homo sapien
tccattctccacagggggtctattt

SEQ ID NO: 3887529 - DNA, 25 bp, Homo sapien
ccattctccacagggggtctatttc

SEQ ID NO: 3887530 - DNA, 25 bp, Homo sapien
cacagggggtctatttctgggcttg

SEQ ID NO: 3887531 - DNA, 25 bp, Homo sapien
tctccacagggggtctatttctggg

SEQ ID NO: 3887532 - DNA, 25 bp, Homo sapien
tgatatggagcatcaccaaggaggt

SEQ ID NO: 3887533 - DNA, 25 bp, Homo sapien
aagatgccacgagattctttggtgc

SEQ ID NO: 3887534 - DNA, 25 bp, Homo sapien
tctggaatccactgggtacagcaca

SEQ ID NO: 3887535 - DNA, 25 bp, Homo sapien
cacaggacaaaagacttcagtgttc

SEQ ID NO: 3887536 - DNA, 25 bp, Homo sapien
tcaccgtccccactcccactctccc

SEQ ID NO: 3887537 - DNA, 25 bp, Homo sapien
ccgtccccactcccactctccccat

SEQ ID NO: 3887538 - DNA, 25 bp, Homo sapien
gtcaccgtccccactcccactctcc

SEQ ID NO: 3887539 - DNA, 25 bp, Homo sapien
tgtcaccgtccccactcccactctc

SEQ ID NO: 3887540 - DNA, 25 bp, Homo sapien
aaggtgagggcaatagtctctccat

SEQ ID NO: 3887541 - DNA, 25 bp, Homo sapien
taggatgaaatccttaagcaacctc

SEQ ID NO: 3887542 - DNA, 25 bp, Homo sapien
caaatacaatcctgggtctcaaggt

SEQ ID NO: 3887543 - DNA, 25 bp, Homo sapien
taagcaacctccagtcactgaatcc

SEQ ID NO: 3887544 - DNA, 25 bp, Homo sapien
caggcatctgcggatacctcctgtg

SEQ ID NO: 3887545 - DNA, 25 bp, Homo sapien
gagaaacgcccaacaatgcactcgt

SEQ ID NO: 3887546 - DNA, 25 bp, Homo sapien
gcatcagagaaacgcccaacaatgc

SEQ ID NO: 3887547 - DNA, 25 bp, Homo sapien
atctgcggatacctcctgtggtcca

SEQ ID NO: 3887548 - DNA, 25 bp, Homo sapien
cattaattatctcctcagagatgag

SEQ ID NO: 3887549 - DNA, 25 bp, Homo sapien
ctgcatgctccagatattgatactg

SEQ ID NO: 3887550 - DNA, 25 bp, Homo sapien
gaagtgatagcccaactcattaatt

SEQ ID NO: 3887551 - DNA, 25 bp, Homo sapien
tctcctcagagatgagactagttag

SEQ ID NO: 3887552 - DNA, 25 bp, Homo sapien
tggtcaggttctgatgagagctctc

SEQ ID NO: 3887553 - DNA, 25 bp, Homo sapien
ggtcaagatcagagtgtcagcatgg

SEQ ID NO: 3887554 - DNA, 25 bp, Homo sapien
catggtcaggttctgatgagagctc

SEQ ID NO: 3887555 - DNA, 25 bp, Homo sapien
ggctgaaaggtcaagatcagagtgt

SEQ ID NO: 3887556 - DNA, 25 bp, Homo sapien
cagaagtcgaggaaagccttggcat

SEQ ID NO: 3887557 - DNA, 25 bp, Homo sapien
cagtcacgttcacagatgacaggta

SEQ ID NO: 3887558 - DNA, 25 bp, Homo sapien
gccttggcatctccagtcacgttca

SEQ ID NO: 3887559 - DNA, 25 bp, Homo sapien
tgacaggtaggtaaaggtggtgaca

SEQ ID NO: 3887560 - DNA, 25 bp, Homo sapien
aatacagcaaaggtctttttcttgc

SEQ ID NO: 3887561 - DNA, 25 bp, Homo sapien
acagaccacacggaatcagcagaaa

SEQ ID NO: 3887562 - DNA, 25 bp, Homo sapien
tgaggaagagttgttctgctccatg

SEQ ID NO: 3887563 - DNA, 25 bp, Homo sapien
tttttcttgctcacatcacagacca

SEQ ID NO: 3887564 - DNA, 25 bp, Homo sapien
tgagctcaccagtagaatgaagcct

SEQ ID NO: 3887565 - DNA, 25 bp, Homo sapien
gattgctggcatggatattgcctct

SEQ ID NO: 3887566 - DNA, 25 bp, Homo sapien
tcatggcaaacacccaattattggc

SEQ ID NO: 3887567 - DNA, 25 bp, Homo sapien
taagctcctggtataggcaatccac

SEQ ID NO: 3887568 - DNA, 25 bp, Homo sapien
ggcatccacgctctctgctgaaata

SEQ ID NO: 3887569 - DNA, 25 bp, Homo sapien
actgtcatgggctatgcaggccaca

SEQ ID NO: 3887570 - DNA, 25 bp, Homo sapien
atttggctgagctgatgacattcaa

SEQ ID NO: 3887571 - DNA, 25 bp, Homo sapien
tcacatacataactgtcatgggcta

SEQ ID NO: 3887572 - DNA, 25 bp, Homo sapien
ctaataaatgcaggtgcagcttcct

SEQ ID NO: 3887573 - DNA, 25 bp, Homo sapien
taataaatgcaggtgcagcttcctt

SEQ ID NO: 3887574 - DNA, 25 bp, Homo sapien
ctgtcagtggacagtaagaatctgg

SEQ ID NO: 3887575 - DNA, 25 bp, Homo sapien
ccctcatggccttctagaacggaga

SEQ ID NO: 3887576 - DNA, 25 bp, Homo sapien
catggccatctcacatatcgctggg

SEQ ID NO: 3887577 - DNA, 25 bp, Homo sapien
gaaactgggttgtgaactacctgct

SEQ ID NO: 3887578 - DNA, 25 bp, Homo sapien
gctaatttgggtcaagccctcatgg

SEQ ID NO: 3887579 - DNA, 25 bp, Homo sapien
atctttcctccgttgcctgcagtct

SEQ ID NO: 3887580 - DNA, 25 bp, Homo sapien
tcagccccacatctcaacaaatgca

SEQ ID NO: 3887581 - DNA, 25 bp, Homo sapien
ttgctgacacgcaggagagcatctt

SEQ ID NO: 3887582 - DNA, 25 bp, Homo sapien
agagcaggcagccacttctgcttga

SEQ ID NO: 3887583 - DNA, 25 bp, Homo sapien
cacagactgagtagggtgtatgacc

SEQ ID NO: 3887584 - DNA, 25 bp, Homo sapien
gctgctactcctcagatatgaaggg

SEQ ID NO: 3887585 - DNA, 25 bp, Homo sapien
ggctggattcagaatcgggtaagca

SEQ ID NO: 3887586 - DNA, 25 bp, Homo sapien
gtgtatgacctgagaaggaggctgg

SEQ ID NO: 3887587 - DNA, 25 bp, Homo sapien
ctccacatcctgaattcagggtttg

SEQ ID NO: 3887588 - DNA, 25 bp, Homo sapien
tgatgggaagagagctgataaatat

SEQ ID NO: 3887589 - DNA, 25 bp, Homo sapien
cacatcctgaattcagggtttgatg

SEQ ID NO: 3887590 - DNA, 25 bp, Homo sapien
tgggaagagagctgataaatatgtc

SEQ ID NO: 3887591 - DNA, 25 bp, Homo sapien
tgcagcttagaacatcgcctacttg

SEQ ID NO: 3887592 - DNA, 25 bp, Homo sapien
tagaacatcgcctacttgtgcaaac

SEQ ID NO: 3887593 - DNA, 25 bp, Homo sapien
ttccctgcagcttagaacatcgcct

SEQ ID NO: 3887594 - DNA, 25 bp, Homo sapien
catcgcctacttgtgcaaaccctga

SEQ ID NO: 3887595 - DNA, 25 bp, Homo sapien
gacattatggggtatgttgtatgcc

SEQ ID NO: 3887596 - DNA, 25 bp, Homo sapien
tctaaagtagatatgacattatggg

SEQ ID NO: 3887597 - DNA, 25 bp, Homo sapien
ttctctaaagtagatatgacattat

SEQ ID NO: 3887598 - DNA, 25 bp, Homo sapien
cattatggggtatgttgtatgcctt

SEQ ID NO: 3887599 - DNA, 25 bp, Homo sapien
atttgtagctgtttcttcatttacc

SEQ ID NO: 3887600 - DNA, 25 bp, Homo sapien
ccccatttgtagctgtttcttcatt

SEQ ID NO: 3887601 - DNA, 25 bp, Homo sapien
cttccccatttgtagctgtttcttc

SEQ ID NO: 3887602 - DNA, 25 bp, Homo sapien
catttgtagctgtttcttcatttac

SEQ ID NO: 3887603 - DNA, 25 bp, Homo sapien
tggaagattctgatacaactactgt

SEQ ID NO: 3887604 - DNA, 25 bp, Homo sapien
taacaggcatcctctctgaaccagc

SEQ ID NO: 3887605 - DNA, 25 bp, Homo sapien
aaggctttagtcagagtaacaggca

SEQ ID NO: 3887606 - DNA, 25 bp, Homo sapien
cagcccagtggtacatggctgggtc

SEQ ID NO: 3887607 - DNA, 25 bp, Homo sapien
ggaaggcagtcattaccagtgttca

SEQ ID NO: 3887608 - DNA, 25 bp, Homo sapien
catcatgatggtggccgtggaagtc

SEQ ID NO: 3887609 - DNA, 25 bp, Homo sapien
aagacagtagcctgagcccagttac

SEQ ID NO: 3887610 - DNA, 25 bp, Homo sapien
caaagctctatcacgactcaaggac

SEQ ID NO: 3887611 - DNA, 25 bp, Homo sapien
ataatcactgaacaacgctggaaga

SEQ ID NO: 3887612 - DNA, 25 bp, Homo sapien
ctgaacaacgctggaagaattctgc

SEQ ID NO: 3887613 - DNA, 25 bp, Homo sapien
atcactgaacaacgctggaagaatt

SEQ ID NO: 3887614 - DNA, 25 bp, Homo sapien
cactgaacaacgctggaagaattct

SEQ ID NO: 3887615 - DNA, 25 bp, Homo sapien
tagagcttacatagcattcatgtgc

SEQ ID NO: 3887616 - DNA, 25 bp, Homo sapien
aatagccctcatccactgtttctct

SEQ ID NO: 3887617 - DNA, 25 bp, Homo sapien
gtttctctctttctatagagcttac

SEQ ID NO: 3887618 - DNA, 25 bp, Homo sapien
tttgaggtgtagtcaatagccctca

SEQ ID NO: 3887619 - DNA, 25 bp, Homo sapien
atccattggctctatagagtcaaaa

SEQ ID NO: 3887620 - DNA, 25 bp, Homo sapien
agtccagggtccacatccattggct

SEQ ID NO: 3887621 - DNA, 25 bp, Homo sapien
gctcttcggtgttctctggtttgtt

SEQ ID NO: 3887622 - DNA, 25 bp, Homo sapien
catttcagtgcgaaggagcagctct

SEQ ID NO: 3887623 - DNA, 25 bp, Homo sapien
aagtttagtaacatcctccatgggc

SEQ ID NO: 3887624 - DNA, 25 bp, Homo sapien
cagcttcaccaggagttttgaaagt

SEQ ID NO: 3887625 - DNA, 25 bp, Homo sapien
agttttgaaagtgccctagcttcag

SEQ ID NO: 3887626 - DNA, 25 bp, Homo sapien
ttcagtaagtttagtaacatcctcc

SEQ ID NO: 3887627 - DNA, 25 bp, Homo sapien
attttgaaagggaatgtgtgggctg

SEQ ID NO: 3887628 - DNA, 25 bp, Homo sapien
aagggaatgtgtgggctgctccgaa

SEQ ID NO: 3887629 - DNA, 25 bp, Homo sapien
tgaaagggaatgtgtgggctgctcc

SEQ ID NO: 3887630 - DNA, 25 bp, Homo sapien
cattttgaaagggaatgtgtgggct

SEQ ID NO: 3887631 - DNA, 25 bp, Homo sapien
taatactgtgggtaacccagagcca

SEQ ID NO: 3887632 - DNA, 25 bp, Homo sapien
agcccaagattagcaaagggatctc

SEQ ID NO: 3887633 - DNA, 25 bp, Homo sapien
cagcccaagattagcaaagggatct

SEQ ID NO: 3887634 - DNA, 25 bp, Homo sapien
cagagtccacaaagtaatactgtgg

SEQ ID NO: 3887635 - DNA, 25 bp, Homo sapien
catgttgtctagagcccttagctca

SEQ ID NO: 3887636 - DNA, 25 bp, Homo sapien
ttttatgtcaaagcccagatgtgtt

SEQ ID NO: 3887637 - DNA, 25 bp, Homo sapien
caactctgcatatattactcatctg

SEQ ID NO: 3887638 - DNA, 25 bp, Homo sapien
tcattttacttcagagcccttagct

SEQ ID NO: 3887639 - DNA, 25 bp, Homo sapien
cactgatagtattgtctatacacac

SEQ ID NO: 3887640 - DNA, 25 bp, Homo sapien
tctctgttttacttcccataggact

SEQ ID NO: 3887641 - DNA, 25 bp, Homo sapien
cggttccttcaaacccactgatagt

SEQ ID NO: 3887642 - DNA, 25 bp, Homo sapien
taggactctatagcttggtgctgtc

SEQ ID NO: 3887643 - DNA, 25 bp, Homo sapien
ggaaagcagatgccactacagattg

SEQ ID NO: 3887644 - DNA, 25 bp, Homo sapien
actttcttctgctaggaaagcagat

SEQ ID NO: 3887645 - DNA, 25 bp, Homo sapien
gaaagcagatgccactacagattga

SEQ ID NO: 3887646 - DNA, 25 bp, Homo sapien
ttcttctgctaggaaagcagatgcc

SEQ ID NO: 3887647 - DNA, 25 bp, Homo sapien
tatagctgcggcgagtgaaacgact

SEQ ID NO: 3887648 - DNA, 25 bp, Homo sapien
tcagagcaatcctgggtgcaaggca

SEQ ID NO: 3887649 - DNA, 25 bp, Homo sapien
aaccggatgactcggctcagaagca

SEQ ID NO: 3887650 - DNA, 25 bp, Homo sapien
gacgctgactatgacgttccctgca

SEQ ID NO: 3887651 - DNA, 25 bp, Homo sapien
tcgatgttgcgtcatgcagtgcgcc

SEQ ID NO: 3887652 - DNA, 25 bp, Homo sapien
agaggcctgcccgtgattggctgct

SEQ ID NO: 3887653 - DNA, 25 bp, Homo sapien
cagtgcgccggaggaactgtgctct

SEQ ID NO: 3887654 - DNA, 25 bp, Homo sapien
agtgtggccgcttttccgacagagg

SEQ ID NO: 3887655 - DNA, 25 bp, Homo sapien
tggtggagagggcggcggcacaagg

SEQ ID NO: 3887656 - DNA, 25 bp, Homo sapien
ggtggagagggcggcggcacaaggc

SEQ ID NO: 3887657 - DNA, 25 bp, Homo sapien
ctggtggagagggcggcggcacaag

SEQ ID NO: 3887658 - DNA, 25 bp, Homo sapien
gtggagagggcggcggcacaaggcc

SEQ ID NO: 3887659 - DNA, 25 bp, Homo sapien
tcaagcaggtagtctaagggtcaac

SEQ ID NO: 3887660 - DNA, 25 bp, Homo sapien
tctcatctgaatctagcgggctggg

SEQ ID NO: 3887661 - DNA, 25 bp, Homo sapien
taatagttcagttgcagagctcgga

SEQ ID NO: 3887662 - DNA, 25 bp, Homo sapien
tgtagctgtgcttctgtcctcgggc

SEQ ID NO: 3887663 - DNA, 25 bp, Homo sapien
tgctgacttctggttgaccacccat

SEQ ID NO: 3887664 - DNA, 25 bp, Homo sapien
tctgctgacttctggttgaccaccc

SEQ ID NO: 3887665 - DNA, 25 bp, Homo sapien
gtctgctgacttctggttgaccacc

SEQ ID NO: 3887666 - DNA, 25 bp, Homo sapien
tgtctgctgacttctggttgaccac

SEQ ID NO: 3887667 - DNA, 25 bp, Homo sapien
ttgatcagatgggaagatggtttgt

SEQ ID NO: 3887668 - DNA, 25 bp, Homo sapien
gatcagatgggaagatggtttgttg

SEQ ID NO: 3887669 - DNA, 25 bp, Homo sapien
ctgtgttctgcagttgatcagatgg

SEQ ID NO: 3887670 - DNA, 25 bp, Homo sapien
tgatcagatgggaagatggtttgtt

SEQ ID NO: 3887671 - DNA, 25 bp, Homo sapien
ttggagctttggtaaagggaccaga

SEQ ID NO: 3887672 - DNA, 25 bp, Homo sapien
tattgattagtgaggagccagtaag

SEQ ID NO: 3887673 - DNA, 25 bp, Homo sapien
gtgatgcattctcctgctgttgctt

SEQ ID NO: 3887674 - DNA, 25 bp, Homo sapien
gaacttaacaaaactgttcatcctg

SEQ ID NO: 3887675 - DNA, 25 bp, Homo sapien
tatttttctgagaccgaagtgctgg

SEQ ID NO: 3887676 - DNA, 25 bp, Homo sapien
atttttctgagaccgaagtgctggg

SEQ ID NO: 3887677 - DNA, 25 bp, Homo sapien
tttttctgagaccgaagtgctggga

SEQ ID NO: 3887678 - DNA, 25 bp, Homo sapien
gaagaagagctgtgttgagaaccta

SEQ ID NO: 3887679 - DNA, 25 bp, Homo sapien
gaaaatgaccgaagacctggttcag

SEQ ID NO: 3887680 - DNA, 25 bp, Homo sapien
taagagttggcctagtccgtagctg

SEQ ID NO: 3887681 - DNA, 25 bp, Homo sapien
tgcaccactgctaagcgattacagt

SEQ ID NO: 3887682 - DNA, 25 bp, Homo sapien
gtgtgaccggaacaaggcttgtcgt

SEQ ID NO: 3887683 - DNA, 25 bp, Homo sapien
ttggtgaactaaggtcgtgacaaag

SEQ ID NO: 3887684 - DNA, 25 bp, Homo sapien
cttaatcatttatgtgtagacaaca

SEQ ID NO: 3887685 - DNA, 25 bp, Homo sapien
acagctacctgtccaattacacagc

SEQ ID NO: 3887686 - DNA, 25 bp, Homo sapien
tccctgccacgagagacaagaagtg

SEQ ID NO: 3887687 - DNA, 25 bp, Homo sapien
cctccctgccacgagagacaagaag

SEQ ID NO: 3887688 - DNA, 25 bp, Homo sapien
ccctcagggacttcaggatatagca

SEQ ID NO: 3887689 - DNA, 25 bp, Homo sapien
ctgaccctcagggacttcaggatat

SEQ ID NO: 3887690 - DNA, 25 bp, Homo sapien
tcgccgacaattcttcaacatgcct

SEQ ID NO: 3887691 - DNA, 25 bp, Homo sapien
gttaccacaatatatgttatgctgt

SEQ ID NO: 3887692 - DNA, 25 bp, Homo sapien
acaactttcgccgacaattcttcaa

SEQ ID NO: 3887693 - DNA, 25 bp, Homo sapien
aagttaccacaatatatgttatgct

SEQ ID NO: 3887694 - DNA, 25 bp, Homo sapien
caggctggccggagttcccctcacg

SEQ ID NO: 3887695 - DNA, 25 bp, Homo sapien
ggctggccggagttcccctcacgga

SEQ ID NO: 3887696 - DNA, 25 bp, Homo sapien
ctggccggagttcccctcacggatg

SEQ ID NO: 3887697 - DNA, 25 bp, Homo sapien
ttcccctcacggatgctccacaggg

SEQ ID NO: 3887698 - DNA, 25 bp, Homo sapien
ctccttgaggcgaggcacagtgtct

SEQ ID NO: 3887699 - DNA, 25 bp, Homo sapien
cttgaggcgaggcacagtgtcttct

SEQ ID NO: 3887700 - DNA, 25 bp, Homo sapien
tgagacagtcacttgtctgcacagc

SEQ ID NO: 3887701 - DNA, 25 bp, Homo sapien
cctccaccaacaggagctccttgag

SEQ ID NO: 3887702 - DNA, 25 bp, Homo sapien
caggagataaggcagccccagagat

SEQ ID NO: 3887703 - DNA, 25 bp, Homo sapien
ccagagagccatagcttggcaggag

SEQ ID NO: 3887704 - DNA, 25 bp, Homo sapien
cagatcagcatgcaggtcaccagca

SEQ ID NO: 3887705 - DNA, 25 bp, Homo sapien
gcacagatcagcatgcaggtcacca

SEQ ID NO: 3887706 - DNA, 25 bp, Homo sapien
gctgaggaggtcccggccccacttg

SEQ ID NO: 3887707 - DNA, 25 bp, Homo sapien
cagtgcccactctcaagaggctgag

SEQ ID NO: 3887708 - DNA, 25 bp, Homo sapien
gaggaggtcccggccccacttgctc

SEQ ID NO: 3887709 - DNA, 25 bp, Homo sapien
tgaggaggtcccggccccacttgct

SEQ ID NO: 3887710 - DNA, 25 bp, Homo sapien
tggggtccatgaccagcgccggagc

SEQ ID NO: 3887711 - DNA, 25 bp, Homo sapien
ccatggggtccatgaccagcgccgg

SEQ ID NO: 3887712 - DNA, 25 bp, Homo sapien
catggggtccatgaccagcgccgga

SEQ ID NO: 3887713 - DNA, 25 bp, Homo sapien
gggtccatgaccagcgccggagcct

SEQ ID NO: 3887714 - DNA, 25 bp, Homo sapien
aggagctcggactgcatgaacaaat

SEQ ID NO: 3887715 - DNA, 25 bp, Homo sapien
gctcggactgcatgaacaaatgtta

SEQ ID NO: 3887716 - DNA, 25 bp, Homo sapien
ctcggactgcatgaacaaatgttac

SEQ ID NO: 3887717 - DNA, 25 bp, Homo sapien
gagctcggactgcatgaacaaatgt

SEQ ID NO: 3887718 - DNA, 25 bp, Homo sapien
ccgttgaggatatgaggttttcagc

SEQ ID NO: 3887719 - DNA, 25 bp, Homo sapien
tgaggatatgaggttttcagcaacg

SEQ ID NO: 3887720 - DNA, 25 bp, Homo sapien
cagcaacgatgataccaggatggac

SEQ ID NO: 3887721 - DNA, 25 bp, Homo sapien
tgaggttttcagcaacgatgatacc

SEQ ID NO: 3887722 - DNA, 25 bp, Homo sapien
tcccagtggctcagtgaaaggggcc

SEQ ID NO: 3887723 - DNA, 25 bp, Homo sapien
ttcccagtggctcagtgaaaggggc

SEQ ID NO: 3887724 - DNA, 25 bp, Homo sapien
ggtcaggtcccatgtctcatggcag

SEQ ID NO: 3887725 - DNA, 25 bp, Homo sapien
gccttgacaagccaagaccttccat

SEQ ID NO: 3887726 - DNA, 25 bp, Homo sapien
ctgcccaggctctgtaagtgagggt

SEQ ID NO: 3887727 - DNA, 25 bp, Homo sapien
gatgagtcctactgagccttgacaa

SEQ ID NO: 3887728 - DNA, 25 bp, Homo sapien
gtaggtccagaagcttttacttcat

SEQ ID NO: 3887729 - DNA, 25 bp, Homo sapien
taggtccagaagcttttacttcatg

SEQ ID NO: 3887730 - DNA, 25 bp, Homo sapien
atcctgacccctctgtctcatgtgc

SEQ ID NO: 3887731 - DNA, 25 bp, Homo sapien
cctgacccctctgtctcatgtgcac

SEQ ID NO: 3887732 - DNA, 25 bp, Homo sapien
tgacccctctgtctcatgtgcacca

SEQ ID NO: 3887733 - DNA, 25 bp, Homo sapien
tcctgacccctctgtctcatgtgca

SEQ ID NO: 3887734 - DNA, 25 bp, Homo sapien
caggtattagacgagtgcagtggcc

SEQ ID NO: 3887735 - DNA, 25 bp, Homo sapien
taatgtacacacttgagagaggcct

SEQ ID NO: 3887736 - DNA, 25 bp, Homo sapien
tcaaggaaacgatggaactggaacc

SEQ ID NO: 3887737 - DNA, 25 bp, Homo sapien
cattccacatgggtccggctaagag

SEQ ID NO: 3887738 - DNA, 25 bp, Homo sapien
catattttgtgccaggaaggaggtc

SEQ ID NO: 3887739 - DNA, 25 bp, Homo sapien
tccgatgcaatgtagagggtgaacc

SEQ ID NO: 3887740 - DNA, 25 bp, Homo sapien
caacccgcaggtcaatgtaggcatt

SEQ ID NO: 3887741 - DNA, 25 bp, Homo sapien
taattaccactgtctaccaggtggg

SEQ ID NO: 3887742 - DNA, 25 bp, Homo sapien
cagagcagtgtcttctccagtagaa

SEQ ID NO: 3887743 - DNA, 25 bp, Homo sapien
gacagagcagtgtcttctccagtag

SEQ ID NO: 3887744 - DNA, 25 bp, Homo sapien
ctctgacagagcagtgtcttctcca

SEQ ID NO: 3887745 - DNA, 25 bp, Homo sapien
gagcagtgtcttctccagtagaaga

SEQ ID NO: 3887746 - DNA, 25 bp, Homo sapien
gccaagcatcgcagggtcacattct

SEQ ID NO: 3887747 - DNA, 25 bp, Homo sapien
tgaccaagaattgaagagccagctc

SEQ ID NO: 3887748 - DNA, 25 bp, Homo sapien
ttaggcgacagtcacatacccaggg

SEQ ID NO: 3887749 - DNA, 25 bp, Homo sapien
tggcacggaacgctgtccatggtac

SEQ ID NO: 3887750 - DNA, 25 bp, Homo sapien
ttcccagggatctttcccaaggaga

SEQ ID NO: 3887751 - DNA, 25 bp, Homo sapien
ttctcacttgcttgaactcttcaga

SEQ ID NO: 3887752 - DNA, 25 bp, Homo sapien
cttggggcatctcaaataagggtga

SEQ ID NO: 3887753 - DNA, 25 bp, Homo sapien
cccaaggagacagatgtgcactgca

SEQ ID NO: 3887754 - DNA, 25 bp, Homo sapien
tctcctctgagcaagtgcatcctgg

SEQ ID NO: 3887755 - DNA, 25 bp, Homo sapien
gctgagctgcgtgtgtatccagaaa

SEQ ID NO: 3887756 - DNA, 25 bp, Homo sapien
gcaagtgcatcctggcagacagaaa

SEQ ID NO: 3887757 - DNA, 25 bp, Homo sapien
cagaaagaccagaactaacaggaag

SEQ ID NO: 3887758 - DNA, 25 bp, Homo sapien
ttgggaggcttatcatcttggaggc

SEQ ID NO: 3887759 - DNA, 25 bp, Homo sapien
gaatattcatgagcgtaatccagga

SEQ ID NO: 3887760 - DNA, 25 bp, Homo sapien
tacatgacatcaggcaaaaggattt

SEQ ID NO: 3887761 - DNA, 25 bp, Homo sapien
ggatgattcttctctacaagggcaa

SEQ ID NO: 3887762 - DNA, 25 bp, Homo sapien
tgtcccatcatgattggttcagacc

SEQ ID NO: 3887763 - DNA, 25 bp, Homo sapien
tgtctttaggtcaataactgtccca

SEQ ID NO: 3887764 - DNA, 25 bp, Homo sapien
tccagaccatgaaaataggtcccaa

SEQ ID NO: 3887765 - DNA, 25 bp, Homo sapien
taaaccattggatcattggcaagat

SEQ ID NO: 3887766 - DNA, 25 bp, Homo sapien
gacagaggtgaatgtgccagacagc

SEQ ID NO: 3887767 - DNA, 25 bp, Homo sapien
caaattgagccttctgctgggaaca

SEQ ID NO: 3887768 - DNA, 25 bp, Homo sapien
cacaagttatagtcaggtgcaccct

SEQ ID NO: 3887769 - DNA, 25 bp, Homo sapien
tatctgagtaagcaggtacccgagc

SEQ ID NO: 3887770 - DNA, 25 bp, Homo sapien
gaaagtccacactggaacgagctga

SEQ ID NO: 3887771 - DNA, 25 bp, Homo sapien
tttcggcagcgcttctgaagagcac

SEQ ID NO: 3887772 - DNA, 25 bp, Homo sapien
tccatctggaagtgctcaagggtca

SEQ ID NO: 3887773 - DNA, 25 bp, Homo sapien
tagtctccggagtcaaggtgggaca

SEQ ID NO: 3887774 - DNA, 25 bp, Homo sapien
ccaggtcatagagtcggcagtcaca

SEQ ID NO: 3887775 - DNA, 25 bp, Homo sapien
agtgctgtgccacccaaaagggacc

SEQ ID NO: 3887776 - DNA, 25 bp, Homo sapien
gctacgtgggctggcacatctcagt

SEQ ID NO: 3887777 - DNA, 25 bp, Homo sapien
ggactccagtagctccacagcgtag

SEQ ID NO: 3887778 - DNA, 25 bp, Homo sapien
gccaggaaccctgcgtatggccgtc

SEQ ID NO: 3887779 - DNA, 25 bp, Homo sapien
cctgcgggagcctcatcagctggtt

SEQ ID NO: 3887780 - DNA, 25 bp, Homo sapien
ctccaggcgcagtctggaggtgtcc

SEQ ID NO: 3887781 - DNA, 25 bp, Homo sapien
gggcctgaaggcctcgccaggaacc

SEQ ID NO: 3887782 - DNA, 25 bp, Homo sapien
cagtggctcagaaaccatgcagagg

SEQ ID NO: 3887783 - DNA, 25 bp, Homo sapien
taacattgttcccaggatcagaaac

SEQ ID NO: 3887784 - DNA, 25 bp, Homo sapien
catgcagaggtcattaatggataag

SEQ ID NO: 3887785 - DNA, 25 bp, Homo sapien
taaaagggtagctccaataacattg

SEQ ID NO: 3887786 - DNA, 25 bp, Homo sapien
aagagccagagcatgcctaatgcca

SEQ ID NO: 3887787 - DNA, 25 bp, Homo sapien
gcctgggggggccacgcaagggcca

SEQ ID NO: 3887788 - DNA, 25 bp, Homo sapien
agagcatgcctaatgccaccctcat

SEQ ID NO: 3887789 - DNA, 25 bp, Homo sapien
ggggggccacgcaagggccaagagc

SEQ ID NO: 3887790 - DNA, 25 bp, Homo sapien
tgaggccatcggataaacatggaca

SEQ ID NO: 3887791 - DNA, 25 bp, Homo sapien
ccctcctgaggccatcggataaaca

SEQ ID NO: 3887792 - DNA, 25 bp, Homo sapien
cagctttccagaggcgagcagccat

SEQ ID NO: 3887793 - DNA, 25 bp, Homo sapien
gcagcactcagaggcttattgcttt

SEQ ID NO: 3887794 - DNA, 25 bp, Homo sapien
accgtgtctatccttgagttgattt

SEQ ID NO: 3887795 - DNA, 25 bp, Homo sapien
atggtaagagatatgggtccagttt

SEQ ID NO: 3887796 - DNA, 25 bp, Homo sapien
ggtaagagatatgggtccagtttca

SEQ ID NO: 3887797 - DNA, 25 bp, Homo sapien
ccaccgtgtctatccttgagttgat

SEQ ID NO: 3887798 - DNA, 25 bp, Homo sapien
tgccagccctgatggtagtgcctct

SEQ ID NO: 3887799 - DNA, 25 bp, Homo sapien
tattgattcctgcaggatttccgac

SEQ ID NO: 3887800 - DNA, 25 bp, Homo sapien
tgatcagtacatcctgagctgccag

SEQ ID NO: 3887801 - DNA, 25 bp, Homo sapien
cctttgcctgctcgtgatacagacg

SEQ ID NO: 3887802 - DNA, 25 bp, Homo sapien
atccacctggcagctctcacaatgg

SEQ ID NO: 3887803 - DNA, 25 bp, Homo sapien
tggcagctctcacaatggcctccat

SEQ ID NO: 3887804 - DNA, 25 bp, Homo sapien
ccctccatccacctggcagctctca

SEQ ID NO: 3887805 - DNA, 25 bp, Homo sapien
ctggcagctctcacaatggcctcca

SEQ ID NO: 3887806 - DNA, 25 bp, Homo sapien
cagtaagcagcagcttcagaataat

SEQ ID NO: 3887807 - DNA, 25 bp, Homo sapien
gtaagcagcagcttcagaataatgc

SEQ ID NO: 3887808 - DNA, 25 bp, Homo sapien
aagcagcagcttcagaataatgcac

SEQ ID NO: 3887809 - DNA, 25 bp, Homo sapien
tcagtaagcagcagcttcagaataa

SEQ ID NO: 3887810 - DNA, 25 bp, Homo sapien
attttccaacctcaattcttcgtct

SEQ ID NO: 3887811 - DNA, 25 bp, Homo sapien
tccagtgaagagctgtgaggcttat

SEQ ID NO: 3887812 - DNA, 25 bp, Homo sapien
tttccaacctcaattcttcgtcttc

SEQ ID NO: 3887813 - DNA, 25 bp, Homo sapien
tgaagagctgtgaggcttatgtatg

SEQ ID NO: 3887814 - DNA, 25 bp, Homo sapien
actactggacacttgtctgaggctg

SEQ ID NO: 3887815 - DNA, 25 bp, Homo sapien
tgtcctggttttctactagtttcca

SEQ ID NO: 3887816 - DNA, 25 bp, Homo sapien
gccctgttgtccctgcccatctgtc

SEQ ID NO: 3887817 - DNA, 25 bp, Homo sapien
agctgagcatggtcctttgtgggcg

SEQ ID NO: 3887818 - DNA, 25 bp, Homo sapien
catccggatgagcacttgtcacacc

SEQ ID NO: 3887819 - DNA, 25 bp, Homo sapien
tctgtgagtccctcatccggatgag

SEQ ID NO: 3887820 - DNA, 25 bp, Homo sapien
caatctgtttaatgtgccagttgtc

SEQ ID NO: 3887821 - DNA, 25 bp, Homo sapien
gacagtgcaatctgtttaatgtgcc

SEQ ID NO: 3887822 - DNA, 25 bp, Homo sapien
ggcagtctcccccttcaccctgctt

SEQ ID NO: 3887823 - DNA, 25 bp, Homo sapien
tgccaccctccattctaaggcagtc

SEQ ID NO: 3887824 - DNA, 25 bp, Homo sapien
gaagctttcccattccttggagctg

SEQ ID NO: 3887825 - DNA, 25 bp, Homo sapien
accccagatgctgcaaggcccatgt

SEQ ID NO: 3887826 - DNA, 25 bp, Homo sapien
ccaaatagtaaggtctctgtcccag

SEQ ID NO: 3887827 - DNA, 25 bp, Homo sapien
gacatttcatgcaggtacatcaccg

SEQ ID NO: 3887828 - DNA, 25 bp, Homo sapien
gacaactgatgtccagagacccact

SEQ ID NO: 3887829 - DNA, 25 bp, Homo sapien
tgactgccgagcaatgatgactggg

SEQ ID NO: 3887830 - DNA, 25 bp, Homo sapien
gatccctcctgaaccatgggtcaga

SEQ ID NO: 3887831 - DNA, 25 bp, Homo sapien
agaggatccctcctgaaccatgggt

SEQ ID NO: 3887832 - DNA, 25 bp, Homo sapien
tccctgtgctgccttggaggaccag

SEQ ID NO: 3887833 - DNA, 25 bp, Homo sapien
ccatccagcaggtcatgctcttcca

SEQ ID NO: 3887834 - DNA, 25 bp, Homo sapien
tggtctctggctctcaaccgagctg

SEQ ID NO: 3887835 - DNA, 25 bp, Homo sapien
gagcttaagagatatcctagattcc

SEQ ID NO: 3887836 - DNA, 25 bp, Homo sapien
gttcctacagccctccctctgagga

SEQ ID NO: 3887837 - DNA, 25 bp, Homo sapien
tagattcctggttttccataaggga

SEQ ID NO: 3887838 - DNA, 25 bp, Homo sapien
tgatggttccccatcgctagcacca

SEQ ID NO: 3887839 - DNA, 25 bp, Homo sapien
acagctgaccccaagtaccaaggaa

SEQ ID NO: 3887840 - DNA, 25 bp, Homo sapien
ctctgttggaagaactggctactgg

SEQ ID NO: 3887841 - DNA, 25 bp, Homo sapien
ctgggatgaggatcctctccacagc

SEQ ID NO: 3887842 - DNA, 25 bp, Homo sapien
aatgtttcttgtaactgtggctgga

SEQ ID NO: 3887843 - DNA, 25 bp, Homo sapien
catcagggagagctactgagctttg

SEQ ID NO: 3887844 - DNA, 25 bp, Homo sapien
tactgggccaacttcccagatggga

SEQ ID NO: 3887845 - DNA, 25 bp, Homo sapien
ttggctggcaggcagacctcagaag

SEQ ID NO: 3887846 - DNA, 25 bp, Homo sapien
ccagtggtgggaaaggagtctacag

SEQ ID NO: 3887847 - DNA, 25 bp, Homo sapien
tggtgggaaaggagtctacagcggt

SEQ ID NO: 3887848 - DNA, 25 bp, Homo sapien
tgggaaaggagtctacagcggtggt

SEQ ID NO: 3887849 - DNA, 25 bp, Homo sapien
gaaaggagtctacagcggtggtcat

SEQ ID NO: 3887850 - DNA, 25 bp, Homo sapien
taaacttgatccccctcttggcttc

SEQ ID NO: 3887851 - DNA, 25 bp, Homo sapien
ctgacactcatcccctaaacttgat

SEQ ID NO: 3887852 - DNA, 25 bp, Homo sapien
tcttggcttctccattagtgttttc

SEQ ID NO: 3887853 - DNA, 25 bp, Homo sapien
tccattagtgttttctctgtcacca

SEQ ID NO: 3887854 - DNA, 25 bp, Homo sapien
gcaattctgacaccatagactccag

SEQ ID NO: 3887855 - DNA, 25 bp, Homo sapien
tagactccagtgaagaacagctggt

SEQ ID NO: 3887856 - DNA, 25 bp, Homo sapien
cacttcagatgcatgctccaggttg

SEQ ID NO: 3887857 - DNA, 25 bp, Homo sapien
gctgtaggataaggtctcagtccca

SEQ ID NO: 3887858 - DNA, 25 bp, Homo sapien
gctgcttttcccttatccaattgtg

SEQ ID NO: 3887859 - DNA, 25 bp, Homo sapien
atggtacctatcatgtaagtgctta

SEQ ID NO: 3887860 - DNA, 25 bp, Homo sapien
taagcatggtacctatcatgtaagt

SEQ ID NO: 3887861 - DNA, 25 bp, Homo sapien
tcttttaaaagcgagaagcttgatt

SEQ ID NO: 3887862 - DNA, 25 bp, Homo sapien
gtcttcaacagaatactggcaaacc

SEQ ID NO: 3887863 - DNA, 25 bp, Homo sapien
gaaaataataagaaccctatatgat

SEQ ID NO: 3887864 - DNA, 25 bp, Homo sapien
caaagatgtttcagcatacacacat

SEQ ID NO: 3887865 - DNA, 25 bp, Homo sapien
ccaaatcaaacagcaactcaaaaag

SEQ ID NO: 3887866 - DNA, 25 bp, Homo sapien
ggccattctaccgcaccactgttta

SEQ ID NO: 3887867 - DNA, 25 bp, Homo sapien
gccattctaccgcaccactgtttat

SEQ ID NO: 3887868 - DNA, 25 bp, Homo sapien
ccattctaccgcaccactgtttatg

SEQ ID NO: 3887869 - DNA, 25 bp, Homo sapien
tggccattctaccgcaccactgttt

SEQ ID NO: 3887870 - DNA, 25 bp, Homo sapien
tgcagagggagaaggtaccacgtca

SEQ ID NO: 3887871 - DNA, 25 bp, Homo sapien
attctcagatccttcgaggtactgg

SEQ ID NO: 3887872 - DNA, 25 bp, Homo sapien
gatacacaactttgatctcaaagct

SEQ ID NO: 3887873 - DNA, 25 bp, Homo sapien
gactttacctcgatacacctcagat

SEQ ID NO: 3887874 - DNA, 25 bp, Homo sapien
tggaggcagctggtgttggatgaac

SEQ ID NO: 3887875 - DNA, 25 bp, Homo sapien
ggtggaggcagctggtgttggatga

SEQ ID NO: 3887876 - DNA, 25 bp, Homo sapien
gtggaggcagctggtgttggatgaa

SEQ ID NO: 3887877 - DNA, 25 bp, Homo sapien
ctggatttggtacaaccaaagagag

SEQ ID NO: 3887878 - DNA, 25 bp, Homo sapien
agttgccacagcactgcagtctggc

SEQ ID NO: 3887879 - DNA, 25 bp, Homo sapien
gaatacagcaataacgattggtcgt

SEQ ID NO: 3887880 - DNA, 25 bp, Homo sapien
tcgtcttggttacgtgtgtcttcaa

SEQ ID NO: 3887881 - DNA, 25 bp, Homo sapien
gtgtgtcttcaagaggtggccccca

SEQ ID NO: 3887882 - DNA, 25 bp, Homo sapien
gcagtatgaagaccctggtgcacct

SEQ ID NO: 3887883 - DNA, 25 bp, Homo sapien
tcagcattccgtggaatttgtacca

SEQ ID NO: 3887884 - DNA, 25 bp, Homo sapien
gcattccgtggaatttgtaccatga

SEQ ID NO: 3887885 - DNA, 25 bp, Homo sapien
aaaggattcagcattccgtggaatt

SEQ ID NO: 3887886 - DNA, 25 bp, Homo sapien
tccgtggaatttgtaccatgatcat

SEQ ID NO: 3887887 - DNA, 25 bp, Homo sapien
ttaagctgcagtcccaaaattaggg

SEQ ID NO: 3887888 - DNA, 25 bp, Homo sapien
tcccttaaaaagagcgtcttgcagc

SEQ ID NO: 3887889 - DNA, 25 bp, Homo sapien
tgaatcccagtagtgtaatccaaga

SEQ ID NO: 3887890 - DNA, 25 bp, Homo sapien
tcttggagactatgagggagcctct

SEQ ID NO: 3887891 - DNA, 25 bp, Homo sapien
ctgtgcaaaatctttgcctctgtgc

SEQ ID NO: 3887892 - DNA, 25 bp, Homo sapien
gtgcaaaatctttgcctctgtgctg

SEQ ID NO: 3887893 - DNA, 25 bp, Homo sapien
tgtcagtgtgatgtgctttctgcat

SEQ ID NO: 3887894 - DNA, 25 bp, Homo sapien
gtgctgtcagtgtgatgtgctttct

SEQ ID NO: 3887895 - DNA, 25 bp, Homo sapien
cagacttcttaatcttaatggagcc

SEQ ID NO: 3887896 - DNA, 25 bp, Homo sapien
gaggtatatacttgagctactcgac

SEQ ID NO: 3887897 - DNA, 25 bp, Homo sapien
tactcgactgtagccaatttgatat

SEQ ID NO: 3887898 - DNA, 25 bp, Homo sapien
tgcacctcttgaaaatggtaagttg

SEQ ID NO: 3887899 - DNA, 25 bp, Homo sapien
gaactgggataccttgaagttcacc

SEQ ID NO: 3887900 - DNA, 25 bp, Homo sapien
cacattgggtttttgaactgggata

SEQ ID NO: 3887901 - DNA, 25 bp, Homo sapien
tctggttgtgatcagcacattgggt

SEQ ID NO: 3887902 - DNA, 25 bp, Homo sapien
tctttagtttgccacaagccaccat

SEQ ID NO: 3887903 - DNA, 25 bp, Homo sapien
gatgagatgacccttcggcacatgg

SEQ ID NO: 3887904 - DNA, 25 bp, Homo sapien
ctgaaacgtctcctgcatcaggtga

SEQ ID NO: 3887905 - DNA, 25 bp, Homo sapien
tgattgcgccttttgtggaaacaca

SEQ ID NO: 3887906 - DNA, 25 bp, Homo sapien
tgaaagctatggagggatgcccttt

SEQ ID NO: 3887907 - DNA, 25 bp, Homo sapien
aatagctcttacttcaggactgttg

SEQ ID NO: 3887908 - DNA, 25 bp, Homo sapien
catagtaacatgaaagtcaagggtt

SEQ ID NO: 3887909 - DNA, 25 bp, Homo sapien
tattctgtccataccaaggatcatg

SEQ ID NO: 3887910 - DNA, 25 bp, Homo sapien
caggcaaattttcctacttgtacga

SEQ ID NO: 3887911 - DNA, 25 bp, Homo sapien
ttcagtatcataggagggtttctct

SEQ ID NO: 3887912 - DNA, 25 bp, Homo sapien
ttggttcatatcattatctccttct

SEQ ID NO: 3887913 - DNA, 25 bp, Homo sapien
gaatattcatcaatccctcactagc

SEQ ID NO: 3887914 - DNA, 25 bp, Homo sapien
caggctctattaatggtttggttca

SEQ ID NO: 3887915 - DNA, 25 bp, Homo sapien
cagttaaggtaatgtagattttcac

SEQ ID NO: 3887916 - DNA, 25 bp, Homo sapien
tgatgaactccagttaaggtaatgt

SEQ ID NO: 3887917 - DNA, 25 bp, Homo sapien
tccagttaaggtaatgtagattttc

SEQ ID NO: 3887918 - DNA, 25 bp, Homo sapien
gaactccagttaaggtaatgtagat

SEQ ID NO: 3887919 - DNA, 25 bp, Homo sapien
gattttttcacctgtaagggcatca

SEQ ID NO: 3887920 - DNA, 25 bp, Homo sapien
attttttcacctgtaagggcatcac

SEQ ID NO: 3887921 - DNA, 25 bp, Homo sapien
agatgtttctgtagctcttccaaag

SEQ ID NO: 3887922 - DNA, 25 bp, Homo sapien
ctagatgtttctgtagctcttccaa

SEQ ID NO: 3887923 - DNA, 25 bp, Homo sapien
gatgtttctgtagctcttccaaagc

SEQ ID NO: 3887924 - DNA, 25 bp, Homo sapien
tagatgtttctgtagctcttccaaa

SEQ ID NO: 3887925 - DNA, 25 bp, Homo sapien
ctagatcgggctgggtcaggccaaa

SEQ ID NO: 3887926 - DNA, 25 bp, Homo sapien
tcgggctgggtcaggccaaagaccc

SEQ ID NO: 3887927 - DNA, 25 bp, Homo sapien
atcgggctgggtcaggccaaagacc

SEQ ID NO: 3887928 - DNA, 25 bp, Homo sapien
agatcgggctgggtcaggccaaaga

SEQ ID NO: 3887929 - DNA, 25 bp, Homo sapien
cctcaaatcaaacacagacccccac

SEQ ID NO: 3887930 - DNA, 25 bp, Homo sapien
ccacacaggggagagaacaggaaac

SEQ ID NO: 3887931 - DNA, 25 bp, Homo sapien
agccacacaggggagagaacaggaa

SEQ ID NO: 3887932 - DNA, 25 bp, Homo sapien
cacaggggagagaacaggaaacgcc

SEQ ID NO: 3887933 - DNA, 25 bp, Homo sapien
catcctactctcagtataatacatt

SEQ ID NO: 3887934 - DNA, 25 bp, Homo sapien
tcatcctactctcagtataatacat

SEQ ID NO: 3887935 - DNA, 25 bp, Homo sapien
tttcatcctactctcagtataatac

SEQ ID NO: 3887936 - DNA, 25 bp, Homo sapien
cctactctcagtataatacattaag

SEQ ID NO: 3887937 - DNA, 25 bp, Homo sapien
ttttacacaattggtatctttactc

SEQ ID NO: 3887938 - DNA, 25 bp, Homo sapien
tacacaattggtatctttactcttt

SEQ ID NO: 3887939 - DNA, 25 bp, Homo sapien
cacaattggtatctttactcttttc

SEQ ID NO: 3887940 - DNA, 25 bp, Homo sapien
aattggtatctttactcttttccag

SEQ ID NO: 3887941 - DNA, 25 bp, Homo sapien
tagatttatatctttagtccagtcc

SEQ ID NO: 3887942 - DNA, 25 bp, Homo sapien
gttagatttatatctttagtccagt

SEQ ID NO: 3887943 - DNA, 25 bp, Homo sapien
gatttatatctttagtccagtcctc

SEQ ID NO: 3887944 - DNA, 25 bp, Homo sapien
tttatatctttagtccagtcctctt

SEQ ID NO: 3887945 - DNA, 25 bp, Homo sapien
gcttatcctttggaactccactgta

SEQ ID NO: 3887946 - DNA, 25 bp, Homo sapien
ttgtgcttatcctttggaactccac

SEQ ID NO: 3887947 - DNA, 25 bp, Homo sapien
tatcctttggaactccactgtagtc

SEQ ID NO: 3887948 - DNA, 25 bp, Homo sapien
tttggaactccactgtagtccctca

SEQ ID NO: 3887949 - DNA, 25 bp, Homo sapien
ctcgctctgtcgtgatcctggctca

SEQ ID NO: 3887950 - DNA, 25 bp, Homo sapien
ccgcacccagccctaatttctatat

SEQ ID NO: 3887951 - DNA, 25 bp, Homo sapien
gtctcgctctgtcgtgatcctggct

SEQ ID NO: 3887952 - DNA, 25 bp, Homo sapien
caccgcacccagccctaatttctat

SEQ ID NO: 3887953 - DNA, 25 bp, Homo sapien
tttcaggcatataggctactgttca

SEQ ID NO: 3887954 - DNA, 25 bp, Homo sapien
aggagtttattggtacaggtgcaga

SEQ ID NO: 3887955 - DNA, 25 bp, Homo sapien
tagactgtttctaataactgagacc

SEQ ID NO: 3887956 - DNA, 25 bp, Homo sapien
caggtgcagatgattttaaggcatt

SEQ ID NO: 3887957 - DNA, 25 bp, Homo sapien
tttgaaatcaccgaacaggcttgca

SEQ ID NO: 3887958 - DNA, 25 bp, Homo sapien
tctgagcagagttgtcatactggtt

SEQ ID NO: 3887959 - DNA, 25 bp, Homo sapien
ttaagatcaataaggctgcagcacc

SEQ ID NO: 3887960 - DNA, 25 bp, Homo sapien
taattatagctgtactacccgatgt

SEQ ID NO: 3887961 - DNA, 25 bp, Homo sapien
caacaatggcactaaagatgttgta

SEQ ID NO: 3887962 - DNA, 25 bp, Homo sapien
atggcactaaagatgttgtaggtgc

SEQ ID NO: 3887963 - DNA, 25 bp, Homo sapien
acaatggcactaaagatgttgtagg

SEQ ID NO: 3887964 - DNA, 25 bp, Homo sapien
caatggcactaaagatgttgtaggt

SEQ ID NO: 3887965 - DNA, 25 bp, Homo sapien
tggctagctcatggtggtcacgccc

SEQ ID NO: 3887966 - DNA, 25 bp, Homo sapien
ctcctgtagcgtgcaaaggacacag

SEQ ID NO: 3887967 - DNA, 25 bp, Homo sapien
tgccctttggtaagtctgaattttg

SEQ ID NO: 3887968 - DNA, 25 bp, Homo sapien
ggtggtcgaattcaaaagcctcctg

SEQ ID NO: 3887969 - DNA, 25 bp, Homo sapien
ggcatggccacacgagtgcgcccgg

SEQ ID NO: 3887970 - DNA, 25 bp, Homo sapien
ttcccaggcatggccacacgagtgc

SEQ ID NO: 3887971 - DNA, 25 bp, Homo sapien
atggccacacgagtgcgcccggctc

SEQ ID NO: 3887972 - DNA, 25 bp, Homo sapien
caggcatggccacacgagtgcgccc

SEQ ID NO: 3887973 - DNA, 25 bp, Homo sapien
ccagtgctgcagaagtgatgaagat

SEQ ID NO: 3887974 - DNA, 25 bp, Homo sapien
tatggtgaggggtggaaacggcgcc

SEQ ID NO: 3887975 - DNA, 25 bp, Homo sapien
ctacagcctatggtgaggggtggaa

SEQ ID NO: 3887976 - DNA, 25 bp, Homo sapien
cagaagtgatgaagattcccgcgac

SEQ ID NO: 3887977 - DNA, 25 bp, Homo sapien
gttcccggtgcttccgtgcaacacg

SEQ ID NO: 3887978 - DNA, 25 bp, Homo sapien
gaagcaaggattcccgagcctcggt

SEQ ID NO: 3887979 - DNA, 25 bp, Homo sapien
gatccagatgacaacgaagtgctct

SEQ ID NO: 3887980 - DNA, 25 bp, Homo sapien
gaaaatttgccgtgggaagcaagga

SEQ ID NO: 3887981 - DNA, 25 bp, Homo sapien
gacagagcgcggaatctctgctgcc

SEQ ID NO: 3887982 - DNA, 25 bp, Homo sapien
cattggccgacagagcgcggaatct

SEQ ID NO: 3887983 - DNA, 25 bp, Homo sapien
cgaatttcctgtctttagttgggca

SEQ ID NO: 3887984 - DNA, 25 bp, Homo sapien
ttagttgggcattggccgacagagc

SEQ ID NO: 3887985 - DNA, 25 bp, Homo sapien
gatggatctgcctgggaactcggca

SEQ ID NO: 3887986 - DNA, 25 bp, Homo sapien
actggaaaagggagaaatgaagaag

SEQ ID NO: 3887987 - DNA, 25 bp, Homo sapien
caggcctgtttaggagatggatctg

SEQ ID NO: 3887988 - DNA, 25 bp, Homo sapien
ttatccatcagtagtacatccctgc

SEQ ID NO: 3887989 - DNA, 25 bp, Homo sapien
tgagcagatagacagcagtgacagc

SEQ ID NO: 3887990 - DNA, 25 bp, Homo sapien
ctgagcagatagacagcagtgacag

SEQ ID NO: 3887991 - DNA, 25 bp, Homo sapien
tattctgctaactgtaagtccccgg

SEQ ID NO: 3887992 - DNA, 25 bp, Homo sapien
tgagactcggccatgtacacatacc

SEQ ID NO: 3887993 - DNA, 25 bp, Homo sapien
tgggtaccttggagtccatattctg

SEQ ID NO: 3887994 - DNA, 25 bp, Homo sapien
aagtccccggcatttagcaagtcct

SEQ ID NO: 3887995 - DNA, 25 bp, Homo sapien
ggacctgctggtgctgagcataaga

SEQ ID NO: 3887996 - DNA, 25 bp, Homo sapien
cctgctggtgctgagcataagaggt

SEQ ID NO: 3887997 - DNA, 25 bp, Homo sapien
gacctgctggtgctgagcataagag

SEQ ID NO: 3887998 - DNA, 25 bp, Homo sapien
acctgctggtgctgagcataagagg

SEQ ID NO: 3887999 - DNA, 25 bp, Homo sapien
ctcttatgctcagcaccagcaggtc

SEQ ID NO: 3888000 - DNA, 25 bp, Homo sapien
acctcttatgctcagcaccagcagg

SEQ ID NO: 3888001 - DNA, 25 bp, Homo sapien
cctcttatgctcagcaccagcaggt

SEQ ID NO: 3888002 - DNA, 25 bp, Homo sapien
tcttatgctcagcaccagcaggtcc

SEQ ID NO: 3888003 - DNA, 25 bp, Homo sapien
atgatttccatcatcttcttccgga

SEQ ID NO: 3888004 - DNA, 25 bp, Homo sapien
atttccatcatcttcttccggattt

SEQ ID NO: 3888005 - DNA, 25 bp, Homo sapien
tttccatcatcttcttccggatttg

SEQ ID NO: 3888006 - DNA, 25 bp, Homo sapien
tgatttccatcatcttcttccggat

SEQ ID NO: 3888007 - DNA, 25 bp, Homo sapien
gatttccatcatcttcttccggatt

SEQ ID NO: 3888008 - DNA, 25 bp, Homo sapien
ttccatcatcttcttccggatttgg

SEQ ID NO: 3888009 - DNA, 25 bp, Homo sapien
tccggaagaagatgatggaaatcat

SEQ ID NO: 3888010 - DNA, 25 bp, Homo sapien
aaatccggaagaagatgatggaaat

SEQ ID NO: 3888011 - DNA, 25 bp, Homo sapien
ccaaatccggaagaagatgatggaa

SEQ ID NO: 3888012 - DNA, 25 bp, Homo sapien
atccggaagaagatgatggaaatca

SEQ ID NO: 3888013 - DNA, 25 bp, Homo sapien
caaatccggaagaagatgatggaaa

SEQ ID NO: 3888014 - DNA, 25 bp, Homo sapien
aatccggaagaagatgatggaaatc

SEQ ID NO: 3888015 - DNA, 25 bp, Homo sapien
cgtcttttccaatgctgtctggaat

SEQ ID NO: 3888016 - DNA, 25 bp, Homo sapien
tggcaagccttttctacgtcttttc

SEQ ID NO: 3888017 - DNA, 25 bp, Homo sapien
tctacgtcttttccaatgctgtctg

SEQ ID NO: 3888018 - DNA, 25 bp, Homo sapien
tacgtcttttccaatgctgtctgga

SEQ ID NO: 3888019 - DNA, 25 bp, Homo sapien
aagtcatttgtctgcacctctcggg

SEQ ID NO: 3888020 - DNA, 25 bp, Homo sapien
tgctgtctggaatcaatttattgac

SEQ ID NO: 3888021 - DNA, 25 bp, Homo sapien
cagcattggaaaagacgtagaaaag

SEQ ID NO: 3888022 - DNA, 25 bp, Homo sapien
cagacagcattggaaaagacgtaga

SEQ ID NO: 3888023 - DNA, 25 bp, Homo sapien
gacccgagaggtgcagacaaatgac

SEQ ID NO: 3888024 - DNA, 25 bp, Homo sapien
ttccagacagcattggaaaagacgt

SEQ ID NO: 3888025 - DNA, 25 bp, Homo sapien
gtcaataaattgattccagacagca

SEQ ID NO: 3888026 - DNA, 25 bp, Homo sapien
gaaaagacgtagaaaaggcttgcca

SEQ ID NO: 3888027 - DNA, 25 bp, Homo sapien
gattacaggtaagataattgtcaga

SEQ ID NO: 3888028 - DNA, 25 bp, Homo sapien
cacaattacaatcctattgattaca

SEQ ID NO: 3888029 - DNA, 25 bp, Homo sapien
cccgttgtgccctcagacaatagat

SEQ ID NO: 3888030 - DNA, 25 bp, Homo sapien
ggtttaaatccagatccttgtctct

SEQ ID NO: 3888031 - DNA, 25 bp, Homo sapien
tgggaaatgcattactgatggcaac

SEQ ID NO: 3888032 - DNA, 25 bp, Homo sapien
tggccgtcttctctgtaggaggcag

SEQ ID NO: 3888033 - DNA, 25 bp, Homo sapien
tggcaacaaagccaggctcctcagg

SEQ ID NO: 3888034 - DNA, 25 bp, Homo sapien
tcagtatgatagctgatgtccagga

SEQ ID NO: 3888035 - DNA, 25 bp, Homo sapien
caggctgggtccgggctgccgagtg

SEQ ID NO: 3888036 - DNA, 25 bp, Homo sapien
tgggtccgggctgccgagtgggttc

SEQ ID NO: 3888037 - DNA, 25 bp, Homo sapien
ggcaggctgggtccgggctgccgag

SEQ ID NO: 3888038 - DNA, 25 bp, Homo sapien
ggctgggtccgggctgccgagtggg

SEQ ID NO: 3888039 - DNA, 25 bp, Homo sapien
ttggctgtaggcgttgctccaccag

SEQ ID NO: 3888040 - DNA, 25 bp, Homo sapien
ctgtaggcgttgctccaccagactg

SEQ ID NO: 3888041 - DNA, 25 bp, Homo sapien
gtaggcgttgctccaccagactgct

SEQ ID NO: 3888042 - DNA, 25 bp, Homo sapien
tggctgtaggcgttgctccaccaga

SEQ ID NO: 3888043 - DNA, 25 bp, Homo sapien
tcagagggccagtagtgcaagaatg

SEQ ID NO: 3888044 - DNA, 25 bp, Homo sapien
tgatgctaggcatgtctgaagaagg

SEQ ID NO: 3888045 - DNA, 25 bp, Homo sapien
gatgctaggcatgtctgaagaagga

SEQ ID NO: 3888046 - DNA, 25 bp, Homo sapien
cagtagtgcaagaatgatgctaggc

SEQ ID NO: 3888047 - DNA, 25 bp, Homo sapien
gctgaggggcactcagcagttggtt

SEQ ID NO: 3888048 - DNA, 25 bp, Homo sapien
tgaggggcactcagcagttggttcc

SEQ ID NO: 3888049 - DNA, 25 bp, Homo sapien
catagatgtatggaattgaggagct

SEQ ID NO: 3888050 - DNA, 25 bp, Homo sapien
tggtgggctttgaatcatagatgta

SEQ ID NO: 3888051 - DNA, 25 bp, Homo sapien
tcatagatgtatggaattgaggagc

SEQ ID NO: 3888052 - DNA, 25 bp, Homo sapien
ggaatctgtggtgggctttgaatca

SEQ ID NO: 3888053 - DNA, 25 bp, Homo sapien
tggtagcttttgggtctactgttgg

SEQ ID NO: 3888054 - DNA, 25 bp, Homo sapien
tttgtggtagcttttgggtctactg

SEQ ID NO: 3888055 - DNA, 25 bp, Homo sapien
tgtggtagcttttgggtctactgtt

SEQ ID NO: 3888056 - DNA, 25 bp, Homo sapien
ggtctactgttggaccaagaatggg

SEQ ID NO: 3888057 - DNA, 25 bp, Homo sapien
tttggcaagtgggttgaagtccaga

SEQ ID NO: 3888058 - DNA, 25 bp, Homo sapien
tttgatgctctacttggttttggca

SEQ ID NO: 3888059 - DNA, 25 bp, Homo sapien
ctcttcaccaaggtaggtgtcacag

SEQ ID NO: 3888060 - DNA, 25 bp, Homo sapien
ccaaggtaggtgtcacaggtgctct

SEQ ID NO: 3888061 - DNA, 25 bp, Homo sapien
cactgccttggaagatgggcttgtg

SEQ ID NO: 3888062 - DNA, 25 bp, Homo sapien
ccttggaagatgggcttgtgtgcca

SEQ ID NO: 3888063 - DNA, 25 bp, Homo sapien
ttggaagatgggcttgtgtgccaac

SEQ ID NO: 3888064 - DNA, 25 bp, Homo sapien
aagatgggcttgtgtgccaacggac

SEQ ID NO: 3888065 - DNA, 25 bp, Homo sapien
tgtacatgtgaattcatctctcaca

SEQ ID NO: 3888066 - DNA, 25 bp, Homo sapien
ctgcctgtttccgtcttgccacagg

SEQ ID NO: 3888067 - DNA, 25 bp, Homo sapien
tttgtacatgtgaattcatctctca

SEQ ID NO: 3888068 - DNA, 25 bp, Homo sapien
gcctgtttccgtcttgccacaggaa

SEQ ID NO: 3888069 - DNA, 25 bp, Homo sapien
gatgctcttggtccatgggtctcct

SEQ ID NO: 3888070 - DNA, 25 bp, Homo sapien
aggtgatgctcttggtccatgggtc

SEQ ID NO: 3888071 - DNA, 25 bp, Homo sapien
tgatgctcttggtccatgggtctcc

SEQ ID NO: 3888072 - DNA, 25 bp, Homo sapien
tgcagggggagatcctgatccctcc

SEQ ID NO: 3888073 - DNA, 25 bp, Homo sapien
gacaacagggtggtgcagtcctcgt

SEQ ID NO: 3888074 - DNA, 25 bp, Homo sapien
aatgaccttggtgtcttgcttctcc

SEQ ID NO: 3888075 - DNA, 25 bp, Homo sapien
cagtcctcgtggaggtgctgaatga

SEQ ID NO: 3888076 - DNA, 25 bp, Homo sapien
gacgggacaacagggtggtgcagtc

SEQ ID NO: 3888077 - DNA, 25 bp, Homo sapien
tcccgatgccaagttcccaggagtg

SEQ ID NO: 3888078 - DNA, 25 bp, Homo sapien
tttggttcccgatgccaagttccca

SEQ ID NO: 3888079 - DNA, 25 bp, Homo sapien
ggttcccgatgccaagttcccagga

SEQ ID NO: 3888080 - DNA, 25 bp, Homo sapien
gttcccgatgccaagttcccaggag

SEQ ID NO: 3888081 - DNA, 25 bp, Homo sapien
ctgggaaacccagtttgcataaatt

SEQ ID NO: 3888082 - DNA, 25 bp, Homo sapien
cctgggaaacccagtttgcataaat

SEQ ID NO: 3888083 - DNA, 25 bp, Homo sapien
gccctgggaaacccagtttgcataa

SEQ ID NO: 3888084 - DNA, 25 bp, Homo sapien
tgggaaacccagtttgcataaattc

SEQ ID NO: 3888085 - DNA, 25 bp, Homo sapien
aggcagttcagctctaagcatctta

SEQ ID NO: 3888086 - DNA, 25 bp, Homo sapien
tgccgacaaggcagttcagctctaa

SEQ ID NO: 3888087 - DNA, 25 bp, Homo sapien
tggcactgccgacaaggcagttcag

SEQ ID NO: 3888088 - DNA, 25 bp, Homo sapien
gacaaggcagttcagctctaagcat

SEQ ID NO: 3888089 - DNA, 25 bp, Homo sapien
aaaatgcaaacctttctctcttctg

SEQ ID NO: 3888090 - DNA, 25 bp, Homo sapien
gctgttggctttgcgcaaaatgcaa

SEQ ID NO: 3888091 - DNA, 25 bp, Homo sapien
tctggccaaagacctcaaatgccct

SEQ ID NO: 3888092 - DNA, 25 bp, Homo sapien
gtgtttgctcatgctgttggctttg

SEQ ID NO: 3888093 - DNA, 25 bp, Homo sapien
tggagctgcccgcagtgttgcacgc

SEQ ID NO: 3888094 - DNA, 25 bp, Homo sapien
tttaacgccagttctggagctgccc

SEQ ID NO: 3888095 - DNA, 25 bp, Homo sapien
cagtgttgcacgctgagtatttgct

SEQ ID NO: 3888096 - DNA, 25 bp, Homo sapien
gcatgcttcttatttaacgccagtt

SEQ ID NO: 3888097 - DNA, 25 bp, Homo sapien
agacagcaggagtgccggcaccttc

SEQ ID NO: 3888098 - DNA, 25 bp, Homo sapien
aatagacagcaggagtgccggcacc

SEQ ID NO: 3888099 - DNA, 25 bp, Homo sapien
agcaaggaaatagacagcaggagtg

SEQ ID NO: 3888100 - DNA, 25 bp, Homo sapien
aaggaaatagacagcaggagtgccg

SEQ ID NO: 3888101 - DNA, 25 bp, Homo sapien
gacttcatctcataggcaccagggt

SEQ ID NO: 3888102 - DNA, 25 bp, Homo sapien
tgtggccagatcgtatgtcaagggt

SEQ ID NO: 3888103 - DNA, 25 bp, Homo sapien
gacaaatagtatgaaggcccagggt

SEQ ID NO: 3888104 - DNA, 25 bp, Homo sapien
tccgctggcagtcgcatgaaagggc

SEQ ID NO: 3888105 - DNA, 25 bp, Homo sapien
gatgtcagtagcaaccacgatggga

SEQ ID NO: 3888106 - DNA, 25 bp, Homo sapien
gagctggaggcttccctgctgtttt

SEQ ID NO: 3888107 - DNA, 25 bp, Homo sapien
tgctggatcccaagggcctactttt

SEQ ID NO: 3888108 - DNA, 25 bp, Homo sapien
tagaaacatcatttatgtgtccact

SEQ ID NO: 3888109 - DNA, 25 bp, Homo sapien
ccacaggttgttggatacatttccc

SEQ ID NO: 3888110 - DNA, 25 bp, Homo sapien
caccatgggtctcttctctggttcc

SEQ ID NO: 3888111 - DNA, 25 bp, Homo sapien
ctgtcaccatgggtctcttctctgg

SEQ ID NO: 3888112 - DNA, 25 bp, Homo sapien
tcccacaggttgttggatacatttc

SEQ ID NO: 3888113 - DNA, 25 bp, Homo sapien
accttgtggtagtggcctctttcct

SEQ ID NO: 3888114 - DNA, 25 bp, Homo sapien
ctggtggttgagcaccttgtggtag

SEQ ID NO: 3888115 - DNA, 25 bp, Homo sapien
ccttgtggtagtggcctctttcctc

SEQ ID NO: 3888116 - DNA, 25 bp, Homo sapien
gttgagcaccttgtggtagtggcct

SEQ ID NO: 3888117 - DNA, 25 bp, Homo sapien
tgtaaaatagatgtgagtgcagcct

SEQ ID NO: 3888118 - DNA, 25 bp, Homo sapien
tgcagccttttctgggcagaactag

SEQ ID NO: 3888119 - DNA, 25 bp, Homo sapien
ttgtaaaatagatgtgagtgcagcc

SEQ ID NO: 3888120 - DNA, 25 bp, Homo sapien
tctgggcagaactagatgtggtccc

SEQ ID NO: 3888121 - DNA, 25 bp, Homo sapien
gttaccgtggttacagatgcagtcc

SEQ ID NO: 3888122 - DNA, 25 bp, Homo sapien
gctctccatcctcatagaaatggtg

SEQ ID NO: 3888123 - DNA, 25 bp, Homo sapien
tcctcatagaaatggtggttgtgct

SEQ ID NO: 3888124 - DNA, 25 bp, Homo sapien
ctggattttgttaccgtggttacag

SEQ ID NO: 3888125 - DNA, 25 bp, Homo sapien
ttattctggtcagatgcaatggtca

SEQ ID NO: 3888126 - DNA, 25 bp, Homo sapien
tcagcaacactgagcaaaagccgta

SEQ ID NO: 3888127 - DNA, 25 bp, Homo sapien
aacactgagcaaaagccgtagtggg

SEQ ID NO: 3888128 - DNA, 25 bp, Homo sapien
ccgtagtggggtctgtagttattct

SEQ ID NO: 3888129 - DNA, 25 bp, Homo sapien
tccctctcctcaactgctgaaaccc

SEQ ID NO: 3888130 - DNA, 25 bp, Homo sapien
tctcctcaactgctgaaaccctgac

SEQ ID NO: 3888131 - DNA, 25 bp, Homo sapien
attccaggtacagatgctccctctc

SEQ ID NO: 3888132 - DNA, 25 bp, Homo sapien
tcattccaggtacagatgctccctc

SEQ ID NO: 3888133 - DNA, 25 bp, Homo sapien
tcttttccaatgtagtagtcgtcca

SEQ ID NO: 3888134 - DNA, 25 bp, Homo sapien
ctctgacagtgctcacactaaggtg

SEQ ID NO: 3888135 - DNA, 25 bp, Homo sapien
cagtgctcacactaaggtgacccat

SEQ ID NO: 3888136 - DNA, 25 bp, Homo sapien
tccacgtagtacttgcacactttga

SEQ ID NO: 3888137 - DNA, 25 bp, Homo sapien
ttgatgcccatgtctgtataacaca

SEQ ID NO: 3888138 - DNA, 25 bp, Homo sapien
gttgatgcccatgtctgtataacac

SEQ ID NO: 3888139 - DNA, 25 bp, Homo sapien
tcatgacttaggcatatgatcttca

SEQ ID NO: 3888140 - DNA, 25 bp, Homo sapien
gatgtcatgacttaggcatatgatc

SEQ ID NO: 3888141 - DNA, 25 bp, Homo sapien
ttgatgtcatgacttaggcatatga

SEQ ID NO: 3888142 - DNA, 25 bp, Homo sapien
gacttaggcatatgatcttcactga

SEQ ID NO: 3888143 - DNA, 25 bp, Homo sapien
ccatgtaaggttgggaaaggctatc

SEQ ID NO: 3888144 - DNA, 25 bp, Homo sapien
tcagatgcccatgtaaggttgggaa

SEQ ID NO: 3888145 - DNA, 25 bp, Homo sapien
tgtaaggttgggaaaggctatcaca

SEQ ID NO: 3888146 - DNA, 25 bp, Homo sapien
tgcccatgtaaggttgggaaaggct

SEQ ID NO: 3888147 - DNA, 25 bp, Homo sapien
ttgcacaggatccaattcttcctct

SEQ ID NO: 3888148 - DNA, 25 bp, Homo sapien
agcaggccacggaagaatttgcaca

SEQ ID NO: 3888149 - DNA, 25 bp, Homo sapien
tgtcccaccctaccaatctgtaagg

SEQ ID NO: 3888150 - DNA, 25 bp, Homo sapien
cacaggatccaattcttcctctgct

SEQ ID NO: 3888151 - DNA, 25 bp, Homo sapien
tatgttgtcatgcactaacttgttg

SEQ ID NO: 3888152 - DNA, 25 bp, Homo sapien
tgttgtcatgcactaacttgttgaa

SEQ ID NO: 3888153 - DNA, 25 bp, Homo sapien
cttgctatgttgtcatgcactaact

SEQ ID NO: 3888154 - DNA, 25 bp, Homo sapien
gctatgttgtcatgcactaacttgt

SEQ ID NO: 3888155 - DNA, 25 bp, Homo sapien
gttggttttgacattcataccactc

SEQ ID NO: 3888156 - DNA, 25 bp, Homo sapien
ttggttttgacattcataccactca

SEQ ID NO: 3888157 - DNA, 25 bp, Homo sapien
tggttttgacattcataccactcat

SEQ ID NO: 3888158 - DNA, 25 bp, Homo sapien
tagacagaagatacatctgtatatg

SEQ ID NO: 3888159 - DNA, 25 bp, Homo sapien
atttgtaaagttattgtcactgttc

SEQ ID NO: 3888160 - DNA, 25 bp, Homo sapien
tgagtagacagaagatacatctgta

SEQ ID NO: 3888161 - DNA, 25 bp, Homo sapien
agtagacagaagatacatctgtata

SEQ ID NO: 3888162 - DNA, 25 bp, Homo sapien
tcttctttgataaggtgttgaatga

SEQ ID NO: 3888163 - DNA, 25 bp, Homo sapien
caataggcacagctgtacttaaaag

SEQ ID NO: 3888164 - DNA, 25 bp, Homo sapien
tcaataggcacagctgtacttaaaa

SEQ ID NO: 3888165 - DNA, 25 bp, Homo sapien
ctttgataaggtgttgaatgatggg

SEQ ID NO: 3888166 - DNA, 25 bp, Homo sapien
tttgggttgagcctcctcgcctgct

SEQ ID NO: 3888167 - DNA, 25 bp, Homo sapien
tggcagagtggactcctttgatttg

SEQ ID NO: 3888168 - DNA, 25 bp, Homo sapien
gagcctcctcgcctgctgagtgtta

SEQ ID NO: 3888169 - DNA, 25 bp, Homo sapien
cctttgatttgggttgagcctcctc

SEQ ID NO: 3888170 - DNA, 25 bp, Homo sapien
cacagaggctgaagggttgagatga

SEQ ID NO: 3888171 - DNA, 25 bp, Homo sapien
ctcagcagtcctgaatacagccggt

SEQ ID NO: 3888172 - DNA, 25 bp, Homo sapien
gtcctgaatacagccggttccacag

SEQ ID NO: 3888173 - DNA, 25 bp, Homo sapien
tacagccggttccacagaggctgaa

SEQ ID NO: 3888174 - DNA, 25 bp, Homo sapien
ggtctacatccatcaagttcccacg

SEQ ID NO: 3888175 - DNA, 25 bp, Homo sapien
tgacagcctctcacgggtctacatc

SEQ ID NO: 3888176 - DNA, 25 bp, Homo sapien
ctttgcttgtttcatcattgtgaca

SEQ ID NO: 3888177 - DNA, 25 bp, Homo sapien
caggacaattccatatcctattaca

SEQ ID NO: 3888178 - DNA, 25 bp, Homo sapien
gatgatctcaggcttagccagttct

SEQ ID NO: 3888179 - DNA, 25 bp, Homo sapien
aggcttagccagttcttcatggctc

SEQ ID NO: 3888180 - DNA, 25 bp, Homo sapien
tctggctatcttcactctgtatgtc

SEQ ID NO: 3888181 - DNA, 25 bp, Homo sapien
aaatctggctatcttcactctgtat

SEQ ID NO: 3888182 - DNA, 25 bp, Homo sapien
tttattgtcacaaattgcaggaata

SEQ ID NO: 3888183 - DNA, 25 bp, Homo sapien
ttgtcacaaattgcaggaatatagc

SEQ ID NO: 3888184 - DNA, 25 bp, Homo sapien
agcatttattgtcacaaattgcagg

SEQ ID NO: 3888185 - DNA, 25 bp, Homo sapien
catttattgtcacaaattgcaggaa

SEQ ID NO: 3888186 - DNA, 25 bp, Homo sapien
cttctccctggcatcaaatgtcttc

SEQ ID NO: 3888187 - DNA, 25 bp, Homo sapien
cctcttctccctggcatcaaatgtc

SEQ ID NO: 3888188 - DNA, 25 bp, Homo sapien
gtgaagcatggactccagcggctgc

SEQ ID NO: 3888189 - DNA, 25 bp, Homo sapien
tgtgaagcatggactccagcggctg

SEQ ID NO: 3888190 - DNA, 25 bp, Homo sapien
ttgctgtgcgattcagatctgagcc

SEQ ID NO: 3888191 - DNA, 25 bp, Homo sapien
tcagatctgagcctgcgataagggc

SEQ ID NO: 3888192 - DNA, 25 bp, Homo sapien
tgagcctgcgataagggcaatccag

SEQ ID NO: 3888193 - DNA, 25 bp, Homo sapien
tcagtggagaacgtcttgctgtgcg

SEQ ID NO: 3888194 - DNA, 25 bp, Homo sapien
tcgactccagtccagttagtttttc

SEQ ID NO: 3888195 - DNA, 25 bp, Homo sapien
ttctgcagttctgcgtgtgtgagtc

SEQ ID NO: 3888196 - DNA, 25 bp, Homo sapien
cagcacgagggcttttgtgggatga

SEQ ID NO: 3888197 - DNA, 25 bp, Homo sapien
tcaagaggtttcgactccagtccag

SEQ ID NO: 3888198 - DNA, 25 bp, Homo sapien
tctgtgactttccccttaggaaatg

SEQ ID NO: 3888199 - DNA, 25 bp, Homo sapien
ctgtgaccggcaaaacctttgttat

SEQ ID NO: 3888200 - DNA, 25 bp, Homo sapien
aaatggtttggctgaatctgatctc

SEQ ID NO: 3888201 - DNA, 25 bp, Homo sapien
ccatactcaatactgtgaccggcaa

SEQ ID NO: 3888202 - DNA, 25 bp, Homo sapien
aagtaaataccagctggtgtagaat

SEQ ID NO: 3888203 - DNA, 25 bp, Homo sapien
gtcccatgctctgttgatgcctgat

SEQ ID NO: 3888204 - DNA, 25 bp, Homo sapien
ggtgtagaatgagtggaatataatt

SEQ ID NO: 3888205 - DNA, 25 bp, Homo sapien
ttatgctcaccagagtaatatttct

SEQ ID NO: 3888206 - DNA, 25 bp, Homo sapien
tcagcaatgtggaagcaactgggac

SEQ ID NO: 3888207 - DNA, 25 bp, Homo sapien
caccttccaggaacgtatggagact

SEQ ID NO: 3888208 - DNA, 25 bp, Homo sapien
tgcttggcttcaatgcagcttacag

SEQ ID NO: 3888209 - DNA, 25 bp, Homo sapien
tacagcagggatctcagtaaagggc

SEQ ID NO: 3888210 - DNA, 25 bp, Homo sapien
ggcgatcctgaaggactcatgaccc

SEQ ID NO: 3888211 - DNA, 25 bp, Homo sapien
agcccaggagagaaatatggctgac

SEQ ID NO: 3888212 - DNA, 25 bp, Homo sapien
gaagtggtctcctaactttgagcag

SEQ ID NO: 3888213 - DNA, 25 bp, Homo sapien
gggatctaagatcttgcagagcatt

SEQ ID NO: 3888214 - DNA, 25 bp, Homo sapien
gccgtttttgagagaataaatccca

SEQ ID NO: 3888215 - DNA, 25 bp, Homo sapien
aatcccaagtagtgttgctaagagc

SEQ ID NO: 3888216 - DNA, 25 bp, Homo sapien
tggtggtgccgtttttgagagaata

SEQ ID NO: 3888217 - DNA, 25 bp, Homo sapien
taagagccagtgacatttgccatgt

SEQ ID NO: 3888218 - DNA, 25 bp, Homo sapien
ccatatatctcaggaattttgacat

SEQ ID NO: 3888219 - DNA, 25 bp, Homo sapien
gacatcacttgtgagtgttaaaagt

SEQ ID NO: 3888220 - DNA, 25 bp, Homo sapien
cacattcaatcgcagtgacattttt

SEQ ID NO: 3888221 - DNA, 25 bp, Homo sapien
aaaagtgaaagctcacattcaatcg

SEQ ID NO: 3888222 - DNA, 25 bp, Homo sapien
agttgtggcatcaaactcatccggt

SEQ ID NO: 3888223 - DNA, 25 bp, Homo sapien
tgaatcattagaggtatggctttcc

SEQ ID NO: 3888224 - DNA, 25 bp, Homo sapien
cattagaggtatggctttccagcat

SEQ ID NO: 3888225 - DNA, 25 bp, Homo sapien
tggactaagctctcagttttcaagt

SEQ ID NO: 3888226 - DNA, 25 bp, Homo sapien
ccaatttacaacatgggtgattata

SEQ ID NO: 3888227 - DNA, 25 bp, Homo sapien
ccatgactggtagctttgattcttt

SEQ ID NO: 3888228 - DNA, 25 bp, Homo sapien
tctttttccatgactggtagctttg

SEQ ID NO: 3888229 - DNA, 25 bp, Homo sapien
tagacctcagcgtattgttttgcaa

SEQ ID NO: 3888230 - DNA, 25 bp, Homo sapien
ttaacactgacaatagctgctgagc

SEQ ID NO: 3888231 - DNA, 25 bp, Homo sapien
gacaatagctgctgagctatatata

SEQ ID NO: 3888232 - DNA, 25 bp, Homo sapien
cattaacactgacaatagctgctga

SEQ ID NO: 3888233 - DNA, 25 bp, Homo sapien
atacattaacactgacaatagctgc

SEQ ID NO: 3888234 - DNA, 25 bp, Homo sapien
gtaaggatactaccctcttcacttc

SEQ ID NO: 3888235 - DNA, 25 bp, Homo sapien
aaggatactaccctcttcacttcca

SEQ ID NO: 3888236 - DNA, 25 bp, Homo sapien
aagtaaggatactaccctcttcact

SEQ ID NO: 3888237 - DNA, 25 bp, Homo sapien
acaagtaaggatactaccctcttca

SEQ ID NO: 3888238 - DNA, 25 bp, Homo sapien
gcttcccatgagagtcctgtgccat

SEQ ID NO: 3888239 - DNA, 25 bp, Homo sapien
tttctcctttgctagagatttcctt

SEQ ID NO: 3888240 - DNA, 25 bp, Homo sapien
aaggtgtgaaggaaccactgcttcc

SEQ ID NO: 3888241 - DNA, 25 bp, Homo sapien
tgcttcccatgagagtcctgtgcca

SEQ ID NO: 3888242 - DNA, 25 bp, Homo sapien
caataacagcttttgcggagtgctc

SEQ ID NO: 3888243 - DNA, 25 bp, Homo sapien
agatcaaagttcgaggtccctgagg

SEQ ID NO: 3888244 - DNA, 25 bp, Homo sapien
taccctgagggtttagtgctggcct

SEQ ID NO: 3888245 - DNA, 25 bp, Homo sapien
cacaggactcgaactctgcggatgc

SEQ ID NO: 3888246 - DNA, 25 bp, Homo sapien
gatttaggtgaatatgattgtccca

SEQ ID NO: 3888247 - DNA, 25 bp, Homo sapien
gtaaatgctcagttaaagatttagg

SEQ ID NO: 3888248 - DNA, 25 bp, Homo sapien
ggaatcatagtttgtaaatgctcag

SEQ ID NO: 3888249 - DNA, 25 bp, Homo sapien
aatgctcagttaaagatttaggtga

SEQ ID NO: 3888250 - DNA, 25 bp, Homo sapien
tacgtacaccgtttcttcagggcag

SEQ ID NO: 3888251 - DNA, 25 bp, Homo sapien
gagaacctgttagtgccatggccct

SEQ ID NO: 3888252 - DNA, 25 bp, Homo sapien
gagataatcattccaggcagacagg

SEQ ID NO: 3888253 - DNA, 25 bp, Homo sapien
catcatggcttcgaaacagtctcac

SEQ ID NO: 3888254 - DNA, 25 bp, Homo sapien
cattccccattagatgataagttca

SEQ ID NO: 3888255 - DNA, 25 bp, Homo sapien
gataagttcacatgcttagcaagca

SEQ ID NO: 3888256 - DNA, 25 bp, Homo sapien
ttctaggtttactggagagtgagtc

SEQ ID NO: 3888257 - DNA, 25 bp, Homo sapien
gatgagaagcaaggttatctaagtt

SEQ ID NO: 3888258 - DNA, 25 bp, Homo sapien
aaatggtgactatggtccacctgag

SEQ ID NO: 3888259 - DNA, 25 bp, Homo sapien
gacaactcgctgatgaggtcagaca

SEQ ID NO: 3888260 - DNA, 25 bp, Homo sapien
tccacctgaggtctagacaactcgc

SEQ ID NO: 3888261 - DNA, 25 bp, Homo sapien
catcgggtgtccagagtactgcagg

SEQ ID NO: 3888262 - DNA, 25 bp, Homo sapien
ttctggcaagctctggtggcaactc

SEQ ID NO: 3888263 - DNA, 25 bp, Homo sapien
gctctggtggcaactctctcattct

SEQ ID NO: 3888264 - DNA, 25 bp, Homo sapien
taccagagaggcatcttgggcatct

SEQ ID NO: 3888265 - DNA, 25 bp, Homo sapien
gagtcaccaaaattaaatccagaaa

SEQ ID NO: 3888266 - DNA, 25 bp, Homo sapien
catgaagggaaaccaatggcccaaa

SEQ ID NO: 3888267 - DNA, 25 bp, Homo sapien
gagcgtgacctaaatcattttctgg

SEQ ID NO: 3888268 - DNA, 25 bp, Homo sapien
cccaaagctgaactgagcagatgat

SEQ ID NO: 3888269 - DNA, 25 bp, Homo sapien
ttatccttgagcgtgacctaaatca

SEQ ID NO: 3888270 - DNA, 25 bp, Homo sapien
gcaatgcccatgctgctacgatgag

SEQ ID NO: 3888271 - DNA, 25 bp, Homo sapien
ctacagggttccacacacagcaatg

SEQ ID NO: 3888272 - DNA, 25 bp, Homo sapien
tccttgccaggcttctacgggagag

SEQ ID NO: 3888273 - DNA, 25 bp, Homo sapien
gtcgaggctccaacaagctccaatg

SEQ ID NO: 3888274 - DNA, 25 bp, Homo sapien
tggattgggcttgaacggacccaat

SEQ ID NO: 3888275 - DNA, 25 bp, Homo sapien
gggcttgaacggacccaatttgcta

SEQ ID NO: 3888276 - DNA, 25 bp, Homo sapien
ctgcaactggattgggcttgaacgg

SEQ ID NO: 3888277 - DNA, 25 bp, Homo sapien
actggattgggcttgaacggaccca

SEQ ID NO: 3888278 - DNA, 25 bp, Homo sapien
tggtctatgtcattcctagttgtca

SEQ ID NO: 3888279 - DNA, 25 bp, Homo sapien
aacacctggtctatgtcattcctag

SEQ ID NO: 3888280 - DNA, 25 bp, Homo sapien
cattcctagttgtcatcagtctttc

SEQ ID NO: 3888281 - DNA, 25 bp, Homo sapien
ctttaacacctggtctatgtcattc

SEQ ID NO: 3888282 - DNA, 25 bp, Homo sapien
gtatgtctagattactgatgagcca

SEQ ID NO: 3888283 - DNA, 25 bp, Homo sapien
caggtatgtctagattactgatgag

SEQ ID NO: 3888284 - DNA, 25 bp, Homo sapien
ccttcaggtatgtctagattactga

SEQ ID NO: 3888285 - DNA, 25 bp, Homo sapien
cttccttcaggtatgtctagattac

SEQ ID NO: 3888286 - DNA, 25 bp, Homo sapien
caggccagccacataaggtgtctgc

SEQ ID NO: 3888287 - DNA, 25 bp, Homo sapien
gttcctggtttgatgttatgttgcc

SEQ ID NO: 3888288 - DNA, 25 bp, Homo sapien
taagcgagagcaggaacggttatca

SEQ ID NO: 3888289 - DNA, 25 bp, Homo sapien
agccccagggcgctaagcgagagca

SEQ ID NO: 3888290 - DNA, 25 bp, Homo sapien
ccataccctgtggtcttactgagaa

SEQ ID NO: 3888291 - DNA, 25 bp, Homo sapien
caggtataagccaagtcgttgcctc

SEQ ID NO: 3888292 - DNA, 25 bp, Homo sapien
tactgagaaatcctgcacctgagct

SEQ ID NO: 3888293 - DNA, 25 bp, Homo sapien
ctgagctcagatgctttaaaggaac

SEQ ID NO: 3888294 - DNA, 25 bp, Homo sapien
caaaacataaggcttctgtccaaaa

SEQ ID NO: 3888295 - DNA, 25 bp, Homo sapien
tatgctgtattgacgaagggccgca

SEQ ID NO: 3888296 - DNA, 25 bp, Homo sapien
aaagttaaagacaagcacattctct

SEQ ID NO: 3888297 - DNA, 25 bp, Homo sapien
aggcttctgtccaaaatagaagtga

SEQ ID NO: 3888298 - DNA, 25 bp, Homo sapien
ccagcaagcagttggattttgtcaa

SEQ ID NO: 3888299 - DNA, 25 bp, Homo sapien
ggtccattatcagccagccaagatt

SEQ ID NO: 3888300 - DNA, 25 bp, Homo sapien
gccaagattcaaggtcactcacttt

SEQ ID NO: 3888301 - DNA, 25 bp, Homo sapien
gcagagggcccttgtcctgatgaag

SEQ ID NO: 3888302 - DNA, 25 bp, Homo sapien
cacttgccttgagcaatcaatgaat

SEQ ID NO: 3888303 - DNA, 25 bp, Homo sapien
gcacttgccttgagcaatcaatgaa

SEQ ID NO: 3888304 - DNA, 25 bp, Homo sapien
agcacttgccttgagcaatcaatga

SEQ ID NO: 3888305 - DNA, 25 bp, Homo sapien
gaaatccaagtgcagggcttgtcaa

SEQ ID NO: 3888306 - DNA, 25 bp, Homo sapien
tcaccaagtatttcactcgggagaa

SEQ ID NO: 3888307 - DNA, 25 bp, Homo sapien
ctaactctgggtgtcgtgtctggaa

SEQ ID NO: 3888308 - DNA, 25 bp, Homo sapien
tgaatcttgaagtatgccaggctct

SEQ ID NO: 3888309 - DNA, 25 bp, Homo sapien
ctggtcctttggaggtgtgagcata

SEQ ID NO: 3888310 - DNA, 25 bp, Homo sapien
cctttggaggtgtgagcatagcttg

SEQ ID NO: 3888311 - DNA, 25 bp, Homo sapien
gaggtgtgagcatagcttgtttagc

SEQ ID NO: 3888312 - DNA, 25 bp, Homo sapien
agcatagcttgtttagctttttcag

SEQ ID NO: 3888313 - DNA, 25 bp, Homo sapien
aagtgtccactcatgctctcaaggc

SEQ ID NO: 3888314 - DNA, 25 bp, Homo sapien
ggagggctgaaccagctttgtgcaa

SEQ ID NO: 3888315 - DNA, 25 bp, Homo sapien
aatcatgctgaggtgtcccttaaca

SEQ ID NO: 3888316 - DNA, 25 bp, Homo sapien
aaccaggcccactcaattcatgtag

SEQ ID NO: 3888317 - DNA, 25 bp, Homo sapien
tggagccctctcagcatggaaacat

SEQ ID NO: 3888318 - DNA, 25 bp, Homo sapien
cctggaacagattgcccaataaaag

SEQ ID NO: 3888319 - DNA, 25 bp, Homo sapien
cattgcaatgggatgagaggaaaga

SEQ ID NO: 3888320 - DNA, 25 bp, Homo sapien
tctttaatgcgcaggcaaatgaaga

SEQ ID NO: 3888321 - DNA, 25 bp, Homo sapien
agtacgagtagtgctggaatcatcc

SEQ ID NO: 3888322 - DNA, 25 bp, Homo sapien
gaggaagcagtgtgcacaaaggcac

SEQ ID NO: 3888323 - DNA, 25 bp, Homo sapien
cattgcccgataactgaagttccca

SEQ ID NO: 3888324 - DNA, 25 bp, Homo sapien
tggccaagtttgctgacaagatcag

SEQ ID NO: 3888325 - DNA, 25 bp, Homo sapien
cagaccaaatgtgcggcagtgggaa

SEQ ID NO: 3888326 - DNA, 25 bp, Homo sapien
cacagggaatcagatgacaggaggc

SEQ ID NO: 3888327 - DNA, 25 bp, Homo sapien
ggcccttgggcaaaaagctgatccc

SEQ ID NO: 3888328 - DNA, 25 bp, Homo sapien
ttagtattgtctccgtcagctgccc

SEQ ID NO: 3888329 - DNA, 25 bp, Homo sapien
cttacttgcctgcattctgtcttat

SEQ ID NO: 3888330 - DNA, 25 bp, Homo sapien
acttgcctgcattctgtcttattca

SEQ ID NO: 3888331 - DNA, 25 bp, Homo sapien
cttgcctgcattctgtcttattcat

SEQ ID NO: 3888332 - DNA, 25 bp, Homo sapien
tacttgcctgcattctgtcttattc

SEQ ID NO: 3888333 - DNA, 25 bp, Homo sapien
aaagctcccttttacacagtcatgg

SEQ ID NO: 3888334 - DNA, 25 bp, Homo sapien
tcccaaaaataaacagtcgctgagc

SEQ ID NO: 3888335 - DNA, 25 bp, Homo sapien
gattccactcacagcattaggcata

SEQ ID NO: 3888336 - DNA, 25 bp, Homo sapien
agctcctattgtttgcctggtccca

SEQ ID NO: 3888337 - DNA, 25 bp, Homo sapien
tctgcaccagaatggcaacaccagg

SEQ ID NO: 3888338 - DNA, 25 bp, Homo sapien
tcatgctcaatacagacaagactct

SEQ ID NO: 3888339 - DNA, 25 bp, Homo sapien
gagttggcatctgtatcactgtacc

SEQ ID NO: 3888340 - DNA, 25 bp, Homo sapien
caccaggatgatacgggaggctgcc

SEQ ID NO: 3888341 - DNA, 25 bp, Homo sapien
gatgaagatcaggtggcaaaatgtc

SEQ ID NO: 3888342 - DNA, 25 bp, Homo sapien
cagcaagatgaagatcaggtggcaa

SEQ ID NO: 3888343 - DNA, 25 bp, Homo sapien
caagatgaagatcaggtggcaaaat

SEQ ID NO: 3888344 - DNA, 25 bp, Homo sapien
agcagtttcttgcaggatggtcaga

SEQ ID NO: 3888345 - DNA, 25 bp, Homo sapien
ccaaatgtcctggatagggaaattc

SEQ ID NO: 3888346 - DNA, 25 bp, Homo sapien
tcagctgtcaagcaaagcggccaaa

SEQ ID NO: 3888347 - DNA, 25 bp, Homo sapien
cctggatagggaaattcataaaagt

SEQ ID NO: 3888348 - DNA, 25 bp, Homo sapien
aagcaaagcggccaaatgtcctgga

SEQ ID NO: 3888349 - DNA, 25 bp, Homo sapien
ttagccttgaacaaaagcagcagga

SEQ ID NO: 3888350 - DNA, 25 bp, Homo sapien
tgaacaaaagcagcaggaaggtatc

SEQ ID NO: 3888351 - DNA, 25 bp, Homo sapien
cttagccttgaacaaaagcagcagg

SEQ ID NO: 3888352 - DNA, 25 bp, Homo sapien
ccttgaacaaaagcagcaggaaggt

SEQ ID NO: 3888353 - DNA, 25 bp, Homo sapien
taccagctaatttcagaatttgggc

SEQ ID NO: 3888354 - DNA, 25 bp, Homo sapien
taaacaagggaagtggcaatcccag

SEQ ID NO: 3888355 - DNA, 25 bp, Homo sapien
acctagggaaatcgcacttcttggg

SEQ ID NO: 3888356 - DNA, 25 bp, Homo sapien
tagttaccattttgctgacagacaa

SEQ ID NO: 3888357 - DNA, 25 bp, Homo sapien
atcttcgccttctcacatagctcaa

SEQ ID NO: 3888358 - DNA, 25 bp, Homo sapien
ttcgccttctcacatagctcaatga

SEQ ID NO: 3888359 - DNA, 25 bp, Homo sapien
gccttctcacatagctcaatgagcg

SEQ ID NO: 3888360 - DNA, 25 bp, Homo sapien
tattttccatcttcgccttctcaca

SEQ ID NO: 3888361 - DNA, 25 bp, Homo sapien
caaccagggttatctttctcaagca

SEQ ID NO: 3888362 - DNA, 25 bp, Homo sapien
tgtctacaggttctatctcaatgcc

SEQ ID NO: 3888363 - DNA, 25 bp, Homo sapien
tgcaatgtcaatcacagcctaagtc

SEQ ID NO: 3888364 - DNA, 25 bp, Homo sapien
tcttgaatgcgatatgttactctgc

SEQ ID NO: 3888365 - DNA, 25 bp, Homo sapien
catgtaccacttcaggatttgatcc

SEQ ID NO: 3888366 - DNA, 25 bp, Homo sapien
gccataggaccaagttccagcaaag

SEQ ID NO: 3888367 - DNA, 25 bp, Homo sapien
actatgaacagtagtgacatgtacc

SEQ ID NO: 3888368 - DNA, 25 bp, Homo sapien
caggtactcctggtatgacagagac

SEQ ID NO: 3888369 - DNA, 25 bp, Homo sapien
agaagccagagtgtctcaatttctt

SEQ ID NO: 3888370 - DNA, 25 bp, Homo sapien
cctgtagggccagcatgaatgccat

SEQ ID NO: 3888371 - DNA, 25 bp, Homo sapien
tgtgcaagatacgtggtgaccagac

SEQ ID NO: 3888372 - DNA, 25 bp, Homo sapien
cctggtacggatgcagttggtgcct

SEQ ID NO: 3888373 - DNA, 25 bp, Homo sapien
aaattgctgctcacgttgtttagat

SEQ ID NO: 3888374 - DNA, 25 bp, Homo sapien
cagcctcccggttttcttagttcat

SEQ ID NO: 3888375 - DNA, 25 bp, Homo sapien
aataaaattgctgctcacgttgttt

SEQ ID NO: 3888376 - DNA, 25 bp, Homo sapien
gctcacgttgtttagatttcataga

SEQ ID NO: 3888377 - DNA, 25 bp, Homo sapien
tgagattacttagcctagccagatg

SEQ ID NO: 3888378 - DNA, 25 bp, Homo sapien
tgcaggatccttactgacatagcag

SEQ ID NO: 3888379 - DNA, 25 bp, Homo sapien
ttctctagaatacaacaagcacctt

SEQ ID NO: 3888380 - DNA, 25 bp, Homo sapien
caagcaccttctatgtgagattact

SEQ ID NO: 3888381 - DNA, 25 bp, Homo sapien
atagatgtaaaataatcccagcaca

SEQ ID NO: 3888382 - DNA, 25 bp, Homo sapien
ccataaaacacaaggggttggatgc

SEQ ID NO: 3888383 - DNA, 25 bp, Homo sapien
cagcacatacacagctcattgcttc

SEQ ID NO: 3888384 - DNA, 25 bp, Homo sapien
gacatgatggaatagatgtaaaata

SEQ ID NO: 3888385 - DNA, 25 bp, Homo sapien
tcaaactatattctggaggatgcat

SEQ ID NO: 3888386 - DNA, 25 bp, Homo sapien
gcttcttttcggctgcacttcatca

SEQ ID NO: 3888387 - DNA, 25 bp, Homo sapien
gcatagatatctccaccagctttgg

SEQ ID NO: 3888388 - DNA, 25 bp, Homo sapien
ctttggagagctagtttcgctgaag

SEQ ID NO: 3888389 - DNA, 25 bp, Homo sapien
gactcacaactcttaacggaagtgg

SEQ ID NO: 3888390 - DNA, 25 bp, Homo sapien
cagagtttcccttagcttgatgcac

SEQ ID NO: 3888391 - DNA, 25 bp, Homo sapien
gattgcacctaaacactcaccttgg

SEQ ID NO: 3888392 - DNA, 25 bp, Homo sapien
cacctctgaggtctatcaagggact

SEQ ID NO: 3888393 - DNA, 25 bp, Homo sapien
cttcggcagaaggaggatatgcctc

SEQ ID NO: 3888394 - DNA, 25 bp, Homo sapien
gcagaaggaggatatgcctcttggg

SEQ ID NO: 3888395 - DNA, 25 bp, Homo sapien
cggcagaaggaggatatgcctcttg

SEQ ID NO: 3888396 - DNA, 25 bp, Homo sapien
gaaggaggatatgcctcttggggag

SEQ ID NO: 3888397 - DNA, 25 bp, Homo sapien
cagatactcaccgactgccctgaag

SEQ ID NO: 3888398 - DNA, 25 bp, Homo sapien
taagcctgacagactgatgccctgc

SEQ ID NO: 3888399 - DNA, 25 bp, Homo sapien
tgcaggggtgcacaagcagatactc

SEQ ID NO: 3888400 - DNA, 25 bp, Homo sapien
caaatgaccctgttagcccagccta

SEQ ID NO: 3888401 - DNA, 25 bp, Homo sapien
caaggctaggagtacaaaacaaggc

SEQ ID NO: 3888402 - DNA, 25 bp, Homo sapien
gctggaggcactcaattaagtgacc

SEQ ID NO: 3888403 - DNA, 25 bp, Homo sapien
gagttatccgttagaccttgcccat

SEQ ID NO: 3888404 - DNA, 25 bp, Homo sapien
gtttcctgaaaacgaagctggaggc

SEQ ID NO: 3888405 - DNA, 25 bp, Homo sapien
gatttatgacccagagataggcctt

SEQ ID NO: 3888406 - DNA, 25 bp, Homo sapien
tatgcttctcacctaaggcgcaagg

SEQ ID NO: 3888407 - DNA, 25 bp, Homo sapien
taacagagtccgtttgcctgacacc

SEQ ID NO: 3888408 - DNA, 25 bp, Homo sapien
taattgtcagcttctctcgggccca

SEQ ID NO: 3888409 - DNA, 25 bp, Homo sapien
ctgacttcgaaaattgggaatattc

SEQ ID NO: 3888410 - DNA, 25 bp, Homo sapien
ttactgacttcgaaaattgggaata

SEQ ID NO: 3888411 - DNA, 25 bp, Homo sapien
gacttcgaaaattgggaatattcaa

SEQ ID NO: 3888412 - DNA, 25 bp, Homo sapien
gaaaaatgaaagagtctctgtgtat

SEQ ID NO: 3888413 - DNA, 25 bp, Homo sapien
agggccgagagctcaatcgacgctg

SEQ ID NO: 3888414 - DNA, 25 bp, Homo sapien
gcttgtgagcaatgtcttcatccat

SEQ ID NO: 3888415 - DNA, 25 bp, Homo sapien
cctgtgtttgcactgcatggagggc

SEQ ID NO: 3888416 - DNA, 25 bp, Homo sapien
tcccgtgtcggctccaaggtctggg

SEQ ID NO: 3888417 - DNA, 25 bp, Homo sapien
gcgccggtggacctgctccaagttc

SEQ ID NO: 3888418 - DNA, 25 bp, Homo sapien
tggacctgctccaagttcacttctt

SEQ ID NO: 3888419 - DNA, 25 bp, Homo sapien
gacctgctccaagttcacttctttg

SEQ ID NO: 3888420 - DNA, 25 bp, Homo sapien
cctgctccaagttcacttctttgtc

SEQ ID NO: 3888421 - DNA, 25 bp, Homo sapien
gaaagctcaaggaagacgtcatctc

SEQ ID NO: 3888422 - DNA, 25 bp, Homo sapien
tcaccacagtgggtgatatcacagg

SEQ ID NO: 3888423 - DNA, 25 bp, Homo sapien
ggctatctaagtgggtgatctcaca

SEQ ID NO: 3888424 - DNA, 25 bp, Homo sapien
gagccatatgagcttcccggtgagg

SEQ ID NO: 3888425 - DNA, 25 bp, Homo sapien
tcctccccataccagtgagacttca

SEQ ID NO: 3888426 - DNA, 25 bp, Homo sapien
tttccatgacaccagtgtgtcaaga

SEQ ID NO: 3888427 - DNA, 25 bp, Homo sapien
gacaccagtgtgtcaagaaattcat

SEQ ID NO: 3888428 - DNA, 25 bp, Homo sapien
tcaaatttcattacccccgtagctc

SEQ ID NO: 3888429 - DNA, 25 bp, Homo sapien
tgtccaaaccgtcactaaactaggc

SEQ ID NO: 3888430 - DNA, 25 bp, Homo sapien
aggacaagctctccctgcatgtggc

SEQ ID NO: 3888431 - DNA, 25 bp, Homo sapien
acaattaactgtgggtggtccaggc

SEQ ID NO: 3888432 - DNA, 25 bp, Homo sapien
aatgacttcccatccaaaggacaag

SEQ ID NO: 3888433 - DNA, 25 bp, Homo sapien
tctggcgctgcccacgctgtacctg

SEQ ID NO: 3888434 - DNA, 25 bp, Homo sapien
gggtagggaagggctctctggcgct

SEQ ID NO: 3888435 - DNA, 25 bp, Homo sapien
tggcgctgcccacgctgtacctgct

SEQ ID NO: 3888436 - DNA, 25 bp, Homo sapien
gtagggaagggctctctggcgctgc

SEQ ID NO: 3888437 - DNA, 25 bp, Homo sapien
actttagtggctaaggctggtactg

SEQ ID NO: 3888438 - DNA, 25 bp, Homo sapien
ttagtggctaaggctggtactgcag

SEQ ID NO: 3888439 - DNA, 25 bp, Homo sapien
tttagtggctaaggctggtactgca

SEQ ID NO: 3888440 - DNA, 25 bp, Homo sapien
agcatgaaaacatcccctacatttc

SEQ ID NO: 3888441 - DNA, 25 bp, Homo sapien
gaccccggcgaagctgtgcagcttg

SEQ ID NO: 3888442 - DNA, 25 bp, Homo sapien
atgtgcggccaccacttctgcttca

SEQ ID NO: 3888443 - DNA, 25 bp, Homo sapien
gtggcaccggttgctgttccaccac

SEQ ID NO: 3888444 - DNA, 25 bp, Homo sapien
agcttgagggatttgccgtcggcct

SEQ ID NO: 3888445 - DNA, 25 bp, Homo sapien
tgtgttggccccatgggctctctta

SEQ ID NO: 3888446 - DNA, 25 bp, Homo sapien
gtgcttccatgagcgctgccttggg

SEQ ID NO: 3888447 - DNA, 25 bp, Homo sapien
tctgttctagagagatgctcagagg

SEQ ID NO: 3888448 - DNA, 25 bp, Homo sapien
ccatttcggaaaaccaactggtgcg

SEQ ID NO: 3888449 - DNA, 25 bp, Homo sapien
cagagatcccacagagactctgagc

SEQ ID NO: 3888450 - DNA, 25 bp, Homo sapien
tcagagatcccacagagactctgag

SEQ ID NO: 3888451 - DNA, 25 bp, Homo sapien
agagatcccacagagactctgagcc

SEQ ID NO: 3888452 - DNA, 25 bp, Homo sapien
tgctgttgccgatgacagtcaccga

SEQ ID NO: 3888453 - DNA, 25 bp, Homo sapien
agggctgcgtattccaccacggcca

SEQ ID NO: 3888454 - DNA, 25 bp, Homo sapien
ggcaatcccgtaacccttgctgctg

SEQ ID NO: 3888455 - DNA, 25 bp, Homo sapien
cagtcaccgagcagtcgtcatccgt

SEQ ID NO: 3888456 - DNA, 25 bp, Homo sapien
gaaaatctaatgccaggggattgca

SEQ ID NO: 3888457 - DNA, 25 bp, Homo sapien
cagaaaatctaatgccaggggattg

SEQ ID NO: 3888458 - DNA, 25 bp, Homo sapien
agaaaatctaatgccaggggattgc

SEQ ID NO: 3888459 - DNA, 25 bp, Homo sapien
aaaatctaatgccaggggattgcaa

SEQ ID NO: 3888460 - DNA, 25 bp, Homo sapien
gctgtggggagttgaggaggataat

SEQ ID NO: 3888461 - DNA, 25 bp, Homo sapien
ggctgtggggagttgaggaggataa

SEQ ID NO: 3888462 - DNA, 25 bp, Homo sapien
tgtggggagttgaggaggataatgt

SEQ ID NO: 3888463 - DNA, 25 bp, Homo sapien
gtggctgtggggagttgaggaggat

SEQ ID NO: 3888464 - DNA, 25 bp, Homo sapien
caatgccttagcataaggctggtgg

SEQ ID NO: 3888465 - DNA, 25 bp, Homo sapien
ccaagccttgagctgtctgcagagc

SEQ ID NO: 3888466 - DNA, 25 bp, Homo sapien
ccaagcttactccaagccttgagct

SEQ ID NO: 3888467 - DNA, 25 bp, Homo sapien
gagacaaggctgtggatacagccaa

SEQ ID NO: 3888468 - DNA, 25 bp, Homo sapien
cttttgtgattacggatatcgaggc

SEQ ID NO: 3888469 - DNA, 25 bp, Homo sapien
tacggatatcgaggctcggcctcct

SEQ ID NO: 3888470 - DNA, 25 bp, Homo sapien
gattacggatatcgaggctcggcct

SEQ ID NO: 3888471 - DNA, 25 bp, Homo sapien
tgtgattacggatatcgaggctcgg

SEQ ID NO: 3888472 - DNA, 25 bp, Homo sapien
gctctccagtgaccctactgtctca

SEQ ID NO: 3888473 - DNA, 25 bp, Homo sapien
cagctctccagtgaccctactgtct

SEQ ID NO: 3888474 - DNA, 25 bp, Homo sapien
tactgtctcaggggctaagaattgt

SEQ ID NO: 3888475 - DNA, 25 bp, Homo sapien
tgtctcaggggctaagaattgtttc

SEQ ID NO: 3888476 - DNA, 25 bp, Homo sapien
tcaacgcgagttccgtttcctgctc

SEQ ID NO: 3888477 - DNA, 25 bp, Homo sapien
acgcgagttccgtttcctgctcctt

SEQ ID NO: 3888478 - DNA, 25 bp, Homo sapien
ggctcaacgcgagttccgtttcctg

SEQ ID NO: 3888479 - DNA, 25 bp, Homo sapien
gagggctcaacgcgagttccgtttc

SEQ ID NO: 3888480 - DNA, 25 bp, Homo sapien
gatcctactgtggaagactgccatc

SEQ ID NO: 3888481 - DNA, 25 bp, Homo sapien
cctgacactaagcagagattgtgtg

SEQ ID NO: 3888482 - DNA, 25 bp, Homo sapien
tctgccacaggtgtagtccctgaca

SEQ ID NO: 3888483 - DNA, 25 bp, Homo sapien
ggtgccaaagttcctgatcctactg

SEQ ID NO: 3888484 - DNA, 25 bp, Homo sapien
cctaagtgccgccaatggacaaggg

SEQ ID NO: 3888485 - DNA, 25 bp, Homo sapien
ggtagctagaacaatgatgaggtgt

SEQ ID NO: 3888486 - DNA, 25 bp, Homo sapien
cagacggtgagtggtttcctaagtg

SEQ ID NO: 3888487 - DNA, 25 bp, Homo sapien
tgaggcataagcaggcacatgtcgc

SEQ ID NO: 3888488 - DNA, 25 bp, Homo sapien
caacaatgtccttctctcttctctg

SEQ ID NO: 3888489 - DNA, 25 bp, Homo sapien
tctcttctctgctgctctggctctc

SEQ ID NO: 3888490 - DNA, 25 bp, Homo sapien
ttctctgctgctctggctctcccac

SEQ ID NO: 3888491 - DNA, 25 bp, Homo sapien
tcttctctgctgctctggctctccc

SEQ ID NO: 3888492 - DNA, 25 bp, Homo sapien
aagggctctacagctgcacgtgttg

SEQ ID NO: 3888493 - DNA, 25 bp, Homo sapien
cacgtgttggataaatgccagttcc

SEQ ID NO: 3888494 - DNA, 25 bp, Homo sapien
gagccacccgatcctcagctgtata

SEQ ID NO: 3888495 - DNA, 25 bp, Homo sapien
cagttccccagcttgtaacccaagg

SEQ ID NO: 3888496 - DNA, 25 bp, Homo sapien
gaatcccggacagtgccataagaca

SEQ ID NO: 3888497 - DNA, 25 bp, Homo sapien
tcttgctgatggtccgccagagttc

SEQ ID NO: 3888498 - DNA, 25 bp, Homo sapien
gcccttggctcggaagtactcatat

SEQ ID NO: 3888499 - DNA, 25 bp, Homo sapien
ccttctgaaggactggacacgcagt

SEQ ID NO: 3888500 - DNA, 25 bp, Homo sapien
catcacctctaatagccacaaattt

SEQ ID NO: 3888501 - DNA, 25 bp, Homo sapien
gaatcttactgctcagacccacggc

SEQ ID NO: 3888502 - DNA, 25 bp, Homo sapien
ccccatcttctttgaatcttactgc

SEQ ID NO: 3888503 - DNA, 25 bp, Homo sapien
agccacaaatttgtgcagaggaatc

SEQ ID NO: 3888504 - DNA, 25 bp, Homo sapien
cagccaggcatccagactgccaagc

SEQ ID NO: 3888505 - DNA, 25 bp, Homo sapien
tgccaagccaacagtggtagtcagt

SEQ ID NO: 3888506 - DNA, 25 bp, Homo sapien
aggcatccagactgccaagccaaca

SEQ ID NO: 3888507 - DNA, 25 bp, Homo sapien
aagccaacagtggtagtcagtggaa

SEQ ID NO: 3888508 - DNA, 25 bp, Homo sapien
tccttcatgggtttggctaaacagg

SEQ ID NO: 3888509 - DNA, 25 bp, Homo sapien
gttccttcatgggtttggctaaaca

SEQ ID NO: 3888510 - DNA, 25 bp, Homo sapien
gatgttccttcatgggtttggctaa

SEQ ID NO: 3888511 - DNA, 25 bp, Homo sapien
ttctgatgttccttcatgggtttgg

SEQ ID NO: 3888512 - DNA, 25 bp, Homo sapien
caatgccaaccggagagaggctccc

SEQ ID NO: 3888513 - DNA, 25 bp, Homo sapien
ttccaaaccatagggctcctctccc

SEQ ID NO: 3888514 - DNA, 25 bp, Homo sapien
ccttccaaaccatagggctcctctc

SEQ ID NO: 3888515 - DNA, 25 bp, Homo sapien
aggccaatgccaaccggagagaggc

SEQ ID NO: 3888516 - DNA, 25 bp, Homo sapien
ccttcggagtgggtgacactgctca

SEQ ID NO: 3888517 - DNA, 25 bp, Homo sapien
tggtaattgaagccttcggagtggg

SEQ ID NO: 3888518 - DNA, 25 bp, Homo sapien
cggagtgggtgacactgctcaggaa

SEQ ID NO: 3888519 - DNA, 25 bp, Homo sapien
gagtgggtgacactgctcaggaacc

SEQ ID NO: 3888520 - DNA, 25 bp, Homo sapien
tgtaggaggagcacacaatgagcgt

SEQ ID NO: 3888521 - DNA, 25 bp, Homo sapien
catcctggacactgtgaggaaggca

SEQ ID NO: 3888522 - DNA, 25 bp, Homo sapien
tgcccatcacgatgcgcatggccat

SEQ ID NO: 3888523 - DNA, 25 bp, Homo sapien
ccatggagttcacggaagattcgcc

SEQ ID NO: 3888524 - DNA, 25 bp, Homo sapien
ttgctgtacgaaggctccatagaca

SEQ ID NO: 3888525 - DNA, 25 bp, Homo sapien
cttgctgtacgaaggctccatagac

SEQ ID NO: 3888526 - DNA, 25 bp, Homo sapien
gctgtacgaaggctccatagacaat

SEQ ID NO: 3888527 - DNA, 25 bp, Homo sapien
tgctgtacgaaggctccatagacaa

SEQ ID NO: 3888528 - DNA, 25 bp, Homo sapien
tgttcaacacaaatatcagcacacc

SEQ ID NO: 3888529 - DNA, 25 bp, Homo sapien
gcaggcccacacagcgaaatcaaat

SEQ ID NO: 3888530 - DNA, 25 bp, Homo sapien
tccatgtaccgcttgctgaagtcca

SEQ ID NO: 3888531 - DNA, 25 bp, Homo sapien
ctcacagcctgtatcctgttcaaca

SEQ ID NO: 3888532 - DNA, 25 bp, Homo sapien
gttctcagccaccatcacgaaaggc

SEQ ID NO: 3888533 - DNA, 25 bp, Homo sapien
ccgatcatcccgttccaggaggtgt

SEQ ID NO: 3888534 - DNA, 25 bp, Homo sapien
gagaaccctttgtagcgcttgggct

SEQ ID NO: 3888535 - DNA, 25 bp, Homo sapien
ttatggagctggtgaccgtacctgc

SEQ ID NO: 3888536 - DNA, 25 bp, Homo sapien
agctgccattcaagcccttctctga

SEQ ID NO: 3888537 - DNA, 25 bp, Homo sapien
ccactttaagagtcaatccttggag

SEQ ID NO: 3888538 - DNA, 25 bp, Homo sapien
cttgcaagctgccattcaagccctt

SEQ ID NO: 3888539 - DNA, 25 bp, Homo sapien
caagacagtcaccactttaagagtc

SEQ ID NO: 3888540 - DNA, 25 bp, Homo sapien
gagtcataacagaagacatcttgtc

SEQ ID NO: 3888541 - DNA, 25 bp, Homo sapien
tcttgtcctaatgatgatgtgacca

SEQ ID NO: 3888542 - DNA, 25 bp, Homo sapien
gacatcttgtcctaatgatgatgtg

SEQ ID NO: 3888543 - DNA, 25 bp, Homo sapien
catcttgtcctaatgatgatgtgac

SEQ ID NO: 3888544 - DNA, 25 bp, Homo sapien
tgtaaatggactaaatgctccaatt

SEQ ID NO: 3888545 - DNA, 25 bp, Homo sapien
atgtaaatggactaaatgctccaat

SEQ ID NO: 3888546 - DNA, 25 bp, Homo sapien
ctggcaaattggataaagagtcaag

SEQ ID NO: 3888547 - DNA, 25 bp, Homo sapien
aaaagacacagactggcaaattgga

SEQ ID NO: 3888548 - DNA, 25 bp, Homo sapien
ataaatgtaatccagcatataaaca

SEQ ID NO: 3888549 - DNA, 25 bp, Homo sapien
caataaatgtaatccagcatataaa

SEQ ID NO: 3888550 - DNA, 25 bp, Homo sapien
ggatgccaggctggttcaatataca

SEQ ID NO: 3888551 - DNA, 25 bp, Homo sapien
tcaatatacacaaatcaataaatgt

SEQ ID NO: 3888552 - DNA, 25 bp, Homo sapien
cacagacgacgtgactgagtccagg

SEQ ID NO: 3888553 - DNA, 25 bp, Homo sapien
ggtccgagcagaacacagatgtcct

SEQ ID NO: 3888554 - DNA, 25 bp, Homo sapien
tgaaagatgccccatggcgagatgg

SEQ ID NO: 3888555 - DNA, 25 bp, Homo sapien
ccaaatccaacaggaggccaagcaa

SEQ ID NO: 3888556 - DNA, 25 bp, Homo sapien
caggcagcacgagtgctttgcagtt

SEQ ID NO: 3888557 - DNA, 25 bp, Homo sapien
ggtggatataattcccactttacag

SEQ ID NO: 3888558 - DNA, 25 bp, Homo sapien
aaaccccaaaacgatgaccacatag

SEQ ID NO: 3888559 - DNA, 25 bp, Homo sapien
cctaagaatctataaagagagtaac

SEQ ID NO: 3888560 - DNA, 25 bp, Homo sapien
gggactgtgatgccctaatgctggc

SEQ ID NO: 3888561 - DNA, 25 bp, Homo sapien
ggactgtgatgccctaatgctggct

SEQ ID NO: 3888562 - DNA, 25 bp, Homo sapien
agggactgtgatgccctaatgctgg

SEQ ID NO: 3888563 - DNA, 25 bp, Homo sapien
agcctctcttggtcctaacttgatt

SEQ ID NO: 3888564 - DNA, 25 bp, Homo sapien
taaggacatttacatggacacgttc

SEQ ID NO: 3888565 - DNA, 25 bp, Homo sapien
gctaaggacatttacatggacacgt

SEQ ID NO: 3888566 - DNA, 25 bp, Homo sapien
gacatttacatggacacgttcatgg

SEQ ID NO: 3888567 - DNA, 25 bp, Homo sapien
gagctaaggacatttacatggacac

SEQ ID NO: 3888568 - DNA, 25 bp, Homo sapien
cttcttatattgagagatgccagct

SEQ ID NO: 3888569 - DNA, 25 bp, Homo sapien
tgccttggcaacgtggaaggtccag

SEQ ID NO: 3888570 - DNA, 25 bp, Homo sapien
cagggtttttgaggcgcattgcctt

SEQ ID NO: 3888571 - DNA, 25 bp, Homo sapien
caaagcttcttatattgagagatgc

SEQ ID NO: 3888572 - DNA, 25 bp, Homo sapien
tagggattcgaactgtcctcccgaa

SEQ ID NO: 3888573 - DNA, 25 bp, Homo sapien
caaaagtctcactataggtagtgcc

SEQ ID NO: 3888574 - DNA, 25 bp, Homo sapien
cgaaactccatcaccccagtgaggc

SEQ ID NO: 3888575 - DNA, 25 bp, Homo sapien
gccaaggatttcaaactggacatag

SEQ ID NO: 3888576 - DNA, 25 bp, Homo sapien
cccaccattccatggcttagtggat

SEQ ID NO: 3888577 - DNA, 25 bp, Homo sapien
gcgttggccagcatcagaacactgt

SEQ ID NO: 3888578 - DNA, 25 bp, Homo sapien
catcagaacactgtcatacagatag

SEQ ID NO: 3888579 - DNA, 25 bp, Homo sapien
tccgtatgcagttgaggctcgccat

SEQ ID NO: 3888580 - DNA, 25 bp, Homo sapien
gtgaaaccctttccacaggtgcatt

SEQ ID NO: 3888581 - DNA, 25 bp, Homo sapien
cccgtgtacatgtccctggcctcct

SEQ ID NO: 3888582 - DNA, 25 bp, Homo sapien
cacccgtgtacatgtccctggcctc

SEQ ID NO: 3888583 - DNA, 25 bp, Homo sapien
ctgagcacccgtgtacatgtccctg

SEQ ID NO: 3888584 - DNA, 25 bp, Homo sapien
gagcacccgtgtacatgtccctggc

SEQ ID NO: 3888585 - DNA, 25 bp, Homo sapien
tgccatggaaagtggccccatcttt

SEQ ID NO: 3888586 - DNA, 25 bp, Homo sapien
gccatggaaagtggccccatctttg

SEQ ID NO: 3888587 - DNA, 25 bp, Homo sapien
aaggagactgagtgcagtttaacta

SEQ ID NO: 3888588 - DNA, 25 bp, Homo sapien
ggaccacggtcatccttccaagggc

SEQ ID NO: 3888589 - DNA, 25 bp, Homo sapien
ttccaagggcactatggaccagatc

SEQ ID NO: 3888590 - DNA, 25 bp, Homo sapien
agatgcggtggttgttcctcgtgca

SEQ ID NO: 3888591 - DNA, 25 bp, Homo sapien
cctttgcagacggaaagatttgccg

SEQ ID NO: 3888592 - DNA, 25 bp, Homo sapien
aaggaaagctgggtttctctgccat

SEQ ID NO: 3888593 - DNA, 25 bp, Homo sapien
tgacaaggaaagctgggtttctctg

SEQ ID NO: 3888594 - DNA, 25 bp, Homo sapien
attctgacaaggaaagctgggtttc

SEQ ID NO: 3888595 - DNA, 25 bp, Homo sapien
tctgacaaggaaagctgggtttctc

SEQ ID NO: 3888596 - DNA, 25 bp, Homo sapien
ctgtttcccctaatccagttttcat

SEQ ID NO: 3888597 - DNA, 25 bp, Homo sapien
tttcccctaatccagttttcatcca

SEQ ID NO: 3888598 - DNA, 25 bp, Homo sapien
tgtttcccctaatccagttttcatc

SEQ ID NO: 3888599 - DNA, 25 bp, Homo sapien
ttcccctaatccagttttcatccat

SEQ ID NO: 3888600 - DNA, 25 bp, Homo sapien
agccatggccccacttctggttgtt

SEQ ID NO: 3888601 - DNA, 25 bp, Homo sapien
ccatggccccacttctggttgttga

SEQ ID NO: 3888602 - DNA, 25 bp, Homo sapien
tgttgagacataagggggttctcca

SEQ ID NO: 3888603 - DNA, 25 bp, Homo sapien
atggccccacttctggttgttgaga

SEQ ID NO: 3888604 - DNA, 25 bp, Homo sapien
gctggattttttagatggttttctg

SEQ ID NO: 3888605 - DNA, 25 bp, Homo sapien
ttagatggttttctgaatcctaaga

SEQ ID NO: 3888606 - DNA, 25 bp, Homo sapien
ggttttctgaatcctaagaagaaga

SEQ ID NO: 3888607 - DNA, 25 bp, Homo sapien
agatggttttctgaatcctaagaag

SEQ ID NO: 3888608 - DNA, 25 bp, Homo sapien
tgtaataacagggtagaaggcacag

SEQ ID NO: 3888609 - DNA, 25 bp, Homo sapien
gaggtgtaataacagggtagaaggc

SEQ ID NO: 3888610 - DNA, 25 bp, Homo sapien
gcgaaggaggtgtaataacagggta

SEQ ID NO: 3888611 - DNA, 25 bp, Homo sapien
tggcgaaggaggtgtaataacaggg

SEQ ID NO: 3888612 - DNA, 25 bp, Homo sapien
ggccatagccatgatgaaagcttgc

SEQ ID NO: 3888613 - DNA, 25 bp, Homo sapien
aggccatagccatgatgaaagcttg

SEQ ID NO: 3888614 - DNA, 25 bp, Homo sapien
gacccagtggctgtccttggaagcc

SEQ ID NO: 3888615 - DNA, 25 bp, Homo sapien
caaagacccagtggctgtccttgga

SEQ ID NO: 3888616 - DNA, 25 bp, Homo sapien
cagtggctgtccttggaagccaggt

SEQ ID NO: 3888617 - DNA, 25 bp, Homo sapien
gctgtccttggaagccaggttggtc

SEQ ID NO: 3888618 - DNA, 25 bp, Homo sapien
tctggggctccgagtttccttcagt

SEQ ID NO: 3888619 - DNA, 25 bp, Homo sapien
ttctttaggatccatagaacaaagc

SEQ ID NO: 3888620 - DNA, 25 bp, Homo sapien
aacaaagctctttgtagctcctggg

SEQ ID NO: 3888621 - DNA, 25 bp, Homo sapien
tctttgtagctcctgggccgtagcc

SEQ ID NO: 3888622 - DNA, 25 bp, Homo sapien
gtaactctctattagtgttttgttc

SEQ ID NO: 3888623 - DNA, 25 bp, Homo sapien
cccgtaactctctattagtgttttg

SEQ ID NO: 3888624 - DNA, 25 bp, Homo sapien
ccgtaactctctattagtgttttgt

SEQ ID NO: 3888625 - DNA, 25 bp, Homo sapien
aactctctattagtgttttgttctg

SEQ ID NO: 3888626 - DNA, 25 bp, Homo sapien
cacagtgtggatcgagctgcataat

SEQ ID NO: 3888627 - DNA, 25 bp, Homo sapien
gacgtggtgtttccctcccatcttg

SEQ ID NO: 3888628 - DNA, 25 bp, Homo sapien
gctgcataatgctgtgggcatcagc

SEQ ID NO: 3888629 - DNA, 25 bp, Homo sapien
gatgacccggtcagacaagcaaagg

SEQ ID NO: 3888630 - DNA, 25 bp, Homo sapien
aaagaaggccgaaggcagctgttct

SEQ ID NO: 3888631 - DNA, 25 bp, Homo sapien
gaaggccgaaggcagctgttcttcc

SEQ ID NO: 3888632 - DNA, 25 bp, Homo sapien
aggccgaaggcagctgttcttccca

SEQ ID NO: 3888633 - DNA, 25 bp, Homo sapien
ctaaagaaggccgaaggcagctgtt

SEQ ID NO: 3888634 - DNA, 25 bp, Homo sapien
caggacaccaacaggccattctgca

SEQ ID NO: 3888635 - DNA, 25 bp, Homo sapien
gtgtctccctgctcgagagcaacag

SEQ ID NO: 3888636 - DNA, 25 bp, Homo sapien
ctgagttgtaagtgacacaggacac

SEQ ID NO: 3888637 - DNA, 25 bp, Homo sapien
caagagctgagttgtaagtgacaca

SEQ ID NO: 3888638 - DNA, 25 bp, Homo sapien
tagggaaatagatgtgggccacgta

SEQ ID NO: 3888639 - DNA, 25 bp, Homo sapien
catatggtggtgaggattggttcta

SEQ ID NO: 3888640 - DNA, 25 bp, Homo sapien
atgtgggccacgtactggctcccag

SEQ ID NO: 3888641 - DNA, 25 bp, Homo sapien
gacagctgcccctggaccatatggt

SEQ ID NO: 3888642 - DNA, 25 bp, Homo sapien
tggggaatcttggatcccagaaggt

SEQ ID NO: 3888643 - DNA, 25 bp, Homo sapien
tcttagatcccactggggaatcttg

SEQ ID NO: 3888644 - DNA, 25 bp, Homo sapien
gcccctccttgatggtcatctgttc

SEQ ID NO: 3888645 - DNA, 25 bp, Homo sapien
tctcccaagactcctaattctggct

SEQ ID NO: 3888646 - DNA, 25 bp, Homo sapien
tgctcgaggatccttgaagtccaag

SEQ ID NO: 3888647 - DNA, 25 bp, Homo sapien
cgaggatccttgaagtccaaggccc

SEQ ID NO: 3888648 - DNA, 25 bp, Homo sapien
ccatctctttgctcgaggatccttg

SEQ ID NO: 3888649 - DNA, 25 bp, Homo sapien
tctttgctcgaggatccttgaagtc

SEQ ID NO: 3888650 - DNA, 25 bp, Homo sapien
gagcccagcttttctatccgatctt

SEQ ID NO: 3888651 - DNA, 25 bp, Homo sapien
gctgtcacacaacttctttagagga

SEQ ID NO: 3888652 - DNA, 25 bp, Homo sapien
ctaagtcctgatgggaggcaacgga

SEQ ID NO: 3888653 - DNA, 25 bp, Homo sapien
ccacatggatgctgtcacacaactt

SEQ ID NO: 3888654 - DNA, 25 bp, Homo sapien
tgcagtgtgcactgtgaacaatctc

SEQ ID NO: 3888655 - DNA, 25 bp, Homo sapien
aatacaagcaaagtccaaaactgat

SEQ ID NO: 3888656 - DNA, 25 bp, Homo sapien
gaacaatctcatgactcggtccctg

SEQ ID NO: 3888657 - DNA, 25 bp, Homo sapien
cagcttcaggtgattttcaaataca

SEQ ID NO: 3888658 - DNA, 25 bp, Homo sapien
gccacctgggcactcaatttgggac

SEQ ID NO: 3888659 - DNA, 25 bp, Homo sapien
cactcaatttgggactctggctcca

SEQ ID NO: 3888660 - DNA, 25 bp, Homo sapien
tcaatttgggactctggctccacag

SEQ ID NO: 3888661 - DNA, 25 bp, Homo sapien
tgggcactcaatttgggactctggc

SEQ ID NO: 3888662 - DNA, 25 bp, Homo sapien
caggtcccagtcaacagggtcttct

SEQ ID NO: 3888663 - DNA, 25 bp, Homo sapien
agagcctggcttttaccccataagc

SEQ ID NO: 3888664 - DNA, 25 bp, Homo sapien
accaggtcccagtcaacagggtctt

SEQ ID NO: 3888665 - DNA, 25 bp, Homo sapien
cataagctgcgagtttccagattgt

SEQ ID NO: 3888666 - DNA, 25 bp, Homo sapien
tccccacgagaacagcagtgttggg

SEQ ID NO: 3888667 - DNA, 25 bp, Homo sapien
ccgaaggtgtcttatccagactgac

SEQ ID NO: 3888668 - DNA, 25 bp, Homo sapien
gggtccaccgaaggtgtcttatcca

SEQ ID NO: 3888669 - DNA, 25 bp, Homo sapien
ggtgtcttatccagactgacccagg

SEQ ID NO: 3888670 - DNA, 25 bp, Homo sapien
ctggactgcctccgggggacccctg

SEQ ID NO: 3888671 - DNA, 25 bp, Homo sapien
tggactgcctccgggggacccctga

SEQ ID NO: 3888672 - DNA, 25 bp, Homo sapien
catgtgtagtgaatcttcaaaggag

SEQ ID NO: 3888673 - DNA, 25 bp, Homo sapien
aacccatgtgtagtgaatcttcaaa

SEQ ID NO: 3888674 - DNA, 25 bp, Homo sapien
ggcagctgagtttctaacccatgtg

SEQ ID NO: 3888675 - DNA, 25 bp, Homo sapien
agtgaatcttcaaaggagggcccat

SEQ ID NO: 3888676 - DNA, 25 bp, Homo sapien
ccacttgggtcctgaggcaaacgaa

SEQ ID NO: 3888677 - DNA, 25 bp, Homo sapien
gaatggcagtacatcctaagcccag

SEQ ID NO: 3888678 - DNA, 25 bp, Homo sapien
ttagctatgcccaacaagtctcccg

SEQ ID NO: 3888679 - DNA, 25 bp, Homo sapien
ccctgaggactcacagagagaggct

SEQ ID NO: 3888680 - DNA, 25 bp, Homo sapien
tttcgaaaattcatgaatatgtgga

SEQ ID NO: 3888681 - DNA, 25 bp, Homo sapien
gacagactatgtgctatgccctaaa

SEQ ID NO: 3888682 - DNA, 25 bp, Homo sapien
ttagaccacaaacccctcaataatc

SEQ ID NO: 3888683 - DNA, 25 bp, Homo sapien
tggaacactccattcaacaagagga

SEQ ID NO: 3888684 - DNA, 25 bp, Homo sapien
gctctttgcaaaattctgccttcag

SEQ ID NO: 3888685 - DNA, 25 bp, Homo sapien
aaaattctgccttcaggactgacag

SEQ ID NO: 3888686 - DNA, 25 bp, Homo sapien
ttccctctgtgtatgctctttgcaa

SEQ ID NO: 3888687 - DNA, 25 bp, Homo sapien
ccctctgtgtatgctctttgcaaaa

SEQ ID NO: 3888688 - DNA, 25 bp, Homo sapien
ctgccgggtctgctgtgaggatccc

SEQ ID NO: 3888689 - DNA, 25 bp, Homo sapien
tgctgtgaggatcccacagtgtcag

SEQ ID NO: 3888690 - DNA, 25 bp, Homo sapien
ccgggtctgctgtgaggatcccaca

SEQ ID NO: 3888691 - DNA, 25 bp, Homo sapien
ctgtgaggatcccacagtgtcagca

SEQ ID NO: 3888692 - DNA, 25 bp, Homo sapien
actgacactgaccgctggaatcctc

SEQ ID NO: 3888693 - DNA, 25 bp, Homo sapien
tgacactgaccgctggaatcctcag

SEQ ID NO: 3888694 - DNA, 25 bp, Homo sapien
cactgacactgaccgctggaatcct

SEQ ID NO: 3888695 - DNA, 25 bp, Homo sapien
ctgacactgaccgctggaatcctca

SEQ ID NO: 3888696 - DNA, 25 bp, Homo sapien
tacagaattctgtatggcactcact

SEQ ID NO: 3888697 - DNA, 25 bp, Homo sapien
gtatggcactcactgatattgtcac

SEQ ID NO: 3888698 - DNA, 25 bp, Homo sapien
tctgccaagatcaactcaaaagacc

SEQ ID NO: 3888699 - DNA, 25 bp, Homo sapien
catgatgctggtgaatacagaattc

SEQ ID NO: 3888700 - DNA, 25 bp, Homo sapien
ggaaaaagagaacgatatggagcaa

SEQ ID NO: 3888701 - DNA, 25 bp, Homo sapien
ctgggccatgcaccgcagccttctg

SEQ ID NO: 3888702 - DNA, 25 bp, Homo sapien
gatatggagcaacagttcacatcca

SEQ ID NO: 3888703 - DNA, 25 bp, Homo sapien
gggcagtctgctcgcctctgttcca

SEQ ID NO: 3888704 - DNA, 25 bp, Homo sapien
ataggacaagatggtgcctttgatc

SEQ ID NO: 3888705 - DNA, 25 bp, Homo sapien
gcctcttataggacaagatggtgcc

SEQ ID NO: 3888706 - DNA, 25 bp, Homo sapien
cttataggacaagatggtgcctttg

SEQ ID NO: 3888707 - DNA, 25 bp, Homo sapien
cctcttataggacaagatggtgcct

SEQ ID NO: 3888708 - DNA, 25 bp, Homo sapien
tccagccattattaaggcaggtctg

SEQ ID NO: 3888709 - DNA, 25 bp, Homo sapien
gtccatttgtgttggtgctaaccac

SEQ ID NO: 3888710 - DNA, 25 bp, Homo sapien
cacctattcatccacacggagacct

SEQ ID NO: 3888711 - DNA, 25 bp, Homo sapien
tgttggtgctaaccacttcactcca

SEQ ID NO: 3888712 - DNA, 25 bp, Homo sapien
gtgaaccttcctatcttgctgccag

SEQ ID NO: 3888713 - DNA, 25 bp, Homo sapien
ccttcctatcttgctgccagcttta

SEQ ID NO: 3888714 - DNA, 25 bp, Homo sapien
ttcctatcttgctgccagctttaac

SEQ ID NO: 3888715 - DNA, 25 bp, Homo sapien
gaaccttcctatcttgctgccagct

SEQ ID NO: 3888716 - DNA, 25 bp, Homo sapien
tggaagctcagtggtccaagaagct

SEQ ID NO: 3888717 - DNA, 25 bp, Homo sapien
actggaagctcagtggtccaagaag

SEQ ID NO: 3888718 - DNA, 25 bp, Homo sapien
ggaagctcagtggtccaagaagctt

SEQ ID NO: 3888719 - DNA, 25 bp, Homo sapien
agctcagtggtccaagaagcttctg

SEQ ID NO: 3888720 - DNA, 25 bp, Homo sapien
tagcgcatagagctgatggaatccc

SEQ ID NO: 3888721 - DNA, 25 bp, Homo sapien
gccttcgccatctaatgttttcaga

SEQ ID NO: 3888722 - DNA, 25 bp, Homo sapien
gaacaactaatgaggcacgcaggat

SEQ ID NO: 3888723 - DNA, 25 bp, Homo sapien
tgttttcagatttcctagcgtgaga

SEQ ID NO: 3888724 - DNA, 25 bp, Homo sapien
cccctgtgcatagtggttccgggta

SEQ ID NO: 3888725 - DNA, 25 bp, Homo sapien
tacccggaaccactatgcacagggg

SEQ ID NO: 3888726 - DNA, 25 bp, Homo sapien
cccgcacacagcataaacagactcc

SEQ ID NO: 3888727 - DNA, 25 bp, Homo sapien
ccgcacacagcataaacagactccc

SEQ ID NO: 3888728 - DNA, 25 bp, Homo sapien
cgcacacagcataaacagactccct

SEQ ID NO: 3888729 - DNA, 25 bp, Homo sapien
tccctgttgtacccagtaccttgaa

SEQ ID NO: 3888730 - DNA, 25 bp, Homo sapien
ttattgggagatgccctttcttaga

SEQ ID NO: 3888731 - DNA, 25 bp, Homo sapien
attgggagatgccctttcttagaag

SEQ ID NO: 3888732 - DNA, 25 bp, Homo sapien
tattgggagatgccctttcttagaa

SEQ ID NO: 3888733 - DNA, 25 bp, Homo sapien
tccatcttctaagcccagcgtggtg

SEQ ID NO: 3888734 - DNA, 25 bp, Homo sapien
tctcgtagcggttgaggactggcgg

SEQ ID NO: 3888735 - DNA, 25 bp, Homo sapien
gagctccatgccatcgtttccatct

SEQ ID NO: 3888736 - DNA, 25 bp, Homo sapien
tgggagctccatgccatcgtttcca

SEQ ID NO: 3888737 - DNA, 25 bp, Homo sapien
caagtctctggtccgttctgagaaa

SEQ ID NO: 3888738 - DNA, 25 bp, Homo sapien
cacaaggaatataagttatgtcgct

SEQ ID NO: 3888739 - DNA, 25 bp, Homo sapien
agtccatcctatcttcagatccaag

SEQ ID NO: 3888740 - DNA, 25 bp, Homo sapien
tccaagtgatagtaaaagtccatcc

SEQ ID NO: 3888741 - DNA, 25 bp, Homo sapien
cccgtggcatcaaaccaggaacagg

SEQ ID NO: 3888742 - DNA, 25 bp, Homo sapien
tcttcaggacttgcaggcaggggac

SEQ ID NO: 3888743 - DNA, 25 bp, Homo sapien
ggacatcagtccgaaggtccctgct

SEQ ID NO: 3888744 - DNA, 25 bp, Homo sapien
ctgctgatcccacagcccgtggcat

SEQ ID NO: 3888745 - DNA, 25 bp, Homo sapien
aggctctcccactgccatcgggacc

SEQ ID NO: 3888746 - DNA, 25 bp, Homo sapien
ccaagagcagaacccaggctctccc

SEQ ID NO: 3888747 - DNA, 25 bp, Homo sapien
ctctcccactgccatcgggacccat

SEQ ID NO: 3888748 - DNA, 25 bp, Homo sapien
ccccaagagcagaacccaggctctc

SEQ ID NO: 3888749 - DNA, 25 bp, Homo sapien
cagggcagaatctgccactcaaggt

SEQ ID NO: 3888750 - DNA, 25 bp, Homo sapien
agggcagaatctgccactcaaggtc

SEQ ID NO: 3888751 - DNA, 25 bp, Homo sapien
ctgagtccacagcattcacattggt

SEQ ID NO: 3888752 - DNA, 25 bp, Homo sapien
cattggtttcctccatctcggtggg

SEQ ID NO: 3888753 - DNA, 25 bp, Homo sapien
ctccatctcggtgggatcataaccc

SEQ ID NO: 3888754 - DNA, 25 bp, Homo sapien
agcattcacattggtttcctccatc

SEQ ID NO: 3888755 - DNA, 25 bp, Homo sapien
gtctatgctttcctccagggacaca

SEQ ID NO: 3888756 - DNA, 25 bp, Homo sapien
tggtctatgctttcctccagggaca

SEQ ID NO: 3888757 - DNA, 25 bp, Homo sapien
cttgtggtctatgctttcctccagg

SEQ ID NO: 3888758 - DNA, 25 bp, Homo sapien
gtggtctatgctttcctccagggac

SEQ ID NO: 3888759 - DNA, 25 bp, Homo sapien
ttattgctgttgcttttgctgcttc

SEQ ID NO: 3888760 - DNA, 25 bp, Homo sapien
tgcttttgctgcttctccgaattcc

SEQ ID NO: 3888761 - DNA, 25 bp, Homo sapien
ctgttgcttttgctgcttctccgaa

SEQ ID NO: 3888762 - DNA, 25 bp, Homo sapien
gttgcttttgctgcttctccgaatt

SEQ ID NO: 3888763 - DNA, 25 bp, Homo sapien
caaagctctttaggctgattgcttg

SEQ ID NO: 3888764 - DNA, 25 bp, Homo sapien
aagctctttaggctgattgcttgct

SEQ ID NO: 3888765 - DNA, 25 bp, Homo sapien
ctttaggctgattgcttgctcctca

SEQ ID NO: 3888766 - DNA, 25 bp, Homo sapien
gctctttaggctgattgcttgctcc

SEQ ID NO: 3888767 - DNA, 25 bp, Homo sapien
tcacccctgcgaacttgctctgtga

SEQ ID NO: 3888768 - DNA, 25 bp, Homo sapien
ttcccacaccaagggcccatgcagg

SEQ ID NO: 3888769 - DNA, 25 bp, Homo sapien
tgagctcacccctgcgaacttgctc

SEQ ID NO: 3888770 - DNA, 25 bp, Homo sapien
cctgcgaacttgctctgtgaggcac

SEQ ID NO: 3888771 - DNA, 25 bp, Homo sapien
cactgctcacagcatactttggtga

SEQ ID NO: 3888772 - DNA, 25 bp, Homo sapien
caggctccatgactcgaactgtgga

SEQ ID NO: 3888773 - DNA, 25 bp, Homo sapien
ttcacacttgtctcctacagcagct

SEQ ID NO: 3888774 - DNA, 25 bp, Homo sapien
gatagtgcagatatgtgagtaatgc

SEQ ID NO: 3888775 - DNA, 25 bp, Homo sapien
cctatgtacggtagagacagtggca

SEQ ID NO: 3888776 - DNA, 25 bp, Homo sapien
tcaaaatgcccatggacactgagag

SEQ ID NO: 3888777 - DNA, 25 bp, Homo sapien
taggaggctcccaattggtacttgc

SEQ ID NO: 3888778 - DNA, 25 bp, Homo sapien
gagaggccttagtggatgacagccc

SEQ ID NO: 3888779 - DNA, 25 bp, Homo sapien
attccatggcctgtacccttggcag

SEQ ID NO: 3888780 - DNA, 25 bp, Homo sapien
caaggcagaacaggcccccctggag

SEQ ID NO: 3888781 - DNA, 25 bp, Homo sapien
tggaggaagggacattccatggcct

SEQ ID NO: 3888782 - DNA, 25 bp, Homo sapien
tcaaggcagaacaggcccccctgga

SEQ ID NO: 3888783 - DNA, 25 bp, Homo sapien
ttaggccatgcgtaagacgactgtg

SEQ ID NO: 3888784 - DNA, 25 bp, Homo sapien
cgtaagacgactgtgccctgcagcc

SEQ ID NO: 3888785 - DNA, 25 bp, Homo sapien
gccatgcgtaagacgactgtgccct

SEQ ID NO: 3888786 - DNA, 25 bp, Homo sapien
tgcgtaagacgactgtgccctgcag

SEQ ID NO: 3888787 - DNA, 25 bp, Homo sapien
tgggcaccaggcccctgaggcctca

SEQ ID NO: 3888788 - DNA, 25 bp, Homo sapien
caccaggcccctgaggcctcaggcc

SEQ ID NO: 3888789 - DNA, 25 bp, Homo sapien
gaggcctcaggcccccatgacctac

SEQ ID NO: 3888790 - DNA, 25 bp, Homo sapien
ctgaaccatcttctgcagagccctg

SEQ ID NO: 3888791 - DNA, 25 bp, Homo sapien
gctggtgaatacgtggctaatgttc

SEQ ID NO: 3888792 - DNA, 25 bp, Homo sapien
aagcgtgtcccggtagcgattcagc

SEQ ID NO: 3888793 - DNA, 25 bp, Homo sapien
cagaaagctttgaagcccacggata

SEQ ID NO: 3888794 - DNA, 25 bp, Homo sapien
ccgcgaggcctggtccagaaagctt

SEQ ID NO: 3888795 - DNA, 25 bp, Homo sapien
ttcctgggactctgaagaaccacac

SEQ ID NO: 3888796 - DNA, 25 bp, Homo sapien
gggactctgaagaaccacacttcct

SEQ ID NO: 3888797 - DNA, 25 bp, Homo sapien
aggagcctgcacctgggagtacggg

SEQ ID NO: 3888798 - DNA, 25 bp, Homo sapien
cctgggactctgaagaaccacactt

SEQ ID NO: 3888799 - DNA, 25 bp, Homo sapien
agctttctgacacctggccctgctt

SEQ ID NO: 3888800 - DNA, 25 bp, Homo sapien
cagctttctgacacctggccctgct

SEQ ID NO: 3888801 - DNA, 25 bp, Homo sapien
gacacctggccctgcttgcccggta

SEQ ID NO: 3888802 - DNA, 25 bp, Homo sapien
acctggccctgcttgcccggtacat

SEQ ID NO: 3888803 - DNA, 25 bp, Homo sapien
tgatgccattttttcaggatgagga

SEQ ID NO: 3888804 - DNA, 25 bp, Homo sapien
ggttttcagagtcctgctgctttga

SEQ ID NO: 3888805 - DNA, 25 bp, Homo sapien
tatttggtaatgattttagcagttc

SEQ ID NO: 3888806 - DNA, 25 bp, Homo sapien
ttagcagttcttcctctatgatttg

SEQ ID NO: 3888807 - DNA, 25 bp, Homo sapien
caggataaaggggagatccaattgt

SEQ ID NO: 3888808 - DNA, 25 bp, Homo sapien
gataaaggggagatccaattgtctg

SEQ ID NO: 3888809 - DNA, 25 bp, Homo sapien
aaaggggagatccaattgtctgtgg

SEQ ID NO: 3888810 - DNA, 25 bp, Homo sapien
attgtctgtgggttagcacaggttc

SEQ ID NO: 3888811 - DNA, 25 bp, Homo sapien
catagcatgattcatatcaagcatt

SEQ ID NO: 3888812 - DNA, 25 bp, Homo sapien
tttcagaaagcaaacgccggaggaa

SEQ ID NO: 3888813 - DNA, 25 bp, Homo sapien
atttcagaaagcaaacgccggagga

SEQ ID NO: 3888814 - DNA, 25 bp, Homo sapien
catttccatgcatcagaccctggga

SEQ ID NO: 3888815 - DNA, 25 bp, Homo sapien
ggtcatcagaccaaaggtgtttcca

SEQ ID NO: 3888816 - DNA, 25 bp, Homo sapien
agtgagaccatttagcccagagacc

SEQ ID NO: 3888817 - DNA, 25 bp, Homo sapien
tccctgcttgattcggagtgagacc

SEQ ID NO: 3888818 - DNA, 25 bp, Homo sapien
tagcattaccaagtgagtttagaaa

SEQ ID NO: 3888819 - DNA, 25 bp, Homo sapien
gaagtcatgttgtgttagtcctcca

SEQ ID NO: 3888820 - DNA, 25 bp, Homo sapien
tctataaactagcaatggacaattg

SEQ ID NO: 3888821 - DNA, 25 bp, Homo sapien
gaaacactgcagtatagaaacatca

SEQ ID NO: 3888822 - DNA, 25 bp, Homo sapien
tgcatttgatgccacagactcaaag

SEQ ID NO: 3888823 - DNA, 25 bp, Homo sapien
gtcagtaattatggcccagtaacct

SEQ ID NO: 3888824 - DNA, 25 bp, Homo sapien
ccctggaggagcttactgtccagag

SEQ ID NO: 3888825 - DNA, 25 bp, Homo sapien
tgctgaatcgcacaataagcatctg

SEQ ID NO: 3888826 - DNA, 25 bp, Homo sapien
catgacatcattgaggcggacgggt

SEQ ID NO: 3888827 - DNA, 25 bp, Homo sapien
catactcgctgtcgtagaacatgac

SEQ ID NO: 3888828 - DNA, 25 bp, Homo sapien
cgaagccagtgtgtaggcctcacca

SEQ ID NO: 3888829 - DNA, 25 bp, Homo sapien
gaacatgacgaacttctgccagcgc

SEQ ID NO: 3888830 - DNA, 25 bp, Homo sapien
gaagagagagaggaaggggtcagca

SEQ ID NO: 3888831 - DNA, 25 bp, Homo sapien
aagagagagaggaaggggtcagcat

SEQ ID NO: 3888832 - DNA, 25 bp, Homo sapien
agaagagagagaggaaggggtcagc

SEQ ID NO: 3888833 - DNA, 25 bp, Homo sapien
gcagctcatgcccaggactcccaag

SEQ ID NO: 3888834 - DNA, 25 bp, Homo sapien
agctcatgcccaggactcccaagag

SEQ ID NO: 3888835 - DNA, 25 bp, Homo sapien
cctggcagctcatgcccaggactcc

SEQ ID NO: 3888836 - DNA, 25 bp, Homo sapien
ccaggactcccaagagaggctgcct

SEQ ID NO: 3888837 - DNA, 25 bp, Homo sapien
cagctccagtctgctgagttctctc

SEQ ID NO: 3888838 - DNA, 25 bp, Homo sapien
gagttctctcctaaacagaaatcca

SEQ ID NO: 3888839 - DNA, 25 bp, Homo sapien
gtctgctgagttctctcctaaacag

SEQ ID NO: 3888840 - DNA, 25 bp, Homo sapien
agctccagtctgctgagttctctcc

SEQ ID NO: 3888841 - DNA, 25 bp, Homo sapien
gcacagtaggttgctctggtgctca

SEQ ID NO: 3888842 - DNA, 25 bp, Homo sapien
tctggagggcacagtaggttgctct

SEQ ID NO: 3888843 - DNA, 25 bp, Homo sapien
gatggctaggtctggagggcacagt

SEQ ID NO: 3888844 - DNA, 25 bp, Homo sapien
aaagtggctgagagcgggatggcta

SEQ ID NO: 3888845 - DNA, 25 bp, Homo sapien
gagtcccaggcatgaggatgctgcc

SEQ ID NO: 3888846 - DNA, 25 bp, Homo sapien
cattcttgaaaggtggcccacactc

SEQ ID NO: 3888847 - DNA, 25 bp, Homo sapien
gagaacacaaggagtcccaggcatg

SEQ ID NO: 3888848 - DNA, 25 bp, Homo sapien
ctcccccagtacattcttgaaaggt

SEQ ID NO: 3888849 - DNA, 25 bp, Homo sapien
taaaataagctcagccattgtcaca

SEQ ID NO: 3888850 - DNA, 25 bp, Homo sapien
aataagctcagccattgtcacacca

SEQ ID NO: 3888851 - DNA, 25 bp, Homo sapien
cagagcactggccactaaaataagc

SEQ ID NO: 3888852 - DNA, 25 bp, Homo sapien
taagctcagccattgtcacaccaac

SEQ ID NO: 3888853 - DNA, 25 bp, Homo sapien
caggataatttctcaggataaccaa

SEQ ID NO: 3888854 - DNA, 25 bp, Homo sapien
cctttgcaggagaacgggatgtcta

SEQ ID NO: 3888855 - DNA, 25 bp, Homo sapien
caaagagagtacttcagccaggcct

SEQ ID NO: 3888856 - DNA, 25 bp, Homo sapien
ttcttcacttgcaggaacccttcag

SEQ ID NO: 3888857 - DNA, 25 bp, Homo sapien
gatgatgagtgcctagtgtgtcaca

SEQ ID NO: 3888858 - DNA, 25 bp, Homo sapien
tacccagtgcaatacagatgaggac

SEQ ID NO: 3888859 - DNA, 25 bp, Homo sapien
tcatccctagaagtcaaggtctgca

SEQ ID NO: 3888860 - DNA, 25 bp, Homo sapien
gccattgaaaaacggagccaccact

SEQ ID NO: 3888861 - DNA, 25 bp, Homo sapien
ggactctaatgggaccttcaggagc

SEQ ID NO: 3888862 - DNA, 25 bp, Homo sapien
ccggtcctcatagggatgcagacag

SEQ ID NO: 3888863 - DNA, 25 bp, Homo sapien
caggagctcccggtcctcataggga

SEQ ID NO: 3888864 - DNA, 25 bp, Homo sapien
taatccctggactctaatgggacct

SEQ ID NO: 3888865 - DNA, 25 bp, Homo sapien
acacatacacatccgggcagccacc

SEQ ID NO: 3888866 - DNA, 25 bp, Homo sapien
acatacacatccgggcagccaccag

SEQ ID NO: 3888867 - DNA, 25 bp, Homo sapien
cacatacacatccgggcagccacca

SEQ ID NO: 3888868 - DNA, 25 bp, Homo sapien
cacacatacacatccgggcagccac

SEQ ID NO: 3888869 - DNA, 25 bp, Homo sapien
aacatctttgttctgcgagtgaagg

SEQ ID NO: 3888870 - DNA, 25 bp, Homo sapien
gggttgcagcacgaggcttgttctt

SEQ ID NO: 3888871 - DNA, 25 bp, Homo sapien
aatttaatgctctgttcgcgggccc

SEQ ID NO: 3888872 - DNA, 25 bp, Homo sapien
gcttgttcttcgaggcagagccgca

SEQ ID NO: 3888873 - DNA, 25 bp, Homo sapien
agagcaggaccctaaaggctgagaa

SEQ ID NO: 3888874 - DNA, 25 bp, Homo sapien
cagctctggaggcacggaagtagat

SEQ ID NO: 3888875 - DNA, 25 bp, Homo sapien
ccgtagggacttgaggagcacagca

SEQ ID NO: 3888876 - DNA, 25 bp, Homo sapien
gcagacacgtgactccaggcagttc

SEQ ID NO: 3888877 - DNA, 25 bp, Homo sapien
cccacaagtcaggatctcactggcc

SEQ ID NO: 3888878 - DNA, 25 bp, Homo sapien
cacaagtcaggatctcactggccac

SEQ ID NO: 3888879 - DNA, 25 bp, Homo sapien
ccacaagtcaggatctcactggcca

SEQ ID NO: 3888880 - DNA, 25 bp, Homo sapien
acaagtcaggatctcactggccacg

SEQ ID NO: 3888881 - DNA, 25 bp, Homo sapien
acaggtatgtgagagacaaaaggac

SEQ ID NO: 3888882 - DNA, 25 bp, Homo sapien
ggaggaagacaccaatgatgggtaa

SEQ ID NO: 3888883 - DNA, 25 bp, Homo sapien
cccagcatctaacgacattctacgg

SEQ ID NO: 3888884 - DNA, 25 bp, Homo sapien
tctacggacactcaacaggtatgtg

SEQ ID NO: 3888885 - DNA, 25 bp, Homo sapien
ggcagttcctcagctgactcaaaca

SEQ ID NO: 3888886 - DNA, 25 bp, Homo sapien
cctcagctgactcaaacacctcatc

SEQ ID NO: 3888887 - DNA, 25 bp, Homo sapien
tcagctgactcaaacacctcatcca

SEQ ID NO: 3888888 - DNA, 25 bp, Homo sapien
tgtggaggggcagttcctcagctga

SEQ ID NO: 3888889 - DNA, 25 bp, Homo sapien
tgtcgattttctgcttcaggttgca

SEQ ID NO: 3888890 - DNA, 25 bp, Homo sapien
gagtggcttgtcgattttctgcttc

SEQ ID NO: 3888891 - DNA, 25 bp, Homo sapien
agtggcttgtcgattttctgcttca

SEQ ID NO: 3888892 - DNA, 25 bp, Homo sapien
tcagagtggcttgtcgattttctgc

SEQ ID NO: 3888893 - DNA, 25 bp, Homo sapien
ttctgggcacaccctctaagatctg

SEQ ID NO: 3888894 - DNA, 25 bp, Homo sapien
tttctgggcacaccctctaagatct

SEQ ID NO: 3888895 - DNA, 25 bp, Homo sapien
tctgggcacaccctctaagatctgc

SEQ ID NO: 3888896 - DNA, 25 bp, Homo sapien
gacctctgagcaggacccagtaggc

SEQ ID NO: 3888897 - DNA, 25 bp, Homo sapien
ggacccagtaggcacctgctaagcc

SEQ ID NO: 3888898 - DNA, 25 bp, Homo sapien
cagaactatgcctctgtccactatc

SEQ ID NO: 3888899 - DNA, 25 bp, Homo sapien
tgagcaggacccagtaggcacctgc

SEQ ID NO: 3888900 - DNA, 25 bp, Homo sapien
ccaacatctaccctgactacattta

SEQ ID NO: 3888901 - DNA, 25 bp, Homo sapien
ctaccctgactacatttagaaacac

SEQ ID NO: 3888902 - DNA, 25 bp, Homo sapien
gatcagtgccccaacatctaccctg

SEQ ID NO: 3888903 - DNA, 25 bp, Homo sapien
gccatggaaaagatgactccacctg

SEQ ID NO: 3888904 - DNA, 25 bp, Homo sapien
tacttggccattgtgcctctccatc

SEQ ID NO: 3888905 - DNA, 25 bp, Homo sapien
ccagcatctgtcatggtggtcccca

SEQ ID NO: 3888906 - DNA, 25 bp, Homo sapien
tggccattgtgcctctccatcccca

SEQ ID NO: 3888907 - DNA, 25 bp, Homo sapien
gaccagcatctgtcatggtggtccc

SEQ ID NO: 3888908 - DNA, 25 bp, Homo sapien
tgctgaaagtgtggattctccatac

SEQ ID NO: 3888909 - DNA, 25 bp, Homo sapien
ctggcatccttgcaccccacttctg

SEQ ID NO: 3888910 - DNA, 25 bp, Homo sapien
tgccacatttcttgggaacacacat

SEQ ID NO: 3888911 - DNA, 25 bp, Homo sapien
gtggattctccatactgccacattt

SEQ ID NO: 3888912 - DNA, 25 bp, Homo sapien
ccccaaatcaaatgtgagggtggct

SEQ ID NO: 3888913 - DNA, 25 bp, Homo sapien
taccacagggcaaagcatatccggg

SEQ ID NO: 3888914 - DNA, 25 bp, Homo sapien
gcagctccaatctgggaagcccagc

SEQ ID NO: 3888915 - DNA, 25 bp, Homo sapien
ggttcggattggaaatggtaccaca

SEQ ID NO: 3888916 - DNA, 25 bp, Homo sapien
taatcgttcagagcggagcagacgc

SEQ ID NO: 3888917 - DNA, 25 bp, Homo sapien
caattaatcgttcagagcggagcag

SEQ ID NO: 3888918 - DNA, 25 bp, Homo sapien
ctattcaattaatcgttcagagcgg

SEQ ID NO: 3888919 - DNA, 25 bp, Homo sapien
tcgttcagagcggagcagacgctgc

SEQ ID NO: 3888920 - DNA, 25 bp, Homo sapien
tgagactcatcacagacctcgctgt

SEQ ID NO: 3888921 - DNA, 25 bp, Homo sapien
gccgatcagtgcgtactgagactca

SEQ ID NO: 3888922 - DNA, 25 bp, Homo sapien
cccggaagcattcaccagtgccgat

SEQ ID NO: 3888923 - DNA, 25 bp, Homo sapien
tcaccagtgccgatcagtgcgtact

SEQ ID NO: 3888924 - DNA, 25 bp, Homo sapien
aacctacactgcctacagcttggac

SEQ ID NO: 3888925 - DNA, 25 bp, Homo sapien
gtaacctacactgcctacagcttgg

SEQ ID NO: 3888926 - DNA, 25 bp, Homo sapien
cactggtaacctacactgcctacag

SEQ ID NO: 3888927 - DNA, 25 bp, Homo sapien
tggtaacctacactgcctacagctt

SEQ ID NO: 3888928 - DNA, 25 bp, Homo sapien
gaaagtgcagacttgccaaagtcca

SEQ ID NO: 3888929 - DNA, 25 bp, Homo sapien
tggaaagtgcagacttgccaaagtc

SEQ ID NO: 3888930 - DNA, 25 bp, Homo sapien
aaagtgcagacttgccaaagtccag

SEQ ID NO: 3888931 - DNA, 25 bp, Homo sapien
gtggaaagtgcagacttgccaaagt

SEQ ID NO: 3888932 - DNA, 25 bp, Homo sapien
caggagtgactccagaatgaaggag

SEQ ID NO: 3888933 - DNA, 25 bp, Homo sapien
cacaggagtgactccagaatgaagg

SEQ ID NO: 3888934 - DNA, 25 bp, Homo sapien
tgcacaggagtgactccagaatgaa

SEQ ID NO: 3888935 - DNA, 25 bp, Homo sapien
ctgcacaggagtgactccagaatga

SEQ ID NO: 3888936 - DNA, 25 bp, Homo sapien
ccagggcctaactccagactatcaa

SEQ ID NO: 3888937 - DNA, 25 bp, Homo sapien
accgtgagttcagcacgggcttgtg

SEQ ID NO: 3888938 - DNA, 25 bp, Homo sapien
gacaccgtgagttcagcacgggctt

SEQ ID NO: 3888939 - DNA, 25 bp, Homo sapien
actccagactatcaatgcctgcagc

SEQ ID NO: 3888940 - DNA, 25 bp, Homo sapien
tcgaagcgaggaaaacaccgggcca

SEQ ID NO: 3888941 - DNA, 25 bp, Homo sapien
gcgaggaaaacaccgggccactgag

SEQ ID NO: 3888942 - DNA, 25 bp, Homo sapien
atcaggggaggtgcgcccgatacag

SEQ ID NO: 3888943 - DNA, 25 bp, Homo sapien
aaacaccgggccactgagatcaggg

SEQ ID NO: 3888944 - DNA, 25 bp, Homo sapien
caggctctccgtgccggcccgcagc

SEQ ID NO: 3888945 - DNA, 25 bp, Homo sapien
acgcaacccgcaagaacaccagctc

SEQ ID NO: 3888946 - DNA, 25 bp, Homo sapien
acacagcccgaagggcgccacgcaa

SEQ ID NO: 3888947 - DNA, 25 bp, Homo sapien
caaacaccgagaaacaaagactgcc

SEQ ID NO: 3888948 - DNA, 25 bp, Homo sapien
ttggccgcgttctcctcgaagatgg

SEQ ID NO: 3888949 - DNA, 25 bp, Homo sapien
tcaggtcggataccgccaactggaa

SEQ ID NO: 3888950 - DNA, 25 bp, Homo sapien
taggtgatcttctcgctctgcagga

SEQ ID NO: 3888951 - DNA, 25 bp, Homo sapien
gaatgggttgttggcctcgatgacc

SEQ ID NO: 3888952 - DNA, 25 bp, Homo sapien
atggagtcggcccgcaccgacacgc

SEQ ID NO: 3888953 - DNA, 25 bp, Homo sapien
tggagtcggcccgcaccgacacgca

SEQ ID NO: 3888954 - DNA, 25 bp, Homo sapien
agaagccacagcgtcagcgcttcca

SEQ ID NO: 3888955 - DNA, 25 bp, Homo sapien
gggagaagccacagcgtcagcgctt

SEQ ID NO: 3888956 - DNA, 25 bp, Homo sapien
gaagccacagcgtcagcgcttccat

SEQ ID NO: 3888957 - DNA, 25 bp, Homo sapien
ggagaagccacagcgtcagcgcttc

SEQ ID NO: 3888958 - DNA, 25 bp, Homo sapien
gagggcagcgcgaagcggggaggcg

SEQ ID NO: 3888959 - DNA, 25 bp, Homo sapien
gtcccccgggcgcgcggctcatcca

SEQ ID NO: 3888960 - DNA, 25 bp, Homo sapien
cgaggccgagggcagcgcgaagcgg

SEQ ID NO: 3888961 - DNA, 25 bp, Homo sapien
cgcgcggctcatccacccgggcccg

SEQ ID NO: 3888962 - DNA, 25 bp, Homo sapien
gctctgacggttcgggcctccttct

SEQ ID NO: 3888963 - DNA, 25 bp, Homo sapien
cagaccgttcctcgtggagtgggac

SEQ ID NO: 3888964 - DNA, 25 bp, Homo sapien
agcagccgcgcgtctcgggtcatgt

SEQ ID NO: 3888965 - DNA, 25 bp, Homo sapien
tctcgggtcatgtccccggccgaaa

SEQ ID NO: 3888966 - DNA, 25 bp, Homo sapien
tcagtgggataagtattaagacctc

SEQ ID NO: 3888967 - DNA, 25 bp, Homo sapien
tagaatcccctggacactgtaggca

SEQ ID NO: 3888968 - DNA, 25 bp, Homo sapien
gactcaaggtggatctcatctggaa

SEQ ID NO: 3888969 - DNA, 25 bp, Homo sapien
ttccagggcgtgtggtagtctgcca

SEQ ID NO: 3888970 - DNA, 25 bp, Homo sapien
ccgattccgcaggtgacagcgcgag

SEQ ID NO: 3888971 - DNA, 25 bp, Homo sapien
ctacacgggctggtctgccgattcc

SEQ ID NO: 3888972 - DNA, 25 bp, Homo sapien
gcgcggtttccaagcccagtcgccg

SEQ ID NO: 3888973 - DNA, 25 bp, Homo sapien
gagcagccgcagtgcaatgctgccc

SEQ ID NO: 3888974 - DNA, 25 bp, Homo sapien
acccggctgacagcgcccgagaccc

SEQ ID NO: 3888975 - DNA, 25 bp, Homo sapien
tctgacccatcactgcggcccaccc

SEQ ID NO: 3888976 - DNA, 25 bp, Homo sapien
gcccacccggctgacagcgcccgag

SEQ ID NO: 3888977 - DNA, 25 bp, Homo sapien
tgacccatcactgcggcccacccgg

SEQ ID NO: 3888978 - DNA, 25 bp, Homo sapien
gagggtcttactccagatcacaaaa

SEQ ID NO: 3888979 - DNA, 25 bp, Homo sapien
gtcttactccagatcacaaaaaatg

SEQ ID NO: 3888980 - DNA, 25 bp, Homo sapien
tagagggtcttactccagatcacaa

SEQ ID NO: 3888981 - DNA, 25 bp, Homo sapien
gttgccagtagagggtcttactcca

SEQ ID NO: 3888982 - DNA, 25 bp, Homo sapien
gctggaaggcacctgtgtaggacac

SEQ ID NO: 3888983 - DNA, 25 bp, Homo sapien
tgtaggacacgatgctggtgccttg

SEQ ID NO: 3888984 - DNA, 25 bp, Homo sapien
tgggcatcagcatttcgcagaactc

SEQ ID NO: 3888985 - DNA, 25 bp, Homo sapien
acagagcacttacatcacctgagag

SEQ ID NO: 3888986 - DNA, 25 bp, Homo sapien
gaacccgctggattggcagctcagg

SEQ ID NO: 3888987 - DNA, 25 bp, Homo sapien
cgcggagctggcaatcagcgacgac

SEQ ID NO: 3888988 - DNA, 25 bp, Homo sapien
ttccgcgcaatgagccctaggcggc

SEQ ID NO: 3888989 - DNA, 25 bp, Homo sapien
ctgacacgcgcgctcacggcgagtg

SEQ ID NO: 3888990 - DNA, 25 bp, Homo sapien
ggaggaacagcaatcagcagagagc

SEQ ID NO: 3888991 - DNA, 25 bp, Homo sapien
tatctggtaaggagagctgaagaca

SEQ ID NO: 3888992 - DNA, 25 bp, Homo sapien
gacacaaggaaaaggcgttgtcctg

SEQ ID NO: 3888993 - DNA, 25 bp, Homo sapien
gaaatccgaggactagtcaccaccg

SEQ ID NO: 3888994 - DNA, 25 bp, Homo sapien
gaaagtagcaattttatttgagtta

SEQ ID NO: 3888995 - DNA, 25 bp, Homo sapien
taagctagctttaatactcagggca

SEQ ID NO: 3888996 - DNA, 25 bp, Homo sapien
ttagttaagtcagcctcaagtaccc

SEQ ID NO: 3888997 - DNA, 25 bp, Homo sapien
tcagggcaaatacaatctcaatggt

SEQ ID NO: 3888998 - DNA, 25 bp, Homo sapien
tcaagtaccctaaaatgcagagttc

SEQ ID NO: 3888999 - DNA, 25 bp, Homo sapien
tacagatttcccaacaatctgcatt

SEQ ID NO: 3889000 - DNA, 25 bp, Homo sapien
tacaagagccccgatttgtcacttt

SEQ ID NO: 3889001 - DNA, 25 bp, Homo sapien
caatagaaggcagccactgcattta

SEQ ID NO: 3889002 - DNA, 25 bp, Homo sapien
aggaagacaatagaaggcagccact

SEQ ID NO: 3889003 - DNA, 25 bp, Homo sapien
taagagcctccctagcattaagtgt

SEQ ID NO: 3889004 - DNA, 25 bp, Homo sapien
taaaccagcaatttaaggctttgcg

SEQ ID NO: 3889005 - DNA, 25 bp, Homo sapien
gacagtagttcagggaacaacaacc

SEQ ID NO: 3889006 - DNA, 25 bp, Homo sapien
tgcgcttatgcaattgatcctgtca

SEQ ID NO: 3889007 - DNA, 25 bp, Homo sapien
catggaattgttaacagcctgaacc

SEQ ID NO: 3889008 - DNA, 25 bp, Homo sapien
cctggctggcatgacaacagtggct

SEQ ID NO: 3889009 - DNA, 25 bp, Homo sapien
cattaccgagcacctgaagcaaagg

SEQ ID NO: 3889010 - DNA, 25 bp, Homo sapien
taaggatagctccagcattaccgag

SEQ ID NO: 3889011 - DNA, 25 bp, Homo sapien
caaatattcaatcactctagagata

SEQ ID NO: 3889012 - DNA, 25 bp, Homo sapien
aaatattcaatcactctagagatag

SEQ ID NO: 3889013 - DNA, 25 bp, Homo sapien
aagtacaccgagattaaattgtggg

SEQ ID NO: 3889014 - DNA, 25 bp, Homo sapien
cactacaaatcaaagtacaccgaga

SEQ ID NO: 3889015 - DNA, 25 bp, Homo sapien
gatttactaaactgaacactacaaa

SEQ ID NO: 3889016 - DNA, 25 bp, Homo sapien
gccataacatgcaatgattaccttg

SEQ ID NO: 3889017 - DNA, 25 bp, Homo sapien
tattcccgcacagtggttacattga

SEQ ID NO: 3889018 - DNA, 25 bp, Homo sapien
tccttctggcagatattcccgcaca

SEQ ID NO: 3889019 - DNA, 25 bp, Homo sapien
gtcattattgaaaagtctccttctg

SEQ ID NO: 3889020 - DNA, 25 bp, Homo sapien
tctctgtcattattgaaaagtctcc

SEQ ID NO: 3889021 - DNA, 25 bp, Homo sapien
gtgaggcagcatgccgacctacttt

SEQ ID NO: 3889022 - DNA, 25 bp, Homo sapien
agcatgccgacctactttcataaat

SEQ ID NO: 3889023 - DNA, 25 bp, Homo sapien
aaataacaaactgcactgtttaatg

SEQ ID NO: 3889024 - DNA, 25 bp, Homo sapien
aggcagcatgccgacctactttcat

SEQ ID NO: 3889025 - DNA, 25 bp, Homo sapien
gatagattctcagacaatatcagga

SEQ ID NO: 3889026 - DNA, 25 bp, Homo sapien
caaaggcaatctaacctcatctatg

SEQ ID NO: 3889027 - DNA, 25 bp, Homo sapien
agggtgaggactttagacctgagaa

SEQ ID NO: 3889028 - DNA, 25 bp, Homo sapien
ggacaggaattaactagaagcatct

SEQ ID NO: 3889029 - DNA, 25 bp, Homo sapien
tcttcagaaatttgccactacccac

SEQ ID NO: 3889030 - DNA, 25 bp, Homo sapien
atcttttaggaaggttcacctgtag

SEQ ID NO: 3889031 - DNA, 25 bp, Homo sapien
ccagggtactcgcaaaattagaaag

SEQ ID NO: 3889032 - DNA, 25 bp, Homo sapien
gctcccaattcgacttttgttagcg

SEQ ID NO: 3889033 - DNA, 25 bp, Homo sapien
gacaggcacatccttcctaataaag

SEQ ID NO: 3889034 - DNA, 25 bp, Homo sapien
tctttaacagcctaactctgacagg

SEQ ID NO: 3889035 - DNA, 25 bp, Homo sapien
catccttcctaataaagccataaag

SEQ ID NO: 3889036 - DNA, 25 bp, Homo sapien
catgagattaaagcactgactagct

SEQ ID NO: 3889037 - DNA, 25 bp, Homo sapien
tggactttcctggcagagacaccca

SEQ ID NO: 3889038 - DNA, 25 bp, Homo sapien
tcctccatgtgtttgccggcatgct

SEQ ID NO: 3889039 - DNA, 25 bp, Homo sapien
gaagtagtgctgtgtaggaggccac

SEQ ID NO: 3889040 - DNA, 25 bp, Homo sapien
actttcctggcagagacacccaaga

SEQ ID NO: 3889041 - DNA, 25 bp, Homo sapien
actgaaaagattaatccacagaatg

SEQ ID NO: 3889042 - DNA, 25 bp, Homo sapien
atcaacgaatgatgctaggacaact

SEQ ID NO: 3889043 - DNA, 25 bp, Homo sapien
taagggtcaagtatccagaacatat

SEQ ID NO: 3889044 - DNA, 25 bp, Homo sapien
actgctacaaatcaacgaatgatgc

SEQ ID NO: 3889045 - DNA, 25 bp, Homo sapien
caaaaccgggcagaagacttagaga

SEQ ID NO: 3889046 - DNA, 25 bp, Homo sapien
gtcacgcccactaggatgactaaaa

SEQ ID NO: 3889047 - DNA, 25 bp, Homo sapien
tcatgtcacgcccactaggatgact

SEQ ID NO: 3889048 - DNA, 25 bp, Homo sapien
attccaactcctaggtataaatcca

SEQ ID NO: 3889049 - DNA, 25 bp, Homo sapien
ttaaatacaccattcaaagtaaata

SEQ ID NO: 3889050 - DNA, 25 bp, Homo sapien
ttcaatttaaatacaccattcaaag

SEQ ID NO: 3889051 - DNA, 25 bp, Homo sapien
ccactatcttcaatttaaatacacc

SEQ ID NO: 3889052 - DNA, 25 bp, Homo sapien
tcaaaccactatcttcaatttaaat

SEQ ID NO: 3889053 - DNA, 25 bp, Homo sapien
tcctccttcttatgtttctcttctg

SEQ ID NO: 3889054 - DNA, 25 bp, Homo sapien
ctttattgaggtcaagttcttcatc

SEQ ID NO: 3889055 - DNA, 25 bp, Homo sapien
tcctcctccttcttatgtttctctt

SEQ ID NO: 3889056 - DNA, 25 bp, Homo sapien
cctcctcctccttcttatgtttctc

SEQ ID NO: 3889057 - DNA, 25 bp, Homo sapien
tttctgctagctgggctgcccgctc

SEQ ID NO: 3889058 - DNA, 25 bp, Homo sapien
tcagtcttttcagttgacacccact

SEQ ID NO: 3889059 - DNA, 25 bp, Homo sapien
agttgacacccactgtatttctcca

SEQ ID NO: 3889060 - DNA, 25 bp, Homo sapien
tgggagcatctttgatcaactcatc

SEQ ID NO: 3889061 - DNA, 25 bp, Homo sapien
aaatctatcactaactctaagatgg

SEQ ID NO: 3889062 - DNA, 25 bp, Homo sapien
tgcttttaaatctatcactaactct

SEQ ID NO: 3889063 - DNA, 25 bp, Homo sapien
actctaagatggttatgtgataaaa

SEQ ID NO: 3889064 - DNA, 25 bp, Homo sapien
cactaactctaagatggttatgtga

SEQ ID NO: 3889065 - DNA, 25 bp, Homo sapien
tacggatccttaagaccctatcagg

SEQ ID NO: 3889066 - DNA, 25 bp, Homo sapien
caaaattggtctaagaatccctacg

SEQ ID NO: 3889067 - DNA, 25 bp, Homo sapien
cctatcagggagtaaaggaggtcaa

SEQ ID NO: 3889068 - DNA, 25 bp, Homo sapien
caaatgccaagtagacctcaaagat

SEQ ID NO: 3889069 - DNA, 25 bp, Homo sapien
accaggaaattatgcccacagacat

SEQ ID NO: 3889070 - DNA, 25 bp, Homo sapien
ccaggaaattatgcccacagacata

SEQ ID NO: 3889071 - DNA, 25 bp, Homo sapien
gattcaggccaacgttatcagtagc

SEQ ID NO: 3889072 - DNA, 25 bp, Homo sapien
tagatctgtggagtttaaacctttc

SEQ ID NO: 3889073 - DNA, 25 bp, Homo sapien
aggtaactgatgtgagtacaaggca

SEQ ID NO: 3889074 - DNA, 25 bp, Homo sapien
taacgttttaggaaatagatctgtg

SEQ ID NO: 3889075 - DNA, 25 bp, Homo sapien
gattccgagcactatactccactag

SEQ ID NO: 3889076 - DNA, 25 bp, Homo sapien
ttgacaagacagtgccgattccgag

SEQ ID NO: 3889077 - DNA, 25 bp, Homo sapien
tgaacttgtccacctatccttaaac

SEQ ID NO: 3889078 - DNA, 25 bp, Homo sapien
gaatcaaaagagcacgatgtttcca

SEQ ID NO: 3889079 - DNA, 25 bp, Homo sapien
cactcgaatatcaaatctctgctcc

SEQ ID NO: 3889080 - DNA, 25 bp, Homo sapien
tttggaacctgaagcacacagttca

SEQ ID NO: 3889081 - DNA, 25 bp, Homo sapien
tatgagaccgtcctgctctcctgtt

SEQ ID NO: 3889082 - DNA, 25 bp, Homo sapien
acagttcagcgctgtgcctatgaga

SEQ ID NO: 3889083 - DNA, 25 bp, Homo sapien
tgaggcagaggcttactgtcagcta

SEQ ID NO: 3889084 - DNA, 25 bp, Homo sapien
cgatgatggccctcatgcagtcctc

SEQ ID NO: 3889085 - DNA, 25 bp, Homo sapien
ctgtcctcagcacggttgtactgct

SEQ ID NO: 3889086 - DNA, 25 bp, Homo sapien
aaattaagcaacaccccgatgatgg

SEQ ID NO: 3889087 - DNA, 25 bp, Homo sapien
tttgattttcgggattatgcacagt

SEQ ID NO: 3889088 - DNA, 25 bp, Homo sapien
tgaaacaataagttgggaatcttta

SEQ ID NO: 3889089 - DNA, 25 bp, Homo sapien
gaatctttatatgctatcaagtagc

SEQ ID NO: 3889090 - DNA, 25 bp, Homo sapien
gctatcaagtagctttgattttcgg

SEQ ID NO: 3889091 - DNA, 25 bp, Homo sapien
ctaaaactcgtaaacatctctctgc

SEQ ID NO: 3889092 - DNA, 25 bp, Homo sapien
ctttctaaaactcgtaaacatctct

SEQ ID NO: 3889093 - DNA, 25 bp, Homo sapien
gctccccatagtgaggctaccagtt

SEQ ID NO: 3889094 - DNA, 25 bp, Homo sapien
tctacttaaatgatccacacattct

SEQ ID NO: 3889095 - DNA, 25 bp, Homo sapien
gtctcctgctcgtttagaagtaagg

SEQ ID NO: 3889096 - DNA, 25 bp, Homo sapien
aatgtctccatagctaaatgcccag

SEQ ID NO: 3889097 - DNA, 25 bp, Homo sapien
cagaccacccaaaagccggagttct

SEQ ID NO: 3889098 - DNA, 25 bp, Homo sapien
ttatctacaatatgatccagaccac

SEQ ID NO: 3889099 - DNA, 25 bp, Homo sapien
tgttaattcatgagtcatacaggca

SEQ ID NO: 3889100 - DNA, 25 bp, Homo sapien
caggcaaagctgaagcctaatgagg

SEQ ID NO: 3889101 - DNA, 25 bp, Homo sapien
tctccaaggtgacaaatatagaact

SEQ ID NO: 3889102 - DNA, 25 bp, Homo sapien
tccctcaaagagtaatttagactgg

SEQ ID NO: 3889103 - DNA, 25 bp, Homo sapien
caacagttaaactttgggagccagt

SEQ ID NO: 3889104 - DNA, 25 bp, Homo sapien
gagcatatctgtcatgaagcaaagc

SEQ ID NO: 3889105 - DNA, 25 bp, Homo sapien
catagtctagatgtgtggcaggtta

SEQ ID NO: 3889106 - DNA, 25 bp, Homo sapien
agtctacagtagtgtgccgtcatgt

SEQ ID NO: 3889107 - DNA, 25 bp, Homo sapien
gggatcccgagacacagatacggct

SEQ ID NO: 3889108 - DNA, 25 bp, Homo sapien
tatagcatataaatcccggatgtgg

SEQ ID NO: 3889109 - DNA, 25 bp, Homo sapien
gactctggaggtacatttgcatgga

SEQ ID NO: 3889110 - DNA, 25 bp, Homo sapien
ttgatgtacactgcaatagccctac

SEQ ID NO: 3889111 - DNA, 25 bp, Homo sapien
tattgggcaaaaagcctaaatacag

SEQ ID NO: 3889112 - DNA, 25 bp, Homo sapien
tcaggcaaggaatgaaattatgctc

SEQ ID NO: 3889113 - DNA, 25 bp, Homo sapien
agtaattctcatcttagaaggaagg

SEQ ID NO: 3889114 - DNA, 25 bp, Homo sapien
gctactgcaactaaccaaagacttt

SEQ ID NO: 3889115 - DNA, 25 bp, Homo sapien
tttcacagagccttcggattttttc

SEQ ID NO: 3889116 - DNA, 25 bp, Homo sapien
caagatgcttgttgtgtacagtttc

SEQ ID NO: 3889117 - DNA, 25 bp, Homo sapien
ctagatcaagatgcttgttgtgtac

SEQ ID NO: 3889118 - DNA, 25 bp, Homo sapien
tccagttccaaaagtcgaatcatta

SEQ ID NO: 3889119 - DNA, 25 bp, Homo sapien
gggcagctgtacagagggacagatt

SEQ ID NO: 3889120 - DNA, 25 bp, Homo sapien
ctactcagtatatacatgagggcag

SEQ ID NO: 3889121 - DNA, 25 bp, Homo sapien
agggcagctgtacagagggacagat

SEQ ID NO: 3889122 - DNA, 25 bp, Homo sapien
ctcagtatatacatgagggcagctg

SEQ ID NO: 3889123 - DNA, 25 bp, Homo sapien
catgtgctctcaggtgcattcgaaa

SEQ ID NO: 3889124 - DNA, 25 bp, Homo sapien
tctcaggtgcattcgaaaactgggc

SEQ ID NO: 3889125 - DNA, 25 bp, Homo sapien
tcgaaaactgggcatggcacattta

SEQ ID NO: 3889126 - DNA, 25 bp, Homo sapien
aagaccattgctaccatcccatgtg

SEQ ID NO: 3889127 - DNA, 25 bp, Homo sapien
tattaaaaaggctctcatcacccag

SEQ ID NO: 3889128 - DNA, 25 bp, Homo sapien
gcagcatgatcacgggctcaagcca

SEQ ID NO: 3889129 - DNA, 25 bp, Homo sapien
tatcactggctatacatactacccc

SEQ ID NO: 3889130 - DNA, 25 bp, Homo sapien
cagctttccctcttatcatgcagaa

SEQ ID NO: 3889131 - DNA, 25 bp, Homo sapien
tgcttcacgtgctgaacaacagtat

SEQ ID NO: 3889132 - DNA, 25 bp, Homo sapien
cttaacaagtactcaatgtcatcag

SEQ ID NO: 3889133 - DNA, 25 bp, Homo sapien
caacgtgtgtttagaggctgagtgc

SEQ ID NO: 3889134 - DNA, 25 bp, Homo sapien
tacaacatcgttgaagtgcttcacg

SEQ ID NO: 3889135 - DNA, 25 bp, Homo sapien
tctttgtcttctcgtctgcatttca

SEQ ID NO: 3889136 - DNA, 25 bp, Homo sapien
tagggctgagtaggtattgtcacag

SEQ ID NO: 3889137 - DNA, 25 bp, Homo sapien
tttatcactttggatggtggtgcag

SEQ ID NO: 3889138 - DNA, 25 bp, Homo sapien
tttcagtgcagtaactatatcttgg

SEQ ID NO: 3889139 - DNA, 25 bp, Homo sapien
gacactctgaggttttactactggt

SEQ ID NO: 3889140 - DNA, 25 bp, Homo sapien
actctgaggttttactactggtggc

SEQ ID NO: 3889141 - DNA, 25 bp, Homo sapien
tgtgacactctgaggttttactact

SEQ ID NO: 3889142 - DNA, 25 bp, Homo sapien
tgaggttttactactggtggcccag

SEQ ID NO: 3889143 - DNA, 25 bp, Homo sapien
gaatggcagcagctattaacttcca

SEQ ID NO: 3889144 - DNA, 25 bp, Homo sapien
gcacaagaattggatcacagagaga

SEQ ID NO: 3889145 - DNA, 25 bp, Homo sapien
taccacatgatgactggatctcaag

SEQ ID NO: 3889146 - DNA, 25 bp, Homo sapien
ccaggagctgtaagtgaatggcagc

SEQ ID NO: 3889147 - DNA, 25 bp, Homo sapien
tcctagctgtctactcagagagggc

SEQ ID NO: 3889148 - DNA, 25 bp, Homo sapien
aatgtcagtaaggtgctcgcttcgg

SEQ ID NO: 3889149 - DNA, 25 bp, Homo sapien
ggatgacacacaaattcgtagagcg

SEQ ID NO: 3889150 - DNA, 25 bp, Homo sapien
aaccagatttctctcggcgaaggga

SEQ ID NO: 3889151 - DNA, 25 bp, Homo sapien
ctttgatttatctccttgtttattt

SEQ ID NO: 3889152 - DNA, 25 bp, Homo sapien
ggcttcttcacactttcaggcacac

SEQ ID NO: 3889153 - DNA, 25 bp, Homo sapien
tcctttgatttatctccttgtttat

SEQ ID NO: 3889154 - DNA, 25 bp, Homo sapien
gggcttcttcacactttcaggcaca

SEQ ID NO: 3889155 - DNA, 25 bp, Homo sapien
tactgagtctacaatctcggcacaa

SEQ ID NO: 3889156 - DNA, 25 bp, Homo sapien
tatcagtacagttccaaaggcccaa

SEQ ID NO: 3889157 - DNA, 25 bp, Homo sapien
gagggaatgcatacttacctggcac

SEQ ID NO: 3889158 - DNA, 25 bp, Homo sapien
taagaaaccatgtatcctagaagct

SEQ ID NO: 3889159 - DNA, 25 bp, Homo sapien
gatgcagtgaactcatccatgctgc

SEQ ID NO: 3889160 - DNA, 25 bp, Homo sapien
gactgtcctgggaattatcattgct

SEQ ID NO: 3889161 - DNA, 25 bp, Homo sapien
tgttagtaccagactgactgtcctg

SEQ ID NO: 3889162 - DNA, 25 bp, Homo sapien
tgtaattagaacttccagaacctcc

SEQ ID NO: 3889163 - DNA, 25 bp, Homo sapien
tgtaatctctagtccgtccaactgt

SEQ ID NO: 3889164 - DNA, 25 bp, Homo sapien
ctgtatggtaacattacaaactgac

SEQ ID NO: 3889165 - DNA, 25 bp, Homo sapien
actgacaagcaagatggatgtaaaa

SEQ ID NO: 3889166 - DNA, 25 bp, Homo sapien
tgtccctctaaaactggtcccacaa

SEQ ID NO: 3889167 - DNA, 25 bp, Homo sapien
ctaaggcctgactggtgccgtccat

SEQ ID NO: 3889168 - DNA, 25 bp, Homo sapien
ggttggcctaagaacactttgtaca

SEQ ID NO: 3889169 - DNA, 25 bp, Homo sapien
gatatttctgatggtgattctggcc

SEQ ID NO: 3889170 - DNA, 25 bp, Homo sapien
cagtacgtcctacagttggttggcc

SEQ ID NO: 3889171 - DNA, 25 bp, Homo sapien
caacttgcttgtgccagtactccca

SEQ ID NO: 3889172 - DNA, 25 bp, Homo sapien
tatcttctcaatctctctctgggca

SEQ ID NO: 3889173 - DNA, 25 bp, Homo sapien
tattcattagccctgtccgggcact

SEQ ID NO: 3889174 - DNA, 25 bp, Homo sapien
gaagattctcagtatactaacccct

SEQ ID NO: 3889175 - DNA, 25 bp, Homo sapien
ctccccttcgaacatctttaacaag

SEQ ID NO: 3889176 - DNA, 25 bp, Homo sapien
tctcctccccttcgaacatctttaa

SEQ ID NO: 3889177 - DNA, 25 bp, Homo sapien
cttctcctccccttcgaacatcttt

SEQ ID NO: 3889178 - DNA, 25 bp, Homo sapien
tcctccccttcgaacatctttaaca

SEQ ID NO: 3889179 - DNA, 25 bp, Homo sapien
gctgctcacattacatagctgggaa

SEQ ID NO: 3889180 - DNA, 25 bp, Homo sapien
gcaagtaagcccatagagtgctaca

SEQ ID NO: 3889181 - DNA, 25 bp, Homo sapien
ggttaaatatcagccttgcctacgt

SEQ ID NO: 3889182 - DNA, 25 bp, Homo sapien
caatgcgagaaatgcaagtgagtcc

SEQ ID NO: 3889183 - DNA, 25 bp, Homo sapien
aaagaacactttggatgtttcccag

SEQ ID NO: 3889184 - DNA, 25 bp, Homo sapien
cagatcttccacttaacagttcaag

SEQ ID NO: 3889185 - DNA, 25 bp, Homo sapien
caacagcactgtatgaaaagaacac

SEQ ID NO: 3889186 - DNA, 25 bp, Homo sapien
ggaatccataatttgccccttgcaa

SEQ ID NO: 3889187 - DNA, 25 bp, Homo sapien
tctcatctcagatcacaagttcctg

SEQ ID NO: 3889188 - DNA, 25 bp, Homo sapien
aataaaggcaggtaactcttgctga

SEQ ID NO: 3889189 - DNA, 25 bp, Homo sapien
ccttcagttctaaatccaagttcaa

SEQ ID NO: 3889190 - DNA, 25 bp, Homo sapien
taagagcctatgctgtagttatctc

SEQ ID NO: 3889191 - DNA, 25 bp, Homo sapien
gactgctaagatttctgagacccaa

SEQ ID NO: 3889192 - DNA, 25 bp, Homo sapien
ggaagcaattatcccacttagctgg

SEQ ID NO: 3889193 - DNA, 25 bp, Homo sapien
taacttgcacacattagagacagga

SEQ ID NO: 3889194 - DNA, 25 bp, Homo sapien
tccctgaccactaagagaccctttg

SEQ ID NO: 3889195 - DNA, 25 bp, Homo sapien
taaaatctatcaacacagccgggca

SEQ ID NO: 3889196 - DNA, 25 bp, Homo sapien
aatatatcgttttaggagagaatac

SEQ ID NO: 3889197 - DNA, 25 bp, Homo sapien
taggagagaatactagatgctatat

SEQ ID NO: 3889198 - DNA, 25 bp, Homo sapien
gtggtttaaaatctatcaacacagc

SEQ ID NO: 3889199 - DNA, 25 bp, Homo sapien
ccattttgtgctaagggtagtccgt

SEQ ID NO: 3889200 - DNA, 25 bp, Homo sapien
taagaggaacacttaacctgggcta

SEQ ID NO: 3889201 - DNA, 25 bp, Homo sapien
taaagtgtcctccaaagggaagcat

SEQ ID NO: 3889202 - DNA, 25 bp, Homo sapien
tgaagtgacctcttccaactgagca

SEQ ID NO: 3889203 - DNA, 25 bp, Homo sapien
gaaaggctgatttattaccctacat

SEQ ID NO: 3889204 - DNA, 25 bp, Homo sapien
gggattcttccctcatgacttttga

SEQ ID NO: 3889205 - DNA, 25 bp, Homo sapien
caagtgttaaacagtgcatataaaa

SEQ ID NO: 3889206 - DNA, 25 bp, Homo sapien
acatgcttccatgtcaattttcctc

SEQ ID NO: 3889207 - DNA, 25 bp, Homo sapien
tgttttgatctacacttgttttccc

SEQ ID NO: 3889208 - DNA, 25 bp, Homo sapien
tgaacaagggcctaaggaatgaaaa

SEQ ID NO: 3889209 - DNA, 25 bp, Homo sapien
agtgaacaagggcctaaggaatgaa

SEQ ID NO: 3889210 - DNA, 25 bp, Homo sapien
tgaatatgttttgatctacacttgt

SEQ ID NO: 3889211 - DNA, 25 bp, Homo sapien
ttatataaattcagtagtagacccc

SEQ ID NO: 3889212 - DNA, 25 bp, Homo sapien
tttatataaattcagtagtagaccc

SEQ ID NO: 3889213 - DNA, 25 bp, Homo sapien
catttataatgagtcactgtctgag

SEQ ID NO: 3889214 - DNA, 25 bp, Homo sapien
gagtcactgtctgagttttatataa

SEQ ID NO: 3889215 - DNA, 25 bp, Homo sapien
cctgcaggtctgtaagtgtacgtac

SEQ ID NO: 3889216 - DNA, 25 bp, Homo sapien
caaaacaggatactgggcaactacc

SEQ ID NO: 3889217 - DNA, 25 bp, Homo sapien
tgagttcctttatgccaacatcaga

SEQ ID NO: 3889218 - DNA, 25 bp, Homo sapien
gatgaatacctgacactaaggactt

SEQ ID NO: 3889219 - DNA, 25 bp, Homo sapien
tggcgggtgctttggccacgggccg

SEQ ID NO: 3889220 - DNA, 25 bp, Homo sapien
ggcgggtgctttggccacgggccgc

SEQ ID NO: 3889221 - DNA, 25 bp, Homo sapien
ctggcgggtgctttggccacgggcc

SEQ ID NO: 3889222 - DNA, 25 bp, Homo sapien
ggcgcggaaccctcgcgcgggagag

SEQ ID NO: 3889223 - DNA, 25 bp, Homo sapien
tctgctttcggtaaataggaagccc

SEQ ID NO: 3889224 - DNA, 25 bp, Homo sapien
aggcgagggactctgctttcggtaa

SEQ ID NO: 3889225 - DNA, 25 bp, Homo sapien
tgagagccgagagaggcgagggact

SEQ ID NO: 3889226 - DNA, 25 bp, Homo sapien
tctcgctggccgccactgctggagc

SEQ ID NO: 3889227 - DNA, 25 bp, Homo sapien
gagctggtaacagagcctgctgtgt

SEQ ID NO: 3889228 - DNA, 25 bp, Homo sapien
ctgctggagctggtaacagagcctg

SEQ ID NO: 3889229 - DNA, 25 bp, Homo sapien
caggcctagctctcgctggccgcca

SEQ ID NO: 3889230 - DNA, 25 bp, Homo sapien
ttccgccggtgaatggtcagtgctg

SEQ ID NO: 3889231 - DNA, 25 bp, Homo sapien
gccgcttccgccggtgaatggtcag

SEQ ID NO: 3889232 - DNA, 25 bp, Homo sapien
cgcttccgccggtgaatggtcagtg

SEQ ID NO: 3889233 - DNA, 25 bp, Homo sapien
cttccgccggtgaatggtcagtgct

SEQ ID NO: 3889234 - DNA, 25 bp, Homo sapien
cttcctccaacagccgctcgctccg

SEQ ID NO: 3889235 - DNA, 25 bp, Homo sapien
tcaacgccatttgcgctcccggccc

SEQ ID NO: 3889236 - DNA, 25 bp, Homo sapien
aacagccgctcgctccgtcactccg

SEQ ID NO: 3889237 - DNA, 25 bp, Homo sapien
ctcaacgccatttgcgctcccggcc

SEQ ID NO: 3889238 - DNA, 25 bp, Homo sapien
gccgcgcaggcgctgcgccccgcat

SEQ ID NO: 3889239 - DNA, 25 bp, Homo sapien
ggttccacaccagaatgagcaaaca

SEQ ID NO: 3889240 - DNA, 25 bp, Homo sapien
tccacaccagaatgagcaaacagaa

SEQ ID NO: 3889241 - DNA, 25 bp, Homo sapien
tacaagcaacctcgaagaagtctgg

SEQ ID NO: 3889242 - DNA, 25 bp, Homo sapien
taggagcacattgcctgacaaggac

SEQ ID NO: 3889243 - DNA, 25 bp, Homo sapien
tctggagatagtgacgtcctctggg

SEQ ID NO: 3889244 - DNA, 25 bp, Homo sapien
gcctagtcaaacaccctgaagggtc

SEQ ID NO: 3889245 - DNA, 25 bp, Homo sapien
ctcaccttggcctaaagaaaatgac

SEQ ID NO: 3889246 - DNA, 25 bp, Homo sapien
tgaaaacctcccactataagagtaa

SEQ ID NO: 3889247 - DNA, 25 bp, Homo sapien
tcttcctggtagaattgaaagcttt

SEQ ID NO: 3889248 - DNA, 25 bp, Homo sapien
tcagctggattttaactcaccttgg

SEQ ID NO: 3889249 - DNA, 25 bp, Homo sapien
gcatcccacggctgggccatgggct

SEQ ID NO: 3889250 - DNA, 25 bp, Homo sapien
catccagatgtattgctggggcctg

SEQ ID NO: 3889251 - DNA, 25 bp, Homo sapien
tcccttcacagcatcccacggctgg

SEQ ID NO: 3889252 - DNA, 25 bp, Homo sapien
gagctcctccaccataagcggctct

SEQ ID NO: 3889253 - DNA, 25 bp, Homo sapien
ggccgcctttgttgcgcaggtgacc

SEQ ID NO: 3889254 - DNA, 25 bp, Homo sapien
tcctggctccgaaagcgggcgccag

SEQ ID NO: 3889255 - DNA, 25 bp, Homo sapien
ctttgttgcgcaggtgaccttcccg

SEQ ID NO: 3889256 - DNA, 25 bp, Homo sapien
gacagtcctggctccgaaagcgggc

SEQ ID NO: 3889257 - DNA, 25 bp, Homo sapien
aaatgctgctggaccaggtcacaca

SEQ ID NO: 3889258 - DNA, 25 bp, Homo sapien
gggaaatgctgctggaccaggtcac

SEQ ID NO: 3889259 - DNA, 25 bp, Homo sapien
ggaaatgctgctggaccaggtcaca

SEQ ID NO: 3889260 - DNA, 25 bp, Homo sapien
tgggggaaatgctgctggaccaggt

SEQ ID NO: 3889261 - DNA, 25 bp, Homo sapien
gaaagatgattcaggagtactttgc

SEQ ID NO: 3889262 - DNA, 25 bp, Homo sapien
agctgaaagatgattcaggagtact

SEQ ID NO: 3889263 - DNA, 25 bp, Homo sapien
aagatgattcaggagtactttgcat

SEQ ID NO: 3889264 - DNA, 25 bp, Homo sapien
gctgaaagatgattcaggagtactt

SEQ ID NO: 3889265 - DNA, 25 bp, Homo sapien
agcaggggttgaaggcgagtaaggg

SEQ ID NO: 3889266 - DNA, 25 bp, Homo sapien
tgaaggcgagtaaggggtcaccgtc

SEQ ID NO: 3889267 - DNA, 25 bp, Homo sapien
gggtcaccgtcctggcagggccctc

SEQ ID NO: 3889268 - DNA, 25 bp, Homo sapien
gcgagtaaggggtcaccgtcctggc

SEQ ID NO: 3889269 - DNA, 25 bp, Homo sapien
tgtccagcgctaggcccctgggttg

SEQ ID NO: 3889270 - DNA, 25 bp, Homo sapien
tgtccacagtgtccagcgctaggcc

SEQ ID NO: 3889271 - DNA, 25 bp, Homo sapien
ctgatgtcagccttacggcactggg

SEQ ID NO: 3889272 - DNA, 25 bp, Homo sapien
taacctttgcttctgcacaggtaaa

SEQ ID NO: 3889273 - DNA, 25 bp, Homo sapien
ggcttgacaacaccaccagaccata

SEQ ID NO: 3889274 - DNA, 25 bp, Homo sapien
accaccagaccatacgcagcagatg

SEQ ID NO: 3889275 - DNA, 25 bp, Homo sapien
ccagaccatacgcagcagatgtcat

SEQ ID NO: 3889276 - DNA, 25 bp, Homo sapien
gcccaggcttgacaacaccaccaga

SEQ ID NO: 3889277 - DNA, 25 bp, Homo sapien
cattagcctattaatccatgaaggg

SEQ ID NO: 3889278 - DNA, 25 bp, Homo sapien
catagtactaacttagacaaggagg

SEQ ID NO: 3889279 - DNA, 25 bp, Homo sapien
catctctgatggaaggtaccgtgat

SEQ ID NO: 3889280 - DNA, 25 bp, Homo sapien
ccatgaagggattaatctatgatcc

SEQ ID NO: 3889281 - DNA, 25 bp, Homo sapien
gatccatgtcttgtgcaatcaccat

SEQ ID NO: 3889282 - DNA, 25 bp, Homo sapien
atccatgtcttgtgcaatcaccatc

SEQ ID NO: 3889283 - DNA, 25 bp, Homo sapien
ccatgtcttgtgcaatcaccatcgg

SEQ ID NO: 3889284 - DNA, 25 bp, Homo sapien
tccatgtcttgtgcaatcaccatcg

SEQ ID NO: 3889285 - DNA, 25 bp, Homo sapien
tggtctgtacttgtgagtagatgtt

SEQ ID NO: 3889286 - DNA, 25 bp, Homo sapien
ggtctgtacttgtgagtagatgttt

SEQ ID NO: 3889287 - DNA, 25 bp, Homo sapien
cctgccgtgagagagccttgctgtg

SEQ ID NO: 3889288 - DNA, 25 bp, Homo sapien
tggggtctgcaatgacccagccctg

SEQ ID NO: 3889289 - DNA, 25 bp, Homo sapien
cagggggacgaccccttctctgtag

SEQ ID NO: 3889290 - DNA, 25 bp, Homo sapien
cgaggccacagcctttctgcgtggg

SEQ ID NO: 3889291 - DNA, 25 bp, Homo sapien
tggcaggttcacagcaattggagag

SEQ ID NO: 3889292 - DNA, 25 bp, Homo sapien
ctagggctgaaatggcaggttcaca

SEQ ID NO: 3889293 - DNA, 25 bp, Homo sapien
tcacagcaattggagagggctgtcc

SEQ ID NO: 3889294 - DNA, 25 bp, Homo sapien
gagggctgtcctggtcttgccgtca

SEQ ID NO: 3889295 - DNA, 25 bp, Homo sapien
cactggtgactggtgactgcagggc

SEQ ID NO: 3889296 - DNA, 25 bp, Homo sapien
tgtagggcagtgtttccgtgacccg

SEQ ID NO: 3889297 - DNA, 25 bp, Homo sapien
ggtcgtgcagaaacaactcagttcc

SEQ ID NO: 3889298 - DNA, 25 bp, Homo sapien
tccgtgacccgtaatgtggtcgtgc

SEQ ID NO: 3889299 - DNA, 25 bp, Homo sapien
gggaacagacacagaacgggccatc

SEQ ID NO: 3889300 - DNA, 25 bp, Homo sapien
ctacacccacttcctcgggccctgg

SEQ ID NO: 3889301 - DNA, 25 bp, Homo sapien
tggcttggcttccatgcagggcttg

SEQ ID NO: 3889302 - DNA, 25 bp, Homo sapien
tgggcacccactctcaggggcaggg

SEQ ID NO: 3889303 - DNA, 25 bp, Homo sapien
ggcatgcagtcccaataacagttct

SEQ ID NO: 3889304 - DNA, 25 bp, Homo sapien
gctgctttaagtgccagagctctca

SEQ ID NO: 3889305 - DNA, 25 bp, Homo sapien
gcagggcatctagagagtccgcgat

SEQ ID NO: 3889306 - DNA, 25 bp, Homo sapien
tcttagaagccacccatgtagctgc

SEQ ID NO: 3889307 - DNA, 25 bp, Homo sapien
gctccagtgccaacctgctggctag

SEQ ID NO: 3889308 - DNA, 25 bp, Homo sapien
tctctgtgtctggtagcacgtagct

SEQ ID NO: 3889309 - DNA, 25 bp, Homo sapien
ggtcctggctcctgatggtatctct

SEQ ID NO: 3889310 - DNA, 25 bp, Homo sapien
tagcttccatctgaggctccagtgc

SEQ ID NO: 3889311 - DNA, 25 bp, Homo sapien
cctcctttctgtaccgtgtgtgctg

SEQ ID NO: 3889312 - DNA, 25 bp, Homo sapien
gggtaatgaggcagagacccctcct

SEQ ID NO: 3889313 - DNA, 25 bp, Homo sapien
tagaatgagtcacccgtagatcagg

SEQ ID NO: 3889314 - DNA, 25 bp, Homo sapien
ccttagctgtagaccagagagggca

SEQ ID NO: 3889315 - DNA, 25 bp, Homo sapien
gggcacacctggtcctctgtcaggt

SEQ ID NO: 3889316 - DNA, 25 bp, Homo sapien
ggcatttgctgagacatccccaacc

SEQ ID NO: 3889317 - DNA, 25 bp, Homo sapien
ctttcccagttacaaggtctttcag

SEQ ID NO: 3889318 - DNA, 25 bp, Homo sapien
cactggcagtgtggtcgcctttctc

SEQ ID NO: 3889319 - DNA, 25 bp, Homo sapien
gacagcccaaggtaactgggccaca

SEQ ID NO: 3889320 - DNA, 25 bp, Homo sapien
tgtctttttggtcccgcctcatcag

SEQ ID NO: 3889321 - DNA, 25 bp, Homo sapien
catcagcacccctattgagcatgcg

SEQ ID NO: 3889322 - DNA, 25 bp, Homo sapien
gggtctctaggctcccttgacctgt

SEQ ID NO: 3889323 - DNA, 25 bp, Homo sapien
tggggaggacatgcctcttggatca

SEQ ID NO: 3889324 - DNA, 25 bp, Homo sapien
tcttggatcaggatgggtaggtcca

SEQ ID NO: 3889325 - DNA, 25 bp, Homo sapien
cctgaggtgggattgatgtgagcaa

SEQ ID NO: 3889326 - DNA, 25 bp, Homo sapien
tgagcaaaccggcttgcaggcctgt

SEQ ID NO: 3889327 - DNA, 25 bp, Homo sapien
taaaatctctttgaccccattgtcc

SEQ ID NO: 3889328 - DNA, 25 bp, Homo sapien
cctgagggtaatgaactaggacgct

SEQ ID NO: 3889329 - DNA, 25 bp, Homo sapien
gggtaggtagttctgaccagcgcca

SEQ ID NO: 3889330 - DNA, 25 bp, Homo sapien
gatcagacaaggctcaacaggccgc

SEQ ID NO: 3889331 - DNA, 25 bp, Homo sapien
aaggcggtggcactagccacccaag

SEQ ID NO: 3889332 - DNA, 25 bp, Homo sapien
tccaaaggcggtggcactagccacc

SEQ ID NO: 3889333 - DNA, 25 bp, Homo sapien
tagccacccaaggaacatcctcctc

SEQ ID NO: 3889334 - DNA, 25 bp, Homo sapien
actagccacccaaggaacatcctcc

SEQ ID NO: 3889335 - DNA, 25 bp, Homo sapien
gaagatccaggaagaagacggtcta

SEQ ID NO: 3889336 - DNA, 25 bp, Homo sapien
tggagagacccagttgatcctccca

SEQ ID NO: 3889337 - DNA, 25 bp, Homo sapien
taccttcagacctaggtaactggag

SEQ ID NO: 3889338 - DNA, 25 bp, Homo sapien
tctagtgttaagagaagacagtgag

SEQ ID NO: 3889339 - DNA, 25 bp, Homo sapien
ccatggctgcgatttccccgtggag

SEQ ID NO: 3889340 - DNA, 25 bp, Homo sapien
ttgcgcagtatgtctctagcttggg

SEQ ID NO: 3889341 - DNA, 25 bp, Homo sapien
acaagtttatcgaagccctgggcca

SEQ ID NO: 3889342 - DNA, 25 bp, Homo sapien
tgttcagcaccaagtgccatggctg

SEQ ID NO: 3889343 - DNA, 25 bp, Homo sapien
cagcagtgttgtcagcgggcaaaag

SEQ ID NO: 3889344 - DNA, 25 bp, Homo sapien
ctttgagaggggcagttggcttccc

SEQ ID NO: 3889345 - DNA, 25 bp, Homo sapien
gcagtgttgtcagcgggcaaaagca

SEQ ID NO: 3889346 - DNA, 25 bp, Homo sapien
gttggcttcccatggttatatgtca

SEQ ID NO: 3889347 - DNA, 25 bp, Homo sapien
gatggagtgacttgaaggttttccc

SEQ ID NO: 3889348 - DNA, 25 bp, Homo sapien
aattgttaccccaaacactagattg

SEQ ID NO: 3889349 - DNA, 25 bp, Homo sapien
caaacactagattggagctgactaa

SEQ ID NO: 3889350 - DNA, 25 bp, Homo sapien
taccccaaacactagattggagctg

SEQ ID NO: 3889351 - DNA, 25 bp, Homo sapien
caagccatggcttgtctagtcctga

SEQ ID NO: 3889352 - DNA, 25 bp, Homo sapien
gcctgcacatctggttacccaactt

SEQ ID NO: 3889353 - DNA, 25 bp, Homo sapien
ccatggcttgtctagtcctgaggca

SEQ ID NO: 3889354 - DNA, 25 bp, Homo sapien
tcctgaggcactgcctgcacatctg

SEQ ID NO: 3889355 - DNA, 25 bp, Homo sapien
aagacagtggcacagaaggcctgtt

SEQ ID NO: 3889356 - DNA, 25 bp, Homo sapien
gacagtggcacagaaggcctgtttt

SEQ ID NO: 3889357 - DNA, 25 bp, Homo sapien
agacagtggcacagaaggcctgttt

SEQ ID NO: 3889358 - DNA, 25 bp, Homo sapien
caattggaagccctgtgtgatccta

SEQ ID NO: 3889359 - DNA, 25 bp, Homo sapien
gtgatcctaggtataacgtccccaa

SEQ ID NO: 3889360 - DNA, 25 bp, Homo sapien
cacacgagcctggttatactcagca

SEQ ID NO: 3889361 - DNA, 25 bp, Homo sapien
ttggctcccagaacccaattggaag

SEQ ID NO: 3889362 - DNA, 25 bp, Homo sapien
ggactccacgtgcactcctcttgat

SEQ ID NO: 3889363 - DNA, 25 bp, Homo sapien
actcctcttgatgtcagtgtcctgg

SEQ ID NO: 3889364 - DNA, 25 bp, Homo sapien
gccccccagcagggatcttcactgc

SEQ ID NO: 3889365 - DNA, 25 bp, Homo sapien
tcctcttgatgtcagtgtcctggag

SEQ ID NO: 3889366 - DNA, 25 bp, Homo sapien
ttgaaatctgctcatgccctgtgcc

SEQ ID NO: 3889367 - DNA, 25 bp, Homo sapien
aaatctgctcatgccctgtgccacg

SEQ ID NO: 3889368 - DNA, 25 bp, Homo sapien
gattgaaatctgctcatgccctgtg

SEQ ID NO: 3889369 - DNA, 25 bp, Homo sapien
tgaaatctgctcatgccctgtgcca

SEQ ID NO: 3889370 - DNA, 25 bp, Homo sapien
gtgaatctggaggggcagccgttct

SEQ ID NO: 3889371 - DNA, 25 bp, Homo sapien
gctccaggtctgccatgtgaatctg

SEQ ID NO: 3889372 - DNA, 25 bp, Homo sapien
tgaatctggaggggcagccgttcta

SEQ ID NO: 3889373 - DNA, 25 bp, Homo sapien
ctccaggtctgccatgtgaatctgg

SEQ ID NO: 3889374 - DNA, 25 bp, Homo sapien
aaggattcgggaggctgatgtttct

SEQ ID NO: 3889375 - DNA, 25 bp, Homo sapien
catcaacttgtaggcggccaaggcc

SEQ ID NO: 3889376 - DNA, 25 bp, Homo sapien
tgctgctggcaacaaaggattcggg

SEQ ID NO: 3889377 - DNA, 25 bp, Homo sapien
aaggccgcctgtgctgacgaggccc

SEQ ID NO: 3889378 - DNA, 25 bp, Homo sapien
tctcccccagtaccctccatctcaa

SEQ ID NO: 3889379 - DNA, 25 bp, Homo sapien
ctccatctcaaataggcttggtggc

SEQ ID NO: 3889380 - DNA, 25 bp, Homo sapien
accctccatctcaaataggcttggt

SEQ ID NO: 3889381 - DNA, 25 bp, Homo sapien
gtctcccccagtaccctccatctca

SEQ ID NO: 3889382 - DNA, 25 bp, Homo sapien
ccctcagtaagaacacacgaggagg

SEQ ID NO: 3889383 - DNA, 25 bp, Homo sapien
tgcagcacactgagtttgtacaatt

SEQ ID NO: 3889384 - DNA, 25 bp, Homo sapien
caggcagagtaaaatctgctgggac

SEQ ID NO: 3889385 - DNA, 25 bp, Homo sapien
gagaaggtgaatacaaagcagcagg

SEQ ID NO: 3889386 - DNA, 25 bp, Homo sapien
caggagctgcagacaagtaccttgg

SEQ ID NO: 3889387 - DNA, 25 bp, Homo sapien
gctgggactgcctggagatttgtca

SEQ ID NO: 3889388 - DNA, 25 bp, Homo sapien
tgtccaggactgttcctggaaccag

SEQ ID NO: 3889389 - DNA, 25 bp, Homo sapien
taggaattggcaacatttgtccagg

SEQ ID NO: 3889390 - DNA, 25 bp, Homo sapien
cattttgggatcctgattccctggt

SEQ ID NO: 3889391 - DNA, 25 bp, Homo sapien
gctctatgttaggaattggcaacat

SEQ ID NO: 3889392 - DNA, 25 bp, Homo sapien
taagcaagctgttgaatggtatggt

SEQ ID NO: 3889393 - DNA, 25 bp, Homo sapien
ccactttctagttgaattatcccta

SEQ ID NO: 3889394 - DNA, 25 bp, Homo sapien
taatatgaggttgcgagtttaggag

SEQ ID NO: 3889395 - DNA, 25 bp, Homo sapien
ctataagcccaggtttaatgggaag

SEQ ID NO: 3889396 - DNA, 25 bp, Homo sapien
ttaggtgcctcggtttgagaagccg

SEQ ID NO: 3889397 - DNA, 25 bp, Homo sapien
gtgctacaggacagctcagcaggcc

SEQ ID NO: 3889398 - DNA, 25 bp, Homo sapien
tgagaagccgaaggccagataagtg

SEQ ID NO: 3889399 - DNA, 25 bp, Homo sapien
agcaggccgctaacccggcctggga

SEQ ID NO: 3889400 - DNA, 25 bp, Homo sapien
ggggaagtgagagttcacaggacat

SEQ ID NO: 3889401 - DNA, 25 bp, Homo sapien
ctgctgaatctggacttggggaagt

SEQ ID NO: 3889402 - DNA, 25 bp, Homo sapien
caagccagctctgctgaatctggac

SEQ ID NO: 3889403 - DNA, 25 bp, Homo sapien
ttggggaagtgagagttcacaggac

SEQ ID NO: 3889404 - DNA, 25 bp, Homo sapien
cgatttctggtgctctgcatgttta

SEQ ID NO: 3889405 - DNA, 25 bp, Homo sapien
agaaaagatccctgaatgtgtgggc

SEQ ID NO: 3889406 - DNA, 25 bp, Homo sapien
tagtagcaaactacagaaaagatcc

SEQ ID NO: 3889407 - DNA, 25 bp, Homo sapien
ctggtgctctgcatgtttagagaaa

SEQ ID NO: 3889408 - DNA, 25 bp, Homo sapien
cagggagcaccattcgtgtcaggca

SEQ ID NO: 3889409 - DNA, 25 bp, Homo sapien
tgttcgacaggatcacgtgcagatg

SEQ ID NO: 3889410 - DNA, 25 bp, Homo sapien
tcagtaccgtgaccatagcgacagt

SEQ ID NO: 3889411 - DNA, 25 bp, Homo sapien
tgtcaggcaggttgcgaatggcacc

SEQ ID NO: 3889412 - DNA, 25 bp, Homo sapien
gactctcattccaacaagataagtg

SEQ ID NO: 3889413 - DNA, 25 bp, Homo sapien
gcgccagggcaaactaccagtagag

SEQ ID NO: 3889414 - DNA, 25 bp, Homo sapien
aacactgacaagtattggttactgg

SEQ ID NO: 3889415 - DNA, 25 bp, Homo sapien
taaccctgccttggctaatagaaat

SEQ ID NO: 3889416 - DNA, 25 bp, Homo sapien
ttcaccgcagtgtgagtgtcggccg

SEQ ID NO: 3889417 - DNA, 25 bp, Homo sapien
ccgaatcgatgagggaagccgctct

SEQ ID NO: 3889418 - DNA, 25 bp, Homo sapien
tatcttatgccgctggaattcgcgg

SEQ ID NO: 3889419 - DNA, 25 bp, Homo sapien
tccaaatggacggaatgagcctccg

SEQ ID NO: 3889420 - DNA, 25 bp, Homo sapien
tccgcgcgcggcgaagatcgcacgg

SEQ ID NO: 3889421 - DNA, 25 bp, Homo sapien
aaggcttaggctcggcgcgtccgtc

SEQ ID NO: 3889422 - DNA, 25 bp, Homo sapien
gcgaagatcgcacggcccgatcgag

SEQ ID NO: 3889423 - DNA, 25 bp, Homo sapien
gccgctgcacgccaagggcgaaggc

SEQ ID NO: 3889424 - DNA, 25 bp, Homo sapien
gctgttggtttgtgtcgattttctg

SEQ ID NO: 3889425 - DNA, 25 bp, Homo sapien
aagtttggaagacctcccctatgtg

SEQ ID NO: 3889426 - DNA, 25 bp, Homo sapien
ggagaggactttgagtaacacttca

SEQ ID NO: 3889427 - DNA, 25 bp, Homo sapien
tatgtgaccatttaggcctagatct

SEQ ID NO: 3889428 - DNA, 25 bp, Homo sapien
ccaatccgaatcttcgtttctttat

SEQ ID NO: 3889429 - DNA, 25 bp, Homo sapien
cactaacccaatccgaatcttcgtt

SEQ ID NO: 3889430 - DNA, 25 bp, Homo sapien
cacggatgccacactaacccaatcc

SEQ ID NO: 3889431 - DNA, 25 bp, Homo sapien
gatgccacactaacccaatccgaat

SEQ ID NO: 3889432 - DNA, 25 bp, Homo sapien
tgttactgtatgtatcttcctaaga

SEQ ID NO: 3889433 - DNA, 25 bp, Homo sapien
aacaatggcaacaatacagaaaact

SEQ ID NO: 3889434 - DNA, 25 bp, Homo sapien
cagaaaaggcattcctctaaaaata

SEQ ID NO: 3889435 - DNA, 25 bp, Homo sapien
ccaaaggatatactaaggaaaacag

SEQ ID NO: 3889436 - DNA, 25 bp, Homo sapien
tggggttcatttccccgcagctctg

SEQ ID NO: 3889437 - DNA, 25 bp, Homo sapien
tttcggctgctcaccctggggttca

SEQ ID NO: 3889438 - DNA, 25 bp, Homo sapien
cccgcagctctgtctgttcccttgg

SEQ ID NO: 3889439 - DNA, 25 bp, Homo sapien
cctccttttcggctgctcaccctgg

SEQ ID NO: 3889440 - DNA, 25 bp, Homo sapien
tgagacttagaacccattgacccta

SEQ ID NO: 3889441 - DNA, 25 bp, Homo sapien
aaaaatggatatcaactgggcacgg

SEQ ID NO: 3889442 - DNA, 25 bp, Homo sapien
tcattgcttaatagagaaaccccag

SEQ ID NO: 3889443 - DNA, 25 bp, Homo sapien
tgagatcggagtggacaacatagtg

SEQ ID NO: 3889444 - DNA, 25 bp, Homo sapien
gtgatttgatgtgagttttgccgat

SEQ ID NO: 3889445 - DNA, 25 bp, Homo sapien
gagttttgccgatgattagtgatgt

SEQ ID NO: 3889446 - DNA, 25 bp, Homo sapien
ttttggttgattgcttgccttgctg

SEQ ID NO: 3889447 - DNA, 25 bp, Homo sapien
taaacccctatccaatacatgattt

SEQ ID NO: 3889448 - DNA, 25 bp, Homo sapien
aaggctccctcagtcatcgtgtatg

SEQ ID NO: 3889449 - DNA, 25 bp, Homo sapien
tctgattgtactgtgttgagtagaa

SEQ ID NO: 3889450 - DNA, 25 bp, Homo sapien
tgcaccagttcagattgttacatga

SEQ ID NO: 3889451 - DNA, 25 bp, Homo sapien
gagtggacttcctagtcttgttcct

SEQ ID NO: 3889452 - DNA, 25 bp, Homo sapien
cacctcgtgatgtccccgcctcggc

SEQ ID NO: 3889453 - DNA, 25 bp, Homo sapien
tcacctcgtgatgtccccgcctcgg

SEQ ID NO: 3889454 - DNA, 25 bp, Homo sapien
tcgtgatgtccccgcctcggcctcc

SEQ ID NO: 3889455 - DNA, 25 bp, Homo sapien
caacttccccctcctaggctctagc

SEQ ID NO: 3889456 - DNA, 25 bp, Homo sapien
tcctaggctctagcagtgcttccac

SEQ ID NO: 3889457 - DNA, 25 bp, Homo sapien
ccccctcctaggctctagcagtgct

SEQ ID NO: 3889458 - DNA, 25 bp, Homo sapien
ccctcctaggctctagcagtgcttc

SEQ ID NO: 3889459 - DNA, 25 bp, Homo sapien
acctcctgggttcaagtgattctcc

SEQ ID NO: 3889460 - DNA, 25 bp, Homo sapien
ttcactgcaacctccacctcctggg

SEQ ID NO: 3889461 - DNA, 25 bp, Homo sapien
agtgtagtggcccaatctcggttca

SEQ ID NO: 3889462 - DNA, 25 bp, Homo sapien
tctgttgtctgggctggagtgtagt

SEQ ID NO: 3889463 - DNA, 25 bp, Homo sapien
accgtgcccggccagaatttgaact

SEQ ID NO: 3889464 - DNA, 25 bp, Homo sapien
ggtttcgcagtgttggttgggctgg

SEQ ID NO: 3889465 - DNA, 25 bp, Homo sapien
tggggtttcgcagtgttggttgggc

SEQ ID NO: 3889466 - DNA, 25 bp, Homo sapien
gatggggtttcgcagtgttggttgg

SEQ ID NO: 3889467 - DNA, 25 bp, Homo sapien
tgtgttcaaatatggaccttgttcc

SEQ ID NO: 3889468 - DNA, 25 bp, Homo sapien
catcgagggcttttcttctgtactt

SEQ ID NO: 3889469 - DNA, 25 bp, Homo sapien
gtatagcattttcaggtaccatcga

SEQ ID NO: 3889470 - DNA, 25 bp, Homo sapien
caaatatggaccttgttccaaaaag

SEQ ID NO: 3889471 - DNA, 25 bp, Homo sapien
cccggaagatgtttgaaagtgacta

SEQ ID NO: 3889472 - DNA, 25 bp, Homo sapien
ggttggttgctgtaggatattgtca

SEQ ID NO: 3889473 - DNA, 25 bp, Homo sapien
tgttaatgcatgagacccggaagat

SEQ ID NO: 3889474 - DNA, 25 bp, Homo sapien
tagatgtaggtaagcctcagaaatg

SEQ ID NO: 3889475 - DNA, 25 bp, Homo sapien
gtagtcagtggtgttcctttagtcc

SEQ ID NO: 3889476 - DNA, 25 bp, Homo sapien
ccgacttgttttattgcatgtgagc

SEQ ID NO: 3889477 - DNA, 25 bp, Homo sapien
agctgagcactgtgccttgtgtcag

SEQ ID NO: 3889478 - DNA, 25 bp, Homo sapien
gggaatccgacttgttttattgcat

SEQ ID NO: 3889479 - DNA, 25 bp, Homo sapien
gtatgatgagaaacttcctaagtgt

SEQ ID NO: 3889480 - DNA, 25 bp, Homo sapien
tgtctgcgtcgttgagggcctccat

SEQ ID NO: 3889481 - DNA, 25 bp, Homo sapien
gccatttttgtctgcgtcgttgagg

SEQ ID NO: 3889482 - DNA, 25 bp, Homo sapien
atttttgtctgcgtcgttgagggcc

SEQ ID NO: 3889483 - DNA, 25 bp, Homo sapien
tttgtctgcgtcgttgagggcctcc

SEQ ID NO: 3889484 - DNA, 25 bp, Homo sapien
tattcattcgttggttgataaggca

SEQ ID NO: 3889485 - DNA, 25 bp, Homo sapien
gccctttgaagcacaacatttgtgt

SEQ ID NO: 3889486 - DNA, 25 bp, Homo sapien
ggttcacggcaacatctggctcccg

SEQ ID NO: 3889487 - DNA, 25 bp, Homo sapien
cctgccagcaggttataaaagttcc

SEQ ID NO: 3889488 - DNA, 25 bp, Homo sapien
cgttccaatgaagacttgtttgtta

SEQ ID NO: 3889489 - DNA, 25 bp, Homo sapien
gacttgtttgttatttggcttgtag

SEQ ID NO: 3889490 - DNA, 25 bp, Homo sapien
gcccactgttcgttccaatgaagac

SEQ ID NO: 3889491 - DNA, 25 bp, Homo sapien
gttatttggcttgtagagggacatg

SEQ ID NO: 3889492 - DNA, 25 bp, Homo sapien
caatagcagatttaactgctggttc

SEQ ID NO: 3889493 - DNA, 25 bp, Homo sapien
ggttggcatctaccacttctctgga

SEQ ID NO: 3889494 - DNA, 25 bp, Homo sapien
tggaatcagcaaccccaatagcaga

SEQ ID NO: 3889495 - DNA, 25 bp, Homo sapien
tggccactgcctggttggcatctac

SEQ ID NO: 3889496 - DNA, 25 bp, Homo sapien
tgtggctagagaggccttacaatca

SEQ ID NO: 3889497 - DNA, 25 bp, Homo sapien
catgtggctagagaggccttacaat

SEQ ID NO: 3889498 - DNA, 25 bp, Homo sapien
tccatgtggctagagaggccttaca

SEQ ID NO: 3889499 - DNA, 25 bp, Homo sapien
acctcttacaaaatcatcagatctt

SEQ ID NO: 3889500 - DNA, 25 bp, Homo sapien
ctatttgaagaactcttgagtattt

SEQ ID NO: 3889501 - DNA, 25 bp, Homo sapien
tatttgaagaactcttgagtattta

SEQ ID NO: 3889502 - DNA, 25 bp, Homo sapien
atttgaagaactcttgagtatttac

SEQ ID NO: 3889503 - DNA, 25 bp, Homo sapien
tttgcaattgcctaactgctcagtg

SEQ ID NO: 3889504 - DNA, 25 bp, Homo sapien
ctttctcctgagtatctaatttgca

SEQ ID NO: 3889505 - DNA, 25 bp, Homo sapien
tgtgtttggcattagctttgagacc

SEQ ID NO: 3889506 - DNA, 25 bp, Homo sapien
tccactactgtctgttctttgtgtt

SEQ ID NO: 3889507 - DNA, 25 bp, Homo sapien
tggtgcagctgtcgtctaatacttg

SEQ ID NO: 3889508 - DNA, 25 bp, Homo sapien
tatgcttttttggtgcagctgtcgt

SEQ ID NO: 3889509 - DNA, 25 bp, Homo sapien
cagctgtcgtctaatacttgttgaa

SEQ ID NO: 3889510 - DNA, 25 bp, Homo sapien
gcttttttggtgcagctgtcgtcta

SEQ ID NO: 3889511 - DNA, 25 bp, Homo sapien
acaaagtcttgctcattatcactgc

SEQ ID NO: 3889512 - DNA, 25 bp, Homo sapien
ggaggaaacaaagtcttgctcatta

SEQ ID NO: 3889513 - DNA, 25 bp, Homo sapien
ggaaacaaagtcttgctcattatca

SEQ ID NO: 3889514 - DNA, 25 bp, Homo sapien
atggaggaaacaaagtcttgctcat

SEQ ID NO: 3889515 - DNA, 25 bp, Homo sapien
tggaagaacaattgctagaagattc

SEQ ID NO: 3889516 - DNA, 25 bp, Homo sapien
gaacaattgctagaagattcatatt

SEQ ID NO: 3889517 - DNA, 25 bp, Homo sapien
gaagaacaattgctagaagattcat

SEQ ID NO: 3889518 - DNA, 25 bp, Homo sapien
caattgctagaagattcatattgct

SEQ ID NO: 3889519 - DNA, 25 bp, Homo sapien
tactggagttttgggaatttgtgct

SEQ ID NO: 3889520 - DNA, 25 bp, Homo sapien
agtagtctgcgggtctggaccagct

SEQ ID NO: 3889521 - DNA, 25 bp, Homo sapien
agctccagagtctcgccccgaggca

SEQ ID NO: 3889522 - DNA, 25 bp, Homo sapien
catttcgagaatggtgggagccctg

SEQ ID NO: 3889523 - DNA, 25 bp, Homo sapien
gcagtcagccatgggagagagtagt

SEQ ID NO: 3889524 - DNA, 25 bp, Homo sapien
cacgttatcttaagggtgaattctt

SEQ ID NO: 3889525 - DNA, 25 bp, Homo sapien
ccacgttatcttaagggtgaattct

SEQ ID NO: 3889526 - DNA, 25 bp, Homo sapien
ctggcccacgttatcttaagggtga

SEQ ID NO: 3889527 - DNA, 25 bp, Homo sapien
tggcccacgttatcttaagggtgaa

SEQ ID NO: 3889528 - DNA, 25 bp, Homo sapien
caataactgattcacttcgcctgtt

SEQ ID NO: 3889529 - DNA, 25 bp, Homo sapien
cttcgcctgtttttggtcatttctg

SEQ ID NO: 3889530 - DNA, 25 bp, Homo sapien
tctgcaataactgattcacttcgcc

SEQ ID NO: 3889531 - DNA, 25 bp, Homo sapien
gattcacttcgcctgtttttggtca

SEQ ID NO: 3889532 - DNA, 25 bp, Homo sapien
ccatagcaagatctgacagcgtgga

SEQ ID NO: 3889533 - DNA, 25 bp, Homo sapien
gatctgacagcgtggacaccaaggc

SEQ ID NO: 3889534 - DNA, 25 bp, Homo sapien
ctgacagcgtggacaccaaggcagg

SEQ ID NO: 3889535 - DNA, 25 bp, Homo sapien
catagcaagatctgacagcgtggac

SEQ ID NO: 3889536 - DNA, 25 bp, Homo sapien
tgtgtaattttctaggtcggcttcc

SEQ ID NO: 3889537 - DNA, 25 bp, Homo sapien
tgtaattttctaggtcggcttcctc

SEQ ID NO: 3889538 - DNA, 25 bp, Homo sapien
tttctaggtcggcttcctcttctat

SEQ ID NO: 3889539 - DNA, 25 bp, Homo sapien
aatatgtgtaattttctaggtcggc

SEQ ID NO: 3889540 - DNA, 25 bp, Homo sapien
ggtgttccttggctagtgtttctgt

SEQ ID NO: 3889541 - DNA, 25 bp, Homo sapien
catctgagctggaattagtggagga

SEQ ID NO: 3889542 - DNA, 25 bp, Homo sapien
ttaatgatgcttaacctgtttgtca

SEQ ID NO: 3889543 - DNA, 25 bp, Homo sapien
ggagactgaacagctttagcggcct

SEQ ID NO: 3889544 - DNA, 25 bp, Homo sapien
tggtttagtgacctccgctctgagg

SEQ ID NO: 3889545 - DNA, 25 bp, Homo sapien
gtttagtgacctccgctctgaggca

SEQ ID NO: 3889546 - DNA, 25 bp, Homo sapien
ctggcctttggtttagtgacctccg

SEQ ID NO: 3889547 - DNA, 25 bp, Homo sapien
cctttggtttagtgacctccgctct

SEQ ID NO: 3889548 - DNA, 25 bp, Homo sapien
tcttgaacctgcatgacggtcatcg

SEQ ID NO: 3889549 - DNA, 25 bp, Homo sapien
cagggaactgctctctgctatgtca

SEQ ID NO: 3889550 - DNA, 25 bp, Homo sapien
tgtagtacctgcctgatgtaatggg

SEQ ID NO: 3889551 - DNA, 25 bp, Homo sapien
tttaccttggtgagagtttgccagc

SEQ ID NO: 3889552 - DNA, 25 bp, Homo sapien
taacagaattctgccccacacttaa

SEQ ID NO: 3889553 - DNA, 25 bp, Homo sapien
aacagaattctgccccacacttaac

SEQ ID NO: 3889554 - DNA, 25 bp, Homo sapien
cagaattctgccccacacttaacat

SEQ ID NO: 3889555 - DNA, 25 bp, Homo sapien
tttaacagaattctgccccacactt

SEQ ID NO: 3889556 - DNA, 25 bp, Homo sapien
aagtgaattcctgcatttgatagca

SEQ ID NO: 3889557 - DNA, 25 bp, Homo sapien
tgtaagtgcctataaccatgttcta

SEQ ID NO: 3889558 - DNA, 25 bp, Homo sapien
ggaaagcatcctctccaaagttgga

SEQ ID NO: 3889559 - DNA, 25 bp, Homo sapien
caaagttggagcttctattgccatg

SEQ ID NO: 3889560 - DNA, 25 bp, Homo sapien
atgtacatacattcatactgtagaa

SEQ ID NO: 3889561 - DNA, 25 bp, Homo sapien
tgtagaaaccagctcatgtgtacct

SEQ ID NO: 3889562 - DNA, 25 bp, Homo sapien
cagctcatgtgtacctcatatccca

SEQ ID NO: 3889563 - DNA, 25 bp, Homo sapien
acctcatatcccatccttaagagaa

SEQ ID NO: 3889564 - DNA, 25 bp, Homo sapien
tctgaagctcatcgactaagtgaaa

SEQ ID NO: 3889565 - DNA, 25 bp, Homo sapien
ttaaccctcaaagagagttcttgtg

SEQ ID NO: 3889566 - DNA, 25 bp, Homo sapien
tatttaaagaatatgataggccagc

SEQ ID NO: 3889567 - DNA, 25 bp, Homo sapien
aagtgtgtagcttcattcagatagc

SEQ ID NO: 3889568 - DNA, 25 bp, Homo sapien
atgtattttgtacagcatctggttt

SEQ ID NO: 3889569 - DNA, 25 bp, Homo sapien
aagagtttaccattacttgctttgt

SEQ ID NO: 3889570 - DNA, 25 bp, Homo sapien
tgttctatatacagattatgtccaa

SEQ ID NO: 3889571 - DNA, 25 bp, Homo sapien
tcgtctttgacgtgtaacacactaa

SEQ ID NO: 3889572 - DNA, 25 bp, Homo sapien
ctacccgctccaagagagctgagta

SEQ ID NO: 3889573 - DNA, 25 bp, Homo sapien
gtggtgctcaggctacagcagggag

SEQ ID NO: 3889574 - DNA, 25 bp, Homo sapien
gggtggtgctcaggctacagcaggg

SEQ ID NO: 3889575 - DNA, 25 bp, Homo sapien
cccgctccaagagagctgagtaatt

SEQ ID NO: 3889576 - DNA, 25 bp, Homo sapien
gtggccgtctgcttcatgccttggg

SEQ ID NO: 3889577 - DNA, 25 bp, Homo sapien
gggcagaattggtcttggtaactga

SEQ ID NO: 3889578 - DNA, 25 bp, Homo sapien
tcttggtaactgagagctgcaccgg

SEQ ID NO: 3889579 - DNA, 25 bp, Homo sapien
ctaatctttgttctggcgtggccgt

SEQ ID NO: 3889580 - DNA, 25 bp, Homo sapien
gctatgagctgtactgtctagtcca

SEQ ID NO: 3889581 - DNA, 25 bp, Homo sapien
ctttgcctagtgtggaaacttccaa

SEQ ID NO: 3889582 - DNA, 25 bp, Homo sapien
tcattctacataacagggcctggaa

SEQ ID NO: 3889583 - DNA, 25 bp, Homo sapien
tacaggaataattgcagctatgagc

SEQ ID NO: 3889584 - DNA, 25 bp, Homo sapien
ttccaaagttgatcattagtgaggg

SEQ ID NO: 3889585 - DNA, 25 bp, Homo sapien
tctttaccctatgtaaggcaaggag

SEQ ID NO: 3889586 - DNA, 25 bp, Homo sapien
tgctaacaagaattacgatggtcct

SEQ ID NO: 3889587 - DNA, 25 bp, Homo sapien
tgaagggcatcactttattccaaag

SEQ ID NO: 3889588 - DNA, 25 bp, Homo sapien
gactaatagagaccaagcaggttgg

SEQ ID NO: 3889589 - DNA, 25 bp, Homo sapien
gaaggcatgccaagccaaggttcag

SEQ ID NO: 3889590 - DNA, 25 bp, Homo sapien
caagccccatgtggttacagggaag

SEQ ID NO: 3889591 - DNA, 25 bp, Homo sapien
ggtttaatcccattgccctctagtg

SEQ ID NO: 3889592 - DNA, 25 bp, Homo sapien
tgcagtgcccgacaggcttctcttt

SEQ ID NO: 3889593 - DNA, 25 bp, Homo sapien
ggttaactcaaaccatactcgctca

SEQ ID NO: 3889594 - DNA, 25 bp, Homo sapien
gcttctctttgttattgatccctgg

SEQ ID NO: 3889595 - DNA, 25 bp, Homo sapien
cccaaatgcagtgcccgacaggctt

SEQ ID NO: 3889596 - DNA, 25 bp, Homo sapien
gggcagccgtcccttctgaaaagct

SEQ ID NO: 3889597 - DNA, 25 bp, Homo sapien
tcagccatggcaaagaccgttgctg

SEQ ID NO: 3889598 - DNA, 25 bp, Homo sapien
aattcaacgctcactgcaaacaggt

SEQ ID NO: 3889599 - DNA, 25 bp, Homo sapien
ggagtccgatggtgacctccaaaca

SEQ ID NO: 3889600 - DNA, 25 bp, Homo sapien
tgtgtggagggtgtacaaacagcca

SEQ ID NO: 3889601 - DNA, 25 bp, Homo sapien
cacaggaaaggtaagtcctacttgg

SEQ ID NO: 3889602 - DNA, 25 bp, Homo sapien
caggaagaagccagtcctgctgcct

SEQ ID NO: 3889603 - DNA, 25 bp, Homo sapien
tggccttggcaccaacgaggtcatg

SEQ ID NO: 3889604 - DNA, 25 bp, Homo sapien
gcaggaggcgatgccctctctgtag

SEQ ID NO: 3889605 - DNA, 25 bp, Homo sapien
agcagtaggcggcactattgtgcct

SEQ ID NO: 3889606 - DNA, 25 bp, Homo sapien
taggcggcactattgtgcctgtggc

SEQ ID NO: 3889607 - DNA, 25 bp, Homo sapien
tgtggcctccaggctatgccgctca

SEQ ID NO: 3889608 - DNA, 25 bp, Homo sapien
ctccccataagccaggtagcttgag

SEQ ID NO: 3889609 - DNA, 25 bp, Homo sapien
gctctggcactagcaggtggttctt

SEQ ID NO: 3889610 - DNA, 25 bp, Homo sapien
caggtggttcttgtgacttctgtct

SEQ ID NO: 3889611 - DNA, 25 bp, Homo sapien
gccaggtagcttgagagacccacac

SEQ ID NO: 3889612 - DNA, 25 bp, Homo sapien
tagtaggggtgacggatggccatcc

SEQ ID NO: 3889613 - DNA, 25 bp, Homo sapien
taggggtgacggatggccatcctgt

SEQ ID NO: 3889614 - DNA, 25 bp, Homo sapien
gacctagtaggggtgacggatggcc

SEQ ID NO: 3889615 - DNA, 25 bp, Homo sapien
ggggtgacggatggccatcctgttc

SEQ ID NO: 3889616 - DNA, 25 bp, Homo sapien
tgtgacccgtatgtccaccaaaggc

SEQ ID NO: 3889617 - DNA, 25 bp, Homo sapien
gccgtggtcatgtgcagctctgaga

SEQ ID NO: 3889618 - DNA, 25 bp, Homo sapien
ccaaagaggctgtggaagagccgct

SEQ ID NO: 3889619 - DNA, 25 bp, Homo sapien
caggctgacgttggcttccatgagc

SEQ ID NO: 3889620 - DNA, 25 bp, Homo sapien
ctttggttaaagctcctccagatgg

SEQ ID NO: 3889621 - DNA, 25 bp, Homo sapien
gtgcaggcggtcctccacgtcctgt

SEQ ID NO: 3889622 - DNA, 25 bp, Homo sapien
cttatggcctgggtaaggctgtgca

SEQ ID NO: 3889623 - DNA, 25 bp, Homo sapien
ggcctggcggttggcctccacgtca

SEQ ID NO: 3889624 - DNA, 25 bp, Homo sapien
caacagacatgtggtgtgacacaag

SEQ ID NO: 3889625 - DNA, 25 bp, Homo sapien
acagacatgtggtgtgacacaagcc

SEQ ID NO: 3889626 - DNA, 25 bp, Homo sapien
gcaacagacatgtggtgtgacacaa

SEQ ID NO: 3889627 - DNA, 25 bp, Homo sapien
ctgcaacagacatgtggtgtgacac

SEQ ID NO: 3889628 - DNA, 25 bp, Homo sapien
cgtgccctgtttgatttgcttccat

SEQ ID NO: 3889629 - DNA, 25 bp, Homo sapien
cacccggtgcacatcattctggaga

SEQ ID NO: 3889630 - DNA, 25 bp, Homo sapien
cactgcagctgtgaggttaccaggc

SEQ ID NO: 3889631 - DNA, 25 bp, Homo sapien
tgttcctgttgcacctcaacctcat

SEQ ID NO: 3889632 - DNA, 25 bp, Homo sapien
ggttcagagaaggagagttgaaggc

SEQ ID NO: 3889633 - DNA, 25 bp, Homo sapien
tgagagcagggaagttagctgctga

SEQ ID NO: 3889634 - DNA, 25 bp, Homo sapien
ctgagagcagggaagttagctgctg

SEQ ID NO: 3889635 - DNA, 25 bp, Homo sapien
gactggtccatcctgaggttcctgg

SEQ ID NO: 3889636 - DNA, 25 bp, Homo sapien
gtggctgtcaccaggatctgcaggc

SEQ ID NO: 3889637 - DNA, 25 bp, Homo sapien
caggtttgaagctgactggtccatc

SEQ ID NO: 3889638 - DNA, 25 bp, Homo sapien
tgaggttcctggtggctgtcaccag

SEQ ID NO: 3889639 - DNA, 25 bp, Homo sapien
agcaccttctgcttgacctggtaca

SEQ ID NO: 3889640 - DNA, 25 bp, Homo sapien
gcaccttctgcttgacctggtacac

SEQ ID NO: 3889641 - DNA, 25 bp, Homo sapien
caccttctgcttgacctggtacact

SEQ ID NO: 3889642 - DNA, 25 bp, Homo sapien
cggacacggctgctgcgagtggatg

SEQ ID NO: 3889643 - DNA, 25 bp, Homo sapien
ggagctccctgcggacacggctgct

SEQ ID NO: 3889644 - DNA, 25 bp, Homo sapien
ctgctgcgagtggatgaggaatttc

SEQ ID NO: 3889645 - DNA, 25 bp, Homo sapien
tggagctccctgcggacacggctgc

SEQ ID NO: 3889646 - DNA, 25 bp, Homo sapien
ggtgccagtgcagagccaccggtcc

SEQ ID NO: 3889647 - DNA, 25 bp, Homo sapien
gggtgccagtgcagagccaccggtc

SEQ ID NO: 3889648 - DNA, 25 bp, Homo sapien
gagaagagagccttccgcattattc

SEQ ID NO: 3889649 - DNA, 25 bp, Homo sapien
agaagagagccttccgcattattca

SEQ ID NO: 3889650 - DNA, 25 bp, Homo sapien
gaagagagccttccgcattattcat

SEQ ID NO: 3889651 - DNA, 25 bp, Homo sapien
cctgggcttcagcactgctattctc

SEQ ID NO: 3889652 - DNA, 25 bp, Homo sapien
ggcttcagcactgctattctctctg

SEQ ID NO: 3889653 - DNA, 25 bp, Homo sapien
cagcactgctattctctctgcccat

SEQ ID NO: 3889654 - DNA, 25 bp, Homo sapien
gaccctgggcttcagcactgctatt

SEQ ID NO: 3889655 - DNA, 25 bp, Homo sapien
atgcccccggcccaacttgctgaag

SEQ ID NO: 3889656 - DNA, 25 bp, Homo sapien
caacttgctgaagtgcccatttttc

SEQ ID NO: 3889657 - DNA, 25 bp, Homo sapien
tcctgctgggtgccctcatctccca

SEQ ID NO: 3889658 - DNA, 25 bp, Homo sapien
tgctgaagtgcccatttttccctct

SEQ ID NO: 3889659 - DNA, 25 bp, Homo sapien
tcagagaggctagtactggaagcct

SEQ ID NO: 3889660 - DNA, 25 bp, Homo sapien
gcagatcagagaggctagtactgga

SEQ ID NO: 3889661 - DNA, 25 bp, Homo sapien
cagagaggctagtactggaagcctg

SEQ ID NO: 3889662 - DNA, 25 bp, Homo sapien
gatcagagaggctagtactggaagc

SEQ ID NO: 3889663 - DNA, 25 bp, Homo sapien
ttggcaagtagctccagaaactgct

SEQ ID NO: 3889664 - DNA, 25 bp, Homo sapien
tcagccttggcaagtagctccagaa

SEQ ID NO: 3889665 - DNA, 25 bp, Homo sapien
tccagaaactgctagtgacgttgtc

SEQ ID NO: 3889666 - DNA, 25 bp, Homo sapien
aactgctagtgacgttgtcttcaag

SEQ ID NO: 3889667 - DNA, 25 bp, Homo sapien
ggctcacagagcagacaacggtttg

SEQ ID NO: 3889668 - DNA, 25 bp, Homo sapien
tggaccttaccaattgcggtgcagg

SEQ ID NO: 3889669 - DNA, 25 bp, Homo sapien
caaaatctgtccaggtatgtgagca

SEQ ID NO: 3889670 - DNA, 25 bp, Homo sapien
tatgtgagcaggcttcagtctttct

SEQ ID NO: 3889671 - DNA, 25 bp, Homo sapien
gaatgtcacaccactatatttcggg

SEQ ID NO: 3889672 - DNA, 25 bp, Homo sapien
gcctgtgggagtctggtcggagaga

SEQ ID NO: 3889673 - DNA, 25 bp, Homo sapien
tgagccccaacaatgagtaactgaa

SEQ ID NO: 3889674 - DNA, 25 bp, Homo sapien
tggtcggagagaccttaaggcttct

SEQ ID NO: 3889675 - DNA, 25 bp, Homo sapien
tgcagaaagcgaaatcacaaattag

SEQ ID NO: 3889676 - DNA, 25 bp, Homo sapien
ctgcagaaagcgaaatcacaaatta

SEQ ID NO: 3889677 - DNA, 25 bp, Homo sapien
gcagaaagcgaaatcacaaattagc

SEQ ID NO: 3889678 - DNA, 25 bp, Homo sapien
tggtgccctgcacgctctcacaagg

SEQ ID NO: 3889679 - DNA, 25 bp, Homo sapien
ccttctgcctctccttgtctgagaa

SEQ ID NO: 3889680 - DNA, 25 bp, Homo sapien
tctcacaaggtccactgctgagtcc

SEQ ID NO: 3889681 - DNA, 25 bp, Homo sapien
aacggtaatgcggtaatgcgctccc

SEQ ID NO: 3889682 - DNA, 25 bp, Homo sapien
gaagcagggtatgtgccagcagacc

SEQ ID NO: 3889683 - DNA, 25 bp, Homo sapien
tttgactgtagtgcctgccgctagg

SEQ ID NO: 3889684 - DNA, 25 bp, Homo sapien
cagagtccccaaggcatccatatgg

SEQ ID NO: 3889685 - DNA, 25 bp, Homo sapien
aaggcttcggtgacagacggcaatc

SEQ ID NO: 3889686 - DNA, 25 bp, Homo sapien
atctcgccctctcaggggaaagatt

SEQ ID NO: 3889687 - DNA, 25 bp, Homo sapien
cattaaggtcaacaccagccctgag

SEQ ID NO: 3889688 - DNA, 25 bp, Homo sapien
gactgcagagcgttaggcagcacct

SEQ ID NO: 3889689 - DNA, 25 bp, Homo sapien
ccacatgcgtttgggtgagaccgac

SEQ ID NO: 3889690 - DNA, 25 bp, Homo sapien
taggcagattcgaggatccaagtcc

SEQ ID NO: 3889691 - DNA, 25 bp, Homo sapien
aggtggtgtgcgcccttctcctgcc

SEQ ID NO: 3889692 - DNA, 25 bp, Homo sapien
gaggtggtgtgcgcccttctcctgc

SEQ ID NO: 3889693 - DNA, 25 bp, Homo sapien
ccggagcctgtatgacgggaaccgc

SEQ ID NO: 3889694 - DNA, 25 bp, Homo sapien
ttaaaaaccggagctggcgcttggc

SEQ ID NO: 3889695 - DNA, 25 bp, Homo sapien
cagctgctcttgacgactccacaga

SEQ ID NO: 3889696 - DNA, 25 bp, Homo sapien
actctgggcaggatccaacgtcgct

SEQ ID NO: 3889697 - DNA, 25 bp, Homo sapien
ctgagacgcagggggcaggcagaac

SEQ ID NO: 3889698 - DNA, 25 bp, Homo sapien
acgcagggggcaggcagaacgccca

SEQ ID NO: 3889699 - DNA, 25 bp, Homo sapien
tgagacgcagggggcaggcagaacg

SEQ ID NO: 3889700 - DNA, 25 bp, Homo sapien
agacgcagggggcaggcagaacgcc

SEQ ID NO: 3889701 - DNA, 25 bp, Homo sapien
ccgcagggaggcagcggaacagagg

SEQ ID NO: 3889702 - DNA, 25 bp, Homo sapien
cgagcagacagatggtgcccgcagg

SEQ ID NO: 3889703 - DNA, 25 bp, Homo sapien
cagacagatggtgcccgcagggagg

SEQ ID NO: 3889704 - DNA, 25 bp, Homo sapien
cccggcgagcagacagatggtgccc

SEQ ID NO: 3889705 - DNA, 25 bp, Homo sapien
tcgccgaaaagtaatcgtcgcctta

SEQ ID NO: 3889706 - DNA, 25 bp, Homo sapien
ccccatcgccgaaaagtaatcgtcg

SEQ ID NO: 3889707 - DNA, 25 bp, Homo sapien
tgaaggtccaggacagggatcgggc

SEQ ID NO: 3889708 - DNA, 25 bp, Homo sapien
tccaggacagggatcgggcgcggcc

SEQ ID NO: 3889709 - DNA, 25 bp, Homo sapien
gcaaagaaggtccttagttcctcca

SEQ ID NO: 3889710 - DNA, 25 bp, Homo sapien
cctccgtattctggaggtgacccag

SEQ ID NO: 3889711 - DNA, 25 bp, Homo sapien
ctggcaaagaaggtccttagttcct

SEQ ID NO: 3889712 - DNA, 25 bp, Homo sapien
gctctctcctccgtattctggaggt

SEQ ID NO: 3889713 - DNA, 25 bp, Homo sapien
caggcttcgttaggactccagctcc

SEQ ID NO: 3889714 - DNA, 25 bp, Homo sapien
gttggttcttcctgcacctagccca

SEQ ID NO: 3889715 - DNA, 25 bp, Homo sapien
gcacctagcccaggcttcgttagga

SEQ ID NO: 3889716 - DNA, 25 bp, Homo sapien
cccagtcaggagacaatatccaaac

SEQ ID NO: 3889717 - DNA, 25 bp, Homo sapien
ctgaaatgctaccaaggaagcctcc

SEQ ID NO: 3889718 - DNA, 25 bp, Homo sapien
agactgaaatgctaccaaggaagcc

SEQ ID NO: 3889719 - DNA, 25 bp, Homo sapien
ggaagcctccgtgtcaggtcccttc

SEQ ID NO: 3889720 - DNA, 25 bp, Homo sapien
aaggaagcctccgtgtcaggtccct

SEQ ID NO: 3889721 - DNA, 25 bp, Homo sapien
ttctgatgggttaatcgagacgagg

SEQ ID NO: 3889722 - DNA, 25 bp, Homo sapien
ggtgcaaaggatgggctgctttctg

SEQ ID NO: 3889723 - DNA, 25 bp, Homo sapien
gatgggttaatcgagacgaggttcc

SEQ ID NO: 3889724 - DNA, 25 bp, Homo sapien
tgggttaatcgagacgaggttccca

SEQ ID NO: 3889725 - DNA, 25 bp, Homo sapien
aacagtccagatgctagctgcagcc

SEQ ID NO: 3889726 - DNA, 25 bp, Homo sapien
gacaccttctctgggattgggaaaa

SEQ ID NO: 3889727 - DNA, 25 bp, Homo sapien
ggacctgtaccaccgaatactctgg

SEQ ID NO: 3889728 - DNA, 25 bp, Homo sapien
ccagaggcatggaaaggtctcctgc

SEQ ID NO: 3889729 - DNA, 25 bp, Homo sapien
cacagcctggccctgatctccgggc

SEQ ID NO: 3889730 - DNA, 25 bp, Homo sapien
cctcctcggtctgccccctcattaa

SEQ ID NO: 3889731 - DNA, 25 bp, Homo sapien
ctggccctgatctccgggcagccac

SEQ ID NO: 3889732 - DNA, 25 bp, Homo sapien
ttccaggcgccatctagcacagcct

SEQ ID NO: 3889733 - DNA, 25 bp, Homo sapien
ggaaatccaatccaacggtctcagg

SEQ ID NO: 3889734 - DNA, 25 bp, Homo sapien
gactcggtcctcagatcctcggaag

SEQ ID NO: 3889735 - DNA, 25 bp, Homo sapien
ttcatgattcctcgcaagctgggcc

SEQ ID NO: 3889736 - DNA, 25 bp, Homo sapien
tagcctcccaaattcggaaatccaa

SEQ ID NO: 3889737 - DNA, 25 bp, Homo sapien
gaagctccttaagtgagcaattcct

SEQ ID NO: 3889738 - DNA, 25 bp, Homo sapien
tcctgtctcaagagcgaagctcctt

SEQ ID NO: 3889739 - DNA, 25 bp, Homo sapien
gctgcatgccctggcaattaagaac

SEQ ID NO: 3889740 - DNA, 25 bp, Homo sapien
gggctgcatgccctggcaattaaga

SEQ ID NO: 3889741 - DNA, 25 bp, Homo sapien
aataaatatgaaacacttcacgaat

SEQ ID NO: 3889742 - DNA, 25 bp, Homo sapien
ttagtgtatgtgctgatgaagcaag

SEQ ID NO: 3889743 - DNA, 25 bp, Homo sapien
aggggccaggctaatctctgtattg

SEQ ID NO: 3889744 - DNA, 25 bp, Homo sapien
ttgcatgtcatccttgcacaggggc

SEQ ID NO: 3889745 - DNA, 25 bp, Homo sapien
tacagtgagtattttgtaagttgca

SEQ ID NO: 3889746 - DNA, 25 bp, Homo sapien
aacaatttgtgtcttgggtctacag

SEQ ID NO: 3889747 - DNA, 25 bp, Homo sapien
tgactctcttaccaacatacgatgt

SEQ ID NO: 3889748 - DNA, 25 bp, Homo sapien
ggtattagtatagccaccccagctc

SEQ ID NO: 3889749 - DNA, 25 bp, Homo sapien
catgctgagttcaaagtctagttca

SEQ ID NO: 3889750 - DNA, 25 bp, Homo sapien
caatagcatacattaactctgctcc

SEQ ID NO: 3889751 - DNA, 25 bp, Homo sapien
tctctgtcccctacctatagttaac

SEQ ID NO: 3889752 - DNA, 25 bp, Homo sapien
gttcagactgatagcaactcagctt

SEQ ID NO: 3889753 - DNA, 25 bp, Homo sapien
tcaataatgcggacaaaacccaatt

SEQ ID NO: 3889754 - DNA, 25 bp, Homo sapien
tttaagactgctgaaagtggttgcc

SEQ ID NO: 3889755 - DNA, 25 bp, Homo sapien
tggctgtggaatatgtaaagcaccc

SEQ ID NO: 3889756 - DNA, 25 bp, Homo sapien
cataggcctatactaccacaactgg

SEQ ID NO: 3889757 - DNA, 25 bp, Homo sapien
taaataaatgaagtatgtttgataa

SEQ ID NO: 3889758 - DNA, 25 bp, Homo sapien
aatgaagtatgtttgataaaaatac

SEQ ID NO: 3889759 - DNA, 25 bp, Homo sapien
tgataaaaatacaaacacaagtcaa

SEQ ID NO: 3889760 - DNA, 25 bp, Homo sapien
atacaaacacaagtcaataaaagtc

SEQ ID NO: 3889761 - DNA, 25 bp, Homo sapien
tctctgaacgtgtaaagcaccgaac

SEQ ID NO: 3889762 - DNA, 25 bp, Homo sapien
tctgggcagctcacaataaagtgga

SEQ ID NO: 3889763 - DNA, 25 bp, Homo sapien
catttcagaaatccaattgcagtat

SEQ ID NO: 3889764 - DNA, 25 bp, Homo sapien
tacaggtggtcgctataaacatttc

SEQ ID NO: 3889765 - DNA, 25 bp, Homo sapien
gggccattggcaatgctcagagcca

SEQ ID NO: 3889766 - DNA, 25 bp, Homo sapien
tagtcaaccatagatcttcaaaaga

SEQ ID NO: 3889767 - DNA, 25 bp, Homo sapien
agccagccagactccaaacagggag

SEQ ID NO: 3889768 - DNA, 25 bp, Homo sapien
ccattttgcaggtatgaagataact

SEQ ID NO: 3889769 - DNA, 25 bp, Homo sapien
tctgctggacaatacatgaatgata

SEQ ID NO: 3889770 - DNA, 25 bp, Homo sapien
ctataggcattcactgtttgagtca

SEQ ID NO: 3889771 - DNA, 25 bp, Homo sapien
gcttttaatgtctgctggacaatac

SEQ ID NO: 3889772 - DNA, 25 bp, Homo sapien
tctataggcattcactgtttgagtc

SEQ ID NO: 3889773 - DNA, 25 bp, Homo sapien
gcagcatgtacttattctattctaa

SEQ ID NO: 3889774 - DNA, 25 bp, Homo sapien
cagcatgtacttattctattctaaa

SEQ ID NO: 3889775 - DNA, 25 bp, Homo sapien
agcagcatgtacttattctattcta

SEQ ID NO: 3889776 - DNA, 25 bp, Homo sapien
cttgtacatgatccgctaaccttaa

SEQ ID NO: 3889777 - DNA, 25 bp, Homo sapien
ttgtacatgatccgctaaccttaat

SEQ ID NO: 3889778 - DNA, 25 bp, Homo sapien
tacatgatccgctaaccttaatttc

SEQ ID NO: 3889779 - DNA, 25 bp, Homo sapien
gtacatgatccgctaaccttaattt

SEQ ID NO: 3889780 - DNA, 25 bp, Homo sapien
ataggcagctgttctcaggtccaat

SEQ ID NO: 3889781 - DNA, 25 bp, Homo sapien
taggcagctgttctcaggtccaatc

SEQ ID NO: 3889782 - DNA, 25 bp, Homo sapien
agaacgctccattgtgtatgccaag

SEQ ID NO: 3889783 - DNA, 25 bp, Homo sapien
tggcagaacgctccattgtgtatgc

SEQ ID NO: 3889784 - DNA, 25 bp, Homo sapien
gcagaacgctccattgtgtatgcca

SEQ ID NO: 3889785 - DNA, 25 bp, Homo sapien
cctggcagaacgctccattgtgtat

SEQ ID NO: 3889786 - DNA, 25 bp, Homo sapien
ggcggcgggaacggagtatctctct

SEQ ID NO: 3889787 - DNA, 25 bp, Homo sapien
catcatttactggtaaagaagtttc

SEQ ID NO: 3889788 - DNA, 25 bp, Homo sapien
gagcatgtgtgaagtacaactgtgg

SEQ ID NO: 3889789 - DNA, 25 bp, Homo sapien
gactatgccgcagatgaaatccatc

SEQ ID NO: 3889790 - DNA, 25 bp, Homo sapien
ccttcactgttaaaacacgtgcgtg

SEQ ID NO: 3889791 - DNA, 25 bp, Homo sapien
catgtcacgcacttactgtcaagct

SEQ ID NO: 3889792 - DNA, 25 bp, Homo sapien
ctttctaaactctcttgaacagaca

SEQ ID NO: 3889793 - DNA, 25 bp, Homo sapien
tctgccgtgggtacaatgggaatag

SEQ ID NO: 3889794 - DNA, 25 bp, Homo sapien
tggaactctgccgtgggtacaatgg

SEQ ID NO: 3889795 - DNA, 25 bp, Homo sapien
caatgggaatagttccaccatgctt

SEQ ID NO: 3889796 - DNA, 25 bp, Homo sapien
gagcaagtggtagttagaatccctt

SEQ ID NO: 3889797 - DNA, 25 bp, Homo sapien
tcaaagtaagatactgtcactcctc

SEQ ID NO: 3889798 - DNA, 25 bp, Homo sapien
gccactcaaagtaagatactgtcac

SEQ ID NO: 3889799 - DNA, 25 bp, Homo sapien
aagtaagatactgtcactcctccag

SEQ ID NO: 3889800 - DNA, 25 bp, Homo sapien
gagttgttggcccattggcaccttc

SEQ ID NO: 3889801 - DNA, 25 bp, Homo sapien
ttctggagttgttggcccattggca

SEQ ID NO: 3889802 - DNA, 25 bp, Homo sapien
ggcccattggcaccttcagcaatga

SEQ ID NO: 3889803 - DNA, 25 bp, Homo sapien
tgttggcccattggcaccttcagca

SEQ ID NO: 3889804 - DNA, 25 bp, Homo sapien
ggcaagagatgtgcatatatgaaca

SEQ ID NO: 3889805 - DNA, 25 bp, Homo sapien
tcaggaacatagagaaatgcgaaca

SEQ ID NO: 3889806 - DNA, 25 bp, Homo sapien
tgcaagagagtcaggaacatagaga

SEQ ID NO: 3889807 - DNA, 25 bp, Homo sapien
gaaatgcgaacaccaccgtcaaatc

SEQ ID NO: 3889808 - DNA, 25 bp, Homo sapien
tatgtgcagtatgtgccaataaagc

SEQ ID NO: 3889809 - DNA, 25 bp, Homo sapien
tacaggagtgtcaggcagatgcgtt

SEQ ID NO: 3889810 - DNA, 25 bp, Homo sapien
gcgtttgttttggtaatggttgcac

SEQ ID NO: 3889811 - DNA, 25 bp, Homo sapien
tgtgccggtagctaaaagccattaa

SEQ ID NO: 3889812 - DNA, 25 bp, Homo sapien
gcttccttcatagggctttgccttg

SEQ ID NO: 3889813 - DNA, 25 bp, Homo sapien
tccaagatgcttccttcatagggct

SEQ ID NO: 3889814 - DNA, 25 bp, Homo sapien
ggcagctgggatcagtatgtcacag

SEQ ID NO: 3889815 - DNA, 25 bp, Homo sapien
actctgggtgcgttggatttggtca

SEQ ID NO: 3889816 - DNA, 25 bp, Homo sapien
ccattgattgaaaatcacaattaat

SEQ ID NO: 3889817 - DNA, 25 bp, Homo sapien
attgattgaaaatcacaattaatag

SEQ ID NO: 3889818 - DNA, 25 bp, Homo sapien
ctgccattgattgaaaatcacaatt

SEQ ID NO: 3889819 - DNA, 25 bp, Homo sapien
gccattgattgaaaatcacaattaa

SEQ ID NO: 3889820 - DNA, 25 bp, Homo sapien
ttatatttagtgtctatgctataaa

SEQ ID NO: 3889821 - DNA, 25 bp, Homo sapien
gttcctttgggtcaataccatctgg

SEQ ID NO: 3889822 - DNA, 25 bp, Homo sapien
catcagactcaccaacagcaataca

SEQ ID NO: 3889823 - DNA, 25 bp, Homo sapien
tctggattccatatactcccatcag

SEQ ID NO: 3889824 - DNA, 25 bp, Homo sapien
cagcaatacatttagcaccaaaacg

SEQ ID NO: 3889825 - DNA, 25 bp, Homo sapien
ccagccaccacttctattttcaagt

SEQ ID NO: 3889826 - DNA, 25 bp, Homo sapien
tttcaacttaattaagattctccta

SEQ ID NO: 3889827 - DNA, 25 bp, Homo sapien
taatttcaacttaattaagattctc

SEQ ID NO: 3889828 - DNA, 25 bp, Homo sapien
actgtgtccagccaccacttctatt

SEQ ID NO: 3889829 - DNA, 25 bp, Homo sapien
aagagacttgcccttctagctataa

SEQ ID NO: 3889830 - DNA, 25 bp, Homo sapien
tgaaacaaatttgggtcagtgtgta

SEQ ID NO: 3889831 - DNA, 25 bp, Homo sapien
tgaatcataccaaggttcaaaaaac

SEQ ID NO: 3889832 - DNA, 25 bp, Homo sapien
taacagtttcacatgtacttgagag

SEQ ID NO: 3889833 - DNA, 25 bp, Homo sapien
gtttaccagtaacacaggcgtgtgc

SEQ ID NO: 3889834 - DNA, 25 bp, Homo sapien
ggccagtagcagagatgcgtccatg

SEQ ID NO: 3889835 - DNA, 25 bp, Homo sapien
cctaaaatgctcatgtaagaagctt

SEQ ID NO: 3889836 - DNA, 25 bp, Homo sapien
aaccctggtgtcattcctaaaatgc

SEQ ID NO: 3889837 - DNA, 25 bp, Homo sapien
tacttttaccaatagagacaagact

SEQ ID NO: 3889838 - DNA, 25 bp, Homo sapien
aaaatatgctaattaggagtgtgtg

SEQ ID NO: 3889839 - DNA, 25 bp, Homo sapien
taaggtatacttttaccaatagaga

SEQ ID NO: 3889840 - DNA, 25 bp, Homo sapien
tttaccaatagagacaagactcact

SEQ ID NO: 3889841 - DNA, 25 bp, Homo sapien
tcacaaaagtagagctagctcagcc

SEQ ID NO: 3889842 - DNA, 25 bp, Homo sapien
caagagtgtagggattgaacatcaa

SEQ ID NO: 3889843 - DNA, 25 bp, Homo sapien
tactataagacttgagcatgtcacc

SEQ ID NO: 3889844 - DNA, 25 bp, Homo sapien
cacgcccggcaaagtagaccatatt

SEQ ID NO: 3889845 - DNA, 25 bp, Homo sapien
cagaattggatgcttcttgatgtac

SEQ ID NO: 3889846 - DNA, 25 bp, Homo sapien
tctgcttatgcaccttagttcctct

SEQ ID NO: 3889847 - DNA, 25 bp, Homo sapien
cctctttaaatggaagccctctgag

SEQ ID NO: 3889848 - DNA, 25 bp, Homo sapien
ggaagccctctgagggaaaaatcag

SEQ ID NO: 3889849 - DNA, 25 bp, Homo sapien
ctatggtgctggcataggtatcagc

SEQ ID NO: 3889850 - DNA, 25 bp, Homo sapien
tccaggacatctcccgctcacctgt

SEQ ID NO: 3889851 - DNA, 25 bp, Homo sapien
atagtgccctatggtgctggcatag

SEQ ID NO: 3889852 - DNA, 25 bp, Homo sapien
tgccctatggtgctggcataggtat

SEQ ID NO: 3889853 - DNA, 25 bp, Homo sapien
ctcaaacaacaattccaactaggcc

SEQ ID NO: 3889854 - DNA, 25 bp, Homo sapien
caattccaactaggccggggcagtg

SEQ ID NO: 3889855 - DNA, 25 bp, Homo sapien
caaacaacaattccaactaggccgg

SEQ ID NO: 3889856 - DNA, 25 bp, Homo sapien
caacaattccaactaggccggggca

SEQ ID NO: 3889857 - DNA, 25 bp, Homo sapien
ttcttatatagagaacaggtatgag

SEQ ID NO: 3889858 - DNA, 25 bp, Homo sapien
ggtatgaggcagaagttaatctttt

SEQ ID NO: 3889859 - DNA, 25 bp, Homo sapien
tgaaagggtaattttggtacacaga

SEQ ID NO: 3889860 - DNA, 25 bp, Homo sapien
cttggcctaacagataaattcttat

SEQ ID NO: 3889861 - DNA, 25 bp, Homo sapien
taagacttctatgtaagacttctac

SEQ ID NO: 3889862 - DNA, 25 bp, Homo sapien
ccaatgtcacttacaatagcattaa

SEQ ID NO: 3889863 - DNA, 25 bp, Homo sapien
taagatggcaatactggtcaggtgc

SEQ ID NO: 3889864 - DNA, 25 bp, Homo sapien
aatatttagttgtaagacttctatg

SEQ ID NO: 3889865 - DNA, 25 bp, Homo sapien
ggtctgagcctcaatctgacactct

SEQ ID NO: 3889866 - DNA, 25 bp, Homo sapien
cacacatgtgacaggatcagggttc

SEQ ID NO: 3889867 - DNA, 25 bp, Homo sapien
tcaatttaactgcatcctgggtcaa

SEQ ID NO: 3889868 - DNA, 25 bp, Homo sapien
caaatttgaaggtttgccgaggagt

SEQ ID NO: 3889869 - DNA, 25 bp, Homo sapien
cttgtgggggaaatgctaagaaagg

SEQ ID NO: 3889870 - DNA, 25 bp, Homo sapien
tagggcaagcattctattaagtagt

SEQ ID NO: 3889871 - DNA, 25 bp, Homo sapien
caaattagaagccttctagattaaa

SEQ ID NO: 3889872 - DNA, 25 bp, Homo sapien
caccacgctcggcagtaagtattaa

SEQ ID NO: 3889873 - DNA, 25 bp, Homo sapien
ttaactatactgatagggcaagcat

SEQ ID NO: 3889874 - DNA, 25 bp, Homo sapien
gaatattcagattgtgcacaaagaa

SEQ ID NO: 3889875 - DNA, 25 bp, Homo sapien
aaatgttgtatgtttggcaaaagct

SEQ ID NO: 3889876 - DNA, 25 bp, Homo sapien
aaagaatattcagattgtgcacaaa

SEQ ID NO: 3889877 - DNA, 25 bp, Homo sapien
tggcaaaagctcctataacaaatag

SEQ ID NO: 3889878 - DNA, 25 bp, Homo sapien
gtgaacctccttgtgatcttttcca

SEQ ID NO: 3889879 - DNA, 25 bp, Homo sapien
agtatagttcttgggattgatctta

SEQ ID NO: 3889880 - DNA, 25 bp, Homo sapien
gggattgatcttaacaccagcttta

SEQ ID NO: 3889881 - DNA, 25 bp, Homo sapien
tcttgggattgatcttaacaccagc

SEQ ID NO: 3889882 - DNA, 25 bp, Homo sapien
gattgatcttaacaccagctttagc

SEQ ID NO: 3889883 - DNA, 25 bp, Homo sapien
ttttacttcatctacactcacatca

SEQ ID NO: 3889884 - DNA, 25 bp, Homo sapien
tagtgcccctgtatctagtagccat

SEQ ID NO: 3889885 - DNA, 25 bp, Homo sapien
cagacaggtaggtactagtgcccct

SEQ ID NO: 3889886 - DNA, 25 bp, Homo sapien
ccttcaccacttctgcaaagagggc

SEQ ID NO: 3889887 - DNA, 25 bp, Homo sapien
cacaagtaagtaatgggagccccag

SEQ ID NO: 3889888 - DNA, 25 bp, Homo sapien
ccacgagggcagactttgttatgtt

SEQ ID NO: 3889889 - DNA, 25 bp, Homo sapien
tatgttcactgctttaattcctggt

SEQ ID NO: 3889890 - DNA, 25 bp, Homo sapien
gttatgttcactgctttaattcctg

SEQ ID NO: 3889891 - DNA, 25 bp, Homo sapien
ctggcaagttagcaccacgagggca

SEQ ID NO: 3889892 - DNA, 25 bp, Homo sapien
aatacatgccgaattaatatacgaa

SEQ ID NO: 3889893 - DNA, 25 bp, Homo sapien
tatacgaatattctgactcttaaaa

SEQ ID NO: 3889894 - DNA, 25 bp, Homo sapien
ggcactcaaatacatgccgaattaa

SEQ ID NO: 3889895 - DNA, 25 bp, Homo sapien
aattaatatacgaatattctgactc

SEQ ID NO: 3889896 - DNA, 25 bp, Homo sapien
gaaggaataagtttcttcgagatag

SEQ ID NO: 3889897 - DNA, 25 bp, Homo sapien
atttgcaattgtttccagtggtgaa

SEQ ID NO: 3889898 - DNA, 25 bp, Homo sapien
aaaagtactgcacatttcaaaatca

SEQ ID NO: 3889899 - DNA, 25 bp, Homo sapien
cttcgagatagattgcacagcatgg

SEQ ID NO: 3889900 - DNA, 25 bp, Homo sapien
tcaggaactatttattcagtaacca

SEQ ID NO: 3889901 - DNA, 25 bp, Homo sapien
gaactatttattcagtaaccaagag

SEQ ID NO: 3889902 - DNA, 25 bp, Homo sapien
tatttattcagtaaccaagagttct

SEQ ID NO: 3889903 - DNA, 25 bp, Homo sapien
caggaactatttattcagtaaccaa

SEQ ID NO: 3889904 - DNA, 25 bp, Homo sapien
cttatgaccccagtcttctccttag

SEQ ID NO: 3889905 - DNA, 25 bp, Homo sapien
catgttccctgcaattatatatgta

SEQ ID NO: 3889906 - DNA, 25 bp, Homo sapien
taacttagctgcactttcacaccaa

SEQ ID NO: 3889907 - DNA, 25 bp, Homo sapien
agactcccttgacttccacttatga

SEQ ID NO: 3889908 - DNA, 25 bp, Homo sapien
gacaacagtgtattgcatgaggcat

SEQ ID NO: 3889909 - DNA, 25 bp, Homo sapien
tcaaccttagtagccacatttggaa

SEQ ID NO: 3889910 - DNA, 25 bp, Homo sapien
tcaactccactacgtactagctgtg

SEQ ID NO: 3889911 - DNA, 25 bp, Homo sapien
ggttctcaatcagcgcttacaatta

SEQ ID NO: 3889912 - DNA, 25 bp, Homo sapien
ttccgacttgatagtgaacacttga

SEQ ID NO: 3889913 - DNA, 25 bp, Homo sapien
gcagaatcttctaggtgtagttgcc

SEQ ID NO: 3889914 - DNA, 25 bp, Homo sapien
taatcggaaggtcttgagtagctcc

SEQ ID NO: 3889915 - DNA, 25 bp, Homo sapien
gcctttcctgcctttaacagtagta

SEQ ID NO: 3889916 - DNA, 25 bp, Homo sapien
gattcatttgaataactagtcagtt

SEQ ID NO: 3889917 - DNA, 25 bp, Homo sapien
ataactagtcagttttagacagcgg

SEQ ID NO: 3889918 - DNA, 25 bp, Homo sapien
tttgaataactagtcagttttagac

SEQ ID NO: 3889919 - DNA, 25 bp, Homo sapien
tattgattcatttgaataactagtc

SEQ ID NO: 3889920 - DNA, 25 bp, Homo sapien
taacggcctcaggtacatgtagtaa

SEQ ID NO: 3889921 - DNA, 25 bp, Homo sapien
acacagacaaatctaacggcctcag

SEQ ID NO: 3889922 - DNA, 25 bp, Homo sapien
aaatctaacggcctcaggtacatgt

SEQ ID NO: 3889923 - DNA, 25 bp, Homo sapien
cagacaaatctaacggcctcaggta

SEQ ID NO: 3889924 - DNA, 25 bp, Homo sapien
ggagctgcgacttataaaaacagga

SEQ ID NO: 3889925 - DNA, 25 bp, Homo sapien
aaactatggtaaacgagttgcttca

SEQ ID NO: 3889926 - DNA, 25 bp, Homo sapien
cgagttgcttcagtgagtttgcgga

SEQ ID NO: 3889927 - DNA, 25 bp, Homo sapien
ttcagtgagtttgcggagctgcgac

SEQ ID NO: 3889928 - DNA, 25 bp, Homo sapien
aatcagaggtcaaagtggttcaaac

SEQ ID NO: 3889929 - DNA, 25 bp, Homo sapien
aatgtaggagactgacggtgtgtac

SEQ ID NO: 3889930 - DNA, 25 bp, Homo sapien
gggaacaccagcaccgctcaagttt

SEQ ID NO: 3889931 - DNA, 25 bp, Homo sapien
tccggtacagagaggatttctaaaa

SEQ ID NO: 3889932 - DNA, 25 bp, Homo sapien
tacagaggccaaatctacagacatt

SEQ ID NO: 3889933 - DNA, 25 bp, Homo sapien
ttggaacaggagtgaacaaatacca

SEQ ID NO: 3889934 - DNA, 25 bp, Homo sapien
gtaaatttactgtcaggacgccagg

SEQ ID NO: 3889935 - DNA, 25 bp, Homo sapien
ggataacccagtgactaccaaacat

SEQ ID NO: 3889936 - DNA, 25 bp, Homo sapien
tagaagtgcatttcggcaggacccg

SEQ ID NO: 3889937 - DNA, 25 bp, Homo sapien
gtgtgacacagacaccgggaccaaa

SEQ ID NO: 3889938 - DNA, 25 bp, Homo sapien
cccaagaacactgacgaggcattat

SEQ ID NO: 3889939 - DNA, 25 bp, Homo sapien
gaggcattatcacacgggcaggtca

SEQ ID NO: 3889940 - DNA, 25 bp, Homo sapien
cttgcagggcgtgcggtgctggctg

SEQ ID NO: 3889941 - DNA, 25 bp, Homo sapien
cccaggagccgtcgtcgcgccggat

SEQ ID NO: 3889942 - DNA, 25 bp, Homo sapien
gccttcgatgacctcccaggagccg

SEQ ID NO: 3889943 - DNA, 25 bp, Homo sapien
gatgacctcccaggagccgtcgtcg

SEQ ID NO: 3889944 - DNA, 25 bp, Homo sapien
tcgatgacctcccaggagccgtcgt

SEQ ID NO: 3889945 - DNA, 25 bp, Homo sapien
cacatggttgcagggcttgatgatc

SEQ ID NO: 3889946 - DNA, 25 bp, Homo sapien
ttgatgatccgcaggatgccgcgca

SEQ ID NO: 3889947 - DNA, 25 bp, Homo sapien
tgctggcgccgcgatcgaagaagcc

SEQ ID NO: 3889948 - DNA, 25 bp, Homo sapien
gactcagcacatggttgcagggctt

SEQ ID NO: 3889949 - DNA, 25 bp, Homo sapien
ccgagtcggcggacgccgagcccag

SEQ ID NO: 3889950 - DNA, 25 bp, Homo sapien
aacgcggccgagtcggcggacgccg

SEQ ID NO: 3889951 - DNA, 25 bp, Homo sapien
gcggccgagtcggcggacgccgagc

SEQ ID NO: 3889952 - DNA, 25 bp, Homo sapien
gcaacgcggccgagtcggcggacgc

SEQ ID NO: 3889953 - DNA, 25 bp, Homo sapien
ggaggtgcgtgatggtcgcgaaaca

SEQ ID NO: 3889954 - DNA, 25 bp, Homo sapien
gcgcgggttgcccttttaagccgca

SEQ ID NO: 3889955 - DNA, 25 bp, Homo sapien
tggtcgcgaaacaggcgcgctttct

SEQ ID NO: 3889956 - DNA, 25 bp, Homo sapien
tcgggcgctcgccacctaacgggga

SEQ ID NO: 3889957 - DNA, 25 bp, Homo sapien
cagaacggtttttgtatgcttcaac

SEQ ID NO: 3889958 - DNA, 25 bp, Homo sapien
gtattttattgcatggacgcaccat

SEQ ID NO: 3889959 - DNA, 25 bp, Homo sapien
taacaatgctgtaatagataaccta

SEQ ID NO: 3889960 - DNA, 25 bp, Homo sapien
caaactcttgtggttataacaatgc

SEQ ID NO: 3889961 - DNA, 25 bp, Homo sapien
gcagctgattgccaccttctgtaga

SEQ ID NO: 3889962 - DNA, 25 bp, Homo sapien
tgtaaacacattaatcctgggatgg

SEQ ID NO: 3889963 - DNA, 25 bp, Homo sapien
gaagctttgctcatagggagataca

SEQ ID NO: 3889964 - DNA, 25 bp, Homo sapien
taaatgccaggttgctgaggactaa

SEQ ID NO: 3889965 - DNA, 25 bp, Homo sapien
aacagtttatggacatagcagaaga

SEQ ID NO: 3889966 - DNA, 25 bp, Homo sapien
taacagtttatggacatagcagaag

SEQ ID NO: 3889967 - DNA, 25 bp, Homo sapien
ttaacagtttatggacatagcagaa

SEQ ID NO: 3889968 - DNA, 25 bp, Homo sapien
cttaacagtttatggacatagcaga

SEQ ID NO: 3889969 - DNA, 25 bp, Homo sapien
tgagaatggcaacatgggttatggc

SEQ ID NO: 3889970 - DNA, 25 bp, Homo sapien
gaagagatcttacaagcaacaggag

SEQ ID NO: 3889971 - DNA, 25 bp, Homo sapien
gcaaatcccaagcaagttaaataca

SEQ ID NO: 3889972 - DNA, 25 bp, Homo sapien
ggctaatccatgttttcagaccaga

SEQ ID NO: 3889973 - DNA, 25 bp, Homo sapien
tagaaatctttgacccattcatcag

SEQ ID NO: 3889974 - DNA, 25 bp, Homo sapien
gcggtaatggagatgtacttgcaag

SEQ ID NO: 3889975 - DNA, 25 bp, Homo sapien
tgtattggtttttccgactgaagcg

SEQ ID NO: 3889976 - DNA, 25 bp, Homo sapien
tcatcagactctgaccactctaaag

SEQ ID NO: 3889977 - DNA, 25 bp, Homo sapien
ttaatgtctgttgctgacccctgga

SEQ ID NO: 3889978 - DNA, 25 bp, Homo sapien
gaagacacagcttctttaatgtctg

SEQ ID NO: 3889979 - DNA, 25 bp, Homo sapien
aaatcacagtatcagaagacacagc

SEQ ID NO: 3889980 - DNA, 25 bp, Homo sapien
gcttttatacagtcaacattcttta

SEQ ID NO: 3889981 - DNA, 25 bp, Homo sapien
cagaatatagaatcccagaagattc

SEQ ID NO: 3889982 - DNA, 25 bp, Homo sapien
agaagattcactcctctagactgag

SEQ ID NO: 3889983 - DNA, 25 bp, Homo sapien
ctagactgagtgatataactagctc

SEQ ID NO: 3889984 - DNA, 25 bp, Homo sapien
gaaagatgactttgtacgttctgtt

SEQ ID NO: 3889985 - DNA, 25 bp, Homo sapien
tccttagggaacctgtggtcctcca

SEQ ID NO: 3889986 - DNA, 25 bp, Homo sapien
tagggaacctgtggtcctccactcc

SEQ ID NO: 3889987 - DNA, 25 bp, Homo sapien
actacaggcacgcatgccgctgcac

SEQ ID NO: 3889988 - DNA, 25 bp, Homo sapien
acacctgatcggctacaactctgaa

SEQ ID NO: 3889989 - DNA, 25 bp, Homo sapien
gagacgtttagtttggtgccatgga

SEQ ID NO: 3889990 - DNA, 25 bp, Homo sapien
gcatcatgtaagttcctaagccagt

SEQ ID NO: 3889991 - DNA, 25 bp, Homo sapien
caaaaatggaagttgcctatggtca

SEQ ID NO: 3889992 - DNA, 25 bp, Homo sapien
ttcacagacatatagaggtggtcac

SEQ ID NO: 3889993 - DNA, 25 bp, Homo sapien
caatatttaagtgaccgattcaaga

SEQ ID NO: 3889994 - DNA, 25 bp, Homo sapien
taagagcacttttctgatgtactgc

SEQ ID NO: 3889995 - DNA, 25 bp, Homo sapien
tctggagtgcctcaatagcttgtaa

SEQ ID NO: 3889996 - DNA, 25 bp, Homo sapien
tctgaacggtgtgttatctgggcct

SEQ ID NO: 3889997 - DNA, 25 bp, Homo sapien
gagaaggtatagaaagagtagttta

SEQ ID NO: 3889998 - DNA, 25 bp, Homo sapien
gaaagagaaggtatagaaagagtag

SEQ ID NO: 3889999 - DNA, 25 bp, Homo sapien
atagaaagagtagtttacttacctg

SEQ ID NO: 3890000 - DNA, 25 bp, Homo sapien
aagagaaggtatagaaagagtagtt

SEQ ID NO: 3890001 - DNA, 25 bp, Homo sapien
agttcgtgtctaggatttgagtgcc

SEQ ID NO: 3890002 - DNA, 25 bp, Homo sapien
caatatgtagcagatccctgggaat

SEQ ID NO: 3890003 - DNA, 25 bp, Homo sapien
tcattaatgaggaagtatggcgtgg

SEQ ID NO: 3890004 - DNA, 25 bp, Homo sapien
gctgcagtgctttcgcttatcccta

SEQ ID NO: 3890005 - DNA, 25 bp, Homo sapien
gaaaaactaaccatccctatgtgtc

SEQ ID NO: 3890006 - DNA, 25 bp, Homo sapien
gatctgaggccgtaaggtgtttaag

SEQ ID NO: 3890007 - DNA, 25 bp, Homo sapien
tagaattctaaactactgggatctg

SEQ ID NO: 3890008 - DNA, 25 bp, Homo sapien
gatgggtttctaggtgttggaacac

SEQ ID NO: 3890009 - DNA, 25 bp, Homo sapien
tcaccgaggtgaattctccccattc

SEQ ID NO: 3890010 - DNA, 25 bp, Homo sapien
ccgaggtgaattctccccattcctt

SEQ ID NO: 3890011 - DNA, 25 bp, Homo sapien
accgaggtgaattctccccattcct

SEQ ID NO: 3890012 - DNA, 25 bp, Homo sapien
gaggtgaattctccccattccttcc

SEQ ID NO: 3890013 - DNA, 25 bp, Homo sapien
gatggactctgcttttctagccagt

SEQ ID NO: 3890014 - DNA, 25 bp, Homo sapien
ccagtacttaactgctgatgccttc

SEQ ID NO: 3890015 - DNA, 25 bp, Homo sapien
ccttctgtgcagcaggcgttgagta

SEQ ID NO: 3890016 - DNA, 25 bp, Homo sapien
gcagcaggcgttgagtactcctctt

SEQ ID NO: 3890017 - DNA, 25 bp, Homo sapien
ggggtccatgtgagagttctttcag

SEQ ID NO: 3890018 - DNA, 25 bp, Homo sapien
gtgagagttctttcagagctcactc

SEQ ID NO: 3890019 - DNA, 25 bp, Homo sapien
ctagcggggacaccgccgtctgcag

SEQ ID NO: 3890020 - DNA, 25 bp, Homo sapien
cagaccccgggaagtttgtcagtca

SEQ ID NO: 3890021 - DNA, 25 bp, Homo sapien
ctgttaatcacgtccccacggctct

SEQ ID NO: 3890022 - DNA, 25 bp, Homo sapien
acgtccccacggctcttctagcggg

SEQ ID NO: 3890023 - DNA, 25 bp, Homo sapien
ttccctatggttcctgtgacccagg

SEQ ID NO: 3890024 - DNA, 25 bp, Homo sapien
ggttagcacacggtaccatctccat

SEQ ID NO: 3890025 - DNA, 25 bp, Homo sapien
cacctagtagagtctagaggcgtaa

SEQ ID NO: 3890026 - DNA, 25 bp, Homo sapien
cttgagtacttcgaggtccccttct

SEQ ID NO: 3890027 - DNA, 25 bp, Homo sapien
atgacccagatattggtgttatcag

SEQ ID NO: 3890028 - DNA, 25 bp, Homo sapien
ttcctggagccactaaaatttatta

SEQ ID NO: 3890029 - DNA, 25 bp, Homo sapien
caacaaaacggagccactaatgacc

SEQ ID NO: 3890030 - DNA, 25 bp, Homo sapien
tagcattcaacaataagtgatcaaa

SEQ ID NO: 3890031 - DNA, 25 bp, Homo sapien
aattaagtacttagcatatgggtta

SEQ ID NO: 3890032 - DNA, 25 bp, Homo sapien
ctgaaattaagtacttagcatatgg

SEQ ID NO: 3890033 - DNA, 25 bp, Homo sapien
gaaattaagtacttagcatatgggt

SEQ ID NO: 3890034 - DNA, 25 bp, Homo sapien
aactgaaattaagtacttagcatat

SEQ ID NO: 3890035 - DNA, 25 bp, Homo sapien
tggagtacggtagtgtgcgatctca

SEQ ID NO: 3890036 - DNA, 25 bp, Homo sapien
ggagtacggtagtgtgcgatctcag

SEQ ID NO: 3890037 - DNA, 25 bp, Homo sapien
aaaagtgtcaacctgtaatcctata

SEQ ID NO: 3890038 - DNA, 25 bp, Homo sapien
gaagtgagaagataatggagtgcca

SEQ ID NO: 3890039 - DNA, 25 bp, Homo sapien
tggaagtgagaagataatggagtgc

SEQ ID NO: 3890040 - DNA, 25 bp, Homo sapien
caacctgtaatcctatattcacaaa

SEQ ID NO: 3890041 - DNA, 25 bp, Homo sapien
aatgggtatgaacctaataacacaa

SEQ ID NO: 3890042 - DNA, 25 bp, Homo sapien
ttaaatgggtatgaacctaataaca

SEQ ID NO: 3890043 - DNA, 25 bp, Homo sapien
ggtatgaacctaataacacaatctc

SEQ ID NO: 3890044 - DNA, 25 bp, Homo sapien
gttcactctaccagaaaacgtcaat

SEQ ID NO: 3890045 - DNA, 25 bp, Homo sapien
ttcctgagcttagacaatctacctg

SEQ ID NO: 3890046 - DNA, 25 bp, Homo sapien
gagccactgagcttgacttaaatct

SEQ ID NO: 3890047 - DNA, 25 bp, Homo sapien
ccactgagcttgacttaaatctaaa

SEQ ID NO: 3890048 - DNA, 25 bp, Homo sapien
tattttatggccatgctccctctaa

SEQ ID NO: 3890049 - DNA, 25 bp, Homo sapien
tgaaggatgtgcaagaacactttac

SEQ ID NO: 3890050 - DNA, 25 bp, Homo sapien
cttaaagtgaagagatataccatgt

SEQ ID NO: 3890051 - DNA, 25 bp, Homo sapien
caaggtcaacatagttttgtagcaa

SEQ ID NO: 3890052 - DNA, 25 bp, Homo sapien
gaggtcctagccactgcaatttgta

SEQ ID NO: 3890053 - DNA, 25 bp, Homo sapien
cttaatcagggagagcacagaaaca

SEQ ID NO: 3890054 - DNA, 25 bp, Homo sapien
ggagtgtgtcggaaggctgtatggc

SEQ ID NO: 3890055 - DNA, 25 bp, Homo sapien
agggagtgtgtcggaaggctgtatg

SEQ ID NO: 3890056 - DNA, 25 bp, Homo sapien
ctcttctctcctgcatatcagcact

SEQ ID NO: 3890057 - DNA, 25 bp, Homo sapien
agtgtgtcggaaggctgtatggcca

SEQ ID NO: 3890058 - DNA, 25 bp, Homo sapien
gttggatgaaacgtccatgcgtgtg

SEQ ID NO: 3890059 - DNA, 25 bp, Homo sapien
tgcaactgcgaggatggtcggctcc

SEQ ID NO: 3890060 - DNA, 25 bp, Homo sapien
tgcgaggatggtcggctcccaaagc

SEQ ID NO: 3890061 - DNA, 25 bp, Homo sapien
gatgaaacgtccatgcgtgtggctg

SEQ ID NO: 3890062 - DNA, 25 bp, Homo sapien
agagcgcatgccagcgcttcaccag

SEQ ID NO: 3890063 - DNA, 25 bp, Homo sapien
tccgtggtgcggcagagcgcatgcc

SEQ ID NO: 3890064 - DNA, 25 bp, Homo sapien
tcagggctccgtggtgcggcagagc

SEQ ID NO: 3890065 - DNA, 25 bp, Homo sapien
tgcggcagagcgcatgccagcgctt

SEQ ID NO: 3890066 - DNA, 25 bp, Homo sapien
caggaggaagtagcaactcccctcc

SEQ ID NO: 3890067 - DNA, 25 bp, Homo sapien
agagccctgaaagactctctccttg

SEQ ID NO: 3890068 - DNA, 25 bp, Homo sapien
ggagagccctgaaagactctctcct

SEQ ID NO: 3890069 - DNA, 25 bp, Homo sapien
aaggagagccctgaaagactctctc

SEQ ID NO: 3890070 - DNA, 25 bp, Homo sapien
ggaaggagagccctgaaagactctc

SEQ ID NO: 3890071 - DNA, 25 bp, Homo sapien
agggagggagctcgtacagctcctt

SEQ ID NO: 3890072 - DNA, 25 bp, Homo sapien
tgaggtcaggacaggaggcactcac

SEQ ID NO: 3890073 - DNA, 25 bp, Homo sapien
gcctgaacactcggcagcccctcgt

SEQ ID NO: 3890074 - DNA, 25 bp, Homo sapien
cctgaacactcggcagcccctcgtg

SEQ ID NO: 3890075 - DNA, 25 bp, Homo sapien
gaagtcttcttgcacttgacaaact

SEQ ID NO: 3890076 - DNA, 25 bp, Homo sapien
aggctgaggctagcggtatccagct

SEQ ID NO: 3890077 - DNA, 25 bp, Homo sapien
tcaggctgaggctagcggtatccag

SEQ ID NO: 3890078 - DNA, 25 bp, Homo sapien
gtcaggctgaggctagcggtatcca

SEQ ID NO: 3890079 - DNA, 25 bp, Homo sapien
ccgcccctgccaggcttctcccaca

SEQ ID NO: 3890080 - DNA, 25 bp, Homo sapien
ccccgcccctgccaggcttctccca

SEQ ID NO: 3890081 - DNA, 25 bp, Homo sapien
cccgcccctgccaggcttctcccac

SEQ ID NO: 3890082 - DNA, 25 bp, Homo sapien
cgcccctgccaggcttctcccacac

SEQ ID NO: 3890083 - DNA, 25 bp, Homo sapien
gggacccagaaccagatgaacacat

SEQ ID NO: 3890084 - DNA, 25 bp, Homo sapien
atgcgagtgggaggtcgccctaaca

SEQ ID NO: 3890085 - DNA, 25 bp, Homo sapien
catcaggggaaaccgaatccattct

SEQ ID NO: 3890086 - DNA, 25 bp, Homo sapien
tgacagaagatccaggagatgcgag

SEQ ID NO: 3890087 - DNA, 25 bp, Homo sapien
tgcacagtgttctgtctaccaggcc

SEQ ID NO: 3890088 - DNA, 25 bp, Homo sapien
tgctctgcacagtgttctgtctacc

SEQ ID NO: 3890089 - DNA, 25 bp, Homo sapien
cacatctttctgactgtgccaatca

SEQ ID NO: 3890090 - DNA, 25 bp, Homo sapien
cggacaatatctagaaaagttctgc

SEQ ID NO: 3890091 - DNA, 25 bp, Homo sapien
tcaaccgccactgggagcggttgag

SEQ ID NO: 3890092 - DNA, 25 bp, Homo sapien
gagagcgaaggccattgggtaacca

SEQ ID NO: 3890093 - DNA, 25 bp, Homo sapien
gccatcaaccgccactgggagcggt

SEQ ID NO: 3890094 - DNA, 25 bp, Homo sapien
attgggtaaccaccctttgctctcg

SEQ ID NO: 3890095 - DNA, 25 bp, Homo sapien
agtgaatgtttgcagtgtgcaccgg

SEQ ID NO: 3890096 - DNA, 25 bp, Homo sapien
gggcaaatgcttcgtaagtgccgac

SEQ ID NO: 3890097 - DNA, 25 bp, Homo sapien
ccgacagggtgtgtttcagtgaatg

SEQ ID NO: 3890098 - DNA, 25 bp, Homo sapien
ttgcagtgtgcaccggtctggctga

SEQ ID NO: 3890099 - DNA, 25 bp, Homo sapien
tgaagatgaggccaacagtgagctg

SEQ ID NO: 3890100 - DNA, 25 bp, Homo sapien
gaaaggatttctggtctcggtgctg

SEQ ID NO: 3890101 - DNA, 25 bp, Homo sapien
cacatgcgatgacactggattccaa

SEQ ID NO: 3890102 - DNA, 25 bp, Homo sapien
taatagtctggatcggctgagacca

SEQ ID NO: 3890103 - DNA, 25 bp, Homo sapien
ccaggagcatatgttcggtattgac

SEQ ID NO: 3890104 - DNA, 25 bp, Homo sapien
gggatttgctccctccaacaggaca

SEQ ID NO: 3890105 - DNA, 25 bp, Homo sapien
tacacggcatattggtggctccaaa

SEQ ID NO: 3890106 - DNA, 25 bp, Homo sapien
aaactccacatatgctctgcccagg

SEQ ID NO: 3890107 - DNA, 25 bp, Homo sapien
cacaccatcaccaatgggaacaagc

SEQ ID NO: 3890108 - DNA, 25 bp, Homo sapien
gtgttcgccaaagagagacttccag

SEQ ID NO: 3890109 - DNA, 25 bp, Homo sapien
gggaacaagcatgtccagtccatca

SEQ ID NO: 3890110 - DNA, 25 bp, Homo sapien
ctaggtgttcgccaaagagagactt

SEQ ID NO: 3890111 - DNA, 25 bp, Homo sapien
tatggcactttgtcctagcagccct

SEQ ID NO: 3890112 - DNA, 25 bp, Homo sapien
cctgggacgcagtgagttgtgcttc

SEQ ID NO: 3890113 - DNA, 25 bp, Homo sapien
tggtgccctgacacatcctaggact

SEQ ID NO: 3890114 - DNA, 25 bp, Homo sapien
cataaccattgaagtaacctgctgt

SEQ ID NO: 3890115 - DNA, 25 bp, Homo sapien
tcaaacaatagagaactttactccc

SEQ ID NO: 3890116 - DNA, 25 bp, Homo sapien
gtctggctctgtcatgcaggaggct

SEQ ID NO: 3890117 - DNA, 25 bp, Homo sapien
tttttaggactattcgttagctgac

SEQ ID NO: 3890118 - DNA, 25 bp, Homo sapien
tagagcctttaatgtttcgttatta

SEQ ID NO: 3890119 - DNA, 25 bp, Homo sapien
ttcagttttgttgtatgtagaccca

SEQ ID NO: 3890120 - DNA, 25 bp, Homo sapien
tcatgttgcctcaatagcccatgta

SEQ ID NO: 3890121 - DNA, 25 bp, Homo sapien
tttgttgtatgtagacccatctttc

SEQ ID NO: 3890122 - DNA, 25 bp, Homo sapien
caatagcccatgtatgaatcactct

SEQ ID NO: 3890123 - DNA, 25 bp, Homo sapien
tgttttaggaatgggcacgcaactc

SEQ ID NO: 3890124 - DNA, 25 bp, Homo sapien
taaatatttgcctcccgggaagctc

SEQ ID NO: 3890125 - DNA, 25 bp, Homo sapien
tgtggcaatcaagacagagaggcta

SEQ ID NO: 3890126 - DNA, 25 bp, Homo sapien
caacgagatatgaggagcagtctac

SEQ ID NO: 3890127 - DNA, 25 bp, Homo sapien
cctgggcgttagcatgtccgaatat

SEQ ID NO: 3890128 - DNA, 25 bp, Homo sapien
caattatcttgcaaccagggaggag

SEQ ID NO: 3890129 - DNA, 25 bp, Homo sapien
gaattaaacctggagtgtatgttcc

SEQ ID NO: 3890130 - DNA, 25 bp, Homo sapien
tctttcaattgacagagatgccaat

SEQ ID NO: 3890131 - DNA, 25 bp, Homo sapien
gaccccttaggatgtcctttcatga

SEQ ID NO: 3890132 - DNA, 25 bp, Homo sapien
tgtgtctctagctcatgatcatggt

SEQ ID NO: 3890133 - DNA, 25 bp, Homo sapien
catggtttatgaagcacgggaagga

SEQ ID NO: 3890134 - DNA, 25 bp, Homo sapien
tctgatcccaactccttagctatga

SEQ ID NO: 3890135 - DNA, 25 bp, Homo sapien
caggctgctttttgatgactctaga

SEQ ID NO: 3890136 - DNA, 25 bp, Homo sapien
aatgtcccctatgaatgcattatag

SEQ ID NO: 3890137 - DNA, 25 bp, Homo sapien
tcagaaatgaaagacactactactg

SEQ ID NO: 3890138 - DNA, 25 bp, Homo sapien
ggaactgatgacttcgctggtgaat

SEQ ID NO: 3890139 - DNA, 25 bp, Homo sapien
taaaatcccaacagcgcttttggca

SEQ ID NO: 3890140 - DNA, 25 bp, Homo sapien
gaagccatggatgcctgtgtttgcc

SEQ ID NO: 3890141 - DNA, 25 bp, Homo sapien
ggcagttctagccagacccatcagg

SEQ ID NO: 3890142 - DNA, 25 bp, Homo sapien
caagtgatataagtgtagaaagccc

SEQ ID NO: 3890143 - DNA, 25 bp, Homo sapien
tctctagctgtcatcaagattgtga

SEQ ID NO: 3890144 - DNA, 25 bp, Homo sapien
gataaacggataggccaggcacgat

SEQ ID NO: 3890145 - DNA, 25 bp, Homo sapien
gcaaattgcatatgtctttctccgt

SEQ ID NO: 3890146 - DNA, 25 bp, Homo sapien
ggcttttgccacgtgacatacctgc

SEQ ID NO: 3890147 - DNA, 25 bp, Homo sapien
tcatttcggcccagaatttcgaggc

SEQ ID NO: 3890148 - DNA, 25 bp, Homo sapien
tcggcccagaatttcgaggctacag

SEQ ID NO: 3890149 - DNA, 25 bp, Homo sapien
gcaggcggatcatttcggcccagaa

SEQ ID NO: 3890150 - DNA, 25 bp, Homo sapien
ctataatcaggccactgtacaacag

SEQ ID NO: 3890151 - DNA, 25 bp, Homo sapien
aagcaggtttcactagtgttgagaa

SEQ ID NO: 3890152 - DNA, 25 bp, Homo sapien
tccatatgcaaatcctcagaaccta

SEQ ID NO: 3890153 - DNA, 25 bp, Homo sapien
cacatttgccataaaactgtagtca

SEQ ID NO: 3890154 - DNA, 25 bp, Homo sapien
tgactgggttaaactaaataatggc

SEQ ID NO: 3890155 - DNA, 25 bp, Homo sapien
aaggaaatgtgagacaaagggagag

SEQ ID NO: 3890156 - DNA, 25 bp, Homo sapien
cctgggttatctgatgtccccaatg

SEQ ID NO: 3890157 - DNA, 25 bp, Homo sapien
tgcgggggctagatccaaggaatgt

SEQ ID NO: 3890158 - DNA, 25 bp, Homo sapien
atctgatgtccccaatgtaatcaca

SEQ ID NO: 3890159 - DNA, 25 bp, Homo sapien
tgtatattaggcacagatattattt

SEQ ID NO: 3890160 - DNA, 25 bp, Homo sapien
cattgtatattaggcacagatatta

SEQ ID NO: 3890161 - DNA, 25 bp, Homo sapien
cacattgtatattaggcacagatat

SEQ ID NO: 3890162 - DNA, 25 bp, Homo sapien
taggcacagatattatttgttggag

SEQ ID NO: 3890163 - DNA, 25 bp, Homo sapien
tatcatcaactatccaggcagaatt

SEQ ID NO: 3890164 - DNA, 25 bp, Homo sapien
tacctcaagatagcttgctcaattg

SEQ ID NO: 3890165 - DNA, 25 bp, Homo sapien
tgctcaattgcaatgtcaccctgca

SEQ ID NO: 3890166 - DNA, 25 bp, Homo sapien
cacacattgagattggctggtagtc

SEQ ID NO: 3890167 - DNA, 25 bp, Homo sapien
taacctctgtaggtgacgaatctca

SEQ ID NO: 3890168 - DNA, 25 bp, Homo sapien
gaatactctgagtgtgtcacatctc

SEQ ID NO: 3890169 - DNA, 25 bp, Homo sapien
aggtattgccaagtttccattgaga

SEQ ID NO: 3890170 - DNA, 25 bp, Homo sapien
tatagctgcatagtgctctcttgtg

SEQ ID NO: 3890171 - DNA, 25 bp, Homo sapien
ggagcatgtgtaccctttccatacg

SEQ ID NO: 3890172 - DNA, 25 bp, Homo sapien
acttctgattagacccagtcccatg

SEQ ID NO: 3890173 - DNA, 25 bp, Homo sapien
ttttcgcctgttctggagggttgcc

SEQ ID NO: 3890174 - DNA, 25 bp, Homo sapien
cataagttcctcagtaaatcaccca

SEQ ID NO: 3890175 - DNA, 25 bp, Homo sapien
cactaggctcaggtaatttttccac

SEQ ID NO: 3890176 - DNA, 25 bp, Homo sapien
tatttggcttatctcaacaacatgt

SEQ ID NO: 3890177 - DNA, 25 bp, Homo sapien
agtatcatatcctctcagcttctag

SEQ ID NO: 3890178 - DNA, 25 bp, Homo sapien
tcagaatgcccaattcaatcttgtc

SEQ ID NO: 3890179 - DNA, 25 bp, Homo sapien
cttggaaaatggtgtaaatggttga

SEQ ID NO: 3890180 - DNA, 25 bp, Homo sapien
taaatggttgactggagatgaaggt

SEQ ID NO: 3890181 - DNA, 25 bp, Homo sapien
gtaacaagaagtactacagatgact

SEQ ID NO: 3890182 - DNA, 25 bp, Homo sapien
gtagtaacaagaagtactacagatg

SEQ ID NO: 3890183 - DNA, 25 bp, Homo sapien
gctttcttgtaggattgttgggaga

SEQ ID NO: 3890184 - DNA, 25 bp, Homo sapien
taacatgaaacaggccctcaataaa

SEQ ID NO: 3890185 - DNA, 25 bp, Homo sapien
tattagctttcttgtaggattgttg

SEQ ID NO: 3890186 - DNA, 25 bp, Homo sapien
ttgctggtactgagtgactttgggc

SEQ ID NO: 3890187 - DNA, 25 bp, Homo sapien
gctattcctactaaagtgccaacaa

SEQ ID NO: 3890188 - DNA, 25 bp, Homo sapien
taatggtacaaaaccaggcacatag

SEQ ID NO: 3890189 - DNA, 25 bp, Homo sapien
cagccaagacaagagttaaatcaga

SEQ ID NO: 3890190 - DNA, 25 bp, Homo sapien
tggggtgactaagcagccacatgca

SEQ ID NO: 3890191 - DNA, 25 bp, Homo sapien
gaagaatcttacctgatcagtccag

SEQ ID NO: 3890192 - DNA, 25 bp, Homo sapien
cccagatccaaaatagtagtagcag

SEQ ID NO: 3890193 - DNA, 25 bp, Homo sapien
gaagttgggagcactgtactgaaca

SEQ ID NO: 3890194 - DNA, 25 bp, Homo sapien
aatgcagtaacatcagggttcccta

SEQ ID NO: 3890195 - DNA, 25 bp, Homo sapien
cgcacaccggaatcaacaagtaaaa

SEQ ID NO: 3890196 - DNA, 25 bp, Homo sapien
caacaagtaaaaattgaatgtcatt

SEQ ID NO: 3890197 - DNA, 25 bp, Homo sapien
aagaggaaaacgcacaccggaatca

SEQ ID NO: 3890198 - DNA, 25 bp, Homo sapien
ttttgctggccaatttggaaaacta

SEQ ID NO: 3890199 - DNA, 25 bp, Homo sapien
gattattagtaactacttcacagga

SEQ ID NO: 3890200 - DNA, 25 bp, Homo sapien
agtgtgacatttgcccatgaactct

SEQ ID NO: 3890201 - DNA, 25 bp, Homo sapien
tgaaattaaaaagcgacatcagtga

SEQ ID NO: 3890202 - DNA, 25 bp, Homo sapien
gccatcacgtggtttattagcagaa

SEQ ID NO: 3890203 - DNA, 25 bp, Homo sapien
taagtaagttggtgcacctggcatc

SEQ ID NO: 3890204 - DNA, 25 bp, Homo sapien
aactcttcagccagcggaatgcagg

SEQ ID NO: 3890205 - DNA, 25 bp, Homo sapien
gcagtacgctaccatgaaaccagtt

SEQ ID NO: 3890206 - DNA, 25 bp, Homo sapien
gacaagtttgggacactcagagtta

SEQ ID NO: 3890207 - DNA, 25 bp, Homo sapien
gcaaccccgaagcaggcagtctgtt

SEQ ID NO: 3890208 - DNA, 25 bp, Homo sapien
tcctaaagcccagctgaggtatcat

SEQ ID NO: 3890209 - DNA, 25 bp, Homo sapien
caatgtgagttttaggcaaccccga

SEQ ID NO: 3890210 - DNA, 25 bp, Homo sapien
gctagaaacacgctgagctcatgga

SEQ ID NO: 3890211 - DNA, 25 bp, Homo sapien
tgagaagctccggaaggtccaacac

SEQ ID NO: 3890212 - DNA, 25 bp, Homo sapien
agaagctccggaaggtccaacacgt

SEQ ID NO: 3890213 - DNA, 25 bp, Homo sapien
gagaagctccggaaggtccaacacg

SEQ ID NO: 3890214 - DNA, 25 bp, Homo sapien
agttggacacataggcctgcagttg

SEQ ID NO: 3890215 - DNA, 25 bp, Homo sapien
gagatgaggactaaatctgtatgtc

SEQ ID NO: 3890216 - DNA, 25 bp, Homo sapien
tacgatgtcttagtcactttgtgct

SEQ ID NO: 3890217 - DNA, 25 bp, Homo sapien
tatgtcatcagtatacatacgatgt

SEQ ID NO: 3890218 - DNA, 25 bp, Homo sapien
ttttatgaggctacagtcctataga

SEQ ID NO: 3890219 - DNA, 25 bp, Homo sapien
tcctatagaattagggtgccaccct

SEQ ID NO: 3890220 - DNA, 25 bp, Homo sapien
tgccacccttatgactcctgtagcc

SEQ ID NO: 3890221 - DNA, 25 bp, Homo sapien
tcggtgtttgccatagagagagctc

SEQ ID NO: 3890222 - DNA, 25 bp, Homo sapien
aaggaagcacatcccttatttcatc

SEQ ID NO: 3890223 - DNA, 25 bp, Homo sapien
tccccaatgccagatgttaagtctg

SEQ ID NO: 3890224 - DNA, 25 bp, Homo sapien
tgggtttaaggattccccaatgcca

SEQ ID NO: 3890225 - DNA, 25 bp, Homo sapien
catccacagaaaatttcctgccagc

SEQ ID NO: 3890226 - DNA, 25 bp, Homo sapien
tcttacaagacttcagtcaaggtgt

SEQ ID NO: 3890227 - DNA, 25 bp, Homo sapien
gaaggatttgcttctgcactcactg

SEQ ID NO: 3890228 - DNA, 25 bp, Homo sapien
cttcagtcaaggtgtttgccagggc

SEQ ID NO: 3890229 - DNA, 25 bp, Homo sapien
tgcctcagaatctcttacaagactt

SEQ ID NO: 3890230 - DNA, 25 bp, Homo sapien
tttggatgcatgacttttcactaga

SEQ ID NO: 3890231 - DNA, 25 bp, Homo sapien
gaatgccttttacacgtagtcccta

SEQ ID NO: 3890232 - DNA, 25 bp, Homo sapien
catttaggtgctttggatgcatgac

SEQ ID NO: 3890233 - DNA, 25 bp, Homo sapien
caaaaggttggacacgcctgcaata

SEQ ID NO: 3890234 - DNA, 25 bp, Homo sapien
tatcactacacatccaagtaactaa

SEQ ID NO: 3890235 - DNA, 25 bp, Homo sapien
ttataaatagggatgctcatgacat

SEQ ID NO: 3890236 - DNA, 25 bp, Homo sapien
taaatagggatgctcatgacatcat

SEQ ID NO: 3890237 - DNA, 25 bp, Homo sapien
catccaagtaactaaatagcacatt

SEQ ID NO: 3890238 - DNA, 25 bp, Homo sapien
ggagaaacgactgtgccctcatgta

SEQ ID NO: 3890239 - DNA, 25 bp, Homo sapien
agagttaggagaaacgactgtgccc

SEQ ID NO: 3890240 - DNA, 25 bp, Homo sapien
ttccagagttaggagaaacgactgt

SEQ ID NO: 3890241 - DNA, 25 bp, Homo sapien
gttaggagaaacgactgtgccctca

SEQ ID NO: 3890242 - DNA, 25 bp, Homo sapien
actcgacaccgagtggtttcttcca

SEQ ID NO: 3890243 - DNA, 25 bp, Homo sapien
ccgagtggtttcttccaatagctaa

SEQ ID NO: 3890244 - DNA, 25 bp, Homo sapien
ccaatagctaaataatacctgatga

SEQ ID NO: 3890245 - DNA, 25 bp, Homo sapien
ttccttgatgaactcgacaccgagt

SEQ ID NO: 3890246 - DNA, 25 bp, Homo sapien
cggacgcgcttcgttgtccaggagc

SEQ ID NO: 3890247 - DNA, 25 bp, Homo sapien
agtccgcggcacacaaggacctcta

SEQ ID NO: 3890248 - DNA, 25 bp, Homo sapien
agccttctcgaagcggcgggacgtc

SEQ ID NO: 3890249 - DNA, 25 bp, Homo sapien
ttgggtggcccggtcagtccgcggc

SEQ ID NO: 3890250 - DNA, 25 bp, Homo sapien
tttctaactattgtttgtactcatc

SEQ ID NO: 3890251 - DNA, 25 bp, Homo sapien
attcatcctttctaactattgtttg

SEQ ID NO: 3890252 - DNA, 25 bp, Homo sapien
tgtactcatcaaccacacccacgta

SEQ ID NO: 3890253 - DNA, 25 bp, Homo sapien
ctgtgtatttacaacctttcctttg

SEQ ID NO: 3890254 - DNA, 25 bp, Homo sapien
gagagtggctagcagaattcaggca

SEQ ID NO: 3890255 - DNA, 25 bp, Homo sapien
gatacgggaacacgagggctgaatt

SEQ ID NO: 3890256 - DNA, 25 bp, Homo sapien
cagttatgcccttgcagatacggga

SEQ ID NO: 3890257 - DNA, 25 bp, Homo sapien
cacccatcgcaggagaagaccttgg

SEQ ID NO: 3890258 - DNA, 25 bp, Homo sapien
tgggaagaccggcagtggggtagga

SEQ ID NO: 3890259 - DNA, 25 bp, Homo sapien
ggggtaggacgccaatctccccagc

SEQ ID NO: 3890260 - DNA, 25 bp, Homo sapien
accggcagtggggtaggacgccaat

SEQ ID NO: 3890261 - DNA, 25 bp, Homo sapien
gcagtggggtaggacgccaatctcc

SEQ ID NO: 3890262 - DNA, 25 bp, Homo sapien
tccagtctgggtgacagagagactc

SEQ ID NO: 3890263 - DNA, 25 bp, Homo sapien
ttgaaccagaaaggcagaggtttca

SEQ ID NO: 3890264 - DNA, 25 bp, Homo sapien
agtctgggtgacagagagactccat

SEQ ID NO: 3890265 - DNA, 25 bp, Homo sapien
gtgaaccaagatcatgccactgcat

SEQ ID NO: 3890266 - DNA, 25 bp, Homo sapien
gaaacaactcatgtccaaccagtcc

SEQ ID NO: 3890267 - DNA, 25 bp, Homo sapien
tatttggatatgttcgagtaagcta

SEQ ID NO: 3890268 - DNA, 25 bp, Homo sapien
cattaggtaagttgtggtacatcca

SEQ ID NO: 3890269 - DNA, 25 bp, Homo sapien
tccaactcaatgattaccagtaggt

SEQ ID NO: 3890270 - DNA, 25 bp, Homo sapien
tgacatgtctcttacagcccagtag

SEQ ID NO: 3890271 - DNA, 25 bp, Homo sapien
tattaagagaaggtcagtaggccca

SEQ ID NO: 3890272 - DNA, 25 bp, Homo sapien
tcttgagcaaggtagagggtcatca

SEQ ID NO: 3890273 - DNA, 25 bp, Homo sapien
gactcagaagtctacaggtcctgtg

SEQ ID NO: 3890274 - DNA, 25 bp, Homo sapien
tgagaggaagcttcagccaacctta

SEQ ID NO: 3890275 - DNA, 25 bp, Homo sapien
acatcaacatgagggaaggcaaggt

SEQ ID NO: 3890276 - DNA, 25 bp, Homo sapien
tgctagggaacgctcttgacatcaa

SEQ ID NO: 3890277 - DNA, 25 bp, Homo sapien
caaatttataggttctgcaagttcc

SEQ ID NO: 3890278 - DNA, 25 bp, Homo sapien
tgcccaggaacaaagcaagtcagac

SEQ ID NO: 3890279 - DNA, 25 bp, Homo sapien
ggtttctgctgcttacaagctgacg

SEQ ID NO: 3890280 - DNA, 25 bp, Homo sapien
cattgctgctgggatctattaaggc

SEQ ID NO: 3890281 - DNA, 25 bp, Homo sapien
tgaggagcatctagcaaggaacatg

SEQ ID NO: 3890282 - DNA, 25 bp, Homo sapien
tgtaatttgtctcaacatgtgtgtc

SEQ ID NO: 3890283 - DNA, 25 bp, Homo sapien
agcatgtaatttgtctcaacatgtg

SEQ ID NO: 3890284 - DNA, 25 bp, Homo sapien
taatttgtctcaacatgtgtgtcct

SEQ ID NO: 3890285 - DNA, 25 bp, Homo sapien
tttgtctcaacatgtgtgtcctttt

SEQ ID NO: 3890286 - DNA, 25 bp, Homo sapien
catcttaagaagctacatgggaggc

SEQ ID NO: 3890287 - DNA, 25 bp, Homo sapien
taggcaccgataagaatctagtact

SEQ ID NO: 3890288 - DNA, 25 bp, Homo sapien
tacgcatgtgccattgacctgaaaa

SEQ ID NO: 3890289 - DNA, 25 bp, Homo sapien
cacacattacatagctaggcaccga

SEQ ID NO: 3890290 - DNA, 25 bp, Homo sapien
aagtcattagagtggcaattcaaca

SEQ ID NO: 3890291 - DNA, 25 bp, Homo sapien
aatgtcattaacttgctagtctgtc

SEQ ID NO: 3890292 - DNA, 25 bp, Homo sapien
tgtacgtacctacaagatacttgaa

SEQ ID NO: 3890293 - DNA, 25 bp, Homo sapien
tctagtgttgataatgagttggctg

SEQ ID NO: 3890294 - DNA, 25 bp, Homo sapien
aatgtattcccataggtgggaattg

SEQ ID NO: 3890295 - DNA, 25 bp, Homo sapien
ccaacatggcatgtgtataccaatg

SEQ ID NO: 3890296 - DNA, 25 bp, Homo sapien
taaaaatgtattcccataggtggga

SEQ ID NO: 3890297 - DNA, 25 bp, Homo sapien
acatggcatgtgtataccaatgtaa

SEQ ID NO: 3890298 - DNA, 25 bp, Homo sapien
taatgttcaacatgtcgtcaccaag

SEQ ID NO: 3890299 - DNA, 25 bp, Homo sapien
tatttctactgaacacaatgtctat

SEQ ID NO: 3890300 - DNA, 25 bp, Homo sapien
aaagtcttgtcattgattgtctcaa

SEQ ID NO: 3890301 - DNA, 25 bp, Homo sapien
tcaccaagccagatagaaccatata

SEQ ID NO: 3890302 - DNA, 25 bp, Homo sapien
tctcaaatactgatggtaggaaagt

SEQ ID NO: 3890303 - DNA, 25 bp, Homo sapien
caaatactgatggtaggaaagtaaa

SEQ ID NO: 3890304 - DNA, 25 bp, Homo sapien
ttccacacctactagaataaataca

SEQ ID NO: 3890305 - DNA, 25 bp, Homo sapien
tgagatgccattccacacctactag

SEQ ID NO: 3890306 - DNA, 25 bp, Homo sapien
caaacacggtatactcataacgtga

SEQ ID NO: 3890307 - DNA, 25 bp, Homo sapien
cataacgtgagatataaccacacac

SEQ ID NO: 3890308 - DNA, 25 bp, Homo sapien
agaatgtgtttgcaagtggccatga

SEQ ID NO: 3890309 - DNA, 25 bp, Homo sapien
tattctactgttgctctttaagcag

SEQ ID NO: 3890310 - DNA, 25 bp, Homo sapien
cacagttcccttgaagattgaagag

SEQ ID NO: 3890311 - DNA, 25 bp, Homo sapien
ttccacagttcccttgaagattgaa

SEQ ID NO: 3890312 - DNA, 25 bp, Homo sapien
ataatccatgtcacccctggtttac

SEQ ID NO: 3890313 - DNA, 25 bp, Homo sapien
tgtcacccctggtttacttccacag

SEQ ID NO: 3890314 - DNA, 25 bp, Homo sapien
tctgcccttggattctacactgtac

SEQ ID NO: 3890315 - DNA, 25 bp, Homo sapien
gagagaaattgataaaaagccactg

SEQ ID NO: 3890316 - DNA, 25 bp, Homo sapien
caggttcttagttctatgttcagcc

SEQ ID NO: 3890317 - DNA, 25 bp, Homo sapien
taatattattgatccacaggcaagc

SEQ ID NO: 3890318 - DNA, 25 bp, Homo sapien
aattactatataaacctagagttat

SEQ ID NO: 3890319 - DNA, 25 bp, Homo sapien
tgaaattactatataaacctagagt

SEQ ID NO: 3890320 - DNA, 25 bp, Homo sapien
tgcacttagatgaggtaattttttc

SEQ ID NO: 3890321 - DNA, 25 bp, Homo sapien
gacttatctgtggaaatatgataga

SEQ ID NO: 3890322 - DNA, 25 bp, Homo sapien
ccactttttccatacagtacacaca

SEQ ID NO: 3890323 - DNA, 25 bp, Homo sapien
ttctgtgaaagtacaatagaacaca

SEQ ID NO: 3890324 - DNA, 25 bp, Homo sapien
ctgaaaagtgtcttgtctgttaatg

SEQ ID NO: 3890325 - DNA, 25 bp, Homo sapien
tgtcttgtctgttaatgtcatatga

SEQ ID NO: 3890326 - DNA, 25 bp, Homo sapien
agtgtcttgtctgttaatgtcatat

SEQ ID NO: 3890327 - DNA, 25 bp, Homo sapien
tcttgtctgttaatgtcatatgagc

SEQ ID NO: 3890328 - DNA, 25 bp, Homo sapien
ttttggatccacagaactaaagtac

SEQ ID NO: 3890329 - DNA, 25 bp, Homo sapien
tgtggtggtagaagaatgctataaa

SEQ ID NO: 3890330 - DNA, 25 bp, Homo sapien
tactaggagagggaatttttcacag

SEQ ID NO: 3890331 - DNA, 25 bp, Homo sapien
ggtagaagaatgctataaattttgg

SEQ ID NO: 3890332 - DNA, 25 bp, Homo sapien
gagatatatttctccgcagatcaat

SEQ ID NO: 3890333 - DNA, 25 bp, Homo sapien
agatatatttctccgcagatcaata

SEQ ID NO: 3890334 - DNA, 25 bp, Homo sapien
atatttctccgcagatcaatatcta

SEQ ID NO: 3890335 - DNA, 25 bp, Homo sapien
agagatatatttctccgcagatcaa

SEQ ID NO: 3890336 - DNA, 25 bp, Homo sapien
tgcagatcattttgactgtttgtgt

SEQ ID NO: 3890337 - DNA, 25 bp, Homo sapien
cagcaaatattacctgaatattgat

SEQ ID NO: 3890338 - DNA, 25 bp, Homo sapien
tagttgtctctatgttataatagaa

SEQ ID NO: 3890339 - DNA, 25 bp, Homo sapien
aaagataataaagtagttgtctcta

SEQ ID NO: 3890340 - DNA, 25 bp, Homo sapien
ccagtggattcaacagagcatctgc

SEQ ID NO: 3890341 - DNA, 25 bp, Homo sapien
tgctgcagtagaaggactgagttgt

SEQ ID NO: 3890342 - DNA, 25 bp, Homo sapien
tgcagtagaaggactgagttgtgtc

SEQ ID NO: 3890343 - DNA, 25 bp, Homo sapien
agttgtgtcacactgaggatttaag

SEQ ID NO: 3890344 - DNA, 25 bp, Homo sapien
tgagttgtgtcacactgaggattta

SEQ ID NO: 3890345 - DNA, 25 bp, Homo sapien
gcatactttgtcttacaataatcca

SEQ ID NO: 3890346 - DNA, 25 bp, Homo sapien
cactttagtatagggatttagtggg

SEQ ID NO: 3890347 - DNA, 25 bp, Homo sapien
aacaccagttgcaaatcaagtgaaa

SEQ ID NO: 3890348 - DNA, 25 bp, Homo sapien
caataatccaattaagacactattt

SEQ ID NO: 3890349 - DNA, 25 bp, Homo sapien
ggtattccacacctacatgtctctg

SEQ ID NO: 3890350 - DNA, 25 bp, Homo sapien
tccgtgtactgatgccaagatgaac

SEQ ID NO: 3890351 - DNA, 25 bp, Homo sapien
tgagctctcatcagcggtttgccta

SEQ ID NO: 3890352 - DNA, 25 bp, Homo sapien
tcatgtagtatcctcataagggtgc

SEQ ID NO: 3890353 - DNA, 25 bp, Homo sapien
cagtattgggaagtgaggcctttga

SEQ ID NO: 3890354 - DNA, 25 bp, Homo sapien
ttaggtttagacaaagtcatgagca

SEQ ID NO: 3890355 - DNA, 25 bp, Homo sapien
gacaaagtcatgagcatagggccct

SEQ ID NO: 3890356 - DNA, 25 bp, Homo sapien
taccccacaatgtgacagtattggg

SEQ ID NO: 3890357 - DNA, 25 bp, Homo sapien
tattttaagttgtaagatctgaagc

SEQ ID NO: 3890358 - DNA, 25 bp, Homo sapien
tttacatcaccaaattactccattt

SEQ ID NO: 3890359 - DNA, 25 bp, Homo sapien
tctgaagcaaaaatcccttacatat

SEQ ID NO: 3890360 - DNA, 25 bp, Homo sapien
taaaggctggaacatgctggagaga

SEQ ID NO: 3890361 - DNA, 25 bp, Homo sapien
caccttgcagaagtaattaataacc

SEQ ID NO: 3890362 - DNA, 25 bp, Homo sapien
tttcatccagtattacttgcaggga

SEQ ID NO: 3890363 - DNA, 25 bp, Homo sapien
gcagggaaagtttgaaattgatgaa

SEQ ID NO: 3890364 - DNA, 25 bp, Homo sapien
ttaaaatcagcacacccaccttgca

SEQ ID NO: 3890365 - DNA, 25 bp, Homo sapien
aggtcacatccattagtgaagtcaa

SEQ ID NO: 3890366 - DNA, 25 bp, Homo sapien
gtcacatccattagtgaagtcaatg

SEQ ID NO: 3890367 - DNA, 25 bp, Homo sapien
aaccaggtcacatccattagtgaag

SEQ ID NO: 3890368 - DNA, 25 bp, Homo sapien
ccaaccaggtcacatccattagtga

SEQ ID NO: 3890369 - DNA, 25 bp, Homo sapien
ccaatcaattctggggcttccaatt

SEQ ID NO: 3890370 - DNA, 25 bp, Homo sapien
ttgagctgaaatttcccttaattac

SEQ ID NO: 3890371 - DNA, 25 bp, Homo sapien
caatttctgacccaatcaattctgg

SEQ ID NO: 3890372 - DNA, 25 bp, Homo sapien
aactgttgaagtcatattgagctga

SEQ ID NO: 3890373 - DNA, 25 bp, Homo sapien
tcagtgcatcaaaactgacagcagc

SEQ ID NO: 3890374 - DNA, 25 bp, Homo sapien
cttagggctggaacaccagtaaagc

SEQ ID NO: 3890375 - DNA, 25 bp, Homo sapien
tgacagcagcaggaatatggttttg

SEQ ID NO: 3890376 - DNA, 25 bp, Homo sapien
gctggaacaccagtaaagcttctct

SEQ ID NO: 3890377 - DNA, 25 bp, Homo sapien
gggcggacgggatctctcgcgctct

SEQ ID NO: 3890378 - DNA, 25 bp, Homo sapien
ttctcctggcccagacgcggctggg

SEQ ID NO: 3890379 - DNA, 25 bp, Homo sapien
gcggctggggcggacgggatctctc

SEQ ID NO: 3890380 - DNA, 25 bp, Homo sapien
ggacgggatctctcgcgctctgcct

SEQ ID NO: 3890381 - DNA, 25 bp, Homo sapien
actagaggtattccccgggcggctg

SEQ ID NO: 3890382 - DNA, 25 bp, Homo sapien
ctggaggactgagtcgagccgggac

SEQ ID NO: 3890383 - DNA, 25 bp, Homo sapien
gacccgagtcctccggtatcccagc

SEQ ID NO: 3890384 - DNA, 25 bp, Homo sapien
agagaagctggcctgcgggcgggcc

SEQ ID NO: 3890385 - DNA, 25 bp, Homo sapien
tcgtgggaccgagtttcaggcagct

SEQ ID NO: 3890386 - DNA, 25 bp, Homo sapien
tagcgagccgcggaaaccatagaga

SEQ ID NO: 3890387 - DNA, 25 bp, Homo sapien
acgtggcctccatccgtgcgcttta

SEQ ID NO: 3890388 - DNA, 25 bp, Homo sapien
accatagagatcagggctcagccgg

SEQ ID NO: 3890389 - DNA, 25 bp, Homo sapien
gcagagcccgtcgggagtcgtagtc

SEQ ID NO: 3890390 - DNA, 25 bp, Homo sapien
cagagcccgtcgggagtcgtagtcc

SEQ ID NO: 3890391 - DNA, 25 bp, Homo sapien
tcgcagagcccgtcgggagtcgtag

SEQ ID NO: 3890392 - DNA, 25 bp, Homo sapien
tagaatctgacaccctaggtctcag

SEQ ID NO: 3890393 - DNA, 25 bp, Homo sapien
tgtcctcagaacagaagctggtagc

SEQ ID NO: 3890394 - DNA, 25 bp, Homo sapien
tagctaaatggcctgcgaagagaag

SEQ ID NO: 3890395 - DNA, 25 bp, Homo sapien
tgccaaagcagatagtccaatagga

SEQ ID NO: 3890396 - DNA, 25 bp, Homo sapien
gccatcaaccgccgcaactggcgct

SEQ ID NO: 3890397 - DNA, 25 bp, Homo sapien
tccctgccatcaaccgccgcaactg

SEQ ID NO: 3890398 - DNA, 25 bp, Homo sapien
gccggcctcgcgctggaacctcgcc

SEQ ID NO: 3890399 - DNA, 25 bp, Homo sapien
gccgttgggtcaccgccctttgctc

SEQ ID NO: 3890400 - DNA, 25 bp, Homo sapien
tccatgcacttaggtaacacccttg

SEQ ID NO: 3890401 - DNA, 25 bp, Homo sapien
gcagtccatgcacttaggtaacacc

SEQ ID NO: 3890402 - DNA, 25 bp, Homo sapien
agtccatgcacttaggtaacaccct

SEQ ID NO: 3890403 - DNA, 25 bp, Homo sapien
tgcagtccatgcacttaggtaacac

SEQ ID NO: 3890404 - DNA, 25 bp, Homo sapien
agtatcctcaaattgcatgtcttgc

SEQ ID NO: 3890405 - DNA, 25 bp, Homo sapien
gtttatcctaaagcaaagtatcctc

SEQ ID NO: 3890406 - DNA, 25 bp, Homo sapien
catgtcttgcattccctttggatgg

SEQ ID NO: 3890407 - DNA, 25 bp, Homo sapien
tggcattgatttcattcctgctcat

SEQ ID NO: 3890408 - DNA, 25 bp, Homo sapien
ccttcacattgatgcaggcccaggg

SEQ ID NO: 3890409 - DNA, 25 bp, Homo sapien
catcgcatccacacttggggaagcc

SEQ ID NO: 3890410 - DNA, 25 bp, Homo sapien
tgtaaatacccatgatgtcatcgca

SEQ ID NO: 3890411 - DNA, 25 bp, Homo sapien
catgcagcttgctcacagcaggtgc

SEQ ID NO: 3890412 - DNA, 25 bp, Homo sapien
ctgaggctcttggtcggcttggcct

SEQ ID NO: 3890413 - DNA, 25 bp, Homo sapien
gactctgaacccattaaacacacag

SEQ ID NO: 3890414 - DNA, 25 bp, Homo sapien
atgccataatgggaccccaacagga

SEQ ID NO: 3890415 - DNA, 25 bp, Homo sapien
ccaggatatctaatgtgcaagggcg

SEQ ID NO: 3890416 - DNA, 25 bp, Homo sapien
tcccttgatttagtcagaagtcccc

SEQ ID NO: 3890417 - DNA, 25 bp, Homo sapien
ctttatgtagccatccatgccccag

SEQ ID NO: 3890418 - DNA, 25 bp, Homo sapien
tttatgtagccatccatgccccagt

SEQ ID NO: 3890419 - DNA, 25 bp, Homo sapien
aatactgattgcaaaaaaggattcc

SEQ ID NO: 3890420 - DNA, 25 bp, Homo sapien
ttaagggcttgtggtatgtaaatac

SEQ ID NO: 3890421 - DNA, 25 bp, Homo sapien
caactataagtctttctggcaattt

SEQ ID NO: 3890422 - DNA, 25 bp, Homo sapien
tttcaactataagtctttctggcaa

SEQ ID NO: 3890423 - DNA, 25 bp, Homo sapien
ttattgttatctgagtctgctcctt

SEQ ID NO: 3890424 - DNA, 25 bp, Homo sapien
attgttatctgagtctgctccttca

SEQ ID NO: 3890425 - DNA, 25 bp, Homo sapien
tattgttatctgagtctgctccttc

SEQ ID NO: 3890426 - DNA, 25 bp, Homo sapien
tttattgttatctgagtctgctcct

SEQ ID NO: 3890427 - DNA, 25 bp, Homo sapien
agaatacttgggattgtacctacag

SEQ ID NO: 3890428 - DNA, 25 bp, Homo sapien
ggccccacagttgccactgccttcg

SEQ ID NO: 3890429 - DNA, 25 bp, Homo sapien
cccacagttgccactgccttcgcca

SEQ ID NO: 3890430 - DNA, 25 bp, Homo sapien
gaatacttgggattgtacctacagg

SEQ ID NO: 3890431 - DNA, 25 bp, Homo sapien
gcccttccagagcaccagttgcact

SEQ ID NO: 3890432 - DNA, 25 bp, Homo sapien
cgttctcctgaacataccggaaggg

SEQ ID NO: 3890433 - DNA, 25 bp, Homo sapien
gctcattcagtgagataagtttgcc

SEQ ID NO: 3890434 - DNA, 25 bp, Homo sapien
ccttcatatggataggatgcctcag

SEQ ID NO: 3890435 - DNA, 25 bp, Homo sapien
tctggtattgaaaaccattcatcac

SEQ ID NO: 3890436 - DNA, 25 bp, Homo sapien
gatctcaagaagcaggcgttcctgg

SEQ ID NO: 3890437 - DNA, 25 bp, Homo sapien
tgatccttcacaggagtcatgtagc

SEQ ID NO: 3890438 - DNA, 25 bp, Homo sapien
ttcacaggagtcatgtagcctttct

SEQ ID NO: 3890439 - DNA, 25 bp, Homo sapien
ctgtattcctgattgtgctgctcaa

SEQ ID NO: 3890440 - DNA, 25 bp, Homo sapien
gtctccaaaggcgttcatggccatt

SEQ ID NO: 3890441 - DNA, 25 bp, Homo sapien
tccaaaggcgttcatggccattgtg

SEQ ID NO: 3890442 - DNA, 25 bp, Homo sapien
tgtattcctgattgtgctgctcaat

SEQ ID NO: 3890443 - DNA, 25 bp, Homo sapien
agtgtccgcgcccacacaggcgtag

SEQ ID NO: 3890444 - DNA, 25 bp, Homo sapien
ctcccctcgcagagcataaactgaa

SEQ ID NO: 3890445 - DNA, 25 bp, Homo sapien
cacacaggcgtaggcagcttcccag

SEQ ID NO: 3890446 - DNA, 25 bp, Homo sapien
gtggccgaaccaccggacgccagag

SEQ ID NO: 3890447 - DNA, 25 bp, Homo sapien
cagtattctgaaaagtgttgtgacc

SEQ ID NO: 3890448 - DNA, 25 bp, Homo sapien
taaagctcagttaaaggtttctggc

SEQ ID NO: 3890449 - DNA, 25 bp, Homo sapien
ttttgctcatcccaggacaaacctg

SEQ ID NO: 3890450 - DNA, 25 bp, Homo sapien
cattctttaaggagggacccagaca

SEQ ID NO: 3890451 - DNA, 25 bp, Homo sapien
tgagcaaagggagatactgtgagaa

SEQ ID NO: 3890452 - DNA, 25 bp, Homo sapien
gagcaaagggagatactgtgagaac

SEQ ID NO: 3890453 - DNA, 25 bp, Homo sapien
ctgagcaaagggagatactgtgaga

SEQ ID NO: 3890454 - DNA, 25 bp, Homo sapien
gggtgaagcgcagatcattttctgc

SEQ ID NO: 3890455 - DNA, 25 bp, Homo sapien
aagggtgaagcgcagatcattttct

SEQ ID NO: 3890456 - DNA, 25 bp, Homo sapien
ctcaagggtgaagcgcagatcattt

SEQ ID NO: 3890457 - DNA, 25 bp, Homo sapien
ttctcaagggtgaagcgcagatcat

SEQ ID NO: 3890458 - DNA, 25 bp, Homo sapien
ggcatgccattcaacccatcgggat

SEQ ID NO: 3890459 - DNA, 25 bp, Homo sapien
ccatcgggatgttggatagtgactt

SEQ ID NO: 3890460 - DNA, 25 bp, Homo sapien
ggtagctccgctctctggtctgaag

SEQ ID NO: 3890461 - DNA, 25 bp, Homo sapien
gcgcttgggccaaggtagctccgct

SEQ ID NO: 3890462 - DNA, 25 bp, Homo sapien
tgaggcactatcactaggaggaggc

SEQ ID NO: 3890463 - DNA, 25 bp, Homo sapien
tagatttgccctgtcgggatgttgc

SEQ ID NO: 3890464 - DNA, 25 bp, Homo sapien
ccctgtcgggatgttgcatactgag

SEQ ID NO: 3890465 - DNA, 25 bp, Homo sapien
gaggcactgattcccgcctttcaat

SEQ ID NO: 3890466 - DNA, 25 bp, Homo sapien
gatcactaggagatattgcaatcat

SEQ ID NO: 3890467 - DNA, 25 bp, Homo sapien
caccagatcactaggagatattgca

SEQ ID NO: 3890468 - DNA, 25 bp, Homo sapien
ccctgccaccagatcactaggagat

SEQ ID NO: 3890469 - DNA, 25 bp, Homo sapien
tgccaccagatcactaggagatatt

SEQ ID NO: 3890470 - DNA, 25 bp, Homo sapien
ggagattggcgtcctaccccactgc

SEQ ID NO: 3890471 - DNA, 25 bp, Homo sapien
cctcctctggcaggggagcctggaa

SEQ ID NO: 3890472 - DNA, 25 bp, Homo sapien
gagcagctggggagattggcgtcct

SEQ ID NO: 3890473 - DNA, 25 bp, Homo sapien
gctggggagattggcgtcctacccc

SEQ ID NO: 3890474 - DNA, 25 bp, Homo sapien
aacaggaaattggtgagtgtctgaa

SEQ ID NO: 3890475 - DNA, 25 bp, Homo sapien
acaggaaattggtgagtgtctgaag

SEQ ID NO: 3890476 - DNA, 25 bp, Homo sapien
gaacaggaaattggtgagtgtctga

SEQ ID NO: 3890477 - DNA, 25 bp, Homo sapien
taccttggcctacgagactgttact

SEQ ID NO: 3890478 - DNA, 25 bp, Homo sapien
aacttgcactttctaatggccgtca

SEQ ID NO: 3890479 - DNA, 25 bp, Homo sapien
catagctttctcagtgatcgccata

SEQ ID NO: 3890480 - DNA, 25 bp, Homo sapien
tgatctaccatgcacggtcccatag

SEQ ID NO: 3890481 - DNA, 25 bp, Homo sapien
ttaaagcccggtagaggaacatgtg

SEQ ID NO: 3890482 - DNA, 25 bp, Homo sapien
gtgtgtgttaaagcccggtagagga

SEQ ID NO: 3890483 - DNA, 25 bp, Homo sapien
aggtccttgtgtgccgcggactgac

SEQ ID NO: 3890484 - DNA, 25 bp, Homo sapien
gtgtgagacaacactgccccctaga

SEQ ID NO: 3890485 - DNA, 25 bp, Homo sapien
tatccatcatggtacatgagggcac

SEQ ID NO: 3890486 - DNA, 25 bp, Homo sapien
tctgtgatagtatccatcatggtac

SEQ ID NO: 3890487 - DNA, 25 bp, Homo sapien
gcatgcatgttgctttctgtgatag

SEQ ID NO: 3890488 - DNA, 25 bp, Homo sapien
tgagggcacagtcgtttctcctaac

SEQ ID NO: 3890489 - DNA, 25 bp, Homo sapien
tagaggccggaagagctctataggc

SEQ ID NO: 3890490 - DNA, 25 bp, Homo sapien
ggaggacataggacaagacgctgcc

SEQ ID NO: 3890491 - DNA, 25 bp, Homo sapien
cattgaaaaggttggacacagctgg

SEQ ID NO: 3890492 - DNA, 25 bp, Homo sapien
tgccctcccggtatctcaggtgtgg

SEQ ID NO: 3890493 - DNA, 25 bp, Homo sapien
cagttagaaagagttcgctgtcctg

SEQ ID NO: 3890494 - DNA, 25 bp, Homo sapien
ttttatcctaaattgccacccgcta

SEQ ID NO: 3890495 - DNA, 25 bp, Homo sapien
gctgtcctgagttcacttgatcact

SEQ ID NO: 3890496 - DNA, 25 bp, Homo sapien
gctaccgtcgtcgtcttccacataa

SEQ ID NO: 3890497 - DNA, 25 bp, Homo sapien
tgtaatggcccgtagcagttggcct

SEQ ID NO: 3890498 - DNA, 25 bp, Homo sapien
ggctgaagagttgatgacatccctg

SEQ ID NO: 3890499 - DNA, 25 bp, Homo sapien
aactggtttcatggtagcgtactgc

SEQ ID NO: 3890500 - DNA, 25 bp, Homo sapien
tccgcctgcattccgctggctgaag

SEQ ID NO: 3890501 - DNA, 25 bp, Homo sapien
gaaggctcttgagtgtaaaacaagt

SEQ ID NO: 3890502 - DNA, 25 bp, Homo sapien
tcaacgcatcattctcattttagtc

SEQ ID NO: 3890503 - DNA, 25 bp, Homo sapien
tcctgctgctggtttagtactttaa

SEQ ID NO: 3890504 - DNA, 25 bp, Homo sapien
gaaaggatctagtgatctgactgct

SEQ ID NO: 3890505 - DNA, 25 bp, Homo sapien
cccaagtgtgagagtcaaagggcct

SEQ ID NO: 3890506 - DNA, 25 bp, Homo sapien
tgcagcctgtacttatgagtggcag

SEQ ID NO: 3890507 - DNA, 25 bp, Homo sapien
tggcagaacgccagagaaggttaat

SEQ ID NO: 3890508 - DNA, 25 bp, Homo sapien
tagatgccaggatcaaatctattaa

SEQ ID NO: 3890509 - DNA, 25 bp, Homo sapien
tgccacatccacaatatgagataaa

SEQ ID NO: 3890510 - DNA, 25 bp, Homo sapien
caatatgagataaatattattctgc

SEQ ID NO: 3890511 - DNA, 25 bp, Homo sapien
tgactttaggtaaagcatctagcct

SEQ ID NO: 3890512 - DNA, 25 bp, Homo sapien
ggatgactttaggtaaagcatctag

SEQ ID NO: 3890513 - DNA, 25 bp, Homo sapien
caaagtcctaggatgtgtcagggca

SEQ ID NO: 3890514 - DNA, 25 bp, Homo sapien
catgatagagactgtaaacagcagg

SEQ ID NO: 3890515 - DNA, 25 bp, Homo sapien
tgtcagggcaccagaagagaagttt

SEQ ID NO: 3890516 - DNA, 25 bp, Homo sapien
caatggttatgtgcgattcagtgaa

SEQ ID NO: 3890517 - DNA, 25 bp, Homo sapien
taagccttcgggaacaacaagcaca

SEQ ID NO: 3890518 - DNA, 25 bp, Homo sapien
gaattttcaacaaccgtctcaggca

SEQ ID NO: 3890519 - DNA, 25 bp, Homo sapien
tctgttgggccatgactcaatgcac

SEQ ID NO: 3890520 - DNA, 25 bp, Homo sapien
gagtcaatccctgaagctccggcta

SEQ ID NO: 3890521 - DNA, 25 bp, Homo sapien
gctgttagggtgttatctatgccag

SEQ ID NO: 3890522 - DNA, 25 bp, Homo sapien
taccatcatgacaatcattccaggc

SEQ ID NO: 3890523 - DNA, 25 bp, Homo sapien
gtattgagcaaaggcctatgtggga

SEQ ID NO: 3890524 - DNA, 25 bp, Homo sapien
tatactttacctgtcatctagatgc

SEQ ID NO: 3890525 - DNA, 25 bp, Homo sapien
tcaggtactcctgctgtgaattcag

SEQ ID NO: 3890526 - DNA, 25 bp, Homo sapien
ggcgacttcccgagctgtttgggca

SEQ ID NO: 3890527 - DNA, 25 bp, Homo sapien
catacgcatgtgctgttcagtgcca

SEQ ID NO: 3890528 - DNA, 25 bp, Homo sapien
gctgaaaatttgagggagcccctgc

SEQ ID NO: 3890529 - DNA, 25 bp, Homo sapien
aaagatctagctgagtacatttggg

SEQ ID NO: 3890530 - DNA, 25 bp, Homo sapien
tgtgaaacgtgaattaagagcttag

SEQ ID NO: 3890531 - DNA, 25 bp, Homo sapien
catactttgcataacatcaattgag

SEQ ID NO: 3890532 - DNA, 25 bp, Homo sapien
gggaaaacatgcaattattagttgt

SEQ ID NO: 3890533 - DNA, 25 bp, Homo sapien
caagtcagatagttagaatcgaagt

SEQ ID NO: 3890534 - DNA, 25 bp, Homo sapien
agttctgtcaaatgccgtgaaagta

SEQ ID NO: 3890535 - DNA, 25 bp, Homo sapien
ctgtcacttggcttcgatttttata

SEQ ID NO: 3890536 - DNA, 25 bp, Homo sapien
ggaagtctcaaaagaccatcttaaa

SEQ ID NO: 3890537 - DNA, 25 bp, Homo sapien
tgtgaaggcatcaagtccaagcctg

SEQ ID NO: 3890538 - DNA, 25 bp, Homo sapien
ggatgagtttctaagtatcccctcc

SEQ ID NO: 3890539 - DNA, 25 bp, Homo sapien
gcatcaagtccaagcctggaaccat

SEQ ID NO: 3890540 - DNA, 25 bp, Homo sapien
gaaccatggccccaagtgagaacat

SEQ ID NO: 3890541 - DNA, 25 bp, Homo sapien
tctcctgaaaatgcctagagcagtg

SEQ ID NO: 3890542 - DNA, 25 bp, Homo sapien
catctggattttgttagccacggga

SEQ ID NO: 3890543 - DNA, 25 bp, Homo sapien
tataggtgaggcacgccagctgtct

SEQ ID NO: 3890544 - DNA, 25 bp, Homo sapien
ggtaagatggttgctcccagctctg

SEQ ID NO: 3890545 - DNA, 25 bp, Homo sapien
tgtgaaagggatcttccacttggtc

SEQ ID NO: 3890546 - DNA, 25 bp, Homo sapien
taggcctgccttcagccatgtgaaa

SEQ ID NO: 3890547 - DNA, 25 bp, Homo sapien
ttggtcctgttcagctcgccatggt

SEQ ID NO: 3890548 - DNA, 25 bp, Homo sapien
ggtcctaggcctgccttcagccatg

SEQ ID NO: 3890549 - DNA, 25 bp, Homo sapien
tggcagcagctatgtgcaagaaatt

SEQ ID NO: 3890550 - DNA, 25 bp, Homo sapien
gatcagaactccttgggaaagggag

SEQ ID NO: 3890551 - DNA, 25 bp, Homo sapien
tcctgttcactattggctggtctgg

SEQ ID NO: 3890552 - DNA, 25 bp, Homo sapien
gctggtctggaccttggtgcctgac

SEQ ID NO: 3890553 - DNA, 25 bp, Homo sapien
tggaagggaaactttgaccagtcaa

SEQ ID NO: 3890554 - DNA, 25 bp, Homo sapien
tgaccagtcaagatgggaactgatg

SEQ ID NO: 3890555 - DNA, 25 bp, Homo sapien
ggaggagtactcctggggcccatcc

SEQ ID NO: 3890556 - DNA, 25 bp, Homo sapien
gctggtagacatagacagtttggaa

SEQ ID NO: 3890557 - DNA, 25 bp, Homo sapien
aaaggtagttcggcctggccacagt

SEQ ID NO: 3890558 - DNA, 25 bp, Homo sapien
aggtagttcggcctggccacagtgg

SEQ ID NO: 3890559 - DNA, 25 bp, Homo sapien
aaggtagttcggcctggccacagtg

SEQ ID NO: 3890560 - DNA, 25 bp, Homo sapien
aaaaggtagttcggcctggccacag

SEQ ID NO: 3890561 - DNA, 25 bp, Homo sapien
aaagtcacagacattcaatgccggc

SEQ ID NO: 3890562 - DNA, 25 bp, Homo sapien
ggaatctacttcttgcattagtgtg

SEQ ID NO: 3890563 - DNA, 25 bp, Homo sapien
ccggcctgtgaaatcagacagaagg

SEQ ID NO: 3890564 - DNA, 25 bp, Homo sapien
caatgccggcctgtgaaatcagaca

SEQ ID NO: 3890565 - DNA, 25 bp, Homo sapien
gggcagaaacagtcttgtagctctt

SEQ ID NO: 3890566 - DNA, 25 bp, Homo sapien
gcttctccaatggactggagcacct

SEQ ID NO: 3890567 - DNA, 25 bp, Homo sapien
ctgtgtcctgtagcaccaggtatga

SEQ ID NO: 3890568 - DNA, 25 bp, Homo sapien
gccatcacaaggtgagtcattctca

SEQ ID NO: 3890569 - DNA, 25 bp, Homo sapien
tattcattgcatgaactgtgcctga

SEQ ID NO: 3890570 - DNA, 25 bp, Homo sapien
acgtgcagcctattcattgcatgaa

SEQ ID NO: 3890571 - DNA, 25 bp, Homo sapien
tctctccggtctgtccctccaagat

SEQ ID NO: 3890572 - DNA, 25 bp, Homo sapien
tgaactgtgcctgatgcgtgtccaa

SEQ ID NO: 3890573 - DNA, 25 bp, Homo sapien
ggaattgatctcgtgaagcccacaa

SEQ ID NO: 3890574 - DNA, 25 bp, Homo sapien
gaattgatctcgtgaagcccacaag

SEQ ID NO: 3890575 - DNA, 25 bp, Homo sapien
attgatctcgtgaagcccacaagga

SEQ ID NO: 3890576 - DNA, 25 bp, Homo sapien
tgatctcgtgaagcccacaaggact

SEQ ID NO: 3890577 - DNA, 25 bp, Homo sapien
gacctgcgggtgctgccccacgact

SEQ ID NO: 3890578 - DNA, 25 bp, Homo sapien
ccccacgactcccaccaaagcccat

SEQ ID NO: 3890579 - DNA, 25 bp, Homo sapien
cttgatttagacctgcgggtgctgc

SEQ ID NO: 3890580 - DNA, 25 bp, Homo sapien
tagacctgcgggtgctgccccacga

SEQ ID NO: 3890581 - DNA, 25 bp, Homo sapien
tagactgtacagacatgcaggctgc

SEQ ID NO: 3890582 - DNA, 25 bp, Homo sapien
ccctagctgcttacattggaaggca

SEQ ID NO: 3890583 - DNA, 25 bp, Homo sapien
tctggcagagtctaagatatggtgg

SEQ ID NO: 3890584 - DNA, 25 bp, Homo sapien
gcagtggtggcagtttactcaaaat

SEQ ID NO: 3890585 - DNA, 25 bp, Homo sapien
ttccagtggaacagaagtgctactt

SEQ ID NO: 3890586 - DNA, 25 bp, Homo sapien
tggtaaaatcttggcgccctaggcc

SEQ ID NO: 3890587 - DNA, 25 bp, Homo sapien
ggcccatacctgtaacctgacgata

SEQ ID NO: 3890588 - DNA, 25 bp, Homo sapien
tggactgaaacaagttgctgggctt

SEQ ID NO: 3890589 - DNA, 25 bp, Homo sapien
caaggctgggcgctgcttgcggaac

SEQ ID NO: 3890590 - DNA, 25 bp, Homo sapien
ggctgggcgctgcttgcggaaccga

SEQ ID NO: 3890591 - DNA, 25 bp, Homo sapien
ccccaaggctgggcgctgcttgcgg

SEQ ID NO: 3890592 - DNA, 25 bp, Homo sapien
tgggcgctgcttgcggaaccgacgg

SEQ ID NO: 3890593 - DNA, 25 bp, Homo sapien
gtccctgcgtccttcggtctctgct

SEQ ID NO: 3890594 - DNA, 25 bp, Homo sapien
cgccgccgtccctgcgtccttcggt

SEQ ID NO: 3890595 - DNA, 25 bp, Homo sapien
cgccgtccctgcgtccttcggtctc

SEQ ID NO: 3890596 - DNA, 25 bp, Homo sapien
ccgtccctgcgtccttcggtctctg

SEQ ID NO: 3890597 - DNA, 25 bp, Homo sapien
atattgcctttcagttcagaccact

SEQ ID NO: 3890598 - DNA, 25 bp, Homo sapien
gcttggccagccagaatatttaata

SEQ ID NO: 3890599 - DNA, 25 bp, Homo sapien
tgtttcccaattcatgccatcgcca

SEQ ID NO: 3890600 - DNA, 25 bp, Homo sapien
tgtgccttcaactattcctatgtgc

SEQ ID NO: 3890601 - DNA, 25 bp, Homo sapien
ttgtgataggctggatagaagacac

SEQ ID NO: 3890602 - DNA, 25 bp, Homo sapien
tatacagcgttaagagctgtgccag

SEQ ID NO: 3890603 - DNA, 25 bp, Homo sapien
acagttgatatacagcgttaagagc

SEQ ID NO: 3890604 - DNA, 25 bp, Homo sapien
tatatgacagttgatatacagcgtt

SEQ ID NO: 3890605 - DNA, 25 bp, Homo sapien
gatatacagcgttaagagctgtgcc

SEQ ID NO: 3890606 - DNA, 25 bp, Homo sapien
tgagtgttcttgtccggctagcctg

SEQ ID NO: 3890607 - DNA, 25 bp, Homo sapien
gaaatcattccattccgagtggctg

SEQ ID NO: 3890608 - DNA, 25 bp, Homo sapien
ggatctgtatgaacccactcatggg

SEQ ID NO: 3890609 - DNA, 25 bp, Homo sapien
gagtgcacggagtcttagaacctca

SEQ ID NO: 3890610 - DNA, 25 bp, Homo sapien
taatggcctctgtgaataatgtaac

SEQ ID NO: 3890611 - DNA, 25 bp, Homo sapien
gagaagaactaagcctttggctcca

SEQ ID NO: 3890612 - DNA, 25 bp, Homo sapien
tatcttacgtgttgaagacctgact

SEQ ID NO: 3890613 - DNA, 25 bp, Homo sapien
cactctaaaagaggtgtggctcaca

SEQ ID NO: 3890614 - DNA, 25 bp, Homo sapien
aaacaatgtggcgatgtcgtggaaa

SEQ ID NO: 3890615 - DNA, 25 bp, Homo sapien
ttgtgtcttgcagaaaggatggccc

SEQ ID NO: 3890616 - DNA, 25 bp, Homo sapien
tggtcattgtgtcttgcagaaagga

SEQ ID NO: 3890617 - DNA, 25 bp, Homo sapien
gaaagttatctttcccgctctttgc

SEQ ID NO: 3890618 - DNA, 25 bp, Homo sapien
gaataagttacacacaatggccaca

SEQ ID NO: 3890619 - DNA, 25 bp, Homo sapien
caaagctgccttctcggatactgaa

SEQ ID NO: 3890620 - DNA, 25 bp, Homo sapien
gctgtgagcaccgtaacaaaatgta

SEQ ID NO: 3890621 - DNA, 25 bp, Homo sapien
gatggctttacttcctgagaggcaa

SEQ ID NO: 3890622 - DNA, 25 bp, Homo sapien
gaagccatcaccttcaaaaaactaa

SEQ ID NO: 3890623 - DNA, 25 bp, Homo sapien
ctgggttgtccagcggcctccttag

SEQ ID NO: 3890624 - DNA, 25 bp, Homo sapien
gcccagcctattcttgtcatattct

SEQ ID NO: 3890625 - DNA, 25 bp, Homo sapien
tattctaaattgtgctctagatgtg

SEQ ID NO: 3890626 - DNA, 25 bp, Homo sapien
tgtaagatacatggtctcagccaag

SEQ ID NO: 3890627 - DNA, 25 bp, Homo sapien
taaaacagagactaccacaggcagt

SEQ ID NO: 3890628 - DNA, 25 bp, Homo sapien
taggcaccaggtcagtcaattgttc

SEQ ID NO: 3890629 - DNA, 25 bp, Homo sapien
tctcaaagctccaagactgccaggg

SEQ ID NO: 3890630 - DNA, 25 bp, Homo sapien
caattagtacggcaaagtggcggga

SEQ ID NO: 3890631 - DNA, 25 bp, Homo sapien
ggtttgatatcatctgcacacagca

SEQ ID NO: 3890632 - DNA, 25 bp, Homo sapien
tggtgctggagtttcagccatgcac

SEQ ID NO: 3890633 - DNA, 25 bp, Homo sapien
cttcatttgaagcacccagttggtg

SEQ ID NO: 3890634 - DNA, 25 bp, Homo sapien
tttagtaatgagacccttatcggcc

SEQ ID NO: 3890635 - DNA, 25 bp, Homo sapien
aatgaatgctgggtttacctgcagg

SEQ ID NO: 3890636 - DNA, 25 bp, Homo sapien
caaccctttaagatgagtgccactg

SEQ ID NO: 3890637 - DNA, 25 bp, Homo sapien
taccaacgagatgatgttgccacca

SEQ ID NO: 3890638 - DNA, 25 bp, Homo sapien
agtacaggcctagggattatggaac

SEQ ID NO: 3890639 - DNA, 25 bp, Homo sapien
taaacgatctaacagattcttgtga

SEQ ID NO: 3890640 - DNA, 25 bp, Homo sapien
ttggtatcttgtattcagtttttcc

SEQ ID NO: 3890641 - DNA, 25 bp, Homo sapien
tccattgttcacctgaaacttccac

SEQ ID NO: 3890642 - DNA, 25 bp, Homo sapien
aactgaagaataaacgatctaacag

SEQ ID NO: 3890643 - DNA, 25 bp, Homo sapien
tacatttgtacctgacttagggcac

SEQ ID NO: 3890644 - DNA, 25 bp, Homo sapien
catgctgcgtggttaggtgcctata

SEQ ID NO: 3890645 - DNA, 25 bp, Homo sapien
ggaggatccaactaataactgcaga

SEQ ID NO: 3890646 - DNA, 25 bp, Homo sapien
caagcacccacgttcaggctggatt

SEQ ID NO: 3890647 - DNA, 25 bp, Homo sapien
atcttttcaattgcccgatgcaggt

SEQ ID NO: 3890648 - DNA, 25 bp, Homo sapien
cctgctgttgaacaggccgaatttc

SEQ ID NO: 3890649 - DNA, 25 bp, Homo sapien
gttgaacaggccgaatttcatcttc

SEQ ID NO: 3890650 - DNA, 25 bp, Homo sapien
tcaattgcccgatgcaggtcctgct

SEQ ID NO: 3890651 - DNA, 25 bp, Homo sapien
cacatagagaaatcataaggaattt

SEQ ID NO: 3890652 - DNA, 25 bp, Homo sapien
aagaccccaaagacaaccacaatga

SEQ ID NO: 3890653 - DNA, 25 bp, Homo sapien
caaagacttcacatctataagtaca

SEQ ID NO: 3890654 - DNA, 25 bp, Homo sapien
cactgagtgctaagaagtaggaagc

SEQ ID NO: 3890655 - DNA, 25 bp, Homo sapien
tctcgacacatctcttttaggtcac

SEQ ID NO: 3890656 - DNA, 25 bp, Homo sapien
gacacatctcttttaggtcacttcc

SEQ ID NO: 3890657 - DNA, 25 bp, Homo sapien
gagggcagcatctcgacacatctct

SEQ ID NO: 3890658 - DNA, 25 bp, Homo sapien
agcatctcgacacatctcttttagg

SEQ ID NO: 3890659 - DNA, 25 bp, Homo sapien
tgtcctagccacataatagacttga

SEQ ID NO: 3890660 - DNA, 25 bp, Homo sapien
tctcaagaaggtaccaaggtgacat

SEQ ID NO: 3890661 - DNA, 25 bp, Homo sapien
caagccaattaagtgactgtcctag

SEQ ID NO: 3890662 - DNA, 25 bp, Homo sapien
caggtaaacacggtcagagccagga

SEQ ID NO: 3890663 - DNA, 25 bp, Homo sapien
tatattcacgggattgataaactct

SEQ ID NO: 3890664 - DNA, 25 bp, Homo sapien
gcaggttaccaatgacggtgataat

SEQ ID NO: 3890665 - DNA, 25 bp, Homo sapien
ggccagtggttgcttaaggctgtac

SEQ ID NO: 3890666 - DNA, 25 bp, Homo sapien
gataaactctatcaactcctggaca

SEQ ID NO: 3890667 - DNA, 25 bp, Homo sapien
ccatcacttctttgtgtaatcctgg

SEQ ID NO: 3890668 - DNA, 25 bp, Homo sapien
tatgaaaaggagcactgcaatagaa

SEQ ID NO: 3890669 - DNA, 25 bp, Homo sapien
ttattatgaaaaggagcactgcaat

SEQ ID NO: 3890670 - DNA, 25 bp, Homo sapien
atgagataaccatttttgaccagct

SEQ ID NO: 3890671 - DNA, 25 bp, Homo sapien
aaccatttttgaccagctgtggtgg

SEQ ID NO: 3890672 - DNA, 25 bp, Homo sapien
taaattccagaatgtccatacagtg

SEQ ID NO: 3890673 - DNA, 25 bp, Homo sapien
tccagaatgtccatacagtggaatc

SEQ ID NO: 3890674 - DNA, 25 bp, Homo sapien
ccttcaatgtggcattgattcacta

SEQ ID NO: 3890675 - DNA, 25 bp, Homo sapien
aaatgtccttcaatgtggcattgat

SEQ ID NO: 3890676 - DNA, 25 bp, Homo sapien
ttttcaagatgagtttcaggattgc

SEQ ID NO: 3890677 - DNA, 25 bp, Homo sapien
aagatgagtttcaggattgcttctc

SEQ ID NO: 3890678 - DNA, 25 bp, Homo sapien
tgagtttcaggattgcttctctctg

SEQ ID NO: 3890679 - DNA, 25 bp, Homo sapien
catttttcaagatgagtttcaggat

SEQ ID NO: 3890680 - DNA, 25 bp, Homo sapien
caaggctctagagtaattatctctg

SEQ ID NO: 3890681 - DNA, 25 bp, Homo sapien
tcaatacttataaggagatgacaga

SEQ ID NO: 3890682 - DNA, 25 bp, Homo sapien
agatgacagaaactttgaagaggtc

SEQ ID NO: 3890683 - DNA, 25 bp, Homo sapien
gaggtcaaagcaactagattcaagg

SEQ ID NO: 3890684 - DNA, 25 bp, Homo sapien
catctaagcgtttgcattcttaagg

SEQ ID NO: 3890685 - DNA, 25 bp, Homo sapien
cagggaagcactgactacatctgcc

SEQ ID NO: 3890686 - DNA, 25 bp, Homo sapien
tctgtgccaaaattatagtgtactg

SEQ ID NO: 3890687 - DNA, 25 bp, Homo sapien
ctaaaatagccaggcaaacttgaga

SEQ ID NO: 3890688 - DNA, 25 bp, Homo sapien
ggtcctgaggacgattggtagctcc

SEQ ID NO: 3890689 - DNA, 25 bp, Homo sapien
tcttctcattatagccgagtcaagg

SEQ ID NO: 3890690 - DNA, 25 bp, Homo sapien
tagccgagtcaaggtcctgaggacg

SEQ ID NO: 3890691 - DNA, 25 bp, Homo sapien
caaggtcctgaggacgattggtagc

SEQ ID NO: 3890692 - DNA, 25 bp, Homo sapien
ctgaaataatccaaatcttatatcc

SEQ ID NO: 3890693 - DNA, 25 bp, Homo sapien
caggagcctcagagcccaattactt

SEQ ID NO: 3890694 - DNA, 25 bp, Homo sapien
tctactctacactgaatgacattca

SEQ ID NO: 3890695 - DNA, 25 bp, Homo sapien
agcctcagagcccaattactttcaa

SEQ ID NO: 3890696 - DNA, 25 bp, Homo sapien
actgaatgacattcaggagcctcag

SEQ ID NO: 3890697 - DNA, 25 bp, Homo sapien
acatcacaaaagacactgtggttaa

SEQ ID NO: 3890698 - DNA, 25 bp, Homo sapien
ctatgctggtctgaaacctctgggc

SEQ ID NO: 3890699 - DNA, 25 bp, Homo sapien
taaaagcataagataatgaatgagt

SEQ ID NO: 3890700 - DNA, 25 bp, Homo sapien
caaaagacactgtggttaagtcaat

SEQ ID NO: 3890701 - DNA, 25 bp, Homo sapien
gacttatgctaatgcggtgggctta

SEQ ID NO: 3890702 - DNA, 25 bp, Homo sapien
taaacgaattaagctaaggctggag

SEQ ID NO: 3890703 - DNA, 25 bp, Homo sapien
gatccttaaaccctctggccacaaa

SEQ ID NO: 3890704 - DNA, 25 bp, Homo sapien
cacaaacataatgtagaaggaggac

SEQ ID NO: 3890705 - DNA, 25 bp, Homo sapien
ggcagctgtgatcagtatccaatcc

SEQ ID NO: 3890706 - DNA, 25 bp, Homo sapien
gcagctgtgatcagtatccaatcca

SEQ ID NO: 3890707 - DNA, 25 bp, Homo sapien
ggctgtagcttcatggtcagaactt

SEQ ID NO: 3890708 - DNA, 25 bp, Homo sapien
ctgtagcttcatggtcagaacttga

SEQ ID NO: 3890709 - DNA, 25 bp, Homo sapien
tcatggtcagaacttgaacggtttc

SEQ ID NO: 3890710 - DNA, 25 bp, Homo sapien
tcagaacttgaacggtttcgtagaa

SEQ ID NO: 3890711 - DNA, 25 bp, Homo sapien
caaatgttcctaacatactgaaatg

SEQ ID NO: 3890712 - DNA, 25 bp, Homo sapien
ctggtctgatcactatatactatag

SEQ ID NO: 3890713 - DNA, 25 bp, Homo sapien
tagatgatgggtattctaattaccc

SEQ ID NO: 3890714 - DNA, 25 bp, Homo sapien
agacaggttgactatgttgtcaagg

SEQ ID NO: 3890715 - DNA, 25 bp, Homo sapien
aagatactgctaaggaaatgaaatg

SEQ ID NO: 3890716 - DNA, 25 bp, Homo sapien
aataaaataaaattcgtgctatgtg

SEQ ID NO: 3890717 - DNA, 25 bp, Homo sapien
gaaagatactgctaaggaaatgaaa

SEQ ID NO: 3890718 - DNA, 25 bp, Homo sapien
aaattcgtgctatgtgaaagatact

SEQ ID NO: 3890719 - DNA, 25 bp, Homo sapien
taatgggaacattgcaacatgcaaa

SEQ ID NO: 3890720 - DNA, 25 bp, Homo sapien
gcaaaaaacctagcaaacgtggcac

SEQ ID NO: 3890721 - DNA, 25 bp, Homo sapien
ggaattgtagctttaagacgctgaa

SEQ ID NO: 3890722 - DNA, 25 bp, Homo sapien
tcctcagataagtggcttagcaggc

SEQ ID NO: 3890723 - DNA, 25 bp, Homo sapien
aaatcaaactaatcacacttcccag

SEQ ID NO: 3890724 - DNA, 25 bp, Homo sapien
tcccagttaaagagaagcttagatt

SEQ ID NO: 3890725 - DNA, 25 bp, Homo sapien
tagctatatattcctctgttcaaga

SEQ ID NO: 3890726 - DNA, 25 bp, Homo sapien
gacaatatagctaataggccaggtg

SEQ ID NO: 3890727 - DNA, 25 bp, Homo sapien
catctataaagatgatggatggttg

SEQ ID NO: 3890728 - DNA, 25 bp, Homo sapien
taaagatgatggatggttgtagctt

SEQ ID NO: 3890729 - DNA, 25 bp, Homo sapien
tataaagatgatggatggttgtagc

SEQ ID NO: 3890730 - DNA, 25 bp, Homo sapien
tctataaagatgatggatggttgta

SEQ ID NO: 3890731 - DNA, 25 bp, Homo sapien
cacagattaagttttagccaaagga

SEQ ID NO: 3890732 - DNA, 25 bp, Homo sapien
cacaagcaaacaatgcaccatagtg

SEQ ID NO: 3890733 - DNA, 25 bp, Homo sapien
tagcctacagaaggtaaacaacttc

SEQ ID NO: 3890734 - DNA, 25 bp, Homo sapien
cataccactttatcaacagttgaaa

SEQ ID NO: 3890735 - DNA, 25 bp, Homo sapien
aaaatgcacaggtacaggcttcagt

SEQ ID NO: 3890736 - DNA, 25 bp, Homo sapien
cataaaaatgcacaggtacaggctt

SEQ ID NO: 3890737 - DNA, 25 bp, Homo sapien
aaaaatgcacaggtacaggcttcag

SEQ ID NO: 3890738 - DNA, 25 bp, Homo sapien
taaaaatgcacaggtacaggcttca

SEQ ID NO: 3890739 - DNA, 25 bp, Homo sapien
cttgagaatctgatttcacaaaaac

SEQ ID NO: 3890740 - DNA, 25 bp, Homo sapien
aggcgaatatatacctttaccatac

SEQ ID NO: 3890741 - DNA, 25 bp, Homo sapien
ggattttaatgctttaggcgaatat

SEQ ID NO: 3890742 - DNA, 25 bp, Homo sapien
caaaaactagttctacaatggcaga

SEQ ID NO: 3890743 - DNA, 25 bp, Homo sapien
cagaagcctggaattctcaaacaaa

SEQ ID NO: 3890744 - DNA, 25 bp, Homo sapien
ctgcagaagcctggaattctcaaac

SEQ ID NO: 3890745 - DNA, 25 bp, Homo sapien
tgcagaagcctggaattctcaaaca

SEQ ID NO: 3890746 - DNA, 25 bp, Homo sapien
agaagcctggaattctcaaacaaat

SEQ ID NO: 3890747 - DNA, 25 bp, Homo sapien
gagaaaatactctgctgcaagaata

SEQ ID NO: 3890748 - DNA, 25 bp, Homo sapien
tactcaaaaatctgcaagggtctaa

SEQ ID NO: 3890749 - DNA, 25 bp, Homo sapien
acaggatgttgtcaagcatcacaga

SEQ ID NO: 3890750 - DNA, 25 bp, Homo sapien
aggtcttacaaaacatagcttctga

SEQ ID NO: 3890751 - DNA, 25 bp, Homo sapien
gatgagcagcaatactcatttcata

SEQ ID NO: 3890752 - DNA, 25 bp, Homo sapien
attaagagggtctacaagatgagca

SEQ ID NO: 3890753 - DNA, 25 bp, Homo sapien
atgagcagcaatactcatttcatat

SEQ ID NO: 3890754 - DNA, 25 bp, Homo sapien
cattcaggttctaaagattcataaa

SEQ ID NO: 3890755 - DNA, 25 bp, Homo sapien
tcaaaatttggcatagggattaaaa

SEQ ID NO: 3890756 - DNA, 25 bp, Homo sapien
tagaccatagtcagtaaggtttgtt

SEQ ID NO: 3890757 - DNA, 25 bp, Homo sapien
tagctacatcttgaagttagtaaga

SEQ ID NO: 3890758 - DNA, 25 bp, Homo sapien
gaatgatctttgcttgcgtaattgt

SEQ ID NO: 3890759 - DNA, 25 bp, Homo sapien
caacttcattccgactcaaaggacg

SEQ ID NO: 3890760 - DNA, 25 bp, Homo sapien
acttcattccgactcaaaggacgag

SEQ ID NO: 3890761 - DNA, 25 bp, Homo sapien
cgactcaaaggacgagaaaaggctt

SEQ ID NO: 3890762 - DNA, 25 bp, Homo sapien
cattccgactcaaaggacgagaaaa

SEQ ID NO: 3890763 - DNA, 25 bp, Homo sapien
taaagctcctcttgcaaactagaag

SEQ ID NO: 3890764 - DNA, 25 bp, Homo sapien
gaaatgtcactaggtaataactata

SEQ ID NO: 3890765 - DNA, 25 bp, Homo sapien
tatttggtagtagaattaatcattt

SEQ ID NO: 3890766 - DNA, 25 bp, Homo sapien
aattgtaagactaacaaagtagctt

SEQ ID NO: 3890767 - DNA, 25 bp, Homo sapien
gagcaatttattgacatgtatagca

SEQ ID NO: 3890768 - DNA, 25 bp, Homo sapien
gaaatcgtactacctcatctatgag

SEQ ID NO: 3890769 - DNA, 25 bp, Homo sapien
tccatttccgagtggaaaaccgtga

SEQ ID NO: 3890770 - DNA, 25 bp, Homo sapien
gcaaatatggtatcaggtcgtttca

SEQ ID NO: 3890771 - DNA, 25 bp, Homo sapien
ggatgccgacaaagattccctcggg

SEQ ID NO: 3890772 - DNA, 25 bp, Homo sapien
tcctctagatactaagggctgcggg

SEQ ID NO: 3890773 - DNA, 25 bp, Homo sapien
gaagagctaagcagaccctaagggc

SEQ ID NO: 3890774 - DNA, 25 bp, Homo sapien
gacctcagaaggatacgacaaccat

SEQ ID NO: 3890775 - DNA, 25 bp, Homo sapien
aacagcaagagcaagtgccctcagc

SEQ ID NO: 3890776 - DNA, 25 bp, Homo sapien
gatgtctgcttaagctacctgctag

SEQ ID NO: 3890777 - DNA, 25 bp, Homo sapien
gactgagactttctgcgaagccggc

SEQ ID NO: 3890778 - DNA, 25 bp, Homo sapien
agcactcgctaaggctctgcgttta

SEQ ID NO: 3890779 - DNA, 25 bp, Homo sapien
cgtgtctgcgagcagcactcgctaa

SEQ ID NO: 3890780 - DNA, 25 bp, Homo sapien
tgtactttagccaaaacgcagaagc

SEQ ID NO: 3890781 - DNA, 25 bp, Homo sapien
gccaaaacgcagaagcttatggcca

SEQ ID NO: 3890782 - DNA, 25 bp, Homo sapien
ttgtgtctgtactttagccaaaacg

SEQ ID NO: 3890783 - DNA, 25 bp, Homo sapien
ttagccaaaacgcagaagcttatgg

SEQ ID NO: 3890784 - DNA, 25 bp, Homo sapien
caaggcttgcaaatgtgatatacca

SEQ ID NO: 3890785 - DNA, 25 bp, Homo sapien
catttgtggaaggatcagctgacca

SEQ ID NO: 3890786 - DNA, 25 bp, Homo sapien
tagtaagggccagatcaaaagctgt

SEQ ID NO: 3890787 - DNA, 25 bp, Homo sapien
gctgccatcccctgataaaacttga

SEQ ID NO: 3890788 - DNA, 25 bp, Homo sapien
gattgtgctactatcagcatgggaa

SEQ ID NO: 3890789 - DNA, 25 bp, Homo sapien
gtgccaacacccaagctgcatagtg

SEQ ID NO: 3890790 - DNA, 25 bp, Homo sapien
tcacaggcatgattgtgctactatc

SEQ ID NO: 3890791 - DNA, 25 bp, Homo sapien
ctactatcagcatgggaattgtgac

SEQ ID NO: 3890792 - DNA, 25 bp, Homo sapien
caaggccttgaccatagagtgattc

SEQ ID NO: 3890793 - DNA, 25 bp, Homo sapien
tattgggacatctcaaaggactaag

SEQ ID NO: 3890794 - DNA, 25 bp, Homo sapien
cattctctgggaagctagtctatgg

SEQ ID NO: 3890795 - DNA, 25 bp, Homo sapien
gctgttctcacaatacaaggccttg

SEQ ID NO: 3890796 - DNA, 25 bp, Homo sapien
gaatgcttcagtctgctccaaagaa

SEQ ID NO: 3890797 - DNA, 25 bp, Homo sapien
gagtaatgtgaagtattaaatgtag

SEQ ID NO: 3890798 - DNA, 25 bp, Homo sapien
ttcagtctgctccaaagaaaagaat

SEQ ID NO: 3890799 - DNA, 25 bp, Homo sapien
aaggaatgcttcagtctgctccaaa

SEQ ID NO: 3890800 - DNA, 25 bp, Homo sapien
catagtaatttgttgccattgccca

SEQ ID NO: 3890801 - DNA, 25 bp, Homo sapien
gatgactgtatcatatttccatgca

SEQ ID NO: 3890802 - DNA, 25 bp, Homo sapien
tgcctggcctatgtaacatttaaag

SEQ ID NO: 3890803 - DNA, 25 bp, Homo sapien
gaccataatgctcctcagtgttaaa

SEQ ID NO: 3890804 - DNA, 25 bp, Homo sapien
tctctggaaatcaactggaggcctt

SEQ ID NO: 3890805 - DNA, 25 bp, Homo sapien
gagtaactctgtgccatggaatcca

SEQ ID NO: 3890806 - DNA, 25 bp, Homo sapien
caagaggattctgtcgcaccaggac

SEQ ID NO: 3890807 - DNA, 25 bp, Homo sapien
aattgtcacttagggtaggctccag

SEQ ID NO: 3890808 - DNA, 25 bp, Homo sapien
agagcaccccgagcaaaggaagaag

SEQ ID NO: 3890809 - DNA, 25 bp, Homo sapien
tccttcgggaggctggtccgagccc

SEQ ID NO: 3890810 - DNA, 25 bp, Homo sapien
cgttctgtaagaatcggcggcagcc

SEQ ID NO: 3890811 - DNA, 25 bp, Homo sapien
ttgtgtaaccagttccccaagcgcc

SEQ ID NO: 3890812 - DNA, 25 bp, Homo sapien
catttagataggtgccctttgggcc

SEQ ID NO: 3890813 - DNA, 25 bp, Homo sapien
ggacacacgtgacctccttcggaaa

SEQ ID NO: 3890814 - DNA, 25 bp, Homo sapien
tatgtgttcacgttcagcacgctcg

SEQ ID NO: 3890815 - DNA, 25 bp, Homo sapien
aaagtagttccgactgtggcccgtg

SEQ ID NO: 3890816 - DNA, 25 bp, Homo sapien
tcaggcgagggagatgagagacggc

SEQ ID NO: 3890817 - DNA, 25 bp, Homo sapien
aagtttgagagttgagccgctgtga

SEQ ID NO: 3890818 - DNA, 25 bp, Homo sapien
tctcagcgcctgtgagcagccgcgg

SEQ ID NO: 3890819 - DNA, 25 bp, Homo sapien
gctgcagccatgatggaagtttgag

SEQ ID NO: 3890820 - DNA, 25 bp, Homo sapien
cttctactgcctccaacacggcggc

SEQ ID NO: 3890821 - DNA, 25 bp, Homo sapien
gagttggtctctccccttctactgc

SEQ ID NO: 3890822 - DNA, 25 bp, Homo sapien
ggagggggtctgagtcgcctgtcac

SEQ ID NO: 3890823 - DNA, 25 bp, Homo sapien
ggaacgccggagagttggtctctcc

SEQ ID NO: 3890824 - DNA, 25 bp, Homo sapien
ccgttcggaggattattcgtcttct

SEQ ID NO: 3890825 - DNA, 25 bp, Homo sapien
cggaggattattcgtcttctcccca

SEQ ID NO: 3890826 - DNA, 25 bp, Homo sapien
gaggcagccgttcggaggattattc

SEQ ID NO: 3890827 - DNA, 25 bp, Homo sapien
cagccgttcggaggattattcgtct

SEQ ID NO: 3890828 - DNA, 25 bp, Homo sapien
gctaccgccaagtccagagccattt

SEQ ID NO: 3890829 - DNA, 25 bp, Homo sapien
gccattacccggctgcggtccagag

SEQ ID NO: 3890830 - DNA, 25 bp, Homo sapien
gatggattcgacttagacttgacct

SEQ ID NO: 3890831 - DNA, 25 bp, Homo sapien
tatcaagaggatggattcgacttag

SEQ ID NO: 3890832 - DNA, 25 bp, Homo sapien
tctgttaaacttgattttcacagtc

SEQ ID NO: 3890833 - DNA, 25 bp, Homo sapien
ttctgttaaacttgattttcacagt

SEQ ID NO: 3890834 - DNA, 25 bp, Homo sapien
tttctgttaaacttgattttcacag

SEQ ID NO: 3890835 - DNA, 25 bp, Homo sapien
gctgaagtacaataaggttctctgt

SEQ ID NO: 3890836 - DNA, 25 bp, Homo sapien
tagagcacttaagcatagctttgac

SEQ ID NO: 3890837 - DNA, 25 bp, Homo sapien
tttatattgcagagtgaatacactc

SEQ ID NO: 3890838 - DNA, 25 bp, Homo sapien
gtgcattttggcatctgagcacagc

SEQ ID NO: 3890839 - DNA, 25 bp, Homo sapien
gcctgtctcagcctgctaaagtgct

SEQ ID NO: 3890840 - DNA, 25 bp, Homo sapien
gtaatctgcctgtctcagcctgcta

SEQ ID NO: 3890841 - DNA, 25 bp, Homo sapien
taatctgcctgtctcagcctgctaa

SEQ ID NO: 3890842 - DNA, 25 bp, Homo sapien
tgtctcagcctgctaaagtgctgag

SEQ ID NO: 3890843 - DNA, 25 bp, Homo sapien
gttggtactcttatcttcccaggta

SEQ ID NO: 3890844 - DNA, 25 bp, Homo sapien
tatccctcccatctaactgttggta

SEQ ID NO: 3890845 - DNA, 25 bp, Homo sapien
gggcctttctgaatagacatatata

SEQ ID NO: 3890846 - DNA, 25 bp, Homo sapien
cattaagtgaggcacatatgtaggt

SEQ ID NO: 3890847 - DNA, 25 bp, Homo sapien
aaagacttgaaggcgtatacaggaa

SEQ ID NO: 3890848 - DNA, 25 bp, Homo sapien
accacagccacgcatcaccaggcct

SEQ ID NO: 3890849 - DNA, 25 bp, Homo sapien
gaaggtgggggggttgcagtgagct

SEQ ID NO: 3890850 - DNA, 25 bp, Homo sapien
aaggtgggggggttgcagtgagctg

SEQ ID NO: 3890851 - DNA, 25 bp, Homo sapien
cttgaataaactgaaaatggacctt

SEQ ID NO: 3890852 - DNA, 25 bp, Homo sapien
gacacttgttgtccagttgaaaaaa

SEQ ID NO: 3890853 - DNA, 25 bp, Homo sapien
ggacattgtgtcagattaccagtta

SEQ ID NO: 3890854 - DNA, 25 bp, Homo sapien
tacatccacagggttttgacacttg

SEQ ID NO: 3890855 - DNA, 25 bp, Homo sapien
tgcagttggctaagagaggtttccg

SEQ ID NO: 3890856 - DNA, 25 bp, Homo sapien
cctgtgtaatcaaggccagtgctaa

SEQ ID NO: 3890857 - DNA, 25 bp, Homo sapien
taattttatgctggactctggacca

SEQ ID NO: 3890858 - DNA, 25 bp, Homo sapien
cattcgaggaattggccgctgtcac

SEQ ID NO: 3890859 - DNA, 25 bp, Homo sapien
taagtggagtttaccggcagcatca

SEQ ID NO: 3890860 - DNA, 25 bp, Homo sapien
gagttgccttctacctgccagttca

SEQ ID NO: 3890861 - DNA, 25 bp, Homo sapien
taagaaagcttacagttgggccctg

SEQ ID NO: 3890862 - DNA, 25 bp, Homo sapien
tctttgttacaatttcgggcaccgc

SEQ ID NO: 3890863 - DNA, 25 bp, Homo sapien
catggaggtagatctaggaaactct

SEQ ID NO: 3890864 - DNA, 25 bp, Homo sapien
tctgataagacttccgggctgccac

SEQ ID NO: 3890865 - DNA, 25 bp, Homo sapien
cagcacctttgccacttgaaccagt

SEQ ID NO: 3890866 - DNA, 25 bp, Homo sapien
tacccaacagtatattccatggagg

SEQ ID NO: 3890867 - DNA, 25 bp, Homo sapien
gcataaaaggtattctgtccctcca

SEQ ID NO: 3890868 - DNA, 25 bp, Homo sapien
ccctaggcttatcagtgggcccttg

SEQ ID NO: 3890869 - DNA, 25 bp, Homo sapien
taaggccctaggcttatcagtgggc

SEQ ID NO: 3890870 - DNA, 25 bp, Homo sapien
gataaggccctaggcttatcagtgg

SEQ ID NO: 3890871 - DNA, 25 bp, Homo sapien
tgcatggggtttgaggcatttccct

SEQ ID NO: 3890872 - DNA, 25 bp, Homo sapien
tctcttagcttgctttccacgtctc

SEQ ID NO: 3890873 - DNA, 25 bp, Homo sapien
actgtcggggatccaccggtgtcca

SEQ ID NO: 3890874 - DNA, 25 bp, Homo sapien
gaaaggggcacacatatcatcaagc

SEQ ID NO: 3890875 - DNA, 25 bp, Homo sapien
ggccagtcacatagtgaatgaaatc

SEQ ID NO: 3890876 - DNA, 25 bp, Homo sapien
gctgccatgacctcttttgctgctg

SEQ ID NO: 3890877 - DNA, 25 bp, Homo sapien
ttttgctgccatgacctcttttgct

SEQ ID NO: 3890878 - DNA, 25 bp, Homo sapien
tctccagataacttgaccgggccag

SEQ ID NO: 3890879 - DNA, 25 bp, Homo sapien
gcagcactgaattgacgccttgcga

SEQ ID NO: 3890880 - DNA, 25 bp, Homo sapien
taggcagagcgtttctgaggagccc

SEQ ID NO: 3890881 - DNA, 25 bp, Homo sapien
aaacatgtacttgggattcaggaac

SEQ ID NO: 3890882 - DNA, 25 bp, Homo sapien
cattgcacgggttcagaaatgtgtc

SEQ ID NO: 3890883 - DNA, 25 bp, Homo sapien
cttgaggtgatgcttgctaatgctt

SEQ ID NO: 3890884 - DNA, 25 bp, Homo sapien
attagttctcttcttgtgtgtgggc

SEQ ID NO: 3890885 - DNA, 25 bp, Homo sapien
ccttgcactggatattagttctctt

SEQ ID NO: 3890886 - DNA, 25 bp, Homo sapien
gcttggcaatggtaatctgtgcccg

SEQ ID NO: 3890887 - DNA, 25 bp, Homo sapien
gtaatgagcttgaagagaactggct

SEQ ID NO: 3890888 - DNA, 25 bp, Homo sapien
tgtgggccaagacgaactcattttc

SEQ ID NO: 3890889 - DNA, 25 bp, Homo sapien
gaacgtaaagtcatgaaagatctct

SEQ ID NO: 3890890 - DNA, 25 bp, Homo sapien
ttaaagttgaagtaggtaatgagct

SEQ ID NO: 3890891 - DNA, 25 bp, Homo sapien
cctgtatgcttgctgcaattgatta

SEQ ID NO: 3890892 - DNA, 25 bp, Homo sapien
cagtgaactctaaattgaattgttg

SEQ ID NO: 3890893 - DNA, 25 bp, Homo sapien
ttgattactagcaatttccttccca

SEQ ID NO: 3890894 - DNA, 25 bp, Homo sapien
gctgcaattgattactagcaatttc

SEQ ID NO: 3890895 - DNA, 25 bp, Homo sapien
cctttggaccaattgcatatggctt

SEQ ID NO: 3890896 - DNA, 25 bp, Homo sapien
tcctttggaccaattgcatatggct

SEQ ID NO: 3890897 - DNA, 25 bp, Homo sapien
ctcctttggaccaattgcatatggc

SEQ ID NO: 3890898 - DNA, 25 bp, Homo sapien
tttggaccaattgcatatggcttac

SEQ ID NO: 3890899 - DNA, 25 bp, Homo sapien
gatgattctggttaaacgtgggaga

SEQ ID NO: 3890900 - DNA, 25 bp, Homo sapien
taaacgtgggagaggacctgatgag

SEQ ID NO: 3890901 - DNA, 25 bp, Homo sapien
agttcccgaatctataggctgatga

SEQ ID NO: 3890902 - DNA, 25 bp, Homo sapien
gtgcaaaatggtcaagccactcagt

SEQ ID NO: 3890903 - DNA, 25 bp, Homo sapien
tgacagtaacccgtacttcacccat

SEQ ID NO: 3890904 - DNA, 25 bp, Homo sapien
gtgacagtaacccgtacttcaccca

SEQ ID NO: 3890905 - DNA, 25 bp, Homo sapien
ggaccggccagccaatccctggctt

SEQ ID NO: 3890906 - DNA, 25 bp, Homo sapien
gccagccaatccctggcttgttgct

SEQ ID NO: 3890907 - DNA, 25 bp, Homo sapien
cacctcctttggggcagttcccttg

SEQ ID NO: 3890908 - DNA, 25 bp, Homo sapien
ctgggaccggccagccaatccctgg

SEQ ID NO: 3890909 - DNA, 25 bp, Homo sapien
ttatgatgtcttccaatgccgtgag

SEQ ID NO: 3890910 - DNA, 25 bp, Homo sapien
tctggcatcccgctctccattaatg

SEQ ID NO: 3890911 - DNA, 25 bp, Homo sapien
tttatgatgtcttccaatgccgtga

SEQ ID NO: 3890912 - DNA, 25 bp, Homo sapien
gcatcccgctctccattaatgttta

SEQ ID NO: 3890913 - DNA, 25 bp, Homo sapien
ttttgtttaatgctccacaagaagg

SEQ ID NO: 3890914 - DNA, 25 bp, Homo sapien
ggtgtgggtcacactcccacttggt

SEQ ID NO: 3890915 - DNA, 25 bp, Homo sapien
gtttaatgctccacaagaaggccat

SEQ ID NO: 3890916 - DNA, 25 bp, Homo sapien
ctggtgtgggtcacactcccacttg

SEQ ID NO: 3890917 - DNA, 25 bp, Homo sapien
cactcgatgggaccatgggtagaca

SEQ ID NO: 3890918 - DNA, 25 bp, Homo sapien
cagaccccactcgatgggaccatgg

SEQ ID NO: 3890919 - DNA, 25 bp, Homo sapien
tagctgattccatatccagacccca

SEQ ID NO: 3890920 - DNA, 25 bp, Homo sapien
cgatgggaccatgggtagacatcta

SEQ ID NO: 3890921 - DNA, 25 bp, Homo sapien
tactggaaacagcccccagaaatct

SEQ ID NO: 3890922 - DNA, 25 bp, Homo sapien
ctgtttactggaaacagcccccaga

SEQ ID NO: 3890923 - DNA, 25 bp, Homo sapien
ttactggaaacagcccccagaaatc

SEQ ID NO: 3890924 - DNA, 25 bp, Homo sapien
tgtttactggaaacagcccccagaa

SEQ ID NO: 3890925 - DNA, 25 bp, Homo sapien
cctcaaattgttctttccaacatgc

SEQ ID NO: 3890926 - DNA, 25 bp, Homo sapien
tcaaattgttctttccaacatgcat

SEQ ID NO: 3890927 - DNA, 25 bp, Homo sapien
ctcaaattgttctttccaacatgca

SEQ ID NO: 3890928 - DNA, 25 bp, Homo sapien
caaggtaggaggatggtacattccc

SEQ ID NO: 3890929 - DNA, 25 bp, Homo sapien
cttagattgcagactttcaggattc

SEQ ID NO: 3890930 - DNA, 25 bp, Homo sapien
catgtgttagttttgtgaactgaag

SEQ ID NO: 3890931 - DNA, 25 bp, Homo sapien
tatccccgatatagagtgaaacctt

SEQ ID NO: 3890932 - DNA, 25 bp, Homo sapien
tcttgctgaaacaccatgtactgcc

SEQ ID NO: 3890933 - DNA, 25 bp, Homo sapien
accatgtactgccagcaaagcaggg

SEQ ID NO: 3890934 - DNA, 25 bp, Homo sapien
gacctctctggtatgcttgctcatc

SEQ ID NO: 3890935 - DNA, 25 bp, Homo sapien
gggtggcagtcttgctgaaacacca

SEQ ID NO: 3890936 - DNA, 25 bp, Homo sapien
tgtgggtgcagagctcactccatgc

SEQ ID NO: 3890937 - DNA, 25 bp, Homo sapien
tcttctcggagaagtggcctcctcc

SEQ ID NO: 3890938 - DNA, 25 bp, Homo sapien
gagaaagcaaagtgggccatctctt

SEQ ID NO: 3890939 - DNA, 25 bp, Homo sapien
catctggtggctcttcgctgtaagc

SEQ ID NO: 3890940 - DNA, 25 bp, Homo sapien
aggttaatctgctccaggcatgtgt

SEQ ID NO: 3890941 - DNA, 25 bp, Homo sapien
ccagagcagaggaggtctgtaatcc

SEQ ID NO: 3890942 - DNA, 25 bp, Homo sapien
aatcccacttcagctctgcctctct

SEQ ID NO: 3890943 - DNA, 25 bp, Homo sapien
ctctctccattttgcctgaggttaa

SEQ ID NO: 3890944 - DNA, 25 bp, Homo sapien
tgcaggctgctacttccccaaagtg

SEQ ID NO: 3890945 - DNA, 25 bp, Homo sapien
tggtgcaactttgacagcacccttc

SEQ ID NO: 3890946 - DNA, 25 bp, Homo sapien
tctgtgtccagctaaggctgggtct

SEQ ID NO: 3890947 - DNA, 25 bp, Homo sapien
ggagccaaagatcctgccctttctg

SEQ ID NO: 3890948 - DNA, 25 bp, Homo sapien
gaagggccttccgagggcataatag

SEQ ID NO: 3890949 - DNA, 25 bp, Homo sapien
gaaaaattccatgatccgagccaag

SEQ ID NO: 3890950 - DNA, 25 bp, Homo sapien
tccatcagcaaaactcgaacgcatc

SEQ ID NO: 3890951 - DNA, 25 bp, Homo sapien
gccaagtggtcagatcctccatcag

SEQ ID NO: 3890952 - DNA, 25 bp, Homo sapien
gggccaggacttcaaaggagcctgg

SEQ ID NO: 3890953 - DNA, 25 bp, Homo sapien
ttagtaccggtcatggctcctgggc

SEQ ID NO: 3890954 - DNA, 25 bp, Homo sapien
tgggccaggacttcaaaggagcctg

SEQ ID NO: 3890955 - DNA, 25 bp, Homo sapien
gaagtcctgactccttctcaatgca

SEQ ID NO: 3890956 - DNA, 25 bp, Homo sapien
cagggctggcgaggtgcctttcgct

SEQ ID NO: 3890957 - DNA, 25 bp, Homo sapien
cgaggtgcctttcgctggaagtcct

SEQ ID NO: 3890958 - DNA, 25 bp, Homo sapien
aatgcacaaggacgcccttctgctg

SEQ ID NO: 3890959 - DNA, 25 bp, Homo sapien
ggacatatgagaggaacgacaggct

SEQ ID NO: 3890960 - DNA, 25 bp, Homo sapien
aaagggagtgggacatatgagagga

SEQ ID NO: 3890961 - DNA, 25 bp, Homo sapien
aaatatgaagacttaatccagacac

SEQ ID NO: 3890962 - DNA, 25 bp, Homo sapien
agtgggacatatgagaggaacgaca

SEQ ID NO: 3890963 - DNA, 25 bp, Homo sapien
ggtgaagtacacatcgttttactcc

SEQ ID NO: 3890964 - DNA, 25 bp, Homo sapien
tgtgtctctgaacttgcgttgtttc

SEQ ID NO: 3890965 - DNA, 25 bp, Homo sapien
tgtagtgtcgagtcttctggtttcc

SEQ ID NO: 3890966 - DNA, 25 bp, Homo sapien
ttactccgggcagaggacttgtgct

SEQ ID NO: 3890967 - DNA, 25 bp, Homo sapien
tattttgctgttgcatagacgtcat

SEQ ID NO: 3890968 - DNA, 25 bp, Homo sapien
cgtcatcagagaggacataggaatc

SEQ ID NO: 3890969 - DNA, 25 bp, Homo sapien
tgcatagacgtcatcagagaggaca

SEQ ID NO: 3890970 - DNA, 25 bp, Homo sapien
tgctgttgcatagacgtcatcagag

SEQ ID NO: 3890971 - DNA, 25 bp, Homo sapien
gccagagcaatgtttgccatccagg

SEQ ID NO: 3890972 - DNA, 25 bp, Homo sapien
tcgtttagaatacggggccagagca

SEQ ID NO: 3890973 - DNA, 25 bp, Homo sapien
tgtgacagtttcttcgtttagaata

SEQ ID NO: 3890974 - DNA, 25 bp, Homo sapien
cagagcaatgtttgccatccaggaa

SEQ ID NO: 3890975 - DNA, 25 bp, Homo sapien
gccacaacgtgccaaacccaagtga

SEQ ID NO: 3890976 - DNA, 25 bp, Homo sapien
cacaacgtgccaaacccaagtgagc

SEQ ID NO: 3890977 - DNA, 25 bp, Homo sapien
caacgtgccaaacccaagtgagcat

SEQ ID NO: 3890978 - DNA, 25 bp, Homo sapien
ctgtggagaagagccacaacgtgcc

SEQ ID NO: 3890979 - DNA, 25 bp, Homo sapien
acaccgtcttgaaaggactccatca

SEQ ID NO: 3890980 - DNA, 25 bp, Homo sapien
gactccatcagctctacaccctcac

SEQ ID NO: 3890981 - DNA, 25 bp, Homo sapien
tcttgcttagacttgatacatttgc

SEQ ID NO: 3890982 - DNA, 25 bp, Homo sapien
ttcctgttgcaacaccgtcttgaaa

SEQ ID NO: 3890983 - DNA, 25 bp, Homo sapien
cttgctaagcttcggccttttccac

SEQ ID NO: 3890984 - DNA, 25 bp, Homo sapien
ttgataggcgaacatcccagcagct

SEQ ID NO: 3890985 - DNA, 25 bp, Homo sapien
tacttgctaagcttcggccttttcc

SEQ ID NO: 3890986 - DNA, 25 bp, Homo sapien
cattcctcctttgataggcgaacat

SEQ ID NO: 3890987 - DNA, 25 bp, Homo sapien
tagctgacatccaggacgaaaggcc

SEQ ID NO: 3890988 - DNA, 25 bp, Homo sapien
cattgttgactggttggtactgagc

SEQ ID NO: 3890989 - DNA, 25 bp, Homo sapien
gagtcagagtgcagattctcgacaa

SEQ ID NO: 3890990 - DNA, 25 bp, Homo sapien
tgagcaatagtgtctagcccctcga

SEQ ID NO: 3890991 - DNA, 25 bp, Homo sapien
acatgtcatctctgttcatctctcg

SEQ ID NO: 3890992 - DNA, 25 bp, Homo sapien
tcatctctgttcatctctcgcctct

SEQ ID NO: 3890993 - DNA, 25 bp, Homo sapien
tgtcatctctgttcatctctcgcct

SEQ ID NO: 3890994 - DNA, 25 bp, Homo sapien
catgtcatctctgttcatctctcgc

SEQ ID NO: 3890995 - DNA, 25 bp, Homo sapien
ctttagctttctcttctgttgtcat

SEQ ID NO: 3890996 - DNA, 25 bp, Homo sapien
gattcacattcccttttcagaggct

SEQ ID NO: 3890997 - DNA, 25 bp, Homo sapien
gaggtccaacgtgggtcttgtccag

SEQ ID NO: 3890998 - DNA, 25 bp, Homo sapien
tctgcagctgtagcggtggcttgcc

SEQ ID NO: 3890999 - DNA, 25 bp, Homo sapien
tgaacaggcttctccaagtggtgag

SEQ ID NO: 3891000 - DNA, 25 bp, Homo sapien
ggcattatctactgtggcgtcttca

SEQ ID NO: 3891001 - DNA, 25 bp, Homo sapien
tcttctatacctttgtctccaactc

SEQ ID NO: 3891002 - DNA, 25 bp, Homo sapien
gcgtcttcagcttggggtgccccat

SEQ ID NO: 3891003 - DNA, 25 bp, Homo sapien
ctgttggcattatctactgtggcgt

SEQ ID NO: 3891004 - DNA, 25 bp, Homo sapien
cagggctacatttctgtggccacat

SEQ ID NO: 3891005 - DNA, 25 bp, Homo sapien
cacacagggctacatttctgtggcc

SEQ ID NO: 3891006 - DNA, 25 bp, Homo sapien
cccatggcacacagggctacatttc

SEQ ID NO: 3891007 - DNA, 25 bp, Homo sapien
ctcatcgtgtacacagctgctacat

SEQ ID NO: 3891008 - DNA, 25 bp, Homo sapien
tgagcccacccttcaggggaatctc

SEQ ID NO: 3891009 - DNA, 25 bp, Homo sapien
ttgaactctcctcttatgaatgtta

SEQ ID NO: 3891010 - DNA, 25 bp, Homo sapien
aactctcctcttatgaatgttactg

SEQ ID NO: 3891011 - DNA, 25 bp, Homo sapien
tatgaatgttactgtccccctgctc

SEQ ID NO: 3891012 - DNA, 25 bp, Homo sapien
gaaaatatgtcactaggcagcttgg

SEQ ID NO: 3891013 - DNA, 25 bp, Homo sapien
aatttagcagcaccatcctacaggg

SEQ ID NO: 3891014 - DNA, 25 bp, Homo sapien
tatgcacggtttgtgcaacccttgg

SEQ ID NO: 3891015 - DNA, 25 bp, Homo sapien
gctatctaagacttatgaggtccca

SEQ ID NO: 3891016 - DNA, 25 bp, Homo sapien
cagatgtgtggctcaaagttcacca

SEQ ID NO: 3891017 - DNA, 25 bp, Homo sapien
tggtagcgatgaacccagcatcctc

SEQ ID NO: 3891018 - DNA, 25 bp, Homo sapien
ccagtgctggcctgtcaatggaata

SEQ ID NO: 3891019 - DNA, 25 bp, Homo sapien
gcatgtgttgttctgtgagggacca

SEQ ID NO: 3891020 - DNA, 25 bp, Homo sapien
gaatggtgatgagatccagacacat

SEQ ID NO: 3891021 - DNA, 25 bp, Homo sapien
gtggcttaggcctgtgtcacatggg

SEQ ID NO: 3891022 - DNA, 25 bp, Homo sapien
gaccagaagaatggtgatgagatcc

SEQ ID NO: 3891023 - DNA, 25 bp, Homo sapien
acatgggccacgactgcatctgaac

SEQ ID NO: 3891024 - DNA, 25 bp, Homo sapien
catgtcagtagttaacaagtggtca

SEQ ID NO: 3891025 - DNA, 25 bp, Homo sapien
tacagaaatggatgtcatgagccta

SEQ ID NO: 3891026 - DNA, 25 bp, Homo sapien
gaaaaccctgctaagatcaagttgg

SEQ ID NO: 3891027 - DNA, 25 bp, Homo sapien
caagcttggctgctatatggcacaa

SEQ ID NO: 3891028 - DNA, 25 bp, Homo sapien
aagatgcctttgatgggttaaccgc

SEQ ID NO: 3891029 - DNA, 25 bp, Homo sapien
ttaggaaggacagacgattgggcac

SEQ ID NO: 3891030 - DNA, 25 bp, Homo sapien
tctgaaactgggtcaatagctctca

SEQ ID NO: 3891031 - DNA, 25 bp, Homo sapien
gattgggcacgctgtggagccaaca

SEQ ID NO: 3891032 - DNA, 25 bp, Homo sapien
cttggattggatcagcaggagactg

SEQ ID NO: 3891033 - DNA, 25 bp, Homo sapien
ttggattggatcagcaggagactgc

SEQ ID NO: 3891034 - DNA, 25 bp, Homo sapien
tggattggatcagcaggagactgct

SEQ ID NO: 3891035 - DNA, 25 bp, Homo sapien
caattctggtagctgctagctggtg

SEQ ID NO: 3891036 - DNA, 25 bp, Homo sapien
agggcaattctggtagctgctagct

SEQ ID NO: 3891037 - DNA, 25 bp, Homo sapien
gggcaattctggtagctgctagctg

SEQ ID NO: 3891038 - DNA, 25 bp, Homo sapien
gcaattctggtagctgctagctggt

SEQ ID NO: 3891039 - DNA, 25 bp, Homo sapien
cttctgtgattctggctatccaaaa

SEQ ID NO: 3891040 - DNA, 25 bp, Homo sapien
ttctgtgattctggctatccaaaac

SEQ ID NO: 3891041 - DNA, 25 bp, Homo sapien
tgtgattctggctatccaaaaccct

SEQ ID NO: 3891042 - DNA, 25 bp, Homo sapien
gattctggctatccaaaaccctcat

SEQ ID NO: 3891043 - DNA, 25 bp, Homo sapien
gcagccagatccgtacaccatgttc

SEQ ID NO: 3891044 - DNA, 25 bp, Homo sapien
ccagtgacacacaccagatatgagt

SEQ ID NO: 3891045 - DNA, 25 bp, Homo sapien
gccccaagttgtacagcaaatgctg

SEQ ID NO: 3891046 - DNA, 25 bp, Homo sapien
gatatgagtaggacataactgccca

SEQ ID NO: 3891047 - DNA, 25 bp, Homo sapien
tcctcgtgatcagttgagtggtcag

SEQ ID NO: 3891048 - DNA, 25 bp, Homo sapien
gtggtttgccacagtgtcctcgtga

SEQ ID NO: 3891049 - DNA, 25 bp, Homo sapien
ggtgccatccaaagtacaggaaccg

SEQ ID NO: 3891050 - DNA, 25 bp, Homo sapien
gagtttatctggcatcagctcgaag

SEQ ID NO: 3891051 - DNA, 25 bp, Homo sapien
catccatgtgacttttgtgaagagc

SEQ ID NO: 3891052 - DNA, 25 bp, Homo sapien
tcatccatgtgacttttgtgaagag

SEQ ID NO: 3891053 - DNA, 25 bp, Homo sapien
catcatccatgtgacttttgtgaag

SEQ ID NO: 3891054 - DNA, 25 bp, Homo sapien
atccatgtgacttttgtgaagagca

SEQ ID NO: 3891055 - DNA, 25 bp, Homo sapien
ccaagatcaagacaaggagggttca

SEQ ID NO: 3891056 - DNA, 25 bp, Homo sapien
ttagcaagagtccagaaagatcaca

SEQ ID NO: 3891057 - DNA, 25 bp, Homo sapien
tgttatacatagtggcaaagagcac

SEQ ID NO: 3891058 - DNA, 25 bp, Homo sapien
cagcaggtaagagggccaagatcaa

SEQ ID NO: 3891059 - DNA, 25 bp, Homo sapien
aagttgcttcataagtctttggttt

SEQ ID NO: 3891060 - DNA, 25 bp, Homo sapien
tggttttaacatgacagtgaccacc

SEQ ID NO: 3891061 - DNA, 25 bp, Homo sapien
agtgaccacctgtcctacccaatcc

SEQ ID NO: 3891062 - DNA, 25 bp, Homo sapien
aaagttgcttcataagtctttggtt

SEQ ID NO: 3891063 - DNA, 25 bp, Homo sapien
tccagcgagcatcacaaatccacat

SEQ ID NO: 3891064 - DNA, 25 bp, Homo sapien
caagttattccagttaaggtcggcg

SEQ ID NO: 3891065 - DNA, 25 bp, Homo sapien
tttagtcggacaactccctgaggag

SEQ ID NO: 3891066 - DNA, 25 bp, Homo sapien
tccgagtgctaaatttggagctctg

SEQ ID NO: 3891067 - DNA, 25 bp, Homo sapien
tctgggggtttaccagtggcacttc

SEQ ID NO: 3891068 - DNA, 25 bp, Homo sapien
gagcaaattcatttctgggggttta

SEQ ID NO: 3891069 - DNA, 25 bp, Homo sapien
attcatttctgggggtttaccagtg

SEQ ID NO: 3891070 - DNA, 25 bp, Homo sapien
gaaaggaatcctcctggtgaggaca

SEQ ID NO: 3891071 - DNA, 25 bp, Homo sapien
tgactgccctcagtgcagccaaggg

SEQ ID NO: 3891072 - DNA, 25 bp, Homo sapien
actgccctcagtgcagccaagggga

SEQ ID NO: 3891073 - DNA, 25 bp, Homo sapien
ctgtgactgccctcagtgcagccaa

SEQ ID NO: 3891074 - DNA, 25 bp, Homo sapien
ccctcagtgcagccaaggggaccat

SEQ ID NO: 3891075 - DNA, 25 bp, Homo sapien
ttactcataaggcagaacacgattt

SEQ ID NO: 3891076 - DNA, 25 bp, Homo sapien
tattcatctatccatggacactggg

SEQ ID NO: 3891077 - DNA, 25 bp, Homo sapien
ccggcactgcacaagggaatccaat

SEQ ID NO: 3891078 - DNA, 25 bp, Homo sapien
tgttgagcacccataaccatcatcc

SEQ ID NO: 3891079 - DNA, 25 bp, Homo sapien
gggaaatccaatcgccatcatccag

SEQ ID NO: 3891080 - DNA, 25 bp, Homo sapien
atcatccaggggctcttcgcacatc

SEQ ID NO: 3891081 - DNA, 25 bp, Homo sapien
gggctcttcgcacatcctagaatca

SEQ ID NO: 3891082 - DNA, 25 bp, Homo sapien
tcagatgggaaatccaatcgccatc

SEQ ID NO: 3891083 - DNA, 25 bp, Homo sapien
gagatccctgaaagctatggccagt

SEQ ID NO: 3891084 - DNA, 25 bp, Homo sapien
tcaacataagggttgtccaatcaac

SEQ ID NO: 3891085 - DNA, 25 bp, Homo sapien
tgcatcactttcgaaaatcaacata

SEQ ID NO: 3891086 - DNA, 25 bp, Homo sapien
tactatgaatcataaggtgattgca

SEQ ID NO: 3891087 - DNA, 25 bp, Homo sapien
tccaacaaggagtagtcatagcaat

SEQ ID NO: 3891088 - DNA, 25 bp, Homo sapien
tattgattcaaggacacatccgaag

SEQ ID NO: 3891089 - DNA, 25 bp, Homo sapien
aaggaaggtctctttatcagtcaag

SEQ ID NO: 3891090 - DNA, 25 bp, Homo sapien
tatagaagcaagttctgcctgtgcc

SEQ ID NO: 3891091 - DNA, 25 bp, Homo sapien
ttgtgatgcagagtcatttggccag

SEQ ID NO: 3891092 - DNA, 25 bp, Homo sapien
tcccctccacatgcaaggaaaggtt

SEQ ID NO: 3891093 - DNA, 25 bp, Homo sapien
caaagttggactgagtaaatccatc

SEQ ID NO: 3891094 - DNA, 25 bp, Homo sapien
ccagaacacatagggcagaagtgat

SEQ ID NO: 3891095 - DNA, 25 bp, Homo sapien
ttgtattgtggactcctgattacag

SEQ ID NO: 3891096 - DNA, 25 bp, Homo sapien
ggactcctgattacagagctctgta

SEQ ID NO: 3891097 - DNA, 25 bp, Homo sapien
tattgtggactcctgattacagagc

SEQ ID NO: 3891098 - DNA, 25 bp, Homo sapien
ttgtggactcctgattacagagctc

SEQ ID NO: 3891099 - DNA, 25 bp, Homo sapien
ttttgggtgaattttcgtgtgcagt

SEQ ID NO: 3891100 - DNA, 25 bp, Homo sapien
aatcaattgactataggtataggtt

SEQ ID NO: 3891101 - DNA, 25 bp, Homo sapien
tgcagtgtgatgtaagggtccagct

SEQ ID NO: 3891102 - DNA, 25 bp, Homo sapien
caagttgttcctgcactatataagg

SEQ ID NO: 3891103 - DNA, 25 bp, Homo sapien
taatgtaaacgtacgggtggtctca

SEQ ID NO: 3891104 - DNA, 25 bp, Homo sapien
atctcatgaggggataatgtaaacg

SEQ ID NO: 3891105 - DNA, 25 bp, Homo sapien
aattaatctcatgaggggataatgt

SEQ ID NO: 3891106 - DNA, 25 bp, Homo sapien
catgaggggataatgtaaacgtacg

SEQ ID NO: 3891107 - DNA, 25 bp, Homo sapien
gagggaaggcccaatttctgatgac

SEQ ID NO: 3891108 - DNA, 25 bp, Homo sapien
caaatgggacagtggtgtgaatcac

SEQ ID NO: 3891109 - DNA, 25 bp, Homo sapien
agctgctggaagactaactcttgca

SEQ ID NO: 3891110 - DNA, 25 bp, Homo sapien
ggctgaggcaaacccggcaaaatgt

SEQ ID NO: 3891111 - DNA, 25 bp, Homo sapien
tgtgtaaatgacagctcaagactca

SEQ ID NO: 3891112 - DNA, 25 bp, Homo sapien
tacacctcgttcttaggacttgaga

SEQ ID NO: 3891113 - DNA, 25 bp, Homo sapien
tatgtatgtactgacacagcaagag

SEQ ID NO: 3891114 - DNA, 25 bp, Homo sapien
taaaggatgagacacacttagcaca

SEQ ID NO: 3891115 - DNA, 25 bp, Homo sapien
tagacaaaggtctcgaggtggaaaa

SEQ ID NO: 3891116 - DNA, 25 bp, Homo sapien
tgtgtcagccacaagcgcctttgta

SEQ ID NO: 3891117 - DNA, 25 bp, Homo sapien
gctaccagatgaagtagagctgctc

SEQ ID NO: 3891118 - DNA, 25 bp, Homo sapien
ggacttcaggaatgccctctgtgga

SEQ ID NO: 3891119 - DNA, 25 bp, Homo sapien
gcagtctgtgatttacgcagtttta

SEQ ID NO: 3891120 - DNA, 25 bp, Homo sapien
cagtctgtgatttacgcagttttat

SEQ ID NO: 3891121 - DNA, 25 bp, Homo sapien
gtctgtgatttacgcagttttatga

SEQ ID NO: 3891122 - DNA, 25 bp, Homo sapien
ttatgatactgttctcaacttgcaa

SEQ ID NO: 3891123 - DNA, 25 bp, Homo sapien
atcatattccctattaaagtttctg

SEQ ID NO: 3891124 - DNA, 25 bp, Homo sapien
catattccctattaaagtttctgat

SEQ ID NO: 3891125 - DNA, 25 bp, Homo sapien
gttccatagccctcatttttcattt

SEQ ID NO: 3891126 - DNA, 25 bp, Homo sapien
tctgatttattcatggatttaaatg

SEQ ID NO: 3891127 - DNA, 25 bp, Homo sapien
tactggtgatgtactgcccagccca

SEQ ID NO: 3891128 - DNA, 25 bp, Homo sapien
tcttattatcaatggagacgaagcg

SEQ ID NO: 3891129 - DNA, 25 bp, Homo sapien
caagggacatcaatcttcgtaccag

SEQ ID NO: 3891130 - DNA, 25 bp, Homo sapien
tatcgagaggagtagctcacagcct

SEQ ID NO: 3891131 - DNA, 25 bp, Homo sapien
gtgatgatgtctccaaataaccagc

SEQ ID NO: 3891132 - DNA, 25 bp, Homo sapien
ctggtgatgatgtctccaaataacc

SEQ ID NO: 3891133 - DNA, 25 bp, Homo sapien
gctggtgatgatgtctccaaataac

SEQ ID NO: 3891134 - DNA, 25 bp, Homo sapien
ggtgatgatgtctccaaataaccag

SEQ ID NO: 3891135 - DNA, 25 bp, Homo sapien
gacttgacttagagttcacccaatg

SEQ ID NO: 3891136 - DNA, 25 bp, Homo sapien
catgataaacactggcagtctggca

SEQ ID NO: 3891137 - DNA, 25 bp, Homo sapien
tagaacagggttagcgctctctcca

SEQ ID NO: 3891138 - DNA, 25 bp, Homo sapien
tgcctgaggcagtacataagagttg

SEQ ID NO: 3891139 - DNA, 25 bp, Homo sapien
gaaaccaactgagcagcagaataaa

SEQ ID NO: 3891140 - DNA, 25 bp, Homo sapien
aataaaactgtccatacaaaggcat

SEQ ID NO: 3891141 - DNA, 25 bp, Homo sapien
aaaccaactgagcagcagaataaaa

SEQ ID NO: 3891142 - DNA, 25 bp, Homo sapien
tgaaaccaactgagcagcagaataa

SEQ ID NO: 3891143 - DNA, 25 bp, Homo sapien
tgtagtggtggcttgttaatggcaa

SEQ ID NO: 3891144 - DNA, 25 bp, Homo sapien
tagtggtggcttgttaatggcaaat

SEQ ID NO: 3891145 - DNA, 25 bp, Homo sapien
tttgcgattaatttcctggatgttc

SEQ ID NO: 3891146 - DNA, 25 bp, Homo sapien
gtgcctaggcaaagatatttttgcg

SEQ ID NO: 3891147 - DNA, 25 bp, Homo sapien
ctctcttaagaagctccccgcaaaa

SEQ ID NO: 3891148 - DNA, 25 bp, Homo sapien
tcttaagaagctccccgcaaaagcc

SEQ ID NO: 3891149 - DNA, 25 bp, Homo sapien
ttcttccacctagaacattctttat

SEQ ID NO: 3891150 - DNA, 25 bp, Homo sapien
cctcctctcttaagaagctccccgc

SEQ ID NO: 3891151 - DNA, 25 bp, Homo sapien
gaaatcaggctatgttagctctcca

SEQ ID NO: 3891152 - DNA, 25 bp, Homo sapien
gcatatagccttccaattactccag

SEQ ID NO: 3891153 - DNA, 25 bp, Homo sapien
gaaatgatttctattcggttccgct

SEQ ID NO: 3891154 - DNA, 25 bp, Homo sapien
gatcctgtctatctgtatgccaata

SEQ ID NO: 3891155 - DNA, 25 bp, Homo sapien
catgctgggcactaaaactcaaggt

SEQ ID NO: 3891156 - DNA, 25 bp, Homo sapien
gattactggcagataacgcaaaacc

SEQ ID NO: 3891157 - DNA, 25 bp, Homo sapien
tgtagggaccatggtgattactggc

SEQ ID NO: 3891158 - DNA, 25 bp, Homo sapien
tcttaaatttgagggacctgaccaa

SEQ ID NO: 3891159 - DNA, 25 bp, Homo sapien
gctgaggagcccaagtacctgggtt

SEQ ID NO: 3891160 - DNA, 25 bp, Homo sapien
tgctgaggagcccaagtacctgggt

SEQ ID NO: 3891161 - DNA, 25 bp, Homo sapien
catgctgaggagcccaagtacctgg

SEQ ID NO: 3891162 - DNA, 25 bp, Homo sapien
gaggagcccaagtacctgggtttga

SEQ ID NO: 3891163 - DNA, 25 bp, Homo sapien
gaaggacctattttccattcatgac

SEQ ID NO: 3891164 - DNA, 25 bp, Homo sapien
tggatttgtctaagcaaagacgacc

SEQ ID NO: 3891165 - DNA, 25 bp, Homo sapien
ggtaagcattagtcctctataaata

SEQ ID NO: 3891166 - DNA, 25 bp, Homo sapien
taacagctgttgattcttagcctag

SEQ ID NO: 3891167 - DNA, 25 bp, Homo sapien
attataactgtgtgagaataacttg

SEQ ID NO: 3891168 - DNA, 25 bp, Homo sapien
ttataactgtgtgagaataacttgt

SEQ ID NO: 3891169 - DNA, 25 bp, Homo sapien
tataactgtgtgagaataacttgta

SEQ ID NO: 3891170 - DNA, 25 bp, Homo sapien
ataactgtgtgagaataacttgtat

SEQ ID NO: 3891171 - DNA, 25 bp, Homo sapien
tcgaaattcaagcattctgagtcct

SEQ ID NO: 3891172 - DNA, 25 bp, Homo sapien
ctcgaaattcaagcattctgagtcc

SEQ ID NO: 3891173 - DNA, 25 bp, Homo sapien
ttcaagcattctgagtcctggtccc

SEQ ID NO: 3891174 - DNA, 25 bp, Homo sapien
attctgagtcctggtcccaattcca

SEQ ID NO: 3891175 - DNA, 25 bp, Homo sapien
ctgaagaggtactgctccaaaggct

SEQ ID NO: 3891176 - DNA, 25 bp, Homo sapien
agaggtactgctccaaaggctccca

SEQ ID NO: 3891177 - DNA, 25 bp, Homo sapien
tcccaagactttagtgagaagttct

SEQ ID NO: 3891178 - DNA, 25 bp, Homo sapien
caaaggctcccaagactttagtgag

SEQ ID NO: 3891179 - DNA, 25 bp, Homo sapien
ggtccatacctctgccgacctacat

SEQ ID NO: 3891180 - DNA, 25 bp, Homo sapien
catcttcctggtacatggattttcc

SEQ ID NO: 3891181 - DNA, 25 bp, Homo sapien
tctgccgacctacatcttcctggta

SEQ ID NO: 3891182 - DNA, 25 bp, Homo sapien
ttccacaaggatcactgtcactcag

SEQ ID NO: 3891183 - DNA, 25 bp, Homo sapien
aaagacgcctttgcattttccttgg

SEQ ID NO: 3891184 - DNA, 25 bp, Homo sapien
ttccttggaggaccagttatatgac

SEQ ID NO: 3891185 - DNA, 25 bp, Homo sapien
aaatggaaccctccacagcacaggc

SEQ ID NO: 3891186 - DNA, 25 bp, Homo sapien
tgtaagagcccctttccactgagtt

SEQ ID NO: 3891187 - DNA, 25 bp, Homo sapien
ctcatgctatttgctgatctgatat

SEQ ID NO: 3891188 - DNA, 25 bp, Homo sapien
tctgccgcactatgactccatcctc

SEQ ID NO: 3891189 - DNA, 25 bp, Homo sapien
cctctgccgcactatgactccatcc

SEQ ID NO: 3891190 - DNA, 25 bp, Homo sapien
catgctatttgctgatctgatattg

SEQ ID NO: 3891191 - DNA, 25 bp, Homo sapien
agcatatgtacaactgccctttaca

SEQ ID NO: 3891192 - DNA, 25 bp, Homo sapien
gcatatgtacaactgccctttacaa

SEQ ID NO: 3891193 - DNA, 25 bp, Homo sapien
tcaattcagttgatgactcagttgg

SEQ ID NO: 3891194 - DNA, 25 bp, Homo sapien
cagttggtgataatgacgcaattcc

SEQ ID NO: 3891195 - DNA, 25 bp, Homo sapien
cccatctctagtatggacatttcct

SEQ ID NO: 3891196 - DNA, 25 bp, Homo sapien
tctaaatgaaaaatagggctccaag

SEQ ID NO: 3891197 - DNA, 25 bp, Homo sapien
aaaataaggtctactgcaaaacaag

SEQ ID NO: 3891198 - DNA, 25 bp, Homo sapien
gatgtcaattcacattcctggcatg

SEQ ID NO: 3891199 - DNA, 25 bp, Homo sapien
tggcatgattcaggacacccttctt

SEQ ID NO: 3891200 - DNA, 25 bp, Homo sapien
tagattggacttcccagacacactg

SEQ ID NO: 3891201 - DNA, 25 bp, Homo sapien
tagctagacaattgcctcagacaga

SEQ ID NO: 3891202 - DNA, 25 bp, Homo sapien
caaaaactgctcttcctttaggcaa

SEQ ID NO: 3891203 - DNA, 25 bp, Homo sapien
tactgacgtgttgaagacatgggca

SEQ ID NO: 3891204 - DNA, 25 bp, Homo sapien
tctcgttcacaaaagagctagctag

SEQ ID NO: 3891205 - DNA, 25 bp, Homo sapien
tgcgaagagagttaaaccaaattca

SEQ ID NO: 3891206 - DNA, 25 bp, Homo sapien
caaattcatgctttgtcaaaagaaa

SEQ ID NO: 3891207 - DNA, 25 bp, Homo sapien
ctgaggcaggtaaatggcaaaagca

SEQ ID NO: 3891208 - DNA, 25 bp, Homo sapien
tcctttgcgaagagagttaaaccaa

SEQ ID NO: 3891209 - DNA, 25 bp, Homo sapien
ccatttgtcatctcttaggttgatc

SEQ ID NO: 3891210 - DNA, 25 bp, Homo sapien
atctcaggaactggcattgtgagaa

SEQ ID NO: 3891211 - DNA, 25 bp, Homo sapien
tgagaacaataagatcaaactgctc

SEQ ID NO: 3891212 - DNA, 25 bp, Homo sapien
gggagcctgtttgtttggatacttc

SEQ ID NO: 3891213 - DNA, 25 bp, Homo sapien
tcaaaacgccataggctaacagttc

SEQ ID NO: 3891214 - DNA, 25 bp, Homo sapien
tcaataggcgagcttagaggcctca

SEQ ID NO: 3891215 - DNA, 25 bp, Homo sapien
atcaccattccttcaataggcgagc

SEQ ID NO: 3891216 - DNA, 25 bp, Homo sapien
tcaagtaatgcttaataattgaaga

SEQ ID NO: 3891217 - DNA, 25 bp, Homo sapien
gaggagtgcaggtgatgtactgagc

SEQ ID NO: 3891218 - DNA, 25 bp, Homo sapien
ttttggcataatgaggagtgcaggt

SEQ ID NO: 3891219 - DNA, 25 bp, Homo sapien
gagtgcaggtgatgtactgagcacc

SEQ ID NO: 3891220 - DNA, 25 bp, Homo sapien
agtgcaggtgatgtactgagcaccc

SEQ ID NO: 3891221 - DNA, 25 bp, Homo sapien
tatgaggactgcaggctgtagtcat

SEQ ID NO: 3891222 - DNA, 25 bp, Homo sapien
gattatgaggactgcaggctgtagt

SEQ ID NO: 3891223 - DNA, 25 bp, Homo sapien
ctgaggattatgaggactgcaggct

SEQ ID NO: 3891224 - DNA, 25 bp, Homo sapien
gaggattatgaggactgcaggctgt

SEQ ID NO: 3891225 - DNA, 25 bp, Homo sapien
cttgaattaatccacaggaaaatgt

SEQ ID NO: 3891226 - DNA, 25 bp, Homo sapien
tgaattaatccacaggaaaatgtct

SEQ ID NO: 3891227 - DNA, 25 bp, Homo sapien
aattaatccacaggaaaatgtctta

SEQ ID NO: 3891228 - DNA, 25 bp, Homo sapien
gaattaatccacaggaaaatgtctt

SEQ ID NO: 3891229 - DNA, 25 bp, Homo sapien
gagggtatagcgttttcgccttaga

SEQ ID NO: 3891230 - DNA, 25 bp, Homo sapien
tgacgaggcgcgccactcggcgcat

SEQ ID NO: 3891231 - DNA, 25 bp, Homo sapien
atgggccgcgctacacggccgctca

SEQ ID NO: 3891232 - DNA, 25 bp, Homo sapien
gagctgagggtatagcgttttcgcc

SEQ ID NO: 3891233 - DNA, 25 bp, Homo sapien
acaagggaccggacgtctgcctcct

SEQ ID NO: 3891234 - DNA, 25 bp, Homo sapien
tacaagggaccggacgtctgcctcc

SEQ ID NO: 3891235 - DNA, 25 bp, Homo sapien
caaggtacaagggaccggacgtctg

SEQ ID NO: 3891236 - DNA, 25 bp, Homo sapien
gtacaagggaccggacgtctgcctc

SEQ ID NO: 3891237 - DNA, 25 bp, Homo sapien
ccggcgcccacgatcagcacctgcg

SEQ ID NO: 3891238 - DNA, 25 bp, Homo sapien
ggcgcccacgatcagcacctgcgcc

SEQ ID NO: 3891239 - DNA, 25 bp, Homo sapien
atcccggcgcccacgatcagcacct

SEQ ID NO: 3891240 - DNA, 25 bp, Homo sapien
tcccggcgcccacgatcagcacctg

SEQ ID NO: 3891241 - DNA, 25 bp, Homo sapien
agcgatccgcgctgagtctctgcgg

SEQ ID NO: 3891242 - DNA, 25 bp, Homo sapien
gccgaaccggcgctagcgctctttg

SEQ ID NO: 3891243 - DNA, 25 bp, Homo sapien
ggcgctagcgctctttggttccgtg

SEQ ID NO: 3891244 - DNA, 25 bp, Homo sapien
tttggttccgtgctccctgggccga

SEQ ID NO: 3891245 - DNA, 25 bp, Homo sapien
ctgtcttctcgctttgggggccggg

SEQ ID NO: 3891246 - DNA, 25 bp, Homo sapien
tgtcttctcgctttgggggccgggc

SEQ ID NO: 3891247 - DNA, 25 bp, Homo sapien
tctgtcttctcgctttgggggccgg

SEQ ID NO: 3891248 - DNA, 25 bp, Homo sapien
tggggctgcggagaaccggggctgt

SEQ ID NO: 3891249 - DNA, 25 bp, Homo sapien
cagtggagggttgtgtatcaacttt

SEQ ID NO: 3891250 - DNA, 25 bp, Homo sapien
tagcagtggagggttgtgtatcaac

SEQ ID NO: 3891251 - DNA, 25 bp, Homo sapien
gagggttgtgtatcaactttagtga

SEQ ID NO: 3891252 - DNA, 25 bp, Homo sapien
tggagggttgtgtatcaactttagt

SEQ ID NO: 3891253 - DNA, 25 bp, Homo sapien
tctacaaatagaactttcacattat

SEQ ID NO: 3891254 - DNA, 25 bp, Homo sapien
gattgccactattatttgttctaca

SEQ ID NO: 3891255 - DNA, 25 bp, Homo sapien
tgtataaaagttggatatctatgtt

SEQ ID NO: 3891256 - DNA, 25 bp, Homo sapien
tttaagatcaaagtgagattgccac

SEQ ID NO: 3891257 - DNA, 25 bp, Homo sapien
tcataaaagtccctggcctgcgtca

SEQ ID NO: 3891258 - DNA, 25 bp, Homo sapien
tctgagctcagaccattaggaagca

SEQ ID NO: 3891259 - DNA, 25 bp, Homo sapien
aagcataagatcctcggtgaacagg

SEQ ID NO: 3891260 - DNA, 25 bp, Homo sapien
tatctcagcagttagaacaagccct

SEQ ID NO: 3891261 - DNA, 25 bp, Homo sapien
cagcatattcattgaggccttgagc

SEQ ID NO: 3891262 - DNA, 25 bp, Homo sapien
caaagtttctgttgaaaatctggca

SEQ ID NO: 3891263 - DNA, 25 bp, Homo sapien
aatctggcaaaggcaaaagagttgc

SEQ ID NO: 3891264 - DNA, 25 bp, Homo sapien
gaaaatctggcaaaggcaaaagagt

SEQ ID NO: 3891265 - DNA, 25 bp, Homo sapien
ggcaaaggcaaaagagttgcaacac

SEQ ID NO: 3891266 - DNA, 25 bp, Homo sapien
tgccagtatatagcagttgccagct

SEQ ID NO: 3891267 - DNA, 25 bp, Homo sapien
atttgaatctcagttatgggcatct

SEQ ID NO: 3891268 - DNA, 25 bp, Homo sapien
agcagttgccagctttttttgccag

SEQ ID NO: 3891269 - DNA, 25 bp, Homo sapien
agttatgggcatctgcctatagtcc

SEQ ID NO: 3891270 - DNA, 25 bp, Homo sapien
tactgtggacctaccataatgtgga

SEQ ID NO: 3891271 - DNA, 25 bp, Homo sapien
tgactggtaacaatgcaagtaagct

SEQ ID NO: 3891272 - DNA, 25 bp, Homo sapien
gatgactctgaactctctcagttga

SEQ ID NO: 3891273 - DNA, 25 bp, Homo sapien
agcaagtgtagtgcaatgatgactc

SEQ ID NO: 3891274 - DNA, 25 bp, Homo sapien
tatgacggtccctacagcaatgtgg

SEQ ID NO: 3891275 - DNA, 25 bp, Homo sapien
tccagaagacgtgaaaatgctgctc

SEQ ID NO: 3891276 - DNA, 25 bp, Homo sapien
cataaattatgagcctgaaagtcca

SEQ ID NO: 3891277 - DNA, 25 bp, Homo sapien
tgtgtggctctaacacccatgtacc

SEQ ID NO: 3891278 - DNA, 25 bp, Homo sapien
catgaaggcagaattacggagagca

SEQ ID NO: 3891279 - DNA, 25 bp, Homo sapien
tcaccttgttgccacagagacataa

SEQ ID NO: 3891280 - DNA, 25 bp, Homo sapien
tgcacttggcactaaatccgacact

SEQ ID NO: 3891281 - DNA, 25 bp, Homo sapien
gacataacactacctcaggaagctg

SEQ ID NO: 3891282 - DNA, 25 bp, Homo sapien
taagtttcttaaatcctgtacacag

SEQ ID NO: 3891283 - DNA, 25 bp, Homo sapien
taagacacgtttaaagacttcagaa

SEQ ID NO: 3891284 - DNA, 25 bp, Homo sapien
caaaggtttgtgtgtgtcaaaagta

SEQ ID NO: 3891285 - DNA, 25 bp, Homo sapien
gggtcacctggtagctcagctcaat

SEQ ID NO: 3891286 - DNA, 25 bp, Homo sapien
ggtatgctggtaaacgaactttatg

SEQ ID NO: 3891287 - DNA, 25 bp, Homo sapien
cattttcatagttgcatagtcttgc

SEQ ID NO: 3891288 - DNA, 25 bp, Homo sapien
tatttgtaaaccgaaatctctagtg

SEQ ID NO: 3891289 - DNA, 25 bp, Homo sapien
gtcttgctcaaaccaagatggcttt

SEQ ID NO: 3891290 - DNA, 25 bp, Homo sapien
gaatatttacttgtgaatctctaag

SEQ ID NO: 3891291 - DNA, 25 bp, Homo sapien
tacttgtgaatctctaagcccacac

SEQ ID NO: 3891292 - DNA, 25 bp, Homo sapien
gtgaatctctaagcccacacacata

SEQ ID NO: 3891293 - DNA, 25 bp, Homo sapien
caaaggaatatttacttgtgaatct

SEQ ID NO: 3891294 - DNA, 25 bp, Homo sapien
tacggccatggtgaacttgactgag

SEQ ID NO: 3891295 - DNA, 25 bp, Homo sapien
ttcccttagaaggattacggccatg

SEQ ID NO: 3891296 - DNA, 25 bp, Homo sapien
tacaactgggaagggagaacgctgt

SEQ ID NO: 3891297 - DNA, 25 bp, Homo sapien
gaacagtttgtctcctagggcatga

SEQ ID NO: 3891298 - DNA, 25 bp, Homo sapien
tatctccatcggtgtggtcacaagg

SEQ ID NO: 3891299 - DNA, 25 bp, Homo sapien
tttctgtatctccatcggtgtggtc

SEQ ID NO: 3891300 - DNA, 25 bp, Homo sapien
agaatccagtcgttaactttttctg

SEQ ID NO: 3891301 - DNA, 25 bp, Homo sapien
aatgaagatagaatccagtcgttaa

SEQ ID NO: 3891302 - DNA, 25 bp, Homo sapien
aaaattttaatctccgtgcaatatc

SEQ ID NO: 3891303 - DNA, 25 bp, Homo sapien
aatctccgtgcaatatccagtgagc

SEQ ID NO: 3891304 - DNA, 25 bp, Homo sapien
gctttccttagcattaattcaatct

SEQ ID NO: 3891305 - DNA, 25 bp, Homo sapien
tacaatgctttccttagcattaatt

SEQ ID NO: 3891306 - DNA, 25 bp, Homo sapien
gatgctgctgctagaggaacctcag

SEQ ID NO: 3891307 - DNA, 25 bp, Homo sapien
tacttcaacataaggcctagattag

SEQ ID NO: 3891308 - DNA, 25 bp, Homo sapien
taaggcctagattagaagatgctgc

SEQ ID NO: 3891309 - DNA, 25 bp, Homo sapien
tagaggaacctcagaccacggtcca

SEQ ID NO: 3891310 - DNA, 25 bp, Homo sapien
tctgcacgggcttccaagagcagag

SEQ ID NO: 3891311 - DNA, 25 bp, Homo sapien
agcagagggataagagactggtttt

SEQ ID NO: 3891312 - DNA, 25 bp, Homo sapien
caggcataatgtaatgcggtacagc

SEQ ID NO: 3891313 - DNA, 25 bp, Homo sapien
tattgtggggtctgcacgggcttcc

SEQ ID NO: 3891314 - DNA, 25 bp, Homo sapien
caaagggccaaaacttcagctcata

SEQ ID NO: 3891315 - DNA, 25 bp, Homo sapien
ttcagctcataagtcgggccctcca

SEQ ID NO: 3891316 - DNA, 25 bp, Homo sapien
ggccaaaacttcagctcataagtcg

SEQ ID NO: 3891317 - DNA, 25 bp, Homo sapien
aacttcagctcataagtcgggccct

SEQ ID NO: 3891318 - DNA, 25 bp, Homo sapien
cactttgtagtatacaactaagcag

SEQ ID NO: 3891319 - DNA, 25 bp, Homo sapien
tttcacactttgtagtatacaacta

SEQ ID NO: 3891320 - DNA, 25 bp, Homo sapien
tccttttcacactttgtagtataca

SEQ ID NO: 3891321 - DNA, 25 bp, Homo sapien
cacactttgtagtatacaactaagc

SEQ ID NO: 3891322 - DNA, 25 bp, Homo sapien
taccagcataggcaaaaccgaaatg

SEQ ID NO: 3891323 - DNA, 25 bp, Homo sapien
cacacacacaactgcctgcatttaa

SEQ ID NO: 3891324 - DNA, 25 bp, Homo sapien
cacgtaaaatatgttaggcatcaca

SEQ ID NO: 3891325 - DNA, 25 bp, Homo sapien
cacttgcctactttttcaataagga

SEQ ID NO: 3891326 - DNA, 25 bp, Homo sapien
cactccagcttcttaactattatgg

SEQ ID NO: 3891327 - DNA, 25 bp, Homo sapien
cgtctcaacaacattaaagccaatt

SEQ ID NO: 3891328 - DNA, 25 bp, Homo sapien
taacctcaaggttgcctgtcagtgg

SEQ ID NO: 3891329 - DNA, 25 bp, Homo sapien
tcaatagaggtattattcccatgag

SEQ ID NO: 3891330 - DNA, 25 bp, Homo sapien
tcgacgccagcatcaagtagcattc

SEQ ID NO: 3891331 - DNA, 25 bp, Homo sapien
tagcattcgtacaagagcctcattc

SEQ ID NO: 3891332 - DNA, 25 bp, Homo sapien
tgtagcattaacttcgacgccagca

SEQ ID NO: 3891333 - DNA, 25 bp, Homo sapien
caatctgtagcattaacttcgacgc

SEQ ID NO: 3891334 - DNA, 25 bp, Homo sapien
tgaggaaatacccaataagcagaac

SEQ ID NO: 3891335 - DNA, 25 bp, Homo sapien
tcttcacagcataatgcaagcaggt

SEQ ID NO: 3891336 - DNA, 25 bp, Homo sapien
gaacaggcattaagaggataattag

SEQ ID NO: 3891337 - DNA, 25 bp, Homo sapien
gcataatgcaagcaggttctctctt

SEQ ID NO: 3891338 - DNA, 25 bp, Homo sapien
gagaactcggtccagtgtaaaggaa

SEQ ID NO: 3891339 - DNA, 25 bp, Homo sapien
ttgtttttccggtacccatggcatc

SEQ ID NO: 3891340 - DNA, 25 bp, Homo sapien
gaatgcggctttccatggagcagaa

SEQ ID NO: 3891341 - DNA, 25 bp, Homo sapien
tttcctgtgggatacatctgattac

SEQ ID NO: 3891342 - DNA, 25 bp, Homo sapien
tcagaagacagattcttatacccac

SEQ ID NO: 3891343 - DNA, 25 bp, Homo sapien
tacttatcaggtaatagatgtcagc

SEQ ID NO: 3891344 - DNA, 25 bp, Homo sapien
cataggaaaactcttaaccacatgg

SEQ ID NO: 3891345 - DNA, 25 bp, Homo sapien
catctaccatgtgtacgattatcca

SEQ ID NO: 3891346 - DNA, 25 bp, Homo sapien
ctggtttttgaggttgacattagca

SEQ ID NO: 3891347 - DNA, 25 bp, Homo sapien
tagcatttcttcttaaaaggaagga

SEQ ID NO: 3891348 - DNA, 25 bp, Homo sapien
ggtttttgaggttgacattagcatt

SEQ ID NO: 3891349 - DNA, 25 bp, Homo sapien
cattagcatttcttcttaaaaggaa

SEQ ID NO: 3891350 - DNA, 25 bp, Homo sapien
aaagccatcttgaacgttggcatag

SEQ ID NO: 3891351 - DNA, 25 bp, Homo sapien
gaacgttggcatagctgctgtcttc

SEQ ID NO: 3891352 - DNA, 25 bp, Homo sapien
ttgtccaaagtcattctgataggct

SEQ ID NO: 3891353 - DNA, 25 bp, Homo sapien
cctcgcctgcaagcacagatcaggg

SEQ ID NO: 3891354 - DNA, 25 bp, Homo sapien
aaaagcaggttttgaaatactggca

SEQ ID NO: 3891355 - DNA, 25 bp, Homo sapien
caaaagcaggttttgaaatactggc

SEQ ID NO: 3891356 - DNA, 25 bp, Homo sapien
aacaaaagcaggttttgaaatactg

SEQ ID NO: 3891357 - DNA, 25 bp, Homo sapien
aaagcaggttttgaaatactggcat

SEQ ID NO: 3891358 - DNA, 25 bp, Homo sapien
tcagtgggccaactgtgtataaacc

SEQ ID NO: 3891359 - DNA, 25 bp, Homo sapien
cagtgggccaactgtgtataaacca

SEQ ID NO: 3891360 - DNA, 25 bp, Homo sapien
agtgggccaactgtgtataaaccac

SEQ ID NO: 3891361 - DNA, 25 bp, Homo sapien
cctcagtgggccaactgtgtataaa

SEQ ID NO: 3891362 - DNA, 25 bp, Homo sapien
gctggtccttcacaggcttacttca

SEQ ID NO: 3891363 - DNA, 25 bp, Homo sapien
gaaagtccctagaagtccaagctgg

SEQ ID NO: 3891364 - DNA, 25 bp, Homo sapien
gcttttctagcaaacacctgtcagt

SEQ ID NO: 3891365 - DNA, 25 bp, Homo sapien
agctggtggcaagctccaggagtgc

SEQ ID NO: 3891366 - DNA, 25 bp, Homo sapien
tgagaaatcctgttgtgctcgatga

SEQ ID NO: 3891367 - DNA, 25 bp, Homo sapien
gtttccagaaatagtcacctgcttc

SEQ ID NO: 3891368 - DNA, 25 bp, Homo sapien
tgctcgatgactgtttccagaaata

SEQ ID NO: 3891369 - DNA, 25 bp, Homo sapien
cctgttgtgctcgatgactgtttcc

SEQ ID NO: 3891370 - DNA, 25 bp, Homo sapien
catcctctaagagaattcccatcct

SEQ ID NO: 3891371 - DNA, 25 bp, Homo sapien
cacctacggttatgtaagggcttgg

SEQ ID NO: 3891372 - DNA, 25 bp, Homo sapien
ttggacacccttagcacatgcctca

SEQ ID NO: 3891373 - DNA, 25 bp, Homo sapien
tcccaggtagtagtggctcggtccc

SEQ ID NO: 3891374 - DNA, 25 bp, Homo sapien
cagggtttcagatgcgaaagtcgca

SEQ ID NO: 3891375 - DNA, 25 bp, Homo sapien
gatgcttaatagtgggcgtagccag

SEQ ID NO: 3891376 - DNA, 25 bp, Homo sapien
gtttaacggtcagctgcatcaaggc

SEQ ID NO: 3891377 - DNA, 25 bp, Homo sapien
tttctgcagaatgcgggaagccgcc

SEQ ID NO: 3891378 - DNA, 25 bp, Homo sapien
caaagctccatctgtcggcagagga

SEQ ID NO: 3891379 - DNA, 25 bp, Homo sapien
acacgggctgcggacaccaagggtt

SEQ ID NO: 3891380 - DNA, 25 bp, Homo sapien
cgaggcaaacgagcggacgcctcgt

SEQ ID NO: 3891381 - DNA, 25 bp, Homo sapien
gggtgccggtatcaccccgctgcaa

SEQ ID NO: 3891382 - DNA, 25 bp, Homo sapien
ctagtgagtagcggcgcgcgcgcgt

SEQ ID NO: 3891383 - DNA, 25 bp, Homo sapien
agtgagtagcggcgcgcgcgcgtga

SEQ ID NO: 3891384 - DNA, 25 bp, Homo sapien
gcgcgcgcgcgtgagtgagagcgcg

SEQ ID NO: 3891385 - DNA, 25 bp, Homo sapien
tagtgagtagcggcgcgcgcgcgtg

SEQ ID NO: 3891386 - DNA, 25 bp, Homo sapien
gggtgcgtctgcctcgtggcctggc

SEQ ID NO: 3891387 - DNA, 25 bp, Homo sapien
ttcctgccagtcatgcaatcggccg

SEQ ID NO: 3891388 - DNA, 25 bp, Homo sapien
aaaatgcactttggcggctgatcgc

SEQ ID NO: 3891389 - DNA, 25 bp, Homo sapien
ttggcggctgatcgcttccttcctg

SEQ ID NO: 3891390 - DNA, 25 bp, Homo sapien
ccagtgttgcatacttgcttcctct

SEQ ID NO: 3891391 - DNA, 25 bp, Homo sapien
tcctcagaatctttcccaataactg

SEQ ID NO: 3891392 - DNA, 25 bp, Homo sapien
tctgggctaccaattcctctattct

SEQ ID NO: 3891393 - DNA, 25 bp, Homo sapien
gctcttcagtttggacaagggtttc

SEQ ID NO: 3891394 - DNA, 25 bp, Homo sapien
gaggactcccttccttatttgcaga

SEQ ID NO: 3891395 - DNA, 25 bp, Homo sapien
ggaatttgatatctgggtgccagca

SEQ ID NO: 3891396 - DNA, 25 bp, Homo sapien
taaggccagaatatattatctcggg

SEQ ID NO: 3891397 - DNA, 25 bp, Homo sapien
caaatactatcacgagggcctgacc

SEQ ID NO: 3891398 - DNA, 25 bp, Homo sapien
tctatcaggtaaacaagagatggca

SEQ ID NO: 3891399 - DNA, 25 bp, Homo sapien
gaatcaactgattcagcaggctgtc

SEQ ID NO: 3891400 - DNA, 25 bp, Homo sapien
actgggtcccagatgtaccaatgga

SEQ ID NO: 3891401 - DNA, 25 bp, Homo sapien
tcaatcaaggagcattacccgtgca

SEQ ID NO: 3891402 - DNA, 25 bp, Homo sapien
acttttaatatacaagatatgactt

SEQ ID NO: 3891403 - DNA, 25 bp, Homo sapien
tgtgtgtgacttttaatatacaaga

SEQ ID NO: 3891404 - DNA, 25 bp, Homo sapien
tgtgtgtgtgacttttaatatacaa

SEQ ID NO: 3891405 - DNA, 25 bp, Homo sapien
tgacttttaatatacaagatatgac

SEQ ID NO: 3891406 - DNA, 25 bp, Homo sapien
tgctcagctggaccactagagggag

SEQ ID NO: 3891407 - DNA, 25 bp, Homo sapien
tttacagaaccgaagtgcagctccc

SEQ ID NO: 3891408 - DNA, 25 bp, Homo sapien
tcacccatcaggttaccagtactgg

SEQ ID NO: 3891409 - DNA, 25 bp, Homo sapien
tcgagtattgatcggaggccaacgc

SEQ ID NO: 3891410 - DNA, 25 bp, Homo sapien
taggtaacgagtcagagctttggct

SEQ ID NO: 3891411 - DNA, 25 bp, Homo sapien
aaaacacataggtaacgagtcagag

SEQ ID NO: 3891412 - DNA, 25 bp, Homo sapien
tcagagctttggctaggaatgattt

SEQ ID NO: 3891413 - DNA, 25 bp, Homo sapien
gagctttggctaggaatgatttgga

SEQ ID NO: 3891414 - DNA, 25 bp, Homo sapien
ggcccggcttcatcgtattcctgtt

SEQ ID NO: 3891415 - DNA, 25 bp, Homo sapien
tggaaggcccggcttcatcgtattc

SEQ ID NO: 3891416 - DNA, 25 bp, Homo sapien
gcttcatcgtattcctgtttgctga

SEQ ID NO: 3891417 - DNA, 25 bp, Homo sapien
ccggcttcatcgtattcctgtttgc

SEQ ID NO: 3891418 - DNA, 25 bp, Homo sapien
tcgttagtgcggtaggacagagcct

SEQ ID NO: 3891419 - DNA, 25 bp, Homo sapien
tctgttagatgccaattgtgtccta

SEQ ID NO: 3891420 - DNA, 25 bp, Homo sapien
tcagtaagcacattcgtttttctca

SEQ ID NO: 3891421 - DNA, 25 bp, Homo sapien
ggatgttctaccatggcctagtttc

SEQ ID NO: 3891422 - DNA, 25 bp, Homo sapien
gcctcagaattcaacacgatacact

SEQ ID NO: 3891423 - DNA, 25 bp, Homo sapien
cacttaagaaccctggcaatgcctc

SEQ ID NO: 3891424 - DNA, 25 bp, Homo sapien
ttattgagcaaactgaaagttggct

SEQ ID NO: 3891425 - DNA, 25 bp, Homo sapien
gtaactcttcgaccacattattgag

SEQ ID NO: 3891426 - DNA, 25 bp, Homo sapien
tttagagaactaggaactgcccaac

SEQ ID NO: 3891427 - DNA, 25 bp, Homo sapien
tttagggcaggactagccagagcct

SEQ ID NO: 3891428 - DNA, 25 bp, Homo sapien
tacccacgtgtgtgaactgcactag

SEQ ID NO: 3891429 - DNA, 25 bp, Homo sapien
tatgacaaattctatgggagttccc

SEQ ID NO: 3891430 - DNA, 25 bp, Homo sapien
tcttatctgtggttatagggctgac

SEQ ID NO: 3891431 - DNA, 25 bp, Homo sapien
ttatagggctgacactgctggcggc

SEQ ID NO: 3891432 - DNA, 25 bp, Homo sapien
ctgctggcggcattgccactgggtc

SEQ ID NO: 3891433 - DNA, 25 bp, Homo sapien
gtctctgaagagttcttatctgtgg

SEQ ID NO: 3891434 - DNA, 25 bp, Homo sapien
cccctgataggacattgttagcata

SEQ ID NO: 3891435 - DNA, 25 bp, Homo sapien
cattgttagcatagaggtccttcct

SEQ ID NO: 3891436 - DNA, 25 bp, Homo sapien
tgttgtaggtggtttcatggatgcc

SEQ ID NO: 3891437 - DNA, 25 bp, Homo sapien
gtacatagtggtgccccctgatagg

SEQ ID NO: 3891438 - DNA, 25 bp, Homo sapien
taagtggagagtaaaacccaggcta

SEQ ID NO: 3891439 - DNA, 25 bp, Homo sapien
gacacaggccatggtccttaagtgg

SEQ ID NO: 3891440 - DNA, 25 bp, Homo sapien
aaacccaggctagacatggaagacc

SEQ ID NO: 3891441 - DNA, 25 bp, Homo sapien
tagacatggaagaccagacttgaac

SEQ ID NO: 3891442 - DNA, 25 bp, Homo sapien
gaatgctttgggcttaactgcaaca

SEQ ID NO: 3891443 - DNA, 25 bp, Homo sapien
taataatctaggaaccacctgtctg

SEQ ID NO: 3891444 - DNA, 25 bp, Homo sapien
gcatcctgaggtgtgggctacaaca

SEQ ID NO: 3891445 - DNA, 25 bp, Homo sapien
gcttccacgctgagccaatgttgca

SEQ ID NO: 3891446 - DNA, 25 bp, Homo sapien
aggctggcttgatatggaagaagac

SEQ ID NO: 3891447 - DNA, 25 bp, Homo sapien
ggaagaagacaatgactccccttcc

SEQ ID NO: 3891448 - DNA, 25 bp, Homo sapien
ttctggaggctggcttgatatggaa

SEQ ID NO: 3891449 - DNA, 25 bp, Homo sapien
aagacaatgactccccttcccagga

SEQ ID NO: 3891450 - DNA, 25 bp, Homo sapien
cgtaactcttctcaagggaggatga

SEQ ID NO: 3891451 - DNA, 25 bp, Homo sapien
catttccgatggtgatcacttgccc

SEQ ID NO: 3891452 - DNA, 25 bp, Homo sapien
ggtctctgggcagcggaaacgttca

SEQ ID NO: 3891453 - DNA, 25 bp, Homo sapien
gcccatcaggcaactcgtaactctt

SEQ ID NO: 3891454 - DNA, 25 bp, Homo sapien
caaacattgtggcaaacattagggt

SEQ ID NO: 3891455 - DNA, 25 bp, Homo sapien
acaaacattgtggcaaacattaggg

SEQ ID NO: 3891456 - DNA, 25 bp, Homo sapien
tacaaacattgtggcaaacattagg

SEQ ID NO: 3891457 - DNA, 25 bp, Homo sapien
atacaaacattgtggcaaacattag

SEQ ID NO: 3891458 - DNA, 25 bp, Homo sapien
tggaagttactgagcaacacactgc

SEQ ID NO: 3891459 - DNA, 25 bp, Homo sapien
ggtgcaccggcttagaatctgaata

SEQ ID NO: 3891460 - DNA, 25 bp, Homo sapien
taagcctcaggcatgttcagaaacc

SEQ ID NO: 3891461 - DNA, 25 bp, Homo sapien
cactgactaatgcataacactgggt

SEQ ID NO: 3891462 - DNA, 25 bp, Homo sapien
agtcagtgagatctcggccagccag

SEQ ID NO: 3891463 - DNA, 25 bp, Homo sapien
tagtaacgaaggaatagccacgctc

SEQ ID NO: 3891464 - DNA, 25 bp, Homo sapien
cagtagtaacgaaggaatagccacg

SEQ ID NO: 3891465 - DNA, 25 bp, Homo sapien
ggtagtcagtgagatctcggccagc

SEQ ID NO: 3891466 - DNA, 25 bp, Homo sapien
acagcaccgcctggatagccacata

SEQ ID NO: 3891467 - DNA, 25 bp, Homo sapien
gcaccgcctggatagccacatacat

SEQ ID NO: 3891468 - DNA, 25 bp, Homo sapien
gttgtgcgtccagaggcatagagag

SEQ ID NO: 3891469 - DNA, 25 bp, Homo sapien
agttgtgcgtccagaggcatagaga

SEQ ID NO: 3891470 - DNA, 25 bp, Homo sapien
gagctgagttagtgaaggtgcccat

SEQ ID NO: 3891471 - DNA, 25 bp, Homo sapien
tccaaagagctgagttagtgaaggt

SEQ ID NO: 3891472 - DNA, 25 bp, Homo sapien
aagcaatccaaagagctgagttagt

SEQ ID NO: 3891473 - DNA, 25 bp, Homo sapien
aagagctgagttagtgaaggtgccc

SEQ ID NO: 3891474 - DNA, 25 bp, Homo sapien
ttgatggatgcagaggggcctgacc

SEQ ID NO: 3891475 - DNA, 25 bp, Homo sapien
ctggttgatggatgcagaggggcct

SEQ ID NO: 3891476 - DNA, 25 bp, Homo sapien
tggatgcagaggggcctgacctgtt

SEQ ID NO: 3891477 - DNA, 25 bp, Homo sapien
ggttgatggatgcagaggggcctga

SEQ ID NO: 3891478 - DNA, 25 bp, Homo sapien
cccctgtagagaacaagtgctagtg

SEQ ID NO: 3891479 - DNA, 25 bp, Homo sapien
gaaaactcagagctctgtctggtgg

SEQ ID NO: 3891480 - DNA, 25 bp, Homo sapien
ggaagatcgtggatcaatcccaggc

SEQ ID NO: 3891481 - DNA, 25 bp, Homo sapien
ttgcgacgtgcagtgattcccaggc

SEQ ID NO: 3891482 - DNA, 25 bp, Homo sapien
cacataactgataagtggcagatcc

SEQ ID NO: 3891483 - DNA, 25 bp, Homo sapien
tattactcccaacttatagacaagg

SEQ ID NO: 3891484 - DNA, 25 bp, Homo sapien
gaaggatgcaagtactttcaagctg

SEQ ID NO: 3891485 - DNA, 25 bp, Homo sapien
tattaggaaccatgatacacatctg

SEQ ID NO: 3891486 - DNA, 25 bp, Homo sapien
ttgtgtgctggggtagcatacttac

SEQ ID NO: 3891487 - DNA, 25 bp, Homo sapien
gtgctgcatagcctccttctaacag

SEQ ID NO: 3891488 - DNA, 25 bp, Homo sapien
cagaccccacagtgttgtgtgctgg

SEQ ID NO: 3891489 - DNA, 25 bp, Homo sapien
gctgcatagcctccttctaacagaa

SEQ ID NO: 3891490 - DNA, 25 bp, Homo sapien
aacacgaagctcattgtagaaagag

SEQ ID NO: 3891491 - DNA, 25 bp, Homo sapien
ggtgggatgctcttcaggggcaaca

SEQ ID NO: 3891492 - DNA, 25 bp, Homo sapien
ttcaggggcaacacgaagctcattg

SEQ ID NO: 3891493 - DNA, 25 bp, Homo sapien
tcaggggtgcctccgtgagcagggt

SEQ ID NO: 3891494 - DNA, 25 bp, Homo sapien
tcgagttattgtccagcccagtgtc

SEQ ID NO: 3891495 - DNA, 25 bp, Homo sapien
taacccagatctgtgaggcaggatg

SEQ ID NO: 3891496 - DNA, 25 bp, Homo sapien
taagtgtctgggagataaggcctca

SEQ ID NO: 3891497 - DNA, 25 bp, Homo sapien
cactgagagggataaccatgcagcc

SEQ ID NO: 3891498 - DNA, 25 bp, Homo sapien
taggctggagtaggatcttggccca

SEQ ID NO: 3891499 - DNA, 25 bp, Homo sapien
tccccagcagtagtgtggtgttctg

SEQ ID NO: 3891500 - DNA, 25 bp, Homo sapien
ttgagcaatgtgagccagttatttc

SEQ ID NO: 3891501 - DNA, 25 bp, Homo sapien
gagaacacagggattatgcatcctg

SEQ ID NO: 3891502 - DNA, 25 bp, Homo sapien
caagtaaaagtacagttgagcaatg

SEQ ID NO: 3891503 - DNA, 25 bp, Homo sapien
atgatgccatgttctatcgggtact

SEQ ID NO: 3891504 - DNA, 25 bp, Homo sapien
tgtgcttcgtcacccacgtagctgt

SEQ ID NO: 3891505 - DNA, 25 bp, Homo sapien
tctgtgcttcgtcacccacgtagct

SEQ ID NO: 3891506 - DNA, 25 bp, Homo sapien
atgttctatcgggtacttcagggtc

SEQ ID NO: 3891507 - DNA, 25 bp, Homo sapien
tttgtcccattcccaccatcacccc

SEQ ID NO: 3891508 - DNA, 25 bp, Homo sapien
ctttttgtcccattcccaccatcac

SEQ ID NO: 3891509 - DNA, 25 bp, Homo sapien
ttttgtcccattcccaccatcaccc

SEQ ID NO: 3891510 - DNA, 25 bp, Homo sapien
tttttgtcccattcccaccatcacc

SEQ ID NO: 3891511 - DNA, 25 bp, Homo sapien
tgtaaaattaccatgcggctgtcca

SEQ ID NO: 3891512 - DNA, 25 bp, Homo sapien
gagtttttaccatgtgatgccacca

SEQ ID NO: 3891513 - DNA, 25 bp, Homo sapien
tagcggcttgtgcagaatatctcca

SEQ ID NO: 3891514 - DNA, 25 bp, Homo sapien
tgaaattggcatttactcctggacc

SEQ ID NO: 3891515 - DNA, 25 bp, Homo sapien
tgatgtctgggacgtcccacaatgg

SEQ ID NO: 3891516 - DNA, 25 bp, Homo sapien
gacgtcccacaatggatgggaaaac

SEQ ID NO: 3891517 - DNA, 25 bp, Homo sapien
agccctgggagcatcgtccccagca

SEQ ID NO: 3891518 - DNA, 25 bp, Homo sapien
agcaaagccggccttacagagccca

SEQ ID NO: 3891519 - DNA, 25 bp, Homo sapien
caaccttagtgtagtgaccggcata

SEQ ID NO: 3891520 - DNA, 25 bp, Homo sapien
aagctagatttttgagggacaggca

SEQ ID NO: 3891521 - DNA, 25 bp, Homo sapien
cagggcattagaggcagagctccag

SEQ ID NO: 3891522 - DNA, 25 bp, Homo sapien
tgttccgttaagagaaggacaccca

SEQ ID NO: 3891523 - DNA, 25 bp, Homo sapien
tttgctttctttccacactgctcca

SEQ ID NO: 3891524 - DNA, 25 bp, Homo sapien
ctttgctttctttccacactgctcc

SEQ ID NO: 3891525 - DNA, 25 bp, Homo sapien
ttgctttctttccacactgctccag

SEQ ID NO: 3891526 - DNA, 25 bp, Homo sapien
tgctttctttccacactgctccagg

SEQ ID NO: 3891527 - DNA, 25 bp, Homo sapien
gaaaaaggagactggccctcagcat

SEQ ID NO: 3891528 - DNA, 25 bp, Homo sapien
tgcttttggaactgcacccgggtca

SEQ ID NO: 3891529 - DNA, 25 bp, Homo sapien
tgtccccggaaagagtcagctcagt

SEQ ID NO: 3891530 - DNA, 25 bp, Homo sapien
agatgcaaaccagatatccggccgg

SEQ ID NO: 3891531 - DNA, 25 bp, Homo sapien
tgcacacagctaacctgcatacctg

SEQ ID NO: 3891532 - DNA, 25 bp, Homo sapien
taacctgcatacctgtattgtgctg

SEQ ID NO: 3891533 - DNA, 25 bp, Homo sapien
cagctaacctgcatacctgtattgt

SEQ ID NO: 3891534 - DNA, 25 bp, Homo sapien
catacctgtattgtgctgcaagatc

SEQ ID NO: 3891535 - DNA, 25 bp, Homo sapien
taccaaactacatattagccctgtc

SEQ ID NO: 3891536 - DNA, 25 bp, Homo sapien
gatgatgtcttattataccgggtaa

SEQ ID NO: 3891537 - DNA, 25 bp, Homo sapien
gtgcatgaacccagccaaatccctg

SEQ ID NO: 3891538 - DNA, 25 bp, Homo sapien
tagccctgtctttaacgttagatca

SEQ ID NO: 3891539 - DNA, 25 bp, Homo sapien
gctgaaagctgaagggttatatagc

SEQ ID NO: 3891540 - DNA, 25 bp, Homo sapien
gctgaagggttatatagccccttgg

SEQ ID NO: 3891541 - DNA, 25 bp, Homo sapien
aagggttatatagccccttggcctg

SEQ ID NO: 3891542 - DNA, 25 bp, Homo sapien
gaaagctgaagggttatatagcccc

SEQ ID NO: 3891543 - DNA, 25 bp, Homo sapien
acagacttgagcctgtcgttcagtc

SEQ ID NO: 3891544 - DNA, 25 bp, Homo sapien
tagggacctcagcacaaaactctct

SEQ ID NO: 3891545 - DNA, 25 bp, Homo sapien
tgtcgttcagtctaacacaaccata

SEQ ID NO: 3891546 - DNA, 25 bp, Homo sapien
aaaactctctaatctgggtggccgg

SEQ ID NO: 3891547 - DNA, 25 bp, Homo sapien
taactactggcaaatagccgtataa

SEQ ID NO: 3891548 - DNA, 25 bp, Homo sapien
gccgtataatattgatgtctggtaa

SEQ ID NO: 3891549 - DNA, 25 bp, Homo sapien
tattgtaaattccttgagcgctggg

SEQ ID NO: 3891550 - DNA, 25 bp, Homo sapien
ctctgtagatttagattaggccatg

SEQ ID NO: 3891551 - DNA, 25 bp, Homo sapien
tctacgctggcacaatggccatcct

SEQ ID NO: 3891552 - DNA, 25 bp, Homo sapien
agttctcctaagatagcccatgaag

SEQ ID NO: 3891553 - DNA, 25 bp, Homo sapien
caaacagttctcctaagatagccca

SEQ ID NO: 3891554 - DNA, 25 bp, Homo sapien
aaaggcatggagtctacgctggcac

SEQ ID NO: 3891555 - DNA, 25 bp, Homo sapien
ctttatgggaaatttgactggacac

SEQ ID NO: 3891556 - DNA, 25 bp, Homo sapien
tttatgggaaatttgactggacact

SEQ ID NO: 3891557 - DNA, 25 bp, Homo sapien
ttatgggaaatttgactggacactt

SEQ ID NO: 3891558 - DNA, 25 bp, Homo sapien
tccagcatattggaggagaaaaaag

SEQ ID NO: 3891559 - DNA, 25 bp, Homo sapien
ttggaatccagcatattggaggaga

SEQ ID NO: 3891560 - DNA, 25 bp, Homo sapien
gagttggaatccagcatattggagg

SEQ ID NO: 3891561 - DNA, 25 bp, Homo sapien
ccagcatattggaggagaaaaaagc

SEQ ID NO: 3891562 - DNA, 25 bp, Homo sapien
aaggatacatatagtgctttggacc

SEQ ID NO: 3891563 - DNA, 25 bp, Homo sapien
gctttggaccaaaatcatagcgacc

SEQ ID NO: 3891564 - DNA, 25 bp, Homo sapien
aatcatagcgaccaagaggcattcc

SEQ ID NO: 3891565 - DNA, 25 bp, Homo sapien
ggatacatatagtgctttggaccaa

SEQ ID NO: 3891566 - DNA, 25 bp, Homo sapien
caacaaagaacaacacattggtggg

SEQ ID NO: 3891567 - DNA, 25 bp, Homo sapien
tccgaattcttatctggaacccctg

SEQ ID NO: 3891568 - DNA, 25 bp, Homo sapien
taggcttcacgtatatatgggagat

SEQ ID NO: 3891569 - DNA, 25 bp, Homo sapien
tcaggcaagcaagggcctaaggtca

SEQ ID NO: 3891570 - DNA, 25 bp, Homo sapien
atattcaccattaggttgtaaactt

SEQ ID NO: 3891571 - DNA, 25 bp, Homo sapien
agtatattcaccattaggttgtaaa

SEQ ID NO: 3891572 - DNA, 25 bp, Homo sapien
aatgttggtaacacgggcactctgc

SEQ ID NO: 3891573 - DNA, 25 bp, Homo sapien
cacacatgtttgtcggtagagtact

SEQ ID NO: 3891574 - DNA, 25 bp, Homo sapien
ccttgactttataagggaaggcagc

SEQ ID NO: 3891575 - DNA, 25 bp, Homo sapien
tagagaagtggatgtaggcaatccc

SEQ ID NO: 3891576 - DNA, 25 bp, Homo sapien
gggatctctaggtcatcatcaccat

SEQ ID NO: 3891577 - DNA, 25 bp, Homo sapien
tcttggggatctctaggtcatcatc

SEQ ID NO: 3891578 - DNA, 25 bp, Homo sapien
ttggggatctctaggtcatcatcac

SEQ ID NO: 3891579 - DNA, 25 bp, Homo sapien
ggggatctctaggtcatcatcacca

SEQ ID NO: 3891580 - DNA, 25 bp, Homo sapien
aaaacactgtccactgcctgaaaca

SEQ ID NO: 3891581 - DNA, 25 bp, Homo sapien
taaaaacactgtccactgcctgaaa

SEQ ID NO: 3891582 - DNA, 25 bp, Homo sapien
ttaaaaacactgtccactgcctgaa

SEQ ID NO: 3891583 - DNA, 25 bp, Homo sapien
aaaaacactgtccactgcctgaaac

SEQ ID NO: 3891584 - DNA, 25 bp, Homo sapien
ttcctgctgacttcaaagagagacg

SEQ ID NO: 3891585 - DNA, 25 bp, Homo sapien
tcaaagagagacgttcacaaggaga

SEQ ID NO: 3891586 - DNA, 25 bp, Homo sapien
tcctgctgacttcaaagagagacgt

SEQ ID NO: 3891587 - DNA, 25 bp, Homo sapien
agagacgttcacaaggagaagatgc

SEQ ID NO: 3891588 - DNA, 25 bp, Homo sapien
agagatggggcgagaacagcataaa

SEQ ID NO: 3891589 - DNA, 25 bp, Homo sapien
ggggcgagaacagcataaatgccat

SEQ ID NO: 3891590 - DNA, 25 bp, Homo sapien
gatggggcgagaacagcataaatgc

SEQ ID NO: 3891591 - DNA, 25 bp, Homo sapien
tggggcgagaacagcataaatgcca

SEQ ID NO: 3891592 - DNA, 25 bp, Homo sapien
tcagagtgtgtgcacaaggctggca

SEQ ID NO: 3891593 - DNA, 25 bp, Homo sapien
tgaaggatgaacagtgggctaagca

SEQ ID NO: 3891594 - DNA, 25 bp, Homo sapien
cagggtcttcctcatggcactaaca

SEQ ID NO: 3891595 - DNA, 25 bp, Homo sapien
gacaagcctatcaacacctacaaga

SEQ ID NO: 3891596 - DNA, 25 bp, Homo sapien
taatcaaagagacgtggatccagga

SEQ ID NO: 3891597 - DNA, 25 bp, Homo sapien
gtttacaaatgtgatctccgcggat

SEQ ID NO: 3891598 - DNA, 25 bp, Homo sapien
gatatccagattacaccaagaggct

SEQ ID NO: 3891599 - DNA, 25 bp, Homo sapien
caggcatagcgagagaagtgtttac

SEQ ID NO: 3891600 - DNA, 25 bp, Homo sapien
taccccctcatcaatagggcatttt

SEQ ID NO: 3891601 - DNA, 25 bp, Homo sapien
cctagaggtaaaatcctcttggccg

SEQ ID NO: 3891602 - DNA, 25 bp, Homo sapien
tcttatcaactagaaataagcacca

SEQ ID NO: 3891603 - DNA, 25 bp, Homo sapien
tagctgagcacaatggtcatattga

SEQ ID NO: 3891604 - DNA, 25 bp, Homo sapien
cctggttggctatgaaaagtgattc

SEQ ID NO: 3891605 - DNA, 25 bp, Homo sapien
gagatcctttcagactgccatggtg

SEQ ID NO: 3891606 - DNA, 25 bp, Homo sapien
taaccgtcatgctagatccgagggc

SEQ ID NO: 3891607 - DNA, 25 bp, Homo sapien
cactgacactggaataagcctgaat

SEQ ID NO: 3891608 - DNA, 25 bp, Homo sapien
cagatgaattatgatatggtaccca

SEQ ID NO: 3891609 - DNA, 25 bp, Homo sapien
cattgcttgtgtttgtgggtgcata

SEQ ID NO: 3891610 - DNA, 25 bp, Homo sapien
ccaggcatgggttcagtatccaagc

SEQ ID NO: 3891611 - DNA, 25 bp, Homo sapien
aattgagagtgtgctgaaaatgagc

SEQ ID NO: 3891612 - DNA, 25 bp, Homo sapien
tataaactgaagcagatacctggaa

SEQ ID NO: 3891613 - DNA, 25 bp, Homo sapien
tatcctacgtttaaatatctttgaa

SEQ ID NO: 3891614 - DNA, 25 bp, Homo sapien
ttataaactgaagcagatacctgga

SEQ ID NO: 3891615 - DNA, 25 bp, Homo sapien
ttaagattctccttactactatcct

SEQ ID NO: 3891616 - DNA, 25 bp, Homo sapien
ggtctagccttcagggaatgggcac

SEQ ID NO: 3891617 - DNA, 25 bp, Homo sapien
caaggacgaatattgtgttttgctt

SEQ ID NO: 3891618 - DNA, 25 bp, Homo sapien
gctcgaatggattggcctcaggata

SEQ ID NO: 3891619 - DNA, 25 bp, Homo sapien
tattgtgttttgcttgcaccagagg

SEQ ID NO: 3891620 - DNA, 25 bp, Homo sapien
tatcacatgcgtttcctcttagagt

SEQ ID NO: 3891621 - DNA, 25 bp, Homo sapien
aaactatcacatgcgtttcctctta

SEQ ID NO: 3891622 - DNA, 25 bp, Homo sapien
gactaaaacacaatgttagatctac

SEQ ID NO: 3891623 - DNA, 25 bp, Homo sapien
cgtttcctcttagagtattaggaag

SEQ ID NO: 3891624 - DNA, 25 bp, Homo sapien
tcttcggaggcttatcacatacagg

SEQ ID NO: 3891625 - DNA, 25 bp, Homo sapien
gggtcacttgtgtgagtcaccctca

SEQ ID NO: 3891626 - DNA, 25 bp, Homo sapien
taagaggaaacaacctctgctgcca

SEQ ID NO: 3891627 - DNA, 25 bp, Homo sapien
caacccacttggaccttcttcggag

SEQ ID NO: 3891628 - DNA, 25 bp, Homo sapien
gtcagcaccttccttggcagggcca

SEQ ID NO: 3891629 - DNA, 25 bp, Homo sapien
attggtcagcaccttccttggcagg

SEQ ID NO: 3891630 - DNA, 25 bp, Homo sapien
tccacattggtcagcaccttccttg

SEQ ID NO: 3891631 - DNA, 25 bp, Homo sapien
caataattcttttctccacattggt

SEQ ID NO: 3891632 - DNA, 25 bp, Homo sapien
tcaactcttattgagtggagtcact

SEQ ID NO: 3891633 - DNA, 25 bp, Homo sapien
ccaaagtgcgtcttttccaaactct

SEQ ID NO: 3891634 - DNA, 25 bp, Homo sapien
tcctggaaccaaagtgcgtcttttc

SEQ ID NO: 3891635 - DNA, 25 bp, Homo sapien
aactcttattgagtggagtcactgt

SEQ ID NO: 3891636 - DNA, 25 bp, Homo sapien
caggatatggctccctgcctcctag

SEQ ID NO: 3891637 - DNA, 25 bp, Homo sapien
ctgatttatgagcataggatgatgc

SEQ ID NO: 3891638 - DNA, 25 bp, Homo sapien
gatgccttggtgacaacaggatatg

SEQ ID NO: 3891639 - DNA, 25 bp, Homo sapien
tggcctcacatctgctgatttatga

SEQ ID NO: 3891640 - DNA, 25 bp, Homo sapien
gaaattcgaatttcttctgccccat

SEQ ID NO: 3891641 - DNA, 25 bp, Homo sapien
tatgctcaaagtcaaggccctgttc

SEQ ID NO: 3891642 - DNA, 25 bp, Homo sapien
cagagattccaaagtgacctaaagg

SEQ ID NO: 3891643 - DNA, 25 bp, Homo sapien
tcaactgcagcagagattccaaagt

SEQ ID NO: 3891644 - DNA, 25 bp, Homo sapien
gatggaatgttgttgtcagagatgt

SEQ ID NO: 3891645 - DNA, 25 bp, Homo sapien
tgtccaacagcttggctgtcacagt

SEQ ID NO: 3891646 - DNA, 25 bp, Homo sapien
tcacagtgaaggtatgctcttggct

SEQ ID NO: 3891647 - DNA, 25 bp, Homo sapien
gcttgattccgattccgagtgatgg

SEQ ID NO: 3891648 - DNA, 25 bp, Homo sapien
caagtgtctgacaaccatgagtcca

SEQ ID NO: 3891649 - DNA, 25 bp, Homo sapien
catgagtccatgctgcccatacact

SEQ ID NO: 3891650 - DNA, 25 bp, Homo sapien
tgctgcccatacactgctgtcttac

SEQ ID NO: 3891651 - DNA, 25 bp, Homo sapien
tatctctctcccatgaacacaagtg

SEQ ID NO: 3891652 - DNA, 25 bp, Homo sapien
catttggaaatggtaccggctcaga

SEQ ID NO: 3891653 - DNA, 25 bp, Homo sapien
aaatggtaccggctcagaacatgat

SEQ ID NO: 3891654 - DNA, 25 bp, Homo sapien
tcagaacatgatactgctttatgca

SEQ ID NO: 3891655 - DNA, 25 bp, Homo sapien
taccggctcagaacatgatactgct

SEQ ID NO: 3891656 - DNA, 25 bp, Homo sapien
ccacgatgagtgtcttcccattgcc

SEQ ID NO: 3891657 - DNA, 25 bp, Homo sapien
cctcctagaactctccattgtctat

SEQ ID NO: 3891658 - DNA, 25 bp, Homo sapien
agctgaaggtctaggagcggcctct

SEQ ID NO: 3891659 - DNA, 25 bp, Homo sapien
aggagcggcctctaaaatgcggaag

SEQ ID NO: 3891660 - DNA, 25 bp, Homo sapien
taattcatatgcaggattcaaggct

SEQ ID NO: 3891661 - DNA, 25 bp, Homo sapien
tagaaggacacttggtatgcccgct

SEQ ID NO: 3891662 - DNA, 25 bp, Homo sapien
caaggctattgaggtgagctagact

SEQ ID NO: 3891663 - DNA, 25 bp, Homo sapien
tgtgaaaggcacagcagtcccgagt

SEQ ID NO: 3891664 - DNA, 25 bp, Homo sapien
gacagatgcagtccgcagcgttccc

SEQ ID NO: 3891665 - DNA, 25 bp, Homo sapien
gggacagatgcagtccgcagcgttc

SEQ ID NO: 3891666 - DNA, 25 bp, Homo sapien
ctgggacagatgcagtccgcagcgt

SEQ ID NO: 3891667 - DNA, 25 bp, Homo sapien
cagatgcagtccgcagcgttcccag

SEQ ID NO: 3891668 - DNA, 25 bp, Homo sapien
tgtgtaaagtacggagcgaagttgc

SEQ ID NO: 3891669 - DNA, 25 bp, Homo sapien
ccagtgtgtaaagtacggagcgaag

SEQ ID NO: 3891670 - DNA, 25 bp, Homo sapien
agtgtgtaaagtacggagcgaagtt

SEQ ID NO: 3891671 - DNA, 25 bp, Homo sapien
tgtaaagtacggagcgaagttgcag

SEQ ID NO: 3891672 - DNA, 25 bp, Homo sapien
tcatatactgcgttgccagcgcgaa

SEQ ID NO: 3891673 - DNA, 25 bp, Homo sapien
tccatgtcgaagagtagcaggcaga

SEQ ID NO: 3891674 - DNA, 25 bp, Homo sapien
gcaggtgccacacgaagaactccat

SEQ ID NO: 3891675 - DNA, 25 bp, Homo sapien
tcctccacggaaagccagatgttga

SEQ ID NO: 3891676 - DNA, 25 bp, Homo sapien
ggcaaaagcccacgtatgtggtgat

SEQ ID NO: 3891677 - DNA, 25 bp, Homo sapien
ggtcggagcagttgtggcagctcat

SEQ ID NO: 3891678 - DNA, 25 bp, Homo sapien
gcacaggatatccaggaccacgaag

SEQ ID NO: 3891679 - DNA, 25 bp, Homo sapien
aagtcagggtggatcttgtagcgcc

SEQ ID NO: 3891680 - DNA, 25 bp, Homo sapien
ccaattgatggttttccgcaaaagg

SEQ ID NO: 3891681 - DNA, 25 bp, Homo sapien
ttctgattagaactttggccacacc

SEQ ID NO: 3891682 - DNA, 25 bp, Homo sapien
ggccacaccatttcttgtccaattg

SEQ ID NO: 3891683 - DNA, 25 bp, Homo sapien
gggtgttttctgacaggtagcatta

SEQ ID NO: 3891684 - DNA, 25 bp, Homo sapien
tagagagctctttaaggcaaggaca

SEQ ID NO: 3891685 - DNA, 25 bp, Homo sapien
cccaacatagggacgtgaagcaggt

SEQ ID NO: 3891686 - DNA, 25 bp, Homo sapien
tatacctcgcttaagtcagtgacag

SEQ ID NO: 3891687 - DNA, 25 bp, Homo sapien
tcaataacgacagtagcgggctcca

SEQ ID NO: 3891688 - DNA, 25 bp, Homo sapien
tattactttgtcctatgaagggcaa

SEQ ID NO: 3891689 - DNA, 25 bp, Homo sapien
tacacatcagtgatatttaaaagac

SEQ ID NO: 3891690 - DNA, 25 bp, Homo sapien
gacttaaagagacaatactatggtt

SEQ ID NO: 3891691 - DNA, 25 bp, Homo sapien
ggttgagacactggcttcctattcc

SEQ ID NO: 3891692 - DNA, 25 bp, Homo sapien
tggtggtacacagctcaagtccagc

SEQ ID NO: 3891693 - DNA, 25 bp, Homo sapien
gaaaaaatagctagtatgtttctaa

SEQ ID NO: 3891694 - DNA, 25 bp, Homo sapien
tcacatgacataatcattgacttgg

SEQ ID NO: 3891695 - DNA, 25 bp, Homo sapien
aactagagtgaactgggcatcttca

SEQ ID NO: 3891696 - DNA, 25 bp, Homo sapien
tctgagtcagtaagatattgacgtc

SEQ ID NO: 3891697 - DNA, 25 bp, Homo sapien
tattgacgtcgtagacatctgcaag

SEQ ID NO: 3891698 - DNA, 25 bp, Homo sapien
tggaacaccaagttggtgatctgag

SEQ ID NO: 3891699 - DNA, 25 bp, Homo sapien
gatgctcccattccggaatgctctc

SEQ ID NO: 3891700 - DNA, 25 bp, Homo sapien
gcagtcggcacaagcatgtccttca

SEQ ID NO: 3891701 - DNA, 25 bp, Homo sapien
tgcagtcggcacaagcatgtccttc

SEQ ID NO: 3891702 - DNA, 25 bp, Homo sapien
ctgcagtcggcacaagcatgtcctt

SEQ ID NO: 3891703 - DNA, 25 bp, Homo sapien
cttccccagtcaaaggcttgaaact

SEQ ID NO: 3891704 - DNA, 25 bp, Homo sapien
aaataattcttggcactgcttcccc

SEQ ID NO: 3891705 - DNA, 25 bp, Homo sapien
aataattcttggcactgcttcccca

SEQ ID NO: 3891706 - DNA, 25 bp, Homo sapien
gcttccccagtcaaaggcttgaaac

SEQ ID NO: 3891707 - DNA, 25 bp, Homo sapien
tgtaagcaggttgtctttctatttg

SEQ ID NO: 3891708 - DNA, 25 bp, Homo sapien
ttgtaagcaggttgtctttctattt

SEQ ID NO: 3891709 - DNA, 25 bp, Homo sapien
cagacctttctgatgttgattttac

SEQ ID NO: 3891710 - DNA, 25 bp, Homo sapien
ccagatcagatttgtaagcaggttg

SEQ ID NO: 3891711 - DNA, 25 bp, Homo sapien
cccaaatgcactcctggaatgccta

SEQ ID NO: 3891712 - DNA, 25 bp, Homo sapien
ccaaatgcactcctggaatgcctac

SEQ ID NO: 3891713 - DNA, 25 bp, Homo sapien
atgaaccccaaatgcactcctggaa

SEQ ID NO: 3891714 - DNA, 25 bp, Homo sapien
aaccccaaatgcactcctggaatgc

SEQ ID NO: 3891715 - DNA, 25 bp, Homo sapien
gtgttgtatatacatccactctaga

SEQ ID NO: 3891716 - DNA, 25 bp, Homo sapien
agagctccttcagtatgacatgagt

SEQ ID NO: 3891717 - DNA, 25 bp, Homo sapien
tgcaaacgtgggtacccagccactt

SEQ ID NO: 3891718 - DNA, 25 bp, Homo sapien
acatgagtgcaaacgtgggtaccca

SEQ ID NO: 3891719 - DNA, 25 bp, Homo sapien
agccacttcaaaaacgcactctggg

SEQ ID NO: 3891720 - DNA, 25 bp, Homo sapien
aatcgtcctaatttggccatagggc

SEQ ID NO: 3891721 - DNA, 25 bp, Homo sapien
ccatagggctagtacagaaggcgac

SEQ ID NO: 3891722 - DNA, 25 bp, Homo sapien
cagggatctgtgaaaatgctataaa

SEQ ID NO: 3891723 - DNA, 25 bp, Homo sapien
tgagatgatctggtaatcgtcctaa

SEQ ID NO: 3891724 - DNA, 25 bp, Homo sapien
ttttattcagaatgaagttaatgga

SEQ ID NO: 3891725 - DNA, 25 bp, Homo sapien
gagaatgacccacataatacacttg

SEQ ID NO: 3891726 - DNA, 25 bp, Homo sapien
tgagaatgacccacataatacactt

SEQ ID NO: 3891727 - DNA, 25 bp, Homo sapien
aatgacccacataatacacttgttc

SEQ ID NO: 3891728 - DNA, 25 bp, Homo sapien
tgtcttatgtttccgagaccaggta

SEQ ID NO: 3891729 - DNA, 25 bp, Homo sapien
agaaactgagagtgtcttatgtttc

SEQ ID NO: 3891730 - DNA, 25 bp, Homo sapien
gtcttatgtttccgagaccaggtat

SEQ ID NO: 3891731 - DNA, 25 bp, Homo sapien
atccacacgtcaaaaccagcatcag

SEQ ID NO: 3891732 - DNA, 25 bp, Homo sapien
gctgttgcccatccacacgtcaaaa

SEQ ID NO: 3891733 - DNA, 25 bp, Homo sapien
gcatcagcaagaatgaagcccaggc

SEQ ID NO: 3891734 - DNA, 25 bp, Homo sapien
ctgctgttgcccatccacacgtcaa

SEQ ID NO: 3891735 - DNA, 25 bp, Homo sapien
tgacccagttactagaatctgccag

SEQ ID NO: 3891736 - DNA, 25 bp, Homo sapien
tttgtgacccagttactagaatctg

SEQ ID NO: 3891737 - DNA, 25 bp, Homo sapien
aggtttgtgacccagttactagaat

SEQ ID NO: 3891738 - DNA, 25 bp, Homo sapien
acccagttactagaatctgccagca

SEQ ID NO: 3891739 - DNA, 25 bp, Homo sapien
tcattgtttaggaggcagtagcacc

SEQ ID NO: 3891740 - DNA, 25 bp, Homo sapien
caaatatgatatcttgctaaataga

SEQ ID NO: 3891741 - DNA, 25 bp, Homo sapien
cattgtttaggaggcagtagcacca

SEQ ID NO: 3891742 - DNA, 25 bp, Homo sapien
gaacattcgtaaaagatccataagc

SEQ ID NO: 3891743 - DNA, 25 bp, Homo sapien
cagcactggcaaggtagcagtgaaa

SEQ ID NO: 3891744 - DNA, 25 bp, Homo sapien
aaacagcactggcaaggtagcagtg

SEQ ID NO: 3891745 - DNA, 25 bp, Homo sapien
caaggtagcagtgaaactggaccat

SEQ ID NO: 3891746 - DNA, 25 bp, Homo sapien
ctggcaaggtagcagtgaaactgga

SEQ ID NO: 3891747 - DNA, 25 bp, Homo sapien
caagattagggctgctttatgtgct

SEQ ID NO: 3891748 - DNA, 25 bp, Homo sapien
gcaatattaacaagactaaatttac

SEQ ID NO: 3891749 - DNA, 25 bp, Homo sapien
gaaacatcatgtatggctggtgtga

SEQ ID NO: 3891750 - DNA, 25 bp, Homo sapien
aaatgccagggccatgcaggtgaac

SEQ ID NO: 3891751 - DNA, 25 bp, Homo sapien
catggtgccattgacagttaagaga

SEQ ID NO: 3891752 - DNA, 25 bp, Homo sapien
tagtgatctgggagtgctcccaaaa

SEQ ID NO: 3891753 - DNA, 25 bp, Homo sapien
taataattttgtagccgcctcctgt

SEQ ID NO: 3891754 - DNA, 25 bp, Homo sapien
gcctcctgttgctcaagtattgtaa

SEQ ID NO: 3891755 - DNA, 25 bp, Homo sapien
acctataaatctgctaatccctgag

SEQ ID NO: 3891756 - DNA, 25 bp, Homo sapien
taccaaaggcatcgaagtggtctac

SEQ ID NO: 3891757 - DNA, 25 bp, Homo sapien
taggctaactctactgttctgtgca

SEQ ID NO: 3891758 - DNA, 25 bp, Homo sapien
gaagtgctttgccagtaagggactg

SEQ ID NO: 3891759 - DNA, 25 bp, Homo sapien
gtcaccctgctggggagcaggtgac

SEQ ID NO: 3891760 - DNA, 25 bp, Homo sapien
cacttcactgtcaccctgctgggga

SEQ ID NO: 3891761 - DNA, 25 bp, Homo sapien
tgtcaccctgctggggagcaggtga

SEQ ID NO: 3891762 - DNA, 25 bp, Homo sapien
tcacacttcactgtcaccctgctgg

SEQ ID NO: 3891763 - DNA, 25 bp, Homo sapien
aagaagtcaatatcagagaccacca

SEQ ID NO: 3891764 - DNA, 25 bp, Homo sapien
tcatggagggcttaatcctgaagaa

SEQ ID NO: 3891765 - DNA, 25 bp, Homo sapien
tatcagagaccaccatcaaatccat

SEQ ID NO: 3891766 - DNA, 25 bp, Homo sapien
tcctgtccacacagtttagaataca

SEQ ID NO: 3891767 - DNA, 25 bp, Homo sapien
cacatcattatagctaagctttaag

SEQ ID NO: 3891768 - DNA, 25 bp, Homo sapien
tagctaagctttaagaaacttaatc

SEQ ID NO: 3891769 - DNA, 25 bp, Homo sapien
gaatggcaatttcacatcattatag

SEQ ID NO: 3891770 - DNA, 25 bp, Homo sapien
aaagattgctgaatggcaatttcac

SEQ ID NO: 3891771 - DNA, 25 bp, Homo sapien
aacagtgtgatacacacaggtaggg

SEQ ID NO: 3891772 - DNA, 25 bp, Homo sapien
catgtgactctgagtgttttaacca

SEQ ID NO: 3891773 - DNA, 25 bp, Homo sapien
ttcccctgcaacagtgtgatacaca

SEQ ID NO: 3891774 - DNA, 25 bp, Homo sapien
ctgggagcatatcaagactcatgct

SEQ ID NO: 3891775 - DNA, 25 bp, Homo sapien
ggaatccccagtaagagataatttc

SEQ ID NO: 3891776 - DNA, 25 bp, Homo sapien
cccatgaggaattcggttaaggcac

SEQ ID NO: 3891777 - DNA, 25 bp, Homo sapien
ttgtcagaatggttcttcctcccat

SEQ ID NO: 3891778 - DNA, 25 bp, Homo sapien
caactaggtattcctcactagggaa

SEQ ID NO: 3891779 - DNA, 25 bp, Homo sapien
cattcatgtttgtttcaggatccac

SEQ ID NO: 3891780 - DNA, 25 bp, Homo sapien
acattcatgtttgtttcaggatcca

SEQ ID NO: 3891781 - DNA, 25 bp, Homo sapien
cacattcatgtttgtttcaggatcc

SEQ ID NO: 3891782 - DNA, 25 bp, Homo sapien
ttcatgtttgtttcaggatccacag

SEQ ID NO: 3891783 - DNA, 25 bp, Homo sapien
gtcagtttccctccagacccctcag

SEQ ID NO: 3891784 - DNA, 25 bp, Homo sapien
tgtcagtttccctccagacccctca

SEQ ID NO: 3891785 - DNA, 25 bp, Homo sapien
ctgtcagtttccctccagacccctc

SEQ ID NO: 3891786 - DNA, 25 bp, Homo sapien
cccctcagaatgcagggtccagaga

SEQ ID NO: 3891787 - DNA, 25 bp, Homo sapien
ccagatttagggcaagtaaaaggtg

SEQ ID NO: 3891788 - DNA, 25 bp, Homo sapien
ttctggtaacttaatgctcccacaa

SEQ ID NO: 3891789 - DNA, 25 bp, Homo sapien
aaatattctggtaacttaatgctcc

SEQ ID NO: 3891790 - DNA, 25 bp, Homo sapien
agttctgaaccagatttagggcaag

SEQ ID NO: 3891791 - DNA, 25 bp, Homo sapien
atttatttattttgaggctgagtct

SEQ ID NO: 3891792 - DNA, 25 bp, Homo sapien
ctccgcctcccaaaggaattattat

SEQ ID NO: 3891793 - DNA, 25 bp, Homo sapien
cgcctcccaaaggaattattattat

SEQ ID NO: 3891794 - DNA, 25 bp, Homo sapien
tatttattttgaggctgagtctcgc

SEQ ID NO: 3891795 - DNA, 25 bp, Homo sapien
ttgtacaattgaaatatgccatgct

SEQ ID NO: 3891796 - DNA, 25 bp, Homo sapien
cacaggtgtgtacacatgcaaaaac

SEQ ID NO: 3891797 - DNA, 25 bp, Homo sapien
tccacaagtcttaagaaattgattc

SEQ ID NO: 3891798 - DNA, 25 bp, Homo sapien
tgcagtctaatctatattcacagaa

SEQ ID NO: 3891799 - DNA, 25 bp, Homo sapien
gaagagagtgggcttctctctgaag

SEQ ID NO: 3891800 - DNA, 25 bp, Homo sapien
gcactgggcagcttcactgaccgga

SEQ ID NO: 3891801 - DNA, 25 bp, Homo sapien
ctgtcctcgcggtccaggagcactg

SEQ ID NO: 3891802 - DNA, 25 bp, Homo sapien
gcagcttcactgaccggagaccgcg

SEQ ID NO: 3891803 - DNA, 25 bp, Homo sapien
gccttgtcgggagggcggatgccca

SEQ ID NO: 3891804 - DNA, 25 bp, Homo sapien
tggagctgtcctgccgggccgctgt

SEQ ID NO: 3891805 - DNA, 25 bp, Homo sapien
caccaccctcggactatttgttcag

SEQ ID NO: 3891806 - DNA, 25 bp, Homo sapien
tgtctcgagtcgcagtgccagctct

SEQ ID NO: 3891807 - DNA, 25 bp, Homo sapien
tctaagagatggagcccgtcctccg

SEQ ID NO: 3891808 - DNA, 25 bp, Homo sapien
gcgccgtaggcgtttctaagagatg

SEQ ID NO: 3891809 - DNA, 25 bp, Homo sapien
gagcatgcgccgtaggcgtttctaa

SEQ ID NO: 3891810 - DNA, 25 bp, Homo sapien
cccagttgaccccatagagcatgcg

SEQ ID NO: 3891811 - DNA, 25 bp, Homo sapien
ctatgcacgcttgggcctcctactt

SEQ ID NO: 3891812 - DNA, 25 bp, Homo sapien
cctcctacttggaggtgccgacaca

SEQ ID NO: 3891813 - DNA, 25 bp, Homo sapien
ccgtgtctgggcctatgcacgcttg

SEQ ID NO: 3891814 - DNA, 25 bp, Homo sapien
ctcctacttggaggtgccgacacat

SEQ ID NO: 3891815 - DNA, 25 bp, Homo sapien
ttccaatctcgcttttcaattaaaa

SEQ ID NO: 3891816 - DNA, 25 bp, Homo sapien
caattccaatctcgcttttcaatta

SEQ ID NO: 3891817 - DNA, 25 bp, Homo sapien
tatccctgaacagcccggttgattt

SEQ ID NO: 3891818 - DNA, 25 bp, Homo sapien
ctatccctgaacagcccggttgatt

SEQ ID NO: 3891819 - DNA, 25 bp, Homo sapien
ttgacaccctggaaagtgttgtgct

SEQ ID NO: 3891820 - DNA, 25 bp, Homo sapien
ccctggaaagtgttgtgctgagaaa

SEQ ID NO: 3891821 - DNA, 25 bp, Homo sapien
ggcttctgtaaagcatcaacaaagg

SEQ ID NO: 3891822 - DNA, 25 bp, Homo sapien
aaaacagagctgatggttaagaaca

SEQ ID NO: 3891823 - DNA, 25 bp, Homo sapien
gcctgcatgcagtaggaaggttcgc

SEQ ID NO: 3891824 - DNA, 25 bp, Homo sapien
aggaagtatccaggaaatgggggtg

SEQ ID NO: 3891825 - DNA, 25 bp, Homo sapien
gaataaagcctgcatgcagtaggaa

SEQ ID NO: 3891826 - DNA, 25 bp, Homo sapien
tgcatgcagtaggaaggttcgctgg

SEQ ID NO: 3891827 - DNA, 25 bp, Homo sapien
gatcagattatgctcctggtgtaaa

SEQ ID NO: 3891828 - DNA, 25 bp, Homo sapien
tatgtactgccattgtgagaacccc

SEQ ID NO: 3891829 - DNA, 25 bp, Homo sapien
gtgtaaatcaggctcaggaccaaga

SEQ ID NO: 3891830 - DNA, 25 bp, Homo sapien
gattggaggcagtaaggtgacttct

SEQ ID NO: 3891831 - DNA, 25 bp, Homo sapien
tcacaagaccagtgatctccatggc

SEQ ID NO: 3891832 - DNA, 25 bp, Homo sapien
agttctaatgatttcatactgaaag

SEQ ID NO: 3891833 - DNA, 25 bp, Homo sapien
tctccatggctggattggctccaag

SEQ ID NO: 3891834 - DNA, 25 bp, Homo sapien
tcaggaagtaataacaggaatgttt

SEQ ID NO: 3891835 - DNA, 25 bp, Homo sapien
tctgctttagtgtagcaggaaggtg

SEQ ID NO: 3891836 - DNA, 25 bp, Homo sapien
gagaagggtccactaacatgtatta

SEQ ID NO: 3891837 - DNA, 25 bp, Homo sapien
aattctctctgctttagtgtagcag

SEQ ID NO: 3891838 - DNA, 25 bp, Homo sapien
attaacagcgtgcagtttgccaggc

SEQ ID NO: 3891839 - DNA, 25 bp, Homo sapien
gatggaagaactctgtgtccttgaa

SEQ ID NO: 3891840 - DNA, 25 bp, Homo sapien
aaagatccctttgtacagaggcact

SEQ ID NO: 3891841 - DNA, 25 bp, Homo sapien
cagcggctaggtgtatactaattca

SEQ ID NO: 3891842 - DNA, 25 bp, Homo sapien
tctggagtagcatcccagtttctca

SEQ ID NO: 3891843 - DNA, 25 bp, Homo sapien
tgctagaagtccaagttggtttctg

SEQ ID NO: 3891844 - DNA, 25 bp, Homo sapien
agatggcagccttttctttatcttc

SEQ ID NO: 3891845 - DNA, 25 bp, Homo sapien
gagatggcagccttttctttatctt

SEQ ID NO: 3891846 - DNA, 25 bp, Homo sapien
gatgctagaagtccaagttggtttc

SEQ ID NO: 3891847 - DNA, 25 bp, Homo sapien
caaaattcacggtatgcttggaacg

SEQ ID NO: 3891848 - DNA, 25 bp, Homo sapien
gcaacaaaacgtgggaacctggtga

SEQ ID NO: 3891849 - DNA, 25 bp, Homo sapien
tggtgtgaaccaaaatagagtcagc

SEQ ID NO: 3891850 - DNA, 25 bp, Homo sapien
tgcacgcatttgaggtcatcagggt

SEQ ID NO: 3891851 - DNA, 25 bp, Homo sapien
tccaccttgatggtgggtgggctgc

SEQ ID NO: 3891852 - DNA, 25 bp, Homo sapien
cctacgtgaacacagacattctgtc

SEQ ID NO: 3891853 - DNA, 25 bp, Homo sapien
gacctacgtgaacacagacattctg

SEQ ID NO: 3891854 - DNA, 25 bp, Homo sapien
ttgacctacgtgaacacagacattc

SEQ ID NO: 3891855 - DNA, 25 bp, Homo sapien
ctgcagtcccaactattcgggaggc

SEQ ID NO: 3891856 - DNA, 25 bp, Homo sapien
tgaggcaggtgaatttcttgaaccc

SEQ ID NO: 3891857 - DNA, 25 bp, Homo sapien
ccgagattgtgccactgcactccag

SEQ ID NO: 3891858 - DNA, 25 bp, Homo sapien
caggaggtgaaggttgcagtgagcc

SEQ ID NO: 3891859 - DNA, 25 bp, Homo sapien
gtgctaggaagaaacggcatcagct

SEQ ID NO: 3891860 - DNA, 25 bp, Homo sapien
gagggaagaccccatcgaccattca

SEQ ID NO: 3891861 - DNA, 25 bp, Homo sapien
aactagtctaatctctaatggtggg

SEQ ID NO: 3891862 - DNA, 25 bp, Homo sapien
aaatttatatattgacctcctggag

SEQ ID NO: 3891863 - DNA, 25 bp, Homo sapien
aatcagtactgcaaacccactcatg

SEQ ID NO: 3891864 - DNA, 25 bp, Homo sapien
ataagaagtattcagagtaactttc

SEQ ID NO: 3891865 - DNA, 25 bp, Homo sapien
cgcgcccggccacctagctgttctt

SEQ ID NO: 3891866 - DNA, 25 bp, Homo sapien
gcattaattactgttaactaactta

SEQ ID NO: 3891867 - DNA, 25 bp, Homo sapien
tgaggaaaccttggcaattggagta

SEQ ID NO: 3891868 - DNA, 25 bp, Homo sapien
tcttcttatcgaggtctcaggcctt

SEQ ID NO: 3891869 - DNA, 25 bp, Homo sapien
gatccctggtgcattgatatgtcaa

SEQ ID NO: 3891870 - DNA, 25 bp, Homo sapien
ggccagctctcgcattggtaaagca

SEQ ID NO: 3891871 - DNA, 25 bp, Homo sapien
tatcattaaatgtctcagcctggcc

SEQ ID NO: 3891872 - DNA, 25 bp, Homo sapien
aaaactgaaagcacctggcgggcag

SEQ ID NO: 3891873 - DNA, 25 bp, Homo sapien
caataaagagtcatgggatagctaa

SEQ ID NO: 3891874 - DNA, 25 bp, Homo sapien
tacttcagtcagactcaagctgagc

SEQ ID NO: 3891875 - DNA, 25 bp, Homo sapien
gagcctccgtgggtctgtttgtaag

SEQ ID NO: 3891876 - DNA, 25 bp, Homo sapien
ccaaggaaagttgatggtgtagtcc

SEQ ID NO: 3891877 - DNA, 25 bp, Homo sapien
cagaaatacaattcctgggttaaag

SEQ ID NO: 3891878 - DNA, 25 bp, Homo sapien
tgggttaaagcaagcaaagctgctt

SEQ ID NO: 3891879 - DNA, 25 bp, Homo sapien
aataactcccattttctatgcatac

SEQ ID NO: 3891880 - DNA, 25 bp, Homo sapien
gctgcttttctaataactcccattt

SEQ ID NO: 3891881 - DNA, 25 bp, Homo sapien
tccatcttccaggtatggttagaaa

SEQ ID NO: 3891882 - DNA, 25 bp, Homo sapien
tgggtccagcattccatcttccagg

SEQ ID NO: 3891883 - DNA, 25 bp, Homo sapien
ggtatggttagaaaagagatcagac

SEQ ID NO: 3891884 - DNA, 25 bp, Homo sapien
tcttccaggtatggttagaaaagag

SEQ ID NO: 3891885 - DNA, 25 bp, Homo sapien
ctgctggtgaagtgaattgcatgct

SEQ ID NO: 3891886 - DNA, 25 bp, Homo sapien
ttgtacagctcagtttcgtgttttc

SEQ ID NO: 3891887 - DNA, 25 bp, Homo sapien
tcagtttcgtgttttctgcagaatc

SEQ ID NO: 3891888 - DNA, 25 bp, Homo sapien
agtgactgctggtgaagtgaattgc

SEQ ID NO: 3891889 - DNA, 25 bp, Homo sapien
caagatccaccaggggatggacagg

SEQ ID NO: 3891890 - DNA, 25 bp, Homo sapien
cctaggtatgcccaagaatgatgca

SEQ ID NO: 3891891 - DNA, 25 bp, Homo sapien
gaatgatgcaacatccccagccatg

SEQ ID NO: 3891892 - DNA, 25 bp, Homo sapien
gatggacaggtgtcctaggtatgcc

SEQ ID NO: 3891893 - DNA, 25 bp, Homo sapien
tgtgcagtgagggttgagatctgcc

SEQ ID NO: 3891894 - DNA, 25 bp, Homo sapien
gcagtgagggttgagatctgccaac

SEQ ID NO: 3891895 - DNA, 25 bp, Homo sapien
aaattgagattcatagaggtgaagc

SEQ ID NO: 3891896 - DNA, 25 bp, Homo sapien
tgcagtgagggttgagatctgccaa

SEQ ID NO: 3891897 - DNA, 25 bp, Homo sapien
ggtggctcatctagacctggcaaga

SEQ ID NO: 3891898 - DNA, 25 bp, Homo sapien
tgtcttactgcatcaccagataggg

SEQ ID NO: 3891899 - DNA, 25 bp, Homo sapien
tacaaaagggcagcctagagggcag

SEQ ID NO: 3891900 - DNA, 25 bp, Homo sapien
gatagggctttgctacaaggcacaa

SEQ ID NO: 3891901 - DNA, 25 bp, Homo sapien
ccaaccatgacaagatgagagatca

SEQ ID NO: 3891902 - DNA, 25 bp, Homo sapien
cttgggttcgtctacaaattggaag

SEQ ID NO: 3891903 - DNA, 25 bp, Homo sapien
tgagacaaggtccttaggcacccag

SEQ ID NO: 3891904 - DNA, 25 bp, Homo sapien
ctggagtactatgagcgggccctga

SEQ ID NO: 3891905 - DNA, 25 bp, Homo sapien
tttgctgatattaatctagttaaat

SEQ ID NO: 3891906 - DNA, 25 bp, Homo sapien
atattacatgaaaatgttgctaaat

SEQ ID NO: 3891907 - DNA, 25 bp, Homo sapien
atcagagatcatgggtaacaatcac

SEQ ID NO: 3891908 - DNA, 25 bp, Homo sapien
gtttatcttgttttatgccatttta

SEQ ID NO: 3891909 - DNA, 25 bp, Homo sapien
tttcttctaaggacgcaccaggtcc

SEQ ID NO: 3891910 - DNA, 25 bp, Homo sapien
acttggccatggatacgattgcggg

SEQ ID NO: 3891911 - DNA, 25 bp, Homo sapien
attgatgacgctacactcctccgga

SEQ ID NO: 3891912 - DNA, 25 bp, Homo sapien
tcctccggaggctctaggcagatag

SEQ ID NO: 3891913 - DNA, 25 bp, Homo sapien
acaaaggtctacggctttactcctg

SEQ ID NO: 3891914 - DNA, 25 bp, Homo sapien
cacaaaggtctacggctttactcct

SEQ ID NO: 3891915 - DNA, 25 bp, Homo sapien
cacgccatctttaacaactgtagca

SEQ ID NO: 3891916 - DNA, 25 bp, Homo sapien
gtagcactcacagcgagagtccgca

SEQ ID NO: 3891917 - DNA, 25 bp, Homo sapien
caactgtagcactcacagcgagagt

SEQ ID NO: 3891918 - DNA, 25 bp, Homo sapien
tctttaacaactgtagcactcacag

SEQ ID NO: 3891919 - DNA, 25 bp, Homo sapien
tggaagcagggacttaagtttccgc

SEQ ID NO: 3891920 - DNA, 25 bp, Homo sapien
ttacacgggcagcatgcgaactcag

SEQ ID NO: 3891921 - DNA, 25 bp, Homo sapien
agaggcgggcgcatcccttgagatc

SEQ ID NO: 3891922 - DNA, 25 bp, Homo sapien
tattgggtccttattacaaagcacc

SEQ ID NO: 3891923 - DNA, 25 bp, Homo sapien
taagtttcagtttctgagcgctcgg

SEQ ID NO: 3891924 - DNA, 25 bp, Homo sapien
gcaaattcaactccgaaagaccctg

SEQ ID NO: 3891925 - DNA, 25 bp, Homo sapien
taaaagccgagaccaaagtgaagga

SEQ ID NO: 3891926 - DNA, 25 bp, Homo sapien
gagcgctcggcatctgattcaatct

SEQ ID NO: 3891927 - DNA, 25 bp, Homo sapien
ggagctacctctgtaccaagcacag

SEQ ID NO: 3891928 - DNA, 25 bp, Homo sapien
cgccctgcacgtggttagtgaacct

SEQ ID NO: 3891929 - DNA, 25 bp, Homo sapien
ttccctcggtgtggcatacgcggtt

SEQ ID NO: 3891930 - DNA, 25 bp, Homo sapien
cacccaatccgctgttttatgagga

SEQ ID NO: 3891931 - DNA, 25 bp, Homo sapien
tgatgaatcttgtgcggttttcttt

SEQ ID NO: 3891932 - DNA, 25 bp, Homo sapien
tactttatatgcattatgatgaatc

SEQ ID NO: 3891933 - DNA, 25 bp, Homo sapien
tcccttgtttattatagagctaata

SEQ ID NO: 3891934 - DNA, 25 bp, Homo sapien
taaatactttatatgcattatgatg

SEQ ID NO: 3891935 - DNA, 25 bp, Homo sapien
cacccatagattaccaaggtttcag

SEQ ID NO: 3891936 - DNA, 25 bp, Homo sapien
tattgagatataaagcagccattgg

SEQ ID NO: 3891937 - DNA, 25 bp, Homo sapien
gctgcttgagggctcttatcccagg

SEQ ID NO: 3891938 - DNA, 25 bp, Homo sapien
gaagatgtccctaacctacacccat

SEQ ID NO: 3891939 - DNA, 25 bp, Homo sapien
tcccgccccatagagaatgacttaa

SEQ ID NO: 3891940 - DNA, 25 bp, Homo sapien
aaaacatggatgtctgggtcccgcc

SEQ ID NO: 3891941 - DNA, 25 bp, Homo sapien
tttaaacaagctcctcctaggtgag

SEQ ID NO: 3891942 - DNA, 25 bp, Homo sapien
ggctacgtattggaatcacctaaaa

SEQ ID NO: 3891943 - DNA, 25 bp, Homo sapien
gagttgaacaattggagattcccct

SEQ ID NO: 3891944 - DNA, 25 bp, Homo sapien
ccccgtgtttatacttgcaagagga

SEQ ID NO: 3891945 - DNA, 25 bp, Homo sapien
tatccctagtcaagccagtcaaaat

SEQ ID NO: 3891946 - DNA, 25 bp, Homo sapien
ctgatataggtaaccaaaagctgaa

SEQ ID NO: 3891947 - DNA, 25 bp, Homo sapien
gaaacatgaagaatctggtggcccc

SEQ ID NO: 3891948 - DNA, 25 bp, Homo sapien
taacaaatgtgagagcctggaaccc

SEQ ID NO: 3891949 - DNA, 25 bp, Homo sapien
aagagctttcggtttccagtggaca

SEQ ID NO: 3891950 - DNA, 25 bp, Homo sapien
tgagactggaacaaagctgctgccc

SEQ ID NO: 3891951 - DNA, 25 bp, Homo sapien
cattggtccatagctgcagcttagg

SEQ ID NO: 3891952 - DNA, 25 bp, Homo sapien
gctgccggtggtatctaccagccgt

SEQ ID NO: 3891953 - DNA, 25 bp, Homo sapien
tctcttgccacagaataagccactg

SEQ ID NO: 3891954 - DNA, 25 bp, Homo sapien
gcaatgaactgcaactgggtttttc

SEQ ID NO: 3891955 - DNA, 25 bp, Homo sapien
tgggctcaccaagtatggcactgcg

SEQ ID NO: 3891956 - DNA, 25 bp, Homo sapien
tgaaggaagtataccacaccaagcg

SEQ ID NO: 3891957 - DNA, 25 bp, Homo sapien
cacgagcagagggagactttgaagc

SEQ ID NO: 3891958 - DNA, 25 bp, Homo sapien
cattcccacggcaaagaggtagcaa

SEQ ID NO: 3891959 - DNA, 25 bp, Homo sapien
tgtactacctgtgaattaagaacgg

SEQ ID NO: 3891960 - DNA, 25 bp, Homo sapien
tgatctagaagtaccagcaagggag

SEQ ID NO: 3891961 - DNA, 25 bp, Homo sapien
cagacctaggtactccacagggtaa

SEQ ID NO: 3891962 - DNA, 25 bp, Homo sapien
tctgcaatttagacacatctggccc

SEQ ID NO: 3891963 - DNA, 25 bp, Homo sapien
ttctgtcggtcagccatccaaatgt

SEQ ID NO: 3891964 - DNA, 25 bp, Homo sapien
gaacggagacggctaacacaacaaa

SEQ ID NO: 3891965 - DNA, 25 bp, Homo sapien
gccaataatgtcaatcactccaagt

SEQ ID NO: 3891966 - DNA, 25 bp, Homo sapien
gccataagccataaacagaacggag

SEQ ID NO: 3891967 - DNA, 25 bp, Homo sapien
tggtcaaagatgaatagggagacac

SEQ ID NO: 3891968 - DNA, 25 bp, Homo sapien
ctgacatgagtaaaaaactgtactc

SEQ ID NO: 3891969 - DNA, 25 bp, Homo sapien
tgaatagggagacacccgcttaatg

SEQ ID NO: 3891970 - DNA, 25 bp, Homo sapien
gacacccgcttaatgtcttctttct

SEQ ID NO: 3891971 - DNA, 25 bp, Homo sapien
tacacagagattcaagacaaagccc

SEQ ID NO: 3891972 - DNA, 25 bp, Homo sapien
gaaggtgccaatgccacttcctgac

SEQ ID NO: 3891973 - DNA, 25 bp, Homo sapien
cataagcaagggctttccgtctgct

SEQ ID NO: 3891974 - DNA, 25 bp, Homo sapien
cccaagaatgagtaaggctccccgc

SEQ ID NO: 3891975 - DNA, 25 bp, Homo sapien
gagtaacaaagtgcaaatccaagac

SEQ ID NO: 3891976 - DNA, 25 bp, Homo sapien
gagagtaacaaagtgcaaatccaag

SEQ ID NO: 3891977 - DNA, 25 bp, Homo sapien
ggagagtaacaaagtgcaaatccaa

SEQ ID NO: 3891978 - DNA, 25 bp, Homo sapien
ctggagagtaacaaagtgcaaatcc

SEQ ID NO: 3891979 - DNA, 25 bp, Homo sapien
gaggataaagagaactctatgagtg

SEQ ID NO: 3891980 - DNA, 25 bp, Homo sapien
gcttcagactcgtggcaaatgagct

SEQ ID NO: 3891981 - DNA, 25 bp, Homo sapien
tagagatgcttcagactcgtggcaa

SEQ ID NO: 3891982 - DNA, 25 bp, Homo sapien
agagtgaggtagagatgcttcagac

SEQ ID NO: 3891983 - DNA, 25 bp, Homo sapien
caggatgagtccagtagatgcaagc

SEQ ID NO: 3891984 - DNA, 25 bp, Homo sapien
cttgacaggataaatggttactgac

SEQ ID NO: 3891985 - DNA, 25 bp, Homo sapien
cacttgacaggataaatggttactg

SEQ ID NO: 3891986 - DNA, 25 bp, Homo sapien
attcccacttgacaggataaatggt

SEQ ID NO: 3891987 - DNA, 25 bp, Homo sapien
cccacttgacaggataaatggttac

SEQ ID NO: 3891988 - DNA, 25 bp, Homo sapien
ataggttcaacagaaaggccttgag

SEQ ID NO: 3891989 - DNA, 25 bp, Homo sapien
acaataagaaataggttcaacagaa

SEQ ID NO: 3891990 - DNA, 25 bp, Homo sapien
aaataggttcaacagaaaggccttg

SEQ ID NO: 3891991 - DNA, 25 bp, Homo sapien
agaaataggttcaacagaaaggcct

SEQ ID NO: 3891992 - DNA, 25 bp, Homo sapien
gagcatggtcacacaatctacaatg

SEQ ID NO: 3891993 - DNA, 25 bp, Homo sapien
ccgtttgtgcgtaatcctgagtgaa

SEQ ID NO: 3891994 - DNA, 25 bp, Homo sapien
taatcctgagtgaagtatgtctgga

SEQ ID NO: 3891995 - DNA, 25 bp, Homo sapien
tctacaatggaatggatccatgccg

SEQ ID NO: 3891996 - DNA, 25 bp, Homo sapien
agccctgatgcacgtcctcaatcag

SEQ ID NO: 3891997 - DNA, 25 bp, Homo sapien
caatcagccattggcggtgggtgcc

SEQ ID NO: 3891998 - DNA, 25 bp, Homo sapien
tctgctcttgggagacgcagctttc

SEQ ID NO: 3891999 - DNA, 25 bp, Homo sapien
tgagggggacctaagaactgacagc

SEQ ID NO: 3892000 - DNA, 25 bp, Homo sapien
acctttctctggtactgcagccaaa

SEQ ID NO: 3892001 - DNA, 25 bp, Homo sapien
ttctctggtactgcagccaaaaccc

SEQ ID NO: 3892002 - DNA, 25 bp, Homo sapien
acaccagcacctttctctggtactg

SEQ ID NO: 3892003 - DNA, 25 bp, Homo sapien
cattcatcattcacaccagcacctt

SEQ ID NO: 3892004 - DNA, 25 bp, Homo sapien
catcgccaattgaatccaatatgcg

SEQ ID NO: 3892005 - DNA, 25 bp, Homo sapien
tcctccagtatcatcgccaattgaa

SEQ ID NO: 3892006 - DNA, 25 bp, Homo sapien
gttatgtagaatctcctccagtatc

SEQ ID NO: 3892007 - DNA, 25 bp, Homo sapien
ccaatatgcgttagcccatatacct

SEQ ID NO: 3892008 - DNA, 25 bp, Homo sapien
acagccagccacaatcatccagccc

SEQ ID NO: 3892009 - DNA, 25 bp, Homo sapien
gggaggtagaccgagctctatttac

SEQ ID NO: 3892010 - DNA, 25 bp, Homo sapien
agaccgagctctatttacttttgcc

SEQ ID NO: 3892011 - DNA, 25 bp, Homo sapien
gactgcccgtgtgcagatggtaaca

SEQ ID NO: 3892012 - DNA, 25 bp, Homo sapien
gaagagtttgctgtccagtgacttc

SEQ ID NO: 3892013 - DNA, 25 bp, Homo sapien
ggaagagtttgctgtccagtgactt

SEQ ID NO: 3892014 - DNA, 25 bp, Homo sapien
cttttccaggttgctccaacagcca

SEQ ID NO: 3892015 - DNA, 25 bp, Homo sapien
ttttccaggttgctccaacagccaa

SEQ ID NO: 3892016 - DNA, 25 bp, Homo sapien
ttgctatgtccaaaggttgattttt

SEQ ID NO: 3892017 - DNA, 25 bp, Homo sapien
atttatatcttattgctatgtccaa

SEQ ID NO: 3892018 - DNA, 25 bp, Homo sapien
tgctatgtccaaaggttgatttttc

SEQ ID NO: 3892019 - DNA, 25 bp, Homo sapien
attgctatgtccaaaggttgatttt

SEQ ID NO: 3892020 - DNA, 25 bp, Homo sapien
gctgccatccgccatgctgttgaaa

SEQ ID NO: 3892021 - DNA, 25 bp, Homo sapien
catgtcatggagtactacggagaac

SEQ ID NO: 3892022 - DNA, 25 bp, Homo sapien
gcctattattgagaacagtgctgct

SEQ ID NO: 3892023 - DNA, 25 bp, Homo sapien
gagtccattatttcagtcagctaga

SEQ ID NO: 3892024 - DNA, 25 bp, Homo sapien
gaacagggactcaataagcagttac

SEQ ID NO: 3892025 - DNA, 25 bp, Homo sapien
cccagattctttgcatgtgagtaca

SEQ ID NO: 3892026 - DNA, 25 bp, Homo sapien
aattccttcaagatacggatggtcg

SEQ ID NO: 3892027 - DNA, 25 bp, Homo sapien
ggaaatggtacacggagcttgaaga

SEQ ID NO: 3892028 - DNA, 25 bp, Homo sapien
tactaagtctattgttccctcccag

SEQ ID NO: 3892029 - DNA, 25 bp, Homo sapien
ccttagccaaacacagcaatagtta

SEQ ID NO: 3892030 - DNA, 25 bp, Homo sapien
aactgtgtaagatattctgtccacc

SEQ ID NO: 3892031 - DNA, 25 bp, Homo sapien
cactaaggcacttacacatttgaag

SEQ ID NO: 3892032 - DNA, 25 bp, Homo sapien
ggtataagcagtgttaataatatct

SEQ ID NO: 3892033 - DNA, 25 bp, Homo sapien
ccgatgaagtccctctgtttattaa

SEQ ID NO: 3892034 - DNA, 25 bp, Homo sapien
gtttattaagagtaggacttgtgcc

SEQ ID NO: 3892035 - DNA, 25 bp, Homo sapien
gacttgtgccttggagaacatgagt

SEQ ID NO: 3892036 - DNA, 25 bp, Homo sapien
gttacatcaagtagaacttaataaa

SEQ ID NO: 3892037 - DNA, 25 bp, Homo sapien
agttacatcaagtagaacttaataa

SEQ ID NO: 3892038 - DNA, 25 bp, Homo sapien
tgttgaagggaagcagtcagtccac

SEQ ID NO: 3892039 - DNA, 25 bp, Homo sapien
caaggaggtaaacacatcagccaca

SEQ ID NO: 3892040 - DNA, 25 bp, Homo sapien
taccagtgtgatccgtaagcttgcc

SEQ ID NO: 3892041 - DNA, 25 bp, Homo sapien
caatgggagcccaactgatgcagtc

SEQ ID NO: 3892042 - DNA, 25 bp, Homo sapien
gctcagacttaagcattcccttagt

SEQ ID NO: 3892043 - DNA, 25 bp, Homo sapien
gtctgcagggtacctcaaactctca

SEQ ID NO: 3892044 - DNA, 25 bp, Homo sapien
aaaacactggctattcactcctgga

SEQ ID NO: 3892045 - DNA, 25 bp, Homo sapien
actcaaatttccaatagtctgcagg

SEQ ID NO: 3892046 - DNA, 25 bp, Homo sapien
tgcttgtggtggagtccgcaattgt

SEQ ID NO: 3892047 - DNA, 25 bp, Homo sapien
aaggcaagtccacaataagactgag

SEQ ID NO: 3892048 - DNA, 25 bp, Homo sapien
ggagtccgcaattgttcccatacaa

SEQ ID NO: 3892049 - DNA, 25 bp, Homo sapien
gaagagactggaaagaaagatgctt

SEQ ID NO: 3892050 - DNA, 25 bp, Homo sapien
ggaggaagacaagtctatcaccaga

SEQ ID NO: 3892051 - DNA, 25 bp, Homo sapien
ctgtggaggaagacaagtctatcac

SEQ ID NO: 3892052 - DNA, 25 bp, Homo sapien
gtggaggaagacaagtctatcacca

SEQ ID NO: 3892053 - DNA, 25 bp, Homo sapien
aggaagacaagtctatcaccagagg

SEQ ID NO: 3892054 - DNA, 25 bp, Homo sapien
cttttccgttgcttcaaattcttgg

SEQ ID NO: 3892055 - DNA, 25 bp, Homo sapien
tgaaagtctcttttccgttgcttca

SEQ ID NO: 3892056 - DNA, 25 bp, Homo sapien
tctacacaaaatagttcaagttcaa

SEQ ID NO: 3892057 - DNA, 25 bp, Homo sapien
cacaaaatagttcaagttcaaacag

SEQ ID NO: 3892058 - DNA, 25 bp, Homo sapien
ggtcctggagaagacaagtcgtgcc

SEQ ID NO: 3892059 - DNA, 25 bp, Homo sapien
aagacaagtcgtgccctaaccccag

SEQ ID NO: 3892060 - DNA, 25 bp, Homo sapien
tcctggagaagacaagtcgtgccct

SEQ ID NO: 3892061 - DNA, 25 bp, Homo sapien
gagaagacaagtcgtgccctaaccc

SEQ ID NO: 3892062 - DNA, 25 bp, Homo sapien
gctggtttccttaggcaatttgtac

SEQ ID NO: 3892063 - DNA, 25 bp, Homo sapien
acaccaaactgttcacggtgcaagc

SEQ ID NO: 3892064 - DNA, 25 bp, Homo sapien
gaagttggcctggaagcacaccaaa

SEQ ID NO: 3892065 - DNA, 25 bp, Homo sapien
tttgtacatgcaaggaagttggcct

SEQ ID NO: 3892066 - DNA, 25 bp, Homo sapien
caataaacatgcctgagcttgcaaa

SEQ ID NO: 3892067 - DNA, 25 bp, Homo sapien
gctgtatacgactgaaaaactgcca

SEQ ID NO: 3892068 - DNA, 25 bp, Homo sapien
caagttcatttcgataagcctttgt

SEQ ID NO: 3892069 - DNA, 25 bp, Homo sapien
taaacaaccccaaaagcggcactga

SEQ ID NO: 3892070 - DNA, 25 bp, Homo sapien
catttcttcagcaaacatccggtca

SEQ ID NO: 3892071 - DNA, 25 bp, Homo sapien
tcatttcttcagcaaacatccggtc

SEQ ID NO: 3892072 - DNA, 25 bp, Homo sapien
atttcttcagcaaacatccggtcac

SEQ ID NO: 3892073 - DNA, 25 bp, Homo sapien
gctcgagagcaaaccggccaatatg

SEQ ID NO: 3892074 - DNA, 25 bp, Homo sapien
ggagctcgagagcaaaccggccaat

SEQ ID NO: 3892075 - DNA, 25 bp, Homo sapien
cggccaatatgtcgaaatcctgtat

SEQ ID NO: 3892076 - DNA, 25 bp, Homo sapien
agcaaaccggccaatatgtcgaaat

SEQ ID NO: 3892077 - DNA, 25 bp, Homo sapien
agctccaacgacagcgccagcgccc

SEQ ID NO: 3892078 - DNA, 25 bp, Homo sapien
ggatgggcgctagggcagcggagaa

SEQ ID NO: 3892079 - DNA, 25 bp, Homo sapien
tcccggcgcgggatgggcgctaggg

SEQ ID NO: 3892080 - DNA, 25 bp, Homo sapien
gcgggatgggcgctagggcagcgga

SEQ ID NO: 3892081 - DNA, 25 bp, Homo sapien
gagggggagccgaggaagcttcttg

SEQ ID NO: 3892082 - DNA, 25 bp, Homo sapien
tgcacaaccgtgtcagggagaggga

SEQ ID NO: 3892083 - DNA, 25 bp, Homo sapien
gcacaaccgtgtcagggagagggaa

SEQ ID NO: 3892084 - DNA, 25 bp, Homo sapien
gggggagccgaggaagcttcttggc

SEQ ID NO: 3892085 - DNA, 25 bp, Homo sapien
agccctggcggtagcgcgcggacat

SEQ ID NO: 3892086 - DNA, 25 bp, Homo sapien
ccccaggctgcgcgatccgcgcttc

SEQ ID NO: 3892087 - DNA, 25 bp, Homo sapien
caggctgcgcgatccgcgcttcggt

SEQ ID NO: 3892088 - DNA, 25 bp, Homo sapien
tccgcgcttcggtggggcggggagc

SEQ ID NO: 3892089 - DNA, 25 bp, Homo sapien
atccgcgcttcggtggggcggggag

SEQ ID NO: 3892090 - DNA, 25 bp, Homo sapien
gcctctgaactgacaaggtctggtt

SEQ ID NO: 3892091 - DNA, 25 bp, Homo sapien
ccacgtaggacaggttccaggcgaa

SEQ ID NO: 3892092 - DNA, 25 bp, Homo sapien
tccaggcgaactttctgtaaagtcc

SEQ ID NO: 3892093 - DNA, 25 bp, Homo sapien
ggttccaatatcttggagcctacgt

SEQ ID NO: 3892094 - DNA, 25 bp, Homo sapien
gtcaacggcagtgcgtttccagttc

SEQ ID NO: 3892095 - DNA, 25 bp, Homo sapien
tccctctgaactccaattcttgttg

SEQ ID NO: 3892096 - DNA, 25 bp, Homo sapien
ccaattcttgttgccagatagccag

SEQ ID NO: 3892097 - DNA, 25 bp, Homo sapien
tgctgtcaacggcagtgcgtttcca

SEQ ID NO: 3892098 - DNA, 25 bp, Homo sapien
atgcggtcacggcttacagcgcacc

SEQ ID NO: 3892099 - DNA, 25 bp, Homo sapien
ggcaacaacgagcaaaacaggcagg

SEQ ID NO: 3892100 - DNA, 25 bp, Homo sapien
gatgatctgtgatgcggtcacggct

SEQ ID NO: 3892101 - DNA, 25 bp, Homo sapien
cactctggtatgggctagtgaggca

SEQ ID NO: 3892102 - DNA, 25 bp, Homo sapien
ttctgacctaccttgtctgatcata

SEQ ID NO: 3892103 - DNA, 25 bp, Homo sapien
aactttttcctggtttctggagctg

SEQ ID NO: 3892104 - DNA, 25 bp, Homo sapien
ttctgccctcctttcacctatttct

SEQ ID NO: 3892105 - DNA, 25 bp, Homo sapien
ctggagctggtttctgacctacctt

SEQ ID NO: 3892106 - DNA, 25 bp, Homo sapien
ggtttagtcagtagttgatcagcgc

SEQ ID NO: 3892107 - DNA, 25 bp, Homo sapien
attttgaacctagagacagcagttg

SEQ ID NO: 3892108 - DNA, 25 bp, Homo sapien
gatcagcgcatagtgctggtttctg

SEQ ID NO: 3892109 - DNA, 25 bp, Homo sapien
ttgaacctagagacagcagttggag

SEQ ID NO: 3892110 - DNA, 25 bp, Homo sapien
cataaagttctgtagtctgccaaac

SEQ ID NO: 3892111 - DNA, 25 bp, Homo sapien
tagacttggctattttggagacccc

SEQ ID NO: 3892112 - DNA, 25 bp, Homo sapien
taccaaattctcagccctaggagac

SEQ ID NO: 3892113 - DNA, 25 bp, Homo sapien
aatgggcacaatctgggaaaacagt

SEQ ID NO: 3892114 - DNA, 25 bp, Homo sapien
gctggtagacctaataaacgatgta

SEQ ID NO: 3892115 - DNA, 25 bp, Homo sapien
tgtaagcctaatgaaagcagagctc

SEQ ID NO: 3892116 - DNA, 25 bp, Homo sapien
tgagcccatcattccttaaaagttg

SEQ ID NO: 3892117 - DNA, 25 bp, Homo sapien
gaagtcttgttcacatcggattgca

SEQ ID NO: 3892118 - DNA, 25 bp, Homo sapien
tgaatagaactaccccttatttagc

SEQ ID NO: 3892119 - DNA, 25 bp, Homo sapien
tatttagcctttacaccagcttact

SEQ ID NO: 3892120 - DNA, 25 bp, Homo sapien
taaatgattgaatggcacttgtggc

SEQ ID NO: 3892121 - DNA, 25 bp, Homo sapien
tctttgtagtactgatctaacatta

SEQ ID NO: 3892122 - DNA, 25 bp, Homo sapien
tgcaacaaaacatgtgaagagccct

SEQ ID NO: 3892123 - DNA, 25 bp, Homo sapien
gaactggtaactgactaagctggac

SEQ ID NO: 3892124 - DNA, 25 bp, Homo sapien
taagctggacccagactgaagctgc

SEQ ID NO: 3892125 - DNA, 25 bp, Homo sapien
gaagagccctactacatgtgagaaa

SEQ ID NO: 3892126 - DNA, 25 bp, Homo sapien
ctaacttgccctgatttcctttgta

SEQ ID NO: 3892127 - DNA, 25 bp, Homo sapien
tagaaccatgatctgcggaatcaag

SEQ ID NO: 3892128 - DNA, 25 bp, Homo sapien
tctgcggaatcaaggtctgctgtta

SEQ ID NO: 3892129 - DNA, 25 bp, Homo sapien
tgatttcctttgtagaaccatgatc

SEQ ID NO: 3892130 - DNA, 25 bp, Homo sapien
tagaagaggccatcaaaaggcacta

SEQ ID NO: 3892131 - DNA, 25 bp, Homo sapien
tagcagaggtagttggcattaagga

SEQ ID NO: 3892132 - DNA, 25 bp, Homo sapien
tatgcatagggctacagcttcacct

SEQ ID NO: 3892133 - DNA, 25 bp, Homo sapien
tgaagacagtgttttggaccatacc

SEQ ID NO: 3892134 - DNA, 25 bp, Homo sapien
aaattaaagacggtgctcagaaggc

SEQ ID NO: 3892135 - DNA, 25 bp, Homo sapien
ggctttatttcaaccagacaagtga

SEQ ID NO: 3892136 - DNA, 25 bp, Homo sapien
tacacaagatcatgggatctcatgc

SEQ ID NO: 3892137 - DNA, 25 bp, Homo sapien
gaaagttacccatcagtcttaatga

SEQ ID NO: 3892138 - DNA, 25 bp, Homo sapien
attttagaaactgagattgaagtac

SEQ ID NO: 3892139 - DNA, 25 bp, Homo sapien
tagatattactatctgacacctcaa

SEQ ID NO: 3892140 - DNA, 25 bp, Homo sapien
tgttgttacaaagttcctagatata

SEQ ID NO: 3892141 - DNA, 25 bp, Homo sapien
atctgacacctcaacccatgactta

SEQ ID NO: 3892142 - DNA, 25 bp, Homo sapien
cacaaagatttgctgccattcatat

SEQ ID NO: 3892143 - DNA, 25 bp, Homo sapien
agtttcaaatttcttgcacaaagat

SEQ ID NO: 3892144 - DNA, 25 bp, Homo sapien
tcaaatttcttgcacaaagatttgc

SEQ ID NO: 3892145 - DNA, 25 bp, Homo sapien
gcacaaagatttgctgccattcata

SEQ ID NO: 3892146 - DNA, 25 bp, Homo sapien
tcacgggcattttcaagagctttag

SEQ ID NO: 3892147 - DNA, 25 bp, Homo sapien
aactttgtattgagctggtcagcac

SEQ ID NO: 3892148 - DNA, 25 bp, Homo sapien
aatgaccagcgcttacatatcaggt

SEQ ID NO: 3892149 - DNA, 25 bp, Homo sapien
tttataagcgataggacaaacttgc

SEQ ID NO: 3892150 - DNA, 25 bp, Homo sapien
acagtgccccaacggctccaaaata

SEQ ID NO: 3892151 - DNA, 25 bp, Homo sapien
cagttccaacagtgccccaacggct

SEQ ID NO: 3892152 - DNA, 25 bp, Homo sapien
ccaacagtgccccaacggctccaaa

SEQ ID NO: 3892153 - DNA, 25 bp, Homo sapien
agttccaacagtgccccaacggctc

SEQ ID NO: 3892154 - DNA, 25 bp, Homo sapien
aaaatccatggcatatgccagcagc

SEQ ID NO: 3892155 - DNA, 25 bp, Homo sapien
ctcatgttccaaaaacagagctttc

SEQ ID NO: 3892156 - DNA, 25 bp, Homo sapien
cttcatggagaccatattgattctg

SEQ ID NO: 3892157 - DNA, 25 bp, Homo sapien
acagagctttcagttgtcctttgga

SEQ ID NO: 3892158 - DNA, 25 bp, Homo sapien
cagctccacccctttttgtgcctgg

SEQ ID NO: 3892159 - DNA, 25 bp, Homo sapien
ccctttttgtgcctgggactctggc

SEQ ID NO: 3892160 - DNA, 25 bp, Homo sapien
ctggctggccttggctgtagcaagc

SEQ ID NO: 3892161 - DNA, 25 bp, Homo sapien
ctctggctggccttggctgtagcaa

SEQ ID NO: 3892162 - DNA, 25 bp, Homo sapien
ttgaactccatgccacaaggcaaca

SEQ ID NO: 3892163 - DNA, 25 bp, Homo sapien
tctgtgctttgatagccctgtacaa

SEQ ID NO: 3892164 - DNA, 25 bp, Homo sapien
ctgtaaagaagctgaaagcagagag

SEQ ID NO: 3892165 - DNA, 25 bp, Homo sapien
ggaatctcgcttttctttactcatc

SEQ ID NO: 3892166 - DNA, 25 bp, Homo sapien
tgatggtgaccaatgtggcccgggc

SEQ ID NO: 3892167 - DNA, 25 bp, Homo sapien
ggcgaggtcttccttgctgatggaa

SEQ ID NO: 3892168 - DNA, 25 bp, Homo sapien
cgcacatccgagcaatggagccaat

SEQ ID NO: 3892169 - DNA, 25 bp, Homo sapien
tagtctcctccgtaaatgtccttca

SEQ ID NO: 3892170 - DNA, 25 bp, Homo sapien
tccttgaaggccaaatcgttcatag

SEQ ID NO: 3892171 - DNA, 25 bp, Homo sapien
ttatcaacattggtgctgtcgcctt

SEQ ID NO: 3892172 - DNA, 25 bp, Homo sapien
gatgctacagcagatccttgaaggc

SEQ ID NO: 3892173 - DNA, 25 bp, Homo sapien
ctcacaaccagtcagcaagcaacat

SEQ ID NO: 3892174 - DNA, 25 bp, Homo sapien
gcttcttcaaaggtctcacaaccag

SEQ ID NO: 3892175 - DNA, 25 bp, Homo sapien
aaaggtctcacaaccagtcagcaag

SEQ ID NO: 3892176 - DNA, 25 bp, Homo sapien
acaaccagtcagcaagcaacatagg

SEQ ID NO: 3892177 - DNA, 25 bp, Homo sapien
gatctgcggagcctccaagtttaag

SEQ ID NO: 3892178 - DNA, 25 bp, Homo sapien
cttctcgtggtagcccctgaaaggg

SEQ ID NO: 3892179 - DNA, 25 bp, Homo sapien
tatagggaagcttgaacatccagac

SEQ ID NO: 3892180 - DNA, 25 bp, Homo sapien
taacctgcaggcttcggtagcacct

SEQ ID NO: 3892181 - DNA, 25 bp, Homo sapien
ggacacaagtaggtttcaattagaa

SEQ ID NO: 3892182 - DNA, 25 bp, Homo sapien
tacatgcatgccagggtttctcaac

SEQ ID NO: 3892183 - DNA, 25 bp, Homo sapien
aaacaaagcctatactctggacaca

SEQ ID NO: 3892184 - DNA, 25 bp, Homo sapien
cagcagcattagtgatatttgaggc

SEQ ID NO: 3892185 - DNA, 25 bp, Homo sapien
ttactataaactggtcatcaagaaa

SEQ ID NO: 3892186 - DNA, 25 bp, Homo sapien
aaagaggtctgggttcaagcacaag

SEQ ID NO: 3892187 - DNA, 25 bp, Homo sapien
cttttactataaactggtcatcaag

SEQ ID NO: 3892188 - DNA, 25 bp, Homo sapien
ggttcaagcacaagcagaaacatgt

SEQ ID NO: 3892189 - DNA, 25 bp, Homo sapien
gagtcgacataaagcaggccctgaa

SEQ ID NO: 3892190 - DNA, 25 bp, Homo sapien
tccttggagtacacggctagaatgc

SEQ ID NO: 3892191 - DNA, 25 bp, Homo sapien
gttaaccagcaacatagggtatggg

SEQ ID NO: 3892192 - DNA, 25 bp, Homo sapien
tatgggttatcaaggcagtacggct

SEQ ID NO: 3892193 - DNA, 25 bp, Homo sapien
acagatagggcatccttgagggacc

SEQ ID NO: 3892194 - DNA, 25 bp, Homo sapien
tgagactcagcctggatacagaagg

SEQ ID NO: 3892195 - DNA, 25 bp, Homo sapien
gcttcaaaagcctgtccaaaggagg

SEQ ID NO: 3892196 - DNA, 25 bp, Homo sapien
ttagaaccttgagaaatacacctgc

SEQ ID NO: 3892197 - DNA, 25 bp, Homo sapien
gctgcccatctgaatgaacctgtgc

SEQ ID NO: 3892198 - DNA, 25 bp, Homo sapien
ggctgtaatatccttcggctcgaaa

SEQ ID NO: 3892199 - DNA, 25 bp, Homo sapien
caggtggacgtctcggatcccagtt

SEQ ID NO: 3892200 - DNA, 25 bp, Homo sapien
tcttcgaatttgaaagccccgcctc

SEQ ID NO: 3892201 - DNA, 25 bp, Homo sapien
tgaaatgtattccagcaggctagaa

SEQ ID NO: 3892202 - DNA, 25 bp, Homo sapien
tatttacaggagtggcagaatgagc

SEQ ID NO: 3892203 - DNA, 25 bp, Homo sapien
gaaatgcctagaagtgtaaacaact

SEQ ID NO: 3892204 - DNA, 25 bp, Homo sapien
tgtatagttggtggctagagatcca

SEQ ID NO: 3892205 - DNA, 25 bp, Homo sapien
tgttattcagaaccctggttccttc

SEQ ID NO: 3892206 - DNA, 25 bp, Homo sapien
ctcgcccagacacgggctgatcata

SEQ ID NO: 3892207 - DNA, 25 bp, Homo sapien
tcacaaccttgtgtgacaataatct

SEQ ID NO: 3892208 - DNA, 25 bp, Homo sapien
tcctctcgcccagacacgggctgat

SEQ ID NO: 3892209 - DNA, 25 bp, Homo sapien
caaccttgtgtgacaataatctttc

SEQ ID NO: 3892210 - DNA, 25 bp, Homo sapien
tgtcattctggtagcaccatgaagt

SEQ ID NO: 3892211 - DNA, 25 bp, Homo sapien
tgaagtgtattcttagcttggatct

SEQ ID NO: 3892212 - DNA, 25 bp, Homo sapien
atgtcattctggtagcaccatgaag

SEQ ID NO: 3892213 - DNA, 25 bp, Homo sapien
agcaccatgaagtgtattcttagct

SEQ ID NO: 3892214 - DNA, 25 bp, Homo sapien
tatttctcaccaagaagctgtcagt

SEQ ID NO: 3892215 - DNA, 25 bp, Homo sapien
tcctatttctcaccaagaagctgtc

SEQ ID NO: 3892216 - DNA, 25 bp, Homo sapien
caagaagctgtcagttctgcccaat

SEQ ID NO: 3892217 - DNA, 25 bp, Homo sapien
tctcaccaagaagctgtcagttctg

SEQ ID NO: 3892218 - DNA, 25 bp, Homo sapien
acaggcgtgaggtcctcagctttaa

SEQ ID NO: 3892219 - DNA, 25 bp, Homo sapien
tttaattatgccactttcttcatca

SEQ ID NO: 3892220 - DNA, 25 bp, Homo sapien
cagctttaattatgccactttcttc

SEQ ID NO: 3892221 - DNA, 25 bp, Homo sapien
aggtcctcagctttaattatgccac

SEQ ID NO: 3892222 - DNA, 25 bp, Homo sapien
cagattcagtgtaggatcaaggcca

SEQ ID NO: 3892223 - DNA, 25 bp, Homo sapien
tgcccaggctagctacaattcagaa

SEQ ID NO: 3892224 - DNA, 25 bp, Homo sapien
tgccagcatcactctcagacagggt

SEQ ID NO: 3892225 - DNA, 25 bp, Homo sapien
gaatctattgctctctctggtcgcc

SEQ ID NO: 3892226 - DNA, 25 bp, Homo sapien
gaaatcctggtatttcagagtcttg

SEQ ID NO: 3892227 - DNA, 25 bp, Homo sapien
tactctgaaatccaatctccgaaag

SEQ ID NO: 3892228 - DNA, 25 bp, Homo sapien
cattgaggaggtgatatccgatcag

SEQ ID NO: 3892229 - DNA, 25 bp, Homo sapien
tctccgaaagattcccagtcagggc

SEQ ID NO: 3892230 - DNA, 25 bp, Homo sapien
gcacatacaagagcttccaggactg

SEQ ID NO: 3892231 - DNA, 25 bp, Homo sapien
acaaacattgttcacttaggctact

SEQ ID NO: 3892232 - DNA, 25 bp, Homo sapien
tcttcagtaatcaattatacttagc

SEQ ID NO: 3892233 - DNA, 25 bp, Homo sapien
ttacaaacattgttcacttaggcta

SEQ ID NO: 3892234 - DNA, 25 bp, Homo sapien
agtccaagatcgagggactgcatct

SEQ ID NO: 3892235 - DNA, 25 bp, Homo sapien
gagaagtccaagatcgagggactgc

SEQ ID NO: 3892236 - DNA, 25 bp, Homo sapien
catggcagaaaggcaaaagagcatg

SEQ ID NO: 3892237 - DNA, 25 bp, Homo sapien
catcccatggcagaaaggcaaaaga

SEQ ID NO: 3892238 - DNA, 25 bp, Homo sapien
gagtcacccacagtcatgtcaaagg

SEQ ID NO: 3892239 - DNA, 25 bp, Homo sapien
tcaggtgctagattacaaccttaca

SEQ ID NO: 3892240 - DNA, 25 bp, Homo sapien
tatatcgaacagcataacctctatg

SEQ ID NO: 3892241 - DNA, 25 bp, Homo sapien
aagtgaaggtgttatttgccaaaca

SEQ ID NO: 3892242 - DNA, 25 bp, Homo sapien
agtaaccagttgaatgagcttcagt

SEQ ID NO: 3892243 - DNA, 25 bp, Homo sapien
caagaaaaaccagctgtaaactcga

SEQ ID NO: 3892244 - DNA, 25 bp, Homo sapien
aaagaagtaaccagttgaatgagct

SEQ ID NO: 3892245 - DNA, 25 bp, Homo sapien
agaagtaaccagttgaatgagcttc

SEQ ID NO: 3892246 - DNA, 25 bp, Homo sapien
ctacaaatttacatcccacagcgtc

SEQ ID NO: 3892247 - DNA, 25 bp, Homo sapien
tctgtgattcaaagggcaggcaacc

SEQ ID NO: 3892248 - DNA, 25 bp, Homo sapien
tctcattggccgtgaagaaacagct

SEQ ID NO: 3892249 - DNA, 25 bp, Homo sapien
tcattggtccacatagttccggccc

SEQ ID NO: 3892250 - DNA, 25 bp, Homo sapien
caccaattagaagggcggacagagc

SEQ ID NO: 3892251 - DNA, 25 bp, Homo sapien
caggcaaagacctgtagtgcttgat

SEQ ID NO: 3892252 - DNA, 25 bp, Homo sapien
gctcaagcttcgtgtccaatcctcg

SEQ ID NO: 3892253 - DNA, 25 bp, Homo sapien
cgttctactgatagaagcgagcaaa

SEQ ID NO: 3892254 - DNA, 25 bp, Homo sapien
aaagacctgtagtgcttgatgtccc

SEQ ID NO: 3892255 - DNA, 25 bp, Homo sapien
cgggaacctactctgtgcagtccct

SEQ ID NO: 3892256 - DNA, 25 bp, Homo sapien
aatcagtcccgggaacctactctgt

SEQ ID NO: 3892257 - DNA, 25 bp, Homo sapien
gaacctactctgtgcagtccctcga

SEQ ID NO: 3892258 - DNA, 25 bp, Homo sapien
agtcccgggaacctactctgtgcag

SEQ ID NO: 3892259 - DNA, 25 bp, Homo sapien
gccccgcacgctgcgtctgccttgc

SEQ ID NO: 3892260 - DNA, 25 bp, Homo sapien
ccgcacgctgcgtctgccttgcgcc

SEQ ID NO: 3892261 - DNA, 25 bp, Homo sapien
ccgggccccgcacgctgcgtctgcc

SEQ ID NO: 3892262 - DNA, 25 bp, Homo sapien
gggccccgcacgctgcgtctgcctt

SEQ ID NO: 3892263 - DNA, 25 bp, Homo sapien
ccggcatttcttggccggggagtca

SEQ ID NO: 3892264 - DNA, 25 bp, Homo sapien
ggatggaagccgttgtgcagcagcc

SEQ ID NO: 3892265 - DNA, 25 bp, Homo sapien
gtcgctgccgcccactggaccccgg

SEQ ID NO: 3892266 - DNA, 25 bp, Homo sapien
ttctttctccccgagtccatcctcc

SEQ ID NO: 3892267 - DNA, 25 bp, Homo sapien
ggcttccgattcagcagccgcagag

SEQ ID NO: 3892268 - DNA, 25 bp, Homo sapien
ctcaggcggcctcgctggaggtcat

SEQ ID NO: 3892269 - DNA, 25 bp, Homo sapien
tcattctccggcgtctttatttccc

SEQ ID NO: 3892270 - DNA, 25 bp, Homo sapien
tggagagtgcgggaccgagcgctcc

SEQ ID NO: 3892271 - DNA, 25 bp, Homo sapien
tggggatggcgaacccggcgctcct

SEQ ID NO: 3892272 - DNA, 25 bp, Homo sapien
ctggggatggcgaacccggcgctcc

SEQ ID NO: 3892273 - DNA, 25 bp, Homo sapien
ggatggcgaacccggcgctcctccc

SEQ ID NO: 3892274 - DNA, 25 bp, Homo sapien
ggggatggcgaacccggcgctcctc

SEQ ID NO: 3892275 - DNA, 25 bp, Homo sapien
gccggcctggagcacgccagccccg

SEQ ID NO: 3892276 - DNA, 25 bp, Homo sapien
cggcgccggcctggagcacgccagc

SEQ ID NO: 3892277 - DNA, 25 bp, Homo sapien
ccggcctggagcacgccagccccgg

SEQ ID NO: 3892278 - DNA, 25 bp, Homo sapien
gcgccggcctggagcacgccagccc

SEQ ID NO: 3892279 - DNA, 25 bp, Homo sapien
gccgcccgccttcccctgatcccca

SEQ ID NO: 3892280 - DNA, 25 bp, Homo sapien
cccctgatccccaggccgcgcgact

SEQ ID NO: 3892281 - DNA, 25 bp, Homo sapien
cgcgcacccccagccggggctcccg

SEQ ID NO: 3892282 - DNA, 25 bp, Homo sapien
gccttcccctgatccccaggccgcg

SEQ ID NO: 3892283 - DNA, 25 bp, Homo sapien
tcccagactggtccccgccactgag

SEQ ID NO: 3892284 - DNA, 25 bp, Homo sapien
ccaccgccaccgacgagtttcaaca

SEQ ID NO: 3892285 - DNA, 25 bp, Homo sapien
caccgccaccgacgagtttcaacat

SEQ ID NO: 3892286 - DNA, 25 bp, Homo sapien
cctcgcctcccagactggtccccgc

SEQ ID NO: 3892287 - DNA, 25 bp, Homo sapien
tgcctgtgcgtttggttaagtgacc

SEQ ID NO: 3892288 - DNA, 25 bp, Homo sapien
tgtatggcgatgtgaaaaccagatg

SEQ ID NO: 3892289 - DNA, 25 bp, Homo sapien
gagacagcgaaaggagcgaaccgtt

SEQ ID NO: 3892290 - DNA, 25 bp, Homo sapien
tccccagtgagcaagatacctttgc

SEQ ID NO: 3892291 - DNA, 25 bp, Homo sapien
agcatctagggcttgcatctggcaa

SEQ ID NO: 3892292 - DNA, 25 bp, Homo sapien
gggccactggagcactctggtctat

SEQ ID NO: 3892293 - DNA, 25 bp, Homo sapien
gcagagccttacctagaatcagagc

SEQ ID NO: 3892294 - DNA, 25 bp, Homo sapien
tgcaattaatctacagaggagtcag

SEQ ID NO: 3892295 - DNA, 25 bp, Homo sapien
ctgccttcaattccttaaacaacat

SEQ ID NO: 3892296 - DNA, 25 bp, Homo sapien
cgcagtactggacacaaaatgggag

SEQ ID NO: 3892297 - DNA, 25 bp, Homo sapien
aagaacggaatctttgaatccccag

SEQ ID NO: 3892298 - DNA, 25 bp, Homo sapien
caggactcaacgcagtactggacac

SEQ ID NO: 3892299 - DNA, 25 bp, Homo sapien
gaagcacttctgataggtctcagct

SEQ ID NO: 3892300 - DNA, 25 bp, Homo sapien
gccaggataagccttcagctgccat

SEQ ID NO: 3892301 - DNA, 25 bp, Homo sapien
tacacgtgactgcatcaaagtcaat

SEQ ID NO: 3892302 - DNA, 25 bp, Homo sapien
tgaagcagctgaagaaaactctgcc

SEQ ID NO: 3892303 - DNA, 25 bp, Homo sapien
gcatcaaagtcaatgccactggtga

SEQ ID NO: 3892304 - DNA, 25 bp, Homo sapien
ctggctccactctttcggaattctc

SEQ ID NO: 3892305 - DNA, 25 bp, Homo sapien
ggctccactctttcggaattctctt

SEQ ID NO: 3892306 - DNA, 25 bp, Homo sapien
cactctttcggaattctcttcattg

SEQ ID NO: 3892307 - DNA, 25 bp, Homo sapien
tccactctttcggaattctcttcat

SEQ ID NO: 3892308 - DNA, 25 bp, Homo sapien
gctaattcggttctgccagttaccc

SEQ ID NO: 3892309 - DNA, 25 bp, Homo sapien
tattaggctccttgccactagagtt

SEQ ID NO: 3892310 - DNA, 25 bp, Homo sapien
ggctccttgccactagagttctggg

SEQ ID NO: 3892311 - DNA, 25 bp, Homo sapien
aagttgggtctgctaattcggttct

SEQ ID NO: 3892312 - DNA, 25 bp, Homo sapien
gagggaggaaatgaggcaaaggcca

SEQ ID NO: 3892313 - DNA, 25 bp, Homo sapien
ctggagggaggaaatgaggcaaagg

SEQ ID NO: 3892314 - DNA, 25 bp, Homo sapien
agggaggaaatgaggcaaaggccat

SEQ ID NO: 3892315 - DNA, 25 bp, Homo sapien
ggagggaggaaatgaggcaaaggcc

SEQ ID NO: 3892316 - DNA, 25 bp, Homo sapien
tgtatctgggatctagttgttgtgg

SEQ ID NO: 3892317 - DNA, 25 bp, Homo sapien
ctttcttgagataaggaattcttca

SEQ ID NO: 3892318 - DNA, 25 bp, Homo sapien
gagataaggaattcttcacagtgtg

SEQ ID NO: 3892319 - DNA, 25 bp, Homo sapien
ttcttcacagtgtgttgtatctggg

SEQ ID NO: 3892320 - DNA, 25 bp, Homo sapien
aaaaaagattagtggatgtcctatc

SEQ ID NO: 3892321 - DNA, 25 bp, Homo sapien
tgtcctatctagcttatacttctgg

SEQ ID NO: 3892322 - DNA, 25 bp, Homo sapien
tctaccacttactggttatgggacc

SEQ ID NO: 3892323 - DNA, 25 bp, Homo sapien
cagattcagttagacttgtgttcac

SEQ ID NO: 3892324 - DNA, 25 bp, Homo sapien
gaggcagtcccgaatcaatattcag

SEQ ID NO: 3892325 - DNA, 25 bp, Homo sapien
ggtatgtcctacctcgcctctgtaa

SEQ ID NO: 3892326 - DNA, 25 bp, Homo sapien
tacaagccgggagtactcagtgggc

SEQ ID NO: 3892327 - DNA, 25 bp, Homo sapien
gagaccagcggttcatgttcagggc

SEQ ID NO: 3892328 - DNA, 25 bp, Homo sapien
ttagcaactgtgaagatggcatcct

SEQ ID NO: 3892329 - DNA, 25 bp, Homo sapien
cactgcctatgaaaccaggttggag

SEQ ID NO: 3892330 - DNA, 25 bp, Homo sapien
tgaagcggcattaccacagagagct

SEQ ID NO: 3892331 - DNA, 25 bp, Homo sapien
cacggcgtgtagaattccttggtca

SEQ ID NO: 3892332 - DNA, 25 bp, Homo sapien
tcacgaccaacaaaccagtcagtgg

SEQ ID NO: 3892333 - DNA, 25 bp, Homo sapien
tatgcacaccttttaaacaccttgg

SEQ ID NO: 3892334 - DNA, 25 bp, Homo sapien
caggagaagccttttcaccacagat

SEQ ID NO: 3892335 - DNA, 25 bp, Homo sapien
taggaacatagcaccagtacaaagc

SEQ ID NO: 3892336 - DNA, 25 bp, Homo sapien
taagtcatatatcgtggtggttccc

SEQ ID NO: 3892337 - DNA, 25 bp, Homo sapien
tattgtctgccaagatgatttgagc

SEQ ID NO: 3892338 - DNA, 25 bp, Homo sapien
gacacagtcggtagttgagctccaa

SEQ ID NO: 3892339 - DNA, 25 bp, Homo sapien
cagaggcatgtgtgacttacggata

SEQ ID NO: 3892340 - DNA, 25 bp, Homo sapien
tttggtattatagacataagactca

SEQ ID NO: 3892341 - DNA, 25 bp, Homo sapien
gatttgcactttgttaagattttgg

SEQ ID NO: 3892342 - DNA, 25 bp, Homo sapien
taaacttctacatcctgttgtctca

SEQ ID NO: 3892343 - DNA, 25 bp, Homo sapien
cactcttccttccatacctctgctg

SEQ ID NO: 3892344 - DNA, 25 bp, Homo sapien
taaagaggtccaacaaattcagtca

SEQ ID NO: 3892345 - DNA, 25 bp, Homo sapien
tgcacacgaaaatagacgaactacg

SEQ ID NO: 3892346 - DNA, 25 bp, Homo sapien
tgagatagaaactgctacaagaagc

SEQ ID NO: 3892347 - DNA, 25 bp, Homo sapien
caatctcagggatctgtcaaatggt

SEQ ID NO: 3892348 - DNA, 25 bp, Homo sapien
ttggcaagtattggcattcacggga

SEQ ID NO: 3892349 - DNA, 25 bp, Homo sapien
cgaaggcactcgagggccctgtgct

SEQ ID NO: 3892350 - DNA, 25 bp, Homo sapien
aagaagcagatcctggcaaagtcag

SEQ ID NO: 3892351 - DNA, 25 bp, Homo sapien
aaaaagcagtgcctgagcgggcacc

SEQ ID NO: 3892352 - DNA, 25 bp, Homo sapien
gcagcccatagtggagacacatgag

SEQ ID NO: 3892353 - DNA, 25 bp, Homo sapien
gcacctggaaccttgtgagtactga

SEQ ID NO: 3892354 - DNA, 25 bp, Homo sapien
tttggattgattctgcctggcacct

SEQ ID NO: 3892355 - DNA, 25 bp, Homo sapien
tgagtactgagcatggaggactgca

SEQ ID NO: 3892356 - DNA, 25 bp, Homo sapien
tgtcatcacagagagtaaactatcc

SEQ ID NO: 3892357 - DNA, 25 bp, Homo sapien
tatagagtccaggacctagcctgca

SEQ ID NO: 3892358 - DNA, 25 bp, Homo sapien
gaattaggtttgacatctagcctcc

SEQ ID NO: 3892359 - DNA, 25 bp, Homo sapien
taaaagttagccagacttcgcggtg

SEQ ID NO: 3892360 - DNA, 25 bp, Homo sapien
gtgagagatcctgagagttcctgtg

SEQ ID NO: 3892361 - DNA, 25 bp, Homo sapien
gataaaaatgagctgcttctgggag

SEQ ID NO: 3892362 - DNA, 25 bp, Homo sapien
aagatataccccctttcctgcttca

SEQ ID NO: 3892363 - DNA, 25 bp, Homo sapien
agagatcctgagagttcctgtgact

SEQ ID NO: 3892364 - DNA, 25 bp, Homo sapien
ctagagaaatctataacatccgact

SEQ ID NO: 3892365 - DNA, 25 bp, Homo sapien
ttttgcccacgcactggtgtatcca

SEQ ID NO: 3892366 - DNA, 25 bp, Homo sapien
ccgacttttgcccacgcactggtgt

SEQ ID NO: 3892367 - DNA, 25 bp, Homo sapien
tataacatccgacttttgcccacgc

SEQ ID NO: 3892368 - DNA, 25 bp, Homo sapien
aatctgctgatcagggtcacagcac

SEQ ID NO: 3892369 - DNA, 25 bp, Homo sapien
ccttgaatctgctgatcagggtcac

SEQ ID NO: 3892370 - DNA, 25 bp, Homo sapien
gtacctataggcctgtgaatgatgc

SEQ ID NO: 3892371 - DNA, 25 bp, Homo sapien
tataggcctgtgaatgatgctcagc

SEQ ID NO: 3892372 - DNA, 25 bp, Homo sapien
acattgcagtcttcaccaagtgagg

SEQ ID NO: 3892373 - DNA, 25 bp, Homo sapien
cactgggagataaacacctggctgt

SEQ ID NO: 3892374 - DNA, 25 bp, Homo sapien
gaagatgctattggcctgaatggac

SEQ ID NO: 3892375 - DNA, 25 bp, Homo sapien
tagagaccgtttcactgaatcctgg

SEQ ID NO: 3892376 - DNA, 25 bp, Homo sapien
caccactgtgggtcagatcagctga

SEQ ID NO: 3892377 - DNA, 25 bp, Homo sapien
taggcgatcgctgcttcatcacact

SEQ ID NO: 3892378 - DNA, 25 bp, Homo sapien
caggttgctgaaacgctgctgctcg

SEQ ID NO: 3892379 - DNA, 25 bp, Homo sapien
gaacccagaagcaggtaggcgatcg

SEQ ID NO: 3892380 - DNA, 25 bp, Homo sapien
tactgaagatcaaggactctctcct

SEQ ID NO: 3892381 - DNA, 25 bp, Homo sapien
ggaggtttccaatatctagggacat

SEQ ID NO: 3892382 - DNA, 25 bp, Homo sapien
cagatctattagtcaggaggtttcc

SEQ ID NO: 3892383 - DNA, 25 bp, Homo sapien
gaccctacggctgctaacttcctgg

SEQ ID NO: 3892384 - DNA, 25 bp, Homo sapien
gcagccagacgagagtggaagattt

SEQ ID NO: 3892385 - DNA, 25 bp, Homo sapien
cttcattaaaggagtatgggttgag

SEQ ID NO: 3892386 - DNA, 25 bp, Homo sapien
gtcctgcagccagacgagagtggaa

SEQ ID NO: 3892387 - DNA, 25 bp, Homo sapien
gagtatgggttgagtcctgcagcca

SEQ ID NO: 3892388 - DNA, 25 bp, Homo sapien
tgggaagggtagtgaagccaacctg

SEQ ID NO: 3892389 - DNA, 25 bp, Homo sapien
aacctggctttcaaaggctgtaagg

SEQ ID NO: 3892390 - DNA, 25 bp, Homo sapien
ggtagtgaagccaacctggctttca

SEQ ID NO: 3892391 - DNA, 25 bp, Homo sapien
gaagggtagtgaagccaacctggct

SEQ ID NO: 3892392 - DNA, 25 bp, Homo sapien
tgactggatggacctttgcagcact

SEQ ID NO: 3892393 - DNA, 25 bp, Homo sapien
gcacaggtgtcatcctacaagcagg

SEQ ID NO: 3892394 - DNA, 25 bp, Homo sapien
ccttcactgtgggaagtagcttgaa

SEQ ID NO: 3892395 - DNA, 25 bp, Homo sapien
gacaacatgctcaacgtttcaggaa

SEQ ID NO: 3892396 - DNA, 25 bp, Homo sapien
acttttttcagtggatggtgcggga

SEQ ID NO: 3892397 - DNA, 25 bp, Homo sapien
gatgtgcagtctaatcatcatctgc

SEQ ID NO: 3892398 - DNA, 25 bp, Homo sapien
tgcaatatcctatgccagtgcccca

SEQ ID NO: 3892399 - DNA, 25 bp, Homo sapien
gctgcttaagagttccaaaagtgct

SEQ ID NO: 3892400 - DNA, 25 bp, Homo sapien
gtgccccatcaggacattacctttg

SEQ ID NO: 3892401 - DNA, 25 bp, Homo sapien
caaaacttggtggttagcagtgggc

SEQ ID NO: 3892402 - DNA, 25 bp, Homo sapien
taacaaacttagtgagtgctcagag

SEQ ID NO: 3892403 - DNA, 25 bp, Homo sapien
tgtttggcattaacaagcagcctct

SEQ ID NO: 3892404 - DNA, 25 bp, Homo sapien
tacccatggaattgtagcagtcact

SEQ ID NO: 3892405 - DNA, 25 bp, Homo sapien
agctgactgatccagggttagattc

SEQ ID NO: 3892406 - DNA, 25 bp, Homo sapien
ctgactgatccagggttagattcct

SEQ ID NO: 3892407 - DNA, 25 bp, Homo sapien
cgaggggatggccttcggtggctgt

SEQ ID NO: 3892408 - DNA, 25 bp, Homo sapien
gatggccttcggtggctgtgtatct

SEQ ID NO: 3892409 - DNA, 25 bp, Homo sapien
tgctactgagtagcttgtaagtctt

SEQ ID NO: 3892410 - DNA, 25 bp, Homo sapien
gagtagcttgtaagtctttggcaga

SEQ ID NO: 3892411 - DNA, 25 bp, Homo sapien
taatctagacttggctgctactgag

SEQ ID NO: 3892412 - DNA, 25 bp, Homo sapien
taatacctggtggatgacgcattca

SEQ ID NO: 3892413 - DNA, 25 bp, Homo sapien
tgtttcctgctgagtttccttgcca

SEQ ID NO: 3892414 - DNA, 25 bp, Homo sapien
cttgccaaaataattgacttgcaac

SEQ ID NO: 3892415 - DNA, 25 bp, Homo sapien
ttcctgctgagtttccttgccaaaa

SEQ ID NO: 3892416 - DNA, 25 bp, Homo sapien
tgctgagtttccttgccaaaataat

SEQ ID NO: 3892417 - DNA, 25 bp, Homo sapien
taaatagctgaagtgctaggcccat

SEQ ID NO: 3892418 - DNA, 25 bp, Homo sapien
cacagattttaaagggtcagtgtcc

SEQ ID NO: 3892419 - DNA, 25 bp, Homo sapien
tggttgagttcgtatggtaattgca

SEQ ID NO: 3892420 - DNA, 25 bp, Homo sapien
aaagtgacccaagaccctctgttct

SEQ ID NO: 3892421 - DNA, 25 bp, Homo sapien
tacccttggtcataggacccatcag

SEQ ID NO: 3892422 - DNA, 25 bp, Homo sapien
gttgtgtccatttcctacgtgaggg

SEQ ID NO: 3892423 - DNA, 25 bp, Homo sapien
gaggattggctgtttgatttcaaaa

SEQ ID NO: 3892424 - DNA, 25 bp, Homo sapien
aatggcatcaagcttaacggactgt

SEQ ID NO: 3892425 - DNA, 25 bp, Homo sapien
tctttttccacaggtgactaaagat

SEQ ID NO: 3892426 - DNA, 25 bp, Homo sapien
aaagatcctgtttggtttgacccat

SEQ ID NO: 3892427 - DNA, 25 bp, Homo sapien
tttccacaggtgactaaagatcctg

SEQ ID NO: 3892428 - DNA, 25 bp, Homo sapien
ggtttgacccattctatcccctcta

SEQ ID NO: 3892429 - DNA, 25 bp, Homo sapien
gcttggctgggtttctcgttataaa

SEQ ID NO: 3892430 - DNA, 25 bp, Homo sapien
ggaatgtgccaactcgatacaagct

SEQ ID NO: 3892431 - DNA, 25 bp, Homo sapien
ttgagattattcacactgagaagca

SEQ ID NO: 3892432 - DNA, 25 bp, Homo sapien
tgtactgttctaatgactgcagcgt

SEQ ID NO: 3892433 - DNA, 25 bp, Homo sapien
acacagccttcagcctcagcatgac

SEQ ID NO: 3892434 - DNA, 25 bp, Homo sapien
agccttcagcctcagcatgacctct

SEQ ID NO: 3892435 - DNA, 25 bp, Homo sapien
tcagcctcagcatgacctctccact

SEQ ID NO: 3892436 - DNA, 25 bp, Homo sapien
cacacagccttcagcctcagcatga

SEQ ID NO: 3892437 - DNA, 25 bp, Homo sapien
tattgtttgcaactgggatggattc

SEQ ID NO: 3892438 - DNA, 25 bp, Homo sapien
gcagcatgggcaatgggagttgaag

SEQ ID NO: 3892439 - DNA, 25 bp, Homo sapien
caatgggagttgaagtattgtttgc

SEQ ID NO: 3892440 - DNA, 25 bp, Homo sapien
aaatctttcaacataggtaggggtg

SEQ ID NO: 3892441 - DNA, 25 bp, Homo sapien
taatgttgtgattctgtgttcaaac

SEQ ID NO: 3892442 - DNA, 25 bp, Homo sapien
aaacatgcttatgactattggcagg

SEQ ID NO: 3892443 - DNA, 25 bp, Homo sapien
ttcaaacatgcttatgactattggc

SEQ ID NO: 3892444 - DNA, 25 bp, Homo sapien
tggatccagtcttaatgttgtgatt

SEQ ID NO: 3892445 - DNA, 25 bp, Homo sapien
atgccagccttgccttactcccctg

SEQ ID NO: 3892446 - DNA, 25 bp, Homo sapien
gccagccttgccttactcccctggt

SEQ ID NO: 3892447 - DNA, 25 bp, Homo sapien
ccagccttgccttactcccctggtg

SEQ ID NO: 3892448 - DNA, 25 bp, Homo sapien
tgccagccttgccttactcccctgg

SEQ ID NO: 3892449 - DNA, 25 bp, Homo sapien
tgttacaaacagatgtcccagttgg

SEQ ID NO: 3892450 - DNA, 25 bp, Homo sapien
tcataattttgggattacatacccc

SEQ ID NO: 3892451 - DNA, 25 bp, Homo sapien
ccatttttagtttgcatggagtcaa

SEQ ID NO: 3892452 - DNA, 25 bp, Homo sapien
caaagttgcttgttaagttggcaac

SEQ ID NO: 3892453 - DNA, 25 bp, Homo sapien
ttatgctaggcccactgggctctct

SEQ ID NO: 3892454 - DNA, 25 bp, Homo sapien
acagccaagactgactttgtgtttg

SEQ ID NO: 3892455 - DNA, 25 bp, Homo sapien
gacattgacacacagtgcttttctg

SEQ ID NO: 3892456 - DNA, 25 bp, Homo sapien
gactgactttgtgtttgtcaaggac

SEQ ID NO: 3892457 - DNA, 25 bp, Homo sapien
tccaactgtgaactccatgagagtg

SEQ ID NO: 3892458 - DNA, 25 bp, Homo sapien
gagtgtcagaggcatgtgcatgtca

SEQ ID NO: 3892459 - DNA, 25 bp, Homo sapien
cagatagcatatctccaaagatgcc

SEQ ID NO: 3892460 - DNA, 25 bp, Homo sapien
tgaatctccaaagctgaacctgcag

SEQ ID NO: 3892461 - DNA, 25 bp, Homo sapien
gaaccagaaatggaacccaagcaca

SEQ ID NO: 3892462 - DNA, 25 bp, Homo sapien
caccgcttgcatgtaactcccagag

SEQ ID NO: 3892463 - DNA, 25 bp, Homo sapien
taaatgcactctttgtgggatgtgg

SEQ ID NO: 3892464 - DNA, 25 bp, Homo sapien
aagacatcgaatgcttggctgtccg

SEQ ID NO: 3892465 - DNA, 25 bp, Homo sapien
aaaagtcatgttgatgcccaaaaag

SEQ ID NO: 3892466 - DNA, 25 bp, Homo sapien
tcctttgttggtagatcgagtgtcc

SEQ ID NO: 3892467 - DNA, 25 bp, Homo sapien
ttactagctgagcatcactaatctg

SEQ ID NO: 3892468 - DNA, 25 bp, Homo sapien
cagtaatattactagctgagcatca

SEQ ID NO: 3892469 - DNA, 25 bp, Homo sapien
gattgtacccattcctacataaggc

SEQ ID NO: 3892470 - DNA, 25 bp, Homo sapien
aaggcatacggagctacttttaggg

SEQ ID NO: 3892471 - DNA, 25 bp, Homo sapien
aagctgtgccttcttattgtcaaaa

SEQ ID NO: 3892472 - DNA, 25 bp, Homo sapien
ggatagggttcaaatctatgctgct

SEQ ID NO: 3892473 - DNA, 25 bp, Homo sapien
gtggccttgcctatggctaataggt

SEQ ID NO: 3892474 - DNA, 25 bp, Homo sapien
tgatatcgagggtattgggctgctt

SEQ ID NO: 3892475 - DNA, 25 bp, Homo sapien
ccttgcctatggctaataggtcggg

SEQ ID NO: 3892476 - DNA, 25 bp, Homo sapien
gggtgatatcgagggtattgggctg

SEQ ID NO: 3892477 - DNA, 25 bp, Homo sapien
gcctcacggaacctagcatgctggt

SEQ ID NO: 3892478 - DNA, 25 bp, Homo sapien
tcaacttcaggcctcacggaaccta

SEQ ID NO: 3892479 - DNA, 25 bp, Homo sapien
gctggttccttgtataaccccctca

SEQ ID NO: 3892480 - DNA, 25 bp, Homo sapien
catgctggttccttgtataaccccc

SEQ ID NO: 3892481 - DNA, 25 bp, Homo sapien
catttctgtgcactctccttccaac

SEQ ID NO: 3892482 - DNA, 25 bp, Homo sapien
tttcctgccctaatactcaggaagt

SEQ ID NO: 3892483 - DNA, 25 bp, Homo sapien
cctgccctaatactcaggaagttag

SEQ ID NO: 3892484 - DNA, 25 bp, Homo sapien
tctttcctgccctaatactcaggaa

SEQ ID NO: 3892485 - DNA, 25 bp, Homo sapien
gccctaatactcaggaagttagttc

SEQ ID NO: 3892486 - DNA, 25 bp, Homo sapien
gtccttcttggacaggggagtcatt

SEQ ID NO: 3892487 - DNA, 25 bp, Homo sapien
tcatttttatcataagatgacagag

SEQ ID NO: 3892488 - DNA, 25 bp, Homo sapien
ctatgtctcttgtccttcttggaca

SEQ ID NO: 3892489 - DNA, 25 bp, Homo sapien
tttttatcataagatgacagaggtg

SEQ ID NO: 3892490 - DNA, 25 bp, Homo sapien
tggaaggcacacttggaccccagcc

SEQ ID NO: 3892491 - DNA, 25 bp, Homo sapien
ctactgcttccaacctgggagtgaa

SEQ ID NO: 3892492 - DNA, 25 bp, Homo sapien
tgttgtctggatgggctactgcttc

SEQ ID NO: 3892493 - DNA, 25 bp, Homo sapien
tctgcagggtggatgatgctgaagc

SEQ ID NO: 3892494 - DNA, 25 bp, Homo sapien
ctgcttccaacctgggagtgaagac

SEQ ID NO: 3892495 - DNA, 25 bp, Homo sapien
caagtctgcttttattcggcgctgc

SEQ ID NO: 3892496 - DNA, 25 bp, Homo sapien
ttactgggcagtgcaatgggctttg

SEQ ID NO: 3892497 - DNA, 25 bp, Homo sapien
gatggacagtagctctctctgcaag

SEQ ID NO: 3892498 - DNA, 25 bp, Homo sapien
gagctgaacgactccttggatggac

SEQ ID NO: 3892499 - DNA, 25 bp, Homo sapien
gaatgaaccgagagcgtagtgacca

SEQ ID NO: 3892500 - DNA, 25 bp, Homo sapien
aagtccaagagtgagatgaccccag

SEQ ID NO: 3892501 - DNA, 25 bp, Homo sapien
gacttggtcatcgtggtcctgcgga

SEQ ID NO: 3892502 - DNA, 25 bp, Homo sapien
tcagtcaagaacaacacgcaagtgc

SEQ ID NO: 3892503 - DNA, 25 bp, Homo sapien
ttagacgttgcactatcaccacggc

SEQ ID NO: 3892504 - DNA, 25 bp, Homo sapien
gcaaggctcccatatgtaagaccag

SEQ ID NO: 3892505 - DNA, 25 bp, Homo sapien
gggccattgccatgaagggtgttct

SEQ ID NO: 3892506 - DNA, 25 bp, Homo sapien
gagtcacaagtagactgccctgaaa

SEQ ID NO: 3892507 - DNA, 25 bp, Homo sapien
tgtccttgattttctaggggcaggt

SEQ ID NO: 3892508 - DNA, 25 bp, Homo sapien
gccctgtccttgattttctaggggc

SEQ ID NO: 3892509 - DNA, 25 bp, Homo sapien
taagatgagtcagattttagagtca

SEQ ID NO: 3892510 - DNA, 25 bp, Homo sapien
ttaagatgagtcagattttagagtc

SEQ ID NO: 3892511 - DNA, 25 bp, Homo sapien
ggttttaaccagagtttagctctga

SEQ ID NO: 3892512 - DNA, 25 bp, Homo sapien
ttttaaccagagtttagctctgaag

SEQ ID NO: 3892513 - DNA, 25 bp, Homo sapien
ctggttttaaccagagtttagctct

SEQ ID NO: 3892514 - DNA, 25 bp, Homo sapien
tttaaccagagtttagctctgaagt

SEQ ID NO: 3892515 - DNA, 25 bp, Homo sapien
tcatgtttgaatggaatgggttttc

SEQ ID NO: 3892516 - DNA, 25 bp, Homo sapien
taataacttcataaagtgttcgatc

SEQ ID NO: 3892517 - DNA, 25 bp, Homo sapien
cataaagtgttcgatcatatccctt

SEQ ID NO: 3892518 - DNA, 25 bp, Homo sapien
tttcctgggctactatgagaaggtt

SEQ ID NO: 3892519 - DNA, 25 bp, Homo sapien
tgattgaatttcaggtcaacccaga

SEQ ID NO: 3892520 - DNA, 25 bp, Homo sapien
taatcaatgagttggcaaggccaca

SEQ ID NO: 3892521 - DNA, 25 bp, Homo sapien
cagataagtcaggataagtgcctcc

SEQ ID NO: 3892522 - DNA, 25 bp, Homo sapien
tgatgtagctctagttcccagtaga

SEQ ID NO: 3892523 - DNA, 25 bp, Homo sapien
tcacatgttcaactgtggtccccag

SEQ ID NO: 3892524 - DNA, 25 bp, Homo sapien
tagtacactgctatagcacttggcc

SEQ ID NO: 3892525 - DNA, 25 bp, Homo sapien
tcaccattggtagaaatcactagcc

SEQ ID NO: 3892526 - DNA, 25 bp, Homo sapien
gctttgtggaaatgtatgggagcca

SEQ ID NO: 3892527 - DNA, 25 bp, Homo sapien
ggagatgtgacctggtaacattttg

SEQ ID NO: 3892528 - DNA, 25 bp, Homo sapien
gcccttgggatttcacattgcaaaa

SEQ ID NO: 3892529 - DNA, 25 bp, Homo sapien
tatgcactaacaccacagtcaaggg

SEQ ID NO: 3892530 - DNA, 25 bp, Homo sapien
gggcccttgggatttcacattgcaa

SEQ ID NO: 3892531 - DNA, 25 bp, Homo sapien
gaacttgcttcttcaacacaacgac

SEQ ID NO: 3892532 - DNA, 25 bp, Homo sapien
caacacaacgacatctgggaatata

SEQ ID NO: 3892533 - DNA, 25 bp, Homo sapien
ccttcccatctgaagaacttgcttc

SEQ ID NO: 3892534 - DNA, 25 bp, Homo sapien
ttcttcaacacaacgacatctggga

SEQ ID NO: 3892535 - DNA, 25 bp, Homo sapien
tccaacgttatgataagtgaggacc

SEQ ID NO: 3892536 - DNA, 25 bp, Homo sapien
gagtcagtccatctatatccaacgt

SEQ ID NO: 3892537 - DNA, 25 bp, Homo sapien
cagtgttgggtgcactcagatatat

SEQ ID NO: 3892538 - DNA, 25 bp, Homo sapien
tataagttgtatacacaccccagca

SEQ ID NO: 3892539 - DNA, 25 bp, Homo sapien
tttgaattgcagcaaacaggtctct

SEQ ID NO: 3892540 - DNA, 25 bp, Homo sapien
caaagtatggtctctcattggttcg

SEQ ID NO: 3892541 - DNA, 25 bp, Homo sapien
aaagtacggcagagacaccagtgat

SEQ ID NO: 3892542 - DNA, 25 bp, Homo sapien
caataatcggcattactactgtgta

SEQ ID NO: 3892543 - DNA, 25 bp, Homo sapien
ttggaggctcttttacaggaaacac

SEQ ID NO: 3892544 - DNA, 25 bp, Homo sapien
tctcgaccgtatctccctcttggag

SEQ ID NO: 3892545 - DNA, 25 bp, Homo sapien
gattttcccttcagtactgtggtac

SEQ ID NO: 3892546 - DNA, 25 bp, Homo sapien
gaaacactggactagagcccaggct

SEQ ID NO: 3892547 - DNA, 25 bp, Homo sapien
gagggacacacatggcacggtgaca

SEQ ID NO: 3892548 - DNA, 25 bp, Homo sapien
gtcctcttctatcggggatgatcga

SEQ ID NO: 3892549 - DNA, 25 bp, Homo sapien
gctactcgtattcctttgacggaaa

SEQ ID NO: 3892550 - DNA, 25 bp, Homo sapien
tcagcccaatcaacccagccagatc

SEQ ID NO: 3892551 - DNA, 25 bp, Homo sapien
tataataagaataagttgagggagt

SEQ ID NO: 3892552 - DNA, 25 bp, Homo sapien
ccacactcagaaggtataataagaa

SEQ ID NO: 3892553 - DNA, 25 bp, Homo sapien
gcagatctttctccacactttacca

SEQ ID NO: 3892554 - DNA, 25 bp, Homo sapien
tctctccatctggactgaaccagta

SEQ ID NO: 3892555 - DNA, 25 bp, Homo sapien
cttccttgcacaacccccgagttct

SEQ ID NO: 3892556 - DNA, 25 bp, Homo sapien
atccttccttgcacaacccccgagt

SEQ ID NO: 3892557 - DNA, 25 bp, Homo sapien
tccttgcacaacccccgagttctca

SEQ ID NO: 3892558 - DNA, 25 bp, Homo sapien
acccccgagttctcaaagttcattg

SEQ ID NO: 3892559 - DNA, 25 bp, Homo sapien
gcattccattccctggcgtccatca

SEQ ID NO: 3892560 - DNA, 25 bp, Homo sapien
gcagggcgatgtaacatgtgctaca

SEQ ID NO: 3892561 - DNA, 25 bp, Homo sapien
catcctggataagtagcagggcgat

SEQ ID NO: 3892562 - DNA, 25 bp, Homo sapien
agcttcagctttcacactatgcaac

SEQ ID NO: 3892563 - DNA, 25 bp, Homo sapien
gtgcttcctgaagatttgaaactgt

SEQ ID NO: 3892564 - DNA, 25 bp, Homo sapien
tttctccaaatgaggccgttctact

SEQ ID NO: 3892565 - DNA, 25 bp, Homo sapien
tcctgaagatttgaaactgtagttt

SEQ ID NO: 3892566 - DNA, 25 bp, Homo sapien
tgaggccgttctacttccacactgt

SEQ ID NO: 3892567 - DNA, 25 bp, Homo sapien
ttacatcgaaccgacaacaccgcaa

SEQ ID NO: 3892568 - DNA, 25 bp, Homo sapien
caccgcaacacatttaggtaaaaga

SEQ ID NO: 3892569 - DNA, 25 bp, Homo sapien
agagctcctgtggaataacgtctcc

SEQ ID NO: 3892570 - DNA, 25 bp, Homo sapien
gaataacgtctccacgcattcctat

SEQ ID NO: 3892571 - DNA, 25 bp, Homo sapien
taaggtaatttctgaaagcctgatg

SEQ ID NO: 3892572 - DNA, 25 bp, Homo sapien
acgtacagcacactcagcaactggg

SEQ ID NO: 3892573 - DNA, 25 bp, Homo sapien
agcaactggggtagaagactttcct

SEQ ID NO: 3892574 - DNA, 25 bp, Homo sapien
ttgaaggtggcttacgtacagcaca

SEQ ID NO: 3892575 - DNA, 25 bp, Homo sapien
ctgccagcagatgtgatgggttgat

SEQ ID NO: 3892576 - DNA, 25 bp, Homo sapien
agcagggaagtctgggtgtactttc

SEQ ID NO: 3892577 - DNA, 25 bp, Homo sapien
tctgccagcagatgtgatgggttga

SEQ ID NO: 3892578 - DNA, 25 bp, Homo sapien
tagataggaattctgatgttgtctc

SEQ ID NO: 3892579 - DNA, 25 bp, Homo sapien
tcttatcttggttctccaggtcgca

SEQ ID NO: 3892580 - DNA, 25 bp, Homo sapien
ccaccaaaagtattcttatcttggt

SEQ ID NO: 3892581 - DNA, 25 bp, Homo sapien
ttgagtccttcagacccagcaacag

SEQ ID NO: 3892582 - DNA, 25 bp, Homo sapien
ccaggtcgcagctgttagtgcttga

SEQ ID NO: 3892583 - DNA, 25 bp, Homo sapien
actgatctcatccttatggaatgcg

SEQ ID NO: 3892584 - DNA, 25 bp, Homo sapien
catccttatggaatgcgattttagc

SEQ ID NO: 3892585 - DNA, 25 bp, Homo sapien
tatggaatgcgattttagccctggt

SEQ ID NO: 3892586 - DNA, 25 bp, Homo sapien
gaatgcgattttagccctggtgaaa

SEQ ID NO: 3892587 - DNA, 25 bp, Homo sapien
ccaccaagtttcttactactgccat

SEQ ID NO: 3892588 - DNA, 25 bp, Homo sapien
ttcatcatcgaactcgagccctgca

SEQ ID NO: 3892589 - DNA, 25 bp, Homo sapien
tccaccaagtttcttactactgcca

SEQ ID NO: 3892590 - DNA, 25 bp, Homo sapien
tgtgattttcatcatcgaactcgag

SEQ ID NO: 3892591 - DNA, 25 bp, Homo sapien
ctttgatactggtaagctgtctgta

SEQ ID NO: 3892592 - DNA, 25 bp, Homo sapien
gtttctttgatactggtaagctgtc

SEQ ID NO: 3892593 - DNA, 25 bp, Homo sapien
ttttagcaagtttctttgatactgg

SEQ ID NO: 3892594 - DNA, 25 bp, Homo sapien
agcaagtttctttgatactggtaag

SEQ ID NO: 3892595 - DNA, 25 bp, Homo sapien
tccatcagtcatttggacttccact

SEQ ID NO: 3892596 - DNA, 25 bp, Homo sapien
gtgtgtggcaggtgacctccttcct

SEQ ID NO: 3892597 - DNA, 25 bp, Homo sapien
ccttgcctttgtcgggtgtgtggca

SEQ ID NO: 3892598 - DNA, 25 bp, Homo sapien
actgtccatgcagtccttccactga

SEQ ID NO: 3892599 - DNA, 25 bp, Homo sapien
gacaatgtgaactggctgatttgta

SEQ ID NO: 3892600 - DNA, 25 bp, Homo sapien
tgtgaactggctgatttgtatatgc

SEQ ID NO: 3892601 - DNA, 25 bp, Homo sapien
gctgatttgtatatgctttctcatc

SEQ ID NO: 3892602 - DNA, 25 bp, Homo sapien
ccatggtgacaatgtgaactggctg

SEQ ID NO: 3892603 - DNA, 25 bp, Homo sapien
ttaaatttcgattcaacccacagca

SEQ ID NO: 3892604 - DNA, 25 bp, Homo sapien
gcaacttctcttcaatgttgagcca

SEQ ID NO: 3892605 - DNA, 25 bp, Homo sapien
tgttaaatttcgattcaacccacag

SEQ ID NO: 3892606 - DNA, 25 bp, Homo sapien
agcaacttctcttcaatgttgagcc

SEQ ID NO: 3892607 - DNA, 25 bp, Homo sapien
taaataatcacgtgcatgctatctg

SEQ ID NO: 3892608 - DNA, 25 bp, Homo sapien
agagctccgccttcagtgagagctg

SEQ ID NO: 3892609 - DNA, 25 bp, Homo sapien
gaaattattcttcgcttctccaggg

SEQ ID NO: 3892610 - DNA, 25 bp, Homo sapien
gagagctgtgataaatcactggtaa

SEQ ID NO: 3892611 - DNA, 25 bp, Homo sapien
cagaaaattgaaatcttcagccacc

SEQ ID NO: 3892612 - DNA, 25 bp, Homo sapien
aaattgaaatcttcagccaccattt

SEQ ID NO: 3892613 - DNA, 25 bp, Homo sapien
gaaaattgaaatcttcagccaccat

SEQ ID NO: 3892614 - DNA, 25 bp, Homo sapien
aacagaaaattgaaatcttcagcca

SEQ ID NO: 3892615 - DNA, 25 bp, Homo sapien
catttgcactcaatatgttctgttg

SEQ ID NO: 3892616 - DNA, 25 bp, Homo sapien
aaccacttcatttgcactcaatatg

SEQ ID NO: 3892617 - DNA, 25 bp, Homo sapien
aagtcaaccacttcatttgcactca

SEQ ID NO: 3892618 - DNA, 25 bp, Homo sapien
ggcctctctgagtatgattcttgta

SEQ ID NO: 3892619 - DNA, 25 bp, Homo sapien
tcaaaaggggtggaaagccaaatgc

SEQ ID NO: 3892620 - DNA, 25 bp, Homo sapien
catcatctgtagcaaccttgtggcc

SEQ ID NO: 3892621 - DNA, 25 bp, Homo sapien
tggtggcactgtggtaacgcagcaa

SEQ ID NO: 3892622 - DNA, 25 bp, Homo sapien
atgccaagcacatcatctgtagcaa

SEQ ID NO: 3892623 - DNA, 25 bp, Homo sapien
gtaccatactgacttataccactgg

SEQ ID NO: 3892624 - DNA, 25 bp, Homo sapien
gaaagcttacacaccaaacatcttc

SEQ ID NO: 3892625 - DNA, 25 bp, Homo sapien
gttgcaaagtcaagccaaagaagag

SEQ ID NO: 3892626 - DNA, 25 bp, Homo sapien
caagtggaccaacttttctcatgtc

SEQ ID NO: 3892627 - DNA, 25 bp, Homo sapien
cgcaacccttgtcgatttgagaaag

SEQ ID NO: 3892628 - DNA, 25 bp, Homo sapien
gcacatggcttaggattagccaata

SEQ ID NO: 3892629 - DNA, 25 bp, Homo sapien
tagccaatagggtgcatgtggagtc

SEQ ID NO: 3892630 - DNA, 25 bp, Homo sapien
aataactggatgagcttggagtcca

SEQ ID NO: 3892631 - DNA, 25 bp, Homo sapien
aggcatagaggtaaagacagtggca

SEQ ID NO: 3892632 - DNA, 25 bp, Homo sapien
agagaggcatagaggtaaagacagt

SEQ ID NO: 3892633 - DNA, 25 bp, Homo sapien
gagaggcatagaggtaaagacagtg

SEQ ID NO: 3892634 - DNA, 25 bp, Homo sapien
gaggcatagaggtaaagacagtggc

SEQ ID NO: 3892635 - DNA, 25 bp, Homo sapien
cagctatgtgagtctttgggaccat

SEQ ID NO: 3892636 - DNA, 25 bp, Homo sapien
gcagctatgtgagtctttgggacca

SEQ ID NO: 3892637 - DNA, 25 bp, Homo sapien
ttttaatctgcaaggaattggtgac

SEQ ID NO: 3892638 - DNA, 25 bp, Homo sapien
ttttttaatctgcaaggaattggtg

SEQ ID NO: 3892639 - DNA, 25 bp, Homo sapien
taatctgcaaggaattggtgaccat

SEQ ID NO: 3892640 - DNA, 25 bp, Homo sapien
tttaatctgcaaggaattggtgacc

SEQ ID NO: 3892641 - DNA, 25 bp, Homo sapien
ggctttctttgtctacgacaccaca

SEQ ID NO: 3892642 - DNA, 25 bp, Homo sapien
tctttgtctacgacaccacatgctg

SEQ ID NO: 3892643 - DNA, 25 bp, Homo sapien
cggctttctttgtctacgacaccac

SEQ ID NO: 3892644 - DNA, 25 bp, Homo sapien
tttctttgtctacgacaccacatgc

SEQ ID NO: 3892645 - DNA, 25 bp, Homo sapien
agtatgttctgtggccagaaaaatg

SEQ ID NO: 3892646 - DNA, 25 bp, Homo sapien
gaaatagtatgttctgtggccagaa

SEQ ID NO: 3892647 - DNA, 25 bp, Homo sapien
ccctctgcgtggtatggaaaatccc

SEQ ID NO: 3892648 - DNA, 25 bp, Homo sapien
ctgcgtggtatggaaaatcccagaa

SEQ ID NO: 3892649 - DNA, 25 bp, Homo sapien
tgagaagtttgcctagccaggaaca

SEQ ID NO: 3892650 - DNA, 25 bp, Homo sapien
gctttcacacagactactcttggga

SEQ ID NO: 3892651 - DNA, 25 bp, Homo sapien
gcagcatagagcacataagctttca

SEQ ID NO: 3892652 - DNA, 25 bp, Homo sapien
tatccagcactgaactaagcaaatg

SEQ ID NO: 3892653 - DNA, 25 bp, Homo sapien
cagccttaatttaagcctgcccttt

SEQ ID NO: 3892654 - DNA, 25 bp, Homo sapien
gcacagccttaatttaagcctgccc

SEQ ID NO: 3892655 - DNA, 25 bp, Homo sapien
ctgggcacagccttaatttaagcct

SEQ ID NO: 3892656 - DNA, 25 bp, Homo sapien
cacctcattgatgcctgggcacagc

SEQ ID NO: 3892657 - DNA, 25 bp, Homo sapien
cagcatggctggttaaagccctctg

SEQ ID NO: 3892658 - DNA, 25 bp, Homo sapien
gttaaagccctctggtgccttgtcc

SEQ ID NO: 3892659 - DNA, 25 bp, Homo sapien
tggctggttaaagccctctggtgcc

SEQ ID NO: 3892660 - DNA, 25 bp, Homo sapien
ctggttaaagccctctggtgccttg

SEQ ID NO: 3892661 - DNA, 25 bp, Homo sapien
cacaaaattgcatattgcttctccc

SEQ ID NO: 3892662 - DNA, 25 bp, Homo sapien
taattcacaaaattgcatattgctt

SEQ ID NO: 3892663 - DNA, 25 bp, Homo sapien
gattcttgttccaggttcatagctt

SEQ ID NO: 3892664 - DNA, 25 bp, Homo sapien
atgattcttgttccaggttcatagc

SEQ ID NO: 3892665 - DNA, 25 bp, Homo sapien
tcgctgtctcccttgaaattctggc

SEQ ID NO: 3892666 - DNA, 25 bp, Homo sapien
ccagggacaacatctgttatcgctg

SEQ ID NO: 3892667 - DNA, 25 bp, Homo sapien
ggttgtttaactgcaaatgtggaag

SEQ ID NO: 3892668 - DNA, 25 bp, Homo sapien
ggcccatggttgtttaactgcaaat

SEQ ID NO: 3892669 - DNA, 25 bp, Homo sapien
tttctgcacctatgctgacaacaaa

SEQ ID NO: 3892670 - DNA, 25 bp, Homo sapien
ttctgcacctatgctgacaacaaac

SEQ ID NO: 3892671 - DNA, 25 bp, Homo sapien
aattctaaggatataataccctggg

SEQ ID NO: 3892672 - DNA, 25 bp, Homo sapien
tgttcatgccactgactcgggaata

SEQ ID NO: 3892673 - DNA, 25 bp, Homo sapien
tcgggaataatagtggcttctcctc

SEQ ID NO: 3892674 - DNA, 25 bp, Homo sapien
ttgttggcagaatatataaagtggc

SEQ ID NO: 3892675 - DNA, 25 bp, Homo sapien
ccccagattctccttaagtgacatt

SEQ ID NO: 3892676 - DNA, 25 bp, Homo sapien
agcaggaaggataattagtgaaagc

SEQ ID NO: 3892677 - DNA, 25 bp, Homo sapien
tagtgaaagcttctcgtcaaccatt

SEQ ID NO: 3892678 - DNA, 25 bp, Homo sapien
ccttctctctagttgcaatttttca

SEQ ID NO: 3892679 - DNA, 25 bp, Homo sapien
cttgcagaatagttgaacatgtcat

SEQ ID NO: 3892680 - DNA, 25 bp, Homo sapien
tgcagaatagttgaacatgtcatat

SEQ ID NO: 3892681 - DNA, 25 bp, Homo sapien
ttgcagaatagttgaacatgtcata

SEQ ID NO: 3892682 - DNA, 25 bp, Homo sapien
tgtcggcctccagtggttaatactg

SEQ ID NO: 3892683 - DNA, 25 bp, Homo sapien
tcaactccaaactctaaaagtgtaa

SEQ ID NO: 3892684 - DNA, 25 bp, Homo sapien
taccgatataaatcaatctgtcggc

SEQ ID NO: 3892685 - DNA, 25 bp, Homo sapien
tagtgaatgtctttaattcaactcc

SEQ ID NO: 3892686 - DNA, 25 bp, Homo sapien
tcaagggatccaggcattgaatgcc

SEQ ID NO: 3892687 - DNA, 25 bp, Homo sapien
cttggcacttcttagttccaaagtc

SEQ ID NO: 3892688 - DNA, 25 bp, Homo sapien
tcttagttccaaagtcaataagatc

SEQ ID NO: 3892689 - DNA, 25 bp, Homo sapien
gcattgaatgccctctgctagttca

SEQ ID NO: 3892690 - DNA, 25 bp, Homo sapien
ataataaagaactcaggaaaaacag

SEQ ID NO: 3892691 - DNA, 25 bp, Homo sapien
tcccataataaagaactcaggaaaa

SEQ ID NO: 3892692 - DNA, 25 bp, Homo sapien
catcccataataaagaactcaggaa

SEQ ID NO: 3892693 - DNA, 25 bp, Homo sapien
tgcatcccataataaagaactcagg

SEQ ID NO: 3892694 - DNA, 25 bp, Homo sapien
cagaaattgcagcaccgagagagtc

SEQ ID NO: 3892695 - DNA, 25 bp, Homo sapien
aattgcagcaccgagagagtcttct

SEQ ID NO: 3892696 - DNA, 25 bp, Homo sapien
ttgcaattgttcagaaattgcagca

SEQ ID NO: 3892697 - DNA, 25 bp, Homo sapien
tttgcaattgttcagaaattgcagc

SEQ ID NO: 3892698 - DNA, 25 bp, Homo sapien
gccctattgacattctcctgcttag

SEQ ID NO: 3892699 - DNA, 25 bp, Homo sapien
cgctgaccaggtagacattgtggca

SEQ ID NO: 3892700 - DNA, 25 bp, Homo sapien
ggatctgggagatagtcttgacccc

SEQ ID NO: 3892701 - DNA, 25 bp, Homo sapien
gcattgaggccactatgagacaggg

SEQ ID NO: 3892702 - DNA, 25 bp, Homo sapien
atctggaagccatagggattgtacg

SEQ ID NO: 3892703 - DNA, 25 bp, Homo sapien
tggaagccatagggattgtacgttt

SEQ ID NO: 3892704 - DNA, 25 bp, Homo sapien
caattccgcaatccctgagaggatc

SEQ ID NO: 3892705 - DNA, 25 bp, Homo sapien
ccaattccgcaatccctgagaggat

SEQ ID NO: 3892706 - DNA, 25 bp, Homo sapien
gctcataatgaagtattcctctcct

SEQ ID NO: 3892707 - DNA, 25 bp, Homo sapien
tggctccctcatgtcgctcataatg

SEQ ID NO: 3892708 - DNA, 25 bp, Homo sapien
tttaccccagttgtaatgtgcatat

SEQ ID NO: 3892709 - DNA, 25 bp, Homo sapien
tattaaaatactcataacctgtggt

SEQ ID NO: 3892710 - DNA, 25 bp, Homo sapien
ggagcatgtgggtgtagtgactggt

SEQ ID NO: 3892711 - DNA, 25 bp, Homo sapien
gagcatgtgggtgtagtgactggta

SEQ ID NO: 3892712 - DNA, 25 bp, Homo sapien
ttggcattgattattttgtcagcta

SEQ ID NO: 3892713 - DNA, 25 bp, Homo sapien
attatagagctttggcattgattat

SEQ ID NO: 3892714 - DNA, 25 bp, Homo sapien
gcattgattattttgtcagctattc

SEQ ID NO: 3892715 - DNA, 25 bp, Homo sapien
tttttattgttaatgcacactcata

SEQ ID NO: 3892716 - DNA, 25 bp, Homo sapien
tagccttagtgtttggagtccagaa

SEQ ID NO: 3892717 - DNA, 25 bp, Homo sapien
gcacaacttacctgagacctagatg

SEQ ID NO: 3892718 - DNA, 25 bp, Homo sapien
cctagacagctattgggtaccaaga

SEQ ID NO: 3892719 - DNA, 25 bp, Homo sapien
gatagaattggtctcataaaagcac

SEQ ID NO: 3892720 - DNA, 25 bp, Homo sapien
actccagagccagtagatccttcat

SEQ ID NO: 3892721 - DNA, 25 bp, Homo sapien
tcctcatcagtgactaacactagca

SEQ ID NO: 3892722 - DNA, 25 bp, Homo sapien
gagccagtagatccttcatcctcat

SEQ ID NO: 3892723 - DNA, 25 bp, Homo sapien
ccagtagatccttcatcctcatcag

SEQ ID NO: 3892724 - DNA, 25 bp, Homo sapien
cctggcatgttgcaactcccaacaa

SEQ ID NO: 3892725 - DNA, 25 bp, Homo sapien
caaaacctggcatgttgcaactccc

SEQ ID NO: 3892726 - DNA, 25 bp, Homo sapien
agcaaaacctggcatgttgcaactc

SEQ ID NO: 3892727 - DNA, 25 bp, Homo sapien
aaacctggcatgttgcaactcccaa

SEQ ID NO: 3892728 - DNA, 25 bp, Homo sapien
aaagagagagaaaacagactgtaaa

SEQ ID NO: 3892729 - DNA, 25 bp, Homo sapien
tgtaaaaaaaaaagcctcagctaca

SEQ ID NO: 3892730 - DNA, 25 bp, Homo sapien
ctgaaaagagagagaaaacagactg

SEQ ID NO: 3892731 - DNA, 25 bp, Homo sapien
gagagagaaaacagactgtaaaaaa

SEQ ID NO: 3892732 - DNA, 25 bp, Homo sapien
gggcagtggcgacaagttatatcca

SEQ ID NO: 3892733 - DNA, 25 bp, Homo sapien
cctttgaaatcttgggaagttcatc

SEQ ID NO: 3892734 - DNA, 25 bp, Homo sapien
gagccattgtgttcccactagcgag

SEQ ID NO: 3892735 - DNA, 25 bp, Homo sapien
caacacactgggtattaacctttga

SEQ ID NO: 3892736 - DNA, 25 bp, Homo sapien
tcattgtagaattccacagttattt

SEQ ID NO: 3892737 - DNA, 25 bp, Homo sapien
cattgcttaacaccactggaagcag

SEQ ID NO: 3892738 - DNA, 25 bp, Homo sapien
tgggattggtctgatttccagattc

SEQ ID NO: 3892739 - DNA, 25 bp, Homo sapien
cactactggacagggtcgctgtgca

SEQ ID NO: 3892740 - DNA, 25 bp, Homo sapien
ttccagattccaggacactactgga

SEQ ID NO: 3892741 - DNA, 25 bp, Homo sapien
ttgatgctattagtatgcacaggaa

SEQ ID NO: 3892742 - DNA, 25 bp, Homo sapien
ccactgtactaattgatgctattag

SEQ ID NO: 3892743 - DNA, 25 bp, Homo sapien
aatagtgcaatggaatatataatgg

SEQ ID NO: 3892744 - DNA, 25 bp, Homo sapien
aaaaaccactgtactaattgatgct

SEQ ID NO: 3892745 - DNA, 25 bp, Homo sapien
caacttttcggctatattgtatata

SEQ ID NO: 3892746 - DNA, 25 bp, Homo sapien
aataaagagttttgctgcacttgtc

SEQ ID NO: 3892747 - DNA, 25 bp, Homo sapien
tctgttcttgagttactagtcctcc

SEQ ID NO: 3892748 - DNA, 25 bp, Homo sapien
tcttgttgaaattatgacagatcat

SEQ ID NO: 3892749 - DNA, 25 bp, Homo sapien
tatatgcagttagtccctgacggaa

SEQ ID NO: 3892750 - DNA, 25 bp, Homo sapien
gtcccagggtggtacaagagcagct

SEQ ID NO: 3892751 - DNA, 25 bp, Homo sapien
gcatgaagatcaccagagtcctcca

SEQ ID NO: 3892752 - DNA, 25 bp, Homo sapien
gcttatatgatagggacactgcctg

SEQ ID NO: 3892753 - DNA, 25 bp, Homo sapien
ccttctagtattctgtggaccatag

SEQ ID NO: 3892754 - DNA, 25 bp, Homo sapien
ctgaaaataacaagacaggctcttc

SEQ ID NO: 3892755 - DNA, 25 bp, Homo sapien
tccaacacttccagtccttctagta

SEQ ID NO: 3892756 - DNA, 25 bp, Homo sapien
gaccataggctaaatcaaccactga

SEQ ID NO: 3892757 - DNA, 25 bp, Homo sapien
aggaaaggaaatttggcattatcaa

SEQ ID NO: 3892758 - DNA, 25 bp, Homo sapien
caacaagcagtttattatctctcat

SEQ ID NO: 3892759 - DNA, 25 bp, Homo sapien
acaacaagcagtttattatctctca

SEQ ID NO: 3892760 - DNA, 25 bp, Homo sapien
gtcatgtagtttcagggcttctcca

SEQ ID NO: 3892761 - DNA, 25 bp, Homo sapien
aactggcaaagcatcttttgtcatg

SEQ ID NO: 3892762 - DNA, 25 bp, Homo sapien
tacagcagaagtggagcaagcagga

SEQ ID NO: 3892763 - DNA, 25 bp, Homo sapien
cttcaatactagctggagcaggtac

SEQ ID NO: 3892764 - DNA, 25 bp, Homo sapien
ttttggaaaattacgcagtcacttg

SEQ ID NO: 3892765 - DNA, 25 bp, Homo sapien
aaataagctgcaaaggccaacatcc

SEQ ID NO: 3892766 - DNA, 25 bp, Homo sapien
aagaggaactcactagcaatcaggg

SEQ ID NO: 3892767 - DNA, 25 bp, Homo sapien
cagcatactgttgggcatctaagct

SEQ ID NO: 3892768 - DNA, 25 bp, Homo sapien
caaccaacttgtcccattgtgagaa

SEQ ID NO: 3892769 - DNA, 25 bp, Homo sapien
gcttgcctcaatgtaacgatatgcc

SEQ ID NO: 3892770 - DNA, 25 bp, Homo sapien
caaagaagttgcttgcctcaatgta

SEQ ID NO: 3892771 - DNA, 25 bp, Homo sapien
ccatcaatactctttgggttcagac

SEQ ID NO: 3892772 - DNA, 25 bp, Homo sapien
tcaaaacgtgctgaccctctgaaag

SEQ ID NO: 3892773 - DNA, 25 bp, Homo sapien
caaaacaagtctaaagggtgatcca

SEQ ID NO: 3892774 - DNA, 25 bp, Homo sapien
catatgggccatagcacatacatgg

SEQ ID NO: 3892775 - DNA, 25 bp, Homo sapien
ccatctggctagctgtagataaaca

SEQ ID NO: 3892776 - DNA, 25 bp, Homo sapien
agctaactcatgcaagagaagcagg

SEQ ID NO: 3892777 - DNA, 25 bp, Homo sapien
gaccatgtagtggagggcctgacct

SEQ ID NO: 3892778 - DNA, 25 bp, Homo sapien
gaaagggatgctctcatgatatgag

SEQ ID NO: 3892779 - DNA, 25 bp, Homo sapien
ggcctgacctaagtggcacacagaa

SEQ ID NO: 3892780 - DNA, 25 bp, Homo sapien
cagcaagtcttctttgtttcctcat

SEQ ID NO: 3892781 - DNA, 25 bp, Homo sapien
acagcaagtcttctttgtttcctca

SEQ ID NO: 3892782 - DNA, 25 bp, Homo sapien
tcacagcaagtcttctttgtttcct

SEQ ID NO: 3892783 - DNA, 25 bp, Homo sapien
gcaagtcttctttgtttcctcatat

SEQ ID NO: 3892784 - DNA, 25 bp, Homo sapien
tacgctcaccgcagtttgcttggaa

SEQ ID NO: 3892785 - DNA, 25 bp, Homo sapien
gatagtgtgtacaacagatcaccct

SEQ ID NO: 3892786 - DNA, 25 bp, Homo sapien
caacgcagttgggtaccacttgagc

SEQ ID NO: 3892787 - DNA, 25 bp, Homo sapien
tgttttagacatcccaagaaaggac

SEQ ID NO: 3892788 - DNA, 25 bp, Homo sapien
tgtttccacctctattttgccttgt

SEQ ID NO: 3892789 - DNA, 25 bp, Homo sapien
ctgtttccacctctattttgccttg

SEQ ID NO: 3892790 - DNA, 25 bp, Homo sapien
gaatcatgacctttttttctacagt

SEQ ID NO: 3892791 - DNA, 25 bp, Homo sapien
cctttttttctacagtagtcagcat

SEQ ID NO: 3892792 - DNA, 25 bp, Homo sapien
catgaatcatgacctttttttctac

SEQ ID NO: 3892793 - DNA, 25 bp, Homo sapien
ttttctacagtagtcagcattttgt

SEQ ID NO: 3892794 - DNA, 25 bp, Homo sapien
acagataccggtggcctcttttctg

SEQ ID NO: 3892795 - DNA, 25 bp, Homo sapien
tagcacccacacagataccggtggc

SEQ ID NO: 3892796 - DNA, 25 bp, Homo sapien
gtgatggtctggagattgtagcacc

SEQ ID NO: 3892797 - DNA, 25 bp, Homo sapien
tgatggtctggagattgtagcaccc

SEQ ID NO: 3892798 - DNA, 25 bp, Homo sapien
gcttttcctccatctattcacttca

SEQ ID NO: 3892799 - DNA, 25 bp, Homo sapien
aaattttcgagtgcctgatgaactc

SEQ ID NO: 3892800 - DNA, 25 bp, Homo sapien
cccagggaaaattttcgagtgcctg

SEQ ID NO: 3892801 - DNA, 25 bp, Homo sapien
gcaaaagtattcacagcttttcctc

SEQ ID NO: 3892802 - DNA, 25 bp, Homo sapien
agagtttgcatagcctagccacaga

SEQ ID NO: 3892803 - DNA, 25 bp, Homo sapien
tcagggcgatgacgctgtctggctc

SEQ ID NO: 3892804 - DNA, 25 bp, Homo sapien
taaaatgccactgcggtagagtaaa

SEQ ID NO: 3892805 - DNA, 25 bp, Homo sapien
gtaaatcgtatagccaaagtcctgg

SEQ ID NO: 3892806 - DNA, 25 bp, Homo sapien
atgtgaggggccttgtgatcccaag

SEQ ID NO: 3892807 - DNA, 25 bp, Homo sapien
gtatgtgaggggccttgtgatccca

SEQ ID NO: 3892808 - DNA, 25 bp, Homo sapien
gaggggccttgtgatcccaaggtac

SEQ ID NO: 3892809 - DNA, 25 bp, Homo sapien
gggtatgtgaggggccttgtgatcc

SEQ ID NO: 3892810 - DNA, 25 bp, Homo sapien
gccttgacgccccttcttgggagag

SEQ ID NO: 3892811 - DNA, 25 bp, Homo sapien
agaatacagcaatccacaaagtctt

SEQ ID NO: 3892812 - DNA, 25 bp, Homo sapien
aagtcttgtggccttgacgcccctt

SEQ ID NO: 3892813 - DNA, 25 bp, Homo sapien
gacgccccttcttgggagagctgga

SEQ ID NO: 3892814 - DNA, 25 bp, Homo sapien
gtgaccactgggatgtggcctttct

SEQ ID NO: 3892815 - DNA, 25 bp, Homo sapien
ccactgggatgtggcctttctacaa

SEQ ID NO: 3892816 - DNA, 25 bp, Homo sapien
gatgtggcctttctacaaggtgctt

SEQ ID NO: 3892817 - DNA, 25 bp, Homo sapien
ctgggatgtggcctttctacaaggt

SEQ ID NO: 3892818 - DNA, 25 bp, Homo sapien
ctgggtaactcaggtaaacatcttc

SEQ ID NO: 3892819 - DNA, 25 bp, Homo sapien
catcttcatgtaggtgctttgccat

SEQ ID NO: 3892820 - DNA, 25 bp, Homo sapien
taaacatcttcatgtaggtgctttg

SEQ ID NO: 3892821 - DNA, 25 bp, Homo sapien
aggtaaacatcttcatgtaggtgct

SEQ ID NO: 3892822 - DNA, 25 bp, Homo sapien
catctgaactcgattattggataca

SEQ ID NO: 3892823 - DNA, 25 bp, Homo sapien
tctgaactcgattattggatacact

SEQ ID NO: 3892824 - DNA, 25 bp, Homo sapien
agcagcatctgaactcgattattgg

SEQ ID NO: 3892825 - DNA, 25 bp, Homo sapien
cagcatctgaactcgattattggat

SEQ ID NO: 3892826 - DNA, 25 bp, Homo sapien
tggcagctttgctaatgtcggtgtt

SEQ ID NO: 3892827 - DNA, 25 bp, Homo sapien
ctaagctgctaagaccttcacatca

SEQ ID NO: 3892828 - DNA, 25 bp, Homo sapien
agctgctaagaccttcacatcactg

SEQ ID NO: 3892829 - DNA, 25 bp, Homo sapien
cactggcagctttgctaatgtcggt

SEQ ID NO: 3892830 - DNA, 25 bp, Homo sapien
ggcttcagccagataccaatcagag

SEQ ID NO: 3892831 - DNA, 25 bp, Homo sapien
agctcttgcaaataaggcagatgag

SEQ ID NO: 3892832 - DNA, 25 bp, Homo sapien
tcttgcaaataaggcagatgagttc

SEQ ID NO: 3892833 - DNA, 25 bp, Homo sapien
ctggcgaggaagcaaggcttcagcc

SEQ ID NO: 3892834 - DNA, 25 bp, Homo sapien
cacgcatgcacgctatgatgcccga

SEQ ID NO: 3892835 - DNA, 25 bp, Homo sapien
gaaagcatcaagcagttgttgagac

SEQ ID NO: 3892836 - DNA, 25 bp, Homo sapien
tgcccgaaagcatcaagcagttgtt

SEQ ID NO: 3892837 - DNA, 25 bp, Homo sapien
ttgttgagacaaccaggacttcagg

SEQ ID NO: 3892838 - DNA, 25 bp, Homo sapien
tgcttcttcttagggaatagctcgg

SEQ ID NO: 3892839 - DNA, 25 bp, Homo sapien
ccaagtaattgagaacacaggcatt

SEQ ID NO: 3892840 - DNA, 25 bp, Homo sapien
gatcattcttaaattagcacaaggg

SEQ ID NO: 3892841 - DNA, 25 bp, Homo sapien
caaagtcatctatctaaagcgcaag

SEQ ID NO: 3892842 - DNA, 25 bp, Homo sapien
gctccagtcagcaagctcgcaagat

SEQ ID NO: 3892843 - DNA, 25 bp, Homo sapien
tacagacagcattaccaaacattga

SEQ ID NO: 3892844 - DNA, 25 bp, Homo sapien
gattccgaactgaccatcataaaga

SEQ ID NO: 3892845 - DNA, 25 bp, Homo sapien
ttccacaagcaagaatgcgattccg

SEQ ID NO: 3892846 - DNA, 25 bp, Homo sapien
tcgtcagcagcgtgatgagcgtcag

SEQ ID NO: 3892847 - DNA, 25 bp, Homo sapien
tgtcaatgctgatcacgcacagggt

SEQ ID NO: 3892848 - DNA, 25 bp, Homo sapien
tgccgtagttgatctgttccccaca

SEQ ID NO: 3892849 - DNA, 25 bp, Homo sapien
cgcacagggtcatgatcgaggccgt

SEQ ID NO: 3892850 - DNA, 25 bp, Homo sapien
cgctgcgggtaacgcggcagcgcgg

SEQ ID NO: 3892851 - DNA, 25 bp, Homo sapien
gcgcggagtcgagggagctcgggct

SEQ ID NO: 3892852 - DNA, 25 bp, Homo sapien
gcgcctggctctgtctcggagcccc

SEQ ID NO: 3892853 - DNA, 25 bp, Homo sapien
gactccctgcgggaggcgcttcggc

SEQ ID NO: 3892854 - DNA, 25 bp, Homo sapien
tcatatgaccttattctatttgcag

SEQ ID NO: 3892855 - DNA, 25 bp, Homo sapien
tcatgaaaaacaaagcgtttgcttc

SEQ ID NO: 3892856 - DNA, 25 bp, Homo sapien
ctactcccacttaggaaatatcaag

SEQ ID NO: 3892857 - DNA, 25 bp, Homo sapien
tatggtcataggtgatgatgcctgt

SEQ ID NO: 3892858 - DNA, 25 bp, Homo sapien
ctagtcaagtgtcctattaagaaaa

SEQ ID NO: 3892859 - DNA, 25 bp, Homo sapien
tagtcaagtgtcctattaagaaaag

SEQ ID NO: 3892860 - DNA, 25 bp, Homo sapien
agtcaagtgtcctattaagaaaagg

SEQ ID NO: 3892861 - DNA, 25 bp, Homo sapien
tgctgttagcatccatagagatccc

SEQ ID NO: 3892862 - DNA, 25 bp, Homo sapien
tgatgcaggacattacagcctggcc

SEQ ID NO: 3892863 - DNA, 25 bp, Homo sapien
gcctcggtggtacaatttatgctcc

SEQ ID NO: 3892864 - DNA, 25 bp, Homo sapien
ccagggtggtgtacctatattgcca

SEQ ID NO: 3892865 - DNA, 25 bp, Homo sapien
catgacgttctcttcacttgggtac

SEQ ID NO: 3892866 - DNA, 25 bp, Homo sapien
gatttgcacttacactcatgacgtt

SEQ ID NO: 3892867 - DNA, 25 bp, Homo sapien
ttaggtacatcttcacaacacgttg

SEQ ID NO: 3892868 - DNA, 25 bp, Homo sapien
gagcgaatgacacataagtaggcac

SEQ ID NO: 3892869 - DNA, 25 bp, Homo sapien
tcagaatgtagctatgcgagaggtc

SEQ ID NO: 3892870 - DNA, 25 bp, Homo sapien
tgtagcaccagatccatcggcgtct

SEQ ID NO: 3892871 - DNA, 25 bp, Homo sapien
tctctgaggctgtcgaatattgctt

SEQ ID NO: 3892872 - DNA, 25 bp, Homo sapien
gaggtcttgtaggagttctctctga

SEQ ID NO: 3892873 - DNA, 25 bp, Homo sapien
tggaaagcttgcaagcggtgtttct

SEQ ID NO: 3892874 - DNA, 25 bp, Homo sapien
gaaagcttgcaagcggtgtttcttg

SEQ ID NO: 3892875 - DNA, 25 bp, Homo sapien
ggaaagcttgcaagcggtgtttctt

SEQ ID NO: 3892876 - DNA, 25 bp, Homo sapien
cataatcaggagtcggatcatctta

SEQ ID NO: 3892877 - DNA, 25 bp, Homo sapien
cggatcatcttatagcggttcagtc

SEQ ID NO: 3892878 - DNA, 25 bp, Homo sapien
tgagatccgcgccatacataatcag

SEQ ID NO: 3892879 - DNA, 25 bp, Homo sapien
ggttcagtctcaccgcatcatgcaa

SEQ ID NO: 3892880 - DNA, 25 bp, Homo sapien
gctccgcgcactcatagtggccagt

SEQ ID NO: 3892881 - DNA, 25 bp, Homo sapien
caggcgataagatgctccgcgcact

SEQ ID NO: 3892882 - DNA, 25 bp, Homo sapien
ggtctgcctcacaggcgataagatg

SEQ ID NO: 3892883 - DNA, 25 bp, Homo sapien
tctgtctttggcgttgaggtctgcc

SEQ ID NO: 3892884 - DNA, 25 bp, Homo sapien
tggaaaattggaaaacgctgctgat

SEQ ID NO: 3892885 - DNA, 25 bp, Homo sapien
gaaaacgctgctgattcgctaggaa

SEQ ID NO: 3892886 - DNA, 25 bp, Homo sapien
aattggaaaacgctgctgattcgct

SEQ ID NO: 3892887 - DNA, 25 bp, Homo sapien
gctgattcgctaggaatgaggacag

SEQ ID NO: 3892888 - DNA, 25 bp, Homo sapien
tctcgggcgctaatttttgctcctt

SEQ ID NO: 3892889 - DNA, 25 bp, Homo sapien
ttatctcgggcgctaatttttgctc

SEQ ID NO: 3892890 - DNA, 25 bp, Homo sapien
tcctccacggcttgcccagtggatg

SEQ ID NO: 3892891 - DNA, 25 bp, Homo sapien
aaacatccaggtttcctccacggct

SEQ ID NO: 3892892 - DNA, 25 bp, Homo sapien
tgaatgactaactcgctgatgagga

SEQ ID NO: 3892893 - DNA, 25 bp, Homo sapien
tatgctgcatactggtcttcgtaga

SEQ ID NO: 3892894 - DNA, 25 bp, Homo sapien
gaattcgtatatgttgctggcagcc

SEQ ID NO: 3892895 - DNA, 25 bp, Homo sapien
tgatatcccgttgccgctttgctat

SEQ ID NO: 3892896 - DNA, 25 bp, Homo sapien
cggaattcgatctgggctccagctt

SEQ ID NO: 3892897 - DNA, 25 bp, Homo sapien
catatcacggaattcgatctgggct

SEQ ID NO: 3892898 - DNA, 25 bp, Homo sapien
tcacggaattcgatctgggctccag

SEQ ID NO: 3892899 - DNA, 25 bp, Homo sapien
atgtccttccaagcatgctctatga

SEQ ID NO: 3892900 - DNA, 25 bp, Homo sapien
ttaatgagctggattttgcagtgct

SEQ ID NO: 3892901 - DNA, 25 bp, Homo sapien
gaaacataaaattaatgagctggat

SEQ ID NO: 3892902 - DNA, 25 bp, Homo sapien
tggattttgcagtgctttgcatgag

SEQ ID NO: 3892903 - DNA, 25 bp, Homo sapien
ttgcagtgctttgcatgagtcttac

SEQ ID NO: 3892904 - DNA, 25 bp, Homo sapien
tttttctactactggcagtttattc

SEQ ID NO: 3892905 - DNA, 25 bp, Homo sapien
aacatctggattgttcttgtctgac

SEQ ID NO: 3892906 - DNA, 25 bp, Homo sapien
acatctggattgttcttgtctgaca

SEQ ID NO: 3892907 - DNA, 25 bp, Homo sapien
aaacatctggattgttcttgtctga

SEQ ID NO: 3892908 - DNA, 25 bp, Homo sapien
acgtaggcacatccacaggttccgt

SEQ ID NO: 3892909 - DNA, 25 bp, Homo sapien
cagaaacgtaggcacatccacaggt

SEQ ID NO: 3892910 - DNA, 25 bp, Homo sapien
cttcagaaacgtaggcacatccaca

SEQ ID NO: 3892911 - DNA, 25 bp, Homo sapien
gaaacgtaggcacatccacaggttc

SEQ ID NO: 3892912 - DNA, 25 bp, Homo sapien
tctaaattttcaagctttgatcttt

SEQ ID NO: 3892913 - DNA, 25 bp, Homo sapien
aatgatttcaggttctggttccttt

SEQ ID NO: 3892914 - DNA, 25 bp, Homo sapien
caggttctggttcctttacaactgg

SEQ ID NO: 3892915 - DNA, 25 bp, Homo sapien
tcagttgaatgattatttcaaggtc

SEQ ID NO: 3892916 - DNA, 25 bp, Homo sapien
gcagcttcatactctccatctctga

SEQ ID NO: 3892917 - DNA, 25 bp, Homo sapien
gtttctcgcttttccactgttgctc

SEQ ID NO: 3892918 - DNA, 25 bp, Homo sapien
tcacagggtgggctagaagtgtctt

SEQ ID NO: 3892919 - DNA, 25 bp, Homo sapien
tcctcctgcttctctaaagtaacag

SEQ ID NO: 3892920 - DNA, 25 bp, Homo sapien
caataacacttcttccctaagacat

SEQ ID NO: 3892921 - DNA, 25 bp, Homo sapien
gagttcccttgcattacacctgaaa

SEQ ID NO: 3892922 - DNA, 25 bp, Homo sapien
gataactacacgtgattccacactg

SEQ ID NO: 3892923 - DNA, 25 bp, Homo sapien
gcagagaattcattactggtagctc

SEQ ID NO: 3892924 - DNA, 25 bp, Homo sapien
gttcctctactttcagtaccatcat

SEQ ID NO: 3892925 - DNA, 25 bp, Homo sapien
cagttcctctactttcagtaccatc

SEQ ID NO: 3892926 - DNA, 25 bp, Homo sapien
agttcctctactttcagtaccatca

SEQ ID NO: 3892927 - DNA, 25 bp, Homo sapien
ggctgaaggagtcttgtatgttttt

SEQ ID NO: 3892928 - DNA, 25 bp, Homo sapien
ttctgtcgtggaaggaatccctgga

SEQ ID NO: 3892929 - DNA, 25 bp, Homo sapien
tgggcccctccacaccggtcagctt

SEQ ID NO: 3892930 - DNA, 25 bp, Homo sapien
cctccacaccggtcagcttatatag

SEQ ID NO: 3892931 - DNA, 25 bp, Homo sapien
tggggccgggtgagataatcttcca

SEQ ID NO: 3892932 - DNA, 25 bp, Homo sapien
ggggccgggtgagataatcttccaa

SEQ ID NO: 3892933 - DNA, 25 bp, Homo sapien
ctggggccgggtgagataatcttcc

SEQ ID NO: 3892934 - DNA, 25 bp, Homo sapien
gggccgggtgagataatcttccaac

SEQ ID NO: 3892935 - DNA, 25 bp, Homo sapien
aggacaagctaaccctgctgaatat

SEQ ID NO: 3892936 - DNA, 25 bp, Homo sapien
acccccattaggagccaactcagag

SEQ ID NO: 3892937 - DNA, 25 bp, Homo sapien
cactcccacccccattaggagccaa

SEQ ID NO: 3892938 - DNA, 25 bp, Homo sapien
ccattaggagccaactcagaggcag

SEQ ID NO: 3892939 - DNA, 25 bp, Homo sapien
aagaaattgaaagcattcagtaatg

SEQ ID NO: 3892940 - DNA, 25 bp, Homo sapien
attgaaagcattcagtaatgcactt

SEQ ID NO: 3892941 - DNA, 25 bp, Homo sapien
gaaattgaaagcattcagtaatgca

SEQ ID NO: 3892942 - DNA, 25 bp, Homo sapien
aaattgaaagcattcagtaatgcac

SEQ ID NO: 3892943 - DNA, 25 bp, Homo sapien
atcttctttgtatagctcctatttt

SEQ ID NO: 3892944 - DNA, 25 bp, Homo sapien
tcttctttgtatagctcctatttta

SEQ ID NO: 3892945 - DNA, 25 bp, Homo sapien
cttctttgtatagctcctattttag

SEQ ID NO: 3892946 - DNA, 25 bp, Homo sapien
tttgtatagctcctattttagtata

SEQ ID NO: 3892947 - DNA, 25 bp, Homo sapien
ttttcctgcataccaaccagacccc

SEQ ID NO: 3892948 - DNA, 25 bp, Homo sapien
tcttttcctgcataccaaccagacc

SEQ ID NO: 3892949 - DNA, 25 bp, Homo sapien
cttttcctgcataccaaccagaccc

SEQ ID NO: 3892950 - DNA, 25 bp, Homo sapien
ttgtgtctgcctgtaggtaggtctt

SEQ ID NO: 3892951 - DNA, 25 bp, Homo sapien
catgggactcggtgtatttctcccc

SEQ ID NO: 3892952 - DNA, 25 bp, Homo sapien
tgtgtctgcctgtaggtaggtcttg

SEQ ID NO: 3892953 - DNA, 25 bp, Homo sapien
atctctccatgggactcggtgtatt

SEQ ID NO: 3892954 - DNA, 25 bp, Homo sapien
gacatgaagcaaggaacaagtctgg

SEQ ID NO: 3892955 - DNA, 25 bp, Homo sapien
gcaatgacctgagtaaaaagtggac

SEQ ID NO: 3892956 - DNA, 25 bp, Homo sapien
cattggtcccttcacattgcttgga

SEQ ID NO: 3892957 - DNA, 25 bp, Homo sapien
caaggaacaagtctggaccaacatc

SEQ ID NO: 3892958 - DNA, 25 bp, Homo sapien
tggcgatcattcataagacctagct

SEQ ID NO: 3892959 - DNA, 25 bp, Homo sapien
tatgagtcaccgacatgaacgttcc

SEQ ID NO: 3892960 - DNA, 25 bp, Homo sapien
tgtctacctcccatatcagaaatga

SEQ ID NO: 3892961 - DNA, 25 bp, Homo sapien
cagaaatgacgcgaagatgaaacac

SEQ ID NO: 3892962 - DNA, 25 bp, Homo sapien
tataaaactccaagcgttgaccagg

SEQ ID NO: 3892963 - DNA, 25 bp, Homo sapien
aagacctagtagacgctccatgatt

SEQ ID NO: 3892964 - DNA, 25 bp, Homo sapien
gctagggcaccacactacaggatca

SEQ ID NO: 3892965 - DNA, 25 bp, Homo sapien
taccagattaattgcaagacctagt

SEQ ID NO: 3892966 - DNA, 25 bp, Homo sapien
cattagcataaagccaatctgggag

SEQ ID NO: 3892967 - DNA, 25 bp, Homo sapien
tcaaccttggcctattactcagaca

SEQ ID NO: 3892968 - DNA, 25 bp, Homo sapien
gaccaggagttagaagatcagaccc

SEQ ID NO: 3892969 - DNA, 25 bp, Homo sapien
gagctatttggttaatgccccagaa

SEQ ID NO: 3892970 - DNA, 25 bp, Homo sapien
gggcaagatattgaatctggttacc

SEQ ID NO: 3892971 - DNA, 25 bp, Homo sapien
ggcaagatattgaatctggttacca

SEQ ID NO: 3892972 - DNA, 25 bp, Homo sapien
gcaagatattgaatctggttaccac

SEQ ID NO: 3892973 - DNA, 25 bp, Homo sapien
tgggcaagatattgaatctggttac

SEQ ID NO: 3892974 - DNA, 25 bp, Homo sapien
tagacatgcagcaaactacttagcc

SEQ ID NO: 3892975 - DNA, 25 bp, Homo sapien
tatgggaccagacaggtagacatgc

SEQ ID NO: 3892976 - DNA, 25 bp, Homo sapien
gaaggttcaattcattatgggacca

SEQ ID NO: 3892977 - DNA, 25 bp, Homo sapien
tgtttctaccgagacacaggaaggg

SEQ ID NO: 3892978 - DNA, 25 bp, Homo sapien
tgtgccagccaagaatgtgaccctg

SEQ ID NO: 3892979 - DNA, 25 bp, Homo sapien
gccatctgtagatgtgccagccaag

SEQ ID NO: 3892980 - DNA, 25 bp, Homo sapien
gttccagcgaaaaactgcagttgtt

SEQ ID NO: 3892981 - DNA, 25 bp, Homo sapien
tcagtgacaggcatcaaacgataac

SEQ ID NO: 3892982 - DNA, 25 bp, Homo sapien
tttctctctaaactattgctttagc

SEQ ID NO: 3892983 - DNA, 25 bp, Homo sapien
tacatgtgttcattagttatcaacc

SEQ ID NO: 3892984 - DNA, 25 bp, Homo sapien
tcttggattgattacatgtgttcat

SEQ ID NO: 3892985 - DNA, 25 bp, Homo sapien
gttcattagttatcaacctttcttc

SEQ ID NO: 3892986 - DNA, 25 bp, Homo sapien
cttcctcttggaactaagtcaggtc

SEQ ID NO: 3892987 - DNA, 25 bp, Homo sapien
ttcctcttggaactaagtcaggtcc

SEQ ID NO: 3892988 - DNA, 25 bp, Homo sapien
cctcttggaactaagtcaggtccag

SEQ ID NO: 3892989 - DNA, 25 bp, Homo sapien
tcttggaactaagtcaggtccaggg

SEQ ID NO: 3892990 - DNA, 25 bp, Homo sapien
taaaagactaaagtcctcataatat

SEQ ID NO: 3892991 - DNA, 25 bp, Homo sapien
gtaaaagactaaagtcctcataata

SEQ ID NO: 3892992 - DNA, 25 bp, Homo sapien
aaagactaaagtcctcataatatac

SEQ ID NO: 3892993 - DNA, 25 bp, Homo sapien
aaaagactaaagtcctcataatata

SEQ ID NO: 3892994 - DNA, 25 bp, Homo sapien
ctaaaagtctgaactcgaagtgtca

SEQ ID NO: 3892995 - DNA, 25 bp, Homo sapien
tctgaactcgaagtgtcagcagggc

SEQ ID NO: 3892996 - DNA, 25 bp, Homo sapien
taaacaacaaaaccgtatagtctca

SEQ ID NO: 3892997 - DNA, 25 bp, Homo sapien
caacaaaaccgtatagtctcacagt

SEQ ID NO: 3892998 - DNA, 25 bp, Homo sapien
ttaggaagtccaacctgaaagaggc

SEQ ID NO: 3892999 - DNA, 25 bp, Homo sapien
tggatgttccacgatgctgattagg

SEQ ID NO: 3893000 - DNA, 25 bp, Homo sapien
gagagaccatcctttgaccaagtgg

SEQ ID NO: 3893001 - DNA, 25 bp, Homo sapien
cagcaaagacggatgaagagagacc

SEQ ID NO: 3893002 - DNA, 25 bp, Homo sapien
ttctgctacaaggtaaggacttcct

SEQ ID NO: 3893003 - DNA, 25 bp, Homo sapien
cattgggatgcagtgtcgtgagaca

SEQ ID NO: 3893004 - DNA, 25 bp, Homo sapien
taatgcattcaggacatgacagggc

SEQ ID NO: 3893005 - DNA, 25 bp, Homo sapien
ctgcaaattagagggaacagtcggg

SEQ ID NO: 3893006 - DNA, 25 bp, Homo sapien
taaggatacaggtgggcagtgctcc

SEQ ID NO: 3893007 - DNA, 25 bp, Homo sapien
atccactgggtgcagacacgcaaag

SEQ ID NO: 3893008 - DNA, 25 bp, Homo sapien
ccaaaggtactggttggtcactcag

SEQ ID NO: 3893009 - DNA, 25 bp, Homo sapien
gcaaagatgtgcaacttctcctctg

SEQ ID NO: 3893010 - DNA, 25 bp, Homo sapien
gagagtgtggtctgaattcacattg

SEQ ID NO: 3893011 - DNA, 25 bp, Homo sapien
tggggcaacccattaacaaatgctc

SEQ ID NO: 3893012 - DNA, 25 bp, Homo sapien
cctggcaagacaactaagccctctg

SEQ ID NO: 3893013 - DNA, 25 bp, Homo sapien
tcacattgagagacacctgttttct

SEQ ID NO: 3893014 - DNA, 25 bp, Homo sapien
ataaaactcaatcctaaatgctgtg

SEQ ID NO: 3893015 - DNA, 25 bp, Homo sapien
cctaaaccccacaagaccagactgg

SEQ ID NO: 3893016 - DNA, 25 bp, Homo sapien
ggagtaccgaatagtataaaactca

SEQ ID NO: 3893017 - DNA, 25 bp, Homo sapien
ggcaggtcagaagcatcatcatcgt

SEQ ID NO: 3893018 - DNA, 25 bp, Homo sapien
gtagtgctgggtttcctgaagaccc

SEQ ID NO: 3893019 - DNA, 25 bp, Homo sapien
cttctgtggcctctggcaggtagtg

SEQ ID NO: 3893020 - DNA, 25 bp, Homo sapien
tgtggcctctggcaggtagtgctgg

SEQ ID NO: 3893021 - DNA, 25 bp, Homo sapien
tgggtttcctgaagaccccttctca

SEQ ID NO: 3893022 - DNA, 25 bp, Homo sapien
ggacacaaagatgtgcagcaccagg

SEQ ID NO: 3893023 - DNA, 25 bp, Homo sapien
gatctagatgtaacttgccaagaaa

SEQ ID NO: 3893024 - DNA, 25 bp, Homo sapien
gccaagaaaagcagttgtaggacac

SEQ ID NO: 3893025 - DNA, 25 bp, Homo sapien
ggacactccggtcagagatccagat

SEQ ID NO: 3893026 - DNA, 25 bp, Homo sapien
actgaagctcgaagtgatttttcct

SEQ ID NO: 3893027 - DNA, 25 bp, Homo sapien
tcttttagcattagacccaaagcca

SEQ ID NO: 3893028 - DNA, 25 bp, Homo sapien
gactgtgaacttccctgtccctagg

SEQ ID NO: 3893029 - DNA, 25 bp, Homo sapien
tgtgattagaattctggatcttggc

SEQ ID NO: 3893030 - DNA, 25 bp, Homo sapien
gaatttctggcagatgattgtgcaa

SEQ ID NO: 3893031 - DNA, 25 bp, Homo sapien
gacaagggcaactgccctggactta

SEQ ID NO: 3893032 - DNA, 25 bp, Homo sapien
tcgctctgtacagtacttagaagac

SEQ ID NO: 3893033 - DNA, 25 bp, Homo sapien
tggattttggtaagccttttcgctc

SEQ ID NO: 3893034 - DNA, 25 bp, Homo sapien
cctggacttagagccaagccatcag

SEQ ID NO: 3893035 - DNA, 25 bp, Homo sapien
tcatagcatcccattaaatgtaagt

SEQ ID NO: 3893036 - DNA, 25 bp, Homo sapien
agtgtgctaatatctaatgtagagg

SEQ ID NO: 3893037 - DNA, 25 bp, Homo sapien
tagcatcccattaaatgtaagtgtg

SEQ ID NO: 3893038 - DNA, 25 bp, Homo sapien
tgtaagtgtgctaatatctaatgta

SEQ ID NO: 3893039 - DNA, 25 bp, Homo sapien
gtttagtaactctctccaggatcat

SEQ ID NO: 3893040 - DNA, 25 bp, Homo sapien
tgtttagtaactctctccaggatca

SEQ ID NO: 3893041 - DNA, 25 bp, Homo sapien
atgtttagtaactctctccaggatc

SEQ ID NO: 3893042 - DNA, 25 bp, Homo sapien
catgtttagtaactctctccaggat

SEQ ID NO: 3893043 - DNA, 25 bp, Homo sapien
cttcccgaaactggcattccctggc

SEQ ID NO: 3893044 - DNA, 25 bp, Homo sapien
gaaatctattggaaagtggacttcc

SEQ ID NO: 3893045 - DNA, 25 bp, Homo sapien
attcccagcattgaccttcccgaaa

SEQ ID NO: 3893046 - DNA, 25 bp, Homo sapien
agtggacttccaagcacacccagtc

SEQ ID NO: 3893047 - DNA, 25 bp, Homo sapien
cactgttgtcataatgcagagcccg

SEQ ID NO: 3893048 - DNA, 25 bp, Homo sapien
gtcgctgtcttatcacacaggaatg

SEQ ID NO: 3893049 - DNA, 25 bp, Homo sapien
tggtctttcaggtcgcaatctcaga

SEQ ID NO: 3893050 - DNA, 25 bp, Homo sapien
gcagagcccgctttaatcgcagcca

SEQ ID NO: 3893051 - DNA, 25 bp, Homo sapien
tgatatctctggtgtatctgggccc

SEQ ID NO: 3893052 - DNA, 25 bp, Homo sapien
gatatctctggtgtatctgggccca

SEQ ID NO: 3893053 - DNA, 25 bp, Homo sapien
tatctctggtgtatctgggcccagg

SEQ ID NO: 3893054 - DNA, 25 bp, Homo sapien
tctctggtgtatctgggcccaggct

SEQ ID NO: 3893055 - DNA, 25 bp, Homo sapien
tgtggggcataccagccatgagggt

SEQ ID NO: 3893056 - DNA, 25 bp, Homo sapien
ctgtggggcataccagccatgaggg

SEQ ID NO: 3893057 - DNA, 25 bp, Homo sapien
tggggcataccagccatgagggtag

SEQ ID NO: 3893058 - DNA, 25 bp, Homo sapien
gtggggcataccagccatgagggta

SEQ ID NO: 3893059 - DNA, 25 bp, Homo sapien
caacaggagatccaagagagccagg

SEQ ID NO: 3893060 - DNA, 25 bp, Homo sapien
tcaacaggagatccaagagagccag

SEQ ID NO: 3893061 - DNA, 25 bp, Homo sapien
ctcaacaggagatccaagagagcca

SEQ ID NO: 3893062 - DNA, 25 bp, Homo sapien
aaatcaacatgttaatccatcatgc

SEQ ID NO: 3893063 - DNA, 25 bp, Homo sapien
tgccagctaaaactgatgtcctttc

SEQ ID NO: 3893064 - DNA, 25 bp, Homo sapien
gaaatttagtaccaacaatgtctgg

SEQ ID NO: 3893065 - DNA, 25 bp, Homo sapien
acatgttaatccatcatgccagcta

SEQ ID NO: 3893066 - DNA, 25 bp, Homo sapien
cagttacagtggttctaaggcccag

SEQ ID NO: 3893067 - DNA, 25 bp, Homo sapien
gtcccagttacagtggttctaaggc

SEQ ID NO: 3893068 - DNA, 25 bp, Homo sapien
ccagttacagtggttctaaggccca

SEQ ID NO: 3893069 - DNA, 25 bp, Homo sapien
tcccagttacagtggttctaaggcc

SEQ ID NO: 3893070 - DNA, 25 bp, Homo sapien
cagtgcccacatgccgtgtggtgtt

SEQ ID NO: 3893071 - DNA, 25 bp, Homo sapien
cctgtaaggagttcatggacatgca

SEQ ID NO: 3893072 - DNA, 25 bp, Homo sapien
catacatgctgcacactaaaggcag

SEQ ID NO: 3893073 - DNA, 25 bp, Homo sapien
ctctcccatgggactggtatggcac

SEQ ID NO: 3893074 - DNA, 25 bp, Homo sapien
tggcagagtcgttgagctgatactc

SEQ ID NO: 3893075 - DNA, 25 bp, Homo sapien
ccccagagccgcatcatggcagaaa

SEQ ID NO: 3893076 - DNA, 25 bp, Homo sapien
gatactcccgggaccggttgaagca

SEQ ID NO: 3893077 - DNA, 25 bp, Homo sapien
gaagggctcggtgtcttccatccga

SEQ ID NO: 3893078 - DNA, 25 bp, Homo sapien
taccactgcatgagagatgggcatg

SEQ ID NO: 3893079 - DNA, 25 bp, Homo sapien
actgcatgagagatgggcatgctga

SEQ ID NO: 3893080 - DNA, 25 bp, Homo sapien
gttaccactgcatgagagatgggca

SEQ ID NO: 3893081 - DNA, 25 bp, Homo sapien
cactgcatgagagatgggcatgctg

SEQ ID NO: 3893082 - DNA, 25 bp, Homo sapien
tacgatgccagtggttttgaccctg

SEQ ID NO: 3893083 - DNA, 25 bp, Homo sapien
tgaagtgggtttctacgatgccagt

SEQ ID NO: 3893084 - DNA, 25 bp, Homo sapien
gaccctggttcggaggatgtcctgc

SEQ ID NO: 3893085 - DNA, 25 bp, Homo sapien
ctgaagtggaggttcttgaatgtga

SEQ ID NO: 3893086 - DNA, 25 bp, Homo sapien
ggcagggagctggtaggcgcagggt

SEQ ID NO: 3893087 - DNA, 25 bp, Homo sapien
gaggcagggagctggtaggcgcagg

SEQ ID NO: 3893088 - DNA, 25 bp, Homo sapien
agggagctggtaggcgcagggtcca

SEQ ID NO: 3893089 - DNA, 25 bp, Homo sapien
taggaggcagggagctggtaggcgc

SEQ ID NO: 3893090 - DNA, 25 bp, Homo sapien
ttgcgttcagatcgctggcctccga

SEQ ID NO: 3893091 - DNA, 25 bp, Homo sapien
aaaatgatggccgtgacgtcctcga

SEQ ID NO: 3893092 - DNA, 25 bp, Homo sapien
cgctgagcgcgacacagaaaatgat

SEQ ID NO: 3893093 - DNA, 25 bp, Homo sapien
tggagcacctggtcatagccgctga

SEQ ID NO: 3893094 - DNA, 25 bp, Homo sapien
gactgggctggtgactgacatcact

SEQ ID NO: 3893095 - DNA, 25 bp, Homo sapien
agtctgggtccaagcacggcccagg

SEQ ID NO: 3893096 - DNA, 25 bp, Homo sapien
tggtcagtgagtctgggtccaagca

SEQ ID NO: 3893097 - DNA, 25 bp, Homo sapien
ttgccccactcagcatcaagactgg

SEQ ID NO: 3893098 - DNA, 25 bp, Homo sapien
gcctgggacttgggttgaagccatc

SEQ ID NO: 3893099 - DNA, 25 bp, Homo sapien
ggcctgggacttgggttgaagccat

SEQ ID NO: 3893100 - DNA, 25 bp, Homo sapien
ccatcttccagaggtgagcgagagc

SEQ ID NO: 3893101 - DNA, 25 bp, Homo sapien
tcttccagaggtgagcgagagccca

SEQ ID NO: 3893102 - DNA, 25 bp, Homo sapien
ttacagcttttagcccggtggtcca

SEQ ID NO: 3893103 - DNA, 25 bp, Homo sapien
agagctcccacatcctagaacctga

SEQ ID NO: 3893104 - DNA, 25 bp, Homo sapien
cagacacctttgttgcaggctctca

SEQ ID NO: 3893105 - DNA, 25 bp, Homo sapien
ggtgatgctagaccctggaccagat

SEQ ID NO: 3893106 - DNA, 25 bp, Homo sapien
cggtgctgagagcaggtacgaggcc

SEQ ID NO: 3893107 - DNA, 25 bp, Homo sapien
gcttggagggtctctcagaactggt

SEQ ID NO: 3893108 - DNA, 25 bp, Homo sapien
cagaactggttttggccttggtttg

SEQ ID NO: 3893109 - DNA, 25 bp, Homo sapien
cttggtttggcaagataaggccctg

SEQ ID NO: 3893110 - DNA, 25 bp, Homo sapien
caaagtcacccagcggtgccctgag

SEQ ID NO: 3893111 - DNA, 25 bp, Homo sapien
gcagggcaagagatgcaggatgggt

SEQ ID NO: 3893112 - DNA, 25 bp, Homo sapien
agtcacccagcggtgccctgagaac

SEQ ID NO: 3893113 - DNA, 25 bp, Homo sapien
cctgagaacctgctgctttcaactc

SEQ ID NO: 3893114 - DNA, 25 bp, Homo sapien
aaattggttcaaccagtctcagggc

SEQ ID NO: 3893115 - DNA, 25 bp, Homo sapien
aattggttcaaccagtctcagggcc

SEQ ID NO: 3893116 - DNA, 25 bp, Homo sapien
aaaattggttcaaccagtctcaggg

SEQ ID NO: 3893117 - DNA, 25 bp, Homo sapien
cagtgaggtcactggagaggctcca

SEQ ID NO: 3893118 - DNA, 25 bp, Homo sapien
tccagctcacggagaggacatgcac

SEQ ID NO: 3893119 - DNA, 25 bp, Homo sapien
aattaatcccgagttggaagcagac

SEQ ID NO: 3893120 - DNA, 25 bp, Homo sapien
tgtttcattccacacgcaggcaggg

SEQ ID NO: 3893121 - DNA, 25 bp, Homo sapien
gttgttgcagatgctgtcaaaaagc

SEQ ID NO: 3893122 - DNA, 25 bp, Homo sapien
atcttctcttcaaatatgtccttct

SEQ ID NO: 3893123 - DNA, 25 bp, Homo sapien
gcttcagggattcgtgcatgcggtt

SEQ ID NO: 3893124 - DNA, 25 bp, Homo sapien
tcaaaaagcttcagggattcgtgca

SEQ ID NO: 3893125 - DNA, 25 bp, Homo sapien
caggtttttggcgatgatgacgtcc

SEQ ID NO: 3893126 - DNA, 25 bp, Homo sapien
gatgacgtccgtcacagcatcaaag

SEQ ID NO: 3893127 - DNA, 25 bp, Homo sapien
tgacttgttcttgctctcgtactgg

SEQ ID NO: 3893128 - DNA, 25 bp, Homo sapien
caggtgacgtgggtgtagatctctt

SEQ ID NO: 3893129 - DNA, 25 bp, Homo sapien
cataggcatgaaagtggcaggcaca

SEQ ID NO: 3893130 - DNA, 25 bp, Homo sapien
caacccctgggtgctaactgtagag

SEQ ID NO: 3893131 - DNA, 25 bp, Homo sapien
tcggagcagagtaagcggaacaact

SEQ ID NO: 3893132 - DNA, 25 bp, Homo sapien
acactgaatctctggtggccgcgga

SEQ ID NO: 3893133 - DNA, 25 bp, Homo sapien
gatcttctcgccaaagagatctttc

SEQ ID NO: 3893134 - DNA, 25 bp, Homo sapien
tggaggtatcgatgaagaacttgtt

SEQ ID NO: 3893135 - DNA, 25 bp, Homo sapien
ttgttacagatggagtcgaagagca

SEQ ID NO: 3893136 - DNA, 25 bp, Homo sapien
tcgaagagcatgagagactcgtgca

SEQ ID NO: 3893137 - DNA, 25 bp, Homo sapien
ctgtgtattcaggaaagcagatggt

SEQ ID NO: 3893138 - DNA, 25 bp, Homo sapien
aggaaagcagatggtcaaaggtgac

SEQ ID NO: 3893139 - DNA, 25 bp, Homo sapien
attcaggaaagcagatggtcaaagg

SEQ ID NO: 3893140 - DNA, 25 bp, Homo sapien
tgtattcaggaaagcagatggtcaa

SEQ ID NO: 3893141 - DNA, 25 bp, Homo sapien
cattagcacggaccatcagtgagga

SEQ ID NO: 3893142 - DNA, 25 bp, Homo sapien
gaggacacggtttgtgctcagaaca

SEQ ID NO: 3893143 - DNA, 25 bp, Homo sapien
ctggatgtaggcaccctgtggctga

SEQ ID NO: 3893144 - DNA, 25 bp, Homo sapien
tcagaacatgggttcctggccgagc

SEQ ID NO: 3893145 - DNA, 25 bp, Homo sapien
cggcgtcgaacaccacctggatgtt

SEQ ID NO: 3893146 - DNA, 25 bp, Homo sapien
taggcggctgcgtcttcataggtat

SEQ ID NO: 3893147 - DNA, 25 bp, Homo sapien
tcaaattgtgcttggatgtaggcgg

SEQ ID NO: 3893148 - DNA, 25 bp, Homo sapien
cagccccggaggttgttggcaatga

SEQ ID NO: 3893149 - DNA, 25 bp, Homo sapien
ataggttgctatacaggacaagagg

SEQ ID NO: 3893150 - DNA, 25 bp, Homo sapien
caaataggttgctatacaggacaag

SEQ ID NO: 3893151 - DNA, 25 bp, Homo sapien
ggtgaacttgagtcccctcctgtca

SEQ ID NO: 3893152 - DNA, 25 bp, Homo sapien
tgtatgcgcgcgcacgcaagctgtt

SEQ ID NO: 3893153 - DNA, 25 bp, Homo sapien
tagggcttcggccatttctgaaagg

SEQ ID NO: 3893154 - DNA, 25 bp, Homo sapien
gaatttgccaagagcaggacggaac

SEQ ID NO: 3893155 - DNA, 25 bp, Homo sapien
tttctatacgaacctggagtgagcg

SEQ ID NO: 3893156 - DNA, 25 bp, Homo sapien
tatcacagaaacctcaccgattggg

SEQ ID NO: 3893157 - DNA, 25 bp, Homo sapien
taggattggtcatgaaaacggcggc

SEQ ID NO: 3893158 - DNA, 25 bp, Homo sapien
taatacatagtactcggcgggacaa

SEQ ID NO: 3893159 - DNA, 25 bp, Homo sapien
cagaggtgccaacgttaaaccccat

SEQ ID NO: 3893160 - DNA, 25 bp, Homo sapien
tgaaagctttgttttgtggtagtcc

SEQ ID NO: 3893161 - DNA, 25 bp, Homo sapien
tggtagtccttttgggaagaatcca

SEQ ID NO: 3893162 - DNA, 25 bp, Homo sapien
aagccttaccttgaaatgctgttag

SEQ ID NO: 3893163 - DNA, 25 bp, Homo sapien
ccttgaacaagatgtgggccttgca

SEQ ID NO: 3893164 - DNA, 25 bp, Homo sapien
ggtttggtccttgaacaagatgtgg

SEQ ID NO: 3893165 - DNA, 25 bp, Homo sapien
tggtccttgaacaagatgtgggcct

SEQ ID NO: 3893166 - DNA, 25 bp, Homo sapien
atgggagagtaaaccttgaagggct

SEQ ID NO: 3893167 - DNA, 25 bp, Homo sapien
ttatcaaactgctgtcgttgttgtg

SEQ ID NO: 3893168 - DNA, 25 bp, Homo sapien
ccacgtcgtggggtaacatctgtta

SEQ ID NO: 3893169 - DNA, 25 bp, Homo sapien
tcatgcgtacgtcccacaaatgcag

SEQ ID NO: 3893170 - DNA, 25 bp, Homo sapien
atgcaggtgtcctgagcaccacacc

SEQ ID NO: 3893171 - DNA, 25 bp, Homo sapien
gcttgcttagtcaccacgtttgcca

SEQ ID NO: 3893172 - DNA, 25 bp, Homo sapien
gaattgtgtaatgtgaatgagccac

SEQ ID NO: 3893173 - DNA, 25 bp, Homo sapien
catgtggtgcctctggtttgccgga

SEQ ID NO: 3893174 - DNA, 25 bp, Homo sapien
gcacctgatggttcagctctgcaag

SEQ ID NO: 3893175 - DNA, 25 bp, Homo sapien
cagagtacagtgtgtttaagttctc

SEQ ID NO: 3893176 - DNA, 25 bp, Homo sapien
atctttaaggagtcacgttgttaat

SEQ ID NO: 3893177 - DNA, 25 bp, Homo sapien
gttctctacaaaagatatctggtca

SEQ ID NO: 3893178 - DNA, 25 bp, Homo sapien
ggagtcacgttgttaatttgtagta

SEQ ID NO: 3893179 - DNA, 25 bp, Homo sapien
gattatgctgttctgttgagggaaa

SEQ ID NO: 3893180 - DNA, 25 bp, Homo sapien
taatttgatttgagccataaaacac

SEQ ID NO: 3893181 - DNA, 25 bp, Homo sapien
taactctagattaggccagttcagg

SEQ ID NO: 3893182 - DNA, 25 bp, Homo sapien
tctggtattacgtttatggcaaatg

SEQ ID NO: 3893183 - DNA, 25 bp, Homo sapien
tgtatgtttcattgccaaagaaggc

SEQ ID NO: 3893184 - DNA, 25 bp, Homo sapien
ttacagtacttgttcagtcacttga

SEQ ID NO: 3893185 - DNA, 25 bp, Homo sapien
aatgttgtgctcttatgttctcggc

SEQ ID NO: 3893186 - DNA, 25 bp, Homo sapien
catagtgtttggaacagtatatgcc

SEQ ID NO: 3893187 - DNA, 25 bp, Homo sapien
ttaggatggacttatccctttggag

SEQ ID NO: 3893188 - DNA, 25 bp, Homo sapien
tgaaagctcttttgcgttctaaaac

SEQ ID NO: 3893189 - DNA, 25 bp, Homo sapien
gtaaaactactaaatgacactggaa

SEQ ID NO: 3893190 - DNA, 25 bp, Homo sapien
gagtatccaagtatagtgcagattc

SEQ ID NO: 3893191 - DNA, 25 bp, Homo sapien
tgaattgtgttgcagagaactccca

SEQ ID NO: 3893192 - DNA, 25 bp, Homo sapien
taatgtgaatcaaccgaaaactggg

SEQ ID NO: 3893193 - DNA, 25 bp, Homo sapien
ccaggccttggtttgcaagcaacag

SEQ ID NO: 3893194 - DNA, 25 bp, Homo sapien
aattggctcgatcagtagtcatagg

SEQ ID NO: 3893195 - DNA, 25 bp, Homo sapien
ttgtatgacaatgcaccaggatatg

SEQ ID NO: 3893196 - DNA, 25 bp, Homo sapien
tccctcagctgttgagcaggtacag

SEQ ID NO: 3893197 - DNA, 25 bp, Homo sapien
aaaatattctgagccacttgggaag

SEQ ID NO: 3893198 - DNA, 25 bp, Homo sapien
tggttcatccatattaactgtcaaa

SEQ ID NO: 3893199 - DNA, 25 bp, Homo sapien
tattacaaagcctaaggaacataag

SEQ ID NO: 3893200 - DNA, 25 bp, Homo sapien
taaaactaaagatgtataccatgct

SEQ ID NO: 3893201 - DNA, 25 bp, Homo sapien
tctgtggctaggaaatctaccttga

SEQ ID NO: 3893202 - DNA, 25 bp, Homo sapien
caaaggtagccatctaaaaattctg

SEQ ID NO: 3893203 - DNA, 25 bp, Homo sapien
tgcaactcccggcatgtccccttta

SEQ ID NO: 3893204 - DNA, 25 bp, Homo sapien
catgtcccctttatcgtgtttcccg

SEQ ID NO: 3893205 - DNA, 25 bp, Homo sapien
ggcatgtcccctttatcgtgtttcc

SEQ ID NO: 3893206 - DNA, 25 bp, Homo sapien
ccggcatgtcccctttatcgtgttt

SEQ ID NO: 3893207 - DNA, 25 bp, Homo sapien
agaaccacgccacgcagatcaagac

SEQ ID NO: 3893208 - DNA, 25 bp, Homo sapien
aggcacagaaccacgccacgcagat

SEQ ID NO: 3893209 - DNA, 25 bp, Homo sapien
acagaaccacgccacgcagatcaag

SEQ ID NO: 3893210 - DNA, 25 bp, Homo sapien
ccaaggcacagaaccacgccacgca

SEQ ID NO: 3893211 - DNA, 25 bp, Homo sapien
taacagcgtccgaaaactccgccat

SEQ ID NO: 3893212 - DNA, 25 bp, Homo sapien
cgtgactgaacggcgtcctgcggct

SEQ ID NO: 3893213 - DNA, 25 bp, Homo sapien
actgaacggcgtcctgcggctccag

SEQ ID NO: 3893214 - DNA, 25 bp, Homo sapien
tcaaggtttcttccgtaacagcgtc

SEQ ID NO: 3893215 - DNA, 25 bp, Homo sapien
agtccaagttcatcagttccttctg

SEQ ID NO: 3893216 - DNA, 25 bp, Homo sapien
gaaaagggtccatgtccatgacaat

SEQ ID NO: 3893217 - DNA, 25 bp, Homo sapien
tgaagcccttctaagaagtcttggc

SEQ ID NO: 3893218 - DNA, 25 bp, Homo sapien
ctttggatgaagtttgggatcacac

SEQ ID NO: 3893219 - DNA, 25 bp, Homo sapien
gctggaacttatataaatcattata

SEQ ID NO: 3893220 - DNA, 25 bp, Homo sapien
tgctggaacttatataaatcattat

SEQ ID NO: 3893221 - DNA, 25 bp, Homo sapien
ctgctggaacttatataaatcatta

SEQ ID NO: 3893222 - DNA, 25 bp, Homo sapien
ctggaacttatataaatcattatac

SEQ ID NO: 3893223 - DNA, 25 bp, Homo sapien
cagagcttgcactttgaacactaga

SEQ ID NO: 3893224 - DNA, 25 bp, Homo sapien
ttttaaagtcttacagggcaggcac

SEQ ID NO: 3893225 - DNA, 25 bp, Homo sapien
caatgcaaggactgttcaaggcaaa

SEQ ID NO: 3893226 - DNA, 25 bp, Homo sapien
gggcaggcactgtctaaggcttcca

SEQ ID NO: 3893227 - DNA, 25 bp, Homo sapien
taataatcagatgcgtatggcccca

SEQ ID NO: 3893228 - DNA, 25 bp, Homo sapien
aatcacaacagcaggtaactgcggt

SEQ ID NO: 3893229 - DNA, 25 bp, Homo sapien
taacctgtgcaaccttaccatggaa

SEQ ID NO: 3893230 - DNA, 25 bp, Homo sapien
ccaaatcaacaagaggccaagggtg

SEQ ID NO: 3893231 - DNA, 25 bp, Homo sapien
aattctgctgtcaagagaagcacag

SEQ ID NO: 3893232 - DNA, 25 bp, Homo sapien
caagagagcatggtaacctgaaagt

SEQ ID NO: 3893233 - DNA, 25 bp, Homo sapien
gcagtagtacaagcgaaagcctgat

SEQ ID NO: 3893234 - DNA, 25 bp, Homo sapien
ttaaaatgggcttaccagagactga

SEQ ID NO: 3893235 - DNA, 25 bp, Homo sapien
gatacactaatagaataatcccggg

SEQ ID NO: 3893236 - DNA, 25 bp, Homo sapien
gagacacagatagcttgaaccaggt

SEQ ID NO: 3893237 - DNA, 25 bp, Homo sapien
tgttgggcgatcatcagcacttcct

SEQ ID NO: 3893238 - DNA, 25 bp, Homo sapien
gaagtgggcttctctggatatacag

SEQ ID NO: 3893239 - DNA, 25 bp, Homo sapien
aaagtggagatgtgaggctctcttc

SEQ ID NO: 3893240 - DNA, 25 bp, Homo sapien
ggagatgtgaggctctcttctcttc

SEQ ID NO: 3893241 - DNA, 25 bp, Homo sapien
cttaaagtggagatgtgaggctctc

SEQ ID NO: 3893242 - DNA, 25 bp, Homo sapien
agtggagatgtgaggctctcttctc

SEQ ID NO: 3893243 - DNA, 25 bp, Homo sapien
ttaaagcacttactactctgcctgg

SEQ ID NO: 3893244 - DNA, 25 bp, Homo sapien
gacttaggtttgtatgctagctccc

SEQ ID NO: 3893245 - DNA, 25 bp, Homo sapien
tcctctacaaagtgggttaacaatg

SEQ ID NO: 3893246 - DNA, 25 bp, Homo sapien
caagattgagcattttatcactgag

SEQ ID NO: 3893247 - DNA, 25 bp, Homo sapien
tagaaatatcagaaagccaggaccg

SEQ ID NO: 3893248 - DNA, 25 bp, Homo sapien
atcagaaagccaggaccggaaatct

SEQ ID NO: 3893249 - DNA, 25 bp, Homo sapien
atatcagaaagccaggaccggaaat

SEQ ID NO: 3893250 - DNA, 25 bp, Homo sapien
gaaatatcagaaagccaggaccgga

SEQ ID NO: 3893251 - DNA, 25 bp, Homo sapien
gtgaattcatatttagcacaggaca

SEQ ID NO: 3893252 - DNA, 25 bp, Homo sapien
tgaattcatatttagcacaggacat

SEQ ID NO: 3893253 - DNA, 25 bp, Homo sapien
cagtgaattcatatttagcacagga

SEQ ID NO: 3893254 - DNA, 25 bp, Homo sapien
agtgaattcatatttagcacaggac

SEQ ID NO: 3893255 - DNA, 25 bp, Homo sapien
tgctgtacaggtccagggtaccacc

SEQ ID NO: 3893256 - DNA, 25 bp, Homo sapien
acaggtccagggtaccacccatgct

SEQ ID NO: 3893257 - DNA, 25 bp, Homo sapien
caggatgaaggcaatccggcgccct

SEQ ID NO: 3893258 - DNA, 25 bp, Homo sapien
ggatgaaggcaatccggcgcccttc

SEQ ID NO: 3893259 - DNA, 25 bp, Homo sapien
cacaggagatacttcaaagaaaacc

SEQ ID NO: 3893260 - DNA, 25 bp, Homo sapien
taagagacttgacaatctgcttcgg

SEQ ID NO: 3893261 - DNA, 25 bp, Homo sapien
ccacgaagggataagagacttgaca

SEQ ID NO: 3893262 - DNA, 25 bp, Homo sapien
ccagtttgttccacgaagggataag

SEQ ID NO: 3893263 - DNA, 25 bp, Homo sapien
catgaaaccagccacttatagacaa

SEQ ID NO: 3893264 - DNA, 25 bp, Homo sapien
accatgaaaccagccacttatagac

SEQ ID NO: 3893265 - DNA, 25 bp, Homo sapien
atgaaaccagccacttatagacaaa

SEQ ID NO: 3893266 - DNA, 25 bp, Homo sapien
ggaccatgaaaccagccacttatag

SEQ ID NO: 3893267 - DNA, 25 bp, Homo sapien
tgggatgtgagggctccgaggtatg

SEQ ID NO: 3893268 - DNA, 25 bp, Homo sapien
tgtgggatgtgagggctccgaggta

SEQ ID NO: 3893269 - DNA, 25 bp, Homo sapien
atcttgtgggatgtgagggctccga

SEQ ID NO: 3893270 - DNA, 25 bp, Homo sapien
cttgtgggatgtgagggctccgagg

SEQ ID NO: 3893271 - DNA, 25 bp, Homo sapien
agtagggttgatccaatcatacaaa

SEQ ID NO: 3893272 - DNA, 25 bp, Homo sapien
gtagggttgatccaatcatacaaaa

SEQ ID NO: 3893273 - DNA, 25 bp, Homo sapien
caaggcctcacagactttcgtgaat

SEQ ID NO: 3893274 - DNA, 25 bp, Homo sapien
aaggcctcacagactttcgtgaatt

SEQ ID NO: 3893275 - DNA, 25 bp, Homo sapien
tgctcattgctctgttggctgttgt

SEQ ID NO: 3893276 - DNA, 25 bp, Homo sapien
ttgttgctgatggccatctgattat

SEQ ID NO: 3893277 - DNA, 25 bp, Homo sapien
actatggctagtcccttcttcagtg

SEQ ID NO: 3893278 - DNA, 25 bp, Homo sapien
tgatggccatctgattattctctgg

SEQ ID NO: 3893279 - DNA, 25 bp, Homo sapien
aatgataggcgaatgccatttccac

SEQ ID NO: 3893280 - DNA, 25 bp, Homo sapien
tcaatgataggcgaatgccatttcc

SEQ ID NO: 3893281 - DNA, 25 bp, Homo sapien
tagtcaatgataggcgaatgccatt

SEQ ID NO: 3893282 - DNA, 25 bp, Homo sapien
cattagtcaatgataggcgaatgcc

SEQ ID NO: 3893283 - DNA, 25 bp, Homo sapien
agtgaccggtcttccaatgcctcag

SEQ ID NO: 3893284 - DNA, 25 bp, Homo sapien
taaagtgtagtgaccggtcttccaa

SEQ ID NO: 3893285 - DNA, 25 bp, Homo sapien
catgaattaaagtgtagtgaccggt

SEQ ID NO: 3893286 - DNA, 25 bp, Homo sapien
tatggtcatgaattaaagtgtagtg

SEQ ID NO: 3893287 - DNA, 25 bp, Homo sapien
taagaagtaaaaccgccatattctg

SEQ ID NO: 3893288 - DNA, 25 bp, Homo sapien
tgtaagaagtaaaaccgccatattc

SEQ ID NO: 3893289 - DNA, 25 bp, Homo sapien
aagtaaaaccgccatattctggctc

SEQ ID NO: 3893290 - DNA, 25 bp, Homo sapien
gcaatgtaagaagtaaaaccgccat

SEQ ID NO: 3893291 - DNA, 25 bp, Homo sapien
ggttaatatgcttgacaaatttcag

SEQ ID NO: 3893292 - DNA, 25 bp, Homo sapien
tatgcttgacaaatttcagagtctc

SEQ ID NO: 3893293 - DNA, 25 bp, Homo sapien
agaattgctttctggattcactgtt

SEQ ID NO: 3893294 - DNA, 25 bp, Homo sapien
aagaattgctttctggattcactgt

SEQ ID NO: 3893295 - DNA, 25 bp, Homo sapien
tacacaggccacaattgcaggatgg

SEQ ID NO: 3893296 - DNA, 25 bp, Homo sapien
catgtgatggtaggccagacccttt

SEQ ID NO: 3893297 - DNA, 25 bp, Homo sapien
tgcccggctgcaatcacgtatgagt

SEQ ID NO: 3893298 - DNA, 25 bp, Homo sapien
tgtcagaattctaaggcccagcatg

SEQ ID NO: 3893299 - DNA, 25 bp, Homo sapien
agttgttgacattggccccaggccc

SEQ ID NO: 3893300 - DNA, 25 bp, Homo sapien
caacatcagagttgggctcctaggg

SEQ ID NO: 3893301 - DNA, 25 bp, Homo sapien
acatttcttaactggctagggtgca

SEQ ID NO: 3893302 - DNA, 25 bp, Homo sapien
tatccatatcaagggcatacctgct

SEQ ID NO: 3893303 - DNA, 25 bp, Homo sapien
gagttggggagaacaagctgcaacc

SEQ ID NO: 3893304 - DNA, 25 bp, Homo sapien
catagggcgggtagtcagaaaagat

SEQ ID NO: 3893305 - DNA, 25 bp, Homo sapien
gcaacccacaggcatgggctggagc

SEQ ID NO: 3893306 - DNA, 25 bp, Homo sapien
tcctaatttccagtatggttaacat

SEQ ID NO: 3893307 - DNA, 25 bp, Homo sapien
gaggctctgagctctaagacagagt

SEQ ID NO: 3893308 - DNA, 25 bp, Homo sapien
tgaggctctgagctctaagacagag

SEQ ID NO: 3893309 - DNA, 25 bp, Homo sapien
agatgaggctctgagctctaagaca

SEQ ID NO: 3893310 - DNA, 25 bp, Homo sapien
cacagtaatttgatcctgttgatgt

SEQ ID NO: 3893311 - DNA, 25 bp, Homo sapien
gatcactgcttgtcgggatgcaatt

SEQ ID NO: 3893312 - DNA, 25 bp, Homo sapien
ggtgaaccccgggtgctaagaatga

SEQ ID NO: 3893313 - DNA, 25 bp, Homo sapien
tgctttggatcacaccctggtgaac

SEQ ID NO: 3893314 - DNA, 25 bp, Homo sapien
tagggcttcagagtccaattttgct

SEQ ID NO: 3893315 - DNA, 25 bp, Homo sapien
tattttaaacccttagtgcatgcag

SEQ ID NO: 3893316 - DNA, 25 bp, Homo sapien
tattacagtcatacataacctcagc

SEQ ID NO: 3893317 - DNA, 25 bp, Homo sapien
taggatgcacctttatattacagtc

SEQ ID NO: 3893318 - DNA, 25 bp, Homo sapien
tgcaggtatatatgtagactcatgc

SEQ ID NO: 3893319 - DNA, 25 bp, Homo sapien
tctacagagaggcaagtataacctt

SEQ ID NO: 3893320 - DNA, 25 bp, Homo sapien
gcgtattgaaccctgagcttggcta

SEQ ID NO: 3893321 - DNA, 25 bp, Homo sapien
tctcagcattaaccaggcagtcagc

SEQ ID NO: 3893322 - DNA, 25 bp, Homo sapien
aaccagcatgtcagtgcatccaggg

SEQ ID NO: 3893323 - DNA, 25 bp, Homo sapien
ggtgtggcctcctctaatttcagaa

SEQ ID NO: 3893324 - DNA, 25 bp, Homo sapien
ctcttcgttgctctggcaaagcagg

SEQ ID NO: 3893325 - DNA, 25 bp, Homo sapien
atctcttagctcttcgttgctctgg

SEQ ID NO: 3893326 - DNA, 25 bp, Homo sapien
gtggcctcctctaatttcagaatca

SEQ ID NO: 3893327 - DNA, 25 bp, Homo sapien
cagagtgactaagaagtgctgcttc

SEQ ID NO: 3893328 - DNA, 25 bp, Homo sapien
cagggcctcctgttgaacgaagtgt

SEQ ID NO: 3893329 - DNA, 25 bp, Homo sapien
cgaagtgttctgttcccatcgaagc

SEQ ID NO: 3893330 - DNA, 25 bp, Homo sapien
gcttctcagggatgggcagatagac

SEQ ID NO: 3893331 - DNA, 25 bp, Homo sapien
gaagatgaagatgctgaacatactg

SEQ ID NO: 3893332 - DNA, 25 bp, Homo sapien
ctggtatatccccagggaggtcgtc

SEQ ID NO: 3893333 - DNA, 25 bp, Homo sapien
tgctgaacatactggtatatcccca

SEQ ID NO: 3893334 - DNA, 25 bp, Homo sapien
atatccccagggaggtcgtccaagg

SEQ ID NO: 3893335 - DNA, 25 bp, Homo sapien
gtatgtttcaggctcgtagatcccc

SEQ ID NO: 3893336 - DNA, 25 bp, Homo sapien
tttgtatgtttcaggctcgtagatc

SEQ ID NO: 3893337 - DNA, 25 bp, Homo sapien
tatgtttcaggctcgtagatcccca

SEQ ID NO: 3893338 - DNA, 25 bp, Homo sapien
gtttcaggctcgtagatccccacat

SEQ ID NO: 3893339 - DNA, 25 bp, Homo sapien
cccatggaaccacggattttggact

SEQ ID NO: 3893340 - DNA, 25 bp, Homo sapien
ggatttggatccatggtcatcagca

SEQ ID NO: 3893341 - DNA, 25 bp, Homo sapien
gactgagagcttctaacgaggagaa

SEQ ID NO: 3893342 - DNA, 25 bp, Homo sapien
tgggcctcagtctgacccatggaac

SEQ ID NO: 3893343 - DNA, 25 bp, Homo sapien
cagacgccctgcacacggcccagcc

SEQ ID NO: 3893344 - DNA, 25 bp, Homo sapien
tgcacacggcccagccagatgcctt

SEQ ID NO: 3893345 - DNA, 25 bp, Homo sapien
acgccctgcacacggcccagccaga

SEQ ID NO: 3893346 - DNA, 25 bp, Homo sapien
gggccagacgccctgcacacggccc

SEQ ID NO: 3893347 - DNA, 25 bp, Homo sapien
gacatgcagacacattccctggggt

SEQ ID NO: 3893348 - DNA, 25 bp, Homo sapien
cagacatgcagacacattccctggg

SEQ ID NO: 3893349 - DNA, 25 bp, Homo sapien
catgcagacacattccctggggtcc

SEQ ID NO: 3893350 - DNA, 25 bp, Homo sapien
atgcagacacattccctggggtcca

SEQ ID NO: 3893351 - DNA, 25 bp, Homo sapien
ccaccacaaacgtgaggatggagat

SEQ ID NO: 3893352 - DNA, 25 bp, Homo sapien
gagccaccacaaacgtgaggatgga

SEQ ID NO: 3893353 - DNA, 25 bp, Homo sapien
gacagagccaccacaaacgtgagga

SEQ ID NO: 3893354 - DNA, 25 bp, Homo sapien
acaggacagagccaccacaaacgtg

SEQ ID NO: 3893355 - DNA, 25 bp, Homo sapien
ttccaatatgttttacagttgcagg

SEQ ID NO: 3893356 - DNA, 25 bp, Homo sapien
acagttgcaggttgtgcatttgcag

SEQ ID NO: 3893357 - DNA, 25 bp, Homo sapien
caggttgtgcatttgcagttgtctc

SEQ ID NO: 3893358 - DNA, 25 bp, Homo sapien
aggttgtgcatttgcagttgtctcc

SEQ ID NO: 3893359 - DNA, 25 bp, Homo sapien
ccgggcacatttggcacagcccggg

SEQ ID NO: 3893360 - DNA, 25 bp, Homo sapien
cccgggcacatttggcacagcccgg

SEQ ID NO: 3893361 - DNA, 25 bp, Homo sapien
ctagctcttctcctcaactcctcct

SEQ ID NO: 3893362 - DNA, 25 bp, Homo sapien
ccttctttgttgattgtagaaaatt

SEQ ID NO: 3893363 - DNA, 25 bp, Homo sapien
ctccttctttgttgattgtagaaaa

SEQ ID NO: 3893364 - DNA, 25 bp, Homo sapien
tcctccttctttgttgattgtagaa

SEQ ID NO: 3893365 - DNA, 25 bp, Homo sapien
gtggagaaaaaggcgctttgcgtat

SEQ ID NO: 3893366 - DNA, 25 bp, Homo sapien
ctagaattctccaggacgccagatc

SEQ ID NO: 3893367 - DNA, 25 bp, Homo sapien
ttctagaattctccaggacgccaga

SEQ ID NO: 3893368 - DNA, 25 bp, Homo sapien
aggcgctttgcgtatttcccagctc

SEQ ID NO: 3893369 - DNA, 25 bp, Homo sapien
gcatccgcgtgcacgacccactcgc

SEQ ID NO: 3893370 - DNA, 25 bp, Homo sapien
gcaggggacgtgctcgccgcagcag

SEQ ID NO: 3893371 - DNA, 25 bp, Homo sapien
ccgctgtgcgcgcactgccagccca

SEQ ID NO: 3893372 - DNA, 25 bp, Homo sapien
ccactgcgtggaagcgcgcacgtac

SEQ ID NO: 3893373 - DNA, 25 bp, Homo sapien
gcccgcgcgtgcgcccccactccca

SEQ ID NO: 3893374 - DNA, 25 bp, Homo sapien
cccgcgcgtgcgcccccactcccac

SEQ ID NO: 3893375 - DNA, 25 bp, Homo sapien
caggtggcgatgcttttatagcctc

SEQ ID NO: 3893376 - DNA, 25 bp, Homo sapien
ctttccgtttgtgcgcttgggctcc

SEQ ID NO: 3893377 - DNA, 25 bp, Homo sapien
tccggcgcacgcactgcatctgtcg

SEQ ID NO: 3893378 - DNA, 25 bp, Homo sapien
ccgcccctgccgtgtgtgtgcactg

SEQ ID NO: 3893379 - DNA, 25 bp, Homo sapien
ggaggcggtgaacgggcttctccaa

SEQ ID NO: 3893380 - DNA, 25 bp, Homo sapien
agcagctggaggcggtgaacgggct

SEQ ID NO: 3893381 - DNA, 25 bp, Homo sapien
tccaagcaactggacgcgcggcttg

SEQ ID NO: 3893382 - DNA, 25 bp, Homo sapien
ggcggtgaacgggcttctccaagca

SEQ ID NO: 3893383 - DNA, 25 bp, Homo sapien
agggcaggggcaggtctcagggtcc

SEQ ID NO: 3893384 - DNA, 25 bp, Homo sapien
agaagggcaggggcaggtctcaggg

SEQ ID NO: 3893385 - DNA, 25 bp, Homo sapien
ggcaggggcaggtctcagggtccat

SEQ ID NO: 3893386 - DNA, 25 bp, Homo sapien
aagggcaggggcaggtctcagggtc

SEQ ID NO: 3893387 - DNA, 25 bp, Homo sapien
gcgcagtgcgcaggatgcgagcggg

SEQ ID NO: 3893388 - DNA, 25 bp, Homo sapien
ttctttgcaggtacaagggcgcgca

SEQ ID NO: 3893389 - DNA, 25 bp, Homo sapien
ccaagtgtccttgagcgaaggcgca

SEQ ID NO: 3893390 - DNA, 25 bp, Homo sapien
catgcccgcccttcacgaggtgaag

SEQ ID NO: 3893391 - DNA, 25 bp, Homo sapien
caggaagggttaatgtggacgaact

SEQ ID NO: 3893392 - DNA, 25 bp, Homo sapien
ctagagagggcgacgccacaggaag

SEQ ID NO: 3893393 - DNA, 25 bp, Homo sapien
atgtggacgaactcgggtccccacg

SEQ ID NO: 3893394 - DNA, 25 bp, Homo sapien
gcgacgccacaggaagggttaatgt

SEQ ID NO: 3893395 - DNA, 25 bp, Homo sapien
ggaggtgcatttgcatccctcgcac

SEQ ID NO: 3893396 - DNA, 25 bp, Homo sapien
ttgcatccctcgcacttgcaggagt

SEQ ID NO: 3893397 - DNA, 25 bp, Homo sapien
gcatttgcatccctcgcacttgcag

SEQ ID NO: 3893398 - DNA, 25 bp, Homo sapien
tcgcacttgcaggagtccgcgcagg

SEQ ID NO: 3893399 - DNA, 25 bp, Homo sapien
cagcatctatgtcgcggcagtggca

SEQ ID NO: 3893400 - DNA, 25 bp, Homo sapien
caaactgagaggatccgtaaggccg

SEQ ID NO: 3893401 - DNA, 25 bp, Homo sapien
gcatattacactgccgtgagctggg

SEQ ID NO: 3893402 - DNA, 25 bp, Homo sapien
gcaagagtcagaaaccacgggatcg

SEQ ID NO: 3893403 - DNA, 25 bp, Homo sapien
ttggcacacttctcacactccgcag

SEQ ID NO: 3893404 - DNA, 25 bp, Homo sapien
cagtccttggcacacttctcacact

SEQ ID NO: 3893405 - DNA, 25 bp, Homo sapien
tgcctctccgcctttgcacacacag

SEQ ID NO: 3893406 - DNA, 25 bp, Homo sapien
tctcacactccgcagggcagcagga

SEQ ID NO: 3893407 - DNA, 25 bp, Homo sapien
ttcaccacaggcataggtggcactg

SEQ ID NO: 3893408 - DNA, 25 bp, Homo sapien
acttcaccacaggcataggtggcac

SEQ ID NO: 3893409 - DNA, 25 bp, Homo sapien
cactgagccacctggcactatctcc

SEQ ID NO: 3893410 - DNA, 25 bp, Homo sapien
cttcaccacaggcataggtggcact

SEQ ID NO: 3893411 - DNA, 25 bp, Homo sapien
gctgcttgcattcccaaaccggttg

SEQ ID NO: 3893412 - DNA, 25 bp, Homo sapien
ggttacaactctgtagcagccaagg

SEQ ID NO: 3893413 - DNA, 25 bp, Homo sapien
tactcgaacctgagccgttagcgcg

SEQ ID NO: 3893414 - DNA, 25 bp, Homo sapien
tgcagcatcacagtaaacccgtggg

SEQ ID NO: 3893415 - DNA, 25 bp, Homo sapien
tgaaggcggcccacttgcgcctcgg

SEQ ID NO: 3893416 - DNA, 25 bp, Homo sapien
ccctgaaggcggcccacttgcgcct

SEQ ID NO: 3893417 - DNA, 25 bp, Homo sapien
ctcggggacgcctcggcgcggaagg

SEQ ID NO: 3893418 - DNA, 25 bp, Homo sapien
tgcgcctcggggacgcctcggcgcg

SEQ ID NO: 3893419 - DNA, 25 bp, Homo sapien
agtgcagcgcggcaagcagtgttta

SEQ ID NO: 3893420 - DNA, 25 bp, Homo sapien
agccgggacgagtgcaaaagccccg

SEQ ID NO: 3893421 - DNA, 25 bp, Homo sapien
gcagtgtttatagctagaaagagcc

SEQ ID NO: 3893422 - DNA, 25 bp, Homo sapien
gcgctgagtcacttgcggctccagg

SEQ ID NO: 3893423 - DNA, 25 bp, Homo sapien
ctacactgggcatccccagcctctt

SEQ ID NO: 3893424 - DNA, 25 bp, Homo sapien
acactgggcatccccagcctcttac

SEQ ID NO: 3893425 - DNA, 25 bp, Homo sapien
tacactgggcatccccagcctctta

SEQ ID NO: 3893426 - DNA, 25 bp, Homo sapien
tcagaaattgcttctctagcgctac

SEQ ID NO: 3893427 - DNA, 25 bp, Homo sapien
actcctgtcctgaaattgagtgacc

SEQ ID NO: 3893428 - DNA, 25 bp, Homo sapien
gtcctgaaattgagtgaccagagaa

SEQ ID NO: 3893429 - DNA, 25 bp, Homo sapien
ctttgggaaggagcaactcctgtcc

SEQ ID NO: 3893430 - DNA, 25 bp, Homo sapien
gggctccgaataacctagaatggag

SEQ ID NO: 3893431 - DNA, 25 bp, Homo sapien
ctcagtccacaaccgattcctggga

SEQ ID NO: 3893432 - DNA, 25 bp, Homo sapien
cctgaacaagggacggcgtactaag

SEQ ID NO: 3893433 - DNA, 25 bp, Homo sapien
tgagaaccgtccctggatacctgaa

SEQ ID NO: 3893434 - DNA, 25 bp, Homo sapien
tgcatttgcaggagccggcgcaggt

SEQ ID NO: 3893435 - DNA, 25 bp, Homo sapien
tttgcactctttgcatttgcaggag

SEQ ID NO: 3893436 - DNA, 25 bp, Homo sapien
ggaggtgcatttgcactctttgcat

SEQ ID NO: 3893437 - DNA, 25 bp, Homo sapien
gagccggcgcaggtgcaggagtcac

SEQ ID NO: 3893438 - DNA, 25 bp, Homo sapien
agaggaaagagaggatcccacttac

SEQ ID NO: 3893439 - DNA, 25 bp, Homo sapien
ggtagaggaaagagaggatcccact

SEQ ID NO: 3893440 - DNA, 25 bp, Homo sapien
gggtagaggaaagagaggatcccac

SEQ ID NO: 3893441 - DNA, 25 bp, Homo sapien
aggatggtggagaggggacaggctg

SEQ ID NO: 3893442 - DNA, 25 bp, Homo sapien
gaggcaacaatttccgcgcaatggg

SEQ ID NO: 3893443 - DNA, 25 bp, Homo sapien
tgagtactagcgacaccgggaataa

SEQ ID NO: 3893444 - DNA, 25 bp, Homo sapien
ccgggaataaggattcctgctctcc

SEQ ID NO: 3893445 - DNA, 25 bp, Homo sapien
gctctccctgataaggatcactgag

SEQ ID NO: 3893446 - DNA, 25 bp, Homo sapien
ttgtccgacgcccctttgcagatgc

SEQ ID NO: 3893447 - DNA, 25 bp, Homo sapien
gtccgacgcccctttgcagatgcag

SEQ ID NO: 3893448 - DNA, 25 bp, Homo sapien
ggcacacttggcacagcccacaggg

SEQ ID NO: 3893449 - DNA, 25 bp, Homo sapien
gcagatgcagccctgggcacacttg

SEQ ID NO: 3893450 - DNA, 25 bp, Homo sapien
tagcaaacggtcacggtcagggttg

SEQ ID NO: 3893451 - DNA, 25 bp, Homo sapien
gaaaaaggaatatagcaaacggtca

SEQ ID NO: 3893452 - DNA, 25 bp, Homo sapien
tccaggtttgtggaagtcgcgttct

SEQ ID NO: 3893453 - DNA, 25 bp, Homo sapien
tggaagtcgcgttctttacatctgg

SEQ ID NO: 3893454 - DNA, 25 bp, Homo sapien
cattgcctgtcactatccccgccat

SEQ ID NO: 3893455 - DNA, 25 bp, Homo sapien
gcattgcctgtcactatccccgcca

SEQ ID NO: 3893456 - DNA, 25 bp, Homo sapien
agccggtgtgcaaccccagcttcgt

SEQ ID NO: 3893457 - DNA, 25 bp, Homo sapien
gagcgttccgggaacccagcctctg

SEQ ID NO: 3893458 - DNA, 25 bp, Homo sapien
agcctctggtggtcgcgatattccc

SEQ ID NO: 3893459 - DNA, 25 bp, Homo sapien
tctgcggtatttcgccattcccgga

SEQ ID NO: 3893460 - DNA, 25 bp, Homo sapien
gtcgtccgcggcgtccgtgccgtcc

SEQ ID NO: 3893461 - DNA, 25 bp, Homo sapien
tgcccgcgcaacttccccatattcc

SEQ ID NO: 3893462 - DNA, 25 bp, Homo sapien
gctcgctcaggcctgtgcgcccggt

SEQ ID NO: 3893463 - DNA, 25 bp, Homo sapien
gctcaggcctgtgcgcccggtcgtc

SEQ ID NO: 3893464 - DNA, 25 bp, Homo sapien
ttcgagccaagaaatgacgggagag

SEQ ID NO: 3893465 - DNA, 25 bp, Homo sapien
tgggcctcctgtgggtacgtggagg

SEQ ID NO: 3893466 - DNA, 25 bp, Homo sapien
gagatgggaccggacgcagaggccc

SEQ ID NO: 3893467 - DNA, 25 bp, Homo sapien
gcagctggaaggcacgttggagcct

SEQ ID NO: 3893468 - DNA, 25 bp, Homo sapien
gtggcgcaggagcagttggggtcca

SEQ ID NO: 3893469 - DNA, 25 bp, Homo sapien
cagtggcgcaggagcagttggggtc

SEQ ID NO: 3893470 - DNA, 25 bp, Homo sapien
agtggcgcaggagcagttggggtcc

SEQ ID NO: 3893471 - DNA, 25 bp, Homo sapien
tggcgcaggagcagttggggtccat

SEQ ID NO: 3893472 - DNA, 25 bp, Homo sapien
ctctttgcacttgcaggagctggca

SEQ ID NO: 3893473 - DNA, 25 bp, Homo sapien
tttgcacttgcaggagctggcacag

SEQ ID NO: 3893474 - DNA, 25 bp, Homo sapien
cacttgcaggagctggcacaggagc

SEQ ID NO: 3893475 - DNA, 25 bp, Homo sapien
tgcactctttgcacttgcaggagct

SEQ ID NO: 3893476 - DNA, 25 bp, Homo sapien
gcagctgcacttctccgacgcccct

SEQ ID NO: 3893477 - DNA, 25 bp, Homo sapien
agacgcagccctgggcacacttggc

SEQ ID NO: 3893478 - DNA, 25 bp, Homo sapien
tgcacttctccgacgcccctttgca

SEQ ID NO: 3893479 - DNA, 25 bp, Homo sapien
cacagcagctgcacttctccgacgc

SEQ ID NO: 3893480 - DNA, 25 bp, Homo sapien
tacatctgggagcagggctgtcccc

SEQ ID NO: 3893481 - DNA, 25 bp, Homo sapien
catctgggagcagggctgtccccac

SEQ ID NO: 3893482 - DNA, 25 bp, Homo sapien
ttacatctgggagcagggctgtccc

SEQ ID NO: 3893483 - DNA, 25 bp, Homo sapien
acatctgggagcagggctgtcccca

SEQ ID NO: 3893484 - DNA, 25 bp, Homo sapien
tagcaaatgctcagggttgtatgaa

SEQ ID NO: 3893485 - DNA, 25 bp, Homo sapien
agcaaatgctcagggttgtatgaaa

SEQ ID NO: 3893486 - DNA, 25 bp, Homo sapien
gtagcaaatgctcagggttgtatga

SEQ ID NO: 3893487 - DNA, 25 bp, Homo sapien
gcaggtacgcggtgttcccgaagtc

SEQ ID NO: 3893488 - DNA, 25 bp, Homo sapien
ctggctgctctatttatagacggag

SEQ ID NO: 3893489 - DNA, 25 bp, Homo sapien
cctttggagcccgttcgctcgggtg

SEQ ID NO: 3893490 - DNA, 25 bp, Homo sapien
gctcacaccagtgagacgaacaagc

SEQ ID NO: 3893491 - DNA, 25 bp, Homo sapien
tggcgcaagagcagttggggtccat

SEQ ID NO: 3893492 - DNA, 25 bp, Homo sapien
cagtggcgcaagagcagttggggtc

SEQ ID NO: 3893493 - DNA, 25 bp, Homo sapien
gtggcgcaagagcagttggggtcca

SEQ ID NO: 3893494 - DNA, 25 bp, Homo sapien
agtggcgcaagagcagttggggtcc

SEQ ID NO: 3893495 - DNA, 25 bp, Homo sapien
ccaggaatattgagactgcgagcca

SEQ ID NO: 3893496 - DNA, 25 bp, Homo sapien
gatgtggagcagttcagccttgagc

SEQ ID NO: 3893497 - DNA, 25 bp, Homo sapien
ttaactctgacgtagaggcccaggg

SEQ ID NO: 3893498 - DNA, 25 bp, Homo sapien
gaaagcatctaacgaagtactggag

SEQ ID NO: 3893499 - DNA, 25 bp, Homo sapien
ggagccggcgcacgtgcaggagcca

SEQ ID NO: 3893500 - DNA, 25 bp, Homo sapien
tgcacttgcaggagccggcgcacgt

SEQ ID NO: 3893501 - DNA, 25 bp, Homo sapien
ctctttgcacttgcaggagccggcg

SEQ ID NO: 3893502 - DNA, 25 bp, Homo sapien
caggagccggcgcacgtgcaggagc

SEQ ID NO: 3893503 - DNA, 25 bp, Homo sapien
agattcctggagatggccccgcact

SEQ ID NO: 3893504 - DNA, 25 bp, Homo sapien
gagggaatgacacgggcaatgaggg

SEQ ID NO: 3893505 - DNA, 25 bp, Homo sapien
agcctggagagggaatgacacgggc

SEQ ID NO: 3893506 - DNA, 25 bp, Homo sapien
ctgccccatctgaatttagggcaga

SEQ ID NO: 3893507 - DNA, 25 bp, Homo sapien
tgtcctgccccatctgaatttaggg

SEQ ID NO: 3893508 - DNA, 25 bp, Homo sapien
gagagtgagaggtggcagtagactt

SEQ ID NO: 3893509 - DNA, 25 bp, Homo sapien
gtagacttgaccgggcacctccctg

SEQ ID NO: 3893510 - DNA, 25 bp, Homo sapien
agagtgagaggtggcagtagacttg

SEQ ID NO: 3893511 - DNA, 25 bp, Homo sapien
gcagtagacttgaccgggcacctcc

SEQ ID NO: 3893512 - DNA, 25 bp, Homo sapien
acttctccgatgcccctttgcagac

SEQ ID NO: 3893513 - DNA, 25 bp, Homo sapien
cagctgcacttctccgatgcccctt

SEQ ID NO: 3893514 - DNA, 25 bp, Homo sapien
ttctccgatgcccctttgcagacgc

SEQ ID NO: 3893515 - DNA, 25 bp, Homo sapien
ctccgatgcccctttgcagacgcag

SEQ ID NO: 3893516 - DNA, 25 bp, Homo sapien
atctgggagaagagctgttcccaca

SEQ ID NO: 3893517 - DNA, 25 bp, Homo sapien
cagcaaatggctcagtgttgtattt

SEQ ID NO: 3893518 - DNA, 25 bp, Homo sapien
aaatccaggttgtgcaggttgttct

SEQ ID NO: 3893519 - DNA, 25 bp, Homo sapien
caggttgtgcaggttgttctattta

SEQ ID NO: 3893520 - DNA, 25 bp, Homo sapien
attgtcagtcacatatttagtataa

SEQ ID NO: 3893521 - DNA, 25 bp, Homo sapien
cattctcttcgcctgagaggatgtg

SEQ ID NO: 3893522 - DNA, 25 bp, Homo sapien
caccaatgtggctttcgtttctcct

SEQ ID NO: 3893523 - DNA, 25 bp, Homo sapien
tccagtccccggatcggtcgtgtgc

SEQ ID NO: 3893524 - DNA, 25 bp, Homo sapien
gggaacactggtcggcctctctctc

SEQ ID NO: 3893525 - DNA, 25 bp, Homo sapien
gctgagcccagcataagtgccgggc

SEQ ID NO: 3893526 - DNA, 25 bp, Homo sapien
gagatctcaagcgataaatggagcg

SEQ ID NO: 3893527 - DNA, 25 bp, Homo sapien
cctgcggctgcttttctactcaggg

SEQ ID NO: 3893528 - DNA, 25 bp, Homo sapien
gataaatggagcgactgctaggccc

SEQ ID NO: 3893529 - DNA, 25 bp, Homo sapien
cagtggtgcaggagcagttggggtc

SEQ ID NO: 3893530 - DNA, 25 bp, Homo sapien
gtggtgcaggagcagttggggtcca

SEQ ID NO: 3893531 - DNA, 25 bp, Homo sapien
agtggtgcaggagcagttggggtcc

SEQ ID NO: 3893532 - DNA, 25 bp, Homo sapien
tggtgcaggagcagttggggtccat

SEQ ID NO: 3893533 - DNA, 25 bp, Homo sapien
caggagccggtgcaggcgcaggaga

SEQ ID NO: 3893534 - DNA, 25 bp, Homo sapien
cacgtgcaggagccggtgcaggcgc

SEQ ID NO: 3893535 - DNA, 25 bp, Homo sapien
cgtgcaggagccggtgcaggcgcag

SEQ ID NO: 3893536 - DNA, 25 bp, Homo sapien
ggagccggtgcaggcgcaggagaca

SEQ ID NO: 3893537 - DNA, 25 bp, Homo sapien
agaggaagctttttacgtctggcac

SEQ ID NO: 3893538 - DNA, 25 bp, Homo sapien
gcagtagacttgaccgggcaccgcc

SEQ ID NO: 3893539 - DNA, 25 bp, Homo sapien
gatgctacagttgggatttgtgtcc

SEQ ID NO: 3893540 - DNA, 25 bp, Homo sapien
ggaagctttttacgtctggcacagc

SEQ ID NO: 3893541 - DNA, 25 bp, Homo sapien
tctccaacgtccctttgcagacaca

SEQ ID NO: 3893542 - DNA, 25 bp, Homo sapien
agttctccaacgtccctttgcagac

SEQ ID NO: 3893543 - DNA, 25 bp, Homo sapien
gttctccaacgtccctttgcagaca

SEQ ID NO: 3893544 - DNA, 25 bp, Homo sapien
ttctccaacgtccctttgcagacac

SEQ ID NO: 3893545 - DNA, 25 bp, Homo sapien
cagcaaatggctcagtatcgtattg

SEQ ID NO: 3893546 - DNA, 25 bp, Homo sapien
aatggctcagtatcgtattgaaaaa

SEQ ID NO: 3893547 - DNA, 25 bp, Homo sapien
gcaaatggctcagtatcgtattgaa

SEQ ID NO: 3893548 - DNA, 25 bp, Homo sapien
caaatggctcagtatcgtattgaaa

SEQ ID NO: 3893549 - DNA, 25 bp, Homo sapien
cgataaatggagagaccgcaaggcg

SEQ ID NO: 3893550 - DNA, 25 bp, Homo sapien
ataaatggagagaccgcaaggcgca

SEQ ID NO: 3893551 - DNA, 25 bp, Homo sapien
tcaagcgataaatggagagaccgca

SEQ ID NO: 3893552 - DNA, 25 bp, Homo sapien
gagatctcaagcgataaatggagag

SEQ ID NO: 3893553 - DNA, 25 bp, Homo sapien
gtggtgcaggagtagttggggtcca

SEQ ID NO: 3893554 - DNA, 25 bp, Homo sapien
tggtgcaggagtagttggggtccat

SEQ ID NO: 3893555 - DNA, 25 bp, Homo sapien
agtggtgcaggagtagttggggtcc

SEQ ID NO: 3893556 - DNA, 25 bp, Homo sapien
cagtggtgcaggagtagttggggtc

SEQ ID NO: 3893557 - DNA, 25 bp, Homo sapien
ggagccggcgcacgtgcaggagcca

SEQ ID NO: 3893558 - DNA, 25 bp, Homo sapien
ctctttgcacttgcaggagccggcg

SEQ ID NO: 3893559 - DNA, 25 bp, Homo sapien
tgcacttgcaggagccggcgcacgt

SEQ ID NO: 3893560 - DNA, 25 bp, Homo sapien
caggagccggcgcacgtgcaggagc

SEQ ID NO: 3893561 - DNA, 25 bp, Homo sapien
agattcctggagatggccccgcact

SEQ ID NO: 3893562 - DNA, 25 bp, Homo sapien
cgtgggcacacttggctcagcccat

SEQ ID NO: 3893563 - DNA, 25 bp, Homo sapien
tctccgacgtccctttgcagatgca

SEQ ID NO: 3893564 - DNA, 25 bp, Homo sapien
cagctgcacttctccgacgtccctt

SEQ ID NO: 3893565 - DNA, 25 bp, Homo sapien
gtgggcacacttggctcagcccatg

SEQ ID NO: 3893566 - DNA, 25 bp, Homo sapien
tgttctattaacatctgggagaaga

SEQ ID NO: 3893567 - DNA, 25 bp, Homo sapien
ttgttctattaacatctgggagaag

SEQ ID NO: 3893568 - DNA, 25 bp, Homo sapien
tccacacctaggtccctcggaccca

SEQ ID NO: 3893569 - DNA, 25 bp, Homo sapien
tgtccacacctaggtccctcggacc

SEQ ID NO: 3893570 - DNA, 25 bp, Homo sapien
ctgtccccggatcggcgtagtgcag

SEQ ID NO: 3893571 - DNA, 25 bp, Homo sapien
cagagcaaccgccaccgatgtgatt

SEQ ID NO: 3893572 - DNA, 25 bp, Homo sapien
cgagcgagttgtgtgcagagcaacc

SEQ ID NO: 3893573 - DNA, 25 bp, Homo sapien
tgtcccgaagtctgagtgcagccac

SEQ ID NO: 3893574 - DNA, 25 bp, Homo sapien
gtggaaggcttggtagggcccagca

SEQ ID NO: 3893575 - DNA, 25 bp, Homo sapien
ctataaggcgcacgtggaaggcttg

SEQ ID NO: 3893576 - DNA, 25 bp, Homo sapien
cacgtggaaggcttggtagggccca

SEQ ID NO: 3893577 - DNA, 25 bp, Homo sapien
gcacgtggaaggcttggtagggccc

SEQ ID NO: 3893578 - DNA, 25 bp, Homo sapien
agccgcggtgaggttggagatccca

SEQ ID NO: 3893579 - DNA, 25 bp, Homo sapien
gccgcggtgaggttggagatcccaa

SEQ ID NO: 3893580 - DNA, 25 bp, Homo sapien
cgagccgcggtgaggttggagatcc

SEQ ID NO: 3893581 - DNA, 25 bp, Homo sapien
ggtgaggttggagatcccaagcaag

SEQ ID NO: 3893582 - DNA, 25 bp, Homo sapien
tggcgcaggagcagttggggtccat

SEQ ID NO: 3893583 - DNA, 25 bp, Homo sapien
cagtggcgcaggagcagttggggtc

SEQ ID NO: 3893584 - DNA, 25 bp, Homo sapien
gtggcgcaggagcagttggggtcca

SEQ ID NO: 3893585 - DNA, 25 bp, Homo sapien
agtggcgcaggagcagttggggtcc

SEQ ID NO: 3893586 - DNA, 25 bp, Homo sapien
taatcttacttctatctgtagaggc

SEQ ID NO: 3893587 - DNA, 25 bp, Homo sapien
gatagctcctgtccaactcagggca

SEQ ID NO: 3893588 - DNA, 25 bp, Homo sapien
cagttggtcaacaaatgctgccagc

SEQ ID NO: 3893589 - DNA, 25 bp, Homo sapien
ttgccaggcctgatagatagctcct

SEQ ID NO: 3893590 - DNA, 25 bp, Homo sapien
tttgcatttgcaggagccagtgcag

SEQ ID NO: 3893591 - DNA, 25 bp, Homo sapien
actctttgcatttgcaggagccagt

SEQ ID NO: 3893592 - DNA, 25 bp, Homo sapien
tgcatttgcaggagccagtgcaggt

SEQ ID NO: 3893593 - DNA, 25 bp, Homo sapien
tctttgcatttgcaggagccagtgc

SEQ ID NO: 3893594 - DNA, 25 bp, Homo sapien
catgcactgtcggagatgggagata

SEQ ID NO: 3893595 - DNA, 25 bp, Homo sapien
catcacgtctaaagatctggctctg

SEQ ID NO: 3893596 - DNA, 25 bp, Homo sapien
aagtccttaggtgtcatgtctgtgc

SEQ ID NO: 3893597 - DNA, 25 bp, Homo sapien
tgcttggcaggctggtgcactcttg

SEQ ID NO: 3893598 - DNA, 25 bp, Homo sapien
gctgcacttctctgatgcccctttg

SEQ ID NO: 3893599 - DNA, 25 bp, Homo sapien
cacttggcacagctcatggggcagc

SEQ ID NO: 3893600 - DNA, 25 bp, Homo sapien
gcagctgcacttctctgatgcccct

SEQ ID NO: 3893601 - DNA, 25 bp, Homo sapien
cttggcacagctcatggggcagcag

SEQ ID NO: 3893602 - DNA, 25 bp, Homo sapien
gtcactctttctatatcttcgagca

SEQ ID NO: 3893603 - DNA, 25 bp, Homo sapien
ctttctatatcttcgagcagggctg

SEQ ID NO: 3893604 - DNA, 25 bp, Homo sapien
caagtttgtgcaggtcactctttct

SEQ ID NO: 3893605 - DNA, 25 bp, Homo sapien
ctatatcttcgagcagggctgtccg

SEQ ID NO: 3893606 - DNA, 25 bp, Homo sapien
ggtacgcggcgtccctgctataatc

SEQ ID NO: 3893607 - DNA, 25 bp, Homo sapien
tcctccttaacgtggctgttgcgca

SEQ ID NO: 3893608 - DNA, 25 bp, Homo sapien
gaatttcccggagattgcactccat

SEQ ID NO: 3893609 - DNA, 25 bp, Homo sapien
tttggctcacgctcgctttggaggg

SEQ ID NO: 3893610 - DNA, 25 bp, Homo sapien
tcggagatcaggtgaggctggagtt

SEQ ID NO: 3893611 - DNA, 25 bp, Homo sapien
cggagatcaggtgaggctggagttc

SEQ ID NO: 3893612 - DNA, 25 bp, Homo sapien
gtggcgcaggagcagctgaggtcca

SEQ ID NO: 3893613 - DNA, 25 bp, Homo sapien
cagtggcgcaggagcagctgaggtc

SEQ ID NO: 3893614 - DNA, 25 bp, Homo sapien
agtggcgcaggagcagctgaggtcc

SEQ ID NO: 3893615 - DNA, 25 bp, Homo sapien
tggcgcaggagcagctgaggtccat

SEQ ID NO: 3893616 - DNA, 25 bp, Homo sapien
ctaagtggtgatgaaggctcttggc

SEQ ID NO: 3893617 - DNA, 25 bp, Homo sapien
gagaaagctcgagaagtgcaaagca

SEQ ID NO: 3893618 - DNA, 25 bp, Homo sapien
aagatggcaatgttctaagtggtga

SEQ ID NO: 3893619 - DNA, 25 bp, Homo sapien
ggagaaagctcgagaagtgcaaagc

SEQ ID NO: 3893620 - DNA, 25 bp, Homo sapien
cctctcgcctcagaaatcggaggca

SEQ ID NO: 3893621 - DNA, 25 bp, Homo sapien
gagggtgacctgcagccgggcagtt

SEQ ID NO: 3893622 - DNA, 25 bp, Homo sapien
gtcctctcgcctcagaaatcggagg

SEQ ID NO: 3893623 - DNA, 25 bp, Homo sapien
gcagccgggcagttttcagcctcag

SEQ ID NO: 3893624 - DNA, 25 bp, Homo sapien
gcaggaggtgcatttgtactctttg

SEQ ID NO: 3893625 - DNA, 25 bp, Homo sapien
tgcatttgcaggagctggcacaggt

SEQ ID NO: 3893626 - DNA, 25 bp, Homo sapien
tttgtactctttgcatttgcaggag

SEQ ID NO: 3893627 - DNA, 25 bp, Homo sapien
ggaggtgcatttgtactctttgcat

SEQ ID NO: 3893628 - DNA, 25 bp, Homo sapien
gatctttggggtgagagtcttgcca

SEQ ID NO: 3893629 - DNA, 25 bp, Homo sapien
ctttggggtgagagtcttgccatga

SEQ ID NO: 3893630 - DNA, 25 bp, Homo sapien
tggatctttggggtgagagtcttgc

SEQ ID NO: 3893631 - DNA, 25 bp, Homo sapien
tggggtgagagtcttgccatgaaaa

SEQ ID NO: 3893632 - DNA, 25 bp, Homo sapien
gggcacatttggcacagcccatggg

SEQ ID NO: 3893633 - DNA, 25 bp, Homo sapien
tgcagccctgggcacatttggcaca

SEQ ID NO: 3893634 - DNA, 25 bp, Homo sapien
catttggcacagcccatggggcagc

SEQ ID NO: 3893635 - DNA, 25 bp, Homo sapien
cacatttggcacagcccatggggca

SEQ ID NO: 3893636 - DNA, 25 bp, Homo sapien
ggcacggcagctgcacttctccaat

SEQ ID NO: 3893637 - DNA, 25 bp, Homo sapien
caggcacggcagctgcacttctcca

SEQ ID NO: 3893638 - DNA, 25 bp, Homo sapien
agctgcacttctccaatgccccttt

SEQ ID NO: 3893639 - DNA, 25 bp, Homo sapien
gcagctgcacttctccaatgcccct

SEQ ID NO: 3893640 - DNA, 25 bp, Homo sapien
actagatttgtaggggttgcgttat

SEQ ID NO: 3893641 - DNA, 25 bp, Homo sapien
cagacatagtaaatgggttaggttt

SEQ ID NO: 3893642 - DNA, 25 bp, Homo sapien
cgttatttacaactggacgcagggc

SEQ ID NO: 3893643 - DNA, 25 bp, Homo sapien
gaaaacagacatagtaaatgggtta

SEQ ID NO: 3893644 - DNA, 25 bp, Homo sapien
cctcatatcatctggcctgatgctc

SEQ ID NO: 3893645 - DNA, 25 bp, Homo sapien
tttagctaggaaacggacctgagac

SEQ ID NO: 3893646 - DNA, 25 bp, Homo sapien
tatctcaccaaagcataggtccatg

SEQ ID NO: 3893647 - DNA, 25 bp, Homo sapien
ttcattctatttatctcaccaaagc

SEQ ID NO: 3893648 - DNA, 25 bp, Homo sapien
gaaacccggcatcctttatcagtgt

SEQ ID NO: 3893649 - DNA, 25 bp, Homo sapien
gagcagttgaggtccatctggagac

SEQ ID NO: 3893650 - DNA, 25 bp, Homo sapien
agggacattctatcctctggcatga

SEQ ID NO: 3893651 - DNA, 25 bp, Homo sapien
atgaaaatggagatcccaaggcccc

SEQ ID NO: 3893652 - DNA, 25 bp, Homo sapien
tttctccacaaaggctcagatcggc

SEQ ID NO: 3893653 - DNA, 25 bp, Homo sapien
ctcagatcggcaggcgccctctttt

SEQ ID NO: 3893654 - DNA, 25 bp, Homo sapien
cttgttccactcaggcacatggaag

SEQ ID NO: 3893655 - DNA, 25 bp, Homo sapien
tccactcaggcacatggaagcccag

SEQ ID NO: 3893656 - DNA, 25 bp, Homo sapien
agaagctggcataagtgcaggaccc

SEQ ID NO: 3893657 - DNA, 25 bp, Homo sapien
gcagaagctggcataagtgcaggac

SEQ ID NO: 3893658 - DNA, 25 bp, Homo sapien
cagaagctggcataagtgcaggacc

SEQ ID NO: 3893659 - DNA, 25 bp, Homo sapien
ggatgtgggaagcttgtcactgtcc

SEQ ID NO: 3893660 - DNA, 25 bp, Homo sapien
gggaagcttgtcactgtcctgctcc

SEQ ID NO: 3893661 - DNA, 25 bp, Homo sapien
ggggatgtgggaagcttgtcactgt

SEQ ID NO: 3893662 - DNA, 25 bp, Homo sapien
gggatgtgggaagcttgtcactgtc

SEQ ID NO: 3893663 - DNA, 25 bp, Homo sapien
agagcagactcgaccggagacctct

SEQ ID NO: 3893664 - DNA, 25 bp, Homo sapien
tcagagcagactcgaccggagacct

SEQ ID NO: 3893665 - DNA, 25 bp, Homo sapien
cagagcagactcgaccggagacctc

SEQ ID NO: 3893666 - DNA, 25 bp, Homo sapien
attccaagtttatataggtcactct

SEQ ID NO: 3893667 - DNA, 25 bp, Homo sapien
ttccaagtttatataggtcactctt

SEQ ID NO: 3893668 - DNA, 25 bp, Homo sapien
cattcacatatttcataaaagagag

SEQ ID NO: 3893669 - DNA, 25 bp, Homo sapien
tcacatatttcataaaagagagaca

SEQ ID NO: 3893670 - DNA, 25 bp, Homo sapien
aagagagacaaatacagtaaatggg

SEQ ID NO: 3893671 - DNA, 25 bp, Homo sapien
tcattcacatatttcataaaagaga

SEQ ID NO: 3893672 - DNA, 25 bp, Homo sapien
tgctgagtctgcactgcccgtggtc

SEQ ID NO: 3893673 - DNA, 25 bp, Homo sapien
ccctgctgagtctgcactgcccgtg

SEQ ID NO: 3893674 - DNA, 25 bp, Homo sapien
tgagtctgcactgcccgtggtccat

SEQ ID NO: 3893675 - DNA, 25 bp, Homo sapien
ctgctgagtctgcactgcccgtggt

SEQ ID NO: 3893676 - DNA, 25 bp, Homo sapien
ctaggcaagatatgagaagtcaggg

SEQ ID NO: 3893677 - DNA, 25 bp, Homo sapien
ggcaagatatgagaagtcagggcag

SEQ ID NO: 3893678 - DNA, 25 bp, Homo sapien
aggcaagatatgagaagtcagggca

SEQ ID NO: 3893679 - DNA, 25 bp, Homo sapien
taggcaagatatgagaagtcagggc

SEQ ID NO: 3893680 - DNA, 25 bp, Homo sapien
ttggagccaagacaagcctggagtt

SEQ ID NO: 3893681 - DNA, 25 bp, Homo sapien
tggagccaagacaagcctggagttc

SEQ ID NO: 3893682 - DNA, 25 bp, Homo sapien
ctgtggtgcaggagcagttgggatc

SEQ ID NO: 3893683 - DNA, 25 bp, Homo sapien
tgtggtgcaggagcagttgggatcc

SEQ ID NO: 3893684 - DNA, 25 bp, Homo sapien
gtggtgcaggagcagttgggatcca

SEQ ID NO: 3893685 - DNA, 25 bp, Homo sapien
tggtgcaggagcagttgggatccat

SEQ ID NO: 3893686 - DNA, 25 bp, Homo sapien
aggaagcgaaaaaggcagtgggcag

SEQ ID NO: 3893687 - DNA, 25 bp, Homo sapien
aaggaagcgaaaaaggcagtgggca

SEQ ID NO: 3893688 - DNA, 25 bp, Homo sapien
agtgtccagtgcgccatcctctgtg

SEQ ID NO: 3893689 - DNA, 25 bp, Homo sapien
tgtccagtgcgccatcctctgtgca

SEQ ID NO: 3893690 - DNA, 25 bp, Homo sapien
tctttgcacttgcaggagccggcgc

SEQ ID NO: 3893691 - DNA, 25 bp, Homo sapien
gagccggcgcaggcacaggagccac

SEQ ID NO: 3893692 - DNA, 25 bp, Homo sapien
cttgcaggagccggcgcaggcacag

SEQ ID NO: 3893693 - DNA, 25 bp, Homo sapien
caggagccggcgcaggcacaggagc

SEQ ID NO: 3893694 - DNA, 25 bp, Homo sapien
gtcccaatagaaaaagtctgccctg

SEQ ID NO: 3893695 - DNA, 25 bp, Homo sapien
ctggagagggaatgacacagccaac

SEQ ID NO: 3893696 - DNA, 25 bp, Homo sapien
ggtacatttgaggtttgtgtcccaa

SEQ ID NO: 3893697 - DNA, 25 bp, Homo sapien
cagaggatgcatttttaggctggca

SEQ ID NO: 3893698 - DNA, 25 bp, Homo sapien
tctctgatgagcctttgcagacaca

SEQ ID NO: 3893699 - DNA, 25 bp, Homo sapien
cagcagcggcacttctctgatgagc

SEQ ID NO: 3893700 - DNA, 25 bp, Homo sapien
tcaggcacagcagcggcacttctct

SEQ ID NO: 3893701 - DNA, 25 bp, Homo sapien
tgatgagcctttgcagacacagccc

SEQ ID NO: 3893702 - DNA, 25 bp, Homo sapien
ggttgctctatttatgtctgggagc

SEQ ID NO: 3893703 - DNA, 25 bp, Homo sapien
aaatccaggttagtactggttgctc

SEQ ID NO: 3893704 - DNA, 25 bp, Homo sapien
aaaaagaatgtagcaaaccggtcag

SEQ ID NO: 3893705 - DNA, 25 bp, Homo sapien
tgtctttcacatattgaatagaaaa

SEQ ID NO: 3893706 - DNA, 25 bp, Homo sapien
tgaagcaggctgtgaaccaggactg

SEQ ID NO: 3893707 - DNA, 25 bp, Homo sapien
cggtgaagcaggctgtgaaccagga

SEQ ID NO: 3893708 - DNA, 25 bp, Homo sapien
ttggcggtgaagcaggctgtgaacc

SEQ ID NO: 3893709 - DNA, 25 bp, Homo sapien
ttttttttggcggtgaagcaggctg

SEQ ID NO: 3893710 - DNA, 25 bp, Homo sapien
tccctttggagtccgctcaagcggg

SEQ ID NO: 3893711 - DNA, 25 bp, Homo sapien
gaaggcgtggtggaccccaacagcc

SEQ ID NO: 3893712 - DNA, 25 bp, Homo sapien
gcaagccgaggagagactggacttt

SEQ ID NO: 3893713 - DNA, 25 bp, Homo sapien
cagccggccgctgctttgatagtca

SEQ ID NO: 3893714 - DNA, 25 bp, Homo sapien
cggcgcaggagcagttggggtccat

SEQ ID NO: 3893715 - DNA, 25 bp, Homo sapien
cagcggcgcaggagcagttggggtc

SEQ ID NO: 3893716 - DNA, 25 bp, Homo sapien
gcggcgcaggagcagttggggtcca

SEQ ID NO: 3893717 - DNA, 25 bp, Homo sapien
agcggcgcaggagcagttggggtcc

SEQ ID NO: 3893718 - DNA, 25 bp, Homo sapien
caaggagtcccctacagttgagatc

SEQ ID NO: 3893719 - DNA, 25 bp, Homo sapien
tacagcagtgagttaatgagtctcc

SEQ ID NO: 3893720 - DNA, 25 bp, Homo sapien
tgggacaaaccgcatgacgtggagc

SEQ ID NO: 3893721 - DNA, 25 bp, Homo sapien
ggtgtctgggaatcgagcatcccca

SEQ ID NO: 3893722 - DNA, 25 bp, Homo sapien
aaaaagccagtgagcggcgagtgac

SEQ ID NO: 3893723 - DNA, 25 bp, Homo sapien
aaaaaagccagtgagcggcgagtga

SEQ ID NO: 3893724 - DNA, 25 bp, Homo sapien
aaaaaaagccagtgagcggcgagtg

SEQ ID NO: 3893725 - DNA, 25 bp, Homo sapien
acttgcaggaaccagcgcaggtgca

SEQ ID NO: 3893726 - DNA, 25 bp, Homo sapien
gcacttgcaggaaccagcgcaggtg

SEQ ID NO: 3893727 - DNA, 25 bp, Homo sapien
ttgcacttgcaggaaccagcgcagg

SEQ ID NO: 3893728 - DNA, 25 bp, Homo sapien
tttgcacttgcaggaaccagcgcag

SEQ ID NO: 3893729 - DNA, 25 bp, Homo sapien
agccacaaaggaccctcagttcagg

SEQ ID NO: 3893730 - DNA, 25 bp, Homo sapien
cagttcaggagggtatggctttgtc

SEQ ID NO: 3893731 - DNA, 25 bp, Homo sapien
agaaagctgcccaggcgccctgcac

SEQ ID NO: 3893732 - DNA, 25 bp, Homo sapien
gacaactgggaaatatctggggtgg

SEQ ID NO: 3893733 - DNA, 25 bp, Homo sapien
ctctgacgcccctttgcaaacacag

SEQ ID NO: 3893734 - DNA, 25 bp, Homo sapien
tctctgacgcccctttgcaaacaca

SEQ ID NO: 3893735 - DNA, 25 bp, Homo sapien
tctgacgcccctttgcaaacacagc

SEQ ID NO: 3893736 - DNA, 25 bp, Homo sapien
cttctctgacgcccctttgcaaaca

SEQ ID NO: 3893737 - DNA, 25 bp, Homo sapien
tctctctgtttacatctgggagaaa

SEQ ID NO: 3893738 - DNA, 25 bp, Homo sapien
tgagaagcccggtgtagaattcaaa

SEQ ID NO: 3893739 - DNA, 25 bp, Homo sapien
tatttcatttaccaaggtttagatg

SEQ ID NO: 3893740 - DNA, 25 bp, Homo sapien
tgtggaatggataggaattaaaaac

SEQ ID NO: 3893741 - DNA, 25 bp, Homo sapien
attccattccgtgtagtcactttct

SEQ ID NO: 3893742 - DNA, 25 bp, Homo sapien
tgtgtaatctacacactagggcctg

SEQ ID NO: 3893743 - DNA, 25 bp, Homo sapien
tagcttaatcttgggagaaactgcc

SEQ ID NO: 3893744 - DNA, 25 bp, Homo sapien
tgcagtgcacggcatccatcaacat

SEQ ID NO: 3893745 - DNA, 25 bp, Homo sapien
tcagagagtgtcctgttggtgacac

SEQ ID NO: 3893746 - DNA, 25 bp, Homo sapien
cagtccttctcatgactctgcgttg

SEQ ID NO: 3893747 - DNA, 25 bp, Homo sapien
cttccaactgcagaatatgccatca

SEQ ID NO: 3893748 - DNA, 25 bp, Homo sapien
gccgagatgacgctttcctccacat

SEQ ID NO: 3893749 - DNA, 25 bp, Homo sapien
gcatcagcacactcaacatccttca

SEQ ID NO: 3893750 - DNA, 25 bp, Homo sapien
gcaattctcgaaccagtagccagtg

SEQ ID NO: 3893751 - DNA, 25 bp, Homo sapien
ggtaccagggcactatcacatttaa

SEQ ID NO: 3893752 - DNA, 25 bp, Homo sapien
cctgcgggcaagcatggtcctgact

SEQ ID NO: 3893753 - DNA, 25 bp, Homo sapien
ttattaagcccgagccaggtaccag

SEQ ID NO: 3893754 - DNA, 25 bp, Homo sapien
aggcaaagctgatgacgaaggtgca

SEQ ID NO: 3893755 - DNA, 25 bp, Homo sapien
acacggacacgggagaggcaaagct

SEQ ID NO: 3893756 - DNA, 25 bp, Homo sapien
cgagcacgaggatggagctacacac

SEQ ID NO: 3893757 - DNA, 25 bp, Homo sapien
cgccaatgaagaaggcgagcacgag

SEQ ID NO: 3893758 - DNA, 25 bp, Homo sapien
ggacactcgctgaatcctgagagct

SEQ ID NO: 3893759 - DNA, 25 bp, Homo sapien
ccctgttgggagttggctcagaatc

SEQ ID NO: 3893760 - DNA, 25 bp, Homo sapien
tcccgccaagatgtagtgtgatcgt

SEQ ID NO: 3893761 - DNA, 25 bp, Homo sapien
gactggaaacagcagactgacccca

SEQ ID NO: 3893762 - DNA, 25 bp, Homo sapien
tacaaatagagtgacccgtaaaatc

SEQ ID NO: 3893763 - DNA, 25 bp, Homo sapien
caagtacaaatagagtgacccgtaa

SEQ ID NO: 3893764 - DNA, 25 bp, Homo sapien
cagccctgctcccaagtacaaatag

SEQ ID NO: 3893765 - DNA, 25 bp, Homo sapien
tgctcccaagtacaaatagagtgac

SEQ ID NO: 3893766 - DNA, 25 bp, Homo sapien
tcaccgttcactggctttttctctt

SEQ ID NO: 3893767 - DNA, 25 bp, Homo sapien
tcttctagcaggtgtctcctgcacc

SEQ ID NO: 3893768 - DNA, 25 bp, Homo sapien
tttctcttctagcaggtgtctcctg

SEQ ID NO: 3893769 - DNA, 25 bp, Homo sapien
tctcttctagcaggtgtctcctgca

SEQ ID NO: 3893770 - DNA, 25 bp, Homo sapien
ggaacacgtggagggcgtggtggag

SEQ ID NO: 3893771 - DNA, 25 bp, Homo sapien
gtggagcgcaacagttggcagctcc

SEQ ID NO: 3893772 - DNA, 25 bp, Homo sapien
acacgtggagggcgtggtggagcgc

SEQ ID NO: 3893773 - DNA, 25 bp, Homo sapien
tggagcgcaacagttggcagctcct

SEQ ID NO: 3893774 - DNA, 25 bp, Homo sapien
cagcctcgcaggagcagttggggtc

SEQ ID NO: 3893775 - DNA, 25 bp, Homo sapien
gcctcgcaggagcagttggggtcca

SEQ ID NO: 3893776 - DNA, 25 bp, Homo sapien
agcctcgcaggagcagttggggtcc

SEQ ID NO: 3893777 - DNA, 25 bp, Homo sapien
cctcgcaggagcagttggggtccat

SEQ ID NO: 3893778 - DNA, 25 bp, Homo sapien
actttttgcacttgcaggagccggc

SEQ ID NO: 3893779 - DNA, 25 bp, Homo sapien
gcactttttgcacttgcaggagccg

SEQ ID NO: 3893780 - DNA, 25 bp, Homo sapien
tttttgcacttgcaggagccggcgc

SEQ ID NO: 3893781 - DNA, 25 bp, Homo sapien
gcaggaggtgcatttgcactttttg

SEQ ID NO: 3893782 - DNA, 25 bp, Homo sapien
agattcctggagatggccccgcact

SEQ ID NO: 3893783 - DNA, 25 bp, Homo sapien
ctagggggacaaaggaagcaggcac

SEQ ID NO: 3893784 - DNA, 25 bp, Homo sapien
acaaaggaagcaggcactcagggcc

SEQ ID NO: 3893785 - DNA, 25 bp, Homo sapien
gacaaaggaagcaggcactcagggc

SEQ ID NO: 3893786 - DNA, 25 bp, Homo sapien
gggggacaaaggaagcaggcactca

SEQ ID NO: 3893787 - DNA, 25 bp, Homo sapien
ctttttcaggagacgactggtggat

SEQ ID NO: 3893788 - DNA, 25 bp, Homo sapien
aggcctggctcaagctcagactcca

SEQ ID NO: 3893789 - DNA, 25 bp, Homo sapien
ccttagttcaggatggcacagcttt

SEQ ID NO: 3893790 - DNA, 25 bp, Homo sapien
tcttcctatgagagactgcccagcc

SEQ ID NO: 3893791 - DNA, 25 bp, Homo sapien
tctctgacgcccctttgcagatgca

SEQ ID NO: 3893792 - DNA, 25 bp, Homo sapien
acttctctgacgcccctttgcagat

SEQ ID NO: 3893793 - DNA, 25 bp, Homo sapien
cacagcccagggggcaacaggagca

SEQ ID NO: 3893794 - DNA, 25 bp, Homo sapien
agctgcacttctctgacgccccttt

SEQ ID NO: 3893795 - DNA, 25 bp, Homo sapien
ttcatctgacagcagggctgtcccg

SEQ ID NO: 3893796 - DNA, 25 bp, Homo sapien
cattctgttttcatctgacagcagg

SEQ ID NO: 3893797 - DNA, 25 bp, Homo sapien
tttcatctgacagcagggctgtccc

SEQ ID NO: 3893798 - DNA, 25 bp, Homo sapien
tctgttttcatctgacagcagggct

SEQ ID NO: 3893799 - DNA, 25 bp, Homo sapien
aatgtagcaaatgagtcggagttgt

SEQ ID NO: 3893800 - DNA, 25 bp, Homo sapien
gaatgtagcaaatgagtcggagttg

SEQ ID NO: 3893801 - DNA, 25 bp, Homo sapien
tgtagcaaatgagtcggagttgtag

SEQ ID NO: 3893802 - DNA, 25 bp, Homo sapien
atgtagcaaatgagtcggagttgta

SEQ ID NO: 3893803 - DNA, 25 bp, Homo sapien
gctgccagaggtacgcgccgcccct

SEQ ID NO: 3893804 - DNA, 25 bp, Homo sapien
cgggtccgtgtgcatccgggtccat

SEQ ID NO: 3893805 - DNA, 25 bp, Homo sapien
caccctgagggccatttcccattcc

SEQ ID NO: 3893806 - DNA, 25 bp, Homo sapien
acagtcgtcctcagcttcgcctctc

SEQ ID NO: 3893807 - DNA, 25 bp, Homo sapien
ttgagctgtgcgcagcaggcgggtc

SEQ ID NO: 3893808 - DNA, 25 bp, Homo sapien
gcggcgcctgcggtcttgggttgag

SEQ ID NO: 3893809 - DNA, 25 bp, Homo sapien
cttgggttgagctgtgcgcagcagg

SEQ ID NO: 3893810 - DNA, 25 bp, Homo sapien
ccacgcggaatccgcggcgcctgcg

SEQ ID NO: 3893811 - DNA, 25 bp, Homo sapien
agaagaagcagtggggcaggtggga

SEQ ID NO: 3893812 - DNA, 25 bp, Homo sapien
aggagaagaagcagtggggcaggtg

SEQ ID NO: 3893813 - DNA, 25 bp, Homo sapien
taagggagaggagaagaagcagtgg

SEQ ID NO: 3893814 - DNA, 25 bp, Homo sapien
ctaagggagaggagaagaagcagtg

SEQ ID NO: 3893815 - DNA, 25 bp, Homo sapien
tacgaagcgaggtgaagctagagtt

SEQ ID NO: 3893816 - DNA, 25 bp, Homo sapien
acgaagcgaggtgaagctagagttc

SEQ ID NO: 3893817 - DNA, 25 bp, Homo sapien
tagtggagcaggagcaattggggtc

SEQ ID NO: 3893818 - DNA, 25 bp, Homo sapien
gtggagcaggagcaattggggtcca

SEQ ID NO: 3893819 - DNA, 25 bp, Homo sapien
agtggagcaggagcaattggggtcc

SEQ ID NO: 3893820 - DNA, 25 bp, Homo sapien
tggagcaggagcaattggggtccat

SEQ ID NO: 3893821 - DNA, 25 bp, Homo sapien
tctctgcatttgcaggagctggtgc

SEQ ID NO: 3893822 - DNA, 25 bp, Homo sapien
gcactctctgcatttgcaggagctg

SEQ ID NO: 3893823 - DNA, 25 bp, Homo sapien
cactctctgcatttgcaggagctgg

SEQ ID NO: 3893824 - DNA, 25 bp, Homo sapien
aggaggtgcatttgcactctctgca

SEQ ID NO: 3893825 - DNA, 25 bp, Homo sapien
gcacttgtcagtgtccctttgcaaa

SEQ ID NO: 3893826 - DNA, 25 bp, Homo sapien
gcagctgcacttgtcagtgtccctt

SEQ ID NO: 3893827 - DNA, 25 bp, Homo sapien
ctgcacttgtcagtgtccctttgca

SEQ ID NO: 3893828 - DNA, 25 bp, Homo sapien
acttgtcagtgtccctttgcaaaca

SEQ ID NO: 3893829 - DNA, 25 bp, Homo sapien
tacttctgggaacacagctttccct

SEQ ID NO: 3893830 - DNA, 25 bp, Homo sapien
ttctgggaacacagctttccctaca

SEQ ID NO: 3893831 - DNA, 25 bp, Homo sapien
tttctacttctgggaacacagcttt

SEQ ID NO: 3893832 - DNA, 25 bp, Homo sapien
tctacttctgggaacacagctttcc

SEQ ID NO: 3893833 - DNA, 25 bp, Homo sapien
tgggtcagggttgtatggaaaacaa

SEQ ID NO: 3893834 - DNA, 25 bp, Homo sapien
aggaggtcatccacatgcccttgag

SEQ ID NO: 3893835 - DNA, 25 bp, Homo sapien
ataatacccgcaggcagatgggcct

SEQ ID NO: 3893836 - DNA, 25 bp, Homo sapien
gtccacataatacccgcaggcagat

SEQ ID NO: 3893837 - DNA, 25 bp, Homo sapien
ggtcatccacatgcccttgagacca

SEQ ID NO: 3893838 - DNA, 25 bp, Homo sapien
tctctgtctgaatgctggagcagtg

SEQ ID NO: 3893839 - DNA, 25 bp, Homo sapien
gaagatcaaatgacttgaaaggtgg

SEQ ID NO: 3893840 - DNA, 25 bp, Homo sapien
gatcaaatgacttgaaaggtgggaa

SEQ ID NO: 3893841 - DNA, 25 bp, Homo sapien
tgttctctgtctgaatgctggagca

SEQ ID NO: 3893842 - DNA, 25 bp, Homo sapien
agttcccgatcaagaggaaaacacg

SEQ ID NO: 3893843 - DNA, 25 bp, Homo sapien
gaggaaaacacgcagcgggacagat

SEQ ID NO: 3893844 - DNA, 25 bp, Homo sapien
atgaaaagcgtggtggagcccagaa

SEQ ID NO: 3893845 - DNA, 25 bp, Homo sapien
cagcgggacagatgaaaagcgtggt

SEQ ID NO: 3893846 - DNA, 25 bp, Homo sapien
ggcgagcaggagcagttggggtcca

SEQ ID NO: 3893847 - DNA, 25 bp, Homo sapien
caggcgagcaggagcagttggggtc

SEQ ID NO: 3893848 - DNA, 25 bp, Homo sapien
aggcgagcaggagcagttggggtcc

SEQ ID NO: 3893849 - DNA, 25 bp, Homo sapien
gcgagcaggagcagttggggtccat

SEQ ID NO: 3893850 - DNA, 25 bp, Homo sapien
tactgtggctgggaaacgggcatcc

SEQ ID NO: 3893851 - DNA, 25 bp, Homo sapien
gacgtgatcgggaagaaagcaccta

SEQ ID NO: 3893852 - DNA, 25 bp, Homo sapien
taaatgcgacttcttcaaacccagg

SEQ ID NO: 3893853 - DNA, 25 bp, Homo sapien
gctaagacaggaggccagaaccttc

SEQ ID NO: 3893854 - DNA, 25 bp, Homo sapien
ggagccggcacaggcacaggagcca

SEQ ID NO: 3893855 - DNA, 25 bp, Homo sapien
gagccggcacaggcacaggagccaa

SEQ ID NO: 3893856 - DNA, 25 bp, Homo sapien
tgcatttgcaggagccggcacaggc

SEQ ID NO: 3893857 - DNA, 25 bp, Homo sapien
tttgcaggagccggcacaggcacag

SEQ ID NO: 3893858 - DNA, 25 bp, Homo sapien
attcgcagggaaggccctgcactca

SEQ ID NO: 3893859 - DNA, 25 bp, Homo sapien
cagattcgcagggaaggccctgcac

SEQ ID NO: 3893860 - DNA, 25 bp, Homo sapien
catcccccagattcgcagggaaggc

SEQ ID NO: 3893861 - DNA, 25 bp, Homo sapien
ccccagattcgcagggaaggccctg

SEQ ID NO: 3893862 - DNA, 25 bp, Homo sapien
caatttgaggtctgattctgaatca

SEQ ID NO: 3893863 - DNA, 25 bp, Homo sapien
ggagacctaggttcacattccagct

SEQ ID NO: 3893864 - DNA, 25 bp, Homo sapien
tcagagcagactcaatcaggcacct

SEQ ID NO: 3893865 - DNA, 25 bp, Homo sapien
gctagggaagctctgggctacccct

SEQ ID NO: 3893866 - DNA, 25 bp, Homo sapien
cagatcctgggccttaagtgcttca

SEQ ID NO: 3893867 - DNA, 25 bp, Homo sapien
cccacagggcagcaggagcagcagc

SEQ ID NO: 3893868 - DNA, 25 bp, Homo sapien
ggcacacttggcacagcccacaggg

SEQ ID NO: 3893869 - DNA, 25 bp, Homo sapien
gcccacagggcagcaggagcagcag

SEQ ID NO: 3893870 - DNA, 25 bp, Homo sapien
ctgggcacacttggcacagcccaca

SEQ ID NO: 3893871 - DNA, 25 bp, Homo sapien
ggcacagcagctgcacttgtctgac

SEQ ID NO: 3893872 - DNA, 25 bp, Homo sapien
tcaggcacagcagctgcacttgtct

SEQ ID NO: 3893873 - DNA, 25 bp, Homo sapien
caggcacagcagctgcacttgtctg

SEQ ID NO: 3893874 - DNA, 25 bp, Homo sapien
aggcacagcagctgcacttgtctga

SEQ ID NO: 3893875 - DNA, 25 bp, Homo sapien
tgctctatttacatctgagagcaca

SEQ ID NO: 3893876 - DNA, 25 bp, Homo sapien
aaaaagatgtagcaaacgggtcagg

SEQ ID NO: 3893877 - DNA, 25 bp, Homo sapien
aatccaggtttatataggttgctct

SEQ ID NO: 3893878 - DNA, 25 bp, Homo sapien
aaaaaagatgtagcaaacgggtcag

SEQ ID NO: 3893879 - DNA, 25 bp, Homo sapien
ttattgccattcacatatttcatag

SEQ ID NO: 3893880 - DNA, 25 bp, Homo sapien
ctagatgaatttattgccattcaca

SEQ ID NO: 3893881 - DNA, 25 bp, Homo sapien
gaatttattgccattcacatatttc

SEQ ID NO: 3893882 - DNA, 25 bp, Homo sapien
gatgaatttattgccattcacatat

SEQ ID NO: 3893883 - DNA, 25 bp, Homo sapien
gcaggaatagaacatgaattcacag

SEQ ID NO: 3893884 - DNA, 25 bp, Homo sapien
ttcctcaaccatggctgtaatctgg

SEQ ID NO: 3893885 - DNA, 25 bp, Homo sapien
ggcttcctgagttgaagttatcact

SEQ ID NO: 3893886 - DNA, 25 bp, Homo sapien
tgtgtttcctcaaccatggctgtaa

SEQ ID NO: 3893887 - DNA, 25 bp, Homo sapien
tctgccatagaccatatgacaccca

SEQ ID NO: 3893888 - DNA, 25 bp, Homo sapien
tgtctaccgagataagtctgccata

SEQ ID NO: 3893889 - DNA, 25 bp, Homo sapien
taagtctgccatagaccatatgaca

SEQ ID NO: 3893890 - DNA, 25 bp, Homo sapien
cgagataagtctgccatagaccata

SEQ ID NO: 3893891 - DNA, 25 bp, Homo sapien
catctgccagtgtggttattctgaa

SEQ ID NO: 3893892 - DNA, 25 bp, Homo sapien
cacaattcatttcttggcactcatc

SEQ ID NO: 3893893 - DNA, 25 bp, Homo sapien
tattctgaagttcagggcgattact

SEQ ID NO: 3893894 - DNA, 25 bp, Homo sapien
gcgattacttcacaattgcctttgc

SEQ ID NO: 3893895 - DNA, 25 bp, Homo sapien
caggatgtgggcgtgtgggtgctcc

SEQ ID NO: 3893896 - DNA, 25 bp, Homo sapien
gcgtgtgggtgctccagatccccac

SEQ ID NO: 3893897 - DNA, 25 bp, Homo sapien
tcaccatccccctgctgttgccagt

SEQ ID NO: 3893898 - DNA, 25 bp, Homo sapien
cagatccccacaccggctgtcacca

SEQ ID NO: 3893899 - DNA, 25 bp, Homo sapien
tttctgaacattggactcattcctg

SEQ ID NO: 3893900 - DNA, 25 bp, Homo sapien
ttctgaacattggactcattcctgt

SEQ ID NO: 3893901 - DNA, 25 bp, Homo sapien
cagctgcagccaatggccagtggaa

SEQ ID NO: 3893902 - DNA, 25 bp, Homo sapien
ccatcatggaggcttgtggtcagtg

SEQ ID NO: 3893903 - DNA, 25 bp, Homo sapien
gctgcagccaatggccagtggaagc

SEQ ID NO: 3893904 - DNA, 25 bp, Homo sapien
ctaatactgggatcttgggggagta

SEQ ID NO: 3893905 - DNA, 25 bp, Homo sapien
gtgccggcttgaggacgcggccgcc

SEQ ID NO: 3893906 - DNA, 25 bp, Homo sapien
tccgccgctcaggtgccggcttgag

SEQ ID NO: 3893907 - DNA, 25 bp, Homo sapien
ccgtctccgccgctcaggtgccggc

SEQ ID NO: 3893908 - DNA, 25 bp, Homo sapien
caggtgccggcttgaggacgcggcc

SEQ ID NO: 3893909 - DNA, 25 bp, Homo sapien
gatttacttggtccctgactatcct

SEQ ID NO: 3893910 - DNA, 25 bp, Homo sapien
ataaaccttgtgtaccagtcacttg

SEQ ID NO: 3893911 - DNA, 25 bp, Homo sapien
agtcacttgatttacttggtccctg

SEQ ID NO: 3893912 - DNA, 25 bp, Homo sapien
cacttgatttacttggtccctgact

SEQ ID NO: 3893913 - DNA, 25 bp, Homo sapien
tggtgcatctcctctcaagcacata

SEQ ID NO: 3893914 - DNA, 25 bp, Homo sapien
tcctctcaagcacataactgtcaca

SEQ ID NO: 3893915 - DNA, 25 bp, Homo sapien
cgtgcactcaaactccaaccgtgag

SEQ ID NO: 3893916 - DNA, 25 bp, Homo sapien
tccaaccgtgagtttccaggcacca

SEQ ID NO: 3893917 - DNA, 25 bp, Homo sapien
ttcgggtactaaggactgaactgta

SEQ ID NO: 3893918 - DNA, 25 bp, Homo sapien
aatattgtctctttcaacttcaaag

SEQ ID NO: 3893919 - DNA, 25 bp, Homo sapien
atattgtctctttcaacttcaaaga

SEQ ID NO: 3893920 - DNA, 25 bp, Homo sapien
aaatattgtctctttcaacttcaaa

SEQ ID NO: 3893921 - DNA, 25 bp, Homo sapien
agctcatcaacaagcaggatttgtt

SEQ ID NO: 3893922 - DNA, 25 bp, Homo sapien
tagcccaagaacaggcctgacagag

SEQ ID NO: 3893923 - DNA, 25 bp, Homo sapien
gttcctgaacatagcccaagaacag

SEQ ID NO: 3893924 - DNA, 25 bp, Homo sapien
catcaacaagcaggatttgttcctg

SEQ ID NO: 3893925 - DNA, 25 bp, Homo sapien
aggagctcaccaaacccctcagtat

SEQ ID NO: 3893926 - DNA, 25 bp, Homo sapien
gagatgccctcagtctcagcagcaa

SEQ ID NO: 3893927 - DNA, 25 bp, Homo sapien
gatctcctgtaagttccgttccaca

SEQ ID NO: 3893928 - DNA, 25 bp, Homo sapien
ccgtctcctgggacgtgcgtgttag

SEQ ID NO: 3893929 - DNA, 25 bp, Homo sapien
agcaactaagatggcatcatgggcc

SEQ ID NO: 3893930 - DNA, 25 bp, Homo sapien
tcaagactgggggtaactgcaggca

SEQ ID NO: 3893931 - DNA, 25 bp, Homo sapien
tatctttgcatacagcacagagcct

SEQ ID NO: 3893932 - DNA, 25 bp, Homo sapien
cagagcctgcatgctcaagactggg

SEQ ID NO: 3893933 - DNA, 25 bp, Homo sapien
gatgtgggatatgtcaagtccccga

SEQ ID NO: 3893934 - DNA, 25 bp, Homo sapien
gtggtggctgcactcagactctcca

SEQ ID NO: 3893935 - DNA, 25 bp, Homo sapien
ctctccaatcgctgggagatgtggg

SEQ ID NO: 3893936 - DNA, 25 bp, Homo sapien
tccccgagacccgaggagaactgac

SEQ ID NO: 3893937 - DNA, 25 bp, Homo sapien
tttcaccatgtgacgtgcaagctcc

SEQ ID NO: 3893938 - DNA, 25 bp, Homo sapien
tcaaaagttatcttggactgaccat

SEQ ID NO: 3893939 - DNA, 25 bp, Homo sapien
tctggaacagcacaacgaagaggtg

SEQ ID NO: 3893940 - DNA, 25 bp, Homo sapien
cgtagtttgaatacatgtctctgcc

SEQ ID NO: 3893941 - DNA, 25 bp, Homo sapien
tgttcattccacaggaagatagctt

SEQ ID NO: 3893942 - DNA, 25 bp, Homo sapien
gaagatagctttggtgggtgcatac

SEQ ID NO: 3893943 - DNA, 25 bp, Homo sapien
tttggtgggtgcatactgccaagct

SEQ ID NO: 3893944 - DNA, 25 bp, Homo sapien
cattccacaggaagatagctttggt

SEQ ID NO: 3893945 - DNA, 25 bp, Homo sapien
gatgagctctgtcggaaccagtgct

SEQ ID NO: 3893946 - DNA, 25 bp, Homo sapien
taaacaatgagattgcagggtccct

SEQ ID NO: 3893947 - DNA, 25 bp, Homo sapien
gcatcaccattcgttgtgcgctaca

SEQ ID NO: 3893948 - DNA, 25 bp, Homo sapien
taaggagttacagaacggtcgatgc

SEQ ID NO: 3893949 - DNA, 25 bp, Homo sapien
tacagggtcagtgttagaggtttcc

SEQ ID NO: 3893950 - DNA, 25 bp, Homo sapien
cagaaatcgattctttgcaatgctg

SEQ ID NO: 3893951 - DNA, 25 bp, Homo sapien
tagtcatgggtaaatccagaactcc

SEQ ID NO: 3893952 - DNA, 25 bp, Homo sapien
caaggcgtggataattgagtcatct

SEQ ID NO: 3893953 - DNA, 25 bp, Homo sapien
cgaccatgatacagctaattgttaa

SEQ ID NO: 3893954 - DNA, 25 bp, Homo sapien
cctaaagaactcttctatacaatgt

SEQ ID NO: 3893955 - DNA, 25 bp, Homo sapien
gccttcagaatacagctcacctcga

SEQ ID NO: 3893956 - DNA, 25 bp, Homo sapien
tgtgccatggaacctaatgtaaatg

SEQ ID NO: 3893957 - DNA, 25 bp, Homo sapien
ggagaggctcttccgagcagccaaa

SEQ ID NO: 3893958 - DNA, 25 bp, Homo sapien
ggctcttccgagcagccaaacttga

SEQ ID NO: 3893959 - DNA, 25 bp, Homo sapien
agaaaggagaggctcttccgagcag

SEQ ID NO: 3893960 - DNA, 25 bp, Homo sapien
aaggagaggctcttccgagcagcca

SEQ ID NO: 3893961 - DNA, 25 bp, Homo sapien
tacaccacagtatcaagctagggct

SEQ ID NO: 3893962 - DNA, 25 bp, Homo sapien
gttaagggcattcctatgatggcca

SEQ ID NO: 3893963 - DNA, 25 bp, Homo sapien
aaatgataaatgatggccacccagg

SEQ ID NO: 3893964 - DNA, 25 bp, Homo sapien
tagcgcatctgttgctgcacttggg

SEQ ID NO: 3893965 - DNA, 25 bp, Homo sapien
cttcaaagatttcagcatcgggtaa

SEQ ID NO: 3893966 - DNA, 25 bp, Homo sapien
caaagatttcagcatcgggtaaaaa

SEQ ID NO: 3893967 - DNA, 25 bp, Homo sapien
caacttcaaagatttcagcatcggg

SEQ ID NO: 3893968 - DNA, 25 bp, Homo sapien
aaacccaacttcaaagatttcagca

SEQ ID NO: 3893969 - DNA, 25 bp, Homo sapien
gcgatataacatggcactgtgtggg

SEQ ID NO: 3893970 - DNA, 25 bp, Homo sapien
agctcagcagatccatcactgctgc

SEQ ID NO: 3893971 - DNA, 25 bp, Homo sapien
ccacaggtggcagaccttggcgata

SEQ ID NO: 3893972 - DNA, 25 bp, Homo sapien
cagcagacgctgtaagagtggctgt

SEQ ID NO: 3893973 - DNA, 25 bp, Homo sapien
actccttctcctgtgatacgcctct

SEQ ID NO: 3893974 - DNA, 25 bp, Homo sapien
aactccttctcctgtgatacgcctc

SEQ ID NO: 3893975 - DNA, 25 bp, Homo sapien
tccttctcctgtgatacgcctctca

SEQ ID NO: 3893976 - DNA, 25 bp, Homo sapien
ccttctcctgtgatacgcctctcat

SEQ ID NO: 3893977 - DNA, 25 bp, Homo sapien
tcagccgagatctgacaggaaaagg

SEQ ID NO: 3893978 - DNA, 25 bp, Homo sapien
agatatacagagtgcacttccccgc

SEQ ID NO: 3893979 - DNA, 25 bp, Homo sapien
cattgtccttatttgcttcagccga

SEQ ID NO: 3893980 - DNA, 25 bp, Homo sapien
gacttccattagtgaaagagatgcc

SEQ ID NO: 3893981 - DNA, 25 bp, Homo sapien
cctcttccgggactcttcgatggca

SEQ ID NO: 3893982 - DNA, 25 bp, Homo sapien
tcttccgggactcttcgatggcaga

SEQ ID NO: 3893983 - DNA, 25 bp, Homo sapien
cgggactcttcgatggcagacagca

SEQ ID NO: 3893984 - DNA, 25 bp, Homo sapien
tccgggactcttcgatggcagacag

SEQ ID NO: 3893985 - DNA, 25 bp, Homo sapien
ctcaaccaacattgactcccgatgg

SEQ ID NO: 3893986 - DNA, 25 bp, Homo sapien
tgagtaaagtcaagggcgtcttctc

SEQ ID NO: 3893987 - DNA, 25 bp, Homo sapien
cagtgtgtgcagaattcgctgtttc

SEQ ID NO: 3893988 - DNA, 25 bp, Homo sapien
attgactcccgatggtactcctcag

SEQ ID NO: 3893989 - DNA, 25 bp, Homo sapien
tattaacagtagtttatcttttgca

SEQ ID NO: 3893990 - DNA, 25 bp, Homo sapien
aacagtagtttatcttttgcattca

SEQ ID NO: 3893991 - DNA, 25 bp, Homo sapien
agtagtttatcttttgcattcaagc

SEQ ID NO: 3893992 - DNA, 25 bp, Homo sapien
agtttatcttttgcattcaagctac

SEQ ID NO: 3893993 - DNA, 25 bp, Homo sapien
ttgccgcgcataggccatctcgatg

SEQ ID NO: 3893994 - DNA, 25 bp, Homo sapien
gttatccagagagcttcgaccaggg

SEQ ID NO: 3893995 - DNA, 25 bp, Homo sapien
taggccatctcgatgttatccagag

SEQ ID NO: 3893996 - DNA, 25 bp, Homo sapien
ggtcccacatcactgatgtagcttg

SEQ ID NO: 3893997 - DNA, 25 bp, Homo sapien
atcgagctctgcgacggaagcacaa

SEQ ID NO: 3893998 - DNA, 25 bp, Homo sapien
agctctgcgacggaagcacaaaggt

SEQ ID NO: 3893999 - DNA, 25 bp, Homo sapien
atcatcgagctctgcgacggaagca

SEQ ID NO: 3894000 - DNA, 25 bp, Homo sapien
cgagctctgcgacggaagcacaaag

SEQ ID NO: 3894001 - DNA, 25 bp, Homo sapien
cactggaccccggtttctacttgag

SEQ ID NO: 3894002 - DNA, 25 bp, Homo sapien
cccggtttctacttgagttagctct

SEQ ID NO: 3894003 - DNA, 25 bp, Homo sapien
tacttgagttagctctaggtgctac

SEQ ID NO: 3894004 - DNA, 25 bp, Homo sapien
ctaggcccatcggaacactggaccc

SEQ ID NO: 3894005 - DNA, 25 bp, Homo sapien
ctctgctcaaggtacgccaaggcct

SEQ ID NO: 3894006 - DNA, 25 bp, Homo sapien
gttttaccatggtccacatgtcgga

SEQ ID NO: 3894007 - DNA, 25 bp, Homo sapien
ttcttcagggcatccgttgccggtg

SEQ ID NO: 3894008 - DNA, 25 bp, Homo sapien
gttgccggtgtcaacaacacgtctg

SEQ ID NO: 3894009 - DNA, 25 bp, Homo sapien
caaaaattcagctaacgcttggatg

SEQ ID NO: 3894010 - DNA, 25 bp, Homo sapien
tcttaaccagggaatggaagctagt

SEQ ID NO: 3894011 - DNA, 25 bp, Homo sapien
tgtaccaagtttgaattacctcagt

SEQ ID NO: 3894012 - DNA, 25 bp, Homo sapien
aaacctattctctgctgtaccaagt

SEQ ID NO: 3894013 - DNA, 25 bp, Homo sapien
caagggcctaagctgaagaagtcta

SEQ ID NO: 3894014 - DNA, 25 bp, Homo sapien
ctctagatggtatacgggtcctccc

SEQ ID NO: 3894015 - DNA, 25 bp, Homo sapien
gcccggcctggaagtatttataagc

SEQ ID NO: 3894016 - DNA, 25 bp, Homo sapien
ctcaaatcttggaatgtggcaggga

SEQ ID NO: 3894017 - DNA, 25 bp, Homo sapien
gctgggatgcagtgcctattaacaa

SEQ ID NO: 3894018 - DNA, 25 bp, Homo sapien
acaagtgcctttaaagcactctact

SEQ ID NO: 3894019 - DNA, 25 bp, Homo sapien
gatgcagtgcctattaacaagtgcc

SEQ ID NO: 3894020 - DNA, 25 bp, Homo sapien
gggatgcagtgcctattaacaagtg

SEQ ID NO: 3894021 - DNA, 25 bp, Homo sapien
tcaggaaacttcgaaccaattggta

SEQ ID NO: 3894022 - DNA, 25 bp, Homo sapien
cagtcacaagggtgtaattcttata

SEQ ID NO: 3894023 - DNA, 25 bp, Homo sapien
caattggtaagtcccaggcaccccg

SEQ ID NO: 3894024 - DNA, 25 bp, Homo sapien
ccaaagacagtcacaagggtgtaat

SEQ ID NO: 3894025 - DNA, 25 bp, Homo sapien
taactacctgtgaagcggcaagcag

SEQ ID NO: 3894026 - DNA, 25 bp, Homo sapien
agcaggtctccacagcgcatgcagt

SEQ ID NO: 3894027 - DNA, 25 bp, Homo sapien
accaggttttaaactctcccagctg

SEQ ID NO: 3894028 - DNA, 25 bp, Homo sapien
agtagtaaattagcgcccacacagg

SEQ ID NO: 3894029 - DNA, 25 bp, Homo sapien
cactctggttgtcggtgacgtcaca

SEQ ID NO: 3894030 - DNA, 25 bp, Homo sapien
tgacgtcacatctgccaatgataca

SEQ ID NO: 3894031 - DNA, 25 bp, Homo sapien
tacacggcccgcttgtagggatctg

SEQ ID NO: 3894032 - DNA, 25 bp, Homo sapien
tattgttcctgagggccctacggta

SEQ ID NO: 3894033 - DNA, 25 bp, Homo sapien
tcgtcgtcaaaacacacttggttca

SEQ ID NO: 3894034 - DNA, 25 bp, Homo sapien
ggtgccatcgtcgtcaaaacacact

SEQ ID NO: 3894035 - DNA, 25 bp, Homo sapien
gagctggtgccatcgtcgtcaaaac

SEQ ID NO: 3894036 - DNA, 25 bp, Homo sapien
gggagctggtgccatcgtcgtcaaa

SEQ ID NO: 3894037 - DNA, 25 bp, Homo sapien
tagtcttccaacaactgcttctgga

SEQ ID NO: 3894038 - DNA, 25 bp, Homo sapien
atagtcttccaacaactgcttctgg

SEQ ID NO: 3894039 - DNA, 25 bp, Homo sapien
agtcttccaacaactgcttctggaa

SEQ ID NO: 3894040 - DNA, 25 bp, Homo sapien
catagtcttccaacaactgcttctg

SEQ ID NO: 3894041 - DNA, 25 bp, Homo sapien
gcaccagtgctacatggacagcatg

SEQ ID NO: 3894042 - DNA, 25 bp, Homo sapien
tggttcaccgtaaagtgggactcgc

SEQ ID NO: 3894043 - DNA, 25 bp, Homo sapien
gcgcagccgctccatgcggaaaaga

SEQ ID NO: 3894044 - DNA, 25 bp, Homo sapien
tcaaactgcgctgtcaggaacagga

SEQ ID NO: 3894045 - DNA, 25 bp, Homo sapien
tcatcccaggcaggtatgcacatgc

SEQ ID NO: 3894046 - DNA, 25 bp, Homo sapien
catgctctaaaatgactggtaccct

SEQ ID NO: 3894047 - DNA, 25 bp, Homo sapien
ccaggcccagagtggagaaaacagc

SEQ ID NO: 3894048 - DNA, 25 bp, Homo sapien
tttgctgcaacaataaggaacctgc

SEQ ID NO: 3894049 - DNA, 25 bp, Homo sapien
gcctcccttgggtccgtggactcaa

SEQ ID NO: 3894050 - DNA, 25 bp, Homo sapien
aacttccgggtgtacagcatgagga

SEQ ID NO: 3894051 - DNA, 25 bp, Homo sapien
ttcagccgccgcaagcaaggagggt

SEQ ID NO: 3894052 - DNA, 25 bp, Homo sapien
atgaggagccgcacgaagttcagcc

SEQ ID NO: 3894053 - DNA, 25 bp, Homo sapien
caatcacaagctcactcacacagcg

SEQ ID NO: 3894054 - DNA, 25 bp, Homo sapien
ctcactcacacagcgcagaaacatg

SEQ ID NO: 3894055 - DNA, 25 bp, Homo sapien
ctcacacagcgcagaaacatgtttt

SEQ ID NO: 3894056 - DNA, 25 bp, Homo sapien
acaagctcactcacacagcgcagaa

SEQ ID NO: 3894057 - DNA, 25 bp, Homo sapien
ctttctacttccgtcattctctagt

SEQ ID NO: 3894058 - DNA, 25 bp, Homo sapien
tacttccgtcattctctagtttccc

SEQ ID NO: 3894059 - DNA, 25 bp, Homo sapien
acttccgtcattctctagtttccca

SEQ ID NO: 3894060 - DNA, 25 bp, Homo sapien
tctacttccgtcattctctagtttc

SEQ ID NO: 3894061 - DNA, 25 bp, Homo sapien
gctttgtgtcactagtaaacttatc

SEQ ID NO: 3894062 - DNA, 25 bp, Homo sapien
tagtaaacttatctatgactccagg

SEQ ID NO: 3894063 - DNA, 25 bp, Homo sapien
ctgccacagaagcaactttgttgat

SEQ ID NO: 3894064 - DNA, 25 bp, Homo sapien
ctttgttgataataggctttgtgtc

SEQ ID NO: 3894065 - DNA, 25 bp, Homo sapien
gggacgacagggctcagcagtttgt

SEQ ID NO: 3894066 - DNA, 25 bp, Homo sapien
acgacagggctcagcagtttgttca

SEQ ID NO: 3894067 - DNA, 25 bp, Homo sapien
gacgacagggctcagcagtttgttc

SEQ ID NO: 3894068 - DNA, 25 bp, Homo sapien
gacagggctcagcagtttgttcatc

SEQ ID NO: 3894069 - DNA, 25 bp, Homo sapien
cagcctctccttgttggattgcggg

SEQ ID NO: 3894070 - DNA, 25 bp, Homo sapien
ccttgttggattgcggggcactgat

SEQ ID NO: 3894071 - DNA, 25 bp, Homo sapien
tcttcagcctctccttgttggattg

SEQ ID NO: 3894072 - DNA, 25 bp, Homo sapien
cgttcggcaatggagagtgccatgt

SEQ ID NO: 3894073 - DNA, 25 bp, Homo sapien
gatactcgtcaaaaaaggtgatcaa

SEQ ID NO: 3894074 - DNA, 25 bp, Homo sapien
caatatgaccactatgatactcgtc

SEQ ID NO: 3894075 - DNA, 25 bp, Homo sapien
caaaagaagatagaacgtggagtcc

SEQ ID NO: 3894076 - DNA, 25 bp, Homo sapien
tgcgcttattccttgagccctatac

SEQ ID NO: 3894077 - DNA, 25 bp, Homo sapien
ttatacaacaaacatactggcaaca

SEQ ID NO: 3894078 - DNA, 25 bp, Homo sapien
cattaacctgcacttcaaacacctt

SEQ ID NO: 3894079 - DNA, 25 bp, Homo sapien
tgttttgaattttcgagggtgtaca

SEQ ID NO: 3894080 - DNA, 25 bp, Homo sapien
ttttcgagggtgtacattaacctgc

SEQ ID NO: 3894081 - DNA, 25 bp, Homo sapien
tcagcacctcacatactccaaaggg

SEQ ID NO: 3894082 - DNA, 25 bp, Homo sapien
gcacctcacatactccaaagggctt

SEQ ID NO: 3894083 - DNA, 25 bp, Homo sapien
ctcacatactccaaagggcttcttc

SEQ ID NO: 3894084 - DNA, 25 bp, Homo sapien
acctcacatactccaaagggcttct

SEQ ID NO: 3894085 - DNA, 25 bp, Homo sapien
ccaccggccccatgtaacacaacca

SEQ ID NO: 3894086 - DNA, 25 bp, Homo sapien
accggccccatgtaacacaaccatc

SEQ ID NO: 3894087 - DNA, 25 bp, Homo sapien
cggccccatgtaacacaaccatcac

SEQ ID NO: 3894088 - DNA, 25 bp, Homo sapien
acaaccaccggccccatgtaacaca

SEQ ID NO: 3894089 - DNA, 25 bp, Homo sapien
attcaggggcaccagcttcaagcgc

SEQ ID NO: 3894090 - DNA, 25 bp, Homo sapien
gcaccagcttcaagcgctcaatgat

SEQ ID NO: 3894091 - DNA, 25 bp, Homo sapien
gggcaccagcttcaagcgctcaatg

SEQ ID NO: 3894092 - DNA, 25 bp, Homo sapien
aggggcaccagcttcaagcgctcaa

SEQ ID NO: 3894093 - DNA, 25 bp, Homo sapien
ctcagtctggatagttactgtaact

SEQ ID NO: 3894094 - DNA, 25 bp, Homo sapien
ggaattcagacaataatctgatggg

SEQ ID NO: 3894095 - DNA, 25 bp, Homo sapien
aaccagacttcacagatcaaccaga

SEQ ID NO: 3894096 - DNA, 25 bp, Homo sapien
caggccaaggtatctgaaagggaac

SEQ ID NO: 3894097 - DNA, 25 bp, Homo sapien
aaagtctccctctatcgcccaggct

SEQ ID NO: 3894098 - DNA, 25 bp, Homo sapien
caaagtctccctctatcgcccaggc

SEQ ID NO: 3894099 - DNA, 25 bp, Homo sapien
acaaagtctccctctatcgcccagg

SEQ ID NO: 3894100 - DNA, 25 bp, Homo sapien
aagtctccctctatcgcccaggctg

SEQ ID NO: 3894101 - DNA, 25 bp, Homo sapien
gccaggccctcgtgtaccactttaa

SEQ ID NO: 3894102 - DNA, 25 bp, Homo sapien
gaccttctgaactgtgtgtaccaca

SEQ ID NO: 3894103 - DNA, 25 bp, Homo sapien
gaagccacagcaggtataaagggaa

SEQ ID NO: 3894104 - DNA, 25 bp, Homo sapien
tgggagtgtctataaggccaggccc

SEQ ID NO: 3894105 - DNA, 25 bp, Homo sapien
cctggatgacgaggatggacttgtc

SEQ ID NO: 3894106 - DNA, 25 bp, Homo sapien
ttcatggtggcaagaagcacttctg

SEQ ID NO: 3894107 - DNA, 25 bp, Homo sapien
gtcgcggtcctcgatgactcgctgg

SEQ ID NO: 3894108 - DNA, 25 bp, Homo sapien
cccttgagcctcttaaactgtgtga

SEQ ID NO: 3894109 - DNA, 25 bp, Homo sapien
aatgtttctcgcgaatgctgggatc

SEQ ID NO: 3894110 - DNA, 25 bp, Homo sapien
tggtctcataagagcgcaacggatt

SEQ ID NO: 3894111 - DNA, 25 bp, Homo sapien
cagttttgggtcatgtggtctcata

SEQ ID NO: 3894112 - DNA, 25 bp, Homo sapien
tcctaacacgagatttatccagctg

SEQ ID NO: 3894113 - DNA, 25 bp, Homo sapien
gataagatgctgtcctagttacctc

SEQ ID NO: 3894114 - DNA, 25 bp, Homo sapien
gacaacatatgctgtgagccccagg

SEQ ID NO: 3894115 - DNA, 25 bp, Homo sapien
tggactccacttgacccatgcactg

SEQ ID NO: 3894116 - DNA, 25 bp, Homo sapien
tgagggcagttgcttcccaactcca

SEQ ID NO: 3894117 - DNA, 25 bp, Homo sapien
tgttacccacattcctaaaggtgga

SEQ ID NO: 3894118 - DNA, 25 bp, Homo sapien
tcagtggaccactcttgagcactgt

SEQ ID NO: 3894119 - DNA, 25 bp, Homo sapien
gcacaagttttgtcaacaaccatgc

SEQ ID NO: 3894120 - DNA, 25 bp, Homo sapien
tccgccatctttcactaagcacaag

SEQ ID NO: 3894121 - DNA, 25 bp, Homo sapien
taattcatgaggacctccatctgca

SEQ ID NO: 3894122 - DNA, 25 bp, Homo sapien
ggtaatcagagtgcgggcttgactt

SEQ ID NO: 3894123 - DNA, 25 bp, Homo sapien
cattggtgtccccagacgttcggta

SEQ ID NO: 3894124 - DNA, 25 bp, Homo sapien
ggtatcattccagcaaaggtaatca

SEQ ID NO: 3894125 - DNA, 25 bp, Homo sapien
gatgtactgacagtgtgccgaccca

SEQ ID NO: 3894126 - DNA, 25 bp, Homo sapien
gtactgacagtgtgccgacccagac

SEQ ID NO: 3894127 - DNA, 25 bp, Homo sapien
cctgatgtactgacagtgtgccgac

SEQ ID NO: 3894128 - DNA, 25 bp, Homo sapien
gtgcctgatgtactgacagtgtgcc

SEQ ID NO: 3894129 - DNA, 25 bp, Homo sapien
tttattggcgttgacaaaaatacat

SEQ ID NO: 3894130 - DNA, 25 bp, Homo sapien
tacataatacagaaaccaaaacaaa

SEQ ID NO: 3894131 - DNA, 25 bp, Homo sapien
caaaacacaacagaaacaaaaccag

SEQ ID NO: 3894132 - DNA, 25 bp, Homo sapien
aatacataatacagaaaccaaaaca

SEQ ID NO: 3894133 - DNA, 25 bp, Homo sapien
tagtgacggtatttcccattacaca

SEQ ID NO: 3894134 - DNA, 25 bp, Homo sapien
ccaaataatgaatatctacatagcc

SEQ ID NO: 3894135 - DNA, 25 bp, Homo sapien
atctacatagcctctcattccctgg

SEQ ID NO: 3894136 - DNA, 25 bp, Homo sapien
cctggcccaagagctagtgacggta

SEQ ID NO: 3894137 - DNA, 25 bp, Homo sapien
catcaagagttaacagtggctgcca

SEQ ID NO: 3894138 - DNA, 25 bp, Homo sapien
tctggaagacaagacgcctagtgcc

SEQ ID NO: 3894139 - DNA, 25 bp, Homo sapien
caacctgatgttgtggccttgcaaa

SEQ ID NO: 3894140 - DNA, 25 bp, Homo sapien
caaatgctggacactgcggaaaagt

SEQ ID NO: 3894141 - DNA, 25 bp, Homo sapien
tactgtgggccagataccccagaga

SEQ ID NO: 3894142 - DNA, 25 bp, Homo sapien
tctgaatctaggcacgtggagctga

SEQ ID NO: 3894143 - DNA, 25 bp, Homo sapien
gatattccagctacctagcacggcc

SEQ ID NO: 3894144 - DNA, 25 bp, Homo sapien
tagaaccacgagtacttcacttagg

SEQ ID NO: 3894145 - DNA, 25 bp, Homo sapien
cacacagagtgactcgagaaaagca

SEQ ID NO: 3894146 - DNA, 25 bp, Homo sapien
ttactgtacagaaaggaacatgcag

SEQ ID NO: 3894147 - DNA, 25 bp, Homo sapien
gatagtggtgaaggaaccatcctaa

SEQ ID NO: 3894148 - DNA, 25 bp, Homo sapien
ctgatcaagtgagaaaaggctgtac

SEQ ID NO: 3894149 - DNA, 25 bp, Homo sapien
ttaacagctgcacgacaccgctggg

SEQ ID NO: 3894150 - DNA, 25 bp, Homo sapien
gggcatatgaagcaggccagctgca

SEQ ID NO: 3894151 - DNA, 25 bp, Homo sapien
tgcagccaggccgaagggacctggg

SEQ ID NO: 3894152 - DNA, 25 bp, Homo sapien
tcggggtcataggagagattaacag

SEQ ID NO: 3894153 - DNA, 25 bp, Homo sapien
atgcgctgctcgtcggcctgattca

SEQ ID NO: 3894154 - DNA, 25 bp, Homo sapien
aaatagccgggtaagaggatgcgct

SEQ ID NO: 3894155 - DNA, 25 bp, Homo sapien
cctggtgtcgtgaaatagccgggta

SEQ ID NO: 3894156 - DNA, 25 bp, Homo sapien
tgatgcaaccctggtgtcgtgaaat

SEQ ID NO: 3894157 - DNA, 25 bp, Homo sapien
ggctatggcaacaatcaggctggaa

SEQ ID NO: 3894158 - DNA, 25 bp, Homo sapien
gacaatgaccctggctatgagttcc

SEQ ID NO: 3894159 - DNA, 25 bp, Homo sapien
tgtattgtttccaagtagagaaccc

SEQ ID NO: 3894160 - DNA, 25 bp, Homo sapien
gagattctgtggacctcggcaagag

SEQ ID NO: 3894161 - DNA, 25 bp, Homo sapien
gccactgcgcttagctggtataata

SEQ ID NO: 3894162 - DNA, 25 bp, Homo sapien
gcgcttagctggtataatatttaaa

SEQ ID NO: 3894163 - DNA, 25 bp, Homo sapien
gaagcctcaaccaccagacttcaag

SEQ ID NO: 3894164 - DNA, 25 bp, Homo sapien
atggggtctcaagtcaccccaacca

SEQ ID NO: 3894165 - DNA, 25 bp, Homo sapien
gccaggatccgcaaggacacacagg

SEQ ID NO: 3894166 - DNA, 25 bp, Homo sapien
aggggccaggatccgcaaggacaca

SEQ ID NO: 3894167 - DNA, 25 bp, Homo sapien
ggacacacagggtggttttataggc

SEQ ID NO: 3894168 - DNA, 25 bp, Homo sapien
acacacagggtggttttataggctg

SEQ ID NO: 3894169 - DNA, 25 bp, Homo sapien
caaaggtgcgcatgcagaaggtgct

SEQ ID NO: 3894170 - DNA, 25 bp, Homo sapien
tgtgggcaccacatcgatcgtgttg

SEQ ID NO: 3894171 - DNA, 25 bp, Homo sapien
ccaggcgtctctgttgtgggcagtt

SEQ ID NO: 3894172 - DNA, 25 bp, Homo sapien
gtgaagcgcccgctgcacaaagtgg

SEQ ID NO: 3894173 - DNA, 25 bp, Homo sapien
ggagtgcaggtcagccagtgtgggc

SEQ ID NO: 3894174 - DNA, 25 bp, Homo sapien
ggaaggagtgcaggtcagccagtgt

SEQ ID NO: 3894175 - DNA, 25 bp, Homo sapien
gagtgcaggtcagccagtgtgggcc

SEQ ID NO: 3894176 - DNA, 25 bp, Homo sapien
cttgaggaaggagtgcaggtcagcc

SEQ ID NO: 3894177 - DNA, 25 bp, Homo sapien
cactgggaggtctcctagtttgtgc

SEQ ID NO: 3894178 - DNA, 25 bp, Homo sapien
caagtgactgacgccctcctctggg

SEQ ID NO: 3894179 - DNA, 25 bp, Homo sapien
gcacttcatctcagtatggagccaa

SEQ ID NO: 3894180 - DNA, 25 bp, Homo sapien
ttcatctcagtatggagccaagggc

SEQ ID NO: 3894181 - DNA, 25 bp, Homo sapien
accagcccatcagtcatctcgtggc

SEQ ID NO: 3894182 - DNA, 25 bp, Homo sapien
tcggggttcttctcgctgctggtgc

SEQ ID NO: 3894183 - DNA, 25 bp, Homo sapien
tcatctcgtggctgggccggctgtc

SEQ ID NO: 3894184 - DNA, 25 bp, Homo sapien
ttgacccagccgaagcgcactggct

SEQ ID NO: 3894185 - DNA, 25 bp, Homo sapien
ggaggacaggggggtcagaggccac

SEQ ID NO: 3894186 - DNA, 25 bp, Homo sapien
gggaggacaggggggtcagaggcca

SEQ ID NO: 3894187 - DNA, 25 bp, Homo sapien
tgggaggacaggggggtcagaggcc

SEQ ID NO: 3894188 - DNA, 25 bp, Homo sapien
ctgggaggacaggggggtcagaggc

SEQ ID NO: 3894189 - DNA, 25 bp, Homo sapien
gatcacgccccaaatgttgagcatg

SEQ ID NO: 3894190 - DNA, 25 bp, Homo sapien
agccgcaggtagaggatcacgcccc

SEQ ID NO: 3894191 - DNA, 25 bp, Homo sapien
ctgcctgggccgtaatccagggcag

SEQ ID NO: 3894192 - DNA, 25 bp, Homo sapien
tgggccgtaatccagggcagccgca

SEQ ID NO: 3894193 - DNA, 25 bp, Homo sapien
gcctgtgatggaggtcaccgtgacc

SEQ ID NO: 3894194 - DNA, 25 bp, Homo sapien
gaggtcaccgtgaccgacagcagga

SEQ ID NO: 3894195 - DNA, 25 bp, Homo sapien
tgtgatggaggtcaccgtgaccgac

SEQ ID NO: 3894196 - DNA, 25 bp, Homo sapien
caccgtgaccgacagcaggatgatg

SEQ ID NO: 3894197 - DNA, 25 bp, Homo sapien
tctgggcccagactccgggagatga

SEQ ID NO: 3894198 - DNA, 25 bp, Homo sapien
aggtcccgcacggtctctgcaaagc

SEQ ID NO: 3894199 - DNA, 25 bp, Homo sapien
aagcgaaaatgaggccgatggagcc

SEQ ID NO: 3894200 - DNA, 25 bp, Homo sapien
acacccacggcattggcgaaagcga

SEQ ID NO: 3894201 - DNA, 25 bp, Homo sapien
cagcagcacagtgaccgagaccacg

SEQ ID NO: 3894202 - DNA, 25 bp, Homo sapien
ttaatggggtccacgatgggtgccc

SEQ ID NO: 3894203 - DNA, 25 bp, Homo sapien
ccgagaccacggcaatgatgcggat

SEQ ID NO: 3894204 - DNA, 25 bp, Homo sapien
caatgatgcggatgtcgttaatggg

SEQ ID NO: 3894205 - DNA, 25 bp, Homo sapien
cccactaaatagttggcaaaggaga

SEQ ID NO: 3894206 - DNA, 25 bp, Homo sapien
gatcagcgtccccactaaatagttg

SEQ ID NO: 3894207 - DNA, 25 bp, Homo sapien
gccttgtcctcagatggggggatca

SEQ ID NO: 3894208 - DNA, 25 bp, Homo sapien
gatggggggatcagcgtccccacta

SEQ ID NO: 3894209 - DNA, 25 bp, Homo sapien
cttgaggtcaccagatatgttggcc

SEQ ID NO: 3894210 - DNA, 25 bp, Homo sapien
gagaacattccgaagaaggtgccat

SEQ ID NO: 3894211 - DNA, 25 bp, Homo sapien
gaccccgccagtcaggcaccaagtt

SEQ ID NO: 3894212 - DNA, 25 bp, Homo sapien
gcaccaagttctggacaaaaatgtc

SEQ ID NO: 3894213 - DNA, 25 bp, Homo sapien
caggtaggaaatggtcgtccagaaa

SEQ ID NO: 3894214 - DNA, 25 bp, Homo sapien
gtaggaaatggtcgtccagaaaatg

SEQ ID NO: 3894215 - DNA, 25 bp, Homo sapien
ggaaatggtcgtccagaaaatggcc

SEQ ID NO: 3894216 - DNA, 25 bp, Homo sapien
gaaatggtcgtccagaaaatggcca

SEQ ID NO: 3894217 - DNA, 25 bp, Homo sapien
aatagttgatgaggccgtagtggca

SEQ ID NO: 3894218 - DNA, 25 bp, Homo sapien
aggccagcccctcgcaggcacccca

SEQ ID NO: 3894219 - DNA, 25 bp, Homo sapien
gaggcatcacgcaccacgcaggagc

SEQ ID NO: 3894220 - DNA, 25 bp, Homo sapien
cccagccaggggtcactgtgtcatt

SEQ ID NO: 3894221 - DNA, 25 bp, Homo sapien
gggcgcgaagcctgacaccatgctc

SEQ ID NO: 3894222 - DNA, 25 bp, Homo sapien
caggggcgcgaagcctgacaccatg

SEQ ID NO: 3894223 - DNA, 25 bp, Homo sapien
ccccgaagatgccagccgtgatcag

SEQ ID NO: 3894224 - DNA, 25 bp, Homo sapien
gcgaagcctgacaccatgctcatgg

SEQ ID NO: 3894225 - DNA, 25 bp, Homo sapien
ccgaagaagccgatcagtgggtaca

SEQ ID NO: 3894226 - DNA, 25 bp, Homo sapien
agcaggtagccacgcacgggctcct

SEQ ID NO: 3894227 - DNA, 25 bp, Homo sapien
agtgggtacagctggtcctcgcaaa

SEQ ID NO: 3894228 - DNA, 25 bp, Homo sapien
ctccttgttcttgccatagcctttg

SEQ ID NO: 3894229 - DNA, 25 bp, Homo sapien
aaatgatgggggctatggtgttgag

SEQ ID NO: 3894230 - DNA, 25 bp, Homo sapien
caggcgagttggtgatggaggcgtg

SEQ ID NO: 3894231 - DNA, 25 bp, Homo sapien
ttgatgagggcataggagcagagga

SEQ ID NO: 3894232 - DNA, 25 bp, Homo sapien
gagttggtgatggaggcgtggaagc

SEQ ID NO: 3894233 - DNA, 25 bp, Homo sapien
ggcttcttgtagatgacatagagca

SEQ ID NO: 3894234 - DNA, 25 bp, Homo sapien
tgtagtattggaatgaaggtctcca

SEQ ID NO: 3894235 - DNA, 25 bp, Homo sapien
aggaggaagagcaccacgccaatgg

SEQ ID NO: 3894236 - DNA, 25 bp, Homo sapien
aacagcgccgcccacttgttgtagt

SEQ ID NO: 3894237 - DNA, 25 bp, Homo sapien
agggccaggttgtaggagccagcct

SEQ ID NO: 3894238 - DNA, 25 bp, Homo sapien
ggagccagcctgtaccgaggagccc

SEQ ID NO: 3894239 - DNA, 25 bp, Homo sapien
gctgagggccaggttgtaggagcca

SEQ ID NO: 3894240 - DNA, 25 bp, Homo sapien
tgagggccaggttgtaggagccagc

SEQ ID NO: 3894241 - DNA, 25 bp, Homo sapien
ctgaggttccgggtgaaggtgccca

SEQ ID NO: 3894242 - DNA, 25 bp, Homo sapien
catcaggctgaggttccgggtgaag

SEQ ID NO: 3894243 - DNA, 25 bp, Homo sapien
gatgagcacgtggccacagatcatc

SEQ ID NO: 3894244 - DNA, 25 bp, Homo sapien
tccgggtgaaggtgcccacaaagtc

SEQ ID NO: 3894245 - DNA, 25 bp, Homo sapien
gcaatgacatccgagtagaaggcct

SEQ ID NO: 3894246 - DNA, 25 bp, Homo sapien
tctgcggaggtcctcggcaatgaca

SEQ ID NO: 3894247 - DNA, 25 bp, Homo sapien
agccacttggtgtgcccgttggcga

SEQ ID NO: 3894248 - DNA, 25 bp, Homo sapien
tgcatgaggatctggacgcctctgc

SEQ ID NO: 3894249 - DNA, 25 bp, Homo sapien
tcttgaacccaaccaccagaatgtt

SEQ ID NO: 3894250 - DNA, 25 bp, Homo sapien
ggaggatgccaatgtagtcttccac

SEQ ID NO: 3894251 - DNA, 25 bp, Homo sapien
gaatgttgggcttcattctcccgag

SEQ ID NO: 3894252 - DNA, 25 bp, Homo sapien
gtcttccactgtggccgggtgagcc

SEQ ID NO: 3894253 - DNA, 25 bp, Homo sapien
cacacacgccatagttgaaatcaaa

SEQ ID NO: 3894254 - DNA, 25 bp, Homo sapien
ttggacacgttgagtccctcccgca

SEQ ID NO: 3894255 - DNA, 25 bp, Homo sapien
tgacacacacgccatagttgaaatc

SEQ ID NO: 3894256 - DNA, 25 bp, Homo sapien
gcctgcatcatcttggacacgttga

SEQ ID NO: 3894257 - DNA, 25 bp, Homo sapien
ctctccttgtctgagggcaccgtgg

SEQ ID NO: 3894258 - DNA, 25 bp, Homo sapien
acaggctctccttgtctgagggcac

SEQ ID NO: 3894259 - DNA, 25 bp, Homo sapien
gggcaccgtgggttcctccttgaca

SEQ ID NO: 3894260 - DNA, 25 bp, Homo sapien
caccgtgggttcctccttgacaggg

SEQ ID NO: 3894261 - DNA, 25 bp, Homo sapien
tcccgtcctccgctgggtcaaacac

SEQ ID NO: 3894262 - DNA, 25 bp, Homo sapien
tccttcccgtcctccgctgggtcaa

SEQ ID NO: 3894263 - DNA, 25 bp, Homo sapien
ttccttcccgtcctccgctgggtca

SEQ ID NO: 3894264 - DNA, 25 bp, Homo sapien
cgtcctccgctgggtcaaacacggg

SEQ ID NO: 3894265 - DNA, 25 bp, Homo sapien
agcgccagagactgatggcctggca

SEQ ID NO: 3894266 - DNA, 25 bp, Homo sapien
gcgccagagactgatggcctggcac

SEQ ID NO: 3894267 - DNA, 25 bp, Homo sapien
aagcgccagagactgatggcctggc

SEQ ID NO: 3894268 - DNA, 25 bp, Homo sapien
caatctttgacacggccaagcccct

SEQ ID NO: 3894269 - DNA, 25 bp, Homo sapien
tccagttactcaggcaccaccgtca

SEQ ID NO: 3894270 - DNA, 25 bp, Homo sapien
ccagttcccaactccagttactcag

SEQ ID NO: 3894271 - DNA, 25 bp, Homo sapien
aagcccctccagttcccaactccag

SEQ ID NO: 3894272 - DNA, 25 bp, Homo sapien
taggtgggtccccatgatgccgtga

SEQ ID NO: 3894273 - DNA, 25 bp, Homo sapien
ttgaacacgggttctctggcaggtg

SEQ ID NO: 3894274 - DNA, 25 bp, Homo sapien
ctggcaatgtagtggtgcggtcaca

SEQ ID NO: 3894275 - DNA, 25 bp, Homo sapien
aacgccccttctgatgttgaacacg

SEQ ID NO: 3894276 - DNA, 25 bp, Homo sapien
cttcttgccctgctccgactggaag

SEQ ID NO: 3894277 - DNA, 25 bp, Homo sapien
gagccagtagatgtctatggtcttc

SEQ ID NO: 3894278 - DNA, 25 bp, Homo sapien
ctccatcgtcaaagagccagtagat

SEQ ID NO: 3894279 - DNA, 25 bp, Homo sapien
ccctgctccgactggaagatggtgg

SEQ ID NO: 3894280 - DNA, 25 bp, Homo sapien
cgcctacgaacacacggatcttgca

SEQ ID NO: 3894281 - DNA, 25 bp, Homo sapien
catcctgttaatctggccgcctacg

SEQ ID NO: 3894282 - DNA, 25 bp, Homo sapien
tcttgcggccaaggagatagggaat

SEQ ID NO: 3894283 - DNA, 25 bp, Homo sapien
tcctcttgcggccaaggagataggg

SEQ ID NO: 3894284 - DNA, 25 bp, Homo sapien
tcatggaatcccagtcggaacttgc

SEQ ID NO: 3894285 - DNA, 25 bp, Homo sapien
tgatgtcagggaggatgtggacttc

SEQ ID NO: 3894286 - DNA, 25 bp, Homo sapien
cagtcggaacttgctcagcagagaa

SEQ ID NO: 3894287 - DNA, 25 bp, Homo sapien
ggatgtggacttcatggaatcccag

SEQ ID NO: 3894288 - DNA, 25 bp, Homo sapien
cacccgaccatccagcaggtattta

SEQ ID NO: 3894289 - DNA, 25 bp, Homo sapien
ccatcggacactgccatttacaaag

SEQ ID NO: 3894290 - DNA, 25 bp, Homo sapien
gccggctgagacgataaccccattt

SEQ ID NO: 3894291 - DNA, 25 bp, Homo sapien
ttttcaggctgaaacccatcggaca

SEQ ID NO: 3894292 - DNA, 25 bp, Homo sapien
ctcgttgacagtggcctcatccttg

SEQ ID NO: 3894293 - DNA, 25 bp, Homo sapien
agtcccgccgcatctcgttgacagt

SEQ ID NO: 3894294 - DNA, 25 bp, Homo sapien
attcagacggaagggtgcaatcatg

SEQ ID NO: 3894295 - DNA, 25 bp, Homo sapien
gactctgttcttcgtaatctcctca

SEQ ID NO: 3894296 - DNA, 25 bp, Homo sapien
tgacgatgagagcagcgtctcggga

SEQ ID NO: 3894297 - DNA, 25 bp, Homo sapien
atgacgatgagagcagcgtctcggg

SEQ ID NO: 3894298 - DNA, 25 bp, Homo sapien
gtctcgggagtaatccagcacaatc

SEQ ID NO: 3894299 - DNA, 25 bp, Homo sapien
agcgtctcgggagtaatccagcaca

SEQ ID NO: 3894300 - DNA, 25 bp, Homo sapien
cacatgctaagaatcgccagggcta

SEQ ID NO: 3894301 - DNA, 25 bp, Homo sapien
tcactgatgcctgggacacgtgagg

SEQ ID NO: 3894302 - DNA, 25 bp, Homo sapien
tttatgggaactttggcccttctgc

SEQ ID NO: 3894303 - DNA, 25 bp, Homo sapien
caaccaggagttgatgtccctcttg

SEQ ID NO: 3894304 - DNA, 25 bp, Homo sapien
tggctcagaactggacgtgggtcca

SEQ ID NO: 3894305 - DNA, 25 bp, Homo sapien
aacatcagctgggaatggccgatag

SEQ ID NO: 3894306 - DNA, 25 bp, Homo sapien
cagggctaggacaggcctctgtttc

SEQ ID NO: 3894307 - DNA, 25 bp, Homo sapien
gacgtgggtccagtaggaacagcca

SEQ ID NO: 3894308 - DNA, 25 bp, Homo sapien
cagggtgaaggacatagacgaccat

SEQ ID NO: 3894309 - DNA, 25 bp, Homo sapien
agggtgaaggacatagacgaccatt

SEQ ID NO: 3894310 - DNA, 25 bp, Homo sapien
tgaaggacatagacgaccatttgtt

SEQ ID NO: 3894311 - DNA, 25 bp, Homo sapien
gtgaaggacatagacgaccatttgt

SEQ ID NO: 3894312 - DNA, 25 bp, Homo sapien
cacatctgctaagaagggtttgcac

SEQ ID NO: 3894313 - DNA, 25 bp, Homo sapien
ggagccctgtgacctatgaatagga

SEQ ID NO: 3894314 - DNA, 25 bp, Homo sapien
ctactgtctactggcacataggaag

SEQ ID NO: 3894315 - DNA, 25 bp, Homo sapien
tgttattgataagcccagtctatgg

SEQ ID NO: 3894316 - DNA, 25 bp, Homo sapien
tcaacacaattgactacactataaa

SEQ ID NO: 3894317 - DNA, 25 bp, Homo sapien
ttatatcactatctgcagctgggca

SEQ ID NO: 3894318 - DNA, 25 bp, Homo sapien
cacaagaaaatgttgcaagcggcag

SEQ ID NO: 3894319 - DNA, 25 bp, Homo sapien
aaattatatcactatctgcagctgg

SEQ ID NO: 3894320 - DNA, 25 bp, Homo sapien
cttagaatcacagcatgttagcatg

SEQ ID NO: 3894321 - DNA, 25 bp, Homo sapien
tcattaagccgtggtctggcacacc

SEQ ID NO: 3894322 - DNA, 25 bp, Homo sapien
ccacacagtgggctaatcgcataga

SEQ ID NO: 3894323 - DNA, 25 bp, Homo sapien
ctctctgaacagaggcggcactcat

SEQ ID NO: 3894324 - DNA, 25 bp, Homo sapien
agtggtagaagagagattaccacgg

SEQ ID NO: 3894325 - DNA, 25 bp, Homo sapien
gaaaaagtggtagaagagagattac

SEQ ID NO: 3894326 - DNA, 25 bp, Homo sapien
ttcagaacagcgagtctgtttaccg

SEQ ID NO: 3894327 - DNA, 25 bp, Homo sapien
gtagaagagagattaccacggggcc

SEQ ID NO: 3894328 - DNA, 25 bp, Homo sapien
tcaggatgactggaggtctgaggtc

SEQ ID NO: 3894329 - DNA, 25 bp, Homo sapien
actggcagtaaaaggtgagcacgtt

SEQ ID NO: 3894330 - DNA, 25 bp, Homo sapien
agccaggccatgtacagcgagctgg

SEQ ID NO: 3894331 - DNA, 25 bp, Homo sapien
tcctggtttcctcggatcaggatga

SEQ ID NO: 3894332 - DNA, 25 bp, Homo sapien
gaaaatggcaatgacacccagccgt

SEQ ID NO: 3894333 - DNA, 25 bp, Homo sapien
tgtcaagattcacgcccagcattgg

SEQ ID NO: 3894334 - DNA, 25 bp, Homo sapien
aagtccctcgtccaaagaaccagtg

SEQ ID NO: 3894335 - DNA, 25 bp, Homo sapien
gagagacctgcattccttagagagc

SEQ ID NO: 3894336 - DNA, 25 bp, Homo sapien
tccctcaggagcacgagagctgttc

SEQ ID NO: 3894337 - DNA, 25 bp, Homo sapien
tcaacgtgtagtgacctgaaggcct

SEQ ID NO: 3894338 - DNA, 25 bp, Homo sapien
agtgctcttgcaccctagctttggg

SEQ ID NO: 3894339 - DNA, 25 bp, Homo sapien
tatgtctagagctgcaaataccctc

SEQ ID NO: 3894340 - DNA, 25 bp, Homo sapien
aacagtgtgttccaaaacaaataag

SEQ ID NO: 3894341 - DNA, 25 bp, Homo sapien
agagttgaaaaacagtgtgttccaa

SEQ ID NO: 3894342 - DNA, 25 bp, Homo sapien
tgaaaaacagtgtgttccaaaacaa

SEQ ID NO: 3894343 - DNA, 25 bp, Homo sapien
tttcaaaacactcagcagagttgaa

SEQ ID NO: 3894344 - DNA, 25 bp, Homo sapien
ggacaaacaagagtcaggtggagcc

SEQ ID NO: 3894345 - DNA, 25 bp, Homo sapien
ccaggccagcatctagggcaagggt

SEQ ID NO: 3894346 - DNA, 25 bp, Homo sapien
caggtttggacccaggacaaacaag

SEQ ID NO: 3894347 - DNA, 25 bp, Homo sapien
agtcaggtggagcccgccctccagg

SEQ ID NO: 3894348 - DNA, 25 bp, Homo sapien
gcttcgggcgccttttatagaagcc

SEQ ID NO: 3894349 - DNA, 25 bp, Homo sapien
gcccgcaatctctgcaacgacagtt

SEQ ID NO: 3894350 - DNA, 25 bp, Homo sapien
aacgtggcccaatcggcgtccggat

SEQ ID NO: 3894351 - DNA, 25 bp, Homo sapien
tctgcggacagaacgctctgtggct

SEQ ID NO: 3894352 - DNA, 25 bp, Homo sapien
cggcggcggtgtcggggctccgctg

SEQ ID NO: 3894353 - DNA, 25 bp, Homo sapien
ggcggtgtcggggctccgctgcgct

SEQ ID NO: 3894354 - DNA, 25 bp, Homo sapien
gcggcggtgtcggggctccgctgcg

SEQ ID NO: 3894355 - DNA, 25 bp, Homo sapien
gcggtgtcggggctccgctgcgctc

SEQ ID NO: 3894356 - DNA, 25 bp, Homo sapien
tgacgggctcgggttcggtctcgga

SEQ ID NO: 3894357 - DNA, 25 bp, Homo sapien
gctcgggttcggtctcggactccat

SEQ ID NO: 3894358 - DNA, 25 bp, Homo sapien
tcagctccaagtcgcggtggcgctg

SEQ ID NO: 3894359 - DNA, 25 bp, Homo sapien
tcttcaccaggagcgtgacgggctc

SEQ ID NO: 3894360 - DNA, 25 bp, Homo sapien
agcagtgccccaaaataatatgaag

SEQ ID NO: 3894361 - DNA, 25 bp, Homo sapien
gcagtgccccaaaataatatgaagc

SEQ ID NO: 3894362 - DNA, 25 bp, Homo sapien
atatgaagctattctaaactgaagc

SEQ ID NO: 3894363 - DNA, 25 bp, Homo sapien
taactttaactggtctctaacacgc

SEQ ID NO: 3894364 - DNA, 25 bp, Homo sapien
agagtaacacaggtcagcatttcac

SEQ ID NO: 3894365 - DNA, 25 bp, Homo sapien
agaatggcaaattatcggctgggca

SEQ ID NO: 3894366 - DNA, 25 bp, Homo sapien
gcatttcacccctacaagttcctaa

SEQ ID NO: 3894367 - DNA, 25 bp, Homo sapien
tccctgagacattggtgatccaaca

SEQ ID NO: 3894368 - DNA, 25 bp, Homo sapien
cattggtgatccaacaacagcttcc

SEQ ID NO: 3894369 - DNA, 25 bp, Homo sapien
ccagaataaattaacctctggtcct

SEQ ID NO: 3894370 - DNA, 25 bp, Homo sapien
gagacattggtgatccaacaacagc

SEQ ID NO: 3894371 - DNA, 25 bp, Homo sapien
gaacctaacctggtgagtgcttaaa

SEQ ID NO: 3894372 - DNA, 25 bp, Homo sapien
cctggtgagtgcttaaaaacattca

SEQ ID NO: 3894373 - DNA, 25 bp, Homo sapien
taaggacctgaacctaacctggtga

SEQ ID NO: 3894374 - DNA, 25 bp, Homo sapien
tcagaagttaatgtgtaagtgatgt

SEQ ID NO: 3894375 - DNA, 25 bp, Homo sapien
tgaaggactcttcacattgcacacc

SEQ ID NO: 3894376 - DNA, 25 bp, Homo sapien
caccagatgcaaaacatgccgtttt

SEQ ID NO: 3894377 - DNA, 25 bp, Homo sapien
ccagatgcaaaacatgccgtttttc

SEQ ID NO: 3894378 - DNA, 25 bp, Homo sapien
tggcgttgatttctggcatttttga

SEQ ID NO: 3894379 - DNA, 25 bp, Homo sapien
gccacacagcgagaccatttttaaa

SEQ ID NO: 3894380 - DNA, 25 bp, Homo sapien
tactacagcactaacggaacaatct

SEQ ID NO: 3894381 - DNA, 25 bp, Homo sapien
tctttagagccaggtctagtggcac

SEQ ID NO: 3894382 - DNA, 25 bp, Homo sapien
gatgcaactgtctgaaatcaagcaa

SEQ ID NO: 3894383 - DNA, 25 bp, Homo sapien
caggatactgtccccgattagaacc

SEQ ID NO: 3894384 - DNA, 25 bp, Homo sapien
tactgtccccgattagaaccagcag

SEQ ID NO: 3894385 - DNA, 25 bp, Homo sapien
taaaccatcacttgaggaatcctca

SEQ ID NO: 3894386 - DNA, 25 bp, Homo sapien
catcacttgaggaatcctcaggata

SEQ ID NO: 3894387 - DNA, 25 bp, Homo sapien
gagatctttaaagcgaagctattta

SEQ ID NO: 3894388 - DNA, 25 bp, Homo sapien
tcttaaattgatgcaaacgaggaac

SEQ ID NO: 3894389 - DNA, 25 bp, Homo sapien
taaatttgtgtgtactaaaaggctg

SEQ ID NO: 3894390 - DNA, 25 bp, Homo sapien
tgttgcataagccaagatctttatt

SEQ ID NO: 3894391 - DNA, 25 bp, Homo sapien
aatgcatgcttctttaatcaggcca

SEQ ID NO: 3894392 - DNA, 25 bp, Homo sapien
tatgtggtcattcctgcaggtcaac

SEQ ID NO: 3894393 - DNA, 25 bp, Homo sapien
cacagggcaggtgtatgcgagtcat

SEQ ID NO: 3894394 - DNA, 25 bp, Homo sapien
cagagctggtctgatgtcaaatgca

SEQ ID NO: 3894395 - DNA, 25 bp, Homo sapien
gaatggaatttacggcagttacatg

SEQ ID NO: 3894396 - DNA, 25 bp, Homo sapien
cagaaggtactaaatgacacagcac

SEQ ID NO: 3894397 - DNA, 25 bp, Homo sapien
gtatgacgcacccatgtaccacaag

SEQ ID NO: 3894398 - DNA, 25 bp, Homo sapien
tgcttgctgagtgcacagatatata

SEQ ID NO: 3894399 - DNA, 25 bp, Homo sapien
tattgcatgtagtactgtcgtgcat

SEQ ID NO: 3894400 - DNA, 25 bp, Homo sapien
cacccatagggtgtgtaaccggaga

SEQ ID NO: 3894401 - DNA, 25 bp, Homo sapien
tagtactgtcgtgcatatatctgct

SEQ ID NO: 3894402 - DNA, 25 bp, Homo sapien
aaccaggaaagctgaagccacccat

SEQ ID NO: 3894403 - DNA, 25 bp, Homo sapien
caggtatctcttgtgcacttggtgg

SEQ ID NO: 3894404 - DNA, 25 bp, Homo sapien
ggccaccttgtgcattcatccgcaa

SEQ ID NO: 3894405 - DNA, 25 bp, Homo sapien
gattggctccaggattaacaaccac

SEQ ID NO: 3894406 - DNA, 25 bp, Homo sapien
tggtggaacaaaagcccctgatgca

SEQ ID NO: 3894407 - DNA, 25 bp, Homo sapien
tacataacaacggtggcccccatga

SEQ ID NO: 3894408 - DNA, 25 bp, Homo sapien
aacggtggcccccatgaccatgagg

SEQ ID NO: 3894409 - DNA, 25 bp, Homo sapien
cagggaggagtagaagtagaggata

SEQ ID NO: 3894410 - DNA, 25 bp, Homo sapien
gctcagggaggagtagaagtagagg

SEQ ID NO: 3894411 - DNA, 25 bp, Homo sapien
taatttatattagagaaaccatctg

SEQ ID NO: 3894412 - DNA, 25 bp, Homo sapien
gtaatttatattagagaaaccatct

SEQ ID NO: 3894413 - DNA, 25 bp, Homo sapien
aatttatattagagaaaccatctgc

SEQ ID NO: 3894414 - DNA, 25 bp, Homo sapien
tgtaatttatattagagaaaccatc

SEQ ID NO: 3894415 - DNA, 25 bp, Homo sapien
acatacttgtggtttgtgagcctgg

SEQ ID NO: 3894416 - DNA, 25 bp, Homo sapien
gccatgctaacagtcagtgcctgac

SEQ ID NO: 3894417 - DNA, 25 bp, Homo sapien
tgagaactactgcttcgggccacag

SEQ ID NO: 3894418 - DNA, 25 bp, Homo sapien
tctactaactagacgccagcaggac

SEQ ID NO: 3894419 - DNA, 25 bp, Homo sapien
aagtccatcttagctgatgtcacag

SEQ ID NO: 3894420 - DNA, 25 bp, Homo sapien
gagacttactcaagaatccaaggct

SEQ ID NO: 3894421 - DNA, 25 bp, Homo sapien
aaggaagcacataaaagtccatctt

SEQ ID NO: 3894422 - DNA, 25 bp, Homo sapien
gctgatgtcacagtgagacttactc

SEQ ID NO: 3894423 - DNA, 25 bp, Homo sapien
ctaaatggaaaccacccaacgtgat

SEQ ID NO: 3894424 - DNA, 25 bp, Homo sapien
aaatggaaaccacccaacgtgatgc

SEQ ID NO: 3894425 - DNA, 25 bp, Homo sapien
taaatggaaaccacccaacgtgatg

SEQ ID NO: 3894426 - DNA, 25 bp, Homo sapien
tacaacgtcaggaggaggaccatca

SEQ ID NO: 3894427 - DNA, 25 bp, Homo sapien
ggtcctgatttacaacgtcaggagg

SEQ ID NO: 3894428 - DNA, 25 bp, Homo sapien
ctgtaagttattgttggggtcctga

SEQ ID NO: 3894429 - DNA, 25 bp, Homo sapien
gatttacaacgtcaggaggaggacc

SEQ ID NO: 3894430 - DNA, 25 bp, Homo sapien
gccatgctgtgctcataaaggaggg

SEQ ID NO: 3894431 - DNA, 25 bp, Homo sapien
aaagtcttgaagacaagccatgctg

SEQ ID NO: 3894432 - DNA, 25 bp, Homo sapien
gggctggtctgctcgccatctagta

SEQ ID NO: 3894433 - DNA, 25 bp, Homo sapien
gccatctagtacatccctgtctgga

SEQ ID NO: 3894434 - DNA, 25 bp, Homo sapien
cagtttgcgatggctggggggcctt

SEQ ID NO: 3894435 - DNA, 25 bp, Homo sapien
tcagtttgcgatggctggggggcct

SEQ ID NO: 3894436 - DNA, 25 bp, Homo sapien
cctaaggccttctacgtacagtgct

SEQ ID NO: 3894437 - DNA, 25 bp, Homo sapien
caccaatttgtatcacggcttcacg

SEQ ID NO: 3894438 - DNA, 25 bp, Homo sapien
caggagaggcaatctagctggagtc

SEQ ID NO: 3894439 - DNA, 25 bp, Homo sapien
gaaaagttcctcaagcatagacatg

SEQ ID NO: 3894440 - DNA, 25 bp, Homo sapien
tgctaaaacatgtctagcaatttca

SEQ ID NO: 3894441 - DNA, 25 bp, Homo sapien
agcaaaggttttcacctccgcaaag

SEQ ID NO: 3894442 - DNA, 25 bp, Homo sapien
aggaatcaaatcgtaccagcagaac

SEQ ID NO: 3894443 - DNA, 25 bp, Homo sapien
tatataaagtagtacacttagtgta

SEQ ID NO: 3894444 - DNA, 25 bp, Homo sapien
ctgatcattcttaccggcacaaaca

SEQ ID NO: 3894445 - DNA, 25 bp, Homo sapien
tcattcttaccggcacaaacagtcc

SEQ ID NO: 3894446 - DNA, 25 bp, Homo sapien
gatcattcttaccggcacaaacagt

SEQ ID NO: 3894447 - DNA, 25 bp, Homo sapien
tgatcattcttaccggcacaaacag

SEQ ID NO: 3894448 - DNA, 25 bp, Homo sapien
ctgtaatcccagctattcgggaggc

SEQ ID NO: 3894449 - DNA, 25 bp, Homo sapien
tcaggaggtagaggttgcagtgagc

SEQ ID NO: 3894450 - DNA, 25 bp, Homo sapien
tgaggcaggagaatcgcttgaactc

SEQ ID NO: 3894451 - DNA, 25 bp, Homo sapien
aattagccagacattgtggtgggca

SEQ ID NO: 3894452 - DNA, 25 bp, Homo sapien
cttctgcttgacatcctgtcacttc

SEQ ID NO: 3894453 - DNA, 25 bp, Homo sapien
gagaggctgcaacgtccttgggtga

SEQ ID NO: 3894454 - DNA, 25 bp, Homo sapien
ctcttctgcttgacatcctgtcact

SEQ ID NO: 3894455 - DNA, 25 bp, Homo sapien
gaggctgcaacgtccttgggtgatg

SEQ ID NO: 3894456 - DNA, 25 bp, Homo sapien
acttcccggcggctattgtcttctt

SEQ ID NO: 3894457 - DNA, 25 bp, Homo sapien
tgcccctggccagggtactggtggt

SEQ ID NO: 3894458 - DNA, 25 bp, Homo sapien
ccagggtactggtggtcagtggctg

SEQ ID NO: 3894459 - DNA, 25 bp, Homo sapien
ccttccttgggccacggagggcaat

SEQ ID NO: 3894460 - DNA, 25 bp, Homo sapien
cccacggaacatgaggctcttccgg

SEQ ID NO: 3894461 - DNA, 25 bp, Homo sapien
agcccgtatatgtatgtccgcccag

SEQ ID NO: 3894462 - DNA, 25 bp, Homo sapien
tgtaagtggcccgagccgttcagcc

SEQ ID NO: 3894463 - DNA, 25 bp, Homo sapien
ttccgggcagcagggtcttcctggc

SEQ ID NO: 3894464 - DNA, 25 bp, Homo sapien
caggcttggtgatgcggcacacgat

SEQ ID NO: 3894465 - DNA, 25 bp, Homo sapien
ttggtgatgcggcacacgatgcctg

SEQ ID NO: 3894466 - DNA, 25 bp, Homo sapien
gcttggtgatgcggcacacgatgcc

SEQ ID NO: 3894467 - DNA, 25 bp, Homo sapien
gcctgcctcgtgcgaggtgcctttg

SEQ ID NO: 3894468 - DNA, 25 bp, Homo sapien
cgctggaaggcggtctggatcacct

SEQ ID NO: 3894469 - DNA, 25 bp, Homo sapien
tatctgggtagctggctcgctggaa

SEQ ID NO: 3894470 - DNA, 25 bp, Homo sapien
tgtgcaacccatacttgacttggcc

SEQ ID NO: 3894471 - DNA, 25 bp, Homo sapien
ccttctcgcccgtgatatctgggta

SEQ ID NO: 3894472 - DNA, 25 bp, Homo sapien
gaatggagacatcaatggacttggc

SEQ ID NO: 3894473 - DNA, 25 bp, Homo sapien
gacacgttctgaatggagacatcaa

SEQ ID NO: 3894474 - DNA, 25 bp, Homo sapien
cccttgaagaccacagacacgttct

SEQ ID NO: 3894475 - DNA, 25 bp, Homo sapien
cgatggacaagtggctgatctggat

SEQ ID NO: 3894476 - DNA, 25 bp, Homo sapien
gtcgatctcgaagtcaatggactga

SEQ ID NO: 3894477 - DNA, 25 bp, Homo sapien
ggcagagtcgatctcgaagtcaatg

SEQ ID NO: 3894478 - DNA, 25 bp, Homo sapien
gaagtcaatggactgatcaataccc

SEQ ID NO: 3894479 - DNA, 25 bp, Homo sapien
gtcaatggactgatcaatacccagc

SEQ ID NO: 3894480 - DNA, 25 bp, Homo sapien
gtccgcactctaccagagtcacagg

SEQ ID NO: 3894481 - DNA, 25 bp, Homo sapien
ggcatcggtccgcactctaccagag

SEQ ID NO: 3894482 - DNA, 25 bp, Homo sapien
tcaggggcatcggtccgcactctac

SEQ ID NO: 3894483 - DNA, 25 bp, Homo sapien
ttatggaaagacaggtagcagtcag

SEQ ID NO: 3894484 - DNA, 25 bp, Homo sapien
gtgaacagctgcttgatccacccag

SEQ ID NO: 3894485 - DNA, 25 bp, Homo sapien
tgaacagctgcttgatccacccagg

SEQ ID NO: 3894486 - DNA, 25 bp, Homo sapien
ttgtgaacagctgcttgatccaccc

SEQ ID NO: 3894487 - DNA, 25 bp, Homo sapien
gaacagctgcttgatccacccaggc

SEQ ID NO: 3894488 - DNA, 25 bp, Homo sapien
cttgtctggacaaaatcggccatga

SEQ ID NO: 3894489 - DNA, 25 bp, Homo sapien
caaaatcggccatgatgttagagat

SEQ ID NO: 3894490 - DNA, 25 bp, Homo sapien
gccatgatgttagagatgacgttga

SEQ ID NO: 3894491 - DNA, 25 bp, Homo sapien
gagatgacgttgatctctttgcaga

SEQ ID NO: 3894492 - DNA, 25 bp, Homo sapien
gatgacgggatcacctgtcagggaa

SEQ ID NO: 3894493 - DNA, 25 bp, Homo sapien
aggctgtgatgacgggatcacctgt

SEQ ID NO: 3894494 - DNA, 25 bp, Homo sapien
ggatcacctgtcagggaaatgtcca

SEQ ID NO: 3894495 - DNA, 25 bp, Homo sapien
gggaaatgtccaccccaatgtctcc

SEQ ID NO: 3894496 - DNA, 25 bp, Homo sapien
gaagccgaataagccctctaggaag

SEQ ID NO: 3894497 - DNA, 25 bp, Homo sapien
tgggatccttgtagtgggcagccct

SEQ ID NO: 3894498 - DNA, 25 bp, Homo sapien
caatccactgctgtagaggatgaca

SEQ ID NO: 3894499 - DNA, 25 bp, Homo sapien
tcctcgcagcatcaggaatgcggag

SEQ ID NO: 3894500 - DNA, 25 bp, Homo sapien
ttgaactcgtctcccatcaggctga

SEQ ID NO: 3894501 - DNA, 25 bp, Homo sapien
cagcgagtggaagactcgctcagag

SEQ ID NO: 3894502 - DNA, 25 bp, Homo sapien
gaaagctaccttggccagcgagtgg

SEQ ID NO: 3894503 - DNA, 25 bp, Homo sapien
ccagaagtacagcatgcgggagtcc

SEQ ID NO: 3894504 - DNA, 25 bp, Homo sapien
tggttggtgttgaagccccaggtct

SEQ ID NO: 3894505 - DNA, 25 bp, Homo sapien
cccttgttttggcaggagatcttgg

SEQ ID NO: 3894506 - DNA, 25 bp, Homo sapien
caaatgtgtaagctacagaatgttg

SEQ ID NO: 3894507 - DNA, 25 bp, Homo sapien
tctgggcgtggaaagaggaatttca

SEQ ID NO: 3894508 - DNA, 25 bp, Homo sapien
gaagaattgaccacgactcccttgt

SEQ ID NO: 3894509 - DNA, 25 bp, Homo sapien
ccctctgcggcccatatgtgagtca

SEQ ID NO: 3894510 - DNA, 25 bp, Homo sapien
taaggagccatgtgcaagagacaac

SEQ ID NO: 3894511 - DNA, 25 bp, Homo sapien
tattacctaagctgtggaaaccacg

SEQ ID NO: 3894512 - DNA, 25 bp, Homo sapien
cccctcgttacttgcatgatgtgat

SEQ ID NO: 3894513 - DNA, 25 bp, Homo sapien
ataggaggcctggacggtagtcacg

SEQ ID NO: 3894514 - DNA, 25 bp, Homo sapien
caagaggcttaagaagagctttttc

SEQ ID NO: 3894515 - DNA, 25 bp, Homo sapien
aaatccaagaggcttaagaagagct

SEQ ID NO: 3894516 - DNA, 25 bp, Homo sapien
aggcctggacggtagtcacgatatc

SEQ ID NO: 3894517 - DNA, 25 bp, Homo sapien
agggagaggtttgcggagttgaccg

SEQ ID NO: 3894518 - DNA, 25 bp, Homo sapien
ggccagggagaggtttgcggagttg

SEQ ID NO: 3894519 - DNA, 25 bp, Homo sapien
ccagggagaggtttgcggagttgac

SEQ ID NO: 3894520 - DNA, 25 bp, Homo sapien
gagaggtttgcggagttgaccgccc

SEQ ID NO: 3894521 - DNA, 25 bp, Homo sapien
caagttggaaacagtctttggtgta

SEQ ID NO: 3894522 - DNA, 25 bp, Homo sapien
ctcagtcaagttggaaacagtcttt

SEQ ID NO: 3894523 - DNA, 25 bp, Homo sapien
gttggaaacagtctttggtgtaatc

SEQ ID NO: 3894524 - DNA, 25 bp, Homo sapien
cagtcaagttggaaacagtctttgg

SEQ ID NO: 3894525 - DNA, 25 bp, Homo sapien
ctgccaatcaaatgcccatggtgag

SEQ ID NO: 3894526 - DNA, 25 bp, Homo sapien
cagcggtgatcattgactgcaggaa

SEQ ID NO: 3894527 - DNA, 25 bp, Homo sapien
ccacagcggtgatcattgactgcag

SEQ ID NO: 3894528 - DNA, 25 bp, Homo sapien
agggatgcccacagcggtgatcatt

SEQ ID NO: 3894529 - DNA, 25 bp, Homo sapien
cacagcggtgatcattgactgcagg

SEQ ID NO: 3894530 - DNA, 25 bp, Homo sapien
gggcaggggacagagccccagtcag

SEQ ID NO: 3894531 - DNA, 25 bp, Homo sapien
gcaggggacagagccccagtcagcc

SEQ ID NO: 3894532 - DNA, 25 bp, Homo sapien
aggggacagagccccagtcagccct

SEQ ID NO: 3894533 - DNA, 25 bp, Homo sapien
tggggcaggggacagagccccagtc

SEQ ID NO: 3894534 - DNA, 25 bp, Homo sapien
gtcgaagaggctcacgcctttgctg

SEQ ID NO: 3894535 - DNA, 25 bp, Homo sapien
taatctcagggttgatgatgtcgaa

SEQ ID NO: 3894536 - DNA, 25 bp, Homo sapien
gagggctgtaaacactacctcgagc

SEQ ID NO: 3894537 - DNA, 25 bp, Homo sapien
tgctgttcatgagggctgtaaacac

SEQ ID NO: 3894538 - DNA, 25 bp, Homo sapien
aggtgctcagggaagccaaagtcca

SEQ ID NO: 3894539 - DNA, 25 bp, Homo sapien
ggtgctcagggaagccaaagtccat

SEQ ID NO: 3894540 - DNA, 25 bp, Homo sapien
agggaagccaaagtccatctgcagc

SEQ ID NO: 3894541 - DNA, 25 bp, Homo sapien
ctcagggaagccaaagtccatctgc

SEQ ID NO: 3894542 - DNA, 25 bp, Homo sapien
tagctcaagctctggaggaaatcca

SEQ ID NO: 3894543 - DNA, 25 bp, Homo sapien
ctagctcaagctctggaggaaatcc

SEQ ID NO: 3894544 - DNA, 25 bp, Homo sapien
agctcaagctctggaggaaatccac

SEQ ID NO: 3894545 - DNA, 25 bp, Homo sapien
tgagcctggtgcttgccttctgcta

SEQ ID NO: 3894546 - DNA, 25 bp, Homo sapien
ctttaatgccagtgggcctttagga

SEQ ID NO: 3894547 - DNA, 25 bp, Homo sapien
ggaggagttgggagccaatctccat

SEQ ID NO: 3894548 - DNA, 25 bp, Homo sapien
tcttggatacagcactttaatgcca

SEQ ID NO: 3894549 - DNA, 25 bp, Homo sapien
tcccagacatcccacagggaagcag

SEQ ID NO: 3894550 - DNA, 25 bp, Homo sapien
gctggtcctacatgaagtcccagga

SEQ ID NO: 3894551 - DNA, 25 bp, Homo sapien
gacctgtgcatgaagtcccagggaa

SEQ ID NO: 3894552 - DNA, 25 bp, Homo sapien
tcactgagcactgacgggatggctg

SEQ ID NO: 3894553 - DNA, 25 bp, Homo sapien
tgctgccgagaaatcacgtggattc

SEQ ID NO: 3894554 - DNA, 25 bp, Homo sapien
ccagtgcatggaactggcggctgct

SEQ ID NO: 3894555 - DNA, 25 bp, Homo sapien
acgtggattcgaggtgccagcccga

SEQ ID NO: 3894556 - DNA, 25 bp, Homo sapien
cgaaactgaaagtagaagccgccgc

SEQ ID NO: 3894557 - DNA, 25 bp, Homo sapien
tcagtaagttttgcagaaagcacgc

SEQ ID NO: 3894558 - DNA, 25 bp, Homo sapien
caatgtgcttcaggagacaaggcgg

SEQ ID NO: 3894559 - DNA, 25 bp, Homo sapien
aaataccagttgttgagagccccag

SEQ ID NO: 3894560 - DNA, 25 bp, Homo sapien
gatgggagtctagatacacctgaaa

SEQ ID NO: 3894561 - DNA, 25 bp, Homo sapien
tgctatctcaagtcttgccattctc

SEQ ID NO: 3894562 - DNA, 25 bp, Homo sapien
tgaccctggtaggttacgcagcctc

SEQ ID NO: 3894563 - DNA, 25 bp, Homo sapien
ggtgagggcaaatgcctccgtacca

SEQ ID NO: 3894564 - DNA, 25 bp, Homo sapien
tgccattctctaggcccgtcagctt

SEQ ID NO: 3894565 - DNA, 25 bp, Homo sapien
tggtctggcctcatgcctgtctgaa

SEQ ID NO: 3894566 - DNA, 25 bp, Homo sapien
tatcttgaaaactcagctctggtct

SEQ ID NO: 3894567 - DNA, 25 bp, Homo sapien
tctgaacttgctatcagcatcccac

SEQ ID NO: 3894568 - DNA, 25 bp, Homo sapien
cttgaaaactcagctctggtctggc

SEQ ID NO: 3894569 - DNA, 25 bp, Homo sapien
tgctttgcatcattccacgtggacg

SEQ ID NO: 3894570 - DNA, 25 bp, Homo sapien
gcaaggttgtgaattaacgggcact

SEQ ID NO: 3894571 - DNA, 25 bp, Homo sapien
tgcatacatagtgaccaactctggg

SEQ ID NO: 3894572 - DNA, 25 bp, Homo sapien
tgggaagctacacaggaaactgacg

SEQ ID NO: 3894573 - DNA, 25 bp, Homo sapien
ctcctccaattcagatatgcacctt

SEQ ID NO: 3894574 - DNA, 25 bp, Homo sapien
tatgcaccttacaatgtcctttggc

SEQ ID NO: 3894575 - DNA, 25 bp, Homo sapien
tccaattcagatatgcaccttacaa

SEQ ID NO: 3894576 - DNA, 25 bp, Homo sapien
ttcagatatgcaccttacaatgtcc

SEQ ID NO: 3894577 - DNA, 25 bp, Homo sapien
catgataggtgctctagggtcccca

SEQ ID NO: 3894578 - DNA, 25 bp, Homo sapien
tgtctgggctatgtgtgccttgagc

SEQ ID NO: 3894579 - DNA, 25 bp, Homo sapien
tcctcgttcatgataggtgctctag

SEQ ID NO: 3894580 - DNA, 25 bp, Homo sapien
tgagctggattgacaggttgtttcc

SEQ ID NO: 3894581 - DNA, 25 bp, Homo sapien
tggtcttgttcatcccctgtggaca

SEQ ID NO: 3894582 - DNA, 25 bp, Homo sapien
tctggaatggtcttgttcatcccct

SEQ ID NO: 3894583 - DNA, 25 bp, Homo sapien
gtgcctgcaccctggctctctggaa

SEQ ID NO: 3894584 - DNA, 25 bp, Homo sapien
gacagtcccgtgaggatgcattact

SEQ ID NO: 3894585 - DNA, 25 bp, Homo sapien
ccaaggtctcgttcctggaatccag

SEQ ID NO: 3894586 - DNA, 25 bp, Homo sapien
aagactgccaggtgtccgaaccctg

SEQ ID NO: 3894587 - DNA, 25 bp, Homo sapien
catcttggcgttcagccattctggg

SEQ ID NO: 3894588 - DNA, 25 bp, Homo sapien
cacaggttcttgttgccgagctgga

SEQ ID NO: 3894589 - DNA, 25 bp, Homo sapien
tggtggagctgagattcaggttggc

SEQ ID NO: 3894590 - DNA, 25 bp, Homo sapien
tggagctgagattcaggttggcttt

SEQ ID NO: 3894591 - DNA, 25 bp, Homo sapien
catggtggagctgagattcaggttg

SEQ ID NO: 3894592 - DNA, 25 bp, Homo sapien
agctgagattcaggttggcttttcc

SEQ ID NO: 3894593 - DNA, 25 bp, Homo sapien
ggtggttagggcttccccatgaagc

SEQ ID NO: 3894594 - DNA, 25 bp, Homo sapien
ggcttgacacacttgcaaatgggtc

SEQ ID NO: 3894595 - DNA, 25 bp, Homo sapien
gcctatgagaaatggctgtgaccag

SEQ ID NO: 3894596 - DNA, 25 bp, Homo sapien
gacagacgaagagcatggcctatga

SEQ ID NO: 3894597 - DNA, 25 bp, Homo sapien
tatcaatcagatctggttacagcca

SEQ ID NO: 3894598 - DNA, 25 bp, Homo sapien
gaaccagttcgagagcacttcaata

SEQ ID NO: 3894599 - DNA, 25 bp, Homo sapien
cagggtcctcctacagctaagctaa

SEQ ID NO: 3894600 - DNA, 25 bp, Homo sapien
gctaagctaagtgaccaataggaac

SEQ ID NO: 3894601 - DNA, 25 bp, Homo sapien
cagctctgatgtgggcgcttcaggc

SEQ ID NO: 3894602 - DNA, 25 bp, Homo sapien
tgcttcttgcactgcttccggcggg

SEQ ID NO: 3894603 - DNA, 25 bp, Homo sapien
ggcggggtgaggacccacagctctg

SEQ ID NO: 3894604 - DNA, 25 bp, Homo sapien
ttccggcggggtgaggacccacagc

SEQ ID NO: 3894605 - DNA, 25 bp, Homo sapien
ctgccctgacccagggatttggctc

SEQ ID NO: 3894606 - DNA, 25 bp, Homo sapien
atttggctcctgtagcgctgctggg

SEQ ID NO: 3894607 - DNA, 25 bp, Homo sapien
ccggcgcaggattggagggacatag

SEQ ID NO: 3894608 - DNA, 25 bp, Homo sapien
gagctgcaggtacttcttggccaac

SEQ ID NO: 3894609 - DNA, 25 bp, Homo sapien
cataatggccccctccggagtgtct

SEQ ID NO: 3894610 - DNA, 25 bp, Homo sapien
gccccctccggagtgtctaaggatg

SEQ ID NO: 3894611 - DNA, 25 bp, Homo sapien
tccaccttgacgtcccccataatgg

SEQ ID NO: 3894612 - DNA, 25 bp, Homo sapien
tggccccctccggagtgtctaagga

SEQ ID NO: 3894613 - DNA, 25 bp, Homo sapien
ccttgttaaccctggtgttgaagag

SEQ ID NO: 3894614 - DNA, 25 bp, Homo sapien
ctggcggaattcaaaaaggaacagg

SEQ ID NO: 3894615 - DNA, 25 bp, Homo sapien
tgttgaagaggtccgagatgctcac

SEQ ID NO: 3894616 - DNA, 25 bp, Homo sapien
gaaacagttcagatggccctctgcc

SEQ ID NO: 3894617 - DNA, 25 bp, Homo sapien
gagctcggacggtgtcaggaacctc

SEQ ID NO: 3894618 - DNA, 25 bp, Homo sapien
agatcaaaaaggagctcggacggtg

SEQ ID NO: 3894619 - DNA, 25 bp, Homo sapien
tcaggaacctcgtgatcaagttgag

SEQ ID NO: 3894620 - DNA, 25 bp, Homo sapien
gacggtgtcaggaacctcgtgatca

SEQ ID NO: 3894621 - DNA, 25 bp, Homo sapien
cagtgtcgtggtccgattcagggct

SEQ ID NO: 3894622 - DNA, 25 bp, Homo sapien
agacagtgtcgtggtccgattcagg

SEQ ID NO: 3894623 - DNA, 25 bp, Homo sapien
actggaagacagtgtcgtggtccga

SEQ ID NO: 3894624 - DNA, 25 bp, Homo sapien
ggaagacagtgtcgtggtccgattc

SEQ ID NO: 3894625 - DNA, 25 bp, Homo sapien
ctagcccatcaaagatcagcaggac

SEQ ID NO: 3894626 - DNA, 25 bp, Homo sapien
atctagcccatcaaagatcagcagg

SEQ ID NO: 3894627 - DNA, 25 bp, Homo sapien
tcatctagcccatcaaagatcagca

SEQ ID NO: 3894628 - DNA, 25 bp, Homo sapien
tctagcccatcaaagatcagcagga

SEQ ID NO: 3894629 - DNA, 25 bp, Homo sapien
catcaggacccataggctggagggc

SEQ ID NO: 3894630 - DNA, 25 bp, Homo sapien
ctgggcctgggccatcaggacccat

SEQ ID NO: 3894631 - DNA, 25 bp, Homo sapien
gtcccattgcagagatgggagaaaa

SEQ ID NO: 3894632 - DNA, 25 bp, Homo sapien
gcaggagggtcccattgcagagatg

SEQ ID NO: 3894633 - DNA, 25 bp, Homo sapien
ttccctggacgggaggtagccatca

SEQ ID NO: 3894634 - DNA, 25 bp, Homo sapien
tccctggacgggaggtagccatcac

SEQ ID NO: 3894635 - DNA, 25 bp, Homo sapien
agcttccctggacgggaggtagcca

SEQ ID NO: 3894636 - DNA, 25 bp, Homo sapien
ggcagcttccctggacgggaggtag

SEQ ID NO: 3894637 - DNA, 25 bp, Homo sapien
gctgggcgctgaagaagtgattcac

SEQ ID NO: 3894638 - DNA, 25 bp, Homo sapien
ccatttgtctgtaactccaccaggg

SEQ ID NO: 3894639 - DNA, 25 bp, Homo sapien
cacaggcttcggagacgtccatttg

SEQ ID NO: 3894640 - DNA, 25 bp, Homo sapien
agagacaggcgacttggcacagtgc

SEQ ID NO: 3894641 - DNA, 25 bp, Homo sapien
tccagtagggacgaggtgggcaagt

SEQ ID NO: 3894642 - DNA, 25 bp, Homo sapien
tagggacgaggtgggcaagtgccca

SEQ ID NO: 3894643 - DNA, 25 bp, Homo sapien
ctcccccaggtccagtagggacgag

SEQ ID NO: 3894644 - DNA, 25 bp, Homo sapien
cccaggtccagtagggacgaggtgg

SEQ ID NO: 3894645 - DNA, 25 bp, Homo sapien
ctgtgagtggccccaaaagctatca

SEQ ID NO: 3894646 - DNA, 25 bp, Homo sapien
tagaagataaccttccctgtctcca

SEQ ID NO: 3894647 - DNA, 25 bp, Homo sapien
ggagcaatatcttttgcatagaaga

SEQ ID NO: 3894648 - DNA, 25 bp, Homo sapien
ctatcaagggtggagcaatatcttt

SEQ ID NO: 3894649 - DNA, 25 bp, Homo sapien
ctttgtgcggtgagactggccagct

SEQ ID NO: 3894650 - DNA, 25 bp, Homo sapien
agtgacacagctctacaacctttgg

SEQ ID NO: 3894651 - DNA, 25 bp, Homo sapien
tctgagaggcccagtctagctttgg

SEQ ID NO: 3894652 - DNA, 25 bp, Homo sapien
gagcttgcgggtggccaacttcttc

SEQ ID NO: 3894653 - DNA, 25 bp, Homo sapien
ccattgtcggcaagctcctggagag

SEQ ID NO: 3894654 - DNA, 25 bp, Homo sapien
ctgcagcctccccattgtcggcaag

SEQ ID NO: 3894655 - DNA, 25 bp, Homo sapien
gcctccccattgtcggcaagctcct

SEQ ID NO: 3894656 - DNA, 25 bp, Homo sapien
ccccattgtcggcaagctcctggag

SEQ ID NO: 3894657 - DNA, 25 bp, Homo sapien
catccccagctgaagacccttctca

SEQ ID NO: 3894658 - DNA, 25 bp, Homo sapien
caggcatccccagctgaagaccctt

SEQ ID NO: 3894659 - DNA, 25 bp, Homo sapien
atccccagctgaagacccttctcag

SEQ ID NO: 3894660 - DNA, 25 bp, Homo sapien
ggcatccccagctgaagacccttct

SEQ ID NO: 3894661 - DNA, 25 bp, Homo sapien
aagctttcaccaggtggctgatgcc

SEQ ID NO: 3894662 - DNA, 25 bp, Homo sapien
atgcctcgggcagtgattttacttc

SEQ ID NO: 3894663 - DNA, 25 bp, Homo sapien
tgacttctttcagctgtggacagag

SEQ ID NO: 3894664 - DNA, 25 bp, Homo sapien
gaggcaaagctttcaccaggtggct

SEQ ID NO: 3894665 - DNA, 25 bp, Homo sapien
tggccaccctcatgtgggagacata

SEQ ID NO: 3894666 - DNA, 25 bp, Homo sapien
gagacataagacaggggcccagaaa

SEQ ID NO: 3894667 - DNA, 25 bp, Homo sapien
ctgatggcctgctcgccggattcca

SEQ ID NO: 3894668 - DNA, 25 bp, Homo sapien
aagccccagttagcaagtgacagga

SEQ ID NO: 3894669 - DNA, 25 bp, Homo sapien
gtcactgagctggttgtcccgaaaa

SEQ ID NO: 3894670 - DNA, 25 bp, Homo sapien
tcaagcttccggagccgtggtaggt

SEQ ID NO: 3894671 - DNA, 25 bp, Homo sapien
tggtaggtgagggagaacctccaca

SEQ ID NO: 3894672 - DNA, 25 bp, Homo sapien
tggtcactgagctggttgtcccgaa

SEQ ID NO: 3894673 - DNA, 25 bp, Homo sapien
gcaagattgtggcaaaggtgtcagg

SEQ ID NO: 3894674 - DNA, 25 bp, Homo sapien
ctgcaagattgtggcaaaggtgtca

SEQ ID NO: 3894675 - DNA, 25 bp, Homo sapien
tgcaagattgtggcaaaggtgtcag

SEQ ID NO: 3894676 - DNA, 25 bp, Homo sapien
cctgaagcatcctgacggtaggaca

SEQ ID NO: 3894677 - DNA, 25 bp, Homo sapien
ccttgccaagcagagtagggttgac

SEQ ID NO: 3894678 - DNA, 25 bp, Homo sapien
ggtaggacacgtgactgccaccctt

SEQ ID NO: 3894679 - DNA, 25 bp, Homo sapien
gggttgacacgcagatgctgttgct

SEQ ID NO: 3894680 - DNA, 25 bp, Homo sapien
aagaaggaagatgaggtccgcctcc

SEQ ID NO: 3894681 - DNA, 25 bp, Homo sapien
gaaagaaggaagatgaggtccgcct

SEQ ID NO: 3894682 - DNA, 25 bp, Homo sapien
ggaaagaaggaagatgaggtccgcc

SEQ ID NO: 3894683 - DNA, 25 bp, Homo sapien
aaagaaggaagatgaggtccgcctc

SEQ ID NO: 3894684 - DNA, 25 bp, Homo sapien
ggaagaattcccataccccagctct

SEQ ID NO: 3894685 - DNA, 25 bp, Homo sapien
ttgccaacctaagcagtaattcatt

SEQ ID NO: 3894686 - DNA, 25 bp, Homo sapien
gtctggacacgctagaggaagttaa

SEQ ID NO: 3894687 - DNA, 25 bp, Homo sapien
acctttcccctcaactgcctgagcc

SEQ ID NO: 3894688 - DNA, 25 bp, Homo sapien
ttcctctggccgtcactttcctgca

SEQ ID NO: 3894689 - DNA, 25 bp, Homo sapien
cctctggccgtcactttcctgcagg

SEQ ID NO: 3894690 - DNA, 25 bp, Homo sapien
cctttcctctggccgtcactttcct

SEQ ID NO: 3894691 - DNA, 25 bp, Homo sapien
tttcctctggccgtcactttcctgc

SEQ ID NO: 3894692 - DNA, 25 bp, Homo sapien
tggagcagggctatgagggcctccg

SEQ ID NO: 3894693 - DNA, 25 bp, Homo sapien
agggcctccgcatcgtggacctgga

SEQ ID NO: 3894694 - DNA, 25 bp, Homo sapien
agcagggctatgagggcctccgcat

SEQ ID NO: 3894695 - DNA, 25 bp, Homo sapien
tccgcatcgtggacctggagctgac

SEQ ID NO: 3894696 - DNA, 25 bp, Homo sapien
gcctagactcttcctacctgtgtgg

SEQ ID NO: 3894697 - DNA, 25 bp, Homo sapien
cctcctagggtcgtgacagagcctc

SEQ ID NO: 3894698 - DNA, 25 bp, Homo sapien
gaaggttatcccactctactctggg

SEQ ID NO: 3894699 - DNA, 25 bp, Homo sapien
tccatcccgaaaagagaaggttatc

SEQ ID NO: 3894700 - DNA, 25 bp, Homo sapien
cttcctggcgatgtgcagctgggat

SEQ ID NO: 3894701 - DNA, 25 bp, Homo sapien
cctctgccatcagccgacagccttc

SEQ ID NO: 3894702 - DNA, 25 bp, Homo sapien
agcttcctggcgatgtgcagctggg

SEQ ID NO: 3894703 - DNA, 25 bp, Homo sapien
tgccatcagccgacagccttcatct

SEQ ID NO: 3894704 - DNA, 25 bp, Homo sapien
gcacacaatgcaccccggccacaga

SEQ ID NO: 3894705 - DNA, 25 bp, Homo sapien
cacagaaagcccgttgttactgagg

SEQ ID NO: 3894706 - DNA, 25 bp, Homo sapien
acggccctcagcacacaatgcaccc

SEQ ID NO: 3894707 - DNA, 25 bp, Homo sapien
tgccagggtccagcacgcactcacg

SEQ ID NO: 3894708 - DNA, 25 bp, Homo sapien
gggcaaacatgaagatcacagtttt

SEQ ID NO: 3894709 - DNA, 25 bp, Homo sapien
ggcaaacatgaagatcacagttttg

SEQ ID NO: 3894710 - DNA, 25 bp, Homo sapien
aacatgaagatcacagttttgtgct

SEQ ID NO: 3894711 - DNA, 25 bp, Homo sapien
tcccgctcttccgtgaatttgtcca

SEQ ID NO: 3894712 - DNA, 25 bp, Homo sapien
ccgtgaatttgtccaggtcaccctg

SEQ ID NO: 3894713 - DNA, 25 bp, Homo sapien
tcttccgtgaatttgtccaggtcac

SEQ ID NO: 3894714 - DNA, 25 bp, Homo sapien
ccgctcttccgtgaatttgtccagg

SEQ ID NO: 3894715 - DNA, 25 bp, Homo sapien
atctggagcatgaggctgtcaagaa

SEQ ID NO: 3894716 - DNA, 25 bp, Homo sapien
gccatgacccctggacacagcaggt

SEQ ID NO: 3894717 - DNA, 25 bp, Homo sapien
cacagcaggtcaggtgtccttcagg

SEQ ID NO: 3894718 - DNA, 25 bp, Homo sapien
ggccatgacccctggacacagcagg

SEQ ID NO: 3894719 - DNA, 25 bp, Homo sapien
tgctgcatgccccactgaacagagg

SEQ ID NO: 3894720 - DNA, 25 bp, Homo sapien
ctgcatgccccactgaacagaggcg

SEQ ID NO: 3894721 - DNA, 25 bp, Homo sapien
acagtgctgcatgccccactgaaca

SEQ ID NO: 3894722 - DNA, 25 bp, Homo sapien
gcatgccccactgaacagaggcggg

SEQ ID NO: 3894723 - DNA, 25 bp, Homo sapien
ctctaggtgcttttcttggaggcca

SEQ ID NO: 3894724 - DNA, 25 bp, Homo sapien
tctaggtgcttttcttggaggccac

SEQ ID NO: 3894725 - DNA, 25 bp, Homo sapien
taggtgcttttcttggaggccacaa

SEQ ID NO: 3894726 - DNA, 25 bp, Homo sapien
aggtgcttttcttggaggccacaat

SEQ ID NO: 3894727 - DNA, 25 bp, Homo sapien
gagccagccgggctgcaccttcatc

SEQ ID NO: 3894728 - DNA, 25 bp, Homo sapien
gctgagccagccgggctgcaccttc

SEQ ID NO: 3894729 - DNA, 25 bp, Homo sapien
tgagccagccgggctgcaccttcat

SEQ ID NO: 3894730 - DNA, 25 bp, Homo sapien
agccagccgggctgcaccttcatcc

SEQ ID NO: 3894731 - DNA, 25 bp, Homo sapien
cagggacaaaccgttctcactgagg

SEQ ID NO: 3894732 - DNA, 25 bp, Homo sapien
gagaagcaccgaaccaaacccaaca

SEQ ID NO: 3894733 - DNA, 25 bp, Homo sapien
ggcatccagggacaaaccgttctca

SEQ ID NO: 3894734 - DNA, 25 bp, Homo sapien
aacccaacacggcatccagggacaa

SEQ ID NO: 3894735 - DNA, 25 bp, Homo sapien
gggcccacgtgggagcagatgacct

SEQ ID NO: 3894736 - DNA, 25 bp, Homo sapien
tgctctgcagatctggtactgccca

SEQ ID NO: 3894737 - DNA, 25 bp, Homo sapien
caggttggcatgaaactggtggaca

SEQ ID NO: 3894738 - DNA, 25 bp, Homo sapien
tcattcagtggacgcccatcacatg

SEQ ID NO: 3894739 - DNA, 25 bp, Homo sapien
tctaaggactatccaaagaacgagt

SEQ ID NO: 3894740 - DNA, 25 bp, Homo sapien
ctggcactacaagggctcacaacca

SEQ ID NO: 3894741 - DNA, 25 bp, Homo sapien
gaggcagagtcaatgaactctctaa

SEQ ID NO: 3894742 - DNA, 25 bp, Homo sapien
tcctgactcctgagcggctggcact

SEQ ID NO: 3894743 - DNA, 25 bp, Homo sapien
aacccagactggtcagggcaaggag

SEQ ID NO: 3894744 - DNA, 25 bp, Homo sapien
gggtggcctgctttcttagcaaaca

SEQ ID NO: 3894745 - DNA, 25 bp, Homo sapien
aagaacccagactggtcagggcaag

SEQ ID NO: 3894746 - DNA, 25 bp, Homo sapien
caaagaccaacttccctggcagtgg

SEQ ID NO: 3894747 - DNA, 25 bp, Homo sapien
cctctcaggaggatgtgttggcttt

SEQ ID NO: 3894748 - DNA, 25 bp, Homo sapien
cccctctcaggaggatgtgttggct

SEQ ID NO: 3894749 - DNA, 25 bp, Homo sapien
ctctcaggaggatgtgttggctttc

SEQ ID NO: 3894750 - DNA, 25 bp, Homo sapien
ccctctcaggaggatgtgttggctt

SEQ ID NO: 3894751 - DNA, 25 bp, Homo sapien
ctgacggaaccctaagaacttggct

SEQ ID NO: 3894752 - DNA, 25 bp, Homo sapien
gggatgcagcgctgacggaacccta

SEQ ID NO: 3894753 - DNA, 25 bp, Homo sapien
gcgctgacggaaccctaagaacttg

SEQ ID NO: 3894754 - DNA, 25 bp, Homo sapien
atgcagcgctgacggaaccctaaga

SEQ ID NO: 3894755 - DNA, 25 bp, Homo sapien
tggcacagaggcgggtgaggcttgg

SEQ ID NO: 3894756 - DNA, 25 bp, Homo sapien
gggtcccgggcagtccttcagagtg

SEQ ID NO: 3894757 - DNA, 25 bp, Homo sapien
gggctccagaggacactcactgagg

SEQ ID NO: 3894758 - DNA, 25 bp, Homo sapien
agtccttcagagtggcacagaggcg

SEQ ID NO: 3894759 - DNA, 25 bp, Homo sapien
gaaaggctgaccatccactgtgcag

SEQ ID NO: 3894760 - DNA, 25 bp, Homo sapien
ggctttcagaagtgctacgctccag

SEQ ID NO: 3894761 - DNA, 25 bp, Homo sapien
cagtgggagacatgcgctgcctaag

SEQ ID NO: 3894762 - DNA, 25 bp, Homo sapien
gagacagccaagtttctaccaaagg

SEQ ID NO: 3894763 - DNA, 25 bp, Homo sapien
ggtcaaaccggattatctggttgga

SEQ ID NO: 3894764 - DNA, 25 bp, Homo sapien
cacactccagggggtcaaaccggat

SEQ ID NO: 3894765 - DNA, 25 bp, Homo sapien
caaaccggattatctggttggaagg

SEQ ID NO: 3894766 - DNA, 25 bp, Homo sapien
ccagggggtcaaaccggattatctg

SEQ ID NO: 3894767 - DNA, 25 bp, Homo sapien
gctctggtcactcaggaactcacag

SEQ ID NO: 3894768 - DNA, 25 bp, Homo sapien
aggtaagcagtccagtagagtctcc

SEQ ID NO: 3894769 - DNA, 25 bp, Homo sapien
gtcactcaggaactcacaggacaat

SEQ ID NO: 3894770 - DNA, 25 bp, Homo sapien
tctggtcactcaggaactcacagga

SEQ ID NO: 3894771 - DNA, 25 bp, Homo sapien
cgtggacacaggcttaaggtgttgg

SEQ ID NO: 3894772 - DNA, 25 bp, Homo sapien
ggacacaggcttaaggtgttggcca

SEQ ID NO: 3894773 - DNA, 25 bp, Homo sapien
ttcggggacagtcccgtctggctca

SEQ ID NO: 3894774 - DNA, 25 bp, Homo sapien
tttcggggacagtcccgtctggctc

SEQ ID NO: 3894775 - DNA, 25 bp, Homo sapien
gtgcaaagttgcatggtgcagggac

SEQ ID NO: 3894776 - DNA, 25 bp, Homo sapien
ctgaagtgcaaagttgcatggtgca

SEQ ID NO: 3894777 - DNA, 25 bp, Homo sapien
tgaagtgcaaagttgcatggtgcag

SEQ ID NO: 3894778 - DNA, 25 bp, Homo sapien
aagtgcaaagttgcatggtgcaggg

SEQ ID NO: 3894779 - DNA, 25 bp, Homo sapien
ccacagcacacgccttcctcctcct

SEQ ID NO: 3894780 - DNA, 25 bp, Homo sapien
cacgccttcctcctcctcgttggat

SEQ ID NO: 3894781 - DNA, 25 bp, Homo sapien
agcacacgccttcctcctcctcgtt

SEQ ID NO: 3894782 - DNA, 25 bp, Homo sapien
cacacgccttcctcctcctcgttgg

SEQ ID NO: 3894783 - DNA, 25 bp, Homo sapien
gaggtctttacacttgctcagcaac

SEQ ID NO: 3894784 - DNA, 25 bp, Homo sapien
aaccagcagagtgactctacgtgct

SEQ ID NO: 3894785 - DNA, 25 bp, Homo sapien
ggctgaggtctttacacttgctcag

SEQ ID NO: 3894786 - DNA, 25 bp, Homo sapien
acctggctgaggtctttacacttgc

SEQ ID NO: 3894787 - DNA, 25 bp, Homo sapien
cagtggcggggatcagaggtgcctc

SEQ ID NO: 3894788 - DNA, 25 bp, Homo sapien
gagcagtggcggggatcagaggtgc

SEQ ID NO: 3894789 - DNA, 25 bp, Homo sapien
agcagtggcggggatcagaggtgcc

SEQ ID NO: 3894790 - DNA, 25 bp, Homo sapien
gtggcggggatcagaggtgcctcct

SEQ ID NO: 3894791 - DNA, 25 bp, Homo sapien
tgagtccgctgtcgcccagcaggtt

SEQ ID NO: 3894792 - DNA, 25 bp, Homo sapien
tcaagcaaaccggagatgggcacct

SEQ ID NO: 3894793 - DNA, 25 bp, Homo sapien
caaaccggagatgggcacctgcggc

SEQ ID NO: 3894794 - DNA, 25 bp, Homo sapien
agaaggcatctgagtccgctgtcgc

SEQ ID NO: 3894795 - DNA, 25 bp, Homo sapien
gcctagcaacaagtggtgtcctgga

SEQ ID NO: 3894796 - DNA, 25 bp, Homo sapien
agaatttcagggacgggatggacca

SEQ ID NO: 3894797 - DNA, 25 bp, Homo sapien
gggtgtgtcaccctgccacgaatca

SEQ ID NO: 3894798 - DNA, 25 bp, Homo sapien
gctctagccccgcatgggtcaagga

SEQ ID NO: 3894799 - DNA, 25 bp, Homo sapien
ctagaagggaaatggagatgagaat

SEQ ID NO: 3894800 - DNA, 25 bp, Homo sapien
tagaagggaaatggagatgagaatg

SEQ ID NO: 3894801 - DNA, 25 bp, Homo sapien
ccagcaggtacagggcactttcctg

SEQ ID NO: 3894802 - DNA, 25 bp, Homo sapien
ttcactgaggcctcccggacacgtg

SEQ ID NO: 3894803 - DNA, 25 bp, Homo sapien
ctccagcaggtacagggcactttcc

SEQ ID NO: 3894804 - DNA, 25 bp, Homo sapien
ctcccggacacgtgggcaggagggc

SEQ ID NO: 3894805 - DNA, 25 bp, Homo sapien
tagaaattatgatcccatgcccagg

SEQ ID NO: 3894806 - DNA, 25 bp, Homo sapien
tccaagccacccagatggaaggcca

SEQ ID NO: 3894807 - DNA, 25 bp, Homo sapien
tgagcatggcaatacctggccttcc

SEQ ID NO: 3894808 - DNA, 25 bp, Homo sapien
cacccacaaggacaagggaggatgg

SEQ ID NO: 3894809 - DNA, 25 bp, Homo sapien
cctggggaagcacggtgcccagaca

SEQ ID NO: 3894810 - DNA, 25 bp, Homo sapien
ggcctggggaagcacggtgcccaga

SEQ ID NO: 3894811 - DNA, 25 bp, Homo sapien
tggggaagcacggtgcccagacatg

SEQ ID NO: 3894812 - DNA, 25 bp, Homo sapien
gggaagcacggtgcccagacatgcc

SEQ ID NO: 3894813 - DNA, 25 bp, Homo sapien
gaagtgaatccggaagctctgctca

SEQ ID NO: 3894814 - DNA, 25 bp, Homo sapien
aagtgaatccggaagctctgctcag

SEQ ID NO: 3894815 - DNA, 25 bp, Homo sapien
tggagaagtgaatccggaagctctg

SEQ ID NO: 3894816 - DNA, 25 bp, Homo sapien
gaatccggaagctctgctcagagcc

SEQ ID NO: 3894817 - DNA, 25 bp, Homo sapien
cagcctggacacgtgctctggccgg

SEQ ID NO: 3894818 - DNA, 25 bp, Homo sapien
tgagctccgtcagctgcagggactt

SEQ ID NO: 3894819 - DNA, 25 bp, Homo sapien
gacacgtgctctggccggaagctgc

SEQ ID NO: 3894820 - DNA, 25 bp, Homo sapien
gtgagctccgtcagctgcagggact

SEQ ID NO: 3894821 - DNA, 25 bp, Homo sapien
gacagaggtcagtcactgaggtggc

SEQ ID NO: 3894822 - DNA, 25 bp, Homo sapien
tgctgtcctcacgggctgggtgggt

SEQ ID NO: 3894823 - DNA, 25 bp, Homo sapien
ggagacagaggtcagtcactgaggt

SEQ ID NO: 3894824 - DNA, 25 bp, Homo sapien
ctgtcctcacgggctgggtgggtca

SEQ ID NO: 3894825 - DNA, 25 bp, Homo sapien
ctgaacagccctgcgggtcgcccca

SEQ ID NO: 3894826 - DNA, 25 bp, Homo sapien
agccctgcgggtcgccccaccaagc

SEQ ID NO: 3894827 - DNA, 25 bp, Homo sapien
ggctgaacagccctgcgggtcgccc

SEQ ID NO: 3894828 - DNA, 25 bp, Homo sapien
acagccctgcgggtcgccccaccaa

SEQ ID NO: 3894829 - DNA, 25 bp, Homo sapien
gacagggtttgctcagggtccagat

SEQ ID NO: 3894830 - DNA, 25 bp, Homo sapien
cagatggcagggttgtgggtacagg

SEQ ID NO: 3894831 - DNA, 25 bp, Homo sapien
caggaaatgactggggccatgatcc

SEQ ID NO: 3894832 - DNA, 25 bp, Homo sapien
gggcctcttactccagtgcccaccc

SEQ ID NO: 3894833 - DNA, 25 bp, Homo sapien
ccaaagcacaggcctccagtgtggg

SEQ ID NO: 3894834 - DNA, 25 bp, Homo sapien
ttttgtcctcagttcagtatcctct

SEQ ID NO: 3894835 - DNA, 25 bp, Homo sapien
cagtatcctctgaaaccttctttct

SEQ ID NO: 3894836 - DNA, 25 bp, Homo sapien
ccagtgtggggaaggacagtttctc

SEQ ID NO: 3894837 - DNA, 25 bp, Homo sapien
gatgtacttaacactcctgaatggt

SEQ ID NO: 3894838 - DNA, 25 bp, Homo sapien
tggccgtacaaaaaagtggatgtac

SEQ ID NO: 3894839 - DNA, 25 bp, Homo sapien
cggagattggccgtacaaaaaagtg

SEQ ID NO: 3894840 - DNA, 25 bp, Homo sapien
gatagagattcagttttgcaagagg

SEQ ID NO: 3894841 - DNA, 25 bp, Homo sapien
tattgttgtgacaatccaaacagaa

SEQ ID NO: 3894842 - DNA, 25 bp, Homo sapien
gaaattaacatcacccttattccaa

SEQ ID NO: 3894843 - DNA, 25 bp, Homo sapien
caagtaggcatcaatctaaaaaagg

SEQ ID NO: 3894844 - DNA, 25 bp, Homo sapien
taaaattatacaagtaggcatcaat

SEQ ID NO: 3894845 - DNA, 25 bp, Homo sapien
aggcctgggcgcagacttctaacag

SEQ ID NO: 3894846 - DNA, 25 bp, Homo sapien
gcagacttctaacagggagagaacc

SEQ ID NO: 3894847 - DNA, 25 bp, Homo sapien
ggcgcagacttctaacagggagaga

SEQ ID NO: 3894848 - DNA, 25 bp, Homo sapien
gcctgaggcctgggcgcagacttct

SEQ ID NO: 3894849 - DNA, 25 bp, Homo sapien
agccattagagggatccaagggcag

SEQ ID NO: 3894850 - DNA, 25 bp, Homo sapien
aagttgataagccttttcagaccat

SEQ ID NO: 3894851 - DNA, 25 bp, Homo sapien
catttgcgctctaagctcactgcct

SEQ ID NO: 3894852 - DNA, 25 bp, Homo sapien
gcgcctggcccttttcaacaattta

SEQ ID NO: 3894853 - DNA, 25 bp, Homo sapien
tctcttcctggcgaggaaattccag

SEQ ID NO: 3894854 - DNA, 25 bp, Homo sapien
gattctcttcctggcgaggaaattc

SEQ ID NO: 3894855 - DNA, 25 bp, Homo sapien
tcctggcgaggaaattccagctgga

SEQ ID NO: 3894856 - DNA, 25 bp, Homo sapien
tcttcctggcgaggaaattccagct

SEQ ID NO: 3894857 - DNA, 25 bp, Homo sapien
gcagcctggcacatgtctccatcag

SEQ ID NO: 3894858 - DNA, 25 bp, Homo sapien
gctgcagcctggcacatgtctccat

SEQ ID NO: 3894859 - DNA, 25 bp, Homo sapien
ctccatcagctgcccgacaagaagg

SEQ ID NO: 3894860 - DNA, 25 bp, Homo sapien
agctgcccgacaagaaggctgtggt

SEQ ID NO: 3894861 - DNA, 25 bp, Homo sapien
ctcacagaggttaacctgagacaag

SEQ ID NO: 3894862 - DNA, 25 bp, Homo sapien
ggaactggcatcatcgtcctcacag

SEQ ID NO: 3894863 - DNA, 25 bp, Homo sapien
tggcatcatcgtcctcacagaggtt

SEQ ID NO: 3894864 - DNA, 25 bp, Homo sapien
gcagcagcagggaactggcatcatc

SEQ ID NO: 3894865 - DNA, 25 bp, Homo sapien
gggtcaaagggcaacaggtcaggca

SEQ ID NO: 3894866 - DNA, 25 bp, Homo sapien
tcaaagggcaacaggtcaggcagga

SEQ ID NO: 3894867 - DNA, 25 bp, Homo sapien
gcaacaggtcaggcaggagccgccc

SEQ ID NO: 3894868 - DNA, 25 bp, Homo sapien
caacaggtcaggcaggagccgccct

SEQ ID NO: 3894869 - DNA, 25 bp, Homo sapien
ggccctcggtgctcacacagctgga

SEQ ID NO: 3894870 - DNA, 25 bp, Homo sapien
aggccctcggtgctcacacagctgg

SEQ ID NO: 3894871 - DNA, 25 bp, Homo sapien
tgccctcctcatcaaattgattgtt

SEQ ID NO: 3894872 - DNA, 25 bp, Homo sapien
ctcatcaaattgattgttagacaag

SEQ ID NO: 3894873 - DNA, 25 bp, Homo sapien
agggccctcatcagcgccttggtgc

SEQ ID NO: 3894874 - DNA, 25 bp, Homo sapien
aagggccctcatcagcgccttggtg

SEQ ID NO: 3894875 - DNA, 25 bp, Homo sapien
tggagctgttcagcagaaggtgact

SEQ ID NO: 3894876 - DNA, 25 bp, Homo sapien
ctgtgagtaagcaaggccaaggtgg

SEQ ID NO: 3894877 - DNA, 25 bp, Homo sapien
gccaaggtggagctgttcagcagaa

SEQ ID NO: 3894878 - DNA, 25 bp, Homo sapien
aaggccaaggtggagctgttcagca

SEQ ID NO: 3894879 - DNA, 25 bp, Homo sapien
gtggcagcaaccgacatcaccgata

SEQ ID NO: 3894880 - DNA, 25 bp, Homo sapien
gcaaccgacatcaccgatactgttc

SEQ ID NO: 3894881 - DNA, 25 bp, Homo sapien
catcaccgatactgttcctgttcag

SEQ ID NO: 3894882 - DNA, 25 bp, Homo sapien
aaggtggcagcaaccgacatcaccg

SEQ ID NO: 3894883 - DNA, 25 bp, Homo sapien
gacaccagcgtctccaatctggttg

SEQ ID NO: 3894884 - DNA, 25 bp, Homo sapien
ccagcgtctccaatctggttgtggc

SEQ ID NO: 3894885 - DNA, 25 bp, Homo sapien
gatggtagctaagtgctggacacca

SEQ ID NO: 3894886 - DNA, 25 bp, Homo sapien
gcagcccaggcaggatggtagctaa

SEQ ID NO: 3894887 - DNA, 25 bp, Homo sapien
gaacgagagactctgccaactgcac

SEQ ID NO: 3894888 - DNA, 25 bp, Homo sapien
gctgagctgatgctattccctgaga

SEQ ID NO: 3894889 - DNA, 25 bp, Homo sapien
cccggctgagctgatgctattccct

SEQ ID NO: 3894890 - DNA, 25 bp, Homo sapien
caggcgcctgcaaagaacgagagac

SEQ ID NO: 3894891 - DNA, 25 bp, Homo sapien
gatcccccagggcattgcagccaag

SEQ ID NO: 3894892 - DNA, 25 bp, Homo sapien
gtgggatcccccagggcattgcagc

SEQ ID NO: 3894893 - DNA, 25 bp, Homo sapien
tgtaggaccctcaggtgctggggca

SEQ ID NO: 3894894 - DNA, 25 bp, Homo sapien
gtaggaccctcaggtgctggggcag

SEQ ID NO: 3894895 - DNA, 25 bp, Homo sapien
aaatggggggatccatccagggcct

SEQ ID NO: 3894896 - DNA, 25 bp, Homo sapien
tcttccaaatggggggatccatcca

SEQ ID NO: 3894897 - DNA, 25 bp, Homo sapien
cacctgggcccagatggctgaatgg

SEQ ID NO: 3894898 - DNA, 25 bp, Homo sapien
cccacctgggcccagatggctgaat

SEQ ID NO: 3894899 - DNA, 25 bp, Homo sapien
atacagaaacgcaggacccctccag

SEQ ID NO: 3894900 - DNA, 25 bp, Homo sapien
cagcgggagctccatacagaaacgc

SEQ ID NO: 3894901 - DNA, 25 bp, Homo sapien
agctccatacagaaacgcaggaccc

SEQ ID NO: 3894902 - DNA, 25 bp, Homo sapien
cgggagctccatacagaaacgcagg

SEQ ID NO: 3894903 - DNA, 25 bp, Homo sapien
aggagcttggcagtctggttgtcaa

SEQ ID NO: 3894904 - DNA, 25 bp, Homo sapien
gttgtcaatcttacaggaaaccagg

SEQ ID NO: 3894905 - DNA, 25 bp, Homo sapien
cagggcagctcgtgaagctggaggt

SEQ ID NO: 3894906 - DNA, 25 bp, Homo sapien
ctggttgtcaatcttacaggaaacc

SEQ ID NO: 3894907 - DNA, 25 bp, Homo sapien
tgacgttgttcacaagatgttgcca

SEQ ID NO: 3894908 - DNA, 25 bp, Homo sapien
gaagacgtcagggtgcaggttacct

SEQ ID NO: 3894909 - DNA, 25 bp, Homo sapien
caagggttttcaagagaggccacct

SEQ ID NO: 3894910 - DNA, 25 bp, Homo sapien
gtcccaaagtcagcggcaggagagc

SEQ ID NO: 3894911 - DNA, 25 bp, Homo sapien
agcacctgggccagctcggcagctg

SEQ ID NO: 3894912 - DNA, 25 bp, Homo sapien
tcatccccgaggagattccaggaca

SEQ ID NO: 3894913 - DNA, 25 bp, Homo sapien
tgggccagctcggcagctgcctcat

SEQ ID NO: 3894914 - DNA, 25 bp, Homo sapien
agccggcccatctgcggcagcacct

SEQ ID NO: 3894915 - DNA, 25 bp, Homo sapien
tcaaggaagggctttctgggaggca

SEQ ID NO: 3894916 - DNA, 25 bp, Homo sapien
gggctttctgggaggcaggggactg

SEQ ID NO: 3894917 - DNA, 25 bp, Homo sapien
aaggaagggctttctgggaggcagg

SEQ ID NO: 3894918 - DNA, 25 bp, Homo sapien
gctttctgggaggcaggggactgac

SEQ ID NO: 3894919 - DNA, 25 bp, Homo sapien
gggaaagagaaacacggccatgaga

SEQ ID NO: 3894920 - DNA, 25 bp, Homo sapien
caaaagacaacaggggactggtggc

SEQ ID NO: 3894921 - DNA, 25 bp, Homo sapien
catgagaatgggtgtgagagtttcc

SEQ ID NO: 3894922 - DNA, 25 bp, Homo sapien
agagtttcctaggtcccttcctcag

SEQ ID NO: 3894923 - DNA, 25 bp, Homo sapien
tgacttggatgctagacccctgggc

SEQ ID NO: 3894924 - DNA, 25 bp, Homo sapien
cggatgacttggatgctagacccct

SEQ ID NO: 3894925 - DNA, 25 bp, Homo sapien
gatgacttggatgctagacccctgg

SEQ ID NO: 3894926 - DNA, 25 bp, Homo sapien
acttggatgctagacccctgggcca

SEQ ID NO: 3894927 - DNA, 25 bp, Homo sapien
tgctgggccatgtcgcagggaatgg

SEQ ID NO: 3894928 - DNA, 25 bp, Homo sapien
ggtgctgggccatgtcgcagggaat

SEQ ID NO: 3894929 - DNA, 25 bp, Homo sapien
ctggggctggttgtcaaagaaggca

SEQ ID NO: 3894930 - DNA, 25 bp, Homo sapien
tgtcgcagggaatggggttattcca

SEQ ID NO: 3894931 - DNA, 25 bp, Homo sapien
taataaattagatcttgggccagcc

SEQ ID NO: 3894932 - DNA, 25 bp, Homo sapien
tcccagtgggcgaaaggtggatcat

SEQ ID NO: 3894933 - DNA, 25 bp, Homo sapien
taatgcagggtactcctttgtccag

SEQ ID NO: 3894934 - DNA, 25 bp, Homo sapien
caaaaaagttctccctgaggactgc

SEQ ID NO: 3894935 - DNA, 25 bp, Homo sapien
ccaaagtagtagctggacccagtag

SEQ ID NO: 3894936 - DNA, 25 bp, Homo sapien
tgaagtgcatggagactcacctgaa

SEQ ID NO: 3894937 - DNA, 25 bp, Homo sapien
gcttcgagtgtgacagagccattct

SEQ ID NO: 3894938 - DNA, 25 bp, Homo sapien
tccttggaagtaacaagaacactgg

SEQ ID NO: 3894939 - DNA, 25 bp, Homo sapien
ccacggcccgctcgcgtgcgctccc

SEQ ID NO: 3894940 - DNA, 25 bp, Homo sapien
cgggcccgcgggcgcgggacaggct

SEQ ID NO: 3894941 - DNA, 25 bp, Homo sapien
cgtgcgctcccagccgctcggggtc

SEQ ID NO: 3894942 - DNA, 25 bp, Homo sapien
ccgcgggcgcgggacaggctcaggg

SEQ ID NO: 3894943 - DNA, 25 bp, Homo sapien
cccgcgctccgagccgcccgggcat

SEQ ID NO: 3894944 - DNA, 25 bp, Homo sapien
caggtcccgcgggcgccaccgccct

SEQ ID NO: 3894945 - DNA, 25 bp, Homo sapien
ggtcccgcgggcgccaccgccctca

SEQ ID NO: 3894946 - DNA, 25 bp, Homo sapien
gtcccgcgggcgccaccgccctcac

SEQ ID NO: 3894947 - DNA, 25 bp, Homo sapien
cgcaggtcccgcgggcgccaccgcc

SEQ ID NO: 3894948 - DNA, 25 bp, Homo sapien
ggtgccagacagctttttcgcaaaa

SEQ ID NO: 3894949 - DNA, 25 bp, Homo sapien
tgggagccggccctccggcagttgc

SEQ ID NO: 3894950 - DNA, 25 bp, Homo sapien
aaaactagtttgcaaacacactccg

SEQ ID NO: 3894951 - DNA, 25 bp, Homo sapien
aacacactccgacttctgggaagct

SEQ ID NO: 3894952 - DNA, 25 bp, Homo sapien
ggccccggaacatcagcccatttca

SEQ ID NO: 3894953 - DNA, 25 bp, Homo sapien
tatgccaggcggaatgccataaaac

SEQ ID NO: 3894954 - DNA, 25 bp, Homo sapien
gccataaaaccacgccttcatgctg

SEQ ID NO: 3894955 - DNA, 25 bp, Homo sapien
ctggacctatgccaggcggaatgcc

SEQ ID NO: 3894956 - DNA, 25 bp, Homo sapien
cgaaacggggagcacatgatgtctg

SEQ ID NO: 3894957 - DNA, 25 bp, Homo sapien
agccaggcgtactggaccctgaggc

SEQ ID NO: 3894958 - DNA, 25 bp, Homo sapien
cagcagccaggcgtactggaccctg

SEQ ID NO: 3894959 - DNA, 25 bp, Homo sapien
ttctggatccccgaaacggggagca

SEQ ID NO: 3894960 - DNA, 25 bp, Homo sapien
ggcggtggcaggagttcctggcagt

SEQ ID NO: 3894961 - DNA, 25 bp, Homo sapien
gagccggtggcggtggcaggagttc

SEQ ID NO: 3894962 - DNA, 25 bp, Homo sapien
gccggtggcggtggcaggagttcct

SEQ ID NO: 3894963 - DNA, 25 bp, Homo sapien
cggtggcggtggcaggagttcctgg

SEQ ID NO: 3894964 - DNA, 25 bp, Homo sapien
ttggaggtaacatcccggtccagta

SEQ ID NO: 3894965 - DNA, 25 bp, Homo sapien
gacttggaggtaacatcccggtcca

SEQ ID NO: 3894966 - DNA, 25 bp, Homo sapien
cacacgcaatactgggggcccatgg

SEQ ID NO: 3894967 - DNA, 25 bp, Homo sapien
cttgcacacgcaatactgggggccc

SEQ ID NO: 3894968 - DNA, 25 bp, Homo sapien
tatgttcaggtgaactcccaccgtg

SEQ ID NO: 3894969 - DNA, 25 bp, Homo sapien
taccatcaacaagctgggtgacaca

SEQ ID NO: 3894970 - DNA, 25 bp, Homo sapien
ggcactcaagggttctagagacctg

SEQ ID NO: 3894971 - DNA, 25 bp, Homo sapien
tctggaaggctggataccaaacggt

SEQ ID NO: 3894972 - DNA, 25 bp, Homo sapien
gatttgaaaccgaggtctgactctg

SEQ ID NO: 3894973 - DNA, 25 bp, Homo sapien
tccaagacctcgcaggctgctggaa

SEQ ID NO: 3894974 - DNA, 25 bp, Homo sapien
cagagtcaaggcagctggtccaaga

SEQ ID NO: 3894975 - DNA, 25 bp, Homo sapien
tcttgtggtcatcgtcagtgactca

SEQ ID NO: 3894976 - DNA, 25 bp, Homo sapien
acctcctcgaagtggtagtcaagca

SEQ ID NO: 3894977 - DNA, 25 bp, Homo sapien
tcctggtcaaagagcgcgaacttga

SEQ ID NO: 3894978 - DNA, 25 bp, Homo sapien
ggcccaggaagtcatgctcgtccag

SEQ ID NO: 3894979 - DNA, 25 bp, Homo sapien
cagccgcatactggacttgtcctgg

SEQ ID NO: 3894980 - DNA, 25 bp, Homo sapien
cttccccgcaggcttgtcattcagc

SEQ ID NO: 3894981 - DNA, 25 bp, Homo sapien
cccttccccgcaggcttgtcattca

SEQ ID NO: 3894982 - DNA, 25 bp, Homo sapien
ccccgcaggcttgtcattcagcagc

SEQ ID NO: 3894983 - DNA, 25 bp, Homo sapien
tccccgcaggcttgtcattcagcag

SEQ ID NO: 3894984 - DNA, 25 bp, Homo sapien
gtgatgacgcggttgtcggacagct

SEQ ID NO: 3894985 - DNA, 25 bp, Homo sapien
gcccgccaggcttagtgtgatgacg

SEQ ID NO: 3894986 - DNA, 25 bp, Homo sapien
ccaggcttagtgtgatgacgcggtt

SEQ ID NO: 3894987 - DNA, 25 bp, Homo sapien
tgtgatgacgcggttgtcggacagc

SEQ ID NO: 3894988 - DNA, 25 bp, Homo sapien
tccagaaaggggtctgacttcccaa

SEQ ID NO: 3894989 - DNA, 25 bp, Homo sapien
ctccagaaaggggtctgacttccca

SEQ ID NO: 3894990 - DNA, 25 bp, Homo sapien
ggcttccacacagggtccagtgtgt

SEQ ID NO: 3894991 - DNA, 25 bp, Homo sapien
tggcttccacacagggtccagtgtg

SEQ ID NO: 3894992 - DNA, 25 bp, Homo sapien
atggcttccacacagggtccagtgt

SEQ ID NO: 3894993 - DNA, 25 bp, Homo sapien
cttccacacagggtccagtgtgtac

SEQ ID NO: 3894994 - DNA, 25 bp, Homo sapien
gggtgggttcagcacggtcacccca

SEQ ID NO: 3894995 - DNA, 25 bp, Homo sapien
ctggatagctcctgaactgcctcct

SEQ ID NO: 3894996 - DNA, 25 bp, Homo sapien
tctgtttgggtagtgcctctcctca

SEQ ID NO: 3894997 - DNA, 25 bp, Homo sapien
tcagcatctgcctagctggcctgga

SEQ ID NO: 3894998 - DNA, 25 bp, Homo sapien
ctgaggtctggaactcgccgatgaa

SEQ ID NO: 3894999 - DNA, 25 bp, Homo sapien
tgtctcgagcctcacacatctgtga

SEQ ID NO: 3895000 - DNA, 25 bp, Homo sapien
ccgtcattgtcatagtcgtagcaca

SEQ ID NO: 3895001 - DNA, 25 bp, Homo sapien
cgatgaagtcatggcccccgtcatt

SEQ ID NO: 3895002 - DNA, 25 bp, Homo sapien
caggatgatgatgcccgagttttta

SEQ ID NO: 3895003 - DNA, 25 bp, Homo sapien
cttgcaggatcgcaggatgatgatg

SEQ ID NO: 3895004 - DNA, 25 bp, Homo sapien
gatgatgcccgagtttttatagttc

SEQ ID NO: 3895005 - DNA, 25 bp, Homo sapien
gatcgcaggatgatgatgcccgagt

SEQ ID NO: 3895006 - DNA, 25 bp, Homo sapien
catgggggagttgttgctctatgtc

SEQ ID NO: 3895007 - DNA, 25 bp, Homo sapien
gctctatgtcctgcaacctcagtag

SEQ ID NO: 3895008 - DNA, 25 bp, Homo sapien
agaaagcggatgagtcagtgggtcc

SEQ ID NO: 3895009 - DNA, 25 bp, Homo sapien
ttgacttggtcacactccccatggg

SEQ ID NO: 3895010 - DNA, 25 bp, Homo sapien
caaggaaggagtagtctcggtttat

SEQ ID NO: 3895011 - DNA, 25 bp, Homo sapien
agcctcccaggatgtagtcaaggaa

SEQ ID NO: 3895012 - DNA, 25 bp, Homo sapien
tcaaggaaggagtagtctcggttta

SEQ ID NO: 3895013 - DNA, 25 bp, Homo sapien
caaagcttggcatgttgggcaaaca

SEQ ID NO: 3895014 - DNA, 25 bp, Homo sapien
caggtaggcagccatgcaaaggttc

SEQ ID NO: 3895015 - DNA, 25 bp, Homo sapien
tgttttcctccacccgcagaaggag

SEQ ID NO: 3895016 - DNA, 25 bp, Homo sapien
cgatcagggagaagcgacaaatgca

SEQ ID NO: 3895017 - DNA, 25 bp, Homo sapien
ctcacatggctagagggtcactccc

SEQ ID NO: 3895018 - DNA, 25 bp, Homo sapien
agagccaggctatcgtttcttcccg

SEQ ID NO: 3895019 - DNA, 25 bp, Homo sapien
caggtgcttattaacagggactcgg

SEQ ID NO: 3895020 - DNA, 25 bp, Homo sapien
cataaagtccactgcctagatgtga

SEQ ID NO: 3895021 - DNA, 25 bp, Homo sapien
caacagcccagatggccgacagata

SEQ ID NO: 3895022 - DNA, 25 bp, Homo sapien
gcccatagggttgatatagtgcaaa

SEQ ID NO: 3895023 - DNA, 25 bp, Homo sapien
gattcccgttggaggctgtaaagtc

SEQ ID NO: 3895024 - DNA, 25 bp, Homo sapien
gacagatattcgttggtgcccatag

SEQ ID NO: 3895025 - DNA, 25 bp, Homo sapien
tcccagagctggaaacatcttatca

SEQ ID NO: 3895026 - DNA, 25 bp, Homo sapien
aatcccagagctggaaacatcttat

SEQ ID NO: 3895027 - DNA, 25 bp, Homo sapien
aactgggccccgaatcccagagctg

SEQ ID NO: 3895028 - DNA, 25 bp, Homo sapien
gtaactgggccccgaatcccagagc

SEQ ID NO: 3895029 - DNA, 25 bp, Homo sapien
ctgcaggcttcgcacagtctgttct

SEQ ID NO: 3895030 - DNA, 25 bp, Homo sapien
tgcaggcttcgcacagtctgttctc

SEQ ID NO: 3895031 - DNA, 25 bp, Homo sapien
gcaggcttcgcacagtctgttctct

SEQ ID NO: 3895032 - DNA, 25 bp, Homo sapien
aggcttcgcacagtctgttctctgc

SEQ ID NO: 3895033 - DNA, 25 bp, Homo sapien
ctccaatggagggtctatcacccac

SEQ ID NO: 3895034 - DNA, 25 bp, Homo sapien
aggactcataactggccccgttcag

SEQ ID NO: 3895035 - DNA, 25 bp, Homo sapien
actgctgcacccatcacatccggct

SEQ ID NO: 3895036 - DNA, 25 bp, Homo sapien
gctgctgctgctcgcatggcttcgg

SEQ ID NO: 3895037 - DNA, 25 bp, Homo sapien
cggacactccgggacactgctgcac

SEQ ID NO: 3895038 - DNA, 25 bp, Homo sapien
gggttgaagttgatggcaaactcat

SEQ ID NO: 3895039 - DNA, 25 bp, Homo sapien
gaagttgatggcaaactcatgggag

SEQ ID NO: 3895040 - DNA, 25 bp, Homo sapien
tggggttgaagttgatggcaaactc

SEQ ID NO: 3895041 - DNA, 25 bp, Homo sapien
agttgatggcaaactcatgggagac

SEQ ID NO: 3895042 - DNA, 25 bp, Homo sapien
cgtgtccagcctaaatcctgccttt

SEQ ID NO: 3895043 - DNA, 25 bp, Homo sapien
gaatgtgaagtcagacaggcctgta

SEQ ID NO: 3895044 - DNA, 25 bp, Homo sapien
tcaatgggactgataatctacactc

SEQ ID NO: 3895045 - DNA, 25 bp, Homo sapien
gctacgtctttgtctgtcaatggga

SEQ ID NO: 3895046 - DNA, 25 bp, Homo sapien
caggcaagctgagtacgcctgggca

SEQ ID NO: 3895047 - DNA, 25 bp, Homo sapien
gagaaattggtaggaccgtagaagc

SEQ ID NO: 3895048 - DNA, 25 bp, Homo sapien
caaaccgggccacgtggttgacgat

SEQ ID NO: 3895049 - DNA, 25 bp, Homo sapien
gtacgcctgggcaataccatccaca

SEQ ID NO: 3895050 - DNA, 25 bp, Homo sapien
ctgagggagggccttgcagagtcca

SEQ ID NO: 3895051 - DNA, 25 bp, Homo sapien
tctgcttcatatagtggtcagggaa

SEQ ID NO: 3895052 - DNA, 25 bp, Homo sapien
tagacattgccgaccatcatcaggg

SEQ ID NO: 3895053 - DNA, 25 bp, Homo sapien
tccattcacagagcacgatgagcct

SEQ ID NO: 3895054 - DNA, 25 bp, Homo sapien
cttggctggtcccaatggtcccctt

SEQ ID NO: 3895055 - DNA, 25 bp, Homo sapien
ctctgactgagcttgtacaactgac

SEQ ID NO: 3895056 - DNA, 25 bp, Homo sapien
gaggctctgactgagcttgtacaac

SEQ ID NO: 3895057 - DNA, 25 bp, Homo sapien
ccttaggcatgggaccaggtccctt

SEQ ID NO: 3895058 - DNA, 25 bp, Homo sapien
ggcctttcccagttactgcccatta

SEQ ID NO: 3895059 - DNA, 25 bp, Homo sapien
cctttcccagttactgcccattaag

SEQ ID NO: 3895060 - DNA, 25 bp, Homo sapien
tttcccagttactgcccattaagcc

SEQ ID NO: 3895061 - DNA, 25 bp, Homo sapien
ttcccagttactgcccattaagcct

SEQ ID NO: 3895062 - DNA, 25 bp, Homo sapien
ggaccaagtcgcagcaaaagtggct

SEQ ID NO: 3895063 - DNA, 25 bp, Homo sapien
cactcctgcaggttagagatgctca

SEQ ID NO: 3895064 - DNA, 25 bp, Homo sapien
gggatttgaacctcccagagcttga

SEQ ID NO: 3895065 - DNA, 25 bp, Homo sapien
tcttggacatcagagtgggagagcc

SEQ ID NO: 3895066 - DNA, 25 bp, Homo sapien
tcatttcagggaagttggcagctga

SEQ ID NO: 3895067 - DNA, 25 bp, Homo sapien
ctagctcatttcagggaagttggca

SEQ ID NO: 3895068 - DNA, 25 bp, Homo sapien
gctcatttcagggaagttggcagct

SEQ ID NO: 3895069 - DNA, 25 bp, Homo sapien
tagctcatttcagggaagttggcag

SEQ ID NO: 3895070 - DNA, 25 bp, Homo sapien
aactcactatgcgtcctgctctcag

SEQ ID NO: 3895071 - DNA, 25 bp, Homo sapien
gactctaggcaactgacttgactcg

SEQ ID NO: 3895072 - DNA, 25 bp, Homo sapien
gaaggcagtgcatcttacccagctg

SEQ ID NO: 3895073 - DNA, 25 bp, Homo sapien
caaaccctccgagtcctggaggaag

SEQ ID NO: 3895074 - DNA, 25 bp, Homo sapien
gggcactcagcaaggtcgaggctct

SEQ ID NO: 3895075 - DNA, 25 bp, Homo sapien
caacggggcactcagcaaggtcgag

SEQ ID NO: 3895076 - DNA, 25 bp, Homo sapien
gcactcagcaaggtcgaggctctgg

SEQ ID NO: 3895077 - DNA, 25 bp, Homo sapien
ctcagcaaggtcgaggctctggcac

SEQ ID NO: 3895078 - DNA, 25 bp, Homo sapien
tgaccccgtccgtgatgatgaggag

SEQ ID NO: 3895079 - DNA, 25 bp, Homo sapien
catggcagcgaagtccgcattgccc

SEQ ID NO: 3895080 - DNA, 25 bp, Homo sapien
agcttggaagcctgcaccacggcat

SEQ ID NO: 3895081 - DNA, 25 bp, Homo sapien
catccaggaactccatggcagcgaa

SEQ ID NO: 3895082 - DNA, 25 bp, Homo sapien
acgaactgcacaatatcgcgggctg

SEQ ID NO: 3895083 - DNA, 25 bp, Homo sapien
cgaactgcacaatatcgcgggctgc

SEQ ID NO: 3895084 - DNA, 25 bp, Homo sapien
gcacatggaggtactcggtcaccga

SEQ ID NO: 3895085 - DNA, 25 bp, Homo sapien
tgagcaccttcttggcgggaataaa

SEQ ID NO: 3895086 - DNA, 25 bp, Homo sapien
gaagcacctatgtgtccggcaaaca

SEQ ID NO: 3895087 - DNA, 25 bp, Homo sapien
tgtccttaggaagcgaatgctccag

SEQ ID NO: 3895088 - DNA, 25 bp, Homo sapien
actgcacaacttgttggggcagctc

SEQ ID NO: 3895089 - DNA, 25 bp, Homo sapien
tactgcacaacttgttggggcagct

SEQ ID NO: 3895090 - DNA, 25 bp, Homo sapien
caggcgggctccgagttggtggggg

SEQ ID NO: 3895091 - DNA, 25 bp, Homo sapien
cagctccgccagcacagctttggcc

SEQ ID NO: 3895092 - DNA, 25 bp, Homo sapien
aggaagccagtttggcctggaagca

SEQ ID NO: 3895093 - DNA, 25 bp, Homo sapien
tattctcaataacaattccactaaa

SEQ ID NO: 3895094 - DNA, 25 bp, Homo sapien
gcatcaacagttgactccaacaaag

SEQ ID NO: 3895095 - DNA, 25 bp, Homo sapien
gaagcagagtgagcgtgcatgttcc

SEQ ID NO: 3895096 - DNA, 25 bp, Homo sapien
ttagatcagtgagcccgtcaggtcc

SEQ ID NO: 3895097 - DNA, 25 bp, Homo sapien
taattaggtgcaggctacgacacgt

SEQ ID NO: 3895098 - DNA, 25 bp, Homo sapien
tacgacacgtatgcaccaaggacat

SEQ ID NO: 3895099 - DNA, 25 bp, Homo sapien
cgcagggacgtctgaaactcatttg

SEQ ID NO: 3895100 - DNA, 25 bp, Homo sapien
ggcagaaaaacagagggacagccat

SEQ ID NO: 3895101 - DNA, 25 bp, Homo sapien
ggagcctcacagtggtaacggcaga

SEQ ID NO: 3895102 - DNA, 25 bp, Homo sapien
ggagcagcggttcggagagagaggg

SEQ ID NO: 3895103 - DNA, 25 bp, Homo sapien
cctcacagtggtaacggcagaacat

SEQ ID NO: 3895104 - DNA, 25 bp, Homo sapien
gctggagcagcggttcggagagaga

SEQ ID NO: 3895105 - DNA, 25 bp, Homo sapien
acagctaacaaagcagcgtctgatc

SEQ ID NO: 3895106 - DNA, 25 bp, Homo sapien
aaacagagcttctgtagcaaccaca

SEQ ID NO: 3895107 - DNA, 25 bp, Homo sapien
cagctaacaaagcagcgtctgatct

SEQ ID NO: 3895108 - DNA, 25 bp, Homo sapien
aacagagcttctgtagcaaccacag

SEQ ID NO: 3895109 - DNA, 25 bp, Homo sapien
gaatcactggtgatcattgcatcat

SEQ ID NO: 3895110 - DNA, 25 bp, Homo sapien
ctgagaatcactggtgatcattgca

SEQ ID NO: 3895111 - DNA, 25 bp, Homo sapien
tcactggtgatcattgcatcatatt

SEQ ID NO: 3895112 - DNA, 25 bp, Homo sapien
actggtgatcattgcatcatattcc

SEQ ID NO: 3895113 - DNA, 25 bp, Homo sapien
gagcagctactgactttgaacatgg

SEQ ID NO: 3895114 - DNA, 25 bp, Homo sapien
tgttgacactgtgatgccggcaggc

SEQ ID NO: 3895115 - DNA, 25 bp, Homo sapien
taattgttctgccagtatgggcgca

SEQ ID NO: 3895116 - DNA, 25 bp, Homo sapien
tgacaacaatctgtaggctctcctg

SEQ ID NO: 3895117 - DNA, 25 bp, Homo sapien
tactgctccacctcgtctcataaag

SEQ ID NO: 3895118 - DNA, 25 bp, Homo sapien
aaaggtgctgccctagtacttttct

SEQ ID NO: 3895119 - DNA, 25 bp, Homo sapien
agggaaacgggctcatcccttggat

SEQ ID NO: 3895120 - DNA, 25 bp, Homo sapien
acagcaactctgaggccatgagcag

SEQ ID NO: 3895121 - DNA, 25 bp, Homo sapien
tgtgaaagctttccatacccttggc

SEQ ID NO: 3895122 - DNA, 25 bp, Homo sapien
gatcggaccgttcatgctgcctata

SEQ ID NO: 3895123 - DNA, 25 bp, Homo sapien
ggaagggactgctaacaagaacgct

SEQ ID NO: 3895124 - DNA, 25 bp, Homo sapien
ccaggtagtgaaatggagcccttcc

SEQ ID NO: 3895125 - DNA, 25 bp, Homo sapien
cgcccttgaaatatggtcatgtgcc

SEQ ID NO: 3895126 - DNA, 25 bp, Homo sapien
cacagtggtccagattccttgatta

SEQ ID NO: 3895127 - DNA, 25 bp, Homo sapien
cattcttccgttaggccagttctct

SEQ ID NO: 3895128 - DNA, 25 bp, Homo sapien
tcttgaaacctcctagataattggg

SEQ ID NO: 3895129 - DNA, 25 bp, Homo sapien
tgcccagcctgaattaagatattag

SEQ ID NO: 3895130 - DNA, 25 bp, Homo sapien
ccaacccactgagagctgatgagaa

SEQ ID NO: 3895131 - DNA, 25 bp, Homo sapien
aagagcagacttttgtaagtgtgca

SEQ ID NO: 3895132 - DNA, 25 bp, Homo sapien
tgtgactgtgttttcaggacaccaa

SEQ ID NO: 3895133 - DNA, 25 bp, Homo sapien
ctgagtaactgggactgcgtttttt

SEQ ID NO: 3895134 - DNA, 25 bp, Homo sapien
agcagtcctccagtctcagcctcct

SEQ ID NO: 3895135 - DNA, 25 bp, Homo sapien
ttgcccgggctggccttgaactcct

SEQ ID NO: 3895136 - DNA, 25 bp, Homo sapien
taagggaaatgggtatctccttatg

SEQ ID NO: 3895137 - DNA, 25 bp, Homo sapien
tctgaaatcttaaatcatatattgc

SEQ ID NO: 3895138 - DNA, 25 bp, Homo sapien
ttccattgttattaaactcggcctc

SEQ ID NO: 3895139 - DNA, 25 bp, Homo sapien
tgctgttttacttcccagttcacct

SEQ ID NO: 3895140 - DNA, 25 bp, Homo sapien
gaagctgtagttcttttgggcacaa

SEQ ID NO: 3895141 - DNA, 25 bp, Homo sapien
gctccttgtccggagtagccgaagc

SEQ ID NO: 3895142 - DNA, 25 bp, Homo sapien
cgctccttgtccggagtagccgaag

SEQ ID NO: 3895143 - DNA, 25 bp, Homo sapien
ctccttgtccggagtagccgaagcc

SEQ ID NO: 3895144 - DNA, 25 bp, Homo sapien
ccgctccttgtccggagtagccgaa

SEQ ID NO: 3895145 - DNA, 25 bp, Homo sapien
ggttccagcttccttacggaagaga

SEQ ID NO: 3895146 - DNA, 25 bp, Homo sapien
gcttccttacggaagagatgagctg

SEQ ID NO: 3895147 - DNA, 25 bp, Homo sapien
ccagcttccttacggaagagatgag

SEQ ID NO: 3895148 - DNA, 25 bp, Homo sapien
tgggttccagcttccttacggaaga

SEQ ID NO: 3895149 - DNA, 25 bp, Homo sapien
catcctgaggcgtgaatggcccaat

SEQ ID NO: 3895150 - DNA, 25 bp, Homo sapien
tcagggtaccggatttccatcgggc

SEQ ID NO: 3895151 - DNA, 25 bp, Homo sapien
aagagctccgcggattgggttacgt

SEQ ID NO: 3895152 - DNA, 25 bp, Homo sapien
aagtctctccggctcgttttcaggg

SEQ ID NO: 3895153 - DNA, 25 bp, Homo sapien
gtaccgccccagccctccctcagtc

SEQ ID NO: 3895154 - DNA, 25 bp, Homo sapien
tacgcgcagagcccacccccgcttc

SEQ ID NO: 3895155 - DNA, 25 bp, Homo sapien
gcgcagagcccacccccgcttcgta

SEQ ID NO: 3895156 - DNA, 25 bp, Homo sapien
ttcgtaccgccccagccctccctca

SEQ ID NO: 3895157 - DNA, 25 bp, Homo sapien
aacggcaaagatggacgcgaggcca

SEQ ID NO: 3895158 - DNA, 25 bp, Homo sapien
ccgagagaacggcaaagatggacgc

SEQ ID NO: 3895159 - DNA, 25 bp, Homo sapien
cggcggcgcgactcctttgtgacag

SEQ ID NO: 3895160 - DNA, 25 bp, Homo sapien
tgacaggtccgagagaacggcaaag

SEQ ID NO: 3895161 - DNA, 25 bp, Homo sapien
gagcagcgcggtcgggctgtggcac

SEQ ID NO: 3895162 - DNA, 25 bp, Homo sapien
agcagcgcggtcgggctgtggcact

SEQ ID NO: 3895163 - DNA, 25 bp, Homo sapien
agcgcggtcgggctgtggcactgac

SEQ ID NO: 3895164 - DNA, 25 bp, Homo sapien
cagcgcggtcgggctgtggcactga

SEQ ID NO: 3895165 - DNA, 25 bp, Homo sapien
gcctcggtggaaaacctctcggctg

SEQ ID NO: 3895166 - DNA, 25 bp, Homo sapien
caagaacctcttctggtgaggaccc

SEQ ID NO: 3895167 - DNA, 25 bp, Homo sapien
tcttctaggaacctcttcagatccc

SEQ ID NO: 3895168 - DNA, 25 bp, Homo sapien
tctcaggttctgaccaacgccacct

SEQ ID NO: 3895169 - DNA, 25 bp, Homo sapien
caattttcagctccggcttccgtag

SEQ ID NO: 3895170 - DNA, 25 bp, Homo sapien
caccccaggagatagatagctgcct

SEQ ID NO: 3895171 - DNA, 25 bp, Homo sapien
tgagtaggtcaggaccccatcggta

SEQ ID NO: 3895172 - DNA, 25 bp, Homo sapien
cttccgtagtaggacattccgctag

SEQ ID NO: 3895173 - DNA, 25 bp, Homo sapien
tagggctaccacaacaacgcatagt

SEQ ID NO: 3895174 - DNA, 25 bp, Homo sapien
gtatgatattcactgcctgtagaca

SEQ ID NO: 3895175 - DNA, 25 bp, Homo sapien
tgtagacatccaaaagccatgcata

SEQ ID NO: 3895176 - DNA, 25 bp, Homo sapien
tattacagtggtaactcctgccagc

SEQ ID NO: 3895177 - DNA, 25 bp, Homo sapien
cagaattacactgcctaggaaggaa

SEQ ID NO: 3895178 - DNA, 25 bp, Homo sapien
gcattcagccatagtacagatcagt

SEQ ID NO: 3895179 - DNA, 25 bp, Homo sapien
catcataaacagctcaccatggaga

SEQ ID NO: 3895180 - DNA, 25 bp, Homo sapien
aaagcagtaaggttctggtactcac

SEQ ID NO: 3895181 - DNA, 25 bp, Homo sapien
tgatcatcccatagacggcattaga

SEQ ID NO: 3895182 - DNA, 25 bp, Homo sapien
tatagaacctaccacagaacctggc

SEQ ID NO: 3895183 - DNA, 25 bp, Homo sapien
tggtcccactacgaatagccagaat

SEQ ID NO: 3895184 - DNA, 25 bp, Homo sapien
gaaggacacaccgactgaactaggg

SEQ ID NO: 3895185 - DNA, 25 bp, Homo sapien
tcaactacaggggattctggacatc

SEQ ID NO: 3895186 - DNA, 25 bp, Homo sapien
ggattctggacatccaatggcagtt

SEQ ID NO: 3895187 - DNA, 25 bp, Homo sapien
cataacctggagttgaggaatttgc

SEQ ID NO: 3895188 - DNA, 25 bp, Homo sapien
tcataacctggagttgaggaatttg

SEQ ID NO: 3895189 - DNA, 25 bp, Homo sapien
tgggtactgcactgttctcggcctg

SEQ ID NO: 3895190 - DNA, 25 bp, Homo sapien
tccagtccctaggaagtgggctatg

SEQ ID NO: 3895191 - DNA, 25 bp, Homo sapien
ttacccatggtagtagcggcacctc

SEQ ID NO: 3895192 - DNA, 25 bp, Homo sapien
ttctgctcgctaagaacacggccca

SEQ ID NO: 3895193 - DNA, 25 bp, Homo sapien
catttactctgccatcagcggagca

SEQ ID NO: 3895194 - DNA, 25 bp, Homo sapien
tcagtggaatagacaggcatgtacc

SEQ ID NO: 3895195 - DNA, 25 bp, Homo sapien
cctaaagtcatggttccgggcagaa

SEQ ID NO: 3895196 - DNA, 25 bp, Homo sapien
tacaggtgtgccttgcagtatcaac

SEQ ID NO: 3895197 - DNA, 25 bp, Homo sapien
tatcattgaatagggaggttcctga

SEQ ID NO: 3895198 - DNA, 25 bp, Homo sapien
cattgaatagggaggttcctgatca

SEQ ID NO: 3895199 - DNA, 25 bp, Homo sapien
ccatttcgtgtaatgttatcattga

SEQ ID NO: 3895200 - DNA, 25 bp, Homo sapien
tgtttctgccatttcgtgtaatgtt

SEQ ID NO: 3895201 - DNA, 25 bp, Homo sapien
aatcaagaagattatatgatggagt

SEQ ID NO: 3895202 - DNA, 25 bp, Homo sapien
atcaagaagattatatgatggagtc

SEQ ID NO: 3895203 - DNA, 25 bp, Homo sapien
tcaagaagattatatgatggagtca

SEQ ID NO: 3895204 - DNA, 25 bp, Homo sapien
aaatcaagaagattatatgatggag

SEQ ID NO: 3895205 - DNA, 25 bp, Homo sapien
ggatcttccagtggaataactctaa

SEQ ID NO: 3895206 - DNA, 25 bp, Homo sapien
tctagtaacaatgttataacagctg

SEQ ID NO: 3895207 - DNA, 25 bp, Homo sapien
aatgttataacagctggtcccagtg

SEQ ID NO: 3895208 - DNA, 25 bp, Homo sapien
ggcaatggacattcatctagtaaca

SEQ ID NO: 3895209 - DNA, 25 bp, Homo sapien
agccttgatagagaatgtggcgggg

SEQ ID NO: 3895210 - DNA, 25 bp, Homo sapien
aaagccttgatagagaatgtggcgg

SEQ ID NO: 3895211 - DNA, 25 bp, Homo sapien
taaagccttgatagagaatgtggcg

SEQ ID NO: 3895212 - DNA, 25 bp, Homo sapien
aataaagccttgatagagaatgtgg

SEQ ID NO: 3895213 - DNA, 25 bp, Homo sapien
ctgctagtttctcggccaagcagcc

SEQ ID NO: 3895214 - DNA, 25 bp, Homo sapien
gtttctcggccaagcagcctaggac

SEQ ID NO: 3895215 - DNA, 25 bp, Homo sapien
aatttcagtcaatttctggagtgca

SEQ ID NO: 3895216 - DNA, 25 bp, Homo sapien
tgagaatttcagtcaatttctggag

SEQ ID NO: 3895217 - DNA, 25 bp, Homo sapien
ttccagtattcctgggctaagtaaa

SEQ ID NO: 3895218 - DNA, 25 bp, Homo sapien
ctaagtaaacctatacttgcaggac

SEQ ID NO: 3895219 - DNA, 25 bp, Homo sapien
cctgggctaagtaaacctatacttg

SEQ ID NO: 3895220 - DNA, 25 bp, Homo sapien
tattcctgggctaagtaaacctata

SEQ ID NO: 3895221 - DNA, 25 bp, Homo sapien
gatgatgcccacttctagatgacta

SEQ ID NO: 3895222 - DNA, 25 bp, Homo sapien
gatgcccacttctagatgactaaga

SEQ ID NO: 3895223 - DNA, 25 bp, Homo sapien
agatgatgcccacttctagatgact

SEQ ID NO: 3895224 - DNA, 25 bp, Homo sapien
tctagatgactaagaataaatagtt

SEQ ID NO: 3895225 - DNA, 25 bp, Homo sapien
tgcgataagtgcaaaaagcatgact

SEQ ID NO: 3895226 - DNA, 25 bp, Homo sapien
cttttccagtgcgataagtgcaaaa

SEQ ID NO: 3895227 - DNA, 25 bp, Homo sapien
tgtgcaaacttttccagtgcgataa

SEQ ID NO: 3895228 - DNA, 25 bp, Homo sapien
ccagtgcgataagtgcaaaaagcat

SEQ ID NO: 3895229 - DNA, 25 bp, Homo sapien
aacaatgaaagggtagaatgatttg

SEQ ID NO: 3895230 - DNA, 25 bp, Homo sapien
ttaacaatgaaagggtagaatgatt

SEQ ID NO: 3895231 - DNA, 25 bp, Homo sapien
aattaacaatgaaagggtagaatga

SEQ ID NO: 3895232 - DNA, 25 bp, Homo sapien
acaatgaaagggtagaatgatttgc

SEQ ID NO: 3895233 - DNA, 25 bp, Homo sapien
gacgtttcagataatcaggatcatt

SEQ ID NO: 3895234 - DNA, 25 bp, Homo sapien
gccggtcactaatactggattcaga

SEQ ID NO: 3895235 - DNA, 25 bp, Homo sapien
actccaatgtgacaagccggtcact

SEQ ID NO: 3895236 - DNA, 25 bp, Homo sapien
cacagaaaccaacttgacgtttcag

SEQ ID NO: 3895237 - DNA, 25 bp, Homo sapien
catatgatccggcaattctgctgct

SEQ ID NO: 3895238 - DNA, 25 bp, Homo sapien
gctagtgccagctacagcaatcaga

SEQ ID NO: 3895239 - DNA, 25 bp, Homo sapien
tcaacgaagtaaagagacatcccac

SEQ ID NO: 3895240 - DNA, 25 bp, Homo sapien
tgaccctcagcaagaaaacgaaact

SEQ ID NO: 3895241 - DNA, 25 bp, Homo sapien
aagagtgttcatgtttctaaggcag

SEQ ID NO: 3895242 - DNA, 25 bp, Homo sapien
agagtgttcatgtttctaaggcagg

SEQ ID NO: 3895243 - DNA, 25 bp, Homo sapien
aaagagtgttcatgtttctaaggca

SEQ ID NO: 3895244 - DNA, 25 bp, Homo sapien
gaaagagtgttcatgtttctaaggc

SEQ ID NO: 3895245 - DNA, 25 bp, Homo sapien
caggtactcgctgacatcattgcta

SEQ ID NO: 3895246 - DNA, 25 bp, Homo sapien
ttcagcatggccctaatgctactca

SEQ ID NO: 3895247 - DNA, 25 bp, Homo sapien
catgaggtgagatcttcaggtactc

SEQ ID NO: 3895248 - DNA, 25 bp, Homo sapien
ctttctcataggtcagctgtctacc

SEQ ID NO: 3895249 - DNA, 25 bp, Homo sapien
ggtgcaacgcacactttcaaaagag

SEQ ID NO: 3895250 - DNA, 25 bp, Homo sapien
gaatttgctgtctcgagtggcccag

SEQ ID NO: 3895251 - DNA, 25 bp, Homo sapien
tacttcatagtaccataccccggca

SEQ ID NO: 3895252 - DNA, 25 bp, Homo sapien
tgcatgacgccagaagtgaccactg

SEQ ID NO: 3895253 - DNA, 25 bp, Homo sapien
aagaaagtttatccacagcttgtca

SEQ ID NO: 3895254 - DNA, 25 bp, Homo sapien
aacaaaagaaagtttatccacagct

SEQ ID NO: 3895255 - DNA, 25 bp, Homo sapien
caaaagaaagtttatccacagcttg

SEQ ID NO: 3895256 - DNA, 25 bp, Homo sapien
aaagaaagtttatccacagcttgtc

SEQ ID NO: 3895257 - DNA, 25 bp, Homo sapien
aggagtattcatcatccccaatgcc

SEQ ID NO: 3895258 - DNA, 25 bp, Homo sapien
gctgccggcagccatcatacgcaca

SEQ ID NO: 3895259 - DNA, 25 bp, Homo sapien
ttctggcattgtaccaaatcagctg

SEQ ID NO: 3895260 - DNA, 25 bp, Homo sapien
gagtattcatcatccccaatgccgt

SEQ ID NO: 3895261 - DNA, 25 bp, Homo sapien
ttccagcatgggtgtatgtgaggct

SEQ ID NO: 3895262 - DNA, 25 bp, Homo sapien
tccagcatgggtgtatgtgaggctt

SEQ ID NO: 3895263 - DNA, 25 bp, Homo sapien
tgataaatttataatggagggaatg

SEQ ID NO: 3895264 - DNA, 25 bp, Homo sapien
aatttataatggagggaatgaatac

SEQ ID NO: 3895265 - DNA, 25 bp, Homo sapien
ttgataaatttataatggagggaat

SEQ ID NO: 3895266 - DNA, 25 bp, Homo sapien
cagtgtccctgatattgccatggct

SEQ ID NO: 3895267 - DNA, 25 bp, Homo sapien
tagagcgtggccactggataggacc

SEQ ID NO: 3895268 - DNA, 25 bp, Homo sapien
ggataggacctgttccatagccatc

SEQ ID NO: 3895269 - DNA, 25 bp, Homo sapien
tatgaccctacttccttagagcgtg

SEQ ID NO: 3895270 - DNA, 25 bp, Homo sapien
aagacttgcttttcaggaggcagct

SEQ ID NO: 3895271 - DNA, 25 bp, Homo sapien
tctaacagaaatcctactgtatctc

SEQ ID NO: 3895272 - DNA, 25 bp, Homo sapien
ttcaagtctaacagaaatcctactg

SEQ ID NO: 3895273 - DNA, 25 bp, Homo sapien
gcagctggttgccatttaaaaagaa

SEQ ID NO: 3895274 - DNA, 25 bp, Homo sapien
tgctaaatttcatagatggtgggta

SEQ ID NO: 3895275 - DNA, 25 bp, Homo sapien
ggaaggcgtagtcattaaaagtgct

SEQ ID NO: 3895276 - DNA, 25 bp, Homo sapien
tttcttcagctgttaggaaggcgta

SEQ ID NO: 3895277 - DNA, 25 bp, Homo sapien
gaactcacattgttgatatgacatg

SEQ ID NO: 3895278 - DNA, 25 bp, Homo sapien
tacctcatcacaacaaagggaacag

SEQ ID NO: 3895279 - DNA, 25 bp, Homo sapien
gcttcaattgtgtgtctgctacctc

SEQ ID NO: 3895280 - DNA, 25 bp, Homo sapien
tactgacttgcttcaacagagcaag

SEQ ID NO: 3895281 - DNA, 25 bp, Homo sapien
aacagcagttttctcggatactgac

SEQ ID NO: 3895282 - DNA, 25 bp, Homo sapien
caaggcacaatccatgcacaggtca

SEQ ID NO: 3895283 - DNA, 25 bp, Homo sapien
tgcaaggcacaatccatgcacaggt

SEQ ID NO: 3895284 - DNA, 25 bp, Homo sapien
agctgcaaggcacaatccatgcaca

SEQ ID NO: 3895285 - DNA, 25 bp, Homo sapien
gctgcaaggcacaatccatgcacag

SEQ ID NO: 3895286 - DNA, 25 bp, Homo sapien
atgaaatatgagaaatctgtctgat

SEQ ID NO: 3895287 - DNA, 25 bp, Homo sapien
ctgattctagatactatttctttac

SEQ ID NO: 3895288 - DNA, 25 bp, Homo sapien
gaaatatgagaaatctgtctgattc

SEQ ID NO: 3895289 - DNA, 25 bp, Homo sapien
atatgagaaatctgtctgattctag

SEQ ID NO: 3895290 - DNA, 25 bp, Homo sapien
caccggtgtctctgaccagtgagaa

SEQ ID NO: 3895291 - DNA, 25 bp, Homo sapien
aatatccatgcttgacacaccggtg

SEQ ID NO: 3895292 - DNA, 25 bp, Homo sapien
tatgcataacccagaaacgctgtca

SEQ ID NO: 3895293 - DNA, 25 bp, Homo sapien
tctcatggaagtaccacaggcctgg

SEQ ID NO: 3895294 - DNA, 25 bp, Homo sapien
caccccaacatgtacagccaggaag

SEQ ID NO: 3895295 - DNA, 25 bp, Homo sapien
gctgctgaggtacaccattataaaa

SEQ ID NO: 3895296 - DNA, 25 bp, Homo sapien
ccctgagagggattaacacttttga

SEQ ID NO: 3895297 - DNA, 25 bp, Homo sapien
tattcaccacaagctaaagaagaga

SEQ ID NO: 3895298 - DNA, 25 bp, Homo sapien
aggtccggccttggataccctctgc

SEQ ID NO: 3895299 - DNA, 25 bp, Homo sapien
agctcactgccaggtcgggtcagcg

SEQ ID NO: 3895300 - DNA, 25 bp, Homo sapien
tccgggcctcggtgactgccggagg

SEQ ID NO: 3895301 - DNA, 25 bp, Homo sapien
cggcggggttaaggcctctcagcca

SEQ ID NO: 3895302 - DNA, 25 bp, Homo sapien
aaagacagcgcaaagctctctcctt

SEQ ID NO: 3895303 - DNA, 25 bp, Homo sapien
gcaaagctctctccttctaaggcgt

SEQ ID NO: 3895304 - DNA, 25 bp, Homo sapien
agctctctccttctaaggcgtccat

SEQ ID NO: 3895305 - DNA, 25 bp, Homo sapien
aaagctctctccttctaaggcgtcc

SEQ ID NO: 3895306 - DNA, 25 bp, Homo sapien
gcatgaacccggcacgggcgaaaca

SEQ ID NO: 3895307 - DNA, 25 bp, Homo sapien
tccaggctcttagctatcaccccat

SEQ ID NO: 3895308 - DNA, 25 bp, Homo sapien
tcaccccatacctgtctgcttgtga

SEQ ID NO: 3895309 - DNA, 25 bp, Homo sapien
ctgcttgtgagcatgaacccggcac

SEQ ID NO: 3895310 - DNA, 25 bp, Homo sapien
caaattctgcatcagaggcggagga

SEQ ID NO: 3895311 - DNA, 25 bp, Homo sapien
gataatgtcctctaaatatccaacc

SEQ ID NO: 3895312 - DNA, 25 bp, Homo sapien
aatatccaaccacagcatcaaattc

SEQ ID NO: 3895313 - DNA, 25 bp, Homo sapien
ccatgataatgtcctctaaatatcc

SEQ ID NO: 3895314 - DNA, 25 bp, Homo sapien
gagccaccgtacccatcccggaata

SEQ ID NO: 3895315 - DNA, 25 bp, Homo sapien
ggcttgggaactccctgacattact

SEQ ID NO: 3895316 - DNA, 25 bp, Homo sapien
caccaccatccttcagtccatttta

SEQ ID NO: 3895317 - DNA, 25 bp, Homo sapien
cttgggaactccctgacattacttt

SEQ ID NO: 3895318 - DNA, 25 bp, Homo sapien
accaccatccttcagtccattttaa

SEQ ID NO: 3895319 - DNA, 25 bp, Homo sapien
gatgtggaaatagcccaatcctcct

SEQ ID NO: 3895320 - DNA, 25 bp, Homo sapien
gtggaaatagcccaatcctcctgtt

SEQ ID NO: 3895321 - DNA, 25 bp, Homo sapien
gctttctcaatgatcagtctctgga

SEQ ID NO: 3895322 - DNA, 25 bp, Homo sapien
taggcaggatctatgtcagcagtac

SEQ ID NO: 3895323 - DNA, 25 bp, Homo sapien
gatgagtttattctcttctgtgtct

SEQ ID NO: 3895324 - DNA, 25 bp, Homo sapien
ggtagtacttgtccatgaaatttct

SEQ ID NO: 3895325 - DNA, 25 bp, Homo sapien
tctctgtaataactggaactcgtca

SEQ ID NO: 3895326 - DNA, 25 bp, Homo sapien
tcattaaaaataggtgtgtagatga

SEQ ID NO: 3895327 - DNA, 25 bp, Homo sapien
catgttgaactcaggaatccgctgc

SEQ ID NO: 3895328 - DNA, 25 bp, Homo sapien
ccatgttgaactcaggaatccgctg

SEQ ID NO: 3895329 - DNA, 25 bp, Homo sapien
ctgtgaaggtgagcagcatgtcgaa

SEQ ID NO: 3895330 - DNA, 25 bp, Homo sapien
gaaaatctgtgaaggtgagcagcat

SEQ ID NO: 3895331 - DNA, 25 bp, Homo sapien
tgagcagcatgtcgaatatgtcacc

SEQ ID NO: 3895332 - DNA, 25 bp, Homo sapien
agccagaaaatctgtgaaggtgagc

SEQ ID NO: 3895333 - DNA, 25 bp, Homo sapien
cgtgggaggttcatgttcggtattt

SEQ ID NO: 3895334 - DNA, 25 bp, Homo sapien
ctcatcggccagtttgaagggagaa

SEQ ID NO: 3895335 - DNA, 25 bp, Homo sapien
tcatgttcggtatttctacctggaa

SEQ ID NO: 3895336 - DNA, 25 bp, Homo sapien
ttctgatgcctcatcggccagtttg

SEQ ID NO: 3895337 - DNA, 25 bp, Homo sapien
tgattaggaactctaagttggtacc

SEQ ID NO: 3895338 - DNA, 25 bp, Homo sapien
tcggttttgtccttctgattaggaa

SEQ ID NO: 3895339 - DNA, 25 bp, Homo sapien
aactctaagttggtacctgggcttg

SEQ ID NO: 3895340 - DNA, 25 bp, Homo sapien
tgggcttgtttcatgaaaacatgag

SEQ ID NO: 3895341 - DNA, 25 bp, Homo sapien
ctaagccactgcttaagtccagtcc

SEQ ID NO: 3895342 - DNA, 25 bp, Homo sapien
tgcttaagtccagtcctcggccttc

SEQ ID NO: 3895343 - DNA, 25 bp, Homo sapien
gccactgcttaagtccagtcctcgg

SEQ ID NO: 3895344 - DNA, 25 bp, Homo sapien
tcaccactaagccactgcttaagtc

SEQ ID NO: 3895345 - DNA, 25 bp, Homo sapien
ctagtgccgcagattgttctgggaa

SEQ ID NO: 3895346 - DNA, 25 bp, Homo sapien
tagtgccgcagattgttctgggaag

SEQ ID NO: 3895347 - DNA, 25 bp, Homo sapien
cagagtcagtctttccaagatgtgt

SEQ ID NO: 3895348 - DNA, 25 bp, Homo sapien
gctgagcctattgggctggtgacat

SEQ ID NO: 3895349 - DNA, 25 bp, Homo sapien
tcatcatgagctgagcctattgggc

SEQ ID NO: 3895350 - DNA, 25 bp, Homo sapien
caagatgtgttctgtcatcatgagc

SEQ ID NO: 3895351 - DNA, 25 bp, Homo sapien
catgctgggctggacagtggaacac

SEQ ID NO: 3895352 - DNA, 25 bp, Homo sapien
gactaggagtagcttttcacatgga

SEQ ID NO: 3895353 - DNA, 25 bp, Homo sapien
gggacacactgggaattgaactact

SEQ ID NO: 3895354 - DNA, 25 bp, Homo sapien
tgttgattcctacagccgagacaag

SEQ ID NO: 3895355 - DNA, 25 bp, Homo sapien
gagaatggtggttcttgcgaaacac

SEQ ID NO: 3895356 - DNA, 25 bp, Homo sapien
ggtggttcttgcgaaacacctgaag

SEQ ID NO: 3895357 - DNA, 25 bp, Homo sapien
atggtggttcttgcgaaacacctga

SEQ ID NO: 3895358 - DNA, 25 bp, Homo sapien
gaatggtggttcttgcgaaacacct

SEQ ID NO: 3895359 - DNA, 25 bp, Homo sapien
tacaggtgcttgtaacctccaggag

SEQ ID NO: 3895360 - DNA, 25 bp, Homo sapien
gtcatataatcaaggtggctggcca

SEQ ID NO: 3895361 - DNA, 25 bp, Homo sapien
tgcgaactctttgaccggaggaagg

SEQ ID NO: 3895362 - DNA, 25 bp, Homo sapien
taaaagcatttctaggtaccctctg

SEQ ID NO: 3895363 - DNA, 25 bp, Homo sapien
aaaagtgggttgattgctgacagca

SEQ ID NO: 3895364 - DNA, 25 bp, Homo sapien
gctgactaggcacatgggacgcaaa

SEQ ID NO: 3895365 - DNA, 25 bp, Homo sapien
ctttgggcgaagctaacatcggtgc

SEQ ID NO: 3895366 - DNA, 25 bp, Homo sapien
cagacccgccgtagtataagcctaa

SEQ ID NO: 3895367 - DNA, 25 bp, Homo sapien
tctccttcagaacactggcctcccc

SEQ ID NO: 3895368 - DNA, 25 bp, Homo sapien
tctggcagggtgttgttctgagaca

SEQ ID NO: 3895369 - DNA, 25 bp, Homo sapien
cctggagaagggacggaggcgtgct

SEQ ID NO: 3895370 - DNA, 25 bp, Homo sapien
ggcgtgctgcccgaagtgtttgttc

SEQ ID NO: 3895371 - DNA, 25 bp, Homo sapien
agtccttatccaccggcttcatctg

SEQ ID NO: 3895372 - DNA, 25 bp, Homo sapien
aagaacgccagaaattcccagtcct

SEQ ID NO: 3895373 - DNA, 25 bp, Homo sapien
tcatctggacgctgtgttcgctgat

SEQ ID NO: 3895374 - DNA, 25 bp, Homo sapien
caccggcttcatctggacgctgtgt

SEQ ID NO: 3895375 - DNA, 25 bp, Homo sapien
gaaactgaggctccgcgatcatcta

SEQ ID NO: 3895376 - DNA, 25 bp, Homo sapien
taccacaagtttatccctaggcgcg

SEQ ID NO: 3895377 - DNA, 25 bp, Homo sapien
cctacaacgctctgtgaggcaggtt

SEQ ID NO: 3895378 - DNA, 25 bp, Homo sapien
gactcttcaagagtcgctgcgccgg

SEQ ID NO: 3895379 - DNA, 25 bp, Homo sapien
cgacctgaacgcagcgccttagacc

SEQ ID NO: 3895380 - DNA, 25 bp, Homo sapien
gacctgaacgcagcgccttagaccg

SEQ ID NO: 3895381 - DNA, 25 bp, Homo sapien
tacatgaggaaccagtaccgcaggg

SEQ ID NO: 3895382 - DNA, 25 bp, Homo sapien
gaggaaccagtaccgcagggcttgc

SEQ ID NO: 3895383 - DNA, 25 bp, Homo sapien
atgaggaaccagtaccgcagggctt

SEQ ID NO: 3895384 - DNA, 25 bp, Homo sapien
ctacatgaggaaccagtaccgcagg

SEQ ID NO: 3895385 - DNA, 25 bp, Homo sapien
gggtctatttcgagatttttcatca

SEQ ID NO: 3895386 - DNA, 25 bp, Homo sapien
tgtgaaaagggtctatttcgagatt

SEQ ID NO: 3895387 - DNA, 25 bp, Homo sapien
gtccttcaaagccttcgatttggct

SEQ ID NO: 3895388 - DNA, 25 bp, Homo sapien
ttcatcatttattctatcatatagc

SEQ ID NO: 3895389 - DNA, 25 bp, Homo sapien
gcgtcttggccacgggaagatgggt

SEQ ID NO: 3895390 - DNA, 25 bp, Homo sapien
ctctggagtcgcagcgtcttggcca

SEQ ID NO: 3895391 - DNA, 25 bp, Homo sapien
ccacgggaagatgggtgatgtgtgg

SEQ ID NO: 3895392 - DNA, 25 bp, Homo sapien
tctggagtcgcagcgtcttggccac

SEQ ID NO: 3895393 - DNA, 25 bp, Homo sapien
aagccagtctaacatgtgccttctt

SEQ ID NO: 3895394 - DNA, 25 bp, Homo sapien
tgcctcagttgcttgaagcgccaca

SEQ ID NO: 3895395 - DNA, 25 bp, Homo sapien
aggacgaggacaaccaggagtgcag

SEQ ID NO: 3895396 - DNA, 25 bp, Homo sapien
ctgcctcagttgcttgaagcgccac

SEQ ID NO: 3895397 - DNA, 25 bp, Homo sapien
aggagtgcagtctgtaggcgatcca

SEQ ID NO: 3895398 - DNA, 25 bp, Homo sapien
tgtcttccatgttggcgccgtaggg

SEQ ID NO: 3895399 - DNA, 25 bp, Homo sapien
tagaagtgtttcaccacgcgcaggg

SEQ ID NO: 3895400 - DNA, 25 bp, Homo sapien
tcacggcagcagacgctgtcttcca

SEQ ID NO: 3895401 - DNA, 25 bp, Homo sapien
gggcagacggtaacggacgtaatca

SEQ ID NO: 3895402 - DNA, 25 bp, Homo sapien
ctccttatccctgaaggttagcaac

SEQ ID NO: 3895403 - DNA, 25 bp, Homo sapien
ggctcagcttattgagaatcatctt

SEQ ID NO: 3895404 - DNA, 25 bp, Homo sapien
tcattggctcagcttattgagaatc

SEQ ID NO: 3895405 - DNA, 25 bp, Homo sapien
agggcactctgggatcggcacagat

SEQ ID NO: 3895406 - DNA, 25 bp, Homo sapien
ggccacggtcatcagagtaggctct

SEQ ID NO: 3895407 - DNA, 25 bp, Homo sapien
aaggccacggtcatcagagtaggct

SEQ ID NO: 3895408 - DNA, 25 bp, Homo sapien
caaggccacggtcatcagagtaggc

SEQ ID NO: 3895409 - DNA, 25 bp, Homo sapien
ccaaggccacggtcatcagagtagg

SEQ ID NO: 3895410 - DNA, 25 bp, Homo sapien
cttctggcggggagcagctataatg

SEQ ID NO: 3895411 - DNA, 25 bp, Homo sapien
gcttctggcggggagcagctataat

SEQ ID NO: 3895412 - DNA, 25 bp, Homo sapien
ggcttctggcggggagcagctataa

SEQ ID NO: 3895413 - DNA, 25 bp, Homo sapien
ggaggtgaccaagggtgacagccac

SEQ ID NO: 3895414 - DNA, 25 bp, Homo sapien
acagcacggaggtgaccaagggtga

SEQ ID NO: 3895415 - DNA, 25 bp, Homo sapien
cagaggatgggttagaggggtcagg

SEQ ID NO: 3895416 - DNA, 25 bp, Homo sapien
gcacggaggtgaccaagggtgacag

SEQ ID NO: 3895417 - DNA, 25 bp, Homo sapien
tcgctgatgggaacaggaccctctg

SEQ ID NO: 3895418 - DNA, 25 bp, Homo sapien
cgctgatgggaacaggaccctctga

SEQ ID NO: 3895419 - DNA, 25 bp, Homo sapien
tcatgggcagtaggcagattcgtcc

SEQ ID NO: 3895420 - DNA, 25 bp, Homo sapien
ggttcaaataccctgcagagcggca

SEQ ID NO: 3895421 - DNA, 25 bp, Homo sapien
ggtgtcagcaacatcccaggcaaag

SEQ ID NO: 3895422 - DNA, 25 bp, Homo sapien
tattggaggttggaggaccacccaa

SEQ ID NO: 3895423 - DNA, 25 bp, Homo sapien
gcggctagagccaggcggcagagct

SEQ ID NO: 3895424 - DNA, 25 bp, Homo sapien
ctgagggtgggcaagagtcccggcg

SEQ ID NO: 3895425 - DNA, 25 bp, Homo sapien
caggcggctagagccaggcggcaga

SEQ ID NO: 3895426 - DNA, 25 bp, Homo sapien
tgagggtgggcaagagtcccggcgg

SEQ ID NO: 3895427 - DNA, 25 bp, Homo sapien
cagaaggtggccaagcggagcagcc

SEQ ID NO: 3895428 - DNA, 25 bp, Homo sapien
gccacgacagagatatcggagccat

SEQ ID NO: 3895429 - DNA, 25 bp, Homo sapien
cagccacgacagagatatcggagcc

SEQ ID NO: 3895430 - DNA, 25 bp, Homo sapien
gaaggtggccaagcggagcagccac

SEQ ID NO: 3895431 - DNA, 25 bp, Homo sapien
ggcggtcgctggcaactggaaatct

SEQ ID NO: 3895432 - DNA, 25 bp, Homo sapien
gaaatctgtccagcgctgcatctgg

SEQ ID NO: 3895433 - DNA, 25 bp, Homo sapien
acacctggctcccttatgccaccca

SEQ ID NO: 3895434 - DNA, 25 bp, Homo sapien
acagccactttgctcgctgggccag

SEQ ID NO: 3895435 - DNA, 25 bp, Homo sapien
tgctcacggtcacataacaggactg

SEQ ID NO: 3895436 - DNA, 25 bp, Homo sapien
gaagacagcatgacgggtagacaca

SEQ ID NO: 3895437 - DNA, 25 bp, Homo sapien
gagaaaggttccaataatgcccagg

SEQ ID NO: 3895438 - DNA, 25 bp, Homo sapien
ccagggctgcgggttacacattaac

SEQ ID NO: 3895439 - DNA, 25 bp, Homo sapien
cccttgtcctacaggggctcccgag

SEQ ID NO: 3895440 - DNA, 25 bp, Homo sapien
aatgctctgcactgactcgtagctg

SEQ ID NO: 3895441 - DNA, 25 bp, Homo sapien
gagtgaatgcgtcagctcttggagt

SEQ ID NO: 3895442 - DNA, 25 bp, Homo sapien
tctttcttgccaggacttgagtggg

SEQ ID NO: 3895443 - DNA, 25 bp, Homo sapien
tatataaagtacagaagcctcctgc

SEQ ID NO: 3895444 - DNA, 25 bp, Homo sapien
tgttgcatttcgtcacaccgtggtg

SEQ ID NO: 3895445 - DNA, 25 bp, Homo sapien
gccgcatgatgcctggttctgttga

SEQ ID NO: 3895446 - DNA, 25 bp, Homo sapien
tcttgctgcacgtgatgttgcattt

SEQ ID NO: 3895447 - DNA, 25 bp, Homo sapien
tctgttgatagtggatgagcaaagc

SEQ ID NO: 3895448 - DNA, 25 bp, Homo sapien
ctcgccgatctgcttctcgaaggtg

SEQ ID NO: 3895449 - DNA, 25 bp, Homo sapien
ttgctccttcgggtcggcacagaac

SEQ ID NO: 3895450 - DNA, 25 bp, Homo sapien
catttcgagttagggcagcagcctg

SEQ ID NO: 3895451 - DNA, 25 bp, Homo sapien
ccagatgctgcatcgcgtccttgac

SEQ ID NO: 3895452 - DNA, 25 bp, Homo sapien
tactgctttcgcctgtggcttcggg

SEQ ID NO: 3895453 - DNA, 25 bp, Homo sapien
aactctgccacgtggcggcagtgga

SEQ ID NO: 3895454 - DNA, 25 bp, Homo sapien
agacgggaggcactcggaaaagctc

SEQ ID NO: 3895455 - DNA, 25 bp, Homo sapien
gaaggagtcggctccaggctactgc

SEQ ID NO: 3895456 - DNA, 25 bp, Homo sapien
acagagacgtgggccatgctgccag

SEQ ID NO: 3895457 - DNA, 25 bp, Homo sapien
ccacagagacgtgggccatgctgcc

SEQ ID NO: 3895458 - DNA, 25 bp, Homo sapien
accacagagacgtgggccatgctgc

SEQ ID NO: 3895459 - DNA, 25 bp, Homo sapien
cagagacgtgggccatgctgccagg

SEQ ID NO: 3895460 - DNA, 25 bp, Homo sapien
gacaggagtgataaggacgcccagc

SEQ ID NO: 3895461 - DNA, 25 bp, Homo sapien
cacgggcaccaggacatatgaatta

SEQ ID NO: 3895462 - DNA, 25 bp, Homo sapien
tgccatctttcgagggcagccctgg

SEQ ID NO: 3895463 - DNA, 25 bp, Homo sapien
catggatgggttcctcagccttagg

SEQ ID NO: 3895464 - DNA, 25 bp, Homo sapien
gctgtctgaatcaaacaactagaca

SEQ ID NO: 3895465 - DNA, 25 bp, Homo sapien
ctgggatggcgtcaaagggaacctc

SEQ ID NO: 3895466 - DNA, 25 bp, Homo sapien
aggtggagaatggtcaaggctggcc

SEQ ID NO: 3895467 - DNA, 25 bp, Homo sapien
tgtgcacctggaggatcccacctcc

SEQ ID NO: 3895468 - DNA, 25 bp, Homo sapien
caagagacacaatcaggttgcaggg

SEQ ID NO: 3895469 - DNA, 25 bp, Homo sapien
tacaaaatggcacagacgttggtga

SEQ ID NO: 3895470 - DNA, 25 bp, Homo sapien
gagcccgggctgtctcagtgactaa

SEQ ID NO: 3895471 - DNA, 25 bp, Homo sapien
tctaaggtgctctgctggtaaggac

SEQ ID NO: 3895472 - DNA, 25 bp, Homo sapien
gttttgaattcagctctcccatcag

SEQ ID NO: 3895473 - DNA, 25 bp, Homo sapien
atcagcaggcggtgacactgtgagc

SEQ ID NO: 3895474 - DNA, 25 bp, Homo sapien
catcagcaggcggtgacactgtgag

SEQ ID NO: 3895475 - DNA, 25 bp, Homo sapien
ggttttgaattcagctctcccatca

SEQ ID NO: 3895476 - DNA, 25 bp, Homo sapien
gagtcagtactggacgcctggtcag

SEQ ID NO: 3895477 - DNA, 25 bp, Homo sapien
caacggtgcttcgattcagtccaaa

SEQ ID NO: 3895478 - DNA, 25 bp, Homo sapien
tattagaattgaaaagcctccacgc

SEQ ID NO: 3895479 - DNA, 25 bp, Homo sapien
catgctttatctgcctccgagaggc

SEQ ID NO: 3895480 - DNA, 25 bp, Homo sapien
ggagcccaggagggagtctctgtgt

SEQ ID NO: 3895481 - DNA, 25 bp, Homo sapien
gcccaggagggagtctctgtgtgca

SEQ ID NO: 3895482 - DNA, 25 bp, Homo sapien
caggagcccaggagggagtctctgt

SEQ ID NO: 3895483 - DNA, 25 bp, Homo sapien
ctctgtgtgcaggtccctctgctca

SEQ ID NO: 3895484 - DNA, 25 bp, Homo sapien
gaccagggccagcatcttcagtggg

SEQ ID NO: 3895485 - DNA, 25 bp, Homo sapien
gtgaccagggccagcatcttcagtg

SEQ ID NO: 3895486 - DNA, 25 bp, Homo sapien
ctgcgtggatgtgctgcagagaagc

SEQ ID NO: 3895487 - DNA, 25 bp, Homo sapien
cgtggatgtgctgcagagaagcccc

SEQ ID NO: 3895488 - DNA, 25 bp, Homo sapien
cccttgaagtactccaggcagcact

SEQ ID NO: 3895489 - DNA, 25 bp, Homo sapien
tcccggcccacattggtccctcgag

SEQ ID NO: 3895490 - DNA, 25 bp, Homo sapien
ggtaccacgtcttcagctttctaag

SEQ ID NO: 3895491 - DNA, 25 bp, Homo sapien
ctaaggggaatggctcccttgaagt

SEQ ID NO: 3895492 - DNA, 25 bp, Homo sapien
tgttggggtccgaacagatggccct

SEQ ID NO: 3895493 - DNA, 25 bp, Homo sapien
ggggtccgaacagatggccctgccc

SEQ ID NO: 3895494 - DNA, 25 bp, Homo sapien
ttgcaggtatttaactgcattcttc

SEQ ID NO: 3895495 - DNA, 25 bp, Homo sapien
tttgcaggtatttaactgcattctt

SEQ ID NO: 3895496 - DNA, 25 bp, Homo sapien
tcccaggtagtcccgggagacagtc

SEQ ID NO: 3895497 - DNA, 25 bp, Homo sapien
cctttgtgcccatggctccagttca

SEQ ID NO: 3895498 - DNA, 25 bp, Homo sapien
tctgggccctttgtgcccatggctc

SEQ ID NO: 3895499 - DNA, 25 bp, Homo sapien
agacaaggggatgggatctccctca

SEQ ID NO: 3895500 - DNA, 25 bp, Homo sapien
gtgttcagagagaagccacggcccc

SEQ ID NO: 3895501 - DNA, 25 bp, Homo sapien
tgtgttcagagagaagccacggccc

SEQ ID NO: 3895502 - DNA, 25 bp, Homo sapien
gttcagagagaagccacggccccat

SEQ ID NO: 3895503 - DNA, 25 bp, Homo sapien
ctgtgttcagagagaagccacggcc

SEQ ID NO: 3895504 - DNA, 25 bp, Homo sapien
aatgcccgccacaaggtcctcggaa

SEQ ID NO: 3895505 - DNA, 25 bp, Homo sapien
gtcctcggaagagaaggacccgcgc

SEQ ID NO: 3895506 - DNA, 25 bp, Homo sapien
ggaaattgcccttctaaccgcagcc

SEQ ID NO: 3895507 - DNA, 25 bp, Homo sapien
ccacaaggtcctcggaagagaagga

SEQ ID NO: 3895508 - DNA, 25 bp, Homo sapien
ctcgttatcgctgtgcccgtactgg

SEQ ID NO: 3895509 - DNA, 25 bp, Homo sapien
taaacttgggttctatcatctgccc

SEQ ID NO: 3895510 - DNA, 25 bp, Homo sapien
actggttttatcaacctcgttatcg

SEQ ID NO: 3895511 - DNA, 25 bp, Homo sapien
caggcaagccagttcactggtttta

SEQ ID NO: 3895512 - DNA, 25 bp, Homo sapien
gagcccaggcatcgttgagcattaa

SEQ ID NO: 3895513 - DNA, 25 bp, Homo sapien
ggcagaactctgaacgacaatacgt

SEQ ID NO: 3895514 - DNA, 25 bp, Homo sapien
tagtgctgctgtgtatcaaaagacc

SEQ ID NO: 3895515 - DNA, 25 bp, Homo sapien
ggatagtcatccacgctcagtttgg

SEQ ID NO: 3895516 - DNA, 25 bp, Homo sapien
cacggcgacgcgaccggtagctacg

SEQ ID NO: 3895517 - DNA, 25 bp, Homo sapien
gtcgcccacggcgacgcgaccggta

SEQ ID NO: 3895518 - DNA, 25 bp, Homo sapien
tttggaagcgggcacgtcgcccacg

SEQ ID NO: 3895519 - DNA, 25 bp, Homo sapien
cgcgaccggtagctacgggaccacg

SEQ ID NO: 3895520 - DNA, 25 bp, Homo sapien
cgggcaggcatcgcagctgcaggag

SEQ ID NO: 3895521 - DNA, 25 bp, Homo sapien
gcaggcatcgcagctgcaggagcct

SEQ ID NO: 3895522 - DNA, 25 bp, Homo sapien
gcaggagcctccagcccgcccggcc

SEQ ID NO: 3895523 - DNA, 25 bp, Homo sapien
ggagcctccagcccgcccggccaag

SEQ ID NO: 3895524 - DNA, 25 bp, Homo sapien
tgaggctctgccaactccatgaaat

SEQ ID NO: 3895525 - DNA, 25 bp, Homo sapien
ctgaggctctgccaactccatgaaa

SEQ ID NO: 3895526 - DNA, 25 bp, Homo sapien
tgctctaaactcaaggttgggctcc

SEQ ID NO: 3895527 - DNA, 25 bp, Homo sapien
ttgtctccctgtgggaaaacagaat

SEQ ID NO: 3895528 - DNA, 25 bp, Homo sapien
tattcactatcctgactctactgag

SEQ ID NO: 3895529 - DNA, 25 bp, Homo sapien
tgccagctagcagaccaatcttatt

SEQ ID NO: 3895530 - DNA, 25 bp, Homo sapien
tgatctacctagcatcttgacctgt

SEQ ID NO: 3895531 - DNA, 25 bp, Homo sapien
gagactcctgtagaaccacttatcc

SEQ ID NO: 3895532 - DNA, 25 bp, Homo sapien
gggacattcaacagagaagaccctt

SEQ ID NO: 3895533 - DNA, 25 bp, Homo sapien
actttgggacacgaagtggtagcaa

SEQ ID NO: 3895534 - DNA, 25 bp, Homo sapien
tgctcatctgaagaccttagcccca

SEQ ID NO: 3895535 - DNA, 25 bp, Homo sapien
aagcatggaaggcacgcggcaccag

SEQ ID NO: 3895536 - DNA, 25 bp, Homo sapien
aagactctggatcaggtttttctgc

SEQ ID NO: 3895537 - DNA, 25 bp, Homo sapien
agaaaatgagttgggaggctgctgc

SEQ ID NO: 3895538 - DNA, 25 bp, Homo sapien
aactcaagggctgccgtcaggatgc

SEQ ID NO: 3895539 - DNA, 25 bp, Homo sapien
tgctgtccacccgtgggcgggcaca

SEQ ID NO: 3895540 - DNA, 25 bp, Homo sapien
tcaggatgcggtgctgcaactgctc

SEQ ID NO: 3895541 - DNA, 25 bp, Homo sapien
cccgtgggcgggcacaaactcaagg

SEQ ID NO: 3895542 - DNA, 25 bp, Homo sapien
tgagcctacagtggagtcagagcac

SEQ ID NO: 3895543 - DNA, 25 bp, Homo sapien
tgatctaatgatcgggtccctccat

SEQ ID NO: 3895544 - DNA, 25 bp, Homo sapien
gaggattctctacaacatggcctga

SEQ ID NO: 3895545 - DNA, 25 bp, Homo sapien
gctcatcttggttaggtggccccac

SEQ ID NO: 3895546 - DNA, 25 bp, Homo sapien
taggaccttgcctgatttgacctcg

SEQ ID NO: 3895547 - DNA, 25 bp, Homo sapien
tgacttagactttgacggcccatcc

SEQ ID NO: 3895548 - DNA, 25 bp, Homo sapien
taaatgtccgcgttccttgagagtc

SEQ ID NO: 3895549 - DNA, 25 bp, Homo sapien
gcccaaatgtgtatctctagtccag

SEQ ID NO: 3895550 - DNA, 25 bp, Homo sapien
gagtgggatctaggcttgaataaca

SEQ ID NO: 3895551 - DNA, 25 bp, Homo sapien
caaagccccttggtgtgtgtgcaag

SEQ ID NO: 3895552 - DNA, 25 bp, Homo sapien
tgttgcctgttcatcactagagcct

SEQ ID NO: 3895553 - DNA, 25 bp, Homo sapien
cagaaaagcggtgcccaagtgtagg

SEQ ID NO: 3895554 - DNA, 25 bp, Homo sapien
gcacacgtgtgagccgggtattgca

SEQ ID NO: 3895555 - DNA, 25 bp, Homo sapien
aaatgcagtattagctcactgccat

SEQ ID NO: 3895556 - DNA, 25 bp, Homo sapien
tcctcttctagcacacgtgtgagcc

SEQ ID NO: 3895557 - DNA, 25 bp, Homo sapien
atccttcccgaacatgctggctgct

SEQ ID NO: 3895558 - DNA, 25 bp, Homo sapien
ccggggccagtgctcaatgtatggg

SEQ ID NO: 3895559 - DNA, 25 bp, Homo sapien
gggccagtgctcaatgtatgggatc

SEQ ID NO: 3895560 - DNA, 25 bp, Homo sapien
ccagtgctcaatgtatgggatcagc

SEQ ID NO: 3895561 - DNA, 25 bp, Homo sapien
gccagtgctcaatgtatgggatcag

SEQ ID NO: 3895562 - DNA, 25 bp, Homo sapien
gctctggggcctggatatagacttg

SEQ ID NO: 3895563 - DNA, 25 bp, Homo sapien
tctggggcctggatatagacttggt

SEQ ID NO: 3895564 - DNA, 25 bp, Homo sapien
ctctggggcctggatatagacttgg

SEQ ID NO: 3895565 - DNA, 25 bp, Homo sapien
tggggcctggatatagacttggtac

SEQ ID NO: 3895566 - DNA, 25 bp, Homo sapien
gaggagtaagctctgctcacaggta

SEQ ID NO: 3895567 - DNA, 25 bp, Homo sapien
ggttctctgagaccagcatcttcac

SEQ ID NO: 3895568 - DNA, 25 bp, Homo sapien
cacaggtaatggtgcatagttgacc

SEQ ID NO: 3895569 - DNA, 25 bp, Homo sapien
tagcaatgctgactacagctgagga

SEQ ID NO: 3895570 - DNA, 25 bp, Homo sapien
ctggtccccagcgtaatgccacatg

SEQ ID NO: 3895571 - DNA, 25 bp, Homo sapien
ctggacgggatgttgtgagggagca

SEQ ID NO: 3895572 - DNA, 25 bp, Homo sapien
tccccagcgtaatgccacatgtcat

SEQ ID NO: 3895573 - DNA, 25 bp, Homo sapien
ggactggtccccagcgtaatgccac

SEQ ID NO: 3895574 - DNA, 25 bp, Homo sapien
tgtaaagaaacccacactaccgctg

SEQ ID NO: 3895575 - DNA, 25 bp, Homo sapien
tgatcacttagcaaagcaggccaag

SEQ ID NO: 3895576 - DNA, 25 bp, Homo sapien
tgaggcagttcctacccaaggccat

SEQ ID NO: 3895577 - DNA, 25 bp, Homo sapien
gattacaatacctgggcaaagctga

SEQ ID NO: 3895578 - DNA, 25 bp, Homo sapien
ttgcatcattaacccggttttccag

SEQ ID NO: 3895579 - DNA, 25 bp, Homo sapien
tggctcggcgggtgtaccagttaaa

SEQ ID NO: 3895580 - DNA, 25 bp, Homo sapien
tggagaggagtcctgcatcatcacc

SEQ ID NO: 3895581 - DNA, 25 bp, Homo sapien
aggaagcgccaagtgtcctcaaagt

SEQ ID NO: 3895582 - DNA, 25 bp, Homo sapien
tagaaggagtcagtgtcaggttccc

SEQ ID NO: 3895583 - DNA, 25 bp, Homo sapien
tatgccttctaaagagggttcccca

SEQ ID NO: 3895584 - DNA, 25 bp, Homo sapien
tgacctgaggagaataggtatgcct

SEQ ID NO: 3895585 - DNA, 25 bp, Homo sapien
gacaaatcaggaggcctatgagccc

SEQ ID NO: 3895586 - DNA, 25 bp, Homo sapien
gtcactgctgcacccatgagtcctt

SEQ ID NO: 3895587 - DNA, 25 bp, Homo sapien
actgctgcacccatgagtccttgca

SEQ ID NO: 3895588 - DNA, 25 bp, Homo sapien
gcacccatgagtccttgcaccagtg

SEQ ID NO: 3895589 - DNA, 25 bp, Homo sapien
atgagtccttgcaccagtgcctctc

SEQ ID NO: 3895590 - DNA, 25 bp, Homo sapien
atgtatcacagagccggaatgggag

SEQ ID NO: 3895591 - DNA, 25 bp, Homo sapien
ttttggaatcaagacactagggctg

SEQ ID NO: 3895592 - DNA, 25 bp, Homo sapien
ccattgtcagccttattattagatt

SEQ ID NO: 3895593 - DNA, 25 bp, Homo sapien
tattagattattgtttccaggttag

SEQ ID NO: 3895594 - DNA, 25 bp, Homo sapien
accagggtcccaggagtcagtgata

SEQ ID NO: 3895595 - DNA, 25 bp, Homo sapien
gggtcccaggagtcagtgatatctc

SEQ ID NO: 3895596 - DNA, 25 bp, Homo sapien
ccagggtcccaggagtcagtgatat

SEQ ID NO: 3895597 - DNA, 25 bp, Homo sapien
cagggtcccaggagtcagtgatatc

SEQ ID NO: 3895598 - DNA, 25 bp, Homo sapien
gccaagatccaggtttgcaaggtgg

SEQ ID NO: 3895599 - DNA, 25 bp, Homo sapien
aagatccaggtttgcaaggtggcag

SEQ ID NO: 3895600 - DNA, 25 bp, Homo sapien
ctggccaagatccaggtttgcaagg

SEQ ID NO: 3895601 - DNA, 25 bp, Homo sapien
caagatccaggtttgcaaggtggca

SEQ ID NO: 3895602 - DNA, 25 bp, Homo sapien
cgctggtttagacctgtcaagttct

SEQ ID NO: 3895603 - DNA, 25 bp, Homo sapien
acgctggtttagacctgtcaagttc

SEQ ID NO: 3895604 - DNA, 25 bp, Homo sapien
cgacgctggtttagacctgtcaagt

SEQ ID NO: 3895605 - DNA, 25 bp, Homo sapien
gacgctggtttagacctgtcaagtt

SEQ ID NO: 3895606 - DNA, 25 bp, Homo sapien
ggttaagacatgatcaaggtgccca

SEQ ID NO: 3895607 - DNA, 25 bp, Homo sapien
gaccagaacggtagcatcaaatgcc

SEQ ID NO: 3895608 - DNA, 25 bp, Homo sapien
aacaccaggttatgtggatggcacc

SEQ ID NO: 3895609 - DNA, 25 bp, Homo sapien
tcaccttgaggtggcgtcagacctt

SEQ ID NO: 3895610 - DNA, 25 bp, Homo sapien
gtgaggcagttttctgagggggctc

SEQ ID NO: 3895611 - DNA, 25 bp, Homo sapien
tgaggcagttttctgagggggctcc

SEQ ID NO: 3895612 - DNA, 25 bp, Homo sapien
taatcctgcaatgcatgctggtgtc

SEQ ID NO: 3895613 - DNA, 25 bp, Homo sapien
actaataatcctgcaatgcatgctg

SEQ ID NO: 3895614 - DNA, 25 bp, Homo sapien
aatgcatgctggtgtcatgtgacac

SEQ ID NO: 3895615 - DNA, 25 bp, Homo sapien
gcaatgcatgctggtgtcatgtgac

SEQ ID NO: 3895616 - DNA, 25 bp, Homo sapien
tgtaccagattcagctatctcggag

SEQ ID NO: 3895617 - DNA, 25 bp, Homo sapien
gcagaaacacttgcagttgtaaaca

SEQ ID NO: 3895618 - DNA, 25 bp, Homo sapien
tatctcggagggtagtttggcaaaa

SEQ ID NO: 3895619 - DNA, 25 bp, Homo sapien
gcatacgtccttcacttaacagtaa

SEQ ID NO: 3895620 - DNA, 25 bp, Homo sapien
aagtcagtcagcgaggcctccgcgg

SEQ ID NO: 3895621 - DNA, 25 bp, Homo sapien
gaactgccgagcgtcttctgcggcc

SEQ ID NO: 3895622 - DNA, 25 bp, Homo sapien
ggcttccgcaaagacgactcacagc

SEQ ID NO: 3895623 - DNA, 25 bp, Homo sapien
cgccaacaccggaagtcagtcagcg

SEQ ID NO: 3895624 - DNA, 25 bp, Homo sapien
agcctccgcgtctgctccgcggtga

SEQ ID NO: 3895625 - DNA, 25 bp, Homo sapien
ccagcctccgcgtctgctccgcggt

SEQ ID NO: 3895626 - DNA, 25 bp, Homo sapien
caccagcctccgcgtctgctccgcg

SEQ ID NO: 3895627 - DNA, 25 bp, Homo sapien
gggccaccagcctccgcgtctgctc

SEQ ID NO: 3895628 - DNA, 25 bp, Homo sapien
ctccgtgatccgcacggtaggctgg

SEQ ID NO: 3895629 - DNA, 25 bp, Homo sapien
tgatccgcacggtaggctggttggc

SEQ ID NO: 3895630 - DNA, 25 bp, Homo sapien
atccgcacggtaggctggttggcgt

SEQ ID NO: 3895631 - DNA, 25 bp, Homo sapien
ccgtgatccgcacggtaggctggtt

SEQ ID NO: 3895632 - DNA, 25 bp, Homo sapien
ttatgggaacctcagcgatgaagac

SEQ ID NO: 3895633 - DNA, 25 bp, Homo sapien
gggaacctcagcgatgaagaccctc

SEQ ID NO: 3895634 - DNA, 25 bp, Homo sapien
tgaagaccctccgaatcgaattggc

SEQ ID NO: 3895635 - DNA, 25 bp, Homo sapien
tcagcgatgaagaccctccgaatcg

SEQ ID NO: 3895636 - DNA, 25 bp, Homo sapien
tcagcaatgcatacccaggacaagg

SEQ ID NO: 3895637 - DNA, 25 bp, Homo sapien
cacagggtatggtcaagtctccagc

SEQ ID NO: 3895638 - DNA, 25 bp, Homo sapien
gctaaaactgggtacgcacggacat

SEQ ID NO: 3895639 - DNA, 25 bp, Homo sapien
tcagcccgaaccaaggactggaagg

SEQ ID NO: 3895640 - DNA, 25 bp, Homo sapien
ctgtgagcaatgaattcatcatgaa

SEQ ID NO: 3895641 - DNA, 25 bp, Homo sapien
cgagagtactgcagcttgtccacaa

SEQ ID NO: 3895642 - DNA, 25 bp, Homo sapien
ccgagagtactgcagcttgtccaca

SEQ ID NO: 3895643 - DNA, 25 bp, Homo sapien
agcttgtccacaatgtcatcactaa

SEQ ID NO: 3895644 - DNA, 25 bp, Homo sapien
ttgtccacaatgtcatcactaatga

SEQ ID NO: 3895645 - DNA, 25 bp, Homo sapien
tcattgcaccgcacatcgagggtga

SEQ ID NO: 3895646 - DNA, 25 bp, Homo sapien
tcgagggtgaactccaccgagcact

SEQ ID NO: 3895647 - DNA, 25 bp, Homo sapien
gacatgtcgcgtctggtcttcattg

SEQ ID NO: 3895648 - DNA, 25 bp, Homo sapien
gaggtctcgagacgtgacatgtcgc

SEQ ID NO: 3895649 - DNA, 25 bp, Homo sapien
gggtcattatctcggttccgggatg

SEQ ID NO: 3895650 - DNA, 25 bp, Homo sapien
cattatctcggttccgggatgtcac

SEQ ID NO: 3895651 - DNA, 25 bp, Homo sapien
tggggtcattatctcggttccggga

SEQ ID NO: 3895652 - DNA, 25 bp, Homo sapien
cattggggtcattatctcggttccg

SEQ ID NO: 3895653 - DNA, 25 bp, Homo sapien
gagtgccactgcaagaccacacaca

SEQ ID NO: 3895654 - DNA, 25 bp, Homo sapien
gaggcacaagtcagtcaagggccag

SEQ ID NO: 3895655 - DNA, 25 bp, Homo sapien
cacatctggaaaaacggtctaaagc

SEQ ID NO: 3895656 - DNA, 25 bp, Homo sapien
taaagccaattttcgaggagaccag

SEQ ID NO: 3895657 - DNA, 25 bp, Homo sapien
cctgcagtagggttccacttggcat

SEQ ID NO: 3895658 - DNA, 25 bp, Homo sapien
ttttggcataggctcgaagtctcag

SEQ ID NO: 3895659 - DNA, 25 bp, Homo sapien
cattcctcgggcttggggtacactg

SEQ ID NO: 3895660 - DNA, 25 bp, Homo sapien
cttggggtacactgtgtgcctcagg

SEQ ID NO: 3895661 - DNA, 25 bp, Homo sapien
ccacatctcagtcaacaacagccat

SEQ ID NO: 3895662 - DNA, 25 bp, Homo sapien
gccacatctcagtcaacaacagcca

SEQ ID NO: 3895663 - DNA, 25 bp, Homo sapien
acaggtcagcacaaggttgccactg

SEQ ID NO: 3895664 - DNA, 25 bp, Homo sapien
ggtcaaacacaggtcagcacaaggt

SEQ ID NO: 3895665 - DNA, 25 bp, Homo sapien
ctgaggtcaaacacaggtcagcaca

SEQ ID NO: 3895666 - DNA, 25 bp, Homo sapien
caaggttgccactgctccttttggg

SEQ ID NO: 3895667 - DNA, 25 bp, Homo sapien
cttgccgttggggtcatagggagcc

SEQ ID NO: 3895668 - DNA, 25 bp, Homo sapien
tcatagggagcctgcgactcatcct

SEQ ID NO: 3895669 - DNA, 25 bp, Homo sapien
agggagcctgcgactcatcctcatc

SEQ ID NO: 3895670 - DNA, 25 bp, Homo sapien
gggtcatagggagcctgcgactcat

SEQ ID NO: 3895671 - DNA, 25 bp, Homo sapien
caatggtttcaggacgcagagagcc

SEQ ID NO: 3895672 - DNA, 25 bp, Homo sapien
tatggttagcacatcactctggatc

SEQ ID NO: 3895673 - DNA, 25 bp, Homo sapien
ttcttcaatcctgagagggctgaca

SEQ ID NO: 3895674 - DNA, 25 bp, Homo sapien
actctggatctcgtggcttaattga

SEQ ID NO: 3895675 - DNA, 25 bp, Homo sapien
ggtactgatgtcctgccaagaagct

SEQ ID NO: 3895676 - DNA, 25 bp, Homo sapien
gaagctcaaccaacagtagactaga

SEQ ID NO: 3895677 - DNA, 25 bp, Homo sapien
gtctagttggttccctacaggtgca

SEQ ID NO: 3895678 - DNA, 25 bp, Homo sapien
tgggaatttgaagcgctagcaggcc

SEQ ID NO: 3895679 - DNA, 25 bp, Homo sapien
aaatatcatgtttatttggtgggga

SEQ ID NO: 3895680 - DNA, 25 bp, Homo sapien
ccccaccaaactaaatgatcaggtc

SEQ ID NO: 3895681 - DNA, 25 bp, Homo sapien
aggtcattggaggtgaaggggttca

SEQ ID NO: 3895682 - DNA, 25 bp, Homo sapien
acccccaccaaactaaatgatcagg

SEQ ID NO: 3895683 - DNA, 25 bp, Homo sapien
ccaccaaactaaatgatcaggtcat

SEQ ID NO: 3895684 - DNA, 25 bp, Homo sapien
tcctttcctttctgtactggatctc

SEQ ID NO: 3895685 - DNA, 25 bp, Homo sapien
tggttttctccaggctgcctaatta

SEQ ID NO: 3895686 - DNA, 25 bp, Homo sapien
gacaacttctgttaatcaataaata

SEQ ID NO: 3895687 - DNA, 25 bp, Homo sapien
gggccagagccttcattaaggagaa

SEQ ID NO: 3895688 - DNA, 25 bp, Homo sapien
tgttgactaccatgcagaagggcta

SEQ ID NO: 3895689 - DNA, 25 bp, Homo sapien
ggctggctcagctaagtggcacgat

SEQ ID NO: 3895690 - DNA, 25 bp, Homo sapien
caggaggatgataaagcacgcggcc

SEQ ID NO: 3895691 - DNA, 25 bp, Homo sapien
gaatgaccacccagagggatgagct

SEQ ID NO: 3895692 - DNA, 25 bp, Homo sapien
ggaagccctccagctcctctccacc

SEQ ID NO: 3895693 - DNA, 25 bp, Homo sapien
agccctccagctcctctccacccat

SEQ ID NO: 3895694 - DNA, 25 bp, Homo sapien
gggaagccctccagctcctctccac

SEQ ID NO: 3895695 - DNA, 25 bp, Homo sapien
ctgggaagccctccagctcctctcc

SEQ ID NO: 3895696 - DNA, 25 bp, Homo sapien
tttgcttccttcgagctgtcggtca

SEQ ID NO: 3895697 - DNA, 25 bp, Homo sapien
tctttgcttccttcgagctgtcggt

SEQ ID NO: 3895698 - DNA, 25 bp, Homo sapien
ttgcttccttcgagctgtcggtcat

SEQ ID NO: 3895699 - DNA, 25 bp, Homo sapien
cctctttgcttccttcgagctgtcg

SEQ ID NO: 3895700 - DNA, 25 bp, Homo sapien
gctgccgtctcagctgctgtctcgg

SEQ ID NO: 3895701 - DNA, 25 bp, Homo sapien
gtctcagctgctgtctcggctgctg

SEQ ID NO: 3895702 - DNA, 25 bp, Homo sapien
tgccgctgccgtctcagctgctgtc

SEQ ID NO: 3895703 - DNA, 25 bp, Homo sapien
gagaagctgccgctgccgtctcagc

SEQ ID NO: 3895704 - DNA, 25 bp, Homo sapien
gagagtggggagaggcccggaggag

SEQ ID NO: 3895705 - DNA, 25 bp, Homo sapien
tggggagaggcccggaggaggctga

SEQ ID NO: 3895706 - DNA, 25 bp, Homo sapien
ggggagaggcccggaggaggctgac

SEQ ID NO: 3895707 - DNA, 25 bp, Homo sapien
agtggggagaggcccggaggaggct

SEQ ID NO: 3895708 - DNA, 25 bp, Homo sapien
tctgtgcccacctggacatgggtat

SEQ ID NO: 3895709 - DNA, 25 bp, Homo sapien
acctggacatgggtatggccagtgc

SEQ ID NO: 3895710 - DNA, 25 bp, Homo sapien
ctggacatgggtatggccagtgccc

SEQ ID NO: 3895711 - DNA, 25 bp, Homo sapien
caggatatcaccaggtctgtgccca

SEQ ID NO: 3895712 - DNA, 25 bp, Homo sapien
ggaagctaagattcgagacccatgc

SEQ ID NO: 3895713 - DNA, 25 bp, Homo sapien
tgcacctgctccagattgccaagca

SEQ ID NO: 3895714 - DNA, 25 bp, Homo sapien
gatctctacattgccccagatgtgg

SEQ ID NO: 3895715 - DNA, 25 bp, Homo sapien
gacccatgcctaaccacttcttaat

SEQ ID NO: 3895716 - DNA, 25 bp, Homo sapien
catggtaacatagccatgcaggaca

SEQ ID NO: 3895717 - DNA, 25 bp, Homo sapien
catgagtgcaaggtggtaattggct

SEQ ID NO: 3895718 - DNA, 25 bp, Homo sapien
tagttgccgcaaaagtagataagga

SEQ ID NO: 3895719 - DNA, 25 bp, Homo sapien
gcaggattacctggagaagcccatc

SEQ ID NO: 3895720 - DNA, 25 bp, Homo sapien
tctcctccaagaactggctccggcc

SEQ ID NO: 3895721 - DNA, 25 bp, Homo sapien
gccctgtgcagagtctcctccaaga

SEQ ID NO: 3895722 - DNA, 25 bp, Homo sapien
gagtctcctccaagaactggctccg

SEQ ID NO: 3895723 - DNA, 25 bp, Homo sapien
ccctgtgcagagtctcctccaagaa

SEQ ID NO: 3895724 - DNA, 25 bp, Homo sapien
ttctgcaaagtcagaaggcacaggc

SEQ ID NO: 3895725 - DNA, 25 bp, Homo sapien
caggaaaagggcaccacagtgatcc

SEQ ID NO: 3895726 - DNA, 25 bp, Homo sapien
ggcacaggcacaggaaaagggcacc

SEQ ID NO: 3895727 - DNA, 25 bp, Homo sapien
ctgttgttgcattctgcaaagtcag

SEQ ID NO: 3895728 - DNA, 25 bp, Homo sapien
aaaactgagctccggcccctggaca

SEQ ID NO: 3895729 - DNA, 25 bp, Homo sapien
tccatgtagctcaggagttcttccc

SEQ ID NO: 3895730 - DNA, 25 bp, Homo sapien
aaactgagctccggcccctggacac

SEQ ID NO: 3895731 - DNA, 25 bp, Homo sapien
ttctccatgtagctcaggagttctt

SEQ ID NO: 3895732 - DNA, 25 bp, Homo sapien
ctaaccctgacccactgattcaagg

SEQ ID NO: 3895733 - DNA, 25 bp, Homo sapien
gagtctacattagactaaccctgac

SEQ ID NO: 3895734 - DNA, 25 bp, Homo sapien
tgctgaagaaatgcacagttaagag

SEQ ID NO: 3895735 - DNA, 25 bp, Homo sapien
gcacagttaagagtctacattagac

SEQ ID NO: 3895736 - DNA, 25 bp, Homo sapien
tcagcgagaggccagagaagtcaca

SEQ ID NO: 3895737 - DNA, 25 bp, Homo sapien
tgtctgcaaggtcaggttgtagcct

SEQ ID NO: 3895738 - DNA, 25 bp, Homo sapien
tggtcagcgagaggccagagaagtc

SEQ ID NO: 3895739 - DNA, 25 bp, Homo sapien
gtcagcgagaggccagagaagtcac

SEQ ID NO: 3895740 - DNA, 25 bp, Homo sapien
atggcgtgctgaccccgggcatgct

SEQ ID NO: 3895741 - DNA, 25 bp, Homo sapien
gggaactgcatggcgtgctgacccc

SEQ ID NO: 3895742 - DNA, 25 bp, Homo sapien
cagctcggcggggaactgcatggcg

SEQ ID NO: 3895743 - DNA, 25 bp, Homo sapien
gcgggtcttgcaggcgtcccgggtc

SEQ ID NO: 3895744 - DNA, 25 bp, Homo sapien
gctgatgttcacaggatccctgagg

SEQ ID NO: 3895745 - DNA, 25 bp, Homo sapien
ccctgaggttgttcacgtgcccatg

SEQ ID NO: 3895746 - DNA, 25 bp, Homo sapien
caggctttggttgtgccagaagctg

SEQ ID NO: 3895747 - DNA, 25 bp, Homo sapien
tgggcccccaggacgtagttattca

SEQ ID NO: 3895748 - DNA, 25 bp, Homo sapien
gttccacaggtttgggtctagtcaa

SEQ ID NO: 3895749 - DNA, 25 bp, Homo sapien
ccagtgttcaacaggagagtcacag

SEQ ID NO: 3895750 - DNA, 25 bp, Homo sapien
gatttccaagatggttccacaggtt

SEQ ID NO: 3895751 - DNA, 25 bp, Homo sapien
ttgggtctagtcaaaccagtgttca

SEQ ID NO: 3895752 - DNA, 25 bp, Homo sapien
gacacaggtagtcacggaagaccat

SEQ ID NO: 3895753 - DNA, 25 bp, Homo sapien
ggctccgggcttttcaggaatgcca

SEQ ID NO: 3895754 - DNA, 25 bp, Homo sapien
tcaacacgagtagggcaagggcatt

SEQ ID NO: 3895755 - DNA, 25 bp, Homo sapien
cccttagaggacgtgttggatttca

SEQ ID NO: 3895756 - DNA, 25 bp, Homo sapien
tgctctgtacgacagccctcagggc

SEQ ID NO: 3895757 - DNA, 25 bp, Homo sapien
ttgcagcggcagagcacctgagagt

SEQ ID NO: 3895758 - DNA, 25 bp, Homo sapien
ggctgctctgtacgacagccctcag

SEQ ID NO: 3895759 - DNA, 25 bp, Homo sapien
agggctgctctgtacgacagccctc

SEQ ID NO: 3895760 - DNA, 25 bp, Homo sapien
taagaggtgccagcaactctgcagg

SEQ ID NO: 3895761 - DNA, 25 bp, Homo sapien
cagcaggactgtgatcagcgaggcc

SEQ ID NO: 3895762 - DNA, 25 bp, Homo sapien
gagatgtacgtaagaggtgccagca

SEQ ID NO: 3895763 - DNA, 25 bp, Homo sapien
tcagcgaggccacgatggagatgct

SEQ ID NO: 3895764 - DNA, 25 bp, Homo sapien
tagatgttgtagacacgcccgagga

SEQ ID NO: 3895765 - DNA, 25 bp, Homo sapien
cgggcacaggagacattgcgaatgc

SEQ ID NO: 3895766 - DNA, 25 bp, Homo sapien
caagcttgaacacatatctgcggat

SEQ ID NO: 3895767 - DNA, 25 bp, Homo sapien
ggttgaagccctcgatggccatcca

SEQ ID NO: 3895768 - DNA, 25 bp, Homo sapien
ggaggcgaggagagatgatgtgctt

SEQ ID NO: 3895769 - DNA, 25 bp, Homo sapien
aggaggcgaggagagatgatgtgct

SEQ ID NO: 3895770 - DNA, 25 bp, Homo sapien
ctggaagtctgaggaggcgaggaga

SEQ ID NO: 3895771 - DNA, 25 bp, Homo sapien
tgtgcagggtccgtataccgagctc

SEQ ID NO: 3895772 - DNA, 25 bp, Homo sapien
agggtccgtataccgagctcttgac

SEQ ID NO: 3895773 - DNA, 25 bp, Homo sapien
ggattgtgcagggtccgtataccga

SEQ ID NO: 3895774 - DNA, 25 bp, Homo sapien
cattctcccagctgtcgaagacggg

SEQ ID NO: 3895775 - DNA, 25 bp, Homo sapien
tgaccaggacactgtgcaccacggg

SEQ ID NO: 3895776 - DNA, 25 bp, Homo sapien
agcccatgaccaggacactgtgcac

SEQ ID NO: 3895777 - DNA, 25 bp, Homo sapien
gcaccacggggctccgcacccagca

SEQ ID NO: 3895778 - DNA, 25 bp, Homo sapien
ccatgaccaggacactgtgcaccac

SEQ ID NO: 3895779 - DNA, 25 bp, Homo sapien
tgacagtgtcatggcaggccctgac

SEQ ID NO: 3895780 - DNA, 25 bp, Homo sapien
cgtagagcgagtttaagatggtgaa

SEQ ID NO: 3895781 - DNA, 25 bp, Homo sapien
gggcagcaggaagacgccaaaagaa

SEQ ID NO: 3895782 - DNA, 25 bp, Homo sapien
gcagcacggtgaggcccagcacagt

SEQ ID NO: 3895783 - DNA, 25 bp, Homo sapien
ctgcttctgagcggcaccgctggga

SEQ ID NO: 3895784 - DNA, 25 bp, Homo sapien
tctgcttctgagcggcaccgctggg

SEQ ID NO: 3895785 - DNA, 25 bp, Homo sapien
ctctgcttctgagcggcaccgctgg

SEQ ID NO: 3895786 - DNA, 25 bp, Homo sapien
aaggcctctatctgtgccttggcct

SEQ ID NO: 3895787 - DNA, 25 bp, Homo sapien
gaaatgggtcactcagtaggcgcag

SEQ ID NO: 3895788 - DNA, 25 bp, Homo sapien
aaaactgcgggatgggctactggtc

SEQ ID NO: 3895789 - DNA, 25 bp, Homo sapien
caggtaaggttggatctgccccgga

SEQ ID NO: 3895790 - DNA, 25 bp, Homo sapien
tcgaggtcatcaaaacggcccagtg

SEQ ID NO: 3895791 - DNA, 25 bp, Homo sapien
cacacccagtgagacatttccagga

SEQ ID NO: 3895792 - DNA, 25 bp, Homo sapien
tttggctggcaataggaacacctca

SEQ ID NO: 3895793 - DNA, 25 bp, Homo sapien
gataccctgctacatgtgaatccag

SEQ ID NO: 3895794 - DNA, 25 bp, Homo sapien
ttagagagtgaagagtccacacccc

SEQ ID NO: 3895795 - DNA, 25 bp, Homo sapien
ggctattctgtattccgtccctggg

SEQ ID NO: 3895796 - DNA, 25 bp, Homo sapien
gctcatctttgcgattgcatcttgt

SEQ ID NO: 3895797 - DNA, 25 bp, Homo sapien
aagcccattgcttcgtctcactctg

SEQ ID NO: 3895798 - DNA, 25 bp, Homo sapien
gactctcactcggtggcttactttg

SEQ ID NO: 3895799 - DNA, 25 bp, Homo sapien
actcttcttagaaacagtgccccct

SEQ ID NO: 3895800 - DNA, 25 bp, Homo sapien
ttatcattgctagggaggaaatggg

SEQ ID NO: 3895801 - DNA, 25 bp, Homo sapien
ttcaaaaatacggtggtatcatcac

SEQ ID NO: 3895802 - DNA, 25 bp, Homo sapien
cgggagtgtttcctcttatcattgc

SEQ ID NO: 3895803 - DNA, 25 bp, Homo sapien
cagggatgtcatcgccacccacagg

SEQ ID NO: 3895804 - DNA, 25 bp, Homo sapien
gatggcagggatgtcatcgccaccc

SEQ ID NO: 3895805 - DNA, 25 bp, Homo sapien
tcatagatggcagggatgtcatcgc

SEQ ID NO: 3895806 - DNA, 25 bp, Homo sapien
cctcatagatggcagggatgtcatc

SEQ ID NO: 3895807 - DNA, 25 bp, Homo sapien
cataagcagacatctcaccttttgg

SEQ ID NO: 3895808 - DNA, 25 bp, Homo sapien
ggcataagcagacatctcacctttt

SEQ ID NO: 3895809 - DNA, 25 bp, Homo sapien
taagcagacatctcaccttttggtt

SEQ ID NO: 3895810 - DNA, 25 bp, Homo sapien
gaaggcataagcagacatctcacct

SEQ ID NO: 3895811 - DNA, 25 bp, Homo sapien
cctcggtcatttcgtcaggcttaga

SEQ ID NO: 3895812 - DNA, 25 bp, Homo sapien
tctgtgaaattgacaagaacctctg

SEQ ID NO: 3895813 - DNA, 25 bp, Homo sapien
cgtagtgatgtcaggcagctttgca

SEQ ID NO: 3895814 - DNA, 25 bp, Homo sapien
cagacttcgagtcagcaacaccctt

SEQ ID NO: 3895815 - DNA, 25 bp, Homo sapien
gtccttgggttctctgggtctcagc

SEQ ID NO: 3895816 - DNA, 25 bp, Homo sapien
aagcagaggctgctggatgagccca

SEQ ID NO: 3895817 - DNA, 25 bp, Homo sapien
ttgggagatgctgccctccatccgt

SEQ ID NO: 3895818 - DNA, 25 bp, Homo sapien
tcttcgtggacttcagcacctctct

SEQ ID NO: 3895819 - DNA, 25 bp, Homo sapien
ttgcaggggccaacctgacccttag

SEQ ID NO: 3895820 - DNA, 25 bp, Homo sapien
tctcgccccatttccggctgcccca

SEQ ID NO: 3895821 - DNA, 25 bp, Homo sapien
tgggcaggtccctcaccggcctgtg

SEQ ID NO: 3895822 - DNA, 25 bp, Homo sapien
ggtgtccttgcaggggccaacctga

SEQ ID NO: 3895823 - DNA, 25 bp, Homo sapien
gaaggggccggggatcactctgctt

SEQ ID NO: 3895824 - DNA, 25 bp, Homo sapien
ggggccggggatcactctgcttcct

SEQ ID NO: 3895825 - DNA, 25 bp, Homo sapien
tctgtcgcctcccagggccagtctc

SEQ ID NO: 3895826 - DNA, 25 bp, Homo sapien
ggccggggatcactctgcttcctca

SEQ ID NO: 3895827 - DNA, 25 bp, Homo sapien
tgacggacgatatatgtgagtcatg

SEQ ID NO: 3895828 - DNA, 25 bp, Homo sapien
tgactggggatgacggacgatatat

SEQ ID NO: 3895829 - DNA, 25 bp, Homo sapien
cttgactggggatgacggacgatat

SEQ ID NO: 3895830 - DNA, 25 bp, Homo sapien
gggatgacggacgatatatgtgagt

SEQ ID NO: 3895831 - DNA, 25 bp, Homo sapien
agcccatctcctacggcagggcagg

SEQ ID NO: 3895832 - DNA, 25 bp, Homo sapien
agtgagctggagagcgtgggaggct

SEQ ID NO: 3895833 - DNA, 25 bp, Homo sapien
gcggctggaccacctttcaggatcc

SEQ ID NO: 3895834 - DNA, 25 bp, Homo sapien
agaggcttaacctgccagccctggt

SEQ ID NO: 3895835 - DNA, 25 bp, Homo sapien
tgctgtccagcccttgtttgggtac

SEQ ID NO: 3895836 - DNA, 25 bp, Homo sapien
ctgctgtccagcccttgtttgggta

SEQ ID NO: 3895837 - DNA, 25 bp, Homo sapien
atcccagtccggctggaggacggtc

SEQ ID NO: 3895838 - DNA, 25 bp, Homo sapien
ttctgcacaggatggcggaacccgc

SEQ ID NO: 3895839 - DNA, 25 bp, Homo sapien
gaacccgcatcccagtccggctgga

SEQ ID NO: 3895840 - DNA, 25 bp, Homo sapien
ggacggtccgcagtggtccctccat

SEQ ID NO: 3895841 - DNA, 25 bp, Homo sapien
ctgtccaccggtgcccggaagcatg

SEQ ID NO: 3895842 - DNA, 25 bp, Homo sapien
ccgcagaacttttcaggccaccagg

SEQ ID NO: 3895843 - DNA, 25 bp, Homo sapien
cgagtctgggaagccaagccagagc

SEQ ID NO: 3895844 - DNA, 25 bp, Homo sapien
caagcataccacaaactgcctgagc

SEQ ID NO: 3895845 - DNA, 25 bp, Homo sapien
aggatctccatgaagagacactggc

SEQ ID NO: 3895846 - DNA, 25 bp, Homo sapien
tgcaggatctccatgaagagacact

SEQ ID NO: 3895847 - DNA, 25 bp, Homo sapien
gctgcaggatctccatgaagagaca

SEQ ID NO: 3895848 - DNA, 25 bp, Homo sapien
caggatctccatgaagagacactgg

SEQ ID NO: 3895849 - DNA, 25 bp, Homo sapien
tctgttgcatcaaaggatcctgtgc

SEQ ID NO: 3895850 - DNA, 25 bp, Homo sapien
caaaggatcctgtgcttaaagggag

SEQ ID NO: 3895851 - DNA, 25 bp, Homo sapien
cctgtgcttaaagggagctggcaag

SEQ ID NO: 3895852 - DNA, 25 bp, Homo sapien
gaaggcggcctctgttgcatcaaag

SEQ ID NO: 3895853 - DNA, 25 bp, Homo sapien
tagatacattaagaacgtgcgtggc

SEQ ID NO: 3895854 - DNA, 25 bp, Homo sapien
caccttttttcaagaggacagagac

SEQ ID NO: 3895855 - DNA, 25 bp, Homo sapien
gggttcttgtttgcaggcagtagcc

SEQ ID NO: 3895856 - DNA, 25 bp, Homo sapien
ggctggtgggtcaatgtcccccgac

SEQ ID NO: 3895857 - DNA, 25 bp, Homo sapien
ccagcctgtgtgacagagcgagacc

SEQ ID NO: 3895858 - DNA, 25 bp, Homo sapien
ggaggttacgatgagccaagatcac

SEQ ID NO: 3895859 - DNA, 25 bp, Homo sapien
ctccagcctgtgtgacagagcgaga

SEQ ID NO: 3895860 - DNA, 25 bp, Homo sapien
cgggaggtggaggttacgatgagcc

SEQ ID NO: 3895861 - DNA, 25 bp, Homo sapien
tgtgccattccattaaagttggccg

SEQ ID NO: 3895862 - DNA, 25 bp, Homo sapien
tcccaggtgtgccattccattaaag

SEQ ID NO: 3895863 - DNA, 25 bp, Homo sapien
tccattaaagttggccgtggccagc

SEQ ID NO: 3895864 - DNA, 25 bp, Homo sapien
cattccattaaagttggccgtggcc

SEQ ID NO: 3895865 - DNA, 25 bp, Homo sapien
cttctggtccaaccaagtgcttgag

SEQ ID NO: 3895866 - DNA, 25 bp, Homo sapien
gcttctggtccaaccaagtgcttga

SEQ ID NO: 3895867 - DNA, 25 bp, Homo sapien
ttctggtccaaccaagtgcttgagc

SEQ ID NO: 3895868 - DNA, 25 bp, Homo sapien
ggcttctggtccaaccaagtgcttg

SEQ ID NO: 3895869 - DNA, 25 bp, Homo sapien
gtgtgtgtgcccgtgcatgactgtg

SEQ ID NO: 3895870 - DNA, 25 bp, Homo sapien
ccatgcatgaatgtccttgtgtgca

SEQ ID NO: 3895871 - DNA, 25 bp, Homo sapien
gtgtgtgtgcccatgcatgaatgtc

SEQ ID NO: 3895872 - DNA, 25 bp, Homo sapien
gagtgtgtgcctgagcatgagtgtg

SEQ ID NO: 3895873 - DNA, 25 bp, Homo sapien
gtctcctgccgggaagacccacgaa

SEQ ID NO: 3895874 - DNA, 25 bp, Homo sapien
cgtgtggagccacgagtcaccgctg

SEQ ID NO: 3895875 - DNA, 25 bp, Homo sapien
cctggacggctctgggattaaccct

SEQ ID NO: 3895876 - DNA, 25 bp, Homo sapien
gggacctgagtcacttccgtgtgga

SEQ ID NO: 3895877 - DNA, 25 bp, Homo sapien
agatccccagcgctacagggcctca

SEQ ID NO: 3895878 - DNA, 25 bp, Homo sapien
tgtctctgcctctggagccgcagat

SEQ ID NO: 3895879 - DNA, 25 bp, Homo sapien
tacagggcctcagccatcaggcgct

SEQ ID NO: 3895880 - DNA, 25 bp, Homo sapien
atcaggcgctcagtaccaaccacgg

SEQ ID NO: 3895881 - DNA, 25 bp, Homo sapien
tgaaggacaaagcagaaccaccgtg

SEQ ID NO: 3895882 - DNA, 25 bp, Homo sapien
ggacaaagcagaaccaccgtgtcac

SEQ ID NO: 3895883 - DNA, 25 bp, Homo sapien
cgtgtcacttcagccctcctggatt

SEQ ID NO: 3895884 - DNA, 25 bp, Homo sapien
agcagaaccaccgtgtcacttcagc

SEQ ID NO: 3895885 - DNA, 25 bp, Homo sapien
aaagtgagccttcactgtcagtagg

SEQ ID NO: 3895886 - DNA, 25 bp, Homo sapien
agtgagccttcactgtcagtaggca

SEQ ID NO: 3895887 - DNA, 25 bp, Homo sapien
tcaaagtgagccttcactgtcagta

SEQ ID NO: 3895888 - DNA, 25 bp, Homo sapien
gagccttcactgtcagtaggcatgg

SEQ ID NO: 3895889 - DNA, 25 bp, Homo sapien
tagtgggagacgtgcattccctcct

SEQ ID NO: 3895890 - DNA, 25 bp, Homo sapien
tggctgtacagaggttgctggataa

SEQ ID NO: 3895891 - DNA, 25 bp, Homo sapien
tggtcagccagggagcacctgatcc

SEQ ID NO: 3895892 - DNA, 25 bp, Homo sapien
cctccaggtagtgggagacgtgcat

SEQ ID NO: 3895893 - DNA, 25 bp, Homo sapien
tgagacctagctcagaggacacctc

SEQ ID NO: 3895894 - DNA, 25 bp, Homo sapien
gaatctggcatgagggttctacctg

SEQ ID NO: 3895895 - DNA, 25 bp, Homo sapien
tgtgtaagtcactcaaaatcgggct

SEQ ID NO: 3895896 - DNA, 25 bp, Homo sapien
tgcccgctgcaggaccttgtgtaag

SEQ ID NO: 3895897 - DNA, 25 bp, Homo sapien
tttcctccgacggagtcactcttgg

SEQ ID NO: 3895898 - DNA, 25 bp, Homo sapien
acggagtcactcttggaagtcacca

SEQ ID NO: 3895899 - DNA, 25 bp, Homo sapien
tccgacggagtcactcttggaagtc

SEQ ID NO: 3895900 - DNA, 25 bp, Homo sapien
tcctccgacggagtcactcttggaa

SEQ ID NO: 3895901 - DNA, 25 bp, Homo sapien
caggaacagtgtcgtctgcagcagc

SEQ ID NO: 3895902 - DNA, 25 bp, Homo sapien
aacagtgtcgtctgcagcagcgact

SEQ ID NO: 3895903 - DNA, 25 bp, Homo sapien
ggaacagtgtcgtctgcagcagcga

SEQ ID NO: 3895904 - DNA, 25 bp, Homo sapien
tcagcaggaacagtgtcgtctgcag

SEQ ID NO: 3895905 - DNA, 25 bp, Homo sapien
cgtggcaggggctgaccagaggcat

SEQ ID NO: 3895906 - DNA, 25 bp, Homo sapien
accccgtggcaggggctgaccagag

SEQ ID NO: 3895907 - DNA, 25 bp, Homo sapien
cccgtggcaggggctgaccagaggc

SEQ ID NO: 3895908 - DNA, 25 bp, Homo sapien
ctgcagatgggaccccgtggcaggg

SEQ ID NO: 3895909 - DNA, 25 bp, Homo sapien
gaagatgtaatctcccagcatgtcg

SEQ ID NO: 3895910 - DNA, 25 bp, Homo sapien
tttgtcactcagcaagaagtcacgc

SEQ ID NO: 3895911 - DNA, 25 bp, Homo sapien
cagcatgtcggttccagtagaggca

SEQ ID NO: 3895912 - DNA, 25 bp, Homo sapien
gaagtcacgcttgccatagagaaga

SEQ ID NO: 3895913 - DNA, 25 bp, Homo sapien
gctgatgttctgagggctccaccag

SEQ ID NO: 3895914 - DNA, 25 bp, Homo sapien
aagtggctaacagcggggggccctg

SEQ ID NO: 3895915 - DNA, 25 bp, Homo sapien
tccaccaggaggtgacagaagtggc

SEQ ID NO: 3895916 - DNA, 25 bp, Homo sapien
gagaaggtgaagctggcggcactgg

SEQ ID NO: 3895917 - DNA, 25 bp, Homo sapien
ttgaatgcataaccgagaaagcctg

SEQ ID NO: 3895918 - DNA, 25 bp, Homo sapien
ggagggtatactttctgtgccactg

SEQ ID NO: 3895919 - DNA, 25 bp, Homo sapien
taaggcggccgactaaggtgtctcc

SEQ ID NO: 3895920 - DNA, 25 bp, Homo sapien
ggttgtgtcttacagaacccgccag

SEQ ID NO: 3895921 - DNA, 25 bp, Homo sapien
tgagctcgcacatgtccaccgaggc

SEQ ID NO: 3895922 - DNA, 25 bp, Homo sapien
ctccttgaggccttctggggatgct

SEQ ID NO: 3895923 - DNA, 25 bp, Homo sapien
cgaggcattgtgagcggccgtgtgg

SEQ ID NO: 3895924 - DNA, 25 bp, Homo sapien
ggggatgcttcaggaactggctgag

SEQ ID NO: 3895925 - DNA, 25 bp, Homo sapien
gcgttgatccggtcctcctcgaagg

SEQ ID NO: 3895926 - DNA, 25 bp, Homo sapien
cagaggtcagtttcgactccaggct

SEQ ID NO: 3895927 - DNA, 25 bp, Homo sapien
tcctgccgggagtggatgtgcaggt

SEQ ID NO: 3895928 - DNA, 25 bp, Homo sapien
gaaggacaccatgtcccccatgaat

SEQ ID NO: 3895929 - DNA, 25 bp, Homo sapien
ctctggaagagtgttcgaggcagca

SEQ ID NO: 3895930 - DNA, 25 bp, Homo sapien
ccccgctccggcctttcgtcctctg

SEQ ID NO: 3895931 - DNA, 25 bp, Homo sapien
tgaagtccaccaggaggagtctctt

SEQ ID NO: 3895932 - DNA, 25 bp, Homo sapien
tcgtcctctggaagagtgttcgagg

SEQ ID NO: 3895933 - DNA, 25 bp, Homo sapien
gctggtgctggaaagtgagcaccac

SEQ ID NO: 3895934 - DNA, 25 bp, Homo sapien
acgggctccgtgaggttggctactt

SEQ ID NO: 3895935 - DNA, 25 bp, Homo sapien
ggtgttctgtaccacaatccccaag

SEQ ID NO: 3895936 - DNA, 25 bp, Homo sapien
gaggttggctactttggtgttctgt

SEQ ID NO: 3895937 - DNA, 25 bp, Homo sapien
tcttcaacccagaacacacattgca

SEQ ID NO: 3895938 - DNA, 25 bp, Homo sapien
tcaacccagaacacacattgcagag

SEQ ID NO: 3895939 - DNA, 25 bp, Homo sapien
cccagaacacacattgcagagtcac

SEQ ID NO: 3895940 - DNA, 25 bp, Homo sapien
aacccagaacacacattgcagagtc

SEQ ID NO: 3895941 - DNA, 25 bp, Homo sapien
catcagcactgcaaagtaggtcaag

SEQ ID NO: 3895942 - DNA, 25 bp, Homo sapien
agtaggtcaagtggttgcagaagca

SEQ ID NO: 3895943 - DNA, 25 bp, Homo sapien
cggtctcacacccagcactgctcca

SEQ ID NO: 3895944 - DNA, 25 bp, Homo sapien
gggtttctctcctgacggtctcaca

SEQ ID NO: 3895945 - DNA, 25 bp, Homo sapien
caggtagtgcttgtgcacggcgtcc

SEQ ID NO: 3895946 - DNA, 25 bp, Homo sapien
ggtagtgcttgtgcacggcgtccac

SEQ ID NO: 3895947 - DNA, 25 bp, Homo sapien
ctcaggtagtgcttgtgcacggcgt

SEQ ID NO: 3895948 - DNA, 25 bp, Homo sapien
tagtgcttgtgcacggcgtccacct

SEQ ID NO: 3895949 - DNA, 25 bp, Homo sapien
caccacgagtcggtagaggttgtac

SEQ ID NO: 3895950 - DNA, 25 bp, Homo sapien
ggacataggtgccaaagacctccac

SEQ ID NO: 3895951 - DNA, 25 bp, Homo sapien
cagcagcaggttcatgtgcaccttg

SEQ ID NO: 3895952 - DNA, 25 bp, Homo sapien
cagcccatggcgctcagcttgagta

SEQ ID NO: 3895953 - DNA, 25 bp, Homo sapien
tagatgacgccctctggagtcctat

SEQ ID NO: 3895954 - DNA, 25 bp, Homo sapien
atggaagggtagatgacgccctctg

SEQ ID NO: 3895955 - DNA, 25 bp, Homo sapien
gatgatggggccatagttgtccaca

SEQ ID NO: 3895956 - DNA, 25 bp, Homo sapien
gagtcctatgcacagccaagatgat

SEQ ID NO: 3895957 - DNA, 25 bp, Homo sapien
tgatgatgctgaaaaggtagaggac

SEQ ID NO: 3895958 - DNA, 25 bp, Homo sapien
gacgacaagctggaaggtgccagaa

SEQ ID NO: 3895959 - DNA, 25 bp, Homo sapien
cagcacatgtgaccacttttgggtg

SEQ ID NO: 3895960 - DNA, 25 bp, Homo sapien
tggtgatgtagctgaccagggagtc

SEQ ID NO: 3895961 - DNA, 25 bp, Homo sapien
ctggacgaggtgctgcccgagctga

SEQ ID NO: 3895962 - DNA, 25 bp, Homo sapien
ggacgaggtgctgcccgagctgatg

SEQ ID NO: 3895963 - DNA, 25 bp, Homo sapien
acgaggtgctgcccgagctgatggg

SEQ ID NO: 3895964 - DNA, 25 bp, Homo sapien
tggacgaggtgctgcccgagctgat

SEQ ID NO: 3895965 - DNA, 25 bp, Homo sapien
aagattgaacgctgactcctgcagg

SEQ ID NO: 3895966 - DNA, 25 bp, Homo sapien
caggccagcaatctacccgtgtgtg

SEQ ID NO: 3895967 - DNA, 25 bp, Homo sapien
gaattaaccatgatgggcggccgag

SEQ ID NO: 3895968 - DNA, 25 bp, Homo sapien
ggattaaggatgtgccagaccctca

SEQ ID NO: 3895969 - DNA, 25 bp, Homo sapien
tttgtattagtatcagtgactcttt

SEQ ID NO: 3895970 - DNA, 25 bp, Homo sapien
gtattagtatcagtgactctttcaa

SEQ ID NO: 3895971 - DNA, 25 bp, Homo sapien
cctgattggccccaaggtatttgta

SEQ ID NO: 3895972 - DNA, 25 bp, Homo sapien
gattggccccaaggtatttgtatta

SEQ ID NO: 3895973 - DNA, 25 bp, Homo sapien
ttgggagtctccagttcgccacagg

SEQ ID NO: 3895974 - DNA, 25 bp, Homo sapien
tccctgcaaggtagtgaccagctgg

SEQ ID NO: 3895975 - DNA, 25 bp, Homo sapien
ggtggtctggctacatgggccctca

SEQ ID NO: 3895976 - DNA, 25 bp, Homo sapien
catttctcataaaaggcaggtggtc

SEQ ID NO: 3895977 - DNA, 25 bp, Homo sapien
ccttggccagccttgcccacgccag

SEQ ID NO: 3895978 - DNA, 25 bp, Homo sapien
cttggccagccttgcccacgccagg

SEQ ID NO: 3895979 - DNA, 25 bp, Homo sapien
cccccaggcccctgggcgtcgccat

SEQ ID NO: 3895980 - DNA, 25 bp, Homo sapien
tgaggtcgggagcaggaggagcagg

SEQ ID NO: 3895981 - DNA, 25 bp, Homo sapien
ctgaggtcgggagcaggaggagcag

SEQ ID NO: 3895982 - DNA, 25 bp, Homo sapien
gagcaggagcagggcccccaggccc

SEQ ID NO: 3895983 - DNA, 25 bp, Homo sapien
gcctgcacttggtgaagcacaaagc

SEQ ID NO: 3895984 - DNA, 25 bp, Homo sapien
ttgcaggagtcgctgcccgactgcc

SEQ ID NO: 3895985 - DNA, 25 bp, Homo sapien
gatgtcgtacatgttgttgctcccc

SEQ ID NO: 3895986 - DNA, 25 bp, Homo sapien
tggcccttcggtgggcttttcctga

SEQ ID NO: 3895987 - DNA, 25 bp, Homo sapien
ccgttatccattgagggacatttgg

SEQ ID NO: 3895988 - DNA, 25 bp, Homo sapien
catcatatggagagatcatatttta

SEQ ID NO: 3895989 - DNA, 25 bp, Homo sapien
ttatgccgttatccattgagggaca

SEQ ID NO: 3895990 - DNA, 25 bp, Homo sapien
tattttaattatgccgttatccatt

SEQ ID NO: 3895991 - DNA, 25 bp, Homo sapien
atgggcctcgtagtttagccagtat

SEQ ID NO: 3895992 - DNA, 25 bp, Homo sapien
gaaatagaagtcttctgcagtgttg

SEQ ID NO: 3895993 - DNA, 25 bp, Homo sapien
ttctgcgtcaaaccttccttcatca

SEQ ID NO: 3895994 - DNA, 25 bp, Homo sapien
cttcaggaaaggcgtgttcaccttc

SEQ ID NO: 3895995 - DNA, 25 bp, Homo sapien
tgtccagaatggtgacggccaagcg

SEQ ID NO: 3895996 - DNA, 25 bp, Homo sapien
ctggcagggatcgaaaaaggctctt

SEQ ID NO: 3895997 - DNA, 25 bp, Homo sapien
cttgggaagtcgcactctgtcaggg

SEQ ID NO: 3895998 - DNA, 25 bp, Homo sapien
gaagagagtccctggaccaatgtcc

SEQ ID NO: 3895999 - DNA, 25 bp, Homo sapien
gattgttcaacacgccgctgccatc

SEQ ID NO: 3896000 - DNA, 25 bp, Homo sapien
gcgattgttcaacacgccgctgcca

SEQ ID NO: 3896001 - DNA, 25 bp, Homo sapien
caggcgattgttcaacacgccgctg

SEQ ID NO: 3896002 - DNA, 25 bp, Homo sapien
ggcgattgttcaacacgccgctgcc

SEQ ID NO: 3896003 - DNA, 25 bp, Homo sapien
ggcggtcgctggtgagagaagacga

SEQ ID NO: 3896004 - DNA, 25 bp, Homo sapien
tgcatttgtcccacactcaaaccca

SEQ ID NO: 3896005 - DNA, 25 bp, Homo sapien
tcgctggtgagagaagacgatctcc

SEQ ID NO: 3896006 - DNA, 25 bp, Homo sapien
tgagagaagacgatctccagaggct

SEQ ID NO: 3896007 - DNA, 25 bp, Homo sapien
catgtgcacctctatggtgtgtggc

SEQ ID NO: 3896008 - DNA, 25 bp, Homo sapien
tcctcctgggcgactgtggaagggt

SEQ ID NO: 3896009 - DNA, 25 bp, Homo sapien
tgtgtatggccctaatggctcctcc

SEQ ID NO: 3896010 - DNA, 25 bp, Homo sapien
gtggccttggatccaattatgtgta

SEQ ID NO: 3896011 - DNA, 25 bp, Homo sapien
ttagtcacatcccagaatacacagg

SEQ ID NO: 3896012 - DNA, 25 bp, Homo sapien
ctttagtcacatcccagaatacaca

SEQ ID NO: 3896013 - DNA, 25 bp, Homo sapien
tttagtcacatcccagaatacacag

SEQ ID NO: 3896014 - DNA, 25 bp, Homo sapien
gtggagcagccctcagaagaccagt

SEQ ID NO: 3896015 - DNA, 25 bp, Homo sapien
aggtctgacctccgtggagcagccc

SEQ ID NO: 3896016 - DNA, 25 bp, Homo sapien
caggagcagggcgaaaaaggtcagg

SEQ ID NO: 3896017 - DNA, 25 bp, Homo sapien
tcaggtggtcacagcagcacacggt

SEQ ID NO: 3896018 - DNA, 25 bp, Homo sapien
agatgcgtgtgaggatatgcaccgt

SEQ ID NO: 3896019 - DNA, 25 bp, Homo sapien
aggaagatcatggagaccccacagc

SEQ ID NO: 3896020 - DNA, 25 bp, Homo sapien
tatgcaccgtggactggtccaaggt

SEQ ID NO: 3896021 - DNA, 25 bp, Homo sapien
ggccaggaagatcatggagacccca

SEQ ID NO: 3896022 - DNA, 25 bp, Homo sapien
ggcaagtcacactcggcttgttggg

SEQ ID NO: 3896023 - DNA, 25 bp, Homo sapien
tggtaatttctcctggcgctccaag

SEQ ID NO: 3896024 - DNA, 25 bp, Homo sapien
cagcaatgcggccagctggcaagtc

SEQ ID NO: 3896025 - DNA, 25 bp, Homo sapien
gtaatttctcctggcgctccaagcc

SEQ ID NO: 3896026 - DNA, 25 bp, Homo sapien
ccacattgaccaagaaggccagatt

SEQ ID NO: 3896027 - DNA, 25 bp, Homo sapien
tgttgaagaccctgacagcgagcag

SEQ ID NO: 3896028 - DNA, 25 bp, Homo sapien
cacccagggccacgtggatctttgg

SEQ ID NO: 3896029 - DNA, 25 bp, Homo sapien
tcaggaagtagtgcccgaagtaggt

SEQ ID NO: 3896030 - DNA, 25 bp, Homo sapien
tagaggccgtagctgttggcactcc

SEQ ID NO: 3896031 - DNA, 25 bp, Homo sapien
tgccgatgaccatcagggcgggcag

SEQ ID NO: 3896032 - DNA, 25 bp, Homo sapien
tatcacggatggtgtagaggccgta

SEQ ID NO: 3896033 - DNA, 25 bp, Homo sapien
ctccctatcacggatggtgtagagg

SEQ ID NO: 3896034 - DNA, 25 bp, Homo sapien
gctccttgaccgctgtagcacggga

SEQ ID NO: 3896035 - DNA, 25 bp, Homo sapien
gtgagcaccttcttccggttcttcc

SEQ ID NO: 3896036 - DNA, 25 bp, Homo sapien
tatagagggcgtacatggttgtccc

SEQ ID NO: 3896037 - DNA, 25 bp, Homo sapien
aagtagccgtggacggtgatataga

SEQ ID NO: 3896038 - DNA, 25 bp, Homo sapien
gtgaagatggccaacccccatgtca

SEQ ID NO: 3896039 - DNA, 25 bp, Homo sapien
caaagatgtagacggtggagaggcc

SEQ ID NO: 3896040 - DNA, 25 bp, Homo sapien
cttgcaaggagttgaaaagtgcaaa

SEQ ID NO: 3896041 - DNA, 25 bp, Homo sapien
tggagaggcccaacggggtgaagat

SEQ ID NO: 3896042 - DNA, 25 bp, Homo sapien
ccctttgctgggatctcagaggaag

SEQ ID NO: 3896043 - DNA, 25 bp, Homo sapien
ttgctgggatctcagaggaagggcc

SEQ ID NO: 3896044 - DNA, 25 bp, Homo sapien
cctttgctgggatctcagaggaagg

SEQ ID NO: 3896045 - DNA, 25 bp, Homo sapien
tttgctgggatctcagaggaagggc

SEQ ID NO: 3896046 - DNA, 25 bp, Homo sapien
tgcggagtgggcctggtccaatctt

SEQ ID NO: 3896047 - DNA, 25 bp, Homo sapien
tcttgagatgcggagtgggcctggt

SEQ ID NO: 3896048 - DNA, 25 bp, Homo sapien
ggtaaaggatggtgaaccagcagca

SEQ ID NO: 3896049 - DNA, 25 bp, Homo sapien
gtccaatcttgcagtagaggaggag

SEQ ID NO: 3896050 - DNA, 25 bp, Homo sapien
tctttgaaatgcagtgtccctggac

SEQ ID NO: 3896051 - DNA, 25 bp, Homo sapien
gatctggatgggacctctgatgcca

SEQ ID NO: 3896052 - DNA, 25 bp, Homo sapien
tattcaaggtttgccacgagccaga

SEQ ID NO: 3896053 - DNA, 25 bp, Homo sapien
gagccttgcaaacctgcttacgtgg

SEQ ID NO: 3896054 - DNA, 25 bp, Homo sapien
ctgcagacagggcttgacagtccac

SEQ ID NO: 3896055 - DNA, 25 bp, Homo sapien
gacagggcttgacagtccacagagc

SEQ ID NO: 3896056 - DNA, 25 bp, Homo sapien
gcagacagggcttgacagtccacag

SEQ ID NO: 3896057 - DNA, 25 bp, Homo sapien
cagggcttgacagtccacagagctc

SEQ ID NO: 3896058 - DNA, 25 bp, Homo sapien
gaggggaagcgaagcgcatccattt

SEQ ID NO: 3896059 - DNA, 25 bp, Homo sapien
agcgaagcgcatccatttgcagtca

SEQ ID NO: 3896060 - DNA, 25 bp, Homo sapien
cagcacccagcatccggacggggag

SEQ ID NO: 3896061 - DNA, 25 bp, Homo sapien
atttgcagtcaacgtcagcacccag

SEQ ID NO: 3896062 - DNA, 25 bp, Homo sapien
atgcaatgtccacgccccagaattt

SEQ ID NO: 3896063 - DNA, 25 bp, Homo sapien
ggaacacagcgccttgcataaagtg

SEQ ID NO: 3896064 - DNA, 25 bp, Homo sapien
tgcataaagtgagggcccaccttcc

SEQ ID NO: 3896065 - DNA, 25 bp, Homo sapien
ccagaatttcccttccaggaacaca

SEQ ID NO: 3896066 - DNA, 25 bp, Homo sapien
ttatgggtgctcaacatggcacttg

SEQ ID NO: 3896067 - DNA, 25 bp, Homo sapien
gctcaacatggcacttggagctgct

SEQ ID NO: 3896068 - DNA, 25 bp, Homo sapien
gctgcttttgcaggaaccgcaggtg

SEQ ID NO: 3896069 - DNA, 25 bp, Homo sapien
cttttgcaggaaccgcaggtgatga

SEQ ID NO: 3896070 - DNA, 25 bp, Homo sapien
tagtatttcagacttggtgctaagc

SEQ ID NO: 3896071 - DNA, 25 bp, Homo sapien
gagagctcacgagacagtgtgtgta

SEQ ID NO: 3896072 - DNA, 25 bp, Homo sapien
taagcaactcgtaattacctctgtg

SEQ ID NO: 3896073 - DNA, 25 bp, Homo sapien
gcactgtggagagctcacgagacag

SEQ ID NO: 3896074 - DNA, 25 bp, Homo sapien
gacagcctgctctagctgttagcca

SEQ ID NO: 3896075 - DNA, 25 bp, Homo sapien
gcctgctctagctgttagccatctc

SEQ ID NO: 3896076 - DNA, 25 bp, Homo sapien
gaggacagcctgctctagctgttag

SEQ ID NO: 3896077 - DNA, 25 bp, Homo sapien
tccgaggacagcctgctctagctgt

SEQ ID NO: 3896078 - DNA, 25 bp, Homo sapien
gaccatgaggtggccacacatgagg

SEQ ID NO: 3896079 - DNA, 25 bp, Homo sapien
cacctggaatgtggagataaagtgg

SEQ ID NO: 3896080 - DNA, 25 bp, Homo sapien
tttccttatataagaaacctcagct

SEQ ID NO: 3896081 - DNA, 25 bp, Homo sapien
tggagtgccacctctagcctttcct

SEQ ID NO: 3896082 - DNA, 25 bp, Homo sapien
agtctcctcttctatacggcagaac

SEQ ID NO: 3896083 - DNA, 25 bp, Homo sapien
ggtggccctgcgatgtgacccggtt

SEQ ID NO: 3896084 - DNA, 25 bp, Homo sapien
ctatacggcagaaccccagttgtgt

SEQ ID NO: 3896085 - DNA, 25 bp, Homo sapien
tggtttgaattgctcagcttcccag

SEQ ID NO: 3896086 - DNA, 25 bp, Homo sapien
tctggagcgtctctgggtgtctgga

SEQ ID NO: 3896087 - DNA, 25 bp, Homo sapien
tctgggtgtctggagatggaatgtc

SEQ ID NO: 3896088 - DNA, 25 bp, Homo sapien
gtctctgggtgtctggagatggaat

SEQ ID NO: 3896089 - DNA, 25 bp, Homo sapien
ctgggtgtctggagatggaatgtct

SEQ ID NO: 3896090 - DNA, 25 bp, Homo sapien
ttctccatcctcgcccattcagccc

SEQ ID NO: 3896091 - DNA, 25 bp, Homo sapien
aaggtgatttcctccttccgcacct

SEQ ID NO: 3896092 - DNA, 25 bp, Homo sapien
gcccattcagcccactcggccgcct

SEQ ID NO: 3896093 - DNA, 25 bp, Homo sapien
cttccgcacctcaactggcctcatc

SEQ ID NO: 3896094 - DNA, 25 bp, Homo sapien
tccgctgagacagtgatctggatct

SEQ ID NO: 3896095 - DNA, 25 bp, Homo sapien
gggagctccgctgagacagtgatct

SEQ ID NO: 3896096 - DNA, 25 bp, Homo sapien
gagctccgctgagacagtgatctgg

SEQ ID NO: 3896097 - DNA, 25 bp, Homo sapien
gctgagacagtgatctggatctctg

SEQ ID NO: 3896098 - DNA, 25 bp, Homo sapien
cagcttggagatgtcaatagtgtcc

SEQ ID NO: 3896099 - DNA, 25 bp, Homo sapien
gtcaatagtgtccttggtaaaggcc

SEQ ID NO: 3896100 - DNA, 25 bp, Homo sapien
gagatgtcaatagtgtccttggtaa

SEQ ID NO: 3896101 - DNA, 25 bp, Homo sapien
gcttggagatgtcaatagtgtcctt

SEQ ID NO: 3896102 - DNA, 25 bp, Homo sapien
gcgggagaagttgtctgccacctgc

SEQ ID NO: 3896103 - DNA, 25 bp, Homo sapien
gggcacttcacactcgttcaggggg

SEQ ID NO: 3896104 - DNA, 25 bp, Homo sapien
cacagatggctgtactggcgggaga

SEQ ID NO: 3896105 - DNA, 25 bp, Homo sapien
cacactcgttcagggggtgcaggaa

SEQ ID NO: 3896106 - DNA, 25 bp, Homo sapien
cagtgtgggccggagggttgtgctc

SEQ ID NO: 3896107 - DNA, 25 bp, Homo sapien
agtcggagacaaactgggcacagct

SEQ ID NO: 3896108 - DNA, 25 bp, Homo sapien
caccatggtgaggaagtcggagaca

SEQ ID NO: 3896109 - DNA, 25 bp, Homo sapien
agctgtcccagttgtagagctcggg

SEQ ID NO: 3896110 - DNA, 25 bp, Homo sapien
gcagagcagcgtactgaagtcaaag

SEQ ID NO: 3896111 - DNA, 25 bp, Homo sapien
ttgagcacagtggtcgaggagtaca

SEQ ID NO: 3896112 - DNA, 25 bp, Homo sapien
gcagtaagcatcatagccagagccg

SEQ ID NO: 3896113 - DNA, 25 bp, Homo sapien
cgagccgtagccgttgacgcagtaa

SEQ ID NO: 3896114 - DNA, 25 bp, Homo sapien
tgggcttcacagtgagtgggcacac

SEQ ID NO: 3896115 - DNA, 25 bp, Homo sapien
ctccttgggcttcacagtgagtggg

SEQ ID NO: 3896116 - DNA, 25 bp, Homo sapien
ccttgggcttcacagtgagtgggca

SEQ ID NO: 3896117 - DNA, 25 bp, Homo sapien
cttgggcttcacagtgagtgggcac

SEQ ID NO: 3896118 - DNA, 25 bp, Homo sapien
tcctggaattaatccacctcatgaa

SEQ ID NO: 3896119 - DNA, 25 bp, Homo sapien
gcattttctgtctgtagcatgacta

SEQ ID NO: 3896120 - DNA, 25 bp, Homo sapien
aagccatggcggagctcgtgctcca

SEQ ID NO: 3896121 - DNA, 25 bp, Homo sapien
ccaggtataacccaggtacacagtg

SEQ ID NO: 3896122 - DNA, 25 bp, Homo sapien
cttaggcagcaccttttcctccttc

SEQ ID NO: 3896123 - DNA, 25 bp, Homo sapien
gcaccttttcctccttcttgatggt

SEQ ID NO: 3896124 - DNA, 25 bp, Homo sapien
ttaggcagcaccttttcctccttct

SEQ ID NO: 3896125 - DNA, 25 bp, Homo sapien
gcagcaccttttcctccttcttgat

SEQ ID NO: 3896126 - DNA, 25 bp, Homo sapien
cttgctcctgctcaaacctgctgca

SEQ ID NO: 3896127 - DNA, 25 bp, Homo sapien
tcaaacctgctgcacaggtccctgg

SEQ ID NO: 3896128 - DNA, 25 bp, Homo sapien
ctccctcagccgcttcttctcctgg

SEQ ID NO: 3896129 - DNA, 25 bp, Homo sapien
tcctgctcaaacctgctgcacaggt

SEQ ID NO: 3896130 - DNA, 25 bp, Homo sapien
tccacaggctttcgatgcccaggaa

SEQ ID NO: 3896131 - DNA, 25 bp, Homo sapien
cagttccagcaatcctgcatgttga

SEQ ID NO: 3896132 - DNA, 25 bp, Homo sapien
gctgtagctatgtcctgtgaatggg

SEQ ID NO: 3896133 - DNA, 25 bp, Homo sapien
gaatgggtcgatgaagaagttctca

SEQ ID NO: 3896134 - DNA, 25 bp, Homo sapien
ccatggagacgcagctatggagaag

SEQ ID NO: 3896135 - DNA, 25 bp, Homo sapien
gctctccccaaggtctggctgccat

SEQ ID NO: 3896136 - DNA, 25 bp, Homo sapien
gtgggccatggagacgcagctatgg

SEQ ID NO: 3896137 - DNA, 25 bp, Homo sapien
ctcgtggcctggtgtctcgctctcc

SEQ ID NO: 3896138 - DNA, 25 bp, Homo sapien
gctacgtccgccatgcagatggaca

SEQ ID NO: 3896139 - DNA, 25 bp, Homo sapien
gcagcagactggctacgtccgccat

SEQ ID NO: 3896140 - DNA, 25 bp, Homo sapien
caccaaacaaatgagcgagccgttc

SEQ ID NO: 3896141 - DNA, 25 bp, Homo sapien
gatggacagacagtccaagccacca

SEQ ID NO: 3896142 - DNA, 25 bp, Homo sapien
ggaagaggctcatacaccatgaggg

SEQ ID NO: 3896143 - DNA, 25 bp, Homo sapien
agaggctcatacaccatgagggcag

SEQ ID NO: 3896144 - DNA, 25 bp, Homo sapien
gaagaggctcatacaccatgagggc

SEQ ID NO: 3896145 - DNA, 25 bp, Homo sapien
caggaagaggctcatacaccatgag

SEQ ID NO: 3896146 - DNA, 25 bp, Homo sapien
tgtactgagtgtaactaaagggacc

SEQ ID NO: 3896147 - DNA, 25 bp, Homo sapien
ctggcaatgtactgagtgtaactaa

SEQ ID NO: 3896148 - DNA, 25 bp, Homo sapien
tactgagtgtaactaaagggaccag

SEQ ID NO: 3896149 - DNA, 25 bp, Homo sapien
caatgtactgagtgtaactaaaggg

SEQ ID NO: 3896150 - DNA, 25 bp, Homo sapien
tgtgtgatggcggtagcaacagaac

SEQ ID NO: 3896151 - DNA, 25 bp, Homo sapien
cagtaatcatgcagaagggatgtgt

SEQ ID NO: 3896152 - DNA, 25 bp, Homo sapien
tagcaacagaacgagtgattatcac

SEQ ID NO: 3896153 - DNA, 25 bp, Homo sapien
cgagtgattatcacttgagttatct

SEQ ID NO: 3896154 - DNA, 25 bp, Homo sapien
catactggcaaacagtgctgtgaca

SEQ ID NO: 3896155 - DNA, 25 bp, Homo sapien
gtccaccagcaagcccatggctgtt

SEQ ID NO: 3896156 - DNA, 25 bp, Homo sapien
caacatactggcaaacagtgctgtg

SEQ ID NO: 3896157 - DNA, 25 bp, Homo sapien
tggcaaacagtgctgtgacatcttg

SEQ ID NO: 3896158 - DNA, 25 bp, Homo sapien
tcagtccccaggagcatgtactccc

SEQ ID NO: 3896159 - DNA, 25 bp, Homo sapien
tatcagtccccaggagcatgtactc

SEQ ID NO: 3896160 - DNA, 25 bp, Homo sapien
cttatcagtccccaggagcatgtac

SEQ ID NO: 3896161 - DNA, 25 bp, Homo sapien
gtccccaggagcatgtactcccatc

SEQ ID NO: 3896162 - DNA, 25 bp, Homo sapien
tcgtttatcccactgtcgtcttctt

SEQ ID NO: 3896163 - DNA, 25 bp, Homo sapien
atcctcatcgtttatcccactgtcg

SEQ ID NO: 3896164 - DNA, 25 bp, Homo sapien
ctcatcgtttatcccactgtcgtct

SEQ ID NO: 3896165 - DNA, 25 bp, Homo sapien
atcatcctcatcgtttatcccactg

SEQ ID NO: 3896166 - DNA, 25 bp, Homo sapien
gagtggggcatgtcgaagctcttat

SEQ ID NO: 3896167 - DNA, 25 bp, Homo sapien
gtggggcatgtcgaagctcttatcc

SEQ ID NO: 3896168 - DNA, 25 bp, Homo sapien
catgtcgaagctcttatcctcatcc

SEQ ID NO: 3896169 - DNA, 25 bp, Homo sapien
gggcatgtcgaagctcttatcctca

SEQ ID NO: 3896170 - DNA, 25 bp, Homo sapien
tccggggagatctcaatctgctcca

SEQ ID NO: 3896171 - DNA, 25 bp, Homo sapien
gggagatctcaatctgctccaccca

SEQ ID NO: 3896172 - DNA, 25 bp, Homo sapien
cggggagatctcaatctgctccacc

SEQ ID NO: 3896173 - DNA, 25 bp, Homo sapien
cttccggggagatctcaatctgctc

SEQ ID NO: 3896174 - DNA, 25 bp, Homo sapien
gaactggatctggagaggataagtg

SEQ ID NO: 3896175 - DNA, 25 bp, Homo sapien
ggataagtgaatacacaaatagaaa

SEQ ID NO: 3896176 - DNA, 25 bp, Homo sapien
aggataagtgaatacacaaatagaa

SEQ ID NO: 3896177 - DNA, 25 bp, Homo sapien
aactggatctggagaggataagtga

SEQ ID NO: 3896178 - DNA, 25 bp, Homo sapien
tgcccctctccggtcctgagacccc

SEQ ID NO: 3896179 - DNA, 25 bp, Homo sapien
ctgcccctctccggtcctgagaccc

SEQ ID NO: 3896180 - DNA, 25 bp, Homo sapien
ccactgcccgttctctgtgtactga

SEQ ID NO: 3896181 - DNA, 25 bp, Homo sapien
tgcccgttctctgtgtactgaactc

SEQ ID NO: 3896182 - DNA, 25 bp, Homo sapien
actgcccgttctctgtgtactgaac

SEQ ID NO: 3896183 - DNA, 25 bp, Homo sapien
atccactgcccgttctctgtgtact

SEQ ID NO: 3896184 - DNA, 25 bp, Homo sapien
ggacacagtcagctgtggtctcttc

SEQ ID NO: 3896185 - DNA, 25 bp, Homo sapien
ctgtggacacagtcagctgtggtct

SEQ ID NO: 3896186 - DNA, 25 bp, Homo sapien
tgtggacacagtcagctgtggtctc

SEQ ID NO: 3896187 - DNA, 25 bp, Homo sapien
cacagtcagctgtggtctcttcttg

SEQ ID NO: 3896188 - DNA, 25 bp, Homo sapien
ttcccgttcgggcagcgggtctcaa

SEQ ID NO: 3896189 - DNA, 25 bp, Homo sapien
ttgccctcttgtactgaatcacctt

SEQ ID NO: 3896190 - DNA, 25 bp, Homo sapien
tgcaagtcctcataggtggtgaggc

SEQ ID NO: 3896191 - DNA, 25 bp, Homo sapien
tgctattgaggtacggggcccactt

SEQ ID NO: 3896192 - DNA, 25 bp, Homo sapien
tggtaccactcctttatctccaaaa

SEQ ID NO: 3896193 - DNA, 25 bp, Homo sapien
catgtcttcccggttctggtaccac

SEQ ID NO: 3896194 - DNA, 25 bp, Homo sapien
tgtcttcccggttctggtaccactc

SEQ ID NO: 3896195 - DNA, 25 bp, Homo sapien
gtttatgtgtttcagctccagcatg

SEQ ID NO: 3896196 - DNA, 25 bp, Homo sapien
caggttgcatggacttgtacgagtg

SEQ ID NO: 3896197 - DNA, 25 bp, Homo sapien
cacacgggccgtttcataaaactca

SEQ ID NO: 3896198 - DNA, 25 bp, Homo sapien
taaaactcaatgacacggtccatct

SEQ ID NO: 3896199 - DNA, 25 bp, Homo sapien
gaagtctgggcgtccttgatagtac

SEQ ID NO: 3896200 - DNA, 25 bp, Homo sapien
gattcacgtggaatagcccctccta

SEQ ID NO: 3896201 - DNA, 25 bp, Homo sapien
caacgaacgttcaggacactggagt

SEQ ID NO: 3896202 - DNA, 25 bp, Homo sapien
agaggagatttctgtgcatgcccgc

SEQ ID NO: 3896203 - DNA, 25 bp, Homo sapien
aatggatttcgtgggttctcagggc

SEQ ID NO: 3896204 - DNA, 25 bp, Homo sapien
cttcgctgggttgcggaagaaccgc

SEQ ID NO: 3896205 - DNA, 25 bp, Homo sapien
tggtcctcacggcagtggtagcgca

SEQ ID NO: 3896206 - DNA, 25 bp, Homo sapien
tagcgcagctggatgcgctcctccg

SEQ ID NO: 3896207 - DNA, 25 bp, Homo sapien
tgtccacctcggtgcgccgcaggaa

SEQ ID NO: 3896208 - DNA, 25 bp, Homo sapien
aagctgatgcacatgtcgggcgtca

SEQ ID NO: 3896209 - DNA, 25 bp, Homo sapien
agctgatgcacatgtcgggcgtcat

SEQ ID NO: 3896210 - DNA, 25 bp, Homo sapien
gactgcagagtcgtcttagcctgct

SEQ ID NO: 3896211 - DNA, 25 bp, Homo sapien
gcccctcagaggtagtgagactctt

SEQ ID NO: 3896212 - DNA, 25 bp, Homo sapien
gtttgactaggaaagctagcccctc

SEQ ID NO: 3896213 - DNA, 25 bp, Homo sapien
tggaataagacagagagccccggtt

SEQ ID NO: 3896214 - DNA, 25 bp, Homo sapien
tgactcccagacctgatgtctggac

SEQ ID NO: 3896215 - DNA, 25 bp, Homo sapien
gactcccagacctgatgtctggaca

SEQ ID NO: 3896216 - DNA, 25 bp, Homo sapien
gcctcgtactggtagagcagcttct

SEQ ID NO: 3896217 - DNA, 25 bp, Homo sapien
cttcaggtgcatcatggcctcgtac

SEQ ID NO: 3896218 - DNA, 25 bp, Homo sapien
gagcccgggatgtagagccataatt

SEQ ID NO: 3896219 - DNA, 25 bp, Homo sapien
aggagggcagattgcatgaattcag

SEQ ID NO: 3896220 - DNA, 25 bp, Homo sapien
tgttggagggcgtgatggagacacc

SEQ ID NO: 3896221 - DNA, 25 bp, Homo sapien
caaaaacaaagataccgcccacctg

SEQ ID NO: 3896222 - DNA, 25 bp, Homo sapien
ttctcattccgcttggtgtcataga

SEQ ID NO: 3896223 - DNA, 25 bp, Homo sapien
cttgctcttctcattccgcttggtg

SEQ ID NO: 3896224 - DNA, 25 bp, Homo sapien
atggcctcccgatattccttgctct

SEQ ID NO: 3896225 - DNA, 25 bp, Homo sapien
gctcttctcattccgcttggtgtca

SEQ ID NO: 3896226 - DNA, 25 bp, Homo sapien
ggccaggtagtccagctgggtctcc

SEQ ID NO: 3896227 - DNA, 25 bp, Homo sapien
tgatgagccgctgcttgaagtcgct

SEQ ID NO: 3896228 - DNA, 25 bp, Homo sapien
cgcctgccagcatgttagtttctct

SEQ ID NO: 3896229 - DNA, 25 bp, Homo sapien
ggtgctcttcgtgcatcatgcgctc

SEQ ID NO: 3896230 - DNA, 25 bp, Homo sapien
gaacatggcctgagagcagtaactc

SEQ ID NO: 3896231 - DNA, 25 bp, Homo sapien
gatgcggatgcggaacatggcctga

SEQ ID NO: 3896232 - DNA, 25 bp, Homo sapien
ggtcttcatcctcgggtgtcagcgt

SEQ ID NO: 3896233 - DNA, 25 bp, Homo sapien
gagcagtaactcaggtacaggtctt

SEQ ID NO: 3896234 - DNA, 25 bp, Homo sapien
ggtccttgtagagcttttcctccag

SEQ ID NO: 3896235 - DNA, 25 bp, Homo sapien
cctccagagccaggtacttcagtgg

SEQ ID NO: 3896236 - DNA, 25 bp, Homo sapien
cccaggcgtgggtccttgtagagct

SEQ ID NO: 3896237 - DNA, 25 bp, Homo sapien
tcctccagagccaggtacttcagtg

SEQ ID NO: 3896238 - DNA, 25 bp, Homo sapien
tttacaggaaaatcatgagaagcag

SEQ ID NO: 3896239 - DNA, 25 bp, Homo sapien
tgtaaacaggcattggctggataga

SEQ ID NO: 3896240 - DNA, 25 bp, Homo sapien
ggcattggctggatagagggaacac

SEQ ID NO: 3896241 - DNA, 25 bp, Homo sapien
gaggccaggtgtctgtgtaaacagg

SEQ ID NO: 3896242 - DNA, 25 bp, Homo sapien
tccaatggcggctgcgccaatggct

SEQ ID NO: 3896243 - DNA, 25 bp, Homo sapien
tgaaaacttttgagagccgccctcc

SEQ ID NO: 3896244 - DNA, 25 bp, Homo sapien
tggcttgagcaaccgtcctggattg

SEQ ID NO: 3896245 - DNA, 25 bp, Homo sapien
gaccaatcagcgtccgcattattgg

SEQ ID NO: 3896246 - DNA, 25 bp, Homo sapien
cttgattggccgctgcttgacaacc

SEQ ID NO: 3896247 - DNA, 25 bp, Homo sapien
ggaggccgaggctccgctccaggcg

SEQ ID NO: 3896248 - DNA, 25 bp, Homo sapien
attggccgctgcttgacaaccgacc

SEQ ID NO: 3896249 - DNA, 25 bp, Homo sapien
tgccttgattggccgctgcttgaca

SEQ ID NO: 3896250 - DNA, 25 bp, Homo sapien
ccaaccctctgcttgcggagtacgg

SEQ ID NO: 3896251 - DNA, 25 bp, Homo sapien
cctctgcttgcggagtacgggctct

SEQ ID NO: 3896252 - DNA, 25 bp, Homo sapien
gcttgcggagtacgggctctagcct

SEQ ID NO: 3896253 - DNA, 25 bp, Homo sapien
cctcggccacggctgatcctcccaa

SEQ ID NO: 3896254 - DNA, 25 bp, Homo sapien
agctgcactgcaaattaggtttggg

SEQ ID NO: 3896255 - DNA, 25 bp, Homo sapien
gagggggcacctcaggtagggtgat

SEQ ID NO: 3896256 - DNA, 25 bp, Homo sapien
aagctgcactgcaaattaggtttgg

SEQ ID NO: 3896257 - DNA, 25 bp, Homo sapien
ggcacctcaggtagggtgatttgga

SEQ ID NO: 3896258 - DNA, 25 bp, Homo sapien
gatcatggaatgttaggctcgagcc

SEQ ID NO: 3896259 - DNA, 25 bp, Homo sapien
gtgcacatctgtcacgatcctggat

SEQ ID NO: 3896260 - DNA, 25 bp, Homo sapien
cacgatcctggatcatggaatgtta

SEQ ID NO: 3896261 - DNA, 25 bp, Homo sapien
tgttaggctcgagccatctcagctc

SEQ ID NO: 3896262 - DNA, 25 bp, Homo sapien
cacatccaggcagacagaatgcctc

SEQ ID NO: 3896263 - DNA, 25 bp, Homo sapien
gaatgcctcgtcttctggccctggg

SEQ ID NO: 3896264 - DNA, 25 bp, Homo sapien
agctggctggcacctgaagccccac

SEQ ID NO: 3896265 - DNA, 25 bp, Homo sapien
tccaggcagacagaatgcctcgtct

SEQ ID NO: 3896266 - DNA, 25 bp, Homo sapien
gcaacttccaggctgtcttggtgac

SEQ ID NO: 3896267 - DNA, 25 bp, Homo sapien
tccaggctgtcttggtgaccacagg

SEQ ID NO: 3896268 - DNA, 25 bp, Homo sapien
ccaggctgtcttggtgaccacaggg

SEQ ID NO: 3896269 - DNA, 25 bp, Homo sapien
acttccaggctgtcttggtgaccac

SEQ ID NO: 3896270 - DNA, 25 bp, Homo sapien
cttcagctccccctttggtgtccac

SEQ ID NO: 3896271 - DNA, 25 bp, Homo sapien
cggctacccgctttggaacctgaag

SEQ ID NO: 3896272 - DNA, 25 bp, Homo sapien
tgaagcccagtggaaggatctgcct

SEQ ID NO: 3896273 - DNA, 25 bp, Homo sapien
cctgctcggctacccgctttggaac

SEQ ID NO: 3896274 - DNA, 25 bp, Homo sapien
tagccagcagccgcccggaggcttt

SEQ ID NO: 3896275 - DNA, 25 bp, Homo sapien
acacgttgctggcatgcgcgacgat

SEQ ID NO: 3896276 - DNA, 25 bp, Homo sapien
tgggcttgttgatggaccacaggtt

SEQ ID NO: 3896277 - DNA, 25 bp, Homo sapien
aggttgacgcggcagtcatccccgc

SEQ ID NO: 3896278 - DNA, 25 bp, Homo sapien
gatctgctcaaggatctaggtggct

SEQ ID NO: 3896279 - DNA, 25 bp, Homo sapien
taattacggctcatccctacaatgg

SEQ ID NO: 3896280 - DNA, 25 bp, Homo sapien
cacagggtgctttagcagagccaaa

SEQ ID NO: 3896281 - DNA, 25 bp, Homo sapien
taaaagaatacttgttgacacaggc

SEQ ID NO: 3896282 - DNA, 25 bp, Homo sapien
cctggagtgcagtggcaccatctcg

SEQ ID NO: 3896283 - DNA, 25 bp, Homo sapien
tactgcaacctccgtctcccaggtt

SEQ ID NO: 3896284 - DNA, 25 bp, Homo sapien
ggaatcttgctctatcacccagcct

SEQ ID NO: 3896285 - DNA, 25 bp, Homo sapien
gcttactgcaacctccgtctcccag

SEQ ID NO: 3896286 - DNA, 25 bp, Homo sapien
gcttccgtgcactgctggacagacc

SEQ ID NO: 3896287 - DNA, 25 bp, Homo sapien
agagcagcagcttccgtgcactgct

SEQ ID NO: 3896288 - DNA, 25 bp, Homo sapien
gacccctgcagttgcgccctgaatt

SEQ ID NO: 3896289 - DNA, 25 bp, Homo sapien
ctgctggacagacccctgcagttgc

SEQ ID NO: 3896290 - DNA, 25 bp, Homo sapien
ctgagagccggccacgatgagctcc

SEQ ID NO: 3896291 - DNA, 25 bp, Homo sapien
gggtgttgaggcggacgctctccac

SEQ ID NO: 3896292 - DNA, 25 bp, Homo sapien
agacacggatggagcccgactgaga

SEQ ID NO: 3896293 - DNA, 25 bp, Homo sapien
agccggccacgatgagctcctcggg

SEQ ID NO: 3896294 - DNA, 25 bp, Homo sapien
tgtcaacctggctgtccatcggaat

SEQ ID NO: 3896295 - DNA, 25 bp, Homo sapien
tactgaatcgggttctctgaggatg

SEQ ID NO: 3896296 - DNA, 25 bp, Homo sapien
gtaatgagttccttgtggagcagcc

SEQ ID NO: 3896297 - DNA, 25 bp, Homo sapien
ggttttcctaagctcggtgctctcc

SEQ ID NO: 3896298 - DNA, 25 bp, Homo sapien
agaggctacaaactcgccgtacggg

SEQ ID NO: 3896299 - DNA, 25 bp, Homo sapien
gttggctttgtgtcccatgagtgtg

SEQ ID NO: 3896300 - DNA, 25 bp, Homo sapien
ctcgccgtacgggtggaaatccagg

SEQ ID NO: 3896301 - DNA, 25 bp, Homo sapien
ttgtgtcccatgagtgtgcgaagaa

SEQ ID NO: 3896302 - DNA, 25 bp, Homo sapien
gacacagcctttcctcctgatgtcc

SEQ ID NO: 3896303 - DNA, 25 bp, Homo sapien
cctgtatcggaagacacagcctttc

SEQ ID NO: 3896304 - DNA, 25 bp, Homo sapien
ctgtatcggaagacacagcctttcc

SEQ ID NO: 3896305 - DNA, 25 bp, Homo sapien
acacagcctttcctcctgatgtccc

SEQ ID NO: 3896306 - DNA, 25 bp, Homo sapien
ttcccatcggggctgaaccggagac

SEQ ID NO: 3896307 - DNA, 25 bp, Homo sapien
cggagacaccgcacggcctggctgt

SEQ ID NO: 3896308 - DNA, 25 bp, Homo sapien
gtgtggtcatctgcggccgacgcca

SEQ ID NO: 3896309 - DNA, 25 bp, Homo sapien
cttcacggtgtggtcatctgcggcc

SEQ ID NO: 3896310 - DNA, 25 bp, Homo sapien
agacatcatcttgccggcagtgaga

SEQ ID NO: 3896311 - DNA, 25 bp, Homo sapien
tactcgttggggtgaaactcgacca

SEQ ID NO: 3896312 - DNA, 25 bp, Homo sapien
ccccgtgtgaccagggaactcagac

SEQ ID NO: 3896313 - DNA, 25 bp, Homo sapien
tcgaccacgttgacaggccccgtgt

SEQ ID NO: 3896314 - DNA, 25 bp, Homo sapien
ggctccccttcgatgcagctcacca

SEQ ID NO: 3896315 - DNA, 25 bp, Homo sapien
ccaggctccccttcgatgcagctca

SEQ ID NO: 3896316 - DNA, 25 bp, Homo sapien
tccccttcgatgcagctcaccacct

SEQ ID NO: 3896317 - DNA, 25 bp, Homo sapien
gcccaggctccccttcgatgcagct

SEQ ID NO: 3896318 - DNA, 25 bp, Homo sapien
ctgggccaggcgagagatggccgtg

SEQ ID NO: 3896319 - DNA, 25 bp, Homo sapien
tggtccccaccccgaggaatccaga

SEQ ID NO: 3896320 - DNA, 25 bp, Homo sapien
gcgcagcagcggagatgggaaaggc

SEQ ID NO: 3896321 - DNA, 25 bp, Homo sapien
gatggccgtgggtcctgtggcaccc

SEQ ID NO: 3896322 - DNA, 25 bp, Homo sapien
ttgccccagttgacgaggaccacat

SEQ ID NO: 3896323 - DNA, 25 bp, Homo sapien
cgctgtacaggcagcagccgtctgg

SEQ ID NO: 3896324 - DNA, 25 bp, Homo sapien
tagacacgcagtgagtcctggcagc

SEQ ID NO: 3896325 - DNA, 25 bp, Homo sapien
atcaaagcaccgctcaggttcccag

SEQ ID NO: 3896326 - DNA, 25 bp, Homo sapien
cgagggggcaaaatcccagccccag

SEQ ID NO: 3896327 - DNA, 25 bp, Homo sapien
tgggactgcaagccgagggggcaaa

SEQ ID NO: 3896328 - DNA, 25 bp, Homo sapien
ggggcaaaatcccagccccagtgtg

SEQ ID NO: 3896329 - DNA, 25 bp, Homo sapien
actgcaagccgagggggcaaaatcc

SEQ ID NO: 3896330 - DNA, 25 bp, Homo sapien
caccacgtaggaggagacgttgctc

SEQ ID NO: 3896331 - DNA, 25 bp, Homo sapien
tgtgctgggccgctcatagatgcgc

SEQ ID NO: 3896332 - DNA, 25 bp, Homo sapien
ggccaccgtgccagtcctggtgaca

SEQ ID NO: 3896333 - DNA, 25 bp, Homo sapien
cagtcctggtgacacgcgtcagatc

SEQ ID NO: 3896334 - DNA, 25 bp, Homo sapien
gcgttctggatctccgcgcgggact

SEQ ID NO: 3896335 - DNA, 25 bp, Homo sapien
tcgttgtagtcctcggcgttctgga

SEQ ID NO: 3896336 - DNA, 25 bp, Homo sapien
tcttgggctggaagatctcgttgta

SEQ ID NO: 3896337 - DNA, 25 bp, Homo sapien
tgcggcgctcgctctctgagttctg

SEQ ID NO: 3896338 - DNA, 25 bp, Homo sapien
aacgtgaggacaggatacggagccc

SEQ ID NO: 3896339 - DNA, 25 bp, Homo sapien
gaagttaaagggatgcggagccaca

SEQ ID NO: 3896340 - DNA, 25 bp, Homo sapien
ggagccacagcaggctaccctggaa

SEQ ID NO: 3896341 - DNA, 25 bp, Homo sapien
gagggtagctcccaggcatgcggct

SEQ ID NO: 3896342 - DNA, 25 bp, Homo sapien
agggctcacttctccggggtggcgt

SEQ ID NO: 3896343 - DNA, 25 bp, Homo sapien
aagggctcacttctccggggtggcg

SEQ ID NO: 3896344 - DNA, 25 bp, Homo sapien
gggctcacttctccggggtggcgtc

SEQ ID NO: 3896345 - DNA, 25 bp, Homo sapien
gaagggctcacttctccggggtggc

SEQ ID NO: 3896346 - DNA, 25 bp, Homo sapien
accgggaactgcacatccatggcag

SEQ ID NO: 3896347 - DNA, 25 bp, Homo sapien
ttggcaccgggaactgcacatccat

SEQ ID NO: 3896348 - DNA, 25 bp, Homo sapien
atttggcaccgggaactgcacatcc

SEQ ID NO: 3896349 - DNA, 25 bp, Homo sapien
gggaactgcacatccatggcagggc

SEQ ID NO: 3896350 - DNA, 25 bp, Homo sapien
ggtgcaggtgtggaagcaaccactg

SEQ ID NO: 3896351 - DNA, 25 bp, Homo sapien
tgggtgcaggtgtggaagcaaccac

SEQ ID NO: 3896352 - DNA, 25 bp, Homo sapien
gaagcaaccactgggggccggggca

SEQ ID NO: 3896353 - DNA, 25 bp, Homo sapien
tgcaggtgtggaagcaaccactggg

SEQ ID NO: 3896354 - DNA, 25 bp, Homo sapien
ggctcgttccgggtggcagggatga

SEQ ID NO: 3896355 - DNA, 25 bp, Homo sapien
gaggccttcagcccgatgggctcgt

SEQ ID NO: 3896356 - DNA, 25 bp, Homo sapien
cttcagcccgatgggctcgttccgg

SEQ ID NO: 3896357 - DNA, 25 bp, Homo sapien
ggcaggaagtcggaggccttcagcc

SEQ ID NO: 3896358 - DNA, 25 bp, Homo sapien
tgtcgtggcctttgcggatctgtga

SEQ ID NO: 3896359 - DNA, 25 bp, Homo sapien
tgagcaccacacacatggtgtcgtg

SEQ ID NO: 3896360 - DNA, 25 bp, Homo sapien
ccaggttcttgtggcggctggtgag

SEQ ID NO: 3896361 - DNA, 25 bp, Homo sapien
tttgcggatctgtgacatggcatcc

SEQ ID NO: 3896362 - DNA, 25 bp, Homo sapien
cccaagcccgggcaggcaggtggca

SEQ ID NO: 3896363 - DNA, 25 bp, Homo sapien
catgggtggcctcttcttgttctgc

SEQ ID NO: 3896364 - DNA, 25 bp, Homo sapien
gatgaggccctgtgcaagggtgggc

SEQ ID NO: 3896365 - DNA, 25 bp, Homo sapien
gggggcgagatgaggccctgtgcaa

SEQ ID NO: 3896366 - DNA, 25 bp, Homo sapien
aacagagcaccgtcaggggtggggc

SEQ ID NO: 3896367 - DNA, 25 bp, Homo sapien
gtgcaaacagagcaccgtcaggggt

SEQ ID NO: 3896368 - DNA, 25 bp, Homo sapien
tgcaaacagagcaccgtcaggggtg

SEQ ID NO: 3896369 - DNA, 25 bp, Homo sapien
agagcaccgtcaggggtggggcagt

SEQ ID NO: 3896370 - DNA, 25 bp, Homo sapien
caccaccaccgacaggtcgttgatg

SEQ ID NO: 3896371 - DNA, 25 bp, Homo sapien
ggttgacgatgttcaggaggtccac

SEQ ID NO: 3896372 - DNA, 25 bp, Homo sapien
tggccacagcggagtccaccgacgt

SEQ ID NO: 3896373 - DNA, 25 bp, Homo sapien
tgacgatgttcaggaggtccaccac

SEQ ID NO: 3896374 - DNA, 25 bp, Homo sapien
gagaggccaggacatgctgccatca

SEQ ID NO: 3896375 - DNA, 25 bp, Homo sapien
ctaggagaggccaggacatgctgcc

SEQ ID NO: 3896376 - DNA, 25 bp, Homo sapien
aggagaggccaggacatgctgccat

SEQ ID NO: 3896377 - DNA, 25 bp, Homo sapien
gaggccaggacatgctgccatcagc

SEQ ID NO: 3896378 - DNA, 25 bp, Homo sapien
gacggtggtgcacaggtccagcttc

SEQ ID NO: 3896379 - DNA, 25 bp, Homo sapien
ttctcaatctgtggcaggacggtgg

SEQ ID NO: 3896380 - DNA, 25 bp, Homo sapien
tggtgcacaggtccagcttccacag

SEQ ID NO: 3896381 - DNA, 25 bp, Homo sapien
gcttctcaatctgtggcaggacggt

SEQ ID NO: 3896382 - DNA, 25 bp, Homo sapien
gggcagaaaccgctgcaggatcagc

SEQ ID NO: 3896383 - DNA, 25 bp, Homo sapien
ggaggtgcagcccgtctggacgtag

SEQ ID NO: 3896384 - DNA, 25 bp, Homo sapien
ctccctgctgatatccacacccaca

SEQ ID NO: 3896385 - DNA, 25 bp, Homo sapien
gggtggggccgccagcatgtctgtg

SEQ ID NO: 3896386 - DNA, 25 bp, Homo sapien
agctcgcggaaggtactgccatggc

SEQ ID NO: 3896387 - DNA, 25 bp, Homo sapien
cgctgatgctcttaagctgcttgta

SEQ ID NO: 3896388 - DNA, 25 bp, Homo sapien
ctgacttgctcttgaccaggccgct

SEQ ID NO: 3896389 - DNA, 25 bp, Homo sapien
tccagactggccatgagcaggtgca

SEQ ID NO: 3896390 - DNA, 25 bp, Homo sapien
gccttataaattacagcagcagccc

SEQ ID NO: 3896391 - DNA, 25 bp, Homo sapien
caagaagcaacagttgggcaaagct

SEQ ID NO: 3896392 - DNA, 25 bp, Homo sapien
gggctcagttcgctgccccaagaag

SEQ ID NO: 3896393 - DNA, 25 bp, Homo sapien
gagagttgtctcaagagttcagggc

SEQ ID NO: 3896394 - DNA, 25 bp, Homo sapien
gcctcatctcaaaccatggggcagg

SEQ ID NO: 3896395 - DNA, 25 bp, Homo sapien
tgaactggtgctgtcccagaggcct

SEQ ID NO: 3896396 - DNA, 25 bp, Homo sapien
tgtggcctcatctcaaaccatgggg

SEQ ID NO: 3896397 - DNA, 25 bp, Homo sapien
cagaggcctgattctctgctgcccc

SEQ ID NO: 3896398 - DNA, 25 bp, Homo sapien
ggggcaggtgcccttctagtcctgc

SEQ ID NO: 3896399 - DNA, 25 bp, Homo sapien
aggggcaggtgcccttctagtcctg

SEQ ID NO: 3896400 - DNA, 25 bp, Homo sapien
gggcaggtgcccttctagtcctgcc

SEQ ID NO: 3896401 - DNA, 25 bp, Homo sapien
catgcgtccttaacaaacaactggg

SEQ ID NO: 3896402 - DNA, 25 bp, Homo sapien
ttgtggtcacagtcgcctcatgcgg

SEQ ID NO: 3896403 - DNA, 25 bp, Homo sapien
ctgaaaaagttggtctgtgagcccc

SEQ ID NO: 3896404 - DNA, 25 bp, Homo sapien
tctaggtcagttagggacatgcgtc

SEQ ID NO: 3896405 - DNA, 25 bp, Homo sapien
tggatccatccggaggaagctgcag

SEQ ID NO: 3896406 - DNA, 25 bp, Homo sapien
gctgttcagagctgggtctagcccc

SEQ ID NO: 3896407 - DNA, 25 bp, Homo sapien
gacagtgctgtgtccgttctgcagg

SEQ ID NO: 3896408 - DNA, 25 bp, Homo sapien
gggagtctccccagggtaatagtca

SEQ ID NO: 3896409 - DNA, 25 bp, Homo sapien
ccggtggtcatacagccaggatcag

SEQ ID NO: 3896410 - DNA, 25 bp, Homo sapien
tgtccaaggttacccagcaggtaag

SEQ ID NO: 3896411 - DNA, 25 bp, Homo sapien
tttaatcctcgagacagcttccatg

SEQ ID NO: 3896412 - DNA, 25 bp, Homo sapien
ctgcccatcagtggcggaaggaccc

SEQ ID NO: 3896413 - DNA, 25 bp, Homo sapien
gccaatggcccatagtccttgagca

SEQ ID NO: 3896414 - DNA, 25 bp, Homo sapien
tactgagagcagttgggccaatggc

SEQ ID NO: 3896415 - DNA, 25 bp, Homo sapien
catggcctcaaggttcctgaagttc

SEQ ID NO: 3896416 - DNA, 25 bp, Homo sapien
gctgtggctgttgggatgaccctcc

SEQ ID NO: 3896417 - DNA, 25 bp, Homo sapien
agggttctgcaagggtcagccagat

SEQ ID NO: 3896418 - DNA, 25 bp, Homo sapien
cagatgcgagttccggtcctaggtc

SEQ ID NO: 3896419 - DNA, 25 bp, Homo sapien
caaggcttaacctcttaggagctca

SEQ ID NO: 3896420 - DNA, 25 bp, Homo sapien
tcaggtgacctcaagtaagttgcct

SEQ ID NO: 3896421 - DNA, 25 bp, Homo sapien
tgtacaattcggtggtcggtggtaa

SEQ ID NO: 3896422 - DNA, 25 bp, Homo sapien
gtatattaaggtggcaatgcaccca

SEQ ID NO: 3896423 - DNA, 25 bp, Homo sapien
gaagtgaaatcgtagtatctaacct

SEQ ID NO: 3896424 - DNA, 25 bp, Homo sapien
actccaacaggcctattgatggtca

SEQ ID NO: 3896425 - DNA, 25 bp, Homo sapien
acagcttagccgaggaagagccagg

SEQ ID NO: 3896426 - DNA, 25 bp, Homo sapien
aattttgggctaaggagcctgctga

SEQ ID NO: 3896427 - DNA, 25 bp, Homo sapien
caagctcaatgaggcggtcctgtta

SEQ ID NO: 3896428 - DNA, 25 bp, Homo sapien
ggtaagcaacttgccgaccgtcaca

SEQ ID NO: 3896429 - DNA, 25 bp, Homo sapien
aacagatcctctgtattgtttctga

SEQ ID NO: 3896430 - DNA, 25 bp, Homo sapien
gtgctgtgttcatgcagtgatagct

SEQ ID NO: 3896431 - DNA, 25 bp, Homo sapien
ctctttcttttacacggctgcgtaa

SEQ ID NO: 3896432 - DNA, 25 bp, Homo sapien
tagtctacttcagggcttaccataa

SEQ ID NO: 3896433 - DNA, 25 bp, Homo sapien
taattacagggtaaccgacagccca

SEQ ID NO: 3896434 - DNA, 25 bp, Homo sapien
ccctgtctggaaaagaggagacctg

SEQ ID NO: 3896435 - DNA, 25 bp, Homo sapien
actttaacacgggtcgggcacagag

SEQ ID NO: 3896436 - DNA, 25 bp, Homo sapien
ggttcctaagcccagtcagagctgt

SEQ ID NO: 3896437 - DNA, 25 bp, Homo sapien
tcggagcctccgtattcggaaacaa

SEQ ID NO: 3896438 - DNA, 25 bp, Homo sapien
tttcatcctgcgagccctagggtct

SEQ ID NO: 3896439 - DNA, 25 bp, Homo sapien
gatatgcaactttcgcacttcggag

SEQ ID NO: 3896440 - DNA, 25 bp, Homo sapien
cccgaggtgcagttgtgctggtcca

SEQ ID NO: 3896441 - DNA, 25 bp, Homo sapien
ctggccggcaaggtgattttcttgg

SEQ ID NO: 3896442 - DNA, 25 bp, Homo sapien
ggaaagattgccttggttctctgaa

SEQ ID NO: 3896443 - DNA, 25 bp, Homo sapien
aaagattgccttggttctctgaaaa

SEQ ID NO: 3896444 - DNA, 25 bp, Homo sapien
ggggaaagattgccttggttctctg

SEQ ID NO: 3896445 - DNA, 25 bp, Homo sapien
agatacgcccctctggtgacagcca

SEQ ID NO: 3896446 - DNA, 25 bp, Homo sapien
gatacgcccctctggtgacagccat

SEQ ID NO: 3896447 - DNA, 25 bp, Homo sapien
aagaaccagatacgcccctctggtg

SEQ ID NO: 3896448 - DNA, 25 bp, Homo sapien
ggcagaagaaccagatacgcccctc

SEQ ID NO: 3896449 - DNA, 25 bp, Homo sapien
gacagaaacactcccggcctgagca

SEQ ID NO: 3896450 - DNA, 25 bp, Homo sapien
gcagacagaaacactcccggcctga

SEQ ID NO: 3896451 - DNA, 25 bp, Homo sapien
cagcagacagaaacactcccggcct

SEQ ID NO: 3896452 - DNA, 25 bp, Homo sapien
cccagcagacagaaacactcccggc

SEQ ID NO: 3896453 - DNA, 25 bp, Homo sapien
ggagccccagtgaagtgccagggtg

SEQ ID NO: 3896454 - DNA, 25 bp, Homo sapien
gagccccagtgaagtgccagggtgt

SEQ ID NO: 3896455 - DNA, 25 bp, Homo sapien
agccccagtgaagtgccagggtgtg

SEQ ID NO: 3896456 - DNA, 25 bp, Homo sapien
aaggcaatcctgtgtgtaaagagtt

SEQ ID NO: 3896457 - DNA, 25 bp, Homo sapien
caaaggcaatcctgtgtgtaaagag

SEQ ID NO: 3896458 - DNA, 25 bp, Homo sapien
ttgcggggattgaatgaaagcaaag

SEQ ID NO: 3896459 - DNA, 25 bp, Homo sapien
cacacatgttgttgcggggattgaa

SEQ ID NO: 3896460 - DNA, 25 bp, Homo sapien
ctggacacacgcaggatgccaggtg

SEQ ID NO: 3896461 - DNA, 25 bp, Homo sapien
tgaggatgccaagcgtgagtggtgc

SEQ ID NO: 3896462 - DNA, 25 bp, Homo sapien
gtgaggatgccaagcgtgagtggtg

SEQ ID NO: 3896463 - DNA, 25 bp, Homo sapien
ggaccgcatggcttttatgtccagg

SEQ ID NO: 3896464 - DNA, 25 bp, Homo sapien
cgcatggcttttatgtccaggagag

SEQ ID NO: 3896465 - DNA, 25 bp, Homo sapien
gactctggagatgccttgagtctcc

SEQ ID NO: 3896466 - DNA, 25 bp, Homo sapien
aggctgtgactctggagatgccttg

SEQ ID NO: 3896467 - DNA, 25 bp, Homo sapien
cccctcgggctttggaaaatgcttg

SEQ ID NO: 3896468 - DNA, 25 bp, Homo sapien
gggtgatgggcagagtcttgtaagc

SEQ ID NO: 3896469 - DNA, 25 bp, Homo sapien
cctcgggctttggaaaatgcttgga

SEQ ID NO: 3896470 - DNA, 25 bp, Homo sapien
cagcccctcgggctttggaaaatgc

SEQ ID NO: 3896471 - DNA, 25 bp, Homo sapien
ctggtgagggtgactaaggcatcag

SEQ ID NO: 3896472 - DNA, 25 bp, Homo sapien
ggagcctccgtttccaacatcaggt

SEQ ID NO: 3896473 - DNA, 25 bp, Homo sapien
actaaggcatcagtgttggtcttgg

SEQ ID NO: 3896474 - DNA, 25 bp, Homo sapien
gcctccgtttccaacatcaggtgca

SEQ ID NO: 3896475 - DNA, 25 bp, Homo sapien
gagtgtcgtgatttgggttgacact

SEQ ID NO: 3896476 - DNA, 25 bp, Homo sapien
cgcacttccttacttcctcaggctt

SEQ ID NO: 3896477 - DNA, 25 bp, Homo sapien
acacacgggaagacagatcccaccg

SEQ ID NO: 3896478 - DNA, 25 bp, Homo sapien
gggaagacagatcccaccgcacttc

SEQ ID NO: 3896479 - DNA, 25 bp, Homo sapien
agcccagagtttcccctgtggcggc

SEQ ID NO: 3896480 - DNA, 25 bp, Homo sapien
ggccttcctcaagaggaagccagga

SEQ ID NO: 3896481 - DNA, 25 bp, Homo sapien
cctgtggcggccaaaacctttgcct

SEQ ID NO: 3896482 - DNA, 25 bp, Homo sapien
tcctgtgaccaaaggcgggtcttct

SEQ ID NO: 3896483 - DNA, 25 bp, Homo sapien
ttcaaggtcggttgtgatggccaca

SEQ ID NO: 3896484 - DNA, 25 bp, Homo sapien
tcaggaacctgtctggcaacaacat

SEQ ID NO: 3896485 - DNA, 25 bp, Homo sapien
taaggcgcagacaaggaacgtcagc

SEQ ID NO: 3896486 - DNA, 25 bp, Homo sapien
gccacagatttggtcacagggagac

SEQ ID NO: 3896487 - DNA, 25 bp, Homo sapien
cctggaaccctgggaatatgacctt

SEQ ID NO: 3896488 - DNA, 25 bp, Homo sapien
gaggtatgcagaggtcatactggat

SEQ ID NO: 3896489 - DNA, 25 bp, Homo sapien
tggaaccctgggaatatgaccttat

SEQ ID NO: 3896490 - DNA, 25 bp, Homo sapien
tactggattagcgtaggccttaagt

SEQ ID NO: 3896491 - DNA, 25 bp, Homo sapien
taatgctggtcgacttttgaattcc

SEQ ID NO: 3896492 - DNA, 25 bp, Homo sapien
tacatataagatttacgttggttcc

SEQ ID NO: 3896493 - DNA, 25 bp, Homo sapien
caagttaacgttagaatgcccttgg

SEQ ID NO: 3896494 - DNA, 25 bp, Homo sapien
tataatgaggcttgtccaaaccctc

SEQ ID NO: 3896495 - DNA, 25 bp, Homo sapien
ggctgttcacggctctgcttccttt

SEQ ID NO: 3896496 - DNA, 25 bp, Homo sapien
tctcttgtgggatcgctttagtctg

SEQ ID NO: 3896497 - DNA, 25 bp, Homo sapien
ggatcgctttagtctgatgcggacc

SEQ ID NO: 3896498 - DNA, 25 bp, Homo sapien
tgaagtgagaccctgagctcgctga

SEQ ID NO: 3896499 - DNA, 25 bp, Homo sapien
ggccttggacgtagagccaaccaga

SEQ ID NO: 3896500 - DNA, 25 bp, Homo sapien
gccggcagtggccttggacgtagag

SEQ ID NO: 3896501 - DNA, 25 bp, Homo sapien
tggacgtagagccaaccagacactg

SEQ ID NO: 3896502 - DNA, 25 bp, Homo sapien
gcagtggccttggacgtagagccaa

SEQ ID NO: 3896503 - DNA, 25 bp, Homo sapien
tcagcagaacggaagctccaggaac

SEQ ID NO: 3896504 - DNA, 25 bp, Homo sapien
cagcagaacggaagctccaggaact

SEQ ID NO: 3896505 - DNA, 25 bp, Homo sapien
gtctacgtgtgcttggtaatagata

SEQ ID NO: 3896506 - DNA, 25 bp, Homo sapien
cgtaaagattttcctgttcctgtga

SEQ ID NO: 3896507 - DNA, 25 bp, Homo sapien
aagtcccaaagcaatattttccacg

SEQ ID NO: 3896508 - DNA, 25 bp, Homo sapien
gggctgtgctttccgaacaccgtct

SEQ ID NO: 3896509 - DNA, 25 bp, Homo sapien
agtgcgagactaccatctcgaaaac

SEQ ID NO: 3896510 - DNA, 25 bp, Homo sapien
cgagactaccatctcgaaaacaaca

SEQ ID NO: 3896511 - DNA, 25 bp, Homo sapien
gtgcgagactaccatctcgaaaaca

SEQ ID NO: 3896512 - DNA, 25 bp, Homo sapien
ttgaggttcccaagaattgtcctgg

SEQ ID NO: 3896513 - DNA, 25 bp, Homo sapien
ggagcagctcggaagtattataatt

SEQ ID NO: 3896514 - DNA, 25 bp, Homo sapien
tccgtagctgaaacaggacgcttat

SEQ ID NO: 3896515 - DNA, 25 bp, Homo sapien
tacagcaagagattcttgaggttcc

SEQ ID NO: 3896516 - DNA, 25 bp, Homo sapien
cgtagtcgtgacctcagtggctgca

SEQ ID NO: 3896517 - DNA, 25 bp, Homo sapien
gcccgaagagcactcggtgaggatc

SEQ ID NO: 3896518 - DNA, 25 bp, Homo sapien
gagcagatcctgtcggtgaagatgc

SEQ ID NO: 3896519 - DNA, 25 bp, Homo sapien
ttcccccacggctcaagagaagatg

SEQ ID NO: 3896520 - DNA, 25 bp, Homo sapien
tgctctgctgcaagttcaaacaccg

SEQ ID NO: 3896521 - DNA, 25 bp, Homo sapien
cagtagcttgtataatggtgccagg

SEQ ID NO: 3896522 - DNA, 25 bp, Homo sapien
cagggctggttcagatggtcaccaa

SEQ ID NO: 3896523 - DNA, 25 bp, Homo sapien
gtaagaacttctgggtgggcaccca

SEQ ID NO: 3896524 - DNA, 25 bp, Homo sapien
caggagtcctgttaaatccagtggg

SEQ ID NO: 3896525 - DNA, 25 bp, Homo sapien
tgccagtggcttccgagcagtaagt

SEQ ID NO: 3896526 - DNA, 25 bp, Homo sapien
gatctctaggcagaggtccccttgt

SEQ ID NO: 3896527 - DNA, 25 bp, Homo sapien
tacctggctgcgctggatcagagct

SEQ ID NO: 3896528 - DNA, 25 bp, Homo sapien
taattgggtcattgttccacagact

SEQ ID NO: 3896529 - DNA, 25 bp, Homo sapien
ttgggtcattgttccacagactgta

SEQ ID NO: 3896530 - DNA, 25 bp, Homo sapien
tttaattgggtcattgttccacaga

SEQ ID NO: 3896531 - DNA, 25 bp, Homo sapien
aattgggtcattgttccacagactg

SEQ ID NO: 3896532 - DNA, 25 bp, Homo sapien
tgtggcccctccgcatttgctcttt

SEQ ID NO: 3896533 - DNA, 25 bp, Homo sapien
tggcacttctggcatttaaaactgt

SEQ ID NO: 3896534 - DNA, 25 bp, Homo sapien
catggatatcttaacaggtgtgaga

SEQ ID NO: 3896535 - DNA, 25 bp, Homo sapien
tcatgggaagatgtacctgtttcca

SEQ ID NO: 3896536 - DNA, 25 bp, Homo sapien
gattaccgactgatttctgctgcca

SEQ ID NO: 3896537 - DNA, 25 bp, Homo sapien
tttcatgcagactgcctggcacgca

SEQ ID NO: 3896538 - DNA, 25 bp, Homo sapien
gccgctgtggcaatgtgattaccga

SEQ ID NO: 3896539 - DNA, 25 bp, Homo sapien
gattttgttgctgtggtgtaccgcg

SEQ ID NO: 3896540 - DNA, 25 bp, Homo sapien
gagaacagtttagatctactcttaa

SEQ ID NO: 3896541 - DNA, 25 bp, Homo sapien
gaacagtttagatctactcttaaca

SEQ ID NO: 3896542 - DNA, 25 bp, Homo sapien
aacagtttagatctactcttaacaa

SEQ ID NO: 3896543 - DNA, 25 bp, Homo sapien
cagtttagatctactcttaacaatt

SEQ ID NO: 3896544 - DNA, 25 bp, Homo sapien
cctggatcttaaacttggaaagccg

SEQ ID NO: 3896545 - DNA, 25 bp, Homo sapien
caggaagccaacctcagccaatctg

SEQ ID NO: 3896546 - DNA, 25 bp, Homo sapien
aaggtttctcaatccacgtgggtga

SEQ ID NO: 3896547 - DNA, 25 bp, Homo sapien
catacggctttggtaacatggcccc

SEQ ID NO: 3896548 - DNA, 25 bp, Homo sapien
tgcaacccatccattcaggagctgg

SEQ ID NO: 3896549 - DNA, 25 bp, Homo sapien
gcaaactgcttaatcatcatggacc

SEQ ID NO: 3896550 - DNA, 25 bp, Homo sapien
gccaacctctagagttcagaacaga

SEQ ID NO: 3896551 - DNA, 25 bp, Homo sapien
tttgcagactggcacagatccatgg

SEQ ID NO: 3896552 - DNA, 25 bp, Homo sapien
tccagtgctccatacagcttccaga

SEQ ID NO: 3896553 - DNA, 25 bp, Homo sapien
ttggagcccctcctgtgaaattctt

SEQ ID NO: 3896554 - DNA, 25 bp, Homo sapien
tgaaattcttgtaggatttgtttcc

SEQ ID NO: 3896555 - DNA, 25 bp, Homo sapien
ggctgaacctgatgggtcttggagc

SEQ ID NO: 3896556 - DNA, 25 bp, Homo sapien
ttctgaggcacccactccttagcaa

SEQ ID NO: 3896557 - DNA, 25 bp, Homo sapien
ctgattctgaggcacccactcctta

SEQ ID NO: 3896558 - DNA, 25 bp, Homo sapien
gattctgaggcacccactccttagc

SEQ ID NO: 3896559 - DNA, 25 bp, Homo sapien
ctgaggcacccactccttagcaacc

SEQ ID NO: 3896560 - DNA, 25 bp, Homo sapien
aacattgtgcacagacaatgcccat

SEQ ID NO: 3896561 - DNA, 25 bp, Homo sapien
gaacattgtgcacagacaatgccca

SEQ ID NO: 3896562 - DNA, 25 bp, Homo sapien
cagctaccttatctgtagggcccag

SEQ ID NO: 3896563 - DNA, 25 bp, Homo sapien
caggcttataaggactttcagttct

SEQ ID NO: 3896564 - DNA, 25 bp, Homo sapien
caggtgcacaggcttataaggactt

SEQ ID NO: 3896565 - DNA, 25 bp, Homo sapien
tagcagctaccttatctgtagggcc

SEQ ID NO: 3896566 - DNA, 25 bp, Homo sapien
ggtggtagagctgctgcttcacgcc

SEQ ID NO: 3896567 - DNA, 25 bp, Homo sapien
tacacatgtgtggagccatcgtccc

SEQ ID NO: 3896568 - DNA, 25 bp, Homo sapien
accaggtcaatgatgcgggccatag

SEQ ID NO: 3896569 - DNA, 25 bp, Homo sapien
ccgctccatgggaagcaggatggcc

SEQ ID NO: 3896570 - DNA, 25 bp, Homo sapien
agtgtaaaatgggcgttgtcaaatt

SEQ ID NO: 3896571 - DNA, 25 bp, Homo sapien
aaggagtgtaaaatgggcgttgtca

SEQ ID NO: 3896572 - DNA, 25 bp, Homo sapien
ggagtgtaaaatgggcgttgtcaaa

SEQ ID NO: 3896573 - DNA, 25 bp, Homo sapien
caaggagtgtaaaatgggcgttgtc

SEQ ID NO: 3896574 - DNA, 25 bp, Homo sapien
tgggcgccagctttccctcgtggta

SEQ ID NO: 3896575 - DNA, 25 bp, Homo sapien
gctttccctcgtggtacctgttgcg

SEQ ID NO: 3896576 - DNA, 25 bp, Homo sapien
cgatgggcgccagctttccctcgtg

SEQ ID NO: 3896577 - DNA, 25 bp, Homo sapien
cgtggtacctgttgcgaagcttctg

SEQ ID NO: 3896578 - DNA, 25 bp, Homo sapien
accagtcctcgatggcgcgcgtgaa

SEQ ID NO: 3896579 - DNA, 25 bp, Homo sapien
ccgaggacacgaagtgggaccagtc

SEQ ID NO: 3896580 - DNA, 25 bp, Homo sapien
aggcagcttgaactccccggccgag

SEQ ID NO: 3896581 - DNA, 25 bp, Homo sapien
cagggccagtccactcggttgatgc

SEQ ID NO: 3896582 - DNA, 25 bp, Homo sapien
gggcttcaagtaccgcaccgcgtag

SEQ ID NO: 3896583 - DNA, 25 bp, Homo sapien
ccaggtctgggtcacgtcgggcttc

SEQ ID NO: 3896584 - DNA, 25 bp, Homo sapien
tctgggtcacgtcgggcttcaagta

SEQ ID NO: 3896585 - DNA, 25 bp, Homo sapien
tcacgtcgggcttcaagtaccgcac

SEQ ID NO: 3896586 - DNA, 25 bp, Homo sapien
ccgctcagggacgggtctgcgcgca

SEQ ID NO: 3896587 - DNA, 25 bp, Homo sapien
agggacgggtctgcgcgcagcgctc

SEQ ID NO: 3896588 - DNA, 25 bp, Homo sapien
ctcagggacgggtctgcgcgcagcg

SEQ ID NO: 3896589 - DNA, 25 bp, Homo sapien
cagggacgggtctgcgcgcagcgct

SEQ ID NO: 3896590 - DNA, 25 bp, Homo sapien
cagcagggataggggcgcggtgagt

SEQ ID NO: 3896591 - DNA, 25 bp, Homo sapien
ggggagcacggacgccctgcccacg

SEQ ID NO: 3896592 - DNA, 25 bp, Homo sapien
gggagcacggacgccctgcccacgc

SEQ ID NO: 3896593 - DNA, 25 bp, Homo sapien
gataggggcgcggtgagtcggggga

SEQ ID NO: 3896594 - DNA, 25 bp, Homo sapien
ggggcttctgtccgtagcggtccag

SEQ ID NO: 3896595 - DNA, 25 bp, Homo sapien
ggcttctgtccgtagcggtccaggc

SEQ ID NO: 3896596 - DNA, 25 bp, Homo sapien
gcttctgtccgtagcggtccaggct

SEQ ID NO: 3896597 - DNA, 25 bp, Homo sapien
gggcttctgtccgtagcggtccagg

SEQ ID NO: 3896598 - DNA, 25 bp, Homo sapien
ggagccgaagcttcggaaagtgttc

SEQ ID NO: 3896599 - DNA, 25 bp, Homo sapien
ctggagccgaagcttcggaaagtgt

SEQ ID NO: 3896600 - DNA, 25 bp, Homo sapien
tagctggagccgaagcttcggaaag

SEQ ID NO: 3896601 - DNA, 25 bp, Homo sapien
ctgtagctggagccgaagcttcgga

SEQ ID NO: 3896602 - DNA, 25 bp, Homo sapien
tagtctggctggagtgtacaaagtg

SEQ ID NO: 3896603 - DNA, 25 bp, Homo sapien
gaagggccatctaggcgctgaaaca

SEQ ID NO: 3896604 - DNA, 25 bp, Homo sapien
taatggcacgaaggagttttccagg

SEQ ID NO: 3896605 - DNA, 25 bp, Homo sapien
cccagcagtcggatgagaacgtggt

SEQ ID NO: 3896606 - DNA, 25 bp, Homo sapien
tattgcactcgatactcagggacac

SEQ ID NO: 3896607 - DNA, 25 bp, Homo sapien
aaggctggtttctgtcaataatgac

SEQ ID NO: 3896608 - DNA, 25 bp, Homo sapien
ggcatcatatggtagcaaaacccag

SEQ ID NO: 3896609 - DNA, 25 bp, Homo sapien
tcagggacacaaaggtagtgaccaa

SEQ ID NO: 3896610 - DNA, 25 bp, Homo sapien
tgccagggggtcaggtagttgacac

SEQ ID NO: 3896611 - DNA, 25 bp, Homo sapien
ttaatgccagggggtcaggtagttg

SEQ ID NO: 3896612 - DNA, 25 bp, Homo sapien
aatgccagggggtcaggtagttgac

SEQ ID NO: 3896613 - DNA, 25 bp, Homo sapien
ccagggggtcaggtagttgacacga

SEQ ID NO: 3896614 - DNA, 25 bp, Homo sapien
caccgtccggcagcctgggagtcag

SEQ ID NO: 3896615 - DNA, 25 bp, Homo sapien
acctgaggtggcaccgtccggcagc

SEQ ID NO: 3896616 - DNA, 25 bp, Homo sapien
tttatttctagttaggctgaactcc

SEQ ID NO: 3896617 - DNA, 25 bp, Homo sapien
ggctggtgccaccataagtcctctg

SEQ ID NO: 3896618 - DNA, 25 bp, Homo sapien
gcacaccagtatgacaagagcttca

SEQ ID NO: 3896619 - DNA, 25 bp, Homo sapien
taagatactgtcatcctgtggccct

SEQ ID NO: 3896620 - DNA, 25 bp, Homo sapien
tcacaggaatcaaggccataggcct

SEQ ID NO: 3896621 - DNA, 25 bp, Homo sapien
aattctggctggaccttgcggctta

SEQ ID NO: 3896622 - DNA, 25 bp, Homo sapien
tgctttaggatgagggtgacatctg

SEQ ID NO: 3896623 - DNA, 25 bp, Homo sapien
gaagtgtggtgctttaggatgaggg

SEQ ID NO: 3896624 - DNA, 25 bp, Homo sapien
tgggaagtgtggtgctttaggatga

SEQ ID NO: 3896625 - DNA, 25 bp, Homo sapien
atgagggtgacatctggatgagggc

SEQ ID NO: 3896626 - DNA, 25 bp, Homo sapien
tgtttgaagatgctgacagtaccaa

SEQ ID NO: 3896627 - DNA, 25 bp, Homo sapien
gaagatgctgacagtaccaactcca

SEQ ID NO: 3896628 - DNA, 25 bp, Homo sapien
gggattttcaggaatgagcctgaga

SEQ ID NO: 3896629 - DNA, 25 bp, Homo sapien
gattttcaggaatgagcctgagacc

SEQ ID NO: 3896630 - DNA, 25 bp, Homo sapien
agagcagttagaggccagactgtcc

SEQ ID NO: 3896631 - DNA, 25 bp, Homo sapien
tctttggcagagcagttagaggcca

SEQ ID NO: 3896632 - DNA, 25 bp, Homo sapien
tggcagagcagttagaggccagact

SEQ ID NO: 3896633 - DNA, 25 bp, Homo sapien
cagttagaggccagactgtcctgtg

SEQ ID NO: 3896634 - DNA, 25 bp, Homo sapien
aaccggcacccggagttccgctgtg

SEQ ID NO: 3896635 - DNA, 25 bp, Homo sapien
gagttccgctgtgccggaagcgccc

SEQ ID NO: 3896636 - DNA, 25 bp, Homo sapien
ctcatccaagaccaccagagcaggt

SEQ ID NO: 3896637 - DNA, 25 bp, Homo sapien
tcatccaagaccaccagagcaggtc

SEQ ID NO: 3896638 - DNA, 25 bp, Homo sapien
atcccccggcctggtccgcatcccg

SEQ ID NO: 3896639 - DNA, 25 bp, Homo sapien
cggcctggtccgcatcccgtcctcg

SEQ ID NO: 3896640 - DNA, 25 bp, Homo sapien
ccatcccccggcctggtccgcatcc

SEQ ID NO: 3896641 - DNA, 25 bp, Homo sapien
cctggtccgcatcccgtcctcggac

SEQ ID NO: 3896642 - DNA, 25 bp, Homo sapien
ttttgtgctgtcatcttcaggcccc

SEQ ID NO: 3896643 - DNA, 25 bp, Homo sapien
atggtacatagacgtgggtggccca

SEQ ID NO: 3896644 - DNA, 25 bp, Homo sapien
atgttcagcacactgtcaggtactg

SEQ ID NO: 3896645 - DNA, 25 bp, Homo sapien
tcggtgcccgggaacatgttcagca

SEQ ID NO: 3896646 - DNA, 25 bp, Homo sapien
gaggtggaacaccttcatccttacc

SEQ ID NO: 3896647 - DNA, 25 bp, Homo sapien
gtcatacgggctttcagagcctgca

SEQ ID NO: 3896648 - DNA, 25 bp, Homo sapien
ggtggcgcagaaccacactctggga

SEQ ID NO: 3896649 - DNA, 25 bp, Homo sapien
gggcagcaacacatcaagcagatcc

SEQ ID NO: 3896650 - DNA, 25 bp, Homo sapien
tggttccaatgaggcaatgaggtcc

SEQ ID NO: 3896651 - DNA, 25 bp, Homo sapien
tctggaccagtctagcaggagatgc

SEQ ID NO: 3896652 - DNA, 25 bp, Homo sapien
cacccaagtggtgtgctgagggcac

SEQ ID NO: 3896653 - DNA, 25 bp, Homo sapien
gattctgcaggatatgccaaccggg

SEQ ID NO: 3896654 - DNA, 25 bp, Homo sapien
tcctagttgggcagtgacatcctat

SEQ ID NO: 3896655 - DNA, 25 bp, Homo sapien
gggttcagctaactgagcagtttcc

SEQ ID NO: 3896656 - DNA, 25 bp, Homo sapien
ccgagtgtctggattgggacaaatc

SEQ ID NO: 3896657 - DNA, 25 bp, Homo sapien
tatggaattcctgggcctatggccc

SEQ ID NO: 3896658 - DNA, 25 bp, Homo sapien
tggtacaccattagccgggagatgc

SEQ ID NO: 3896659 - DNA, 25 bp, Homo sapien
tgcccaagggcaaaagtcagtcagc

SEQ ID NO: 3896660 - DNA, 25 bp, Homo sapien
tccgcaggataagggaagcactctc

SEQ ID NO: 3896661 - DNA, 25 bp, Homo sapien
ggactcgtgcccagttaaggaacca

SEQ ID NO: 3896662 - DNA, 25 bp, Homo sapien
tgtcacctatgacgctttcgtgagg

SEQ ID NO: 3896663 - DNA, 25 bp, Homo sapien
gataatggaccacttaacagctgat

SEQ ID NO: 3896664 - DNA, 25 bp, Homo sapien
cattatgcaggtggtatactgaacc

SEQ ID NO: 3896665 - DNA, 25 bp, Homo sapien
tgaaccttaaacattagagctggac

SEQ ID NO: 3896666 - DNA, 25 bp, Homo sapien
tacctggttggcagtaaagaagaat

SEQ ID NO: 3896667 - DNA, 25 bp, Homo sapien
ggttttctcttgattggtgtaaatc

SEQ ID NO: 3896668 - DNA, 25 bp, Homo sapien
ctggttttctcttgattggtgtaaa

SEQ ID NO: 3896669 - DNA, 25 bp, Homo sapien
gtaaatctttacctggttggcagta

SEQ ID NO: 3896670 - DNA, 25 bp, Homo sapien
taaacaccacaactgggatggagct

SEQ ID NO: 3896671 - DNA, 25 bp, Homo sapien
tccttagtgtacagcaaatgcctgg

SEQ ID NO: 3896672 - DNA, 25 bp, Homo sapien
gaggcccctttcagaagtgctcaga

SEQ ID NO: 3896673 - DNA, 25 bp, Homo sapien
gatgaagacacggactaaacaccac

SEQ ID NO: 3896674 - DNA, 25 bp, Homo sapien
gaagtgacctcaagcccaataaagg

SEQ ID NO: 3896675 - DNA, 25 bp, Homo sapien
gtggtgaggttgaattcctccatga

SEQ ID NO: 3896676 - DNA, 25 bp, Homo sapien
gaactgggcatgccctgaagtgacc

SEQ ID NO: 3896677 - DNA, 25 bp, Homo sapien
aaagtggtgaggttgaattcctcca

SEQ ID NO: 3896678 - DNA, 25 bp, Homo sapien
cagctggagacgtgcatcacccaca

SEQ ID NO: 3896679 - DNA, 25 bp, Homo sapien
cctccagctggagacgtgcatcacc

SEQ ID NO: 3896680 - DNA, 25 bp, Homo sapien
tccagctggagacgtgcatcaccca

SEQ ID NO: 3896681 - DNA, 25 bp, Homo sapien
gctggagacgtgcatcacccacaca

SEQ ID NO: 3896682 - DNA, 25 bp, Homo sapien
ttcaaaggcatcgagaagaacttgt

SEQ ID NO: 3896683 - DNA, 25 bp, Homo sapien
ggacttgctcagtgtgcacgcgcag

SEQ ID NO: 3896684 - DNA, 25 bp, Homo sapien
ttcccagacttgcagcggacttgct

SEQ ID NO: 3896685 - DNA, 25 bp, Homo sapien
caaaggcatcgagaagaacttgttc

SEQ ID NO: 3896686 - DNA, 25 bp, Homo sapien
ctggtctgcagagggccctggagga

SEQ ID NO: 3896687 - DNA, 25 bp, Homo sapien
cctggaggaggaaggcctctggtgc

SEQ ID NO: 3896688 - DNA, 25 bp, Homo sapien
gggccctggaggaggaaggcctctg

SEQ ID NO: 3896689 - DNA, 25 bp, Homo sapien
gccctggaggaggaaggcctctggt

SEQ ID NO: 3896690 - DNA, 25 bp, Homo sapien
aatatcagcactcagggaggatgag

SEQ ID NO: 3896691 - DNA, 25 bp, Homo sapien
tctccatcgattttagcaggttcct

SEQ ID NO: 3896692 - DNA, 25 bp, Homo sapien
ctcctgccaggttgaaggcatggct

SEQ ID NO: 3896693 - DNA, 25 bp, Homo sapien
gaggatgaggagtggctacacctcc

SEQ ID NO: 3896694 - DNA, 25 bp, Homo sapien
ggagagacaggaggggaagagagag

SEQ ID NO: 3896695 - DNA, 25 bp, Homo sapien
ggaggagagacaggaggggaagaga

SEQ ID NO: 3896696 - DNA, 25 bp, Homo sapien
aggaggggaggagagacaggagggg

SEQ ID NO: 3896697 - DNA, 25 bp, Homo sapien
gaggggaggagagacaggaggggaa

SEQ ID NO: 3896698 - DNA, 25 bp, Homo sapien
ggctcgccagtgaccccaatatttt

SEQ ID NO: 3896699 - DNA, 25 bp, Homo sapien
agccagggcgtgatgatttaaaaca

SEQ ID NO: 3896700 - DNA, 25 bp, Homo sapien
gagtaagcattaggatgcccaggct

SEQ ID NO: 3896701 - DNA, 25 bp, Homo sapien
tggaccacaagttatcaccctgtac

SEQ ID NO: 3896702 - DNA, 25 bp, Homo sapien
gagccagttattgatcttggcccat

SEQ ID NO: 3896703 - DNA, 25 bp, Homo sapien
ctcaaagttgctgcactcaaattcc

SEQ ID NO: 3896704 - DNA, 25 bp, Homo sapien
ggagccagttattgatcttggccca

SEQ ID NO: 3896705 - DNA, 25 bp, Homo sapien
caaagttgctgcactcaaattccat

SEQ ID NO: 3896706 - DNA, 25 bp, Homo sapien
gtttacgcttcccagacggcaggaa

SEQ ID NO: 3896707 - DNA, 25 bp, Homo sapien
ttggaaacttgcgacgctccctggc

SEQ ID NO: 3896708 - DNA, 25 bp, Homo sapien
ggcaaattcccaagcccgaggagaa

SEQ ID NO: 3896709 - DNA, 25 bp, Homo sapien
aaagggccagtgtgctcccaatgcg

SEQ ID NO: 3896710 - DNA, 25 bp, Homo sapien
tcgccgaggaggctgcccgtccagc

SEQ ID NO: 3896711 - DNA, 25 bp, Homo sapien
agcggcagcagtcgcggccgcgccg

SEQ ID NO: 3896712 - DNA, 25 bp, Homo sapien
cgtcttcggccgctacgccaaggcc

SEQ ID NO: 3896713 - DNA, 25 bp, Homo sapien
tccagcccggccgtccgggcgcgct

SEQ ID NO: 3896714 - DNA, 25 bp, Homo sapien
cgcccagctcttgctccgcctgtgg

SEQ ID NO: 3896715 - DNA, 25 bp, Homo sapien
gcctgtggctgtccccgagagcagc

SEQ ID NO: 3896716 - DNA, 25 bp, Homo sapien
cactcgcaaagagcgccactgcgcg

SEQ ID NO: 3896717 - DNA, 25 bp, Homo sapien
ccgggctctcgaggaatcggctgcc

SEQ ID NO: 3896718 - DNA, 25 bp, Homo sapien
ccaagcgggctcctagcgaagagag

SEQ ID NO: 3896719 - DNA, 25 bp, Homo sapien
cgggagggacgccaagcgggctcct

SEQ ID NO: 3896720 - DNA, 25 bp, Homo sapien
gggtccaccctctcgaatccagggc

SEQ ID NO: 3896721 - DNA, 25 bp, Homo sapien
tcgaatccagggcttcgacgtaggg

SEQ ID NO: 3896722 - DNA, 25 bp, Homo sapien
tgcccaggtccaacccaagtgtttc

SEQ ID NO: 3896723 - DNA, 25 bp, Homo sapien
tccagatcaggagcacggtttgtga

SEQ ID NO: 3896724 - DNA, 25 bp, Homo sapien
tgtgataacgcaaccatggcttctt

SEQ ID NO: 3896725 - DNA, 25 bp, Homo sapien
caggagtagggctccaggacagtca

SEQ ID NO: 3896726 - DNA, 25 bp, Homo sapien
accatcggccgatggcagcaggatg

SEQ ID NO: 3896727 - DNA, 25 bp, Homo sapien
cacgagggccatgggattagggaag

SEQ ID NO: 3896728 - DNA, 25 bp, Homo sapien
gggctggctaatggctggtaccagg

SEQ ID NO: 3896729 - DNA, 25 bp, Homo sapien
taccaggggcttatccacctgtcct

SEQ ID NO: 3896730 - DNA, 25 bp, Homo sapien
tgacagtcactcctaggggaaggac

SEQ ID NO: 3896731 - DNA, 25 bp, Homo sapien
ggtgacagtcactcctaggggaagg

SEQ ID NO: 3896732 - DNA, 25 bp, Homo sapien
gacagtcactcctaggggaaggaca

SEQ ID NO: 3896733 - DNA, 25 bp, Homo sapien
cagggtgacagtcactcctagggga

SEQ ID NO: 3896734 - DNA, 25 bp, Homo sapien
ggtgctgactcctagacggggctgt

SEQ ID NO: 3896735 - DNA, 25 bp, Homo sapien
tgcaggtgctgactcctagacgggg

SEQ ID NO: 3896736 - DNA, 25 bp, Homo sapien
caggtgctgactcctagacggggct

SEQ ID NO: 3896737 - DNA, 25 bp, Homo sapien
tgctgactcctagacggggctgtcc

SEQ ID NO: 3896738 - DNA, 25 bp, Homo sapien
tgtgctcagggtgactgaacgccaa

SEQ ID NO: 3896739 - DNA, 25 bp, Homo sapien
tgaacgccaagtgcccaaaaatctg

SEQ ID NO: 3896740 - DNA, 25 bp, Homo sapien
tggcagcaataccacccataggact

SEQ ID NO: 3896741 - DNA, 25 bp, Homo sapien
tgcctgaccggtgaaagtgtgctca

SEQ ID NO: 3896742 - DNA, 25 bp, Homo sapien
ctggaaggtgtggagcagcagatcc

SEQ ID NO: 3896743 - DNA, 25 bp, Homo sapien
ggtgtggagcagcagatccaccatc

SEQ ID NO: 3896744 - DNA, 25 bp, Homo sapien
aaggtgtggagcagcagatccacca

SEQ ID NO: 3896745 - DNA, 25 bp, Homo sapien
gaaggtgtggagcagcagatccacc

SEQ ID NO: 3896746 - DNA, 25 bp, Homo sapien
ataagatactggcaatgtcgtgggt

SEQ ID NO: 3896747 - DNA, 25 bp, Homo sapien
tcttcccaagcacgggaaacctctc

SEQ ID NO: 3896748 - DNA, 25 bp, Homo sapien
caatgtcgtgggtaccctccctgtt

SEQ ID NO: 3896749 - DNA, 25 bp, Homo sapien
gggcgcattcccacagctcaataag

SEQ ID NO: 3896750 - DNA, 25 bp, Homo sapien
agtctccctgggagacccaacacac

SEQ ID NO: 3896751 - DNA, 25 bp, Homo sapien
gcactgctccccaaagaccttaaat

SEQ ID NO: 3896752 - DNA, 25 bp, Homo sapien
tggcactgctccccaaagaccttaa

SEQ ID NO: 3896753 - DNA, 25 bp, Homo sapien
tttggcactgctccccaaagacctt

SEQ ID NO: 3896754 - DNA, 25 bp, Homo sapien
actgctccccaaagaccttaaatct

SEQ ID NO: 3896755 - DNA, 25 bp, Homo sapien
ctgggatcccgtagaagcgctgcat

SEQ ID NO: 3896756 - DNA, 25 bp, Homo sapien
aacgcatggtggacatatggcggct

SEQ ID NO: 3896757 - DNA, 25 bp, Homo sapien
ggtagccataaagccgcagccagtt

SEQ ID NO: 3896758 - DNA, 25 bp, Homo sapien
gtctcttcgtcgagcacaccggtga

SEQ ID NO: 3896759 - DNA, 25 bp, Homo sapien
ttccgacgccgccgcaggttggctt

SEQ ID NO: 3896760 - DNA, 25 bp, Homo sapien
actcgtaccccgaactggtctggca

SEQ ID NO: 3896761 - DNA, 25 bp, Homo sapien
ttcctcccggtgagggcgtagcgct

SEQ ID NO: 3896762 - DNA, 25 bp, Homo sapien
cgcaggttggctttcactcgtaccc

SEQ ID NO: 3896763 - DNA, 25 bp, Homo sapien
gctggtctcatcagcgtgaaagcgg

SEQ ID NO: 3896764 - DNA, 25 bp, Homo sapien
ggtctcatcagcgtgaaagcgggct

SEQ ID NO: 3896765 - DNA, 25 bp, Homo sapien
catcagcgtgaaagcgggctggact

SEQ ID NO: 3896766 - DNA, 25 bp, Homo sapien
aaagcgggctggactgttaaggctg

SEQ ID NO: 3896767 - DNA, 25 bp, Homo sapien
gggcctactatcctctgctggcatg

SEQ ID NO: 3896768 - DNA, 25 bp, Homo sapien
tgttcccaagagtgcacgcaaggtc

SEQ ID NO: 3896769 - DNA, 25 bp, Homo sapien
atgagtgagcggatgcagggccaag

SEQ ID NO: 3896770 - DNA, 25 bp, Homo sapien
aaggtcaccaacaagcccgtcatta

SEQ ID NO: 3896771 - DNA, 25 bp, Homo sapien
ggtgccatcaaacggcgagctgtcg

SEQ ID NO: 3896772 - DNA, 25 bp, Homo sapien
ggtaccagcccaacttctccgtgta

SEQ ID NO: 3896773 - DNA, 25 bp, Homo sapien
tcatctgcgtcaaaatgggtgtccc

SEQ ID NO: 3896774 - DNA, 25 bp, Homo sapien
gcagccggatgtcctcatagggcac

SEQ ID NO: 3896775 - DNA, 25 bp, Homo sapien
gagagaaggagggcagcacagtcag

SEQ ID NO: 3896776 - DNA, 25 bp, Homo sapien
tggggagagaaggagggcagcacag

SEQ ID NO: 3896777 - DNA, 25 bp, Homo sapien
cttttggggagagaaggagggcagc

SEQ ID NO: 3896778 - DNA, 25 bp, Homo sapien
gggagagaaggagggcagcacagtc

SEQ ID NO: 3896779 - DNA, 25 bp, Homo sapien
agcttgaagttgtcaacgtccttcc

SEQ ID NO: 3896780 - DNA, 25 bp, Homo sapien
tagaacggcgccatgatggcattgg

SEQ ID NO: 3896781 - DNA, 25 bp, Homo sapien
cttccactggtagaacggcgccatg

SEQ ID NO: 3896782 - DNA, 25 bp, Homo sapien
tgccacggagatcgtcctcgggcag

SEQ ID NO: 3896783 - DNA, 25 bp, Homo sapien
ccccaaatgatgtgggcaagtcact

SEQ ID NO: 3896784 - DNA, 25 bp, Homo sapien
gatgtgggcaagtcactaatcctca

SEQ ID NO: 3896785 - DNA, 25 bp, Homo sapien
agtcactaatcctcactgagccttg

SEQ ID NO: 3896786 - DNA, 25 bp, Homo sapien
tattccccaaatgatgtgggcaagt

SEQ ID NO: 3896787 - DNA, 25 bp, Homo sapien
ctggagactttctcgggtgggccct

SEQ ID NO: 3896788 - DNA, 25 bp, Homo sapien
ccaggccctggcttcaggcgttttg

SEQ ID NO: 3896789 - DNA, 25 bp, Homo sapien
ggacttggcccaccgaactggccca

SEQ ID NO: 3896790 - DNA, 25 bp, Homo sapien
ccttggggacattccccttgggatg

SEQ ID NO: 3896791 - DNA, 25 bp, Homo sapien
ggagaggctgggtaggctgtggctg

SEQ ID NO: 3896792 - DNA, 25 bp, Homo sapien
ggccggtggtcaggccggcctggcc

SEQ ID NO: 3896793 - DNA, 25 bp, Homo sapien
ctggccgccgtggcgtcacagtggg

SEQ ID NO: 3896794 - DNA, 25 bp, Homo sapien
ccgccgtggcgtcacagtggggaga

SEQ ID NO: 3896795 - DNA, 25 bp, Homo sapien
actgtgtcaaagtccccgtcgcaga

SEQ ID NO: 3896796 - DNA, 25 bp, Homo sapien
ggccatactggtcgggccgctctgt

SEQ ID NO: 3896797 - DNA, 25 bp, Homo sapien
ttgaacacgaacatctccccgcgaa

SEQ ID NO: 3896798 - DNA, 25 bp, Homo sapien
ccgtcgcagatgttggggccatact

SEQ ID NO: 3896799 - DNA, 25 bp, Homo sapien
gacaaaacgaccgtcttggcgctcg

SEQ ID NO: 3896800 - DNA, 25 bp, Homo sapien
aggcagcactgatgtcaccgggcag

SEQ ID NO: 3896801 - DNA, 25 bp, Homo sapien
tagttgtccaggacgcggttgtgcc

SEQ ID NO: 3896802 - DNA, 25 bp, Homo sapien
cacgccagaagtgcccgatgggcat

SEQ ID NO: 3896803 - DNA, 25 bp, Homo sapien
gaccacagaaatctggccccggagt

SEQ ID NO: 3896804 - DNA, 25 bp, Homo sapien
gggcacaggaccagacatgcaatgc

SEQ ID NO: 3896805 - DNA, 25 bp, Homo sapien
ttagagccctggtggatccatcacg

SEQ ID NO: 3896806 - DNA, 25 bp, Homo sapien
gcacttccgggttgcaggtccaacc

SEQ ID NO: 3896807 - DNA, 25 bp, Homo sapien
ttcccgtgagcaagagtcacccgct

SEQ ID NO: 3896808 - DNA, 25 bp, Homo sapien
tttagtttggtgccagccctgtcct

SEQ ID NO: 3896809 - DNA, 25 bp, Homo sapien
gaggcacacttgttcccgtgagcaa

SEQ ID NO: 3896810 - DNA, 25 bp, Homo sapien
cccgcacatatagttcttgtatggg

SEQ ID NO: 3896811 - DNA, 25 bp, Homo sapien
caggttcgcttctcgaaagagccag

SEQ ID NO: 3896812 - DNA, 25 bp, Homo sapien
gtcataggggatgcccaggccatag

SEQ ID NO: 3896813 - DNA, 25 bp, Homo sapien
caggccatagctggtcagcggctgt

SEQ ID NO: 3896814 - DNA, 25 bp, Homo sapien
caccagatggccgtgtcaatgcggt

SEQ ID NO: 3896815 - DNA, 25 bp, Homo sapien
caggctgtggacctagagatcctgc

SEQ ID NO: 3896816 - DNA, 25 bp, Homo sapien
tcctgcttgggccaggacccgttcc

SEQ ID NO: 3896817 - DNA, 25 bp, Homo sapien
aggctgtggacctagagatcctgct

SEQ ID NO: 3896818 - DNA, 25 bp, Homo sapien
accaggctgtggacctagagatcct

SEQ ID NO: 3896819 - DNA, 25 bp, Homo sapien
tgtctcctcgttgaagcgccagtac

SEQ ID NO: 3896820 - DNA, 25 bp, Homo sapien
cccctgccagacactgatgggcttg

SEQ ID NO: 3896821 - DNA, 25 bp, Homo sapien
gatcccctgccagacactgatgggc

SEQ ID NO: 3896822 - DNA, 25 bp, Homo sapien
gtctccacgctgtgtctcctcgttg

SEQ ID NO: 3896823 - DNA, 25 bp, Homo sapien
ggttgagccgaaccaccagtgagaa

SEQ ID NO: 3896824 - DNA, 25 bp, Homo sapien
gctttgggctaagggtacgactaga

SEQ ID NO: 3896825 - DNA, 25 bp, Homo sapien
cacaagagatcagagcggctgcaga

SEQ ID NO: 3896826 - DNA, 25 bp, Homo sapien
ttctagagcggaaggaacctggtgc

SEQ ID NO: 3896827 - DNA, 25 bp, Homo sapien
gcaccagcgcgtaggtgaggcccag

SEQ ID NO: 3896828 - DNA, 25 bp, Homo sapien
atcaccacgttcaccgtccgtgcca

SEQ ID NO: 3896829 - DNA, 25 bp, Homo sapien
ggcgctcattgtcgaatttccagta

SEQ ID NO: 3896830 - DNA, 25 bp, Homo sapien
gggctccatccgcaggcgctcattg

SEQ ID NO: 3896831 - DNA, 25 bp, Homo sapien
cttgcagtaaagcaggacacgtggc

SEQ ID NO: 3896832 - DNA, 25 bp, Homo sapien
ctgcagcgagcgcttgcagtaaagc

SEQ ID NO: 3896833 - DNA, 25 bp, Homo sapien
cgagcgcttgcagtaaagcaggaca

SEQ ID NO: 3896834 - DNA, 25 bp, Homo sapien
cagtaaagcaggacacgtggcgcac

SEQ ID NO: 3896835 - DNA, 25 bp, Homo sapien
acaaaacaaacacctggacataaat

SEQ ID NO: 3896836 - DNA, 25 bp, Homo sapien
cataaataatgagggcggggcagac

SEQ ID NO: 3896837 - DNA, 25 bp, Homo sapien
ctgagcaccgttagcaggagcgctg

SEQ ID NO: 3896838 - DNA, 25 bp, Homo sapien
gatgggggcctaattccctgtctgg

SEQ ID NO: 3896839 - DNA, 25 bp, Homo sapien
agtctccaactgggcaaagagagcc

SEQ ID NO: 3896840 - DNA, 25 bp, Homo sapien
aagagagcctggcagttacagccct

SEQ ID NO: 3896841 - DNA, 25 bp, Homo sapien
tgggcaaagagagcctggcagttac

SEQ ID NO: 3896842 - DNA, 25 bp, Homo sapien
ccaactgggcaaagagagcctggca

SEQ ID NO: 3896843 - DNA, 25 bp, Homo sapien
tcagaagtggactgcgaagtccact

SEQ ID NO: 3896844 - DNA, 25 bp, Homo sapien
ttctctggcacaaggagccagggtc

SEQ ID NO: 3896845 - DNA, 25 bp, Homo sapien
tcaatggggactcaagggccacggc

SEQ ID NO: 3896846 - DNA, 25 bp, Homo sapien
tggcagactccctttggtccgtggt

SEQ ID NO: 3896847 - DNA, 25 bp, Homo sapien
gttcacagtctgatgcgcggctggc

SEQ ID NO: 3896848 - DNA, 25 bp, Homo sapien
acccctgaggctagtggtgtgagtc

SEQ ID NO: 3896849 - DNA, 25 bp, Homo sapien
gggaggaacccctcatgcccagtgc

SEQ ID NO: 3896850 - DNA, 25 bp, Homo sapien
caatgggctccttcgtggggttcac

SEQ ID NO: 3896851 - DNA, 25 bp, Homo sapien
gtgcacaagaaaccactcgcagagg

SEQ ID NO: 3896852 - DNA, 25 bp, Homo sapien
ggtggcagactccactcgctcaggg

SEQ ID NO: 3896853 - DNA, 25 bp, Homo sapien
gacccgcacttggtgccagtgcaca

SEQ ID NO: 3896854 - DNA, 25 bp, Homo sapien
gagccagctgtacagtaccatttcc

SEQ ID NO: 3896855 - DNA, 25 bp, Homo sapien
aaataaatgtatgggggtggacacg

SEQ ID NO: 3896856 - DNA, 25 bp, Homo sapien
ggctgtacaatttattcagtgcaca

SEQ ID NO: 3896857 - DNA, 25 bp, Homo sapien
ccggctgtacaatttattcagtgca

SEQ ID NO: 3896858 - DNA, 25 bp, Homo sapien
tgtacaatttattcagtgcacatta

SEQ ID NO: 3896859 - DNA, 25 bp, Homo sapien
gagggcttgtggcaaactcagttgt

SEQ ID NO: 3896860 - DNA, 25 bp, Homo sapien
ttccaagggccatcgggaaggagcc

SEQ ID NO: 3896861 - DNA, 25 bp, Homo sapien
cctcccagggcatagtttccaaggg

SEQ ID NO: 3896862 - DNA, 25 bp, Homo sapien
gcccaaggccttacaaacaaggaca

SEQ ID NO: 3896863 - DNA, 25 bp, Homo sapien
ccactgggcctctgagattttagca

SEQ ID NO: 3896864 - DNA, 25 bp, Homo sapien
ctcggatgggccgtgccttcagcca

SEQ ID NO: 3896865 - DNA, 25 bp, Homo sapien
gatagatagatagggctctcggatg

SEQ ID NO: 3896866 - DNA, 25 bp, Homo sapien
aagcccccccgcaaggatagataga

SEQ ID NO: 3896867 - DNA, 25 bp, Homo sapien
tagccgctggaaactcgtgctccag

SEQ ID NO: 3896868 - DNA, 25 bp, Homo sapien
gactgccctttatcaggaaagctga

SEQ ID NO: 3896869 - DNA, 25 bp, Homo sapien
tggaaactcgtgctccaggaagcac

SEQ ID NO: 3896870 - DNA, 25 bp, Homo sapien
tcacaacccactgcccttggttctg

SEQ ID NO: 3896871 - DNA, 25 bp, Homo sapien
ttgtctacttgatccccaggggctc

SEQ ID NO: 3896872 - DNA, 25 bp, Homo sapien
ggctcttgcgaagagcaactgtggg

SEQ ID NO: 3896873 - DNA, 25 bp, Homo sapien
caactgtggggttgtgccagagacc

SEQ ID NO: 3896874 - DNA, 25 bp, Homo sapien
cagtatacttttgacggatgaagag

SEQ ID NO: 3896875 - DNA, 25 bp, Homo sapien
gaaagagccctatagacaccaggag

SEQ ID NO: 3896876 - DNA, 25 bp, Homo sapien
ctcacgtaatgaatgaagttgacag

SEQ ID NO: 3896877 - DNA, 25 bp, Homo sapien
ttgacagagggttctcactggagaa

SEQ ID NO: 3896878 - DNA, 25 bp, Homo sapien
gaggaagggacaggctctctcacgt

SEQ ID NO: 3896879 - DNA, 25 bp, Homo sapien
tcccctccactagaaactgaataag

SEQ ID NO: 3896880 - DNA, 25 bp, Homo sapien
cccctccactagaaactgaataaga

SEQ ID NO: 3896881 - DNA, 25 bp, Homo sapien
ttcccctccactagaaactgaataa

SEQ ID NO: 3896882 - DNA, 25 bp, Homo sapien
cttcccctccactagaaactgaata

SEQ ID NO: 3896883 - DNA, 25 bp, Homo sapien
ttaatgtccgaagcctgctcctgca

SEQ ID NO: 3896884 - DNA, 25 bp, Homo sapien
gactgctggcataggcatgcgtgca

SEQ ID NO: 3896885 - DNA, 25 bp, Homo sapien
ggatagggaactgactccacctggg

SEQ ID NO: 3896886 - DNA, 25 bp, Homo sapien
gccagtggaacctcatgtctgcaca

SEQ ID NO: 3896887 - DNA, 25 bp, Homo sapien
caagatccagagtgtgtctggagag

SEQ ID NO: 3896888 - DNA, 25 bp, Homo sapien
agaaccaagatccagagtgtgtctg

SEQ ID NO: 3896889 - DNA, 25 bp, Homo sapien
aaccaagatccagagtgtgtctgga

SEQ ID NO: 3896890 - DNA, 25 bp, Homo sapien
ccaagatccagagtgtgtctggaga

SEQ ID NO: 3896891 - DNA, 25 bp, Homo sapien
cttgtctaggtaggcatcacaaaga

SEQ ID NO: 3896892 - DNA, 25 bp, Homo sapien
tgtcttgtctaggtaggcatcacaa

SEQ ID NO: 3896893 - DNA, 25 bp, Homo sapien
ttgtctaggtaggcatcacaaagag

SEQ ID NO: 3896894 - DNA, 25 bp, Homo sapien
tcttgtctaggtaggcatcacaaag

SEQ ID NO: 3896895 - DNA, 25 bp, Homo sapien
cattatttcaaagcataccctccct

SEQ ID NO: 3896896 - DNA, 25 bp, Homo sapien
ggccaaccacattatttcaaagcat

SEQ ID NO: 3896897 - DNA, 25 bp, Homo sapien
tccagccctccctgtctatattagt

SEQ ID NO: 3896898 - DNA, 25 bp, Homo sapien
tatattagtttgttatcatgcttct

SEQ ID NO: 3896899 - DNA, 25 bp, Homo sapien
accggcctgaatcgaccccctggag

SEQ ID NO: 3896900 - DNA, 25 bp, Homo sapien
gagaagcagggtgtataaacgggga

SEQ ID NO: 3896901 - DNA, 25 bp, Homo sapien
agagaagcagggtgtataaacgggg

SEQ ID NO: 3896902 - DNA, 25 bp, Homo sapien
gaatcgaccccctggagcctcagtg

SEQ ID NO: 3896903 - DNA, 25 bp, Homo sapien
tcgctgcgtgtccatgtccaggtgg

SEQ ID NO: 3896904 - DNA, 25 bp, Homo sapien
gcctggctggcgatgtcgctgcgtg

SEQ ID NO: 3896905 - DNA, 25 bp, Homo sapien
agtttccctccataaggcagagttg

SEQ ID NO: 3896906 - DNA, 25 bp, Homo sapien
agttgtggttagtggcctgggttca

SEQ ID NO: 3896907 - DNA, 25 bp, Homo sapien
agaatgatgaagttgtgggaaataa

SEQ ID NO: 3896908 - DNA, 25 bp, Homo sapien
ctgaagattttattagcaagaatga

SEQ ID NO: 3896909 - DNA, 25 bp, Homo sapien
aagattttattagcaagaatgatga

SEQ ID NO: 3896910 - DNA, 25 bp, Homo sapien
gaatgatgaagttgtgggaaataat

SEQ ID NO: 3896911 - DNA, 25 bp, Homo sapien
cagctcaggatgaaccctgggttct

SEQ ID NO: 3896912 - DNA, 25 bp, Homo sapien
gaacaacttggggagatgcccgcag

SEQ ID NO: 3896913 - DNA, 25 bp, Homo sapien
tataaggctacgagtgctggagagc

SEQ ID NO: 3896914 - DNA, 25 bp, Homo sapien
cctgggttctgacttgagcaatgga

SEQ ID NO: 3896915 - DNA, 25 bp, Homo sapien
ccaaggtcccatgtcggcccttagg

SEQ ID NO: 3896916 - DNA, 25 bp, Homo sapien
catgtcggcccttaggaggtgattt

SEQ ID NO: 3896917 - DNA, 25 bp, Homo sapien
cccatgtcggcccttaggaggtgat

SEQ ID NO: 3896918 - DNA, 25 bp, Homo sapien
gatttttggggaagatgggagccag

SEQ ID NO: 3896919 - DNA, 25 bp, Homo sapien
acagacatgcaggagtgatgaggat

SEQ ID NO: 3896920 - DNA, 25 bp, Homo sapien
gtggggaggggccaacaggtcttgc

SEQ ID NO: 3896921 - DNA, 25 bp, Homo sapien
ggggaggggccaacaggtcttgctc

SEQ ID NO: 3896922 - DNA, 25 bp, Homo sapien
gaggggccaacaggtcttgctccag

SEQ ID NO: 3896923 - DNA, 25 bp, Homo sapien
cgtgcagcccctggccgctcagtgc

SEQ ID NO: 3896924 - DNA, 25 bp, Homo sapien
agtgagttgtcttcagggcagagcc

SEQ ID NO: 3896925 - DNA, 25 bp, Homo sapien
agcccttccactagctggccgtgca

SEQ ID NO: 3896926 - DNA, 25 bp, Homo sapien
cagaagggccctttgggcactgtga

SEQ ID NO: 3896927 - DNA, 25 bp, Homo sapien
tcagagcctgcttgtgccagagggt

SEQ ID NO: 3896928 - DNA, 25 bp, Homo sapien
gggtcagagcctgcttgtgccagag

SEQ ID NO: 3896929 - DNA, 25 bp, Homo sapien
gagcctgcttgtgccagagggtcca

SEQ ID NO: 3896930 - DNA, 25 bp, Homo sapien
cagagggtccaacccggcagcacag

SEQ ID NO: 3896931 - DNA, 25 bp, Homo sapien
gagccactgctgtgtactggctgtg

SEQ ID NO: 3896932 - DNA, 25 bp, Homo sapien
ccaccgtgagtgtccattccttgtt

SEQ ID NO: 3896933 - DNA, 25 bp, Homo sapien
tgttgttcactggtcccctcagtga

SEQ ID NO: 3896934 - DNA, 25 bp, Homo sapien
tcagtgagcaaacagtgagccactg

SEQ ID NO: 3896935 - DNA, 25 bp, Homo sapien
agtctgacgagcagagggtggagta

SEQ ID NO: 3896936 - DNA, 25 bp, Homo sapien
ctgacgagcagagggtggagtaggc

SEQ ID NO: 3896937 - DNA, 25 bp, Homo sapien
gtctgacgagcagagggtggagtag

SEQ ID NO: 3896938 - DNA, 25 bp, Homo sapien
tctgacgagcagagggtggagtagg

SEQ ID NO: 3896939 - DNA, 25 bp, Homo sapien
gaagaagaggagagccgcgggggct

SEQ ID NO: 3896940 - DNA, 25 bp, Homo sapien
gagatgaagaagaggagagccgcgg

SEQ ID NO: 3896941 - DNA, 25 bp, Homo sapien
ctggaatttgaagaggaaaacagag

SEQ ID NO: 3896942 - DNA, 25 bp, Homo sapien
gaatttgaagaggaaaacagagatg

SEQ ID NO: 3896943 - DNA, 25 bp, Homo sapien
tgctggctgaagacgattgcatgat

SEQ ID NO: 3896944 - DNA, 25 bp, Homo sapien
gattgcatgatgatctcctgggctg

SEQ ID NO: 3896945 - DNA, 25 bp, Homo sapien
ggccacggctgttggattcctctct

SEQ ID NO: 3896946 - DNA, 25 bp, Homo sapien
cagtgccaggccacggctgttggat

SEQ ID NO: 3896947 - DNA, 25 bp, Homo sapien
gacagggcagccctagacacaggct

SEQ ID NO: 3896948 - DNA, 25 bp, Homo sapien
cttccatccccagctctaatccctt

SEQ ID NO: 3896949 - DNA, 25 bp, Homo sapien
tctaatcccttgcagctgttgtcct

SEQ ID NO: 3896950 - DNA, 25 bp, Homo sapien
agggcagccctagacacaggctcct

SEQ ID NO: 3896951 - DNA, 25 bp, Homo sapien
agaggtattatctgagctggcccca

SEQ ID NO: 3896952 - DNA, 25 bp, Homo sapien
tagtggtgtcatgactgcacagccc

SEQ ID NO: 3896953 - DNA, 25 bp, Homo sapien
ctccccaggaagacgacaacctcca

SEQ ID NO: 3896954 - DNA, 25 bp, Homo sapien
ccagggtgaatagtggtgtcatgac

SEQ ID NO: 3896955 - DNA, 25 bp, Homo sapien
ggtgacttcccagatgcctcacata

SEQ ID NO: 3896956 - DNA, 25 bp, Homo sapien
gtgacttcccagatgcctcacatac

SEQ ID NO: 3896957 - DNA, 25 bp, Homo sapien
tggggtggtaggtggtgacttccca

SEQ ID NO: 3896958 - DNA, 25 bp, Homo sapien
ggtggtgacttcccagatgcctcac

SEQ ID NO: 3896959 - DNA, 25 bp, Homo sapien
tcttgcttacaataggaatcctcaa

SEQ ID NO: 3896960 - DNA, 25 bp, Homo sapien
ttaaatggcaggaagcacgctttcc

SEQ ID NO: 3896961 - DNA, 25 bp, Homo sapien
ccacatccgtatcctccagagtatg

SEQ ID NO: 3896962 - DNA, 25 bp, Homo sapien
ccccacatccgtatcctccagagta

SEQ ID NO: 3896963 - DNA, 25 bp, Homo sapien
aatggcaggaagcacgctttcccca

SEQ ID NO: 3896964 - DNA, 25 bp, Homo sapien
taagcagtcctgtgagtggcgcatg

SEQ ID NO: 3896965 - DNA, 25 bp, Homo sapien
tacttggtgttgcttgtcatggaca

SEQ ID NO: 3896966 - DNA, 25 bp, Homo sapien
tgaacgctggagcttattccgccgc

SEQ ID NO: 3896967 - DNA, 25 bp, Homo sapien
tcatggacaccggtgaacatgccgt

SEQ ID NO: 3896968 - DNA, 25 bp, Homo sapien
aagcttcagtgtgctgtgtcacaaa

SEQ ID NO: 3896969 - DNA, 25 bp, Homo sapien
caaatttctttgtacgcctcttggg

SEQ ID NO: 3896970 - DNA, 25 bp, Homo sapien
gccttgtcagatatttcagtactaa

SEQ ID NO: 3896971 - DNA, 25 bp, Homo sapien
tgtacgcctcttgggctaccgtggt

SEQ ID NO: 3896972 - DNA, 25 bp, Homo sapien
ccatgagtggatcagactcacagtg

SEQ ID NO: 3896973 - DNA, 25 bp, Homo sapien
gaaaaggtgggcagtgacatcagat

SEQ ID NO: 3896974 - DNA, 25 bp, Homo sapien
accaggcagaccatgagtggatcag

SEQ ID NO: 3896975 - DNA, 25 bp, Homo sapien
aaggtgggcagtgacatcagatgtc

SEQ ID NO: 3896976 - DNA, 25 bp, Homo sapien
actatgccctcggtgcctgatttct

SEQ ID NO: 3896977 - DNA, 25 bp, Homo sapien
tgccctcggtgcctgatttctccat

SEQ ID NO: 3896978 - DNA, 25 bp, Homo sapien
tactatgccctcggtgcctgatttc

SEQ ID NO: 3896979 - DNA, 25 bp, Homo sapien
tatgccctcggtgcctgatttctcc

SEQ ID NO: 3896980 - DNA, 25 bp, Homo sapien
ttcaaaaacacgttccagagcggct

SEQ ID NO: 3896981 - DNA, 25 bp, Homo sapien
tcgacgctcggtgcctgtatctact

SEQ ID NO: 3896982 - DNA, 25 bp, Homo sapien
ggccgccggcgagatgttcaaaaac

SEQ ID NO: 3896983 - DNA, 25 bp, Homo sapien
atcctctacagcatcggcagcaagc

SEQ ID NO: 3896984 - DNA, 25 bp, Homo sapien
tgagctcgcagcttaggagctgaag

SEQ ID NO: 3896985 - DNA, 25 bp, Homo sapien
ggtttccgttctgagctcgcagctt

SEQ ID NO: 3896986 - DNA, 25 bp, Homo sapien
tagcgttgccgcgtccgagtccggc

SEQ ID NO: 3896987 - DNA, 25 bp, Homo sapien
tgaagatcgcggacttagcgttgcc

SEQ ID NO: 3896988 - DNA, 25 bp, Homo sapien
catagagggtcttattcgaatagaa

SEQ ID NO: 3896989 - DNA, 25 bp, Homo sapien
cagacatagagggtcttattcgaat

SEQ ID NO: 3896990 - DNA, 25 bp, Homo sapien
tcgaatagaatcatttgattggctt

SEQ ID NO: 3896991 - DNA, 25 bp, Homo sapien
gattggcttgcatctttagatgtca

SEQ ID NO: 3896992 - DNA, 25 bp, Homo sapien
tgagactgtgcatcccccctggaca

SEQ ID NO: 3896993 - DNA, 25 bp, Homo sapien
tttcagggccaccacagcatcgtgg

SEQ ID NO: 3896994 - DNA, 25 bp, Homo sapien
tgttgctcaggtgtgggagcttgag

SEQ ID NO: 3896995 - DNA, 25 bp, Homo sapien
cgtggtgtcctttggaccagcttct

SEQ ID NO: 3896996 - DNA, 25 bp, Homo sapien
aagaaaggccccgtcttggaggctg

SEQ ID NO: 3896997 - DNA, 25 bp, Homo sapien
ccacacattctgaagcacccatgaa

SEQ ID NO: 3896998 - DNA, 25 bp, Homo sapien
aggctggttgagtttgctgtcctga

SEQ ID NO: 3896999 - DNA, 25 bp, Homo sapien
ctgctactgaagaaaggccccgtct

SEQ ID NO: 3897000 - DNA, 25 bp, Homo sapien
acctagagctgactgctgaatttgt

SEQ ID NO: 3897001 - DNA, 25 bp, Homo sapien
gaatttgtagcttgactggcacaga

SEQ ID NO: 3897002 - DNA, 25 bp, Homo sapien
atcagcaccctggacccgagggatg

SEQ ID NO: 3897003 - DNA, 25 bp, Homo sapien
cagaatggtcaagaggctctgaggc

SEQ ID NO: 3897004 - DNA, 25 bp, Homo sapien
aaaagcagggaccacatgagcacac

SEQ ID NO: 3897005 - DNA, 25 bp, Homo sapien
taataaccgatcagagtcacagtcg

SEQ ID NO: 3897006 - DNA, 25 bp, Homo sapien
tgagcacacaagaagccaaagtttg

SEQ ID NO: 3897007 - DNA, 25 bp, Homo sapien
gaagcatcgggccagatcaaccgtt

SEQ ID NO: 3897008 - DNA, 25 bp, Homo sapien
taaaccatggtaaatgtacgcaccc

SEQ ID NO: 3897009 - DNA, 25 bp, Homo sapien
cctttccaaactgaagtgagtccag

SEQ ID NO: 3897010 - DNA, 25 bp, Homo sapien
ggtcttggtgaagcggtaactccat

SEQ ID NO: 3897011 - DNA, 25 bp, Homo sapien
gccttagacttagaccataactggg

SEQ ID NO: 3897012 - DNA, 25 bp, Homo sapien
cagccttgtaaggagaacttcacca

SEQ ID NO: 3897013 - DNA, 25 bp, Homo sapien
cataactaaagctggaaagtcagtc

SEQ ID NO: 3897014 - DNA, 25 bp, Homo sapien
tgctcccggagcaagtgttggatcc

SEQ ID NO: 3897015 - DNA, 25 bp, Homo sapien
catccctatgtgtgcgcctatttta

SEQ ID NO: 3897016 - DNA, 25 bp, Homo sapien
tggtcatctagaaaacccacgtggg

SEQ ID NO: 3897017 - DNA, 25 bp, Homo sapien
cacgtgggacccttatgtacaaaat

SEQ ID NO: 3897018 - DNA, 25 bp, Homo sapien
aagtcttaaaggctagctggctcag

SEQ ID NO: 3897019 - DNA, 25 bp, Homo sapien
tcatgtccacatagatgctggtctg

SEQ ID NO: 3897020 - DNA, 25 bp, Homo sapien
tcccgtttccggtgcactctgtttc

SEQ ID NO: 3897021 - DNA, 25 bp, Homo sapien
tctgctcattgctctaaagaaccat

SEQ ID NO: 3897022 - DNA, 25 bp, Homo sapien
caatgacgtgccttcgtatgggtcc

SEQ ID NO: 3897023 - DNA, 25 bp, Homo sapien
aaccatcagcccctgtctcaaggat

SEQ ID NO: 3897024 - DNA, 25 bp, Homo sapien
cattttagcactggattgtaggatc

SEQ ID NO: 3897025 - DNA, 25 bp, Homo sapien
ctttacaaatgggagacctaggcac

SEQ ID NO: 3897026 - DNA, 25 bp, Homo sapien
tgaccattagccagaactcctgttt

SEQ ID NO: 3897027 - DNA, 25 bp, Homo sapien
ggatctgaacgttgagcacagaaac

SEQ ID NO: 3897028 - DNA, 25 bp, Homo sapien
atgattaccaactggttcgaaaact

SEQ ID NO: 3897029 - DNA, 25 bp, Homo sapien
taatcaagatgattaccaactggtt

SEQ ID NO: 3897030 - DNA, 25 bp, Homo sapien
gatgattaccaactggttcgaaaac

SEQ ID NO: 3897031 - DNA, 25 bp, Homo sapien
cttgaagatgtgaaacgagaagcag

SEQ ID NO: 3897032 - DNA, 25 bp, Homo sapien
gatgtgaaacgagaagcaggtgctg

SEQ ID NO: 3897033 - DNA, 25 bp, Homo sapien
tgtgaaacgagaagcaggtgctggg

SEQ ID NO: 3897034 - DNA, 25 bp, Homo sapien
tgaagatgtgaaacgagaagcaggt

SEQ ID NO: 3897035 - DNA, 25 bp, Homo sapien
tacgccgaggtgaacagtctgagga

SEQ ID NO: 3897036 - DNA, 25 bp, Homo sapien
tgaggagccgcgagtactgggacta

SEQ ID NO: 3897037 - DNA, 25 bp, Homo sapien
tacgaggctcacgtcccgagctggg

SEQ ID NO: 3897038 - DNA, 25 bp, Homo sapien
gggtctacgccgaggtgaacagtct

SEQ ID NO: 3897039 - DNA, 25 bp, Homo sapien
taggatggtcaacagcctgaaaacc

SEQ ID NO: 3897040 - DNA, 25 bp, Homo sapien
cagagagaactcaagaccctacgtc

SEQ ID NO: 3897041 - DNA, 25 bp, Homo sapien
atctaagtgtaggtataggccgggc

SEQ ID NO: 3897042 - DNA, 25 bp, Homo sapien
gcctattctggttctaagggctccc

SEQ ID NO: 3897043 - DNA, 25 bp, Homo sapien
gctgttgcagccaaacaatgattga

SEQ ID NO: 3897044 - DNA, 25 bp, Homo sapien
acagtatggcagtgtcagggcagtc

SEQ ID NO: 3897045 - DNA, 25 bp, Homo sapien
caatgattgaaactggattagcatg

SEQ ID NO: 3897046 - DNA, 25 bp, Homo sapien
tagcatgcagctggcaaagcatcta

SEQ ID NO: 3897047 - DNA, 25 bp, Homo sapien
gctcccctttccgggttcatgccat

SEQ ID NO: 3897048 - DNA, 25 bp, Homo sapien
agctcccctttccgggttcatgcca

SEQ ID NO: 3897049 - DNA, 25 bp, Homo sapien
cccctgccaatgccgtgtgcccagg

SEQ ID NO: 3897050 - DNA, 25 bp, Homo sapien
gccggcggccacgcgtcactccggc

SEQ ID NO: 3897051 - DNA, 25 bp, Homo sapien
gtgccggcggccacgcgtcactccg

SEQ ID NO: 3897052 - DNA, 25 bp, Homo sapien
gcccctgccaatgccgtgtgcccag

SEQ ID NO: 3897053 - DNA, 25 bp, Homo sapien
cagcccgcacagctggataacaggc

SEQ ID NO: 3897054 - DNA, 25 bp, Homo sapien
acccttcatgggagtcggagaggac

SEQ ID NO: 3897055 - DNA, 25 bp, Homo sapien
ggacgctctcggactcatcatcagt

SEQ ID NO: 3897056 - DNA, 25 bp, Homo sapien
cagctccgacccttcatgggagtcg

SEQ ID NO: 3897057 - DNA, 25 bp, Homo sapien
acttttaataattcctgtttggctg

SEQ ID NO: 3897058 - DNA, 25 bp, Homo sapien
catgtgttattaatctattaggttg

SEQ ID NO: 3897059 - DNA, 25 bp, Homo sapien
tttcatgtgttattaatctattagg

SEQ ID NO: 3897060 - DNA, 25 bp, Homo sapien
attttaagactagtggggccaggtg

SEQ ID NO: 3897061 - DNA, 25 bp, Homo sapien
ctgcaagacagggtacctgagtaag

SEQ ID NO: 3897062 - DNA, 25 bp, Homo sapien
tgcaagacagggtacctgagtaagt

SEQ ID NO: 3897063 - DNA, 25 bp, Homo sapien
gcaagacagggtacctgagtaagtt

SEQ ID NO: 3897064 - DNA, 25 bp, Homo sapien
ctcagtctcagttttgagagcagag

SEQ ID NO: 3897065 - DNA, 25 bp, Homo sapien
agttttgagagcagagtttacatag

SEQ ID NO: 3897066 - DNA, 25 bp, Homo sapien
tctcagttttgagagcagagtttac

SEQ ID NO: 3897067 - DNA, 25 bp, Homo sapien
cagtctcagttttgagagcagagtt

SEQ ID NO: 3897068 - DNA, 25 bp, Homo sapien
cctgggctccagtttagcgtaatat

SEQ ID NO: 3897069 - DNA, 25 bp, Homo sapien
gataatcgtggaggtcgctgatccc

SEQ ID NO: 3897070 - DNA, 25 bp, Homo sapien
gggctccagtttagcgtaatatttc

SEQ ID NO: 3897071 - DNA, 25 bp, Homo sapien
ttctgataatcgtggaggtcgctga

SEQ ID NO: 3897072 - DNA, 25 bp, Homo sapien
cacggtccatacctgtccgggattt

SEQ ID NO: 3897073 - DNA, 25 bp, Homo sapien
gatttggatctacgcctgcctcgaa

SEQ ID NO: 3897074 - DNA, 25 bp, Homo sapien
caagtttttggtcggcagtcaggcc

SEQ ID NO: 3897075 - DNA, 25 bp, Homo sapien
tgcccttgtgtgtcgtaagtcatcc

SEQ ID NO: 3897076 - DNA, 25 bp, Homo sapien
gaacccactctagatacctctcagt

SEQ ID NO: 3897077 - DNA, 25 bp, Homo sapien
ttccaaagccccaacaatcacatga

SEQ ID NO: 3897078 - DNA, 25 bp, Homo sapien
tcacatgaacccactctagatacct

SEQ ID NO: 3897079 - DNA, 25 bp, Homo sapien
tccaaagccccaacaatcacatgaa

SEQ ID NO: 3897080 - DNA, 25 bp, Homo sapien
caaactcatgcacttctctcgaaac

SEQ ID NO: 3897081 - DNA, 25 bp, Homo sapien
tccggcggttcatgtcctcaatgta

SEQ ID NO: 3897082 - DNA, 25 bp, Homo sapien
ccatcgaatttcagcctcctcaatg

SEQ ID NO: 3897083 - DNA, 25 bp, Homo sapien
tctgagtggccaaaatactcccttt

SEQ ID NO: 3897084 - DNA, 25 bp, Homo sapien
tcaaacgtaatttctccttcatatt

SEQ ID NO: 3897085 - DNA, 25 bp, Homo sapien
ttcaaacgtaatttctccttcatat

SEQ ID NO: 3897086 - DNA, 25 bp, Homo sapien
caaacgtaatttctccttcatatta

SEQ ID NO: 3897087 - DNA, 25 bp, Homo sapien
gaaaatcaacatcgtgaagggcctc

SEQ ID NO: 3897088 - DNA, 25 bp, Homo sapien
ctgaaaatcaacatcgtgaagggcc

SEQ ID NO: 3897089 - DNA, 25 bp, Homo sapien
aaatcaacatcgtgaagggcctcac

SEQ ID NO: 3897090 - DNA, 25 bp, Homo sapien
tcaacatcgtgaagggcctcactca

SEQ ID NO: 3897091 - DNA, 25 bp, Homo sapien
tcaagaaattgagcgttctctatct

SEQ ID NO: 3897092 - DNA, 25 bp, Homo sapien
aagaaattgagcgttctctatcttc

SEQ ID NO: 3897093 - DNA, 25 bp, Homo sapien
ctcaagaaattgagcgttctctatc

SEQ ID NO: 3897094 - DNA, 25 bp, Homo sapien
gaaattgagcgttctctatcttcaa

SEQ ID NO: 3897095 - DNA, 25 bp, Homo sapien
tgcagagtgtttccagatgacagct

SEQ ID NO: 3897096 - DNA, 25 bp, Homo sapien
taggcattgagaacctgcagagtgt

SEQ ID NO: 3897097 - DNA, 25 bp, Homo sapien
tgtttccagatgacagctttagctg

SEQ ID NO: 3897098 - DNA, 25 bp, Homo sapien
tttagctgggtcagttcttgattcc

SEQ ID NO: 3897099 - DNA, 25 bp, Homo sapien
ggcacccaaacgctgtgtgaaactg

SEQ ID NO: 3897100 - DNA, 25 bp, Homo sapien
gcttgacagcgagggggcacccaaa

SEQ ID NO: 3897101 - DNA, 25 bp, Homo sapien
ccaaacgctgtgtgaaactggaatg

SEQ ID NO: 3897102 - DNA, 25 bp, Homo sapien
gaatgcacaagaacctccctgtggc

SEQ ID NO: 3897103 - DNA, 25 bp, Homo sapien
gtccagattgaggtatatttccatt

SEQ ID NO: 3897104 - DNA, 25 bp, Homo sapien
tatttccattgccttgtgaagcttg

SEQ ID NO: 3897105 - DNA, 25 bp, Homo sapien
tctccttgtccagattgaggtatat

SEQ ID NO: 3897106 - DNA, 25 bp, Homo sapien
atttccattgccttgtgaagcttgc

SEQ ID NO: 3897107 - DNA, 25 bp, Homo sapien
ggagctcagatgactccattcacct

SEQ ID NO: 3897108 - DNA, 25 bp, Homo sapien
aatttacacaggcaaggagctcaga

SEQ ID NO: 3897109 - DNA, 25 bp, Homo sapien
caaggagctcagatgactccattca

SEQ ID NO: 3897110 - DNA, 25 bp, Homo sapien
aggcaaggagctcagatgactccat

SEQ ID NO: 3897111 - DNA, 25 bp, Homo sapien
gggaaattcagctatcaatgctcag

SEQ ID NO: 3897112 - DNA, 25 bp, Homo sapien
aggccttctggtcatgagtccagca

SEQ ID NO: 3897113 - DNA, 25 bp, Homo sapien
gttagggaaattcagctatcaatgc

SEQ ID NO: 3897114 - DNA, 25 bp, Homo sapien
tggtcatgagtccagcactctttct

SEQ ID NO: 3897115 - DNA, 25 bp, Homo sapien
tcacagatgtggaaacagtcctgtc

SEQ ID NO: 3897116 - DNA, 25 bp, Homo sapien
gggcagcacaagacaatgacactaa

SEQ ID NO: 3897117 - DNA, 25 bp, Homo sapien
cagttttagagtttgacaaagcatc

SEQ ID NO: 3897118 - DNA, 25 bp, Homo sapien
tgacactaataatcatacaaacagt

SEQ ID NO: 3897119 - DNA, 25 bp, Homo sapien
tattgtaggcaaatttggggcagca

SEQ ID NO: 3897120 - DNA, 25 bp, Homo sapien
tacctttgctacttgccactctgta

SEQ ID NO: 3897121 - DNA, 25 bp, Homo sapien
gccactctgtactgaaattgggggt

SEQ ID NO: 3897122 - DNA, 25 bp, Homo sapien
tttttgctttacctttgctacttgc

SEQ ID NO: 3897123 - DNA, 25 bp, Homo sapien
tgctttacctttgctacttgccact

SEQ ID NO: 3897124 - DNA, 25 bp, Homo sapien
atctaataactatcaacacaaggaa

SEQ ID NO: 3897125 - DNA, 25 bp, Homo sapien
tctaataactatcaacacaaggaaa

SEQ ID NO: 3897126 - DNA, 25 bp, Homo sapien
ctaataactatcaacacaaggaaaa

SEQ ID NO: 3897127 - DNA, 25 bp, Homo sapien
aaatctgttcaattctcctctcaat

SEQ ID NO: 3897128 - DNA, 25 bp, Homo sapien
gcctagaagctatggtaattcaatt

SEQ ID NO: 3897129 - DNA, 25 bp, Homo sapien
gggtatattcccagacgcagaatgc

SEQ ID NO: 3897130 - DNA, 25 bp, Homo sapien
tcaatttcgtgagtaatccttgtct

SEQ ID NO: 3897131 - DNA, 25 bp, Homo sapien
ttgctttgagaactcactggccctg

SEQ ID NO: 3897132 - DNA, 25 bp, Homo sapien
gctttgagaactcactggccctgcc

SEQ ID NO: 3897133 - DNA, 25 bp, Homo sapien
tttgagaactcactggccctgccat

SEQ ID NO: 3897134 - DNA, 25 bp, Homo sapien
tgagaactcactggccctgccatct

SEQ ID NO: 3897135 - DNA, 25 bp, Homo sapien
tcccggacgtaagtcatcacctgtg

SEQ ID NO: 3897136 - DNA, 25 bp, Homo sapien
tccaggtccgcatttaagatcttct

SEQ ID NO: 3897137 - DNA, 25 bp, Homo sapien
tattcactgcctcggctttggcccg

SEQ ID NO: 3897138 - DNA, 25 bp, Homo sapien
atcacctgtggtgcccggaactcgg

SEQ ID NO: 3897139 - DNA, 25 bp, Homo sapien
aagacccatggcgactgtgtacatg

SEQ ID NO: 3897140 - DNA, 25 bp, Homo sapien
ctgcgggattcgttcaaaagcagaa

SEQ ID NO: 3897141 - DNA, 25 bp, Homo sapien
ggtaccatattcaaagtctgcggga

SEQ ID NO: 3897142 - DNA, 25 bp, Homo sapien
gacccatggcgactgtgtacatgca

SEQ ID NO: 3897143 - DNA, 25 bp, Homo sapien
ccttacgatggccttttaaggacat

SEQ ID NO: 3897144 - DNA, 25 bp, Homo sapien
agcaaggtaatctgcctgcaactgc

SEQ ID NO: 3897145 - DNA, 25 bp, Homo sapien
tacttcccagcaaggtaatctgcct

SEQ ID NO: 3897146 - DNA, 25 bp, Homo sapien
tcattggttattttcattcgattcc

SEQ ID NO: 3897147 - DNA, 25 bp, Homo sapien
gaacaggttgtatcagcccgaagaa

SEQ ID NO: 3897148 - DNA, 25 bp, Homo sapien
gatttggtcacttgccagggtccca

SEQ ID NO: 3897149 - DNA, 25 bp, Homo sapien
cccaggtgtgggaaggtcactttca

SEQ ID NO: 3897150 - DNA, 25 bp, Homo sapien
ctgaacttcggtggtgagacgtgcc

SEQ ID NO: 3897151 - DNA, 25 bp, Homo sapien
tcctgttgttaattgcggccccatt

SEQ ID NO: 3897152 - DNA, 25 bp, Homo sapien
gggctgaagcggctgctcttctgcc

SEQ ID NO: 3897153 - DNA, 25 bp, Homo sapien
gcctttctgctgctcgtggttcagt

SEQ ID NO: 3897154 - DNA, 25 bp, Homo sapien
ggttcagtctgttcagattgtttcc

SEQ ID NO: 3897155 - DNA, 25 bp, Homo sapien
aaaaagcgtatatgctgtgcccagg

SEQ ID NO: 3897156 - DNA, 25 bp, Homo sapien
gaatcacggcagctttgcagcatgg

SEQ ID NO: 3897157 - DNA, 25 bp, Homo sapien
ttaagacaaactgcgaatcggactg

SEQ ID NO: 3897158 - DNA, 25 bp, Homo sapien
gaaccacgtcattcttggccaggga

SEQ ID NO: 3897159 - DNA, 25 bp, Homo sapien
gaatctgcctatgggtttccctgaa

SEQ ID NO: 3897160 - DNA, 25 bp, Homo sapien
tcttgtgcttcagaagtcgcagccc

SEQ ID NO: 3897161 - DNA, 25 bp, Homo sapien
acaaaatgaaagaccccactctggg

SEQ ID NO: 3897162 - DNA, 25 bp, Homo sapien
aaaatgctgcccgttaaactctgac

SEQ ID NO: 3897163 - DNA, 25 bp, Homo sapien
caactccatgagcaacaacatagcc

SEQ ID NO: 3897164 - DNA, 25 bp, Homo sapien
ggtataagtaacatggatcctagca

SEQ ID NO: 3897165 - DNA, 25 bp, Homo sapien
ccatgaggactttgataacaactcc

SEQ ID NO: 3897166 - DNA, 25 bp, Homo sapien
gatcctagcaagattgctcacacag

SEQ ID NO: 3897167 - DNA, 25 bp, Homo sapien
gcatcctgagcgagttctgggtcct

SEQ ID NO: 3897168 - DNA, 25 bp, Homo sapien
tgtggcgtccagaaagcttccgttt

SEQ ID NO: 3897169 - DNA, 25 bp, Homo sapien
agagggtcctgaggtctccttgccc

SEQ ID NO: 3897170 - DNA, 25 bp, Homo sapien
tagtgatgatcgagacagacagccc

SEQ ID NO: 3897171 - DNA, 25 bp, Homo sapien
aaaaagcttgccttctcagactagg

SEQ ID NO: 3897172 - DNA, 25 bp, Homo sapien
cgtggccacgaccagagaagacttt

SEQ ID NO: 3897173 - DNA, 25 bp, Homo sapien
gctaagtctgaaagaaaccaccctg

SEQ ID NO: 3897174 - DNA, 25 bp, Homo sapien
tggtagcttagattggacccggaaa

SEQ ID NO: 3897175 - DNA, 25 bp, Homo sapien
gaggcgggtacaagggtggagacag

SEQ ID NO: 3897176 - DNA, 25 bp, Homo sapien
gacagggtagaagagcttccgggag

SEQ ID NO: 3897177 - DNA, 25 bp, Homo sapien
ccagagaattcaccagagaggcggg

SEQ ID NO: 3897178 - DNA, 25 bp, Homo sapien
aagagcttccgggagcaaggcacgt

SEQ ID NO: 3897179 - DNA, 25 bp, Homo sapien
aatgatcatcgcacggaagcaccag

SEQ ID NO: 3897180 - DNA, 25 bp, Homo sapien
cacgtctactgcaactgtcctggaa

SEQ ID NO: 3897181 - DNA, 25 bp, Homo sapien
tcttgggcgatgcataggtgacaac

SEQ ID NO: 3897182 - DNA, 25 bp, Homo sapien
cgtcaatatagaatgcggcgagcaa

SEQ ID NO: 3897183 - DNA, 25 bp, Homo sapien
ccagggaaagcgctttggcttttga

SEQ ID NO: 3897184 - DNA, 25 bp, Homo sapien
tgcaaatagtttctccgccaaggaa

SEQ ID NO: 3897185 - DNA, 25 bp, Homo sapien
aaagcgctttggcttttgagcacgt

SEQ ID NO: 3897186 - DNA, 25 bp, Homo sapien
tttctccgccaaggaatcgtcagca

SEQ ID NO: 3897187 - DNA, 25 bp, Homo sapien
gaactggaccatccgagctctgtcc

SEQ ID NO: 3897188 - DNA, 25 bp, Homo sapien
ctggaccatccgagctctgtccttt

SEQ ID NO: 3897189 - DNA, 25 bp, Homo sapien
gagctctgtcctttccaataccaaa

SEQ ID NO: 3897190 - DNA, 25 bp, Homo sapien
agggaactggaccatccgagctctg

SEQ ID NO: 3897191 - DNA, 25 bp, Homo sapien
tctagccacagctgtgctaccaaag

SEQ ID NO: 3897192 - DNA, 25 bp, Homo sapien
acagctgtgctaccaaaggtggcac

SEQ ID NO: 3897193 - DNA, 25 bp, Homo sapien
ctgtgctaccaaaggtggcacaggc

SEQ ID NO: 3897194 - DNA, 25 bp, Homo sapien
tagccacagctgtgctaccaaaggt

SEQ ID NO: 3897195 - DNA, 25 bp, Homo sapien
cagtcttgaactcctgaccgcaggt

SEQ ID NO: 3897196 - DNA, 25 bp, Homo sapien
ttactgcaacctctgtcccctaggt

SEQ ID NO: 3897197 - DNA, 25 bp, Homo sapien
ctggagtgcagcggtacgatcttgg

SEQ ID NO: 3897198 - DNA, 25 bp, Homo sapien
acagagtcttgctctgtcacccagg

SEQ ID NO: 3897199 - DNA, 25 bp, Homo sapien
gggcttggcttgaaaggattaactg

SEQ ID NO: 3897200 - DNA, 25 bp, Homo sapien
gattaactgaaccaatcagagtcct

SEQ ID NO: 3897201 - DNA, 25 bp, Homo sapien
ccttgaatactggttgacacaaagt

SEQ ID NO: 3897202 - DNA, 25 bp, Homo sapien
gagtcctcccttgaatactggttga

SEQ ID NO: 3897203 - DNA, 25 bp, Homo sapien
ctgttccaagcagagcacaactcat

SEQ ID NO: 3897204 - DNA, 25 bp, Homo sapien
cagctcctgttatacgaaagggcag

SEQ ID NO: 3897205 - DNA, 25 bp, Homo sapien
ccatggcagattttatggtctcagc

SEQ ID NO: 3897206 - DNA, 25 bp, Homo sapien
tctgaagcatgggattccactttcc

SEQ ID NO: 3897207 - DNA, 25 bp, Homo sapien
ttccctctagccctggatacagctg

SEQ ID NO: 3897208 - DNA, 25 bp, Homo sapien
ctccaacagatagatataactcagg

SEQ ID NO: 3897209 - DNA, 25 bp, Homo sapien
cagatagatataactcaggatgctg

SEQ ID NO: 3897210 - DNA, 25 bp, Homo sapien
aacagatagatataactcaggatgc

SEQ ID NO: 3897211 - DNA, 25 bp, Homo sapien
ccatccctccaacagatagatataa

SEQ ID NO: 3897212 - DNA, 25 bp, Homo sapien
gcttgaaagccattagaatgataaa

SEQ ID NO: 3897213 - DNA, 25 bp, Homo sapien
tgttatgacatatacgtttcactac

SEQ ID NO: 3897214 - DNA, 25 bp, Homo sapien
aaactgggacagttggccactcatg

SEQ ID NO: 3897215 - DNA, 25 bp, Homo sapien
agaccagcatgcttgaaagccatta

SEQ ID NO: 3897216 - DNA, 25 bp, Homo sapien
cagaggctgtgtgggaagagtcacc

SEQ ID NO: 3897217 - DNA, 25 bp, Homo sapien
ctttagcctgcttagttctcagagg

SEQ ID NO: 3897218 - DNA, 25 bp, Homo sapien
taaggatctctgataactgcctctc

SEQ ID NO: 3897219 - DNA, 25 bp, Homo sapien
attggctgctccattaaggatctct

SEQ ID NO: 3897220 - DNA, 25 bp, Homo sapien
gaagggatgtcactgtaccccacga

SEQ ID NO: 3897221 - DNA, 25 bp, Homo sapien
tacaaatcgccatggttgagcccca

SEQ ID NO: 3897222 - DNA, 25 bp, Homo sapien
ctttcggtggaggacatcagggctt

SEQ ID NO: 3897223 - DNA, 25 bp, Homo sapien
ggctctgtgactccactacaaatcg

SEQ ID NO: 3897224 - DNA, 25 bp, Homo sapien
ggaagtgagtcatgataaaggcctt

SEQ ID NO: 3897225 - DNA, 25 bp, Homo sapien
atccttgtcgtcttcttgttgtgta

SEQ ID NO: 3897226 - DNA, 25 bp, Homo sapien
tcttgttgtgtagactgagaaggag

SEQ ID NO: 3897227 - DNA, 25 bp, Homo sapien
atggaagtgagtcatgataaaggcc

SEQ ID NO: 3897228 - DNA, 25 bp, Homo sapien
tggattgaaactcgtttcccgcgcc

SEQ ID NO: 3897229 - DNA, 25 bp, Homo sapien
gcccggggacgcatcagacaggagc

SEQ ID NO: 3897230 - DNA, 25 bp, Homo sapien
tggttggggtcaggaaagtggattg

SEQ ID NO: 3897231 - DNA, 25 bp, Homo sapien
cgcgcccggggacgcatcagacagg

SEQ ID NO: 3897232 - DNA, 25 bp, Homo sapien
acttgagcttctccgcttccactcg

SEQ ID NO: 3897233 - DNA, 25 bp, Homo sapien
actcgcgtgattcggaggagcctca

SEQ ID NO: 3897234 - DNA, 25 bp, Homo sapien
agcttctccgcttccactcgcgtga

SEQ ID NO: 3897235 - DNA, 25 bp, Homo sapien
tccgcttccactcgcgtgattcgga

SEQ ID NO: 3897236 - DNA, 25 bp, Homo sapien
ctgtgggaccgcgttgtcagtctcg

SEQ ID NO: 3897237 - DNA, 25 bp, Homo sapien
tccactcggaaataagcctctgaca

SEQ ID NO: 3897238 - DNA, 25 bp, Homo sapien
tccgctccaggaagaaagcgccaag

SEQ ID NO: 3897239 - DNA, 25 bp, Homo sapien
gcagcttctcgtgggacatcaggat

SEQ ID NO: 3897240 - DNA, 25 bp, Homo sapien
ggcgtgagccaccgcatccggccta

SEQ ID NO: 3897241 - DNA, 25 bp, Homo sapien
gtgagccaccgcatccggcctattt

SEQ ID NO: 3897242 - DNA, 25 bp, Homo sapien
gagccaccgcatccggcctatttga

SEQ ID NO: 3897243 - DNA, 25 bp, Homo sapien
gcgtgagccaccgcatccggcctat

SEQ ID NO: 3897244 - DNA, 25 bp, Homo sapien
caaggaggtctgattaattgtcaca

SEQ ID NO: 3897245 - DNA, 25 bp, Homo sapien
tgtcacaaccaagagaaggctaagg

SEQ ID NO: 3897246 - DNA, 25 bp, Homo sapien
cagtgtgtatgggaacgaaatcctc

SEQ ID NO: 3897247 - DNA, 25 bp, Homo sapien
tcgaggtcattagaacaaggaggtc

SEQ ID NO: 3897248 - DNA, 25 bp, Homo sapien
aggatctctggagcctgggaggtca

SEQ ID NO: 3897249 - DNA, 25 bp, Homo sapien
ctgcaataccagccacataggtggc

SEQ ID NO: 3897250 - DNA, 25 bp, Homo sapien
caataccagccacataggtggctga

SEQ ID NO: 3897251 - DNA, 25 bp, Homo sapien
ggtgggaggatctctggagcctggg

SEQ ID NO: 3897252 - DNA, 25 bp, Homo sapien
gtcagcgagaccagcgagaccaaga

SEQ ID NO: 3897253 - DNA, 25 bp, Homo sapien
cacaagggtcttcggcttcattctt

SEQ ID NO: 3897254 - DNA, 25 bp, Homo sapien
aagtcagcgagaccagcgagaccaa

SEQ ID NO: 3897255 - DNA, 25 bp, Homo sapien
tgaagtcagcgagaccagcgagacc

SEQ ID NO: 3897256 - DNA, 25 bp, Homo sapien
gctgccaacaccaccaggacatgag

SEQ ID NO: 3897257 - DNA, 25 bp, Homo sapien
ccaccaggacatgagggcctaagat

SEQ ID NO: 3897258 - DNA, 25 bp, Homo sapien
caatattgagttcaaggctgccaac

SEQ ID NO: 3897259 - DNA, 25 bp, Homo sapien
aacaccaccaggacatgagggccta

SEQ ID NO: 3897260 - DNA, 25 bp, Homo sapien
gggagttccacagaaaggatccgtc

SEQ ID NO: 3897261 - DNA, 25 bp, Homo sapien
gaaaggatccgtcgcttgttgtcaa

SEQ ID NO: 3897262 - DNA, 25 bp, Homo sapien
cacattgggatctgcactgaacaca

SEQ ID NO: 3897263 - DNA, 25 bp, Homo sapien
ccgtcgcttgttgtcaaaaagtcct

SEQ ID NO: 3897264 - DNA, 25 bp, Homo sapien
ctgggagccaaacccgtagaaatgg

SEQ ID NO: 3897265 - DNA, 25 bp, Homo sapien
tggggccccattttgtggaggtcca

SEQ ID NO: 3897266 - DNA, 25 bp, Homo sapien
aatgtctgcattctcgggactgtca

SEQ ID NO: 3897267 - DNA, 25 bp, Homo sapien
attctcgggactgtcaaaatgcagg

SEQ ID NO: 3897268 - DNA, 25 bp, Homo sapien
tgggtaaaagtagtatctgtggctg

SEQ ID NO: 3897269 - DNA, 25 bp, Homo sapien
gtcctgggtaaaagtagtatctgtg

SEQ ID NO: 3897270 - DNA, 25 bp, Homo sapien
aacagactaaatttacaagtcatac

SEQ ID NO: 3897271 - DNA, 25 bp, Homo sapien
aaaacagactaaatttacaagtcat

SEQ ID NO: 3897272 - DNA, 25 bp, Homo sapien
aaaggttgggaacagatgtataaca

SEQ ID NO: 3897273 - DNA, 25 bp, Homo sapien
taaaggttgggaacagatgtataac

SEQ ID NO: 3897274 - DNA, 25 bp, Homo sapien
aggttgggaacagatgtataacatt

SEQ ID NO: 3897275 - DNA, 25 bp, Homo sapien
cataaaggttgggaacagatgtata

SEQ ID NO: 3897276 - DNA, 25 bp, Homo sapien
agggttgacctcacaccccacaaag

SEQ ID NO: 3897277 - DNA, 25 bp, Homo sapien
ggaaacaagggagtaagacaagtca

SEQ ID NO: 3897278 - DNA, 25 bp, Homo sapien
ccccacaaagtcatatccattttta

SEQ ID NO: 3897279 - DNA, 25 bp, Homo sapien
ggagtaagacaagtcagggttgacc

SEQ ID NO: 3897280 - DNA, 25 bp, Homo sapien
cagggctgaagtgtcttcgttgtaa

SEQ ID NO: 3897281 - DNA, 25 bp, Homo sapien
tgaggagtccatgatgcggcgaaaa

SEQ ID NO: 3897282 - DNA, 25 bp, Homo sapien
cttcgttgtaagcattctgtgagga

SEQ ID NO: 3897283 - DNA, 25 bp, Homo sapien
gatgcggcgaaaacgtccgataaaa

SEQ ID NO: 3897284 - DNA, 25 bp, Homo sapien
ctgaacgaggttggaagctgtgatc

SEQ ID NO: 3897285 - DNA, 25 bp, Homo sapien
gaaataagcccctctccatctcgtc

SEQ ID NO: 3897286 - DNA, 25 bp, Homo sapien
tcagtcttccatatcagtgaatttt

SEQ ID NO: 3897287 - DNA, 25 bp, Homo sapien
tctccatctcgtctagcctggctac

SEQ ID NO: 3897288 - DNA, 25 bp, Homo sapien
gacacacggagggatacgtctgtga

SEQ ID NO: 3897289 - DNA, 25 bp, Homo sapien
gagggatacgtctgtgaggagccat

SEQ ID NO: 3897290 - DNA, 25 bp, Homo sapien
acacacggagggatacgtctgtgag

SEQ ID NO: 3897291 - DNA, 25 bp, Homo sapien
acggagggatacgtctgtgaggagc

SEQ ID NO: 3897292 - DNA, 25 bp, Homo sapien
ccatgaaatgggacaggattctggt

SEQ ID NO: 3897293 - DNA, 25 bp, Homo sapien
tcctggaagactcacagagccaggg

SEQ ID NO: 3897294 - DNA, 25 bp, Homo sapien
ggttctgtacaaggtcaaccagctc

SEQ ID NO: 3897295 - DNA, 25 bp, Homo sapien
tccagcatgtccagttccctataat

SEQ ID NO: 3897296 - DNA, 25 bp, Homo sapien
taggctctccgaggcaataacaagc

SEQ ID NO: 3897297 - DNA, 25 bp, Homo sapien
cattttgtgaacaggcgatgaccca

SEQ ID NO: 3897298 - DNA, 25 bp, Homo sapien
aaacagggcccttcatagtcagcac

SEQ ID NO: 3897299 - DNA, 25 bp, Homo sapien
caaacagtctaatgggcccagggaa

SEQ ID NO: 3897300 - DNA, 25 bp, Homo sapien
taccgtcaaatatgatcaaagacac

SEQ ID NO: 3897301 - DNA, 25 bp, Homo sapien
gacacaattctgatagctttgatta

SEQ ID NO: 3897302 - DNA, 25 bp, Homo sapien
tctgtagtactagtgaaagagcact

SEQ ID NO: 3897303 - DNA, 25 bp, Homo sapien
aacatggatttgtgtattaccgtca

SEQ ID NO: 3897304 - DNA, 25 bp, Homo sapien
aagtgggattaatttctgctgtcag

SEQ ID NO: 3897305 - DNA, 25 bp, Homo sapien
ctgcaggggactgtttgaactgtgt

SEQ ID NO: 3897306 - DNA, 25 bp, Homo sapien
tgtcagtgaaattcccagcagaaga

SEQ ID NO: 3897307 - DNA, 25 bp, Homo sapien
tctgctgtcagtgaaattcccagca

SEQ ID NO: 3897308 - DNA, 25 bp, Homo sapien
tggcagaaggagaagcaaatacatc

SEQ ID NO: 3897309 - DNA, 25 bp, Homo sapien
gcagaaggagaagcaaatacatcct

SEQ ID NO: 3897310 - DNA, 25 bp, Homo sapien
agaaggagaagcaaatacatccttc

SEQ ID NO: 3897311 - DNA, 25 bp, Homo sapien
atggcagaaggagaagcaaatacat

SEQ ID NO: 3897312 - DNA, 25 bp, Homo sapien
gtgatctcagccctacattcccctg

SEQ ID NO: 3897313 - DNA, 25 bp, Homo sapien
cctcgggttgcatgcctggcagatg

SEQ ID NO: 3897314 - DNA, 25 bp, Homo sapien
tcccctgatagacactgcctcgggt

SEQ ID NO: 3897315 - DNA, 25 bp, Homo sapien
tagacactgcctcgggttgcatgcc

SEQ ID NO: 3897316 - DNA, 25 bp, Homo sapien
cttgggcacgggtaccctctatcat

SEQ ID NO: 3897317 - DNA, 25 bp, Homo sapien
atgaggccttgggcacgggtaccct

SEQ ID NO: 3897318 - DNA, 25 bp, Homo sapien
taatctccgagctggcctttctgcc

SEQ ID NO: 3897319 - DNA, 25 bp, Homo sapien
gccttgggcacgggtaccctctatc

SEQ ID NO: 3897320 - DNA, 25 bp, Homo sapien
ggttctacaatgcacagcctggtaa

SEQ ID NO: 3897321 - DNA, 25 bp, Homo sapien
tgccattggccagagtaaagcctgc

SEQ ID NO: 3897322 - DNA, 25 bp, Homo sapien
ggtaaattctggagccgatgaccca

SEQ ID NO: 3897323 - DNA, 25 bp, Homo sapien
cacagagcccgtccatgaggaggtt

SEQ ID NO: 3897324 - DNA, 25 bp, Homo sapien
tacagaaggcagcactcatagcatg

SEQ ID NO: 3897325 - DNA, 25 bp, Homo sapien
ctttgaccttgcttcctcgggacag

SEQ ID NO: 3897326 - DNA, 25 bp, Homo sapien
tcagaacttgtctggcagtggcaag

SEQ ID NO: 3897327 - DNA, 25 bp, Homo sapien
tcatagcatgttcaacgggtgagtc

SEQ ID NO: 3897328 - DNA, 25 bp, Homo sapien
tagattattctgactccaggccaca

SEQ ID NO: 3897329 - DNA, 25 bp, Homo sapien
tcccaagtttgagctagattattct

SEQ ID NO: 3897330 - DNA, 25 bp, Homo sapien
cagttcaagaccctggagcatttga

SEQ ID NO: 3897331 - DNA, 25 bp, Homo sapien
ggccacaaggcactaaggaagcagg

SEQ ID NO: 3897332 - DNA, 25 bp, Homo sapien
gaggagagacgtaagcgtcgttccc

SEQ ID NO: 3897333 - DNA, 25 bp, Homo sapien
atgcttttccttccaggccttcgtt

SEQ ID NO: 3897334 - DNA, 25 bp, Homo sapien
agagacgtaagcgtcgttcccctga

SEQ ID NO: 3897335 - DNA, 25 bp, Homo sapien
cgtaagcgtcgttcccctgatgctt

SEQ ID NO: 3897336 - DNA, 25 bp, Homo sapien
tcagcttgctccgaaccctggatgg

SEQ ID NO: 3897337 - DNA, 25 bp, Homo sapien
gacactggcctgaagatttgaagag

SEQ ID NO: 3897338 - DNA, 25 bp, Homo sapien
gcacagtgccatctgcctagacttg

SEQ ID NO: 3897339 - DNA, 25 bp, Homo sapien
ggctctcctagctgggttttacatg

SEQ ID NO: 3897340 - DNA, 25 bp, Homo sapien
aggcagcgtttcatcaccttcagaa

SEQ ID NO: 3897341 - DNA, 25 bp, Homo sapien
agaaaacacttgctggactacttct

SEQ ID NO: 3897342 - DNA, 25 bp, Homo sapien
gccaaaggcagcgtttcatcacctt

SEQ ID NO: 3897343 - DNA, 25 bp, Homo sapien
aaacacttgctggactacttctctg

SEQ ID NO: 3897344 - DNA, 25 bp, Homo sapien
ggctcttgcttctgttgtgttcact

SEQ ID NO: 3897345 - DNA, 25 bp, Homo sapien
tctggctcttgcttctgttgtgttc

SEQ ID NO: 3897346 - DNA, 25 bp, Homo sapien
atctctggctcttgcttctgttgtg

SEQ ID NO: 3897347 - DNA, 25 bp, Homo sapien
ttgcttctgttgtgttcacttcaat

SEQ ID NO: 3897348 - DNA, 25 bp, Homo sapien
caacactgggtagccactggctgga

SEQ ID NO: 3897349 - DNA, 25 bp, Homo sapien
ttgacatctgagacgttcctggccc

SEQ ID NO: 3897350 - DNA, 25 bp, Homo sapien
gctggtggccccaagtctgttgcaa

SEQ ID NO: 3897351 - DNA, 25 bp, Homo sapien
tatgaggcatgaacacctgggtccc

SEQ ID NO: 3897352 - DNA, 25 bp, Homo sapien
aagcccagaatcagcggagccactg

SEQ ID NO: 3897353 - DNA, 25 bp, Homo sapien
ttgtggcccaaatgattactgcttg

SEQ ID NO: 3897354 - DNA, 25 bp, Homo sapien
tagcctatcctagaatgtcatacaa

SEQ ID NO: 3897355 - DNA, 25 bp, Homo sapien
catttgctaagttttgacagatgca

SEQ ID NO: 3897356 - DNA, 25 bp, Homo sapien
gctttcacggagacaacaaccacta

SEQ ID NO: 3897357 - DNA, 25 bp, Homo sapien
cacataaagccgaaggacaggcatc

SEQ ID NO: 3897358 - DNA, 25 bp, Homo sapien
taataagtttcctgagtgagtccaa

SEQ ID NO: 3897359 - DNA, 25 bp, Homo sapien
tcatctggagaccttgtgactcaca

SEQ ID NO: 3897360 - DNA, 25 bp, Homo sapien
caattgacgttggttctgcagatgc

SEQ ID NO: 3897361 - DNA, 25 bp, Homo sapien
ctgccagagctgtgacctcagtgtc

SEQ ID NO: 3897362 - DNA, 25 bp, Homo sapien
gaaccaccttgtgagcacagattcc

SEQ ID NO: 3897363 - DNA, 25 bp, Homo sapien
tcccctggagaagatcaatggtgcc

SEQ ID NO: 3897364 - DNA, 25 bp, Homo sapien
ttgccaagccagctgacatattcag

SEQ ID NO: 3897365 - DNA, 25 bp, Homo sapien
gcactctccgttctcaggggctgca

SEQ ID NO: 3897366 - DNA, 25 bp, Homo sapien
gggcactctccgttctcaggggctg

SEQ ID NO: 3897367 - DNA, 25 bp, Homo sapien
ccaggggcactctccgttctcaggg

SEQ ID NO: 3897368 - DNA, 25 bp, Homo sapien
cacccaggggcactctccgttctca

SEQ ID NO: 3897369 - DNA, 25 bp, Homo sapien
gggccagccccttgctatcctggta

SEQ ID NO: 3897370 - DNA, 25 bp, Homo sapien
tggaaactttagcaggctcatggaa

SEQ ID NO: 3897371 - DNA, 25 bp, Homo sapien
catgatatgtaagggccctttgccc

SEQ ID NO: 3897372 - DNA, 25 bp, Homo sapien
ggccaccgtggacgactcactggtt

SEQ ID NO: 3897373 - DNA, 25 bp, Homo sapien
cctccaccaggcttagttctatata

SEQ ID NO: 3897374 - DNA, 25 bp, Homo sapien
aggagccagtccttaggagcacagg

SEQ ID NO: 3897375 - DNA, 25 bp, Homo sapien
gttccttgctctgcggaaatccctg

SEQ ID NO: 3897376 - DNA, 25 bp, Homo sapien
atgacagaagtgaacctctatttct

SEQ ID NO: 3897377 - DNA, 25 bp, Homo sapien
cgcggagatgcggacgagacagacg

SEQ ID NO: 3897378 - DNA, 25 bp, Homo sapien
agatgcggacgagacagacgcgcag

SEQ ID NO: 3897379 - DNA, 25 bp, Homo sapien
ccgccgacgcgcgggtgcaggtgcg

SEQ ID NO: 3897380 - DNA, 25 bp, Homo sapien
cggacgagacagacgcgcaggcggg

SEQ ID NO: 3897381 - DNA, 25 bp, Homo sapien
caggagagcgcggagcgaagcggca

SEQ ID NO: 3897382 - DNA, 25 bp, Homo sapien
tggtcccggtgaactccaggaggcg

SEQ ID NO: 3897383 - DNA, 25 bp, Homo sapien
aaaaatccaccaattgcatggccgc

SEQ ID NO: 3897384 - DNA, 25 bp, Homo sapien
aggagcgcgggagacccggagcgga

SEQ ID NO: 3897385 - DNA, 25 bp, Homo sapien
cagctccagccggtgtcccagcacc

SEQ ID NO: 3897386 - DNA, 25 bp, Homo sapien
ccagccggtgtcccagcaccttcat

SEQ ID NO: 3897387 - DNA, 25 bp, Homo sapien
gctccagccggtgtcccagcacctt

SEQ ID NO: 3897388 - DNA, 25 bp, Homo sapien
tgtgagcagctccagccggtgtccc

SEQ ID NO: 3897389 - DNA, 25 bp, Homo sapien
gacaagcgacactgattggagggca

SEQ ID NO: 3897390 - DNA, 25 bp, Homo sapien
ggcaactgatcacttctccagagga

SEQ ID NO: 3897391 - DNA, 25 bp, Homo sapien
tttcagggtcctaatccgagctccg

SEQ ID NO: 3897392 - DNA, 25 bp, Homo sapien
tcacagggcgcagaaataagaggtc

SEQ ID NO: 3897393 - DNA, 25 bp, Homo sapien
ggagcacctataagtcccagagctg

SEQ ID NO: 3897394 - DNA, 25 bp, Homo sapien
gatggagcacctataagtcccagag

SEQ ID NO: 3897395 - DNA, 25 bp, Homo sapien
tctgggtctctccacaccggggaga

SEQ ID NO: 3897396 - DNA, 25 bp, Homo sapien
acggatggagcacctataagtccca

SEQ ID NO: 3897397 - DNA, 25 bp, Homo sapien
tctgctccctcatcggacattaagg

SEQ ID NO: 3897398 - DNA, 25 bp, Homo sapien
ggattccaccgtttcctgagcgcac

SEQ ID NO: 3897399 - DNA, 25 bp, Homo sapien
tttttcgaggtcttcaaaagctgcc

SEQ ID NO: 3897400 - DNA, 25 bp, Homo sapien
tccagccttgtaacagggctccggg

SEQ ID NO: 3897401 - DNA, 25 bp, Homo sapien
tgagacctaagtagggtcccccaga

SEQ ID NO: 3897402 - DNA, 25 bp, Homo sapien
tgtgagaacccaacgaaggaactgg

SEQ ID NO: 3897403 - DNA, 25 bp, Homo sapien
tgttgtgagaacccaacgaaggaac

SEQ ID NO: 3897404 - DNA, 25 bp, Homo sapien
tgagaacccaacgaaggaactggaa

SEQ ID NO: 3897405 - DNA, 25 bp, Homo sapien
tcgagtgccaatgcgcagaaacaac

SEQ ID NO: 3897406 - DNA, 25 bp, Homo sapien
gagctctgactctgaaccgttttgg

SEQ ID NO: 3897407 - DNA, 25 bp, Homo sapien
cctacttgcaaaaagaccagtgtcc

SEQ ID NO: 3897408 - DNA, 25 bp, Homo sapien
tttggaacatattgctcgagtgcca

SEQ ID NO: 3897409 - DNA, 25 bp, Homo sapien
tgctccgtccacataggccaagcac

SEQ ID NO: 3897410 - DNA, 25 bp, Homo sapien
gttgcaagggacctctgggtcatct

SEQ ID NO: 3897411 - DNA, 25 bp, Homo sapien
gctttgggagcagtaggctgagtgc

SEQ ID NO: 3897412 - DNA, 25 bp, Homo sapien
taggttgtgggttgcaagggacctc

SEQ ID NO: 3897413 - DNA, 25 bp, Homo sapien
tctccagtaaagagagagcccgagg

SEQ ID NO: 3897414 - DNA, 25 bp, Homo sapien
cgggtgcctcactcaattcagctgt

SEQ ID NO: 3897415 - DNA, 25 bp, Homo sapien
gagacccaccctatcgtgctaaagg

SEQ ID NO: 3897416 - DNA, 25 bp, Homo sapien
ggcacaggagtctgcaatacagtct

SEQ ID NO: 3897417 - DNA, 25 bp, Homo sapien
cagtctccccaccaggtttgccgaa

SEQ ID NO: 3897418 - DNA, 25 bp, Homo sapien
tctccccaccaggtttgccgaaatc

SEQ ID NO: 3897419 - DNA, 25 bp, Homo sapien
ctccagtctccccaccaggtttgcc

SEQ ID NO: 3897420 - DNA, 25 bp, Homo sapien
tgtgtctccagtctccccaccaggt

SEQ ID NO: 3897421 - DNA, 25 bp, Homo sapien
tccttatcctgatctcctaggcctg

SEQ ID NO: 3897422 - DNA, 25 bp, Homo sapien
gaactggaccctcttatttctctcc

SEQ ID NO: 3897423 - DNA, 25 bp, Homo sapien
tgtccagggaactggaccctcttat

SEQ ID NO: 3897424 - DNA, 25 bp, Homo sapien
tccaactgcactatatagggggtct

SEQ ID NO: 3897425 - DNA, 25 bp, Homo sapien
tctcctcagggaatcgcagctcctg

SEQ ID NO: 3897426 - DNA, 25 bp, Homo sapien
ggtttgtgtcacagtcaccagtatg

SEQ ID NO: 3897427 - DNA, 25 bp, Homo sapien
gaaagtggtttgtgtcacagtcacc

SEQ ID NO: 3897428 - DNA, 25 bp, Homo sapien
tgtcacagtcaccagtatgacggca

SEQ ID NO: 3897429 - DNA, 25 bp, Homo sapien
tttgaaagtggtttgtgtcacagtc

SEQ ID NO: 3897430 - DNA, 25 bp, Homo sapien
acttcagcacttgcgatgggatgca

SEQ ID NO: 3897431 - DNA, 25 bp, Homo sapien
acacttcagcacttgcgatgggatg

SEQ ID NO: 3897432 - DNA, 25 bp, Homo sapien
ggcagcacctccgtgcggctgtccc

SEQ ID NO: 3897433 - DNA, 25 bp, Homo sapien
gctgtcccgcaacctgcacacttca

SEQ ID NO: 3897434 - DNA, 25 bp, Homo sapien
gccaagatgccctagttctccccat

SEQ ID NO: 3897435 - DNA, 25 bp, Homo sapien
caggccaagatgccctagttctccc

SEQ ID NO: 3897436 - DNA, 25 bp, Homo sapien
ggccaagatgccctagttctcccca

SEQ ID NO: 3897437 - DNA, 25 bp, Homo sapien
ccaagatgccctagttctccccatt

SEQ ID NO: 3897438 - DNA, 25 bp, Homo sapien
cacacggtggagcagataatggcag

SEQ ID NO: 3897439 - DNA, 25 bp, Homo sapien
gactgaaagaatttgcacctggcaa

SEQ ID NO: 3897440 - DNA, 25 bp, Homo sapien
aaagtgaacagggtgccaggtgaag

SEQ ID NO: 3897441 - DNA, 25 bp, Homo sapien
aagtcccgtgggaacagggtgagca

SEQ ID NO: 3897442 - DNA, 25 bp, Homo sapien
gaggagggaaaggatggggctggag

SEQ ID NO: 3897443 - DNA, 25 bp, Homo sapien
agaggagggaaaggatggggctgga

SEQ ID NO: 3897444 - DNA, 25 bp, Homo sapien
gagaggagggaaaggatggggctgg

SEQ ID NO: 3897445 - DNA, 25 bp, Homo sapien
aggagaggagggaaaggatggggct

SEQ ID NO: 3897446 - DNA, 25 bp, Homo sapien
tcttctgcagattcgttccaggcct

SEQ ID NO: 3897447 - DNA, 25 bp, Homo sapien
gcttcttctgcagattcgttccagg

SEQ ID NO: 3897448 - DNA, 25 bp, Homo sapien
ttcttctgcagattcgttccaggcc

SEQ ID NO: 3897449 - DNA, 25 bp, Homo sapien
ggcttcttctgcagattcgttccag

SEQ ID NO: 3897450 - DNA, 25 bp, Homo sapien
gactgtcacatagagaatggccaca

SEQ ID NO: 3897451 - DNA, 25 bp, Homo sapien
tgcgactgtcacatagagaatggcc

SEQ ID NO: 3897452 - DNA, 25 bp, Homo sapien
ggctgcctgcgactgtcacatagag

SEQ ID NO: 3897453 - DNA, 25 bp, Homo sapien
aatcagagggcactaggggttccca

SEQ ID NO: 3897454 - DNA, 25 bp, Homo sapien
tcacatgagaaatagggtgccacag

SEQ ID NO: 3897455 - DNA, 25 bp, Homo sapien
tcagctaggtaagtacaaggaggaa

SEQ ID NO: 3897456 - DNA, 25 bp, Homo sapien
cccaaatcacaggagtggaaagcag

SEQ ID NO: 3897457 - DNA, 25 bp, Homo sapien
ccaaaataaggaagagttcagccac

SEQ ID NO: 3897458 - DNA, 25 bp, Homo sapien
ccggaccgcgggcaccacgagggcg

SEQ ID NO: 3897459 - DNA, 25 bp, Homo sapien
gaccgcgggcaccacgagggcggga

SEQ ID NO: 3897460 - DNA, 25 bp, Homo sapien
gcgggcaccacgagggcgggaccac

SEQ ID NO: 3897461 - DNA, 25 bp, Homo sapien
cgcgggcaccacgagggcgggacca

SEQ ID NO: 3897462 - DNA, 25 bp, Homo sapien
gtgaaccgtttgagtctggctagtg

SEQ ID NO: 3897463 - DNA, 25 bp, Homo sapien
ctttgtgcctcagatcactggagct

SEQ ID NO: 3897464 - DNA, 25 bp, Homo sapien
tcagatcactggagcttacttcaca

SEQ ID NO: 3897465 - DNA, 25 bp, Homo sapien
tctccagacctggtcgctttgtgcc

SEQ ID NO: 3897466 - DNA, 25 bp, Homo sapien
ctcattaaggaggtgtggattccat

SEQ ID NO: 3897467 - DNA, 25 bp, Homo sapien
gcgtgtgagcgtcctcattaaggag

SEQ ID NO: 3897468 - DNA, 25 bp, Homo sapien
tcctcattaaggaggtgtggattcc

SEQ ID NO: 3897469 - DNA, 25 bp, Homo sapien
gaggagcgtgtgagcgtcctcatta

SEQ ID NO: 3897470 - DNA, 25 bp, Homo sapien
ccaagaggaaggcatcggagctctc

SEQ ID NO: 3897471 - DNA, 25 bp, Homo sapien
caaagggcgctttcagtttccacgg

SEQ ID NO: 3897472 - DNA, 25 bp, Homo sapien
ccggaaatcaatggtcactgtggga

SEQ ID NO: 3897473 - DNA, 25 bp, Homo sapien
aaacgactggccgagtgagcaacat

SEQ ID NO: 3897474 - DNA, 25 bp, Homo sapien
atcatcacccggaggaataaaaaca

SEQ ID NO: 3897475 - DNA, 25 bp, Homo sapien
gggtctgaattggttcagcatgtcg

SEQ ID NO: 3897476 - DNA, 25 bp, Homo sapien
aattggttcagcatgtcgggatggc

SEQ ID NO: 3897477 - DNA, 25 bp, Homo sapien
tctgaattggttcagcatgtcggga

SEQ ID NO: 3897478 - DNA, 25 bp, Homo sapien
ttggttcagcatgtcgggatggcca

SEQ ID NO: 3897479 - DNA, 25 bp, Homo sapien
gcagcttcgcagcagcagttgggaa

SEQ ID NO: 3897480 - DNA, 25 bp, Homo sapien
gcacatgtacattggctgccctgaa

SEQ ID NO: 3897481 - DNA, 25 bp, Homo sapien
aagaaaatcccctggtgagcctgcc

SEQ ID NO: 3897482 - DNA, 25 bp, Homo sapien
tcgtccttgaagtggcgcgtgaccg

SEQ ID NO: 3897483 - DNA, 25 bp, Homo sapien
tcctgagaaccggggtcccacacac

SEQ ID NO: 3897484 - DNA, 25 bp, Homo sapien
cagaggatcctgagaaccggggtcc

SEQ ID NO: 3897485 - DNA, 25 bp, Homo sapien
gaggatcctgagaaccggggtccca

SEQ ID NO: 3897486 - DNA, 25 bp, Homo sapien
ggatcctgagaaccggggtcccaca

SEQ ID NO: 3897487 - DNA, 25 bp, Homo sapien
gcttcacgaatatgtgggtcattct

SEQ ID NO: 3897488 - DNA, 25 bp, Homo sapien
gaaggcttcacgaatatgtgggtca

SEQ ID NO: 3897489 - DNA, 25 bp, Homo sapien
tcttgtacaggggtcgtgctcatct

SEQ ID NO: 3897490 - DNA, 25 bp, Homo sapien
aaggcttcacgaatatgtgggtcat

SEQ ID NO: 3897491 - DNA, 25 bp, Homo sapien
atgtacactattgctggtcatgtcc

SEQ ID NO: 3897492 - DNA, 25 bp, Homo sapien
gcctgggggcacctattccatctct

SEQ ID NO: 3897493 - DNA, 25 bp, Homo sapien
gacctggtcgacacctgctatgtac

SEQ ID NO: 3897494 - DNA, 25 bp, Homo sapien
ctgctgacctggtcgacacctgcta

SEQ ID NO: 3897495 - DNA, 25 bp, Homo sapien
ggcaaccagtttggggcttggctct

SEQ ID NO: 3897496 - DNA, 25 bp, Homo sapien
tctatctcaggctccgtgccctgtt

SEQ ID NO: 3897497 - DNA, 25 bp, Homo sapien
gggagcagaacactaggtctatctc

SEQ ID NO: 3897498 - DNA, 25 bp, Homo sapien
gcaaggatctgggtggcgagctcgc

SEQ ID NO: 3897499 - DNA, 25 bp, Homo sapien
gggatcctccgaatacaaaagccga

SEQ ID NO: 3897500 - DNA, 25 bp, Homo sapien
tacacacagggtcgtcacagacatg

SEQ ID NO: 3897501 - DNA, 25 bp, Homo sapien
tgggccatttatacagggatcctgg

SEQ ID NO: 3897502 - DNA, 25 bp, Homo sapien
gacatgcacagcttaccaatgcggg

SEQ ID NO: 3897503 - DNA, 25 bp, Homo sapien
ttgatgcccgcagcgccctcactca

SEQ ID NO: 3897504 - DNA, 25 bp, Homo sapien
cttgatgcccgcagcgccctcactc

SEQ ID NO: 3897505 - DNA, 25 bp, Homo sapien
cacacggtcagagggacatgcaggc

SEQ ID NO: 3897506 - DNA, 25 bp, Homo sapien
gtccacacgggcaatgcagccaagt

SEQ ID NO: 3897507 - DNA, 25 bp, Homo sapien
cctgcggtgggtcataaggatgcac

SEQ ID NO: 3897508 - DNA, 25 bp, Homo sapien
tgaccccagggtgaggctatttgaa

SEQ ID NO: 3897509 - DNA, 25 bp, Homo sapien
agcttcacggctccagcgttgcctt

SEQ ID NO: 3897510 - DNA, 25 bp, Homo sapien
tgtggcccagacctccttgcctctg

SEQ ID NO: 3897511 - DNA, 25 bp, Homo sapien
ttcacggctccagcgttgccttccc

SEQ ID NO: 3897512 - DNA, 25 bp, Homo sapien
tgtgtggcccagacctccttgcctc

SEQ ID NO: 3897513 - DNA, 25 bp, Homo sapien
ctgatgccccggcgagaggaggtgc

SEQ ID NO: 3897514 - DNA, 25 bp, Homo sapien
tgctgacgtcgtcacctccgtgcgt

SEQ ID NO: 3897515 - DNA, 25 bp, Homo sapien
tgtggttcggcctgtcagccgcatc

SEQ ID NO: 3897516 - DNA, 25 bp, Homo sapien
tgtcagccgcatcaataattcaggg

SEQ ID NO: 3897517 - DNA, 25 bp, Homo sapien
gctttgcgccggtgtgggagttggt

SEQ ID NO: 3897518 - DNA, 25 bp, Homo sapien
catgcggctgattgcaccacccagg

SEQ ID NO: 3897519 - DNA, 25 bp, Homo sapien
agccatgcggctgattgcaccaccc

SEQ ID NO: 3897520 - DNA, 25 bp, Homo sapien
atgcggctgattgcaccacccaggg

SEQ ID NO: 3897521 - DNA, 25 bp, Homo sapien
gattgcaccacccaggggatgagga

SEQ ID NO: 3897522 - DNA, 25 bp, Homo sapien
tggagaacactctttgacttgcagg

SEQ ID NO: 3897523 - DNA, 25 bp, Homo sapien
gccaaaggctctaccctggagaaca

SEQ ID NO: 3897524 - DNA, 25 bp, Homo sapien
tctttgacttgcaggccctttttat

SEQ ID NO: 3897525 - DNA, 25 bp, Homo sapien
ttatttccctgttgtcctccaggag

SEQ ID NO: 3897526 - DNA, 25 bp, Homo sapien
gggaatgaggtgacgcagcctggta

SEQ ID NO: 3897527 - DNA, 25 bp, Homo sapien
tgacgcagcctggtacctgttaggc

SEQ ID NO: 3897528 - DNA, 25 bp, Homo sapien
ggtgacgcagcctggtacctgttag

SEQ ID NO: 3897529 - DNA, 25 bp, Homo sapien
aatgaggtgacgcagcctggtacct

SEQ ID NO: 3897530 - DNA, 25 bp, Homo sapien
tctgggcagcctccgctcttggctc

SEQ ID NO: 3897531 - DNA, 25 bp, Homo sapien
ctgaaggggagagaccgtgctggac

SEQ ID NO: 3897532 - DNA, 25 bp, Homo sapien
aggggagagaccgtgctggacactc

SEQ ID NO: 3897533 - DNA, 25 bp, Homo sapien
ggagagaccgtgctggacactctgg

SEQ ID NO: 3897534 - DNA, 25 bp, Homo sapien
gggagccccggatcactacatgcag

SEQ ID NO: 3897535 - DNA, 25 bp, Homo sapien
cgtagggtgtctcgatgtcatgttc

SEQ ID NO: 3897536 - DNA, 25 bp, Homo sapien
gatcactacatgcagaaggccgtag

SEQ ID NO: 3897537 - DNA, 25 bp, Homo sapien
aaggccgtagggtgtctcgatgtca

SEQ ID NO: 3897538 - DNA, 25 bp, Homo sapien
tgtccaggggcatccacgtgacaca

SEQ ID NO: 3897539 - DNA, 25 bp, Homo sapien
acaccacaaagtgcttggtgatctc

SEQ ID NO: 3897540 - DNA, 25 bp, Homo sapien
gcatgtcctcgaagttgaagaaggt

SEQ ID NO: 3897541 - DNA, 25 bp, Homo sapien
accacaaagtgcttggtgatctcct

SEQ ID NO: 3897542 - DNA, 25 bp, Homo sapien
ccctgaggaaactgcgacgccccca

SEQ ID NO: 3897543 - DNA, 25 bp, Homo sapien
cctgaggaaactgcgacgcccccac

SEQ ID NO: 3897544 - DNA, 25 bp, Homo sapien
ctgctccatggaggggaactggtac

SEQ ID NO: 3897545 - DNA, 25 bp, Homo sapien
ccgaaatgctgcaccacgctgggga

SEQ ID NO: 3897546 - DNA, 25 bp, Homo sapien
cacgctggggagcatggcagccagc

SEQ ID NO: 3897547 - DNA, 25 bp, Homo sapien
gctgctccatggaggggaactggta

SEQ ID NO: 3897548 - DNA, 25 bp, Homo sapien
cactctagggctaggggtgccattt

SEQ ID NO: 3897549 - DNA, 25 bp, Homo sapien
gtaggcacccctgggccctagcgca

SEQ ID NO: 3897550 - DNA, 25 bp, Homo sapien
gcagttggggtaggcacccctgggc

SEQ ID NO: 3897551 - DNA, 25 bp, Homo sapien
agcaggctggtcactctagggctag

SEQ ID NO: 3897552 - DNA, 25 bp, Homo sapien
ttggccagcacataggctccggcgc

SEQ ID NO: 3897553 - DNA, 25 bp, Homo sapien
cgcccactccgatgccaatcacata

SEQ ID NO: 3897554 - DNA, 25 bp, Homo sapien
gctccggcgcccactccgatgccaa

SEQ ID NO: 3897555 - DNA, 25 bp, Homo sapien
ggcgcccactccgatgccaatcaca

SEQ ID NO: 3897556 - DNA, 25 bp, Homo sapien
gctaaaaaaattattcatgttgaaa

SEQ ID NO: 3897557 - DNA, 25 bp, Homo sapien
tttgctaaaaaaattattcatgttg

SEQ ID NO: 3897558 - DNA, 25 bp, Homo sapien
ttgctaaaaaaattattcatgttga

SEQ ID NO: 3897559 - DNA, 25 bp, Homo sapien
tgctaaaaaaattattcatgttgaa

SEQ ID NO: 3897560 - DNA, 25 bp, Homo sapien
acatggtgaagccctgtctctaata

SEQ ID NO: 3897561 - DNA, 25 bp, Homo sapien
ggtcaggcatacgagaccagcctag

SEQ ID NO: 3897562 - DNA, 25 bp, Homo sapien
ccaacatggtgaagccctgtctcta

SEQ ID NO: 3897563 - DNA, 25 bp, Homo sapien
gtcaggcatacgagaccagcctagc

SEQ ID NO: 3897564 - DNA, 25 bp, Homo sapien
ttagaatctctatcattgtttccac

SEQ ID NO: 3897565 - DNA, 25 bp, Homo sapien
ctctgtaaagtcttcaaggtgctgc

SEQ ID NO: 3897566 - DNA, 25 bp, Homo sapien
atgggtgcagatggcagaaacactc

SEQ ID NO: 3897567 - DNA, 25 bp, Homo sapien
tacagccgggtctgtgcatgcacac

SEQ ID NO: 3897568 - DNA, 25 bp, Homo sapien
ttggtggcagcccagtctatccagc

SEQ ID NO: 3897569 - DNA, 25 bp, Homo sapien
cattggggtcgatgttcaccagcac

SEQ ID NO: 3897570 - DNA, 25 bp, Homo sapien
ggcagcccagtctatccagcctttg

SEQ ID NO: 3897571 - DNA, 25 bp, Homo sapien
cctccaccaggtcggggaagatgag

SEQ ID NO: 3897572 - DNA, 25 bp, Homo sapien
tgtcgggtaaagtgctagttaggcc

SEQ ID NO: 3897573 - DNA, 25 bp, Homo sapien
agagcaccgtgtcgggtaaagtgct

SEQ ID NO: 3897574 - DNA, 25 bp, Homo sapien
ccgtgtcgggtaaagtgctagttag

SEQ ID NO: 3897575 - DNA, 25 bp, Homo sapien
tgggagagcaccgtgtcgggtaaag

SEQ ID NO: 3897576 - DNA, 25 bp, Homo sapien
tcccaatctgctgccggtagctctg

SEQ ID NO: 3897577 - DNA, 25 bp, Homo sapien
cacgttcccaatctgctgccggtag

SEQ ID NO: 3897578 - DNA, 25 bp, Homo sapien
ggtagctctgcaccaactctgtgtt

SEQ ID NO: 3897579 - DNA, 25 bp, Homo sapien
aatctgctgccggtagctctgcacc

SEQ ID NO: 3897580 - DNA, 25 bp, Homo sapien
cattgggcaccgttccaggccggtt

SEQ ID NO: 3897581 - DNA, 25 bp, Homo sapien
tccaggccggttaatgtccaggtct

SEQ ID NO: 3897582 - DNA, 25 bp, Homo sapien
cgttccaggccggttaatgtccagg

SEQ ID NO: 3897583 - DNA, 25 bp, Homo sapien
gagcgtcttggcattgggcaccgtt

SEQ ID NO: 3897584 - DNA, 25 bp, Homo sapien
agcgggtgcattatccccaaccacc

SEQ ID NO: 3897585 - DNA, 25 bp, Homo sapien
tcagcgggtgcattatccccaacca

SEQ ID NO: 3897586 - DNA, 25 bp, Homo sapien
caccccgtcctcagcgggtgcatta

SEQ ID NO: 3897587 - DNA, 25 bp, Homo sapien
cccgtcctcagcgggtgcattatcc

SEQ ID NO: 3897588 - DNA, 25 bp, Homo sapien
gccaaggcaggtttgatgccccaag

SEQ ID NO: 3897589 - DNA, 25 bp, Homo sapien
ccccattgccaaggcaggtttgatg

SEQ ID NO: 3897590 - DNA, 25 bp, Homo sapien
ctgaggacaaggagccagcttcagc

SEQ ID NO: 3897591 - DNA, 25 bp, Homo sapien
attgccaaggcaggtttgatgcccc

SEQ ID NO: 3897592 - DNA, 25 bp, Homo sapien
cgtagtggtcgggtccagtttggag

SEQ ID NO: 3897593 - DNA, 25 bp, Homo sapien
cgggtccagtttggagttgcactcc

SEQ ID NO: 3897594 - DNA, 25 bp, Homo sapien
tggtcgggtccagtttggagttgca

SEQ ID NO: 3897595 - DNA, 25 bp, Homo sapien
gtcgggtccagtttggagttgcact

SEQ ID NO: 3897596 - DNA, 25 bp, Homo sapien
ggggcagccctccagagtctgccat

SEQ ID NO: 3897597 - DNA, 25 bp, Homo sapien
gacctggggcagccctccagagtct

SEQ ID NO: 3897598 - DNA, 25 bp, Homo sapien
cctggggcagccctccagagtctgc

SEQ ID NO: 3897599 - DNA, 25 bp, Homo sapien
tggggcagccctccagagtctgcca

SEQ ID NO: 3897600 - DNA, 25 bp, Homo sapien
catgccttgcaggaagtatttgaag

SEQ ID NO: 3897601 - DNA, 25 bp, Homo sapien
cccatgccttgcaggaagtatttga

SEQ ID NO: 3897602 - DNA, 25 bp, Homo sapien
gaagtatttgaaggcttcagtcagc

SEQ ID NO: 3897603 - DNA, 25 bp, Homo sapien
tagcccatgccttgcaggaagtatt

SEQ ID NO: 3897604 - DNA, 25 bp, Homo sapien
tggggtggggtggaaatgtactcac

SEQ ID NO: 3897605 - DNA, 25 bp, Homo sapien
gtggggtggggtggaaatgtactca

SEQ ID NO: 3897606 - DNA, 25 bp, Homo sapien
tgtggggtggggtggaaatgtactc

SEQ ID NO: 3897607 - DNA, 25 bp, Homo sapien
ccagcacggaaggaagagtcccttc

SEQ ID NO: 3897608 - DNA, 25 bp, Homo sapien
ctggacccccagcacggaaggaaga

SEQ ID NO: 3897609 - DNA, 25 bp, Homo sapien
tgccatcagaacagtgcgccaagtc

SEQ ID NO: 3897610 - DNA, 25 bp, Homo sapien
gcccagcactgccatcagaacagtg

SEQ ID NO: 3897611 - DNA, 25 bp, Homo sapien
tcaggtgccatagacccagctctga

SEQ ID NO: 3897612 - DNA, 25 bp, Homo sapien
gattttcagatctgccaagccaggt

SEQ ID NO: 3897613 - DNA, 25 bp, Homo sapien
tcctgtttgccctggagatagctcc

SEQ ID NO: 3897614 - DNA, 25 bp, Homo sapien
agttgtttcaaaaggccttctcagg

SEQ ID NO: 3897615 - DNA, 25 bp, Homo sapien
tcagccttcggtccttcaagtacgc

SEQ ID NO: 3897616 - DNA, 25 bp, Homo sapien
actcagccttcggtccttcaagtac

SEQ ID NO: 3897617 - DNA, 25 bp, Homo sapien
tccactcagccttcggtccttcaag

SEQ ID NO: 3897618 - DNA, 25 bp, Homo sapien
agccttcggtccttcaagtacgcaa

SEQ ID NO: 3897619 - DNA, 25 bp, Homo sapien
caagcaagacttgcgggcagcaaac

SEQ ID NO: 3897620 - DNA, 25 bp, Homo sapien
gaggccaagcctgcagaaaagcaag

SEQ ID NO: 3897621 - DNA, 25 bp, Homo sapien
tggtcgcatactgccctcaattcag

SEQ ID NO: 3897622 - DNA, 25 bp, Homo sapien
gttccaaaccacagcaagatgcggc

SEQ ID NO: 3897623 - DNA, 25 bp, Homo sapien
gatgccagtggagaagtaggactgt

SEQ ID NO: 3897624 - DNA, 25 bp, Homo sapien
ggtgctgggtttccagccgtgcctc

SEQ ID NO: 3897625 - DNA, 25 bp, Homo sapien
caggaggctggcgacagctgtcggg

SEQ ID NO: 3897626 - DNA, 25 bp, Homo sapien
gcaaagcggccagcgaaccgttcct

SEQ ID NO: 3897627 - DNA, 25 bp, Homo sapien
tctggtgggaaaagtaggctgcaag

SEQ ID NO: 3897628 - DNA, 25 bp, Homo sapien
ccgttcctcgaaggcacaaagggct

SEQ ID NO: 3897629 - DNA, 25 bp, Homo sapien
cgggagcgtgccaggcgggtcatgc

SEQ ID NO: 3897630 - DNA, 25 bp, Homo sapien
gatgcagtgcgggagcgtgccaggc

SEQ ID NO: 3897631 - DNA, 25 bp, Homo sapien
cagtgcgggagcgtgccaggcgggt

SEQ ID NO: 3897632 - DNA, 25 bp, Homo sapien
gagggatgcagtgcgggagcgtgcc

SEQ ID NO: 3897633 - DNA, 25 bp, Homo sapien
atctccaaacatgcctgcccaaggg

SEQ ID NO: 3897634 - DNA, 25 bp, Homo sapien
actaaagggaacatgagccggcgca

SEQ ID NO: 3897635 - DNA, 25 bp, Homo sapien
tgctatgagacagaaacaggtgtgc

SEQ ID NO: 3897636 - DNA, 25 bp, Homo sapien
gcctggatccgtagcgaatctccct

SEQ ID NO: 3897637 - DNA, 25 bp, Homo sapien
tctcttccttagtgatgcgtccggg

SEQ ID NO: 3897638 - DNA, 25 bp, Homo sapien
aaggcagtcaccacgaagttctcag

SEQ ID NO: 3897639 - DNA, 25 bp, Homo sapien
tggatggaaagcatacaacgcagtc

SEQ ID NO: 3897640 - DNA, 25 bp, Homo sapien
gactgtagaagcctcgctgccttgg

SEQ ID NO: 3897641 - DNA, 25 bp, Homo sapien
gtgacattctcatctcaccggtaaa

SEQ ID NO: 3897642 - DNA, 25 bp, Homo sapien
cataaggcttttaatgtttgtgaca

SEQ ID NO: 3897643 - DNA, 25 bp, Homo sapien
gaaatagaaagatgggtggagacca

SEQ ID NO: 3897644 - DNA, 25 bp, Homo sapien
tcatctcaccggtaaaataatgtga

SEQ ID NO: 3897645 - DNA, 25 bp, Homo sapien
tgatctcgaccccttgttgccgatg

SEQ ID NO: 3897646 - DNA, 25 bp, Homo sapien
ggtggccggccggtggtgagcgacg

SEQ ID NO: 3897647 - DNA, 25 bp, Homo sapien
tggtgagcgacgcaactgggcggcg

SEQ ID NO: 3897648 - DNA, 25 bp, Homo sapien
gcggcgagcgacctcctgatctcga

SEQ ID NO: 3897649 - DNA, 25 bp, Homo sapien
ctgggtgcaagaacaaaatacggtt

SEQ ID NO: 3897650 - DNA, 25 bp, Homo sapien
aggagagtcccgtgccgcttggcgc

SEQ ID NO: 3897651 - DNA, 25 bp, Homo sapien
caggtacagccctggccttcggtct

SEQ ID NO: 3897652 - DNA, 25 bp, Homo sapien
gtctgtccccgagggctgaggcttc

SEQ ID NO: 3897653 - DNA, 25 bp, Homo sapien
cgctgcgagtgcagaaggagagtcc

SEQ ID NO: 3897654 - DNA, 25 bp, Homo sapien
ggtctaagagcgcgtttcctcgcgg

SEQ ID NO: 3897655 - DNA, 25 bp, Homo sapien
tcgcgggccggcgcaccgcgcggtc

SEQ ID NO: 3897656 - DNA, 25 bp, Homo sapien
cgcgggccggcgcaccgcgcggtca

SEQ ID NO: 3897657 - DNA, 25 bp, Homo sapien
ctaagagcgcgtttcctcgcgggcc

SEQ ID NO: 3897658 - DNA, 25 bp, Homo sapien
cgtggacgcttcgcctgggtcgcca

SEQ ID NO: 3897659 - DNA, 25 bp, Homo sapien
gtggacgcttcgcctgggtcgccat

SEQ ID NO: 3897660 - DNA, 25 bp, Homo sapien
ccgtggacgcttcgcctgggtcgcc

SEQ ID NO: 3897661 - DNA, 25 bp, Homo sapien
aaggctggaccccgcgcccgccact

SEQ ID NO: 3897662 - DNA, 25 bp, Homo sapien
ggtgaggcgcggaggaaaaggctgg

SEQ ID NO: 3897663 - DNA, 25 bp, Homo sapien
gctggaccccgcgcccgccactcac

SEQ ID NO: 3897664 - DNA, 25 bp, Homo sapien
ctgcgaacggagaaggggtgaggcg

SEQ ID NO: 3897665 - DNA, 25 bp, Homo sapien
gaggaggggacgagcggagaggggc

SEQ ID NO: 3897666 - DNA, 25 bp, Homo sapien
gacgagcggagaggggcgcgggacc

SEQ ID NO: 3897667 - DNA, 25 bp, Homo sapien
ctttgggtggaggaggggacgagcg

SEQ ID NO: 3897668 - DNA, 25 bp, Homo sapien
gtggaggaggggacgagcggagagg

SEQ ID NO: 3897669 - DNA, 25 bp, Homo sapien
agaccgcggcgcgagcgcagaacgg

SEQ ID NO: 3897670 - DNA, 25 bp, Homo sapien
gataagtgcgcgcagtgaccaggtc

SEQ ID NO: 3897671 - DNA, 25 bp, Homo sapien
gtgcgcgcagtgaccaggtccgacc

SEQ ID NO: 3897672 - DNA, 25 bp, Homo sapien
ctgagataagtgcgcgcagtgacca

SEQ ID NO: 3897673 - DNA, 25 bp, Homo sapien
cacaggatccaggtcgccgccgtcc

SEQ ID NO: 3897674 - DNA, 25 bp, Homo sapien
gccacaggatccaggtcgccgccgt

SEQ ID NO: 3897675 - DNA, 25 bp, Homo sapien
ggccacaggatccaggtcgccgccg

SEQ ID NO: 3897676 - DNA, 25 bp, Homo sapien
caggatccaggtcgccgccgtccac

SEQ ID NO: 3897677 - DNA, 25 bp, Homo sapien
cagcccgcgccccgccgcgggtcct

SEQ ID NO: 3897678 - DNA, 25 bp, Homo sapien
tgagcaggagggctggtcagggcag

SEQ ID NO: 3897679 - DNA, 25 bp, Homo sapien
gtcagggcagcccgcgccccgccgc

SEQ ID NO: 3897680 - DNA, 25 bp, Homo sapien
ctgagcaggagggctggtcagggca

SEQ ID NO: 3897681 - DNA, 25 bp, Homo sapien
agctctccggcctgcacgctctccc

SEQ ID NO: 3897682 - DNA, 25 bp, Homo sapien
tcccgggccaccatgccgtagccgg

SEQ ID NO: 3897683 - DNA, 25 bp, Homo sapien
tctcccgggccaccatgccgtagcc

SEQ ID NO: 3897684 - DNA, 25 bp, Homo sapien
cacgaacaacagctctccggcctgc

SEQ ID NO: 3897685 - DNA, 25 bp, Homo sapien
gccgccgatggagcaggtgtgctgc

SEQ ID NO: 3897686 - DNA, 25 bp, Homo sapien
gctccagcaggccgccgatggagca

SEQ ID NO: 3897687 - DNA, 25 bp, Homo sapien
tgtgctgcgacaggagcgcggcccg

SEQ ID NO: 3897688 - DNA, 25 bp, Homo sapien
ggtgtgctgcgacaggagcgcggcc

SEQ ID NO: 3897689 - DNA, 25 bp, Homo sapien
cccagctcgggccagagcgcaaagt

SEQ ID NO: 3897690 - DNA, 25 bp, Homo sapien
ggccagagcgcaaagtagggcctcc

SEQ ID NO: 3897691 - DNA, 25 bp, Homo sapien
agaacatcgggtgctccaagcggcc

SEQ ID NO: 3897692 - DNA, 25 bp, Homo sapien
gcccgactggctctgcagcgcaact

SEQ ID NO: 3897693 - DNA, 25 bp, Homo sapien
ggaaacttcttgcagcaggctacgg

SEQ ID NO: 3897694 - DNA, 25 bp, Homo sapien
tcttgcagcaggctacggtgcaggc

SEQ ID NO: 3897695 - DNA, 25 bp, Homo sapien
aacttcttgcagcaggctacggtgc

SEQ ID NO: 3897696 - DNA, 25 bp, Homo sapien
cagcaggctacggtgcaggcgctcc

SEQ ID NO: 3897697 - DNA, 25 bp, Homo sapien
cacccacacccaggttcccttcatt

SEQ ID NO: 3897698 - DNA, 25 bp, Homo sapien
cacacccaggttcccttcattcctt

SEQ ID NO: 3897699 - DNA, 25 bp, Homo sapien
gacacccacacccaggttcccttca

SEQ ID NO: 3897700 - DNA, 25 bp, Homo sapien
tgcagggacacccacacccaggttc

SEQ ID NO: 3897701 - DNA, 25 bp, Homo sapien
tagagttctagggagcgaaccctga

SEQ ID NO: 3897702 - DNA, 25 bp, Homo sapien
gcagcacgatggactggtactcgct

SEQ ID NO: 3897703 - DNA, 25 bp, Homo sapien
ttctccacggcctcaggtacgcctg

SEQ ID NO: 3897704 - DNA, 25 bp, Homo sapien
cctcaggtacgcctgtgccctggag

SEQ ID NO: 3897705 - DNA, 25 bp, Homo sapien
tccacttttgtccctctatagagtt

SEQ ID NO: 3897706 - DNA, 25 bp, Homo sapien
gacagaacctggctaaggccctgtc

SEQ ID NO: 3897707 - DNA, 25 bp, Homo sapien
ctgccattgacagaacctggctaag

SEQ ID NO: 3897708 - DNA, 25 bp, Homo sapien
agaacctggctaaggccctgtcttg

SEQ ID NO: 3897709 - DNA, 25 bp, Homo sapien
cgttgtgattggctaagtggtttag

SEQ ID NO: 3897710 - DNA, 25 bp, Homo sapien
ctagattggcgttgtgattggctaa

SEQ ID NO: 3897711 - DNA, 25 bp, Homo sapien
agtattctagattggcgttgtgatt

SEQ ID NO: 3897712 - DNA, 25 bp, Homo sapien
gctaagtggtttagtatgtctgcag

SEQ ID NO: 3897713 - DNA, 25 bp, Homo sapien
ccatgactgatgctgttaactacca

SEQ ID NO: 3897714 - DNA, 25 bp, Homo sapien
gatcgtcttagacctttggcctgtg

SEQ ID NO: 3897715 - DNA, 25 bp, Homo sapien
gaaacatggctatgcagaccactca

SEQ ID NO: 3897716 - DNA, 25 bp, Homo sapien
tagcactagtaagagaatggagcct

SEQ ID NO: 3897717 - DNA, 25 bp, Homo sapien
catatgaatcagttgccagttagcc

SEQ ID NO: 3897718 - DNA, 25 bp, Homo sapien
ctgtgttgtcaggatatggttcaac

SEQ ID NO: 3897719 - DNA, 25 bp, Homo sapien
ttgcccataagtgttgaaaatctca

SEQ ID NO: 3897720 - DNA, 25 bp, Homo sapien
tggttcaacaaaaccgtacatatga

SEQ ID NO: 3897721 - DNA, 25 bp, Homo sapien
aatgctgcctcacgaactgtcacca

SEQ ID NO: 3897722 - DNA, 25 bp, Homo sapien
cctgtaatgctgcctcacgaactgt

SEQ ID NO: 3897723 - DNA, 25 bp, Homo sapien
tgtaatgctgcctcacgaactgtca

SEQ ID NO: 3897724 - DNA, 25 bp, Homo sapien
actgtcaccatctgaatgtcagctg

SEQ ID NO: 3897725 - DNA, 25 bp, Homo sapien
tagtctgccacccagtctacaaagt

SEQ ID NO: 3897726 - DNA, 25 bp, Homo sapien
tacaaagtcaactgctatttagcaa

SEQ ID NO: 3897727 - DNA, 25 bp, Homo sapien
cctgaggcatgggtatagacacacc

SEQ ID NO: 3897728 - DNA, 25 bp, Homo sapien
tgaaagtctcagtacacccaagggt

SEQ ID NO: 3897729 - DNA, 25 bp, Homo sapien
catctccagtttgcataggaaatcc

SEQ ID NO: 3897730 - DNA, 25 bp, Homo sapien
ataggaaatcccagcgctcgtacac

SEQ ID NO: 3897731 - DNA, 25 bp, Homo sapien
tacactaggtgcctttcagcttcag

SEQ ID NO: 3897732 - DNA, 25 bp, Homo sapien
tccctatcacaaaggctccctcttc

SEQ ID NO: 3897733 - DNA, 25 bp, Homo sapien
ttttaagtctgtggcataggtctgc

SEQ ID NO: 3897734 - DNA, 25 bp, Homo sapien
gcagctgtctccacgatgctttgag

SEQ ID NO: 3897735 - DNA, 25 bp, Homo sapien
ccagctgagtttcgcatagacttcc

SEQ ID NO: 3897736 - DNA, 25 bp, Homo sapien
aatatttgtgatcgtcaggctgccc

SEQ ID NO: 3897737 - DNA, 25 bp, Homo sapien
taacttgtcagctccaacaactgat

SEQ ID NO: 3897738 - DNA, 25 bp, Homo sapien
caactgatgtaagatcatcttctga

SEQ ID NO: 3897739 - DNA, 25 bp, Homo sapien
aacaactgatgtaagatcatcttct

SEQ ID NO: 3897740 - DNA, 25 bp, Homo sapien
cagctccaacaactgatgtaagatc

SEQ ID NO: 3897741 - DNA, 25 bp, Homo sapien
ggaagggctcactattggaatccca

SEQ ID NO: 3897742 - DNA, 25 bp, Homo sapien
caaacgtattccaaagctgactgca

SEQ ID NO: 3897743 - DNA, 25 bp, Homo sapien
tattccctgagaggtggtttgtgcc

SEQ ID NO: 3897744 - DNA, 25 bp, Homo sapien
gaatggccatacaggctaagctgaa

SEQ ID NO: 3897745 - DNA, 25 bp, Homo sapien
tgtacgtgtcagtctagaggtctca

SEQ ID NO: 3897746 - DNA, 25 bp, Homo sapien
gaagcaggcccagcaagtaatggaa

SEQ ID NO: 3897747 - DNA, 25 bp, Homo sapien
gaggtctcactgcaccgagttcata

SEQ ID NO: 3897748 - DNA, 25 bp, Homo sapien
tcaggttattccagtcggtcgcaca

SEQ ID NO: 3897749 - DNA, 25 bp, Homo sapien
gcctgggagctcattctggaaatta

SEQ ID NO: 3897750 - DNA, 25 bp, Homo sapien
catgaatttgtacactgtgccccag

SEQ ID NO: 3897751 - DNA, 25 bp, Homo sapien
cttctacggctaagagcagggttca

SEQ ID NO: 3897752 - DNA, 25 bp, Homo sapien
tctgaacagctgtgaggtagatacc

SEQ ID NO: 3897753 - DNA, 25 bp, Homo sapien
ttttgcagaggccaatacggaagcc

SEQ ID NO: 3897754 - DNA, 25 bp, Homo sapien
agatcacaaggtaagcgagcagctt

SEQ ID NO: 3897755 - DNA, 25 bp, Homo sapien
aaatcagctccggtacccaaatagc

SEQ ID NO: 3897756 - DNA, 25 bp, Homo sapien
gttagaactgtcttcccatgttggc

SEQ ID NO: 3897757 - DNA, 25 bp, Homo sapien
tctagaaccagcatacagctgtggt

SEQ ID NO: 3897758 - DNA, 25 bp, Homo sapien
taacttgggtcattggcttaggaac

SEQ ID NO: 3897759 - DNA, 25 bp, Homo sapien
taaacctgtggatgggaatattccc

SEQ ID NO: 3897760 - DNA, 25 bp, Homo sapien
tcaagaggtaccacagagtagatgg

SEQ ID NO: 3897761 - DNA, 25 bp, Homo sapien
catgcctggctgatgcagaatattt

SEQ ID NO: 3897762 - DNA, 25 bp, Homo sapien
ttttcattatctcccaagaggtttc

SEQ ID NO: 3897763 - DNA, 25 bp, Homo sapien
cattatctcccaagaggtttccttg

SEQ ID NO: 3897764 - DNA, 25 bp, Homo sapien
gcctggctgatgcagaatattttca

SEQ ID NO: 3897765 - DNA, 25 bp, Homo sapien
tatttatgaggtatacttcgtacag

SEQ ID NO: 3897766 - DNA, 25 bp, Homo sapien
agaagtcttccctttaggtgtatag

SEQ ID NO: 3897767 - DNA, 25 bp, Homo sapien
tggttggttatttatgaggtatact

SEQ ID NO: 3897768 - DNA, 25 bp, Homo sapien
tatacttcgtacagtagaagtcttc

SEQ ID NO: 3897769 - DNA, 25 bp, Homo sapien
caatctgggcccactgcaccttccg

SEQ ID NO: 3897770 - DNA, 25 bp, Homo sapien
gggcccactgcaccttccgcctcct

SEQ ID NO: 3897771 - DNA, 25 bp, Homo sapien
tctgggcccactgcaccttccgcct

SEQ ID NO: 3897772 - DNA, 25 bp, Homo sapien
gcaatctgggcccactgcaccttcc

SEQ ID NO: 3897773 - DNA, 25 bp, Homo sapien
tatatgctaccatgcatgcctattt

SEQ ID NO: 3897774 - DNA, 25 bp, Homo sapien
ggtatatgctaccatgcatgcctat

SEQ ID NO: 3897775 - DNA, 25 bp, Homo sapien
acaggtatatgctaccatgcatgcc

SEQ ID NO: 3897776 - DNA, 25 bp, Homo sapien
gtcttgcctccaattacctgggatt

SEQ ID NO: 3897777 - DNA, 25 bp, Homo sapien
gatggctccccaacgaacttcatgt

SEQ ID NO: 3897778 - DNA, 25 bp, Homo sapien
ggctcgactgcttcacatgggttgt

SEQ ID NO: 3897779 - DNA, 25 bp, Homo sapien
tcactcagtacttggtgggccacca

SEQ ID NO: 3897780 - DNA, 25 bp, Homo sapien
gagagtccttgtatggttcctgcag

SEQ ID NO: 3897781 - DNA, 25 bp, Homo sapien
tatacaaatagaatgatccagcgct

SEQ ID NO: 3897782 - DNA, 25 bp, Homo sapien
aagtgactatagctttgtgttacag

SEQ ID NO: 3897783 - DNA, 25 bp, Homo sapien
gagccaatagtagacaacgcgtata

SEQ ID NO: 3897784 - DNA, 25 bp, Homo sapien
ggttttggcctggatatgaagttaa

SEQ ID NO: 3897785 - DNA, 25 bp, Homo sapien
tttcactcttggcgcctgggttaga

SEQ ID NO: 3897786 - DNA, 25 bp, Homo sapien
ctcttggcgcctgggttagagtgca

SEQ ID NO: 3897787 - DNA, 25 bp, Homo sapien
cactcttggcgcctgggttagagtg

SEQ ID NO: 3897788 - DNA, 25 bp, Homo sapien
ccaggtttcaagagacgatcctgcc

SEQ ID NO: 3897789 - DNA, 25 bp, Homo sapien
ttagtttcccagcccttcttccaca

SEQ ID NO: 3897790 - DNA, 25 bp, Homo sapien
caggatcagccagttgccagaaaat

SEQ ID NO: 3897791 - DNA, 25 bp, Homo sapien
tcctgcacagagtcggcctccagat

SEQ ID NO: 3897792 - DNA, 25 bp, Homo sapien
agtccgaggctaggctttttatgaa

SEQ ID NO: 3897793 - DNA, 25 bp, Homo sapien
ttttatgaacaagttggtgggcagg

SEQ ID NO: 3897794 - DNA, 25 bp, Homo sapien
gagatgacagcaacacatggactag

SEQ ID NO: 3897795 - DNA, 25 bp, Homo sapien
taaccctgcaggaggcaatatagcc

SEQ ID NO: 3897796 - DNA, 25 bp, Homo sapien
tctggacatcacaccaacctgggtt

SEQ ID NO: 3897797 - DNA, 25 bp, Homo sapien
caaaatgggattgacaggccaggca

SEQ ID NO: 3897798 - DNA, 25 bp, Homo sapien
cctcattcaagccaaactctctgag

SEQ ID NO: 3897799 - DNA, 25 bp, Homo sapien
tgtgcctcattcaagccaaactctc

SEQ ID NO: 3897800 - DNA, 25 bp, Homo sapien
cattcaagccaaactctctgagatg

SEQ ID NO: 3897801 - DNA, 25 bp, Homo sapien
gtgcctcattcaagccaaactctct

SEQ ID NO: 3897802 - DNA, 25 bp, Homo sapien
atctcagtcattggaggcctggccg

SEQ ID NO: 3897803 - DNA, 25 bp, Homo sapien
gcctggccgcctgcttcatcttcgt

SEQ ID NO: 3897804 - DNA, 25 bp, Homo sapien
tgacatcggcaaggtgatctcagtc

SEQ ID NO: 3897805 - DNA, 25 bp, Homo sapien
gctcttcatccctgacatcggcaag

SEQ ID NO: 3897806 - DNA, 25 bp, Homo sapien
tgagcgtgctcacctcctaccctat

SEQ ID NO: 3897807 - DNA, 25 bp, Homo sapien
gccttcatcatcctgagcgtgctca

SEQ ID NO: 3897808 - DNA, 25 bp, Homo sapien
ccgagccttcatcatcctgagcgtg

SEQ ID NO: 3897809 - DNA, 25 bp, Homo sapien
gttgcccgagccttcatcatcctga

SEQ ID NO: 3897810 - DNA, 25 bp, Homo sapien
tgcgccagctctgccgcgcctttac

SEQ ID NO: 3897811 - DNA, 25 bp, Homo sapien
ggtccagatcctggcgtcctcgccc

SEQ ID NO: 3897812 - DNA, 25 bp, Homo sapien
cggaaaagctcagaccctttccctg

SEQ ID NO: 3897813 - DNA, 25 bp, Homo sapien
cgcgcctttacccagccagagggtc

SEQ ID NO: 3897814 - DNA, 25 bp, Homo sapien
tccagtttaggatattccacagcag

SEQ ID NO: 3897815 - DNA, 25 bp, Homo sapien
taatggaaggcctggaagcaagtta

SEQ ID NO: 3897816 - DNA, 25 bp, Homo sapien
caagagatctgtctagcagggcagg

SEQ ID NO: 3897817 - DNA, 25 bp, Homo sapien
gaaggccatcctctcaacagtgaga

SEQ ID NO: 3897818 - DNA, 25 bp, Homo sapien
tcataagccagtagatgtatccact

SEQ ID NO: 3897819 - DNA, 25 bp, Homo sapien
atgctgagaatgtgggtgtaatccc

SEQ ID NO: 3897820 - DNA, 25 bp, Homo sapien
tcagtttgtccagtccgaagatgct

SEQ ID NO: 3897821 - DNA, 25 bp, Homo sapien
aacaagtggagtcccatgaaggatc

SEQ ID NO: 3897822 - DNA, 25 bp, Homo sapien
catgtagacttattgcggcctggtt

SEQ ID NO: 3897823 - DNA, 25 bp, Homo sapien
catggctggcgtctggaatattaaa

SEQ ID NO: 3897824 - DNA, 25 bp, Homo sapien
caggttcctcgtgagaaacagcaca

SEQ ID NO: 3897825 - DNA, 25 bp, Homo sapien
tctgtcatgagtagtcggcctcgtg

SEQ ID NO: 3897826 - DNA, 25 bp, Homo sapien
tgtacctcccctagtcatcatgtga

SEQ ID NO: 3897827 - DNA, 25 bp, Homo sapien
tgctagacctaccaaaaatttgagt

SEQ ID NO: 3897828 - DNA, 25 bp, Homo sapien
cccagctcagggtagttctttatgg

SEQ ID NO: 3897829 - DNA, 25 bp, Homo sapien
tggtataataggttcatgctagacc

SEQ ID NO: 3897830 - DNA, 25 bp, Homo sapien
atcacaggtgtgcacaacgagaccc

SEQ ID NO: 3897831 - DNA, 25 bp, Homo sapien
tcacaggtgtgcacaacgagaccca

SEQ ID NO: 3897832 - DNA, 25 bp, Homo sapien
cgtgcaacgcaatccctagggaaag

SEQ ID NO: 3897833 - DNA, 25 bp, Homo sapien
tggccctcggcggttgccggactcc

SEQ ID NO: 3897834 - DNA, 25 bp, Homo sapien
ggaagtgtggccctcggcggttgcc

SEQ ID NO: 3897835 - DNA, 25 bp, Homo sapien
gcaggaaggcgtgcaacgcaatccc

SEQ ID NO: 3897836 - DNA, 25 bp, Homo sapien
gaaaaggcaggtctactgacacagg

SEQ ID NO: 3897837 - DNA, 25 bp, Homo sapien
caattggacaagacctccctaggcc

SEQ ID NO: 3897838 - DNA, 25 bp, Homo sapien
ggttgcccggtctgtcccaattgga

SEQ ID NO: 3897839 - DNA, 25 bp, Homo sapien
cagatctggatcctgggttgcccgg

SEQ ID NO: 3897840 - DNA, 25 bp, Homo sapien
tctggaaatgtttcctctgggtctg

SEQ ID NO: 3897841 - DNA, 25 bp, Homo sapien
ctggaaatgtttcctctgggtctgt

SEQ ID NO: 3897842 - DNA, 25 bp, Homo sapien
aggatccccgcaatcatttctgagg

SEQ ID NO: 3897843 - DNA, 25 bp, Homo sapien
ggtgaaaaggatccccgcaatcatt

SEQ ID NO: 3897844 - DNA, 25 bp, Homo sapien
aaaggatccccgcaatcatttctga

SEQ ID NO: 3897845 - DNA, 25 bp, Homo sapien
cctgggtgaaaaggatccccgcaat

SEQ ID NO: 3897846 - DNA, 25 bp, Homo sapien
tgtccgtattgatccctggtgacca

SEQ ID NO: 3897847 - DNA, 25 bp, Homo sapien
ggaaagccttgtccgtattgatccc

SEQ ID NO: 3897848 - DNA, 25 bp, Homo sapien
tagcaggaaagccttgtccgtattg

SEQ ID NO: 3897849 - DNA, 25 bp, Homo sapien
aagccttgtccgtattgatccctgg

SEQ ID NO: 3897850 - DNA, 25 bp, Homo sapien
tacagctcaaaaagacagtgcaaac

SEQ ID NO: 3897851 - DNA, 25 bp, Homo sapien
tggaaggacgccgaaacatgttacc

SEQ ID NO: 3897852 - DNA, 25 bp, Homo sapien
aggtggcgtgtctgaaacttgttcc

SEQ ID NO: 3897853 - DNA, 25 bp, Homo sapien
cataagccgcgacagtgtggaagga

SEQ ID NO: 3897854 - DNA, 25 bp, Homo sapien
caggaaactgattttcagcgcagta

SEQ ID NO: 3897855 - DNA, 25 bp, Homo sapien
agctggtgttgacagagcgccgctc

SEQ ID NO: 3897856 - DNA, 25 bp, Homo sapien
gaaaccacaacccatgaagagctgg

SEQ ID NO: 3897857 - DNA, 25 bp, Homo sapien
ggctctgtgacgtaacttgattccc

SEQ ID NO: 3897858 - DNA, 25 bp, Homo sapien
cagacctcattgtcaaccggggcgc

SEQ ID NO: 3897859 - DNA, 25 bp, Homo sapien
gacctcattgtcaaccggggcgcca

SEQ ID NO: 3897860 - DNA, 25 bp, Homo sapien
aaccggggcgccagtcagtggagga

SEQ ID NO: 3897861 - DNA, 25 bp, Homo sapien
cctcattgtcaaccggggcgccagt

SEQ ID NO: 3897862 - DNA, 25 bp, Homo sapien
cttaggcagcctggcagtctccagc

SEQ ID NO: 3897863 - DNA, 25 bp, Homo sapien
aggcagcctggcagtctccagctcc

SEQ ID NO: 3897864 - DNA, 25 bp, Homo sapien
taggcagcctggcagtctccagctc

SEQ ID NO: 3897865 - DNA, 25 bp, Homo sapien
ttaggcagcctggcagtctccagct

SEQ ID NO: 3897866 - DNA, 25 bp, Homo sapien
tccagagagggttgtcccagaaaga

SEQ ID NO: 3897867 - DNA, 25 bp, Homo sapien
cttttactccacaacagcatccagg

SEQ ID NO: 3897868 - DNA, 25 bp, Homo sapien
gagtatcctgcttactccttagaat

SEQ ID NO: 3897869 - DNA, 25 bp, Homo sapien
tccataatgccatatcgacatgtct

SEQ ID NO: 3897870 - DNA, 25 bp, Homo sapien
cctctgcatctacccctcctcttta

SEQ ID NO: 3897871 - DNA, 25 bp, Homo sapien
tctacctctgcatctacccctcctc

SEQ ID NO: 3897872 - DNA, 25 bp, Homo sapien
tacctctgcatctacccctcctctt

SEQ ID NO: 3897873 - DNA, 25 bp, Homo sapien
ctgcatctacccctcctctttaaac

SEQ ID NO: 3897874 - DNA, 25 bp, Homo sapien
tggcagagatcctcagtgatttcca

SEQ ID NO: 3897875 - DNA, 25 bp, Homo sapien
ctggcagagatcctcagtgatttcc

SEQ ID NO: 3897876 - DNA, 25 bp, Homo sapien
ggcagagatcctcagtgatttccat

SEQ ID NO: 3897877 - DNA, 25 bp, Homo sapien
gcaaaggtcgtggtcggcattcaca

SEQ ID NO: 3897878 - DNA, 25 bp, Homo sapien
cccaccagtgggtgttgtagcaaag

SEQ ID NO: 3897879 - DNA, 25 bp, Homo sapien
acaagcgcttcatctcagcctggca

SEQ ID NO: 3897880 - DNA, 25 bp, Homo sapien
tggcagtgctgttcccatacaagcg

SEQ ID NO: 3897881 - DNA, 25 bp, Homo sapien
cagccagaactgggctgcttttggt

SEQ ID NO: 3897882 - DNA, 25 bp, Homo sapien
cacaccagggcctgtcatggcgtgg

SEQ ID NO: 3897883 - DNA, 25 bp, Homo sapien
aaaagaagccgtagctcttccctca

SEQ ID NO: 3897884 - DNA, 25 bp, Homo sapien
gccccctcgtgtccactaacagtca

SEQ ID NO: 3897885 - DNA, 25 bp, Homo sapien
tgccccctcgtgtccactaacagtc

SEQ ID NO: 3897886 - DNA, 25 bp, Homo sapien
tcttccctcagagcccgggatgagg

SEQ ID NO: 3897887 - DNA, 25 bp, Homo sapien
gacaaacacgggtttgtagatccag

SEQ ID NO: 3897888 - DNA, 25 bp, Homo sapien
caaacacgggtttgtagatccagat

SEQ ID NO: 3897889 - DNA, 25 bp, Homo sapien
gcaaggacaaacacgggtttgtaga

SEQ ID NO: 3897890 - DNA, 25 bp, Homo sapien
cgggtttgtagatccagatgatggt

SEQ ID NO: 3897891 - DNA, 25 bp, Homo sapien
tgccttcgcaatgtataaacaacct

SEQ ID NO: 3897892 - DNA, 25 bp, Homo sapien
tggagacagacccaaaggatccacc

SEQ ID NO: 3897893 - DNA, 25 bp, Homo sapien
gtcaccagttgccttcgcaatgtat

SEQ ID NO: 3897894 - DNA, 25 bp, Homo sapien
ccccatccgtgcacctcagatacat

SEQ ID NO: 3897895 - DNA, 25 bp, Homo sapien
tttaggggttccttgagggatctga

SEQ ID NO: 3897896 - DNA, 25 bp, Homo sapien
gtactatcacaatctgggactgcct

SEQ ID NO: 3897897 - DNA, 25 bp, Homo sapien
agaagcagaaggtactatcacaatc

SEQ ID NO: 3897898 - DNA, 25 bp, Homo sapien
gaaggtactatcacaatctgggact

SEQ ID NO: 3897899 - DNA, 25 bp, Homo sapien
ctctagctaaagattgatgctgcat

SEQ ID NO: 3897900 - DNA, 25 bp, Homo sapien
aacatggcggcccacagatgaggcc

SEQ ID NO: 3897901 - DNA, 25 bp, Homo sapien
ttctctagctaaagattgatgctgc

SEQ ID NO: 3897902 - DNA, 25 bp, Homo sapien
ccatccccaggatctctctagtggt

SEQ ID NO: 3897903 - DNA, 25 bp, Homo sapien
tgatttctcaacaacagttagcagc

SEQ ID NO: 3897904 - DNA, 25 bp, Homo sapien
atgatttctcaacaacagttagcag

SEQ ID NO: 3897905 - DNA, 25 bp, Homo sapien
aaatctgcttagtcatttgaacaag

SEQ ID NO: 3897906 - DNA, 25 bp, Homo sapien
aaaatctgcttagtcatttgaacaa

SEQ ID NO: 3897907 - DNA, 25 bp, Homo sapien
gtcgattctccccttgctttaacaa

SEQ ID NO: 3897908 - DNA, 25 bp, Homo sapien
gctcttcatcccaatcgctggctta

SEQ ID NO: 3897909 - DNA, 25 bp, Homo sapien
gctggcttaatcacctctgctggct

SEQ ID NO: 3897910 - DNA, 25 bp, Homo sapien
gctactaaaagaatgactgcctgtg

SEQ ID NO: 3897911 - DNA, 25 bp, Homo sapien
cccgtgttcctgtggctaagtagca

SEQ ID NO: 3897912 - DNA, 25 bp, Homo sapien
caaagctctagacaggagcgaagct

SEQ ID NO: 3897913 - DNA, 25 bp, Homo sapien
tgaaccagttcgtggaagctccaaa

SEQ ID NO: 3897914 - DNA, 25 bp, Homo sapien
gcactggtcgtaatgaatgctggca

SEQ ID NO: 3897915 - DNA, 25 bp, Homo sapien
taggaatgagctacactgcagcatg

SEQ ID NO: 3897916 - DNA, 25 bp, Homo sapien
caaattattccatctggcagagctg

SEQ ID NO: 3897917 - DNA, 25 bp, Homo sapien
catgcatggatacctgtggccttta

SEQ ID NO: 3897918 - DNA, 25 bp, Homo sapien
tgtggatatgccagctaaaaccctt

SEQ ID NO: 3897919 - DNA, 25 bp, Homo sapien
ggaactagatatcacacagacttgg

SEQ ID NO: 3897920 - DNA, 25 bp, Homo sapien
cagctggacctgagaaacaacggtt

SEQ ID NO: 3897921 - DNA, 25 bp, Homo sapien
tgctaaggtcctgccacgtggcaag

SEQ ID NO: 3897922 - DNA, 25 bp, Homo sapien
catactcaaggtgagcaacctaggg

SEQ ID NO: 3897923 - DNA, 25 bp, Homo sapien
caagtgagtatggtttcaaatggaa

SEQ ID NO: 3897924 - DNA, 25 bp, Homo sapien
cgcccggccaagtgagtatggtttc

SEQ ID NO: 3897925 - DNA, 25 bp, Homo sapien
ccggccaagtgagtatggtttcaaa

SEQ ID NO: 3897926 - DNA, 25 bp, Homo sapien
gtatggtttcaaatggaagtcacag

SEQ ID NO: 3897927 - DNA, 25 bp, Homo sapien
ttttttctagtataaactgcggcag

SEQ ID NO: 3897928 - DNA, 25 bp, Homo sapien
tattatatgtccaaagtcagatagc

SEQ ID NO: 3897929 - DNA, 25 bp, Homo sapien
taggccaggagtcattgcaaaggag

SEQ ID NO: 3897930 - DNA, 25 bp, Homo sapien
taatggctcccttttgttgactact

SEQ ID NO: 3897931 - DNA, 25 bp, Homo sapien
gcttaaccaccataattaagtgggc

SEQ ID NO: 3897932 - DNA, 25 bp, Homo sapien
ggaaaactgtcacaaaacagggatg

SEQ ID NO: 3897933 - DNA, 25 bp, Homo sapien
ccttggaaaactgtcacaaaacagg

SEQ ID NO: 3897934 - DNA, 25 bp, Homo sapien
tcccttggaaaactgtcacaaaaca

SEQ ID NO: 3897935 - DNA, 25 bp, Homo sapien
gttccacttcaattgttgctgggac

SEQ ID NO: 3897936 - DNA, 25 bp, Homo sapien
tgttccacttcaattgttgctggga

SEQ ID NO: 3897937 - DNA, 25 bp, Homo sapien
ttgttccacttcaattgttgctggg

SEQ ID NO: 3897938 - DNA, 25 bp, Homo sapien
tctaggcccttggctattttgttcc

SEQ ID NO: 3897939 - DNA, 25 bp, Homo sapien
cacatcttcgcatgattctgcttca

SEQ ID NO: 3897940 - DNA, 25 bp, Homo sapien
gtttccccaaagtaggtcactggca

SEQ ID NO: 3897941 - DNA, 25 bp, Homo sapien
cactggcatatgacaccttttactc

SEQ ID NO: 3897942 - DNA, 25 bp, Homo sapien
cccaaaacacatcttcgcatgattc

SEQ ID NO: 3897943 - DNA, 25 bp, Homo sapien
cagggactgacgtcagaaacagcaa

SEQ ID NO: 3897944 - DNA, 25 bp, Homo sapien
tatggaaagcgccaggattgccaaa

SEQ ID NO: 3897945 - DNA, 25 bp, Homo sapien
gccaaagggcctgggtcaatggtat

SEQ ID NO: 3897946 - DNA, 25 bp, Homo sapien
cctgggtcaatggtattggtgtaat

SEQ ID NO: 3897947 - DNA, 25 bp, Homo sapien
taaagccagtctaaagccatatagc

SEQ ID NO: 3897948 - DNA, 25 bp, Homo sapien
gctgatggacagtagaactttcacc

SEQ ID NO: 3897949 - DNA, 25 bp, Homo sapien
ttatgggcaagcaaattaaagccag

SEQ ID NO: 3897950 - DNA, 25 bp, Homo sapien
gaccccagaaatgcacactgtaggt

SEQ ID NO: 3897951 - DNA, 25 bp, Homo sapien
cctagtagtaataagattgcttcac

SEQ ID NO: 3897952 - DNA, 25 bp, Homo sapien
gcctttaatcacatacaaaaactct

SEQ ID NO: 3897953 - DNA, 25 bp, Homo sapien
cacaccaccttaacagtattagaga

SEQ ID NO: 3897954 - DNA, 25 bp, Homo sapien
gtcctttaacaatatactgtagctg

SEQ ID NO: 3897955 - DNA, 25 bp, Homo sapien
tgcataggtgccagtggtgtcagca

SEQ ID NO: 3897956 - DNA, 25 bp, Homo sapien
acaggctcccagatggcataagtgg

SEQ ID NO: 3897957 - DNA, 25 bp, Homo sapien
gcctccaggaggtgtgcataggtgc

SEQ ID NO: 3897958 - DNA, 25 bp, Homo sapien
tggttgttagtaaagactttggtga

SEQ ID NO: 3897959 - DNA, 25 bp, Homo sapien
tggagtcagtgtcgttctggcctac

SEQ ID NO: 3897960 - DNA, 25 bp, Homo sapien
agtcagtgtcgttctggcctaccat

SEQ ID NO: 3897961 - DNA, 25 bp, Homo sapien
gagtcagtgtcgttctggcctacca

SEQ ID NO: 3897962 - DNA, 25 bp, Homo sapien
tctggagtcagtgtcgttctggcct

SEQ ID NO: 3897963 - DNA, 25 bp, Homo sapien
tttccaaggatctctgatgcagtgc

SEQ ID NO: 3897964 - DNA, 25 bp, Homo sapien
aacctggaacgcatgaactaaaggc

SEQ ID NO: 3897965 - DNA, 25 bp, Homo sapien
tgacccttgtgtgggagcaacctgg

SEQ ID NO: 3897966 - DNA, 25 bp, Homo sapien
gatgcagtgcttgacccttgtgtgg

SEQ ID NO: 3897967 - DNA, 25 bp, Homo sapien
cttttactgccagcaacacgtgcat

SEQ ID NO: 3897968 - DNA, 25 bp, Homo sapien
tcaagacaagttccctatgcagcac

SEQ ID NO: 3897969 - DNA, 25 bp, Homo sapien
gaaaaggtgacaatattcatctcca

SEQ ID NO: 3897970 - DNA, 25 bp, Homo sapien
aaacacgtagtctgagtaaaacctg

SEQ ID NO: 3897971 - DNA, 25 bp, Homo sapien
tgccaatcctggttctctatttagg

SEQ ID NO: 3897972 - DNA, 25 bp, Homo sapien
cttttccgcttgatatttgtctcca

SEQ ID NO: 3897973 - DNA, 25 bp, Homo sapien
taggttcacacttttccgcttgata

SEQ ID NO: 3897974 - DNA, 25 bp, Homo sapien
cctggttctctatttaggttcacac

SEQ ID NO: 3897975 - DNA, 25 bp, Homo sapien
ctccaccaaagtcgtcattatattt

SEQ ID NO: 3897976 - DNA, 25 bp, Homo sapien
ccaccaaagtcgtcattatatttgt

SEQ ID NO: 3897977 - DNA, 25 bp, Homo sapien
tccaccaaagtcgtcattatatttg

SEQ ID NO: 3897978 - DNA, 25 bp, Homo sapien
caccaaagtcgtcattatatttgta

SEQ ID NO: 3897979 - DNA, 25 bp, Homo sapien
cacagtcctagaaggtaatgtgaca

SEQ ID NO: 3897980 - DNA, 25 bp, Homo sapien
agggtccttacagaagggagacaag

SEQ ID NO: 3897981 - DNA, 25 bp, Homo sapien
tacagcagcaatggagaacttttaa

SEQ ID NO: 3897982 - DNA, 25 bp, Homo sapien
caacgaggtaagactgtaaagcgaa

SEQ ID NO: 3897983 - DNA, 25 bp, Homo sapien
gctgcctcctttctactaggttggt

SEQ ID NO: 3897984 - DNA, 25 bp, Homo sapien
ctgcctcctttctactaggttggtt

SEQ ID NO: 3897985 - DNA, 25 bp, Homo sapien
tgcctcctttctactaggttggtta

SEQ ID NO: 3897986 - DNA, 25 bp, Homo sapien
ggctgcctcctttctactaggttgg

SEQ ID NO: 3897987 - DNA, 25 bp, Homo sapien
aagagggcaaaacggggatgaagag

SEQ ID NO: 3897988 - DNA, 25 bp, Homo sapien
tttttaataccacctggcattgtta

SEQ ID NO: 3897989 - DNA, 25 bp, Homo sapien
aggtttttaataccacctggcattg

SEQ ID NO: 3897990 - DNA, 25 bp, Homo sapien
gatgaagagggtgcccatttaggtt

SEQ ID NO: 3897991 - DNA, 25 bp, Homo sapien
ctgctccttcagggcgcgatgtact

SEQ ID NO: 3897992 - DNA, 25 bp, Homo sapien
ttcagggcgcgatgtacttctccag

SEQ ID NO: 3897993 - DNA, 25 bp, Homo sapien
cacactgaacagacatcagctgctc

SEQ ID NO: 3897994 - DNA, 25 bp, Homo sapien
acactgaacagacatcagctgctcc

SEQ ID NO: 3897995 - DNA, 25 bp, Homo sapien
aaaagcaaaaggcagtggaggcaaa

SEQ ID NO: 3897996 - DNA, 25 bp, Homo sapien
gaggcaaaatgcttgcattttttga

SEQ ID NO: 3897997 - DNA, 25 bp, Homo sapien
ctttcagtacaaacttggaaaagca

SEQ ID NO: 3897998 - DNA, 25 bp, Homo sapien
tctgtttctcatttggaggacaatc

SEQ ID NO: 3897999 - DNA, 25 bp, Homo sapien
accagcagccagaactagttactca

SEQ ID NO: 3898000 - DNA, 25 bp, Homo sapien
actagttactcaactccagggatgc

SEQ ID NO: 3898001 - DNA, 25 bp, Homo sapien
caaacgtgacacatgtcacctggag

SEQ ID NO: 3898002 - DNA, 25 bp, Homo sapien
cttagctcaaacgtgacacatgtca

SEQ ID NO: 3898003 - DNA, 25 bp, Homo sapien
attttacatgcatatagtaagaatg

SEQ ID NO: 3898004 - DNA, 25 bp, Homo sapien
tttacatgcatatagtaagaatgtg

SEQ ID NO: 3898005 - DNA, 25 bp, Homo sapien
tcctctaaatgaatacccttctgtg

SEQ ID NO: 3898006 - DNA, 25 bp, Homo sapien
acatgcatatagtaagaatgtggac

SEQ ID NO: 3898007 - DNA, 25 bp, Homo sapien
cattatcttggtagattaattcaaa

SEQ ID NO: 3898008 - DNA, 25 bp, Homo sapien
aaagataacacgaattcaggaagct

SEQ ID NO: 3898009 - DNA, 25 bp, Homo sapien
caaattatggaacttacgataaggc

SEQ ID NO: 3898010 - DNA, 25 bp, Homo sapien
gggagatcactgttgtataccttac

SEQ ID NO: 3898011 - DNA, 25 bp, Homo sapien
gcttctgtcagagaataatgataat

SEQ ID NO: 3898012 - DNA, 25 bp, Homo sapien
catctcttcctacatgaaattgagt

SEQ ID NO: 3898013 - DNA, 25 bp, Homo sapien
gaataatgataatgggttgggcatc

SEQ ID NO: 3898014 - DNA, 25 bp, Homo sapien
tattaacaaacacatagggacagag

SEQ ID NO: 3898015 - DNA, 25 bp, Homo sapien
gattggcctccctaatgtggctggg

SEQ ID NO: 3898016 - DNA, 25 bp, Homo sapien
ttgggtgtccagcttgccgactgtg

SEQ ID NO: 3898017 - DNA, 25 bp, Homo sapien
gagtttatcaagcagcctcaggcag

SEQ ID NO: 3898018 - DNA, 25 bp, Homo sapien
taggcttctcctgacctcggactgg

SEQ ID NO: 3898019 - DNA, 25 bp, Homo sapien
tctttcaaagtaactgtgagacgca

SEQ ID NO: 3898020 - DNA, 25 bp, Homo sapien
gagacgcacgcacaatctctgccaa

SEQ ID NO: 3898021 - DNA, 25 bp, Homo sapien
tctctgccaattgcatgatttagca

SEQ ID NO: 3898022 - DNA, 25 bp, Homo sapien
gccaattgcatgatttagcagctat

SEQ ID NO: 3898023 - DNA, 25 bp, Homo sapien
gaaagtcatactctttctgtggaaa

SEQ ID NO: 3898024 - DNA, 25 bp, Homo sapien
tgtattgcttctgagcatgctagat

SEQ ID NO: 3898025 - DNA, 25 bp, Homo sapien
aacacactggttgagaaagtcatac

SEQ ID NO: 3898026 - DNA, 25 bp, Homo sapien
tctgagcatgctagattttagagca

SEQ ID NO: 3898027 - DNA, 25 bp, Homo sapien
gtaccaagttgagaactgttcctcg

SEQ ID NO: 3898028 - DNA, 25 bp, Homo sapien
caaagtgacgaaagcatagtccagg

SEQ ID NO: 3898029 - DNA, 25 bp, Homo sapien
ttcagttgcaaatcacactggtgtc

SEQ ID NO: 3898030 - DNA, 25 bp, Homo sapien
taaccaagctgagccaagtaccaag

SEQ ID NO: 3898031 - DNA, 25 bp, Homo sapien
atcacatttcccaaggttaaacgtg

SEQ ID NO: 3898032 - DNA, 25 bp, Homo sapien
gacgctgtaggacagtggtgctctt

SEQ ID NO: 3898033 - DNA, 25 bp, Homo sapien
gtgctctttgtaatgttaataaccc

SEQ ID NO: 3898034 - DNA, 25 bp, Homo sapien
ttctgatatctgatgcaactctggg

SEQ ID NO: 3898035 - DNA, 25 bp, Homo sapien
gttgatgatacaaattccgaattac

SEQ ID NO: 3898036 - DNA, 25 bp, Homo sapien
ttgatgatacaaattccgaattacc

SEQ ID NO: 3898037 - DNA, 25 bp, Homo sapien
aactgactgcaatgtcatttgattt

SEQ ID NO: 3898038 - DNA, 25 bp, Homo sapien
atgatacaaattccgaattaccact

SEQ ID NO: 3898039 - DNA, 25 bp, Homo sapien
tgaattctggactgttaaaaattgg

SEQ ID NO: 3898040 - DNA, 25 bp, Homo sapien
tttaggtgaattctggactgttaaa

SEQ ID NO: 3898041 - DNA, 25 bp, Homo sapien
aattgggaatctttatacacaggta

SEQ ID NO: 3898042 - DNA, 25 bp, Homo sapien
attgggaatctttatacacaggtaa

SEQ ID NO: 3898043 - DNA, 25 bp, Homo sapien
ttgcttcagacgaattcagaccatg

SEQ ID NO: 3898044 - DNA, 25 bp, Homo sapien
tgcttcagacgaattcagaccatgt

SEQ ID NO: 3898045 - DNA, 25 bp, Homo sapien
cccttgccctcctggaagcagtcat

SEQ ID NO: 3898046 - DNA, 25 bp, Homo sapien
ctgattcagcacattgcccttgccc

SEQ ID NO: 3898047 - DNA, 25 bp, Homo sapien
ttgcccttgccctcctggaagcagt

SEQ ID NO: 3898048 - DNA, 25 bp, Homo sapien
tgattcagcacattgcccttgccct

SEQ ID NO: 3898049 - DNA, 25 bp, Homo sapien
ggaccctttccatcatccagtgctg

SEQ ID NO: 3898050 - DNA, 25 bp, Homo sapien
ttactccaggttctatagccccatg

SEQ ID NO: 3898051 - DNA, 25 bp, Homo sapien
tccagtgctgaattcttactccagg

SEQ ID NO: 3898052 - DNA, 25 bp, Homo sapien
attggctggaccatacacccgcctg

SEQ ID NO: 3898053 - DNA, 25 bp, Homo sapien
gaatattggcacaactctccagata

SEQ ID NO: 3898054 - DNA, 25 bp, Homo sapien
ccagcagttccagcgaatgcattca

SEQ ID NO: 3898055 - DNA, 25 bp, Homo sapien
ttttgaaaggccagttagataagag

SEQ ID NO: 3898056 - DNA, 25 bp, Homo sapien
gaagagtgacagtatctgatccagc

SEQ ID NO: 3898057 - DNA, 25 bp, Homo sapien
tctccttgatttttattccttcctc

SEQ ID NO: 3898058 - DNA, 25 bp, Homo sapien
cttttcttctttcttctccttgatt

SEQ ID NO: 3898059 - DNA, 25 bp, Homo sapien
tcttctttcttctccttgattttta

SEQ ID NO: 3898060 - DNA, 25 bp, Homo sapien
tcttctccttgatttttattccttc

SEQ ID NO: 3898061 - DNA, 25 bp, Homo sapien
caattcaggctcatctgcttttctc

SEQ ID NO: 3898062 - DNA, 25 bp, Homo sapien
tgcttttctctctccatactctcct

SEQ ID NO: 3898063 - DNA, 25 bp, Homo sapien
ttttctctctccatactctcctatc

SEQ ID NO: 3898064 - DNA, 25 bp, Homo sapien
ttctctctccatactctcctatcat

SEQ ID NO: 3898065 - DNA, 25 bp, Homo sapien
tgcaaatggtttctaggcatctgac

SEQ ID NO: 3898066 - DNA, 25 bp, Homo sapien
tattactagttcagctgaagcactg

SEQ ID NO: 3898067 - DNA, 25 bp, Homo sapien
ttaaagcacaagctctttgccagag

SEQ ID NO: 3898068 - DNA, 25 bp, Homo sapien
gccagagccatgctaactaccaatg

SEQ ID NO: 3898069 - DNA, 25 bp, Homo sapien
ttttgatagactttattgtaccctc

SEQ ID NO: 3898070 - DNA, 25 bp, Homo sapien
tattgtaccctcaagatgggtatca

SEQ ID NO: 3898071 - DNA, 25 bp, Homo sapien
gtaccctcaagatgggtatcatggg

SEQ ID NO: 3898072 - DNA, 25 bp, Homo sapien
gactttattgtaccctcaagatggg

SEQ ID NO: 3898073 - DNA, 25 bp, Homo sapien
ccaggagatacagtgtcagagtcat

SEQ ID NO: 3898074 - DNA, 25 bp, Homo sapien
tacagtgtcagagtcatggcaagcc

SEQ ID NO: 3898075 - DNA, 25 bp, Homo sapien
gtgtcagagtcatggcaagcccact

SEQ ID NO: 3898076 - DNA, 25 bp, Homo sapien
gagatacagtgtcagagtcatggca

SEQ ID NO: 3898077 - DNA, 25 bp, Homo sapien
aaaacattccactaattccacagcc

SEQ ID NO: 3898078 - DNA, 25 bp, Homo sapien
aaagttgacgtcagctgtttcttcc

SEQ ID NO: 3898079 - DNA, 25 bp, Homo sapien
tgcccttgaattacaaagggagcaa

SEQ ID NO: 3898080 - DNA, 25 bp, Homo sapien
cctttgtaggactgctaaggtctcc

SEQ ID NO: 3898081 - DNA, 25 bp, Homo sapien
tctggaagctgttcttccctctgtg

SEQ ID NO: 3898082 - DNA, 25 bp, Homo sapien
tggaagctgttcttccctctgtggg

SEQ ID NO: 3898083 - DNA, 25 bp, Homo sapien
cctctggaagctgttcttccctctg

SEQ ID NO: 3898084 - DNA, 25 bp, Homo sapien
ggaagctgttcttccctctgtgggt

SEQ ID NO: 3898085 - DNA, 25 bp, Homo sapien
gagaagtccaactcactggtgtaag

SEQ ID NO: 3898086 - DNA, 25 bp, Homo sapien
tggaagaaccaagttgaggctgtct

SEQ ID NO: 3898087 - DNA, 25 bp, Homo sapien
gaggctgtcttgaaactgcaaaaag

SEQ ID NO: 3898088 - DNA, 25 bp, Homo sapien
cagtttgtaaagaatcaacctggct

SEQ ID NO: 3898089 - DNA, 25 bp, Homo sapien
tatttggtgccattaagcactttga

SEQ ID NO: 3898090 - DNA, 25 bp, Homo sapien
ctttgaagtttaggtagagcacagt

SEQ ID NO: 3898091 - DNA, 25 bp, Homo sapien
gatccaacagttaataatgaacctg

SEQ ID NO: 3898092 - DNA, 25 bp, Homo sapien
tatctctaggataccctctgtgata

SEQ ID NO: 3898093 - DNA, 25 bp, Homo sapien
gactctgacctgtacaatgcctttg

SEQ ID NO: 3898094 - DNA, 25 bp, Homo sapien
gatcatccctatggtgtgtgctacc

SEQ ID NO: 3898095 - DNA, 25 bp, Homo sapien
cctttgagactcacctgaacctgaa

SEQ ID NO: 3898096 - DNA, 25 bp, Homo sapien
taagggtggttacagctcctagctt

SEQ ID NO: 3898097 - DNA, 25 bp, Homo sapien
attgctgatgaagaccgacaggtcc

SEQ ID NO: 3898098 - DNA, 25 bp, Homo sapien
tcaggtctctttcggtaactgaggg

SEQ ID NO: 3898099 - DNA, 25 bp, Homo sapien
catgtgtgctgtgttgatccgattg

SEQ ID NO: 3898100 - DNA, 25 bp, Homo sapien
gggtacaagatgcaccagaaggtgc

SEQ ID NO: 3898101 - DNA, 25 bp, Homo sapien
tgtgcacctgaagtatcataagcct

SEQ ID NO: 3898102 - DNA, 25 bp, Homo sapien
ctgtgcacctgaagtatcataagcc

SEQ ID NO: 3898103 - DNA, 25 bp, Homo sapien
tggcggtgttgcttccattcctgga

SEQ ID NO: 3898104 - DNA, 25 bp, Homo sapien
tcctcctttataggccttcacatct

SEQ ID NO: 3898105 - DNA, 25 bp, Homo sapien
gttcttcctcctttataggccttca

SEQ ID NO: 3898106 - DNA, 25 bp, Homo sapien
ggcggtgttgcttccattcctggat

SEQ ID NO: 3898107 - DNA, 25 bp, Homo sapien
cagctgtcctatctcgccaaaatgt

SEQ ID NO: 3898108 - DNA, 25 bp, Homo sapien
tgatgttttgaaagcacaagacggc

SEQ ID NO: 3898109 - DNA, 25 bp, Homo sapien
aagacggcatatcctcttctgccct

SEQ ID NO: 3898110 - DNA, 25 bp, Homo sapien
atgtttactctcattatattctgta

SEQ ID NO: 3898111 - DNA, 25 bp, Homo sapien
cctgtgacattagcccctgctctta

SEQ ID NO: 3898112 - DNA, 25 bp, Homo sapien
tatactgcctcatagaacaggcatc

SEQ ID NO: 3898113 - DNA, 25 bp, Homo sapien
aacaggcatctatagaatttgctcc

SEQ ID NO: 3898114 - DNA, 25 bp, Homo sapien
gccatccagccttgtaccattctat

SEQ ID NO: 3898115 - DNA, 25 bp, Homo sapien
tctaacacatggagagtcagcatgg

SEQ ID NO: 3898116 - DNA, 25 bp, Homo sapien
tgaccctgatcacaagagttacctg

SEQ ID NO: 3898117 - DNA, 25 bp, Homo sapien
gagttacctgctaagtacactacgg
